United States Patent Application Publication US 2013/0332133 A1 - sequence listing, part 30

SEQ ID NO: 233319 - DNA, 706 bp, Unknown
  Bacterial polypeptide expressing nucleotide sequence isolated from the Sargasso Sea
tatgaataatatagaaaaaattatagatgatgcatggaaaaataaagataacattagtcaaaattccgatcaattaatcataaatacaataaatcaaatcattgatgatcttgatcaaggaaaagcaagagtggcagaaaaaattaatggagaatggattactcatcaacatattaaaaaagctattatgttaagttttagaattcacggaatggacgctttatcaggaccatacagttcttggtatgataaatctcatctgttaaaaggtaaaactgcaggttggactaaaaaagattttgaaaaagccggttttagaatggtgcctaacactcctgtacgaaaaggatcttacatcgcaaaaaatgttgtgttaatgccatgttttattaatacaggtgcatatataggatctggaacaatgatggataccttctcaagagcaggatcgtgttgccaaataggaaaaaactgtcacatatcagcaggaagtggagttggcggtgtattagagcctgcacaagcacttccaacaataattgaggacaatgtttttcttggcgccatgtcagaagttgtagagggggtaattgtaggagaaggatctgtgcttagtatgggaatgtttattggacagtccacaaagatagttgatagaaaaactggtgaaattatatatgggaaaatacctccttattcagttctt

SEQ ID NO: 233320 - DNA, 506 bp, Unknown
  Bacterial polypeptide expressing nucleotide sequence isolated from the Sargasso Sea
aaattcaccagtaagaaaaggatcctttattggaaaaaatgctgttctaatgccatgctacgtaaacattggtgcatatattgacgaaggaacaatgatagatacatttgctagagcaggtagttgttgtcaaataggaaaaaattgtcatatttctgcaggatcaggtgttggtggagttttggaaccagcacaggcattaccaactattattgaagacaatgttttcttaggtgcaatgtcagaagtagttgaaggagtagttgttggagagggttcggtcttaagtatgggaatgtatattggtcaatcaacaaaaatagtggatagaaaaactggagaaatctcatatggtaaaattccaccttactcagttgtggttccaggttcattgcctaataaaaatgattcttcaaaaccatcattatattgtgcagtaattattaaacaagttgatgaaaaaacaagatcaaaaacatccgttaatgatcttttaagagagtaga

SEQ ID NO: 233321 - DNA, 733 bp, Unknown
  Bacterial polypeptide expressing nucleotide sequence isolated from the Sargasso Sea
aaaaattataaatgatgcatgggaaataaaagataaaattaatcaaaattctgatgaatctataaagaatgcgattaatcaggttattgaagatttagatagtggtaactctagagtagctgaaaaaattaatggtgaatgggtaacacaccaacatttaaaaaaagcaataatgctcagctttagaatttatccaatggaaaatttaaatggtccttacagcagttggtatgataaagctcacctactaaaaggtaaaacagcaggatggacaaaagaagatcatgaaaaagctggttttagaatggttcctaattcaccagttagaaaaggatcttttattggaaaaaatgctgttctaatgccatgctatgttaatattggtgcttatattgattccggtacaatgattgatacatttgcaagagctggtagctgttgtcaaattggaaaaaattgtcatatatcagcgggaagtggtattggtggtgtacttgaaccagcacaagcactaccaacaattattgaagataatgtatttttaggagctatgtctgaagtagtagaaggaataatagtaggagaaggatctgtattaagtatgggaatgtacattggtcaatcaacaaaaattgtaaatagatcaacaggtgagataacttatggaaaaattccaccttattcagttgtagtaccaggtgctcttccagataaaaaaaatccgtctgcacca

SEQ ID NO: 233322 - DNA, 688 bp, Unknown
  Bacterial polypeptide expressing nucleotide sequence isolated from the Sargasso Sea
ttatggcaatggattactcatcaacacattaaaaaagctatcatgctaagctttagaatctatcctatggaaaacttaagtggaccatacagcagctggtacgataaagcacatttattaaaaggtaaaactgcaaactggactaaaaaacagcatgaggaagctgggtttagaatgacgcctaattctccggttcgcccaggatcctttattggtaagaacgctgttcttatgccttgttatgtaaatatcggagcatatatcggagctggtacaatgatggacactttcagtcgtgctggaagctgttgtcaaataggagaaaattgccatatctctgcaggttcaggaattggaggagttttggaacccgctcaagcattaccaacaataatcgaggataacgtatttgttggtgctatgtcagaagttgtcgaaggaataatagtaggtgaaggatcagttttaagtatgggcatgtacattggacaatcaactaaaattgtaaatcgaaaaactggtgaaattacttatggtaaaattccaccatactcagttgttgttcctggttcactaccaaacaaaaataattcttctgcaccatcattatattgtgcagtaataattaaacaagttgatgaaaaaacaagatctaaaacatcagttaacgatctattgagagaataaa

SEQ ID NO: 233323 - DNA, 301 bp, Unknown
  Bacterial polypeptide expressing nucleotide sequence isolated from the Sargasso Sea
aggccgagcttcgtgaacctcggcgcctatgtcggcagcggcaccatggtcgacacctgggcgacggtcggcagctgcgcccagatcggcgagaatgttcacctgtccggcggtgccggcatcggtggggtcctggagccgttgcaagcgaaccccgtgatcatcgaggacgattgcttcatcggcgcgcgttccgaagtcgccgaaggtgtgatcgtcgaggaaggcgccgtcttgtcgatgggcgtgtatctgggcgcctcgaccaagatcgtcgaccgggagaccggcgatgtgaccg

SEQ ID NO: 233324 - DNA, 700 bp, Unknown
  Bacterial polypeptide expressing nucleotide sequence isolated from the Sargasso Sea
tatgaacaatttagaaaatattattgatgaagcttggaaaaataaagatcaagtaaatcaaaattctgacaaagtactaaaagatgcgataaaccaggtaattagtgatttagataatggtaaatcaagagttgctgaaaaaattaatggaaaatgggttacacatcaacatttaaaaaaagcaatcatgctaagtttcagaatttatccaatggaaaatttaaatgggccttatagcagttggtatgataaagcacatttgttaaagggtaaaactgctggatggtctaaagaagatcacgaaaaagctggctttagaatggttccaaattctccagttagaaaaggatcgtttgtaggaaaaaacgctgttctcatgccctgttatgtaaatattggggcttacatagatgaaggaacgatgatcgatacttttgcaagagctggtagctgctgtcaaattggaaaaaactgtcatatatctgctggatcaggagttggaggtgttttggaacccgctcaagcactaccaacaataattgaagacaatgtttttttaggagcaatgtctgaagttgttgaaggtgtaattgttggtgaaggatcagttttaagtatgggaatgtatattggtcaatcaactaaaattgtaaacagaaaaactggtgaaattacatatggaaaaaattccaccatactc

SEQ ID NO: 233325 - DNA, 145 bp, Unknown
  Bacterial polypeptide expressing nucleotide sequence isolated from the Sargasso Sea
ctctgttatagtcccaggttcaaatccaggaaaaaaactatcagatgggagtgaaggtccgggattgtattgtgcagtaatagttaaaagagttgatgaaagaactagatctaaaacctcaattaatgatctgctgcgtgattaa

SEQ ID NO: 233326 - DNA, 556 bp, Unknown
  Bacterial polypeptide expressing nucleotide sequence isolated from the Sargasso Sea
ttatgcaagctaggtgtcagagttgttccaccagcaacagcgagatatggttcttacatgcaatctggcgtggttttaatgccttcttacgttaatattggtgcttggattggtgctaatactatggttgacacttgggcaacagtaggttcatgtgcgcacataggttgtgatgtacacctatcaggtggtgttggtattggtggtgttttggagcctgctcatgctcaaccagttattattgaagatggtgcttttattggatcgcgatcaattattgttgaaggtgtcaaggttggtaaagaagctgttgttgcagcaggagttacaataacagcatccacccctataattgacttaagaggagcagaggcctcttctacaaagggaagtgtcccaccgcggtccattgttgtaccaggaactaggaaaaaggttatttctggttatgaggcccatatgggatgtgcttatataatcggagaaagaaacgagtccactgatcgcaagacctctttaaatgaagcacttagggaatttaaactttcagtttaaa

SEQ ID NO: 233327 - DNA, 102 bp, Unknown
  Bacterial polypeptide expressing nucleotide sequence isolated from the Sargasso Sea
caaatcctaatggtccttcattgtattgtgcagttattgttaaaaaagttgatgagaaaactagaagcaaaacttctattaatgacttacttagagactgat

SEQ ID NO: 233328 - DNA, 172 bp, Unknown
  Bacterial polypeptide expressing nucleotide sequence isolated from the Sargasso Sea
catggtcaactgtggggtcaggtgctcagatcggcaaaaatgttcatttatcaggtggtgttggaattggtggagttttggaaccagttcagcatctccaactataatagaagacaattgtttcataggtgctcggagcgaagtagctgaaggagtaatgtcagaaaaatag

SEQ ID NO: 233329 - DNA, 176 bp, Unknown
  Bacterial polypeptide expressing nucleotide sequence isolated from the Sargasso Sea
caggtctacaggggaaattagttacggtgaagtgcccgcttactcagtagtagtcccaggaagccttcctaatgaagactctaagaagccaagtttatattgtgttgtaatcgttaaaacagttgacgaaaacacaagaaagaaaacttccattaacgatttacttagagagtaaa

SEQ ID NO: 233330 - DNA, 517 bp, Unknown
  Bacterial polypeptide expressing nucleotide sequence isolated from the Sargasso Sea
tcgctacggcgcctatctcggctcaaatgttgttctaatgccatgctttgtcaatgtcggatcatatgttgatgatgatacaatgctcgatacttggtgcacaatcggctcatgcgctcaaattggcaaacgtgtgcacatatcaggtggcaccggaattggtggtgttcttgaacctgcaacagccacgccaactattatagaagatgattgttttattggcgcacgatctgaaattgcagaaggtgtcattgtgaaaaaaggcgctgttttagcaagcggcacattcataacacaaagcactaaaatttatgatcgccatagtggacgcatatacaaaggctatattcctgaaaatgcagttgttgttccaggcacattgcccagtacagagggaaactatagtcttcaggccgctattatcgtcaagtatgcagatcaacaaactcggggcaaaaccgcactaaacaattggcttcgaagtgaacaaaccttgactacagactccaaccattaa

SEQ ID NO: 233331 - DNA, 638 bp, Unknown
  Bacterial polypeptide expressing nucleotide sequence isolated from the Sargasso Sea
tatgagtattgaaaaaattataaatgaagcttgggaaaataaagatcaagtaaaccaaaattcagataaatctttaaaggatgctgttaatcaaattattgatgatctagacagtggaaaagcaagagtagctgaaaaaattaatggtgagtgggtaacacatcaacatataaaaaaagcaattatgttaagttttagaatgtatccaatggaaaatttaaatggcccctacagtagctggtatgataaagctcatctattaaagggtaaaactgcaggctggtctaaagaagatcacgaaaaagcaggatttagaatggttcctaattctcctgttagaagaggatcgttcataggtaaaaatgcagtattaatgccatgctatgtgaatataggagcatacattgatgagggaacaatgatagatacttttgcaagagctggtagctgttctcaaatcggaaaaaattgtcatatctccgcaggtagcggagttggaggagttttagagcctgcacaggcattaccaacaatcatagaggacaatgtttttttaggagcaatgtctgaggttgtagagggagtgatagttggcgaaggatctgttttaagtatggggatgtacattggacaatcaa

SEQ ID NO: 233332 - DNA, 478 bp, Unknown
  Bacterial polypeptide expressing nucleotide sequence isolated from the Sargasso Sea
atgagtgataatacagaattaaaaaataaaattgaaagtgcttgggaaaatattgctaaaatttctcctaacgatacagacatcgctgatgctgtaaatgaagttataaaaaaacttgataatggacaatttagaattgcagaaaaaaacggcaatgattggattgttaatcagtggttaaaaaaagccgttcttatatcattccgaataaatgataataaaattttaaaaggaccttacacctcttggtatgacaaggtgaaaggtaaaactgttgattggaatgaggatcaatggaaagaagctggctaccgacatgttccaaatggtaccgttcgcgaaggatcattcataggtaaaggtgtagttctgatgccatcctttgtaaatattggcgcttatattgatgaaggcacaatggttgatacatgggcaactgttggctcatgtgctcagattggaaaaaactgtcacttat

SEQ ID NO: 233333 - DNA, 82 bp, Unknown
  Bacterial polypeptide expressing nucleotide sequence isolated from the Sargasso Sea
attgtattgtgcagtaatagttaaaagagttgatgaaagaacgagatctaaaacctcaattaatgatctgctacgtgattaa

SEQ ID NO: 233334 - DNA, 217 bp, Unknown
  Bacterial polypeptide expressing nucleotide sequence isolated from the Sargasso Sea
tatgggtgtttatattggtgcatcaacaagaattgttgatcgtgctactggggagatacattatggaaaagttcctgcttactcagtagttgttccagggtcaatgccaagcaaaaataatcctaaaggaccatcactatattgtgtggtaattgtaaaaaaagtagacgaaaaaactagaagcaaaacttctataaacgatttgttaagagattaa

SEQ ID NO: 233335 - DNA, 538 bp, Unknown
  Bacterial polypeptide expressing nucleotide sequence isolated from the Sargasso Sea
catattaaaaaagccctaatgcttagttttagaatttaccccatggacaatttaagtggaccttacagtagttggtatgacaaagctcatttactaaaaggaaaaacagcaggctggacgaaagaagatcatgaaaaagcaggatttagaatggttcccaattcaccagtaaggaaaggatcatttgttggaaaaaatgttgtcttaatgccatgttatgtaaatattggagcatacattgacgaaggcacaatgattgacacatttgcaagagctgggagttgttgtcaaataggaaaaaactgtcatatatcagctggtacaggagtaggtggagttttagaacctgctcaagcactcccaacaataatagaagataatgtttttcttggagcaatgtctgaagtagttgaaggagttatagttggagaaggttctgtattaagcatgggaatgtatattggacaatcaacaaagatagttaatagaaaaagtggagagataacttatggaaaaattcctccatattctgttgttg

SEQ ID NO: 233336 - DNA, 394 bp, Unknown
  Bacterial polypeptide expressing nucleotide sequence isolated from the Sargasso Sea
atgagcatagaaaacattataaatgaagcttgggaaaacaaagatcaagttaatcaaaattcagatcaaaaattaaaagatactattaatcaagtaatagaagatctagatagtggtaaatctagagtagctgaaaaaattgatggtgaatgggtaactcatcaacatctaaaaaaagcaattatgctaagttttagaattcatggaatggaaactttagatggtccctactcagcttggagagataaagctcatttgttaaaaggaaaaacagccggatggtcaaacgctgattttgaaaaagcaggttttagaatggtaccaaatactgcaatgagaaaaggatcatatgttgctaaaaatgttgttctaatgccaagttatgtaaatattg

SEQ ID NO: 233337 - DNA, 139 bp, Unknown
  Bacterial polypeptide expressing nucleotide sequence isolated from the Sargasso Sea
ttattcagttgtagtgccaggaagcatgcctagtaaaaacaatccagacggaccatcgttgtattgtgttgttattgtaaaaaaagttgatgaaaaaacgagaagcaaaacatcaattaatgatcttttaagagactag

SEQ ID NO: 233338 - DNA, 130 bp, Unknown
  Bacterial polypeptide expressing nucleotide sequence isolated from the Sargasso Sea
ggtagtatctggcaacttgccttctgcttgtggtaaatacagcttgtatgcagccatcatcgtcaagaaagtcgatgctaaaacacgcggtaaagtaggtattaacgaactactgcgtattgttgattaa

SEQ ID NO: 233339 - DNA, 490 bp, Unknown
  Bacterial polypeptide expressing nucleotide sequence isolated from the Sargasso Sea
aaaggatcatttgtcggaaaaaatgcagttttgatgccatgttatgtaaatattggagcatatattgatgaaggtactatgatggacacattcagtcgtgcaggaagttgttgtcaaattggaaaaaattgtcatatctcagctggaaccggagttggaggtgtattagaacctgctcaagcattaccaacaattattgaagataacgtattcttaggtgcaatgtcagaagtagtagaaggtataatagttggggaaggctctgttctaagtatgggaatgtatattggacaatcaacaaaaatcgttaatagaaaaactggtgaaataacttacggaaaaattccaccttattcagtagtggttccaggatccttgccagataaaaataatccacaagcgccatctttatattgtgcagtcataattaaacaagttgatgaaaagacgagatcaaaaacatcagttaacgatcttttaagagaataaa

SEQ ID NO: 233340 - DNA, 742 bp, Unknown
  Bacterial polypeptide expressing nucleotide sequence isolated from the Sargasso Sea
atgaatgaaatagaaaaaattattaatcaagcatgggaaaataaagaggagattaatcaaaattctgaacaatcgattatatcagtaataaatcaaataattgaagatcttgatcagggaaaggttcgggtagcagaaaaaattaatgggcagtgggttactcatcaacatataaaaaaagcgataatgttaagttttagagttaacggtatggatgcattatcaggaccatatagttcctggtatgataaagctcatctattaaaaggtaaaactgcaggatggacaaaaaaagattttgaaaaagcaggatttagaatggtacctaatacgcccgtaagaaaaggatcttatattgctaaaaatgttgtattgatgccatgctttattaatactggagcatatattggatctggcacaatgatggatacattttcaagagcgggatcatgttgtcagataggtaaaaactgtcatatttctgctggaagtggagttggcggagtattagagccagcgcaagctcttccaacaataattgaggataacgtttttcttggggcaatgtcagaggttgtagaaggggtaattgttggtgaaggttcagttcttagtatgggcatgtttattggacaatcgacaaaaattgttgatagaaaaaccggcgaaattatatttggtaaaataccaccttactcagttcttgttcctggttcattgccagataaaaataatcctagcg

SEQ ID NO: 233341 - DNA, 682 bp, Unknown
  Bacterial polypeptide expressing nucleotide sequence isolated from the Sargasso Sea
tatgactgttgaaaaaattataaatgaagcttgggaaaataaagatcaagtaaatcagaattcagatcaatctttaaaagatgcaattaaccaagttataaatgatctagataccggtaaatctcgtgttgcagaaaagattaatggtgagtggaaaactcatcaacatctaaaaaaagcaattatgttaagttttaggatttaccctatggaaaatttaaatggtccatatagtagctggtatgataaagctcatttgttaaaaggtaaaacagctggctggacaaaagagcaacatgaagcagctggatttcggatgactccaaatagtcctgtgcgtcctgggtcttttattggaaagaatgctgttcttatgccttgttatgtaaacattggcgcttacattggagctggaacaatgatggataccttcagtcgtgcaggtagctgctgccaaattggggaaaattgtcatatctctgctggatctggaattggtggagttttagaaccagctcaagcactaccaactataatcgaagataatgtttttgttggagcaatgtctgaggtcgttgaaggtgtgattgttggagaaggctctgtattaagtatgggtatgtatataggtcaatcaacgaaaattgtgaatagaaaaactggagatatatcttatggtaaa

SEQ ID NO: 233342 - DNA, 235 bp, Unknown
  Bacterial polypeptide expressing nucleotide sequence isolated from the Sargasso Sea
agaaggatctgtattaagtatgggaatgtatattggtcaatctactaaaattgttaatagatcaactggtgaaataacttatggaaaaattccaccttattcagtagttgtaccaggtactctgccagataaaaaaaatccttcagcgccttctctaagttgtgcggtaataatcaaacaagttgatgaaaaaacaagatcaaaaacatctattaatgatttactaagagaataa

SEQ ID NO: 233343 - DNA, 724 bp, Unknown
  Bacterial polypeptide expressing nucleotide sequence isolated from the Sargasso Sea
ttactcgacacgggtaaagagcgagtagccgaatacgacaacgaaaatggtgtgcaagtaaacgaatggttgaaattagctatcttgctactttttcgtcaatctgaaatgtcaatacaagaagtaggacccttcgaatttgttgacaaaatacctctaaagaaaaattattctgagagtaaagtgagagttgtgcctggagcgtctgctcggtgggggagttatcaagctcccggtgttgtcatgatgcctagctatataaatatcggagcctatgtaggtgaaaacactatggttgatacttgggcaactgttggctcttgcgcacagataggaaaaaatgttcacctatcaggcggtgttggtatcggcggcgttctagaacctcccaatgccgttcctgtctttattggggatgagtgtctcatcggaagtagatgcatagtcgctgagggggcttctgtaggcgagggatctgttcttggagctggagcagttctaactggttcaatacctgtcatcgatgctgaatctggtaacgagttgagtagaggaattgtgccgccatggtgtgtggctgttcaggccagcagagagagacaatttaccggaggaacttttggactaccgtgtgtcttggttgttcggtatttagaacccggagagcgacacgataagtcaaccctaaatgaagtgttgcgtacacatggggtaacgacttgaa

SEQ ID NO: 233344 - DNA, 209 bp, Unknown
  Bacterial polypeptide expressing nucleotide sequence isolated from the Sargasso Sea
gtatattggacaatcaacaaaaattgttaatagaaaaactggtgaaataacttatggaaaaattccaccttattcagtggtagttccaggatccttgccagataaaaacaatccacaagcgccatctttgtattgtgcagtaataattaaacaagttgatgaaaaaacgagatctaaaacatcagttaacgatcttttaagagattaaa

SEQ ID NO: 233345 - DNA, 619 bp, Unknown
  Bacterial polypeptide expressing nucleotide sequence isolated from the Sargasso Sea
atgcaagatattattgaatccgcttgggaaaatagatctttattagaagagcccaaaacacaagaaaccattagaaaggtaattgatcaacttgatctgggagaaatcagagttgcagtacctacagaagaaggatggaaattaaatgaatgggtgaaaaaggctgttgtactttattttcctattcaaaaaatggaaactttaaaagcaggacctcttgagttctatgataaaattccattaaaatcaggatatcaaaaaaaaggtattcgagtagttccaaacgccatatcaagacatggagcatatattgcgaaaggtgtaataatgatgcctagttttgttaatatcggagcctatgtggattcaggaactatggtggacacatgggcgacagttggcagttgtgctcaaattggtgaaaatgtccatctaagtggtggagtaggaattggaggtgtattagaacctttacaagcagctccagtaataattgaggacaatgtttttttaggttctaggagtattgtggtagaaggtgtacgtgttgaaaaagaagccgttctaggtgcaaatgttgttttaacatcatctacaaaaataatagacgtcactggca

SEQ ID NO: 233346 - DNA, 638 bp, Unknown
  Bacterial polypeptide expressing nucleotide sequence isolated from the Sargasso Sea
aatgagtatagaaaatattataaatgatgcatgggaaaatagggatcaagtaagcccctcatctgaacagtctcttaaagatacaataaatcaagtgattgatgatttggatagtggtaaatcgagggtggctgagaaaataaatggtgagtgggtaacccatcaacatttaaaaaaggcaatcatgttgagtttcagattgtatcctatggaaaatttgaatggtccttatagtagttggtacgataaatcacatttacttaaaggcaaaacagcaggatggacaaaagaagatcacgaaaaagctggttttaggatggtgcccaactctccagtaaggaaaggaagttttgtgggtaaaaatgcagttttaatgccatgttacgttaatatcggcgcttatattgatgaaggtacaatgattgatacatttgcaagagcaggaagctgtagccaaataggaaaaaattgtcatatctctgcaggatcaggtgtgggtggagtattagaacctgcgcaagcacttccaactattatagaagataatgtttttttgggtgcaatgtctgaagttgtcgagggtgtgattgtaggagaaggatcggtactaagtatgggaatgtacattggacaatcta

SEQ ID NO: 233347 - DNA, 313 bp, Unknown
  Bacterial polypeptide expressing nucleotide sequence isolated from the Sargasso Sea
gcaagcaaacccaaccataatcgaagatgattgttttgtaggagctagagccgaaatagcggagggagttattgttggaaaaggatctgtgctgtccatgggagtttacatcggagcgtcaacacgaatatttgatagagcatcaggcgaaatacattatggaaaagttcctaattattctgtggtgatccctggaaccatgccaagcaaaaataatcctgatggaccatcattatattgtgtggttattgtaaaaaaagtagacgaaaaaactagaagcaaaacttcgattaatgatttattaagagactaa

SEQ ID NO: 233348 - DNA, 631 bp, Unknown
  Bacterial polypeptide expressing nucleotide sequence isolated from the Sargasso Sea
aatgaaagtagatgaacttgaaaaaataattaatgatgcatttgaagacagacaaaatatttctgatacatctaatcaaaaaatattagatgctattaatgaaactattaacttaacagataaaggatctgtgcgagttgcggaaaagaaaaatggaaactggactgtcaatcaatgggttaaaaaggctattctattaagttttagaacaaataaaatgacaatgtctaaaggtccttacactacttggtatgataaagttccaggaaaatctgttaattggaatgaagcggattggaaaaaagctggttatagacacgttccaaatggagttgtaagaagaggttcttacattgcaaaaaacgttgttctaatgccatgttttgtcaacttgggtgcctacgttgacgaaggaacaatgatagatacttgggcatctgtaggttcatgtgcacaagttggaaaaaactgtcatgtttcaggtggtgctggaataggtggagttttagaacccttacaagccgggccagttataatagaggatgattgctttataggcgctagatcagaaatagctgaaggtgtacttgttgaaaagggagcagtcatttcaatgggtgtttatattggt

SEQ ID NO: 233349 - DNA, 646 bp, Unknown
  Bacterial polypeptide expressing nucleotide sequence isolated from the Sargasso Sea
tatgaaagaattagaaaaaataattaatgatgcttgggaaaataaagaggatattaatcaaaattctcatgtatcaatattaaatgcagttaatcaaattattgaagatttggatcaaggcaaaataagagtagctgaaaaaataaattcagaatggataactcatcaatatataaaaaaagcaatcatgttgagttttagaattcataatatggaagctttgtcagggccctatagctcatggtatgataaagcccatcttcttaaaggaaaaactgccggatggggcaaagatcaattcgaaaaggctggatttagaatggtgccaaattcacctgtaagaaaaggttcttatattgcaaaaaatgttgttttaatgccatgctttataaatacaggtgcttatgttggatcaggaacaatgatggatactttttcaagagctggatcatgctgccaaatcggtgcaaactgccatatatcggctggaagcggggttggtggagttttagaaccagcacaagctcttcccactattattgaagataatgtgtttttaggtgcaatgtctgaagttgttgaaggagttatagtaggtgaaggttcagtaaatagtatgggcatgtatataggacaatcaacaaaa

SEQ ID NO: 233350 - DNA, 184 bp, Unknown
  Bacterial polypeptide expressing nucleotide sequence isolated from the Sargasso Sea
ttggatcgtgcaactgggcaaaattcattatggcaaagtacctgcctattctgttgttgttccaggctcaatgccaagtacaaataatcctaaaggaccatcgttatattgtgtggtaattgtaaaaaaagtagatgagaaaactagaagtaaaacttctattaacgatttgttaagagattaa

SEQ ID NO: 233351 - DNA, 595 bp, Unknown
  Bacterial polypeptide expressing nucleotide sequence isolated from the Sargasso Sea
aatgagtatagaaaatatcataaacgaagcttggaaaaataaagatcaggttaatccaaattctgataaaagtttaaaggatactattaatcaaattattgatgatttagataaaggaaaagttagggttgctgaaaaaataaatggagagtggataactcatcaatatttaaaaaaagcaattatgttaagttttagaatttatccaatggaaaatttaaatggtccgtatagtagttggtacgataaagctcatttgcttaaaggtaaaactgctgggtggacaaaagaagatcatgaaaaagcaggttttagaatggttcctaactcacctgttagaaaaggatcttttgttggaaaaaatgtagttcttatgccttgctatgtaaatattggtgcatacatcgatgaaggaactatgattgatacatttgctagagctggaagctgcagtcaaattggaaaaaactgccatatatcagctggcagtggagttggtggagtattagagccagcacaagcgcttccaactattattgaagataatgttttcttaggagcaatgtcagaagtagtagaaggtgtaatagtcggc

SEQ ID NO: 233352 - DNA, 688 bp, Unknown
  Bacterial polypeptide expressing nucleotide sequence isolated from the Sargasso Sea
tatgtctttagaaaaaattataaatgatgcgtgggaaaaaaaggatcaagttagtcctaattcagaacaaagcttaaaagatacgattaatcaagttataaatgatttagatagtggtaaagttagagtagctgaaaaaattaaaggtcaatggataactcaccaacacattaaaaaggcaataatgttaagttttaggatttatccaatggaaaatctaagtggtccctatagtagttggtatgataaatctcatttacttaaaggtaaaactgctaattggacaaaatccgatcacgaaaaagctggatttagaatggtgcctaattctcctgtgagaaaaggatcatatgtaggaaaaaacgcagttttaatgccatgttatgtaaatattggtgcatatattgatgagggtaccatgatagatacatttgctagagcaggaagttgtagtcagataggaaaaaattgtcatatctccgcaggatcaggtgttgggggagttttagaaccagcccaggcacttccaacaattatagaagataatgtatttttaggagcaatgtctgaggttgtggaaggtgtgattgttggagaaggatcagtattaagtatgggaatgtacatagggcaatcaacaaaaattgttgatagaaaaactggtgaaatatattatggaaaaataccc

SEQ ID NO: 233353 - DNA, 448 bp, Unknown
  Bacterial polypeptide expressing nucleotide sequence isolated from the Sargasso Sea
atgaataacacagatataattaacgaagcatttgaaaatggcataactgatgataacaagaatgacgtgttaaatgctgtaacggaaactatatcttctctagatcgaggtaaattaagagttgcagaaaataaagatggccaatggactgtaaatgaatgggctaaaaaagctattttactatcttttagattaaatcaaaataaagctattgatacaggttatacaaaattttatgataaagttgattcaaaatttttgcatactccagaagactatctcaaagaaaaaaacattcgaatagttccacaagctatagctcgtcatggatcctttatagataagaatgtagttttgatgccatcgtttgtaaatattggtgcatacgtcggtgaaggaacgatggttgatacatgggcaactgtagggtcatgtgctcaaataggcg

SEQ ID NO: 233354 - DNA, 602 bp, Unknown
  Bacterial polypeptide expressing nucleotide sequence isolated from the Sargasso Sea
tacgtcaggaccgtattcagtgtggtatgataaagtaggatttaagactgcagggtggactgaagaagaccataaaagagcaggatttagatacgtcccaaacggtatgactcgaaaagggtgtttcgttgctcctggatgtattttaatgccatcatttttgaacataggatgccatgttgacagtggaactatggtagatacatggtcaactgttggatccggtgcgcaggttggaaaaaattgtcacctaagtggtggagttggaattggaggtgtcttggaaccagttcaagcaggaccaactattattgaggataattgtttcattggagctagaagtgaaattgttgagagtgtcattgtaagaaaaaatagtgttatatcaatgggggtttttttaggagcatctacaaaaataatttacagggatactggcaaagttatcatgggggaagttcctgagggtagtgttgttgtaccaggtacattaccttctaaaaaacctggcatgccatcattatattgtgcagtaataattaaaactgttgatgagaagactagatcaaaaactagtttgaatgaccttttaagagactaat

SEQ ID NO: 233355 - DNA, 205 bp, Unknown
  Bacterial polypeptide expressing nucleotide sequence isolated from the Sargasso Sea
tatattgggcaaagtacaaaaattttggatagacaaacaggtgaaattacttatggggtaatacctgagggctcagttgtggtatctggaaatttgccatcaaaagatggtaaatatagtttatattgtgcagtaattgtaaaaaaggtggatgaaaagactagaagcaaagtgggtattaacgaattactcagagaagcttaga

SEQ ID NO: 233356 - DNA, 646 bp, Unknown
  Bacterial polypeptide expressing nucleotide sequence isolated from the Sargasso Sea
aatgaacttagaaaaaattgaaaaatctattaacgaagcttttgaaaataaagctaaattagatagttctaacaaagaggttagtgagttaattcaagaaactatagacttactagataacggtaaaattagagttgccgaaaagagaggtgataaatggcaagttaatcaatggattaaaaaaagtatacttttaagttttcgtgtaaataaaatgaaagcatctaaaggaccttactctacttggtacgataaagtagatgggaaaactcaagggtggagtgaagaacaagttaagaaagctggttttaggtatgttccaaacggtgttataagaaaaggtgctcacattggtaaaaatgttgttctaatgccatcattcataaatgttggagcttacgttgatgagggaacgatgattgatacttgggcatctgtaggatcatgtgctcaggttggaaaaaattgtcatatatctggtggcgcaggtattggtggtgttttagagccaatgcaagctaatccaactattgtggaggataattgttttttaggagcaagggcagaaattgcagaaggtgttattgttgaaaaaggatcagtattgtcgatgggtgtttatattggtgcatcaacaagaatagtt

SEQ ID NO: 233357 - DNA, 385 bp, Unknown
  Bacterial polypeptide expressing nucleotide sequence isolated from the Sargasso Sea
tatgaatctaaaaatagaagaccttaaaaataatatagaaagcatttgggaaaataaagaaaatatttcttcttcaacttcaggaaaagaaagagaagtaattgaggactgtttaaccttgttagactcgggtcaagctagagtaagtgaaaaaatagagaaaaattgggtagttaatgaatggctcaaaaaagctgtgcttttatcttttagattatggcctatggatttaatttcaggcgggcctggagatagtaattggtgggataaagttccatctaaatttctaaatggagcgctaaagacttccagaataataattttagaactgtgcctggctctatcgttagatacagtgctcatatttcacctgaagctatattaa

SEQ ID NO: 233358 - DNA, 232 bp, Unknown
  Bacterial polypeptide expressing nucleotide sequence isolated from the Sargasso Sea
aggatctgtattaagtatgggaatgtatattgtcaatcccacaaaaattgttgatagaaaaactggtgaaattatttatggaaaaataccaccttattcagttgtcgtacctggttctttaccagataaaaataatcctgcagcgccatccctttattgtgcggtaattattaaacaggttgatgaaaaaactagatcaaaaacatcagtaaacgatcttttgagagaataa

SEQ ID NO: 233359 - DNA, 412 bp, Unknown
  Bacterial polypeptide expressing nucleotide sequence isolated from the Sargasso Sea
atgatggatacgtttagtcgtgcaggaagttgttgtcagattggaaaaaattgtcatatctctgcaggttctgggattggaggagttttggaacccgctcaagcattaccaacaattattgaagataatgtttttgttggagcaatgtcggaagttgtggaaggtgtgatagttggagaaggctcagtactaagtatgggcatgctaatcacacaaagcactaaaattgtaaaccgtgcgacaggtgaaattacttatggtaaaattcctcaatactcacttgttgtaccgggctctttacctgataaaaataatccatcagcaccatcgttaagctgtgcagtaatcattaaacaagttgatgaaaaaacaagatcaaaaacatctgttaatgatcttttgagagattaat

SEQ ID NO: 233360 - DNA, 109 bp, Unknown
  Bacterial polypeptide expressing nucleotide sequence isolated from the Sargasso Sea
ttgcctgacggctctgagggtccaggattatattgcgcagttatagtaaaaaaagtggatgaaagaacaagatctaagacctcaattaatgatctacttcgtgattaat

SEQ ID NO: 233361 - DNA, 229 bp, Unknown
  Bacterial polypeptide expressing nucleotide sequence isolated from the Sargasso Sea
atcagtactaagtatggggatgtatatcggtcaatcaactaaaatagtaaatagatcaacaggtgagataacttatggaaaaattccaccttactcagttgtggtaccaggtacacttccagataaaaaaaatccatcagcaccttcactaagctgtgcagtaataattaagcaagttgatgaaaaaactagatcaaaaacttcaattaacgatcttttaagagaatag

SEQ ID NO: 233362 - DNA, 673 bp, Unknown
  Bacterial polypeptide expressing nucleotide sequence isolated from the Sargasso Sea
atgaacttaaataatattgaaaaatctataaatgaagcttttgctaacaaagataatatagatagttcagataaaaacttaaatgatttagtgcgtgaaacgatagatttattagatgctggtaaaataagagtagctgaaaaaaaaggagacaaatgggaagttaatcaatggattaaaaaagcaatacttttaagttttaaggtaaataaaatgaaagcctctaaaggtccctattcaacttggtatgataaaatagaaggaaaaactcaaggctgggatgaaaaaaaaattagagaagcaggatttagatatgttccaaatggtgtaatcagaaaaggttcttttattgcaaggaatgttgttttaatgccttcttttataaacgtaggagcttatgtagacgaaggaacaatgattgatacttgggcatccgttggttcttgcgctcaagtaggaaaaaattgtcatatctctggtggggctggtatcggaggtgttttagaacccatgcaagccaatccaactatagtagaagataattgttttgttggagcaagatcagaaattgctgaaggagttatcgtagaaagaggatcagtattatcaatgggagtttacattggaggctcaacaagaattgtagacagagctacaggtgaaatccattagg

SEQ ID NO: 233363 - DNA, 266 bp, Unknown
  Bacterial polypeptide expressing nucleotide sequence isolated from the Sargasso Sea
tgctgaaatagcagaaggtgtaattgttgaaaaaggttcagtattatctatgggtgtttatattggtgcatcgacgagaataattgatcgtgcaactggtgaaattcattatggtaaagttccagcctattctgttgttgttccaggatcaatgccaagtaaaaataatcctaaaggtccatcattatattgtgtagtaattgtaaaaaaagtagacgaaaaaactcgaagcaaaacgtctattaatgatttattaagagactaaa

SEQ ID NO: 233364 - DNA, 136 bp, Unknown
  Bacterial polypeptide expressing nucleotide sequence isolated from the Sargasso Sea
tctgttcttgtacctggttcattaccagacaaaaataatccaagcgccccttcattaaattgtgctgtaataatcaaacaagttgatgaaaaaacaagatctaaaacatctataaatgatttattacgtgattaat

SEQ ID NO: 233365 - DNA, 661 bp, Unknown
  Bacterial polypeptide expressing nucleotide sequence isolated from the Sargasso Sea
ttgaaaaaagcaatcatgttaagttttagattatatccaatggagaatttgaatggtccatatagtagttggtatgataaagctcatttactaaaaggtaagactgcaggatggacaaaagaagatcatgagaaagcgggttttagaatggtgcctaattcaccagtaagaaaaggaagttttgttggtaagaatgcagttttaatgccatgctacattaacattggagcatacatagacgaaggaacaatgattgatacatttgcaagagcaggaagctgtagccaaattggaaaaaattgtcatatctccgctggttcgggtgtgggtggagttttagaacctgcacaagctttaccaactattattgaagataacgtttttttaggtgcaatgtctgaagttgtagaaggtgtaattgtaggtgaaggatccgtcctgagtatgggaatgtatataggacaatctactaaaattgttaataggaagactggagaaattacttatggaaaaattcctccttattcagttgtagttccaggttcacttcctgataaaaataatccagctgcaccgtcactatattgtgctgtaataattaagcaagtagatgaaaaaacaagatctaaaacttctattaacgatctcttgagagaatagt

SEQ ID NO: 233366 - DNA, 588 bp, Unknown
  Bacterial polypeptide expressing nucleotide sequence isolated from the Sargasso Sea
atgacaaatcacatttgcttaaaggtaaaacagccggatggacaagagaagaccatgaaaaagctggctttaggatggtccaaaactcgccagtagaaaaaggatcttttgtaggcaaaaatgcagttcttatgccatgctacgtaaatattggagctttcattgatgaaggcacaatgattgacacttttgcaagagctggcagttgttcccaaattggaaaaaattgtcatatatctgctgctagtggagttggtggagttttagaaccagctcaagcactgccaacaataattgaggataatgtattcttaggagcaatgtcagaagttgtggaaggtgtaattgttggcgaaggttcggttataagtatgggaatgtatattggacaatcaacaaaaattgtaaatagaaaaactggagaaattacttatggaaaaattcctccttattcagttgtagttcctggttcacttccagataaaaagaatcctgaagcgccatctttatattgtgctgttataattaaacaagttgatgagaaaacaaggtctaaaacttctattaatgaccttttaagagattaaa

SEQ ID NO: 233367 - DNA, 702 bp, Unknown
  Bacterial polypeptide expressing nucleotide sequence isolated from the Sargasso Sea
aaatcagagttgccgaaaaaaaaggtaacaaatggcaagtcaatcaatggattaaaaaagctatacttttaagttttcgtgtaaataaaatgaaagcatctaaggggccttactctacttggtacgataaagtagatggtaaaacgcaagggtggagtgaagaacaaattaaaaaagctggttttagatatgtgcctaacggcgtaattagaaaaggagcccacatagcaaagaatgttgttctaatgccgtcatttattaatgtaggtgcctatgtcgatgaaggaacaatgatagatacctgggcttcagttggatcgtgtgcacaggttggaaaaaattgccatatttctggcggcgctggtattggtggtgtcttagaaccaatgcaggcaaatccaactattgtagaagacaactgtttcttaggtgcacgtgctgagatagcagaaggtgttattattgaaaaaggatcagtattatcaatgggtgtttatatcggtgcatctacaagaatagtggatcgtgctactggcgagattcattatggaaaagttccagcatactcagttgttgttcctggttcaatgccaagcaaaaataatcctaatggtccttctttatactgcgtagtgattgtaaaaaaagtagacgaaaaaactagaagtaaaacatcaattaacgatttattaagagattaaa

SEQ ID NO: 233368 - DNA, 564 bp, Unknown
  Bacterial polypeptide expressing nucleotide sequence isolated from the Sargasso Sea
aatgagttacgataggctagaaaaaattataaacaaaagttttgaaaaaaaagaaaaagtaggtccaaagtctgatcaaaaattagtaagggctataaatgaaaccattgatttagtcgatagtggaaaaataagagtagcaaataaactaaatggaagttggattgtaaaccaatggattaagaaggctattttgttaagctttagaattaataaattggaaatgatgaaaggtccttatacaacttggtatgacaaagttaagggcaagactgttaaatggaaagaacgagattggaaaaaagctggataccgtcacgttcctaatggagttgtaagaaaaggagcatacattgctaaaaatgtagttctaatgcctagttttgtaaatcttggcgcttatgtagacgaaggcacaatgattgatacatgggcatctgttggttcatgtgctcaagttggaaaaaattgtcatatctctggtggtgcaggtataggaggtgtattagaaccgcttcaagctggcccagttattattgaagataattgttttattggtgctcg

SEQ ID NO: 233369 - DNA, 612 bp, Unknown
  Bacterial polypeptide expressing nucleotide sequence isolated from the Sargasso Sea
aatgaatacagaaaaacttgaaaatataattaatagagcttttgaggacatgcaaaatgtttccgataaatctgaaagagaagtattaaatgctgtcaaagaaacaatagaacttactgataaaggggagattagagtagcaaataaaagagacggttcatggcatgtaaatcaatgggttaaaaaagcaattttattaagttttaaaattaacaaaatgactatgtctaaaggaccatacaccacttggtatgataaagttccaggtaagtcagtatcttggaacgaagacgattggaaaaaagccggttatagacatgtcccaaatggagttgtcagaaagggttcgtatatagctaaaggcgctgtcttaatgccttgttttgtcaatttaggagcgtatgtagatgaaggaacaatgatcgacacttgggcttctgtaggttcctgtgcacaaattggaaaaaattgtcacgtatcaggcggcgctggaataggaggtgttttagaacctctacaagcaggaccagtcataatcgaggataattgctttattggagctagatctgaaatagctgaaggtgttttagtagaagaaggtgcggtgatctc

SEQ ID NO: 233370 - DNA, 816 bp, Unknown
  Bacterial polypeptide expressing nucleotide sequence isolated from the Sargasso Sea
tatgagtatagaaaatattataaatgaagcttgggaaaacaaagatcaagttaatcaaaattcagatcaaaaattaaaagatactattaatcaagtaatagaggatctagatagcggtaaatctagagttgctgaaaaaattgatggtaaatgggtaactcatcaacacttaaaaaaagcaattatgctaagttttagaatccatggtatggaaactttagatggcccctattcagcttggagagataaagctcatttgttaaaaggaaaaacagctggatggtcaaatgctgattttgaaaaagcaggttttagaatggtaccaaatactgcaatgagaaaagggtcatatgttgctaaaaatgtagttctaatgccgagttatgtaaatattggcgcttacatagatgaaggaacaatgatggatacttttagtcgtgcaggtagttgctgtcagattggaaaaaattgtcatatttcagctggaactggtattggcggagttttagaaccagcacaagcacttccgactattattgaagataatgtttttgtaggtgctatgtcagaagttgtggaaggtgtaatagttggtgaaggttcggtgttaagtatgggtatgtatattggacaatcaactaaaatcgttaatagaaaaactggtgaagtaactcatggtaaaatacctccttactcagtagttgttcctggatcattaccagacaaaaataatcctgctgcgccctcattatactgtgcagtaatcatcaaacaagtagatgaaaaaacaagatccaaaacatcagtaaacgatct

SEQ ID NO: 233371 - DNA, 293 bp, Unknown
  Bacterial polypeptide expressing nucleotide sequence isolated from the Sargasso Sea
agaagataattgttttatcggtgctcgatcagaaatcgctgaaggtgttttagtggaggaaggtgcggtattatcaatgggagtttatattggtgcgtccacgaaaatagtagatagaaattctggagaaatacattatggaaaagtccctgcgtattcagttgttgttcctggcagcttacctaacaaatctaatcctaatgggccctctttgtattgtgcagttatagttaaaaaagttgatgaaaaaactagaagcaaaacctcaatcaatgatttacttagagactaat

SEQ ID NO: 233372 - DNA, 442 bp, Unknown
  Bacterial polypeptide expressing nucleotide sequence isolated from the Sargasso Sea
ctttgttaatttgggtgcatatgtagatgaaggaactatggttgatacttgggctacggttggttcttgtgctcaagtgggaaaaaactgtcatatctcagggggcgcaggcataggaggagtcttagaacccttgcaggcaaacccagttataatagaggataactgttttatcggtgcaaggtcagaagttgcagagggtgtaatagttggagaaggatcagtattatcgatgggagtatttattggtgcttcaacaaaaatttataatcgtgaaactaaagaaatatatatgggtaaagttcctccatattctgttgttgttccgggtagtcttccgagttctaaaggagatgcatcattgtactgtgttgtgattgtgaaaacggttgatgaaaaaactcgttcaaaaacctccgtcaatgaattactaagagactaa

SEQ ID NO: 233373 - DNA, 529 bp, Unknown
  Bacterial polypeptide expressing nucleotide sequence isolated from the Sargasso Sea
aaagctggatttagaatggtacctaattcaccagtaagaaaaggatcatttgttggaaaaaatgcagttttaatgccatgttatgtaaatattggtgcatacattgatgaaggaacaatgatggatacatttagtcgtgcaggaagttgttgtcagattggaaaaaattgtcatatctcagctggtactggcgttggaggtgtattagaacctgcacaagcattaccaacaattattgaagataatgttttcttaggagcaatgtccgaagtagttgaaggtgtaatagttggagaaggctctgttctaagtatgggaatgtatattggacaatcaacaaaaattgttaatagaaaaactggtgaaataacttatggaaaaattccaccttattcagtggtagttccaggatccttgccagataaaaacaatgtaaaagcgccatctttatattgtgcagtaataattaaacaagttgatgaaaagacgagatcaaaaacatcagttaacgatcttttaagagaataaa

SEQ ID NO: 233374 - DNA, 685 bp, Unknown
  Bacterial polypeptide expressing nucleotide sequence isolated from the Sargasso Sea
aatgaacagaactgaacttgaaggcgtgattaacgtcgcatgggaaaaccgcgacgaaatcagctccgccacccagggcgaaattcgcaaagcagttgatcaggcgcttaatgccatggatcgcggtgaattgcgcgttgccgaaaagaccggcggcaaatgggttgtcaatcagtgggccaaaaaggcggttctgctgtctttccgccttaatgacatgaccaccatcgcaggtggccctggcgaaaacaccaactggtgggacaaggttccgtccaaattcgaaggctggggcgaagccgagttcaaacaggccggtttccgtgccgttccgggcagcatcgttcgccgctcggcttatgtcgcaccgggcaccgtcctgatgccaagctttgtaaaccttggcgcctatgttgataccggcgtaatggttgatacctgggcaaccgttggatcctgtgcgcagatcggtaaaaacgttcacctgtcaggtggtgcgggtatcggcggcgttcttgaaccgcttcaggccggaccggtcatcatcgaagacaatgccttcatcggcgcacgttcggaaatcgtcgaaggcgttatcgtcgaagaaggtgctgtcatttcgatgggtgtctttatcggcgcatcgaccaagatcatcgaccgcaccaccggcgaaaccttgtcg

SEQ ID NO: 233375 - DNA, 514 bp, Unknown
  Bacterial polypeptide expressing nucleotide sequence isolated from the Sargasso Sea
atgaaaaaccttgaagagattattacagttacatttgaagatcgtgaaaaaattactaaggacacaattggtgaagcaagagaagcagtagaattaactttaaatctactagataatggttctataagagtatgtgaaaaaatagatggaaaatggatcgtaaaccaatggattaaaaaagcaattcttttaagttttagattaagtgataatgaaattattaaagcatctcatgcaacttggtttgataaagttgaaagcaaaacagctaattggactaaagatgatcatttaaaagctggctttagatatgttccagatgctgttgtaagaaaatctgcatttattgcgaagggagtggttttaatgccatcatttgtaaatttaggtgcttatgttgatgaaggaacaatgattgacacatgggcaacagttggttcatgtgctcaaattggaaaaaattgtcatatatctggtggagctgggattggtggagtactagaacctctgcaag

SEQ ID NO: 233376 - DNA, 640 bp, Unknown
  Bacterial polypeptide expressing nucleotide sequence isolated from the Sargasso Sea
atgagtattgaaaatattataaatgatgcttgggagaataaagaccaagtaactcaaaattcagataaatctttgaaggatgctgtaaatgaaattatagatgatttagacagtggaaaagcaagagtagctgaaaaaatcaatggtgaatgggttactcaccaacatcttaaaaaagctatcatgttaagttttagaatgtatccaatggaaaatttaaatggaccttatagtagctggtatgacaaagctcatttacttaaagggaaaactgctggatggacaaaagaagaccatgaaaaagctggttttagaatggtgcctaattcacctgtgagaaaaggatcatttgtaggaaagaatgcggttttaatgccgtgttacgtaaatattggagcatacattgatgaaggtacaatgatggatacattcagtcgtgcaggaagttgttgtcagattggaaaaaattgtcatatctcagctggtactggagttggtggtgttttagaacctgctcaagcgttaccaacaattattgaggataatgttttcttaggggcaatgtcagaagtagtagaaggtgtaatagttggagaaggctctgttataagtatgggaatgtatattggacaatctacaa

SEQ ID NO: 233377 - DNA, 559 bp, Unknown
  Bacterial polypeptide expressing nucleotide sequence isolated from the Sargasso Sea
atgcagcagttacagaacgttattgagtccgctttcgagcgccgtgccgacattactccggcaaatgtagataccgtaacccgcgaagcggtgaatcaggttattgctttactggattccggtgcactgcgcgtcgcagaaaagattgagggtcagtgggtcacgcatcagtggctgaaaaaggcggtcctgctctctttccgtattaacgataatcaggttatcgagggtgcggaaagtcgttacttcgataaagtgccgatgaaattcgccaactacgacgaagcacgcttccagaaagaaggtttccgcgtggttccgccagcggccgtacgccagggtgcgtttatcgcccgtaacaccgtgctgatgccgtcttacgtgaacatcggcgcttatgtggatgaaggtacgatggttgatacctgggcgaccgtgggttcctgcgcgcaaattggtaaaaacgttcacctgtccggcggcgttggcatcggtggcgtactggagccgttacaggctaacccgaccatcatcgaagacaactgcttcatcggcgcac

SEQ ID NO: 233378 - DNA, 830 bp, Unknown
  Bacterial polypeptide expressing nucleotide sequence isolated from the Sargasso Sea
tatgagtgatatagaaaaaattataaatgatgcttgggaaaataaagatcaaataaaccctaattctgataaaaagattaaagatactattaatcaaataattgcagaattagacagtggaaaagtaagagttgcggaaaagattaatggagaatgggtaacccatcagtatcttaaaaaagcaatcatgttaagttttagaatttatccaatggagaatttgaatggtccttatagtagttggtatgacaaagcacacttgcttaaaggtaaaacagccggatggacaaaagaagatcatgaaaaagcaggttttaggatggttccaaactcgcctgtaagaaaaggatcttttgttggcaaaaatgcagtcctaatgccgtgttacgttaatatcggtgcatacattgatgaaggtacaatgatcgatacttttgctagagcaggtagctgtagtcaaattggaaaaaattgtcatatatctgctgcaagtggagttggaggagtattggagccagcacaagcattacctacaattattgaagataatgtttttttaggagcaatgtctgaagttgtagaaggtgtaattgtaggagaaggatctgtaataagtatgggaatgtatattggccaatcaactaaaattgtaaatagaaaaacaggcgagattacatatggaaaaatacctccatattcagttgtggtacctggatctttgcctgacaaaaataatccttcagcaccttctctatattgtgcagttattattaaacaggttgatgaaaaaacaaggtctaaaacatctatttatgacctattaagagatt

SEQ ID NO: 233379 - DNA, 331 bp, Unknown
  Bacterial polypeptide expressing nucleotide sequence isolated from the Sargasso Sea
ggagttttggagccggctcaagcccttccaacaatcatagaagataatgtatttttaggagcaatttccgaagttgtcgaaggtgtaattgttggggaaggatcagtattaagtatgggaatgtatataggtcaatcaacaaagattgttaatagaaaaactggtgaaattcattatggaaaaataccgccgtattctgttgttgttccaggatcattgcctgataaaaataaccctagtggcccatctttatattgtgctgtaatcattaaacaggtcgatgaaaaaacaagatcaaaaacttcaattaatgatctactaagagattaaa

SEQ ID NO: 233380 - DNA, 580 bp, Unknown
  Bacterial polypeptide expressing nucleotide sequence isolated from the Sargasso Sea
gttaatttgaaaacttctggatgggttgaagatgaatggacaaaaaggaattttagatccgttccaggagctgtagtaagatactcatcttttattgcagctaatgttgttctaatgcccagttttgtcaatttaggtgcttatgtagattctggaacaatgattgatacatgggcaacagtcggatcttgcgctcaaattggtaaaaatgttcatatttctggcggtgctgggataggtggagttttagaaccacttcaagctaatccagttataatagaagacaattgttttattggtgctcggtctgaaatagctgaaggagtaattgtagaaacaggtagtgtgatttctatgggagtttatattggagcttcaacaaaaattattgatagagattcgggagaaattttttatggaaaagttccaagttattctgtagttgtcccaggtactttaggcggtaaaactttgaaagatggtacaacaggaccaaacttatattgtgctgtgattgttaaaaaagttgatgaaaagacaagatcaaaaacctctattaatgaactgctaagagagtaat

SEQ ID NO: 233381 - DNA, 631 bp, Unknown
  Bacterial polypeptide expressing nucleotide sequence isolated from the Sargasso Sea
atgagtatagaaaatatcataaataaagcctgggaaaacaaagaccaggtaggcccaaattctgatcaaaatttaaaagatgctataaatcaaattattgaagatttagattgtggtaagtctagagttgcagaaaaaatcgatggtaaatgggtaactcaccaatatctcaaaaaagcgatcatgttaagttttagaatatatccaatggaaaatttaaatggcccttatagtagttggtatgataaagctcacttgcttaaaggtaaaactgctggatggacaaagcgagaccatgaaaaagcaggctttagaatggttcctaattcaccagttagaaaaggatcgtttgttgggaaaaatgcagttttaatgccctgctatgtaaacatcggtgcctacatagatgaaggcacaatgattgacacttttgcaagagccgggagttgtagtcaaataggcaaaaattgtcatatatcagctgcgagcggtgttggcggcgtgctagaaccggcacaagctcttccaaccattatagaagataatgtttttttaggtgcaatgtctgaggttgttgagggagtgattgttggcgaaggatctgtaataagtatgggtatgtacattggtc

SEQ ID NO: 233382 - DNA, 493 bp, Unknown
  Bacterial polypeptide expressing nucleotide sequence isolated from the Sargasso Sea
atgaaagatttaaaaagttttatcgatgctcaatttgacaaacgatcagaaattaaatcaagtgatgaaaatcaagagctaaaaaacgtgataaaagatattattaaaaaattagataatggtgaactaagaatagcagagaaaattaatgaaaaatggacagtcaatcaatggctaaaaaaagctgttctgctttcttttattgctgatgaaaattttgttattaaaggtgaacatacaaattatttcgataagattccaaataaattctatgattatgataatactaaatttgttaaaacaggtgctcgtgtagttcctaccgccactgtgagacgaggtagttttattggaaaaaacgtggtgttaatgccgagttttgtaaatatcggcgcttatgttgatgacggtacaatggtagatacttgggctactgttggatcgtgtgctcaaataggtaaaaatgttcatttatctggtggcgtaggtattg

SEQ ID NO: 233383 - DNA, 392 bp, Unknown
  Bacterial polypeptide expressing nucleotide sequence isolated from the Sargasso Sea
tgcaggaagttgtggtcagattggaaaaaattgtcatatctctgcaggttctggaattggaggcgttttggagcccgctcaagcattaccaacaattattgaggataatgtttttgttggagcaatgtcagaagttgtcgaaggtgtgatagttggagaaggttctgttctaagtatgggaatgctgattacgcaaagcactaaaatagtaaacagggcaaccggcgaaattacttatggtaaaattcctccatactcagttgttgtgccaggttctttaccagacaaaaataatccatctgcaccatctttaagttgtgtggtgattattaaacaagttgatgaaaaaacaagatcaaaaacatcagtaaacgatcttttaagagattaaa

SEQ ID NO: 233384 - DNA, 631 bp, Unknown
  Bacterial polypeptide expressing nucleotide sequence isolated from the Sargasso Sea
aaagcaatcatgttaagttttagaatttacccaatggaaaatttaaatggaccatactccagttggtatgacaaagctcatttattaaaaggtaaaactgcaggttggacaaaagaagaccatgaaaaagctggttttagaatggtaccaaactcgcctgttagaaaaggatcattcgtaggaaaagatgctgttcttatgccatgttatgtaaacattggtgcttacattggggctaaaactatgatggatacgtttagccgtgctggtagttgttgccaaattggagaaagttgccatatatctgctggttctggaatcggaggagtactagaacctgctcaagcattaccaacaatcattgaggataatgtgtttgttggagccatgtctgaggtagttgagggagtaattgttgaggaaggaagtgttctttcaatgggatgctatataggtcaaagtactaaaatcattaatagatcaaatggagaaattacaaaaggtcgtatacctccttattcagtagttgtaccaggcacttataaagatctttacgctgttcatataattaaaactgtggactctaaaactaggtcaaagacttcaattaacgatcttctaagagactaac

SEQ ID NO: 233385 - DNA, 427 bp, Unknown
  Bacterial polypeptide expressing nucleotide sequence isolated from the Sargasso Sea
gtcgacgaaggaacaatgatagatacttgggcatcagttgggtcatgcgcgcaggttggaaagaattgtcatatttctggtggcgctggtattggtggtgtcttagaaccaatgcaagcaaatccaactattgtggaggacgattgttttttaggagcgagagcggaaattgcagaaggtgtaattgttgaaaaaggatctgtattgtcgatgggagtttatatcggggcgtcaacaagaatagttgatcgtacaactggtgaaattcattatggtaaagttcctgcctattctgttgttgttccaggctcaatgccaagtaaaaataatcctaaaggaccatcactatattgtgttgtaattgtaaaaaaagtagatgagaaaactagaagcaaaacttctataaacgatttgttaagagactaaa

SEQ ID NO: 233386 - DNA, 385 bp, Unknown
  Bacterial polypeptide expressing nucleotide sequence isolated from the Sargasso Sea
ggatcgggagcacaaattggtaagaactgtcatttaagtggtggggttggaatcggaggagtgctggaaccggttcaagctggaccaactatcattgaagataattgtttcattggagctagaagtgaaatcgtggagtcagtcatcgtaagaaaaaatagtgttatttcgatgggagttttcataggatcctcaaccaagatagttagacgtgatactggtgaagttataatgggagaagtgcccgagggtagtgttgtggtacctggaacaatgccttctaaaaaacctggcatgccctcattatattgtgcagtaataattaaaactgttgatgaaaaaactagatcaaaaacaagtttgaatgaattattgagagactagc

SEQ ID NO: 233387 - DNA, 646 bp, Unknown
  Bacterial polypeptide expressing nucleotide sequence isolated from the Sargasso Sea
tatgctcagttttagaattcatggaatggagactcttgcaggaccgtattcgagttggagagataagagcaatattttaaaaggtaaaacagccggctggggagataaagaatttgagcaagctgggtttaggatggttccaaactctcccgtaagaaaaggatcatttataggaaagaatgtagttttgatgccatgttttgttaacatcggagcgtacattgactcaggaactatgatggatacttttagccgtgctggaagttgttgtcagataggaaaaaattgtcatatttctgctggaagtggagtcggtggcgttttggaacctgctcaagcgttacctacgattattgaagataatgtatttttgggagctatgtccgaagttgtagaaggtattattgtaggcgaaggatcagtattaagtatgggtatgtatattggtcaatcaactaaaattgttaacagatcaacaggtgaaataagttatggcaaaattcctccttattctgttgttgtgccaggtactttaccagataaaaaaaaaccatctggaccatcactaagttgtgcagttataattaaacaggttgatgaaaaaactagatctaaaacttcaattaacgatcttttaagagagtaa

SEQ ID NO: 233388 - DNA, 217 bp, Unknown
  Bacterial polypeptide expressing nucleotide sequence isolated from the Sargasso Sea
aatgggcgtttacatcggtcagagcacgcgtatttatgaccgcgaaaccggtgaagttcactatggccgtgtaccagcaggttcagtagtcgtggcgggtaacctgccaagcgcagacggtaaatacagcctttacgccgctatcatcgtgaagaaagtagatgcgaagacccgcgcgaaagtaggtatcaacgcgctacttcgaggcgtagaataa

SEQ ID NO: 233389 - DNA, 820 bp, Unknown
  Bacterial polypeptide expressing nucleotide sequence isolated from the Sargasso Sea
atgagtaataattacgaacagataattaatgatgttttcgataataattcatctactaatattgaagaagtcagtattattgtcgatgacgttcttgaacaattggactcaggggcactcagagtctgcgaaaagatcaacggaaattgggttgttaatcaatggattaagaaagccatattactcagtttcaggacaaaaagtaattcaactcttagtggcccatacgcaacttggttcgataaagtcgctggcaagactgcagattgggatgaagataagtataacttagcaggattccgtaatgttccaaatgctgtgatcagaaaatctgcttttgttgcaaaagattgtattattatgccctcatttatcaatgtgggtgcttatgtggatcaaggtacaatgattgatacttggtctacaattggatcgtgtgcacaaataggaaaaaattgtcatataagtggaggagtaggcattggtggcgtgcttgagccacttcaagctaatccagtaataatagaagataattgctttattggagctagatcagaaattgctgaaggcgtgttggtcgaagaaggatcggtaatttctatgggggtctttattggagcctcaacgaagatagtcgatagagatagtggggatatttattatggtaatgttccatcttattctgtagtagttcctggaacgttacctagtgaaaagatgaaggacgacggtttgggactttattgtgcagtaattgttaaaagagtcgatgagaaaactcgattaaaaacatcgatcaatgagttattaaggccataaa

SEQ ID NO: 233390 - DNA, 310 bp, Unknown
  Bacterial polypeptide expressing nucleotide sequence isolated from the Sargasso Sea
agcgttgccaacaataattgaagataatgttttcttacgagcaatgtcagaagtagtggaaggtgttgttgttggtgaaggttcagttttaagtatgggtatgtatattggccaatcaactaaaatagtcgatagaaaaactggaaaaattacttatggaaaaataccaccttattcagttgttgttcctggttctttaccaaataaaaataattcatctgcaccatcgttgtattgtgcagtaataattaaacaagttgatgaaaaaacaagatctaaaacatctattaacgatcttctaagagattaa

SEQ ID NO: 233391 - DNA, 580 bp, Unknown
  Bacterial polypeptide expressing nucleotide sequence isolated from the Sargasso Sea
tatgataaagtacctgggaaagacagtaaagtggaaagagaaagactggaaaaaagcaggttaccgtcatgtcccaaatggagttgtaagaagaggggcttatattggtaaaaatgtagttctaatgccgagctttgtaaaccttggagcttacgttgatgagggaacaatgattgacacttgggcttctgttggttcatgcgctcaggttggaaaaaattgtcatatttctggaggtgcaggaataggaggtgtgttagaaccacttcaagctggtccagtaattattgaggataattgttttattggtgcgagatctgaaattgctgaaggtgttttagtggaagaaggcgcagtactatcaatgggagtatacataggtgcgtctacaaagatagtagatagacactctggtgaaatacactatggaaaagtacctgcatattctgttgtggttcctggaagccttcctaacaaatcaaacccaagtggaccttcgttgtattgtgcagttatagttaaaaaagttgatgagaaaactagaagcaaaacttcaatcaacgatttacttagagactaa

SEQ ID NO: 233392 - DNA, 400 bp, Unknown
  Bacterial polypeptide expressing nucleotide sequence isolated from the Sargasso Sea
tttgcaagagcaggtagctgttgtcaaatctggaaaaaattgtcacatctctgcagggagtggagtaggtggagttcttgaaccagctcaagcattacctacaataatagaggacaatgtatttttaggagcaatgtctgaagtagtagaaggagttatagttggagaaggttctgtgttaagcatgggaatgttaattacgcaatctacaaaaatagtaaatagatcaactggtgagatcatgtacggaaaaattcctccatattctgttgttgtgcccggttctcttcctgataaaaaaaatccatctgctccatcactaagttgtgcagtaattatcaaacaagttgatgaaaaaactagatcaaagacctcaattaacgatcttttaagagaatag

SEQ ID NO: 233393 - DNA, 325 bp, Unknown
  Bacterial polypeptide expressing nucleotide sequence isolated from the Sargasso Sea
ttagaaccagcacaagcacttccgactattattgaagataatgtttttgtaggtgctatgtcagaagttgtggaaggtgtaatagttggtgaaggttcagtgttaagtatgggtatgtatattggccaatcaactaaaatcgttaatagaaaaactggtgaagtaactaatggtaaaatacctccttactcagtagttgttcctggatcattaccagacaaaaataatcctgctgcgccctcattatactgtgcagtaatcatcaaacaagttgatgaaaaaacaagatccaaaacatcagtaaacgatcttttaagagattaaa

SEQ ID NO: 233394 - DNA, 778 bp, Unknown
  Bacterial polypeptide expressing nucleotide sequence isolated from the Sargasso Sea
aaccctaattctgataaaaagataaaagatactattaatcaaatcattgcagatttagacagtggaaaagttagagttgcggaaaagatcaatggagaatggataacccatcagcatcttaaaaaagcaatcatgttaagttttagaatttatccaatggagaatttaaatggtccttatagtagttggtatgacaaagctcacttgctaaaaggtaaaacagctggatggacaaaagaagatcatgaaaaagcaggttttaggatggttccaaactcgcctgtaagaaaaggatcttttgttggcaaaaatgctgttctaatgccgtgttatgttaatattggtgcatacattgatgaaggtacaatgatagatacttttgctagagcgggtagttgtagtcaaattggaaaaaattgtcatatatctgcagcaagtggagttgggggagtattagagccagcacaagcattaccaacaattattgaagataatgtttttttaggagcaatgtcagaagtagtagaaggtgtaattgtaggagaaggatctgtaataagtatgggaatgtatattggccaatcaacaaaaattgtaaatagaaaaacaggtgagattacgtatggaaaaatacctccatattcagttgtggtacctggatctttgcctgataaaaataatccttctgcaccctctctatattgtgcagttattattaaacaagttgatgaaaaaacaaggtctaaaacatctattaatgacctattaagagattaat

SEQ ID NO: 233395 - DNA, 721 bp, Unknown
  Bacterial polypeptide expressing nucleotide sequence isolated from the Sargasso Sea
atgtctatagaaaaaattataaacgatgcttgggaaaataaagaacaggttaaccaaaattcagatcagtctataaaaaatgctattaatcaagttataagtgatttagatagtggtaaatctcgtgtagcagaaaaaattaatggggaatggaaaacccatcaacacttaaaaaaagctataatgctaagttttagaatttatccaatggataatttgagtggtccatatagtagttggtatgacaaatcgcacttgttaagaggcaagactgctaactggacaaaagaacaacatgaagctgcgggtttcagaatgacaccaaatagtcctgtgcgccctggctcttttattggaaagaatgcggttcttatgccgtgttatgtaaacattggtgcttacataggatcaggtactatgatggatacttttagtcgtgccggaagttgttgtcaaatcggagaaaattgtcatatttcagctggatctgggattggcggtgttctagagccagctcaagcacttccaacaataatagaagataatgtttttgttggtgcaatgtctgaggttgttgaaggagttattgttgaagaaggaagtgttctctcgatgggatgttacattgggcaaagtacgaagatcataaatagatcaaatggagaaattacaaaaggtcgtattccaccttattcagtagtagttccaggtacttataaag

SEQ ID NO: 233396 - DNA, 589 bp, Unknown
  Bacterial polypeptide expressing nucleotide sequence isolated from the Sargasso Sea
ttggaatgactttgagcacttacctggtaaaacagcaggttggactgaaaaagagtttgcaaaagctggattcagattagttccaaattgtgtggtgaggaatggttcttttatcgggaaaggtgctgttataatgccaaattcatttattaacattggtggatactgtggggaaaattctatggtagacactggtgcaagaattgggtcagctgctagacttggggcaaattgccatttatctgctggttgcggcttaggcggaatcctggagccagtaggttctaaacctactatcattgaagatgattcatttataggagctctcagtgaaattgtggaaggcgtaatagttagaaaaggaagtgttgtttctatgggatgttatattggcaaaagtactaaaatagtaaatagagaaacaggtgaaattaacacaggtgaagtcccagctggcagtgtagttgttcccgggtcattaccttcaaaaaaacctggtggaccaaatttatattgtgtagttattatcaaaactgtagatgaaaaaactagatcaaaaactagtttgaatgaccttttgagagattaa

SEQ ID NO: 233397 - DNA, 847 bp, Unknown
  Bacterial polypeptide expressing nucleotide sequence isolated from the Sargasso Sea
tttatcgaaaactgcgtaatgaataccaaatcttttgaaaatattattaacgaagcttgggaaaataaaggtcaagttaattctaaatctagcaaaaaattactaaatgctattagtaaaattattgaactattagattcaggagaaatacgtgtagcagaaaagaaaagtgatggatgggttgttaatcaatggattaaaaaagcaattttattaagcttcagagtaaataaaatgaaaatttccaaaggtccttatgctgcttggttcgacaaaatcgaaggtaaaactcataaatggaatgaaaaaagatttattaaagaaggttttagatacgttccgaatggtgttgtgagaaaaggagcatttatcgcaaagaatgttgttttaatgccttcatttataaatatcggtgcttatgttgatgaaggaagcatggttgatacttgggcttctgttggatcttgtgcccaagttggaaaaaattgtcatatttctggtggagctggaattggtggtgtattggaacccatgcagtcaaatccaaccatcattgaagataactgttttgttggtgcgcgttcagaagttgtggaaggtgttatagttggaaaaggatctgttttatcgatgggtgtattcataggcaaatctacaaaaattgtaaatagatcaactggagaaattttatatggaaaaattccaccttattctgtcgtcgttcctggtagtttgccaagcaaaagcaatccggatggacctgcattatattgtgtagtaattattaaacaggttgatgaaaaaactagatcaaaaacatcaattaatgatctattgagagaataat

SEQ ID NO: 233398 - DNA, 455 bp, Unknown
  Bacterial polypeptide expressing nucleotide sequence isolated from the Sargasso Sea
gccatgttatgtaaatattggagcctacattgatgaaggtactatgatggatacatttagtcgtgcaggaagttgttgtcagattggaaaaaattgtcatatctcagctggtactggagttggaggtgtattagaacctgctcaagcattaccaacaattattgaagataatgttttcttaggagcaatgtcagaagtagtagaaggtgtaatagttggagaaggctctgttttaagtatgggaatgtatattggacaatcaacaaaaattgttaatagaaaaactggtgacataacctatggaaaaattccaccttattcagtggtagttccaggatctttgccagataaaaacaatccacaagcaccatctttatattgtgcagttataattaaacaagttgatgaaaaaacaagatcaaaaacatcagttaatgatcttttaagagaataaa

SEQ ID NO: 233399 - DNA, 181 bp, Unknown
  Bacterial polypeptide expressing nucleotide sequence isolated from the Sargasso Sea
aatagaaaaactggtgaaatttcttatggaaaaattccaccatattctgttgttgttcctggttcactacctgataaaaaagatccagcaaatgcatctttatattgcgcagtaattattaaacaagtcgacgagaaaacgagatcaaaaacatcaattaacgatctcttaagagaataat

SEQ ID NO: 233400 - DNA, 692 bp, Unknown
  Bacterial polypeptide expressing nucleotide sequence isolated from the Sargasso Sea
aatgaatacaaattcttttgaaaaaataattaatgaagcttggaataataaaagtaagattaattctaaatccgataaaaaaataataaatgctataaataaaactatagatttattagattctggaaaaatacgtgttgcagaaaaaaaaaataatcaatggcatgttaatcaatggataaaaaaagcaatattgttaagttttagggttaacaaaatgaaagcttcgaaaggaccatattcaacttggtacgataaaattgatggaaaaacacagggctggaatgagaaaaaaatagctgccgctggttttagatacgttcctaatggggttattagaaaaggagcctttgttgcaaaaaatgttgtgttaatgccttcgttcctaaatattggagcattcgtcgatgagggaagtatgattgatacttgggcttcagtaggatcttgtgcacaagttggaaaaaactgtcatatatcaggcggggccgggataggcggtgtgttggaaccaatgcaagcaaatcctacaataattgaggataattgttttgtgggtgctagagctgaaattgctgaaggtgttatagttggcaaaggatcagttttatcaatgggagtgtatataggaacatcaacaagaattgttgatagagcaacaggagaaatatacttcggtaaagttcccgaat

SEQ ID NO: 233401 - DNA, 241 bp, Unknown
  Bacterial polypeptide expressing nucleotide sequence isolated from the Sargasso Sea
ggagaggtgcagtactatcaatggggtgtatttattgggtgcttcaacaaaaatagttgatcgtgatacaggcgaaatttatatgggaaaagttcctccctattcagttgtcgtaccaggtacattaccaggaaaaaaagagggggatattaatccttctttatactgtgccgttattgttaaaaaagttgatgaaaaaactagaagtaaaacatcaataaatgatcttttaagagattaa

SEQ ID NO: 233402 - DNA, 268 bp, Unknown
  Bacterial polypeptide expressing nucleotide sequence isolated from the Sargasso Sea
tatgtcagaggttgttgaaggtgtaatagttggagaaggatctgtattaagtatgggtatgtatatcggtcaatcaacaaaaatagttgatagaaaaactggtgaaattacttatggaaaaattccaccttattcagtcgttgtacctggttctttacctgataagaataatccaacagcaccatcactttattgtgcagtaattattaaacaggttgatgaaaaaactagatcaaaaacatcagtaaacgaccttttgagagaataa

SEQ ID NO: 233403 - DNA, 313 bp, Unknown
  Bacterial polypeptide expressing nucleotide sequence isolated from the Sargasso Sea
cgctgcaggccacccggtcatcatcgaagacaactgcttcatcggtgcgcgctcggaagtcgtggaaggcgtgatcgttgaagaaaactcggtgatctcgatgggcgtgtacctgggccagtcgaccaagatttacgatcgcgaaaccggtgaagtcagctacggccgcatcccggcgggctcggtggtggtggcgggcaacctgccgtcgaaggacggctcgcacagcctgtactgcgccgtgatcgtcaagaaggtcgacgcgaagacgcgcgccaaggttggcctgaacgagctgctgcgcggcgattaa

SEQ ID NO: 233404 - DNA, 514 bp, Unknown
  Bacterial polypeptide expressing nucleotide sequence isolated from the Sargasso Sea
aattgtgtcgtgcggcgctccgcatttatagctcctggggtcgtcttaatgccaagttttgtcaatttaggcgcttatgtagatagtggaacgatggttgatacttgggccacaattggttcatgtgcccaagttggtaagaactgtcatatatccggaggggcgggtatcgcaggtgtactggagccaatgcaggcagatcccgtgattattgaggataactgttttataggagcccgatctgaggtggcggaaggtgttattgtcgaaacagggtccgtgttgagcatgggagtttacattggtgcttcaacaaagattgtcaatagagaaacaggggaaatctttacaggcagggtacctgcgtactcagttgtagttccaggtgcaatgccaggcaagacgttgcccgacaggtctcaagggccttcgctgtattgtgctgtaattgtgaaacaggtagatgagcaaacacgcaccaaaacatcaataaatgagcttctacgcgattaaa

SEQ ID NO: 233405 - DNA, 766 bp, Unknown
  Bacterial polypeptide expressing nucleotide sequence isolated from the Sargasso Sea
gataaatctttaaaggatgctgttaatcaaataattgatgatttagatagtggaaaagtaagagtagctgaaaagatcaatggcgaatgggttactcatcagcatctaaaaaaagctataatgttaagttttagaatgtatccaatggaaaatttaaatggtccttacagtagttggtatgacaaatctcatttacttaaagggaaaacagctggatggacaaaagaagatcatgaaaaagctggttttagaatggtacctaattcaccagtaagaaaaggatcatttgtaggaaagaatgcagttttgatgccatgttatgtaaatattggagcatatattgatgagggtactatgatggatacattcagtcgtgcaggaagttgttgtcagattggaaaaaattgtcatatctcagctggaactggagttggcggagtattagaaccagcccaagcattaccaacaattattgaagataatgttttcttaggagcaatgtctgaggtggtagaaggagtaatagttggagaaggttctgttctaagtatgggaatgtacattggacaatcgacaaaaattgttaacagaaaaactggcgaaataacttatggaaaaatacctccttattcagtagttgttccaggatccttgccagatcaaaacaatccacaagcgccatctttgtattgtgcggtaataattaaacaagttgatgaaaagacgagatcaaaaacatcagttaacgaccttttaagagaataaa

SEQ ID NO: 233406 - DNA, 256 bp, Unknown
  Bacterial polypeptide expressing nucleotide sequence isolated from the Sargasso Sea
ggtcgagggagttattgtaggtgagggttcattattaagcatgggaatgtacataggtcaatctactaaaatagtgaatagaaaaactggtgatataacatatggaaaaattccaccttattcagtagttgtcccaggctcattaccagataaaaataatgcttcagcaccatcattatattgtgcagtgataattaaacaggttgatgaaaaaacaagatcaaaaacatctatcaacgatcttttaagagaataa

SEQ ID NO: 233407 - DNA, 490 bp, Unknown
  Bacterial polypeptide expressing nucleotide sequence isolated from the Sargasso Sea
aatggtcccaaattcaccagtaagaaaaggatcattcgtaggaaaagatgttgttcttatgccatgctatgtaaacattggtgcttacattggggctaaaaccatgatggatacgtttagccgtgctggtagttgttgccagattggagaaagttgccatatatctgctggttctggaatcggcggagtactagaacctgctcaagcattaccaacaatcattgaggataatgtgtttgttggagccatgtctgaagttgttgagggagtaattgttgaggaaggaagtgttctatcaatgggatgctatataggccaaagtactaaaatcattaatagatcaaatggagaaattataaaaggtcgtatacctccttattctgttgttgtgccaggtacacataaagatctttacgctgttcatataattaaaacagttgattctagaacaaggtcgaagacttcaattaacgatcttctaagagattaa

SEQ ID NO: 233408 - DNA, 567 bp, Unknown
  Bacterial polypeptide expressing nucleotide sequence isolated from the Sargasso Sea
aaggtaaaactgctggatggacaaaagatgatcatgaaaaagcaggatttaggatggttccaaattcaccagtcagaaaagggtcttttgttggaaaaaatgctgttcttatgccgtgctatgtaaatattggtgcatatatcgatgaaggaacaatgatagatacttttgcaagagctggtagttgttgtcaaattggaaaaaattgtcatatatctgcaggttcaggtgttggtggagttttagaaccagcacaagcattgccaacaataattgaagataatgttttcttgggagcaatgtcagaagtggtggaaggtgttattgttggtgaaggttcagttctaagtatgggtatgtatattggccaatcaactaaaatagttgatagaaaaactggaaaaattacttacggaaaaattccaccttattcagttgttgttcctggttctttaccagataaaaataattcatctgcaccatcattgtattgtgcagtaataattaaacaagttgatgaaaaaacgagatctaaaacatccattaacgatcttttaagagattaat

SEQ ID NO: 233409 - DNA, 325 bp, Unknown
  Bacterial polypeptide expressing nucleotide sequence isolated from the Sargasso Sea
attagaaccaatgcaagcaaacccaacaataattgaggacaattgttttataggagcaagagcagaaatagccgaaggtgtcatagttggtaagggatctgttttatctatgggagtttatattggtgcatcaacaagaatcattgaccgagcaacaggcgaagtccattatggtaaagttcctgattattctgttgtagttccaggagctatgcctagcaaaaataatcctgatggtccatctttgtactgtgtggttatcgtaaaaaaagtagacgaaaaaacaagaagcaaaacttcaattaacgatttattaagagattaa

SEQ ID NO: 233410 - DNA, 826 bp, Unknown
  Bacterial polypeptide expressing nucleotide sequence isolated from the Sargasso Sea
tatgagtgaaatagaaaaaattattgaagatgcatggaaaaataaagaaaatattaatcaaaattcagaaccaacaataattgattcaataaatcaaattattgaagatttagatgctggaaaaattcgtgttgcagagaaaattaataatgaatgggttactcatcaatatattaagaaagcaataatgctgagttttagaattcatggaatggaagccttgtcaggtccttatagttcttggtatgataaagcacacttgcttaaaggaaaaactgctggatggaataaagaagattttgaaaaagctggttttagaatggttcccaattcaccagttagaaaaggttcatacatagcaaaaaatgttgttttaatgccgtgctttattaatactggagcatatatagattctggaactatgatggatacattttcaagagcaggatcttgttgtcaaattggaaaaaattgtcatatatctgcaggaagtggagttgggggagtgttagagccagcacaagctttgcctacaataattgaagataatgtttttctaggtgcaatgtcagaagttgttgaaggagtaattgtaggtgaaggatctgtgattagtatgggtatgtacattggtcaatcaacaaaaattgttgatagaaagtctggtgaaatcacttatgggaaaattcctccttattcagttattgtaccagggtcattaccagataaaaataatccaagtgcgccttctttaagttgtgcggtaattataaaaaaagttgacgaaaaaacacgatctaaaacatcaattaatgacttattacgt

SEQ ID NO: 233411 - DNA, 194 bp, Unknown
  Bacterial polypeptide expressing nucleotide sequence isolated from the Sargasso Sea
aactaaaatagtcgatcgaaaaactgaaaaaataacttacggaaaaattccaccttattcagttgttgtacctggttctttacctgataaaaataattcacaagctccctcgctatattgtgcagtaataattaagcaagttgatgaaaaaacaagatctaagacatctataaacgacttgttaagagattaaa

SEQ ID NO: 233412 - DNA, 439 bp, Unknown
  Bacterial polypeptide expressing nucleotide sequence isolated from the Sargasso Sea
attgtgtgcatacatagatgaaggtacaatgatggatacttttagtcgtgcaggtagttgctgccagattggaaaaaattgtcatatttcagctggaactggtattggtggagttttagaaccagcacaagcacttccgactattattgaagataatgtttttgtaggagctatgtcagaagtcgtggaaggtgtaatagttggtgaaggttcagttttaagtatgggtatgtatattggccaatcaactaaaatcgttaatcgaaaaactggtgaagtaactcatggtaaaatacctccttactcagtagttgttcctggatcattaccagacaaaaataatcctgctgctccttcattatattgtgcagtaatcatcaaacaagtagatgaaaaaacaagatccaaaacatcagtaaacgatcttttaagagattaa

SEQ ID NO: 233413 - DNA, 790 bp, Unknown
  Bacterial polypeptide expressing nucleotide sequence isolated from the Sargasso Sea
actgggtgaaattagagactctattgaaactgcgttagattacttagatcaaggtaaattaagagttgctgagccattgggaaatagtgaatggcaagtgaatcaatggttaaaaaaagctgttttattatcttttaagattaatgatatggatgtaatttctggaggaccaaaaagtcaaactactggcccagctaattggtgggacaaaattccttctaagttttctggatggagtaaagaagagttcaaaaaagctggttttagagcagttcctggaagtgtggtaagacattctgcttatattgcgcctagtgttgtattaatgccgtcatttgtaaatattggtgcttacgttgatagtggaagtatgattgatacgtgggcaactgttggatcttgtgcacaaattggtaaaaatgttcatatttcaggtggtgctggtattggaggtgttttagaacctattcaagcaggaccagttatcatcgaagatgattgttttataggggccagatctgaagtggcagaaggtgtcgttgttgaaaaaggagcagtgttatcaatgggggtatttattggcgcatctactaaagttattgatagaaatacaggcgaagtatatgtgggtagggtaccagcatattcagttgtagttccaggttctcttcctggaaaatctttaccagatggctcccaaggaccgagtttatattgtgctgtaattgtaaaaaaagttgattctcagacacgttcaaagacgtctgtaaatgaactattaagagattag

SEQ ID NO: 233414 - DNA, 829 bp, Unknown
  Bacterial polypeptide expressing nucleotide sequence isolated from the Sargasso Sea
tatgtcgcaacaacttcagcagatcattgataccgcctgggaaaaccgcgccgaactgtcgccgaaggccgccccggccgacgtgcgcgaagccgtcgcccacgccatcgagcaactggacaagggcgcgctgcgcgtggccgaaaagaaggacggcgactgggtcgtcaatcagtggctgaagaaagccgtgctgctgtcgttccgtctggaagacaacgcgccgatgccggccggcggctactcccagttctacgacaaggtgccgtcgaagttcgccaactacaccgctgaagacttcgccgccggcggcttccgcgtggtgccgcccgccatcgcgcgccgcggttcgttcatcgcgaagaacgtcgtgctgatgccgtcgtacaccaacatcggcgcctatgtggacgaaggcacgatggtcgacacgtgggcgaccgtcggctcgtgcgcgcagatcggcaagaacgtccacctgtcgggcggcgtgggcatcggcggcgtgctggagccgctgcaggcgaacccggtcatcatcgaagacaactgcttcatcggcgcgcgttcggaagtggtggaaggcgtgatcgtcgaagaaaactcggtgatctcgatgggcgtctacctcggccaaagcaccaagatctacgaccgcgaaaccggcgaagtgacgtacggccgcattccggcgggctccgtggtggtggcgggcaacctgccgtcgaaggacggctcgcacagcctgtactgcgcggtgatcgtcaagaaggtcgacgccaagacacgtgcgaaggtcggcctgaacgagctgctgcgaggcgattga

SEQ ID NO: 233415 - DNA, 619 bp, Unknown
  Bacterial polypeptide expressing nucleotide sequence isolated from the Sargasso Sea
tatgaaagaattagaaaaaataataaatgatgcttggaaaaataaagaaaatattaatcaaaattctgatacttcaatattaaatgcagttaatcaaattattgaagatttagaccaaggaaaaatacgtgtagctgaaaaaataaattcaacatggataactcatcagcacataaaaaaagcaatcatgttaagttttagaatatataatatggaagctttatcagggccatatagctcttggtatgacaaagctcatctacttaaaggcaagactgcgggatggggaaaagatgaatttgaaaaagctggttttagaatggtgccaaactcacctgtaagaaaaggctcttacattgctaaaaatgttgttttgatgccatgctttattaatactggagcttatgttggatctggaacaatgatggatacattctcaagagcaggatcatgttgccaaattggttcaaactgccacatatcggctggcagtggtgttggtggggttttagaaccagcacaagctttgccgactattattgaggacaatgtttttttaggagcaatgtctgaagttgtcgaaggagttatagtaggtgaaggatctgtaattagtatg

SEQ ID NO: 233416 - DNA, 433 bp, Unknown
  Bacterial polypeptide expressing nucleotide sequence isolated from the Sargasso Sea
atgagcagcaccgatctcgaacaggcgatagaccaggcgtgggaagaccgcgatggaattacaccggacaccaagggcgaaacccgcgacgcaatcgatgcgacgctggaaggcttggatttaggcgatttgcgtgtcgccgaaaaaggcgtcgatgggtggaccgtcaatcagtggctaaaaaaagccgttttgctgtccttccggattttcgacatggcacccctgccaggcggaccgggcttcccgggcatcggcgacagcccctggtttgacaaggtgccgtccaaattcgccggctgggatgaagcgaagttccgcgccgctggtttccgcgcagtgcccaactgcacagtgcggcgctcagcttatttgggtccgggagtcgtacttatgcccagcttcgtaaatctgggcgcctatgtggattcag

SEQ ID NO: 233417 - DNA, 385 bp, Unknown
  Bacterial polypeptide expressing nucleotide sequence isolated from the Sargasso Sea
gatggatacatttagtagagctggaagttgttgtcaaattggagagaattgtcatatatctgctggatcaggaattggtggagttttagaacccgcgcaagcacttccaactataattgaggacaatgtctttgttggagcaatgtcagaagttgtagaaggtgttatagttggagagggtagtgttctttcaatgggatgttacattggtcaaagtacaaaaattgttaacagatcaaatggcgagatcacaaaaggtcgtgttccaccttattcagttatggtgcctggcactcataaagatctttatgctgttcatataataaaaactgtagacgcaaagacgaggtcaaagacatcaattaacgaccttttaagagactaa

SEQ ID NO: 233418 - DNA, 184 bp, Unknown
  Bacterial polypeptide expressing nucleotide sequence isolated from the Sargasso Sea
tgttaatagaaaaaccggtgaaataaattatggtaaaattcctctatattccgtggttgttccaggatccttgccggacaaaaataatccttcagcaccatcattatcatgtgctgtaataattaaacaagttgacgaaaaaacaagatcaaaaacttcaattaacgatctattaagagaataa

SEQ ID NO: 233419 - DNA, 388 bp, Unknown
  Bacterial polypeptide expressing nucleotide sequence isolated from the Sargasso Sea
gttggttctgtgctcagttggaaaaaattgtcacatttctggaggagcgggtattggaggagtgctagaaccaattcaggctggtccagtaattattgaagataattgttttattggtgctcgttctgaaatcgccgaaggtgttttagttgaggaaggtgcagttttatcgatgggagtttacattggtgcatcaacgaaaatagtggataggaattctggagaaatacattatggtaaagttcctgcttattcagttgtggttcctggaagcttacctaacaaattaaacccaaatggaccctcattatattgtgctgtaatagttaaaaaggttgatgaaaaaactagaagcaaaacgtctatcaatgatttactaagagattaa

SEQ ID NO: 233420 - DNA, 692 bp, Unknown
  Bacterial polypeptide expressing nucleotide sequence isolated from the Sargasso Sea
gatgagtcacagcgatcttgaaaacgccatcgacaacgcatgggaagatgcggcgtcgatcaacaccagcaccaaaggcgaggtccgcgatgcggtcgaagccgcgctcgacctgatggacagcggggtcgcccgcgtcgctgagaaaagcgccggcagctggcatgtcaaccagtggctcaagaaggcggtgctgctttcgttccgcctcaacgacatggagccaatggacggaccggcgaacgcaccctactgggataaggtcgcactcaagtcgcgcaactggacggcggaccgcttccgccaggccggcttccgctccgtgccgggatcggtcgtgcgccactccgcttatgtcgcgccgggcgcgatcctgatgccgagcttcgtcaacctcggcgcctatgtcgacagcggcacgatggtcgatacctgggcgacggtcggctcctgcgcgcagattggtaaggattgccacctctcgggtggcgtcggcatcggcggcgtgcttgagccgctgcaggcagatccagtgatcatcgaggacaactgctttatcggtgcacggtccgaagtcgccgaaggcgtcatcgtggaaaccggcgcggtgctcgccatgggctgctacatcggccagtcgaccaagatcatcgaccgcaattcgggcgagattcacatgggccgcatcccgg

SEQ ID NO: 233421 - DNA, 587 bp, Unknown
  Bacterial polypeptide expressing nucleotide sequence isolated from the Sargasso Sea
cacgtcttggtatgacaaagtgaaaggtaaaaccgttgattggaatgaagatcaatggaaagaagctggctaccgacatgttccaaatggtaccgttcgtgaaggatctttcataggtaaaggcgtggtgctgatgccatcttttgtaaatattggcgcttacattgatgaaggtacaatggttgatacatgggcaactgttggatcatgtgctcagattggtaaaaactgtcacttatcaggcggtgttggtattggtggtgttttagagccactacaagctaatccagtaataattgaagataattgttttgttggtgcaagagctgaagttgctgaaggtgtaattgtaagagaaggatcggttctttcgatgggcgtctacttgggtgcatcaacaaagataatcaatagatccacaggtgagacaagttacggagaagtccccgcttattccgtagtggtaccaggcaatttgccaaacgaggatccaaaaaaaccaggactgtattgtgttgtcattgtcaaaacggtagatgagaaaacaagatcgaaaacatcgataaacgatttgctcagagaataaa

SEQ ID NO: 233422 - DNA, 665 bp, Unknown
  Bacterial polypeptide expressing nucleotide sequence isolated from the Sargasso Sea
ttcaatcaatggctcaaaaaggcccgttttactgtcgttccggctgaacgccatgaccaccatctccacaggcccgaatgatgcaagctggtgggacaaagtaccgtccaaatttgaaggctgggacagcgcgcgctttaccgaggccgggtttcgcgccgtgccaaactgcgtggtgcgccgctcggcctatatcgcgccgggcgtgattttgatgccgagttttgtcaatctgggcgcctatgtcgacagcggcaccatggtcgatacatgggcgaccgtcggctcatgcgcgcaaatcggcaaaaatgttcacatttcaggcggggccggtattggcggcgtgctggaacctttgcaggccaatccggtgattgtggaagatggctgctttatcggcgcgcgctccgaggttgccgaaggcgtgattgtgcgcgagggcgcggttttgtcgatgggggttttcatcacctcttcaacaaaaattgtcgaccgcgcgacgggcgaaatccatcgcggcgaagttccgacctattcggttgtggtgcccggctcattgcccggcggccccgaccagcctgcactgtcttgcgccgttatcgtcaaaaccgtggatgcgcagacacgcgcaaaaacctccgtcaacgatattttgcgggactaat

SEQ ID NO: 233423 - DNA, 514 bp, Unknown
  Bacterial polypeptide expressing nucleotide sequence isolated from the Sargasso Sea
atgaatgaattaaaaaaaataattgaagatgcatttgaaaatagagatgaaattaacagtcaaacagaaggaaaaataagaaatagtgtaaatgaaactctaaaccaattggatgctggaaaaataagagtatgtgaaaaaaatagagatggttggatagttaatcaatggattaaaaaagcaattttattaagttttcgtttaaatgataatgagattattcaagcatcacacgccacatggtttgacaaagtgccaagtaagaccgctaactggtcaaaagaagatcatgaaaaagcaggatttcgatatgttcctgatgctgtagttcgtaaatctgcttatattgcaaaaggagttattttgatgccatcttttgtaaatttaggtgcatatgtggatgaaggcactatgattgacacttgggcgactgtaggatcatgtgcacaaattggaaaaaattgtcatatttcaggaggagctggtattggaggagttttagaaccattacagg

SEQ ID NO: 233424 - DNA, 540 bp, Unknown
  Bacterial polypeptide expressing nucleotide sequence isolated from the Sargasso Sea
aagaagatcataaaagagcaggatttagatatgttccaaacggcatgactcgaaaaggttgtttcgttgctcctggatgtattttaatgccatcatttttgaacataggatgctatgttgacagcggcacaatggtcgatacatggtcaactgttggatccggtgcgcaggttggaaaaaattgtcacctaagtggtggagttggaattgggggcgtcttggaacccgttcaagcaggaccaacaattattgaagataattgtttcattggagctagaagtgaaatcgttgagagtgtcattgtaagaaaaaatagtgttatatcaatgggggtttttataggagcatctacaaaaataatttacagagatactggtaaagtgatcatgggggaagttcctgagggtagtgttgttgtaccgggtacattaccttctaaaaaacctggcatgccctcattatattgtgcagtaataattaaaactgttgatgagaagactagatcaaaaactagccttaatgatctattaagagattaac

SEQ ID NO: 233425 - DNA, 568 bp, Unknown
  Bacterial polypeptide expressing nucleotide sequence isolated from the Sargasso Sea
gatggaaaaacccgaggatggagtgaaaaaaaaataaaggaagctggatttagatatgttccaaatggagtaataagaaaaggagcattcattgccaaaaatgttgtcttgatgccctcatttgtaaatgttggagcttatgtagatcaaggaagtatgatcgatacttgggcttcagtaggatcttgcgcacaaattggaaaaaattgtcacatatcaggtggagccggaattggtggagttttggaaccaatgcaggccaacccaacaataatcgaagatgattgttttattggagcacgagcagaaattgccgaaggtgttattatcggaaagggatcagtattatcaatgggagtttatataggagcctcaactagaatcattgatagagctactgggcaagttcattatggaaaagttccagactactctgttgttgtacctggatctatgccaagtaaaaataatccagatggaccgtcgttatactgtgtagtcattgttaaaaaagtagacgaaaagacaagaagcaaaacttcaatcaacgatttattgagagattaat

SEQ ID NO: 233426 - DNA, 337 bp, Unknown
  Bacterial polypeptide expressing nucleotide sequence isolated from the Sargasso Sea
gtaggtggagtattagaacccgcgcaagctttgccaactattatcgaagataatgtttttttaggcgcgatgtctgaagttgtagagggtgtaattgtaggagaaggatccgtactgagtatgggcatgtacataggacaatctacaaaaattgttaatagaaaaactggagaaattacttatggaaaaattcctccttattcagttgtggttccaggttcacttcctgataaaaataacccaactgcaccttcactatattgtgctgtaataattaagcaagtagatgaaaagacaagatctaaaacttctattaacgatctcttgagagaatagc

SEQ ID NO: 233427 - DNA, 740 bp, Unknown
  Bacterial polypeptide expressing nucleotide sequence isolated from the Sargasso Sea
aatgaacttaaaagagcttgaagaaatcataaataaagcattcgaagataaaaaaaacgtgtctgataaatcagactcaaaaattttaaatgccattaatgaaacaatagatttgactgataaaggaaccataagagttgcaaataaaaaaaatggtatttggtcagtaaaccaatgggttaaaaaagcaatcttattaagctttagaataaataaaatgacaatgtcaaaagggccttatactacttggtatgataaagtctcaggtaaatccgttaattggaatgaaaatgattggaagaaagcaggttatagacatgttccaaacggtgttgttagaaaagggtcatttattgctaagggtgtagtcttaatgccatgttttgtaaatttaggagcttatgtggacgaaggaactatgattgatacttgggcgtcagttggatcgtgtgctcaagtaggaaaaaattgtcatgtttctggcggagctggtattggaggtgttcttgagccactgcaagcaggaccagtaataattgaagataattgtttcataggtgccagatcagaaatagctgaaggagtattagtagaagaaggtgctgttatttcaatgggtgtttatattggtgcctctactaaaatagtagatagagaaactggaaaggttacatatggaaaagttccagcgtattcagttgtggtacccggatcaatgccaaacaaaaaaaatccagatg

SEQ ID NO: 233428 - DNA, 594 bp, Unknown
  Bacterial polypeptide expressing nucleotide sequence isolated from the Sargasso Sea
gtccttatacaagctggtatgataaggttagaggaaagtctgttgattgggatgaagcaaaatggaaagaagcaggatatcgacatgtaccaaatggtactgtaagacagggttcatttattggaagaggtgttgttcttatgccttgttttgtaaacattggtgcctatgttgatgaaggcacaatggttgatacctgggcaacagttggttcatgcgcacaaataggaaagaattgtcatttatcaggtggggttggaattggtggagttttagaaccactacaagccaatccagtaatcattgaggataattgttttgttggagcaagagctgaagtagctgagggtgttattgttagggaaggaactgtactctctatgggcgtttacctcggagcatcaacaaagattattaatagggctactggtgaaatttcatacggtgaagttccaccttattcagtagtggttcccggaactctacccaacgaggatccaaaaaaacccagtttatattgtgttgtcattgttaaaacagttgatgaaaatacaagaaaaaaaacatcaattaatgatcttttaagagattaag

SEQ ID NO: 233429 - DNA, 275 bp, Unknown
  Bacterial polypeptide expressing nucleotide sequence isolated from the Sargasso Sea
aggagcaatgtctgaagtggtagaaggtgtaatagtcggagaaggctctgttctaagtatgggaatttatattggacaatcaaccaaaattgttaatagaaaaactggcgaaataacctacggaaaaattccaccgtattcagtggtagttccaggatccttgccagataaaaacaatccacaagcaccatccttatattgtgcggtaataattaaacaagttgatgaaaaaacaagatcaaaaacgtcagttaatgatcttttaagagaataaa

SEQ ID NO: 233430 - DNA, 514 bp, Unknown
  Bacterial polypeptide expressing nucleotide sequence isolated from the Sargasso Sea
atgaatataaatttttttgaaaaaataattaatgaggcttggaataacaaaagtaaggttaattctaaatctgataagaaaataataaacgctattaataaaactatagatttattagatactggaaaaatacgtgttgctgaaaaaaaaggtaatgattggtcagttaaccaatggattaaaaaagcaattttactaagtttcagagttaataaaatgaaaatttctaaagggccctatgctgcttggtatgacaaagtggaagggaaaactcataaatggaatgaaaaaagattcattaaagagggttttagatatgttccgaatggagttgtaagaaaaggagcttacattgctaagaatgttgttttgatgccttcatttgtaaacattggggcttatgtagatcaaggaagcatgattgatacatgggcatctgtcggatcttgtgctcaaatcggaaaaaattgtcatatatcaggcggagctggaattggtggagttttagaaccta

SEQ ID NO: 233431 - DNA, 535 bp, Unknown
  Bacterial polypeptide expressing nucleotide sequence isolated from the Sargasso Sea
tcaatggaaagcagctggttatcggcacgtgcccaatgggacagtacgagagggttcatttattggcaagggcgttgtcttgatgccttcatttgtaaacattggtgcctatattgacgaaggaactatggttgatacatgggcaacggtaggttcatgcgctcagatcggtaagaattgtcatctttctgggggggttggcattggcggtgtccttgaacctctacaagcaaatccagtaataattgaagataattgttttgtaggcgctcgagcagaagttgcagagggtgtaattgtgcgagaaggatcagttttatctatgggtgtttatctcggcgcttccacaaaaatagtaaatcgtgtaactggagagatactgtatggtgaagttcctgcatactctgtcgttgttcctgggacaatgccaaatgaagatccaacaaaaccaagtctttattgtgtagtcatcgttaagacagttgatgaaaatacaagaaaaaaaacctccattaatgatctattaagagagtag

SEQ ID NO: 233432 - DNA, 347 bp, Unknown
  Bacterial polypeptide expressing nucleotide sequence isolated from the Sargasso Sea
tggatcaggtattggtggagttttagaaccagctcaagctcttccaactataattgaagataacgtttttgttggagcaatgtctgaggttgttgaaggtgtaatagtcggagaaggatcagttttaagtatgggaatgtatgtaggtcaatcaacaaaaattgttaatagaaagactggtgaaatatcttatggaaaaattcctccttattctgtagttgttcctggatctttacctgataagaataatccaactgcaccatcactaagttgtgcggtaataattaaacaagttgatgaaaaaactagatcaaaaacatcaattaatgatcttttaagagagtaaa

SEQ ID NO: 233433 - DNA, 535 bp, Unknown
  Bacterial polypeptide expressing nucleotide sequence isolated from the Sargasso Sea
ttggaaaaaagcaggttatagacatgttccaaatggtgttgttagaaaaggatcctttattggaaaaggagtggtattgatgccttgttttgtaaatcttggcgcatatgtagatgaaggaacaatgatcgatacttgggcttcagtcggatcctgtgctcaagttggaaaaaactgtcatgtctctggtggagcgggtattggtggagttctcgaacctttgcaagctggaccagttattattgaggataattgttttataggagctcgatcggaaattgccgaaggtgtactagtcgaagaaggagcggtaatctcaatgggagtttatattggagcttctacaaaaattgttgatagagaaactggaaaaattacctatggaaaagttccagcttattctgtcgtagtgccaggttcaataccaaataagaaaaatcctgaaggaccatcattatattgtgctgtaattgttaaaaaagttgacgaaaaaactagaagcaaaacgtcaattaatgatttattaagagattaa

SEQ ID NO: 233434 - DNA, 751 bp, Unknown
  Bacterial polypeptide expressing nucleotide sequence isolated from the Sargasso Sea
tcaaaattccgataaatctttaaaaaacgcaataaatcaagttattgaagatttagatagtggaaagtctagagttgcagaaaagattaatggtgagtggaaaactcatcagcatcttaaaaaagctattatgttaagttttagaatttatccaatggataatctaaacggtccatatagtagctggtacgacaaattacatctgcttaaaggtaaaacagcaggatggtcaaaagaagatcatgaaaaagctgggtttaggattgtgcctaattcgccggtgagaaaaggatcattcattggtaagaatgctgtacttatgccatgctatgtgaatataggagcttacattgatgaaggtaccatgttggatacattttcccgtgctggttcatgttctcagataggaaaaaattgccatatatctgctggttcaggaattggaggggtattggaacctgctcaagcattacctactattattgaagataatgttttcattggtgcaatgtccgaaatcgtagaaggagttatagtagaagaaggaagtgttctttcaatgggatgttacattggtcaaagtacaaaaattattaatagatctagtggagaaattatgaagggtcgtattccttcttactcggttgtagtgcccggcacttacaaagatctttacgctgtctatataattaaaactgttgatgcaaaaactagatcgaaaacttcgattaatgatcttttaagagactaa

SEQ ID NO: 233435 - DNA, 673 bp, Unknown
  Bacterial polypeptide expressing nucleotide sequence isolated from the Sargasso Sea
tatgaaagatattgaaaatataataaagaaggcttttgaagatcgagaaaagataaataaagatacacatggtgagattagagaagcggtagaacaaactctaaatcaactagataatggatctataagagtttgccagaaaattgaaggagagtggatagtaaatcaatggatcaaaaaagctattcttctaagttttagattaagtgataacgaaataataaaatcttcacacgcaacctggtttgataaagttgaaagcaaaacagcaaattggacaaaagacgatcatttaaaggcgggctttagatatgttcctgatgcagttgtaagaaaatcagcttatattgcgaagggtgttgttttgatgccatcgtttgtgaacttaggtgcgtacgttgatgaagggactatgattgatacgtgggctacagttggttcatgtgcacaaattggaaaaaattgtcatatatctggaggagcgggtattggcggagtattagaacctttacaagcaaatcctgttattattgaagataattgttttataggggcaagaagtgaagttgctgaaggcgttataattggagagggttcagttttatcgatgggtgtttttataggagcatctacaaaaatagtagatcgtgctacaggagatattcatatggaa

SEQ ID NO: 233436 - DNA, 278 bp, Unknown
  Bacterial polypeptide expressing nucleotide sequence isolated from the Sargasso Sea
ggcaagaagtgaagttgctgaaggagtcatagttggagaaggagctgtattatcaatgggggtttttataggagcgtctacaaaaatagttgaccgtgaaactggagaaattcatatgggtaaagttccaccatattcagttgttgtacctggaactcttccaggtaaaaaaaatgatagtgacttaaacccttcactatactgtgttgtgatagttaaaaaagttgatgaaagaactcgaagaaaaacttcaattaatgatttgttgagagattaat

SEQ ID NO: 233437 - DNA, 461 bp, Unknown
  Bacterial polypeptide expressing nucleotide sequence isolated from the Sargasso Sea
tctaatgccatcttttattaatgtaggagcctacgttgacgagggaacaatgatagatacttgggcatcagttggatcgtgtgcgcaagttggaaaaaattgtcatatttctggaggtgctggtatcggtggcgtcttagaaccaatgcaagcaaatccaactatcgtagaggacaattgttttctaggtgctagatctgaaatagcagagggtgtgattattgaaaaaggatcggtattatcaatgggagtttatataggtgcatctacaagaatcgttgatcgtgcaactggagagattcattatggaaaagttcctgcgtattcagtggttataccaggttccatgccaagtaaaaataatccgaaagggccctcgttatattgtgtagtaattgtaaaaaaagtagacgaaaaaactcgaagtaaaacgtctataaacgatttattaagagactaaa

SEQ ID NO: 233438 - DNA, 469 bp, Unknown
  Bacterial polypeptide expressing nucleotide sequence isolated from the Sargasso Sea
aaatgcagtcttaatgccatgctatgttaatattggagcatacattgactctggtacaatgattgatacatttgcaagagctggtagttgcagtcaaattggaaaaaattgtcatatatcagctgggagtggcgttggtggagtacttgaaccagcgcaggcattaccaacaatcattgaggataatgtttttttaggagctatgtcagaggttgttgaaggtgttatcgtaggtgaaggatccgtattaagcatgggaatgtatattggtcaatcaacaaaaattgttaacagatcaactggtgaaatatcttatggaaaaattccaccctattctgttgttgtgccaggtactttaccagacaaaaaaaatccatctggtccatcgcttagctgtgcagtaataatcaagcaagtagacgaaaaaactagatcaaaaacttcaataaacgatcttttaagagaataa

SEQ ID NO: 233439 - DNA, 599 bp, Unknown
  Bacterial polypeptide expressing nucleotide sequence isolated from the Sargasso Sea
gggtccatattcaacttggtacgacaaagttgaagggaagactcaaggatggagtgaagaaaaaataaagaaagctggattcagatatgtgccaaatggagtaataagaaaaggctccttcattgcgaaaaatgttgtgttgatgccatcatttgtaaatattggagcttacgtagatgaaggaagcatgattgatacttgggcgtctgtaggatcttgtgcacaagttggaaaaaattgtcatatctcaggtggagcaggaattggtggggttttagagcctatgcaagctagcccaacaatagtagaggataattgctttgttggagcaagatcggaaattgctgagggtgttattgtggaaaaaggatccgtattatctatgggagtttacataggtgcctcgactagaattgttgatagatctacaggcaaaattcattacggtaaagttcctgcatactctgtagttgtgcctgggtctatgccaagtaaaaaaaatcctgatggaccatcgttatattgtgtagtaattgttaaaaaagtagaccaaaagactagaagtaaaacatcaatcaacgatttattaagagactaat

SEQ ID NO: 233440 - DNA, 475 bp, Unknown
  Bacterial polypeptide expressing nucleotide sequence isolated from the Sargasso Sea
tcggaaaaaatgttgtcttgatgccttcatttttaatattggagcatacgttgatgaaggaagtatgattgatacttgggcttctgtgggatcctgtgcacaagttggaaaaaattgtcatatatcaggcggggctggtattggtggtgttttagagcctatgcaagcgaatccaacaatagttgaggataattgttttgtcggagcaagagcagaaatagctgaaggagtcattgttgaaaaaggatctgtactatcaatgggagtttatattggagcgtcaactaggattgttgatagatccactggtcaaattaattacggcaaagttcctgcatattctgttgtggtgcccggctctatgccaagtaaaaacaatcctaaaggaccatcgttgtattgtgtggtcattgttaaaaaagtagacgaaaaaacaagaagtaaaacttctatcaacgatttattgagagactaa

SEQ ID NO: 233441 - DNA, 808 bp, Unknown
  Bacterial polypeptide expressing nucleotide sequence isolated from the Sargasso Sea
atggattcaattattgaaaatgcatggactaatcgaactcttttaaaggaaaaagagacgcaaaacaaaattagagaagtaattgaaaatctagataaaggaaaagtgagagttgcagagaaaaaaggtgacaaatggattacacatgagtggataaaaaaagctgttattctttattttgctattcaaaaaatggatacaacaaaagctggaccactagaatttcatgataaaataaatttaaaaaataattattcggaaagaaatattagggtggttcctcatgctgtagctagatatggatcatatatttcagagggtgttattttgatgccaagctttgtaaatattggtgcatatgttgataaagggactatggtggatacttgggcaactgttggaagttgcgctcagataggtaaaaatgttcatttaagcggtggagtaggaataggtggggttttagaacctttacaagcatctccagttataatagaggataatgttttcgttggttcaagatgcattgtagtggaaggtgtacatgtcaaaaaagaagccgttttaggagctaatgtggtccttacgaaatcaacaaaaatatttgatgtttcaaaaaaagaggcagttgaaataagaggttttattccagagagatcagttgtaattccggggagttataacaaaaaatttaacgctggagaatttaatgtcccctgtgcattaataattggggaaagaaaagaaagtactgataaaaaaacttctctaaatgatgtacttagggaacacggggtatcagtgtaat

SEQ ID NO: 233442 - DNA, 769 bp, Unknown
  Bacterial polypeptide expressing nucleotide sequence isolated from the Sargasso Sea
tctgacaaatctatcaaagatgctgtcgaccaaattattgaagatttagatagtggcaactcaagagtagcagaaaaaattaatggtgaatgggtaacacatcaacacttaaaaaaagctataatgttaagttttagaatttatcctatggaaaatttaaatggcccttacagcagttggtacgataaagctcacttgcttaaaggcaaaacagccggatggacaaaagtcgatcatgaaaaagctggttttagaatggttcctaattcgccagttagaaaaggatcttttgttggaaaaaatgcagtactaatgccatgctacgtaaacattggcgcttacattgatgaaggcactatgattgatacatttgcaagagctggaagctgttgtcaaattggaaaaaattgtcatatatctgcgggaagtggtgttggtggtgtacttgaaccagcacaggcactaccaacaattattgaagataacgtatttttgggagctatgtctgaagttgtagagggaataattgtaggagaaggatctgtattaagtatggggatgtacattggtcaatcaacaaaaattgtgaatagatcaacaggagaaataacttatggaaaagttccaccttattcagttgtggtaccaggtacccttccagataaaaaaaatccatctgcaccatcactaagttgcgcggtgataattaagcaagtagatgaaaaaactagatcgaaaacttcaattaacgatcttttaagagaataga

SEQ ID NO: 233443 - DNA, 400 bp, Unknown
  Bacterial polypeptide expressing nucleotide sequence isolated from the Sargasso Sea
tgggcatccgttggctcatgtgctcagggttggaaaaaattgtcatatatctggtggtgcaggtataggaggtgtactagaaccacttcaagctggtcctgttataattgaagataattgttttattggtgctagatctgaaattgctgaaggtgttttagtggaagaaggcgctgtgttatcaatgggcgtttatattggtgcgtctacaaaaatagtagatagaaactctggagaaatacattatggtaaagttcctgcttattcggttgtggttcccggaagcttacctaacaaatctaaccctaatggaccctcattgtactgcgcagttatagttaaaaaagttgatgaaaaaactagaagcaaaacctctataaatgacttacttagagactaa

SEQ ID NO: 233444 - DNA, 572 bp, Unknown
  Bacterial polypeptide expressing nucleotide sequence isolated from the Sargasso Sea
tagttggtatgacaaagcacatttgttaaaaggaaaaacagctggctggacaaaagaagatcatgaaagagcaggttttaggatggttccaaactcacctgttagaaaaggatcattcgtaggaaaagatgctgttcttatgccatgttatgtaaacattggttcttacattggggctaaaacgatgatggatacatttagtcgtgctggtagctgttgccagattggaaaaaattgccatatatctgctggatcaggaattggaggcgtattggaacccgcgcaagcactaccaactatcattgaagataatgtttttgttggagctatgtctgaggttgttgagggagttattgttgaagaaggaagtgttctttcaatgggatgctacattgggcaaagtacaaaaattataaacagatcaaatggtgatattacaaaaggtcgtataccaccttattcagttgtagtaccagggacgcacaaagatctttatgctgttcatattataaaaactgttgactcaaaaactaggtcaaagacatcaattaatgatcttttaagagattaaa

SEQ ID NO: 233445 - DNA, 711 bp, Unknown
  Bacterial polypeptide expressing nucleotide sequence isolated from the Sargasso Sea
ttaatactggagaattaagagttgctgagaaagttaataatgagtgggtagttaatcaatggattaaaaaagcgattttagtttcatttaaacttagagaaaataaaattacagaaacaggttacactaagttttatgataaattaacttcgaaattcaaaaatattgatgaaaattatttgaaagaaaataatatcagagtggtgccacaagcaattgctcgcgaagggacttatgttggtaaaaatgtcgtattaatgccctcttatatgaatattggtgcatatgtagatgacggaacaatggttgatacatgggcaacagttggttcttgtgctcagattgggaagaatgttcatttgtctggtggtgttggaattggtggggtcctagaaccattgcaggctaatcctactataattgaagataattgttttattggcgctcgatctgaaattgttgaaggtgtaatagtaaaaaagaactctgtgatatcaatgggggtttatattggacaaagtactaaaatctatgatagagaatctggaaaggtaacatatgggactataccagagggatcagtggttgtctcaggatcgcttccatcaaaagatcaaaaatatagtttgtactgtgcagttatagtgaaaaaggttgatgaaaaaactagatcaaaagtaggaatcaatgaacttctcagagaatcttaga

SEQ ID NO: 233446 - DNA, 400 bp, Unknown
  Bacterial polypeptide expressing nucleotide sequence isolated from the Sargasso Sea
tttgcaagagctggtagttgttctcaaattggaaaaaattgtcatatctctgcaggtagtggagttggaggagttttggagcctgcacaagcattaccaacaattattgaggacaatgtttttttaggagcaatgtctgaggtagtagagggagtgatagttggcgaaggttcagttttaagtatgggaatgtatattggacaatcaacaaaaattgttaacaggaaaacaggtgaaataagttatggtaaaattccaccatattcggttgttgtgccaggttctctaccagataaaaataattcaagcgctccatcgttatattgcgcggtaataatcaaacaagtagatgaaaaaacaagatcaaagacttctataaacgatcttttaagagaataaa

SEQ ID NO: 233447 - DNA, 483 bp, Unknown
  Bacterial polypeptide expressing nucleotide sequence isolated from the Sargasso Sea
ctaaaggtgtaatcttaatgccatcttttgtaaatttaggagcttatgttgatgaaggaactatgattgatacttgggcaactgtaggttcttgtgcacaaattggcaaaaattgtcatatatctggtggtgcaggcattggaggggttttagaacctcttcaagccaatccggttattattgaagataattgttttataggggcgagaagtgaagtagctgaaggagttcttgttggagaaggttctgtattatcgatgggtgtgtttattggtgcatcaacaaaaattattgatagagcaagtggagaaattcatatggggaaagtgcctccatactccgttatagtaccaggctcaaatccaggaaaaaaactatcagatgggagcgaaggtccaggattgtattgtgcagtaatagttaaaagagttgatgaaagaacgagatctaaaacctcaattaatgatctgctacgtgattaat

SEQ ID NO: 233448 - DNA, 797 bp, Unknown
  Bacterial polypeptide expressing nucleotide sequence isolated from the Sargasso Sea
ggaaaataaaggccaagtaaatcaaaattcagatcagtcattaaaggacgccattaatcaagtaatcagtgatttggatagtggaaaatcaagggttgctgaaaagattaatggtgaatggattactcatcaacatcttaaaaaagctatcatgttaagtttcagaatttatccaatggaaaatttaaacggcccatacagtagttggtatgacaaagctcatttattaaaaggaaaaaccgcaggctggacaaaggaacagcatgaagcagctggttttcgtatgacacctaatagtcccgttcgtccagggtcttttattggaaagaatgctgttttaatgccttgttatataaacataggtgcatatgtggatgaaggaactatgttagacactttttcaagggctgggtcatgctctcaaataggaaaaaattgtcatatctctgcaggctcaggaattggtggagttttggaacctgctcaagcattgccaacaattattgaagataatgtttttgttggcgcaatgtctgaagtagtagaaggtgtaatagttggagaaggctctgttctgagtatgggaatgtatattggacaatcaacaaaaattgttaatagaaaaactggtgaaataacttatggaaaaattcctccttattcagtggtagttccaggatccttgccagacaaaaataatccacaagcgccatctttgtattgtgcagtaataattaaacaagttgatgaaaagacaagatcaaaaacatcagttaacgatcttttaagagagtaaa

SEQ ID NO: 233449 - DNA, 628 bp, Unknown
  Bacterial polypeptide expressing nucleotide sequence isolated from the Sargasso Sea
tatgaaagatcttgaaaaaataattaatagtgcatgggaaaataaagaaaatatcgatcaaaattcagatcaagatttaaaatattcaataaatgaaataattaataaattagactctggaaaagttagggtagctgaaaaaattgatggaaaatgggtaacacatcaatatgtaaaaaaagcaattatgttaagctttagaattcaccctatgcaaaatttaagtggcccttatagtagttggtatgacaaagaacacctccttaaaggaaaaacagcaggatggactaaagaagatcatgaaaaggccgggtttagaatggttcccaactcacctgttagaaaaggttcatacgttggaaaaaatgcagttttaatgccatgttatgttaatattggtgcgtatatagatgaaggtacaatgatagatacctttgctagggctggaagttgttgtcagattggaaaaaattgtcatatttcagctggaagtggtgtagggggtgttttagagcctgcacaagcattacccacaataattgaagataatgtatttttaggagcaatgtcagaagttgtggaaggagtaattgttggggaaggttcggtattaagcatgggtatgttt

SEQ ID NO: 233450 - DNA, 613 bp, Unknown
  Bacterial polypeptide expressing nucleotide sequence isolated from the Sargasso Sea
ttaaatggtccatacagtagctggtatgacaaagctcatctgcttaaaggaaaaacagctggatggacaaaagaagatcatgaaaaggctggttttagaatggtacctaattcaccagtaagaaagggatcatttataggaaaaaatgcagttttaatgccttgttatgtaaatatcggagcatacattgatgaagggacaatgatggatacatttagtcgtgctggaagttgttgtcagattgggaaaaattgtcatatctcagctgggactggagttggaggtgtattagagcctgctcaggcattaccaacaataattgaagataatgttttcttaggcgcaatgtctgaagtggtagaaggtgtgattattggagaaggctctgttctgagtatgggaatgtatattggacaatcaacaaaaattgttaatagaaaaactggtgaaataacttatggaaaaattccaccgtattcagtagtagttccaggatccttgccagataaaaacaatccacaagcaccatctttatattgtgctgtgataattaaacaagttgatgaaaagacaagatcaaaaacatcagttaatgatcttttaagagaataaa

SEQ ID NO: 233451 - DNA, 694 bp, Unknown
  Bacterial polypeptide expressing nucleotide sequence isolated from the Sargasso Sea
ggttgcgaacagacaatcagatggaaaatgggtaaccaatgaaactgcaaaaaaagcaattctattatcttttagaactaataaaatgaccaccacgtcgggaccatattcagtatggtatgataaagtaggatttaaaactgctggatggactgaagaagatcataagaaagcgggatttagatatgttccgaacggcatgacacgcaaaggatgctacgtagctcctggcgccgttttgatgccttgttttattaatatcggagcatatgttggagaaggcacgatggtcgatacttggagtacggttggatcgggagctcagattggatctaatgtacacttatctggaggagttggaattggaggcgtcttggagcccgttcaggctgctcctacaataatagaagacaattgctttatcggtgctcgtgccgaggtagcggaaggcgtaattgttagaaaaaatagtgttcttgcaactggtgttttcttgactgcatcgacccgtattattaatagagatacgaatgaaataatgattggcgaagtgcctgagggaagtgtagtagttcctggttccctaccttcaaaaaaacctggtggtcccagcttatattgtgctgtaatcgtcaagcaggtagatgagcgtacaagatcaaagacatctattaatgaattattgagatcttaa

SEQ ID NO: 233452 - DNA, 271 bp, Unknown
  Bacterial polypeptide expressing nucleotide sequence isolated from the Sargasso Sea
gccatgtctgaagtagttgagggtgtaatcgttggagagggatcagttttaagcatgggtatgttaattactcaatcaacaaaaatagttaatagatcaactggagagattagttatggaaaaattcctccttattctgttgttgtgcctggttctctgcctgataaaaaaaatccattagctccatcattaagttgtgtagtaataattaaacaagttgacgagaaaacaagatctaagacttcaataaatgatcttttgagggattaaa

SEQ ID NO: 233453 - DNA, 550 bp, Unknown
  Bacterial polypeptide expressing nucleotide sequence isolated from the Sargasso Sea
gggggtaaagatgatttccagaaagctggatttagaatggtaccaaattcacctgtaagaaaaggttcttatattgctaataatgttgttttgatgccatgctttataaacattggtgcctatgttggttctgggacaatgatggatacattttcaagagctggatcatgctgccaaatcggctcaaactgccatatatcagcaggaagtggcgttggtggggtgttagaaccagcacaagctctacctaccattattgaagataatgtttttttaggagcaatgtctgaagttgttgagggtgttattgtaggtgaaggatcagtaattagtatgggaatgtatataggtcaatcaacaaaaattgttaatagaaaaactggagaaatagtttacggaaaaattccaccttattcagtattagtacctggatcattaccagataaaaataatccaagtgcaccgtcactaagttgcgcagtaataattaaacaagttgatgaaaaaacaagatcaaaaacatccattaatgatttgttgcgtgattaat

SEQ ID NO: 233454 - DNA, 637 bp, Unknown
  Bacterial polypeptide expressing nucleotide sequence isolated from the Sargasso Sea
gttcttatttcattccgaataaatgataacaaaattttaaaaggaccttacacctcttggtatgacaaagtgaaaggtaaaactgttgattggaatgaagatcaatggaaagaagctggctaccgacatgttccaaatggtaccgttcgtgagggatcattcataggtaaaggcgtggtgctgatgccatcttttgtaaatattggtgcctacattgatgaaggaacgatggttgatacatgggcaactgttggctcatgtgctcagattggaaaaaactgtcacttatctggcggtgttggtattggaggcgttttagagccactacaagcaaatccagtaataattgaagacaattgttttgttggtgcaagagctgaggttgctgagggtgtgattgttagagaaggatcagttctttcaatgggagtatatttaggggcgtcaacaaaaattgtgaacaggtccacaggtggaattagttatggtgaagtacccgcttattctgtagtggttccaggaagccttccaaatgaagaccctaaaaagccgagtttatattgtgttgtaatcgttaaaacagttgatgaaaacacaagaaagaaaacatcgataaacgatctactcagagaataaa

SEQ ID NO: 233455 - DNA, 325 bp, Unknown
  Bacterial polypeptide expressing nucleotide sequence isolated from the Sargasso Sea
tttagaacctgcacaagctttacctacgataatcgaagataatgttttccttggagctatgtcagaagttgttgagggtgtgattgttggggaaggttctgttttaagtatgggtatgtatataggtcaatcaactaaaatagtcgatcgaaagaccggtaatattacttttggtaaaattccgccgtactcagttgttgtcccaggttcattgccagacaaaaataattcggctgcaccatcgttgtactgtgctgtaataattaagcaggttgatgaaaaaacaaggtcaaaaacttctataaacgaccttttacgagactaa

SEQ ID NO: 233456 - DNA, 811 bp, Unknown
  Bacterial polypeptide expressing nucleotide sequence isolated from the Sargasso Sea
atgagtttagataaactagaaaaaataataaacgaaaactttgaaaaaaaagaaaaagtaggtccaagatcagataaaaaactaataaaagctataaatgaaactattaatttagttgatgaaggaaaaataagagtagctaataaacaaaatggtatttgggtggtcaatcaatggattaaaaaagctattttattgagttttagaattaataatatgaagatgatgaaaggcccttacactacttggtatgacaaagtacctgggaagacggttaattggaaagagaaagattggaaaaaagcaggttaccgtcatgtccctaatggggttgtaagaaaaggagcatacatcgctaaaaatgtagttttaatgcctagcttcataaatctcggggcttacgtggatgaaggttcaatgatagatacttgggcgtcagtaggttcgtgtgcgcaagttggaaaaaattgtcatatttctggaggtgcgggtattggaggtgtcttagaaccacttcaggctggtcccgtaatcatcgaagataattgttttattggtgctagatctgaaatcgccgagggagttttagtagaagaaggcgcggtattatcaatgggagtttatattggtgcatcaacaaaaatagtagatagaaactctgggaaaatatattatggtaaagttccagcatattcagttgtagttcctggaagcttacctaacaagtctaacccaaatggcccttcattgtattgtgcagttatagttaaaaaagttgatgaaaaaactagaagcaaaacctctataaacg

SEQ ID NO: 233457 - DNA, 145 bp, Unknown
  Bacterial polypeptide expressing nucleotide sequence isolated from the Sargasso Sea
tccgccatactcagttgttgtcccaggttcattgccagataaaaataattcggctgcaccttcgttgtactgtgctgtaataattaagcaggttgatgaaaaaacaaggtcaaaaacttctataaacgaccttttacgagactga

SEQ ID NO: 233458 - DNA, 651 bp, Unknown
  Bacterial polypeptide expressing nucleotide sequence isolated from the Sargasso Sea
agaaggcggtactgctctacttccgcatcaatgacaacggcatcatcaagggcgacgacgcccagtactacgacaaggttcccctcaagttctccgactacagcgccgagcagttcaaggctgccggtgtgcgcgtggtgccgccggccaccgcccgcaaaggctccttcatcgcccccaataccgtgctgatgccctcctacgtcaacatcggcgccttcgtcgatgaaggcaccatggtcgacacctgggccaccgtgggctcctgcgcccagatcggcaagaacgtgcacctctccggcggcgtcggcatcggcggcgtactggagccgctgcaggccaacccgaccatcatcgaagacaactgcttcatcggtgcccgttccgaagtggtggaaggggtgatcgtggaagagggctccgtcatctccatgggcgtcttcatcggccagtccacccgcatctatgaccgtgagaccggcgagatccactacggccgcgtcccggccggctcagtggtcgtctccggctccctgccctccaagtgcggcaagtacagcctgtacgccgccgtcatcgtcaagaaggtagatgccaagacccgcgccaaggtcggcatcaacgccctgctgcgctccatcgacgagtaag

SEQ ID NO: 233459 - DNA, 697 bp, Unknown
  Bacterial polypeptide expressing nucleotide sequence isolated from the Sargasso Sea
tatgagtattgaaaatattataaatgaagcttgggaaaataaagaccaagtaaatcaaaattcagataaatctttgaagaatgctataaatcaaattattgatgatttagacagtggaaaagcaagagtggctgaaaaaatcgatggtgaatgggttactcatcaacatcttaaaaaagctatcatgttaagctttagaatgtatccaatggaaaacttaaatggtccttatagtagctggtatgacaaagctcatttacttaaagggaaaacagctggatggacaaaagaagatcatgaaaaagctggttttagaatggtacctaattcacctgtaagaaaaggatcgtttgtaggaaagaatgcggttttgatgccgtgttatgtaaatattggagcatacattgatgaaggcactatgatggatacatttagtcgtgcaggaagttgttgccagattggaaaaaattgtcatatatcagctggtactggagttggaggtgtattagaacctgctcaagcattaccaacaattattgaagataatgttttcttaggagcaatgtccgaagtagtagaaggtgtaatagttggagaaggctctgttctaagtatgggaatgtatattggacaatcaacaaaaattgttaatagaaaaactggtgaaataacttatggaaaaattccgccttactca

SEQ ID NO: 233460 - DNA, 465 bp, Unknown
  Bacterial polypeptide expressing nucleotide sequence isolated from the Sargasso Sea
tgaatattggtgcttatgtagacgaaggaactatggttgatacatgggcaacagtaggaagttgtgctcaaattggtaaaaacgttcatctttctggtggtgttggaattggtggagttttagaacctttacaagctgctccagtaatcattgaagatggtgcttttattggttcaagatgtattgtggttgaaggtgttcgtgtagaaaaggaagctgttttaggagccaatgtagttttaacaggttctacaaaaattattgatgtaactggtgatgaacctattgaatataaaggagttgttcctgcaagatgcgttgtaattccaggaagttatacaaaaaaattcgctgctggtgaatatcaagttccttgtgcattaatcattggaaaacgcaaaccttcaactgatttaaaaacttcattgaacgatgctttacgtgaatatgatgtagcagtttaag

SEQ ID NO: 233461 - DNA, 394 bp, Unknown
  Bacterial polypeptide expressing nucleotide sequence isolated from the Sargasso Sea
cgtgcaggtagttgctgtcagaattggaaaaaattgtcatatttcagctggaactggtattggtggagttttagaaccagcacaagcacttccgactattattgaagataatgtttttgtaggtgctatgtcagaagttgtggaaggggtaatagttggtgaaggttcagtactaagtatgggtatgtatattggccaatcaactaaaatcgttaatagaaaaactggtgaagtaactcacggtaaaatacctccatactcagtcgttgttcctggatcattaccagacaaaaataatcctgctgcaccctcgttatattgtgcagtgatcatcaaacaagttgatgaaaaaacaagatctaaaacatcagtgaacgatcttttaagagattaa

SEQ ID NO: 233462 - DNA, 474 bp, Unknown
  Bacterial polypeptide expressing nucleotide sequence isolated from the Sargasso Sea
tagataaaaacgtagttttgatgccatcttttgtaaatattggtgcatacgttggtgagggaacaatggttgatacatgggcgaccgtaggatcatgtgctcagataggtgcaaatgtccatttatcaggtggcgtaggtattggcggtgttttagagcctttgcaagcctcaccgacgataattgaagataattgtttcataggagctaggtcagaagtagtggaaggagtcatagtcaggagaaattcagttatttctatgggagtctttataggaaaaagtacaaagatatatgacagagaaactcgttcggtttcttacggtgaagtaccggaaggatctgttgtagtctcaggttcgctcccatcaaaagatggtacatgcaacttatattgtgcagtaattgtaaaaaaagtagacgcaaagactttaagtaaagttggtatcaatgagcttttgcgagaagcctaat

SEQ ID NO: 233463 - DNA, 832 bp, Unknown
  Bacterial polypeptide expressing nucleotide sequence isolated from the Sargasso Sea
tatgaacgatatagaaaaaatcataaatgatgcttgggaaaacaaagaccaggttaatcaaaactctgacaaatctataaaagattcaataaaccaagtaattcaggatttggatagtggcaaatcaagagtagcagaaaaaattaatggtgaatgggtaactcatcaacacttaaaaaaagctattatgctaagttttagaatccatggaatggaaactctttcaggaccatactcaagctggagagataagagtaatattttaaaaggaaaaacagcaggttggggagacaaagaatttgaacaagctggttttaggatggtgccaaattctccagtgagaaaaggatcatttataggaaagaatgtggttttgatgccatgttttgttaacattggagcatacattgaccaaggaacaatgatggacacttttagccgcgcaggtagttgttgccagataggaaaaaattgtcatatatctgctggaagtggtgtgggcggtgtattggaacctgctcaagcgttaccaacaattattgaggataatgtatttttaggagccatgtctgaagttgtagaaggagtaatcgtaggtgaagggtcagtattaagtatgggaatgtatattgggcaatcaacgaaaatagtaaatagatcgacaggcgaaataacttatggaaaaattccaccttattctgttattgtgccaggtactctgccagataaaaaaaatccatctgctccatctttaagttgtgcagttataattaaacaggttgacgaaaaaactaggtctaaaactttcattaacgatctttttagagaatag

SEQ ID NO: 233464 - DNA, 784 bp, Unknown
  Bacterial polypeptide expressing nucleotide sequence isolated from the Sargasso Sea
atgaataccagtacatttgaaaaaataattgataaggcttggaatgataagaaccaagttaattctaaatcggataaaaagctactaagtgctattagtgaaactatagaattattagactcaggaaaaataagagttgctgaaaaaaaagataatcaatggcttgttaatcaatggataaaaaaagcaatactattaagttttagagtaaacaagatgaaagcatctaaaggcccttactcaacctggtacgataaaattgatggtaaaactcagggttggagcgaaaaaaaaatggttaaagcaggattcagatatgttcctaatggagttataagaaaaggagctttcattgcaaaaaatgttgtcttaatgccctcatttgtaaatgttggagcttatgtggatgaaggtagtatgattgatacatgggcttctgtaggatcttgcgctcaagttggaaaaaattgtcatatatcaggtggagcgggaataggtggtgttttggagccaatgcaagcaaaccctacaataattgaagataattgttttgttggagcaagagcagaaatagcagaaggcgtaattattgaaaaagggtcggttttatctatgggagtttatataggagcatcgacaagaattattgatagagccacaggaaaaatctattttggtaaagttccagcttattcagtagttgtccctggaactatgccgagcaaaaataacccaagcggtccatccttgtattgtgttgttattgtaaaaccaggtagatgaa

SEQ ID NO: 233465 - DNA, 530 bp, Unknown
  Bacterial polypeptide expressing nucleotide sequence isolated from the Sargasso Sea
aaaagcaggctatagacatgttccaaatggtgttgttagaaaaggttcttttatagcaaagggtgtggttttaatgccttgttttgtaaatcttggagcatacgtagatgaaggtacaatgatagatacttgggcttcagtaggatcatgtgctcaagtaggaaagaattgtcatatctctggaggagctggaattggaggagttctagaaccattacaagctggcccagttataattgaagataattgttttattggagctagatctgaaatagcagaaggtgtactggtggaagaaggttcagttgtttcgatgggtgtttatattggtgcttcaactaaaatagttgacagaacaacaggagaagttacctatggaaaagttcccgcttactcagtagttgtgccaggatcaatgccaaacaaaaaaaatcctgatggtccctctttatattgtgtagtaatagttaaaaaagttgatcaaaaaactcgaagtaaaacttcaataaatgatttattaagagactaat

SEQ ID NO: 233466 - DNA, 829 bp, Unknown
  Bacterial polypeptide expressing nucleotide sequence isolated from the Sargasso Sea
gatgaatataaattcttttgaaaaaataataaatgaagcttggaataacaaaagtcaaataaattctaaatctagtagaaaaatattaaattctattagtaaaactatagacttgttagattcgggtaaaataagagttgcggaaaagaaaaatgatgagtggattgttaatcaatggattaaaaaagcaattttattaagctttagagttaataaaatgaaaatttctaaaggcccctatgctgcttggtttgataaagtagaaggtaaaactcataaatggaatgaaaaaagatttattaaagaaggttttagatatgttcctaatggtgttgtaagaaaaggagcgtacatttcaaagaatgttgtattaatgccttcgtttgtaaacgttggagcttatgtagatcaaggaagtatgattgatacatgggcgtctgtaggatcttgtgcacaagttggaagaaattgccatatatcaggcggtgctggaattggtggagtattagaacctatgcaagcaaatcctactatcattgaagatgaatgttttgtgggagctagagcagaaatagctgagggagttattgttggaaaaggatcagtgttatctatgggagtttatataggagcatcaacacgaatttttgatagagcaacgggtcaaatacattatggaaaagttccgaattactctgtagtggtaccaggaacaatgccaagcaaaaataatcctgagggaccatcattatattgtgtagtaattgtaaaaaaagtggacgaaaaaacaagaagtaaaacctcaattaatgatttgttgagagactaa

SEQ ID NO: 233467 - DNA, 718 bp, Unknown
  Bacterial polypeptide expressing nucleotide sequence isolated from the Sargasso Sea
atgagtaatcaagaagttattgaaaagctatgggatcaaaaggatcaaattaattttataaaggatagcgaagcaaaaaaaaatatagagaatgttctaaacttattagaccaaggaaagcttcgagtatgtgaaaaaaaagatgatatttggcacgttaatcagtggcttaaaaaaacaatacttttaagttttagaatacaggatatggaaatgatcagcggtggcccaagtgtcagcgatgggaacacttcatggtgggataaagttccctcaaaatttcaaaattggacatcggaaaattttcaatcagctggctttagagcagttcctaactgtgttgtaaggaggtcagcttttattgcaaagagtgctgtcttgatgccttgttttgttaacctaggtgcctatgttgatgaaggaactatggtagacacttgggcaacagttggctcttgcgcgcaagttggaaaaaattgtcatatttcaggtggtgcaggtataggtggcgtattagagcccttacaagcaaatcctgtaataattgaagataattgttttattggtgctagatctgaagttgctgaaggtgtgatagttggagagggttcagtattatctatgggggtatttattggagcttcaactaaaatttataatcgtgaaactaaagaaatttatatgggaaaagttcctccttattcagtagttgtaccag

SEQ ID NO: 233468 - DNA, 647 bp, Unknown
  Bacterial polypeptide expressing nucleotide sequence isolated from the Sargasso Sea
tatgttaagttttaaaatgtatccaatggaaaatttaaatggtccctacagtagttggtatgacaaagcgcatcttttaaaaggtaaaacagcaggttggtctaaagaggaccatgaaaaagctggtttcagaatggttcctaattctccagtgagaaaaggatcttttgtaggcaaaaatgctgttttaatgccatgctatgtgaatataggagcatacattgatgagggaacaatgatagatacttttgcaagagctggtagctgttctcaaatcggaaaaaattgtcatatttctgcaggtagcggagttggaggagttttagagcctgcacaggcattaccaacaatcattgaggacaatgtttttttaggagcaatgtctgaggttgtagagggagtgatagttggcgaaggttctgttttgagtatggggatgtatattggacaatcaacaaaaattgttaacaggaaaacaggcgaaataagttatggtaaaattccaccatattctgttgtagttccaggttctctaccagataaaaataattcaagcactccatcattatattgtgcggtaataatcaaacaagtagacgaaaaaacaagatcaaagacttcaataaatgatcttttaagagaataga

SEQ ID NO: 233469 - DNA, 802 bp, Unknown
  Bacterial polypeptide expressing nucleotide sequence isolated from the Sargasso Sea
atgagcaatcaagaagttattgaaaagttatgggatcaaagagatcaaattaattttattgaggatagcgaagcaaaaaaaagtatagagaatgttctaaacttattagatcaaggaaagcttcgagtatgcgaaaaaaaagatgatatttggcacgttaatcaatggcttaaaaaagcaatacttttaagttttagaatacaggatatggaaatgatcaacggtggcccaagtgtcagccatgggaatacttcatggtgggataaagttccctcaaaatttcaaaattggacatcggaaaattttcaatcagctggctttagagcagttcctaactgtgttgtaaggaggtcagcttttattgcaaagagtgctgtcttgatgccttgttttgttaacctaggtgcctatgttgatgaaggaactatggtagacacttgggcaacagttggctcttgcgcgcaagttggaaaaaattgtcatatttcaggtggtgcaggtataggtggcgtattagagcccttacaagcaaatcctgtaataattgaagataattgttttattggtgctagatctgaggttgcagaaggtgtaatagttggagagggttcggtattatctatgggggtatttataggagcttcaactaaaatttataatcgtgaaactaaagaaatttatatgggaaaagttcctccttattcagtagttgtaccaggtagtcttccaagttcaaaaggtgatgcatctttgtactgtgttgttattgtcaaaactgttgatggaaaaaactcgatcaaaa

SEQ ID NO: 233470 - DNA, 430 bp, Unknown
  Bacterial polypeptide expressing nucleotide sequence isolated from the Sargasso Sea
gcttacattgatgaaggtactatggttgatacttgggcaacggttgggtcttgtgcacaaattgaaaaaaattgccatttatctggaggtgttggaattggaggagtgttagaaccccttcaagccaatcctgtaataattgaagataactgtttcgttggagcaagagctgaggttgccgaaggcgtaattgttagagaggggtctgttttatcaatgggagtatatttaggagcctcaactaaaattgttaataggtcaacaggtgaaatattttatggagaagttccagcttattcagttgttgtacctggaacattgcctaatacggatccagctaagcctagcttgtattgtgtagtaattgttaaaactgttgatgaaaatacaaggaaaaaaacatcaataaacgacttactaagagagtaag

SEQ ID NO: 233471 - DNA, 316 bp, Unknown
  Bacterial polypeptide expressing nucleotide sequence isolated from the Sargasso Sea
attagagcctatgcaagcatcgcctactgttatcgaggataattgctttattggagcaaggtccgaaattgtagaaggctgtattgtcagagagggagctgtagtaggcatgggtgtgtttattggaaaatctacaaaaatatttaatagagaaaatggtgaaacaacatatggagaaatacctccttactctgtggttgtctcaggttctattccatctagaggaggagtaaacctttattgcgcggtaatagtcaaacaggtcgatgaaaaaacaagaagtaaaacttctataaatgatttattacgagactaa

SEQ ID NO: 233472 - DNA, 338 bp, Unknown
  Bacterial polypeptide expressing nucleotide sequence isolated from the Sargasso Sea
tattggaggagttcttgaaccacttcaagctgtcccagttattattgaagacaattgttttattggtgctcgatcagaaatcgcagaaggtgttttagtagaggaaggagcagttttatctatgggagtttacattggagcatccacaaaaatagttgataggaactctggggaaatacattatggtaaggttcctgcatattctgttgtagttcctgggagcttacccaataagtcgaatcctagcggaccttcattgtattgtgcggttatagttaaaaaagttgatgagaaaactagaagtaaaacttctattaatgatttacttagagactaat

SEQ ID NO: 233473 - DNA, 634 bp, Unknown
  Bacterial polypeptide expressing nucleotide sequence isolated from the Sargasso Sea
aaaaaagctatcatgctaagctttaggatttacccaatggataatttaagtggaccatatagtagctggtacgataaatcacatttgttaaagggtaaaacagctaattggacaaaagaacagcacgaggcagcaggatttcgtatgacgcctaatagtccggttcgaccaggatccttcattggtaaaaatgcggttctaatgccatgttacgtaaacataggtgcatacatcggtgcgggcacaatgatggatacatttagtagagctggtagttgttgtcaaattggagaaaattgtcatatatcagctgggtcaggtattggtggggtcttggagccagctcaagcacttccaactataattgaggacaatgtttttgttggagcgatgtctgaagttgtagaaggtgttattgtgggggaaggaagtgttctttcaatgggatgttacattggacaaagtacaaaaattataaatagatcaaatggtgaaattacaaagggtcgtgtaccaccttattcagttgtcgtgcctggaactcacaaagatctatatgctgttcatataattaaaactgtagatgcaaaaacaaggtcaaagacatcaattaacgatcttttacgagattaat

SEQ ID NO: 233474 - DNA, 239 bp, Unknown
  Bacterial polypeptide expressing nucleotide sequence isolated from the Sargasso Sea
tggagaaggatcagttttaagtatgggtatgttaatcactcaatctacaaaaatagttaacagatcaacaggtgagatcagttatggaaaaatacctccatattctgttgtggtaccaggttctcttcctgataaaaaaagtgcttctgcaccatctcttagttgcgcagttattattaagcaagttgatgaaaaaacaagatctaaaacttcaataaacgatcttttgagagactaga

SEQ ID NO: 233475 - DNA, 757 bp, Unknown
  Bacterial polypeptide expressing nucleotide sequence isolated from the Sargasso Sea
aatgagcgatatagaaaaaattataaatgaagcttgggaaaataaagatcaaataaaccctaattctgataaaaaaattaaagatactattaatcaaattattgtagatttagatagtggaaaagttagagttgcagaaaagattgatggagaatggataactcaccaacatattaaaaaagcaatcatgttaagttttagaattcatggaatggaagctttgagtggcccatatagtagttggtatgacaaagctcatttactaaaaggtaaaacagctggttggacaaaagaagatcatgaaaaagctggttttagaaatccacctaactcaccaattcgaaaaggatcttttattggtaaaaatgcagtgcttatgccatgctatgtaaatattggagcttatattgatgaaggaactatgattgatacatttgctagagcaggtagttgttgtcaaataggaaaaaattgtcatatatcagctggatcaggaattggaggagttttggaacctgcgcaagcattgccaacaattattgaagataatgtatttgttggtgctatgtcagaagttgtagagggtgtaatagttggggaaggatcagttttaagtatgggaatgtatattggtcagtcaacaaaaattgttaatagaaaaactggtgaaataacttacggaaagataccaccatattcagtagtagtgcctggatctttaccagataagaatagttcgtctgcaccatctttatat

SEQ ID NO: 233476 - DNA, 673 bp, Unknown
  Bacterial polypeptide expressing nucleotide sequence isolated from the Sargasso Sea
tatgaaagatattatagagaaagcatgggaaaatagaactttattaaatgacgataacacaaaacaaacaattagaaaaattattgatcagcttgataaaggtgaagttagaattgctgaaaaaattaattcaaaatggattgtaaatgaatggataaaaaaagcagttatattatattttccaattcaaaaaatgaaaacaattcaatcaggagatatggaattctttgataaaattgatcttaaaaaaaattataaagaaaaaggaataagggtcgttccaagtgctattgcgagatatggatcatatgtttcagaaggagtgatattaatgccaagttatgtgaatattggagcttatgtggactccggaagtatgattgacacctgggccactgttggaagttgtgcacaaattggaaaaaatgttcatctaagtggcggtgttggaattggtggtgttttagaacctcttcaggctgctccagtaataattgaagacaattcatttataggatccagatgtataattgttgagggagttaaaattgaatcagaagcagtgttaggtgcaaatgtagtaataacatcatctactaagattatagatgttagtggatcaaaaccaattgaaagtaaaggattaattccaaaaaggtcggtagttatacct

SEQ ID NO: 233477 - DNA, 352 bp, Unknown
  Bacterial polypeptide expressing nucleotide sequence isolated from the Sargasso Sea
gttcacctttctgggggagttggtattgggggcgtcttggagccaatgcaggcagggcctactataatagaagataattgctttataggggcacgatccgaagttgtagagggctgtatagtccgggaggggtctgtcctaggaatgggtgtctatatagggcaatctactaaaatagtggatcgagaaactggggaggttatgtatggagaagttccgccatattctgtagttgtttctgggtctatgccatcaaaaaacaatgtaagtttatattgtgctgttatagtaaaacgtgttgatgaaaaaactcgaagtaaaactggcataaatgagctattaagggattaat

SEQ ID NO: 233478 - DNA, 826 bp, Unknown
  Bacterial polypeptide expressing nucleotide sequence isolated from the Sargasso Sea
atgaacttagaaaaaattgaaaaaactataaacgaagcttttcggaataaagaaaaaattgatagtgcagataaaactttaaacgatttagtacatgaaactatagacttgttagataatggtaaaattagagttgctgaaaaaatggatgataaatggcaagtcaatcaatggataaaaaaagcaatacttttgagttttcgaataaataaaatgaaagcttctaaaggtccctattctacttggtacgataaaattgatggtaaaacacaaggatggagtgaagaacaaattaagaaagctggatttaggtatgtgcctaatggagtaataagaaaaggagctcacatagcaaagaatgttgttctgatgccatcatttattaatgtaggcgcctacgtagacgaaggaacaatgatagatacttgggcttcggtcgggtcgtgtgcgcaagttggaaaaaattgtcatatttctggtggtgctggtattggaggtgtcttagaaccaatgcaggcaaatccaactattgtagaggatgattgttttttaggagcaagagcggaaatagcagaaggtgtaattgttgaaaaggggtcagtattatcaatgggtgtttatattggtgcatcaacaagaatagttgatcgtgcaactggtgaaattcattatggtagggttcctgcatattctgttgttgttccaggctcaatgccaagcaagaataatcctaaagggccatcattatattgtgtggtaattgtaaaaaaagtagacgagaaaactagaagtaaaacttctataaacgatttattaagagactaaa

SEQ ID NO: 233479 - DNA, 508 bp, Unknown
  Bacterial polypeptide expressing nucleotide sequence isolated from the Sargasso Sea
cctaactcacctggtaagaaaaggatcttatgtaggaaaaaatgcagttctaatgccgtgctatgttaacattggtgcttatatagatgaaggtacaatgattgatacatttgcaagagcaggtagttgttgtcaaattggaaaaaattgtcatatatcagcaggtagtggtattggtggagtacttgaaccagcgcaagcattaccaacaattattgaagataatgtatttttaggagctatgtctgaagttgttgaaggcgtaattgtaggagaaggatctgtattaagcatgggaatgtatattggtcaatcaacaaaaattgtaaatagatcaagtggtgaaataaattatggaaagattccaccatactcagttgttgtgccaggtaccttgcctgataaaaaaaacccatctgcgccatcgctaagctgtgcagtaataattaaacaagttgacgaaaaaactagatcaaaaacctcaattaacgatcttttaagagaataa

SEQ ID NO: 233480 - DNA, 651 bp, Unknown
  Bacterial polypeptide expressing nucleotide sequence isolated from the Sargasso Sea
caattatgttaagctttagaatttatccaatggaaaacttaaatggtccttatagtagttggtacgataaatctcacttgttaaaaggtaaaactgcaggttggtcaaaagaagatcatgagagagctggatttagaatggttcctaattctccagttagaaaaggatcatttgttggaaaaaatgcagttttgatgccatgctatgtaaatatcggagcttatatcgatgagggaacaatgatagatacatttgcaagagcaggtagctgttgtcaaatcggaaaaaattgtcatatctcagcaggatcaggagttggtggagttttagaacctgcacaagctttacctacgataatcgaagataatgttttccttggagctatgtcagaagttgttgagggggtggttgttggggaaggttcagttttaagtatgggtatgtatataggtcaatcaactaaaatagttgatcgaaaaactggtaatatcacttatggtaaaattccgccgtactcagttgttgtcccaggttcattgccagataaaaataactcagctgcaccatcgttgtattgtgctgtaataattaagcaggttgatgaaaaaacaagatcaaaaacttctataaacgatcttttaagagactaaa

SEQ ID NO: 233481 - DNA, 409 bp, Unknown
  Bacterial polypeptide expressing nucleotide sequence isolated from the Sargasso Sea
tatgattgacacttgggcatcagttggatcatgcgcccaagttgggaagaactgtcatatatccggaggtgctggaattggaggcgtattagaaccaatgcaagctaatcctactattatagaagataattgttttattggtgcaagatctgaaattgttgaaggtgtaattgttggtgaaggttcagtcatttcaatgggtgtttttattggacaatcgacaaaaataataaatagagaaaccggcgaaaccttatatggaaaaattcctccatattcagtagtcgttcctggttcattgccaagtaaaaatggtaaaggtccaagcttatattgtgccgtaattgttaaaacagttgatgcaaaaacaagaagtaaaacttctataaacgatttattaagagattaa

SEQ ID NO: 233482 - DNA, 457 bp, Unknown
  Bacterial polypeptide expressing nucleotide sequence isolated from the Sargasso Sea
catgccgtgttatgttaatattggcgcgtacattgatgaaggtacaatgattgatacttttgctagagcaggtagctgtagtcaaattggaaaaaattgtcatatatctgctgcaagtggagttgggggagtattagagccagcacaagcattacctacaattattgaagataatgtttttttaggagcaatgtcagaagtcgtagaaggtgtaattgtaggagagggatctgtaataagtatgggaatgtatattggtcaatcaacaaaaattgtaaatagaaaaacaggagagattacgtatggaaaaatacctccatattcagttgtggtacctggatctttacctgacaaaaataatccttcagcaccttctctatattgtgcagttattattaaacaggttgatgaaaaaacaaggtctaaaacatctattaatgaactattaagagattaa

SEQ ID NO: 233483 - DNA, 829 bp, Unknown
  Bacterial polypeptide expressing nucleotide sequence isolated from the Sargasso Sea
aatgagttacgataagcttgaaaaaataattaacgaaagttttgaaaaaaaagaaaaagtaagtccaaagtcagataaaaagttattaaaggctattaatgaaactattaatttagttgacagcggaaaaattagagtagcaaataaacaaaacgggaattgggttgtaaaccaatggattaaaaaagctattttgttaagttttaggataaataaaatgcagatgatgaaagggccctacactacttggtatgacaaagttcctggcaagacagtgaagtggaaagaaaaagattggaaaaaagcagggtaccgtcatgtcccaaatggagttgtacgaaaaggagcatacattgcaaaaaatgtggttttgatgcctagttttgttaaccttggagcttatgttgatgaaggcacaatgattgatacttgggcatccgttggttcatgtgctcaagtaggaaaaaattgtcatatttctggaggagcaggtataggaggcgtgctagaaccactgcaagctggtccggtaataattgaggataattgttttataggtgctagagccgaaatcgctgaaggagttttagtggaagaaggtgcagtattatcaatgggagtttatattggagcatctacaaaaataatagatagaaactctggggagatatattatggtaaagtccctgcatattcagttgtggtccctggaagtttgcctaataagtctaatccgcaaggaccttcgttgtattgcgcggttatagtaaaaaaagtagacgaaaaaaccagaagtaaaacttctataaatgatctattaagagactga

SEQ ID NO: 233484 - DNA, 614 bp, Unknown
  Bacterial polypeptide expressing nucleotide sequence isolated from the Sargasso Sea
tatggaaataataactggtggtccaagcgttaaaaatggatctactgcatggtgggataaagtcccttcaaaattccaagattggaaatcagaaaattttcaatcagctggttttagagctgttcctaactgtgttgtaagaagatcagcatttattgcaaaaagtgcagtgcttatgccttgctttgtaaacttgggtgcatatgtagatgagggaacaatggttgatacttgggctactgttggatcttgtgcacaagtaggaaaaaactgtcatatctcaggaggtgcaggtataggaggagtcttagaacctttgcaggcaaatccagttataatagaggataattgttttattggtgcgaggtcagaagtcgccgagggtgtaattgttggagagggatcagtattatccatgggggtatttattggtgcttcaacaaaaatttataatcgtgaaactaaagaaatttacataggaaaagttcctccatactctgtagtcgttccgggtagtcttccaagttcaaaaggagatgcatcattgtactgtgttgtgattgtgaaaacagttgatgaaaaaactcgttcaaaaacctccgttaatgaattac

SEQ ID NO: 233485 - DNA, 364 bp, Unknown
  Bacterial polypeptide expressing nucleotide sequence isolated from the Sargasso Sea
aattgtcatatctcagcaggatcaggagttggtggggttttagaacctgcgcaagccttacctacgataatcgaagataatgttttccttggagctatgtcagaagttgttgagggggtgattgttggggaaggttcagttttaagtatgggtatgtatataggtcaatcaactaaaatagtcgatcgaaaaactggtaatatcacttatggtaaaattccgccgtactcagttgttgtaccaggttcattgccagacaaaaataattcggctgcaccatcgttgtactgtgctgtaataatcaagcaggttgatgaaaaaacaaggtcaaaaacttctataaacgatcttttacgagactgaa

SEQ ID NO: 233486 - DNA, 729 bp, Unknown
  Bacterial polypeptide expressing nucleotide sequence isolated from the Sargasso Sea
gagtagctgaacttcttggctctagtaagtggcgtgtaaatcagtggtctaaaaaagctgtcttactttcatttagactaaacgatatgggaataattcaaggtgggcctgaaagttgggattgtggtccttctgtttggtgggataaggttaaatcaaaattttcaaactggtcatctgatgattttaaaaaggcaggatttagagcagttccaggttcaatagtaagacattcagcttttattaacaaaaatgttgttttaatgccatcttttgttaatttgggtgcttttgtagatgagggcgcaatgattgatacgtgggcaactgttggatcttgtgcgcaaatcggtaaaaatgttcatttgtctggaggtgcaggtatcggtggtgtactagaacctttacaagctgatccagtaattatagaggacaattgttttattggtgcacgttctgaagttgcagagggcgttattatagaagaaggctctgtgttgtcgatgggagtttatataggcgcttcaacaaaagttgttgatagatcgactggcgaaatttatatgggaagagttccatcatattcagtagttgtcccaggctctatggctggaagcaaaaataatgaaacatctaattcccctaatttatattgtgcggtaatagtaaaaagagttgatgctaaaactagatcaaaaacatcagtcaatgatttgttaagagactaat

SEQ ID NO: 233487 - DNA, 610 bp, Unknown
  Bacterial polypeptide expressing nucleotide sequence isolated from the Sargasso Sea
actgtatctcgaggaccatacactactttggtatgacaaagtaccaggtaagtcagtaacttggaatgaaaatgattggaagcaagcaggatatagacatgtaccaaatggggtagttagaaaaggatctttcattgctaaaaatgttgtacttatgccatgctttgtaaatttgggagcttatgttgacgagggaacaatgatagatacctgggcatcagtaggttcctgtgctcaagtaggaaaaaattgccatgtttctggtggtgcaggtattggtggtgttcttgaacctctccaagctggaccggttattattgaggacaattgctttatcggggcaagatcagaaattgctgaaggagtaatagtagaagaaggagcggtaatttcgatgggtgtttacataggtgcctccacaaaaattgtagatagatcttctggagaaattacttatggaaaagttccagcctactcagtggttgttccaggtagtatgccaaacaaaaataattcaggtggtccaaatttatattgtgcggttatagttaaaaaagttgatgaaaaaactagaagtaaaacatcaataaatgatttattaagagactaa

SEQ ID NO: 233488 - DNA, 634 bp, Unknown
  Bacterial polypeptide expressing nucleotide sequence isolated from the Sargasso Sea
aatgaaaataaatgaactagaaaaaattattaatgagtcttttgaaagcaaagaaaatatttctttaaactcagataaaaaaattattgatgctattaatgaaactattgaactaactgatagaggaaatgttagagtcgcagaaagaaaaaatggtaaatggtctgttaatcaatgggtgaaaaaagcgatattattaagttttagagtcaataaaatgacaatgtctaaagggccttacacaacttggtatgacaaagttccaggcaagtcagttcagtggaatgaggaggattggaaaaaagctggctacagacacgttccaaatggagtcgttagaaaaggatcttttattgggaaaaatgttgttctaatgccttgctttgtaaatcttggtgcgtttgtggatgaaggtacaatgattgatacttgggcttcggttggttcttgtgcccaggttggtaaaaattgtcatatctctggaggagccggcataggaggagttcttgaaccattgcaagctggcccagtaataattgaagataattgttttataggagcaagatctgagattgctgaaggcgtaattgtagaagaaggatcagttatttcaatgggtgtctacattggggca

SEQ ID NO: 233489 - DNA, 757 bp, Unknown
  Bacterial polypeptide expressing nucleotide sequence isolated from the Sargasso Sea
cttaaagaacgcaatcaatcaggtaataagtgacttggatagtggtaaatcaagagttgctgaaaaaataaatggtgagtgggttacacaccagcatttaaagaaagcaattatgttaagctttagaatttatccaatggaaaatttaaatggtccttacagtagttggtacgataaatctcacttgttaaaaggtaaaactgcaggttggtcaaaagaagatcatgaaaaagctggctttagaatggttcctaattctccagttagaaaaggatcatttgttggaaaaaatgctgttttgatgccatgctatgtaaatattggagcttatatcgatgagggaacgatgattgatacatttgcaagagcaggtagctgttgtcaaatcggaaaaaattgccatatctcagcaggatcaggagttggtggagttttagaacctgcacaagctttacctacgataatcgaagataatgttttccttggagctatgtcagaagttgttgagggggtgattgttggggaaggttcagttttaagtatgggtatgtatataggtcaatccaccaagatagtcgatcgaaaaaccggtaatatcacttatggtaaaattccgccgtattcagtagttgtcccaggttcattgccagataaaaataactcggctgcaccatcgttgtattgtgctgtaataattaagcaggttgatgaaaaaacaagatcaaaaacttctataaacgaccttttaagagactaa

SEQ ID NO: 233490 - DNA, 442 bp, Unknown
  Bacterial polypeptide expressing nucleotide sequence isolated from the Sargasso Sea
aatgttggagcttatgttgacgaaggaagtatgattgacacttgggcttctgtaggttcttgcgcccaagttggaaaaaattgtcacatatcaggtggagctggaataggtggtgtgttggaaccgatgcaagcaaaccctactataattgaagataattgtttcgttggtgctagggctgaaattgcagaaggtgttattgtttgcaaaggatcggttttatctatgggagtttatataggagcatcaacaagaattattgatagagcaacaggaaaaatactctatggtaaagttcctgaatattcagttgtggtgccgggaactatgccgagcaaaaatactcccgacggtccatcattgtactgtgtcgtaattgtaaaaaaagtagacgagaaaacaagaagcaaaacctcaattaatgatttgttgagagattaaa

SEQ ID NO: 233491 - DNA, 391 bp, Unknown
  Bacterial polypeptide expressing nucleotide sequence isolated from the Sargasso Sea
tgcaggaagttgctgtcagattggaaaaaactgtcatatctcagccggcactggagttggaggtgtattagaaccagctcaagcattaccaacaattattgaagacaacgttttcttaggagcaatgtcagaagtagtagaaggcgtgatagttggggaaggctctgttctgagcatgggaatgtatattggacaatcgacaaaaattgttaatagaaaaactggtaagataacctatggaaaaattccaccttattcagtggtagttccgggatctttgccagataaaaacgatccacaagcaccatctttatattgtgcagttataattaaacaagttgatgaaaaaacaagatcaaaaacatccgttaatgatctgttaagagaataa

SEQ ID NO: 233492 - DNA, 780 bp, Unknown
  Bacterial polypeptide expressing nucleotide sequence isolated from the Sargasso Sea
aatgaaagtagatgaactagaaaagataattaatgatgcatttgaggataaacaaaatatatctgcctcttctgataagaagattttagatgctatcaatgaaactattatattaactgataaaggatcgcttagagtagcagaaaagaaaaatggcaaatggtcagttaatcaatgggtcaaaaaagcaattttactaagtttcagaacaaataaaatgacaatgtctaaaggtccttacacaacctggtatgacaaagttccaggtaaatcagttagttggaatgaagctgattggaaaaaagctggttatcgacacgtgccaaatggagttgttagaagaggttcttacattgcaaaaaatgttgtccttatgccatgttttgttaaccttggtgcatatgtggacgaagggacaatgatagatacttgggcatctgttggttcatgtgcacaaataggaaaaaactgtcatgtttcgggcggtgcaggaattggtggagttttagaacctttacaagcagggccagtaatcatagaggatgattgctttattggtgctagatctgaaatagcagaaggggtccttgttgaaaaaggagcagtaatttctatgggtgtttatataggtgcatcaactaaaattatagacaggagtactggtgaaataacttacggaaaagttccagcatactcggtaatagtaccaggtagtttgcctaataaaaaaaatcctgacggaccgagtttatattgtgcagttatcgttaaaaaggtaga

SEQ ID NO: 233493 - DNA, 816 bp, Unknown
  Bacterial polypeptide expressing nucleotide sequence isolated from the Sargasso Sea
tatgtctatagaaaaaattatcaatgaggcttggaaaatcaaagatcaagtaaatcaagattcggataaaaaacttaaagatgcaatcaatcaagtaatcagtgatttagatagtggtaaatcaagagttgctgagaaaattaatggagaatgggtaactcatcaacatctaaaaaaagctattatgttaagctttagaatttatccgatggaaaatttaaatggcccatacagtagttggtatgacaaagcacatttgttaaaaggtaaaactgcaggttggtctaaagaagatcatgagaaagcaggttttagaatggtgcctaattcacctataagaaaaggatcttttattggaaaaaatgcagtactaatgccatgctatgtaaatatcggtgcctatattgatgagggaacaatgatagatacatttgctagagcaggtagctgttgtcaaataggaaaaaattgtcatatttcagcaggctcaggtgttggaggtgttttagaaccagcacaagcattaccaactataattgaagataatgtttttctgggagcaatgtcagaggtagtagaaggtgtaattgttggtgaaggttcagtcttaagtatggggatgtatattggtcaatcaactaaaatagttgatagaaaaactggaaaaattacttatgggaaaattccaccttactctgtagttgttccaggatctttacctgataagaataacccatcagctccatcattatattgtgcagttataattaaacaagttgatgaaaaaacaagatcaaagacatctataaacgacct

SEQ ID NO: 233494 - DNA, 739 bp, Unknown
  Bacterial polypeptide expressing nucleotide sequence isolated from the Sargasso Sea
atgtttagcattattagactctggtcaggctagagtaagcgaaaaaatagagaaaaattgggtagttaatgaatggcttaaaaaagctgtacttttatcttttagattatggcctatggatttaatttcaggcggacctggagatagtaattggtgggataaagttccatctaaattttctaaatggagcgctaaagacttccagaataataattttagaactgtgcctggctctatcgttagatacagtgctcatatttcacctgaagctatattaatgccttcatttgttaatttgggcgcgagagtagggtctggaacaatgatagatacttgggctactgtaggttcctgtgctcaagtcggtaaaaattgccatatctcaggtggagttggtttaggaggcgtattagaaccactgcaagctacgccagttattattgaggataattgtttcataggggcaagatcagaaatagcagagggagttattgtagaagagggagcagtaatatcaatgggagtatatataggagcttcaacaaaaattattgaccgtaaatctggtgaagtgttttatggtaaagttccagcttattctgtagtagttcctggatcaatggaaactaattcagcaaatgataatgggaaattatcactttattgtgctgtgattgtaaaaagagttgacgaacaaactcgttcaaaaacttcaataaatgagttattaagagattag

SEQ ID NO: 233495 - DNA, 284 bp, Unknown
  Bacterial polypeptide expressing nucleotide sequence isolated from the Sargasso Sea
tgttttcttaggtgcaatgtcagaagtggtcgagggagttattgtaggtgagggttcagttttaagtatgggaatgtatataggtcaatctactaaaatagtgaatagaaaaactggtgaaataacatatggaaaaattccaccttattcagtagttgtcccaggctcattaccagataaaaataatacttcagcaccgtcattatattgtgcggtaataattaaacaggttgatgaaaaaacaagatcaaaaacatctatcaacgatcttttaagagaataaa

SEQ ID NO: 233496 - DNA, 496 bp, Unknown
  Bacterial polypeptide expressing nucleotide sequence isolated from the Sargasso Sea
ctgtgtgttaaggaggtcagctttattgcaaagagtgctgtcttgatgccttgttttattaacctaggtgcctatgttgatgaaggaactatggtagacacttgggcaacagttggctcttgcgcgcaagttggaaaaaattgtcatatttcaggtggtgcaggtataggtggcgtattagagcccttacaagcaaatcctgtaataattgaagataattgttttattggtgctagatctgaagttgctgaaggtgtgatagttggagagggttcagtattatctatgggggtatttattggagcttcaactaaaatttataatcgtgaaactaaagaaatttatatgggaaaagttcctccttattcagtagttgttccaggtagtcttccaagttcaaaaggtgatgcatctttgtactgtgttgttattgtcaaaactgttgatgaaaaaactcgatcaaaaacctcagttaatgaattgttaagagattaag

SEQ ID NO: 233497 - DNA, 693 bp, Unknown
  Bacterial polypeptide expressing nucleotide sequence isolated from the Sargasso Sea
aaatcaatggtgaatggcttactcatcaacatcttaaaaaagcaatcatgttaagttttagaatgtatccaatggaaaatttaaatggtccttatagcagctggtatgacaaatctcatttacttaaagggaaaacagctggatggacaaaagaagatcatgaaaaagctggctttagaatggtgcctaattcacctgtaagaaaaggatcgtttgtaggaaagaatgcagttttgatgccttgttatgtaaatattggagcatacattgatgaaggtactatgatggatacattcagtcgtgcaggaagttgttgtcagattggaaaaaactgtcatatctcagctggcactggagttggaggtgtattagaacctgctcaagcattaccaacaattattgaagacaatgttttcttaggagcaatgtccgaagtagtggaaggtgtaatagttggagagggctctgttctaagtatgggaatgtatattggacaatctacaaaaattgtcaatagaaagaccggtgagataacctatggaaaaattccaccttattcagtggtagttccaggatctttgccagataagaacaatccaaaagcgccatctttgtattgtgcggtaataattaaacaagttgatgaaaagacgagatcaaaaacatcagttaacgatcttttaagggattaaa

SEQ ID NO: 233498 - DNA, 607 bp, Unknown
  Bacterial polypeptide expressing nucleotide sequence isolated from the Sargasso Sea
atggaaactttcaatacccttatatcagaagcgtttgaacagcgcgacactctcaacagcgagaccattacagacgagcttcgctccgccatcaccgccaccctggatggcctaaacgaagggcgccttcgggtcgcagaaaaaatagatcaacaatggcaagtgcacgaatggataaaaaaagccatcttgctctactttaaaaccaatgacaacgaacccatgcaaggattcacgcagttctacgataaggtgccactcaagtaccatcagcacgacgctgcgcaactcaaacacgagggtgtgcgcatcgtgccaccggcctgtgtccgctacggtgcttttatcgataaaaacacggtactcatgccaagctacgttaacctcggcgcatacatcggccaaggcagtatgatcgacacctgggccactgtcggctcctgtgcccaaataggtaatcgcgtgcatctatccggcggcgctggcattggcggcgtactcgagccactgcaagcaaagcccaccatcattgaagacaattgtttcattggcgcacgctctgaaatcgttgaaggcgtcatagtcgaaaaaaacgctgtcatttcca

SEQ ID NO: 233499 - DNA, 358 bp, Unknown
  Bacterial polypeptide expressing nucleotide sequence isolated from the Sargasso Sea
tcatatatccgcaggatctggaattggaggtgtattagaacctgcacaagcattgccaacaattattgaagataatgtttttgtcggagcaatgtctgaagtagttgaaggagtaatcgtagaaaaaggatcagtattaagtatgggaatgtatattggtcaatcaacaaaaatagtgaatagaaaaactggggaaattacatatggaaaaataccaccatattctgttgttgtgcctggttctctacctgataaaaaaaatcctagcgcaccttcgttgagttgtgctgttataattaaacaagttgatgaaaaaacaagatcaaaaacttctattaatgatctactaagagaataa

SEQ ID NO: 233500 - DNA, 340 bp, Unknown
  Bacterial polypeptide expressing nucleotide sequence isolated from the Sargasso Sea
ggagttggaggagtattagaaccagcacaagctttgcctacaataattgaagataatgtttttctaggtgcaatgtcagaagttgtagaaggagtaatcgtaggtgaaggatctgtgattagtatgggtatgtatattggtcaatcaacaaaaattgttgatagaaagtctggtgaaatcacttatgggaaaattcctccttattcagttattgtgccgggatcattacccgataaaaataatccaagagcaccttctttgagttgtgcagtaattataaaaaaagttgatgaaaaaacacgatctaaaacatcaatcaatgacttattacgtgattgat

SEQ ID NO: 233501 - DNA, 784 bp, Unknown
  Bacterial polypeptide expressing nucleotide sequence isolated from the Sargasso Sea
taaaagaaatcaaaactcagaagaatcattaataagaacgattaatcaaattattaatgatttggatgagggaaaagcaagagtagctgaaaagattaatggagaatggattactcatcaacatattaaaaaggctataatgttaagttttagaatacatggaatggaggctctttcaggaccatatagttcatggtatgataaagcacatttacttaaaggtaaaacagctggttggactaaaaaagattttgaagaagctggatttagaatggtgccaaactctcccgtaagaaaaggttcttatattgcaaaaaatgttgttctaatgccatgctttattaatacaggagcttatattggatcaggaactatgatggatacattctcaagagctggatcctgctgtcaaattggtaaaaactgccatatctcagctggaagtggaataggtggagttttagaacctgcacaagctctaccgactataattgaagacaatgtttttcttggagcaatgtctgaagttgtagaaggagtaattgttggtgaagggtctgtaattagcatgggcatgtttatcggtcaatcaacaaaaattgttgatagaaaaactggtgatattacatatgggaaaatacccccttactctgttctggtaccaggctcattgccagataaaaaaaatccaaatgcaccatcattaaactgtgctgttataattaaacaagttgatgaaagaacaagatcaaaaacatcaataaatgatcttttgcgtgattaa

SEQ ID NO: 233502 - DNA, 859 bp, Unknown
  Bacterial polypeptide expressing nucleotide sequence isolated from the Sargasso Sea
atggatttggcccagatcgaaactgaaatcaataccgcatgggaaaaccgcgattcggtaaatttcgataccaaaggcgctgtgcgtgaggctgttgtcgaagcgctcgcgcttctcgataacggcacagcgcgggttgcaaaaccaactggcgcgcatcaatgggttgtaaaccagtggttgaaaaaagctgtgcttttatctttcaggctgaatgatatgcagcttatcccgagtggcacgatttatccggggtctggcgaatccgtctggtgggacaaggtggcgccgaaatttagcggctggggcgaggcgcggttccgggcagccgggtttcgtgcggtgccgggatgtttggtgcgccactctgcctatattgcgcctggcgtggtgattatgcctggctttatcaatctgggtgcctatgtcgatagtggcacaatggttgatacctgggcgaccgtcggctcttgtgcgcagattggcaaaaacgtgcatctgtccggtggtgccggcattggtggcgttttggaaccattgcaggcaggacctgtgattattgagaatgattgtttcattggggcgcgttcagaagttgttgagggcgttgttgttgaacagggtgcggtgttgtcgatgggcgtatttattggtgcctcgacgaaaattgttgatcgccagacgggtgaaatccatatcggacgtgtgcccgcctattcggttgtggtgccgggcagtctgccgggtaaaccgttggctgatggcagtccgggcccgtccttgtcatgtgcggtcattatcaagcaggttgacgaaaaaacccgcgctaaaacatctgttaatgatttgctccggagat

SEQ ID NO: 233503 - DNA, 299 bp, Unknown
  Bacterial polypeptide expressing nucleotide sequence isolated from the Sargasso Sea
tattatagaagataatgtttttttgggtgcaatgtccgaagttgtagagggtgtaattgttggtgaaggttctgttttaagtatgggaatgtatataggacaatctacaaaaattgttaatagaaaaactggagaaattacatacggaaaaattcctccttactcagtcgtagtaccagggtcacttcctgataaaaataattcatctgcgccatcactttattgtgcagtagtaattaaacaagtggatgaaaaaacaagatccaaaacctctatcaacgatctgttaagagaatagt

SEQ ID NO: 233504 - DNA, 349 bp, Unknown
  Bacterial polypeptide expressing nucleotide sequence isolated from the Sargasso Sea
catgagcataagtgacctacaatcggcgatcgagaccgcctgggacaaccgcgaagacctgacgccggcgactaccggcgccaatcgcgaggccgtggaaaccgcgctggcgcagctcgatagcggtgcagcgcgggtggccgagaagatagacggcgcatggcaggtccatgagtggttgaagaaggcggtcctcctctcgttccggctaaacgacatggagatgatccccaacggtcccggtgcgaacaccgcctggtgggacaaagtcccttcgaagtttgccggctggggcgcatcagagtttgaatcggccggattccgagctgtgccgaacgccatcgtgcgc

SEQ ID NO: 233505 - DNA, 526 bp, Unknown
  Bacterial polypeptide expressing nucleotide sequence isolated from the Sargasso Sea
agctggttttaggatggttccaaactcacctgtaagaaaaggatcatttgtaggaaaagatgctgttcttatgccatgttatgtaaacattggttcttacattggtgcaaaaacgatgatggatacatttagtcgtgctggcagttgttgccagattggggagaattgccatatatctgcaggatctggagttggtggggtactagaacctgctcaggcattacctacaataatagaagataatgtatttttaggagcaatgtctgaggtagttgagggagtgattgttggtgaaggttctgtgttaagtatgggaatgctcattacacaatctacaaagattgtaaatagatcaaccggtgagatcacgtatggaaaaattcctccatactcagttgttgtaccaggttctcttcctgataaaaaaaatccatctgctccatcactaagttgtgcagtaataataaagcaagtagacgaaaagactagatcaaagacatctattaatgatcttttaagagattaa

SEQ ID NO: 233506 - DNA, 532 bp, Unknown
  Bacterial polypeptide expressing nucleotide sequence isolated from the Sargasso Sea
tgcggctgacggcgcgcgtattgttccaccagcagcggtacgtacgggtacattcgtaggtaagaatgcggttgttatgccttcttatgtaaacattggtgcatttgttgacgaaggcaccatggttgatacgtgggcgacggtaggctcgtgtgcgcaaattggtaagaatgttcacctttcaggtggcgtgggtattggcggcgtattagaaccacttcaggctaaccccaccattattgaagataactgctttatcggcgcgcgttctgagatcgtagaaggcgtgattgttgaagaaggttctgttatctcaatgggcgtttacatcggtcagagcactcgtatttatgaccgcgaaaccggtgaagttcactatggccgtgtaccagcaggttcagtagtagtgtcgggtaacctgccaagcgcagatggtaaatacagcctttacgccgctatcatcgtgaagaaagtagatgctaagacccgcgcgaaagtaggtatcaacgcgctacttcgcggcgtagaataa

SEQ ID NO: 233507 - DNA, 430 bp, Unknown
  Bacterial polypeptide expressing nucleotide sequence isolated from the Sargasso Sea
tatgtagacgaaggaacaatgatagatacttgggcatctgttggttcatgtgcacagataggaaaaaactgtcatgtttcaggaggtgctgggatcgggggagttttagagcctttgcaagcggggccggttatcatagaggatgattgctttataggtgctagatcagaaatagctgaaggagtccttgttgaaaaaggagcagttatttccatgggtgtttatattggtgcatcaaccaaaattatagacaggaacactggtgaaataacttatggaaaagttccagcatactcagtagtggtaccgggaagtataccaaataaaaaaaatcctgataggccaagtttatattgtgcagttatcgtcaaaaaggtagatgaaaaaactagaagcaaaacctcaattaatgatttattaagagactaat

SEQ ID NO: 233508 - DNA, 646 bp, Unknown
  Bacterial polypeptide expressing nucleotide sequence isolated from the Sargasso Sea
atgttaagtttcagattatatccaatggaaaatttgaatggtccatatagtagctggtatgacaaagctcacttactaaagggcaagactgcaggatggacaaaagaagatcatgagaaagcaggttttagaatggtgcctaactcaccagtaagaaaaggaagttttgttggcaagaatgcagttttaatgccatgctacgttaacattggtgcttacatagacgaaggaacaatgattgatacatttgcaagagcaggaagctgtagccaaattggaaaaaattgtcatatctcagcaggttcgggtgtgggtggagttttagaacctgcacaagctctgccgactattatcgaggataatgtttttttaggtgcaatgtctgaagttgtagaaggtgtaattgtaggtgaaggatccgtgctgagtatgggaatgtatataggacaatctactaaaattgttaataggaagactggagaaattacttatggaaaaattcctccttattcagttgtagttccaggttcacttcctgataaaaatagccctactgctccctcactatattgtgcagtaataattaaacaagtagatgagaaaacaagatctaaaacttctattaacgatctcttgagagaatagt

SEQ ID NO: 233509 - DNA, 826 bp, Unknown
  Bacterial polypeptide expressing nucleotide sequence isolated from the Sargasso Sea
atgaacttagaaaaaattgaaaaatctataaatgatgctttcgaaaataaggctaaattagatagctctaacaaagaggttactgagttaattcggaaaactatagacttgttagataacggtaaaattagagttgccgaaaagaaagatgataaatggcaagtcaatcaatggattaaaaaagctatacttttaagttttcgtgtaaataaaatgaaagcgtctaaaggaccctactctacttggtatgataaaatagatggaaaaacccaagggtggagtgaagaacaagtaaagaaagctggttttaggtatgtccctaacggtgttataagaaaaggggctcacattgctaaaaatgttgtgctaatgccttcttttataaatgtcggtgcttacgttgatgaaggaacgatgatcgacacttgggcatccgtaggatcatgtgctcaggttggaaaaaattgtcatatttctggtggtgcaggtataggtggtgttttggaaccaatgcaagccaatccaactattgtggaagataattgttttttaggagcaagagcagaaatagcagaaggtgttattgttgaaaaaggatcggtattatcgatgggtgtttatatcggagcgtcaacaaggatagttgatcgtgctactggtgaaattcattatggtagagttcctgcttattctgttgttgtaccaggctcaatgccaagtaaaaataatcctgaaggtccatcattatattgtgtagtaattgtaaaaaaagtagacgaaaaaactagaagcaaaacttctataaacgatttgttaagagattaaa

SEQ ID NO: 233510 - DNA, 823 bp, Unknown
  Bacterial polypeptide expressing nucleotide sequence isolated from the Sargasso Sea
atgagtgatatagaaaaaattattaatgatgcctgggaaaatagaaaagatatttctccaaattctgacaaaaaaattattgacacaataaatgatactattcaaaaattggatgagggtaaaataagaactgctaataggtctgaagatggaaaatggattacaaatcaagtagctaagaaagctatattgctctctttcagaacaagtaaaatgaccacaacaacgggcccatatgctacttggtttgataaggtgccaggcaaaacacaaggttggactgtagatgaccatagaaaggctggatttcgtcaagttccaaatggagtaatacgaaaaggatcttacattgctcctggagtagtttgcatgccttcattcgtgaacataggggcatatgttgacagcggcacgatggtcgatacttgggtaacggtaggatctggagctcagataggaaaaaattgtcacctaagcggaggagttggaattggaggcgtcttagaacccgttcaagctggtccaactattattgaagatgggtgttttataggcgctagaagtgagattgtcgaaggtgttattgtaagaaaaaatagtgttatatcaatgggtgttttcatcggctcaagcaccaagatagttcgtcgtgatacaggcgaaatattaatgggagaagttccagaaggcagtgtggttgtacctggagcattaccttcaaaaaaacctggatcaccttctttatactgtgcagtaattataaaaacagttgatgaaaaaactagatcaaaaacaagtttgaatgagttattgagagactagc

SEQ ID NO: 233511 - DNA, 829 bp, Unknown
  Bacterial polypeptide expressing nucleotide sequence isolated from the Sargasso Sea
aatgaaaccagatgaactagaaaaaattattagtgaagcttttgagaacaagcaaagtgtttcggaaaactctgataaaaaaatcttagatgcaattaaagaaacaatcgagttaaccgatagcggtaatgttagagttgctgaaaaaaaaaatggaaaatggtcagtaaaccaatgggtaaagaaaggaattttattaagttttagagttaataaaatgactatgtcaaaaggcccttatacaacttggtacgacaaagttcctggtaaatctgtgttatggaatgaaagtgattggaaaaaagcaggatatagacatgttcctaatggcgtagttagaaaaggatcttttattgcaaagggtgtcgttttaatgccttgttttgtaaatcttggagcatatgttgacgaaggtacaatgatagatacttgggcatctgtaggatcatgcgcgcaagttggaaaaaattgtcatgtttcaggaggtgcgggtataggaggagtgctagagccgttgcaagccggacctgtaataattgaagacaactgttttattggtgctcgatctgaaattgctgaaggtgttctggttgaagaaggttctgtaatttcaatgggtgtatatattggagcatcaacgaaaatagtagatagagaaactggagaagttacttacggaaaagttccagcctactctgttgttgtgcctggttctatgccaaataaaaaaaatccgaatggcccatctttgtactgcgcagtgatagtaaaaaaagttgatgaaaaaactagaagtaaaacatcaatcaatgaattattaagagattaa

SEQ ID NO: 233512 - DNA, 523 bp, Unknown
  Bacterial polypeptide expressing nucleotide sequence isolated from the Sargasso Sea
ggatttagaatggttccaaattctccagttagaaaaggatcatttgttggaaaaaatgctgttttgatgccatgctatgtaaatatcggagcttatatcgatgagggaacgatgatagatacatttgcaagagcaggtagctgttgtcaaatcggaaaaaattgtcatatatcagcaggatcaggggttggtggagttttagaacctgcacaagctttacctacgataatcgaagataatgttttccttggagctatgtcagaagttgttgagggggtgattgttggggaaggttcagttttaagtatgggtatgtatataggtcaatcaactaaaatagtcgatcgaaaaacaggtaatatcacttatggtaaaattccaccgtactcagttgttgtcccaggttcattgccagataaaaataattcggctgcaccgtcgttgtactgtgctgtaataattaagcaggttgacgaaaaaacaaggtcaaaaacttctataaacgaccttttacgagactgaa

SEQ ID NO: 233513 - DNA, 829 bp, Unknown; identical to SEQ ID NO: 233414
  Bacterial polypeptide expressing nucleotide sequence isolated from the Sargasso Sea

SEQ ID NO: 233514 - DNA, 748 bp, Unknown
  Bacterial polypeptide expressing nucleotide sequence isolated from the Sargasso Sea
ttagttaaggctattaatgaaactataaatttagttgatagtggaaaaattagagtagcaaataaacgagatggaaattggatagtaaatcaatggattaaaaaagctattttgttaagctttagaataaacaaaatggagatgatgaaaggcccatacacaacttggtatgacaaagtaccgggcaaaacggtaaagtggaaagataaagattggaaaaaggcaggatatcgccacgtgcctaatggagtggtaagaaaaggagcctttattgctaaaaatgttgttttaatgcctagttttgtaaaccttggagcttatatagatgagggtacaatgattgacacttgggcgtctgttggctcatgtgctcaagttggaaaaaattgtcatatctctggaggagcaggtataggaggtgtgcttgaaccacttcaagctggaccggtaattattgaggataattgttttatcggcgctcgatctgaaattgctgaaggtgtattagtagaagaaggtgcagtattatcaatgggagtttacatcggcgcatctacaaaaatagtggatagaagttctggagaaatacattatggtaaagtgcctgcatattctgttgttgttccgggaagcttacctaacaaatcgaacccaagtggaccttcattatattgtgcagttatagttaaaaaggttgatgaaaaaactagaagtaaaacttctataaatgaattgcttagagactaat

SEQ ID NO: 233515 - DNA, 781 bp, Unknown
  Bacterial polypeptide expressing nucleotide sequence isolated from the Sargasso Sea
aaacaaaatatatccgactcttctgataagaagattttttatgctataagtgaaacaattaatttgactgataaaggatcgataagagtagcagaaaagaaaaatggtaaatggtctgtcaatcaatgggttaaaaaggcaattttactaagtttcagaacaaataaaatgacaatgtctaaaggtccttacacaacttggtatgataaagttccaggcaaatcagttagttggaatgaagctgattggaaaaaagctggttatcgacacgttccaaacggagttgtaagaagaggttcttacattgcaaaaaatgtagttctaatgccatgttttgtaaacttaggtgcatatgttgacgagggaacaatgatagatacttgggcatctgttggttcatgtgcgcaaataggaaaaaactgccacgtttcaggcggtgctgggatcggtggagttttagagcctttacaagcaggcccggttatcattgaggataattgctttataggtgctagatcagaaatagctgaaggagtccttgttgaaaaaggagcggtcatttcaatgggtgtttatataggtgcgtcaaccaaaattatagacaggaacactggtgaaataacttatggaacagttccagcatactcagtagtggtaccaggaagtttaccaaataaaaaaaattctgacgggccaagtttatattgtgcagttatcgtcaaaaaagtggatgaaaaaacaagaagcaaaacttcaattaatgatttattaagagactaat

SEQ ID NO: 233516 - DNA, 862 bp, Unknown
  Bacterial polypeptide expressing nucleotide sequence isolated from the Sargasso Sea
atgggtgatagccaattggagtccataatagataaggcttgggaagatcgtgaatctatcacaagcgccacttctggtgaaataagagatgctgtggaagcggctttagagtctatggactcaggtaaggagcgcgtggcttcgccattaggcgaccacaaatggagggtaaaccaatggctaaaaaaagctgtcctattatcctttaggctcaacgatatggagatgatttcaggtggtcctggtgacaaccaaaggggtgcatcggcttggtgggataaggtaccgtcaaagttctcaggttggtcagatgagcagtttaaaagttcggggctccgagctgtgccaaattgtgttgttcgccgttccgcgtacatagcacctggcgtcgttttgatgccaagttttgtcaatttaggtgcctatgtagacagtggaacaatggttgatacctgggcgaccattgggtcatgcgctcaagtgggcaaaaattgtcatatatctgggggtgcaggcatagctggtgtattggagcctatgcaggctgatcccgtaataatagaggataactgcttcataggggcacgatctgaagtggcagaaggcgtcatagttgagaccggatctgtactgagtatgggagtgtatattggcgcatcaacgaaaattattaacagagaaacaggtgagattacgatgggtagagtacctgcatactcagtagtagtaccaggggcgatgccggggaagccgctgccggatggctcgccagggccatcactctattgtgctgtaattgtgaagcaggtagatgaacaaacacgtaacaagacatcaataaacgagctcctgcgcgattaaa

SEQ ID NO: 233517 - DNA, 722 bp, Unknown
  Bacterial polypeptide expressing nucleotide sequence isolated from the Sargasso Sea
aatgaacttagaaaaaattgaaaaaactattaacgaagcttttgaaaataaagaaaaaattaatagctcagataaagctctaaacgacttagtgcgtgagactatagacttattagacaacggtaaaattagagttgctgaaaaaaaaggtcataaatggcaagtcaatcaatggattaaaaaagcaatacttttaagttttcgagttaataaaatgaaagcttctaagggaccctactctacttggtacgataaaatagatggtaaaactcaaggatggagtgaggaacaagttaagaaagctggatttagatatgtgcctaatggcgtaattagaaaaggagctcacatagcaaagaatgttgttctaatgccatcctttattaatgtaggtgcctatgtcgatgaaggaacaatgatagatacttgggcttcagtaggatcatgtgctcaggttggaaaaaattgtcatatttctggtggtgctggtattggtggtgtcttagaaccaatgcaggcaaatccaactattgtagaggataattgttttataggtgcacgtgctgaaatagcagaaggtgttattgttgaaaaaggatcagtactatcaatgggtgtttatatcggtgcatctacaagaatagtggatcgtgctactggtgagattcattatggaaaagttcctgcttattcagtggttgttcctggttcaatgccaagta

SEQ ID NO: 233518 - DNA, 835 bp, Unknown
  Bacterial polypeptide expressing nucleotide sequence isolated from the Sargasso Sea
atgacccaacaactccaaaccctcatcgacaacgcctgggaaaaccgcgccagcctctcgcccgccgccgcccccaaggagatccaggacgccgtcgagcacgtgattgccgagctgaacaacggcaagctgcgtgtggccacccgcgaaggcgtgggccagtggaccgtgcaccagtggatcaagaaggccgtgctgctgtctttccgcctgaaggacaacgaagtcgtcaaggccggcgacctgggcttttacgacaaggtgcagaccaagtttgcccacctgtccgaagaagaaatgaaggctactggcgtgcgcgtggtgccacctgctgtggcccgccgtggcagcttcatcgccaagggtgcgatcctgatgccctcgtacgtgaacatcggcgcctacgtgggcgaaggcaccatggtcgacacctgggccaccgtgggctcgtgcgcacagatcggtgcgggcgtgcacctgtccggcggcgtgggcattggcggcgtgctggagcctctgcaggccggccccaccatcattgaagacaactgcttcatcggtgcccgttccgaggtcgtcgaaggcgtggtggtggaagagaattccgtgctgggcatgggcgtgtacctgggccagagcaccccgatcttcaaccgtgccaccggcgaaatcagctacggccgcgtgccttcgggctcggtggtggtgagcggcaacctgcccaagaccgccgccaacggcgcaccttacagcatgtacgctgccatcatcgtcaagcaggtggacgcgcaaacccgctcgaagaccagcatcaacgacctgctgcgcgactgat

SEQ ID NO: 233519 - DNA, 829 bp, Unknown
  Bacterial polypeptide expressing nucleotide sequence isolated from the Sargasso Sea
atgtcgcaacaacttcagcaaatcatcgataccgcctgggaaaaccgcgccgagctgtcgccgaaggccgcaccggccgacgtccgcgaagccgtcgcgcacgcgatcgagcagctcgacaaaggcgcgctgcgcgtggccgagaagatcgacggcaactggaccgtgcaccagtggctgaagaaggccgtgctgctgtcgttccgcctggaggacaacgcgccgatgcccgccggcggctactcgcagttctacgacaaggtgccgtcgaagttcgcgaactacaccgctgaagatttcgccgcgggcggcttccgcgtcgttccgccggccatcgcgcgccgcggctcgttcatcgcgaagaacgtcgtgctgatgccgtcgtacaccaacatcggcgcatacgtcgacgaaggcacgatggtcgacacgtgggcaacggtcggctcctgcgcacagatcggcaagaacgtgcacctgtcgggcggcgtcggcatcggcggcgtgctcgagccgctgcaggcgaacccggtcatcatcgaagacaactgcttcatcggcgcacgctcggaagtcgtcgaaggcgtgatcgtcgaggaaaactcggtgatctcgatgggcgtgtacctcggccagagcaccaagatctacgaccgcgagacgggcgaagtcagctacggccgcatcccggccggctcggtcgtcgtcgccggcaacctgccgtcgaaggacggctcgcacagcctgtactgcgcggtgatcgtcaagaaggtcgacgcgaagacgcgcgcgaaggtcggcctgaacgagctgctgcgaggcgactgat

SEQ ID NO: 233520 - DNA, 607 bp, Unknown
  Bacterial polypeptide expressing nucleotide sequence isolated from the Sargasso Sea
ggtccttatagtagttggtacgataaatctcatttattaaaaggcaaaactgcaggatggtcaaaggaagatcatgagaaagctggctttagaatggtgcctaattcaccagtaagaaaaggatcatttgttggtaagaatgctgtactaatgccatgctatgtaaatattggagcatatattgatgagggaacgatgatcgatacatttgctagagcaggtagctgttgtcaaattggaaaaaattgtcatatctctgctggatcaggtgttggaggagttttagaaccagctcaagctttacctacaattattgaagataatgtttttttaggagctatgtcagaggtagtagagggagtaattgttggagagggttcagttttaagcatgggtatgtatattggtcaatcaacaaaaatagtagatagaaagactggaaaaattacttatggcaaaattccaccttactcagttgttgttccaggttcattaccagataataataattcatctgcgccatcattatattgtgctgtgataataaaacaggttgatgagaaaacgagatcgaaaacatctataaacgatcttttaagagattaaa

SEQ ID NO: 233521 - DNA, 838 bp, Unknown
  Bacterial polypeptide expressing nucleotide sequence isolated from the Sargasso Sea
atgaaaaatgtagaacaaattataaaaaatgcctttgaagataaagaaaaaataaataaagacacaaatggtgaagttagagatgctgtagaatatactctaaatcaattggataatggatctataagagtttgtcagaaaattaatggagagtggatagtaaatcaatggataaaaaaagctattcttttaagttttagattaagtgataacgaaataataaaagcttcacatgcaacctggtttgataaagttgaaagcaaaacagcaaagtggacaaaagacgatcatttaaaagcaggctttaggtatgttcctgacgcagttgtaagaaaatctgcttatattgctaaaggtgtagttttgatgccatcttttgttaacttgggtgcgtatgttgatgaaggtactatgattgatacttgggctacagttggttcatgtgcacaaattggaaaaaattgtcatatatctggagggacaggtattggtggggtcttagaacctttacaagcaaatcctgttattgttgaagataattgttttataggtgcaagaagtgaagttgctgaaggtgttataattggtgaaggttcagttttatcaatgggtgtttttattggagcatctacaaaaatagtagatcgtgctactggagaaattcatatgggaaaagttccaccctactcagttgttgttgctggatcaatgcaaagtaaccaaagtgataaaaaattgttggtaactaatcctgcattatattgtgcagtgatagtgaaaaaagttgatgagagaactagaagtaaaacatctattaatgaattactacgagattaat

SEQ ID NO: 233522 - DNA, 637 bp, Unknown
  Bacterial polypeptide expressing nucleotide sequence isolated from the Sargasso Sea
atgagtgaattaaaaaaaattatagagcaagcttttgaacaacgagatgagattagttttaataccaaaggtgagattcgagattcagttgaagaaacactgaatcaacttgatgtaggaaaaatacgtgtatgtgaaaaaattaatgatgaatggatagttaatcaatggataaaaaaagctatacttctgagctttcgattaaatgacaatgaaataatcaaagcatcgcatgcaacttggtatgataaagtcccaagtaaaactgctaactggacaaaagacgatcatgaaaaagctggttttagatatgtgcctgatgctgttgtaagaaaatctgcttttattgcaaaaggtgtaattttgatgccttcctttgtaaacttaggtgcttatgttgatgaaggtaccatgattgatacttgggcaaccgttggttcctgcgcacaaattggtaaaaattgccatatctctggaggtgcagggattggaggagtattagaaccactccaagcaaatccggttattatagaagacaattgttttataggagcaaggagtgaggtagctgaaggagttatcgttggagaaggctcagttctatcgatgggagtttttattggcgcatccacaaaaa

SEQ ID NO: 233523 - DNA, 790 bp, Unknown
  Bacterial polypeptide expressing nucleotide sequence isolated from the Sargasso Sea
taaagatcaaataaaccctaattctgataaaaaaattaaagatactattaatcaaatcatttcagatttggacagtggaaaagttagagttgcagaaaaaatcaatggagaatggataactcatcaacatcttaaaaaagcaatcatgctaagttttagaatttatccaatggagaatttaaatggtccttatagtagttggtatgacaaagctcacttacttaaaggtaaaacagctggatggacaaaagaagatcatgaaaaagcaggttttaggatggttccaaactcgcctgtaagaaaaggatcttttgttggcaaaaatgcagtactaatgccgtgctatgttaatattggagcgtacattgacgaaggtacaatgattgacacttttgctagagcaggtagctgtagtcaaattggaaaaaattgtcatatatctgctgcaagtggagttggaggagtattagaaccagcacaagcactacctacaattattgaggataatgtttttttaggggcaatgtcagaagttgtagaaggtgtaattgtaggagaaggatctgtaataagtatgggaatgtatattggccaatcaacaaaaattgtaaatagaaaaacaggggagattacgtatggaaaaatacctccatattcagttgtggtgccaggatctttgcctgataaaaataatccttcggcaccctctctatattgtgcagttattattaaacaagttgatgaaaaaacaaggtctaaaacatctattaatgacctattaagagattaa

SEQ ID NO: 233524 - DNA, 829 bp, Unknown
  Bacterial polypeptide expressing nucleotide sequence isolated from the Sargasso Sea
atgagtatagaaaatattataaatgatgcttgggaaaatagagatcaagtaaacccgtcatctgaacagtctcttaaagatacaataaatcaagttatcgatgatttagatagtggtagatcgagagtggctgagaaaataaatggtgagtgggtaactcatcaacatttaaaaaaagcaatcatgttgagtttcagattgtatcctatggaaaatttgaatggtccttacagtagttggtatgataaatcgcatttacttaaaggtaaaacagcaggatggacaaaagaagatcatgaaaaagctggttttagaatggtacctaactctccagtaaggaaaggaagttttgtaggcaaaaatgcagttttaatgccatgctacgttaatatcggcgcatatattgatgaaggtacaatgattgatacatttgcaagagcaggaagctgcagccaaataggaaaaaattgtcatatctctgcaggatcaggtgtgggtggtgtattagaacctgcacaagcacttccgacaattatagaagataatgtttttttgggtgcaatgtctgaagttgtagagggtgtaattgtaggagaaggatcggttctaagtatgggaatgtacattggacaatctacaaaaattgttaatagaaaaactggtgaaattacttacggaaaaattcctccttattcagttgtggttccaggttcacttccagataaaaataattcatctgcaccctctctgtattgtgcagtaataatcaaacaagttgatgagaaaaccagatcaaaaacttctattaacgatctcttgagagaataat

SEQ ID NO: 233525 - DNA, 826 bp, Unknown
  Bacterial polypeptide expressing nucleotide sequence isolated from the Sargasso Sea
atgagtgaaaatcaaaaattaaaagaaagtattgaaaacgcttgggagaatatagcaaacttgtcaccaagtgatagagacgttacacaagtagtagatcaagtaattaaaaaacttgatggtggtgaactacgaatagctgaaaaagttgatgatcaatggactgtcaatcaatggctaaaaaaagctgtacttatttcattcaggatcaatgaaaatacaatccttagaggaccctacacaacatggtttgataaagttaaaggtaaaactgtcgattgggatgaaaatcaatggaaagaagcaggttatcgacacgtacccaatggtacagtaagagagggttcatttattggtaagggtgttgtcttgatgccttcatttgtaaacattggcgcctatattgatgaaggaactatggttgacacatgggcaactgtaggttcatgcgcgcagattggaaagaattgccatctctctggcggggttggcatcggtggcgttcttgaacctcttcaagcaaatccagtaataattgaagataattgttttgtaggtgctagggctgaggttgcggagggtgtaattgttcgagaaggatcagttttatctatgggcgtttatctgggcgcttccacaaaaatagttaatcgtgcaactggagagataatgtatggtgaagttcctgcatactctgtcgttgttcctggaacaatgccaaatgaagactcatcaaaaccaagtctttattgtgtagtcatagttaagacagttgatgaaaatacgagaaaaaaaacctccattaatgatcttttaagagagtaaa

SEQ ID NO: 233526 - DNA, 832 bp, Unknown
  Bacterial polypeptide expressing nucleotide sequence isolated from the Sargasso Sea
atggctaatacaaatttagaaagaataattaacgaagtttgggaggatagagaggccatctctccaaatacatcaggtgaacggcgcgatgcagttgaagaagtgttggacgctcttgataaaggtacgataagggtggcggtaagacaagataatggagattggcgggtaaatcagtgggtaaaaaaagccgttgttttaagttttcgattattcaatatggttgagcagaaaggtggcccacaggaagctacatggtgggataaagtagatagcaaattcaagaactggacagcagatgagtggaaatcaaaaaattttagagctgtcccaaattgtatcgtcaggaaatctgcttatattgcaccaggcgtagtactaatgccttcatttgttaaccttggtgcttatgttggagagggcacgatggttgacacatgggccactgttgggtcatgcgctcaaatagggaaaaatgtgcatttatctggtggcgtaggtattggtggggttcttgaaccacttcaggcaggacccacaataattgaagacaactgtttcataggagcaagatcagaagtggtcgaaggctgcataataagagaaggagcggttctaggtatgggagttttcataggaaaatcaacaaaaatcttagacagagaaacaggcaaaatttcatttggagaggttcctccctactctgtagttgttccaggagctttacaaacagaaagacctgaagtcagccttgcttgtgcagttattgttaaaaaggttgatgagaaaacaagatcgaaaacatcaataaatgaattattacgttcttaat

SEQ ID NO: 233527 - DNA, 805 bp, Unknown
  Bacterial polypeptide expressing nucleotide sequence isolated from the Sargasso Sea
tatgtctatagaaaaaattataaatgatgcttgggaaaacaaggatcaagtaaatcctaattcggatcaatctttaaaggatacgattaatcaagttataagtgatttagatagtggtaaatctcgtgttgctgaaaaagtaaatggtgaatggattactcaccagcatttaaaaaaagcaatcatgttaagttttagaatttacccaatggaaaatttaaatggaccatactccagttggtatgacaaagctcatttattaaaaggtaaaactgcaggttggacaaaagaagaccatgaaaaagctggttttagaatggtaccaaactcacctgttagaaaaggatcattcgtaggaaaagatgctgttcttatgccatgttatgtaaacattggtgcttacattggggctaaaactatgatggatacgtttagccgtgctggtagttgttgccagattggagaaagttgccatatatctgctggttctgggatcggcggagtactagaacctgctcaagcattaccaacaatcattgaagataatgtgtttgttggagccatgtctgaagttgttgagggagtaattgttgaggaaggaagtgttctctcaatgggatgctatataggccaaagtactaaaattatcaatagatcaaatggagaaattacaaaaggtcgtatacctccatattcagtagttgtaccaggcacacataaagatctttacgctgttcatataattaaaactgtggactctaaaactaggtcaaagacttcaatcaacgatcttctaagagactaa

SEQ ID NO: 233528 - DNA, 783 bp, Unknown
  Bacterial polypeptide expressing nucleotide sequence isolated from the Sargasso Sea
tattaatcaaaacttctgatcaatcaataataaattcaataaatcagataattgaaaatgtagatcaggggaaaatgcgtgttgctgaaaaaattaataatgaatgggtaactcaccaacatattaaaaaagctataatgttgagctttaggatttacggaatggaagccttatcaggaccttacagttcttggtatgataaagcacatctacttaaaggcaaaactgctggatggcaaaaagatgattttgaaaaagcaggatttcgaatggtgccaaattcccctgttagaaaaggatcatacattggtaaaaatgttgttttaatgccatgctttattaatattggtgcgtatgttgattcaggaactatgatggatacattttcaagagctggatcttgttgccaaataggaaaaaattgccatatatcagcaggtagtggagtaggtggagttttggaacctgctcaagctttaccaactataattgaagataatgtttttctaggagcaatgtcagagattgttgaaggggtaattgtagaagaaggatctgtaattagtatgggaatgtatataggtcaatcaacaaaaatagttgatagaaaaactggagaaataacctatggtaaaataccggcttattctgttgttgtgcctggttccttgccagataaaaataatccaaatgctccgtcattgagttgtgcagttattattaaacaagttgatgaaaaaactagatctaaaacatcaatcaatgatttattgcgtgattaat

SEQ ID NO: 233529 - DNA, 829 bp, Unknown
  Bacterial polypeptide expressing nucleotide sequence isolated from the Sargasso Sea
atgtctattgaaaaaattataaacgaagcttgggataataaagatcaagttaatcaaaattctgaaaaatctttaaaagaagcaatagaccaagttattatggatttagataccggtaaatcaagagtcgcagaaaaaattgatggtgaatggaaaactcaccaacatcttaaaaaggcaatcatgcttagtttcagaatccatggtatggaaactttagctggaccttattcgagctggagagataaaagcaacattttaaaaggtaaaacagctggatggggagataaagaatttgaagaggcaggctttagaatggtgccaaattctcctgtaagaaaaggatcttttattgggaaaaatgtagtcttaatgccatgctttgttaatataggagcatatatcgatcaaggaacaatgatggatacttttagtcgagcaggaagctgttgtcagataggtaaaaattgtcatatatcagccggaagtggagttggtggtgttttagagcccgctcaagcacaaccaaccataattgaagataatgtttttcttggagctatgtccgaggttgttgaaggtgtaatagtaggtgaaggttctgttttaagtatgggtatgtatattggtcaatcaacaaaaattgttgatagaaaaacaggagaaatcacttatggaaaaattccaccttattcagttgtggttcctggttctctaccagataaaaaaaatccatctgcaccatctttaagctgtgcggtaataattaagcaagttgacgaaagaacaagatctaaaacttcaataaatgatcttttgagagattaag

SEQ ID NO: 233530 - DNA, 667 bp, Unknown
  Bacterial polypeptide expressing nucleotide sequence isolated from the Sargasso Sea
attaagaaagctattcttttaagctttcgattaagcgataatgaaatcattaaagcatcacatgccacttggtttgataaagtggaaagtaaaactgcgaattggactaagtacgatcatttaaaagcaggatttagatatgtgccagatgctgttgttagaaaatctgcatatattgctaagggagttgtactaatgccatcatttgtaaaccttggagcatatgtggaccaaggaacgatgatagatacttgggctacagttggatcttgcgcacaaataggtaaaaattgtcatatatcaggaggagctggaattggtggagttttagagccattacaagcaaatcctgtaatcatagaagataactgttttataggtgcaagaagtgaagtggctgaaggtgtcataattggtgagggttcagttttatcaatgggtgtttttataggtgcatcaacaaaaatagttgaccgtgctactggagaaattcatatgggaaaagttccaccttattcagtagttgttgctggctctatgccaagtagtcaaggtgaaaaaaaatggcttgttactaatccaggattatactgtgctgtaattgttaaaagagtggatgaaagaactagaagtaagacttctataaatgagttattacgcgattaat

SEQ ID NO: 233531 - DNA, 862 bp, Unknown
  Bacterial polypeptide expressing nucleotide sequence isolated from the Sargasso Sea
aatggaaatagaaaacatgaaatcagttatagaaagagtttttgataataatgaagatattaacccaaatactactggtgaaattagaaattctattgaaactgcattagattatttagatcaaggaaaattaagagtggctgagccattgggaaatagtaaatggcatgtaaatcaatggctaaaaaaggctgttttattatcatttaagataaatgatatggatgtaatttctggaggaccaaaaagtcaaaatacgggtccagccaattggtgggacaaaattccttctaagttttcaggatggaataaagaagagtttaaaaaagctggttttagagcagtccctggaagtgtggtaagacattctgcttttattgcacctagtgttgtattaatgccatcatttgtaaatattggtgcttatgttgatagtgggagtatgattgatacgtgggcaactgttggatcctgcgcgcaaataggtaaaaatgttcatatttcaggtggtgcaggtattgggggtgttttagaacctattcaagcaggaccagttgttatagaagacaactgttttgttggagcaagatccgaagtagcagaaggagttgttattgaaacaggagctgtgttatcaatgggagtttttattggtgcatctacaaaagttattgatagaaatacaggcgaactctttataggtagggtgcctgcatattctgttgtagttccgggttctcttccaggaaaaccgttacctaatggctcgcaaggaccaagtttatattgtgctgtaattgtaaaaaaagttgatgctcagacacgttcaaagacatctgtaaacgaattattacgagattag

SEQ ID NO: 233532 - DNA, 829 bp, Unknown
  Bacterial polypeptide expressing nucleotide sequence isolated from the Sargasso Sea
tatgtctatagaaaaaattataaatgatgcttgggaaaacaaagatcaagtaaattcaaattcggatcagtctttaaaggatacaataaatcaagtaataaatgacttggatagtggtaaattaagagtagctgaaaaaataaatggagaatgggtaactcatcaacatctaaagaaagcaattatgctaagttttagaatttatcctatggagaatttaaatggaccttactctagttggtatgataaggcacatttgttgaaaggaaaaacagctggttggacaaaagaagatcatgagagagcaggttttaggatggttccaaactcacctgttagaaaaggatcattcgttggaaaagatgctgttcttatgccatgttatgtaaacattggttcttacattggagcaaaaacaatgatggatacatttagtcgtgctggtagttgttgccaaattggggagaattgccacatatctgcagggtctggtgttggaggggtactagaacctgcccaagcattacctacaataatagaggataatgtatttttaggagcaatgtctgaggtagttgaaggggtgattgttggagaaggttctgtattaagtatgggaatgctgatcacacaatctacaaaaattgtaaatagatcaactggtgagatcacgtatggaaaaattcctccatactcagttgttgtaccaggttctcttcctgataaaaaaaatccatctgctccatcactaagttgtgcagtaataatcaagcaagtagacgaaaagactagatcaaagacatcaattaatgatcttttaagagattaa

SEQ ID NO: 233533 - DNA, 582 bp, Unknown
  Bacterial polypeptide expressing nucleotide sequence isolated from the Sargasso Sea
aagctcatttattaaaaggaaaaacagctggctggacaaaagaagatcatgaaagagcaggatttagaatggtgccaaattcaccagtgagaaaaggatcatttgttggaaaaaatgctgtcttgatgccatgttatgtaaacattggagcatacatcgatgaaggaactatgatagatacttttgcaagagccggtagctgtagtcaaataggtaaaaattgtcatatatccgctggttcaggaattggcggcgtattggaacccgctcaagcactaccaacaattattgaagatggagtcatgatcggagcaatgtcggaaattgtggagggagtaattgttggtgaaggatcagttgttagtatgggtatgtatattggtcaatctacaaaaattgttaacagaaaaactggagaaataacttacggaaaaattccaccttattctgtagtagttccaggcactttacctgacaaaaataaccctaaaggaccttctttatattgcgcagtgattattaaacaggttgatgaaaaaacaagatctaaaacatctatcaatgatcttttgagagattaat

SEQ ID NO: 233534 - DNA, 829 bp, Unknown
  Bacterial polypeptide expressing nucleotide sequence isolated from the Sargasso Sea
tatgtctttagaaaaaattattactgatgcgtgggaaaaaaaggatcaaataaatcaaaattctgaccaaaatattaaagatgctatcgatcaagtaattatagatctagatagtggcaaatccagagtggctgaaaaaattaatggtgagtgggtgacacatcaatatttaaaaaaagctatcatgttaagttttagaatttatccaatggaaaatttaaatggcccttatagtagctggtatgataaatctcatttattaaaaggtaagactgctggatggtcaaaagaagaccatgaaaaggctggttttagaatggtacctaattcaccagttagaaaaggatcatttgttggaaaaaatgctgtattaatgccttgttatgtaaacattggggcgtacatagatgaaggaacaatgatagatacatttgctagggcaggtagctgttgtcaaattggaaaaaactgtcacatatcagctggttcaggagttggaggggttttggaacccgctcaagctttaccaacaataattgaagataatgtttttttaggagctatgtctgaagtagttgagggtgttattgtcggagaagggtcagttttaagtatgggtatgtatattggccaatccacgaaaataattgatcgaaaaactggaaaaattacttatggtaaaattccaccctactcagtagttgtcccaggttcattacctgataaaaataattcttcagcaccatcactatattgtgcagtaataattaaacaagttgatgaaaaaacaagatcaaaaacatctataaatgatcttttaagagactaa

SEQ ID NO: 233535 - DNA, 724 bp, Unknown
  Bacterial polypeptide expressing nucleotide sequence isolated from the Sargasso Sea
atgagtgaattaaagcaaattatagaggaagcttttgaaaacagggataaaataaattttaatactaaaggtaaaattagagagagtgttgaagaaactttaaatcaacttgatgtaggtaatatacgtgtttgtgaaaaaattaataatgattgggtagttaatcaatggattaaaaaagctattcttttaagctttcgattaaatgataatcagatagtaaaagctccccacgcgacctggtatgataaagtaccaagtaaaactacaaattggacgaaagatgatcatgaaaaagctggttttagatatgtgccagatgctgttgtaagaaaatctgcttttattgctaaaggtgtaatcttaatgccctcttttgtaaatttaggagcttatgttgatgaaggaacaatgattgatacttgggcaacagtaggttcttgtgcacaaattggtaaaaattgtcatatatctggtggtgcaggtattggtggagttttagaacctcttcaagctaatccagttattattgaagataattgttttataggggcaagaagtgaagtagctgaaggagttattgttggagaaggttctgtactatctatgggtgtatttattggtgcatcaacaaaaattattgatagagcaagtggagaagttcatatgggaaaagtgcctccatactccgttatagtaccaggctcaaatccaggtaaaaaac

SEQ ID NO: 233536 - DNA, 652 bp, Unknown
  Bacterial polypeptide expressing nucleotide sequence isolated from the Sargasso Sea
gctgctttcgttccgcctgaatgatatgaaaacgataaataatagcccaggagacgggaattggtgggacaaagttccgtcaaaatttgagaattggggtagaaaggaatttatcgacgcagactttagagctgttcctaactgtgtggtaaggaagtcagcctatatagcccctggggctgtattaatgccttcatttgttaatcttggtgcttatgttggaaagcgtactatggtcgatacatgggctacaattggctcatgtgctcaaattggcgaagattgtcatatatctggtggtgcaggaattggtggagttttagaaccactgcaagctgacccagttattattgaagataactgttttatcggcgcaaggtccgaggtggccgaaggtgtaattgtaggtgagggagccgtcttatcaatgggtgtttttatcggagcgtcgacaaaaatagtgaacagaagcaccggagatattattaccggaaaagttccaccctattctgttgttgtgccaggctcaattccaagtgcaccattaagtgatggatcgccagcgcctagtctatactgtgcagtaatagtaaaaaccgtggatgaaaaaacacgatcaaaaacctcaatcaacgagttgctgagagactag

SEQ ID NO: 233537 - DNA, 832 bp, Unknown
  Bacterial polypeptide expressing nucleotide sequence isolated from the Sargasso Sea
atgagtgatataaaaaaaataataaatgatgcctggaaaaataaagatcaaataaaccctaattctgataaaaagattaaagatactattaatcaaatcattgcagacttagacagtggaaaagttagagttgcagaaaagattaatggagaatgggtaacccatcaatatcttaaaaaagcaatcatgttaagttttagaatttatccaatggagaatttaaatggtccgtatagtagttggtatgacaaagctcacttacttaaaggtaaaacagcaggatggacaaaagaagatcatgaaaaagcaggttttaggatggttccaaactcacctgtaagaaaaggatcttttgttggcaaaaatgcagtccttatgccgtgttatgttaatataggtgcgtacattgatgaaggtacaatgattgacacttttgctagagcaggtagctgtagtcaaattggaaaaaattgtcatatatctgctgcaagtggagttggaggagtattagagccagcacaagcattgcctacaattattgaagataatgtttttttaggagcaatgtcagaagttgtagaaggcgtaattgtgggagaaggatctgtaataagtatgggaatgtatattggccaatcaacaaaaattgtaaatagagaaacaggagagattaagtatggaaaaatacctccatattcagttgtggtgcctggatctttgcctgacaaaaataatccttcagcaccttctctatattgtgcagttattattaaacaggttgatgaaaaaacaaggtctaaaacatctattaatgacctattaagagattaat

SEQ ID NO: 233538 - DNA, 814 bp, Unknown
  Bacterial polypeptide expressing nucleotide sequence isolated from the Sargasso Sea
atgactattaatatagaattaattgaacaagcatttgataacaatttagatggcgtagatgttgcggcagttgaggaaaatgttaatgaagtttttaattctctgaattcaggaaatatccgagtagcttacaagaacggagaagaatggattgttaatcaatggataaaaaaggctatccttctatctttcaaattgaaaaataacaaattaacagatgtcggttacacaaaatattatgataagttagcttcaaaattcgagaatataagtgaaaactatctaaaagaaaataatatacggatagtacctcaagctattgcaagagaaggaacttttatcggcaataatgttgtactgatgccatcatatgtaaatataggagcctatgttgattcaggcactatggtagatacatgggctactgttggttcatgcgctcaaattggtaaaaatgtacatctatctggaggagtaggtattggaggagttttagagcctctacaagctaatccaactataatcgaagataactgttttataggtgccagatcagaaattgttgaaggagttatagttaagaaaaattctgtaatttctatgggtgtttatattggcaaaagtactaaaatatatgatcgagaaactgatcaaatatcatacggattaatacctgagggctctgtagtagtatcaggttctttaccctcttcagacaataaatataatttatattgtgcagtgattgtcaaaaaggttgatgaaaaaactcgtagtaaagtgagtattaacgaattacttagagaagcttaga

SEQ ID NO: 233539 - DNA, 829 bp, Unknown
  Bacterial polypeptide expressing nucleotide sequence isolated from the Sargasso Sea
atgtctattgaaaatattataaacgaagcttggataaataaagatcaaattaatcctagctccgaaaaaaaaattaaagatacaattgataaaattatagatgatttagacagtggaaaaataagagttgctgaaaaaattaatggtgaatgggtgacgcaccagtacatcaaaaaaggaattatgttaagttttagaatttatgggatggaggcattaagtggtccgtatagcagttggtatgataaagctcatttattaaaaggcaaaacagctggatggacaaaagatgatcacgaaaaggctggttttagaaacccaccaaactctccaattagaagaggttcttttataggtaaaaatgctgttctaatgccctgctacgtaaatattggcgcttatattgatgagggtacaatgatagacacatttgcgagagcaggtagctgttgtcagataggaaaaaattgtcatatatcggcaggatctggtattgggggagttttagagcctgctcaagcattgccaacaattatagaggataatgtttttgttggtgctatgtcagaagttgttgaaggagtaattgtgggtgaggggtcggttctaagtatgggtatgtatattggtcaatcaacaaaaattgtaaatagaaaaactggtgaaattacttatggtaaaattccgccttattctgttgttgtacctggttcattgcctgacaaaaataattcttctgcaccatctttgtattgtgcggtaataattaagcaagttgatgaaaaaacaagatcaaaaacatcaattaatgatcttttaagagagtaaa

SEQ ID NO: 233540 - DNA, 829 bp, Unknown
  Bacterial polypeptide expressing nucleotide sequence isolated from the Sargasso Sea
atggtaaacgaaatagaaataattgaaaatgcttttaataatattgaaaaaatcaattcaaattctgacaaagaaatcctagacgcaattaataatgtaattgaaaaaattgataatggatctttaagagttgcagataaaaaccaaaatgattggcaagttaatgaatatgcgaagaaagcaattttgctatatttccgtataaaagatatgaaattaatttctggtggtcctgatcaatcaaattggtgggacaagattgaccctaaatttaattcttgggatgaaaataaatttgaggaagctggatttagagctgtacctgggtcggttgttagatatgggtcctttattggtaaaggctgtgttcttatgcctagttttattaatattggagcatatgtagatgattcaaccatggttgatacatgggcaacaatagggtcatgcgctcaaattggtaaaaattgtcatatctcagggggtgcaggtattggtggagtattagaaccattacaagcaagccctgtaatcatagaagataattgttttattggtgcaagatcagaagtggctgagggtgttattgtaagagaaggttcagtaatctcaatgggcgtattccttacagcatcaacaccaatttttgacagaagttctggtgaagtcatttatggtgaagttcctaaatattctgttattgttcctggaagcatgccttcaaaaaatgttgattctgctgcaaacttatcttgtgcagtaattgttaaaactgtcgatgagaaaacaagatctaaaacctctatcaatgagctattaagggactaat

SEQ ID NO: 233541 - DNA, 829 bp, Unknown
  Bacterial polypeptide expressing nucleotide sequence isolated from the Sargasso Sea
atgtctttagaaaaaataatcaatgatgcttgggaaaataaagatcaggtaaaccaaaattctgatcaaaatttaaaagatgctattaaccaagttattgctgatttagatagtggtaaatcaagagttgctgagaaaataaatggagaatgggtaactcatcagcaccttaagaaagctataatgttaagttttagaatttacccaatggaaaatttaaatggtccttatagtagttggtatgataaatcacatttattaaaaggtaaaactgcaggatggaccaaagctgatcatgaaaaagcaggttttagaatggttccgaactcaccagtaagaaaaggttcatttgtcggaaaaaacgctgttcttatgccatgttatgtaaacattggagcttatattgacgaaggaacgatgatagatacttttgcaagagctggtagttgttgtcagataggtaagaattgccatatttctgcaggttcgggtgttggtggagttctagagcccgcgcaagctttaccaacaatcatagaggataatgtatttcttggagcgatgtcagaggtagttgaaggtgtaattgttggagaaggttcagttttaagtatgggtatgtatattggtcaatcaactaaaatagttgaaaggaaaactgggaagattacttatggtaaaataccaccttattcagttgtagttccaggctcgttgcctgataaaaataattcttctgcaccctccttgtattgtgcagtaataattaaacaagttgatgaaaaaacaagatctaaaacttctattaacgacctcttaagagactaaa

SEQ ID NO: 233542 - DNA, 832 bp, Unknown
  Bacterial polypeptide expressing nucleotide sequence isolated from the Sargasso Sea
tatgagccatcaagatataattgaaaaattatgggatcaaagagatcagataaattttattgaggataatgaggcaaaaaaaaatatagaaaatgttcttaacctattagatgagggaatgcttcgagtatgtgaaaaaaaagaaaatgaatggcatgtaaatcaatggcttaaaaaagcaattcttttaagttttagaattcaagatatggaaataatcactggcggtccaagtgtaaaagatggaactacttcatggtgggataaagttccctcaaagtttcaagattggaaatcagaaaattttcaatcagctggttttagagctgttcctaactgtgttgtaagaaggtcagcatttattgcaaaaagtgcagtgcttatgccttgctttgttaacttgggtgcatatgtagatgagggaacaatggttgatacttgggctactgttggatcttgtgctcaagttggaaaaaactgtcatatctcaggaggtgcaggtataggaggagtcttagaacctttgcaggcaaatccagttataatagaggataattgttttattggtgcgaggtcagaagtggccgagggtgtaattgttggagagggttcagtattatccatgggggtatttattggtgcttcaacaaaaatttataatcgtgagactaaagaaatttatatgggtaaagtccctccatattctgtagtcgttccgggtagtcttccaagttctaaaggagatgcatcattgtactgtgttgtgattgtgaaaacggttgatgaaaaaactcgttcaaaaacctccgttaatgaattactaagagattaa

SEQ ID NO: 233543 - DNA, 799 bp, Unknown
  Bacterial polypeptide expressing nucleotide sequence isolated from the Sargasso Sea
ttgggaaatagagaccaagtaagtccaaactcagatgagagtttaaaaaatacagttaatcaaattattgatgagttagatagtggtaaagtcagagtagctgaaaaaattaatggtgagtgggtaacgcatcaacatataaaaaaagcaattatgttaagttttagaatgtatccaatggaaaatttaaatggcccctacagtagctggtatgataaagcgcatctattaaaaggtaaaactgcaggctggtctaaaaaagaccatgaaaaagcaggatttaggatggttcctaattctcctgttagaagaggatcgtttataggtaaaaatgcagtcttaatgccatgctatgttaatatcggagcatggatcgactccggaaccatgatggacacgtttagtcgtgcaggtagttgttgtcaaattggaaaaaattgtcatatctctgctggctcagggattggaggagtattagaacctgcccaagcattaccaactattattgaagataatgtttttgttggcgcaatgtcggaggttgttgaaggtgttatagttggagaaggctcagtattaagtatggggatgctgataacgcaaagtactaaaatagtaaaccgggcgactggtgaaatcacttatggcaaaattcctccatactcggttgttgtaccaggttctcttcctgataaaaataatccatctgcaccctcgttaagctgtgcagtaattattaaacaagttgatgaaaaaactagatctaagacatctgttaacgatcttttaagagaataga

SEQ ID NO: 233544 - DNA, 826 bp, Unknown
  Bacterial polypeptide expressing nucleotide sequence isolated from the Sargasso Sea
aatggaggctttacgccaacgtattgaggccgcatttgaagcgcgtgccgacatcacaccaagcactgttgacgccagcgtgcgtaacgatgtgcaaaatgtcatcaatatgctcgataaaggtgaactgcgcgtcgccgagaaaatcgatggccaatggcatgtacatcaatggttgaagaaggcggtattactgtcattccgtattttcgataacgccgttatcgatggtgccgaaaccaaatatttcgataaagtaccgttaaagttcgccgagtatgacgaagcccgctttaaagccgaagccatccgtgtggtgccatcggcaactgtacgtaaaggttcattcatcggtaaaaacaccgtattaatgccctcttacgtgaaccttggcgcctacgttgacgaaggcactatggttgacacttgggcaaccgttggctcatgtgcgcaaatcggtaagaacgttcacttatctggcggtgttggtattggtggcgtactcgaaccgctgcaagcgggtcctaccattatcgaagacaactgctttatcggcgcacgctcagaaatcgttgaaggcgtcgtggttgaagaaggctcagtgatttcaatgggcgtttatatcggccaaagcacccgtatttatgaccgtgaaacaggcgaaatccactacggccgtgtaccagctggctcagtcgtggtatcgggtaacctgccatcggcttgcggtaaatacagcctatacgctgccatcattgtgaaaaaagtggatgcgaaaacccgcggcaaagtgggtatcaacgaactgttacgtatcgtcgattaa

SEQ ID NO: 233545 - DNA, 829 bp, Unknown
  Bacterial polypeptide expressing nucleotide sequence isolated from the Sargasso Sea
tatgtctttagaaaaaattattaacgatgcctgggaaattaaggatcaaattagccctagctcagatccaaagcttaaagatgcaattaatcaaataattgcagacttggatagcggaaaagttagagccgctgaaaaagtaaatggtcaatggattgctcaccaacacattaagaaagcaataatgcttagttttagaatatatccaatggaaaatttaaatggtccttatagtagttggtatgataaagctcacttgttaaaaggtaaaactgctggttggtctaaagaggatcatgaaaaagctggctttagaatggttcctaattctccagttagaaaaggatcttttgttgggaaaaatgctgtattaatgccttgctatgtaaacataggtgcatacattgatgagggcacgatgatagacactttcgcgagagctggcagttgttgtcaaattggaaaaaattgtcatatatctgcagggtctggagttggtggagttttggaaccggctcaagcattgcctacaattatagaagataacgtttttttaggtgcaatgtccgaggtagttgagggagtgatcgttggtgaaggatcggttttgagtatgggaatgtacattggtcagtcaactaaaattgtagaccggaagacaggaaaaatatcttatggtaaaatacctccttactcagttgttgtaccaggaaccttaccagataaaaataattcatcagcagcatcgctatactgcgcagtaataattaaacaagttgatgaaaaaacaagatctaaaacttcggtaaacgaacttttaagagaatag

SEQ ID NO: 233546 - DNA, 805 bp, Unknown
  Bacterial polypeptide expressing nucleotide sequence isolated from the Sargasso Sea
atgtctatagaaaaaattataaatgatgcttgggaaaataaagatcaagtaaatcaaaattcagatcaatcgttaaaagatgcaataaatcaagtaatcagtgatttagacagcggtaaatcacgtgttgcagaaaaaattaatggtgagtggaaaactcaccaacatcttaaaaaagcgatcatgttaagttttaaaatctatccgatgactaatttaagcggtccttatagtagttggtacgacaaagcacatcttttaaaaggcaaaacagcaaactggacaaaagaacagcatgaggctgctgggtttcgtatgactcctaatagtccagtgcgcccaggctctttcattggaaagaatgcagttcttatgccatgctatgtaaacattggtgcctacattggatctggtactatgatggacacttttagtagggctggaagttgttgtcaaattggtgagaattgccatatatcagctgggtcaggaattggaggtgtcttagagcctgctcaagcattaccaacaataattgaagataatgtttttgttggagcaatgtctgaagttgttgaaggagttattgtagaagagggaagcgttctttcaatgggatgctacattggacaaagcactaaaattgtaaatagatcaaatggagagattacaaaaggtcgtgtaccaccttattcggttgtggtaccaggtactcacaaagatctttatgctgttcatataattaaaacagtcgattcaaaaacacgttccaaaacatccattaacgatcttttaagagattaat

SEQ ID NO: 233547 - DNA, 826 bp, Unknown
  Bacterial polypeptide expressing nucleotide sequence isolated from the Sargasso Sea
aatgagtgataatacagaattaaaaaataaaattgaaagtgcttgggaaaatattgctaaaatttctcctaaagatacagacatcgctgatgctgtaaatgaagttataaaaaaacttgataatggacaatttagaattgcagaaaaaaatggcaatgattggattgttaatcagtggttaaaaaaagccgttcttatatcattccgaataaatgataataaaattttaaaaggaccctatacgtcttggtatgacaaggtgaaaggtaaaactgttgattggaatgaggatcaatggaaagaagctggctaccgacatgttccaaatggtaccgttcgcgaaggatcattcataggtaaaggtgtagtgctgatgccgtcctttgtaaatattggtgcttatattgatgaaggcacaatggttgatacatgggcaactgttggctcgtgtgctcagattggaaaaaactgtcacttatcaggcggtgttggtattggcggtgttttagaaccgctacaagcaaatccagtagtaattgaagacaactgttttgttggtgcgagagctgaagttgccgagggtgtaattgttagagaaggatcagttctttcaatgggagtatatttaggtgcgtcaacaaaaattgtgaacaggtccacaggtgaaattagttatggtgaagtacccgcttattctgtagtggttccaggaagccttccaaatgaagaccctaaaaagccaagtttatattgtgttgtaatcgttaaaacagttgatgaaaacacaagaaagaaaacatccatcaacgatttactcagagagtaa

SEQ ID NO: 233548 - DNA, 805 bp, Unknown
  Bacterial polypeptide expressing nucleotide sequence isolated from the Sargasso Sea
tatgtccttagaaaaaataattaatgatgcttgggaaaaaaaagaccaagtaaatcaaaactcagatcaatctttgaaggatgcaataaaccaagtaattaaagatttagatagtggtaaatctcgcgtagcagaaaaaattaatggggaatggaaaacccaccaatatcttaaaaaggctatcatgcttagttttagaatttacccgatggataatttaagcggtccttatagtagctggtacgataaagctcacttgttaaaaggtaaaacagctaattggacaaaggaacaacatgaggctgccggatttcgaatgacacctaatagtccagtaagaccaggatcttttattggaaaaaatgcagtacttatgccgtgttatgtaaacataggagcatacatcggcgctggaacaatgatggatacttttagtagagctggtagctgctgtcaaattggagaaaattgtcatatatcggctggatcaggtattggtggagttttagaacccgcacaagcacttccaactataattgaagataatgtctttgttggagcaatgtcagaagttgtagagggcgttatagtcggagaaggtagtgttctttcaatgggatgttacattggtcaaagtacaaaaattgtaaacagatcaaatgacaaaatcacaaaaggtcgtgttccaccttattcagttgtggtgcctggtattcataaagatctttatgctgttcatataataaaaactgttgacgcaaaaacaaggtcaaagacatcaattaacgatcttttaagagactaa

SEQ ID NO: 233549 - DNA, 829 bp, Unknown
  Bacterial polypeptide expressing nucleotide sequence isolated from the Sargasso Sea
atgtctaatgctatactagagggtgaaatagaggcggcgtggagtgtaagagagacaataagctctaagactaaaggcaaagttcgcgacgccatagaagaaactttggaagctctagataagggaaaacttcgtgtagccgaaaaaacaaaagataatgtttggcaagttaatcaatgggcaaagaaagcggtgcttctaggctttaggattaaagacatggagattcaaagtggtggcccacaggcctcaggatggtgggataaagttgatagtaaattcaaaggttggggtgaggaagcttggaaaaaagccggtttcagggctgtccctaatagtgttgtaagaaaatcagcatatatagcaccaggtgtggttttaatgccttcctttgtaaatttaggcgcgtatgttgatgagggaacaatggttgacacatgggccacagtaggaagttgtgcccaaataggtaaaaatgttcacctttctgggggagttggtattgggggtgttttggaaccaatgcaggcagggcctactatcatagaggataattgttttataggggcaagatcggaagttgtagagggatgcatagtccgggagggatctgtcctgggaatgggagtttatatagggcaatctactaaaatagtagatcgagaaactggagaggttatttatggagaagttccaccttattctgtagttgtttctggttctatgccatcaaaaaataatgtcagtttatattgtgctgtaatagtaaaacgtgttgatgaaaaaactcgaagtaaaactggcataaatgagctattaagagattaat

SEQ ID NO: 233550 - DNA, 151 bp, Unknown
  Bacterial polypeptide expressing nucleotide sequence isolated from the Sargasso Sea
aagataccaccatattcagtagtggtacctgggtctttaccagataaaaataatccaaatgcaccatctctaaattgtgcagttataattaaacaagttgatgaaaaaacaagatctaaaacttctataaacgacctattaagagaataaa

SEQ ID NO: 233551 - DNA, 519 bp, Unknown
  Bacterial polypeptide expressing nucleotide sequence isolated from the Sargasso Sea
tccgcgtggtgccttcagccactgttcgtaaaggctcttttatcggtaaaaacactgtgttaatgccctcttacgtgaaccttggcgcctacgttgacgaagggaccatggttgacacttgggcaactgtgggttcatgcgcgcaaattggtaaaaacgtgcatttatctggtggtgtaggcattggtggggtattggagccgctgcaagctggcccgactattatcgaagataactgctttatcggcgcacgctctgaaattgtcgaaggcgttgtggtagaagaaggctcggtgatatccatgggcgtttatatcggccaaagtacccgtatttatgaccgtgaaacgggcgaaatccactatggccgcgtaccagctggctctgtagtcgtatccggtaacctgccctcagcatgtggcaaatacagcctatacgctgcgattatcgtcaagaaagtggatgcaaaaacccgcggcaaagtggggatcaacgaactgttacgtatcgtcgattaat

SEQ ID NO: 233552 - DNA, 658 bp, Unknown
  Bacterial polypeptide expressing nucleotide sequence isolated from the Sargasso Sea
catgtcagatttaaaaacaatgatcgaaaacgcatgggataaccgcgacagcattagcccaagcactgtatctagcgatgtaaaacaagctattattgacgctctagaactacttgatagcggtgctgcccgtgttgctgaaaaaatatcaggcgaatgggttgtacaccaatggcttaaaaaagcagtgttactatcttttcgtattcgcgacaaccaaccaatgaacgacggcgttaatcagttttacgacaaagtaccgcttaaatttagcgactacacgccagagcaatttcaacaaggcggcatgcgcgtagtgcctaacgcagtagcacgtaaaggcagctttgtaggtaaaaacgtcgtacttatgccttcgtacgtaaacattggcgcatacgttgacgagggcaccatggttgatacatgggccactgttggctcatgtgcacaaattggtaagaacgtacacttatctggcggcgttggcataggcggcgttttagagccactacaagctaacccaaccatcattgaagacaattgttttattggcgcacgttctgaaattgttgaaggtgtagtagtagaagaaggcgctgttattttcatgggcgtttatatcagccaaagcactcgtatttacgaccgtgaaacc

SEQ ID NO: 233553 - DNA, 457 bp, Unknown
  Bacterial polypeptide expressing nucleotide sequence isolated from the Sargasso Sea
aatgccttcttttataaatgttggcgcttacgttgatgaaggaactatgatcgacacttgggcatctgtaggatcatgtgctcaggttggaaaaaattgtcatatttctggtggtgcaggtattggtggtgttttagaaccaatgcaagccaatccaactatagtggaggataattgtttcttaggagcaagagcagaaatagcagaaggtattattgttgaaaaaggctcagttttatctatgggagtttacatcggagcctcaacgagaattattgatcgagcatcaggtgaaattcattatggcaaagttcctgcttactcagtagttgttccagggtcaatgccaagcaaaaataatcctaaggggccatcactatattgtgtggtaattgtaaaaaaagtagacgaaaaaactagaagtaaaacttctataaacgatttgttaagagattaa

SEQ ID NO: 233554 - DNA, 805 bp, Unknown
  Bacterial polypeptide expressing nucleotide sequence isolated from the Sargasso Sea
aattattagtaaggcatttgaagaaaagcaaaatattaatggtaactctgataaaaaaataattgaagcagtaaaaaaaactattgagctgactgataaaggtgaagttagagttgctcaaaaagttaatggtaagtggacggtaaatcaatgggtaaagaaagctattttattaagttttagaattaatgaaatgacaatgtcaaaaggcccgtacactacttggtacgataaagtacctggaaaatctgttgcttggaatgaaagtgattggaaaaaagctggttacagacatgttccaaatggcgttgtaagaaaggggtcgtttataggaaaaaatgttgttttaatgccatgttttgtgaatcttggtgcctatgttgatgaaggaacaatgattgatacttgggcgtcagttggttcttgtgctcagataggaaagaattgtcatgtttctggtggagcaggtattggaggagtattagaaccgcttcaagcaggtcccgttattgttgaggataattgttttattggcgcaagatctgaaatagcagaaggtgtaattgtcgaagaaggtgctgtaatttcgatgggagtatatattggcgcatcgactaaaattgttgatagaacaactggcaatgtaacatatggaaaagttcccgcttattcagtggttgtgcctggatctattaaaaataaaaaaaatcctgatggtcctagtttatactgtgcagtaattgtaaaaaaagttgatgagaaaacaagaagtaaaacttctataaacgatttattaagagattaa

SEQ ID NO: 233555 - DNA, 304 bp, Unknown
  Bacterial polypeptide expressing nucleotide sequence isolated from the Sargasso Sea
ctcacccacaattattgaggataactgttttattggagctagatctgaagtcgtagaaggtgtaatcgttagaaagaactctgttatttcaatgggtgtcttcatagggaaaagcactaaaatatatgatagggaaacacaaactataacctatggtgaagtcccagagggttctgttgtagtatctggttctctaccctcaaaagatggtacttgtaatttatattgtgcagtaattgttaaaaaagttgatgaaaaaacattaagcaaagttggaattaacgaaattctgagagaagcttaa

SEQ ID NO: 233556 - DNA, 826 bp, Unknown
  Bacterial polypeptide expressing nucleotide sequence isolated from the Sargasso Sea
aatgaaagattatgaagaaattattgaaaaaaactttgataacattcaagatttaagtattgcaagcgctagtaatgaacttaaagagaccgtgaatgatgtcttgaatcttcttgataaaggcgagataagagtatgcaataaatctgaaaaaggctgggttgtaaatcaatggattaaaaaagctatattacttagctttcgccttaaagataattatttacaaagaggctcttatgccaattggttcgataaagttgatagcaagacaggtaattggtcagagaaagattttaataaagcaggttttagatatgttccaaatgctgtaataagaaagtctgcctttgttgcgaaaaatgctgttgtcatgccaagcttcattaatataggagcttatgttgatgagggaacaatggttgatacatgggctacagttggatcatgtgctcaaattggcaaaaatgtccatttatcgggaggagttggtattggcggagttcttgagcctcttcaggcctcaccaaccattattgaggacaattgctttattggagcaaggtctgaaatagttgaaggtgttattgttgaacaaaattcggtaatctcaatgggtgtatacatcggtcaaagtacgaggatatatgatagagaaaaagatgaggtatattatggaagagtaccagccggatctgtagttgtttcaggtaatcttccatcaaaaaacggtaaatatagtctgtacgcagctattatagtcaagagagttgatgaaaaaactttatctaaagttggcataaataatattttaagggaagcagagtga

SEQ ID NO: 233557 - DNA, 829 bp, Unknown
  Bacterial polypeptide expressing nucleotide sequence isolated from the Sargasso Sea
atgtctattgaaaaaattataaatgaagcttgggaaaacaaagatgagataaaccagcattctagtaaaactataaaagatgcaattaatcaagtaattgaagacttagacagtggtaaatctagagtagcagaaaaaattaaaggtgagtgggttactcatcaatatctaaaaaaagctattatgttaagtttcagaatttatcctatggaaaatttaaatggaccttactctagttggtttgataaagcacatttacttaaagggaaaacagctgggtggactaaagaacaacatgaggctgcaggttttagaatggtgccaaatagtcctgtgagaaaaggttcttttgttggtaagaatgcagttttgatgccatgctacgttaatattggtgcatacattgactctggaactatgattgatacttttgctagggcaggaagttgttgtcaaattggaaaaaattgtcatatctctgcaggtagtggtattggtggcgttcttgaacctgctcaagcattacccacaattatagaagataatgtatttttaggtgccatgtcagaagttgtagaaggtgtaatagttggtgaaggttcagttttaagtatgggaatgtatataggacaatctactaaaatagtaaatagatctacaggggaaattatatatggaaaaattccaccctattctgtagttgtgccaggtacactccctgataaaaaaaattcagctgctccatcattaagttgcgcggtaataattaaacaagtagatgaaaaaactagatcaaaaacatctattaatgatcttttaagagaataga

SEQ ID NO: 233558 - DNA, 829 bp, Unknown
  Bacterial polypeptide expressing nucleotide sequence isolated from the Sargasso Sea
atgaccgagttgcaacagatcatcgaagcggccttcgagcgccgtgattccatcactcccggctccgtcgatgccgccaccaaggccgccatcctgcaagccatcgacctgctggactccggcaaggctcgcgtcgccgagaagattgccggcgagtgggtggtacaccagtggttgaagaaggcggtactgctctacttccgcatcaatgacaacggcatcatcaagggcgacgacgcccagtactacgacaaggttcccctcaagttctccgactacagcgccgagcagttcaaggctgccggtgtgcgcgtggtgccgccggccaccgcccgcaaaggctccttcatcgcccccaataccgtgctgatgccctcctacgtcaacatcggcgccttcgtcgatgaaggcaccatggtcgacacctgggccaccgtgggctcctgcgcccagatcggcaagaacgtgcacctctccggcggcgtcggcatcggcggcgtactggagccgctgcaggccaacccgaccatcatcgaagacaactgcttcatcggtgcccgttccgaagtggtggaaggggtgatcgtggaagagggctccgtcatctccatgggcgtcttcatcggccagtccacccgcatctatgaccgtgagaccggcgagatccactacggccgagtccctgccggctcggtggtcgtctccggctccctgccctccaagtgcggcaagtacagcctgtacgccgccgtcatcgtcaagaaggtggatgccaagacccgtgccaaggtcggcatcaacgccctgctgcgctccatcgacgagtaag

SEQ ID NO: 233559 - DNA, 268 bp, Unknown
  Bacterial polypeptide expressing nucleotide sequence isolated from the Sargasso Sea
tatgtcagaagtcgtagaaggagtaattgtaggtgaaggatcagtattaagtatgggaatgtatattggacaatcaactaaaatagtaaatagaaaaactggtgaaataacttacggaaagataccaccatactcagtagttgtacctggatctttgccagataagaataattcttctgcaccagctttatattgtgcggttattattaaacaagttgatgaaaagactagatcaaaaacttcaataaacgatcttttgagagaatag

SEQ ID NO: 233560 - DNA, 829 bp, Unknown
  Bacterial polypeptide expressing nucleotide sequence isolated from the Sargasso Sea
atgtctatagaaaaaattataaatgatgcttgggagaaaaaagatcaggttaatcctaattctgaccaatctttaaaggatgcaatcaatcaagtaataaatgacttggatagtggtaaatcaagagttgctgaaaaaataaatggagaatggataactcatcagcacttaaaaaaagcaattatgcttagttttagaatttatccaatggaaaacttaaatggaccttactccagttggtatgataaagcacatttgttaaaaggaaaaacagctggctggacaaaagaagatcatgagagagcaggtttcaggatggttccaaactcgcccgttagaaaaggatcattcgtaggaaaagatgctgttcttatgccatgttatgtaaacattggttcttacattggggctaaaacgatgatggatacatttagtcgtgctggtagttgttgccagattggagagaattgccatatatctgcagggtcaggagttgggggggtactggaacctgctcaagcattacctacaataatagaagataatgtatttttaggagcaatgtctgaagtagtagaaggtgttatagttggagaaggttctgtattaagcatgggaatgctgatcacacaatctacaaaaatagtaaatagatcaaccggtgagatcacgtatggaaaaattcctccatactcagtagttgtgccaggctctctccctgataaaaaaaatccatctgctccatcactaagctgtgcagtaataatcaagcaagtagacgaaaaaactagatcaaagacatcaattaatgatcttctaagagattaaa

SEQ ID NO: 233561 - DNA, 598 bp, Unknown
  Bacterial polypeptide expressing nucleotide sequence isolated from the Sargasso Sea
cagcagttggtatgacaaagctcaccttttaaaaggtaaaacagccggttggaataaagaagatcatgaaaaagctggctttagaatggttccaaattctcctgttagaaaaggttcctttgtaggcaagaatgcggtcttgatgccatgttatgtaaacattggagcgtacatagatgaaggcactatgatagatacatttgcaagagccgggagttgttgtcaaattggaaaaaactgtcatatctcagctggtagtggtgtaggcggtgtgctagaaccagctcaagctttacctacaattattgaagacaatgtttttttaggagcaatgtctgaagttgttgaaggagttattgttggtgaaggatcagtattaagtatgggaatgtatattggacaatctacaaaaattgttaatagaaaaactggggaaataacatacggaaagatacccccatattcagtagtggtgccaggatcattgccagataaaaataattctagtgctccatctttatattgtgctgtaataatcaaacaagttgatgaaaaaactagatccaaaacttctataaacgatcttttaagagaataa

SEQ ID NO: 233562 - DNA, 508 bp, Unknown
  Bacterial polypeptide expressing nucleotide sequence isolated from the Sargasso Sea
tcccaattcaccagttagaaaaggttcatacatagcaaaaaatgttgttttaatgccgtgctttattaatactggggcatatatagattctggaactatgatggatacattttcaagagcaggatcttgttgtcaaattggaaaaaattgtcatatatctgcgggaagtggagttgggggagtattagaaccagcacaagctttgcctacaataattgaagataatgttttcctaggtgcaatgtcagaagttgtagaaggagtaattgtaggtgaaggatctgtgattagtatgggtatgtacattggtcaatcaacaaaaattgttgatagaaagtctggtgaaattacttatggaaaaattcctgcttattcagttattgtaccgggatcattaccagataaaaataatccaagtgcgccttctttaagttgtgcggtaattataaaaaaagttgacgaaaaaacacgatctaaaacatcaattaatgacttattacgtgattga

SEQ ID NO: 233563 - DNA, 829 bp, Unknown
  Bacterial polypeptide expressing nucleotide sequence isolated from the Sargasso Sea
tatgagtatagaaaatgtaataaatgaagcttgggaaaaaagggatcaaataaatcctgcttcagataagtctttaaaagatactataaatcaagttattgatgacttagatagtggaaagtcacgagttgctgaaaaaataaatggtgaatggataacccatcaacatttgaaaaaagcaatcatgttaagttttagattatatccaatggagaatttgaatggtccatatagtagttggtatgataaagctcatttgctaaagggtaagactgcaggatggacaaaagaagatcatgagaaagcaggttttagaatggtgcctaactcaccagtaagaaaaggaagttttgttggcaagaatgcagttttaatgccatgctacgttaacattggagcatacatagatgaaggaacaatgattgatacatttgcaagagcaggaagctgtagccaaattggaaaaaattgtcatatctcagcaggttcaggtgtgggtggagttttagaacctgcacaagctctgccaactatcatcgaggataatgtatttttaggtgcaatgtctgaagttgtagaaggagttattgtaggagaaggatcagtactgagtatgggcatgtacatagggcaatctacaaaaattgttaatagaaaaactggagaaattacttatggaaaaattcctccttattcagttgtagttccaggttcacttcctgataaaaataaccctaccgcaccttcactatattgtgctgtaataattaagcaagtagatgaaaaaacaagatctaaaacttctattaacgatctcttgagagaatag

SEQ ID NO: 233564 - DNA, 556 bp, Unknown
  Bacterial polypeptide expressing nucleotide sequence isolated from the Sargasso Sea
gctgggttggacaaaagaggatcatgaaaaagccggttttagaatggtacctaattctcctgtaagaaaaggttcgtttgtaggaaaaaatgctgtgcttatgccatgctatgtaaatattggagcttatatagatgaaggtactatgatggatacttttagtcgtgctggtagttgttgccaaataggaaaaaattgtcatatttctgctggatcaggaattgggggtgtcttggaacccgctcaagcattaccaactataattgaagataattgttttattggagcaatgtcagaggttgttgagggtgtcattgttggagaaggatctgttttgagtatgggaatgtatataggacaatcaactaaaatagttaatagaaatacaggggaagttacttatggaaaaattccaccatattccgtagttgtgcctggttcattgcctgataaaaataattctttcgcaccatcgttatattgtgcggtaataatcaaacaagttgatgaaaagactagatctaaaacttctgttaatgatctattaagagaatag

SEQ ID NO: 233565 - DNA, 667 bp, Unknown
  Bacterial polypeptide expressing nucleotide sequence isolated from the Sargasso Sea
atgagtgatatagaaaaaattataaatgatgcttgggaaaataaagataaaataaaccctaattctgataaaaagattaaagatactattaatcaaatcatttcagatttagacagtggaaaagttagagttgcagaaaagattaatggagaatgggtaacccatcaacatcttaaaaaagcaatcatgttaagttttagaatttatccaatggagaatttaaatggtccttatagtagctggtatgataaagctcacttacttaaaggtaaaacagcaggatggacaaaagaagatcatgaaaaagcaggctttaggatggttccaaactcgcctgtaagaaaaggatcttttgttggcaaaaatgcagtcctaatgccttgctatgttaatatcggtgcatacattgatgaaggaacaatgattgatacttttgctagagcaggcagttgtagccaaattggaaaaaattgtcatatatctgctgcaagtggagttggaggagtattagagccagcacaagcattgcctacaattattgaagataatgtttttttaggagcaatgtcagaagttgtagaaggtgtaattgtaggagaaggatctgtaataagtatgggaatgtatattggtcaatcaacaaaaattgtaaatagaaaaacaggta

SEQ ID NO: 233566 - DNA, 829 bp, Unknown
  Bacterial polypeptide expressing nucleotide sequence isolated from the Sargasso Sea
atgagtattgaaaaaattataaataaagcttgggaaaataaagaccaagtaaaccaaaattcagataaatctttaaaggatgctgttaatcaaattattgatgatcttgacagtggaaaagcaagaatagctgaaaagatcaatggtgaatgggttactcatcaacatctaaaaaaagctatcatgttaagttttcgaatgcatggaatggatatcatggcggggccatattcaacatggagagataagagtcacttattaaaaggtaaaactgctggctggacgaatgaagattttgaaaaagctgggttcagaatggtccccaacacagcagcaagacgtggttcctttgttgcaaaaaatgctgttcttatgccatgttatgtaaatattggagcgtacatagacgaaggtactatgatggatacattcagtcgtgcaggaagttgttgtcagattggaaaaaattgtcatatctcggccgggactggagttggtggagtattagaaccagcccaagcattaccaacaattattgaagataatgttttcttaggagcaatgtcagaagtagtagaaggtgtaatagttggagaaggctctgttttaagtatgggaatgtatattgggcaatcaacaaaaattgttaatagaaaaactggtgaaataacttatggaaaaattccaccttactcagtagtagttccaggatccttaccagataaaaacaatccacaagcaccatctttatattgtgcagtaataattaaacaagttgatgaaaaaactagatcaaagacatctgttaacgatcttttaagagaataaa

SEQ ID NO: 233567 - DNA, 298 bp, Unknown
  Bacterial polypeptide expressing nucleotide sequence isolated from the Sargasso Sea
aattattgaggataatgtttttgttggggcgatgtctgaggttgttgaaggtgtgatagttggggaaggctctgtattaagcatgggaatgcttattactcaaagtactaaaatagtaacgcgttcaacaggcgagattacttatgggaaaattcctccatactcagttgttgtaccaggttctttgccagataaaaataattcatctgcaccatctttaagctgcgcagtgattatcaaacaagttgatgaaaaaacgagatctaaaacatcagttaacgatcttttaagagattaa

SEQ ID NO: 233568 - DNA, 220 bp, Unknown
  Bacterial polypeptide expressing nucleotide sequence isolated from the Sargasso Sea
atggaggctttacgccaacgtattgaggccgcttttgaagcgcgtgccgacatcacaccaagcactgttgacgctagcgtgcgtaacgatgtgcaacatgtcatcaatatgctcgacaagggtgaactgcgcgtcgctgaaaaaatcgacggccaatggcatgttcatcaatggttgaaaaaggcggtgttactgtcattccgtatttttgataacgcag

SEQ ID NO: 233569 - DNA, 862 bp, Unknown
  Bacterial polypeptide expressing nucleotide sequence isolated from the Sargasso Sea
atggatgtatcaaaacttgaaaatataattaatgatgcatgggaaaatagagatacaattagtactgatactaaaggtgaagttagaaaatcagttgaagaagctcttaacggtttagatagcggtttattcagagtcgcagaaccgattggcgatcatcaatggaaggttaatcaatggcttaaaaaagctgtccttttatcatttcgtttgaatgatatgggattgatctctggtgcacctgaaactccaagtttaggtaaatctttttggtgggataaaatcccttcaaaatttgctggttacacagagcaagactatagaaaagccggctttagatctgtaccaggatgcgttgtaagacattcagcatatatcgcaaagggagttgttttaatgccttgctttgtcaatattggagctaatgtaggagaatcttcaatggttgatacttgggcaactgttggatcttgtgcacaaattggggctaacgtacatctttctggaggtgttggtattgggggtgtattggaacctctccaagcaggtcctgttataatagaagacgactgttttataggcgctcggtcagaagttgttgaaggcgttattgttgaaaaaggggctgtactttcaatgggtgttttcataggcgcttctacaaaaattattgatagaagcacaggagaaatacacattggaagagtacctgcttactctgtagttgttccaggaagtttacctggtaaaaatttacctgatggatctcctggccctaatctttattgtgctgtaattgtgaaaaaagtagatgcacaaacaagggaaaaaacatccataaatgatttattgagagattaat

SEQ ID NO: 233570 - DNA, 580 bp, Unknown
  Bacterial polypeptide expressing nucleotide sequence isolated from the Sargasso Sea
tggtatgacaaagtagggtttaaaactgcagggtggactgaggaagatcataagagagccggatttagatatgttccaaatggtatgactcgaaaaggttgtttcgttgcacctggatgtgttttaatgccatcatttttgaacataggatgttatgttgatagcggaacgatggttgatacctggtcaactgttggctctggcgctcaagttgggaaaaattgtcatctaagtggtggagttggaattggaggcgtcttggagcccgttcaagctggtccaactattattgaagatggatgttttataggcgctagaagtgagatcgttgagagtgtcattgtaagaaaaaatagtgttatatcaatgggagtttttataggtgcatctacgaaaataatttacagagatactggcaaagtgatcatgggtgaagttcccgagggaagtgttgtggtaccaggtacattaccttctaaaaaacctggaatgccctcattatattgtgcagtaataattaaaactgttgatgaaaaaactagatcaaaaactagccttaatgatctattaagagattaac

SEQ ID NO: 233571 - DNA, 829 bp, Unknown
  Bacterial polypeptide expressing nucleotide sequence isolated from the Sargasso Sea
atgtcaaattcagagctggaaaatgctatagaagctgcttggaatgttcgagaagaaataaccccctcaacaactggtgagacgagaaaagctattgaagcaactttatctgctcttgatactggaagtttacgtgttgctgataaaaatgacaaaggtgattggatcgtaaaccaatgggcaaaaaaggctgttttgctcgggtttaaactaaaagatatggaggtacacgagggtggccctcagaactcaggttggtgggacaaagttgataataagttcaaaggatggaaaactaaagattggatagaagcaggttttagagctgtaccaagttgtgttgtaagacgttctgcatatatagcgccaggagttgttctaatgccttcatttgtaaatcttggtgcatatgtagatacaggaacaatggtagacacatgggctacggttggcagttgtgcccaaataggtaagaacgtacatttatctggaggtgttggtatcggtggcgtattagagccaatgcaggcctctccgacaataatagaggataattgttttataggtgcccgttccgaagtggtagaaggtgtaatcgttcgagagggttcagttttggggatgggagtttacatagggcaatcgaccaaaatagtagaacgagaaacaggagaggtaatgtatggagaagttcctccttactcagtagtcgtttctggttcaatgccaagcaaaaataacataagtttatactgtgcagtgattgttaaaagagttgatgagagaacccgtagcaaaacgggaattaatgaacttctccgtgattaat

SEQ ID NO: 233572 - DNA, 826 bp, Unknown
  Bacterial polypeptide expressing nucleotide sequence isolated from the Sargasso Sea
aatgagtgataatacagaattaaaaaataaaattgaaagtgcttgggaaaatattactaaaatttctcctaacgacacagacatcgctaatgctgtaaatgaagttataaagaaacttgataatggacaatttagaattgcagaaaaaaacggcaatgattggattgttaatcagtggttaaaaaaagccgttcttatatcattccgaataaatgataataaaattttaaaaggaccctatacgtcttggtatgacaaagtgaaaggtaaaactgttgattggaatgaggatcaatggaaagaagctggctaccgacatgttccaaatggtaccgttcgcgaaggatcattcataggtaaaggtgtagttctgatgccatcatttgtaaatattggcgcttatattgatgaaggtacaatggttgatacatgggcaactgtcggctcatgtgctcagattggaaaaaactgtcacttatcaggcggtgttggcattggcggtgttttagaaccactacaagcaaatccagtaataattgaagacaactgttttgttggtgcgagagctgaagttgccgagggtgtaattgttagagaagggtcggttctatcaatgggagtgtatttaggcgcatcaacaaaaattgtgaacaggtccacaggtgaaattagttatggtgaagtacccgcttattctgtagtggttccaggaagccttccgaatgaagaccctaaaaagccaagtttatattgtgttgtaatcgtaaaaacagttgatgaaaacacaagaaagaaaacatcgataaacgatctactcagagaataa

SEQ ID NO: 233573 - DNA, 463 bp, Unknown
  Bacterial polypeptide expressing nucleotide sequence isolated from the Sargasso Sea
tttgtcagatttaaaatccgttatagaagccgcgtttgaacaacgtgcgtccattactccagccactgtaactgctgaagtcaaagctgccgtcactgccgctattgaacttctggacagcggaaaagcccgtgttgcggaaaaaatcgctggcgaatgggtcactcaccaatggctgaaaaaggcggtgttattgtcttttcgtatcaatgacaatcaggtgatggacggcgctgaaaaccgtttcttcgataaagtaccgatgaaatttgctgactacacacacgagcgttttgtcgctgaaggtgtgcgtgttgtgcctcctgcagcagtgcgtaaaggcagttttgtcgataaaaacgtggtgctgatgccatcctacgtcaatatcggcgcttatgtcggtgaaggcactatggtggacacctgggccactgtgggctcctgtgctcaaattggtaaa

SEQ ID NO: 233574 - DNA, 805 bp, Unknown
  Bacterial polypeptide expressing nucleotide sequence isolated from the Sargasso Sea
atgtctttagaaaaaataattaatgatgcttgggaaaaaaaagaccaagtcaatcaaaactcagatcaatctttaaaggatgcaataaatcaagtaattaaggatttggatagtggtaagtctcgagtagctgaaaaaattaatggggaatggaaaactcaccaatatcttaaaaaagctatcatgcttagctttagaatttaccctatggataatttaagcggtccgtatagtagctggtacgataaagctcacttattaaaaggtaaaacagctaattggacaaaggaacaacatgaggctgctggatttcgaatgacaccaaacagtccagtaagaccaggatctttcattggaaaaaatgccgtgctcatgccttgctatgtaaacataggagcgtacatcggtgctggaacaatgatggatacttttagtagagctggaagctgctgtcaaattggagaaaattgtcatatatctgctggttcaggtattggaggagttttagaaccagctcaagcactcccaactataattgaggataacgttttcgttggagcaatgtcagaagttgtagagggtgttatagtgagagaaggaagcgttctttcaatgggatgttacattggtcaaagtacaaaaattgtaaatagatcaaatggcgaggttacaaaagggcatgttccaccttattcggtcgtggtacctggcactcataaagatctttatgctgttcatataataaaaactgtggacgcaaagacgaggtcaaagacatcaattaacgatcttttaagagactaat

SEQ ID NO: 233575 - DNA, 829 bp, Unknown
  Bacterial polypeptide expressing nucleotide sequence isolated from the Sargasso Sea
atgagtgaaatagataatattaaagaactgatcgaatcctcttgggaaaatattgcagacttatctccagaaaataaggatgtaattgatgcagttgacaccacaatcctaaagcttgatagtggtgagcttagaattgcagaaaagaaagacaacaatgaatggcaagtcaatcagtggcttaaaaaagcagttttaatttcatttagaattaatgaaaattcgattctaaaaggaccatacacaagctggtatgacaaagttcgaggaaagtctgttgattgggatgaatccaaatggaaagaggctggatacagacacgttccaaatggtactgttagacaaggatcatttattggacgaggagtagttctaatgccaagttttgtaaatattggtgcttatatagatgaaggaactatggttgatacttgggcaactgttggttcatgtgctcaaattggtaaaaattgtcatttgtctggaggagttggtattggtggagtattagaaccattgcaagctaatccagtgattattgaagacaattgctttgttggagctcgagcagaagttgctgaaggggtaatagttagagaaggttctgttctttcaatgggagtttatttaggagcttctacgaaaattgttaacagagcaactggtgaaatatcttacggtgaagttccatcttattcagttgtagtccctggaacacttcctaacgaagatccgaagaaaccaagtctatattgtgttgtaatcgtgaaaaccgttgatgaaaacacaagaaagaaaacttcgattaatgaacttttaagagattaat

SEQ ID NO: 233576 - DNA, 832 bp, Unknown
  Bacterial polypeptide expressing nucleotide sequence isolated from the Sargasso Sea
atgagtaatatagaaaaaattataaatgatgcttgggaaaatagagaaaaagtaaatcaaaattcagacgagagtctaaaaaatacaatcaatcaaattattgatgaattggatagtggcaaagtaagagttgctgaaaaaataaatggagaatggattactcatcaacatataaaaaaagctataatgcttagctttagaatttatcccatggaaagtttaagcggaccttatagtagctggtatgataaagctcatttgttaaaaggaaaaacagctggctggacgaaagaagatcatgagaaggcaggatttagaatggttcctaattcacctgtaagaaaaggatcattcgttggaaaaaatgttgtcttaatgccatgttatgtaaatattggagcttatatcgacgaaggaagtatgattgatacttttgctagggcaggtagttgttgtcaaataggaaagaattgtcatatctctgctggttcaggtatcggtggtgtcctggagcctgctcaagccttaccaacaataattgaagacaatgtatttgtcggagctatgtcagaagttgttgaaggagtagtagtgggtgaaggatcagttttaagtatgggtatgtatattggacaatccacaaaaatcgttaatagaaaaagtggagaaataatttatggaaaaatacctccatattcagttgtagttccaggttctttacctgataagaataatcctttagcaccatcattatcatgtgctgtaattattaaacaagttgatgaaaaaacaagatctaaaacttctattaacgatcttttaagagaataga

SEQ ID NO: 233577 - DNA, 826 bp, Unknown
  Bacterial polypeptide expressing nucleotide sequence isolated from the Sargasso Sea
aatgagtgataatacagaattaaaaaacaaaattgaaagcgcatgggaaaatattgcaaatattactcccgacgatacagatattgctgatgctgtaaatgaagttataaaaaaacttgataacggacattttaggattgcagaaaaaaatggcaatgactggattgttaatcagtggttaaaaaaagccgttcttatatcatttcgaataaatgataataaaattttaaaaggaccttacacgtcttggtatgacaaagtaaaaggtaaaaccgttgattggaatgaagatcaatggaaagaagctggctatcgacatgttccaaatggtaccgttcgcgaaggatctttcataggtaaaggcgtggtactgatgccatcttttgtaaatattggtgcttacattgatgaaggaacaatggttgatacatgggcaacagttggatcatgtgctcagattggaaaaaactgtcacttatcaggcggtgttggtattggtggagttttagagccactacaagcaaatccagtaataattgaagatgattgttttgttggtgcaagagctgaggttgctgaaggtgtaattgtaagagaaggatcggttctctcaatgggagtatatttaggagcatcaacaaaaattgtgaacaggtccacgggcgaaataagttacggggaagtacctgcttattctgtagtagttccaggtagtcttcctaatgaagatccaaaaaagccaagcttatattgtgttgtaatcgttaaaacagttgatgaaaacacaagaaagaaaacatcgataaacgatctgctcagagaataa

SEQ ID NO: 233578 - DNA, 745 bp, Unknown
  Bacterial polypeptide expressing nucleotide sequence isolated from the Sargasso Sea
atgagtatagaaaacattatagaagaagcttgggaaaacaaagatcaagttaatcaaaattcagatcaaaaattaaaagatgctattaatcaagtaatagaagatctagatagtggtaaatctagagttgctgaaaaaattgatggtgaatgggtaactcatcaacacttaaaaaaagcaattatgctaagttttagaatccatggtatggaaactttaaatggcccctactcagcttggagagataaagctcatttgttaaaaggaaaaacagctggatggtcaaacgatgattttgaaaaagcaggttttagaatggtacctaatactgcaatgagaaaagggtcatatgttgctaaaaatgtagttctgatgccgagttatgtaaatattggcgcttacatagatgaaggaacaatgatggatacttttagtcgtgcaggtagttgctgtcagattggaaaaaattgtcatatttcggctggaactggtataggcggagttttagagccagcacaagcacttccgactattattgaagataatgtttttgtaggtgctatgtcagaagttgtggaaggtgtaatagttggtgaaggttcagtgttaagtatgggtatgtatattggtcaatcaactaaaatcgttaatagaaaaactggtgaagtaactcatggtaaaatacctccttactccgtagttgttcctggatcattaccagacaaaaataatcctgctgcgccct

SEQ ID NO: 233579 - DNA, 664 bp, Unknown
  Bacterial polypeptide expressing nucleotide sequence isolated from the Sargasso Sea
attgtcatttaaaacacaggataacgtaattttttcgagtggaatttcaaatacacggagaggtcagtatacttggtttgataaagctttccttaaaacatcaggctgggtagaagatgaatggacaaaaagaaattttagatccgtaccaggatccatagttagattttctgcatttatagctgataatgtagtattaatgccatcatttgtaaatctaggtgcttttgttgatagtggaactatgattgatacctgggctacagttggttcttgtgcacaaattggaagaaatgttcatatctctggaggcgcaggaattggtggggttttagagcctcttcaagctaacccagttattatagaggataacagttttgtaggtgcaaggtctgagattgctgaaggagtaattgtaaaggaaggtagtgttatttctatgggagtttacattggtgcatccacaaaaattgtagatagagagactggaagaattttttttggtgaagtaccaccatactcagtggttgttcctggatctttgccaggtaaaactttggataatggtgagattgggcccaacctttattgtgctgtaattgtaaaaagagttgatgccaaaactagatcaaaaacatcaattaacgatctacttaggtcataa

SEQ ID NO: 233580 - DNA, 308 bp, Unknown
  Bacterial polypeptide expressing nucleotide sequence isolated from the Sargasso Sea
tctaccaactattatcgaggataatgtttttttaggggcgatgtctgaagttgtagaaggtgtaattgtaggagaaggatccgtactgagtatgggcatgtacataggacaatctacaaaaattgttaatagaaaaactggagaaattacttatggaaaaattcctccttattcagttgtggttccaggttcacttcctgataaaaataactcaactgcaccttcgctatattgtgctgtaataattaagcaagtagatgaaaaaacaagatctaaaacttctattaacgatctcttgagagaatagt

SEQ ID NO: 233581 - DNA, 826 bp, Unknown
  Bacterial polypeptide expressing nucleotide sequence isolated from the Sargasso Sea
aatgaacttagaaaaaattgaaaaaactataaacgaagcttttgaaaaaaaagataagattgatagttcagataaaacgctaaatgatttggtgcgtgaaactattaacttgttagataacggtaaaatcagagttgcagaaaaaaaaggtgacaaatggcaagtcaatcaatggattaaaaaagctatacttttaagttttcgggtgaataaaatgaaagcatctaaaggtccttactctacttggtacgataaagttgatggaaaaacacaaggatggagtgaagaacaagttaagaaagctggatttagatatgttcccaatggcgtaattagaaaaggagctcacatagcaaagaatgttgttttaatgccttcgtttataaatgttggagcgtacgtagacgaaggaacaatgatagatacatgggcatcagttgggtcatgtgctcaggttggaaaaaattgtcatatttctggtggtgctggtattggtggtgtcttagaaccgatgcaagcaaatccaactattgtagaggacaattgttttttaggagcaagagcagaaatagcggaaggtgtaattgttgagaaaggatcggtgctgtctatgggtgtttatattggtgcatcaacaagaataattgatcgtgcaactggcaaaattcattatggtaaagtacctgcctattccgttgttgttccaggatcagtgccaagtacaaataatcctaaaggaccatcgctatattgtgtggtaattgtaaaaaaagtagatgagaaaactagaagtaaaacttctattaacgatttgttaagagattaa

SEQ ID NO: 233582 - DNA, 288 bp, Unknown
  Bacterial polypeptide expressing nucleotide sequence isolated from the Sargasso Sea
ataatgtttttttgggtgcaatgtctgaagttgtagagggtgtgattgtaggagaaggatcagtattaagcatgggaatgtacattggacaatctacaaaaattgttaatagaaaaactggtgaaattacttacggaaaaattcctccttattcagttgtggtgccaggttcacttccagataaaaataattcatctgcgccctctctgtattgtgcagtaataattaaacaagttgacgagaaaaccagatcaaaaacttctattaacgatctcttgagagaataat

SEQ ID NO: 233583 - DNA, 829 bp, Unknown
  Bacterial polypeptide expressing nucleotide sequence isolated from the Sargasso Sea
atgagtgtagaaaatgtaataaatgaagcttgggaaaaaagggatcaaataaatcctgcttcagatcaatctttaaaagatactataaatcaagttattgatgatttagatagtggaaagtcacgagttgctgaaaaaataaatggtgaatggataactcatcaacatttgaaaaaagcaattatgttaagttttagattatatccaatggagaatttgaatggtccatatagtagttggtatgataaagctcatttactaaagggtaagactgcaggatggacaaaagaagatcatgaaaaagcgggttttagaatggtgcctaactcaccagtaagaaaaggaagttttgttggaaagaatgcagttttaatgccatgctatgttaacattggggcatacatagacgaaggaacaatgattgatacatttgcaagagcaggaagctgtagccagattggaaaaaattgtcatatctccgctggttcaggtgtaggtggagttttagaacctgcacaagctttaccaactattatagaagataatgtttttttaggtgcaatgtctgaagttgtagaaggtgtgattgtaggtgaaggatccgtgctgagtatgggaatgtatataggacaatctactaaaattgttaataggagaactggagaaattacttatggaaaaattcctccttattcagttgtagttccaggttcacttccagataaaaataactcaactgcaccctcactatattgtgcagtaataattaaacaagtagatgagaaaacaagatctaaaacttctattaacgatctattgagagaatagt

SEQ ID NO: 233584 - DNA, 292 bp, Unknown
  Bacterial polypeptide expressing nucleotide sequence isolated from the Sargasso Sea
ctgcacaagcacttccactattattgaggacaatgtctttgttggagcactgtcagaagttgtagaaggcgttataataggagaaggtagtgttctttcaatgggatgttacattgggcaaagcacaaaaattataaacagatcaaatggcgagatcacaaaaggccgtgttccaccttattcagttgtagtgcctggtgctcataaagatctttatgctgttcatataataaaaacggtggatgcaaagacgaggtcaaagacatcaattaacgatcttttaagagaataa

SEQ ID NO: 233585 - DNA, 826 bp, Unknown
  Bacterial polypeptide expressing nucleotide sequence isolated from the Sargasso Sea
atgagtgaaaatcaaaaattaaaagagagtattgaaagcgcttgggagaatatagcaagcttatcaccaagtgataaagatgtatctcaagtagtagatcaagtaattaaaaaacttgatagtggcgaacttcgaattgctgaaaaagttgataatcagtggactgtaaatcaatggttaaaaaaagccgttcttatttcattcaggattaatgaaaatacaatccttagaggcccttacacatcatggtttgacaaagtcaaaggcaaaactgttgattgggatgaagatcaatggaaagcagctggctatcggcacgtccccaatgggacagtacgagagggttcatttattggcaagggagttgtcttgatgccttcatttgtaaacattggtgcctatatcgacgaaggaactatggttgatacatgggcaacagtaggttcatgcgcacagatcggaaagaattgtcatctttctggaggggttggcatcggtggtgtccttgaacctctacaagcaaatccagtaataattgaagataattgttttgtaggcgctcgagcagaggttgcagagggtgtaattgttcgagaaggatcagttttatctatgggtgtttatctcggcgcctctacaaaaatagttaatcgtgcaactggtgagatactgtatggtgaagttcctgcatactctgtcgttgttcctgggacaatgccaaatgaagatccagcaaaaccaagtctatattgcgtagtcatcgttaagacagttgatgaaaatacaagaaaaaaaacctccattaatgatttattaagagagtaaa

SEQ ID NO: 233586 - DNA, 360 bp, Unknown
  Bacterial polypeptide expressing nucleotide sequence isolated from the Sargasso Sea
gtcatatttctggtggtgctggtattggtggtgtcttagaaccaatgcaagcaaatccaactattgtagaggacaattgttttttaggagcaagagcagaaatagcggaaggcgtaattgttgaaaaaggctcagtattgtcgatgggggtttatatcggggcatcaacaagaatagttgatcgggcaacaggtgaaattcattatggtaaagttcccgcctattctgttgtcgttccaggctcaatgccaagcaaaaataatcctaaaggaccatcactatattgtgtcgtaattgtaaaaaaagtagatgagaaaactagaagtaaaacttctataaacgatttgttaagagattaaa

SEQ ID NO: 233587 - DNA, 829 bp, Unknown
  Bacterial polypeptide expressing nucleotide sequence isolated from the Sargasso Sea
aatggaaaatgaaatagaaataattgaaaaagcttttaacgatattgaaaaaataaattcaaattctgaaaaagaaattctagatgctataaattatgtaattgaaaaaattgatgatggatcattaagagtagcagataagactgatggtgattggaaagttaatgaatatgcaaaaaaagcaattttgttatattttcgtatcaaagaaatgaaattaattccaaacggaccagatcactcaaactggtgggataaaattgatcctaagttcaattcatgggatgaaagaaaatttgaggaaagcggatttagggcagtacctggatctattgttagatatggatcttttgttggtaagggatgcgttctaatgccgagctttattaatattggcgcgtatgttgatgaatctacaatggttgatacatgggcaacaataggttcttgtgctcagatcggtaaaaattgtcatatttctggtggtgccggtataggtggagtattagaaccattacaagcaagcccggtaattattgaagataattgttttataggtgcgagatctgaagtggctgaaggcgtaatagttaggcaaggatcagtaatttcaatgggtgtatttctaacagcatccacaccaatttttgatagaaaatctggtgaagttatttatggagaagttcctgagtattctgttattgttcctggtagcatgccatcaaaaaatgttgagtctgttgctaatttatcttgtgcagtgattgttaaaacagttgatgagaaaactcgatctaaaacttcaattaacgaactattgagggattaa

SEQ ID NO: 233588 - DNA, 829 bp, Unknown
  Bacterial polypeptide expressing nucleotide sequence isolated from the Sargasso Sea
atgagtatagaaaatattattagcgaagcttgggaaaaaagagaccaaataaccccaagttcagatgaaaatttaaagaatactgtaaatcaaattattgatgatttagatagtggtaaagtcagagttgctgaaaaaatagatggtgagtggaaaactcatcaatatcttaaaaaagcaatcatgttaagttttagaatgtacccaatggaaaatttaaatggtccatacagtagttggtatgataaagctcatcttttaaaaggtaaaacagcgggatggactaaagaagatcatgaaaaagctggttttagaatggtacccaattcacctgtgagaaaaggatcttacgttggcaaaaatgcagtattaatgccgtgctatgtaaatattggtgcgtacatagatgagggcactatgattgatacttttgcaagagctgggagttgctgtcaaattgggaaaaattgtcatatttcagctggctctggtgtcgggggtgtattggagcctgctcaagcattacccacgataattgaagacaatgttttccttggtgctatgtctgaagttgttgaaggtgtaatagttggagaaggatctgtattaagtatgggaatgtatattggtcaatccacaaaaatagttgatagaaaaactggtgaaattacttatggaaaaataccaccttattcagttgttgtacctggttctttaccagataaaaataatcctgcagcgccatcactttattgtgcggtaattattaaacaggttgatgaaaaaactagatcaaaaacatcagtaaacgatcttttgagagaataaa

SEQ ID NO: 233589 - DNA, 770 bp, Unknown
  Bacterial polypeptide expressing nucleotide sequence isolated from the Sargasso Sea
tatgtctattgaaaaaactataaatgaagcttgggataataaagaccaaattaatccaaattctaaccaatcaattaaagatgctattaaccaagttattgaagatttagattgtggtaaatctagagttgcagaaaaaattaatggtgagtgggttactcatcaatatttaaaaaaagcgattatgcttagctttaggatttatccaatggaaaatttaaatggaccatattctagttggtttgataaagcccatttacttaaaggtaaaacggcgggctggactaaagaacaacatgaggctgcaggttttagaatggttcctaatagtcctgttagaaaaggatccttcgtaggtaaaaatgcagttctaatgccgtgctatgtcaatataggagcatacatagattctggaacaatgattgacacatttgcaagagctggaagttgcagtcaaattggaaaaaattgtcatatatctgcaggtagtggtgttggaggggttcttgaaccagcacaagcattacctacaattattgaagataatgtatttttaggagctatgtctgaagttgttgaaggtgtaatcgttggagaaggttcagtgttgagcatgggaatgtatattggtcaatcaacgaaaatagtaaacaggtcaacaggtgaaattacatatggaaaaatacctccatattctgttgttgttccaggtacacttccagataaaaaaaatccatcggcaccatcattaagttgtgctgtaattatta

SEQ ID NO: 233590 - DNA, 829 bp, Unknown
  Bacterial polypeptide expressing nucleotide sequence isolated from the Sargasso Sea
tatgagtatagaaaaaattataaatgaagcttgggaaaataaagaccaagtaggccaaaattcagataaatctttaaaggatgctgttaatcaaattattgatgatttagacgctggaaaagcaagagtagctgaaaagatcaacggcgaatgggttactcatcagcatctaaaaaaagctatcatgttaagctttagaatgtatccaatggaaaatttaaatggtccatacagcagctggtatgacaaagctcatttacttaaaggaaaaacagctggatggacaaaagaagatcatgaaaaagctggttttagaatggtgcctaattcaccagtaagaaaaggatcatttataggaaagaatgcagttttgatgccgtgttatgtaaatatcggagcatatattgatgaagggacgatgatggatacgtttagtcgtgctggaagctgttgtcagattggaaaaaattgtcatatctcagctggtactggcgttggaggtgtattagaacctgctcaagcattaccaacaattattgaagataatgttttcttaggagcaatgtctgaggtagttgaaggtgtaatagttggagaaggctcagttctaagtatgggaatgtatattggacaatcaacaaaaattgttaatagaaaaaccggtgaaataacttatggaaaaattccaccttattcagtggtagttccaggatccttgccagataaaagcaacccacaagcgccgtctttgtattgtgcggtaataattaaacaagttgatgaaaagacgagatcaaaaacatcagttaacgatcttttaagagaataa

SEQ ID NO: 233591 - DNA, 832 bp, Unknown
  Bacterial polypeptide expressing nucleotide sequence isolated from the Sargasso Sea
atgagcgacatagaaaaaatcataaatgatgcttgggaaaataaagaccaagttaaccaaaattcagataagtctctaagggatgctgttaatcaaataattgatgatttagacagtggaaaagtaagagtggctgaaaaaatcaatggtgaatgggttactcatcaacatcttaaaaaagctatcatgttaagctttagaatgtatccaatggaaaatttaaatggtccttacagtagctggtatgataaagctcatctacttaaaggaaaaacagctggatggacaaaagaagatcatcaaaaagctggttttagaatggtgcctaattcaccggtaagaaaaggatcttttgttggaaagaatgcagttttgatgccatgctatgtaaatattggagcatatattgacgaaggtactatgatggatacattcagtcgtgcagggagttgttgtcagattggaaaaaattgtcatatctcagctgggactggagttgggggtgtcttggaacccgctcaagcactaccaacaataattgaagataatgtatttttaggtgcaatgtcagaagtagtagaaggtgtaatagttggagaaggctctgttttaagtatgggaatgtacattggacaatcaacaaaaattgttaatagaaaaacaggtgaaatatcttatggaaaaatacctccttattcagtagttgttccaggatctttaccagacaaaaaaaatccacaagcaccatctttatattgtgcagtaataattaaacaagttgacgaaaaaactagatcaaaaacttcagttaatgatcttttaagagaataga

SEQ ID NO: 233592 - DNA, 826 bp, Unknown
  Bacterial polypeptide expressing nucleotide sequence isolated from the Sargasso Sea
aatgaacttagaaaaaattgaaaaaactataaacgaagcttttgaaaataaagaaaaaattgataactcaaacaaagatcttaatgacattgtgcgtgaaactattgacttattagataatggaaaaattagagttgctgaaaaaaaaggtagtaaatggcaagtcaatcaatggattaaaaaagctattcttttgagtttccgagttaacaaaatgaaagcttcaaaaggaccatactctacttggtacgataaaatagatggaaagactcaaggatggagtgaagaacaagttaagaaagctggatttagatatgttccaaatggcgtgattagaaaaggagctcatatagcaaaaaatgtggttctaatgccatcatttattaatgtaggtgcctacgtcgacgaaggaacaatgatagatacctgggcatcagttggatcatgtgctcaagttggaaaaaattgtcatatttctggtggtgctggtatcggtggtgttttagaaccaatgcaggcaaatccaactattgtggaggataactgttttttaggtgcacgtgctgaaatagcagaaggtgtaattgttgaaaaagggtcagtattatctatgggcgtttatattggtgcatcaacaagaatagttgatcgtgcaacaggtgaaattcattatggtaaagttcctgcctattctgttgttgttccaggatcaatgccaagcaaaaataatccaaagggtccatcattatattgtgtggtaattgtaaaaaaagtagacgaaaaaactcgaagcaaaacgtctattaatgatttattaagagactaa

SEQ ID NO: 233593 - DNA, 832 bp, Unknown
  Bacterial polypeptide expressing nucleotide sequence isolated from the Sargasso Sea
tatgaatgatcttgaaaaaataattaatagtgcatgggaaaataaagaaaatatagatcaaaattcagatcaagatttaaaacattcaataaatgaaataattaataaattagactctggtaaagttagagtagctgaaaaaattgatggaaaatgggtaacacatcaatacgtaaaaaaagcaattatgttaagctttagaattcaccctatgcaaaatttaagtggcccttatagtagttggtatgataaagaacatctccttaaaggaaaaacagcaggatggactaaagaagatcatgaaaaggctgggtttagaatggttcccaattcacctgttagaaaagggtcatatgttggaaaaaatgcagttttaatgccatgttatgttaatattggtgcatacatagatgaaggtacaatgatagatacctttgctagagctggaagttgttgtcagattggaaaaaattgtcatatttcagctggaagtggtgtagggggagttttagagcctgctcaagcattacccacaataattgaagataatgtatttttaggagcaatgtcagaagtcgttgagggggtaattgttggggaaggttcggtattaagtatgggtatgtttatcggacaatcaacaaaaatagttgatagaaaaactggtgatataacttatggatctattccaccatattctgttgtagtaccaggtactttgccagataaaaacaataaaaattctccctccttgagttgtgcagtaattatcaaaaaagtagatgaaaagactagatcgaagacttctataaatgatcttttgagagattaa

SEQ ID NO: 233594 - DNA, 826 bp, Unknown
  Bacterial polypeptide expressing nucleotide sequence isolated from the Sargasso Sea
atgagtgatctcgaaaaaattataaatgatgcctttgaggatagagataatattaatgtcaatactgcaggtgatattagaaacgcagtagatgaaactttaaacaaacttgatagtggaagcttaagggtttgtgaaaaaattaataatgaatggcaagttaatcaatggattaaaaaggcaattcttttaagtttcagattaaatgataatgaaatcattaaagcatcgcatgccacttggtttgacaaagtagaaagtaaaactgcaaattggactaaagatgatcatctgaaagcaggatttcgatatgtaccagatgctgttgtaagaaaatctgcatttattgctaaaggtgttgttttaatgccttcttttgtaaatcttggtgcatatgttgatgaaggaacaatgattgatacttgggcaacagttggctcatgtgcgcaaataggtaaaaactgtcatatttctggaggcgctggtattggcggtgtacttgaacctcttcaagcaaatcctgtgattattgaagacaattgttttattggagctagaagtgaagtggctgaaggtgttattgttggtgaaggtgcggttttatcaatgggtgtatttattggagcatctacaaaaatagtcgatcgatcaactggggaaattcatatgggaaaagttccagcgtattcagttgtggtaccaggtacattaccaggaaaaaaagaaggagatattaatccttctttatactgtgcagttattgttaaaagagttgatgaaaaaactagaagcaaaacatcaatcaatgatcttttaagagattaat

SEQ ID NO: 233595 - DNA, 829 bp, Unknown
  Bacterial polypeptide expressing nucleotide sequence isolated from the Sargasso Sea
tatgtctttagaaaaaattataaatgaagcttgggagaataaagatcaggtcaaccaaaattcagatccatcattaaaagatgcaattaatcaggtaattgatgatctagatagtggtaaatctcgtgttgctgaaaagataaaaggtgagtgggttacacaccaatatttaaaaaaagcaattatgttaagttttagaatttatccaatggaaaatttaaatggtccttatagtagttggtatgataaatcacatctattaaaaggtaaaactgcaggatggaccaaagctgatcatgaaaaagcaggttttagaatggtgccgaactcaccagtaagaaaaggttcatttgtcggaaggaatgcagttctaatgccatgttacgtgaacattggagcatatattgatgaaggtacaatgatagacacttttgcaagagctggtagttgttgtcagataggtaaaaattgccatatatccgctggttctggtgttggtggggttttagagccggcgcaagctttaccaacaatcatagaggataatgtgtttcttggagcgatgtctgaggtggttgaaggagtaattgttggggaaggatcagttttaagtatgggtatgtatattggtcaatcaactaaaatagttgatagaaaaactggggaaattacttacggtaaaataccaccctattcagttgtagttccaggctcattgcccgataaaaataactcttctgcaccctctttgtattgtgcggtaataattaaacaagttgatgaaaaaacaagatctaaaacttctattaacgacctgttaagagactaa

SEQ ID NO: 233596 - DNA, 730 bp, Unknown
  Bacterial polypeptide expressing nucleotide sequence isolated from the Sargasso Sea
aatgtctaatgctatattagaaagcgaaatagaggcggcgtggagtttaagagatacgataagccctagcaccacaggtaaagttcgtgacgccatagaagaaactttggaagctttagataagggaaaccttcgtgtagcagaaaaaacaaatgataatgcttggcaagttaaccaatgggcaaaaaaagcggtgcttcttggctttaggattaaagacatggagattcaaagtggtggcccacagtcctcaggatggtgggacaaagtggatagtaaattcaaaggctggagtgaggaagcttggaaaaaggctggcttcagagctgttcctaattgtattgtaagaaaatcagcatacatagcgccgggtgtcgttttaatgccttccttcgtaaatttaggtgcttatgttgatgagggaactatggttgacacatgggccacagtaggaagttgcgcccaaataggtaaaaatgttcacctttctgggggtgttggtattgggggtgttttggaaccaatgcaggcagggcctactataatagaggataattgttttataggtgcaagatctgaagttgtagaaggttgcatagtccgagagggatctgttctgggaatgggagtttatatagggcaatcgactaaaatagtagatcgagaaactggagatgttatgtacggggaagttccgccatattctgtagttgtttccgggtctatgcca

SEQ ID NO: 233597 - DNA, 217 bp, Unknown
  Bacterial polypeptide expressing nucleotide sequence isolated from the Sargasso Sea
atgggaatgtatattggacaatctacaaaaattgttaatagaaaaagtggagaaataagttatggaaaaatacctccatattcagtagtagtaccgggttctttgccggataaaaataatccttcggcaccatcattgtcatgtgcagtaattattaaacaagttgacgaaaaaactagatctaaaacctctatcaatgatcttttaagagaataga

SEQ ID NO: 233598 - DNA, 694 bp, Unknown
  Bacterial polypeptide expressing nucleotide sequence isolated from the Sargasso Sea
gttgcagaaaaaaaaggtaattcctggaaagttaatcaatggataaaaaaagcaatactgcttagctttagagttaataaaatgaaagcatctaaaggtccttattctacttggtatgataaaatagatggaaaaactcaaggatggagtgaagaaaaaattaaaaaagccggctttagatatgttcctaatggagtgataagaaaaggtgctttcattgcaaaaaatgttgtcttaatgccttcatttgtaaatgttggggcatatgttgatcaaggaagtatgattgacacctgggcttcggtagggtcttgcgcgcaagttggaaaaaattgccatatatcaggcggagctggtattggaggtgttttagagcctatgcaagctaacccaaccataatagaggatgattgttttcttggggcaagggcagaaattgccgaaggggtcattattgaaaaaggttcggtattatctatgggggtttatataggtgcttcaactagaatagttgatagatctactgggcagattcattatggaaaagttcctgcatattcagttgttgtgccaggatctatgccaagcaaaaataatcctactggaccatcactatattgcgtagtgattgttaaaaaagtagatgaaaaaacaagaagtaaaacttcaataaacgatttattaagagattaat

SEQ ID NO: 233599 - DNA, 771 bp, Unknown
  Bacterial polypeptide expressing nucleotide sequence isolated from the Sargasso Sea
atccagataaatctttaaaggatgctgtgaatcaaattattgatgatttagacaatggaaaagtaagagtagctgaaaagataaatggtgaatgggttacacatcaacatctaaaaaaagctataatgttgagctttagaatgtatccaatggaaaatttaaatggtccatacagtagttggtatgacaaagctcatttacttaaaggaaaaacagctggatggacaaaagaagatcatgaaaaagctggttttagaatggtgcctaattcgccagtaagaaaaggatcatttgtaggaaagaatgcggttttgatgccttgttatgtaaatattggagcgtatattgatgaaggaacaatgatggatacatttagtcgtgctggaagttgtagtcagattggaaaaaattgtcatatctctgcaggttctggaattgggggcgtcttggagcccgctcaagcattaccaacaattattgaggataatgtttttgtcggggcgatgtctgaggttgttgaaggtgtgatagttggagaaggctctgtattaagtatgggtatgctaattactcaaagtactaaaatagtaacgcgttcaacaggagagattacttatgggaaaattcctccatactcagttgttgtaccaggttctttaccagataaaaacaatccatctgcaccatctttaagctgtgcagtgattattaaacaagttgatgaaaaaacgagatctaaaacatcagttaacgatcttttaagagattaaa

SEQ ID NO: 233600 - DNA, 850 bp, Unknown
  Bacterial polypeptide expressing nucleotide sequence isolated from the Sargasso Sea
gctagagaatttggaatcgatttaaatttgatccaacctacaggccctaagggaagaattttaaaaactgatttacataactttgttcagaagaagttatctggacaagaatcatctggctttaaattcaatcagccaaatgttgattattctcagtggggtaagacagaagaaaaatcgtttactaaattcgagaaaactgctttaaagaatttacataattcatggataaatatccctcatgttactcagcatcacgaaatagatttttcattggtttcaggcattagaaaatctaaaaaaaaggagaagataagcatttcacctttagcatttatcgtttatgcagtttcaatgcttctcaaagaatttccattacttaactcgtcgctaaatgaaagtttagatgggtatatttctaaagattatgtaaatattggcatagccgttgatacagaaaggggattaatggttccaaatattaagaatgctgataaattatctgttcaagaaatatctgagaatattaatcagctcgcacaaaaagcaaagaataagaagattaaacctaatgacttacagggagcaacttttagcatttcttcgcttggtaacattggcggcggattttttactcccattattaacccccctgaggttgcaatcttgggtctctcaaggacctatcaaaaaccttatttaacctcctcaaaaagcttaaaggaaaaagaagttttgccagtctctctgtcttatgatcacagacttattaatggtgtttatggtgcaaagtttgttacttcgctcgatgctatacttcaagataataaattatttgaaaaaatatgat

SEQ ID NO: 233601 - DNA, 692 bp, Unknown
  Bacterial polypeptide expressing nucleotide sequence isolated from the Sargasso Sea
caaagatataccaagagtaaaaaaattatcatcaaagtatttatcaaattcatggaccactatacctcatgttacaaatcatgatgaggctgatattacagaaatggaaagctttagaaattctttgactgatatttatacaggagaaaaaattaaaattactcctttagcatttattgtaaaagctttagttgccacgttaaaaaaatttccaagttttaattcttcaattgatgaaattgaaacaggtaaaatgacgatgaaaaaatattaccatataggtatagctgtagacactccaaatggactaatggttccaaaaattagaaatgctaataataaaaaaatttctcatattagtagagagttaagggaggtaagcgagctttgcagaaatttaaaaatagataaaaaggaattgtttggtggttcaatgactattactagcctaggaggaataggtggatcattttttacaccaataataaattatcctgaagtagcaattttaggagtaggtaggtcagagaaaaaacaaatttatattaatggaaagtttcaaattagaacaatgctgccgatttctttgtcctatgatcatagaatcattgacggtgctgaggctgcaagatttaacaatgaccttaaagaaaacttaggtaaaaattttgcctataagcttgctgtataat

SEQ ID NO: 233602 - DNA, 572 bp, Unknown
  Bacterial polypeptide expressing nucleotide sequence isolated from the Sargasso Sea
ttctttaacagatatatatactggagaaaaaattaaaattacacctctagcatttataataaaggctttagttgcgtctcttaagaaatttcctagttttaattcttctatcgacgaaattgagattggaaaaatgactttaaaaaaatattaccatattgggatagcagttgacacaccaaatggattaatggttccaaaaataagaaatgcaaataacaaaaaaatttctctgataagtaaagaattaaaagaggtaagtgaactttgtagaaatttaaaaattgataaaaaagaattgtttggtggctcgatgacgattacgagtttaggtggtataggaggttcattttttactcctataattaattatcctgaagttgctatattaggagtaggaagatcagaaaaaaaaaaaatttttatgaacgggaaatttcaaaccaggaccatgctgccaatttctttatcttatgaccatagaattattgacggtgctgaagcagctaggtttaataatgatttaaaagaaaacttaggcaaaaattttgcttataaactagctgtctaat

SEQ ID NO: 233603 - DNA, 847 bp, Unknown
  Bacterial polypeptide expressing nucleotide sequence isolated from the Sargasso Sea
aacgaagcttcaaaagaaaaacaaccgccagaagttaaaccagctgtgcaatcacctcaaaacacacctcaaaacacacctcaagagcaacaagaaaggagtggcgatggggtatacgctagcccaggagtgaggagacttgcccgtgagctaaacatcaacttatctacgctttcagggagtggaagcaagggtcgaataaccaaaaacgatcttcatgcctatataaaagcacaaatgtattcaaaaaaccttccaaatatatatagtcaacaagagattgatttcagtcagtggggtgacataaatgtaaaaaaattaacaaaaataaagacaattacaggaaaaagactatcaagcgcgtggcaaacaatacctcatgttacacaatttgttgaagcagatgtgacagaacttgaaagtgtaagaaaaaaacaaaaagataaacacataaaagacggtataaaaattacaatgatgccatatctaatgaaagccgcggttaatgttttaaaaacacaccctgttttcaatagctctattcaaaacgatggtttaaatattgtttttaaaaaatactataatataggtgttgctgttgacacaaaagacgggttggttgttcctgttataaaagatgtggacaaaaaagatatcgttcagctttcaaaagagctgatggatatcagcgaacgcgcgagaaacaaacaactgttagttgacgagttaaagggtggaacttttactatatctaacttaggtggaattggcggttctttttttacaccaataataaacccaccagaggtagcaatacttggagtttcaagaacaaaaatcgaaaaca

SEQ ID NO: 233604 - DNA, 382 bp, Unknown
  Bacterial polypeptide expressing nucleotide sequence isolated from the Sargasso Sea
aatggttccaaaaatcagaaatgcaaataataaaaaaatttcgttaattagcaaagaactaagagaagttagcgaactttgtagaaatttaaaaatagataagaaggaattatttggtggatcaatgacaattacaagtttaggtggaataggtgggtctttttttacgccaataataaactatcctgaagtagctattttaggtattggaagatccgaaaaaaaacaagttttcttaaatggtaagtttcaagtcagaacaatgttgccactttcattatcatatgatcatagaattatcgatggagctgaagctgctaggtttaataacgatttaaaagaaaatctaggaaaaaattttgcttacaagttagctgtataa

SEQ ID NO: 233605 - DNA, 858 bp, Unknown
  Bacterial polypeptide expressing nucleotide sequence isolated from the Sargasso Sea
tagatatttataaagttaaaggtagtgaaagagatggcagggtaatagataatgatattaaattatttgtctctaaaaattccaaacaaataaaaaaaattgactctcagaaagacgaaaaaaatgaattagaatatgctcattcagaatttggtgagatagaaataaaagatattccaagagttaaaaaactttcttcgaaatatttaataaattcttggtcaaaaataccccatgtaactaaccacgatgaagccgatattactgaaatggaagaattcagaaattctcttaccaatatgtatactggagaaaggaagaaaataacccctttggcatttatagttaaagcattatctgtaactcttaaaaaatttccaaactttaattcctcaatagatgaaattgatagtggtaaaattacaattaaaaagtattaccatataggtatagctgtagatacgcctcacggtttaatggttcccaaattaaggaatgtaaaagataaaaaaatttctctgattgctgacgaattaaaaaaaattagtgacgaatgtaaaaatcttaagattgataaaaaagaactttttggtggatcgatgactataacaagtcttgggggaattgggggctcattctttactccaattattaattatccagaagtagctattttgggaatcggtaagtcagaaaaaaagcagatttatataaatggtaaatttgaaattcgtataatgttacccttatctttgtcttatgatcatagaattatagacggcgcagaggcagctagattcaataatgaattaaaggaaaatttaggtaaaaattttgcctacaaattggctgtttaaa

SEQ ID NO: 233606 - DNA, 727 bp, Unknown
  Bacterial polypeptide expressing nucleotide sequence isolated from the Sargasso Sea
atatgatcacgctgattttggagatgttgaaattcaagatataccaagaattaaaagaattgctgctccacatttatcaaattcttggcaaacaattccgcatgttactagttgtgatgaagcagatattacggagttagaagaatttagacaaaatttgactgatacttttactggagagaaaaagaaaattactccattggcatttattataaaggcagtcgtggaagctttgaaagtttttccaagatttaatagttcaattgataatattgaaaatggaaaaataacgttaaaaaaatactttcatgtaggaattgcagttgatactcctaacggattaatggtgcccaaaataagaaatgccaaccaaaagaatatagatcaaataagtaaggatctaaaaaaagtaagtgatgattgtcgaaatttgaagatagataaaaaagaattttatggaggatctataactataacaagcctaggtggtattggaggaacttattttactcctattattaattatccggaggttgctattttaggaattggtaggacttatattaaacctgtctttattgatggacaatttaaacctagaacaatgctgcctttatctctttcttacgatcatagaattatagacggtgccgaaggttcaagatttaataatgaattaaaaaataaccttggtaaaaactttgcctataaattagctaagcaatga

SEQ ID NO: 233607 - DNA, 973 bp, Unknown
  Bacterial polypeptide expressing nucleotide sequence isolated from the Sargasso Sea
cgaaaaacaacaaggtaatacccaaaagagtgatcgtcaattcttcaatacatccttcaatactgttcatgcaagtccttcagtaagaaagctggggcgtgaattaggcgtggatctaaaccaagtcaatggctctggaatgaaaggtcgtatacttccagaggatcttaaatcttttgtgaagtctgtgatgagtgggcatgccccaaatgtccaatctgctcttccagaattacccgaagtagatcactctgcatttggtgaaattgagagcgttcctttgagtcgaattaaaaagatttcaggtcctagactgcaagcgagttggattaatatcccgcatgtcacacagcatgatgaagccgatatcaaccagctggaacaattaagattggacttaaaaaaatcatacgcaaaagatgggatatcactttcaatcctgccttttatcatcatggcagtttgtaagctattgagggaatttccagatttcaactcatcactggatgacaagcattcagcactgatccataaaaaatatataaatatcggttttgcagcgaataccgatcaaggactcatggtccctgtgatcaaagatgcagaccaaaagagcttaaaagaaatttcacttgagcttatcagattaagtgaagatgccagaagcggaaaaatccagatcaatgatctacaaggtggaacatttaccatatcaagtcttggaggctttggaggagttggattcacaccaattattaacccccctgaagtggctattcttggtgtagccagggctcaaataagaccgatcatgattaagggaaaattcttaccaaggctcatattgcccttatcattgtcttatgatcaccgagtcatcgatggtgtcggcgggatacaattcacatctgcactaaaggaattgcttgaaaatccagaatcttacttatccgaggagatcagcattggctga

SEQ ID NO: 233608 - DNA, 271 bp, Unknown
  Bacterial polypeptide expressing nucleotide sequence isolated from the Sargasso Sea
ttttggaggctccatgaccattacaagcttaggtgggataggaggtaattattttacaccaataattaattatcctgaggttgcgattttaggtattggaaaattagagaaaaaacaaaaatttattaagggtgaatttaaaactagaaccattttacctttatctttatcctatgatcatagaataatagatggtgctgaggctgcaagatttaataatgagcttaaagaaaatcttggtaagaattttgcatacaggcttgcaatctaa

SEQ ID NO: 233609 - DNA, 330 bp, Unknown
  Bacterial polypeptide expressing nucleotide sequence isolated from the Sargasso Sea
aggatttaagattaattagtgataaatgtagaaaattaaaaattgataaaaaagaattttttggtggttcaatgacaattacaagtttaggcggtataggaggcacttattttacaccaataattaattatccagaagtagcaattttaggaattggtaagcttactaagaaaaaaatttactttgacgatgggtttaaaactagaactattttacctctttctttgtcttacgaccatagaattattgatggagctgaggcagcaagatttaacaatgagcttaaaaaaaatcttggaaaaaattttgcttataatttaagcaattaaa

SEQ ID NO: 233610 - DNA, 725 bp, Unknown
  Bacterial polypeptide expressing nucleotide sequence isolated from the Sargasso Sea
gtttaaacattcagagtttggagaagttgaaataaaagaaataccaagagtaaaaaaaatagctgctccccatcttttaaactcttggcagactattccacatgttactcaccacgatgaggcagatgttacagagcttgaagaattccgaacatcacttactgatataaatacaggggaaaagaaaaagatgtcacctttagtttttataattaaatctttagtagcaacaatgaaaaaatatcctagttttaactcatccatagatgaaatcaatgaaggaaaaatgacattaaaaaaatactttcatattggtattgcagttgatactgagcatggactaatggtaccaaaaattagagatgtaaataaaaaaaaccttaaccaaatatctttagagctgaaagaagtaagtgaaaaatgtcgaaaacttaaaattgataaaaaagaattttttggtggatcaatgacaataactagcttgggtggaataggaggatcattttttacaccaattattaattatccggaggtagcaattttgggagttggaagatcttattataagcaagttttaattgataatgaatttcaaaaaagaattatgcttccattgtcattgtcatacgatcacagaattatagatggagcagaagctgctagattttccaatgaattaaaagagaatcttggaaaaaactttgcttataaattggcactataat

SEQ ID NO: 233611 - DNA, 391 bp, Unknown
  Bacterial polypeptide expressing nucleotide sequence isolated from the Sargasso Sea
aatggattaatggttccaaaaataagaaatgcaaataacaaaaaaatttctctgataagtaaagaattaaaagaggtaagtgaactttgtagaaatttaaaaattgataaaaaagaattgtttggtggctcgatgacgattacgagtttaggtggcataggaggttcattttttactcctataattaattatcctgaagttgctatattaggagtaggaagatcagaaaaaaaacaaatttttatgaatggaaagtttcaaactaggactatgctgccaatttctttatcttatgatcacagaattattgatggtgcagaagcagctaggtttaataatgatctaaaagaaaacttaggcaaaaattttgcctataaactagctgtctaat

SEQ ID NO: 233612 - DNA, 553 bp, Unknown
  Bacterial polypeptide expressing nucleotide sequence isolated from the Sargasso Sea
actgggagaaaaaattaaaattacacctcttgcatttataataaaggcattagttgcctccttaaagaaatttcccatttttaattcttctattgatgaaatagagactggaaaaatgactttaaaaaaatattatcatattggaatagcagttgatacgccaaatggattaatggttccaaagataaggaatgcaaacaacaaaaaaatttcattaataagtaaagagttaaaaaaagtaagtgagctttgtagaaatttgaaaattgataaaaaggaattatttggtggctcgatgacaattactagtttaggtggaataggaggttcatattttactcctataattaattatcctgaagtagctattttagggataggtagatcagaaaaaaaacaaatttttatgaatggaaaatttcaaattaggactatcttgccaatttctttatcttatgatcatcgaataattgatggtgctgatgcagcaaggtttaataacgaaattaaagaaaatttaggtaaaaattttgcttataaacttgcagtttaa

SEQ ID NO: 233613 - DNA, 760 bp, Unknown
  Bacterial polypeptide expressing nucleotide sequence isolated from the Sargasso Sea
agtaaagatagtaaaccagataaaattaaaaacgaatttgaacattctgattttggtgaaatagaaattaaagacataccaagagtaaaaaaattatcatcaaaatatcttataaattcatggacaacaattcctcatgttacaaatcatgatgaagccgacataacggagatggaaagttttagaagttcattaacagatatttatactggagaaaaaattaaaattacacctctagcatttataataaaggctttagttgcatctcttaagaaatttcctagttttaattcttctatcgacgaaattgagactggaaaaatgactttaaaaaaatattaccatattgggatagcagttgacacgccaaatggattaatggttccaaaaataagaaatgcaaataacaaaaaaatttctctgataagtaaagaattaaaagaggtaagtgaactttgtagaaatttaaaaattgataaaaaagaattgtttggtggctcgatgacgattacgagtttaggtggtataggaggttcattttttactcctataattaattatcctgaagttgctatattaggagtaggaagatcagaaaacaaacaaatttttattaatggaaagtttcaaactaggactatgctaccaatttctttatcttatgatcacagaattattgatggtgcagaagcagctaggtttaataatgatctaaaagaaaacttaggcaaaaattttgcctataaactagccgtctaat

SEQ ID NO: 233614 - DNA, 511 bp, Unknown
  Bacterial polypeptide expressing nucleotide sequence isolated from the Sargasso Sea
aaggctttaactgcatcacttaaaaaatttccaaatttcaatagttctattgatgatattgataatggaaaaatgactgttaaaaaatattatcatattggtatagctgtggatactccgcatggtttaatggttccaaaactaagaaatgcagataataaaaatattaatttaataagttctgaactcaaaaaaattagtgaacaatgtagaaatcttaaaattgataaaaaagaattgtttggtggatctatgacaataacaagtttagggggaattggtggttcgttttttacacctattataaattatcctgaagttgcgattttaggagttggtaaatctcaaaaaaaacaagtttttttagatggtaaatttgtaataagaaccatattacctttgtcattatcttatgatcacagaattattgatggagcagaggcagctcgctttaacaatgatttaaaagaaaatttaggtaaaaattttgcttataaattagcagtctaac

SEQ ID NO: 233615 - DNA, 531 bp, Unknown
  Bacterial polypeptide expressing nucleotide sequence isolated from the Sargasso Sea
taacctttctacctttcttattgaaagcggttataactgttttaaaggagattcccaaattcaacagctcgttagatcacacaggtgaaaatctcgttttaaagcaatactaccacattggaatagcggttgatacaccgcatgggctcacagttcctgtggtgaaggatgtagataaaaaagatattttcgagctttcgaaagacctaatggttcttagcgaaaaagctagaaataaaaaactaaaaccagaggatcttcagggaagcacctttactgtttctagtttaggtggaattggtggtacagctttttccccaattgtaaatcccccagaggtggccatccttggtgtttctaaaagtgagtggcgtcctgtgtatgacttaaaaacagaggagtttatccctcgctacattatgcctttttctatttcatatgaccatagggtggtcgatggtgcagctggagcatcctttgttgaaaggttctctcaagccttgaaagacacagacagcatggtcggataaa

SEQ ID NO: 233616 - DNA, 516 bp, Unknown
  Bacterial polypeptide expressing nucleotide sequence isolated from the Sargasso Sea
ttatagcaaaagctcttgtcagtgctttgaagaaatttccaaattttaatgcttcaattgacagtgcaaacgacaaaattatttataaaaaatattttcatgttggttttgcagtagatactcctcacggtctaatggtgcctaaaataagagatgttgatcaaatgagtataaaagaaattggaagcgctttaagaaaaacaagtagactttgcagagatttgaaaattgataagaaggaattttttggcggctcaatgaccatatcaagcttgggtggcattggaggaactttctttaccccaattatcaatcctcctgaagtagccatacttggagtcggaaaaagttttgacaggttagtaaaagttaatgacaagtttgtttcaagaaaaattttacctatttcactctcatacgatcatagaataattgatggcgcggaaggtgctaggttctgcgtttatctagggaaatgtcttggcaaggacttcgcttttaaacttgccgtttaat

SEQ ID NO: 233617 - DNA, 478 bp, Unknown
  Bacterial polypeptide expressing nucleotide sequence isolated from the Sargasso Sea
ttccaattttaatgcttctattgatattaatcagaataaaataatttataaaaaatattttcatttaggatttgctgtggatacacctcacggtttaatggttcctaaaataagaaatgtggatcaaatgagtattaaagaaataggcgaagcattaaaaaaaactagtaagctctgcagagagttaaaaattgataaaaaagaattctttggcgggtctatgactatttccagcttaggaggtattggtggaacattttttactccaattataaatcctccagaagtcgcgatactaggtattggaaaaagttttgataaattagttaaactaaaaggtaaaatagtttccagaaagattttaccaatttctttatcatatgatcatagaataatcgatggagctgaaggagcaagattttgcgtttatttaggtgaatgtctgggtaaagattttgctttcaatcttgctgtttaa

SEQ ID NO: 233618 - DNA, 269 bp, Unknown
  Bacterial polypeptide expressing nucleotide sequence isolated from the Sargasso Sea
tggtggttcaatgactataacaagtttggagggaataggtggttcattttttacacctattataaattatcctgaggttgcaattttgggaataggaaagtcagaaaaaaaacaagtttttttagatggaaagtttgtaacaagaacaatgttacctttatcattgtcatacgatcacagaataattgatggcgcagaagcagctcgttttaacaatgatctaaaggagaatttaggtaaaaattttgcttataaattagccgtctaat

SEQ ID NO: 233619 - DNA, 328 bp, Unknown
  Bacterial polypeptide expressing nucleotide sequence isolated from the Sargasso Sea
agaattaaaagaggtaagcgaactttgtagaaatttaaaagttgacaaaaaagaattgtttggcggctcgatgacgattacgagtttaggtggtataggaggttcattttttactcctataattaattatcctgaagtcgctatattaggagtaggaagatcagaaaaaaaacaaatttttatgaacggtaagtttcaaactaggactatgctgccaatttctttatcttatgaccacagaattattgatggtgctgaagcagcaaggtttaataatgatctaaaagaaaatctagggaaaaattttgcttataaactagctgtttaa

SEQ ID NO: 233620 - DNA, 472 bp, Unknown
  Bacterial polypeptide expressing nucleotide sequence isolated from the Sargasso Sea
tattcttctatcgacgaaattgagactggaaaaatgactttaaaaaaatattaccatattgggatagcagttgatacgccaaatggattaatggttccaaaaataagaaatgcaaataacaaaaaaatttctctgataagtaaagaattaaaagagataagcgaactttgtagaaatttaaaaattgataaaaaagaattgtttggcggctcgatgacgattacgagtttaggtggaataggaggttcattttttactcctataattaattatcctgaagttgctatattaggagtaggaagatcagaaaaaaaacaaatttttatgaatggaaagtttcaaactaggactatgctgccaatttctttatcttatgatcacagaattattgatggtgcagaagcagctaggtttaataatgatctaaaagaaaacttaggcaaaaattttgcctataaactagctgtctaat

SEQ ID NO: 233621 - DNA, 826 bp, Unknown
  Bacterial polypeptide expressing nucleotide sequence isolated from the Sargasso Sea
cttaaaagggtctgaaagaaacgggagaataacagaggaagatgtcaaaaattttataaaaaattctaaaaagagtataccggtaaaagaaaccccaaaaccagaacctaaaaaaaacttagttgatcactctgaatttggcgaaatagaaattgttgaaatgccaagagttaaaaggcttgcagcaccgttgttatccgaatcttggagaactattccacatgttacacatcatgatgaagcagatattactgaacttgaaaactttcgtaaaaatttaaaggatggttacacaggtgagcaaaagaaaattaccccacttgcttttataattaaggcattggtaaaaagtatgatgaaatatcctatatttaattcatcaataaaagatgaagaaaattatcaaattatattaaaaaaatattttcatatcggtattgcggtagatactccacacggtcttatggttcctaaaataagagatgccgataaatttaaaatatctgacttatcgcaaaaattaaaagaggtaagtgataaatgtagaaatttaaaaattgacaaaaaagaatttcaaggtggttcaataactatcactagtcttggtgggataggtggaacattttttacacctataataaatccacctgaggtagccatattaggaattggaaaaatatttcaaaaagataaaagtgacaaacttatacttccactgtcactatcctatgatcacagaattattaacggagcagatgctgcaagattttgtaatgagattaaagaaaaccttggtaaaaattttgcctacaacctctcaatataa

SEQ ID NO: 233622 - DNA, 754 bp, Unknown
  Bacterial polypeptide expressing nucleotide sequence isolated from the Sargasso Sea
aatgaaagaagatattaaagttaaatcagaatttgatcattctgattttggggaagtgaaaataattgatataccaagagtaaaaagattagcggctccacatctttcaaattcttggaatacaattccacatgttactcatcatgatgaagcagatataaccgagctagaagattttagagcaaaattaacagatcctttttctggagataaaattaaaattacaccacttgcttttatagcaaaagcgttaacaaataatttaaagaaatttcctacatttaattcttcgattgataatattagtgaaggaaaaattaccttaaaaaattattttcacataggaattgctgttgatacaaaacatggtttaatggttccaaaaattaggaatgtagatcaaaaaaaaataaaagaaatagcagaagagttaaaaaaagttagtgatcttagtaaaaatcttaaaataaataaaaaagaattttttggtggatcaattactataacgagtcttgggggcattggaggtacttactttacacctataataaattaccctgaagttgcaattcttggtgttggtaggtcttacaaaaaacaaatttttataaaagataagtttcttgcaagaacagtgttaccaatatcactttcatatgatcatagaattatagatggtgcagaagcggctaaattttgtaattcattaaaagaaaatttaggaaaaaattttgcctataatttggccttttaa

SEQ ID NO: 233623 - DNA, 640 bp, Unknown
  Bacterial polypeptide expressing nucleotide sequence isolated from the Sargasso Sea
tcatggactgaaataccacatgtaactcaacacgatcaaattgatattactgaaatggagcaatttagaacatcattatttgatcatttcactggagaaaaaatttctgtaacacctttagctttcataacaagagcggttgtgaatgctttgaaagattttcctaattttaattgttcgatcgatactaatcaaaataaaatagtttataaaaaatactaccacgttggttttgctgtagacactccacatggacttatggttccaaaattaagagatgttgatcagatgaatattaaagaaataggagatgaattaagaagggtgagtagagaatgtagagatttaaaaataaataaaaaagaattttttggtgggtcaatgactatttcaagcttgggaggaattggcggaactttttttacacctataattaacccaccggaagtagctattttgggagttggaaaaagttttgatagacttgttagaataaaaggtcaaatagtttcaagaaaaattttgccaatttctttatcttatgaccacagaataatagacggtgctgaaggtgcaagattttgtgttcatttaaacaaaagtttaggtaaagattttgctttcaagcttgccgtttaat

SEQ ID NO: 233624 - DNA, 868 bp, Unknown
  Bacterial polypeptide expressing nucleotide sequence isolated from the Sargasso Sea
atcgaacctcagaaaccaaaagaaattattcctatagcgcctacatcacaatcaggcagtaagtcagctagtccaaaagttagaaaatttgcaagagagttaggtgccaatgtagttgaaatacctggttctcaaagaggtggtagagtttccgaggaagatgtaaaaaattttgtaagatctcaagttacagtcagcggtggaaaaatagaaaagaaagttcataaagaagagtatccgcatgaagagtttggcgaaatcgaactaaaagatataccaagagttaaaagattatctggtcctcacttagtaagatcttggactgaaattccccatgtaacacagcatgatgaagttgatataacagaaatggagcaatttagatcatcattatatgattactatactggtgagaaaataaaagtgacacctcttgcttttatagcaaaagctcttgtcagtgctttgaagaaatttccaaattttaatgcttcaattgacagtgcaaacgacaaaattatttataaaaaatattttcatgttggttttgcagtagatactcctcacggtctaatggtgcctaaaataagagatgttgatcaaatgagtataaaagaaattggaagcgctttaagaaaaacaagtagactttgcagagatttgaaaattgataagaaggaattttttggcggctcaatgaccatatcaagcttgggtggcattggaggaactttctttaccccaattatcaatcctcctgaagtagccatacttggagtcggaaaaagttttgacaggttagtaaaagttaatgacaagtttgtttcaagaaaaattttacctatttcactctcatacgatcatagaa

SEQ ID NO: 233625 - DNA, 535 bp, Unknown
  Bacterial polypeptide expressing nucleotide sequence isolated from the Sargasso Sea
gatgtcacccttggtttttataattaaatctttagtagcagcattaaaaaaatatccaaatttcaactcatctattgaagaaattagtgaagggaaaatgactttaaaaaaatattttcatattggtatagctgttgatactgagcatggattgatggtaccaaaaattagaaacgtagataaaaaaaacttaaatcaaatatattctgagcttaaagatataagtgataaatgcaggaaacttaaaattgataaaaaggaattttttggaggatcgatgacaataactagtttaggaggaataggaggatcattttttactccgattattaattatccagaagtggcaattttaggagtaggaaaaaactactacaaacaagttttggttaaagaccaatttcaaaaaagaattatgttacccttatcgctatcttatgatcatagaattatagacggtgcagaagcagcaagattttctaatgaattaaaagagaatctcggtaaaaattttgcttacaagctagcaatataa

SEQ ID NO: 233626 - DNA, 566 bp, Unknown
  Bacterial polypeptide expressing nucleotide sequence isolated from the Sargasso Sea
aaaagataattatacaggagaaagaataaaaattactcctcttgcatttattataaaagcattggtactttcactaaaaaaatttccatcatttaattcatcaattgatgatattgaaaatggaaaaattacttttaaaaagtattttcatgttggtatcgcagttgatactcaacatggacttatggttcctaaaattagagatgctaatcaaaaagatatcaatcagttaagtgaggaattaaaaaaagtaagtgatgattgtagaaatttaaaaattgataaaaaagagttctttggaggatcaatgactatcacaagcttaggtggcataggtggttcgttttttacaccaataattaattttccagaggttgctatacttggtgttggtagaagttataaaaaacaggtatttattgatggtaaatttgttccaagaaccatgcttccactatctctctcatatgatcacagaattatagatggtgctgaggctgcgaagtttaataacgaattaaaagataatcttgggtctaattttgcatataacttgagtaaatgat

SEQ ID NO: 233627 - DNA, 658 bp, Unknown
  Bacterial polypeptide expressing nucleotide sequence isolated from the Sargasso Sea
tggtcctcatttggtaaggtcttggactgagattccacatgtgactcaacatgaagaaatagatattacagagatggagcagtttaggtcttccttatatgattattataccggcgaaaaaataaaagtcacaccattagcattcattgccaaagctttagttagtgctcttaaagagtttccaaattttaatgcttctatagatatgagttcaggtaaaattatttataaaaagtattttcatattggttttgcagtagatacacctcatggcttgatggttcctaaattaagagatgcagaacaactaagtattcaagaaataggtgaagaacttaaaaaaattagtaaactttgtagagatttaaaaattgataaaaaagaattttttggcggctctatgactatttcaagtttaggtggtataggcgggactttttttactccaattatcaatcctcctgaagtcgcgattttaggtgtagggaaaagttttgataaattaataaaattaaaaggcaaaattgtttctagaaaaattttgcctatttctttgtcttatgatcatagaataatcgacggagcagaaggtgcaagattttgtgtttatttaggtgaatgtttaggtaaagattttgctttcaagcttgctgtttaa

SEQ ID NO: 233628 - DNA, 331 bp, Unknown
  Bacterial polypeptide expressing nucleotide sequence isolated from the Sargasso Sea
actggagcttaaaaaattaagtgatcaatgcagaaatcttaaaattgacaaaaaagaattatttggtggttccatgactataacgagtctgggaggtattggtggttctttttttacacctattattaattatcctgaagtcgcaatcttaggagttggtaaatctcaaaaaaaacaaatttttattgatggaaagtttataacgcgaacaattctacctttatctttatcatatgatcatagaataatagatggagccgaagctgctcgatttaacaacgatctaaaagataatcttggaaaaaattttgcttataaattagctgtataa

SEQ ID NO: 233629 - DNA, 850 bp, Unknown
  Bacterial polypeptide expressing nucleotide sequence isolated from the Sargasso Sea
gaattaggagctgatatatctaacttaaaagggtctgaaagaaacggaagaataacagaggaagatgtcaaaaattttataaaaaattctaaaaagaatatactagtaaaagaaacccaaaaaccagaacctaaaaaaaacttagttgatcactctgaatttggcgagatagaaattgttgaaatgccaagagtaaaaaggcttgcagcaccgttgttatccgaatcttggagaactattccacatgttacacatcatgatgaagctgatgttactgaacttgaaaatttccgtaaaaatttaaaagatggttacacaggggagcaaaagaaaattaccccacttgcttttataataaaggcattggtaaaaagtatgatgaaatatcctatatttaattcatcaataaaagatgaagaaaattatcaaattatattaaaaaaatattttcatattggtattgcggtagatactccacacggtcttatggttcctaaaataagagatgccgataaatttaaaatatctgacttatcacaaaaattaaaagaagtaagtgataaatgtagaaatttaaaaattgataaaaaagaatttcaaggtggttcaataactatcactagtcttggtgggataggtggaacattttttacgcctataataaatccacctgaggtagccatattaggaattggaaaaatatttcaaaaagataaaagtgacaaacttattcttccactgtcactatcctatgatcacagaattattaacggagcagatgctgcaagattttgtaatgagattaaagaaaaccttggtaaaaattttgcctacaacctctcaatataat

SEQ ID NO: 233630 - DNA, 881 bp, Unknown
  Bacterial polypeptide expressing nucleotide sequence isolated from the Sargasso Sea
aaaatttgcgagagaacttggtgtaaatataaatcaggttttaggaagtgagagagatggaagagttgttgaaaaagatattaaaaactttgtttcctctaaaataatcaatgattctaaaactaaagaaaacaaaaaaaataatattaaaaatgattttgaacattctgattttggtgaaattgaaattaaaaatattccgagagtgaagaaattagcttctacttatttagttaattcatggacaacaattcctcatgtaacaaatcatgatgaggcagatatcacagagatggagaattttagaagttctttaactgatatttatacaggtgaaaaaataaagattactcctttggtttttataataaaagcattagttgcttcattaaaaaaatttccaaattttaattcatcaattgatgatattgaaaatggtaaaatgacattaaaaaaatattatcatataggaatagcagttgatacgtcaaatggattaatggttcccaaaataagaaatgttgataataaaaaaattttattacttagcaatgagttaaaaaaagtaagtgaactttgtaaaaatctcaaaattgataaaaaagaattgtttggtggatctatgactattactagtttaggtgggataggaggatctttttttactccaataataaactatcctgaagttgcaattttaggagtaggaaagtcacaaaagaaacaaatattaataaatggaaaatttcaaacaagaactatgctgccgatttctttatcttatgatcatagaattattgatggtgcagaggcagctagatttaacaatgatttaaaagaaaatcttggtagtaattttgcatataaattagcaatataat

SEQ ID NO: 233631 - DNA, 546 bp, Unknown
  Bacterial polypeptide expressing nucleotide sequence isolated from the Sargasso Sea
aaaaaaaaaaaattactccattagttttatttattaagtctctgactattgctttaagaaatttccctaattttaattcatcgattgaagatattgaaaatggaaaaatgaccttaaaaaaatattctcatattggcgtagcaattgataccaaacatggacttatggttccaaaaattagaaatgttgataaaaaaaatctaaaccaaatttcaaaagaactaaaagacataagtgagaaatgtagagagcttaaaatagataaaaaagaattttttggtggatcaatcactgtaactagtttaggtggaataggtggttctttttttactccaataataaactaccccgaggttgcaatattaggggtgggtagaacttatttaaaacaagtttatataaatgaaaaatttcaaaagaggtttattttgcctttatctttgtcttatgatcatagaataatcgacggagcagaagctgcaagattttgcaacgatttaaaaaataaccttggcaaaaactttgcgtataagctagctatataaa

SEQ ID NO: 233632 - DNA, 736 bp, Unknown
  Bacterial polypeptide expressing nucleotide sequence isolated from the Sargasso Sea
ataaaaaaggaattcgatcattctgaatttggggaggtacaaataattgatatgccaagagttaaaagactggctgcccctcacctttcaaattcttggaatacaataccacatgtaacccaccatgatgaagctgatataactgagcttgatgattttagatcaaaattaattgattctgtatcaggagatataattaaaattacaccacttgcttttattgcaaaagcattagcaaataatttaaaaaaatttccaacatttaattcttctattgataatattaatgatgcaaagattactttaaaaaaatatatccatataggaattgcagtcgatactccgcatggattaatggttccaaaaataagaaatgtagatcaaaaaaaaataaaagaaattgctcaagaattaaaaaaagtgagtgaattaagcagaaatttaaaaataaataaaaaagaatttttcggaggatcaataacaataactagtctagggggtattggtggtacttactttacacctataataaattatcctgaggttgcgattcttggagttggtagatcttataaaaagcaaattttcatcaaagataaatttcttgtaagaacagtattgcctttgtcactttcatatgatcacagaattatagatggcgccgaagcagctaagttttgtaatttgctaaaagaaaatttgggaaaaaattttgcttataatttagctttttgat

SEQ ID NO: 233633 - DNA, 415 bp, Unknown
  Bacterial polypeptide expressing nucleotide sequence isolated from the Sargasso Sea
aagcgggattgctgttgatacacctaatggattaatggttcctaaaatcagaaatgcaaataacaagaaaatttcactacttagtaaagaattaaaagaagttagtgaactttgcagaaatcttaaaattgataaaaaagaattatttggtggctctatgacgatcacaagtttgggtggaataggaggatcatttttcactccaattattaattttccagaagttgcaattttaggagtaggcaagtctcaaaaaaaacaaatattgatagatggaaaatttcaaataagaacaatgttacccttatctctatcttatgatcatagaattatagatggtgcggaggcagcaagatttaacaacgatttaaaagaaaatttaggtaggaattttgcttataaattagcaatttaa

SEQ ID NO: 233634 - DNA, 777 bp, Unknown
  Bacterial polypeptide expressing nucleotide sequence isolated from the Sargasso Sea
ggcttggcggcagcgcgccatcggcaagtgctgcctccggcgaagggttggacctccttccctggccgaaagtcgattacgagaaatttggcgaaacggaacgggtgccgctttcccgtattgcccggctttccggcccgaacctggcgcgcaatgcgacgattattccgcatgtcaccaatttcgaagaggccgacatcaccgaactggaggcattccggaaatctctcaacgccgattccagagacggcctcaagctttcgatcctgccgttcgtcgtcaaggcggcggcggccacgctgaggcagcatccgaaattcaattcgtcgctcgacggcaattcactcgtgttgaagaaatatttcaatatcggggtggccgcagataccccggaggggctggtcgtgcctgtcgttaaggccgcagaccagaagggcatcatcgagatcgctgcggaaatggttgaactggcggctcaggcgagagccggcaggctcaagccacaggacatgcagggtgcaaccttcacgatatcgtcgctgggcggcatcggcggcacgagtttcaccccgatcatcaacgcacccgaagtcgcgatactcgggatgacgcgggccaggatgcaaccggtgtggaacggagaagatttcgagccgcgcctgatacagccgctttccatgagctgggatcaccgcgccgtcgacggcgttgccgccgcgcgtttcctggtgacgctgaaagtcatcctgtcggatttccgtcgtattaccctttagg

SEQ ID NO: 233635 - DNA, 751 bp, Unknown
  Bacterial polypeptide expressing nucleotide sequence isolated from the Sargasso Sea
tatgattactactgtggatttacctcaagttggagaatctgtaacggaaggcgttataggtaaatggcttgtatcaccagggcaatgggttgaccgttatgatcctatagtagaggtagttacagacaaggttagcatggaaataccatcgccttttgcaggtgtttttataaaggcactggtagaagaaggcgaagtagttcctatgggtagcccaatctgcgagatagaagaccagaatgccatcacgcaggatgatgaaaagaccccgccttcaaaatttgaatttatggatagcgttcgcagcgtagggccaacaggttcaggtgaagggggtgaaggtcgtcgggatgctctgcaagaatcgatgcagcccgaacatcagttacctcatatgtatcaggaggttgcttcagcgcaggatcgtaaaaaagtgatttcccctttggtcgctaaaattgcaatgcaaaataatattgatgtagcaaatttaattggttccggtattggtgggagagtcacaaaaaaagacatagaggactatatttctgagaaggaaatagcactgggattgcctaatcaaaatgaacagcctgagacctcaaaaatacacataagcgctattcgccgctctattgcagaccatatgtctaggtctgcatccgaaataccttccgcgtggtcgatggttgaactggacgtaacaggcttggttgagctgcgatccaaattaaaaggccagtttgaatct

SEQ ID NO: 233636 - DNA, 553 bp, Unknown
  Bacterial polypeptide expressing nucleotide sequence isolated from the Sargasso Sea
atactggcgaaaaataaaaattactccattagcatttattataaaagcattagtaatatcactaaaaaaatttccatcttttaattcatcaattgatgacattgaaaatggtaaaattacatttaaaaagtattttcacatcggtatcgcagttgatacccaacatggacttatggttcctaagattagagatgctgatcaaaaagatataaacgagttaagtaaggacttgaaaaaagtaagtgatgattgcagaaatctaaaaattgataaaaaagaattctttgggggatcgatgactattactagtttgggtggaattggaggttcgttctttacaccgataattaattttcctgaagttgctatccttggaataggcagaagctacaaaaaacagttattcatagatggaaaatttgttccaagaactattttacctttatcactctcatatgaccatcgaattatagatggagctgaggctgctaaatttaataatgaattaaaagataatttaggagcaaattttgcttacaacctaagtaaatga

SEQ ID NO: 233637 - DNA, 889 bp, Unknown
  Bacterial polypeptide expressing nucleotide sequence isolated from the Sargasso Sea
gttagaaaatttgcaagagaacttgggagtagatataaataatgttaagggaactgagagatcaggtaggattgttgaaaaagatttaaaagactttgtctcatctagaatcaatcatccccagaataatagtgaaagacaaaaagaaaaaattattaaaagcgaatatcaacattcagattttggggaagttgaaattaaagatattcctagagtaaaaaaaatagcagctccacatcttgtaaattcgtggacaaacatcccacatgtaaccaatcatgatgaggctgatattacagaaatggaagaatttagaaactcaataaaagataattatacaggagaaaaaataaaaattactcctcttgcatttattattaaagcattggtactttcactaaaaaaatttccatcatttaattcatcaattgatgatattgaaaatggcaagattacttttaaaaagtattttcatgttggtatcgcggttgatactcaacatggacttatggttcctaaaattagagatgctaatcaaaaagatatcaatcagttaagtgaggaattaaaaaaagtaagtgatgattgtagaaatttaaaaattgataaaaaagagttctttggaggatcaatgactatcacaagcttaggtggcataggtggttcgttttttacaccaataattaattttccagaggttgctatacttggtgttggtagaagttataaaaaacaggtatttattgatggtaaatttgttccaagaaccatgcttccactatcgctctcatatgatcacagaattatagatggtgctgaggctgctaaatttaataatgaattaaaagataatcttggttctaattttgcatataatttgagtaaatga

SEQ ID NO: 233638 - DNA, 445 bp, Unknown
  Bacterial polypeptide expressing nucleotide sequence isolated from the Sargasso Sea
gacaaaattatttataaaaaatattttcatgttggttttgcagtagatactcctcacggtctaatggtgcctaaaataagagatgttgatcaaatgagtataaaagaaattggaagcgctttaagaaaaacaagtagactttgcagagatttgaaaattgataagaaggaattttttggcggttcaatgaccatatcaagcttgggtggcattggaggaactttctttaccccaattataaatcctcctgaagtcgcaatacttggagtcggaaaaagtttcgacaggttggtaaaagttaatgacaagtttgtttcaagaaaaattttacctatttcactctcatacgatcatagaataattgacggcgcggaaggtgctaggttctgcgtctatctagggaaatgtcttggcaaggacttcgcttttaaacttgccgtttaat

SEQ ID NO: 233639 - DNA, 493 bp, Unknown
  Bacterial polypeptide expressing nucleotide sequence isolated from the Sargasso Sea
cttaaaaaatttccaacatttaattgttcaatagatagtattgatgatggcaaaatgacattaaaaaaatattttcatataggtatagcagttgatactgaacacggattaatggttcctaaaataagaaatgttaatagaaaaaaaattggtgaaattaataatgaactaaaaatagtaagtgataaatgtaaaaaattaaaaattgataaaaaagaattttttggaggttctatgaccatcacaagcttaggcggtattggtggttcattttttactccaataattaactatcctgaggttgcaatcttaggaattggaaaactaaggaaaaaacaggttttcataaatgataagtttgaagcaagaataatgcttcctctatcactatcttatgaccacagaataatagatggcgcagaagcggcaagatttaataatgaattaaaagaaaatcttggaaaaaattttgcttataagctagctatatagg

SEQ ID NO: 233640 - DNA, 553 bp, Unknown
  Bacterial polypeptide expressing nucleotide sequence isolated from the Sargasso Sea
actgggagaaaaaaaaaaaattacaccattagcttttattgttaaggctttgaccgcatcattaaaaaaatttccaaattttaatagctctattgatgaaatagaaaaaggaaaaatgactattaaaaaatattatcatataggtattgcagtcgacacacctcatggattgatggtaccgaagttaagaaatgcagataataaaaatatttccttaataggagaagaacttaaaaaattaagtaatgaatgtagaaatttaaagattgataaaaaagaattgttcggtggttcgataacaattacaagccttggtggaattggaggatcattttttacaccaattattaattatcctgaagttgccattttgggagttggcaaatcagaaaaaaaacaagttcatattgatggtaaatttgtaacacgaataatgttacccctttctttatcttatgatcatagaataattgatggagctgaggcggcacgttttaataatgaattaaaagaaaatttaggtaaaaactttgcctataaattggctatctaa

SEQ ID NO: 233641 - DNA, 896 bp, Unknown
  Bacterial polypeptide expressing nucleotide sequence isolated from the Sargasso Sea
tccccccaaagtaagaaaatttgcaagagaacttggagtagatatcaatagagtttcagttagtgaaagacaaggaagagttactgaaagtgatatcaagttatttgtttctaatagatctagtcaaaagaaggaatttaagattaaaaatgaagagaaaattaaattagaatattcacactcagaatttgggaaaatagaaacaaaagatattccaagagttaaaaaactgtcatctaaatacttaatgaattcttggagcaatatacctcatgttacaaatcatgatgaagctgatatcactgagatggaagaattcagaaactcactcacagatatttatacaggagaaaaaaagaaaataacaccactcgcttttattattaaagctttaacgtcatcattaaaaaaatttcctaattttaattcatcaatagatgagattgaaaaaggaaaaatgactataaagaaatattatcatattggtatagccgtggatactcctaatggattaatggtacctaaattgaggaatgcgaataataaaaatatttcatctatagctgatgagcttaaagaattaagtgagcaatgcagatcacttaaaattgataaaaaggaattatttggaggatcaatgaccataacaagtcttggtggtataggaggttcattcttcaccccaattattaattttcctgaggtagctattttaggaataggaaaatctcaaagaaagcaagtttttatagaagggaaacttgttactagaacaatgttacctttatcactctcttatgatcatagaataatagatggagcagaagctgctagatttaataatgaattaaaagaaaatcttggaaaaaattttgcttataagctagcagtttaaa

SEQ ID NO: 233642 - DNA, 529 bp, Unknown
  Bacterial polypeptide expressing nucleotide sequence isolated from the Sargasso Sea
tccattagcttttataataaaagcagtaacatctgcacttaaaaaatttccatcatttaattgttcaatagatagtattgaggatggcaaaatgacattaaaaaaatattttcatattggtatagcggttgatactgaacatggattaatggttccaaaaataagaaatgttaatgaaaaaaaaattggtgaaataaataatgaactaaaagtactaagtgatcaatgtagaaaattaaaaattgataaaaaagaattttttggaggctctatcaccatcacaagtttaggtggtattggtggttcattttttactccaataataaactatcctgaggttgcaatcttaggaattggaaaactaaggaaaaaacaggtttttataaatgataagtttgaagcaagaataatgcttcctctatcactatcttatgaccatagaataatagacggtgctgaagcagcaagatttaataatgaattaaaagaaaatcttggaaaaaattttgcttataagttagctatatag

SEQ ID NO: 233643 - DNA, 304 bp, Unknown
  Bacterial polypeptide expressing nucleotide sequence isolated from the Sargasso Sea
ttgcagaaatctaaaaattgataaaaaagaattctttggaggatcgatgactattactagtttaggtggaattgggggatcgttctttacaccaataattaattttcctgaagttgctatccttggaataggcagaagctataaaaaacaattatttaaagacggaaagtttgttccacgaaccattttgcctttatcactatcatatgaccatcgaattattgatggagctgaggctgctaaatttaataatgagttaaaagataatttaggagcaaattttgcctacaacctaagtaaatga

SEQ ID NO: 233644 - DNA, 526 bp, Unknown
  Bacterial polypeptide expressing nucleotide sequence isolated from the Sargasso Sea
tttggcttttattgtcaaagctttgactgcatcattaaaaaaatttcctaattttaatagctctattgatgatattgatgggggaaaaatgactgttaaaaaatattatcacattggaatagccgtggatactccgcatggtttaatggttcccaaactaaggaatgcagaaaataaaaatataaatcttataagttctgaacttaaaaatcttagtgatcaatgtagaaatcttaaaattgataaaaaagaattatttggtggatctatgacaataacaagtttaggtgggattggaggatcttttttcacacctattataaattttcctgaagttgcgattttaggaattggaagatccgaaaaaaaacaagtttttttagatggaaaattcgttacaagaaccatgttgcctttatcattgtcttacgatcataggatcattgatggtgcagaagcagcacgttttaataatgaattaaaagaaaatttaggaaaaaactttgcttacaagttagctatctaa

SEQ ID NO: 233645 - DNA, 324 bp, Unknown
  Bacterial polypeptide expressing nucleotide sequence isolated from the Sargasso Sea
tgagagaagttgcacaaaaatgtagagatttaaaaattgataagaaagaattttatggaggatctattacaatatcgagtttaggaggtataggtggaagttttttcacacccattataaattatcctgaggttgcaatattaggggtaagtaaatcacataaaaaacaaatttttattggagaccaatttaaagtaagaactatattgccaatttctttatcatatgatcatagaattattgatggagcagaggcagcaagattttgcaacgagttaagggataatttaggtaaaaattttgcttttaaattggcaatttaat

SEQ ID NO: 233646 - DNA, 547 bp, Unknown
  Bacterial polypeptide expressing nucleotide sequence isolated from the Sargasso Sea
aatggagcaattcagatcatcattatatgattactatactggtgagaaaataaaagtgacacctcttgcttttatagcaaaagcacttgtcagtgctttgaagaaatttccaaattttaatgcttcaattgatagtgctaacgacaaaatcatttataaaaaatattttcacgttggttttgcagtagatactcctcatggtttaatggtgcctaaaataagagatgttgatcaaatgagtataaaagaaatcggaagcgcgttaaggaaaacaagtagactttgcagagatttaaaaattgataaaaaggaattttttggcgggtcgatgacgatatcaagcttgggtggcattggaggaactttctttaccccaattataaatcctcctgaagtcgcaatacttggtgtcggaaaaagtttcgacaggttagtaaaagtaaatgacaagtttgtttcaagaaaaattttacctatttcactctcatacgatcatagaataattgacggcgcagagggtgctaggttctgcgtttatctagggaaa

SEQ ID NO: 233647 - DNA, 391 bp, Unknown
  Bacterial polypeptide expressing nucleotide sequence isolated from the Sargasso Sea
aaatggattaatggttccaaaaataagaaatgcaaataacaaaaaaatttctttgataagtaaagaattaaaagaggtgagtgaactttgtagaaatttaaaaatcgataaaaaagaattgtttggtggctcgatgacgattacgagtttaggtggtataggaggttcattttttactcctataatcaattatcctgaagttgctatattaggagtaggaagatcagaaaaaaaaaaaatttttatgagcgggaaatttcaaaccaggaccatgctaccaatttctttatcttatgatcacagaattatagatggcgctgaagctgctagatttaataatgatttaaaagaaaatttaggcaaaaactttgcttataaactagctgtctaa

SEQ ID NO: 233648 - DNA, 250 bp, Unknown
  Bacterial polypeptide expressing nucleotide sequence isolated from the Sargasso Sea
cgagtcttgggagggataggaggatcctttttcacacctattattaattaccctgaagttgctatactcggagtgggaaaattgaggaaattacatttatatacagatggaaaatataatgagagaattatgttacctctatcattatcatacgatcacaggattatagacggagcagaagctgcaaggtttaataatgagctaaaagagaatttaggtaagaactttgcatataggctagcgttataat

SEQ ID NO: 233649 - DNA, 568 bp, Unknown
  Bacterial polypeptide expressing nucleotide sequence isolated from the Sargasso Sea
ttaacagatatgtatactggagaaaaaattaaaattactcctctagcatttataataaaggctttagttgcatctctaaagaaatttcctagttttaattcatctattgacgaaattgagattggaaaaatgactttaaaaaaatattaccatattgggatagcagtagacacgccaaatggattaatggttccaaaaataagaaatgcaaataacaaaaaaatttctctgataagtaaagagctgaaagaagtaagtgaactttgtagaaatttgaaaattgataaaaaagaattatttggtggttcaatgacgattacaagtttaggtggtataggaggttcattttttacacctataattaattatcctgaagttgccatattaggagtaggtagatctgaaaaaaaacaaatttttgtgaatgggaagtttcaaactagaactatgttgccaatttctttatcttatgatcatagaattattgatggagctgaagcagctagatttaataatgatcttaaagaaaatttaggcaaaaattttgcttataaactggcagtctaat

SEQ ID NO: 233650 - DNA, 553 bp, Unknown
  Bacterial polypeptide expressing nucleotide sequence isolated from the Sargasso Sea
actgggagaaaaaattaaaattacacctctagcatttataataaaggctttagttgcatctcttaagaaatttcctagttttaattcttctatagacgaaattgagactggaaaaatgactttaaaaaaatattaccatattgggatagcagttgacacgccaaatggattaatggttccaaaaataagaaatgcaaataacaaaaaaatttctctgataagtaaagaattaaaagaggtaagtgaactttgtagaaatttaaaaattgataaaaaagaattgtttggcggctcgatgacgattacgagtttaggtggtataggaggttcattttttactcctataattaattatcctgaagttgctatattaggagtaggaagatcagaaaaaaaacaaatttttatgaatggaaagtttcaaactaggactatgctgccaatttctttatcttatgatcacagaattattgatggtgcagaagcagctaggtttaataatgatctaaaagaaaacttaggcaaaaattttgcctataaactagctgtctaa

SEQ ID NO: 233651 - DNA, 776 bp, Unknown
  Bacterial polypeptide expressing nucleotide sequence isolated from the Sargasso Sea
caaatttaatgactcaaaaaatcgaataaaagataaattaattaaaatagaatatgagcattctgattttggtgagattgaaattaaagatatcccaagagtaaaaaaaatagcagctcctcatttaagtaactcttggacaaatatcccccatgttacaaatcatgatgaagcagatataactgaattagaagaacttagaagttctttagtagataaatttactggtaaaagaaaaaaaattactcctctagcttttattatgaaagcaattgttctatcattaaaaaaatttccaagatttaattcatcaattgatgatattgaaaatggtaaaataactttgaaaaaatattttcatattggtatagcagtagatactccacacggtttaatggtgccaaaaataagaaatgttaatgaaaaagatattaaccaattgagtagagaattaaaaaaagttagtgatgactgcagaaatttgaaaatagacaaaaaagaattttttggaggatctataacaataacaagtttgggaggaattggcggatctttttttacaccaattataaattatcctgaggttgcgattcttggtattggcaggtcttataaaaaacaattgtttgtggatggtgaatttataccacgcacaattttacctttgtcactatcttacgatcatagaattattgatggagcagaagcagctagatttaataatgatataaaatacaatttaggtccaaattttgcgtacaatctaagaaaatgat

SEQ ID NO: 233652 - DNA, 631 bp, Unknown
  Bacterial polypeptide expressing nucleotide sequence isolated from the Sargasso Sea
atgacagtagcaccgatacaaatcccagatatcggcggcgccgagggggccgaaatcgtcgaggtgttggtcgcgccgggcgatgtcattgaggaggagcaaagcctgatcgttgtcgagtcagacaaggcctcgatggaaatacccgcaccccaagccggtgtggtggcggagcttcgggtggcggtgggcgataaggtttccgagggtgatgtgatcctgctacttgagggtgcccacgaatcaacagcctgcgacgataccgcaggcggcgaagacgcgccgtcgccggcggcagtcgatgttctccagagcgtcgcaaccgcgacgaacgctggatcaaatgaggagcacaccgccaccacacaaacgcaaacgtcaactcccgacacaacgaacgaggtgacgtccatcgacgtggtgattcccgatttgggaagcgacgagggtgcggatctggttgagctgctggttgcggtgggcgcaaaggtcgaggagggcgactcgctggtgttgctggagtcagataaagcgtcgatggaagtgccctcgccagccaccggcattctcgccgcttggctgaccgacacgggcagcacggtaacagagggaaccgtgattgcacggctcg

SEQ ID NO: 233653 - DNA, 918 bp, Unknown
  Bacterial polypeptide expressing nucleotide sequence isolated from the Sargasso Sea
tattgaagaaccaagatacgaatctaccgcatctgggatttatgctggtcctgcagtaagaaaactggcacgtgaatttggcattgacctaaataaggtaattgccacaggtccaagaaatagaattctcaaggaagaccttcataaatttgttaaatcaaaacttgaaggttcatcaactggaatacctaaaatgccaagcatcgatttttctgagtttgggaatgtcgaagaaattgatttgactaaattccaaaaaacttcagctcttaatcttcaacaatcatggataacaatacctcatgtcactcagcatgatgaaacttcaatagatgaactcttaactgtcagaaaatctctaatgaagaaacacaaggtcaaggtttcacctttagctttttttgctaaaggtgtttgtaagcttcttgaggagtttccattattcaatgcatcgatagacatgaataccatgaaaattataaaaaaagattatattaatcttggtattgctgttgatacaccccaaggcttaattgttccaaacataaaatcagcggataagatgtctataagagaaatatctgacgaaatagccaggcttgctgctctatctaaatcaaggaagatcaaagtagatgatttgaagggatcaacttttacaattagctcacttgggagttttggtggtaaattttttacacctattatcaatccaccggaggtagctatattaggtatttcaaagagttatgattcagttttattaaaaggcactaaaccagtaagtacaaccaatctcccaatatctctatcttatgatcataggattataaatggagttgagggcgttaaattacaacaagattttgtgaaattctttcagatattggttactttaagaagaatttttaatttttt

SEQ ID NO: 233654 - DNA, 280 bp, Unknown
  Bacterial polypeptide expressing nucleotide sequence isolated from the Sargasso Sea
aaaggaattctttggtggatcaataactataacaagtcttggaggtattggaggtacttattttacacctataataaattatcctgaagttgcaattcttggcattggtagatcctataaaaaagaaattttcataaaggataagtttcttgcaagaaccgtattgcccatatcactttcatatgaccatagaattatagacggagcagaagcagctaaattttgcaatttattaaaagaaaatttaggaaaaaatttcgcctacaatttggctttttaa

SEQ ID NO: 233655 - DNA, 270 bp, Unknown
  Bacterial polypeptide expressing nucleotide sequence isolated from the Sargasso Sea
ttgtgggttcaatgacaattacgagtttaggaggaattggaggctcattttttacaccaattataaattatccagaagttgctattttaggagttggtaaatctgaaaaaaaacaaatttatatagacggtaagtatgttaatcgaataatgttaccactttctttatcttacgatcatagaataattgatggtgctgaagcagctcgttttaataatgagttaaaagaaaatttaggtaaaaactttgcctacaagctagctgtctaaa

SEQ ID NO: 233656 - DNA, 885 bp, Unknown
  Bacterial polypeptide expressing nucleotide sequence isolated from the Sargasso Sea
tccaagaaaaaacatttttctaaaaataatatttcagaaatttcatctgcaagtccaaaagctagaaaatttgctagagaacttggggtagatattaatcaagtagcgggaacccagagagatggccgagttgttgaagatgatattaaaaaatttgtatcatctaattcaaaaaacaatgtcgtagtaaaagatagtaaaccagataaaattaaaaacgaatttgaacattctgattttggtgaaatagaaattaaagacataccaagagtaaaaaaattatcatcaaaatatcttacaaattcatggacaacaattcctcatgttacaaatcacgatgaagccgacataacggagatggaaagttttagaagttcattaacagatatgtatactggagaaaaaattaaaattacacctctagcatttataataaaggctttagttgcatctcttaaaaaatttcctagttttaattcttctatcgacgaaattgagactggaaaaatgaccttaaaaaaatattaccatattgggatagcagttgacacaccaaatggattaatggttccaaaaataagaaatgcaaataacaaaaaaatatctctcataagtaaagaattaaaagaggtaagcgaactttgtagaaatttaaaaattgataaaaaagaattgtttggtggctcgatgacgattacgagtttaggtggtataggaggttcattttttacccctataattaattatcctgaagttgctatattaggagtaggaagatcagaaaaaaaacaaatttttatgaatggtaagtttcaaaccaggactatgcttccaatatctttatcttatgatcacagaattattgatggtgcagaagcagctagg

SEQ ID NO: 233657 - DNA, 583 bp, Unknown
  Bacterial polypeptide expressing nucleotide sequence isolated from the Sargasso Sea
gagttccgatcatcacttacagacatcaatactgggagaaaaaaaaaaagtttcacctttagtttttataattaaatctttagtgatagcattaaaaaaatatccaaattttaattcatcaattgaagaaattgatgaaggaaagatgacattaaaaaattattttcatattggtattgctgttgatactgaacatggactaatggtacccaaaattagaaatgtaaataaaaaaaatttaaatcaaatatcgatagagctcaaagatataagtgaaaaatgtagaaagcttaaaattgataaaaaagaattttttggaggatcgatgacaataactagtttaggaggaataggaggatcttttttcactccaattattaactatcctgaagtggctattttaggtgtaggaaaaaattactataaacaagttttaattaaagacaaatttcaaaaaagaattatgcttcctttatcattgtcttatgatcatagaattatagatggagctgaagccgcaagattttctaatgaattgaaagaaaatcttggtaagaattttgcttacaagttagcaatataa

SEQ ID NO: 233658 - DNA, 784 bp, Unknown
  Bacterial polypeptide expressing nucleotide sequence isolated from the Sargasso Sea
tcaaaatctaaaaaaaacgtcatacatcaaaacaaaaacatcccaaaaattgaacaagaatatccgcattctgaatttggtgagatagaaattaaagatattccgagagtaaaaaaattgtcatcaaaatatttaatgaactcttggtcgaaaatccctcatgtaactaatcacgacgaagcagatatcactgaattagaggaatttcgaacttctcttacagatatatataccggagaaaaaaaaaaaattactccattagcttttattgttaaagcattgactgcatcattaaaaaaatttccaaattttaacacttcaattgatcaaatcgaaactggcaagatgacaattaaaaaatattatcatgtaggcatagctgtagatactccaagtggtttaatggtaccaaaattaagaaatacaaataataagaatgtctcattaattagcaaagaactgaaaaagataagccaagagtgtagagatcttaaaattgataaaaaggaattatttggaggttctatgaccataactagcttaggaggaatcggcggatcttttttcacaccaattataaactttccagaagttgctattttaggagtagggaaatcagaaaaaaaacaagttttttgtgatggaaggtttgttacgcgcacaatgttaccactatcactgtcctatgatcatagaataattgatggtgcagaagctgctcgttttaacaatgatttgaaagaaaatttaggtaaaaattttgcctataaattagctgtttaat

SEQ ID NO: 233659 - DNA, 763 bp, Unknown
  Bacterial polypeptide expressing nucleotide sequence isolated from the Sargasso Sea
cgtgagctaggagttgatctaagtcaggtagagggtacaggcagaaaaggacgaattactcagcaagatgttcaaatttttgtaaaacaagttttagtagaattttcatctggtggaccgaaagcatcattagcggctattccggaaattcctgaagttgatttcagtaagtttggttcagttgaaattcaaccactatcacgtataaaaaagaaaacaggatttaatctaaatagagcatggcttaatcttcctattgtaacgcatcatgatgatgcagatataaccgaacttgagcattttcgtaaatcactctcagatgaagcggtaaaaaaagatgtgaaacttacactgctatcctttcttttaaaagcgtgtgcggtagccataaggaaacatcctactttcaactcttcgctttctgcagacaaggaaaatctagttattaagcattacttgaatattggtgtagcagttgatacatctgacggtttggttgtgcctgttataaaaaatgttgaaaagaaaggtttacttgaattggcgaaagaattagatgaagttagcaaaagagcaagaacaaaaaaacttaataaaagtgacattgaaggaggatgtttcagcatatcaagtctgggtggaattggtggaacagcttttacccccctggttaatgcgcctgaagttgctatactaggggtgacacgttcacgaatggtccctgtttggaatggtaaagctttcattcctagattagttctac

SEQ ID NO: 233660 - DNA, 854 bp, Unknown
  Bacterial polypeptide expressing nucleotide sequence isolated from the Sargasso Sea
tcctccccctgcagccattaagacgacgaaaagaggcacaaaattagctagtcctattgtcagaaaattcgcaagagagttaggggcgaacgtattagagattcccggctctcaaagatcaggaagagtctccgaggaagatgtaaaagaatttgttcgatcgcaagtaactgtcaataagggaactgttgaaaaaaaagaaaataaagaagagttcgctcacgaggaatttggtcaaattgaaataaaagaaatacctagagtaaaaagattatctgggcctcacttagttagatcttggactgagataccacatgtcactcagcatgaagaaatcgacattactgaaatggaacaatttagatcttctctttacgattattattcaggagaaataatgaaagtaacccctctagcatttatatcaaaggctttagttagtgctctaaaaacttttcccaattttaatgcttcaattgatacaaatgaaaataaaataatttataaaaaatattttcatttaggttttgcagtggatactcctcatggtttaatggttcctaaaattagaaatgtagatcaaatgaacattaaagaaattgccgaggcattaaaaaaaactagtaaactttgtagagaattaaaaatagataaaaaggaattttttggtggctctatgacaatttctagtctaggaggaattggtggcacatttttcaccccaataattaatcctcctgaggtagcaatattaggtataggaaaaagttttgataaattattgaaaattaaagggagaattgtatcaagaaaaattttacctatttcactttcctatgatcatagaataattg

SEQ ID NO: 233661 - DNA, 517 bp, Unknown
  Bacterial polypeptide expressing nucleotide sequence isolated from the Sargasso Sea
atgaaagcagctgttgaaaatttaaaagcaatgccggaatttaatagctcaatgaatcactcggctgaaacattgataataaaaaaatattttaatatcgggattgcagttgatactcctacaggattagtcgttccagtaatacaaaatgtcgaccaaaagagcattgatgagctttcaatcgaattggttgaaataagcaaaaaagcgagagcaaaaaagcttacgccagatgatatgaccgggggtacttttactatttctagtttagggggtattggaggcacatatttcacaccaataattaatccacctgaagttgcgatccttggagtgtctaaaagcagatgggagaaaatatataaccacaaagaacaaagctcttcagctgcgtatgtaatgcctttttctttatcttatgatcatcgtattattgatggtgcggcagcagcaaaatttaccggcgattttggtaagtctgtagaaacactatcctttttagagaaaagcaaatgag

SEQ ID NO: 233662 - DNA, 548 bp, Unknown
  Bacterial polypeptide expressing nucleotide sequence isolated from the Sargasso Sea
cggagaaaaaatttcaataacacctcttgcttttataactagagcagtggtaaacgctttaaaagattttccaaattttaattgctcgattgattcagagaaaaataagataacatataaaaaatattatcatataggttttgcggtggatacaccacacggccttatggttccaaaaataagaaatgttgaccaaatgaatataaaagagataagcaacgaactaagaaaagttagcagagagtgtagagatttaaaaataaataaaaaggaattttttggaggctcaatgacaatttcaagccttggtggtataggaggaactcattttactccaataataaacccacctgaagttgcgattcttggtgtcggaaaaagttatgaaaaattaagtcgtttcaatggaaaaattattttcagaaaaatacttccaatatctctgtcttatgatcatagaattattgacggcgctgaaggagcgagattttgcgtacatttaagaaatagtttaggtaaagactttgctttcaagcttgctgtttagc

SEQ ID NO: 233663 - DNA, 707 bp, Unknown
  Bacterial polypeptide expressing nucleotide sequence isolated from the Sargasso Sea
attcggtgaaatagagataaaagaactctcaagaattaaaaaaatatctggcccgcaactagtgaggtcttggacagaaatacctcatgttactcaacatgatgagattgatattactgaaatggaaaaatttagatcttcattatttgattattatactggtgaaaaaatttctgttacacctttggcttttattactagagcagtggttaatgctcttaaagactttcctaattttaactgttctatcaatccaactaataatcaggttgtatataaaaaatattttcatattggctttgcagttgacactccacacggactaatggttccaaaaatcagagatgtagaaaaaatgagcattaaagagataggagaagagttaaaaacagtaagtaaaaaatgtagagatttaaaaatagataaaaaagaatttttcggtggatcaatgactatttccagtttaggtagcatcggaggaactttttttactcctattattaatcctccagaggtggctatactaggtgtaggtcgaagttataataaaatggtaaaagttaatggaaaaatagtatcaagaaagattttgcctatttcattatcctacgatcatagaattattgatggtgcagaaggtgctcgtttttgtgttcatttaaatgaaagcttaggaaaagactttgctttcaaattggcagtataaa

SEQ ID NO: 233664 - DNA, 858 bp, Unknown
  Bacterial polypeptide expressing nucleotide sequence isolated from the Sargasso Sea
aaatttgctcgagaattaggtattgatgtaagagatgttgttggaagcgaaagattgggaagggtaatcgaaaaagatattaaggaatttgtttcttcaaaattaaataataaagaaaatattaatataaataaagaatatgatcattctgaatttgggaaagttgaaattaaagaaatatcacgaataaaaagaattgcagcaccacatttagttaattcttggaaaaatattcctcatgttacaaatcatgacgaagccgatattactgaaatggaagaatttagaaattctttaacagatatttatactggagaaaaaaaaaaaattacaccattagcttttataattaaagcagttgtatcttcccttagaaaatttccgacttttaattcttcaattgatgatattgaaaatggcaagatcactttaaaaaaatattttcatattggtattgctgtagatacttttcatggtttaatggtacctaaaataagaaatgtagataaaaaaaatataaatcaaattagtgaggaattaaaaaaacttagtgaagattgtagaaatttaaaaatagataaaaaagagttttttggaggctcaatcacaataactagtttgggtggtataggtggttctttttttactccaattataaattatccagaagtagcaatacttggtgttggaaaatcttataaaaaacaattatttataaaagaaaaattcacaacgcgtactgttttacctctttctttatcttacgatcatagaattatagatggcgcagaagcagctagatttaataatgatttaaaagataatcttggaagaaattttgcttataagttagcaatt

SEQ ID NO: 233665 - DNA, 779 bp, Unknown
  Bacterial polypeptide expressing nucleotide sequence isolated from the Sargasso Sea
acctaagaagtctttatttgacttgtttgactctagtatctcgctaaataaaaaaattcataaactcattttagattttgagggagaaacaagagattttgagtacttcacaataaataatattccttttgatgaaccagtattaacagacgcagagctaaaagattattttacagaaaatgaaaaaaattttcgtgtacctaaatcaattatccttgatcttattcaaataaattatcaagactttgcaaatgatgtagatattgatgagacaattttaaaagaagaatatgaaaataatttagcggcttataccacaccagaaacaagggatatagagtttgcaagatttgataatatcttggatgctaataattatagagaaataattttaactttatcagatacggagataaaaagttataataaagaaaatgatgtatcattcaataaaattgaaaatctgaaatttgatgatttcgatataattcttgctgaaaaaatttttaatttacgtgagggtaaaatttctaaaccaatcgatactaaagaattgggtttttatattgttaaattaaattctattaacttagaaaaagttatatcatttgaagaagcttcaaatgagattaaacaaaatttaatacaagatgaagcctatgatatttttgatgaaacagttaatctagcagatgaattacttatatcgggatatgatctaaatgaaatatcagatgaaattaatattgaggtaagtaaaaatatagattttagaaaaa

SEQ ID NO: 233666 - DNA, 355 bp, Unknown
  Bacterial polypeptide expressing nucleotide sequence isolated from the Sargasso Sea
aaaaaaaatattaattatatctcaaaagaattaagagaagttgctcaaaaatgtagagatttaaaaattgataaaaaagaattttatggaggttcaatgacaatctctagccttggtgggataggtggaagtttctttacgccaataattaattatcctgaggttgctattttagggataagtaaattaaacaaaaaacaaatttatattgataaccaatttaaagtaagaacattacttcctatttcgttgtcatatgatcatagaattattgatggagctgaggcagcaagattttgcaatgaggtaagagacaatttggggaaaaattttgctttcaaattagcaatataat

SEQ ID NO: 233667 - DNA, 388 bp, Unknown
  Bacterial polypeptide expressing nucleotide sequence isolated from the Sargasso Sea
gatgaaggattactggtgccagttgttcgatttgctgatacaaaaggaatggatcaaatatctgctgaggttaaagattttgcacaaaaagctaaaaataagaaattgcagcctacagattgggagggcaatacatttacgatttcaaatttaggaatgtttggaatagattctttcacggctattgtaaatccaccggatagttgtatattggcagtaggaggaataaaagaagtccctgttgttaaggacggggcattggttcctggaaatattatgaaagttacattgtcatgcgaccacagagttgttgatggtgctttaggggcagcatttctgcaaaccttcaaagcataccttgaaaacccagttacaatgttgctttaat

SEQ ID NO: 233668 - DNA, 871 bp, Unknown
  Bacterial polypeptide expressing nucleotide sequence isolated from the Sargasso Sea
aaggctagaaagtttgctagagaattagaagttgatgtcaaagatgttgttggtagtgaaaaacgaggaagggtaatagagaaagatataaaagaatttgtttcttcaaatataaataaaaaagaagatattaaaattaataatgagtataaacactcagaatttggagaaattgaagttaaagagattccaagaataaaaaggatcgcatcaccacatttagttaattcatggaaaaatattcctcatgttactaatcatgatgaggcagatattactgaaatggaagattttagaaattcattaacagatatttatacaggagaaaaaaaaaaaattaccccattagcttttattactaaagcgattgtatcttcattaaaaaaatttccgagttttaattcttcaattgatgatattgaaaatggtaaaattactttaaaaaaatattatcatataggaattgcagtagatacacctcacggtttgatggtacctaaaattagaaatgtaaataaaaaaaatataaatcaaataagtgaagaattaaaaaaaataagcgaagattgcagaaatttaaaaatagaaaaaaaagaattttttggtggatcaataacaataactagtttgggaggcataggtggttctttttttacaccaattataaattatccagaagtagcaatacttggaattggaaggtcttataaaaaacaaatatttataaatgaaaaatttataactcgcactgttttaccgctttctttatcttatgatcatagaattatagacggagcagaagctgctcgattcaataatgatttaaaagataatcttggaagtaattttgcttataaaaaggcaatttaat

SEQ ID NO: 233669 - DNA, 532 bp, Unknown
  Bacterial polypeptide expressing nucleotide sequence isolated from the Sargasso Sea
acacctcttgcctttatagcaaaagcattaactaataacctaaagaaatttcctacattcaattcttccattgatgatatcagcgaaggcaagattactttgaaaaaatatattcatataggtattgctgttgatacacctcatgggttaatggttccaaaaatacgaaatgtggatcaaaagaaaataaaagaaattgcagaagatttaaaaaatgtaagtgaacttaatacaaatttaaaaataaataaaaaggaattttttggaggatcaataaccataacaagtctaggaggtattggtggtacttattttacacctataataaactatcctgaagttgcaattcttggtgtaggtagatcctataaaaaacaaatttttataaaggataagtttcttgcaagaacagtgttgccaatatcactttcatatgaccatagaattatatacggagcagaagcggctaagttttgtaattcattaaaagaaaatttagggaaaaatttcgcctataatttggccttttaat

SEQ ID NO: 233670 - DNA, 538 bp, Unknown
  Bacterial polypeptide expressing nucleotide sequence isolated from the Sargasso Sea
aaaattactccacttgtttttattataaaatcactagtctcttcattaaaaaaatttccaaattttaattcatcaattgatgagatagaaaaaggcaaaattacattaaaaaaatattttcacattggagttgctgttgatacaaaacatggcttaatggttccaaaaattagagaagcagataaaaaaaactttaatcaattgagtgaacatctaaaagaaattagtgacaagtgtagaaaattaaaaattgataaaaaagaattttttggcggatctattactgttactagcctaggaggaatcggtggttctttctttaccccaataatcaactatccagaagttgcaatacttggtattggcaaaaaatattataagcaagtttatattgataatgaatttaaaaaaagaattatgctaccattatcgctctcttatgatcatagaattatagatggagcagaagctgctagattttgcaatgatttaaaagaaaatcttggtaaaaattttgcttataaattggcgatatgac

SEQ ID NO: 233671 - DNA, 895 bp, Unknown
  Bacterial polypeptide expressing nucleotide sequence isolated from the Sargasso Sea
catgggttttgcatcaccaggggttagaagactttctagagaattaaatattaatttaaatataataaaaggaactggagctaagggtcgtataaccaaagatgatcttaataactatataaaacttcaaatggctatgtcatctggaaatattggataccaacaaccagaaattgatttttctcaatggggaaaagttgaagcacaaaaactgacaaaaattaataaaattactggcaaacgactccagcacgcctggcaatcaataccgcatgtaacacaatttgataaggcagatattactgatttgaatgaatacagaaaggaactgaataaaaataatgccaaaaagaaaataaaagtaacatttctaccatttttgatgaaagcagctacaatagttcttaaagaaatgcccaaattcaatagttctttagatcaaaatggtgaaaatcttattattaaaaaatactttaatttgggtgttgcggttgatactccaaacggacttgtagtacctgttgtaaaagatgtagataaaaagtctataattgaattatcaaaagaactaggtgatttaagtcagagagctagagataaaaagcttaagccacatgaactgcaatctggaacatttacaatttcaagtcttggcggggtaggtggtacttttttcaccccaataatcaatccaccagaagttgcaatattaggtatctcacaaagttggtgggaaaatatttatagtgaaaaaataaaaaataattcaccaaaatatattatgcctttttcattatcatatgatcatagagtaattgatggtgttgcgggggcaagtttcacttcaaaatttagtgaagtacttgaggatatttcaaatttttcggataaataa

SEQ ID NO: 233672 - DNA, 970 bp, Unknown
  Bacterial polypeptide expressing nucleotide sequence isolated from the Sargasso Sea
aaaggagacttaattcttagtctgaatgcagagagtgctactgaggaaaaaaaagaagcagtcagtgagcaaaaaaaagtagagaatacagatataaaagaaatcaaacctcagatacaaaaagaaattattcctgtagtgcctacatcacaatcaggtagcaagtcagctagtccaaaagtaagaaaatttgcaagagagttaggtgccaatgtagttgaaatacctggttctcaaagaggtggtagagtttcggaggaagatgttaaaaattttgtaagatccaaggttacggtcagcggtggtaaagtagaaaagaaagttaataaagaagagtatccgcacgaagagtttggtgaaatcgagttaaaagatatacctagagtcaaaagattatctggtcctcacctagtaagatcttggacagaaattccccatgtcacacagcatgatgaagttgatataacagaaatggagcaatttagatcatcattatatgattactatactggtgagaaaataaaagtgactcctcttgcttttatagcaaaagctcttgtaaatgccttgaagaaatttccaaattttaatgcttcgattgacagtgctaatgataagattatttataaaaaatattttcacgttggttttgcagtagatactcctcatggtttaatggtacctaaaataagagatgttgatcaaatgagtataaaagaaatcggaagtgctttgagaacaacaagtagactttgcagagatttgaaaattgataaaaaagaattttttggcggttcaatgacgatatcaagcttgggtggtattggaggtactttctttacaccaataataaatcctcctgaagtagcgatacttggagttggaaaaagttttgatagattagtaaaagttaaagacaaatttgtttcaagaaaaattttaccaatttcactttcatacgaccatagaa

SEQ ID NO: 233673 - DNA, 296 bp, Unknown
  Bacterial polypeptide expressing nucleotide sequence isolated from the Sargasso Sea
tttaaaaattgataagaaagaattttatggtggatcaatgacaatatctagtcttggaggtattggaggaagtttctttacaccaattataaattaccccgaggtagcaatattaggagttagtaaatcaaataaaaaacaaatctttttaggagatcgatttacatcaagaactatattgccaatttctttgtcctatgatcatagaattattgacggtgcagaagctgcaagattttgtaatgagattagggataatttaggtaaaaattttgcttttaaattagctgtataat

SEQ ID NO: 233674 - DNA, 382 bp, Unknown
  Bacterial polypeptide expressing nucleotide sequence isolated from the Sargasso Sea
atggtaccaaaaattagagaggtagataaaaaaaatataaatcaaataagtaaagatttaaaaaaagtaagcgaagattgtagaaatttaaaaatagataaaaaagaattttttggaggatcaatcactataactagtttgggtggaataggaggttctttttttacaccaattataaattatcctgaagtagcaatactaggtattggaagatcgtataagaaacaattatttataaatggaaaatttataactcgcattgtattgcctctttctttatcttatgatcatagaattatagatggcgctgaagctgctaaatttaataatgatttaaaagataatcttggaagcaattttgcttataaattagcaatttaat

SEQ ID NO: 233675 - DNA, 742 bp, Unknown
  Bacterial polypeptide expressing nucleotide sequence isolated from the Sargasso Sea
aaaaatagaaaaaaaaatttataaagaggaatattctcatgaagaatttggaaaaattgaattaaaagatatccctagagtaaaaaaattatcaggacctcagttagtaagatcttggactgaaatccctcatgtcactcaacatgaagaaatagatgttacagaaatggaacaatttagatcgtctttatatgactattattctggagaaatgataaaagttactcctctagcatttatatcaaaagctctaataagtgctcttaaagcctttccaaattttaatgcctctatcgatcctaatcaaaataaaataatttataaaaaatattttcatttaggttttgcagtagatacttctcatgggttaatggtgcctaaaattagaaacgttgatcaaatgagtattaaggaaataggagaagcgttaaaaaaaactagtaaactttgtagagaattaaaaatagataaaaaagaattctttggtggatcaatgacaatctcaagcttggggggcattggaggaacattttttactccaataattaaccctccagaagtagctatactaggcgttggaaaaagttttgatcgtttaacaaaattaaaaggaaagatagtttctcgaaaaatcttaccaatttctttgtcttatgatcacagaataattgacggagcagagggtgcaagattttgtgtttatttaagtgaatgtctaggtaaagacttcgcattcaagctt

SEQ ID NO: 233676 - DNA, 616 bp, Unknown
  Bacterial polypeptide expressing nucleotide sequence isolated from the Sargasso Sea
tcatcatgatgaagtagatataacagagatggaagattttagaactaaattaaaagataatttcacaggacaaaatatcaaaattacacctttagtttttattattaaagctttggttaatgcattaaaaaaatttccatcatttaattcatcgattgatgatatagaaactggaaaaataactttaaaaaaatattttcatattgggattgcagtagatactccccatggattaatggttccaaaaattagaaatgcaaatgaaaaaaatattaaagatttgagcagtgaaatattggaaataagtgataaatgtaaaaatttaaaaattgataaaaaagaattttatggaggttcaataacaatatcaagtttaggtggaattggaggttctttttttactccaataataaactatcctgaagtagcaattttaggagtcagcagatcttcaaaaaaacaaatttttttagaaaatagctttcaagttcgaacaattttaccaatatcactttcctatgatcataggataattgatggagcagaagctgctagattttgtaatgaactaaagaaaaatcttggtaaaaattttgcttataaattagctatataa

SEQ ID NO: 233677 - DNA, 298 bp, Unknown
  Bacterial polypeptide expressing nucleotide sequence isolated from the Sargasso Sea
aatgatataagtgaaaaatgtagaaatttaaaaattgataaaaaagaattttttgggggctccatgacaattacaagtttaggaggtattggtgggactttttttacaccgattatcaaccctcctgaagttgcaatattgggtattggcaaaatagtagaacgaaataaaaatttaatgcttccattatctttgtcttatgatcatagagtagttaatggtgcggatgcagcaaggttttgtaacgaattaaaagacaaccttgggcaaaattttgcttataaattatcactataat

SEQ ID NO: 233678 - DNA, 223 bp, Unknown
  Bacterial polypeptide expressing nucleotide sequence isolated from the Sargasso Sea
ttttttcacgccaataattaaccctcctgaagtagcaatattgggagtgggaaagtctgttgaaaaaacttttaaacaaaatggtcaacttattaataaaaaaatgcttcccatttcactttcatacgaccatagaattattgatggagccgaaggcgctagattctgtgtccatttaggtgaaagcttgggtaaagactttgcctttaaacttgctgtttga

SEQ ID NO: 233679 - DNA, 718 bp, Unknown
  Bacterial polypeptide expressing nucleotide sequence isolated from the Sargasso Sea
gacttttctaagtggggtggacattgagcttcaaaaacttacaaaggtcaaccgaataacaggtgaccgactacagcaggcgtggcaggagataccccatgttacgcaacacaatgatgcagatataactgaactagaaaagattcgtaagcaattaaaggaggagggctatcaaaaggatattaaagtaacctttctacctttcttattgaaagcggttataactgttttaaaggagattcccaaattcaacagctcgttagattacacaggtgaaaatctcgttttaaagcaatactaccacattggaatagcggttgatacaccgcatgggctcacagttcccgtggtgaaggatgtagataaaaaagatattttcgagctttcgaaagacctaatggaccttagcgaaaaagctagaaataaaaaactaaaaccagaagaccttcagggaagcacctttactgtttctagtttaggtggaattggtggaacagctttttccccaattgtaaaccccccagaggtggccatccttggtgtttctaaaagtgagtggcgtcctgtgtacgacttaaaaagagaggagtttatcccccgctacattatgcctttttctatttcatatgaccatagggtggtcgatggtgcagctggagcatcctttgttgagaggttctctcaggccttgaaagacacagacagtatggtcggataa

SEQ ID NO: 233680 - DNA, 814 bp, Unknown
  Bacterial polypeptide expressing nucleotide sequence isolated from the Sargasso Sea
tcaccaaaagtcagaaaatttgcaagagaacttggtgttgatattagtaaagttgaaggtagtgaaagactaggaagagtaactgaaagtgatgtaaagtcatttgttgcaaataaacctgagataaattctgaaaaagaattcaaaaaagatgaaacgatagaactagaatatcctcactctgaatttggaaaaacagaaataaaggatattccaagagtgaagagactatcgtctaaatatcttatgaattcttggaccaatattccccatgtgaccaatcatgatgaagcagatataactgaattagaggagtttagaacatctcttacagatatttacactggagaaaaaaaaaaaattactcctttagcttttatcgtcaaggcattaactgcatcacttaaaaaatttccaaattttaattcatctatagatgaaattgataaaggaaaaatgaccttaaaaaagtattaccatattggaatagctgtagataccaaacatgggctaatggtgccaaaactaagaaatgctgataataagaatatctcattaattggtaacgaacttaaaaaattaagtgatcaatgtaggaatcttaaaattgataaaaaagaattatttggtggttccatgacaataacaagtctaggagggattggtggctcttttttcacacctataattaattatcctgaagttgcaattttgggagttggcaaatctcaaaaaaaacaaatttttattaatggaaagtttattacacgaacaatgttacctttatctttatcatatgatcacagaataatga

SEQ ID NO: 233681 - DNA, 291 bp, Unknown
  Bacterial polypeptide expressing nucleotide sequence isolated from the Sargasso Sea
aaattgacaagaaagaattttttggtgggtcgatgactatatcgagcttgggtggtatcggaggcactttctttactccgatcataaatcctcctgaagtagcaatattaggagttggaaaaagttttgatagattagtaaaagttaaagacaagtttgtctcaagaaaaattttacctatttcactttcatacgaccacaggataattgatggggctgagggtgctaagttttgtgtttatctaggacaatgtcttggtaaagatttcgcttttaaacttgccgtttaag

SEQ ID NO: 233682 - DNA, 883 bp, Unknown
  Bacterial polypeptide expressing nucleotide sequence isolated from the Sargasso Sea
aaaagttacttcagaaaaaattgctaataaagtatctcaagaaccaatagctaaagataaaactgagaaagtatatgaaactaataaatcctcttccacagacaatgacaaaattttagcaggccctgcagtcagaaaatatgctcgagagctagagctagatttaacaagcatcaatggtatgggcaaggatggaagaataacaaaagatgacttaaaacgttttattcatcaaaaagtaacaccctctaaaagagatgtttacccatctcttgaaagccttgcgaaatttggaccatataaaattgaaaacctttctggaatcaggaaagctggactaaaaaacttgcaaaactcgtggtcattaatcccacatgttttccattttgaagaaataaatttgacaagaattaatgatattagagaaaaagttaaatgttccccattgccagttatcgtaaaagcagtatcaaatatactaaaaaaacatcctctatttaactcaacacttctaagcgaatctgaagtcttattaaaagattatataaacattggtttagctgtgaataccagagatggcttagtagttcctgttataaaagaagtaaataagttagatataaaagacattgatcaagctataaaaaaactatccatgcatgctcgagaaaagcaacttaaaaaaacggatattgaaggtgcaacatttactatctcaagtttaggaaagataggtggccaaggattcaccccaataatcaaccatccagaagtggcaattcttggaatatctaataataaaaaaaccttatcaatgtacaaagaaaaaattattgaagaattggtattaccgatctctttatcttacgatcatagggtaata

SEQ ID NO: 233683 - DNA, 623 bp, Unknown
  Bacterial polypeptide expressing nucleotide sequence isolated from the Sargasso Sea
gttgtcatctaaatatttaatgaattcttggacaaaaattcctcatgtaaccaatcatgatgaagctgatataactgaattagaggaatttagaacctctcttacggacgtatatacaggtgagaaaaaaaaaattactccattagctttcatcgtaaaagcattaacaacatcattaaaaaaatttccaaattttaatacctcaatcgatcaaattgaaaacggtaaaatgactgttaaaaggtattatcatgtcggcatagcagtggatactccacatggtttgatggttccaaaattaagaaatgcagataataagaatatttctttaataagcacagaattgaaaaaaataagtcaacaatgtagagatcttaaaattgaaaaaaaggagttattcggaggctctatgacgataactagtctagggggaattgggggatctttttttactccaattataaattatcctgaggttgctattttaggagtaggtagagcagaaaaaaaacaagtatttatagatggaaaatttgttactcgcaaaatgttaccactttccctgtcttatgatcatagaattattgatggtgcggaagcagctcgatttaataatgatttaa

SEQ ID NO: 233684 - DNA, 259 bp, Unknown
  Bacterial polypeptide expressing nucleotide sequence isolated from the Sargasso Sea
aatgacaattactagtcttggtggaattggagggtcattttttacaccaatcattaattatcctgaagttgctattttaggaatcggtaaattagaaaaaaaacaagtttatattgatggtaaatttgcatcacgaataatgttgcctctttctttatcttatgatcatagaataattgatggagctgaggcggcacgttttaataacgaattaaaagaaaatttaggtaaaaactttgcctataaattagctatctaa

SEQ ID NO: 233685 - DNA, 265 bp, Unknown
  Bacterial polypeptide expressing nucleotide sequence isolated from the Sargasso Sea
ggttcaatgaccataacaagtctaggaggtatcggcggttctttttttacaccaattataaactttccagaggttgctatcttaggagtagggaaatcagaaaaaaaacaggtttttaccgatggaaaatttgttacgcgcacaatgttaccactatcattatcctatgatcacagaataattgatggtgcagaagccgctcgttttaataatgatttgaaagaaaatttaggtaaaaattttgcctacaaattagctgtttaac

SEQ ID NO: 233686 - DNA, 487 bp, Unknown
  Bacterial polypeptide expressing nucleotide sequence isolated from the Sargasso Sea
aaatttccaagttttaattcttcaatagatgatattgaaaaaggaaaagttatttataaaaaatattatcatattggtatagccgtagatacactaaatggtttaatggttcccaaaataagaaatgttgataaaaaaaatattaatcaaataagtcaagaattaaagaaagttagcgaagattgtagaaatttaaaaatagataaaaaagaattttttggtggatcaatcacgatcactagtttaggtggaataggaggttctttttttacaccaatcataaattttcctgaagtagcgatacttggtattggaagatcatataaaaaacagctatttataaatggcaattttttagctcgtactgtgcttccaatatctttatcttatgatcacagaattatagacggtgctgaggctgcacgttttaataatgatttaaaagaaaatctaggcactaattttgcttataagttagctatttaaa

SEQ ID NO: 233687 - DNA, 406 bp, Unknown
  Bacterial polypeptide expressing nucleotide sequence isolated from the Sargasso Sea
gctgttgatacagagcatggtttaatggtaccaaaaataagaaatgccaatgaaaaaaatattaaccaattaagtgaagaactgagggatataagtgaaaagtgcagaaaattaaaaattgataaaaaagaattttttggtggttcaattacaataacaagtttaggaggaataggtggatctttttttactcctattattaatcatccggaagttgcaattctagggattggtagaacttattataaacaagttttgattgataattctttccaaaaaagggttatgcttccattatcattatcttatgatcataggataattgacggtgcagaagccgcaaggttctgtaacgaaattaaagatagtttgggcaaaaattttgcttataaattagcaatataaa

SEQ ID NO: 233688 - DNA, 742 bp, Unknown
  Bacterial polypeptide expressing nucleotide sequence isolated from the Sargasso Sea
gataaaattaaaaacgaattgaaacattctgattttggtgaaatagaaattaaagacataccaagagtaaaaaaattatcatcaaaatatcttacaaattcatggacaacaatccctcatgttacaaatcatgatgaagccgacataacggagatggaaagttttagaagttcattaagagatatgtatactggagaaaaaattaaaattacacctctagcatttataataaaggctttagttgcatctcttaagaaatttcctagttttaattcttctatcgacgaaattgagactggaaaaatgactttaaaaaaatattaccatattgggatagcagttgatacgccaaatggattaatggttccaaaaattagaaatgcaaataacaaaaaaatttctctgataagtaaagaattaaaagaggtaagcgaactttgtagaaatttaaaaattgacaaaaaagaattgtttggcggctcgatgacgattacgagtttaggtggcataggaggttcattttttactcctataattaattatcctgaagttgctatattaggagtaggaagatcagaaaaaaaacaaatttttatgaatggaaagtttcaaactaggactatgctgccaatttctttatcttatgatcacagaattattgatggtgcagaagcagctaggtttaataatgatctaaaagaaaacttaggcaaaaattttgcctataaacttgctgtctaat

SEQ ID NO: 233689 - DNA, 853 bp, Unknown
  Bacterial polypeptide expressing nucleotide sequence isolated from the Sargasso Sea
aaaaatctctcgcacttcagccaagacaattaatacaaatgtttatgcaggaccggcggttagaaagcttgcaagagaattcggtattgatttatcactcgttcagcctacaggtccaaagaataggattcaaaaagaagacttgcatcaattcgtaaaatctcgactttcagaaactggacaaggaaatggatttgagttttctcagcctgatattgattattcaaaatggggtttaattaaagaagaaaagctttcaaaatttcagaagtcttctattagtaaccttcatacatcctggataaatatccctcatgttactcaacatgacgaatgtgatttaaatattctgcttgaagttagaactaaattatgtaaaaagcataaagtaaagatttctcctttagctttcatagcaaaaattacttctaagttacttgctgattttccattacttaattgctctttagataagagtttagaaaaaattattttaaaagattatataaacctaggtattgctatagacactcctgaagggctgattgtgccaaatgtaaaaaatgcacaattaaaatctattgtggagatctcagcagagattaatgaattagctacagctgcaaaaaaacgaaagttaaaaattgctgatctgaaaggtgcatcctttagtattagttctctaggtgcaattgggggtaggttttttacgccaataattaatcctcccgaagtagctatactaggaatttcaaagacttatgagaaggttgtttcatccgacggaggatttgaaaatagaagttttttaccaatttcgctgagttatgatcaccgcgcaattaatggggtc

SEQ ID NO: 233690 - DNA, 553 bp, Unknown
  Bacterial polypeptide expressing nucleotide sequence isolated from the Sargasso Sea
actgggcgaaagaaaaaaaattactccgttagcatttattgtaaaagcattaacagcttcattaaaaaaatttccaaattttaattcttctatagatgaaattgaaaaaggaaaaatgacaattaaaaaatactttcatattggtatagctgtagatacaccacacggattaatggttcctaaattaagaaatgctgaaaataaaaatatttctttaataagtgatgaacttaaaaaattaagtgaaaaatgtagaaatcttaagattgataaaaaagagttgtttggcggatcaatgacaattacaagcttaggaggaattggaggttctttttttactccaataattaattatcctgaagttgctattttaggtattggtaagtctgaaaagaaacaagtttatctagatggaagatttgttacaagaacaatgttgcctttatctttatcttatgatcatagaataatagatggtgcagaagcagctcgttttaataatgatttaaaagataatttaggtaaaaactttgcttataaactagctgtttaa

SEQ ID NO: 233691 - DNA, 541 bp, Unknown
  Bacterial polypeptide expressing nucleotide sequence isolated from the Sargasso Sea
attaaaattacacctctagcatttataataaaggctttagttgcatctcttaagaaatttcctagttttaattcctctattgacgaaatcgagactggaaaaatgactttaaaaaaatattaccatatagggatagcagttgacacgccaaatggattaatggttccaaaaataagaaatgcaaataacaaaaaaatttctcttataagtaaagaattaaaagaggtaagcaaactttgcagaaatttaaaaattgataaaaaagaattgtttggcggctcgatgacgattacgagtttaggcagtataggaggttcattttttactcctataattaattatcctgaagttgctatattaggagtgggtagatcagaaaaaaaacaagcttttatgaatggaaagtttcaaactaggactatgctcccaatttctttatcttatgatcacagaattattgatggtgcagaagcagctaggtttaacaatgatctaaaagaaaatttaggcaaaaattttgcttataaattagctgtctaat

SEQ ID NO: 233692 - DNA, 928 bp, Unknown
  Bacterial polypeptide expressing nucleotide sequence isolated from the Sargasso Sea
aatgtcaaaagataaaaaaatatttacaacacctaaagttagaaaatttgctagggagttgggagccaatgttaatttaatagaaggaacagaaagaaaaggtcgaattactgaagaagatgtaaagaaatttataaactaccaactaaaagatcaaaagaatataaaaaaagataaccaaaccaaaaataaaattaatagcgaatatgaccattctgattttggtgaagtggaaattaaagaagtaccaagagtaaaaagaattgcagcaccacatttagcaagttcatggaaaaatattccacacgttacgcaccacgatgaagctgatataacagaaatggaagagtttagaatttctttaaccgattcattcactggcgaaagaaaaaaaataactcctttagcatttataataaaagctcttgtttcttcattggtaaagtttcccacatttaatgcttcaattgaggatattgataaaggagaaatgacaattaaaaaatattaccatataggaattgcagttgatacttctcacggattaatggtgccaaaattaagaaatgcaaacaataaaaatattaaccttataagcaaggaattaaaagaaattagtgaaaaatgtcgaaatttaaaaatagataaaaaggaattttttggtggctctatgacggtaacaagtttaggaggtataggaggttctttttttactccaattattaattatccggaagttgcaattttgggtattggaaaatcgtcaaaaaaaaatgtttattatgaagaaaaatatcaaacaagaataatgttacctttatccttatcttatgatcacagaattattgatggcgcagaggcagcaagattttgtaatgaattaaaagaaaatcttggtaaagattttgcatacaaattagcagtctaa

SEQ ID NO: 233693 - DNA, 1181 bp, Unknown
  Bacterial polypeptide expressing nucleotide sequence isolated from the Sargasso Sea
aatgtcagaaattgaaattaaagtaccaaatattggagattttaaagatgtagaggtaatagaagttttagtttcagaggggcaaacattaaaaaaaaatgatcctctaataacaatagagagtgataaatctagtgtagaaattccatcgaattttgatggaaagatcaaagccttaaaaataaaagtaggagataaagtttctgagggtgatttaatattaactttagaaaatatatctaaaacaaaagaagaaggtgatcaaaagccagtaattaaaaaagagatcaaaaaaacacagattatcgatccaaaagtccaaaagatcccaactaatcaaaataaagttttaaatatatcatctgcaagtccaaaagttcgaaaatttgctagagaactaggtgtggatattatgcaagttaaagggagtgaacgtgagggtagggttattgagagtgatataaaattgtttgttgcttcgaaatcgaataatccagttaatagtgagaataaaaataaagataagatcaaacaagaatatccccactcagagtttggagaagtagaaataaaagatataccaagagttaaaaaattatcatcaaaatatttaatgaattcttggacaaatatccctcatgtaactaatcatgatgaagcagatattactgaactagaagaattcagaacaaccttaacggacatatatactggtgaaaaaaaaaagattacacctttggcttttatcgtcaaagctttgactgcatcattaaaaaaatttcctaattttaatagttcaattgatgatattgaagaaggaaaaatgacggttaaaaaatattttcatattggaatagctgtagatactccacatggtctaatggttccaaaacttagaaatgcagataataaaaatattaatcttataagttctgaacttaaaaagttaagtgatcaatgtagaaatctaaaaattgataaaaaagaattgttcggtggatctatgacaataacaagtttaggtggtattggtggatcatttttcaccccgattataaattttcctgaagttgcaattttaggagttggtagatctgaaaaaaaacaagtttttttaaatggtaaatttgttacaagaacaatgttgcccttatcattgtcctatgatcataggattattg

SEQ ID NO: 233694 - DNA, 931 bp, Unknown
  Bacterial polypeptide expressing nucleotide sequence isolated from the Sargasso Sea
aatgactgaaaatgaaacttacaaaactgtatctgctaccccaaaagtcagaaaatttgcaagagaacttggagtagatattaataaagttactggtagtgaaagacaaggaagagttactgaaagtgatatcaagttatttgtttctaataaatctattcaaaaaaaggaagttcagactaagaatgaagagaaaattaaactagaatattcacattcagaatttggagaaatagaaacaaaagatattccaagagtcaaaaaactttcggctaaatatttaatgaactcttggactaatatacctcatgttactaaccatgatgaggcagacattacagagatggaagaatttagaaattcacttacagatatttacacaggaaaaaaaaagaaaataactccactagcttttatagttaaagctttaacagcatcattaaaaaaatttcctaattttaattcatcaattgatgagattgaaaaaggaaaaatgactgttaaaaaatattatcatattggtatagcagtggatacacctaatggattaatggtacctaaattaagaaatacaaacaataaaaatatttcttcaattgctgatgagcttaaaaaattaagtgaggaatgtagaactctcaagattaataaaaaagaattatttggaggatctatgaccataacaagtcttggtggtataggtggttcattctttacacctattattaattttcctgaggttgctattttaggaataggaaaatcacaaaagaaacaagtttttatagaaggaaaacttgtagctagaacgattttaccgttgtcactttcttatgatcatagaataatagatggagcagaagcagctagatttaacaacgaattgaaagagcacttaggaaaaaattttgcttataaattagccgtttaa

SEQ ID NO: 233695 - DNA, 904 bp, Unknown
  Bacterial polypeptide expressing nucleotide sequence isolated from the Sargasso Sea
aaaaaatattttgccacacccaaagtaagaaaattttggctagagagcttgggagcaaatatagctgagatagaaggatcggaaagattaggaaggataactgaagaagatgttaaaaattttgtaaataaaaatttaagtaaatttcataaaaaagaagatattacaatcaaatcagaatttaatcattctgattttggagatattgagataactgatttgtctagggtaaaaagattagctgctccacatctttcaaattcttggaatacaatcccacatgttactcatcatgatgaagcagatataactgaacttgaggatttcagggcaaaattaacagacccagtttctggtgataaaattaaaattactcctcttgcttttatagcaaaagcattaactaataatttaaagaaatttcctacattcaattcatctatcgataatatcagtgaaggtaaaattactttaaaaaaatatattcatataggtattgccgttgatacgcctcatggtttgatggttccaaaaataagaaatgtggataaaaagaaaataaaagaaattgcggaagaattaaaaaatgtaagtgaacttagtagaaatttaaaaataaataaaaaagaattttttggaggatcaataaccataacaagtctaggaggtattggtggtacttattttacacctataataaattatcctgaagttgcaattcttggcgtaggtagatcctataaaaaacaaatttttataaaagataagtttcttgcaagaacagtgttgccaatatcactttcatatgaccatagaattatagacggagcagaagcagctaagttttgtaattcattaaaagaaaatttaggtaaaaatttcgcctataatttagccttttaat

SEQ ID NO: 233696 - DNA, 862 bp, Unknown
  Bacterial polypeptide expressing nucleotide sequence isolated from the Sargasso Sea
atgtcagattttgaaaatcaaaagaacaagggactaccttctgcagcaagtccaaaagcaagaaagtttgcaagagaacttggtgtaaatataaatctagtttcaggaagtgagagagatggaagagttgtggaagatgatattaaaaaatttatttcttcaaaaataatcaattcttctgaaatcaaagaaagcaagcacaataaaattaaaaatgaatttgaacattctgattttggtgaagttaaaattgaggatataccaagagtaaaaaaattagcttcgacttacttgattaattcttggacaaaaattcctcatgtaacaaatcatgatgaggtggatattacggaaatggaaaattttagaagttctttaactgatatatattctggagaaaaaataaaaattactcctttagcttttattattaaagcattagttgcctcattaaaaaaatttccaaattttaattcatcaattgatgatattgaaaatggtaaaatgacattaaaaaaatattatcatataggaatagcagttgatacttcaaatggattgatggttccaaaaataagaaatgtagataataaaaaaattttattgattagcaaagaattaaaagaagtaagtgaactttgtagaaatctcaaaattgataaaaaggaattatttggtggatctatgactattacaagcttaggtggtatcggaggctctttttttacaccaataataaattatcctgaggtagcaattttaggaataggaaagtcacaaaagaaacaaatattaattaatggaaaatttcaaacaagaactatgctgccaatttcattatcttatgatcacagaataattg

SEQ ID NO: 233697 - DNA, 586 bp, Unknown
  Bacterial polypeptide expressing nucleotide sequence isolated from the Sargasso Sea
aatggaacaattcagatcatcattatatgattattacactggggaaatgataaaagtaactcctttagcatttatatcaaaagctttagtaagcgcacttaaagcttttccaaattttaatgcgtctatcgaccttaatcaaaataaaataatttataaaaaattttttcatttaggttttgctgttgatacgcctcatggtttgatggttcctaaaataagaaatattgatcaaatggatattaaggaaattggagaagctttaaaaaaaactagtaaactttgtagagaattaaaaattgataagaaagagttttttggagggtcaatgacaatatcaagtttaggaggaattggaggcacattttttactccaataataaatcctcctgaagttgctattctaggtattggaaaaagttttgatagattagtaaaattaaaaggaaaaatagttactcgaaaaattttaccaatttctttgtcttatgatcacaggattattgatggagcagaaggagcgagattttgtgtctatttaagtgagtgtttgggcaaagatttcgctttcaaacttgctgtttga

SEQ ID NO: 233698 - DNA, 913 bp, Unknown
  Bacterial polypeptide expressing nucleotide sequence isolated from the Sargasso Sea
atgtcagatataaaaaaagttccagcaagtcctaaagtgagaaagtttgctagagaacttggtgctaatataaatgaaattattggttcagaaagagatggaagagtaactgaaaaagatattaaaatttttattaattcaaaagtaaaaaataaacctcaaatagacaaaccaaatttgaaatcagaatttgatcattctgattttggtgagatcgaaataaaagaaataccacgagtaaaaaaaatcgcagcacctcatttatcaaattcttggaatactattcctcatgttactcatcatgatgatatagatattactgaattagaggattttagatctaatttaattgatagcatatcaggagaaaaaattaaaattacacctttggcttttatagcaaaagctttaaccaataatttaaagaaatttcctaccttcaattcgtctatagataatattgataatggcaaaataacaatcaaaaagtattttcatattggtatagctgtagatacaccacatggattaatggtaccaaaggttagaaatgttgataaaaaaaaaataaaagaaattgcaacagaacttaaagagatcagtgatttaagtagaaaattaaaaataaataaaaaagaattttttggaggatcaattacaattactagtctaggaggaattggaggcacttactttactccaataattaattttccagaagtagcaatattaggaataggtaggtcttataaaaaacaaatatttataaataataaatttttagcaagaactgtattacctatatctctatcatacgatcatagaataatagatggagctgaagcggcaaaattttgtaatgccttaaaagaaagtttaggaaaaaattttgcttataatctagctttttaat

SEQ ID NO: 233699 - DNA, 1240 bp, Unknown
  Bacterial polypeptide expressing nucleotide sequence isolated from the Sargasso Sea
atgtcctctaaagatatcttagttccaaacataggtgattttaaagatgtcgaagtcattgaggttttggttaaagctgggcaaaaaattaaaaaaaatgactctttaataacaattgaaagcgacaaatctagtgtagaggtaccttctacatcagatggaattatagaaaaaattaatattaaaataggtgataaagtaagcgaaggcgatcttatacttactgtaaatgtagaatcaaaaatagatgtgaaagaaaaacctgtacaaaaaaacaaaattaaagaagtatcaaaaaaaccagatccagtttctccaccagttactcggtctacatcaggtgtaaaattagctagtcctaaagtcagaaaatttgcaagagaacttggtgccaatgtaactcaaatacaaggttcacagagatcaggaagagtaacagaagatgatgttaaaaaattcgtaaagtctcaagtatctgtaaatcaaggtaaagttgaaccaaaaaaatataaagatgaatattcgcatgaagaatttggagaaattgaaattaaagatatgccaagagtaaaaaagctttcagggcctcaactagtaagatcgtggactgaaataccgcatgtaactcaacatgatgaaattgatattacggaaatggaacaattcagaacatcattatttgatcatttcactggagaaaaaatttctgtaacgcctttagcttttataactagggcagtagtaaatgctttaaaagattttcctaattttaattgttccatagatcctgaacataataagatattttataaaaaatactatcacgttggttttgcagtggatacacctcatggattaatggttccaaagttaagagatgttgaccaaatgaatataaaagaaataggaaatgaattaagaagagtaagtagagattgtagagatttaaaaattaataaaaaggaattttttggtggttcaatgactatttctagtttaggaggaataggtggaactttttttacacctataattaatccgcccgaagtagctatcttgggagttggaaaaagttttgataggcttgttaaaattaaaggtcaaataatttcaagaaaaatattgccaatttctttatcttatgatcacagaataatagatggtgctgagggtgcaagattttgtgttcatttaaataaaagtttaggtaaagattttgctttcaagcttgccgtttaat

SEQ ID NO: 233700 - DNA, 1264 bp, Unknown
  Bacterial polypeptide expressing nucleotide sequence isolated from the Sargasso Sea
tatggctagcataaaaattttagttcctgatatgggtgacttcaaagatgtagaagttattgaagttctcgtaaaagaaggacagcaaattaaaaagaatgactctttaataacattagaaagtgataaatctagtgtggaagtgccttctactcatgagggggtagtggagaaaataaatataaaagttggtaataaagtaaatcaaggagatctaattcttaatctaaaatctgaaagcgcagctaaagaaacaaaagaaacagtaaataaagataaaaaaattgaaaaaaaagtagaagttacaagtcaagagataatcaaacaaaaaaaaattataccggcaactcctactttgaaaagtggaactaaagctgcgagtccaaaggtaagaaaatttgctagagagcttggagctaatgtaattgaaattcctggcactcaaagaggaggaagagtttctgaggaagatgttaaaaattttgtcagatcacaagtcacggtaaatgatggtaaagtacaaaaaaaaatacataaagaagaatattctcatgaagagtttggagaaattgaattaaaagatatcccaagagttaaaaaattatcaggacctcaattagtcagatcttggacagaaattcctcacgtaacacaacacgatgagattgatgttacagagatggaacaatttagatcatctttgtatgattactactcaggagaattaattaaagtaactcccttagcatttattgctaaagctttggtgagcgcacttaaagaatttccaaattttaatgcttcaattgatcctaatcaaaataagattatttataaaaaatatttccatttaggttttgcagtagatacacctcacggcttaatggtgcctaaaattagagatgtagatcaaatgaatattaaacaaataggagaagaattaaaaaatacaagcaaactttgcagagagcttaaaattgataaaaaagatttttttggtggctcaatgacaatatctagtttaggtggaattggtggaacttttttcacaccaataattaaccctcctgaagttgctattttaggtgtaggcaaaagctttgatagactcgtaaaaataaaaaataaagttatttcaagaaaaattttaccaatttcactatcttacgaccatagaattattgacggggctgaaggtgccagattctgtgtttaccttggcaaatgtttaggcaaagattttgctttcaagcttgctgtttaa

SEQ ID NO: 233701 - DNA, 907 bp, Unknown
  Bacterial polypeptide expressing nucleotide sequence isolated from the Sargasso Sea
atgataaaaaaagactatttatcaatagttccagcatcacctaaagcaagaaaatttgccagggaacttggaatagatataaataaaatttcaggtagtgagagacagggcagagttacagaaagagatataaaactatttgtttcaacaaagccccaggaaaatattaaaaaaaatgaaatcaaaaaagaagaaaaagtaaaacaagaatatttacattcagaatttggtgaaatagaaataaaagaaataccaagagttaaaaaattatcatcaaaatatttgatgaattcttggacaaatatccctcatgtaactaatcatgatgaggcagatatcactgaattagaggaatttagaacatcacttactgatatatattcaggggaaaagaaaaaaatcacacccttagcttttattgtcaaagctctgaccacatcattaaaaaagtttccaaattttaatagttctattgatgaaatcgaggaaggaaaaatgacagtcaaaaagtattaccacattggcattgcagtcgatactcctaatggtttaatggttcccaaaataagaaatgtagataacaaaaatatttccttaatagctaatgaactaaaaaaattaagtgatcaatgtagaaatttaaaaattgacaaaaaagagttatttggtggctcaatgacaatcactagccttgggggaattggaggatcgttttttacacctataattaattatcctgaagttgctattttgggagttggtaaatcagaaaaaaaacaagtttatattaatgggaaatttattacccgaacaatgctaccactatctttatcttatgatcataggataattgatggtgctgaagcagcacgctttaataatgatttaaaagataatttaggtaaaa

SEQ ID NO: 233702 - DNA, 892 bp, Unknown
  Bacterial polypeptide expressing nucleotide sequence isolated from the Sargasso Sea
agttagaagatttgctagagagttgggagccaatgtaagtataataaaaggaacagaaagaaaaggtagaattacagaagaagatgtaaaaaaatttataaataataaactaaaagattctggaaaaacaaaagaagacagtcaaaaaataaataaaattaaaaatgaatataaccattctgattttggtgaagtagaaattaaagaagttccaagagtaaaaagaatcgcagcgccacatttagtaaattcttggaaaaacattccccacgtaactcaccatgatgaggccgatataacagagatggaagaatttagaagttctttaaccgattcatttactggcgaaagaaaaaaaatcactccattggcatttataataaaagctcttgtttcttcgatgataaaatttcctacatttaattcttcaattgaagatatcgataaaggaaaaatgacaattaaaaaatattatcacataggaattgccgttgatactcctcatggattaatggtacctaaattaagaaatgtaaataataaaaatatcagtcttataagcaaagaattaaaagaaattagtgagaaatgtaaaaatctaaaaatcgataaaaaggaattttttggtggctcaatgacagtaacaagcttaggaagtataggaggttctttttttacaccaattattaattaccctgaagttgcgattttaggtgttggaagatcttcaaaaaaaagtgtttattatgataacaaatatcaagcaagaattatgcttcctttatctttatcttatgaccatagaattatcgatggtgcagaagcagcaagattttgtaacgaattaaaagaaaatcttggtaaggattttgcttataaattagcaatgtaa

SEQ ID NO: 233703 - DNA, 1276 bp, Unknown
  Bacterial polypeptide expressing nucleotide sequence isolated from the Sargasso Sea
atgaccaaaaaagatataaaagttccaaatattggtgaatttaaagatgtagaggttattgaaattatagtcaaaaaaggtcaggagattaaaaaaaatgatcctttaataacaattgaaagtgataaatcgagtgttgaaataccctcgttacatgatggaatagttacagaattaaatttaaatgttggggataaggtttctgaaggtgataaaatattagaaattgaattaaaagacaatcaagtagaaactcaattaaaaactgaagaaataaaaacaattaaaaaagaaaatactaaggaaaaaaaaatagaaattagaagagaagttggatcaaaaaatgttatcgtaaaagatttttctaaaaaaactgcagcctcaccaaaagtcagaaaatttgcaagagaacttggtgttgatattagtaaagttgaaggtagtgaaagactaggaagagtaactgaaagtgatgtaaagtcatttgttgcaaaaaaacctgaaataaattctgaaaaagaattcaaaaaagatgaaacgatagaactagaatatcctcactctgaatttggaaaaacagaaataaaggatattccaagagtgaagagactttcgtctaaatatcttatgaattcttggaccaatattccccatgtgaccaatcatgatgaagcagatataactgaattagaggagtttagaacatctcttacagatatttacactggagaaaaaaaaaaaattactcctttagcttttatcgtcaaagcattaactgcatcacttaaaaaatttccaaattttaattcatctatagatgaaattgataaaggaaaaatgaccttaaaaaagtattatcatattggaatagcagtagatacaaagcatgggcttatggtgccaaaactaagaaatgctaataataagaatatctcattaattggcaacgaacttaaaaaattaagtgatcagtgtaggaatcttaaaattgataaaaaagaattatttggtggttccatgacaataacaagtctaggaggtattggcggttctttttttacacctataattaattatcctgaagttgcaattttgggagttggcaaatctcaaaaaaaacaaatttttattgatggaaaatttattacacgaataatgttacctttatctttatcatatgatcacagaataattgatggagctgaagcagctcgatttaacaacgatttgaaagataatctgggtaaaaattttgcctacaaactagctgtgtaaa

SEQ ID NO: 233704 - DNA, 913 bp, Unknown
  Bacterial polypeptide expressing nucleotide sequence isolated from the Sargasso Sea
tatgtcagaaaataaaaaaatatttgcaacacctaaagtaagaaaatttgctagagaacttggagcaaatataactgagattgaaggatcagaaagattaggaagaataactgaagaggatgtaaaaaattttgtaaataaaaatttaaataaatctcaaacaaaagaagatattaaaattaagtctgaatttaatcactctgactttggagatattgagatagctgatatgcctagggtaaaaagattagctgcctcacatctttcaaattcgtggaatacaatccctcatgttactcatcatgatgaagcagatataactgagctcgaggatttcaggacaaagttaacagacccagtctctggtgataaaatgaaaattactcctcttgcttttatagcaaaagcattaactaataatttaaagaaatttcctacattcaattcttccatcgataatatcagtgaaggtaagattactttgaaaaaatacattcatatcggcatcgctgttgatacacctcatggtttgatggtcccaaaaataagaaatgtggatcaaaagaaaataaaagaaattgcagaagaattaaaaaatgtaagtgaacttagtagaaatttaaaaataaataaaaaggaattttttggaggatcaataaccataacaagtctaggaggtattggtggtacttattttacacctataataaattatcctgaagttgcaattcttggtgtaggtagatcctataaaaaacaaatttttataaaggataagtttcttgcaagaacagtgttgccaatatcactttcatatgaccatagaattatagacggagcagaagcggctaagttttgtaattcattaaaagaaaatttaggaaaaaatttcgcctataatttggccttttaa

SEQ ID NO: 233705 - DNA, 913 bp, Unknown
  Bacterial polypeptide expressing nucleotide sequence isolated from the Sargasso Sea
tatgtcagaaaataaaaaaatatttgccacacctaaagtaagaaaatttgcaagagagcttggagcaaatatatctgagattgaaggatcggaaagattaggaagaataagcgaagaggatgtcaaaaattttgtaaataaaaatttaaataaatctcaaacaaaagaagatattaaaattaaatcagaatttgatcattctgattttggcgatgttgaaatagttgatataccaaggataaaaagatttgctgctccacatctctcgaattcatggaatacaattccacatgttactcatcatgatgaagctgatataactgaactagaggatttcagagcaaaattaacagatccagtttctggtgataaaattaaaattactcctcttgcttttatagcaaaagcactaactaataatctaaagaaatttcccacattcaattcatccatagacaatatcagcgaaggtaagattactttaaaaaaatacattcatattggtattgctgttgatacacctcatggcttgttggttccaaaaataagaaatgttgatcaaaagaaaataaaagaaattgcagaagaattaaaaaatgtaagtgaacttagtagaaatttaaaaataaataaaaaggaattttttggggggtcaataactataacaagtcttggaggtattggtggtacttattttacacctataataaattatcctgaagttgcgattcttggcattggtagatcctacaaaaaacaaatttttgtaaaggataaatttcttgcaagaacagtattaccaatatcactttcatatgaccatagaattatagacggcgcagaagcagctaagttttgtaattcattaaaagaaaatttaggaaaaaattttgcctacaatttagccttttaa

SEQ ID NO: 233706 - DNA, 928 bp, Unknown
  Bacterial polypeptide expressing nucleotide sequence isolated from the Sargasso Sea
atgtctgatcaatccatcaaaacatctgcaagtccaaaagttaggaagtttgctagagaattaggtgttgatataaatagtgtcaaaggttcagaaagattaggcagggttgtagaaaaagatttaaaagaatttgtttcatctaacattaatcaaacatatgatccaaaagatagtaaaaatgaaaaagtaatcaaaagtgaatatcagcattcagattttggaaaaattgaagttaaagatatccctagagtaaaaaaaattgctgctcctcatttagtcaactcttggactaacattccacatgtaacaaatcatgacgaagctgatattactgagatggaagagtttagaagttcacttaaagataattacactagagaaaaaataaaaattactccattagcatttattataaaagcgttggtaatatcgctaaaaaaatttccatctttcaattcatcaattgatgatattgaaaatggtaaaattacatttaaaaagtattttcatatcggcattgcagttgatacccaacatggacttatggttcccaagattagagacgccaatcaaaaagatataaaagagttaagtaaggacttaaaaaaagtaagtgatgattgcagaaatttaaaaattgataaaaaagaattttttggaggatcaatgactattactagtttaggtggaattggtggatcattctttacaccaataattaattttcctgaagttgccatccttggaattggcagaagctataaaaaacaggtatttatagatggaaaatttgttccaagaactatgttacctttatcactctcatatgatcatcgaattatagacggagctgaggctgcaaaatttaataatgaattaaaagataatttaggagcaaattttgcttacaacctaagtaaatgat

SEQ ID NO: 233707 - DNA, 1285 bp, Unknown
  Bacterial polypeptide expressing nucleotide sequence isolated from the Sargasso Sea
aatgagcgagaaagaagtattagttcctaacattggtgattttaaagatgttgaagtaattgaggtattaatagaggcaggatcaaatattaataaagatgatccgataattacaatagaaagcgataaatcaagtgttgagatcccaagcccatactcaggtagtgtcaaaaaagttaacttaaaagttggtgataaggtttcagagggttcctcaatattaataattggttctgaagaacaaaaaccagatgttcaaatcgaagaagagatgaaagaagttaaaaaagaaactattatacaaaaacctcttgaaacagtaacttcaaaaccaaaagaaatattacaaaataatagagttagtgtattcaaatcaagcaaagcgcttgctagcccaaaaactagaaaatttgcaagagaacttggtgttgatattaataatattactggatcacaaagatcaggaagaattatagaagaggatataaaaaaattcgtatcttctaattttaataaacctcaagaagaaaagaaggctccatctataaagccctcagaatatgatcacgctgattttggagatgtagaaattcaagatataccaagaattaaaagaattgctgctccacatttatcaaattcttggcaaacaataccgcatgttactagttgtgatgaagcagatattactgagttagaagaatttagacaaaatttgactgatacttttactggagaaaaaaagaaaattactccattggcatttattataaaggcagttgtggaagctttgaaagtttttccaagatttaatagttctattgacaatattgaaaatggaaaaataacattaaaaaaatacttccatgtaggaattgcagttgatactcccaatggtttaatggtgccaaaaataagaaatgctaatcaaaagaatatagatcaaataagcaaggatctaaaaaaagttagtgatgattgccgaaatttgaagatagataaaaaagagttttatggaggatccataactataacaagcctaggtggcattggaggaacttattttactcctataataaattatcctgaggttgctattttaggaattggaaggacttatattaaacctgtttatattgatggacaatttaaacctagaacaatgttgcctttatctctctcttacgatcatagaattattgacggtgctgagggttcaagatttaataatgaattaaaaaataaccttggtaaaaactttgcctacaaattagctaagcaatga

SEQ ID NO: 233708 - DNA, 1264 bp, Unknown
  Bacterial polypeptide expressing nucleotide sequence isolated from the Sargasso Sea
tatgactagtacaaaaattttagttcctgatatgggtgacttcaaggatgtagaagttattgaagttcttgtaaaagaaggtcaacaaattaaaaaaaatgaatctttaataacattggaaagtgacaaatctagcgtagaagtgccttccactcacgaaggaatagtagaaaaaattaaaataaaagttggtaataaagtaaatcaaggagatctaattcttagtcttaagtcagaaaacaaaacagaagaagaaaaaatatcagttaataaagagcaaaaaattgaaaaaaaagtagaagataagaagccacaggtaattaaaacaaaggagattataccgaccgcacctagttcacaaagtggaactaagtctgctagcccaaaggttagaaaatttgcgagagaactgggcgctaatgtacttgaaatacctggatcacaaagagcaggaagagtctctgaagaagatgtaaaaaatttcattagatcacaagttactgttagtggtggtagagtagagaaaaaaatccataaagaagaatatcctcatgaagattttggagaaattgaattaaaagatataccgcgagtcaaaaaattatcaggaccccaactagtcaggtcttggacagaaatacctcatgttactcagcatgaagaaattgatattacggaaatggaacaatttagatcatctttgtacgattattactctggggaaatgataaaagtaactccccttgcatttatatcgaaagctttagtaagcgcacttaaagcttttccaaatttcaatgcctcgattgactctattcataataaaataatttataaaaaatattttcatttaggttttgccgttgatacacctcatggtctaatggtacctaaaattagaaatgtagaccaaatgagcattaaagaaataggtgaggcattaaaaaagacaagtaagctatgtagagaattaaaaatagataaaaaagaattctttggaggatccatgacaatatcaagtttaggaggcattggaggaacatttttcactccaataattaatcctccggaagtggcgatactaggcgtaggaaaaagttttgataggttaataaaattaaaaggtaaaattgtttctagaaaaattttaccaatttctttgtcttatgatcatagaataattgatggggcagagggagcaagattttgcgtctatttaagtgaatgtttaggcaaggatttcgctttcaagcttgctgtttaa

SEQ ID NO: 233709 - DNA, 232 bp, Unknown
  Bacterial polypeptide expressing nucleotide sequence isolated from the Sargasso Sea
tggaggctcgttttttacaccaatcataaattatccagaagttgcaattttaggtgtaggcaagtcacagaaaaaacaagtttacacagatggaaaatttgatactagaataatgttacctatatcattgtcgtatgatcacagaataattgatggagcagaggcagcaagatttaataatgacttaaaagagaatttaggtaaaaattttgcttataaattagctgtataa

SEQ ID NO: 233710 - DNA, 928 bp, Unknown
  Bacterial polypeptide expressing nucleotide sequence isolated from the Sargasso Sea
atgtctgatcaatcaaataaaatatctgcaagtccaaaagttagaaaatttgcaagagagctgggagtagatataaataaagttaagggaacagagagatcaggcagggttgttgaaaaagatttaaaagattttgtctcatctagaatcaatcatcctcagaataatagtgaaagacaaaaagaaaaaattattaaaagcgaatatcaacattcagattttggggaagttgaaattaaagatattcctagaataaaaaaaatagcagctccacatctcgtaaattcgtggacaaatattccacatgtaaccaatcatgatgaagctgatattacagaaatggaggaatttagaaacacaataaaagataattatacaggagaaaaaataaaaattactcctcttgcatttattattaaagcattggtgctttcactaaaaaaatttccatcatttaattcatcaattgatgatattgaaaatggcaagattacttttaaaaagtattttcatgttggtattgcggttgatactcaacatggacttatggttcctaaaattagagatgctaatcaaaaagacattaaagagttaagtgaggaattaaaaaaagtaagtgatgattgtagaaacttaaaaattgataaaaaagagttctttggtggatcaatgaccatcacaagcttaggtggcataggtggttcattttttacaccaataattaactttccagaagttgctatacttggtgttggtagaagttataaaaaacaggtttttattaatggtaaatttattccaagaaccatgcttccactatccctctcatatgatcacagaattatagatggagctgaggccgctaaatttaataacgaattaaaagataatcttggctctaattttgcctataatttgagtaaatgat

SEQ ID NO: 233711 - DNA, 1261 bp, Unknown
  Bacterial polypeptide expressing nucleotide sequence isolated from the Sargasso Sea
atggctagtacaaaaattttagttccagatatgggtgacttcaaggatgtagagattattgaagttttagtcaaagagggtcaacaaataaaaaaaaatgattctcttattacattggaaagtgacaaatcgagtgttgaggtaccatcaacgcacgaaggagttattgaaaaaataaatattaaagtaggcgataaagttaataaaggagacttaattcttaatctgaatgtagagagtgctactgaggaaaaaaaagaagcagtcagtgagcaaaaaaaagaagaaaagacagaaataaaagagatcaaaacccagaaaccaaaggaaattattcctatagcgcctacatcacaattaggtagtaagtcagctagtccaaaagttagaaaatttgctagagagttaggtgccaatgtagttgaaatacctggttctcaaagaggtggtagagtttccgaggaagatgtaaaaaattttgtaagatctcaggttacagtcagcggtggaaaaatagaaaagaaagttcataaagaagagcacccacacgaagagtttggtgaaatcgaactaaaagatataccaagagttaaaagattatctggtcctcacttagtaagatcttggactgaaattccccatgtaacacagcatgatgaagttgatataacagaaatggagcaatttagatcatcattatatgattactatactggtgagaaaataaaagtgacacctcttgcttttatcgcaaaagcacttgtcagtgctttgaagaaatttccaaattttaatgcttcaattgatagtgttaacgacaaaatcatttataaaaaatattttcacgttggttttgcagtagatactcctcacggtcttatggtgcctaaaataagagatgttgatcaaatgagcataaaagaaatcggaagtgccttaaggaaaacaagtagactatgtagagatttaaaaattgataaaaaggaattttttggcgggtctatgacgatatcaagcttgggtggtattggaggaactttctttaccccaattataaatcctcctgaagtcgcaatacttggagttggaaaaagctttgacaggttagtaaaagttaaagacaaatttgtttcaagaaaaattttaccaatttcactttcatatgaccatagaataattgatggtgcggagggtgctaggttctgcgtttatcttggaaaatgtcttggcaaagactttgcttttaaacttgccgtttaat

SEQ ID NO: 233712 - DNA, 859 bp, Unknown
  Bacterial polypeptide expressing nucleotide sequence isolated from the Sargasso Sea
aatgaacgatttagaagataaaaataaccaaaatgttctagctagtccaaaagctagaaagtttgcgagggaattaggagttgatgttagggatgttgttggcagtgaaagactgggaagagtaattgaagaagatataaaagaatttgtttcttcaaaatttaataaaaaggaaaatattaaaataaataaagagtatgaacactcagaatttggaaaagttgaaattaaagaaattccaagaataaaaagaatagctgcaccacatttagttaactcatggaaaaacatccctcatgttactaatcatgatgaagcagatattactgaaatggaagaatttagaagctctttaaaagatatttatactggtgagaaaaaaaaaattactccattagcttttataattaaagcattagtatcttctatgaaaaaatttccaaattttaattcttccattgacgatattgaaaatagtaaaattactttaaaaaaatattttcatattggaattgcggttgatacttctcacggtttaatggtacctaagattagaaatgtagataaaaaaaatataaaccaaattagtgaagaattaaaaaaagttagtgaggattgtagaaatttaaaaatagataaaaaagaattttttggaggatcaatcactataactagtttgggtggcataggaggttcattttttacaccaatcataaattatccggaagtagcaatacttggagttggaagatcttataaaaaacaattatttataaatgataaatttataattcgcactgttttaccactttctttatcttatgatcatagaattatagatggcgcagaagcagctaga

SEQ ID NO: 233713 - DNA, 514 bp, Unknown
  Bacterial polypeptide expressing nucleotide sequence isolated from the Sargasso Sea
tattaaagctttaactaaaagcttaataaattttccaatttttaattcctctataaaagatattgaaaaaggtataattgtacaaaaaaaatactttcatatcggaatagcagtagataccccgcatggcttaatggttccaaaaataagagatacaaacaaaaagaatataaataacatcgctaatgaacttaagatagttagtgaaaaatcaaaaaatcttaaaattgaaaaaaaggagttttttggtggttctataacagtaacaagtttaggtggaataggaggaaccttttttacacccataattaactccccagaggtagcaattttaggaattggaaaaatgtttgataaatttattgatttggaaaaaaatcctgagaaaaggtttattcttccaatatctctctcatatgatcatagagtaattaatggtgcagatgcagcaagattttgcaacaatctcaaagaaaatcttggccagaactttgcatacaacttatcaatataa

SEQ ID NO: 233714 - DNA, 951 bp, Unknown
  Bacterial polypeptide expressing nucleotide sequence isolated from the Sargasso Sea
aaattcaacaagaaactgaagttttaaataatgtgtctaatatttcatcagcaagcccaaaagctagaaaatttgctagagaacttggtgtagatataaataaagttttaggaagcgagagagatggaagagtagtagaagacgatataaaaaaatttgtagcatttagatcaaataataacgctgaagtcgttgaggaaaaaaaaccaagcaaaatcaaaaatgaatttgagcattcagattttggtgaaatagagatcaaagatataccaagagtaaaaaaattatcatcaaagtatctaacaaattcatggaccactatacctcatgttacaaatcatgacgaggccgatattacagaaatggaaagcttcagaaattctttgactgatatttatacgggagaaaaaattaaaattactcctttagcatttattataaaagctttagttgcttcgttaaaaaaatttccaagttttaattcttcaattgatgaaattgaaacaggtaaaatgacaatgaaaaaatattaccatataggtatagctgtagacactccaaatggactaatggttccaaaaattagaaatgctaataataaaaaaatttctcatattagtagagagttaaaggaggtaagcgagctttgtagaaatttaaaaatagataaaaaagaattgtttggtggttcaatgactattactagcctgggaggaataggtggatctttttttacaccaataataaattatcctgaagtagcaattttaggagtaggtaggtcagagaagaaacaaatctatataaatggaaagtttcaaattagaacaatgttaccgatttctttgtcttatgatcatagaatcattgacggtgctgaggctgcaagatttaacaatgatcttaaagaaaatctaggtaaaaattttgcctataaactagctgtataat

SEQ ID NO: 233715 - DNA, 228 bp, Unknown
  Bacterial polypeptide expressing nucleotide sequence isolated from the Sargasso Sea
gttcattttttactcctataattaattatcctgaagttgctatattgggagtaggaagatcagaaaagaaacaaatttttattaatggaaagtttcaaactaggactatgctgccaatttctttatcttatgatcatagaattatagatggcgctgaagctgctaggtttaataatgatctaaaagaaaacttaggcaaaaattttgcttataaattagctgtctaat

SEQ ID NO: 233716 - DNA, 928 bp, Unknown
  Bacterial polypeptide expressing nucleotide sequence isolated from the Sargasso Sea
atgtctatcaataaaaaaatatttgcaactccaaaaacaagaaaatttgctagagaacttggggcaaacataagtgaaatcgcaggaacacaaagagctggaagaattaccaatgatgatgttaaaaattatattaataacaaattaaacaatccaaaattagatagcgaaaatagtaaagagaaaacaaacctaaaagtagaatttgatcattctgattttggtgaagttgaagtaatcgacatgccaagaattaaaagaatagcagcaccaaatctttcaaattcttggaaattaataccacatgtcactcatcatgatgaagcagatatttcagaactagaggaatttagattatcattgaaggatcgaattacaggtgaaattaaaaaaattactccacttgtttttattataaaatcactagtctcttcattaaaaaaatttccaaattttaattcatcaattgatgagatagaaaaaggtaaaattacattaaaaaaatattttcacattggagttgctgttgatacaaagcatggcttaatggttcctaaaattagagaagcagataaaaaaaactttaatcagttgagtgagaatctaaaagaaattagtgacaagtgtagaaaattaaaaattgataaaaaagaattttttggcggatctattactgttactagcttaggaggtatcggtggttctttctttactccaataatcaactacccagaagttgcaatacttggtattggcaaaaaatattacaagcaagtttatattgataatgaatttaaaaaaagaattatgctaccgttgtcgctctcttacgatcatagaattatagatggagcagaagctgctagattttgcaatgatttaaaagaaaatcttggtaaaaattttgcttataaattggcgatatgac

SEQ ID NO: 233717 - DNA, 769 bp, Unknown
  Bacterial polypeptide expressing nucleotide sequence isolated from the Sargasso Sea
ttctttaaaattaaataaaaaaaaaaatattaatacaaataaagaatatgatcattctgaatttggtaaagttgaagttaaagaaataccacgagtaaaaaaaattgcagcaccacatttagttaattcttggaaaaatattcctcatgttacaaatcatgatgaggctgatattacagaaatggaagaatttagaaattctttaaaagatatttatactggagaaaaaaaaaaaattaccccattagcttttataattaaagcagttgtctcttctcttagaaaatttccaagttttaattcttcaattgatgatattgaaaatggcaatatcacctttaaaaaatattatcatattggtgttgccgtggatacttctcatggtttaatggtgcctaaaataagaaatgtagataaaaaaaatataaatcaaattagcaaagaattaaaaaaagttagcgaagattgtagaaatttaaaaatagataaaaaagaattttttggaggttcaatcacaataaccagtttgggtggtataggtggttctttttttactccaattataaattatccagaagtagcaatacttggtattggaagatcttataaaaaacaattatttataaatgaacaattcacaaaacgtacagttttgccactttctttatcttatgatcatagaattatagatggcgcagaagcagccagatttaataatgatttaaaagataatcttggaagcaattttgcttataagttagcaatttaa

SEQ ID NO: 233718 - DNA, 585 bp, Unknown
  Bacterial polypeptide expressing nucleotide sequence isolated from the Sargasso Sea
ttttagtgagttacttaaatttgagaaaaaaattaaataaaacatataaaatttcaccgcttgcatacatagtaaagtcaactgctgagactctaaaacacttcccagaaatgaattcatcattgtcacatgataaaaccacaatagttttaaaagattattataatatcggtattgctattgatacggaatatggtctagtggttccaaacattaaagatgtagataaaaaatcaataattaaaatttcagatgagattaaggatttagcaaaaactgcaaaaaaaagaagactaaacaatgagcaactctctggagctacattttctgtttcatctttaagtggagttggcggtaagttttttacaccaattattaatccacctgaagtggcaattttaggattatctaaaacatatgatgttgtaaaacttgttaatatgaaattaagcacaactcaacaactcccagtatctttatcttacgatcacaggataataaatggtgtttatgcaatgacttttataaacaagcttagtgaatatctaaatgatataaattttttacaaagctcctttgaataat

SEQ ID NO: 233719 - DNA, 249 bp, Unknown
  Bacterial polypeptide expressing nucleotide sequence isolated from the Sargasso Sea
cgagtttaggtgggataggaggttcattttttactcctataattaattatcctgaagttgctatattaggagtaggaagatcagaaaaaaaacaaatttttataaatggaaagtttcaaactaggactatgctgccaatttctttatcttatgatcacaggattattgatggtgcagaagcagctaggtttaataatgatctaaaagaaaacttaggcaaaaattttgcctataaactagctgtctaat

SEQ ID NO: 233720 - DNA, 934 bp, Unknown
  Bacterial polypeptide expressing nucleotide sequence isolated from the Sargasso Sea
aatgtcagacacaaaaaaaatctctgcaagcccaaaagtaaggaagtttgcaagagaacttggtgccaacataaatcaaatcgttggctctgaaagaggtggaagagtaacagaacaggatataaaaaattatataaattctaaaatcaaaaataccagtgaattaaatataccaaatgtaaaaagcgaaaaaaaaaatataaaaccagaatatgagcattctgattttggtaaagttgaaatcaaagatattccaagagtaaaaagaattgcagctccgcatttaacaaattcatggaatactattcctcatgtaacacaccatgatgaaattgacattactgaactagaggaattcagaaatagtttatttgattcagtcactggagaaaaaattaaaataacacctttagcttttattgcaaaagctttgacaaacaatttaaaaaattttccatcattcaactcatcaattgatgatattgataacgggaaaattacaattaaaaaatattttcatataggtattgctgttgatactccacacggtttaatggttccaaagataagaaatgttgatcaaaagaaaataaaagaaatcgcaaatgaactaaaagaaattagtgatttaagtagaaaattaaaaattaataaaaaagaattttttggtggatcaattactataactagtcttggaggaattggaggtacatactttacaccaataataaattttccagaggttgcaattttaggaatagggcgatcttataaaaaacaactatattttaaaaacagttttcaccctagaactgttcttccaatttctttatcttatgatcacagaattatagatggagctgaggctgcaaaattttgtaatgctttgaaagaaattttaggtagtaattttgcttataaccttgctttttaa

SEQ ID NO: 233721 - DNA, 1258 bp, Unknown
  Bacterial polypeptide expressing nucleotide sequence isolated from the Sargasso Sea
atgaaagaaatagagattaaagttccaaatatcggtgattttacagacgttgaggtgattgaagtgttagtcaatcaagggcaaatgattgcaaaaaatgatccattaataacaattgagagtgataaatcaagcgttgaaataccatcaaatttcgagggaaaaattaaatctttaaaattaaaagttggagacaaagtttcagaaggtgatttaattttaattttagaaagttcatcaaataaaaatgagattaaagaagagccaaaaattgaaaaacaatctgaaccaattatagaaacaaaatcagagttagaacaagtacctgtgtaccaaaaacaagttacaggtgtctcctctgcaagtccaaaagctagaaaatttgcaagggagttaggtgtaaatattaatgaagtattaggtagtgaaaaagatggtagagttgtcgaggatgatattaaaaaatttgtttctttaaagtcagtaaataataaagaaattaaagaaattaaacctagcaaaatcaagaatgaatatgaacatgcagaatttggaaaaatagagattaaagatataccacgagtaaagaaactagcctcaacttatttaaccaactcttggacaaccattccacatgtgaccaatcatgatgaagcagatataactgaaatggagggctttagaagctctttaactgatatttatactggagaaaaaattaaaattacacctttggcttttatcataaaagcgcttgtagcttctttaaaaaaatttccaagctttaactcatcaatagatgaaattgaaactggaaaaatgattgtaaaaaaatattatcatataggaattgctgttgacacacccaatggattaatggttccaaaaatcagaaatgcaaataataaaaaaatttcgttaattagcaaagaactaagagaagttagtgaactttgtagaaatttaaaaatagataagaaggaattatttggtggatcaatgacaattacaagcctaggaggaataggtgggtctttttttacgccaataataaactaccctgaagtagctattttaggtattggaagatcggaaaaaaaacaagttttcttaaatggtaagtttcaagtcagaacaatgttgccactttcactatcatatgatcatagaattatcgatggagctgaagctgctaggtttaataacgatttaaaagaaaatctaggaaaaaattttgcttacaagttagctgtataat

SEQ ID NO: 233722 - DNA, 387 bp, Unknown
  Bacterial polypeptide expressing nucleotide sequence isolated from the Sargasso Sea
gtttaatggtacctaaaataagaaatgtagataaaaaaaatataaatcaaattagtgaagaattaaaaaaaattagtgaagattgtagaaatttaaaaatagataaaaaagaattttttggaggctcaatcacaataactagtttaggtggtataggtggttctttttttactccaattataaattatccagaagtagcaatactcggtgttggaagatcttataaaaaacaactatttataaatgaaaaattcacaactagaaccgttttaccactttctttatcttatgatcatagaattatagatggtgcagaagcagctagatttaataatgatttaaaagataatcttggaagcaattttgcttataagttagcaatttaaa

SEQ ID NO: 233723 - DNA, 289 bp, Unknown
  Bacterial polypeptide expressing nucleotide sequence isolated from the Sargasso Sea
gatctacaaggtggaacatttaccatatcaagtcttggaggctttggaggagttggattcacaccaattattaacccccctgaagtggctattcttggtgtggccagggctcaaataagaccgatcatgattaagggaaaattcttaccaaggctcatattgcccttatcattgtcttatgatcaccgagtcatcgatggtgtcggcgggatacaattcacatctgcactaaaggaattgcttgaaaatccagaatcttacttatctgaggagatcagcattggctgag

SEQ ID NO: 233724 - DNA, 781 bp, Unknown
  Bacterial polypeptide expressing nucleotide sequence isolated from the Sargasso Sea
aaatcaataacaaataatgagattaaagaaattccccctaagaaaattagtaatgattttgcacattcagattttggaaatgttgaaattcaagatatacccagggtaaaaaaattagcatcaagctatctttcaaattcatggacaacaattcctcatgtaacaaaccatgatgaagcagatatcacagaaatggaaacttttagaaaatctttaaccgataattatacaggagaaaaaattaaaattactcctttggcctttattgtaaaagctttagttgcatctcttaaaaaattcccaacctttaactcctctatagataagattgaaagtggaaaaatgactttaaaaaaatattttcatattggaattgctgttgacacaccaaacggattaatggttcccaaattaaggaatgctgaaaataaaaaaatttctttgataagcaaagaattaaaagaaataagtgaattatgtagaaatttaaaaatagataagaaagagttatttggtggatcaatgactattacaagcctaggcggaataggtggatctttttttacaccaataattaattatccagaggtagctatattaggaataggaagatcagaaaaaaaacagatttatttaaacggaaagtttcaaacaagaataatgttgccattatcactatcttatgaccacagaataatagatggggcagaagcagccagatttaataacgatttaaaagaaaatcttggaaaaaactttgcttataaattagcagtataat

SEQ ID NO: 233725 - DNA, 1261 bp, Unknown
  Bacterial polypeptide expressing nucleotide sequence isolated from the Sargasso Sea
tatggctagtacaaaaattttagttccagatatgggtgactttaaggatgtagagattattgaagttctagtcaaagagggtcaacaaataaaaaaaaatgattctcttattacattggaaagtgacaaatcaagcgttgaggtaccctccactcacgagggagttattgaaaaaataaatgttaaagtaggagataaagttaataagggagacttaattcttagtctgaatgcagaaagtgctactgaggaaaaaaaagaagcagtcagtgagaaaaaaaaagtagaaaagacagaaataaaagaaatcaaacctcaaaaaccaaaagaaataattcctatagcgcctacatcacaaacaagcagtaagtcagctagtccaaaagttagaaaatttgcaagagagttaggtgccaatatagttgaaatacctggatctcaaaggagtgggagagtttccgaggaagatgttaaaaattttgtaagatctcaggttacagtcagcggtgggaaaatagaaaagaaagttcataaagaagagtatccgcacgaagagtttggtgaaatcgaattaaaagatatacctagagttaaaagattatctggtcctcacttagtaagatcttggactgaaattccccatgtcacacagcatgatgaagttgatataacagaaatggaacaatttagatcatcgttatatgattactatactggtgagaaaataaaagtgacgcctcttgcttttatagcaaaagctcttgtaagtgccttgaagaaatttccaaattttaatgcttcaattgatagtgctatcgacaaaattatctataaaaaatattttcacgttggttttgcagtagatactcctcatggtttaatggtacctaaaataagagatgttgatcaaatgagtataaaagaaattggaagtgctttaagaaaaacaagtagactttgcagagatttgaaaattgataagaaggaattttttggcggttcaatgacgatatcaagcttgggtggtattggaggaactttctttaccccgataataaatcctcctgaagtagcgatacttggagttggaaaaagttttgacaggctagtaaaagttaaagacaaatttgtttcaagaaaaattttaccaatttcactttcatacgatcatagaataattgatggtgctgagggtgctaggttctgtgtttatctcggtaaatgccttggcaaagactttgctttcaagcttgctgtatag

SEQ ID NO: 233726 - DNA, 913 bp, Unknown
  Bacterial polypeptide expressing nucleotide sequence isolated from the Sargasso Sea
tatgtcggaaaataaaaaaatatttgctacacctaaagtaagaaaatttgcaagagagcttggagcaaatatagctgagattgaaggatcagaaagattaggaagaataagcgaagaggatgtcaaaaattttgtaaataaaaatttaaataaatctcaaaaaaaagaagatattaaaattaaatcagaatttgatcattctgattttggtgatgtggagataattgatataccaaggataaaaagattagctgctccacatctttcaaattcctggaatacaatcccacatgttactcatcatgatgaagctgatataactgaactagaggacttcagagcaaaattaacagatgcagtttcgggcgataaaattaaaattactcctcttgcttttatagcaaaagcattaactaataatttaaagaaatttcctacatttaattcttccatcgacaatatcagcgaaggaaagattactttgaaaaaatatattcatattggtattgctgttgatactgctcatggtttaatggttccaaaaataagaaatgtggataagaaaaaaataaaagaaatttcagaagaattaaaaaatgtaagtgaacttagtagaaatttaaaaataaataaaaaggaattttttggagggtcaataactataacaagtcttggaggtattggtggtacttattttacacctataataaattatcctgaagttgcaattcttggtgttggtagatcctataaaaaacaaatttttgtaaaggataagtttcttgcaagaacagtgttgccaatgtcactttcatatgaccatcgaattatagacggcgcagaagcagctaagttttgtaattcattaaaagaaaatttaggaaaaaattttgcctacaatttagccttttaa

SEQ ID NO: 233727 - DNA, 1315 bp, Unknown
  Bacterial polypeptide expressing nucleotide sequence isolated from the Sargasso Sea
cgggcgagcgggcttccggagcacgtcgtgataccgatgccggcgctgtccccgaccatgtccagcggcgggatcgcgaagtggcacgcggcgatcggggacgaagtgcgcgcgggcgacgtgttggcggacgtggagacggataaggcgacgatggcgatggaggcgacggatgatgggttcctggcggcgatattggtggaggaaggggcgacggacgtggaggtggggacgccggtgtgcgtcatgtgcgaagacgcgggagacgtcgcggcgtttaaagattacgagagctcggcggcgccggtggtgaaggaagaggcaccggcgagcgaggtggcgtcgagcgcgtcgagcgcgagcgcggtggtgcgagaggaagcgccgaaagtcgcgcggtcgtttgacagagcgagcggcgcgcgcgtgttcgcgtcgcctctggcgcgtcggttggccaacgaacgaggtgtgagtttggacgcggtgcgaggcaccggcccgaatgggcgtgtgatcgccgaagacgtgctcgcggcgcgcgcggtggacgcgtccgtcggcccgacgcaaacggtggtggttgaacatccgctggccaagttcttcccagactttgaagacgtcagcgtgaccgccatcaagcgcgtcaccgcgcagcgtttaacggagagcaagcaacaagtgccgcacttttacgtcacggtcgacgttcgtctcgatcacatgatgaacattcgcaagacgctcaacgatcagctcgccaacgacaagtcggcggagggcaccaagattagcgtgaacgatctcatcatcaaggcgagcgcgaaagcgctcttggcggtgcccgatgtaaacgctagctggctaggtgataaaatccgcaagtacaagaaagcggacatctccgtggctgtgcaaaccgagcgcggattgatggtgcccatcgtgcgttcggcttgttgcctcgggctcaaatctattagctcagaagtcaaggcgctcgccggacgcgcgcgcgatggaacgctcacgccgcacgacatgactggtggtacgttcaccatcagtaatctcggtatgtttggcgtgaagagtttcgccgctatagtcaaccctccgcaagcggctattctcgccgtgggtggggcgagaaaagaagtcgtcaaaaactcggaaggaggttacgaagaagtctcggttctgagcgcgacgatgagctgcgaccatcgcgtcgtggacggcgccgtggcggcacaatggttgcaatctttcaaaggatacttggaggatccgatgacgatgctcctctaga

SEQ ID NO: 233728 - DNA, 884 bp, Unknown
  Bacterial polypeptide expressing nucleotide sequence isolated from the Sargasso Sea
aacccaaacaggaagagttctcgccagtcctgcggtcagaaagagagcgcgcgagaatgatgtagacctttccaacgtaaggggttcggggccagcgggcagaatcaggcatgcagatcttgacgcatttatcgctgctggaggggcagtctctggtgcaccgcctatggcatattcgctgaagaggacagaagtgacgccagtgaaagttgtgggcctaagaagaaagatctccgagcagatgagtctgtctaagagcaggatccctcatttctcatatttcgaggaagtggatatcacagaattggagaatctgagacagattctaaattccacaagggacgaaacccagcctaagttaacatatctgcctttcataatgctagcattggcaaaaataatgcccgatcacccagagtgcaatgctcacttcgatgatgaggccggagtggtaaacaggaatgcagcagtaaatctgggaatagccacgcaaacggatagaggcctgtatgtccccgtggttaagcacgtcgagtccatggatatctggaagacggcttctgaaatgcagagggtctctggctctgcaagagacggaagtgcgagcttggacgaattaacaggatccacatttacaattacaagtcttgggagagaagggggattgggggccacgcccatcatcaaccatccggaagttgcaatccttggagtgcacaaggccagagagatgccggttgcgcgtaatggtgcaatagtcattcgccggattatgaacctatcaagcgcctttgaccatagagtagtcgatggcgccgatggtgcatcactcattcagcacctaaagagaatgctggagaacccggcactcatattcatgtgag

SEQ ID NO: 233729 - DNA, 1110 bp, Unknown
  Bacterial polypeptide expressing nucleotide sequence isolated from the Sargasso Sea
agtactggtgaaagtgggcgacaaagtcacgctggaccagtctttattatcggtagagggcgacaaggcttcgatggaagtaccagcagctcaggccggtactgttaaagaaattaaagtcaaagccggcgataaagtaaaaaccggctcactgattatggtgtttgaagctgaaggtgctgctgttgcagcgccagcagctgctcctgctcctgcgcctgttgccgcaccagctccggttgctgcggctccggccactcctgcagctgcagagttaaaagaagttcaggtgcctgatattggtggcgacgccgttgaagtaacggaagtgatggtgaaagtcggtgacactgttgccgctgatcaatcactgttgtcggtggaaggtgataaagcttcaatggaagtgccagcgccatttgccggtactgtgaaagaaatcaaagtcaaagtaggcgacaaagtacaaacaggctcttcagtctttgtatttgaagtggctggcagtgctccatcagctgcagctgctgcggtagcggctcctgctgctgttgctgcgccagctccagtagcagcgcctgcgcctgcagcatcagctccggttgcagcgccatctgcatcagcaagcgaatttactgagaaccaggcttatgctcatgcttctcctgtggtgcgtcgtttagcccgtgagtttggtgttgatttaagcaaggtcacaggcacagcgcgtaaaggccgtgtgcagcgcgaagacgtgcaaaattatgtgaaaaatattattgcgcaagtggcatcaggcaaaggcaacgtcaccagcagtagcaatagtgtaggttttgatttaatcccttggccaaaagtggatttcagcaagtttggcgctgtggaagaaaaacctctgtcgcgtattcagaagttatccggtgcaaacttgcatcgcaactgggtgcgcattccacatgtgactcagtttgacgaagcggatatcacaggcctggaagaattccgcaaagagcaaaacgcgctggctgataaaaagaaaatgggcgtcaaatacaccccattggtctttattatgaaagccgttgctaaagctcggaagagttccaa

SEQ ID NO: 233730 - DNA, 1258 bp, Unknown
  Bacterial polypeptide expressing nucleotide sequence isolated from the Sargasso Sea
aatgaagcaagtaattaaaattccaagcctaggtgatgcagaaaatactgaagttatagaaatttgtgttaatcctggtgatagtgttggttcagaagattcgattgttgttcttgaatccgaaaaagctgcaatggatgttcctgcttctaaaaatggagttgttaaaaaggtccttgtaaaaattggagatgaggtaaaggagggagatgacttcttagaaattgaaattactgaagaagaaattaaagaggatgattccgataaagatgttaaaaatgatattcatgaagatgatcaacccgaagtagaggaaatcatcgaagagaaacaagttgaagaaattattgaagaaccaagatacgaatctaccgcatctgggatttatgctggtcctgcagtaagaaaactggcacgtgaatttggcattgacctaaataaggtaattgccacaggtccaagaaatagaattctcaaggaagatcttcataaatttgttaaatcaaaacttgaaggttcatcaactggaatacctaaaatgccaagcatcgatttttctgagtttgggaatgtcgaagaaattgatttgactaaattccaaaaaacttcagctcttaatcttcaacaatcatgggtaacaatacctcatgtcactcagcatgatgaaacttcaatagacgaactcttaactgtcagaaaatctctaatgaagaaacacaaggtcaaggtttcacctttagctttttttgctaaaggtatttgtaagcttcttgaggagtttccattattcaatgcatcgatagacatgaataccatgaaaattataaaaaaagattatattaatcttggtattgctgttgatacaccccaaggcttaattgttccaaacataaaatcagcaaataagatgtctataagagaaatatctgacgaaatagccaggcttgctgctctatctaaatcaaggaagatcaaagtagatgatttgaagggatcaacttttacaattagctcacttgggagttttggtggtaaattttttacacctattatcaatccgccagaagtagctatattaggtatttcaaagagttatgattcagttttgctaaaagataaaaaaccagtaagtacaaccaatctcccaatatctctttcttatgatcataggattataaatggagttgagggtgttaaatttacaacaagattttgtgaaattctttcagatattagctactttaagaagaatttttaa

SEQ ID NO: 233731 - DNA, 340 bp, Unknown
  Bacterial polypeptide expressing nucleotide sequence isolated from the Sargasso Sea
tctgataagcaaagaattaaaagaagtaagtgaactttgtagaaatttaaaaattgataaaaaagaattattcggtggctcaatgacgattacgagtttaggtggtataggaggttcattttttactcctataattaattatcctgaagtggctatattaggagtaggtagatcagaaaaaaaacaaatttttatgaatgggaagtttcaaactagaactatgctaccaatttctttatcttatgatcatagaattattgatggagctgaagcagctaggtttaacaatgacttaaaagaaaacttaggcaaaaattttgcttataaactagctgtttaa

SEQ ID NO: 233732 - DNA, 1261 bp, Unknown
  Bacterial polypeptide expressing nucleotide sequence isolated from the Sargasso Sea
atgatcaaggaaataacactaccagacctaggcgaggggatagacggtgctgaggtaagcgagatccctgtttcaaagggagacactgtttcgccggatgatacaattctagtattggagtcagataaggcatcaatggagatcccgtctgaagtttctggtacgatctctgagatattaatttcttcaggagatgaagtaatcacaggacaactacttttaaagatagaggtagcggatggtccaaaacaaggtgaacaaataaaagaagaagttgtattgccggcaccagagccagaacccaaagatgaaccggccacgacccaagagacagctcctcagttagagactcagcccccttctaccaaaggggcttttgcgtctccaggtgtgagaaggctatcgagagagttaggtataaacctagagggcattaatggctcagggccaaaaggaagaataacaaaagatgacctcaatgcttatataaaacttcaaatggcaatgtcatcagggcctcttcctcgggttaaaaaagaagtagatttttctacttgggggaatgttgaggttgaaaagctaaccagggttaataaaataactggggagcggcttcagcaagcctggcaagaaatcccacacgtaacccaatatggcgatgcagatataaccgaactagaaaacttacgtaagaacctaaaagatgacggcgctaaaaaaggggttaaggtgacctttctcccccttctaatgaaagcagttgccgttgtccttaaagaaatgcctaggttcaatagctctcttgatcacacgggccaaaatctgatccttaaaaactattatcatattggaatagctgttgacactccaagcggccttaccgttcctgtagttaaagatgtggataaaaaaggcattttggatctttcaaaagagttgatggatgtaagcgaaagagcaagggaaaaaaagctaaaccctgatgatatgaacggtggaacgtttacaatatccagtcttgggggtattggaggcacaaacttctccccaatagtaaatccgcccgaggttgccataatgggtgtttcaaaaagcgaatggaagcctgtctatgaccggaatgcaaaagagtttattgcacgatatattatgccattttctatttcctatgaccacagggtcatagacggtgcttatgcagctgctttttcagaaaggttttctcaggttttaaatgatataaaaacctttaaagagtaga

SEQ ID NO: 233733 - DNA, 919 bp, Unknown
  Bacterial polypeptide expressing nucleotide sequence isolated from the Sargasso Sea
aatgaaagatgtagacgataaaaataatttaaatgttctagcaagccccaaagctagaaagtttgcaagagaattaggtgtcaatgttagagatgttgttggtagtgaaagattgggaagagtgattgaagaggatataaaagaatttgtttcttcaaaatttaataaaaaagaaaatattaaaataagtaaagagtatgaacactcagaatttggtaaagttgaaattaaagaaatttcaagaataaaaagaatagctgcaccacatttagttaattcatggaaaaacatcccacatgttaccaatcatgatgaggctgatattactgaaatggaagaatttagaagttctttaaaagacatttattctggcgagaaaaaaaaaattactccattagcttttataattaaagcactagtatcatctctaaaaaaatttccaaatttcaattcttccatcgatgatattgaaaatggtaaaattactttaaaaaaatattttcatattggcattgccgtagatacttctcacggtttaatggtacctaaaatcagaaatgtagataaaaaaaatataaatcaaattagtgaagaattaaaaaaagttagcgaagattgtagaaatttaaaaatagataaaaaagaattttttggaggatcaatcactataactagtttgggtggtataggaggctctttttttacgccaatcataaattatccagaagtagcaatacttggcgttggaagatcttataaaaaacaattatttataaataaaaaatttataactcgtactgttttgccaatttctttatcttatgatcatagaattatagacggcgcagaagcatctagatttaataatgatttaaaagataatcttggaagtaattttgcttataagttagcaatttaa

SEQ ID NO: 233734 - DNA, 1105 bp, Unknown
  Bacterial polypeptide expressing nucleotide sequence isolated from the Sargasso Sea
gagtcattttactcaggtcatcttctacatattggagtagatgaggaaaaatcagcaaaagtagatactattttagctataattggtgataaggaagttaatattcaacaagttctaacttcattaaaaaaacctaatgatgtcgaattaaaagataagactcaaaataaagttgtaattgatgttaaggctgaagaaaatattgataagaattttgagaaaattttaaatgaggatttatcttcaacagataataaagcaaggatttttgtttcccctttagcaaaaaaaattgcttttgaaaaaggattaaatctatcaaaaattaagggaagcggtgataatgggagaattataaaaagagatgttgaaaattatgttggtgattccacagaaacaaaaagtttagtttcatatggaaccgaatcttccaatgaatttccaaattctcaaatgcgaaagacaattgcaaaaagactttcagagtcaaagttctcagcaccccattactatttgggggtagaattcaatatggataatttaatctcttttagaattcagcataataactctactggtttaaaaatatcctttaacgatattatactaaaggcatctgccaaggctctaaagttacatccagaagtaaatgctcagtggtcacatgaaaagatagttcaatttgatcatgtccatatgggttttgctgttgcagttgatgacgggttagttgtaccagtcttaaaatttgtaaatgaaatgcccttacaagaaatatcaaagtctgtaaaagatttagcagaaagagcaagatcaaaaaaaattgtaccttcagaaatggaaggaagcactttcacgatttctaatcttggaatgttcggaattaccgagtttacatctattattaatcaaccaaactcagcaattttatctgttggcgcaatagttcaaaagccaattgtaaaagatgaaaaaataattattggtaatacaatgaagcttacattagcctgcgaccatcgtgtagttgacggagcaactggttcagcttttttaactaccctcagaaattttatcgaaaatcccgttggaattttattatgat

SEQ ID NO: 233735 - DNA, 1267 bp, Unknown
  Bacterial polypeptide expressing nucleotide sequence isolated from the Sargasso Sea
aatgtcaaagaaagatataaaagttccaaatattggtgaattcaaagatgtggaagtcatcgaagttttaattaaaaaaggtcaaaaaataaaaaagaatgatccactgataactatagaaagtgataaatcaagtgtggaaataccatcttctgatgatggaaccataatttctttgaatgttaaaattggagacaaggtatcggaaggtgataaaattattgaaattgaaagtgagaaagaaataaaagaaacaagcgctcaagaattaccaaaaagtcaattaccaaaagaaataaaaaaaaatgatgtaaaaaaaaccaatgagtctgaaaatataatagttaaagatttttctacaaaagcttctgcttcaccaaaagttagaaaatttgcgagagaacttggagttaatatcaacaaagtcccaggtagtgaaagacaaggtagggttaccgagagtgatgtaaagttatttgttgcaactaaatctgataaaagtttcaaagatcaaaatacaactgaacaaaaaattgaactagagtattcccattcagattttggagaagtagatattaaagacattcccagagtgaaaaagttgtcgtctaaatatttaatgaactcttggacaaaaattcctcatgtaaccaatcatgatgaagctgatataaccgaattagaggaatttagaacttctcttacggacgtatatactggtgaaaaaaaaaaaattacaccattagctttcatcgtaaaagcattaacaacatcattaaaaaaatttccaaattttaatacctcaatcgatcaaattgaaaacggtaaaatgactgttaaaaagtattatcatgttggcatagcagtggatacaccacatggtttgatggttcctaaattaagaaatgcagataataaaaatatttctttaataagcacagaattaaaaaaaatcagtcagcaatgtagagatcttaaaattgataaaaaagagttattcggaggttctatgacgataactagcctagggggaattgggggatctttttttaccccaattataaattatcctgaagttgctattttaggagtaggaagagcagaaaaaaaacaagtattcatggatggaaaatttgtaacgcgtactatgttgccactttcactatcttatgatcatagaattattgatggtgcggaggcagctcgatttaataatgatttaaaagaaaatcttggtaaaaattttgcttataagttagccgtttga

SEQ ID NO: 233736 - DNA, 1261 bp, Unknown
  Bacterial polypeptide expressing nucleotide sequence isolated from the Sargasso Sea
tatgactagtacaaaaattttagttccagatatgggtgacttcaaggatgtagagattattgaagttctagtcaaagagggtcaacaaataaaaaaaaatgattctcttattacattggaaagtgacaaatcaagcgttgaggtaccctccactcacgagggagttattgaaaaaataaatattaaagtaggcgataaagttaataagggagacttaattcttagtctgaatgcagagagtgctactgaggaaaaaaaagaagcagtcagtgagaaaaaaaaagaagagaagacagaaataaaagaaataaaaactcagaaaccaaaagaaattattcctgttgtgccttcatcacaatcaggtagtaagtcagctagcccaaaagtcagaaaatttgctagagagttaggcgccaatgtagttgaaatacctggttctcaaagaggtggtagagtttctgaggaggatgttaaaaattttgtaagatcccaagtaacagtcagcggcgggaaagtagaaaagaaagttcataaagaagagtacccacacgaagagtttggtgaaatcgaattaaaagacataccaagagtaaaaaggttgtctggtcctcacttagtaagatcttggaccgaaattccccatgtaacgcagcatgatgaagttgatattacagaaatggaacaattcagatcttcattatatgactactatactggtgagaaaataaaagtaacacctcttgcatttatagcaaaagcacttgtaagtgctttgaaaaaatttccaaattttaatgcctcaattgatagtgctaacgacaaaattatttataaaaaatattttcatgttggttttgcagtagatactcctcacggtctaatggtgcctaaaataagagatgttgatcaaatgagtataaaagaaattggaagcgctttaagaaaaacaagtagactttgcagagatttaaaaattgataaaaaggaattttttggtggttcaatgacgatatcaagcttgggcggcattggaggtactttcttcacaccgattataaatcctcctgaagtagcgatacttggagttggaaaaagttttgatagattggtaaaggttaaggacaaatttatttcaagaaaaattttacctatttcactctcatatgaccatagaataattgatggtgcggagggtgcaaggttctgcgtttatctcgggaaatgtctcggcaaagacttcgcttttaaacttgccgtttaa

SEQ ID NO: 233737 - DNA, 511 bp, Unknown
  Bacterial polypeptide expressing nucleotide sequence isolated from the Sargasso Sea
aaggctttagttgcatctcttaaaaaatttcctagttttaattcttctatctacgaaatcgagactggaaaaatgaccttaaaaaaatattaccatattgggatagcagttgacacaccaaatggattaatggttccaaaaataagaaatgcaaataacaaaaaaatttctctcataagtaaagaattaaaagaggtaagcgaactttgtagaaatttaaaaattgataaaaaagaattgtttggtggctcgatgacgattacgagtttaggtggtataggaggttcattttttacccctataattaattatcctgaagttgctatattaggagtaggaagatcagaaaaaaaacaaatttttatgaatggtaagtttcaaaccaggactatgcttccaatatctttatcttatgatcacagaattattgatggtgcagaagcagctaggtttaataatgatctaaaagaaaacttaggcaaaaattttgcttataaactagctgtctaat

SEQ ID NO: 233738 - DNA, 895 bp, Unknown
  Bacterial polypeptide expressing nucleotide sequence isolated from the Sargasso Sea
tcaccaaaagtcagaaaatttgcaagagaacttggtgttgatattagtaaagttgaaggcagtgaaagactaggaagagtaactgaaagtgatgtaaagtcatttgtcgcaaataaacctgagagaaattctgaaaaagaattcaaaaaagatgaaacgatagaactagaatatcctcactctgaatttggaaaaacagaaataaaggatattccaagagtgaagagactttcgtctaaatatcttataaattcttggaccaatattccccatgtgaccaatcatgatgaagcagatataactgaattagaggagtttagaacatctcttacagatatttacactggagaaaaaaaaaaaattactcctttagcttttatcgtcaaagcattaactgcatcacttaaaaaatttccaaattttaattcatctatagatgaaattgataaaggaaaaatgaccttaaaaaagtattaccatattggaatagcagtagatacgaagcatggacttatggtgccaaaactaagaaatgctgataataagaatatttcattaattggcaacgaacttaaaaaattaagtgatcagtgcaggaatcttaaaattgataaaaaagaattatttggtggttccatgacaataacaagtctaggaggtattggcggttctttttttacacctataattaattatcctgaagttgcaattttgggagttggcaaatctcaaaaaaaacaaatttttattgatggaaaatttattacacgaacaatgttacctttatctttatcatatgatcacagaataattgatggagctgaagcagctcgatttaacaacgatttgaaagacaatcttggaaaaaattttgcttacaaattagctgtgtaaa

SEQ ID NO: 233739 - DNA, 565 bp, Unknown
  Bacterial polypeptide expressing nucleotide sequence isolated from the Sargasso Sea
aacttccgtaaaaatttaaaggacggttacacaggtgagcaaaagaaaattaccccactagcttttataattaaggcattagtgaagagcatgatgaaatatccaatcttcaattcatctataaaagacgaggaaaattatcaaataatattaaaaaaatattttcatatcggtattgcagtagatacaccacacggtctcatggttcctaaaataagagatgccgataaatttaagatatctgacttatcgcaaaaactaaaagaagtaagtgataaatgcagaaatctaaaaattgataaaaaagaatttcaaggtggctcaataactatcactagtcttggaggaataggtggaacattttttacacccataataaaccctcctgaggtagctatattaggaataggaaaaatatttcaaaaagataaaagcgagaaactgatacttccactgtcattatcctatgaccacagaattattaacggagcagatgctgctaggttttgtaatgaaataaaagaaaacttaggtaaaaatttcgcttacaacctctcaatataat

SEQ ID NO: 233740 - DNA, 637 bp, Unknown
  Bacterial polypeptide expressing nucleotide sequence isolated from the Sargasso Sea
ctgcaccgcaactgggtcgtcatcccgcacgtcacgaaccacgacgacgcggacatcactgacctggaagccttccgcgtgcagttcaacaaggagaacgagaagagtggcgtcaaggtcaccatgctcgccttcatgatcaaggccgccgtggccgcactcaagaagttccccgagttcaacagttcgctcgacggcgaccagctggtgctgaagaactacttccacatcggctttgcggccgacacgcccaacggcctcgtggtgcccgtcatccgcgacgccgacaagaagggcatcgtccagatctcgcaagagatgggtgacctggccaagaaggcgcgtgacggcaagctcggccccgccgacatgacgggcggctgcttctccatcagctcgttgggtggcattggtggtcgttatttcacgcccatcatcaatgcccctgaagtcgccatcatgggcgtgtgcaagagcagcctggagcccaagtgggacggcaagcagttcgcaccgcgcctgatgctgcccctctccctgagctgggaccaccgcgtgatcgacggcgccgccgccgctcgcttcaacgtgtactttgcctcgctgctggcggacttccgccgcatcgtgatgtaac

SEQ ID NO: 233741 - DNA, 1258 bp, Unknown
  Bacterial polypeptide expressing nucleotide sequence isolated from the Sargasso Sea
aatgaaagaaatagagattaaagttccaaatatcggtgattttacagacgttgaggtgattgaagtgttagtcaatcaagggcaaatgattggaaaaaatgatccattaataacaattgagagtgataaatctagcgttgaaataccatcaaattttgagggaaaaattaaatctttaaaattaaaagttggagacaaagtttcagaaggtgatttaattttaattttagaaagttcatcaaataaaaatgagattaaagaaaagccaaaaattgaaaaacaatctgaaccaattatagaaacaaaatcagagttagaacaagtacctgtgtaccaaaaacaagttacaggcgtctcttctgcaagtccaaaagctagaaaatttgcaagggagcttggagtaaatattaatgaagtattaggtagtgaaaaagatggtagagttgtcgaggatgatattaaaaaatttgtttctttaaagtcagtaaacaataaagaaattaaagaaatcaaacccagcaaaatcaagaatgaatatgaacatgcagatttcggaaaaatagagattaaagaaataccacgagtaaagaaactagcatcaacatatttaaccaactcttggacaaccattccacatgtgaccaatcatgatgaagcagatataactgaaatggagggctttagaagctctttaactgatatttatactggagaaaaaattaaaattacacctttggcttttatcataaaagcgcttgtagcttctttaaaaaaatttccaagctttaactcatcaatagatgaaattgaaactggaaaaatgactgtaaaaaaatattatcatataggaattgctgttgacacacccaatggattaatggttccaaaaatcagaaatgcaaataataaaaaaatttcgttaattagcaaagaactaagagaagttagtgaactttgtagaaatttaaaaatagataagaaggaattatttggtggatcaatgacaattacaagcctaggaggaataggtgggtctttttttacgccaataataaactaccctgaagtagctattttaggtattggaagatcggaaaaaaaacaagttttcttaaatggtaagtttcaagtcagaacaatgttgccactttcactatcatatgatcatagaattatcgatggagctgaagctgctaggtttaataacgatttaaaagaaaatctaggaaaaaattttgcttacaagttagctgtataa

SEQ ID NO: 233742 - DNA, 696 bp, Unknown
  Bacterial polypeptide expressing nucleotide sequence isolated from the Sargasso Sea
cgaaattaaaagatataccaagagttaaaagattatctggtcctcacttagtaagatcttggactgaaattcctcatgtcacacagcatgatgaagttgatataacagaaatagagcaatttagatcatcattatatgattactacactggtgagaaaataaaagtgacacctcttgcttttatagctaaagcacttgtcagtgctttgaagaaatttccaaattttaatgcttcaattgatagtgctaatgacaaaatcatttataaaaaatattttcatgttggttttgcagtagatactcctcatggtttaatggtgcctaaaataagagatgttgatcaaatgagtataaaagaaattggaagcgcgttaaggaaaacaagtagactgtgcagagatttaaaaattgataaaaaggaattttttggcgggtcgatgacgatatcaagtttaggtggcattggaggtactttctttaccccaataataaatcctcctgaagtagcaatacttggagttggaaaaagttttgatagattagtaaaagttaaagacaaatttgtttcaagaaaaattttacctatttcactttcatacgaccatagaataattgatggcgcggagggtgctaggttctgcgtttatctcggtaaatgccttggcaaagactttgctttcaagcttgctgtataga

SEQ ID NO: 233743 - DNA, 748 bp, Unknown
  Bacterial polypeptide expressing nucleotide sequence isolated from the Sargasso Sea
aaaagaaaaaattattaaaagtgaatatcaacattcatattttggagaagttgaaattaaagatattcctagagtaaaaaaaatagctgctccacatcttgtaaattcgtggacaaacattccacatgtaactaaccacgatgaggctgatattacagaaatggaagaatttagaatctcaattaaagataattatacaggagaaagaataaaaattactcctcttgcatttattataaaagcattggtactttcactaaaaaaatttccatcatttaattcatcaattgatgatattgaaaatggaaagattacttttaaaaagtattttcatgttggtatcgcagttgatactcaacatggacttatggttcctaaaattagagatgctaatcaaaaagatatcaatcagttaagtgaggaattaaaaaaagtaagtgatgattgtagaaatttaaaaattgataaaaaagagttctttggaggatcaatgactatcacaagcttaggtggcataggtggttcgttttttacaccaataattaactttccagaagttgctatacttggcgttggtagaagttataaaaaacaggtatttattgatggtaaatttgttccaagaaccatgcttccactatctctctcatatgatcacagaattatagatggtgctgaggctgcgaagtttaataacgaattaaaagataatcttgggtctaattttgcatataacttgagtaaatga

SEQ ID NO: 233744 - DNA, 902 bp, Unknown
  Bacterial polypeptide expressing nucleotide sequence isolated from the Sargasso Sea
tgcaagcccaaaagcaaggaagtttgctagggagttaggcgtagatataaatgaagtttcaggtagcgaaagaattggaagagtaattgaaaaagatataaagcattttatatcttcaaaaataaataaatctaataaacgtgaaaatgaaataaaaaataaatctataaaaatggaatataaacactccgaatttggagagattgaaattaaagatattccaagagtaaaaaaaatagctgctcctcatttaagtaattcttggacaaatatccctcatgtcacaaatcatgatgaagcagatataactgaattagaagaatttagaagttcattgacagacagttttacaggagaaagaaaaaaaattactcctttagcctttataataaaagcaattgttctatctttaaaaaaatttccaagatttaattcatcaattgatgatattgaaaatggaaaaattacattaaaaaaatattttcatataggtatagcagtggatactccacacggtttaatggttccaaaattaagaaatgcaaatgaaaaagatattaatcaattaagcatagaattaaaaaatgtaagcgatgagtgtagaaatttaaaaatagataagaaggaattttttggaggatccatgacaataacaagtttaggaggaataggtggatcattttttacaccaataattaactatccagaagttgcaattcttggtgtaggtagatcttataaaaaacaagtatttttggatggaaaatttatgcctcgaacaattttacctttatcattatcctatgatcatagaattattgatggcgcagaagcagcaagattcaataacgatttaaaatataatttaggtccaaattttgcatataatttagccaaatgat

SEQ ID NO: 233745 - DNA, 685 bp, Unknown
  Bacterial polypeptide expressing nucleotide sequence isolated from the Sargasso Sea
gaccttcctagagtgaaaaagttatcaggacctcaacttgttagatcatggactgagattcctcacgttactcaacatgatgagatagatataactgaaatggaacagtttagaacaactttaattgataactatactggtgaaaggatcagaataagtcctttagcatttataactagagctgtagttaatgcattaaaagaatatcctaattttaattcatccatagatactgctactaacaaattaatatttaaaaaatattatcatgtcggttttgccgttgatacaccacatggtttgatggttccaaaaatgagaaatgttgatcaaatgggtttaaaagaaatttatgaagaacttaaaagagtaagtaaattatgtaaggagctaaaaattgataaaaaagaattctttggtggttcaatgacaatatcaagccttggtggtatcggaggaaattttttcacaccaattataaatcctcctgaggtagcaattctaggagtgggaaaaacatttgaaaaagtgaagaaagtaaacggtcagtttatcgaaagaaaaatattaccaatctctttgtcatatgaccatagagttatagatggtgctgaaggtgcaagattttgtgttcacttatctaaaagtttaggtaaagattttgcattcaagctagctgtctaaa

SEQ ID NO: 233746 - DNA, 438 bp, Unknown
  Bacterial polypeptide expressing nucleotide sequence isolated from the Sargasso Sea
taatttttaaaaaatattttcatataggttttgctgtggatacgccccatggtctgatggtgcccaaaataagaaatgttgatgaaatgaatttgaaagaaatttttgaagaactacagagagtaagcaaactatgtaaagagctaaagatagacaagaaagaattttttgggggttctatgacaatttcaagcttaggaggtattggtggaaacttttttacaccaataattaatcctccagaagtagcaatacttggggttggaaagacatttgaaaaaattagaagggttaatggtcggttcattgtaagaaaaatgctaccggtatcactatcttatgatcatagagtcatagatggggctgaaggtgctaaattttgtgtgcacttatcccaaagcttaggtaaagactttgccttcaagttggctgtttaaa

SEQ ID NO: 233747 - DNA, 697 bp, Unknown
  Bacterial polypeptide expressing nucleotide sequence isolated from the Sargasso Sea
aatagaaaaaaaagatcttcccagagtgaaaaagttatctggtcctcaacttgttagatcttggactgagattccacacgttactcaacatgatgagatagatattactgaaatggaacagtttagaacaacattaatcgataattattctggtgatagaataagaataagtccattggcatttataactagagctgtagtaaacgcacttaaagagtatccaaattttaattcttctatagatcctgagaacaataaattaatttttaaaaagtattaccatgttggttttgcggttgatactccgcacggtttgatggttccaaaaattagaaatgttgatcaattaggattaaaggaaatttatgaagaattaagaaaagtaagtaaacaatgtaaagagcttaaaatagataagaaggaattttttgggggttcaatgacaatttcaagcttaggaggtattggaggaaattttttcacaccaattattaatcctccagaagtagctattttaggtgttggtaaaacttttgataaaattaaaaaagttaacggtcaatttattgtgagaaagatgcttccaatatctctctcttatgatcatagagtaattgatggtgctgaaggcgcaagattttgcgtacatttatctaaaagtctaggtaaagattttgcattcaagcttgcagtttaa

SEQ ID NO: 233748 - DNA, 313 bp, Unknown
  Bacterial polypeptide expressing nucleotide sequence isolated from the Sargasso Sea
ctaaactgtgcaaagatcttaaaattaataaaaaagaatttttttggtggatcaatgaccatttcaagtttaggaagtataggtggcagtttctttacaccaataattaaccagccagaagtcgctattctaggtataggtagggcagaaacaaaacaagttttggttggagataaatatgaaaacaaaataatgcttccattgtctctttcctatgatcatagagttatagatggcgcagaaggagctcgtttttgcactcatttacgagaaagtttaggaaaagattttgcctataaattagcggtatagt

SEQ ID NO: 233749 - DNA, 502 bp, Unknown
  Bacterial polypeptide expressing nucleotide sequence isolated from the Sargasso Sea
tgtagtaaaagccttaaaagactatccaaatttcaattcttcattggatttaaggaaagaaaagcttatatataaaaaatatttccacataggtatagcaatggatacccctcatggcttgatggtccctaagattagaaatgcagataaaaaggatataactgaacttggacgagaactaaaaaaaatttctaaactttgcaaagatctaaaaattaacaaaaaagaattttttggtggatcaatgacaatttcaagcctaggaagtattggaggcagtttctttacacctattattaatcagccagaagttgctattctaggcataggtaaagctgaaaagaagcaagtgtttgtaggagataaatatgaaaacaaaataatgcttcctttgtcattgtcctacgatcatagagttatagatggtgccgagggagctcgtttttgtgcacatttaagagaaagtttaggaaaagattttgcctataaattagcggtatag

SEQ ID NO: 233750 - DNA, 683 bp, Unknown
  Bacterial polypeptide expressing nucleotide sequence isolated from the Sargasso Sea
aattagcgataaaatgaccagctgctggcaaaatattcctcatgttacacaatttgatgaagccaatataactgaactgatgaaattacgtaaaaaacataaccccaaatacgaaaaagaaaacggaaaactcacaatgactgtactgttaatccgtgcagtcgaaaaagctcttgatgaatttcctaacttcaatgcgagtttgaatgataaagagattgttataaaaagttataaaaacataggtatagctgttgatacaccttcaggtttaattgtaccggtaatcaaagaaccaggagaaaaatctttcttagatatagctcaagaattaacatcaattgctgaaaaagccagagatagaagtctttctagaactgacttagaaggtggtacctttacaatctcaaatttaggtggattaggtgttgggcattttaccccaattattaaccacccagaagttgcaatattaggggttggaagaggtagtaaaaaacttcaacttaataaagatggtaaaattgaagaaatattgagcttaccacttgctctttcatatgaccatagaatcattgatggtgctgatggtgcaagatttattaaatctgtcatcaaaaacttagagtctatcagtgaaaaagacatgaaagtcgttaatacgacaggagaaaaatcatgaa

SEQ ID NO: 233751 - DNA, 319 bp, Unknown
  Bacterial polypeptide expressing nucleotide sequence isolated from the Sargasso Sea
ctgcaggatatttcgttaaaagcccgtgaaggtaaactgactgctgcagatatgcagggtggttgtttcaccatctctagtttaggcggcattggtggtacggcctttacgcctatcgtcaatgcgcctgaagtggctattctgggtgtgtcaaaatctgatatcaaacctaagtggaatggtaaagagtttgaaccacgcctgatggtgcctttgtctgtctcttatgaccacagggtgattgatggtgctttagctgcgcgtttcactgcgactctggcatcttatctggcggatattcgtcagatcattatgtaag

SEQ ID NO: 233752 - DNA, 814 bp, Unknown
  Bacterial polypeptide expressing nucleotide sequence isolated from the Sargasso Sea
tcgtatcactcacaaggacgtccagggacatgtcaaagaaagattgagtgcaccatccacgggtcagggtttaactgggaccgttcctcaaattccagaaatcgacttttcacagtttggagagattgaaatcaatccgctttccaggatcagaaaaaaaggcgcagaacacctccaccgagcctggttgaacctgccgatggtgaccaatcatgacgaagccgacattaccgaactggaagcattccggcagaaactcaaaaaagaggcagccgagcaaaacatccggctaacaatgcttgcattcctgcttaaggcaacagcatcaaatcttaaaaaacatcctgatttctgctcatccctgagccctgatggtcaaaacctgattcacaaacgctattgtcacatcggagttgcagtcgataccgaagaaggtctcgtggtccctgtaatccgtgatgtcgatcaaaaaggcgtttttgaactcgctcaaaatctgggggatgtcagtgaaaaagctcgcaaccgtaaactaaaacgtgaagatcttcagggtggttgtttcagtatttccagtctcggtggaatcggaggaaccgcattcactccattggtgaatgcacctgaagtcgcgatccttggcgtaactcgctccaaaatgacaccgaaatggaatggagaggaattcattcccagattaacgcttcccctggatctgacctatgatcatcgtgtcatcgatggtgcagcggccgcaaggtttctggctgacttctgcactcttctttccgatatgaagcgcttgctgctctga

SEQ ID NO: 233753 - DNA, 932 bp, Unknown
  Bacterial polypeptide expressing nucleotide sequence isolated from the Sargasso Sea
ccacagaattataaaaaatatgacagataaaaaaacaatcattagcgcaagcccaaaagtaagaaaattagcaagagagtttggtgctgatatatatcaaattcagggatcgcagagagaaggaagagtttcggaagaagatgtaaagtctttcattaaagattcaatttctggaaaaatcgaaaaaaaacaaaatgaaccattacagaagtacgatcattcagaatttggtgaaattgatgtaaaacctatacctagaattaaaaaaattgctggacctcatttagaaaaatcttggacagaaattccacatgttactcaacatgacgaggcagatattactgaaatggaaaaatttagaaaatctttaagagatttatatactggtgaaaaactttcaattacgcctctagcatttattataagagctgttgtaaaagcactaaaaaactacccaaattttaattcttctctagatttaaaaaaagaaaaacttatctacaaaaaatatttccatgtgggaatagcgattgatactcctcatgggctaatggttccaaagatcagggatgctgataaaaaagatataacagaattaggaaaagagttaaaaaaaataacaaaactttgtagcgaactcaagattgataaaaaggaattttttggtggttcaataacaatttcaagtttaggaagtattggtggaagtttttttacgccaattattaatcagcccgaagtagccattcttggcataggaagagctgagaccaaacaaatatttatgggagatagttatgaaaatagaattatgcttcctttgtcattgtcgtacgatcatagagtaatagatggtgcagaaggcgctcggttttgtgtacatcttaaagaaagtttaggaaaagactttgcttacaaactagcagtgtaga

SEQ ID NO: 233754 - DNA, 502 bp, Unknown
  Bacterial polypeptide expressing nucleotide sequence isolated from the Sargasso Sea
taaggcgacagcagctaatcttaaaaaacatcctgatttctgctcatccctgagccctgatggtcaaaacctgattcacaaaggctattgtcacatcggagttgcagtcgataccgaagaaggtctggtggtccctgttatccgtgatgtcgatcaaaaaggagtttttgaactcgcccataatctgggggatgtcagtgaaaaagcacgcagccgaaaactaaaacgtgaagatcttcagggtggttgtttcagtatttccagtctcggtggaatcggaggaactgcattcactccactggtgaatgcaccagaagtcgcaatcctcggcgtcactcgttccaaaatgacaccccaatggaatggagaggaattcattcccagattaatgcttcccctggatctgacctacgatcatcgtgtcatcgatggtgcagcggccgcaaggtttctggctgacttctgcactcttctttccgatatgaaacgcttgctgctctga

SEQ ID NO: 233755 - DNA, 289 bp, Unknown
  Bacterial polypeptide expressing nucleotide sequence isolated from the Sargasso Sea
cggaaaactgaagccggacgaaatgcagggcggctgtatcagcatttccagtctcggcggcattggaggcattggctttacgcccatcgtcaatgcacccgaggtggcaatccttggcgtgtccagagcgcagacgaagccgtgctgggatcgaaccgcttttgcgccgcgcctgatgctgccgctcgatctttcttatgaccaccgtgtgatcgacggagcggaggcggcccgtatcattgccttcatcgtagccgccctagaggatccaagaaggttgctgctctag

SEQ ID NO: 233756 - DNA, 856 bp, Unknown
  Bacterial polypeptide expressing nucleotide sequence isolated from the Sargasso Sea
ggcgctaaaagactcagttccaagcgagctggtggatgaacagatttccggcgcatcgcagcttgtttccgttccggatactggaagcgcagatagtgtcacgattattgaaatcgccgtatcagtcggtgatagggtatccgaaggagataccctaatcgtcctagagtctgacaaggcttcaatggagatccccgcgccagcgtctggcgtagtgacggccttgagagtgtcagaagggcaacaagttgttcaaggcgacccgatttgcgagatgagcggtggtgacgcgactgtatctgcggagcttgtcccggcgtcggttcgctctgagcccttgaaacaagtgctggcagaggaagctgtcactaaaacagggggcgaaattgaaaaggttgtcgtacctgataccggaaacgccgatggcgtgactgtgatcgagatcagtgtcggtgttggcgacaccgtctcggaaggagacacggtgattgttcttgaatcggataaggcctcgatggaaatcccgtcaccggtcagcggcaaagttttggcgctttccgttaacgaaggcgactccgtcacccgaggtgatccggttgctgaggtcgaagcaacaggtggccctgcgccacaagcgaacaaggctccacagaagtctgtgcaggaagctcctacatccacatcacctcccgctccgattctcgattctcatgtggtagcagagtctactgcgccgtcggtagcctcaagcgtgcacgcaggtccggctgtccgtgcgcttgcccgtgagctcggggtcaatttgacaaaggtctcaccttcggggcctcgcggacggatcacgaaggatgattgc

SEQ ID NO: 233757 - DNA, 717 bp, Unknown
  Bacterial polypeptide expressing nucleotide sequence isolated from the Sargasso Sea
attttgctaaatttggtgaaattgaagagaaaaaactgtctcgcatccaaaagctatcgggtaaaaacttacaccgtaactgggtacaaataccgcatgttacacagtttgacgaagcagatatcacaagccttgaagtattccgtaaagaacaaaacgttttaagcgagaagaaaaagcttggcgttaaaatcacaccactagtgtttgtgatgaaagctgcggctaaagtacttgctgagttcccaacgtttaactcgtcgctgtctgaagatggcgaaagcttgattcttaaaaagtacattaatattggtgttgcggtagatacgcctaatggcttagttgttccagtgtttaaatacgtggacaaaaaaggcattattgagctatctcgtgagctaatggaagtgtctaaaaaagcgcgtgaaggtaagctaactgcatcagatatgcaaggcggttgttttactatttcaagtttaggcggtattggtggtacggcatttacgccaattgttaacgcaccagaggttgctattttaggtgtatctaaatctgaaatgaaacctaagtggaacggtaaagactttgaacctaaattaatggttccgttgtctatgtcgtacgatcaccgcgtgattgacggtgcactagctgcacgctttaccgcaacgcttgctagctacatgagcgacatacgtcaattagtgatgtaat

SEQ ID NO: 233758 - DNA, 708 bp, Unknown
  Bacterial polypeptide expressing nucleotide sequence isolated from the Sargasso Sea
aaaacaaaccacaacaatagaacgttacgaacattctgagtttggcgaaattgagataaaagatattccaagacttaaaaaaattgcaggcccacatttacaaaaatcttggagtgaaattccacatgttacgcagcacgatgaggcagacattaccgaaatggaaaaatttagaaaatctttgagagatctttatactggtgaaaaactttctataactcccttgccttttattataagagctgtagtaaaagctttaaaagattatccaaattttaactcttcattggatttaaaaaaggaaaagctcatatataaaaaatattttcatattggaatagcgatggatacacctaatggcttgatggttccgaagattagagatgcggataaaaaagatataaccgaaataggacatgaattaaaaaaaactgcgaagctttgtaaagatctaaaaattgataaaaaagagttttttggtggttcaattacaatttcaagtttaggaagtattggaggaagttttttcactcctataattaatcagccagaagttgctattttgggcgtaggtagagctgaaacgaaacaagtatttgtaggcgataaatatgaaaataggatcatgcttcccatatctttgtcttacgatcatagagttatagatggtgcagaaggggctcgtttttgtgcccatttgcgtgacag

SEQ ID NO: 233759 - DNA, 642 bp, Unknown
  Bacterial polypeptide expressing nucleotide sequence isolated from the Sargasso Sea
catgagtgaactcatcaaggtgcccgacctcggcggtgaaggcgaggtcattgaaattctggtcaaagaaggcgatcaggtagaagccgaacaatcactggcggtactcgagtcggacaaggcgagcatggagatcccctcgcccaaggccggcacggtaaaagccatcaagttcaagctgggcgacaacctgaaagaaggcgacccgctgatcgagctggacgttgaaggcggcgagcaagccaagcaagacgacagcagcgagcaacccgccaaagccgagagcaaggcagaacagccggccgagccgaaagccgacaccagcgccgagcagcaaaagccggccgctggcggcggcagccgcagtgaagcggtcaaggtgcccgatctgggcaccgacagcgcccgcgtgatcgagatcctggtcagcaagggtgatcaggtggaggccgaccagtcgctgctggtgctcgagtctgacaaggccagcatggagctgcccgcgcccttctctggtgtcatcgagtcgatcgacatcaagctggagcaggacgtcaagaccggcgatgtgatcatgcagatgcaggtcagtggcggcgacagcgaggcccaggcagagtcgcaacccgctgagcagcaagg

SEQ ID NO: 233760 - DNA, 328 bp, Unknown
  Bacterial polypeptide expressing nucleotide sequence isolated from the Sargasso Sea
gctgctgaaatggccgacctggcaagtcgggcaaaagccggtaagttgatgcctgatgaatttacgggtggcacattcacgatttcaaacttggggatgtatcgtgtctccggctttgacgcaatcattaacccgccgcaggtctgtattcttgcagttggcggacttgagaagaaatatcgtgaaatcaacggtaaacctaaatttgtgaaggccatgactttgaccctttccagcgatcatcgcgtgatagacggggcggtggctgcgcaatttttgtcttctatcaaaactttcctcgaaaacccttatagccttgttttgtaag

SEQ ID NO: 233761 - DNA, 682 bp, Unknown
  Bacterial polypeptide expressing nucleotide sequence isolated from the Sargasso Sea
tttgccaagagtaaaaaaattatctggaccacaacttgttaggtcttggactgaaatacctcatgttacccaacatgacgagattgatgttactgagatggaacaatttagaacatccttgattgataattatacgggtgaaaaaatcagaataagtcctttggccttcataactagagcagttgtaaatgctttaaaaaaatatccaaattttaattcatctatcgatagccaaaataataaattagtttttaaaaagtattttcatattggttttgcggtagatacacctcacggcctaatggtacccaagataagaaatgttgatgaaatgggcctaaaagaaattttcgaggaattaaaaagagtaagcaaggcatgcaaagatttaaagatagataaaaaagaattttttggtggctctatcacaatttcaagcttgggaggtattggtggaaacttttttacaccaataatcaaccctcctgaagttgctatacttggagttggaaaaacatttgaaaaaattaaaaaaattaatggtcaattcattacaagaaaaatgctcccaatatccctatcttatgatcacagagtaatagatggtgctgaaggtgctagattttgtgtccacttatcccaaagtctaggtaaagactttgcatttaaactggctgtttaa

SEQ ID NO: 233762 - DNA, 826 bp, Unknown
  Bacterial polypeptide expressing nucleotide sequence isolated from the Sargasso Sea
atagggagaattaccaaagaagatgtacaaaaatttgttaaattatctttaaaaaatatttcgtcaaataatttaaaagccacttccagtggtattccagattttcctgaggttgacttcagtaaatttggaccaattgaaatagaaccactttcaagaattaaaaaaaaggcaggatttaatttacaccgaagttggctaaacttgccaattgttactcatcatgatgaggcagatattacagatcttgaaaattttagaaagtctctcaaggaagaagctttaaaaaagaaattaaaactaacaccactagctttcctaataaaagcttgcgctgttgcaattaataaacatccacactttaattcttctctaacaagtgatcaagaaaatttagttttgaaaaaatatctcaatattggcgttgcagtagatactcaagatggtttggttgtacctgtgattaaagaagttgagcataagggattatttgaacttgcaaaagaattaagagatattagtgagcgtgcgcggtcaaataaattaaatactgatgacttacagggagggtgctttagtatttcaagcttaggtggaataggaggcacatctttcacacctctagtaaatgctccagaggttgctattcttggagtaactcgttctaaaatggtaccagtttggaatgggaaagaatttcttccaagacttatgttaccacttgatttaacttatgatcacagagtaattgacggagcgcaatctgcacgttttatggttgatttatgtaacattctgggagacatgaggagaatggctttatgag

SEQ ID NO: 233763 - DNA, 222 bp, Unknown
  Bacterial polypeptide expressing nucleotide sequence isolated from the Sargasso Sea
tttttacacctattataaatcctcctgaagttgcaatactgggtgtgggaaaaacatttgaaaaaattagaaaagttaatggtcagttcatcgttagaaaaatgcttccagtatcattgtcttatgatcacagggtaatagatggagcagaaggtgctagattttgtgttcacttggccgaaagtttaggaaaagactttgcttttaaattagctgtttaat

SEQ ID NO: 233764 - DNA, 334 bp, Unknown
  Bacterial polypeptide expressing nucleotide sequence isolated from the Sargasso Sea
ggatttagatgcggtggctgaaaaagcgcgtaatcgtacgttaacacgtgaggatttacagggtagtgggtttactatttccaatttagggggattaggcgtaggttcgtttacgccgattgttaattcgcctgaagtggctattttaggattaagtgcaggtcgtaagacaccggtgtttgatgacaagggtaaggtaacccagcgtcttattatgcccatgtccttgtcctatgatcatcgggtaattgatggagcggatggagctcggtttattaatgaagttaaagcgcaatttgaatcgtttagtgaaaccttgttaaaggagatataa

SEQ ID NO: 233765 - DNA, 877 bp, Unknown
  Bacterial polypeptide expressing nucleotide sequence isolated from the Sargasso Sea
cgcggtaagaaagctagcccgcgaattcggtgtcgcactctcgcaggtgaagggcacgggcacccgcgggaggatcctgaaggaagacctgcagcagcacgtggcgcagatccttgccgccgagccatcatcaggtggggctgccttgccggcgattcccgagcaagactacgcgcgctttggtgcaattgagaaaaccgaccgtagccgggttgacaaggtcaccgccgacaacatggtgcgctcctggctgaatgtcccgcatgtgacccagtttgatgacgcggatatcagcgatatggagcgctttcgcaaagacctgaaaaacgaggcagcggatcggagcgtgcgactcacacccttgcccttcattttgaaagcctgtgccgtcgcgctgcgcgagcatccgaaattgaagtcctctttagccgatggcggtgaaacgttggtcatgaagcactactgccacatcggcatggcggtcgatacgccggcgggactgatggtaccggtgctgcgcgatgtcgataaaaagtcgatctgggaactggcagccgagactgcggcctatgcggagcgggcgcgcgagaaacaactcagacctgatgatatgcagggcggggtgttcaccgtgagtagtctcggcgccatcggaggacggggcttcaccccgattatcaatgcgccggaggtggcgatccttggcgtgggccgcgctgctgtgcagccggtctgggatggcgaggtgttccgaccgcaaacgctattgcccctcgcgttgtcctacgatcatcgggttgtgaacggcggtgatggcgggcgtttcctgaccgagctcaccagtttgctgggcgacgtaaagcgcatggtgatgtga

SEQ ID NO: 233766 - DNA, 880 bp, Unknown
  Bacterial polypeptide expressing nucleotide sequence isolated from the Sargasso Sea
aaagttcgaaagtttgcacgagaattaggtgctgatattgttcagatacctggatctcaaaggggtggtagagtaaccgaagaagatgttaaaaagtttgtaagatctcaagtatctgttgatgagggaaaagttgaaaaaaaaatttacaaggacgagtatcctcatgaagcatttggtgaaatagaaaaaaaagatctgccaagagtaaagaagctttctggtcctcagcttgtaagatcatggactgaaattccccatgtaacacagcatgatgagatagatattactgaaatggaacagtttaggtcaactttaatagataattacacaggtgaaagaattagaataagtcctttggcatttataaccagagctgtagtaaatgctctcaaagaatatcccaattttaattcatctatagactctgaaaataataaattaatatttaaaaagtattatcatgttggtttcgctgtagatacgccacatggtttaatggttccaaaaataaggaatgtagatcagatgggtttaaaagatatctttgaggagctaaaaagagtaagtaagttgtgtaaacaacttaaaatagataaaaaagaattttttggtgggtctatgacaatttcaagtcttggaggtattggtggaaattttttcacaccaattataaatccacctgaagtagcaattttaggggttggtaaaacttttgataaaatcaagaaaattaatggacaatttattgtaagaaaaattcttccagtatcattatcatatgatcacagggttattgatggcgcagagggtgcaagattttgtgtacatttatcaaaaagtttaggcaaagattttgcgttcaaacttgctgtataaa

SEQ ID NO: 233767 - DNA, 814 bp, Unknown
  Bacterial polypeptide expressing nucleotide sequence isolated from the Sargasso Sea
gaaggagagtttccggaagaagatgtaaaatcatttgttaaagaatcgatttctggaaaagtagaaaaaaaacaagttacaacttcattgcagtatgaacattccgaatttggtgaagttgaaacaaaacctatcccacgacttaaaaaaattgcaggtcctcatctagaaaaatcttggagtgaaattccacatgtaacgcaacatgatgaagcagatattactgaaatggaaaagtttagaaaatctttaagaaacctttatactggtgaaaaactttcgattactcctttatcttttattataagagctgtagtaaaagccttaaaagattatccaaattttaattcttcattggacttaaaaaaagaaaaacttatatataaaaaatattttcatatagggatagcaatggatacaccgcatggattaatggttccaaaaattagagatgcagataaaaaagatataactgaacttggacaagaattaaaaaaaatttctaaactttgtaaagatctaaaaattgataaaaaagaattttttggtgggtcgatgacaatttcaagtttaggaagtattggaggtagtttttttacacctataattaaccagccagaagtcgcaattctcggcatagggagagccgagacaaagcaagtttttgtgggtgataaatatgaaaataagataatgcttccattatctttatcatatgatcacagagttatagatggtgcagaaggagctcgcttttgcgctcatttaaaagaaagtctaggaaaagattttgcctataaattagcggtatagt

SEQ ID NO: 233768 - DNA, 541 bp, Unknown
  Bacterial polypeptide expressing nucleotide sequence isolated from the Sargasso Sea
taatcaaaacagcaaagaaaagatctcaataaatgatttcattattaaagcttcgtctgttagtctactttcagttccagaatctaatgtaagttggatagaagacgcttttagatattatcaatatgtagatatatcagtagcagttgcagttcctaatggtttgattactccaataattaaaaatgttgaaaataaaggtttagaattaatttcaaaagaaataaaggagttagcttctcgtgcaagtcaaggaaagttatcacctgaagagtatcagggtggcacatttacaatttccaatcttggaatgtatggaattaaaaattttactgccatcattaatcctcctcagagtatgattctagccgtagggaatgctgaaaaaagagcaataattgaaaatgaccaaataaaaattgcatccattatgacagtaactttgtcttgtgatcacagaattatagatggagcaattggggctgagtggttgaaaatttttaaagaaaatatagaaaatccttctttaatgttgttgtag

SEQ ID NO: 233769 - DNA, 436 bp, Unknown
  Bacterial polypeptide expressing nucleotide sequence isolated from the Sargasso Sea
aatttaattttcaaacattacctgaacataggtgtggcagttgatacccaggatggtttggttgtccctgttattagagatgttgaaaaaaaaggattaattgatttagcaaaagagttaggagaagttagtaaaagagctagaaacaacaaacttaaaagcagtgatattgagggaggatgcttcagtatatccagtttaggtggaattggcgggactgcatttactcccttggtaaatgctcctgaagtggctatacttggagtaacgcgctccaaaatggctcctgtttgggatggtaaggacttcaaacctcgtctgatgctgccattggatttaacatatgatcatcgagtgattgatggagcccaggcagcccgattcatggtggacttgtgcaaaatattgggagatatgcggagaatgtctctatgag

SEQ ID NO: 233770 - DNA, 643 bp, Unknown
  Bacterial polypeptide expressing nucleotide sequence isolated from the Sargasso Sea
atggtgcgttcctggctgaatattccgcatgtgacccagtttgatgacgcggatatcagcgatatggagcgtttccgcaaagagttgaaaagcgaggcggcggatcggggcgtgcgactgacgcccttgcccttcatcctgaaagcatgtgcggtcgcgctgcgtgaacacccgaaattgaagtcctccttggccgatggcggtgaaacgctggtcatgaagcactgctgccacatcggcatggcggttgatacgccggcaggcctggtggtgcccgtgctacgcgatgtcgacaaaaagtcgatctgggaactggcggcagaaacatccgctgtgtccgagcgggcgcgggagaaacagctcagacccgatgacatgcagggcggcgtgtttaccgtgagcagtctcggtgctattggtgggcggggcttcaccccgattatcaatgcgcctgaggtggcgatccttggcgtgggtcgcgctgccgtgcagccggtctgggatggcgaggtgttccgaccgcaaacgctattacccctcgcgctgtcctatgatcatcgggttgtgaacggcggtgacggcggccgcttcctgactgagctcaccagtcttctgggcgacgtgaaacgcatggtgatgtgac

SEQ ID NO: 233771 - DNA, 823 bp, Unknown
  Bacterial polypeptide expressing nucleotide sequence isolated from the Sargasso Sea
tctcaaagagaaggtagagtttcggaagaagatgtaaaatcatttgttaaagaatcaatttctgggaaagtagaaaaaaaacaagacacaactttattacagtatgaacactccgaatttggtgaagttgaaacaaaacctatcccacgacttaaaaaaattgcaggcccgcacttagaaaaatcttggagtgaaattccacatgttacgcaacatgatgaagcagatattacagaaatggaaaagtttagaaaatctttgagggatctttacactggtgaaaaactttcgattactcctttaccttttattataagagctgtagtaaaagctttaaaagattatcctaattttaattcttccttagatttaaaaaaggaaaaacttatatataaaaaatattttcatgtaggtatagcaatggatacaccgcatggtttaatggtcccaaaaattagagatgcagacaaaaaggatataacagagctagggctagaaattaaaaaaattgctaaactttgcaaagatctaaaaattgataaaaaagagttttttggtggatcaatgacagtttcgagtttaggaagcattggaggcagcttctttacgcctataattaatcagcctgaagttgctattctaggtataggtagagccgaaactaagcaagtttttgttggcgataaatatgaaaataaaataatgcttcctttatctttgtcctatgatcatagggttatagacggcgcagaaggagcacgtttttgcgctcatttacgggaaagtttaggaaaagattttgcctataaattagcggtatagt

SEQ ID NO: 233772 - DNA, 349 bp, Unknown
  Bacterial polypeptide expressing nucleotide sequence isolated from the Sargasso Sea
aagaagagcattaccgagctgtctcgtgaactgaccgtgatctccaagaaagcgcgtgatggcaagctgactgctggcgaaatgcagggcggttgcttcaccatctccagcatcggtggcctgggtactacccacttcgcgccgattgtgaacgcgccggaagtggctatcctcggtgtctccaagtcctctatggagccagtgtggaacggtaaagagtttatgccgcgtctgatgatgccgatttcgctctccttcgaccaccgtgtaattgacggtgcggatggtgcgcgctttatcaccatcatcaacaacatgctgtctgacattcgccgcctggtgatgtaag

SEQ ID NO: 233773 - DNA, 646 bp, Unknown
  Bacterial polypeptide expressing nucleotide sequence isolated from the Sargasso Sea
gtaagatcatggactgagatacctcatgtaactcaacatgatgaaatagatatcacagagatggaacagtttagaaattcacttatagatcactattctggcgaaagaataagaataagtcctttggcatttattactcgagctgtcattaaagctctcaaaaagtacccaaattttaattcatctatcgatactaaaaataataagttaatttacaaaaagtatttccatataggatttgctgttgacacccctcatggtcttatggttcccaaaataagaaatgcagatgagttaggtttaaaagaaatttttgcagagctaaaaagagttagtaagctttgtaaagaattaaaaattgaaaaaaaagaattttttggaggttcgatgacaatatcaagtttaggaggaataggagggaacttttttacgcccatcattaatccgccagaggtagcaatacttggggtaggaaaaacttttgaaaaaataactaaggtaaatggtcaatttattgtaaggaaaatgctgcctatatctttatcatatgatcacagagttatagatggagctgaaggtgctagattctgtgttcacctcgctgaaagtttaggtaaagactttgcttttaaattggcagtttaaa

SEQ ID NO: 233774 - DNA, 694 bp, Unknown
  Bacterial polypeptide expressing nucleotide sequence isolated from the Sargasso Sea
gataatatagattataaaaaatggggctctgttgatataaaaaaactaacaaaaataaaaagaattaccggtcaaaggttaacgagggcatggcaatcaataccccatgttactcagtttattgaatcagatgtaacagagttggaaaaactcagaaaagatgaaaaaaccaaacaaggcccaaagggtataaaaatcacaatgatgccctaccttatgaaggcgtcagtttttgttttaaaagaacaccctgtttttaatagttccttacaaaacagtggagaaaatattgtgtataaaaaatattaccatattggtattgctgttaacacagaaaagggtttagtggttcctgtgattaaagatgtagataagaaaagcgtgttggaaatatcgcaagagctaatggatgttagcgaaagagcgcgtaataaaaaacttgcgccaaatgaacttaaaggcggaacattcacaatttctaatttagggggaataggaggttctttttttacaccaataataaatccgccagaagtggcgatattgggagtttcacgaactaaagagaaaaatgagaaactaatactacccctttctctttcgtatgaccatcgagtaattgatggggcggccggagcagcgtttgttgttgccttttcaaatgttttaaaagacataagaaaattcaaatagt

SEQ ID NO: 233775 - DNA, 666 bp, Unknown
  Bacterial polypeptide expressing nucleotide sequence isolated from the Sargasso Sea
taaaaaagaaaacaggagttaacctgcgtcgagcatggcttaaccttcctattgtaactcaccatgatgatgcagatataaccgaacttgaacattttcgtaaatcactttcagaggaagctgcgaaaaaggatgtgaaactcacactgcttccctttcttttgaaagcatgtgcagcagccattaggaagcatcccactttcaattcttcactttctgcagacaaagaaaatttagtaatcaaacattacctgaacataggtgttgcagttgatacaccggatgggttggttgtgccagttattagagatgttgaacagaaaggattaattgagttagcgaaagaattgggagaagccagcaaaagagccagaacgaacaaacttaaaagcagtgatattgaaggaggatgcttcagtatatccagcttaggcggaattggcgggacagcatttacacctctggtgaatgctcctgaagtggcgatacttggagtgactcgttctcgaatggttcctgtctgggaagggaaagattttcatcccagattaatgctaccattggatctgacctatgatcatcgtgtgattgacggagcacaagcagcccgattcatggtggaactgtgtgcaattttgggagatatgcggagaatgtctctatgag

SEQ ID NO: 233776 - DNA, 741 bp, Unknown
  Bacterial polypeptide expressing nucleotide sequence isolated from the Sargasso Sea
aaactataatatctgaaatatatgatcattcagaatttggtgaaattgatataaaacccctttctagaattaaaaaaattgcaggtccccatctagaaaaatcttggagagaaataccacatgtaactcaacatgatgaagcagatattactgaaatggaaaaatttagaaaatctctaagagatttatatactggggaaaaaatttcaattactccattagcatttattataagagctgtaacaaaagcattaaaagattatccaaattttaattcttctttagatttaaaaaaagaaaaacttatttacaaaaaatattttcatattggtatagcagttgatactccacatggattaatggttccaaaaattagagatgcagataagaaagatataacagagctaggaaatgaaataaaaaaaattacaaaactttgtagagaacttaagattgataaaaaagaattatttggcggttcaattacgatttctagtcttggaggtattgggggcagttttttcactcctataattaatcaacctgaggtagccattcttggcattggaagatctgagaataaacaaatattcactggctctacttatgaaaatagaactatgctgcctttatcattatcttatgatcatagggtagtagatggagcagaaggagcacgtttttgcgctcatcttaaagaaagtttaggaaaagattttgcttataaattagcggtatagt

SEQ ID NO: 233777 - DNA, 308 bp, Unknown
  Bacterial polypeptide expressing nucleotide sequence isolated from the Sargasso Sea
ttcgttaaaagcccgtgaaggtaaactgactgctgcagatatgcagggtggttgttttaccatctccagcttaggtggtattggtggtacggcctttacgcctatcgtcaacgcgccggaagtggccattctgggtgtgtcaaaatcagatatcaaacctaagtggaatggtaaagagtttgaaccacgcctgatggtgcctttatctgtctcttacgaccacagggtgattgatggtgctttagctgcgcgtttcactgcgactctggcatcttatctggcggatattcgtcagatcatcatgtaag

SEQ ID NO: 233778 - DNA, 787 bp, Unknown
  Bacterial polypeptide expressing nucleotide sequence isolated from the Sargasso Sea
aaatttgttagatcacaagtatctgtaaatgaaggaaaggttgaaagaaaagtttataatgatgaatatccccatgaagcctttggtaaagttgaagtaaaagatttaccgagagtaaaaaaattatcaggccctcaactcacaaggtcttggacagaaataccgcacgtaacacaacacgacgaaatagacataactgaaatggaacaatttagaaattcactaattgatcattatacaggtgaaaaaattaaaataagtcctttagcatttataacaagagcggttgtaaaagcccttagagaatatcccaactttaattcatcaatagataaagaaagtaaaaagctaatttttaaaaaatattttcatataggatttgcggtagatacacctcatggtcttatggttccaaaaatcagaaatgttgatgaaatgggtttaaaagaaatttttgaagaattaaaaagagtgagtaaactttgcaaggaacttaaaattgaaaagaaagaatttttcggtggatctatgacaatttcgagtcttggtggtattgggggaaatttttttacaccaataataaatcctcctgaggtagcaatacttggtgtgggaaaaacatttgaaaaaattagaaaaattaatggtcagttcattgtaagaaaaatgcttccagtatcattgtcttatgatcacagagtgatagatggagcggagggtgctagattttgtgttcatctagccgaaagcttaggaaaagattttgctttcaaattggcagtttaaa

SEQ ID NO: 233779 - DNA, 650 bp, Unknown
  Bacterial polypeptide expressing nucleotide sequence isolated from the Sargasso Sea
tagaaaaaatctgggagcgaaatttccacatgttacacaacatgatgaggcagatattactgaaatggaaaagtttagaaaatctttgagagatctttatactggagaaaaactttcgattactcccttgccttttattataagagctgtagtgaaagcattaaaagactatccaaattttaattcttcattagatttaaaaaaagaaaagcttatttataaaaaatatttccatataggtatagcaatggataccccccatggtttaatggttccaaaaattagagatgctgataaaaaagatataaacgaactgggacaagaactaaaaaagatttctaaacagtgtaaagatctaaaaattgataaaaaagaattttttggtggttcaatgacaatttcaagcctgggaagtatcggtggtagtttttttacacctataattaaccaaccagaagtagcaattttgggtataggtagagcggagacgaaacaagtttttgttggcgaaaaatacgaaaataaaataatgcttcctctatccttgtcctatgatcatagggttatagacggtgcggaaggagctcgtttttgtgctcatttacgagaaagtttaggaaaagattttgcctataaattagcggtatagt

SEQ ID NO: 233780 - DNA, 545 bp, Unknown
  Bacterial polypeptide expressing nucleotide sequence isolated from the Sargasso Sea
tgaaaggattagaataagtcctttagcatttataactagagcagtagttaatgcattaaaagaatatcctaattttaattcatctatagatactgcaaataacaaattaatatttaaaaaatattatcatattggtttcgccgtagatacaccacatggtttgatggtcccaaaaatgagaaatgttgatcaaatgggtttaaaagaaatttacgaagaacttaaaagagtaagtaaattatgtaaggagctaaaaattgataaaaaagaattctttggtggttctatgacaatatcaagccttggcggtatcggaggaaattttttcacaccaattataaatcctcctgaagtagcaattctaggagtgggaaaaacatttgaaaaagtgaaaaaagtaaatgggcaatttattgaaagaaaaatattaccaatctctttgtcatatgaccacagagttatagatggtgctgaaggtgcaagattttgtgtccacttatctaaaagcttaggtaaagattttgcattcaagctagctgtctaaa

SEQ ID NO: 233781 - DNA, 744 bp, Unknown
  Bacterial polypeptide expressing nucleotide sequence isolated from the Sargasso Sea
aaaaaaaagtttacaaggatgaatatcctcatgaagcattcggagaagtggaaaaaaaagatctccccagagtgaaaaagttatctggacctcaacttgttagatcttggactgagattcctcacgttactcaacatgatgagatagatataactgaaatggaacagtttagaacaactttaatcgataattattctggtgatagaataagaataagcccattggcatttataaccagagctgtagtaaatgcacttaaagaatatccaaattttaattcgtctatagatcctgagaacaacaaattaatttttaaaaagtattaccatgttggttttgcagttgatacttcacatgggttgatggttccaaagcttagaaatgttgatcaattaggattaaaggaaatttatgaagaactgagaagagtaagtaaacaatgtaaggagcttaaaatagataaaaaagaattttttggtgggtcgatgacaatttcaagtcttggtggaataggtggaagttttttcacaccaattatcaatcctccagaagtagctattttaggtgttggtaaaacttttgataaaattaaaaaaattaatgggcaatttattacaagaaagatgttaccgatatctctgtcttatgatcatagagtcattgatggtgctgagggtgcaaggttttgtgtacatttatcaaaaagtctaggcaaggattttgcattcaagcttgcagtttaaa

SEQ ID NO: 233782 - DNA, 454 bp, Unknown
  Bacterial polypeptide expressing nucleotide sequence isolated from the Sargasso Sea
ctgcatccagatagccagcgtttaattgttaaggaatacattaacgtgggtatcgccactaatacggcagagggcttactggtgccggtgattcgtggcgctgataaaaaaggcttgtgggaattatccgagaacatcgcggaattggcagagaaggcgcgggataaaaaattagcattagacgacttgggtggcgggacctttaccgtctccagcttaggttcgatcggtggcaccggttttaccccgattgttaatgcacctgaggtcgccattctgggtgttggccgtctgagcactcagccccagtggaatggtcaggagtttttgcctcggcaaatgcttccgctgtccttgtcttacgatcatcgggtgatcaatggtgtcgacggtggtgaatttatgcagttgttgtcgcggcttctgtttgatgtgcgccggttagcgctttagt

SEQ ID NO: 233783 - DNA, 916 bp, Unknown
  Bacterial polypeptide expressing nucleotide sequence isolated from the Sargasso Sea
aattttttacgctctcatgcgagtccttccattagaaaatttgcgcgtgagcttggagttaatctaagtcaagtattaggtactggaagaaaagggcgcattactcaccaggatgttcagtcctttgtaaaacaggttttagaggaagtttcatctggtggcaagacatcaacaatctcaggtattccggaaatgcctgagattgatttcagtaagtttggttcagttgaaattaaacccctatcacgaatcaaaaagaaaacgggaattaatttgcatcgggcatggcttaacctacctgtcgtaacgcatcatgatgatgcagatataaccgaacttgagcattttcgtaaatcactctcagaagaagccgtaaaaaaagatgtgaaacttactttgctgtcctttattttgaaagcatgtgccgtagccataaggaagcatcccaatttcaactcttcactttctgcagataaggggaatttagttatcaaacattacctcaacataggtgttgccgttgatacatctgatggtttggttgttcctgttattaagaatgttgagcagaaaggtttacttgaattagcaaaagaattagaacaagttagcaaaagagccagaacaaacaagcttaagagcagtgacattgaaggaggctgtttcagcatttccagcttaggaggaattggcgggacagcatttactcccctagttaatgctcctgaagttgccatacttggagtgacacgctcccgaatggttccagtttgggatggtaaagatttcaatcctagactgtgtttaccattggatctaacatatgatcatcgtgttattgatggagctcaggcagctcgattcatggttgacctgtgttcaatattagcagacatgcggagaatgtctttatgag

SEQ ID NO: 233784 - DNA, 331 bp, Unknown
  Bacterial polypeptide expressing nucleotide sequence isolated from the Sargasso Sea
ctggcagagcgggctcaggaactggcggaaaaggcgcgctcgaaaaaacttgcgttggatgatttaagtggtggcacgttcaccatctcgagtcttggcgccataggcgggaccggatttacacccatcatcaacgcacccgaggtcgccattttgggtgtcggcaagtcggtagttcagcctatctggcagggcgatgcctttgcgccgcgactgcggttaccgctaagtctctcttacgaccatcgagtgataaacggggtagacggcggaaactttatggccactatgacggcactgttagcagacatccgacggttgaccctgtagc

SEQ ID NO: 233785 - DNA, 889 bp, Unknown
  Bacterial polypeptide expressing nucleotide sequence isolated from the Sargasso Sea
atgggggtgcatgcgtctccagccgtaaggcgtattgctcgagagttagatgttgacctttcctccgttcgggccacggggcctaaaaataggattactaaagaagatgtaaagcgctatttgcaaggtggtgctggggcttcggggctcagtgttgccgctgcacctgacgttgactttagtcagtttggttcagttgaaaccgtggctttgtcaaaaatcaaaagattatcgggtgcaaatctacatcgaaactgggtaagtattccacatgttactcaatttgatcaggcggatgtgacagagttagaggtgtttcgccaagcgcaaaaaaagattgcggcacagcaaggtgttaaattgacgcccattgtcttcatcatgaaagcgttagtctcgtcattaaaagcctatccctcttttaatgcgtctttaggttcggatggaactaacttggtattaaaatcgtattttcatattggtgttgctgtcgatactcccaatggattagttgtgcctgttattcgagatgtggataagaaaagtttgtatgacttggcggcggagttaggtgtcattagcgttaaagcgagagaaaaaggcttgtctatcaaagagatgcaaggcggctgtatgactatttcaagtttgggtgggatcggcggtactgcttttactcctataatcaacgcaccggaagttgcgatcgtgggtgtttcgcgtttacaaaagactcctgtttataacgaagataaccaacttgagcaacggctgatgatgccgctcagcctgtcttacgatcaccgtgtgattgatggtgcagaagctgcacgttttgtggtacatttgtcgagtcgtttggctgacatacgtacattattattataac

SEQ ID NO: 233786 - DNA, 791 bp, Unknown
  Bacterial polypeptide expressing nucleotide sequence isolated from the Sargasso Sea
aggcagcggtgaaaagggtagagttacaaaagatgatttgcacagccatatcaaagcacaaatgtatatatcaaaaacaaacctttatcaaccagatgacaatatagattataaaaaatggggctctgttgatataaaaaaactaacaaaaataaaaaaaattaccggtcaaaggttaacgagagcatggcaatcaataccccatgttactcagtttattgaatcagatgtaacagagttggaaaaactcagaaaagatgaaaaaaccaaacaaggcccaaagggtataaaaatcacaatgatgccctaccttatgaaggcgtcagtttttgttttaaaagaacaccctgtttttaatagttccttacaaaacagtggtgaaaatattgtgtataaaaaatattaccatattggtgtagctgttaatacagaaaacggtttagtggttcctgtgattaaagatgtagataagaaaagcgtgttggaaatatcgcaagagttaatggatgttagcgaaagagcgcgtaataaaaaacttgcgccaaacgaactcaaaggtggaacattcacaatttctaatttagggggaataggaggttctttttttacgccaataataaatcctccagaagtggcgatattgggagtttcacgaactaaagagaaaaatgagaaactaatactacccctttctctttcgtacgaccatcgggtaattgatggggcggccggagcagcgtttgttgttgccttttcaaatgttttaaaagacataaaaaaattcaaatagt

SEQ ID NO: 233787 - DNA, 1315 bp, Unknown
  Bacterial polypeptide expressing nucleotide sequence isolated from the Sargasso Sea
atgaccttgtcaaaaatagaagaaattaaaatccctgatattggagattttgatgctgtcgaagtaatcgaaattgccgttagtattggcgatagtgtccagcctgaagacacattaattactgttgaaagtgataaagcatcgatggatattccttcgccatcttcaggtgagataaaggaaataaaagttaatatcggtgataaagtttcagagggtacaccaatcattaatttattaatcgttgaggaaggtgtaaaaaaagataataagacatcgaaagaaataaataatgaagagatagaagaaaaagtaacgtcggaagttgacaaacaaactgaaaataaagttgtgccccccgctccaccaaaaactccagagtcaagtcaattggccggacaaagtaaatcagctaaagcgcatgcaagtccttcggtaagacgatttgcgagagagttaggtgttgaccttggtttggtatatggaaaagggccaaaaaatagaattttaaaagaagatgttaaagcgtttaccaagagcattatgtctggtgaaaaacttactaataaaggtgctttttctacaccagaaataccccccgttgatttctctaaatttggagaagttgaacaaaaaccactaactcgtatccgccgaatagcaggacaaagcttacaccgtagctggataacgatacctcatgttactcaatttgatgaagcagatatcactgaacttgaaaaattcagaaaatcaaaacttgaatctgcaaaaaaggacggtgttaaattaacactcgtaacttttttaattaaggcggtggttgttgccttacaaaaatttccagaatttaactcttcaatcgaaccaagcggtgaaaacttaataattaaaaaatattttcatgttggtgtagcagtaaatacaaaaaatggattattagttcccgttctgaaagacgttgataaaaaaggattatttgagattgcaacagagataacagaattaagtaataaggcgagagaaggaaaaattgcgccaaaggatttacaagggggctgtttcacaatatcgagtttgggcggtattggagggctacatttcgtgccaatcattaatgcccctgaggttgcaattctaggtgtttcacgtgcggcaatgaaaccggtttacaagaatgagtcatttgaacctcgacttattctgccgttttcgctgtcctatgatcatcgcgttattgatggagtagctggtgctcaattcacgcaatttctaagtactgtattaaccgatatacgtcatattttattgtaaa

SEQ ID NO: 233788 - DNA, 1255 bp, Unknown
  Bacterial polypeptide expressing nucleotide sequence isolated from the Sargasso Sea
aatggctgaaaaaaaattattagttccaaatattggagattttaaaaatgttgaagtgattgaggtattagttaagtcaggacaacagatcaaaaaaaatgatcccttaataacgttagaaagtgataaatcaagtgtagaagttcctgcaactgatgaaggaaaaatcaataagattattgttaaagttggtgacaaagtttcagaaggaagtgaaatattatcgttagattctgttagtaaaaaggaagaaagtaaaaaaacagttgaggtaaaagaaaatattcctgaaaagaaaatagtaactgaaactccaaaagagatagctcctgtagtaaaaaaattgagtaaagatggcgtatcatctgcaagtccaaaggttagaaaatttgcaagagaattaggtgctgacatcgttcagatacctgggtctcaaagagctggcagagtaacagaggatgatgttaaaaaatttgtaagatcacaagtatctgtaaatgagggaaagattgaaaaaaaagtctataaggatgaatatcctcatgaagcatttggtgaagtagaaaaaaaagatcttccaagagtaaagaaattatctggacctcaacttgtaagatcctggactgaaatacctcatgtaacccagcatgatgaaatagatataaccgaaatggaacagtttagaacaaatttaattgataattatactggggaaagaataagaatcagtcctttagcatttataactagagccgtcatcaaagctctaaaaaaatatccaaactttaattcatccatcgataccaaaaataataagttaatttacaaaaagtatttccatataggatttgctgttgacacccctcatggtctgatggttccaaaaataaggaatgcagatgggctaggtctaaaagaaatttttgaagagctaaaaagagttagcaagctttgtaaagaattaaaaattgaaaaaaaagaattttttggaggttctatgacaatctcaagtttaggtgggataggtggaaacttttttacacctattattaatcctcctgaagttgcaatacttggtgtgggaaaaacatttgaaaaaattagaaaagttaatggtcagttcattgtaagaaaaatgcttccagtatcattatcttatgatcatagggtaatagatggagcggagggtgctagattttgtgttcatttagctgaaagcttagggaaagactttgctttcaaattggcagtttaa

SEQ ID NO: 233789 - DNA, 844 bp, Unknown
  Bacterial polypeptide expressing nucleotide sequence isolated from the Sargasso Sea
tctgatagaagtaagaggaaccggttctaaatccaggatacttaaagacgatgtaaaagcctttgtcaaatcaatactgagtggttccaacaacccatccattgggctgccaaagatactatcattggattatgcaaaatatggtgaagtcagttatcagccgttaacaaaaatacaaaagatttctggacctcgactgcaagcaagttggataaatctacctcatgttacacagcatgacctagcagacattacagaaatggaagcggataggttgagaattaaaaaattaaaacaaaacaaagatatcaaaatatcgcctttagcatatgttatgaaggcatgttcgcttgtgttaaaagattttgaaaagataaattcatcattggcggaagatggacattcaataatattgaaaagctacataaatataggatttgcagcagacactgaaaatggacttgtggtccctgtaataaaggatgtagataaaaaatccttaattgaaatcgcaaaggaattgcttcgtctttcggaaaaagctcgcgctggaaagttatcttcagatgaaatgcaaggcgcaacatttacaatttcgagtttgggcggtattggaggaacggcatttacccctataataaatgcacccgaggttgcaatactgggcctatcacgatcgacaacacaaccagtttggaatggatcagaatttgagccaaagctgatgcttcctttgtccttttcatacgatcatcgagttatagatggggcatacgcagttcgatttaccacagctctgtgtgacgcattaaaaaaagcaaaaaatctctctaaaaaggcataa

SEQ ID NO: 233790 - DNA, 712 bp, Unknown
  Bacterial polypeptide expressing nucleotide sequence isolated from the Sargasso Sea
gaagcttttggtgaaatagaaaaaaaagatcttccaagagttaagaaactttctggacctcaacttgtaaggtcttggactgaaattcctcacgttactcaacatgatgaaatagatattacagaaatggagcagtttagaacatctttaattgaccattattctagacaaagaataagattaagtcctttggcttttataacaagggcagtggtgaaggcgctcaaaaggtatccaaattttaatacctcaattgatactaattctggtaaattaatttttaagaaatatttccatattggatttgctgtagatacaccccacggccttatggtcccaaaaataagaaatgttgatcaactaggtttgaaagaaatatttggagaattaaaaagggtgagtaaactttgtaaagaactaaaaattgataaaaaagaattttttggtggatcaataactatttcaagtcttggaggaataggtggaagtttttttactccaattattaatcctcctgaagtagcaattttaggtgttggaaaaacatttgaaaaagttaaaaaagttaatggccagtatataaatagaaaaatactaccaatttctttatcttatgatcatagagtaattgatggtgcagagggagcaaggttttgtgtacatttggctgaaagcttaggtaaagattttgcttttaaactagccgtttaga

SEQ ID NO: 233791 - DNA, 553 bp, Unknown
  Bacterial polypeptide expressing nucleotide sequence isolated from the Sargasso Sea
ttgaacaaggaaaacgaaaaggccggcgtgaaagtcacgatgctggcattcgtaatcaaggcagtggttgccgccctgaagcagttcccgacgttcaatgccagcctcgacggcgacaacctggtcttcaagcagtacttccatatcggctttgctgccgatacgccgaacggtctggtcgttccggtgattcgcgatgcggacaagaagggtttgatcgatatcgcgaaggaaatgaccgagctttcgaaggccgcgcgtgatggcaagctgaagccggatcagatgcaaggtggctgcttctcgatttcttcgctgggtgggattggcgggactaacttcacgccgattatcaatgcgcctgaagtcgccattctcggtttgtcgcgtggcgcgatgaagccggtgtgggatggcaagcagtttgtgccgcgtctgattctgccgctgtcgttgtcgtatgaccatcgcgtgatcgatggtgctgcggcggcgcggttcaatgcgtatctgggtgcgattcttgccgattttcggcgtgtgattctttgat

SEQ ID NO: 233792 - DNA, 1267 bp, Unknown
  Bacterial polypeptide expressing nucleotide sequence isolated from the Sargasso Sea
aatggcaaaatcagtaaaagaaattattctaccggaccttggagagggtattgatggagcagaggtcagcgaagtatctgttgctgtaggggatacgcttagccaaggcgacacaatagttgttttagaatctgataaggcatcaatggaaataccatcagatgacgatggtatcgtaaaagaagtgctagttgttactggaaaagagattaatgtaggcgacctattaatcaagcttgaaatagagcaatcttcaccctcaaaagagaataaagaatctgaagtaaaaagtgatgcaaacgaaccaggaactactgagactgcgcagcccacagaatcaaaaccaaaaccaaacccacagttaccagtagatggtaagatttttgcctcacctggtgttcgtaggcttgcaagagagctttctataaacctacaacatatcactgcttctggagataaaggtagaatcaccaaagaagatcttaataattatataaagctccaaatggccaaccagcaaggcgttgcccaatcaataaataaagagattgattatacccaatggggtgctatagaagaaataaaactaagtaaaataaaaaagatcaccggtcgacgtttacagggagcgtggcaaaacataccgcacgtaactcaatttgatgaagctgatattacagatttagatacaaaaagacgtaaaatgaaacaggaatcggaaaaaaaagatatcaaaataacgttcctcccttttttgatgaaagctacagttgaggtactacaatcaatgcccgaatttaatagttcgttaaaccatacaagcgagacccttataataaaaaaatattataatattggtattgcagttgataccccaaatggacttattgtaccagtagttagagatgtagataaaaagaccatttttgatttatctgttgagctggcggatataagcgacaaagctagatctaatgcacttaaaccaaaggatctttcgggcggcacctttacaatttctagtttaggtggaattggaggaaaatattttaccccaatcatcaatcctccagaggtagcaattttaggaatatcaaaaagtgtttgggaaaatatatataaccatgaatccaagtcttcagagccaagatatattatgcctttttcattatcttatgatcaccgtataattgatggtgcagctgcagcaaagttcaccagcgcattcagcaacacgattgaagagctttcttttttaaaaaaatag

SEQ ID NO: 233793 - DNA, 1651 bp, Unknown
  Bacterial polypeptide expressing nucleotide sequence isolated from the Sargasso Sea
gatgagtcaagcgatcgaagtgaaggtgccggatatcggcgattacaaggatgtgccggtgatcgagatcggcgtgaaggtcggcgataccgtcgagccggagcagtcgctcgtcacgctcgagtcggacaaggcgacgatggacgtgccgagcccggtcggcggcgtcgtgaaggaaatcaaggtcaaggtgggtgattccgtgtcggaaggctcgctgatcatcctgctcgaaggcggcgccgcggcgcaggcgaacggctcggccgcgcccgctgctgctccggctccggcggcagcgccggcaccggctgctgcagcaccggcggccgcaccggcagcagccggcggcacgctcgaagtgaaggtccccgacatcggcgactacaaggatgtgccggtgatcgagatcggcgtgaaggtcggcgacacggtcgagaaggagcagtcgctcgtcacgctcgagtcggacaaggcgacgatggacgtgccgagcccggcggcaggtgtcgtcaaggacatcaaggtcaaggtgggcgattcggtgtcggaaggcacgctgatcgtgctgctcgaagccgcaggtgccgctgctgccgcaccgcaggcgagcgcaccggctccggccgctgccgctccggcgccggcacctgccgccgcacccgcgcaggccgccccggcaccggctgctgctgcgccggctccggccgctgcgcagtcgggcgaataccgcgccagccacgcatcgccgtcggtgcgcaagttcgcgcgcgagctcggcgtcgaagtcgcacgcgtacagggttcgggtccgaagggccgtattacgaaggaagacgtcacgagcttcgtgaagggcgtgatgaccggccagcgcgcagcaccggccgcggctgccgcgccggcaggcggcggcgagctgaacctgctgccgtggccgaaggtcgacttctcgaagttcggcccgttcgaagcgaagccgctgtcgcgcatcaagaagatctcgggtgcgaacctgcatcgcaactgggtgatgatcccgcacgtcacgaacaacgacgaagcggacatcaccgagctcgaagcgctgcgggtgcaactgaacaaggaacacgagaaggcgggcgtgaagttcacgatgctcgcgttcgtgatcaaggcagtcgttgctgcactgaagaaattcccgacgttcaacgcaagcctcgacggcgacaacctggtgttcaagcagtactaccacatcggttttgccgcggatacgccgaacggtctggtcgtgccggtgatccgcgatgcggacaagaagggtctcgtcgatatcgcgaaggaaatggccgagctgtcgaaggcggcacgcgacggcaagctgaagccggaccagatgcagggcggctgcttctcgatctcgtcgctcggcggcatcggtggcacgaacttcacgccgatcatcaatgcgccggaagtggcgatcctcgggttgtcgcgcggccagatgaagccggtgtgggacggcaagcagttcgtgccgcggctcacgctgccgctgtcgctgtcgtatgaccatcgcgtgatcgatggcgcggaagccgcgcggttcaatgcgtatctcggcgcgttgcttgccgatttccgtcgcatcattctttga

SEQ ID NO: 233794 - DNA, 1684 bp, Unknown
  Bacterial polypeptide expressing nucleotide sequence isolated from the Sargasso Sea
catgaatcaaatcaagcaggtacaggttccagacatgggggatttccaggatgtagaaatcatcgaggttcacatccaagctggtgacagggtcgaaagtgaaaatccattgattaccctagaaagcgataaagcaacgatggatgtgcccgcacctttttcaggaaaagtagaaaatgtcctgatcaaggttggagacaaagtttctgaaggaactcctatcgtggatcttcaaacctcggatgatgcgaaagctgaagaaatctccaatacggacgagaaaagagatacacaaaatttggaaatccaacaagattcaggaaatttgagttcttcctccgaatctcctgaaattcaaacagattccggtgaatctaccaaagcaaattcattctcatccgagcctgagttgatgctgatgcccgacatgggcgatttcaccgaagtggatatcattgaggtgttggtcaagactggagaccagttaaagcctgaagattccgtgatcacattggaaagtgacaaagcaaccatggatgttcctgctccactcaagggaaccatccaggaaatgtttgtcaaaacaggacaaaaaatttccaaaggacaaaagatcgccctgatccttccggattctgaaactgcaaatcaggctatacaaaaaaccgacacaaacgtgaaatcttcagtatcggaagtttccaaaaaaccacccacagaagatagaacttcaacaatacgtagacctcctgttacagaacccatcgaccaccagcaatttctgaaagcccatgcgagcccttcagttcggaaattcgctcgtgaacttggtgtggatttaagcagggtgaatgggtccggcagaaaaggtcgcatcactcacgaagacgtccagggacatgtcaaagaaagattgagtgcaccatccacggctcagggtttaactggagccgttcctcaaattccagaaatcgacttctctcagtttggagagattgaaatcaatccgctatccaggatcagaaaaaaaggtgccgaacacctccatcgagcctggttgaacctgccgatggtgacaaatcatgacgaagccgacattaccgaactggaagcattccggcaaaaactcaaaaaagaggccgccgaacaaaatatccggctaacgatgctcgcattcctgcttaaggcgacagcagctaatcttaaaaaacatcctgatttctgctcatccctgagccctgatggtcaaaacctgattcacaaacgctattgtcacatcggagttgcagtcgataccgaagaaggtctcgtggtccctgtgatccgtgatgtcgatcaaaaaggagtttttgaactcgctcaaaatctgggggatgtcagtgaaaaagcacgcagccgaaaactaaaacgtgaagatcttcagggtggttgtttcagtatttccagtctcggtggaatcggaggcaccgcattcactccattggtgaatgcacctgaagtcgcgatcctcggcgtcactcgttccaaaatgacaccccaatggaatggagaggaattcattcccagattaatgcttcccctggatctgacctacgatcatcgtgtcatcgatggtgcagcggccgcaaggtttctggctgacttctgcactcttctttccgatatgaagcgcttgctgctctga

SEQ ID NO: 233795 - DNA, 1252 bp, Unknown
  Bacterial polypeptide expressing nucleotide sequence isolated from the Sargasso Sea
aatgatcaaggaaatcaaactaccagaccttggagaaggtatcgacggtgctgagataagcgaagtacccgtcgctgtaggagacacagtttcacccgaagacacggtacttgttttagagtcagataaagcctcaatggagataccttcggagatgtcgggcgttgtttccgagatattaatatccgaaggagaggaagtaacgacagggcagctattattaaagatagaggttgaagagggttctgttgaaaatgaaaaaagcgctccggagaaaattgaagatgtgccaaaagaggatgtgcttgaacaggttcaaaagccaactttttcaccggattcagaagagaaatcaagtagtagtgtttttgcttctccaggagttaggaggcttgcacgcgagcttggaattaatttagaggtgatcagtgggtcggggcaaaaaggaaggataaccaaggatgacctacatgggtatatcaagcttcaaatgtcaatgtcaggcggcaccgttcctaaggttaaaaaagaaatagacttttctaagtggggcgatattgaggttcaaaagcttacaaaggtcaaccgaataacaggtgaccgactacagcaggcctggcaggagataccccatgttacgcaacataatgatgcagatataactgaactagaaaaggtccgtaagcaattaaaagaggagggctctcaaaaggatattaaagtaacctttctaccttttttattgaaagcggttataactgttttaaaggatattcccaaattcaacagctcgttagaccacacaggtgaaaatctcgttttaaagcaatactaccacattggaatagcggttgatacaccgcatgggctcacagttcccgtggtgaaggatgtagataaaaaagatattttcgagctttcgaaagacctaatggatcttagcgaaaaagctagaaataaaaaattaaaaccagaagatcttcagggaagcacctttactgtttctagtttaggtggaattggtggtacagctttttccccaattgtaaaccccccagaggtggccatccttggtgtttctaaaagtgagtggcgtcctgtatacgacttaaaaacagaggagtttatcccccgctacattatgcctttttctatttcatatgaccatagggtggtcgatggtgcagctggagcatcctttgttgaaaggttctctcaggccttgaaagacacagacagcatggtcggataa

SEQ ID NO: 233796 - DNA, 292 bp, Unknown
  Bacterial polypeptide expressing nucleotide sequence isolated from the Sargasso Sea
aagatagataagaaagaattttttggtgggtcgatgacaatttcaagccttggtggtattggaggaaattttttcacaccaattataaaccctcctgaagtagctattttaggtgttggtaaaacttttgataaaattaaaaaagttaacggtcaatttattgtgagaaagatgcttccaatatcactatcttatgatcacagagtaattgatggtgctgagggtgcaaggttttgtgtgcacttatctaaaagtctaggtaaagattttgcattcaagcttgcagtttaaa

SEQ ID NO: 233797 - DNA, 445 bp, Unknown
  Bacterial polypeptide expressing nucleotide sequence isolated from the Sargasso Sea
aacaaattaatttttaaaaagtattaccatgttggctttgcagttgatactccacatgggttgatggttccaaagcttagaaatgttgatcaactaggattaaaggaaatttatgaagaactgagaagagtaagtaaacaatgtaaagaacttaagatagataagaaagaattttttggtgggtcgatgacaatttcaagtcttggcgggataggtggaaattttttcacaccaattatcaatcctccagaagtagcaattttaggtgtaggcaaaacttttgataaaattaaaaaaattaatgggcaatttattacaagaaagatgttaccgatatccctgtcttatgatcatagagtcattgatggtgctgagggtgcaaggttttgtgtacatttatctaaaagtctaggtaaggattttgcatttaagcttgcagtttaaa

SEQ ID NO: 233798 - DNA, 424 bp, Unknown
  Bacterial polypeptide expressing nucleotide sequence isolated from the Sargasso Sea
tattaccacgttggttttgcggttgatactccgcacggtttgatggttccaaaaattagaaatgttgaccaattaggattaaaagaaatttatgaagaattaaaaagagtaagtaaacaatgtaaagaacttaaaatagataagaaggaattttttggaggttcaatgacaatttcaagcttaggaggtattggaggaaatttttttacaccaattatcaatcctccagaagtagctattttaggtgttggtaaaacttttgataaaattaaaaaagttaatggccaatttattgaaagaaaaatgcttccaatatctctttcttatgatcacagagtaattgatggagctgaaggcgcaagattttgtgtacatttatctaaaagtctaggtaaggattttgcattcaagcttgcagtttaaa

SEQ ID NO: 233799 - DNA, 1724 bp, Unknown
  Bacterial polypeptide expressing nucleotide sequence isolated from the Sargasso Sea
aagcgaaagcaagtcagaagcagcgccagctgcgtctggcaacagcgaagtgattgaagttgcagtaccggatatcggttctgacgacgaagtagacgtaatcgacgtattggtttcagtgggcgacaccattgaaaaagaagatgggctaattacccttgaaaccgataaagcaaccatggacgttccttcaacacacgcaggtacggtgaaagaagtattcatcagtactggtgataaagtgaaagaaggtacggtagtgatcaagcttgaagtagcgggctcaggctcgtcttcaagtgaatcggcgtctagcgatgcttcttctgaagcatctgcaccggctgcgcaggaaagttcaaagcaagaatcagcgcctgcggcgtctgcaagtaacgaaaccattgaagttgctgtaccagacattggtgaagacggtgaagttgacgtcatcgacgtacttgtatcggttggcgacaccgttgaaaaagaagacggcctaattacgctagaaactgataaagcgaccatggatgtgccttcaacacatgcaggtacgattaaagaagtctttatcaaagcgggcgacaaagttaagcaaggcaccttggttgttaagcttgagaccagcggtggttcgtcttcaagtgcagctgaaaagcctgctgaagcgcctaagcaagaagagactaaacaagactcacagcaagacgaggctcaacaagcgtcacagcaggaagcctcgcaaggtcgctctcctgtgcctccagcgccagaagccaagaatacaggtaaagcacatgcttctccttcggttcgccgtattgctcgtgagtttggtgtagacctgactcaagttaacggctctggcccgaaaaaccgtatcttgaaagaagacgttcaagcctacgtgaaagctgagcttgcgaaacctcgcacagcagcagcttcaggcagtgcgcctgtgggcgacaacgtacttcaaatcgtgccagttaagcctgttgatcacagcaagtttggtgagattgaagaacaaaagctttctcgaattcaaaagatctctggaccgttcttacaccgtaactgggcgactatcccgcacgttacgcagttcgacgaagcagatatcactgaagttgaagaattccgtaaagagcaaaacgcttaccacgcgaaaattaagtctggtcttaagatcacgccactagtattcgttatgaaagcggtagcgaaagcgcttgagaaatacgaagtattcaactcatcactgtctgacgatggcgagagcttaatcattaagaagtttatcaacattggcattgcggttgaaacaccgggaggccttgttgtacctgttattcgcgatgtgaataagaaaggtattgagcagctgtctcaagagcttattgaaacatctaagaaagcccgtgaaggtaagcttaaagctgcagacatgcagggtggtacgtttactatctctagcctaggtggtattggcggtacggcgtttacgcctattgtaaatgcaccagaagtcgccatattaggtgtgtctaagtctgagatgaagcctaagtggaatggtaaagagtttgagccgcgcttaatggtgccgctaagcctgtcatacgaccaccgagtcatcgatggtgcggtaggtgcaagattctctactgaggttgctgcaaacctaactgacttacgcagaatcatactttaaa

SEQ ID NO: 233800 - DNA, 1903 bp, Unknown
  Bacterial polypeptide expressing nucleotide sequence isolated from the Sargasso Sea
aatgtccaaacagattatggtgccggatatcggcgccgatgaagttgaagtcaccgagatcatggtggccgtgggtgacaaggtcgaactcgatcagtccatcatcgcggtagaaggcgacaaggcctccatggaagtaccggccccgtccgccggtatcgtcaaagagatcctgatcaaggtgggtgacaaggttgccaccggttcccagatcatgatcttcgaagccgaaggtgccgccgcacctgcgccggttcaggccgctgcaccggttgcagccgcaccggccgccgctcctgctgctgccgctcgcaaagacgtgcacgtgccggacatcggtgacgacgaagtggatgtgaccgagatcatggttgccgtgggcgacatggttgaagccgaccagtccatcatcgccgtggaaggtgacaaggcctccatggaagtgccggcaccgttcgcgggccgcgtggtcgagatcaaggttgccgctggcgccaaggtctctactggttccctggtgatggtctttgaagtggctggcgccgctcctgccgttgctgctgcaccggcccaggctgccgctcccgtggctgctgccccggttgccgccgctgccaaagaggtcaatgtaccggatatcggtggcgacgaagtcgaagtcaccgagatcatggtcgccgtgggtgacaaggttgaagccgaccagtccctgatcgccgtggaaggtgacaaggcctccatggaagtgcctgcgccgttcgccggtgtggtcaaagagatcaaggttaaggcgggtgacaaggtctccaccggttccctgatcatggtattcgaagtggctggtgctgctccggacgccgcagctgccccggttgctcaggctgccgccccggtcgctgctgcccctgttgccgctgctccggctccggttgcccaggctgctgccgcctccgacttcgttgccaacgatgcctacgtacacgcctctccggccgtacgccgtctggctcgtgagttcggcgtcaacctggccaaggtgaaagcctccggtcgcaagggccgcatcgtcaaagaagacgtgcaggcctacgtgaaggatgcggtcaagcgcgccgagtccgctccggctgctggtcaaggcactggcaacggtaacggcatgagtgtgctggcgtggccgaaggttgatttcagcaagttcggtgatgtggaagaggtcgatctgacccggatccagaagatctccggtccaaacctgcaccgcaactgggtcatgatcccccatgtcacccagttcgacgaagccgataccaccgagctggaagtgttccgcaaagagcagaatgcgatgctcgagaagcagaaggcagacgtgaagatcaccccgctggtgttcatcctgaaagccgccgccaaggcgttggaagctcacccgcgcttctgcagctccctgtccgaagatggcagcaagctgatcatgaagaagtacatccatatcggtgtggcggtggatacccccaacggtctggttgtgcccgtggtgcgtgacgtcaacaagaagggcatcatggagctgtctcgcgatctggccgagatctccaagaaggcccgtgccggcaagctgaccgctgccgacatgcagggcggttgcttcaccatctccagcctgggtggcatcggcggtaccagctttaccccgatcgtcaacgcgccggaagtggccatcctcggcgtctccaagtccgagatgaagccgaagtggaacggcaaagagttcgcgccgcgcctgatgctgccgctggccctgagctacgaccaccgcgtcatcgatggtgccgatggagctcgcttcatcaccaccatgaacggcgtgctgtccgacatccgtcgactggtcctgtaa

SEQ ID NO: 233801 - DNA, 1204 bp, Unknown
  Bacterial polypeptide expressing nucleotide sequence isolated from the Sargasso Sea
aatgcgactgccagaccttggggaaggaattgattttgccaccataagtgaaataggggtcgccgtagggcaaactataaaacatgacgacataatattagttttagaatcagacaaagcatcaatggaaataccttctgaagtaagtggtgttgtaaaaagcgttgatgttaaacaaggacaagaagtaaaaactaacgatctcttgatcgctatagaagtggaaaatggaaacgaaacaactgtggaaaaagaggatgaaaaagaggatataaaaacatctagcacccccgcactatcaaaaaagaaaaaagaaactcctttaattaataaaccaacatcagacggagtttatgcaagcccaggggtgagaaggctcgctcgagaattagaaattaatctcaacacaatatcaggcagcggtgaaaagggtagagttacaaaagatgatttgcacagccatatcaaagcgcaaatgtatatatcaaaaacaaacctttatcaaccagatgataatatagattataaaaaatggggctctgttgatataaaaaaactaacaaaaataaaaagaattaccggtcaaaggttaacgagggcatggcaatcaataccccatgttactcagtttattgaatcagatgtaacagagttggaaaaactcagaaaagatgaaaaaaccaaacaagacccaaagggtataaaaatcacaatgatgccctaccttatgaaggcgtcagtttttgttttaaaagaacaccctgtttttaatagttccttacaaaacagtggtgaaaatattgtgtataaaaaatattaccatattggtattgctgttaatacagaaaacggtttagtggttcctgtgattaaagatgtagataagaaaagcgtgttggaaatatcacaagagttgatggatgttagcgaaagagcacgcaataaaaaacttgcgccaagcgaccttaaaggtggaacattcacaatttctaatttagggggaataggaggttctttttttacgccaataataaatcctccagaagtggccatattgggggtttcacgaactaaagagaaaaataagaaactaatactacccctttctctttcgtacgatcatcgggttattgatggggcggccggagcagcgtttgttgttgccttttcaaatgttttaaaagacataaaaaaattcaaatag

SEQ ID NO: 233802 - DNA, 1654 bp, Unknown
  Bacterial polypeptide expressing nucleotide sequence isolated from the Sargasso Sea
gctgaggagattttttgtgagcgaactcattcgcgtacctgacatcggcagcggtgaaggtgaagtaatcgagctgtttgtgaaggtcggcgacaccgtcgaagccgaccagagcatcctgaccctcgagtcggacaaggcgagcatggaaatccctgctcccaaggccggcgtggtcaaaagcctgaaagtgaagctgggcgaccgtctgaaagaaggcgacgaactgctggagctggaaatcgaaggcgctgctgatgcagcccctgcggccgcggctccggccgccgctgcacctgcacctgctgctgaaaagcctgccgctgccgaggctgctccagccccggccgctgcacctgccgccgcgaccgtccaggacattcacgtcccggacatcggttcgtcgggcaaggccaagatcatcgagctgctggtcaaggtcggcgacaccgtcgaagccgaccagtcgctgatcaccctggagtccgacaaggcttccatggaaatcccatcgccggctgccggcgtggtggaaagcatcgcggtcaagctggaagacgaagtcggcaccggtgacttcatcctcaagctcaaagtacaaggtgctgcgccagccgccgcaccagcaccggctgctgctccggctgccaaggctgaagcggcacctgccgctgctgcccctgctccggccgcaaaagccgaagctgcgccagcccctgcggctgctgcgcctgcgcctgcgccaagcggtgccaaggttcacgccggcccagccgtgcgtcagctggcccgtgaatttggcgtcgagctgagcgctgttgcagccagcggccctcacggccgtgtgctgaaggaagacgtgcaggtttacgtcaaagccatgatgcaaaaagccaaggaagctccggctgccggcggcgctaccggtggttcgggcattccgccgatccgcaccgtggatttcagccgtttcggcgaaatcgaagaagtgccgatgacccgcctgatgcaaatcggcgcggcaggcctgcacgccagctggctgaacatcccgcacgtgactcagttcgaccaggccgatatcaccgacctggaagcgttccgcgttgcgcagaaagccgtggccgagaaggccggcgtgaagctgaccgtgctgccactgctgctcaaggcctgtgcacacctgctcaaggaactgccggacttcaacagctcgctggcgccaagcggcaaggcgatcattcgcaagaagtacgtgcacatcggctttgcggtcgacaccccggatggcctgctggtaccggtcatcaagaacgtcgaccagaagagcctgctgcaactcgctggcgaagcggctgcgctggctgccaaggcccgcgacaagaagctcaccccggacgacatgcagggcgcttgcttcaccatctccagcctcggccacattggcggcactggcttcacgccaatcgtcaacgcgccggaagtggcgatcctgggtgtgtccaaggccaccatccagcctgtgtgggacggtaaagcgttccaacccaagctgatgctgccactgtcgctgtcctacgatcaccgtgtgatcaacggcgccgcggctgcgcgcttcacccagcgcctgagccagttgctgaacgacatccgc

SEQ ID NO: 233803 - DNA, 784 bp, Unknown
  Bacterial polypeptide expressing nucleotide sequence isolated from the Sargasso Sea
atgattcatagttctagtataatagataaagatgctttaatcggtaaggatgttaagattggtccattttgttatataggtccaaaagttcaaattgcagataatgttgaattaatttcaaatattcatattgaaggaaataccaaaataggaaaaggaactaagatttatccatttgcaagcatcggaactttcccacaagatttaaaatacaaaggggaaaaaaatagccttgaaattggcgaaaataatataattagagaatatgtaactataaatccaggaaccaaagggggaggagaaaaaactattattggtaataactgtttactaatgatttcttctcatgtcgcacacgactgcaaaattggtaacaatgttgttatagcaaacaacgttccattaggaggtcacgttacagtagaagactcggtagttataggtggcaactcagctgtacaacaattcacaagaataggtagattagcaatgataggtggtatgacaggggttttaaaagacgtaattccttttggattatcttttggtaacagaaactatctaagaggaataaatttaataggattaaaaagaaaaaagtatgaaaataaaaaaataatggagctagatacagcttataaaaaaatattttcatcaaaaaatctacatgaaaatttaagtgaaattaatggagagtataaagataacgatttagtaactgaggtcataaactttatttcaaaagataaaaaaagacctatctgttcacctcaaaccgaataat

SEQ ID NO: 233804 - DNA, 520 bp, Unknown
  Bacterial polypeptide expressing nucleotide sequence isolated from the Sargasso Sea
agaatatgttacgataaatttaggaacaaaaggtggaggaggcttaactaaagtaggcaaaaattgtctcctaatgattggaacacacatagcacacgattgtattattggtgataatgtaatatttgctaatcattcaacattggctggtcatgtgattgttgagaataatgttgttgttggagcactcagtgcaatacatcaatttagtaggattggtgagggtgcgatgataggtggtatgtctggtgttacagcagatgtaattccattttcaactgtaatgggaaatagagcaaaactaagtggtataaatttagttggattgcgaagaaatatgtttcaaagagatgagattaacgaattaagaaaagttttcaaatatatcttttttaataaaaaaaatacttttgaggcgcgtattaaagaaataaaaaagaaaaaattaaagttttacactataagaaagattttaagttttcatcaagctgagactcgaagatcatttattatgccttaa

SEQ ID NO: 233805 - DNA, 484 bp, Unknown
  Bacterial polypeptide expressing nucleotide sequence isolated from the Sargasso Sea
atgactagtattcataaaacagcaatcgtttctcccaaatcaaatattgatgacagtgttgaaattggagcgtattcacttattggcgatgatgtagtcataggtaaaaacacaataatagattcacatgtagttattaagggaaaaacaaaaattggtcaagataatcatttttatcctttctcctctattggagatgacccgcaagatatgaaatattcaaacgaaaatactgaagttgagataggcgatagaaatacaatcagagagtatacaacaattaacaaagggaccattcaggatgtaggcgttacaagaatggggaatgataactggattatggcctatgttcatattgcccatgactgtcaaattggaaacaacacaatatttgctaacaacacaaccttgggcggacatgttgaggttggagattatgtgatttttggggtttttctggtgctcatcaattttgtaaaatagg

SEQ ID NO: 233806 - DNA, 721 bp, Unknown
  Bacterial polypeptide expressing nucleotide sequence isolated from the Sargasso Sea
catgaaaatacattcgacagcaattattcacgaaaaatctaaaatagatgactctgtagaaatcggccctttctgcattattgatgaagatgttgagattaaaaaaggaacaaagttattaagtcatgttgttctcaggggcccaacaataattggtgaggacaatattttttatcaattttctactataggagaggatacccctgataaaaaatttaaaggcgagaagactaaacttgaaataggaaatagaaatatcttcagagagggggttactgttcatagaggcactatccaagataaaagcataacttccattggatctgataatcttttgatggcatattctcatgttgctcacgattgtgttgttgggaatggaaatgtttttgcaaacaatgctggcatagcaggacatgttaatgttggtaataatattacaataggagctcttacgactattcatcaattttgtaacataggtgattattcatttattggaatgaatacatcaattaacatggacattcctgcatttgttaaagttgctgccgaccccgctagaataattgggcttaattcagttggtatgagtagaaatgacatcagctctgaatctatttccttaattaaaaaagcttataagcttgtttacagaaagggtttaaaaattgatgaagcaattaaaaaatcaaaggaactcaataaagatcaaaatgat

SEQ ID NO: 233807 - DNA, 684 bp, Unknown
  Bacterial polypeptide expressing nucleotide sequence isolated from the Sargasso Sea
aatgatacataaatctagcgtgattgatacaaaagcaaaaattggaaaagatgtaaaaattggaccattctgttttattggaccaaaagttcaattagacgatcgtgtagaattaatttcaaatgtacatattgaaggcaatacaaaaattggaaaaatgacaaagatttatccttttgcaagcattggaacacctccacaagatttgaaatataagggagaacccaacagtttagttattggagaaaataatgtaataagagagtatgtaactattaatcctggaacagacggcggaggtagcaagacctttgttggaaataattgcttatttatgatttcatctcatgttgctcatgattgtaaaattggaaacaatgtagtcattgcaaacaatgtcccattaggtggacatgttacaatagaggactcagttgttataggaggaaattctgcagttcaacaatttaccagaataggaagattagcaatgattggaggaatgacgggagttcttaaagatgttattccttttggattatcatttggaaatcgaaattatcttaaaggaattaacttgataggattgagaagaaaaaaatatgataataaaaaaattatggaattagataaagcatataaagaaattttttcatctaaaaatcttcaagaaaatatagcaaa

SEQ ID NO: 233808 - DNA, 568 bp, Unknown
  Bacterial polypeptide expressing nucleotide sequence isolated from the Sargasso Sea
atgatccacaaaacagcaatagttgactcaaaagcaaaaatttcagacaacgtaaaaataggaccatattctataataggaccagatgttgaaataggagctaaatcagttttatattcacatgtaaatattgttggaaatacaaaaattggaattaataatcaaatatatcctttttcatcaattggaacacctcctcaagatttaaagtataaaggcgagaaaaattctataataattggagataacaataaattcagagagtatgtaaatataaatcctggcacagaacaaggcggtggggttacgaaaattggagataacaatttatttatggtttattgtcatgttgcacacgattgtaaaatttcaaataatattgttttagccaataatgttcaggtaggaggccatgtttccattgaacaaaatgcaatagttggtggcagctgtgcaatacatcaattttcaagaataggagagtcctcaatgataggagggatgactggtgttataagcgaatgtaattccatttggcttatctatgggaaacagaaacaactgacgg

SEQ ID NO: 233809 - DNA, 781 bp, Unknown
  Bacterial polypeptide expressing nucleotide sequence isolated from the Sargasso Sea
atgattcataaaacaagtgtaatagataaaaaagcaaaaatttcagataatgtaaaaattggaccattttgttatgttggtccaaacgtagaattatctgaaggtgtagagttagtttcaaatgttcatatagaaggttttacaaaaattggaaaaggaacaaaaatttttccatttgctagtatcggaactcaaccacaagatcttaaatttaaaaatgaaaaaacaactttgtctataggagaacataatataattagagaatatgttacaataaatccgggcacagaaggcggtgggtctaaaactataattggaaatagttgtctatttatgatttcttcccacattgctcacgattgcaaaattgggaataatgtaattattgcaaacaatgtacccctaggaggtcatgttactatagaagactccgtagttattggaggaaattcagcagtccaacaatttactagaataggcagattagcaatgatcggcggtatgaccggcgtcttaaaagacgttactccttttggtttatcaatagggaatagaaattacttacaagggttgaatctaattggtttacgaagaaaaaagtatgataacaaaaaaattatgggtttagatagagcttataaggaaattttttcttcaaaaaatttacatgaaaatttgagtaagataaatggtgagcataaagacaatgaattagttttagaagtgataagatttatcgaaaaagataagaaaagacctatttgctcaccacaaaactaaa

SEQ ID NO: 233810 - DNA, 325 bp, Unknown
  Bacterial polypeptide expressing nucleotide sequence isolated from the Sargasso Sea
tatgaaaattcatccaacatcaattattcacgataattccaaaatagatgattctgtagaaattggtccattttgtattattgatgaaggtgttgagattaaaaaaggaacacagttattgagtcatgttgttctgaggggtcccacaataattggcgaagataatgttttttatcaattttctactataggagaggatacccccgataaaaaatttaaaggcgagaagactaaacttgaaataggagatagaaatatctttagagaaagagtgaccgtgcatagaggaactgtacaagacaaaagtctcacttctattggatct

SEQ ID NO: 233811 - DNA, 713 bp, Unknown
  Bacterial polypeptide expressing nucleotide sequence isolated from the Sargasso Sea
aaaaatacaccctacatccataataggtgaaaattgtgttataggtgagaacacaacaattggcccattctgcgtaatagaagataatgttaagataggtaatgataatatcatctatagctcaactagcatagggagttatactgagataggtagcggtaataaattcttcccctatagtttcatcggttcaataccacaagatttgaaatataaaggggagaatagcaggctattaatcggaaataataacacttttagagagcattgtactgtaaataccggaacatctgcagacaatatggagactacagttggtaattcatcactattcatgacaggtgttcatatagcgcatgactgtaagattggtgatcaggttatatttgcaaatcaagtaacattaggaggtcatgtagaagttgaagataatgcagtaatagggggactatcagctgttcatcaattttgtaggattggtaagttagcaatgatcggaggcatgtctgcgatagagaatgatattattccatatggattggccattgggaatagagcaaaggtaactggaattaatattattggtctaaggagagcaaactatgataacaatataattagagaatattcaagtactgtagaaaaaatttttaatggacaatcaataaatgttgaaaaagaaagcgctcgaaataatgacaatgtgttagtaa

SEQ ID NO: 233812 - DNA, 644 bp, Unknown
  Bacterial polypeptide expressing nucleotide sequence isolated from the Sargasso Sea
aatgatacacaaatcaagcgtaatagatcctaaagcaaaagtagaaaataatgttaaaattggtccattttgttttgttggagaaaatgttcatttaaaagagggggttgaactaatttcaaatgttcatattgaaggcaatacaaaaataggcaagtttacaaaactttatcccttttcaagtattgggacatctccacaagatctaaaatttaaaggtgaaaaaaacagtttagatataggcgaatataatacaattagagaatatgtaacaattaatcctggcaccgcaggtggtgggggtaaaacagtaataggaaataattgtttgtttatgatttcatcccatatagctcatgattgtaacataggaaataatgtgattattgctaacaatgttccattaggaggacatgtaacaatagaagattctgttattataggaggcaactcagcagtacaacaatttaccagaattggaagattagccatgatcggcggtatgactggagtcttaaaagatgtcattccttttggcctttcatttggtaatagaaactatttaaaaggtataaatttagtaggattacgaagaaaaaaatatgataacaaaaaaataattgaattagatagggcatataaaa

SEQ ID NO: 233813 - DNA, 781 bp, Unknown
  Bacterial polypeptide expressing nucleotide sequence isolated from the Sargasso Sea
aatgatacataaatcgagtgtagtagatcctaaagctaaaatttcaaaaaatgttaaaattggtccattttgttatattggtccaaatgttattcttaacgacgctgtcgaattggtatcaaacgttcatattgagggtaatacaaaagtaggcaaaggaactaaaatttttccatttgctagtattgggactcaaccacaagatctaaaatttaaaaatgaaaaaaacagtttagagataggagaaaataatttaatacgagaatatgtaacaattaatccaggtacagcaggtggtggatcaaaaactattgtaggaaataattgtttgtttatgatttcttctcatgtagcacacgattgtaagataggaaacaacgttattatagcaaataatgttcctttaggtggacatgtaactattgaagactcggtagttatcggtggaaactctgcagtacaacagtttacaaggataggaagattagcaatgatcggaggaatgacgggtgtgcttaaagacgttataccttttggcttatctattgggaatagaaactatttagaaggattaaatttgatagggttaagaagaaaaaagtatgaaaatcaaaaaattatgggattaagtaaagcttacaaagaaatatttgcttctaaaaatttttatgagaatctaagtaaaattaatggggaacataaaagcaatgaacttgtaaaggaagtgattgcctttatagaaaaagataaaaagagacctatttgctcaccaaagagctaa

SEQ ID NO: 233814 - DNA, 547 bp, Unknown
  Bacterial polypeptide expressing nucleotide sequence isolated from the Sargasso Sea
tggtaaagataataaatttagagagtacgttaatattaatcctggtactgaacaaggaggaggtataacaaaaattggaaataataatttatttatggtttattgtcatgtagctcatgattgtaatttatcaaacaacattgttttagctaacaatgtacaagttggtggccacgttcatattcaagataatgcaatagtaggtggaagttgcgcaattcatcagttttctagaataggagagtcatcgatggttggaggtatgactggagtgctgagtgatgttattccatttggtttgtccataggtaatagaaataatttagtaggcttaaatcttataggtttaagaagagcaaaaatatcaaatgatgatattaaaattatgcaaaatgcatataatttaatatttgaaacagaaaactttaggtcaaatattgataatttaaattctgaaataaaaaataatatatttgttaataaaattgttaattttattacttcagataaaaaaaggccaatttcacttccagtaaatattaaatga

SEQ ID NO: 233815 - DNA, 394 bp, Unknown
  Bacterial polypeptide expressing nucleotide sequence isolated from the Sargasso Sea
gatgatacacaaaacagctataatagatccaaaagcaaaattagataaaaatgttcaagtaggtccttactctataattggtcctaatgttgaaattggagaaaatactataattcagtctcatgtaaatatttctggaaaggttaaaattggtaaagggaataagatctatccttttgtctctattaacgatccacaagatttaaaatatgctggagaacaaactaatcttacaattggagataataataaaatcagagaatacgtaacaataaatccaggaacagcaggtggtggtggtgaaacagtaattggaagtaactgtctatttatgatttcatcacatatcgctcatgattgtaaagtaggaaacaatgtaataatcgcaaataat

SEQ ID NO: 233816 - DNA, 427 bp, Unknown
  Bacterial polypeptide expressing nucleotide sequence isolated from the Sargasso Sea
aatgattcataattcaagtgttattgaaaaaggttcaaaaattgggaaaaatgtaaaaattggacccttttgctacatagggccaaaagtgcaaatcagtgatggtgtagaattatcctcaaatattcatatcgagggaaatactaaaataggaaaaggaactaaaatttttccttttgctagcattggaacctttccacaagatttaaaatataaaggagaaaataacagtctcgaaattggtgaaaataatacaattagagaatacgttactattaatccaggcactgaaggaggaggtggcaaaactgttataggaaataactgtttatttatgatttcatcgcatgtagcccatgattgtaatataggaaatgatgtggttgttacaaataacgtccctttgggtgggcatgttactgtagag

SEQ ID NO: 233817 - DNA, 596 bp, Unknown
  Bacterial polypeptide expressing nucleotide sequence isolated from the Sargasso Sea
aatagggagtgcgccccaagatttaaaatataaaggggaaaaaagttttttaattattggaaataataatacatttagagaaaatgtaacggttaatcctggaactgaaggtggtggcctatatacaacaattaaggataattgcttacttatggtaggagcacatgttgctcatgattgtataattggatcaaatattattttagctaataatgcaactttggcaggtcatgtcgaaatagataacaatacaataataggaggtaattctgctattcatcaatttgttaaaattggaaataatgcaatggttggtggtatgagtggattagaaaaaaatcttattccttatggtctttatcttgggattagatcaaatatgaaaggtttgaacttaattggattaaagagaaagggtctagaaaatagtaaaatcataattttaaataactttattgaagatatttttaatcaaaatgattcgattgaaaataatataaataaaataaataatgaagttaaatctttagaagaggttaaagaaattattgattttattaataaatcaaacaaaagaggtttggtaactctgtaaa

SEQ ID NO: 233818 - DNA, 763 bp, Unknown
  Bacterial polypeptide expressing nucleotide sequence isolated from the Sargasso Sea
attgcacaagcatacattacaatcatacgcaaaaattaatttatttcttgaagtaattaaaaaacttaaaaatggttatcacgatttatcttctattatcacaagaataagcatttctgataaaattaaaattgatatagcagatgtattttctgtaaaatttataggacccttttgctcgcaagtaagtcaagaaagcaatattcatactttgtttcaattcctattagataataattttatcaaccatagcaattacgcaattcttattgataaacaaataccagttggctctggattgggaggcggatcctcaaatgttgccgaaattctaaagtacttaatgagcgagggcgctttatcaaaatcacaatgtttattcgctgcaaaagaactcggttctgatattgaattttttttagaagaaggctcagctctaatcactggcacaggttctgtaaaaagaagaataaatttattctcagataaaatttttctcattatttacccacaaattttaatgagtacaaaaataatttttgagcagcataatatattgagtaagagtaattttctttacgagggacaaacacaaattagtgatatattgcaagatacttcaaatgaccttgagaagacagctataactctgcatcaagaaacaggaatggcaaagcagtttctagaaaatgatgaacattgtgagtttgctagaatgacaggaagtggatcagcattttttggatgttacgatgatgaagct

SEQ ID NO: 233819 - DNA, 458 bp, Unknown
  Bacterial polypeptide expressing nucleotide sequence isolated from the Sargasso Sea
aatgattcataaatctagtgtaatagacactaaagcaaaaattggaaaagatgttaagattggcccattttgtcttattggaccaaacgttcaattagaagatggagttgaactaatttcaagtattcatattgaaggtaatacaaaaataggaaaaggaacaaaaatttaccctttcgcaagtatcggaacagatccgcaagacctgaaatttaaaggtgaacaaaatagtttagacataggtgaatacaatgttatcagggaatacgttacgattaatcctggtacagctggaggaggtagtaagacagtcattggcaataattgtttatttatgatctcttcgcacattgcgcatgattgtaaaattggtaataacgttgttattgcaaacaacgttcctttaggaggacatgttactattgaagactcagttgttattggaggtaattcagctg

SEQ ID NO: 233820 - DNA, 613 bp, Unknown
  Bacterial polypeptide expressing nucleotide sequence isolated from the Sargasso Sea
tttttcgtttgcatcaataggatctgatcctcaagatttaaagtttaacggtgagaaaactgaaattattataggagaaagttgtaagataagagaatattgcacaattaatccaggtacgacaggtggaggaggtgtcacaaaagttggtaatgactgtctattgatggttggaactcatgtggctcatgattgcttgataagtgataatgtaatatttgctaaccactctacattggcgggtcacgtcaacattgaaaaaaacgttgtagtaggagcattaagtgctatacaccaatttacaagaattggggaaggctcaatgattggaggtatgtcaggaattacaggtgatgttcctcctttttgtacagcgatgggaaatagagcaaaattaaatggattaaatgttgtaggtttaaaaagaaatgaagtaagtaaaattgaaatatcagaattacgaaaagtatataattatatttttggtagtaatgaattaacttttaaagaacgattaaaagagatcaaagcagaaaaaactggattttatactataaataaacttttagattttatatctggagagagtaacagatctttttgtctaccttag

SEQ ID NO: 233821 - DNA, 460 bp, Unknown
  Bacterial polypeptide expressing nucleotide sequence isolated from the Sargasso Sea
taacttgttaatggtttattgccatgtagcgcatgattgtatgatatcgaacaatattgttttagctaacaacgttcaagtaggtgggcatgttaccattcaagacaacgcaatagtgggtggaagttgtgcgatacatcaattttctagaattggtgagtatgcgatgatagggggaatgactggtgttttgagtgatgtcattccgtttggtttatcaatgggtaacagaaataatttaatgggtttaaatcttattggattaagaagatctaaagtttcaaatgaaaatattaaaaaaatacaattatcttatgaaataatatttaaaactccaagttttagagaaaatatagaacaacttaataatgatcttaaagaaaatgagtttgtaaaaaaaatacttagttttataaatacagacaaaaaaagaccaatatcacttccacttaacaaataa

SEQ ID NO: 233822 - DNA, 478 bp, Unknown
  Bacterial polypeptide expressing nucleotide sequence isolated from the Sargasso Sea
aatgatacatagttcaagcgttattgataaaaaagctaaaatttccaaaaatgttaaaattggtccattttgttttgttggacctgaagttcaattattagataacgttgagttagtctcccacgttcatattgaaggaaatacaaaaattggaaaaggaactaaaatttttcctttcgcaagcataggcactcaacctcaagatttaaaatttaaaaatgagaaaaatagtttaacgattggagaacaaaacattataagagagtacgtaactattaatcctggtacagaaggtggcggctataaaacagaaataggaaacaattgtttgtttatgatttcttcacatatagcccatgattgcaaaataggtaacaatgttattatagcaaataacgtaccacttggcggacatgttacaatagaagactcagtagtaattgggaggcattctgctgtacacaatttacaagaataa

SEQ ID NO: 233823 - DNA, 733 bp, Unknown
  Bacterial polypeptide expressing nucleotide sequence isolated from the Sargasso Sea
aatgatacatagtacagcaatagttgatcctaaagctaaaatatctaataaagttaaaattggaccttactcatttattggtcccaatgtagaaattggagaaggaacactagtacaatcacatgtaaatataactggtgatactaaaattggattaaataataaaatttatccatttgcttctattggaaatgatcctcaagatctaaaatttaaaggtgaaaaaacaaaattagaaataggggataacaataaaataagagagtatgttactattaatcctggaactaaaggtggtgggggaataacaaaagtaggtagcaactgtctatttatggtttcggctcatatcgctcatgattgtttagttggtgataatgtaattttagcaaataatgtaccactaggaggacatgcgcatgttgatgataatgctattattggtggaaattcagctgtacagcaatttacaagggtaggtaaattcgccatgataggtggtatgtgtggcgttgttagagacgttataccttatggcatagctcatggaaatagaagcgtattacaaggtttaaatttgataggtttaagaagacaagatattcccaataaagaaataatgaaacttagtgatgcttataaagaaatatttaaaaatgaaaatttaacagagaatttaagtaatttaccaagtgaattaaaaaaaaataaacttgttatggaagttgttaat

SEQ ID NO: 233824 - DNA, 574 bp, Unknown
  Bacterial polypeptide expressing nucleotide sequence isolated from the Sargasso Sea
gataaaaaatatgatggcgaagcgaccaccttagagattggcaaaaacaatatttttagagaaggcgtaactgtacatcgaggaactgttcaagataagtcgaaaactgctatagggagccaaaatctttttatggcatatgtccatatagctcacgattgtattgttggtgataataacgtatttgcaaatgctacttgtttagctggtcatgttaaggtaggaaatcatgtagttcttggtggagtgacccttgtgcatcaattttgctctcttggagaccactcatttactggaattaacactatcataacaatggatgttccggcattcgtcaaagttgctgcaaatccagctaggccaataggtctgaacaccgttggaatgcagcgcaacaattttgataatgactcagttaacttgattaaaaaagcctacagaattatctatagaaagggttactctcttgatgaagcgattaagcgcttacacttattgaatcaagataaaaatccggcactcaccacttttatttcctctattgaaagatctgaaagaggtttacttcgatagg

SEQ ID NO: 233825 - DNA, 781 bp, Unknown
  Bacterial polypeptide expressing nucleotide sequence isolated from the Sargasso Sea
aatgatacataactcgagtataatcgataaaaaaactaaattaagcgataatgtaaaaattggtcccttttgctacgttggaccagatgttgaattatcggatggtgtagagttaatctcaaatgtacatattgagggaaatactaagataggaaaaaacacaaaaatttttccatttgcaagtattggcactcagcctcaagacctaaaatttaataatgagaaaaacagtttagtaattggagaaaataatataattcgtgaatatgtaactatcaatcctggtacatcaggcggtggaactaaaacaataataggagataattgtttatttatgatttcatctcatatagcacatgattgtaaaattggtaataacgtaattattgctaacaatgttcctttaggtggacatgttactattgaagactcggtagttataggagggaattcagcagtacaacaatttacaagaataggacgccttgcaatgattggtggaatgacaggagttttaaaagatgtaaccccttttggattatcaattggaaatcgaaactacttacaaggaattaacctgattggtttacgaagaaataaatatgataataaaaaaataatgggtttagataaagcttataaagagattttttcttcaaaaaatttacataaaaatttaagtaaaattaatggtgagtttaaagacaatgaattagtaactgaggtaattaaattcattgaaaaagataaaaaaagacctatttgctcaccacagaattaa

SEQ ID NO: 233826 - DNA, 517 bp, Unknown
  Bacterial polypeptide expressing nucleotide sequence isolated from the Sargasso Sea
atgattcataattcaagttttatagaaaaaagagcaaaaattggcaaagatgtaaaaataggtcctttctgctacgtcggccctgatgttcaattagaggatggagttgaattagtttcgaatattcatattgaaggaaatactttaataggtaaaaaaaccaaaatttttcctttcgctagcattggaacgcaaccacaagatttaaaatttaaaggagaaaaaaataatttaaaaattggtgaaaataatactattagagaatatgttaccataaaccctggaacagaaggtggaggaggaaaaacagtaataggaaataataatttattgatgatttcctctcatgttgcgcatgattgtcatatcggaaataatgtagttattgcaaataatgttcctttaggtggtcatgtaacaatcgaggattcagttgtaattggaggtaattctgcagttcaacagttcacaagaataggaaggcttgcaatgataggaggaatgacaggagtttaaa

SEQ ID NO: 233827 - DNA, 442 bp, Unknown
  Bacterial polypeptide expressing nucleotide sequence isolated from the Sargasso Sea
aatgattcatagttcaagtgttatagacaataaagcaaaaattggaaagaatgtaaaaattgggccattttgttatgttggtcctaaagttcaaattaatgacgacgttgaattgatttcaaacgttcatgttgaaggcaacaccaaaataggaaaggggacaaaaatttttcctttttccagcataggaactcaaccacaagacctaaaatataaaggggaaaataatagtttagagataggtgagcaaaatactattagagaatatgtaactattaatccaggaactgaaaaaggaggaggaaaaactgttgtaggaaataattgtctttttatgatttcatcacatatagcacatgattgccacgtaggaaatgatgtagtgatagcaaacaacgttcctttaggtggtcacgtcactatagaagactctgttgttata

SEQ ID NO: 233828 - DNA, 382 bp, Unknown
  Bacterial polypeptide expressing nucleotide sequence isolated from the Sargasso Sea
gatgtcgactgatttgattgatggaagttctcaaattcataaaactgctgaaattggtagtaatgttcgcattggtccttggtgctctataggtaaaaatgtcaagataggggatggctcaattttagagtctcacatcattattcgttctaatacaaagcttggtagaaataatcgaatttttcagtttagctctatcggagaagatccggcagacaaaaaatttcaaggtgaggacacttggttagaaatcggcgacaacaatgtatttcgcgaaggtgtaacagctcacagaggcaccggttctgggggtgggttgaccaaaatcgggaacggtaatttattaatgccatatgtgcatatagctcatgattgtgatgtt

SEQ ID NO: 233829 - DNA, 666 bp, Unknown
  Bacterial polypeptide expressing nucleotide sequence isolated from the Sargasso Sea
tatgatccacgatactgccattatctcaaaaaaagctcgcattgattccgatgttagcataggcgcttattctgtgattgaagatgaagttcaaattgacagtgggactaaaattgaaagccatgttgtcatccaaggtccaacaaaaattggaaaaaataatcatattttttcatttgctgcaatcggaggtgaccctcaggataagaaatataataacgaggtgacatcgctagaaattggagataacaacacaattagagaatattgcacaattaatcgcggaacgactcaagatagcaaaaaaactttattgggtaacaataactggattatggcctacgttcacatagcacatgattgcgtcgttggaaataatgtgatttttgcaaataatgccacattagcgggtcatgtaagagtagatgattgggctatattcgggggttttactggtgcacatcaatatacaagaattggtgcgcacagttttattggcatgaatacgctcacaacaaaagatattccggcatatgttatggcagagggtcagccaataaaaccaagaggtgtgaatatcgaaggattaagaagaagaggtttcaatcaaaagcagattaaaaatataaaagatgcatatcgaattttatatagaaaagatttaaa

SEQ ID NO: 233830 - DNA, 454 bp, Unknown
  Bacterial polypeptide expressing nucleotide sequence isolated from the Sargasso Sea
aatgattcacaaatctagtgtaatagatacaaaagctaaaattggaaaagatgttaagattggcccattttgctttgtaggatctaatgtacaattagaagatggagttgaactaatttcaagtattcatattgaaggtaatacaaaaataggtaaaggaacaaaaatctatccttttgcaagtattggaacaacaccgcaagatttaaaatataaaggggaagataatagtttagagataggggaatataacgtcattagagaatacgttacaataaatcctggcacagccggagggggaggtaaaacagttgtaggaaacaattgtttatttatgatttcctcacacgttgcgcacgattgcaaaatcggaaataacgtagtgattgctaataatgtccccttaggcggacatgtaactattgaggactcggttgttattggaggtaactca

SEQ ID NO: 233831 - DNA, 346 bp, Unknown
  Bacterial polypeptide expressing nucleotide sequence isolated from the Sargasso Sea
taatccttcggcaagaccgatccttaagggcgaggtggcgctgatgttggcagagccgcgtatccaactcaccagcataaagcgtaaaacgacacagtcgagagtgccgcttaactatgatcgcaagttatttgcccgccttaaaacactgcgccgcaccattgccgaagagcaggatgtgccgccttatctggtgtttaacgatgctactttagcggaaatggcggctatgatgccgacaagccctggggaaatgctggcagttaatggcgtgggggaacgtaaactcagtcgatttggcggtgagttcctcgacgaaatagccgcttatttagcgggggagtag

SEQ ID NO: 233832 - DNA, 581 bp, Unknown
  Bacterial polypeptide expressing nucleotide sequence isolated from the Sargasso Sea
cccagataaaaaatataaaggcgaaaaaacaaaactattaataggtaaaaaaaatatttttagagagggtgtaactatacatagaggcactattcaagataaaaatgaaacaataataggtaatgaaaatttatttatggcctacactcatgtagctcatgactgtattgttggcgataaaaatgtttttgcaaataatgctggtatcgcaggtcacgttgttgttggaaataatattactattggagccctcactactattcatcaattttgtaaaataggagattttagttttgtaggaatgaatacctccatcactatggatgtacctgcctttgtaaaagttgctgctgatcccgcaagagttgttggtttaaattcagttggaatgactagaggtggaattgatcaaaaaacaattgctttgattaaaaaagcatataaggttttatacaggcgcaacttaaaaattcaggaagccttatctaagcttgaaattatttacaaagagacatcaaatgaaaatctgaatgtttttattaaatccatttcattatctgaaagaggcattttaagataag

SEQ ID NO: 233833 - DNA, 778 bp, Unknown
  Bacterial polypeptide expressing nucleotide sequence isolated from the Sargasso Sea
tatgaactcatctatatcgaataaagcaaaaatacatccttcaacttttattggccctaactgcataattgacgataatgtagagattggtatgaataataaattaattgcaaatatagttattacaggaaatacaaaaataggaaataataatactttctatcctttttcaacaattggaagtgatcctcaagatctaaaatacaaaggtgaaaaaagttttctttatataggcaataataatacatttagagaatatgtgactgtaaatacagggactgaaggaggtggtttaaaaactataattgaaaacaattgtttatttatggtcagctcccatattgcacatgattgtataataaaatccaatgtcatactagctaacaatgcaactttagctggtcatgtagaaatttttgaaaatgcagtacttggaggaaactctgcagttcatcaatttgtaaaaataggtagatatgcaatgattggtggtatgagcggtgttgaaaaaaatattatcccgtatagtctttatactggaattagatcagagttaaaaagtatgaatttagtaggattaaaaagaaaaggattaaattcaaaaaaaattaactatattatcaggattgtcaaaaaaatatttcatagcggtgattcaatagaaaataatattcattcactatctaaagatatgttaattttagatgaaataagtgaaataatagaatttataaaaaaatatcaaaaaagaggaatttgtaaattaattgatgaataa

SEQ ID NO: 233834 - DNA, 472 bp, Unknown
  Bacterial polypeptide expressing nucleotide sequence isolated from the Sargasso Sea
aatgattggaaataattgtttgatgatgataggaactcacatagcacacgattgtttaattgggaataatgttatttttgcaaatcattcaacacttgctggtcatgtaatacttaaggataacgttgttgttggagcattaagtgcaatacatcaattttcaaaaataggagagggtgctatgattggaggaatgtctggcgttactgcagatgttgttccttactcaactgttgttggtaatagagcaaaattatctggtttaaatattcttggattgaagaggagaaatattgaaaagaaagagatatctgagttaaggaaagtctataagtatatttttcataataatcagaacactctgagggaaagagtaattaatatgaaacagaaagaattcaaagaacagactatacaaattttcttagaatttctatccgaggactctgatagatcctttaccctaccttaa

SEQ ID NO: 233835 - DNA, 772 bp, Unknown
  Bacterial polypeptide expressing nucleotide sequence isolated from the Sargasso Sea
atgattcatagtacagcattaattcatccctcagcatctattgctgataatgtagaaattggtgcgcacacaatagtcgataaagatgttcaaattggcccaggaacagttattaaagaaaatgtagttataagagaaaatactacaataggagaaaataatttattctttcaatttgctacaattggtgaggtacctcaagatctcaaatttaataacgaaaaaaccacctgtacaattggtaataacaatatctttagagagtattgtagtattcatagaggtactaaggatggaatttctgacacttttataggagacaataacttgtttatggcttatacacatgttgctcatgattgtgtaattaaaaactactgtatactatcgaatgccgcaagcctagctggacacgtaaatcttgattcgtatgtatctttaggtggtttcactttagttcatcagttctgtcgaattggtgaatacgctttttctggtttaggaactgtaatttctcaagatgtaacgccatatactctagtagcaggtaatcacgcaaaagcgtacaagataaattctataggacttaaaagaaaaggttttgatagcgaatcaatttcttcattagaaaagtgttttaaattatttgttaagtctaaaaaaacctctgatgaaaaaaatcaaatatataaagaaaatgaaatatcaaatgaatacactgacaaatttgtaaattttattgcaaacagtgatagaggtattactcgctaga

SEQ ID NO: 233836 - DNA, 724 bp, Unknown
  Bacterial polypeptide expressing nucleotide sequence isolated from the Sargasso Sea
aatgatagatagtaaatcgttaattcatgaatcagcgtccattgccgataatgtaaagataggtgcctatgctgttatagataaaaacgtatcaataggcgaaggcaccattataaaagagcatgcagtaataagagaaaatactactatcggaaaaaataatcgtatctatcaatttgcaactattggtgaggaacctcaagatcttaaatttcatgacgagcacactacgtgtactataggagataataataccatacgcgaatacagcagtatccatagggggactaaagatggtatatctgatactgaaataggtgataataacttattaatggcctatacgcatgttgcacatgactgtattatagaaaatcattgtattttgtccaatgcggctagcttagcagggcatgtgaaattagaatctaatgtatctctgggtggatttactcttgtacatcagttttgtcatattggtaaatatgctttttcaggactcggtactgtaatctcacaagatgtgacaccgtataccttaatagcaggaaatcatgccaaagcatataaaatcaattcggaaggattaagacgtaaaagcttcaatgatgcaaccataagagatttagaaaaatgttttaaaatatttataaaatctacaaagcccctttcagagagactgtctttatttgaagagctcaatattacctgtaatcatgtaaac

SEQ ID NO: 233837 - DNA, 635 bp, Unknown
  Bacterial polypeptide expressing nucleotide sequence isolated from the Sargasso Sea
ttgctcagatacaacgatcggtgaaggatgtaagattttacattcaagctcaattggtgagatacctcaagatctaaagtttgggggtgaaagaacaaaaacctttattggtaaacgaacaagaataagagagtatgttacaatcaatcgcgggacaaaagcgcttggagaaaccagagttggttcagattgtttacttatggcatctactcatgtggcacatgattgtatagtcggagataatgtgatcatgtctaatctatctactcttggtgggcatgtcgaagtaggtgactgggccatactggggggaggagtactggttcatcaatttacaaaaataggttcgcatgtgcttattggtggtggatttcgagcagtccaggatgttccaccgttcataatagcagcagatcatccgttgatatataaaggattgaatctaataggtttaaaaagaagaggtttttcattggacgaaagacaatcaataaaaaaaatatataaactatatttcaaatctggattaaatagatctgacgccctaaataaaatttatactgaaattaaatcttcacctgttaaaaatcagattgttgaattcattaaagcctctgatagaggtattatttaaa

SEQ ID NO: 233838 - DNA, 697 bp, Unknown
  Bacterial polypeptide expressing nucleotide sequence isolated from the Sargasso Sea
caaattgaaaaaataataaacttatttcacacgtatcaattactgggaaataccacaattaaaaataataatatattttacccatacacttcaattggttcagatcctcaagatttaaaatataattttgaaaaatcttttttagaaataggaaataataataaatttagagaaaatgttactattaatccaggaactcaaggaggaggacttaaaactgttattgaagataattgcctatttatggtaggttctcatgttgcacatgattgtaaaattaaatcaaatgtaattttagctaataatgcaacattagctggtcatgttcatattgatgaaaatgcaattttaggaggtaactcagcagtacatcaatttgttagaattggtaaatatgcaatgataggtggaatgagtggagttgaaaaagatattattccatatggcttgtacacaggaataagagaaaatttgaaaggaataaacttaattggattaaaaagaaaaggaattcctagttcgtccattaattatattaatcatattgtaaagaatatatttaattcaaaaaatacaattgttaaaaatataaaaaaattaaatatagaagataatgaattaaatgaaattaaagaaataatgtcatttattagtgatgaatcaaaaagaggaatatgtgtattagagaatgactaaa

SEQ ID NO: 233839 - DNA, 601 bp, Unknown
  Bacterial polypeptide expressing nucleotide sequence isolated from the Sargasso Sea
ttcctccattggagatgatcctcaagataagaagtacttaaatgaggaaactgcagttgaaatcggagatagaaatacaatcagagaatatacgaccatcaataagggaactatccaggatgtaggcgttacaagaatgggcaatgacaactggatcatggcctatgttcatattgcacatgactgtcaagttggaaacaatacgatatttgctaacaacacaacattaggtgggcatgttgaggttggggattacgtaatatttggtggtttttcgggtgcccatcagttctgtaaaataggagcgcatagcttcttgggcatgtattcaggagtggccagagatcttcctccatatgtcatcgtgatgggccaacctgctgaacccagagggattaaccttgagggtttaaaaagaagagatttctcaaaggatcaaataaggaacattaaatcagcatacaaagccttgtatatgtctgatcttcgattaggagagtctataaaggcaattgaggatcttggtgatatcaatggagaactcaatattcttgtcgattttctaaataatacgacaagaggcatcgtcagaaaaggctaa

SEQ ID NO: 233840 - DNA, 906 bp, Unknown
  Bacterial polypeptide expressing nucleotide sequence isolated from the Sargasso Sea
tgcctttggtatggggattaataaatcgaacgtgcgctttgtggtgcattacgttatccctaagagtatcgaagcctattatcaagaaactggccgagcgggccgtgatggactcgaggccgaagcctttatgttgttcgatcccgctgatattggtcgagtgcgccatcttatcgagcaatcggagccagggccgcagcagcaggtggatttccataaactcaataccatggccgcctttgccgaggcgcaaacctgtcggcgccaagtgctgttgcattacttcgatgaaagcgcattagaaccctgtggtaactgtgatatttgtcttgacccgcctaagcgttataacggcaccgaagatgcgcagaaggtgctttcttgcatctatcgtctcgggcaacgctttggtattaatcatttgattgaagtgttgcgtggctccaagggggccgcgattgttgaccgtggccacgataagctcagtacatgggggattggtaaagataagagccatgagtattggctgagtgttattcgccaactgatccatttgggtctggcaagccaagatattactcgtggctcatccatcaccttaaatccttcagcaagaccgatccttaagggcgaggtggcgctgatgttggcagagccgcgcattcaactcaccagcataaagcgtaaaacgacacagtcgagagtgccgcttaactatgatcgcaagttatttgcccgccttaaaacactgcgccgcactattgccgaagagcaggatgtgccgccttatctggtgtttaacgatgctactttagcggaaatggcggctatgatgccgacaagccctggggaaatgctggcagttaatggcgtgggggagcgtaaactcagtcgatttggcggtga

SEQ ID NO: 233841 - DNA, 602 bp, Unknown
  Bacterial polypeptide expressing nucleotide sequence isolated from the Sargasso Sea
tggatcgtcacctcaagatctaaaatataagggagaatccactgccataaaaattggtaaaaattgtagaatacgtgaatatgtaacaattaatccaggtacaaatggaggagggaagattacctcagtcggtgacgattgccttcttatgattggaactcatgttgcacatgactgtcgtattggaaataaagttatttttgcgaatcattcaactttagcagggcatgttattattgaagataatgttgtcgtaggagctttaagtgcaatacatcaattttgtagaattggagagggtgcaatgattggtggaatgtcaggagttacagctgatgtaatacctttttcaacagtgatgggaaaccgtgctaaattatctggaattaatatactgggtttaaaaagaaggaacgtaaaaaaaaaagaaatatcagaatttagaaaaacttttaagtatattttttttgataaagaatttacctttagagatagaatatcagaggttatgaaaaaaaaacatgaaaatcatattgtttctaagcttctaaaatttcttcataaccattctgatagatcttattgcatgccagatatataaa

SEQ ID NO: 233842 - DNA, 370 bp, Unknown
  Bacterial polypeptide expressing nucleotide sequence isolated from the Sargasso Sea
tactcgaggctcgtccattactttaaatccttcggcaagaccgatccttaagggcgaggtggcgctgatgttggcagagccgcgtatccaactcaccagcataaagcgtaaaacgacacagtcgagagtgccgcttaactatgatcgcaagttatttgcccgccttaaaacactgcgccgcaccattgccgaagagcaggatgtgccgccttatctggtgtttaacgatgctactttagcggaaatggcggctatgatgccgacaagccctggggaaatgctggcagttaatggcgtgggggaacgtaaactcagtcgatttggcggtgagttcctcgacgaaatagccgcttatttagcgggggagtag

SEQ ID NO: 233843 - DNA, 369 bp, Unknown
  Bacterial polypeptide expressing nucleotide sequence isolated from the Sargasso Sea
aatgatacatagctcaagcgtaatagataaaaaagctaaattaggaaaaaatgtcaagataggccctttttgttatattggaccagatgtagaactgcaacaagatgtagaattaatctctaatgttcatatagaaggtaatacaaaaattggtaaaggaacaaaaatttttccttttgcaagcataggaactattcctcaagatttaaagtttagaggggagcaaaacagtgttctgatcggagaaaataatatgattagagaatatgtaactattaaccctggaactgaaggtggaggaggtaaaactataatagggaataattgtttatttatgatctcctctcatattgcccatgattgtaaagt

SEQ ID NO: 233844 - DNA, 772 bp, Unknown
  Bacterial polypeptide expressing nucleotide sequence isolated from the Sargasso Sea
aatgcatcatccttcggctattattgatccttcagctaaaatagatgaatcagtagaaatcggtccattttctttaattggaccggacgtcactattggcaaagatactaaaattgaatctcatgttatattaaaagggcctacaataattggagaaaggaatcatattttccaattttctacagtcggagacggaagtcctgacaagaaatataagaatgagcctactcttttaaaaataggtaatgataatataatcagagaaggggttactgttcacaggggaactatccaagataggggtgagacccttataggtaatagaaatttaatcatggcctattcccacatcgcacatgattgtgtaataggtgacgatatagtgcttactaaccaggctgccttagcaggatctgtaaaggtaggtgatggagctattcttggaggatacgctatagtgcatcaattttgctctattggtagttatagtttttgtgcaatgggaagttctgttaataaagatgttcctgcgtatgtaaaagtaaggggaaatccagcgaggccttttggaataaatacaacgggaatcaaacgtttaggttattctaaagaggttattgaatcattacgatctgcttatagatcagtctatagaaaaaaactaaccgttgaagaagctatgtttgatttatctgatttgagagataaacatgatgaagtaaataccttcttggcatcaatcgaagaatctacgaggggcatttctcgttga

SEQ ID NO: 233845 - DNA, 369 bp, Unknown
  Bacterial polypeptide expressing nucleotide sequence isolated from the Sargasso Sea
aatgatacataattcaagtataattgataagaaagcaaaattatcaaaaaatgtgaaaataggtcctttttgttatatagggcccaatgttcaattaaaagaaaatgttgagctaatttcaaatattcatattgagggtaacactattattggcagtggtacaaaaatttttccatttgcatgtataggaacacaacctcaagatttaaaatttaaaggagaggaaaatagccttgtgattggaaataataatgtgattagagagtacgttacaataaatcctggaactgcgggaggtggttcaaaaacttctgtaggaaataactgtctatttatgatttcttcacacatagctcatgattgtaatgt

SEQ ID NO: 233846 - DNA, 703 bp, Unknown
  Bacterial polypeptide expressing nucleotide sequence isolated from the Sargasso Sea
atgattcataaaaccgcaataataggtgataaagttaagattgggaaagatgttaaaattggtccgttttgtgttattggtgatggagcaattataggcgataatgttgagctaaaatcacatgtagtaatggaaggtagggtaacaattggcgaaggtacaaaaatatatccatttgcttctttatgttatccacaaactttaaaatataatggcgaagactctgagatagtaatcggtaaaaataatactattcgtgagtatgtaactatccagcatggaacagctggagataagatgataactagtattggtgacaattgcctttttatggttggtgttcatattgcgcataattgcttagttggaaataatgtgatctttgcaaattatgcaagtcttgctggacatgttgaagttggtgatttcgcaattttaggtggcttgtctgcagtgcagcaattttgtagagttggtcctcatactatggttggaggaatttctgcagttgtaagagacttagtgccttatggcttagcatcaagtgatagagctcacttagagggattaaacctagttggtatgaatagaagaggttttgataaaaaacaatctattgaggcaagcaaagttgtaaaagaaatatttgatgaaaactcagatatagtttttaataaaagaatagagcgtgcaaaagaaaaat

SEQ ID NO: 233847 - DNA, 526 bp, Unknown
  Bacterial polypeptide expressing nucleotide sequence isolated from the Sargasso Sea
atgatagataaaactgcaattatagactcaaaagcaaaattagataaaaatgttcaagtaggtccttattgtgtaataggtcctaacgttgagataggggaaaacactgttattcattctcatgtaaatatttctggaaatgtaaaaattgggaaagggaataagatatacccttttgtttctattaatgacccacaagatttaaaatatgctggagagccaactaatctgataattggagataataataaaatcagagaatacgtaacaataaatccaggaacagtaggtggcggtggtaaaacattaataggtaacaactgtctatttatgatttcttctcatatcgcccatgattgccaggtaggaaataatgtaataattgcaaacaatgttcctttaggtggtcacgcaattatcgaagataatgttgtaatcggaggaaactctgcagttcaacaattcactagaattggaaaaatggcaatgattggtggaatgacaggtgttttgcatgacgtaattc

SEQ ID NO: 233848 - DNA, 566 bp, Unknown
  Bacterial polypeptide expressing nucleotide sequence isolated from the Sargasso Sea
aatgaattttagttatatttctaaaaaagcaaatatccattcctcggttaaaattggcccatattgtgtgataggtgataatgtagaaataggtaaggattgtgtactacactcacatgtatctttatcaggtaatacaaaaattggaaacagtaatatattttatcctttttcttcgataggaagcgcacctcaggatttgaaatataaaggagagaaaagttttttaattataggaaacaataatacatttagagaaaatgtaacagttaatccaggaacggaaggtggaggcttgtatactaagattgaggataattgtttatttatggtaggagtgcatattgcccatgattgtatgattggatcaaatacaattttagccaataatgcaacactggcaggtcatgtagaaatagataacaacgcaattataggtggtaattctgcaattcatcaatttgttaaaattggaaaaaatgctatggttggtggtatgagtgggttagaaaaaaaccttattccctatgggctttatattggaataaggtcaaacatgaaaggtt

SEQ ID NO: 233849 - DNA, 769 bp, Unknown
  Bacterial polypeptide expressing nucleotide sequence isolated from the Sargasso Sea
aagcattatagacccaaaagcaaaaattgaaaaaaatgtaaaaattggccctttttgttatgttggttctaaagtccatttaaaagaaggtgtagaattaatttcaaatgttcatatagaaggtaatacaaaagtaggagtaggtacaaaaatttatccttttgcaagtattggaacagctcctcaagatttaaagtacaaaggtgaaactaacagtttagatataggtgaagccaacataattagggaatatgttacaataaatccaggaactataggtggaggaagtaaaactttagtaggaaacaattgtctatttatgatttcttctcatatcgcacacgattgcagaataggtaataacgtagtaattgcaaacaatgttcctttaggtggacatgtaacaattgaggataatgttgttattggaggtaattcagctgttcagcaatttacaagaattggaaggttggccatgataggtggaatgaccggtgtattaaaagatgttatcccttttggcctatcttttggcaatagaaattatttaaaaggtattaatttaattggattaagaagaaaaaaatacgataacaaaaaaataatggaattggatcaagcatacaaaaaaatattttcatctaacaatcttcacgaaaatctgagtaaaattaatggtgaatttaaagaaaatgaattagtgcaagaggttactaaatttatagaaaatgataaaagaagacctatttgctcacctttatctgaataa

SEQ ID NO: 233850 - DNA, 520 bp, Unknown
  Bacterial polypeptide expressing nucleotide sequence isolated from the Sargasso Sea
agagagggcgttactgttcatagaggcactgtccaagataaaagcataacatccataggatccgataatcttttgatggcatattctcatgttgctcatgattgcgttgttggggacggaaatgtttttgcaaacaatgctggtatagcaggacatgttaatgttggtaataatattacaataggagcacttacgactattcatcaattttgtaacataggtgattattcatttattggaatgaatacatcaattaatatggacatccccgcatttgttaaagttgctgccgaccccgctagaataattgggcttaattcagttggtatgagtagaaatgatatcagctctgaatctatatcccttattaaaaaagcttataagcttgtttatagaaagggttttaaaattgatgaagcaattaaaaaattaaaggaactcaataaagatcaaaatgattcttttttagatatatttataaaatctttagagatatctgaaagaggaattttaagataag

SEQ ID NO: 233851 - DNA, 518 bp, Unknown
  Bacterial polypeptide expressing nucleotide sequence isolated from the Sargasso Sea
tacggttaacccaggaactcaaggaggaggacttcatacaataataaagaacaactgtttatttatggtgggagcacatattgctcatgattgtcaaataaggtcgaatgtaattttagcaaataatgcaacattagcaggtcatgttgaaattgatgattatgcaataataggtggtaattctgcagttcatcaatttgtaaatataggtaaaaatgcaatgataggtggaatgagtggagttgaaaaaaatattataccatatggactttatactggaataaggtgtaatctaaaaggtttgaatattgttggtttaaaaagaaagggtttatcaaataaagatatattaacaatacgaactgcaactaattcaatttttaatattaatagttcaatagaggtcaatattaaagatttagatgataaattaaaattaattactgaaattaaagatataataaatttcattttaaaaaataaaaaaagaggcatttgtgtattaagcaatgattaaa

SEQ ID NO: 233852 - DNA, 682 bp, Unknown
  Bacterial polypeptide expressing nucleotide sequence isolated from the Sargasso Sea
atcaataatacattctcatgtaaatattgttggatatactaaaataggaaaaaaaaatgaaatatatccattttgttcaataggaacaccaccacaagatttaaaatataaaggtgaaaaaaattcaataattataggtgacaataataaacttagagagtacgtaaatataaaccctggtacagagataggtggtggagtaactcaaataggaaataacaatcttttcatggtttattgtcatgttgcacatgattgtttaattatggacaatatcattttagctaataatgttcagataggaggacatgttactataaataagagagctatagttggtggaagttgtgcaatacaccaattttgtagaataggagaacatgcaatgataggtggaatgacaggtgttttaagcgatgtcatcccttacggtttatctttgggtaatagaaatatcttaacaggattaaatttaattggtttaagaagatctggagtatcaaatcaagatattaaaattattcaaaatgcttacgatataatttttagcaatagtaattttagaaaaaacatagaaaatcttagtctaatttcaaaaaaaaataaatatgtaaacgaaattactaaatttataaattcagataaaaaaaggcctatatcattacctacgaatatatcatga

SEQ ID NO: 233853 - DNA, 633 bp, Unknown
  Bacterial polypeptide expressing nucleotide sequence isolated from the Sargasso Sea
cgacagttggaaaaaataatgttttttatcaattctgtaccattggtgaagatactccagataagaaatttaaaggtgaagaaacaactcttgagatcggagatgaaaatatctttagagagggtgtgactgttcatagaggaactgttcaagatacaagcacaaccataattggtaacaagaatttatttatggcatatgctcatgttgctcatgattgtgtcgttggaaatgataatgtttttgctaataattcaggtatagctggtcatgtaactgttcgcaacaacgtgactataggtgctttaactactattcatcagttttgtcagatgggagactattcttttgcaggcatgaatgcttcaatcacaatggacgtaccttcatatataaaagtagcatcaaatcctgctagggttgttggtctaaattcagtaggcatggaaagaggaggtattgataaggaaacaataaccattcttaaaaaagcatataaaattatttataggaaaggatttaatttaaaggatgcaattaagaaagttgaatctatggattctagcgaaatccaagaagtccgaaattttatagactctattaaatcttccgaaagaggcattctcagatagg

SEQ ID NO: 233854 - DNA, 666 bp, Unknown
  Bacterial polypeptide expressing nucleotide sequence isolated from the Sargasso Sea
aatgatacacaaaaccgctatagttgattcaaatgctaaaatctctaaaaatgtaacaataggtccatattctgtaattggtcctgatgtagaaattggagagggtacaattgttcaatctcatgttaatataaaaggtaatactattataggtagtaataataaaatttatccatttgtatctataggaaatgatccacaagatttaaaatttaaaggtgaaaaaacatcattagagataggtgataataataaaataagagagtacgtaactattaatccaggtactaaaggtggtggtggtaaaactaaggttggtaataattgtctgtttatggtttcttctcacattgctcatgattgcatagttggtgataacgttattttagcaaataatgttccattaggaggtcatgctcatgtaggtgataatgccatattaggtggcaattcagctgtacagcaattcactagagttggcaaatttgcaatgataggcggtatgtgtggtgtagtaagagatgtgataccatatggtatagcacatggaaacagaagtatattgcaaggattaaatctaattggtttgagaagaaaaaatattccaaataaagaaatattatcccttagtgaagcttataaaaaaatatttaagaatgaaaattt

SEQ ID NO: 233855 - DNA, 424 bp, Unknown
  Bacterial polypeptide expressing nucleotide sequence isolated from the Sargasso Sea
atgatacatacctcaagtgttattgataaaaaagcaaggattggaaaaaatgtaaaaattggacccttttgctttataggacccggagttgaaattagtgaagatgtcgaattaatttcaaatgttcatatagaaggtaataccaaagtaggaaagggaacaaaaatttttccttttgctagtattggaacacaacctcaagacctaaaatttaaaggtgaaaacaatagcttagaaataggtgaaaaaaatactattagagaatatgtaactattaatcctggtacagaaggtggtggaggaaaaacaattataggaaacaattgtctctttatgatttcatcccatgtagcacacgattgttctgtaggaaatgatgttgttatagctaacaacgtcccacttggaggacatgtaacaatag

SEQ ID NO: 233856 - DNA, 554 bp, Unknown
  Bacterial polypeptide expressing nucleotide sequence isolated from the Sargasso Sea
gatgatacacaaatcagcaattatagatcctaaatctaaaatttcatcaaatgtaaatattggtccatttacagtaataggtcctaatgtagaaattggagaaggaacatttattcagacacatgttaatatcacaggtaatacaaaaataggaaaaaataacaggatttttccttttgcatcaataggaaatattccccaagatttaaaatataacggagaagaaacaaaacttatcattggggatggaaatacaataagagaaaatactactattaatacagggactgtcggcggtggaaatataacaaagataggaaacaataatttattgatgataggtgttcacatagctcatgattgctcaattggaaataacgtaataattgcgaacagtggtgctattgctggtcatgcggttattgatgacgatgttattattggaggaaattgtggagttcaacagtttacaagaattggtaaaatggcaatgattggtggtatgacgggtgtttcaagagacgtaataccttatggattgtcattaggaaatc

SEQ ID NO: 233857 - DNA, 655 bp, Unknown
  Bacterial polypeptide expressing nucleotide sequence isolated from the Sargasso Sea
ctggtgatccataaaactgcaataataaataaaaactcaaaaatatccgaagatgttgaaataggaccatattgtattgtaggtcccgaagttgagattggtaaaaatactgtactgcactcacatgttaatttagttggtaatactaaaataggaaaaaataatgaaatatttccgtttgcttcaataggcacacctccacaagatctgaaatataaaggagaaaaaaattccttagtaattggtgataataataaatttagagagtatgttaatataaatccgggaacaaaaaatggaggtgaagtaactaaaataggaaataataatctactaatggtgtattgccatgttgcccatgattgtaatttatcaaataatattgtgttagctaataatgtacaagttggtggacatgtaactatagacgacaatgcaatagttggtggaagctgtgctattcatcaattttctagaattggcgaatccgctatgatcggaggaatgacaggggttttaagtgatgttataccatatggactttcaattggaaatagaaatagtttggttggattaaatttaattggattaagaagattaaaaatatcaaatgaaaatataaaaataatgcaaaaagcatatgatattatattta

SEQ ID NO: 233858 - DNA, 604 bp, Unknown
  Bacterial polypeptide expressing nucleotide sequence isolated from the Sargasso Sea
ttggtacaccgccacagggatttgaaatataaaggtgaaaaaaattctataattattggtgataataataaacttagagaatatgtgaacattaatccgggtacatctcagggaggcacaattactaaattaggcaataataatttattaatggtttactgtcatgtagcacatgattgtaatcttggagataatatagttttagcaaataatgttcaggttggtggccatgtcataatagaggataatgcaatagttggaggtagttgtgctatacatcaattttcaagaattggtagttatgcaatggtaggtggaatgactggagtattaagtgatgtaattccatatggtttatcattaggaaatagaaataatttagttggtctaaatcttataggacttagaagggcaaaaatttcaaatgaagatattaaaatattacaaaaattttatgataaggtattttataaccaatatttcagatctaatattgaaaatttaaatactgaaataaaagaaaataaatatgtcaaaatcataattgattttataaattctgataaaaagcgaccaatatccttgccagaaaatattaaatgat

SEQ ID NO: 233859 - DNA, 688 bp, Unknown
  Bacterial polypeptide expressing nucleotide sequence isolated from the Sargasso Sea
caataacacaaagatacactcacatgttaatattgatggaaatacatctattggttctggaaatgagatttttccatttgcctctatagggactcctccacaagatttaaaatacaaaggtgaaaaaaattcattagtaattggtgataataataaacttagagaatatgtaaatatcaatccaggaacagaacagggaggtggaacaacaaaaattggaaatgataatttatttatggtttattgtcatatagctcatgattgtaacattttaaataacatagttttagcaaataatgttcaagtaggtggtcacgttactatttataacaatgcaatagttggtggtagctgtgctatacaccaattttcaagaattggtgagtcatcaatggtaggaggtatgaccggtgtcctcagtgatataattccatatggattatcattaggaaatagaaataacctggttggtttaaatcttataggtttaagaagagcaagaatatcaaatgaaaatattaaaattatgcaacaagcctatgaaattatatttaaaaatgaaaattttagatcaaatattaataatttaagttcagaagtaaaaaataatgaatttgtaaataaaataattacttttattaattcagacaaaaaaagaccaatttcacttccagaaaataataaatga

SEQ ID NO: 233860 - DNA, 980 bp, Unknown
  Bacterial polypeptide expressing nucleotide sequence isolated from the Sargasso Sea
ctgtcgcagatcctgcgcatcttcacaaggacgtgttgccccaccctgggaagaatgtcgatctacgacattcgccgcccccaactcctgggcgtcttggcggcgatcgagaaacgcaaggcgttcaccaccgccgagaaggtccgcacctggttcaaccagttgttccgctatgccctggtcattgccgaggggttggaagtcaacccggccgccgacctggacgtggtggcagagcccaagccccccgtagcccacaatccctacctgcacctgcccgagatgcccgagttcctccagaagctccggctctacaacccccgtggctggcagacccagcttggcgtccggctgctgttcctgaccggggtgcgcaccggcgaactgcgattggccgaacccgaacagttcgacctcgacaggggcttgtggatcatcccaccgcagatcgtcaagcagctccaggatgaaatgcgcaaggcagggaagcggccgcaggatgtgcccccctatatcgtgccgctatccctgcaggccatcgagatcgtgcgctatctcctgggggtgatgcggccggcgcagaagtacttgctgtcacaccgcagcgaactcaagaagcgcatcagcgagaacaccctcaacaaggccgtgcagctcatgggctatgaggggcgcctgaccggccacggcatccgcggcactatctcgacggcgctcaacgagattggctacccgaagatttgggtggacgcgcagctttcccattccgaccccaacaaggtgagttcgtcctacaaccacgccaagtacgttgagccgcgccgtcggatgatgcaggactgggccgatcggctcgacctgctcgaacagggcgaagtggaagccgcgagcgcgcatctgaccatccgtatcgacggggcgccggcgatggcagaagtggaggaagcggtggatgcgaccctcgcgatggccgagcccac

SEQ ID NO: 233861 - DNA, 625 bp, Unknown
  Bacterial polypeptide expressing nucleotide sequence isolated from the Sargasso Sea
tggaaagaataatgttttttatcagttctgtttcataggtgaagatactccagataagaaatttaaaggtgaagaaacaactctagaaattggagatgaaaatatctttagagagggcgtaactgtccacagaggaactgtccaagataaaagcacaactataattggcaacaagaatctatttatggcatatgctcatgttgctcatgattgcgtcgttggtagtgctaatgtttttgcaaataatgcaggcatagccggtcatgtgaccgtaggcaataatgtgacaattggtgctttaaccactattcatcaattttgtcagatgggggactattcttttgcaggcatgaatgcttcaatcacaatggatgtgcctgcatacataaaagtagcatcaaatcctgcaagggttatcggtcttaattcagttggtatggaaagaggaggtattgatcaggaaacaataaccattcttaaaaaagcatataaaactatctatagaaagggatttaatcttaaggatgcaatagagaaagttgaatctatggagtccaatgatgtccaagaagtccgaaactttgtagactctattaaatcttcagaaagaggcattctcagatag

SEQ ID NO: 233862 - DNA, 406 bp, Unknown
  Bacterial polypeptide expressing nucleotide sequence isolated from the Sargasso Sea
attttaaaaaatgatataattttagctaatggggtacaattaggaggacatgttgaaattgatgattatggtattgtgggaggaatgacacctgttcatcaattttgtaaaattggaatgcatgcttttattggaggaggattaagagttgtacaagatgttcccccttatattattgctaatggtgaacctttaaaattttcaggcattaatattttaggtttaagaagaagaaaattttctagtgaagaacgaaacaatattaaaaaagtttataaattactatataattctgattataatacttcacaggctattaaaaaaattgaaagcacatttgaaataaatgatagtattcaaaatattattaattttattctttctagtaaacgaggtttaatataga

SEQ ID NO: 233863 - DNA, 575 bp, Unknown
  Bacterial polypeptide expressing nucleotide sequence isolated from the Sargasso Sea
tatgaatcaacccttagcatatgtacaccctggagcaaaaattgcaaaaaatgtagttgtagagccatttgcaacaattagcagtaatgttgaaattggagaaggaacttgggtaggttcaaatgttacaataatggagggggctagaattggtaaaaactgtaatatttatcctggtgcagttatttcaggagtgcctcaagatttaaaatttgaaggagaagagtcactttgtgaaattggggataatacaactattagggaatgtgttacaattaaccgaggaacaaaggatagagggacaactaagataggtgataattgtttaattatggcttattcacatattgctcatgattgttttgttggtgataattgtattttttccaatagttcaacattggctggacacattactgtaggtgattatgttattctttcgggatttgttgcagttcatcaattttgtaaaataggatcacatgcatttgtagcaggtggatcccttgttagaaaagatgtacctccctttgttaaagctgcaagagagccattgtcatatgtaggaataaatt

SEQ ID NO: 233864 - DNA, 468 bp, Unknown
  Bacterial polypeptide expressing nucleotide sequence isolated from the Sargasso Sea
aaaccataattggttgtaataatttatttatggcatacagtcatatcgctcatgactgcgtcatcaaagataattgtatcttatctaatgctgcatctttagctggacatgttacactgggtaacaatgtctctcttggaggttttacattagtacatcaattttgtgacataggtgattatgcatttagtggtctaggcacggtaatttcaagagatgttactccttatacgttagttgctggtaatcatgcccaagcatataaaattaattctgcaggccttaaaagaaaaggatttgatgattcagtcatatcatccctcgaaaaagtttttaaattatttataaaatctaaggcaggcagagagcaagcggaagcttctttccataaactaaaaattaaattaccagaagttgactatttcttaaattttataaaaaatagcgaaagaggagtaactagatagt

SEQ ID NO: 233865 - DNA, 409 bp, Unknown
  Bacterial polypeptide expressing nucleotide sequence isolated from the Sargasso Sea
tatgaacaatatccatccaacagcaattatcgatgaaaaagcagaactggggaatcatctttcaattggaccttattgtcgtattggtgcagaagtcgaacttggtgatggatgccagctaaaatctcacgttgttgttgatggcccctgcagaattggttccgaaaacattttcttccctttttccataataggaggtgatcctcaggatttaaaatttaatcaggaaaaaactcaactgattgtggggagtaacaatacatttcgtgaaggtgtatcagttcaccgaggtacaatcgggggaggaggcaaaactttaatcgggaacagtaatctcttgatggggtacgtgcatgttgctcatgactgtaggataggtaacaacaatatattagcaaactacacaggc

SEQ ID NO: 233866 - DNA, 614 bp, Unknown
  Bacterial polypeptide expressing nucleotide sequence isolated from the Sargasso Sea
attttcatcaataggatcagagcctcaggatttaaaatataataatgaaaagtcatatatagaaattggatctaataataagtttcgagaaaacgtaacaatcaatccgggcactgaagcaggtgggttaaaaactgttattaaaaataattgtttattaatggtgggatcacacattgctcatgattgtaaaataaattcaaatgtagttttggctaataatgctacactagccggccatgttgaaattgataataatgccattcttggaggcaattcagctgttcatcaatttgtaagaattggaaaatactcaatgattggtggaatgagcggagttgaaaaagatataataccatatggtctttacacaggtattcgagaaaatttaaagggcattaatctaattggtatgaaaagaaaaggtctcaatagctcttcaataaatgaaataaatataattataaaaaaaatatttcaacaaaatggaacaattacaaataatattgaaaaattaaattctaatgaaaaaaaaatattagaaattgaagaaattatcgattttattaataatagctcaaaaagaggattgtgtcctttagaaaatgaataaa

SEQ ID NO: 233867 - DNA, 613 bp, Unknown
  Bacterial polypeptide expressing nucleotide sequence isolated from the Sargasso Sea
atgatacacaactcaagcgtaatcgacaaaaaagcgaaaatatcaaaaaaaattagaataggaccattttgctatgttggaccagatgtagagttgaaagatgatgttgaattaatctcgaacgttcatatagagggaaatactaccatcggtaaaggaacaagaatctttccttttgcaagtattggaacgcaacctcaagatttaaaatttaaaggtgaaaagaataatttggtaataggagagaataatttaattagagagtatgttaccataaatcccggtactgaaggaggaggctccaaaacaataattggtaataattgtttgtttatgatttcttcacatatagctcacgattgtaagatcggaaataatgttataatcgctaacaatgttcctttaggaggtcatgttaccatagaggactccgttgttattggaggcaattctgcagttcaacaatttacgagaataggaaggcttgcgatgattggaggaatgactggagtattaaaggatgttataccttttggattatcaataggtaacagaaatttcttacaaggtcttaatttaataggtctaagaagacataaatacgataatcaaa

SEQ ID NO: 233868 - DNA, 661 bp, Unknown
  Bacterial polypeptide expressing nucleotide sequence isolated from the Sargasso Sea
cacatgtaaatatttttctggaaatgtaaaaattggtaaacggaataaaatatacccttttgtttctatcaatgacccgcaggatttaaagtatgctggagaaccgactaatctgataattggagacaataacaagatcagagagtatgtaacaattaatcctggaacagttggtggaggcggtaaaacagtaattggaaataattgtttatttatgatttcatcacatattgcccatgattgtcatgtaggaaacaatgtaatcattgcaaataacgttcctttaggaggtcatgtaataattgaagataacgttgttataggaggtaattctgcagttcaacaattcacaaggattggtaaaatggctatgattggtggaatgacaggtgtattacacgatgtaattccttacgggttgtcgacaggaaatagaaactcattacaagggttaaacttaataggcttgagaagagctaagtttgaaaataaagacattttaattttaagtgaggcatataaggagatttttgctacaaaggatgtcaatgaaaatataagtaaattgaacggctcttttcacgagaacccattagttaagaatgtaattgactttataacaaaagacaaaaaaagatctatttgtacaccattttcataa

SEQ ID NO: 233869 - DNA, 373 bp, Unknown
  Bacterial polypeptide expressing nucleotide sequence isolated from the Sargasso Sea
gatgatagataaaactgcaatcatagattcaaaagcaaaattagaaaaaaatgttcaagtaggtccttattgtgtaataggccctaatgttgagattggagaaaacactgttattcaatcacatgtaaatatttctggaaatgttaaaattggtaaagggaataagatatacccctttgtttctattaacgacccacaagatttaaaatatgctggagaaccaactaatttgataattggagataataataagatcagagagtacgtaacaataaatccaggaacagttggtggtggtggcaaaacaattattggaaataactgtttatttatgatttcatctcatatcgctcacgattgtcaggtaggaaat

SEQ ID NO: 233870 - DNA, 723 bp, Unknown
  Bacterial polypeptide expressing nucleotide sequence isolated from the Sargasso Sea
gatgattaataaacaccatacctctatagtttcagaaaaagctgaattaggctttaatgttactatcggaccttattgtattattaatgaaaatgttaaaataggaaataatgtgaatttagttgctcacacatatgttgatggtaatactacaataggtgataattgcaaattttttccttattgttcaataggtacttcgcctcaagacttaaaatataaaggtgaaaaatctatattaaaaataggcaacaataatatatttagagagtatgtcacagtcaatccgggcacagaaggaggaggtttagaaactataataggtaatgactgtttatttatgataaatgcgcacgttgcccatgattgtaagattggtaataacgtcattatggtaaataatgcctcaatagcagggcatgtaatcttagaagattatgctataatgggagctttatcaggagctcatcagttttgtagaattggaaaacattcgatgataggaggtttatcaggagtagatagtgacgtaataccatatggaactgtaataggtaatagagcatatctctctggcttaaatattataggtttaaaaagaagaggattttctaaagatactattcaagatcttagaaaagcctatggcttattattttcttctcaagaaggaacattttctgatagagtaaaggaagtatcagaagaatttttagataatga

SEQ ID NO: 233871 - DNA, 772 bp, Unknown
  Bacterial polypeptide expressing nucleotide sequence isolated from the Sargasso Sea
atgcatcatccttctgctattattgatccttcagccaaaatagatgaatctgtagaaataggaccattttctttaattggacctgacgtaactattggaaaagatactagaattgaatctcatgcaatattaaaaggaccgacaataattggtcaaagaaatcatgtgttccaattttctactgtcggagatggaagtcctgataagaaatataagaatgaaccgaccctcttaagaataggtgatgataatataattagagaaggggttactattcacagggggactatccaagataagggtgagaccattataggcaatagaaatttaataatggcctattcccatatcgcacatgattgcattttaggagatgatattgtgcttactaaccaagctgcattagcaggatctgtaaaggtaggtaatggagcaattctaggcgggtacgctatcgttcatcaattttgttctattggcagttatagtttttgtgcaatgggaagttctgttaataaagatgtacctgcttatgtcaaagtaagaggtaatcctgcaagaccttttggtgtaaatacaacaggaataaaacgtttaggttattctaaagaagttattgaatcgttgagatctgcttacagatccatttatagaaaaaaactaactgttgaagaagctatgtctgatttatctgatttgagagataaatatgatgaagtaaataccttcttgctatcaattgaagaatctacgagaggcatttctcgttaat

SEQ ID NO: 233872 - DNA, 702 bp, Unknown
  Bacterial polypeptide expressing nucleotide sequence isolated from the Sargasso Sea
aatgatacacaaatctagcgtaatagatccaaaagcaaaaattggaaaagatgtaaaaattggacctttttgttttattggaccaaaagctcaattagataatggcgctgaattaatttcaaatgtccatattgaaggaaatacaaaaataggaaaaggaacaaaaatatatccttttgcaagtattggaacagcgccacaagatttaaaatacaaaggcgaggagaacagtttagaaattggtgataataacgttatcagggagtacgttactattaatccaggaacagctggcggaggaagtaaaacagttattggaaataattgcttatttatgatttcatctcatatcgctcatgattgcaaaataggaaacaatgttgttattgctaacaatgtacctcttggaggtcatgttacgattgaggactcagttgtcattggaggaaattcggctgttcaacaattcaccagaataggaagattagctatgattggaggaatgaccggtgttttaaaagatgttattccatttggtttgtcttttggaaatagaaattatctaaaaggtataaatttaataggtttaagaagaaagaaatatgataacaaaaaaattatggaactagaccaagcatacaaaaaaatattttcttctaagaatcttcaagaaaacttaagcaaaataaatggtgaatacaa

SEQ ID NO: 233873 - DNA, 616 bp, Unknown
  Bacterial polypeptide expressing nucleotide sequence isolated from the Sargasso Sea
aatgaatacatcagacatgaaagcttttgaagaaggcgacattttagtgggggcaacccttttaaataatccaaacgacgatcacgctggtcctggaagaatcattcaatttgacagcgatttaaatctcaaaggaacattgtggacagataacaccacgcatctcgtaggaggcttaaaatttgactcaaataaagatctttgggcttttgatagccaaaactgctctgccattaaagtaaatgcatctggagagcaaagtgatcaggctgatttcggtgatcgatcgttttctaacgtgaacttcttaggtaatggagaaatcctactcggagagcatcttacaggtgatgagagcaataataaggctttagagggaccaaggaagttgggtacggtgcttccgttcatgccaggcactgaaagatatggggatggaaacatctataaatactctcaagacggtaatcacattgaaacttatgaaaccgaaacgcacggcggcatgccaggattcctaggtgtgacctcctctgcaatcacaccggatgaatcaaagattatttatatctctgaattgggtaatcgtatttttcagtttgatatagaaaataat

SEQ ID NO: 233874 - DNA, 676 bp, Unknown
  Bacterial polypeptide expressing nucleotide sequence isolated from the Sargasso Sea
atgaatacatcagacatgaaagcttttgaagaaggcgacattttagtgggggcaacccttttaaataatccagaggatgaccatgctggtcctggaagaatcattcaatttgacagcgatttaaatctcaaaggaacattgtggacagataacaccacgcatctcgtaggaggcttaaaatttgactcaaataaagatctttgggcctttgacagccagaactgctctgccatcaaagtgaatgcatctggagagcaaattgatcagtctgattttggagatcgatcgttctctaatgtgaacttcttggataatggtgaggttctactcggagagcatctcacgggcgatgagagcaataacaaagcgctagagggaccaaggaagttgggtacagtgcttccgttcatgccaggcactgaaagatacggggatggaaacatctataaatactctcaagatggtaatcatattgaaacttatgaaaccgaaacgcacggcggcatgccaggattcctcggtgtcacctcctctgccattactccggatgaatcaaagattatttatatctctgaattgggtaatcgtatttttcagtttgatatagaaaataataatcaattagatgatctcattacctatgaacccgacagcgggaacatggtgatgcaatcgg

SEQ ID NO: 233875 - DNA, 1825 bp, Unknown
  Bacterial polypeptide expressing nucleotide sequence isolated from the Sargasso Sea
atggaaactcagttactcgacatacatgatgatccgctgtcgcaacgcctcgcgcaggtgtttggctaccgtgactttagggacggtcagcgcgaggttatcgaacgtgtatgcagtggtgaggactgccttgtgatcatgcccactggcggcggtaagagtctgtgttaccaattgcccgcactgctgatgccaggcatcactatcgtagtatcaccgctgatttcattgatgaaagatcaggtcgatagcctgttgcagacgggtgttaatgccgcctatttaaactcctcgcagccgcgggagcagagtgtagaggtgctgaggcagctgcatcgaggcgagctaaaactgctatatgtgtctcctgagcggttacttactggcgattttatcgagcgcatgcgctccctgccgttatcgatgtttgccattgatgaggcgcactgcatcagtcaatggggacacgattttcgtcctgaatatgccgcccttggccagttaaagcagttctttccccatgtgcctatgatggcgctcaccgccacagcggatcaggcgacgcggcaaaatatttgcgagcgcctagggattaatccctttaggttactatcgagtttcgatcggcccaatatccgctatacggttgccgaaaaactcaatgccgcgaatcaattacgacagtttttactgcaacagaatggcagtagcggcattgtctactgcagcagtcgtcgccgtgtggatgaggtggctgaacggcttactctacaagggtttcatgctaaggcataccatgcgggcatgacgccccaagagcgcggtgaagtgcaggatagcttccttaaagatcaaattgatatcgtggttgccaccgtagcctttggtatggggattaacaaatccaacgtgcgctttgtggtgcattacgatatccctaagagcatcgaagcctattatcaagaaaccggtcgagcggggcgcgatggactcgaggccgaagcctttatgctgttcgatcctgccgatattgggcgggtgcgccatcttatcgagcagtcggaaccagggccgcagcagcaggtggattttcataaactcaataccatggctgcatttgcagaggcacaaacctgtcgtcgccaagtgttgctgcattacttcgatgaaagcgcgctagagccctgcggtaactgcgatatttgtctcgacccgcctaaacgttataacggcaccgaagatgcgcagaaggtactatcttgcatctatcgtcttgggcagcgctttggtatcaatcacttgattgaagtcttgcgtggctccaagggcgccgcgattgtggatagagggcacgataaactcagcacttggggcataggcaaagacaaaagccatgaatattggctgagcgtgatccgtcagctgattcacttagggcttgcgagccaagatattacgcggggctcgtccatcaccttaaacccttcggcaaggccgatccttaagggcgaggtggcgctaatgttggcggagccacggattcaactgaccaacattaagcgcaaagtcactcaatcgcgggcaccgctgaattacgaccgtaaactgtttgcgaggctaaaagccctacgtcgtactattgctgaagaacaggatgtgccgccctatctagtgtttaacgatgcgaccctagcggaaatggcggccatgatgcccaccagtccaggtgaaatgctggcggttaacggtgttggtgaacgcaaactcagccgatttggcgacgatttcctcgatgaaattgccgcctatttagcgggggaataat

SEQ ID NO: 233876 - DNA, 784 bp, Unknown
  Bacterial polypeptide expressing nucleotide sequence isolated from the Sargasso Sea
atgactaacattcataaaacagcagtcgtatcacccaaatcaaatattgatccaagcgttgcaattggagcttattctatcatcggggatgatgtagagattggtaagaatacaaagatagaatcgcatgttgtcatcaagggaaacacaaagatcggtgaggataatcacttttattctttttcctccattggagatgatcctcaagataagaagtacttaaatgaggaaactgcagttgaaatcggagatagaaatacaatcagagaatatacgaccatcaacaagggaacaatccaggatgtaggcgttacaagaatgggcaatgacaactggatcatggcctatgttcatattgcacatgactgtcaagttggaaacaatacgatatttgctaacaacacaacattaggtgggcatgttgaggttggggataacgtaatatttggtggtttttcgggtgcccatcagttctgtaaaataggagcgcatagcttcttgggtatgtactcaggagtggccagagatcttcctccatatgtcattgtgatgggccaacctgctgaacccagagggatcaaccttgagggtttaaaaagaagagatttctcaaaggatcaaataaggaacattaaatcagcatacaaagccttgtatatgtctgatcttcgattagaagaggctataaaggcaattcaggatcttggtgatataaacggagaactcaatattcttgttgattttctgaacaatacgacaagaggcattgtcagaaaaggctaat

SEQ ID NO: 233877 - DNA, 778 bp, Unknown
  Bacterial polypeptide expressing nucleotide sequence isolated from the Sargasso Sea
atgtctattcacgaatcctcaataattcatccttctgccgaaatcgatgaaaatgttgaaatcggacctttttgtattgtaggagaaaaagttaaagtaaaatctggttcaaaactgctttctcatgtagttttgaaggggccaacaactgttggaaagaataatgttttttatcagttctgtaccataggtgaagatactccagataagaaatttaaaggcgaagaaacaactctagaaattggagatgaaaatatctttagagagggcgtaactgtccacagaggaactgcccaagataaaagcacaactataattggcaacaagaatctatttatggcatatgctcatgttgctcatgattgcgtcgttggtagtgataatgtttttgcaaataatgcaggcatagccggtcatgtgaccgtaggcaataatgtgacaattggtgctttaaccactattcatcaattttgtcagatgggggactattcttttgcaggcatgaatgcttcaatcacaatggatgtgcctgcatacataaaagtagcatcaaatcctgcaagggttatcggtcttaattcagttggtatggaaagaggaggtattgatcaggaaacaataaccattcttaaaaaagcatataaaactatctatagaaagggatttaatcttaaggatgcaatagagaaagttgaatctatggagtccaatgatgtccaagaagtccgaaactttgtagactctattaaatcttcagaaagaggcattctcagatagg

SEQ ID NO: 233878 - DNA, 427 bp, Unknown
  Bacterial polypeptide expressing nucleotide sequence isolated from the Sargasso Sea
atgatacacaaatctagtgttatagatcctaaagcaaaaattggcaaaaatgtaaaaattggccccttttgttttattggtcctcaggtccaattagacgatggtattgaattaatttctaatattcatattgaaggtaatacaaaaataggaaaaggaaccaaaatttatccttttgctagtattggaaccgcaccacaagatttgaaatataaaggtgaagcaaacagtttatatattggagaaaataatgttatcagagaatatgtaactattaatcctggaacatctggtggaggaagcaaaacaactgtaggaaataattgtttactcatgatttcatcgcatgtagcacatgattgcaaaataggaaataatgtagttatcgctaataatgtcccattaggtggacatgttacaatagagg

SEQ ID NO: 233879 - DNA, 784 bp, Unknown
  Bacterial polypeptide expressing nucleotide sequence isolated from the Sargasso Sea
atgaatcaaccattatcatatgttcatccagcagccaaaattgcaaaaactgtagtaattgagcctttcacaactattgcaaaagatgttattatcggagaaggtacctggataggttcaaacgtaacaattatggaaggtgccagaattggaaagaattgctcagtatttccaggtgctgttatttcagctatacctcaagatttaaaattcaaaggcgaggaaactaccgcagtaattggagacaatactgttatcagagagtgtgtaaccattaatagaggaacaaactggaggaaaaaaactgaaattggtaaaaattgcttaataatggcttactgtcatatagcacacgactgtaaagttggcgataactcaatattttcaaataattcaacactagcaggacatgtaactgttcaggactatgtaattcttgcaggtatggttgctgttcatcaattttgcaacattggtcgtcatgcttttattgctggtggatcattagttagaaaagatattcccccatttgtaaaagctgcgagagagccactctcatatgtcggtattaattcagtaggcttaagaagaaggggctttgaatctgaaaagattagagagattcaaaatatttatagaattctttatcaaaaaaaattcaacaacactcaagccattgatataattgaggctgaggttgaggcaacaacagcaagagatgagatattattgtttataaaaaactcacaaagaggaattatgaaaggttacgttcaaaattaat

SEQ ID NO: 233880 - DNA, 784 bp, Unknown
  Bacterial polypeptide expressing nucleotide sequence isolated from the Sargasso Sea
gatgactagtattcataaaacagcaatcgtttctccaaaatcaaatattgatgacagcgttgaaattggagcgtattcacttattggtgatgatgtagtcataggtaaaaacacaataatagattcacatgtagttattaagggaaaaacaaaaattggtcaagataatcatttttatcctttctcctctattggagatgaccctcaagataagaaatattcaaacgaaaatactgaagttgagataggcgatagaaatacaatcagagagtatacaacaattaacaaagggaccattcaggatataggtactacaagaatggggaatgataactggattatggcctatgttcatattgcccatgactgtcaaattggaaacaacacaatatttgctaacaacacaaccttgggtgggcatgttgaggttggagattatgtgatttttggtggtttttctggcgctcatcaattttgtaaaataggagcacatagcttcctaggcatgtattctggtgtggcgagagatttaccaccttatgtaattgtcatggggcaaccagctgaaccaagaggaatcaatcttgaaggcctaaaaagaagagatttttcagaggatcaaattagaaatatcaaatcagcatacaaagccttatacatgtctgatcttcgactagaagaggcaatcgagtcaattcaagatctgggagatattaacggtgaaatcaatattcttgtcgattttttaactaatacgacaagaggcattgtaagaaaaggctga

SEQ ID NO: 233881 - DNA, 784 bp, Unknown
  Bacterial polypeptide expressing nucleotide sequence isolated from the Sargasso Sea
atgactaagattcataacacagcagtcgtatcacccaaatcaaatattgacccaagtgttgaaattggagcatattcaattattggagatgacgtagagattggcaagaatacaaagatagaatcacatgttgtcatcaagggaaaaacaaagatcggtgaggataatcacttttattctttttcctccattggagatgatcctcaagataagaagtacttaaatgaggacactgcagttgaaatcggagatagaaatacaatcagagaatatactaccatcaacaagggaacaatccaggatgtaggcgttacaagaatgggtaatgacaactggatcatggcctatgttcatattgcacatgactgtcaagttggaaacaatacgatatttgctaacaacacaacattaggtgggcatgttgaggttggggataacgtaatatttggtggtttttcgggcgcccatcagttctgtaaaataggagcgcatagcttcttgggtatgtactcaggagtggccagagatcttcctccatatgtcattgtgatgggccaacctgctgaacccagagggatcaaccttgagggtttaaaaagaagagatttctcaaaggatcaaataaggaacattaaatcagcatacaaagctttgtatatgtctgatcttcgattagaacaggctataaaggcaattcaggatcttggtgatatcaacggagaactcaatattcttgtcgattttctaaacaatacgacaagaggcattgtcagaaaaggctgat

SEQ ID NO: 233882 - DNA, 647 bp, Unknown
  Bacterial polypeptide expressing nucleotide sequence isolated from the Sargasso Sea
aatgagtaatatacatcagaccgcaataatagatgcatcagcattaattcatgatagtgtcaaaataggtccttactcagtaattggtccagatgtaagaattgcggagaaatgtgaattgaaatcgcatgtggttctcaaaggaccaagcaatattggtccaggaaataaatttttctctttttgtgtaattggtgaagatacacctgatttaaaatacaaaggagagaaatctggtcttgaaattggagaaaataatacatttcgggagttttgcaaagtccatagaggaacagaggtagatttagggtatacaaaaatcggtgacaacaatttaatcatgcctggagttatgatagctcacgattgtgtaattggtgatggaaacatcttagttgataattcagctcttgctgggcatgttgttttgggtgatcacgtaactctaggtgggtatacattaatccaccagttttgtaagttaggatcctattctttcacaggcctctctgctcatataactatggatgttccagcttttacaagagtagctggaatgccaacaaaacaggcaggtttaaattctattggtttggaaagaaatggattcattaaagaagaaattatgaatctcaaaaaagcataca

SEQ ID NO: 233883 - DNA, 382 bp, Unknown
  Bacterial polypeptide expressing nucleotide sequence isolated from the Sargasso Sea
aatgatagatagcaaatctttaatacatgagtcagcgtctattgctgataatgtgaaaataggggcatatgttgttatagataaaaacgtatcaataggtgagggtactgttataaaagagtatgctgtaattagagagaatactactattggtaaaaacaatttgatttatcaatttgcaacgattggcgaagaacctcaagatcttaaatatcatggtgagcatactacatgcactatagggaataataatatcatacgtgaatacagtagcattcatagaggaactgaagatggtatctctgatactgaaataggcaataataatctattaatggcttatacacatattgcacacgattgtgttattgccaatgattgt

SEQ ID NO: 233884 - DNA, 784 bp, Unknown
  Bacterial polypeptide expressing nucleotide sequence isolated from the Sargasso Sea
atggtacataattcaagtgttgtcgataaaaatgcgaaaattggaaaaaatgtaaaaattggacctttttgttatgtaggtcctaatgttgaattgtctgaaagtgttgaattgatctcaaatgtacacattgaaggtaatacaataataggtaaaggaactaaaatttttccttttgcaagcatagggactattcctcaagatttaaaatacaagggagagtcaaatagcgtggtaattggggaaaataatatgataagggaatatgttaccattaatcctggaacagaaggtggaggaggtaaaacaataataggaaataattgtctatttatgatttcatctcacatcgcccatgattgtaaagttggcaataacgttgtaatagccaacaatgttccattaggaggtcatgttacacttgaagactcagtagttatcggtggaaattcagcggtacagcaatttacaagaataggaagattggcgatgattggaggtatgacaggagtacttaaagatgttattccatttggcttatcatttggtaacagaaattatttacaaggcatcaatttaattggattaagaagaaaaaaatacgaaaataaaaaaattttggaattagactcggcttataaaaaaatattctcttctgagaagcttcatgaaaatttagctaaaattaatggtgaatttaaagataatgatttagttaaagaggtagtagattttatagcaaaagataaaaaaagacctatttgtacgccattagctaaataat

SEQ ID NO: 233885 - DNA, 784 bp, Unknown
  Bacterial polypeptide expressing nucleotide sequence isolated from the Sargasso Sea
aatgatacacaagtcaagcgtaatagacagcaaagccaaaataggtaaggatgtaaaaattggacctttttcatttgtcggtcctaatgttgaattaaaagatggagttgagctagtttcaaatgttcacatagaaggaaataccaaaattggaaataatacaaaaatatttccatttgcaagcattggaactcaaccccaagatttaaagtacaagggggaaaataatagtttagaaataggtgattacaacgtaataagggagtacgtaaccgtaaatcctggtacttccggtggtggtagtaaaacaataataggtaataattgtttatttatgatttcttcacatgtagctcacgactgtgtgattggtaataatgtagtaattgcaaacaatgtccctttaggaggacatgtgactatagaagactcagttgttataggaggaaattctgctgttcaacaatttacaagaattggaagattagcaatgataggaggaatgacgggtgtcttgaaagatgtaattccatttggtctatcgttcggaaatagaaattacctgaaaggaattaacctaattggtcttagaagaaagaaatatgataacaaaaaaattctagaattagatcaagcttataaaaaaattttttcaacaaacaatttgcaggagaacctaaataaaattaatggcgaatttaaagctaatgaattggtgcaagaggtgactaaatttattgaaaaagacaagaaaagacctatttgcacacctttatctgaataa

SEQ ID NO: 233886 - DNA, 772 bp, Unknown
  Bacterial polypeptide expressing nucleotide sequence isolated from the Sargasso Sea
tatgcatcattcttctgccattattgatccttcagcaaatatagacgagtctgtagatataggacccttttcattgattggtccaaatgtaacgataggtaaagacacaaaaatagaatctcatgtcatcttaaaaggcccaacaacaattggtgagagaaatcatgtatttcaattttcaacagtcggtgacggcagtcctgacaagaagtataagaatgagcctactttattaactattggtgacgacaacataattagagaaggagttactattcatcggggtactatacaagataaaggcgaaacgcttattggcaatcgaaatcttataatggcttattctcacatagcacatgactgtgttttgggagacgatatagtgctgaccaatcaggctgcattagctggatcagtaaaggtaggagacggagctattttaggtggttatgcaattgttcatcaattctgctctatcggtagctatagtttttgtgcaatgggtacttctgtaaataaagatgtcccagcatatgtaaaagtaagaggaaatcccgcaaaaccttttggaataaatactacaggaataaaacgtttagggtattcaaaagaagtgattgaatcattacgttccgcatacagatctgtctatagaaaaaaactaaccatcgaagaggctatggtagatttatcagagatgagaaacaaatacgatgaagtaaataacttcctcaaatctattgaagagtctacgaggggcatttctcgttga

SEQ ID NO: 233887 - DNA, 1825 bp, Unknown
  Bacterial polypeptide expressing nucleotide sequence isolated from the Sargasso Sea
catggaaactcagttactcgacatacatgatgatccgctgtctcaacgcctggcgcaggtgtttggttaccgtgactttagggacggtcagcgcgaggttatcgaacgtgtatgcagtggtgaggactgcctggtgatcatgcccaccggcggcggtaagagtctgtgttaccagttgccagcactgctgatgcctggcatcactatcgtggtatcaccgctgatttcattgatgaaagatcaggtcgacagcctgttgcagacgggggtcaatgccgcctatttaaactcatcgcagccgcgggagcagagtgtagaggtgcttaggcagttgcatcgaggcgagctaaaactgctgtatgtgtcccctgagcggttgctgacggctgattttatcgagcgcatgcagtcactgccgctgtcgatgtttgctattgacgaggcgcactgcatcagccagtggggacatgattttcgacccgaatatgccgcccttgggcagttaaagcagctctttccccatgtgccaatgatggcgctcaccgccaccgcggatcaggcgacgcgacaaaatatttgtgagcgcctagggattaatccctttagattactatcgagtttcgatcggcccaatattcgctatacggttgccgaaaagctcaatgccgcgaatcaattacgacagtttttactgcaacaaaatggcagtagcggcattgtctactgcagcagtcgtcgccgtgtggatgaggtggcagaaaggctcaccctgcaagggtttcatgctaaggcttaccatgcgggcatgacggcagaagagcgcggcgaagtgcaggatagcttccttaaagatcaaatagatattgttgttgcgaccgttgcctttggtatggggattaataaatcgaacgtgcgctttgtggtgcattacgatatccctaagagtatcgaagcctattatcaagaaactggccgagcgggccgtgatggactcgaggccgaagcctttatgctgttcgatcctgccgatattgggcgagtgcgccatcttatcgagcagtctgagccaggaccgcagcagcaggtggatttccataaactcaataccatggccgcctttgccgaggcacaaacctgtcggcgccaagtgctgttgcattacttcgatgagagcgcgttagagccctgcgggaactgcgatatttgtcttgacccgcctaagcgttataacggcaccgaggatgcgcagaaggtgctttcttgtatttatcgactcggacaacgctttggtattaatcatttgattgaagtattgcgtggctccaagggcgccgcgattgttgatcgtggccacgataagctcagcacttgggggattggtaaagataagagccatgaatattggctgagtgttattcgccaactgatccatttgggcttagcgagtcaagatattactcgaggctcgtccattactttaaatccttcggcaagaccgatccttaagggcgaggtggcgctgatgttggcagagccgcgtatccaactcaccagcataaagcgtaaaacgacacagtcgagagtgccgcttaactatgatcgcaagttatttgcccgccttaaaacactgcgccgcaccattgccgaagagcaggatgtgccgccttatctggtgtttaacgatgctactttagcggaaatggcggctatgatgccgacaagccctggggaaatgctggcagttaatggcgtgggggaacgtaaactcagtcgatttggcggtgagttcctcgacgaaatagccgcttatttagcgggggagtag

SEQ ID NO: 233888 - DNA, 778 bp, Unknown
  Bacterial polypeptide expressing nucleotide sequence isolated from the Sargasso Sea
gatgatagataaaactgcaatcattgacccaaaaacaaaattagataaaaatgttcaaataggtccttatagtgtaataggtcctaatgttgagattggcgaagacactattattcaatcacatgtcaatatttctggaaatgttaaaattggtaaagggaataagatatacccctttgtttctatcaatgagcctcaagacttaaaatatgcaggagaaccaacttatctgataattggggataataataagatcagagaatatgtaacaataaatccaggaacagttggtggaggtggcaaaacagttattggaaataattgtttatttatgatttcatcgcatattgctcatgattgtcaggtaggaaacaacgtaataattgcaaataatgttccattaggaggacacgcaatcattgaagataatgttattataggaggtaattctgcagttcaacaattcacaagaattggtaaaatggcaatgattggtggtatgacaggtgtgctgcatgacgtaattccttatggattatcaacaggaaacagaaattctttacaaggattaaatttaataggccttagaagagctaagttcgaaaacaaggatattctaggtttaagtaaagcttacaaagaaatttttgcaacaaagaatatcaatgaaaatataagtaaattgaacggttcttttcaagaaaatccattagttaagaatgtaattgactttataacaaaagataaaaaaagatctatttgtacaccattttcgtaa

SEQ ID NO: 233889 - DNA, 772 bp, Unknown
  Bacterial polypeptide expressing nucleotide sequence isolated from the Sargasso Sea
atgatacatgaaacagcaatagtaagcgacaaagctgatatagattcatcagtttcagttggtccttattgtataattgatgaaaatgtaactataggaccgaatacaattcttgagagtcatgttgttataaaaaaaaatgtggtaataggtaatggtaatcatttttatcaattctcatctattggagagcagccacaagatcttaagtttaagggcgaagactctctattaatcattggtaataataatatatttagagagtattgtactttaaatcgaggaacaaaagagggtattaataaaactcaaatagggtcgaataatttgttcatggcttatactcatgttgcccatgattgtgtgataaaagatcattgtattttctctaatgcggcttctttagccggacatgtgatagttggtgattatgtatctttgggcggatttacacttgttcatcaattttgtaatattggtgattatgcattcagtggattgggtacagttatctctagagatgtaactccttatacactaatagctggaaatcatgctaaagcttacaaaattaacactgaaggtctaaagagaaaaggctttgatagtgatctcattgtagcgcttgaaaaaactttcaaattattcataaagtctaaaaaaactagagaagaagctactattatattcaataattataatttcaattacaatgagacaaagtatttttttgactttttaagaaatagttcaagaggagtcactagatagt

SEQ ID NO: 233890 - DNA, 706 bp, Unknown
  Bacterial polypeptide expressing nucleotide sequence isolated from the Sargasso Sea
atggggttaaaatttggagaaaataataatttaatttcccatgtttctatcgttggagatacaactatagaaaatagtaatactttttatccattttgttcaattggttctgaacctcaagatttaaaatataataaagaaaaatcgtatctaaaaattggtagtaacaataaatttagagaaaatgttaccgtaaatccaggaacatctggaggagggttaaatacaataataggaaataattgcttatttatggtgggttctcatgtagcacatgattgtataataaaatcaaatgttattttagccaataatgccactcttgcaggacatgtagaaattgataataatgcaattttaggtggtaattcagctattcatcaatttgttagaataggaaaatatgcaatgattggcggtatgagtggtgttgagaaagatatcattccatatagtttgtatacaggaataagagaaaatttgagaagcttaaacctaattggtttaaaaagaaaaggcttaacatctaatgcaatcaatgaaattaaaaatcttataaatataatttttgataaaaatgatacaattgaaaataatattaaaaataattttgttgaaagttctgaaattttagaaattaaggaaataattgaatttctgaactcagattcaaaaagaggtattaccacttttgaaaatgactaaa

SEQ ID NO: 233891 - DNA, 624 bp, Unknown
  Bacterial polypeptide expressing nucleotide sequence isolated from the Sargasso Sea
aggataatcacttttattctttttcctctattggagatgatcctcaagataagaagttcttaaatgaggaaactgcagttgaaatcggagatagaaatacaatcagagaatatacgaccatcaacaagggaacaatccaggatgtaggcgttacaagaatgggcaatgacaactggatcatggcctatgttcatattgcacatgactgtcaagttggaaacaatacgatatttgctaacaacacaacattaggtgggcatgttgaggttggggataacgtaatatttggtggtttttcgggtgcccatcagttctgtaaaataggagcgcatagcttcttgggtatgtactcaggagtggccagagatcttcctccatatgtcattgtgatgggccaacctgctgaacccagagggatcaaccttgagggtttaaaaagaagagatttttcaaaggatcaaataaggaacattaaatcagcatacaaagccttgtatatgtctgatcttcgattagaagaggctataaaggcaattcaggatcttggtgatatcaacggagaactcaatattcttgtcgattttctaaacaatacgacaagaggcattgtcagaaaaggctaat

SEQ ID NO: 233892 - DNA, 784 bp, Unknown
  Bacterial polypeptide expressing nucleotide sequence isolated from the Sargasso Sea
tatgaatcaaccactatcatatgttcatcctgcagccaaaattgcaaaaactgtagtaattgagccttttacaactattgcaaaagatgttattattggagaaggtacctggataggttcaaacgtaacaattatggaaggtgctagaattggaaagaattgttcaatatttcctggtgctgttatttcagctatacctcaagatttaaaattcaaaggtgaggaaactaccgcagtcattggagacaatactgttattagagaatgtgtaaccattaacagaggaacaaactggaggaaaaaaactgaaattggtaaaaactgtttaataatggcttactgtcatatagcacacgactgtaaagttggtgataactcaatattttcaaataactcaacactagcaggacatgtaactgttcaggactatgtaattcttgcaggtatggttgctgttcatcaattttgcaacattggtcgacatgcttttattgccggtggatcattagttagaaaagatattcccccatttgtaaaagctgcgagagaaccactctcatatgttggtattaattcagtgggcttaaggagaaggggttttgaatccgaaaagattagagagattcaaaatatttatagaattctttatcaaaaaaaattcaacaacactcaagctataaatataatcgaagctgaggttgaggcaacaacagcaagagatgagatattattgtttataaaaaactcacaaagaggaattatgaaaggttacgttcaaaattaa

SEQ ID NO: 233893 - DNA, 508 bp, Unknown
  Bacterial polypeptide expressing nucleotide sequence isolated from the Sargasso Sea
ggtgtaacaattcacagagggactattcaggatcgtggagaaactcttatcggcaatagaaatcttattatggcttattctcatatagcgcatgattgtgtattgggtaatgatattgttttaactaatcaggctgcactagctggttctgttcatgttggagatggcgcaatacttggaggctatgccattgttcatcaattttgctctattggaagttatagtttttgtgcaatgggcagcgcagtaaataaagacatacctgcatatgtgaaagtcagaggtaatccagctaaaccttttggagtaaacgtaacagggatcaaaaggatcggatattctaaggaaactatagaagctttaagatctgcttatagatcaatttatagaaagaagcttatggtcgatgaggctgtgaaggatcttgattctttaagaaaggattttagagaagtagatatattcttaagttcaattgaagactctaagagaggcatatctcgttgat

SEQ ID NO: 233894 - DNA, 991 bp, Unknown
  Bacterial polypeptide expressing nucleotide sequence isolated from the Sargasso Sea
gctgtcgactggatcaacaataacgtttaaaagagctcttgctttctccttagtatttggagttttgttgatctcaatgaaacttcaatttactctggctcagaaaattcctttcaacgaaacaaataaaacatttgtaatttacaaaggagatagcctttataaggtgcttgcaagattagaagaatcgcatgatttgcaagacacttcttggcttaaacttaaatatatttttagagactctccagtgataaaagctggccgttataccattcatcgcggcacagatttgagttctttaattgatcgttttgtaattggagatgtagagaaatttaaatttacaatcattgagggaacagtcgccaaaaataacctaaataaattggaaaaaattcttgcagataacgatttatcatttgaaattcctcagaaagttcttgatatcttttcttctgaaagtttgatattgcccgatacttatttcttttctgatcaagaagatctgataaaagttttagaggattcaaagttatctcttcaagagcatgtagatgctttatgggccaataaaccaacagataatccgttaaaaagtacatctgaagctttggtgcttgcatccattattgagagggaagccttattaaattctgagcaaactatcatagcttctgtatttcttaatagattgaaaaagaacatgaaattacaggcagatccaacttcatcttatggttattacaaggattatggcgaaaaaattggtagagctgttctagatgataagaatgaatttaatacttatttcataaaaggtttaccaccatctccaatatgttttccatcaaaaggagcaattgaagcggcaattctctcgtctccaggagagtatttgtactttgttgcaaaaggggatgggtcccatgttttttcaaaaacctacgaagaacataataaagctgtaaaaaagtatatttatcctaaataa

SEQ ID NO: 233895 - DNA, 802 bp, Unknown
  Bacterial polypeptide expressing nucleotide sequence isolated from the Sargasso Sea
atgcgggagaaaattcctgaggtggctgtttccatccatccccaggccatagtcgaggaaggcgccgagctgggtgaggacgtggtggttgaagccttctccatggttggcccgaaggccaagctgggtgacggttgccgggtcctccatcatgccaccgtcgagggccgggtcgacatgggccgcaacaacgtcgttcatccctatgccctcatcggcgggttgactcatgacctcaagtatgagggcggggaacccggcctgcgcatcggggacgacaacgtctttagggaatacgtcaccgcgcacgtagccaccggagccgacgacgagaccataatcggctcgggtaacgtcttcctggcctacagccacgtcgcccacgattgcgtgatcggcaaccacctcgtcatgagcagccattccgcccttgccgggcacgtggaggtagccgaccacgtcaacgtcgcctggggcgcgggggttcaccagttttgcagactgggcaggcattgcatggtttcggcctgttccaagctcgtccaggacgtgccccccttcatgcttgccgatggttcgcctgcggaggttcgttcgatcaacaaagtgggaatggaacgatccggcttttccggagacgaagtcgaaactgcccgtggagtctttaaggttctctataagtcggacttgaaccgcagccaggcgatcaagcgcctggagaatgagttttcggccgccagcccagacatcgtgggtgagattatagagtttgcccgctccagcgaacgagggctcgcttgag

SEQ ID NO: 233896 - DNA, 712 bp, Unknown
  Bacterial polypeptide expressing nucleotide sequence isolated from the Sargasso Sea
gatgatagataaaagtgcaatcgtagacccaaaagcaaaattagacaaaaatgttcaaataggtccttactgtgtaataggccccaatgtggagattggagaaaacactattattcaatcacatgttagtatttctggaaatgtaaaaattggtaaagggaataagatttacccttttgtttctattaatgatccacaagatttaaaatatgctggagaaccaactaatcttataatcggagacaataataagatcagagaatacgtaacaataaatccaggaacagtaggcggtggtagcaaaacagttattggaaataactgtttattcatgatctcatcacatattgctcatgattgtcaggttggaaataatgtaataattgctaacaatgttcctctaggtggtcatgcaataattgaagataatgttgtaataggaggaaactctgcggttcaacaattcacaaggattggaaaaatggcaatgattggtggaatgacaggtgttttacacgatgttattccttacggattatcaacaggaaatagaaacacattacaaggattaaacttaataggcttaagaagagcaaagtttgaaaataaggacatattaggtttaagtgaagcttataagaagatttttgccacaaagaatatcaatgaaaatataagtaaattgaatggttcttttcagaaaatccattag

SEQ ID NO: 233897 - DNA, 781 bp, Unknown
  Bacterial polypeptide expressing nucleotide sequence isolated from the Sargasso Sea
atgatacacaactcaagcgtaattgacaaaaaagcaaaaatatcaaaaaaaattaaaataggacctttctgctatgttgggccaaatgtagagttgaaagatgatgttgaattaatctcgaacgttcatatagagggaaatactaccatcggtaaaggaacaagagtctttccttttgcaagtattggaacgcagcctcaagatttaaaatttaaaggtgaaaaaaataatttagtaataggagagtataatttaattagggagtatgttaccataaatcccggtactgaaggaggaggttctgaaacaataattggtaataattgtttgtttatgatttcttcacatatagctcacgattgtaagatcggaaataatgtcataatcgctaacaatgttcctttaggaggtcatgttaccatagaggactccgtcgttattggaggtaattctgcagttcaacaatttacgagaataggaaggcttgcgatgattggaggaatgactggagtattaaaagatgtcataccttttggactatcaataggtaatagaaatttcttacaaggtcttaatttgataggtctaagaagacataaatatgaaaatcaaaaaattatcggactagataaagcattcaaagaaatattctcatccaaaaatttacatgaaaatctaaacaaaataaatggtgagtataaagataacgagctagtaggtgaagtaataagatttatagaaaaagataaaaaaagaccgatttgcgcaccacaaaattaga

SEQ ID NO: 233898 - DNA, 772 bp, Unknown
  Bacterial polypeptide expressing nucleotide sequence isolated from the Sargasso Sea
aatgaattcaaattttatctcagataaggcaaaaatacattcttcagttaatattggcccatattgtgtaataggtgaaaatgtagaaataggtgaaaattgtaccctccattcacatgtagtgatcactggaaatactaaaatcggagataacaatatattttatccatttacttccataggaaatgcccctcaagatctaaaatatataggcgaggagagctatttagttattggaaataataatacttttagagaaaatgttacagttaatcctggaacagatggtggcggtttatatactcgtataaaagataattgtttatttatggtagggtgccacatagctcatgattgtataattggttcaaatgtaattttagctaacaatgctactttagcaggtcatgtagaaattgataataacacaatcattggtggaaattcagcaattcatcaatttgttcaaattggtaaaaatgctatggtcggaggtatgagtggattagaaaaaaatcttataccgtatggtctctacattggtatacgctcaaatctaaaaggattaaatgtaattggattaaaaagaaaaggtctagaaaacaacaaaattaaaactttaaatcattttattaaaaatatttttgataaaaatgactcaatagaaaataatatcaataaattagatgatgaaataaaatctactgaagaagtttcagaaattatcaaatttattgaaaaatcaaatcaaagaggtttagtaactctataa

SEQ ID NO: 233899 - DNA, 769 bp, Unknown
  Bacterial polypeptide expressing nucleotide sequence isolated from the Sargasso Sea
atgactaattctgttattgattcttctgcaaaaattgataagtctgtcaaaattggccccttctgtgtgataggacctgatgtagaaatcggacctgattgtattttacattctcatgttgttattaaagggcctactaaaatcagttctggaaatatcttttttcaattttctactattggtgaggatacacctgataaaaaatatgatggcgaagcgaccaccctagagattggtaaaaacaatatttttagagaaggcgtaactgtgcatcgaggaactattcaagataagtcaaaaactgttataggtaatgataatttattcatggcatattcacatattgctcatgactgcattgttggagaccaaaacgtatttgcaaatactgctggcttggctggacatgtaacggttggaaataatgtgatccttggcgccgtgactctagttcatcaattctgttctttgggcgatcattctttcactggcttaaatacattaataactatggacgttccagcattcgtcaaagttgctgcaaatcctgcaagaccaataggtctgaacaccgttggaatgcagcgcaacaattttgataatgactcagttaatttgattaaaaaagcctacagaattatctatagaaagggttactctcttgatgaagcaattaagcgcttacacttattgaatcaggataaaaatccagcactcaccacttttatttcctctattgaaagatctgaaagaggtttagtccgatagg

SEQ ID NO: 233900 - DNA, 667 bp, Unknown
  Bacterial polypeptide expressing nucleotide sequence isolated from the Sargasso Sea
atgaaaccctgccaacactggtcgcaggtcgagtacctgcacctgacggtgagcaaccccaacatccacctgaaggggcgccacagctactactccggcgcctgggacggtccgtttgaagaggccgccgtgcgctatctgcacggcgacagcttcagccgcagcccagagaccggctgggagccgctctggcacatcgatcagctgcatatcggcgactatgtgcaaatagccgccggggtgaagatcctgatgggcggcaaccacacccacaatgccgacttcatcagcacctatccgtttgccgatctcgacgccctccagcgcagctatcgccctgccggcgacacccgcatcggcaacgacgtctggatcggcatggacgccatgatcatgccgggggtcaccgtcggcgacggggccatcatagcggcgcgcgccttggtcaatcaggatgtgccgccctatgccatggtggcaggcacgccggccaaggtgatcaggatgcgttttgctgaggaggagatcgcccgcttgcaggcgctggcctggtgggagtggccggatgcccaggtgcaggccttgttgccgctgatccagcaaggcgaagtggccctgctggaacaggccgccgcgcactggcagcaggcccggcagccatcatgac

SEQ ID NO: 233901 - DNA, 756 bp, Unknown
  Bacterial polypeptide expressing nucleotide sequence isolated from the Sargasso Sea
aatgatacataaatcgagcgaaatagataaaaaagcaataatttcaaaaaatgtaaaaataggacctttttgttatgtgggaccaggagttgagttaaaggaaaatgttgagcttatttctaacgtccatattgagggcaatacatcaataggaaatggcactaaaatatttccattcgcaagtataggtacccaacctcaggatttaaaatttaaaggtgaaaaaagtactctttcaatcggagaaaataatgtaattagggagtatgtaacaatcaaccctggaacagaaggaggtggattacaaacagtgattggtaataattgtttgtttatgatttcatcacatatagcacacgactgtaaaattggaaataatgtaattatagcaaataatgttcctttaggaggacatgtaactattgaagactctgccataatcggtggaaactctgcagtccaacagtttactagaattggtagactagccatgattggtggaatgacgggcgtacttaaggatgtaataccgtttggtttatctattggtaacagaaattatttacaaggtttaaatttaattggtttacgaagacagaaatatgataaccaaaaaattatgggtctagataaagcttttaaagaaatatttgcttctaaaaatctctatgaaaatctgagtaaggttaatggtgaatataaagataatgaattagtaagcgaagtcatcaaatttatagaaaaagataaaaaaag

SEQ ID NO: 233902 - DNA, 454 bp, Unknown
  Bacterial polypeptide expressing nucleotide sequence isolated from the Sargasso Sea
atggatgaaaataacactgagttatcaggcgatgaaatacaatctaatccaatagataatgatgctaaagctgtaaacataggttccggtgttagagttgacggacgaatagaaggagcagaaacttcagatatttccggaactctcacaggaactttaaaatcttcaaatataaatattaacagtaagggtgcttttagtggagacatgtcaggtcaagaaataaccatttctggaagtgttgatggtgagataaattcagaggattatttgatcgttaataactctgcaaacattaaaggagtaattgaatacgcttcattacaagtaagttatggtgcaagaatccaaggcacactaagacataggggcactgtccaatcctattcaccagtttctactgatgaagttaaagaagatgagattaatgaaaatcaagaggttgatcaataat

SEQ ID NO: 233903 - DNA, 940 bp, Unknown
  Bacterial polypeptide expressing nucleotide sequence isolated from the Sargasso Sea
catgaaagcttttgaagaaggcgacatcctagtgggggcaacccttttaaataatccagaggacgatcacgcaggtccaggacgtatcattcagtttgacagtaatttaaatctcaaaggaacattgtggactgataacaccacacatctcgtaggaggcttaaaatttgattcaaataaagatctttgggcttttgatagccaaaactgttctgccattaaagtgaatgcatctggagagcaaagtgatcaggctgatttcggtgatcgatcgttctctaacgtgaacttcttggataacggtgaggttctgctaggagagcatctcaccggtgatgagagcaataacaaagcactagagggaccaaggaagttgggtacagtgcttcctttcatgccaggcactgaaagatacggggatggaaacatctatagatactctcaagacggcaatcatattgaaacttatgaaactgaaacgcacggcggcatgccaggattccttggtgtcacctcctctgcaatcacaccggatgaatcaaagattatttatatctctgaattgggcaatcgcatttttcagtttgatatagagaacaataaacaattagatgatctcattacctatgaacccgatagtgggaacatggtgatcgcaattggcttctcaagtgacggagacttttattccatcaaagcaaacttcagagaaggcttttctctctgccatcatgatcttgagtcgggatcaattcttgatgaaaaagtattgcctgggcctggatgggcaacattgtgcttatgcaatgatggccaacatgctgtgcttgggaatttctttaatggtcaaattggtaaatttgagctggcatctggtcagatggtagcgagcgctgaaacagaggttgagcgatcagtggccggaattgcagagttttaa

SEQ ID NO: 233904 - DNA, 940 bp, Unknown
  Bacterial polypeptide expressing nucleotide sequence isolated from the Sargasso Sea
catgaaagcttttgaagaaggcgacattttagtgggggcaacccttttaaataatccaaacgacgatcacgctggtcctggaagaatcattcaatttgacagcgatttaaatctcaaaggaacattgtggacagataacaccacgcatctcgtaggaggcttaaaatttgactcaaataaagatctttgggcttttgatagccaaaactgctctgccatcaaagtgaatgcatctggagagcaaattgatcagtctgattttggagatcgatcgttctctaatgtgaacttcttggataacggtgaggttctactcggagagcatctcaccggtgacgagagcaataacaaagcgctagagggaccaaggaagttgggtacagtgctccctttcatgccaggcactgaaagatacggagatggaaacatctataaatactctcaagacggtagtcatattgaaacttatgaaactgaaacgcacggcggcatgccaggattcctaggtgtcacctcttctgcaatcacaccggatgaatcaaagattatttatatctctgaattgggtaatcgtatttttcagtttgatatagaaaacaataatcaattggatgatctcattgcctatgaacccgaaagtggaaatatggttattgcaattgggttctcaagtggtggagacttttattccatcaaagcaaacttcagagaaggcttctctctctgtcatcatgatcttgagtcgggatcaattcttgatgaaaaagtattgcctgggcctggatgggcaacattgtgcttatgcaatgatggccaacatgctgtgcttgggaatttctttaatggtcaaattggtaaatttgagctggcatcgggtcagatgatagctagcgctgaaacagaggttgagcgatcagtggctggaattgcagagttttaa

SEQ ID NO: 233905 - DNA, 700 bp, Unknown
  Bacterial polypeptide expressing nucleotide sequence isolated from the Sargasso Sea
catgaaagcttttgaagaaggcgacatcttagtgggggcaacccttttaaataatccagacgacgatcacgctggtcctggaagaatcattcaatttgacagcgatttaaatctcaaaggaacattgtggactgataacaccacgcatctcgtaggaggcttaaaatttgattcaaataaagatctttgggcttttgacagccagaactgctctgccatcaaagtgaatgcatctggagagcaaattgatcagtctgatttcggtgatcgatcgttctctaatgtgaacttcttaagtaatggagaagttctactcggagagcatctcaccggtgatgagagcaataataaagcgctagaggggccaaggaagttgggtacagtgctccctttcatgccaggcactgaaagatacggggatggaaacatctataaatactctcaagacggtaatcatattgaaacttatgaaactgaaacgcacggcggcatgccaggattcttgggtgtcacctcctctgcaatcacaccggatgaatcaaaaattatttatatctctgaattgggtaatcgtatttttcagtttgatatagaaaataataatcaaatggatgatctcattacctatgagcctgatagtgggaatatggttattgcaattgggttctcaagtggcggagacttttattccatcaaagcc

SEQ ID NO: 233906 - DNA, 529 bp, Unknown
  Bacterial polypeptide expressing nucleotide sequence isolated from the Sargasso Sea
catgatacatccttcttctataattgatccaacagcaattattgctgattcagtagaaataggtcccttttgccttattggccctgacgttgaaatagatgaagatactaggattgaatcacatgtaattttgaaaggtcctacaaagattggtaaaagaaatcatattttccaattttctactttaggagatgggagtccagataagaagtataagaatgaaccaacaacactaactattggagatgacaatattgttagagaaggtgtcactatacatagaggtacagttcaagacagaggtgatacattaataggaaatagaaaccttattatggcctattctcacattgcacatgactgtgtattgggagatgacatcgttttgacaaatcaagcagctctggctggctctgtaactgttggggatggagctattttaggaggctatgccatagttcaccaattttgttcaatcggaagttatagtttttgtgctatgggtagtgcagtaaataaagacatacct

SEQ ID NO: 233907 - DNA, 740 bp, Unknown
  Bacterial polypeptide expressing nucleotide sequence isolated from the Sargasso Sea
tttgcgcagatcgggagaaatagtgccaattcattccagttcaataattgattctgcagcaaaaattcatgattcagttgaaattggccctttttgtacaattggagcagatgttgagattgaagcaggaaccgttttaaagtctcatgttgttgtaaagggaccttcaaaaatcggtcctcataatattttttttcaattttgtacaattggagaggacactccagataaaaaatataaggatgaaagaacacagttaatcataggatccaataatattttcagagagggagtgactgtccatcgaggcactattcaggataaagggctcaccaaaataggtgataataaccttctcatggcttatgctcatgttgctcacgactgtgaagtaggtgattataatgtctttgctaataactctggaattgccggtcacgtgaatgttggcaacaaagttaccataggtgctttgacgaccattcaccaattttgccagatgggtgattattcttttgccggaatgaattcttctattactatggatgttcctgcatttgtaaaagttgcttcaaaccctgctagagtggttgggttgaatacaattggtatggataggggtggaatttctaaagatactattcaaaaactcaaagatgcttacaggctagtttatagaaagagtctatctatcgaagaggcaattaaagcaattgaggccatggatctttccaacaatg

SEQ ID NO: 233908 - DNA, 766 bp, Unknown
  Bacterial polypeptide expressing nucleotide sequence isolated from the Sargasso Sea
acagcaattattcatgataaatctaaaatagatgactctgtagaaatcggccctttttgcattattaatgaagatgttgagattaaaaaaggaacaaagttattaagtcatgttgttcttaggggcccgacaataattggtgaggacaatattttttatcaattttctactattggagaggatacccctgataaaaaatttaaaggcgaaaagactaaacttgaaataggaaatagaaatatcttcagagagggcgttactgttcatagaggcactgtccaagataaaagcataacatccataggatccgataatcttttgatggcatattctcatgttgctcatgattgcattgttggggacggaaatgtttttgcaaacaatgctggtacagcaggacatgttaatgttggtaataatattacaataggagcacttacgactattcatcaattttgtaacataggtgattattcatttattggaatgaatacatcaattaatatggacatccccgcatttgttaaagttgctgccgaccccgctagaataattgggcttaattcagttggtatgagtagaaatgatatcagctctgaatctatatccctcattaaaaaagcttataagcttgtttacagaaagggtttaaaaattgatgaagcaattaaaaaattaaaggaactcaataaagatcaaaatgattcttttttagatatatttataaaatctttagagatatctgaaagaggaattttaagataag

SEQ ID NO: 233909 - DNA, 775 bp, Unknown
  Bacterial polypeptide expressing nucleotide sequence isolated from the Sargasso Sea
atgaaaatacattcgacagcaattattcatgataaatctaaaatagatgactctgtagaaatcggccctttttgcattattgatgaagatgttgagattaaaaaaggaacaaagttattaagtcatgttgttcttaggggcccgacaataattggtgaggacaatattttttatcaattttctactataggagaggatacccctgataaaaaatttaaaggcgagaagactaaacttgaaataggagatagaaatatcttcagagagggcgttactgttcatagaggcactgtccaagataagagcataacatccatcggatctgacaatcttttgatggcatactctcatgttgctcatgattgcgttgttggggacggaaatgtttttgcaaacaatgctggtatagcaggacatgtaaatgttggtaataatattacaataggagcacttacgactattcatcagttttgtaatataggtgattattcatttattggaatgaatacatcaattaatatggacattcccgcatttgttaaagttgctgccgaccccgctagaataattgggcttaattcagttggtatgagtagaaatgatattagctctgaatctatatccctaattaaaaaagcttataagcttgtttacagaaagggtttaaaaattgatgaagcaattaaaaaatcaaagggactcaataaagatcgaaatgattcttttttagatatatttataaaatctttagagatatctgaaagaggaatttaag

SEQ ID NO: 233910 - DNA, 478 bp, Unknown
  Bacterial polypeptide expressing nucleotide sequence isolated from the Sargasso Sea
aagcacttgggggaaactaaaataggttctagttgtttattaatggcatcaacgcatattgctcatgattgtatagtaggagacaatgtaattatgtctaatttatctacgctaggaggtcatgtggttttagaggattgggtagtattagggggtggtgttcttgttcatcaatttactaagattggtcagcatgcttttgtaggtggcggattccgggttacgcaagatgttcctccttatatattagcggcagaaaatccacttacttataaaggagtaaattcaactggtttaaaaagaagagggttttcattagaagaaagaaaggaaataaaaaaaatatatcaaatatattttcaatcaggaattaatagaaaaaaatctatcgggatagtacaatcagaactaccatcaacaaatataaaaaataaaattattgattttattctttcatctcaaagaggtattatttaat

SEQ ID NO: 233911 - DNA, 760 bp, Unknown
  Bacterial polypeptide expressing nucleotide sequence isolated from the Sargasso Sea
atgtctattcacgaatcctcaataatacatccttcttctgaaattgatgatgatgttgaaatcgggcctttttgtattattggagaaaaagtaaaaataaaatctggttcaaaattgctctcccatgtagttttaaagggaccaacaactattggtaaaaataatgttttttatcagttctgtactataggcgaggatactccagataagaaatttaaaggcgaggtaacaactcttgaaattggagatgaaaatatcttcagagagggcgtgactgtccacagaggaactgtccaagataaaagcacaacactaattggtaacaagaatctatttatggcttatgctcatgttgctcatgattgcattgttggtaatgataatgtttttgctaataattcaggtatagctggtcatgtaactgtaggcaataatgtgactataggagctttaaccaccattcatcagttttgtcagatgggagactattcttttgcaggtatgaatgcttcgataacaatggacgtaccttcatatataaaagtagcttcaaatcctgcaagagtagttgggctaaattcagtaggtatggaaagaggaggtattgatcaggaaacaataactattcttaaaaaagcatacaaaattatttatagaaaagggtttaatttaaaggatgcaatagaaaaagttgaatctatcgagtccagtaatatcctagaagtacgaagctttatcgactctattaaatctcaaaaag

SEQ ID NO: 233912 - DNA, 685 bp, Unknown
  Bacterial polypeptide expressing nucleotide sequence isolated from the Sargasso Sea
gatggagtatcaattgggcaataatacaacaattggcaataatacaacaatatgcagcggaacgacggttggtagtaatagtaaaatttttcataattgtagtattggagaaatcccacaagatttaaagtttacaggcgaggaaaccgaaacaataattggcaataatactataatacgtgaaaatgttactattaatcgaggtacatctgcgcttggtaaaacaacagtaggaaataatgtgctattaatggcagcggttcatattgctcatgactgtatagtaaaagataatgttattatggcaaatatgtctacacttggaggccatgttgagattcaagaatatgcttcattgggtggaggagttctagtgcatcaattttgtaaaattggatcacatgtttttattggtggtggatttcgtgcagtccaagacgttccaccctatattttagctgttggagaaccattaagatttggtggtataaattcaattggattaaaaagaagaggttactcttcagattcaatatctaaaattaaaaaagcctatagaatgtattttagatcagatttaacaagatcaatagcattagaaaagatgaaagaaaaattatctaataatgtagatgttgataatattattaactttattgacaatagtgaacgtgggattatttaa

SEQ ID NO: 233913 - DNA, 619 bp, Unknown
  Bacterial polypeptide expressing nucleotide sequence isolated from the Sargasso Sea
aatgattcacccttcttcaatagttgatgattctgccaaaattgataattcagtagaaattggacctttttgtcttatcggtccggaggtggaaatagacgcaggaaccaaaattgagtctcatgttattttgaaaggacctgcaaagataggaaaaggaaatcatatatttcagttttctactttaggtgatggaagtccagataagaaatataacaatgagcctactaccctagtaattggagatgataatatcattagggagggtgtaactattcacagaggcaccattcaagataggggtgaaactcttatcggcgatagaaatcttattatggcctattctcatatagcgcatgactgtgttttagaaaatgatattgttctaactaatcaggctgcgctagctggctctgttcatgttggagatggtgcaatacttggaggttatgccatagttcatcaattttgctctattggtagttatagtttttgtgcaatgggaagtgcggtaaataaggatatacctgcatatgtgaaagtcagaggtaatccagctaaaccctttggaataaacgtaacagggataaaaagatcggttattctaaagaaactatag

SEQ ID NO: 233914 - DNA, 751 bp, Unknown
  Bacterial polypeptide expressing nucleotide sequence isolated from the Sargasso Sea
atgaataatatccatccaaccgcaattatcgatgaaagagctgaacttgggaataatctctcaattgggcctttctgccgtattggttctgaagtcgaacttggtgatggatgccaacttaaatctcacgttgttctggatggtcccagcacaattggttccgaaaacattttcttccctttttcctttatagggggtgatcctcaggatttaaagttcaatcaggaaaaaacccagctaatcgttggcaataaaaatacatttcgtgaaggtgtatcagtccaccgaggcacaatcggtggaggtggcaaaactttaataggagacgggaatctcttcatggggtatgtacatgtagcccatgattgtaggataggaaaccataatatattagcaaactataccggcttaagtggccatgtttctttggatgactatgttactttaggcggacaaaatggagtggctcaatttcttaggataggttcctttgtctatactggggcaggatcactaatagaccgaaatgtacctccttactccactggatatgggaaccggtttgaagttaaaggtgtaaatatcgtcggcttgaaacgccaaaaatttagccgggaaaaaattgcagaaattcttgaaactcatagaatttattatcgttcagaacttaaaaatgacgaggcactacgtgtaattgaggaaactttcggggaaagtgatgctgtcaggacatttcttgattttatttatt

SEQ ID NO: 233915 - DNA, 603 bp, Unknown
  Bacterial polypeptide expressing nucleotide sequence isolated from the Sargasso Sea
catgtcccagattcatgccacatccctcgtcgaaaacggtgccgtcatcggtaaaaatgttgaaattggtccattctgtcacgttggggccaatgtcagtatcggagacgagtgtattttaaaatcacatgtggtgatcgatggttggaccaccctgggagaaaaaaataccatttatccttttaccagtatcggtggagaacctcaggatcttaagtatcaaaacgaaaaaacccttgtcaccattggcagtgaaaacatcattcgagaaggagttacgatacaccgcgggacgaatggaggaggaggagaaaccaatcttggagatcacaatctgctgatgggatatgttcatattgctcatgactgccatatcggaaatcacaatattctctcaaactatacgggtctcagcggtcactgcaccctggatgaccatatcaatctcggcgggcaaaacgggatcgctcagtttcttcatatcggctcgtatgtgtttaccggcggaggttctctaatcgaccgtaacatccctccttattccaccggtttcggcaaccgtttcgaagttaaaggggtcaacattgtcggactaaagaggaa

SEQ ID NO: 233916 - DNA, 584 bp, Unknown
  Bacterial polypeptide expressing nucleotide sequence isolated from the Sargasso Sea
attgttaatagagcaggatcgtagaatttcaagcctagtacatcccgcatccattattaatgaaaacgttaatataggaaaaaatgttaaagttggtccattttctataatagaagatggagtatcaattggcaataatacaacaattggcaataatacaacaatatgtagcggaacaacggttggtagtaatagtaaaatttttcataattgtagtattggagaaatcccacaagatttaaagtttacaggtgaggaaaccgaaacaataatagggaataatactataatacgtgaaaatgttactattaatcgtggtacatctgcgcttggtaaaacaacagtaggaaataatgtgctattaatggcagcagttcatattgctcatgattgtatagtaaaagataatgttattatggcaaacatgtctacacttggaggccatgttgagattcaagaatatgcttcattgggtggaggagttctagtgcatcaattttgtaaaattggatcacatgtttttattggtggaggatttcgtgcagtccaagatgttccaccctatattttagctgttggagaac

SEQ ID NO: 233917 - DNA, 491 bp, Unknown
  Bacterial polypeptide expressing nucleotide sequence isolated from the Sargasso Sea
attgtcgtgccagcgtcgagggcaagccggtctgctcggcagaaatcatctgcgcggaacagaagatatgagtttgatcgaccctcgcgccatcatcgaccctgcggctcgcttggcggatgacgtccaggtcggcccatggtcgatcattggtccggacgtcgaaattggcgagggtacggtgatcgcgtcgcatgtggtcatcaaagggccgacccgtatcggtcggcacaatcgcatctatcagttctcctcggttggcgaagatacgccggatctgaagtacaagggtgagccgacgcgcctggtgattggcgatcacaacgtgattcgcgagggtgtcaccatccatcgcggcaccgtgcaggatcgctccgaaaccaccctcggtgatcacaacctgatcatggcttatgctcacatcggccacgacagcgtgatcgccaatcattgtattctggtcacaacaccgcgctggccggtcacgtcca

SEQ ID NO: 233918 - DNA, 277 bp, Unknown
  Bacterial polypeptide expressing nucleotide sequence isolated from the Sargasso Sea
agggagctgggtggctatatatcacaagatgtcccgccttatattttagtggccgggtcaccgacagaatatagtggtataaatagtgttgggctaaagcgtagaggtttttcaaaaaaagatagacaagatattaaaaagatctataatattttttttcgatcaaaaaaaaaccgaaaagaaaatctgttaacgataaataaaaatttttctgataatgattatcttaaaacaattagtgggtttattcaaaatagcaagcgtggaattatttaga

SEQ ID NO: 233919 - DNA, 781 bp, Unknown
  Bacterial polypeptide expressing nucleotide sequence isolated from the Sargasso Sea
atgaaaattcatccaactgcaattgttcatgagaaatctcaaatacatgagtctgttgaaataggaccattttgcattattaacgaagatattgagattaaaaaaggaacaaaattattaagtcatattgttcttaggggcccgacaataattggcgaggataatattttttatcaattttctactataggagaggatacccctgataaaaaatttaaaggcgaaaagacaaaacttgaaataggagatagaaatatttttagagaaggtgttaccattcatagaggcactgtccaagacaaaagcataacctctattggatctgataatcttttgatggcgtattcgcatgttgctcatgactgtgttgttggagatggaaatgtttttgcaaataatgctggtatagcagggcatgttaatgtcggcaataacattacaataggagctctaagcacgattcatcagttttgtaacataggtgattattcatttattggcatgaatacatcaattaatatggacattccggcatttgttaaagttgctgctgatccggcaagaataattgggcttaatacagttggtatgagtagaaatgatattagctctgaatctatatccctaattaaaaaagcttataagcttgtttacagaaagggtttaaaaattgatgaagcaattaaaaaattaaaggaactcaacaaagaccagaatgactcttttttagatatatttataaaatctttagagatatctgaaagaggaattttaagataag

SEQ ID NO: 233920 - DNA, 579 bp, Unknown
  Bacterial polypeptide expressing nucleotide sequence isolated from the Sargasso Sea
aatgttatcaaattcatcatttatttctcctaaagccaaaattcattcttctgtaaaaataggtccattttgttatgttgatgataatgtcattattgataaaaattgtgaattaaaatcacatgtatcaatagtagggaatactactattggtgaaaataatattttttatcctttttgctcaattggttcaaatccacaagatttaaaattcaataatgaaaaaagttatttagttataggtaataagaatatatttcgtgaaaatgttacagttaatcctggcacaacaggaggggggttaaatacaaacattaaagataattgcctatttatggttggctcacatatagcacatgattgcaagatagactcaaatgttattttggcaaataatgcaactttagcagggcatgttgaaataggtcaaaatgcaattgttggaggaaactctgcaatacatcaatttgttcaagttggtaaatttgcaatgattggcggtatgagtggtgtagaaaagaatattttaccttattgtctatatattgggattaggactaatcttaaaggattaaattt

SEQ ID NO: 233921 - DNA, 691 bp, Unknown
  Bacterial polypeptide expressing nucleotide sequence isolated from the Sargasso Sea
catgaaaatacattcgacagcaattattcatgataaatctattatagatgactctgtagaaatcggccctttttgcattattgatgaagatgttgaaattaaaaaaggaacaaaattattaagccatgttgttcttaggggtccgacaataattggtgaagacaatattttttatcaattttctactataggagaggatacccctgataaaaaatttaaaggcgagaagactaaacttgaaataggagatagaaatatcttcagagagggtgttaccgttcatagaggcactgtccaagataaaagcataacttccattggatctgataatcttttgatggcatattctcatgttgctcacgattgtgttgttgggaatggaaatgtttttgcaaacaatgctggcatagcaggacatgttaatgttggtaataatattacaataggagctcttacgactattcatcaattttgtaacataggtgattattcatttattggaatgaatacatcaattaacatggacattcctgcatttgttaaagttgctgccgaccccgctagaataattgggcttaattcagttggtatgattagaaatgacatcagctctgaatctatatccttaattaaaaaagcttataagcttgtttacagaaagggtttaaaaattgatgaagcaattaaaaaa

SEQ ID NO: 233922 - DNA, 682 bp, Unknown
  Bacterial polypeptide expressing nucleotide sequence isolated from the Sargasso Sea
atgtcccaaattcatgccacatccctcgtcgaaaacggtgccgtcatcggcaaaaatgttgaaattggtccattctgtcacgttggggccaacgtcagtattggagacgggtgtattttaaaatcacatgtggtgatcgatggttggaccaccctgggagaaaaaaataccatttatccttttaccagcatcggcggagaacctcaggatcttaagtatcaaaacgaaaaaaccctggttaccattggcagtgaaaacatcattcgagaaggagtaacgatacaccgtgggacgaagggaggaggaggagaaaccaatcttggagatcataatctgctgatgggatatgttcatattgctcatgactgccatatcgggaatcacaatattctctcaaactatacgggtctcagcggtcactgcaccctggatgaccatatcaatctcggcgggcaaaacgggatcgctcagtttcttcatatcggctcgtatgtgtttaccggtggaggttctctgatcgaccgtaacatccctccttattccaccggtttcggcaaccgtttcgaagttaaaggggtcaacattgtcggactgaagaggaagggtttttccagggaagcaatcagtgaaattctggaagcacaccgcctttattttcgtgctgacctgaaaagcgatgagg

SEQ ID NO: 233923 - DNA, 577 bp, Unknown
  Bacterial polypeptide expressing nucleotide sequence isolated from the Sargasso Sea
atcaacccttggaattggatcaggcaacgtaatacgagaacatgttactatgaaccctggaacggggggaggcggaatggttaccgaggttggtgaccattgtcttttcatggttggagcacatgttgcccatgattgtcatgttggtgataacgtaattcttgccaacaatgcaaccttggctggtcatgttgaagttggcgactttgcgattttgggtgggttaagtgcaatccatcaattcgttcgaattggtagacatgctatgattggcggtatgtctggtgtagaaaatgacgtaatcccatatggttctgcgatgggcaaccgagcacatctatctgggttgaacgtggtcgggttaaaacgtagaggtttctctcgcgagactattcacgagatgcgtaaggcttatcgtttattatttgctgaagaagggacgatgactgaacgcatggaagacgttttagaaagttttggtcaagtcgaaccagtaatggaaataattcaattcatacagtctggcgcggatagttcaagagctatttgcaggccaaaatttaatcgtgcggcctaa

SEQ ID NO: 233924 - DNA, 355 bp, Unknown
  Bacterial polypeptide expressing nucleotide sequence isolated from the Sargasso Sea
atgtcccagattcacgccacatccctcgtcgaaaacggtgccgtcatcggcaaaaatgttgaaattggtccattctgtcatgttggggccaacgtcagtatcggagacgggtgtattttaaaatcacatgtggtgatcgatggttggaccaccctgggagaaaaaaatatcatttatccttttaccagcatcggcggagaacctcaggatcttaagtatcaaaacgaaaaaaccctggttaccattggcagtgaaaacatcattcgagaaggagtaacgatacaccgtgggacgaagggaggaggagcagaaactaatcttggagatcataatctgctgatgggatatgttcata

SEQ ID NO: 233925 - DNA, 608 bp, Unknown
  Bacterial polypeptide expressing nucleotide sequence isolated from the Sargasso Sea
catgactaattctataattgatccttcggcaaaaattgataaatcggttaaaattggaccattttgcgtaataggtcctgatgtagaaataggtccaaattgtattcttcattctcatgttgtaattaaagggccaactaaaattggaaagggaaatagtttttttcaattttcaacaattggggaagacactcctgataaaaaatatgcaggagaagcaactaccttagacataggagataacaatatttttagagagggagttacagttcataggggaactgttcaagaccaatctaaaactgtaattgggaacgaaaatctatttatggcgtatgtccatatagctcacgattgtattgttggtgagaataatgtattcgctaatgcaacttgtttagctggacatgtgaaggtaggaaataatgtagtcttaggtggggtaactctcgttcatcaattttgttctcttggggactactcatttactggaataaataccatcataacaatggatgtccccgcattcataaaagttgctgctaatccagctcgaccgataggcttaaacacagttggaatgcagagaaatggctttgataatgatt

SEQ ID NO: 233926 - DNA, 523 bp, Unknown
  Bacterial polypeptide expressing nucleotide sequence isolated from the Sargasso Sea
tatgatccatccttcagctgttattgcaaaaaatgcagaaattcacgaaacaacaaatattggcccattctgcattattggagatagagttaaaattggagaaaataataatttaatttctcatgtctctattgttggagatacaactatagaaaatagtaatactttttacccattttgttcaattgggtcagaacctcaagatttaaaatataataaagaaaaatcatatcttaatattggaagcaataataaatttagagaaaatgttactgtaaatccaggaacatctggaggggggttaaatacaataatagctaataattgtttgttcatggtaggatcgcatgttgcgcatgattgtaaaattcaatcaaatgtcattttagcaaataacgcaactctcgctggacatgtagaaattgatcataatgcaattttaggtggaaattcagcaatacatcaatttgttagaataggaaaatatgcaatgattggaggtatgagtggtgtgaaaaagata

SEQ ID NO: 233927 - DNA, 476 bp, Unknown
  Bacterial polypeptide expressing nucleotide sequence isolated from the Sargasso Sea
tatgccaataaataattcttatgtttcaaaaaatgcattaatacaccctagcgtaaagattggtcctttttgttatattggtgataatgtaaaaattgataaaaattgcgaattaaaatcacatgtatcaatattgggtaatacacaaattggtaaagataatattttttatcctttttcatctattgggtctgagcctcaagacttaaaatttgaaaaagaaaaaagttatctcattattggtgataataatacgtttagagaaaatgttactgcaaatcctggaacgaaaggtggagggcttaaaactttaataaaaaataactgtctttttatggtaggttcacatattgctcatgattgtcaaattgattcaaatgtaatactagctaataatgctacattagctggacacgttgaaattggagaaaacgcaataataggcggtaactctgctgtacaccagttcgtacaaa

SEQ ID NO: 233928 - DNA, 611 bp, Unknown
  Bacterial polypeptide expressing nucleotide sequence isolated from the Sargasso Sea
aatgactgatatacatccaactgccatcatacaccccgacgctgagatcggcgagaatgtgttcataggtcccttttgtaatgttggtaaatacgctaagttggcagagggtgtgcaactctactcccatgtggtagtggaaggacgcactacaattggcgcaaattcccgaatttttccatttgcatccatcggccatgaacctcaagatttaaaatttcatggggaaaaatccgagcttattattgggagagataataccatccgtgagcacgttaccttaaatcccggaaccgaagggggcggtatggtaactacaattggtgatggctgcctcttcatgatgagttcgcatgtagcccatgactgcgtcatcggtgacaatgtgattttggttaataacgcaacactagctggccacgttgtaattggtaattgggcgattattggcggactctccgcggtccaccaatttgtccggatcggccgtcatgctatggtcgggggtatgtcaggcgtcgaaaatgatgtcattccctatggttcagtagtcggaaacagggcgcatttatccggtctaaacctggtcggcctcaaacggcgggatttct

SEQ ID NO: 233929 - DNA, 748 bp, Unknown
  Bacterial polypeptide expressing nucleotide sequence isolated from the Sargasso Sea
taaatctaaaatagatgactctgtagaaattggccctttttgcattattgatgaagatgttgagattaaaaaaggaacaaagttattaagtcatgttgttcttaggggcccaacagtaattggtgaggacaatattttttatcaattttctactataggagaggatacccctgataaaaaatttaaaggcgagaagactaaacttgaaataggagatagaaatatcttcagagagggtgttactgttcatagaggcactgtccaagataaaagcataacttccattggatctgataatcttttgatggcatattctcatgttgctcacgattgtgttgttggggacggaaatgtttttgcaaacaatgctggtatagcaggacatgttaatgttggtaataatattacaataggagcacttacgactattcatcaattttgtaacataggtgattattcatttattggaatgaatacatcaattaatatggacattcccgcatttgttaaagttgctgccgaccccgctagaataattgggcttaattcagttggtatgagtagaaatgatatcagctctgaatctatatcccttattaaaaaagcttataagcttgtttacagaaagggtctaaaaattgatgaagcaataaaaaaatcaaaggaactcaataaagatcaaaatgattcttttttagatatatttataaaatctttagagatatctgaaagaggaattttaagataa

SEQ ID NO: 233930 - DNA, 787 bp, Unknown
  Bacterial polypeptide expressing nucleotide sequence isolated from the Sargasso Sea
tatgattcatccttcagctgttatttcaaaaaatgcagaaattcatgaatcaacacatattggtcctttctgtatcattggggatcaggttaaaattggagaaaataataatttaatttcccatgtttctatcgttggagatacaactatagaaaatagtaatactttttatccattttgctcaattggttctgaacctcaagatttaaaatataataaagaaaaatcgtatctaaaaattggaagtaacaataaatttagagaaaatgttaccataaacccagggacatctggagggggattaaatacaacaatatctaataattgtttatttatggtaggttcacacgtagcacatgattgtattattaaatcaaatgttattttagctaataatgccactcttgcaggacatgtagaaatcgatcataatgcaattttaggaggtaattcagcaattcatcaatttgttagaataggaaaatatgcaatgattggcggtatgagcggtgttgaaaaagatatcattccatatggcttatatacaggaataagagaaaatttgaaaagcttaaacctaattggtttaaaaagaaaaggcttaacgtccaatgcaatcaatgaaattaaaattctcataaatataatttttgataaaaatgatacaattgaaaataatattaaaaataattatgttgaaagttctgaaattttagaaattaaggaagtaattgaatttctgaattcaaattcaaaaagaggtattaccacttttgaaaatgactaa

SEQ ID NO: 233931 - DNA, 490 bp, Unknown
  Bacterial polypeptide expressing nucleotide sequence isolated from the Sargasso Sea
taatcgcggtacatctgcgcttggtaaaacaacagtaggaaataatgtgctattaatggcagcagttcatattgctcatgattgtatagtaaaagataatgttattatggcaaacatgtctacacttggaggccatgttgagattcaagaatatgcttcattgggtggaggagttctagtgcatcaattttgtaaaattggatcacatgtttttattggtggtggatttcgtgcagtccaagatgttccaccctatattttagctgttggagaaccattaagatttggtggcataaattcaattggattaaaaagaagaggttactcttcaaattcaatatctaaaattaaaaaagcctatagaatgtattttagatcagatttaacaagatcaatagcattagaaaagatgaaagaaaaactatctaataatgtagatgttgataatattattaactttattgataatagtgaacgtgggattatttaa

SEQ ID NO: 233932 - DNA, 601 bp, Unknown
  Bacterial polypeptide expressing nucleotide sequence isolated from the Sargasso Sea
atgtcccagattcatgccacatccctcgtcgaaaacggtgccgtcatcggcaaaaatgttgaaattggtccattctgtcacgttggggccaacgtcagtatcggagacgggtgtattttaaaatcacacgtggtgatcgatggttggaccaccctgggagaaaaaaataccatttatccttttaccagcatcggcggagaacctcaggatcttaagtatcagaatgaaaaaaccctggtcaccattggcagtgaaaacatcatccgagaaggagtaacgattcaccgtgggacgaagggaggaggagcagaaaccaatcttggagatcacaatttgctgatgggatatgttcatattgctcatgactgccatattggaaatcacaatattctctcaaactatacgggtctcagcggtcactgcaccctggatgaccatatcaatctcggcgggcaaaacgggatcgctcagtttcttcatatcggctcgtatgtgtttaccggcggaggttctctgatcgaccggaatatccctccttattccaccggttttggcaaccgtttcgaagtaaaaggggtcaacattgtcggtcttaagagga

SEQ ID NO: 233933 - DNA, 724 bp, Unknown
  Bacterial polypeptide expressing nucleotide sequence isolated from the Sargasso Sea
atgagaatccatccaacatcaattattgatccttcggcaaaaattgctagtgatgtgaaaattggtccattttgttcaattggagaagatgttgagattgaaagtggctcaaagattattagtcatgctgtcattaaaggacccacagtaattggaaaaaataattgtatttatcaattctcaactattggagatgatactcctgataaaaagtttaaaggagaaaaaacaaaactaattattggtaataataatatttttagagagggagtcacaatacaccggggaacaactcaagacgagtcagtaacaaccataggatcaaacaatttatttatgccgtttgcccatgttgctcatgattgtaaagttggaaatgacaatgtttttgctaatcttgcagcgctcgctgggcatgttcatgttggaagtaatgtatctattggtggaattacaactgttcatcagcattgtaaattaggagatttttgttttgcaggtatgaattcatcaatcacaatggatgttcctgcatatgtaaaagtagcatctgatccagctagagttgtaggaataaattctgtaggaatgtccagaaaaaatgtaagcaaagaaacaattaccaatatcaaaaaagcctacaaactggtatatagaaaaaatctaaaaatagaagaagcccttaaggagttaagtttactttatgagcaaactcaggatagtc

SEQ ID NO: 233934 - DNA, 465 bp, Unknown
  Bacterial polypeptide expressing nucleotide sequence isolated from the Sargasso Sea
attgcttatttatggtaggatctcatattgcacatgactgtgtgattaaatcaaatgttattttagcaaataatgctacattggctggacatgtcgaaatagataataatgcaattataggaggtaattcggcaatacatcaatttgtaagaattggaaaatatgcaatgattggaggcatgagtggtgttgaaaaagatataattccatatggtttgtatataggaattagagaaaacttaaaaagccttaacctcattgggttaaaaagaaagggcttaacgtctaatgatattaatgaaattaaaagtctaataaatttaatttttaataaaaatgacacaattgaaaataatataaataataattttattgcaaaatccgaaattatagaaattaaggaagtaattgaatttttaaactcaaattcaaaaagaggcattacaacttttgaaaatgactaaa

SEQ ID NO: 233935 - DNA, 667 bp, Unknown
  Bacterial polypeptide expressing nucleotide sequence isolated from the Sargasso Sea
aatgaatcaaccattatcatacgttcatccaggtgctaaagttgctaaaaccgttgttctagagccattttctacaattgataataatgttaaaattggagaaggtacatggattggatctaacgtaactattttagaaggtgcaagaattggaaaaaattgttcaatatttcctggagctgtaatatctggagttccacaagatttaaagtttaatggcgaggaaacaactgctgaaatcggtgataacactgtaataagagagtgtgttactataaacagaggaacatcggacagaaataaaactgtaattggaaaaaattgtttaataatggcatattctcatatagcacatgattgtcaggtaggtgattatagtattttttctaataactcaactttggcgggtcatgttaacgtaggtaatcatgtaactttagctggaatggttgctgttcatcagttctgtcacattggaagacattcatttgtagcaggaggatcacttgtcagaaaagatattccaccatatgtaaaagctgctcgagaaccactatcttatgttggtatcaattctgttgggttaagaagaaggggatttgaagctgatactattaagtctattcaaaacatatatagaatattatttcaaatgaagtttaataac

SEQ ID NO: 233936 - DNA, 553 bp, Unknown
  Bacterial polypeptide expressing nucleotide sequence isolated from the Sargasso Sea
tatgatccatccttcagctgttattgcaaaaaatgcagaaattcatgaaacaacacatattggccctttctgtatcattggggatggggtaaaaattggagaaaataataatttaatttctcatgtttctatagttggagaaacaactatagaaaatagtaatactttttatccattttgttcaattggttctgaacctcaagatttaaaatataataaagaaaaatcatatctacaaattggcagtaacaataaatttagagaaaatgttaccgtaaatccaggaacatctgcagggggattaaaaacaataatatctaataattgtttatttatggtaggttcgcatgtagcacatgattgtattattaaatcaaatgttattttagccaataatgccactcttgcaggacatgtagaaattgatcataatgcaattttaggaggtaattcagcaattcatcaatttgttagaataggaaaatatgcaatgattggtggtatgagcggtgttgaaaagatattattccatatggtttgtatacgggaataa

SEQ ID NO: 233937 - DNA, 568 bp, Unknown
  Bacterial polypeptide expressing nucleotide sequence isolated from the Sargasso Sea
attgttaacagagcaggatcgtagaatttcaatcctagtacatcccgcatccattattaatgaaaacgttaaaataggaaaaaatgttaaagttggtccattttctataatagaagatggagtatcaattggcaataatacaacaattggcaataatacaacaatatgcagcggaacgacggttggtagtaatagtaaaatttttcataattgtagtattggagaaatcccacaagatttaaagtttacaggcgaggaaaccgaaacaataattggcaataatactataatacgtgaaaatgttactattaatcgaggtacatctgcgcttggtaaaacaacagtaggaaataatgtgctattaatggcagcggttcatattgctcatgactgtatagtaaaagataatgttattatggcaaatatgtctacacttgggggccatgttgagattcaagaatatgcttcattgggtggaggagttctagtgcatcaattttgtaaaattggatcacatgtttttattggtggtggatttcgtgcagtccaagatgttccaccctatatt

SEQ ID NO: 233938 - DNA, 703 bp, Unknown
  Bacterial polypeptide expressing nucleotide sequence isolated from the Sargasso Sea
atgagcgagattcactccaccgcagtgatccaggagggcgcgcaaatcggcaaggggtgtcgcatcggtccgtactgtgtaatcggctcaaatgtaaccttgggcgccggctgcgagttgcattcgcacgtggtgattgatggccataccgagatcggttccgaaaatgccttttacccgtttgcctcgattgggttgaggacgcaggatttaaaatgggatggaggtacggcttggacgcggattggctccaacaatacttttcgcgaatacgttaccgtccacagtgcgaccggtgacggggatgccacggtgattgggtcgcacaacaacctcctggcctacacgcacgtggcgcacgattgccagctcggtgatcacatcatcatgtccaatgtcggcaccttggcagggcatgtgactgtggaggatcgcgccatcgtgggtggccttgccgccgtgcatcagttctgccgaatcggcaccatgtcgatcatcggcggatgttccaaagtggttcaggatgtgccgccgtacatgatggtggacggtaatccggcagggacgcgtacgctcaataaggaaggtcttaagcgaaacggcgtgagcgaggaaacacagaagtccattcggcaggcttaccggattttgtttcgcagtgagcagacgtttaccaacgcggtgaaacaggtgcgcgccgatg

SEQ ID NO: 233939 - DNA, 670 bp, Unknown
  Bacterial polypeptide expressing nucleotide sequence isolated from the Sargasso Sea
ggttgtgttctgaaatcacatgtggtggtacgcggcccaacgcgtatcggcaagaacaataagttttatcagttttcatcaattggtgaagactgtcaggataaaaaatacgcaggcgaacctaccgagcttgttattggcgatgataacgaattccgagaaggcgttaccgttcataggggaaccattcaagataatggcattaccattattggttcacgtagcttgtttatggcgaacgcgcacgtggcacatgactgtgtgctaggaaacgatatcatagtggccaataatgtggcgattgcgggccatgtgcatattgatgattttgtgattattggcggcgcaacaggtatccatcaattttgtaaagtgggcgcccatgcgtttttaggtgcaggtggtattattcttcgtgacgtacctccgtttgtcatggtgagcggtcagaaaaatattcctcaagggattaactcggaaggtttaaagcgacgcggctttgcaaaagaggaagtcttggaaataaagcgtgcttataaagcgatatatcgggaagggaacaccatcgatgaagccattgaaaaaatgacacaatcagcggaaaagttcagcgccgttgcgcagatggttgattttctgaaaaacgcatcacgaggcattattcgttaat

SEQ ID NO: 233940 - DNA, 784 bp, Unknown
  Bacterial polypeptide expressing nucleotide sequence isolated from the Sargasso Sea
aatgaaaaactcatcatatatctctaaaagtgctaaaatagataaatcagttaaaataggcccattttgctatgttggtgaaaatgtaaaaatttcaaaaaattgtaatttaatttctcatgtacatctgagtggcaatacaacaataggagaaaataatactttttacccattttgtacaataggttctgctccacaagatttaaaatataatggagaaaaaagttttttaaatattggtaataataatacttttagagaaaatgttacagtaaatcctggtactataggcggtggcttaaaaactattattaaagataattgtttgttcatggtaggatcacacattgctcatgattgtaaaattgaatcaaatgtcatacttgctaataacgctacattggcagggcatgttgaaataaataaaaacgcaattctaggaggaaattcagcaattcatcaatttgttaaaataggtcaatattctatgatagggggtatgagtggtgttgagaaagatgtaattccttatggactatatattggaataagaacaaacttaaaaggcataaacataatcggactaaaaagaaaaggattatcaaataaaacaattaatcaaataaatatagctgtaaaaaaaatttttaataaaaaaaattcaattgaaaaaaacatttcaattttaagtcaagaatataagtcaattaaagaaattaatgaaattatttcatttatacaaaataataataaaagaggattaagtataattagtaatgattaa

SEQ ID NO: 233941 - DNA, 751 bp, Unknown
  Bacterial polypeptide expressing nucleotide sequence isolated from the Sargasso Sea
cattcttcggccgaaatcgatgatgatgttgaaatcggacctttttgcatcataggagagaatgtcaaaataaaagctggttcaaaactgcactctcatgttattttgaagggccctacaactgttggaaagaataatgttttttatcagttctgtactataggtgaagatactccagataagaaatttaaaggtgaagaaacaacacttgaaattggagatgaaaatatctttagagagggcgtaactgtccatagaggaactgtccaagataaaagcacaactacaattggtaacaaaaatttatttatggcatatgctcatgttgctcatgattgtgttgttggtaatgataatgtttttgcaaataatgcaggcatagctggtcatgtaactgttggcaataatgtgactattggtgctttaaccactattcatcagttttgtcaggtgggagactattcttttgcgggtatgaatgcttcgatcacaatggatgtaccttcatacataaaagtagcatcaaatcctgcgagggttgttggtctaaattcagtaggtatggaaagaggaggcattgatcaggaaacaataacaattcttaaaaaagcatataaaattatctatcgaaaaggatttaatcttaaggatgcagtgaaaaaagttgaatctatggagtctagcgatgtccaagaggtcctaaactttatcgactctataaaatcttcacaaagaggcattctaagatagg

SEQ ID NO: 233942 - DNA, 553 bp, Unknown
  Bacterial polypeptide expressing nucleotide sequence isolated from the Sargasso Sea
acaaaattaattgtcggagatacaaatatatttagagagggcgttactattcatagaggaacaatacaagatcagggaataactcagataggttctaataatttatttatggcatattctcatgtcgctcatgattgtactgttggtgataataatgtttttgccaatcttgctggaattgctggacatgtttctattggtaacaatgtcaatgtaggagccataacgacagttcatcaattttgcaagatgggcgatttttcttttgcagggatgaatacatcaataactatggatgttcctgcatttgttaaagtggcttctgatcctgctagagtaattgggttgaattcagttgggatgaaaagaaataatatcaatgaagaatcaattagtttaatgaaaaaggcatataaattactttataggaaaaacttgaagattgatgaagcaattaaaaaaatcaaagaattacatagcgaatcaaatgattcctatctagaaacttttatctcctctattgaagtatctaaaagagggatcctaagataag

SEQ ID NO: 233943 - DNA, 594 bp, Unknown
  Bacterial polypeptide expressing nucleotide sequence isolated from the Sargasso Sea
ataattgtagtattggagaaatcccacaagatttaaagtttacaggcgaggaaaccaaaacaataatagggaataatactataatacgtgaaaatgttactattaatcgcggtacatctgcgcttggtaaaacaacagtaggaaataatgtgctattaatggcagcagttcatattgctcatgattgtatagtaaaagataatgttattatggcaaacatgtctacacttggaggccatgttgagattcaagaatatgcttcattgggtggaggagttctagtgcatcaattttgtaaaattggatcacatgtttttattggtggtggatttcgtgcagtccaagatgttccaccctatattttagctgttggagaaccattaagatttggtggcataaattcaattggattaaaaagaagaggttactcttcaaattcaatatctaaaattaaaaaagcctatagaatgtattttagatcagatttaacaagatcaatagcattagaaaagatgaaagaaaaactatctaataatgtagatgttgataatattattaactttattgataatagtgaacgtgggattatttaac

SEQ ID NO: 233944 - DNA, 799 bp, Unknown
  Bacterial polypeptide expressing nucleotide sequence isolated from the Sargasso Sea
tatgatacacccactcgctgtagtttcaaaaaatacagatatacatgaatcaacaaatattggccctttttgtgttataggtgatggcgttaaaattggaaaagacaataatctaatttctcatgtttctattactggcaatactagtattaaagataataactccttttacccattttgctcaataggatcagaaccacaagatttaaaatataataaagaaaagtcttttttaaaaataggaagcaataataaatttagagaaaatgtaactgtaaatcctggaacatctggtggtggtttaaatacaataataggaaatcattgcttatttatggtgggttctcatgtagcccatgattgtataattaaatcaaatgttattttagccaataatgccactcttgcaggacatgtagaaattgataataatgcaattttgggtggtaattcagcaattcatcaatttgttagaataggaaaatatgcaatgattggtggtatgagtggtgttgagaaagatatcattccatatggtttgtatacaggaataagagaaaatttgaaaagcttaaacctaattggcttaaaaagaaaaggtttaacgtcaaatgaaatcaataaaattaaaaatctcataaatataatttttgataaaaatgatacaattgaaaaaaatattaaaaataatttttttgaaagttctgaaattttagaaattaaggaagtaattgaatttctgaattcaaattcaaaaagaggtatcactaatttgaaaatgactaaaataggaataatt

SEQ ID NO: 233945 - DNA, 781 bp, Unknown
  Bacterial polypeptide expressing nucleotide sequence isolated from the Sargasso Sea
aatgaaagttcatccaacttcaataatccacccaaaatctaaaatagatgattctgttgagattggaccattttgtattgttggtgaggatgtagaaataaaaaaaggatcaaagcttctaagccatatagttcttaagggacccacatcaataggcgaggaaaatattttttatcaattttcaacaattggagaagatactcctgataaaaaatttaaaggagagaaaactaaacttgaaattggtaacagaaacatattcagagaaggggtaactgttcatagaggaaccgttcaagataatagcatcacatctataggctcagataatcttcttatggcatattcacatatagctcatgattgtgttgttggtgatggcaatgtttttgctaacaatgctggaatagcagggcatgtaagtgttggaaataatatcactattggcgcacttactaccattcatcagttttgtaatataggagactactcttttattggtatgaatacttcaattaatatggatattcctgcttatgtaaaagttgcagctgatccagctagagtaattggattaaattctgttggaatgactagaaacaatataacctcagattcaatctctttaattaaaaaagcatataaattagtttatagaaaaggtttaaagattgaagaggcaattaaaaagtctaaagagcttaataaaaaagctaatgacccctttctagatgtcttcattcaatctcttgaagtttccgaaagaggaattttaaggtaa

SEQ ID NO: 233946 - DNA, 578 bp, Unknown
  Bacterial polypeptide expressing nucleotide sequence isolated from the Sargasso Sea
tatgaaaaatatacacccaacagcaatcatagatgagggagcagaactagggagtcacctatcaatcggaccattttgccgggttggtgcagaagttaaacttggtgatggatgccatctgaaatcacacgttgttctagatggtcccagcacaattggctctgaaaacactttcttccctttttccttcataggaggtgaaccacaggatttaaaattcaatcaggaaaaaacccatctgattgtcggcagcaaaaacacatttcgtgaaggtgtatctgtccaccgtggtacagccgggggaggaggtgaaactgtaatcggtgacggtaatctgctgatgggctacgtacatgttgctcatgactgcaggataggcgaccacaatatattggcaaactatacaggtctcagcggccacgttaccttggataactatgttactttaggcggacaaaatggagtggctcaattcctaaggataggttcctacgtctacacaggggcaggttctctaattgaccgcaatgttccaccctactccacaggatatggaaaccgctttgaagtgaaaggag

SEQ ID NO: 233947 - DNA, 796 bp, Unknown
  Bacterial polypeptide expressing nucleotide sequence isolated from the Sargasso Sea
atgactaaaattcatgatactgcaattattagttcctcggtcaaagtaggaaaagatgtaacaattggacctttttgtaatatttatggagatgttactattggtgataaagtaactttgttatctcatataagtgtttcagggcgcacaactattggtgaaggtacaaagatatggccattttctgttattgggtctgaacctcaagacttaaaatatgatgatgagaacagtgcgctagtaataggttctaataataaaattcgcgaacatgtgacaatgcattctggaacaaaagaaggcggaatgataacggagattggtgataataatctatttatggttggggcacatattgcccatgattgcaaggttggaaataattgtgttttcgctaataatgcaacattagcagggcatgttgaagtaggtgattgggcaattctagggggtttatcagctgttcatcaatggagtcgtgtagggtgtcattcgtttatcggaggtttagctgctgtaacacgtgatttattaccttttggtatggctgttggaaatagggctaatctagagggtgtaaatctagttggtatgagaagaagaaatttttcaaagaatgaaattgaagaagttaagagagcttattcaattttatttgatgaaaacgaacttgaattcaaaagtagagtaaaaaaattaagtgaagaaaaatttgaatttaattctgctaaaataattactagttttgtatcagtagaaacaaatagagcttatgtttcgccaaccgaagtataga

SEQ ID NO: 233948 - DNA, 535 bp, Unknown
  Bacterial polypeptide expressing nucleotide sequence isolated from the Sargasso Sea
tatgattattcatgaaacatcaattgtgcacccgtcatccaagatagatgattctgttgaaattggaccattctgtatagttggagaaaatgttgaaatcaagaaagatacaaagctgctaagtcatgttgttattaaagggccaacatctataggcgaaaataatattttttatcaattttcaacaattggtgatgacactccagataaaaaatttaaaggagagaaaacaaaacttgaaattggagataataatatttttagggaaggagtaactgttcatagaggcactgttcaagataaaggattaactaagattggctctgacaatttattaatggcatacagtcatgttgctcatgattgtgttgttggaaatgataatgtttttgcaaataacgctggaatagcaggacatgtaaacgtaggaaacaacataactattggagcattaacaactgttcatcaattttgcaaattgggtgatttttgttttgttggtatgaatacatcaataaatatggatattcctgca

SEQ ID NO: 233949 - DNA, 589 bp, Unknown
  Bacterial polypeptide expressing nucleotide sequence isolated from the Sargasso Sea
tatgatccatcctacctctgtgattgaaacaggtgctgtacttggccaaaacgtcaaagttggaccattttgttatatcgctgccaatgtggtgatcggtgataacactgtgcttgaatctcatgtggtgctcaaaggcccgaccgttataggtaaaggcaatcacttttaccagttcaccagcataggtgaagattgtcaggacaaaaaatacaacggcgagccaacggaacttattattggtgacaacaatgtattccgtgaaaattgcactgtgcatcgtggcactattcaggacaaaggggtcacccgtatagggtcgaataacctctttatgaataacactcatgtggcgcatgactgcgtgattggtgataacgtgatttttgccagcggtgctcagtctgccggccatgtgcacattggtgactgggctattttaggcggtatgagtggtattcatcagttctgtcatataggtgctcatgcctttatcggtggaggctctattgtagtcaaagatgttcctccttacctgatggcacacggctcccatgctgttccggctggtttaaatgttgaaggttaa

SEQ ID NO: 233950 - DNA, 769 bp, Unknown
  Bacterial polypeptide expressing nucleotide sequence isolated from the Sargasso Sea
tatgtctgatcaatcttttatccatccaagtgccaagatagatagctcagctactgtaggcccattttgttttataggcgaaggcgttacagttgggccagaatgcgaactaaaatctcatgttgtgattaaagggccaacaaccattggtcccaagaatgttttctatcagttttgcacaatcggcgaggatacaccggataaaaaatatcaaggtgaaaagacaactcttcaaattggtgaagggaatatttttagagaaggtttcactgctcatcggggaacagttcaagacaaatcaactactgtcattggcgactacaatctgtttatggcttactctcatgttgctcatgattgtgtggttggaaacaataatgtctttgcaaataatagcggtatagctggacatgtaaatgtaggaaattatgctacgctgggtgctgtctcacttatccatcaattttgtaatgttggcagttatgcatttacgggcctcaacacggtaataacaatggatatcccagcatttgtaaaagttgccgctaatcccgctaggcctataggccttaataccgttgggatgcaaagaaatggtttttctgacgatgagattgctgttttgaaaaaagcatatcgaattgtttatcgaaaaggctactctttagaggatgccatttcgtctcttaatgaattagacataaatcaaaaaggccttaaagaatttatcctatctgtagagcaatcctcaagaggcttattgcgctag

SEQ ID NO: 233951 - DNA, 775 bp, Unknown
  Bacterial polypeptide expressing nucleotide sequence isolated from the Sargasso Sea
cttgattgatcctactgcaatagtccatccagatgctagtattgatagtaatgtaatcattggcccatacacagttattaaaaaagatgtatctattggttctggaactgagattgggtcacatgttgtcattagtggcccaacaaaaattggttctcataacaagatattcaatttttgttccataggagaagatccccaagataaaaaatataaagatgattcgaattcatatttagaaattggttcaggcaatacaattcgtgaatatgtttctattaatcgcggaacatcaaatggcggaggaaaaacaagcattggtagtaataactggattatggcttacgttcatattgctcatgattgttgtattggtaataattctacgtttgcaaataatacaacattagcagggcatgtaagtataggtgatttcgttattttaggtggttttacaggtgtccatcaattttgtcgtgttggtaattatagtttctcagcaatttcatctgttattgtcaaggatgttcccccgtatattttagtttcaggcaatactgctaagccatcaggactaaatcgtgagggtcttaagagaaatggatttaattcagatgatataaacttattaaagaaagcctatcgaattatttatcgagatggctatattcttgctgaagcacttgaggagctactaaaaatctcaaaggattcaaaagaggtagaattgttgtattcatttatctcatcgtcagaaagaggaattgttagataa

SEQ ID NO: 233952 - DNA, 753 bp, Unknown
  Bacterial polypeptide expressing nucleotide sequence isolated from the Sargasso Sea
tgcccgcctggaccctacggtcacggtgggggccttacacggtcattggtgcacacgtgaccattggtgcgggcaccacggtcggcgcgcactgcgtgatcgatgggcacaccacgattggtgctgacaaccgcatcttccagttcaattccatcggcgccatcccgcaggacaagaagtacgcgggcgagccgaccgaactggtcatcggcgaccgcaacaccatccgcgagttctgcacactgaacctgggagtgccccaggctggtggcatcaccaccgtgggccatgacaactggatcatggcgtacacccacatcgcccacgattgccatgtgggcaaccacaccacactggccaacaacaccacgctggcaggtcatgtgcacctgggcgactgggtgacggtgggcgggctcaccggcattcaccagttcgtcaagattggtgcccacgcgatggtgggctttgccagcgccgtgtcgcaagacgtgccacctttcatgctggtggatggcaaccccctggccgtgcgcggctacaacgtggtggggctgcgccgccgtggcttttcggccgagcgcattgcggcggtcaagcagatgcacaagctgatctatcgccagggcctcacgctggaggctgcgcgcgccgccattgccgagctggcggagtccgcgccgcaggccggcgacgacgcggcgatgatggagcggttcctggccgacgccacgcgcggcattgcgcgctgag

SEQ ID NO: 233953 - DNA, 742 bp, Unknown
  Bacterial polypeptide expressing nucleotide sequence isolated from the Sargasso Sea
tgattcaagcgctgaattaggttctaatgtaaaaataggaccatacactgttatagagcctaatgtaattattggagataattgcatcattggtaatcatgtgacaatatgctccaatactaccattggaaaaaattgtaagatttttcattgcagctccataggtgagatacctcaagatttaaaatttgaaggtgaagaaacaattactaatatcggagataaaacggtaattcgagaatatgttacaattaatagaggtacaaaagccttaggcaaaacttctattggctcgcggtgtttattaatggcctctactcatgttgcacatgattgtatacttggggataatgttattatgtctaatttatcaacacttggcgggcatgtagaattagaggactgggtaatccttggaggcggagtattgattcaccaattcacaaaaattggttcacatgcgtttataggaggagggttcagagccgtccaagatgtccccccatatatattagcagctgaagatcctttaaaatttaaaagcgtaaatagtctaggcttaaaaagacgaggcttttctttggaggaacgaaaacagattaaaaaaatctataaaatatattttaggtcaggatctaatagagaggaatctctaaaacatataattgatgaaatagattcatcggatgttaaagaccagattgttaattttattaacacatcgcaacgaggaataatttaa

SEQ ID NO: 233954 - DNA, 313 bp, Unknown
  Bacterial polypeptide expressing nucleotide sequence isolated from the Sargasso Sea
agttcatcagttttgtaaaattggtgaacattcttttataggagctggtgggtatatatcacaagatgtccctccttatattctagtggccggttcgccgatagaatatagtggtataaatagtgttgggctaaagcgtagaggtttttcaaaaaaagatagacaagatattaaaaagatctataatattttttttcgatctaaaagaaaccgaaaagaaaatctatcaacgataaataaagaattttctgataattattatcttaaaacaattagtgagtttattcaaaacagcaagcgcggaattatctag

SEQ ID NO: 233955 - DNA, 778 bp, Unknown
  Bacterial polypeptide expressing nucleotide sequence isolated from the Sargasso Sea
aatgtctattcacgaatcctcaataatacatccttctgccgaaatcgatgaaaatgttgaaattggacctttttgtattgtgggagagaaagtcaaaataaaatctggttcaaaactgctctctcatgttgttttgaaaggcccaacaaccataggaaaaaataatgttttttatcagttctgtaccataggtgaagatactccagataagaaatttaaaggtgaggaaacaactcttgtaatcggagatgaaaatatcttcagagagggtgtgactgtccatagaggaactgtccaagataaaagcacaacagtaattggtaacaagaacttatttatggcttatgctcatgttgcccatgattgcgtcgttggtaatgataatgtatttgctaataattcaggtatagctggtcatgtaactgtaggtaacaatgtgactataggagctttaactaccattcatcagttttgtcagatgggagactattcttttgcaggcatgaatgcttcgataacaatggatgtaccttcatacataaaagtagcttcaaatcctgcaagagttgttgggttaaattcagtaggtatggaaagaggaggtattgatcaggaaacaataaccattcttaaaaaagcatacaaaattatttatagaaaaggatttaatttaaaggatgcaatagagaaagttgaatctatcgagtccagtaatgtccaagaagtacgaaactttatcgactctattaaatcatctgaaagaggtattcttagatag

SEQ ID NO: 233956 - DNA, 772 bp, Unknown
  Bacterial polypeptide expressing nucleotide sequence isolated from the Sargasso Sea
atgcatcacgagacagcaataattgataagaaagcgaaaatagatgagggagtaactattggaccttactccgttataggtcctggagtaagaatattaaagggaactattatcgaatcacatgtaatcctttctggtcctacaaaaataggaaaaaataatcatatctttcagttttctactgtaggagatggcagtcctgacaaaaaatataagggagagccaacaaaactaactattggagatggcaatcaaatcagagaaggtgtaacaattcacagaggcaccgttcaagaaaaaggagtaacaaaaataggaaataataatttattattggcttactctcatgtcgcacatgattgcgagattgctgataatgttgtcttaacaaaccaagcagctttagctggggctgtaaaagtaggagagggcgctattttaggtggatacgccattgttcatcaatattgttcaataggagcttatagtttttgcgctatgggaagtgcagtgaataaagatgttcctgcatttgtaagagtaagaggtaatccggccggagtttatggtatcaattcaattggacttcgaagacaagggtttagtaagtctgcaatagaatcacttaaatcagcttatagatctgtctatagaaagaatttaaccgttgaggaggctttaaaagagatcagaccgctggcaaccaaacataaagaagtaaaattatttacctccacgataaagaaatctactcgtgggatcgctagataaa

SEQ ID NO: 233957 - DNA, 577 bp, Unknown
  Bacterial polypeptide expressing nucleotide sequence isolated from the Sargasso Sea
tatgattattcatgaaacatcaattgtgcatccgtcatccaagatagatgattctgttgaaattggaccattctgtatagttggagaaaatgttgaaatcaagaaggatacaaagctgctaagtcatgttgttattaaagggccaacatctataggcgcaaataatattttttatcaattttcaacaattggtgatgacactccagataaaaaatttaaaggagagaaaacaaaacttgaaattggagataataatatttttagggaaggagtaactgttcatagaggcactgttcaagataaaggattaactaaaattggctctgacaatttattaatggcatacagtcatgttgctcatgattgtgttgttggaaatgataatgtttttgcaaataatgctggaatagcaggacatgtaaacgtaggaaacaacataactattggagcattaacaactgttcatcaattttgcaaattgggtgatttttgttttgttggtatgaatacatcaataaatatggatattcctgcatatcttaaggtggctgcagatccagcaagagtaataggataa

SEQ ID NO: 233958 - DNA, 778 bp, Unknown
  Bacterial polypeptide expressing nucleotide sequence isolated from the Sargasso Sea
aatgtctattcacgaatcctcaataatacatccttctgccgaaatcgacgaaaatgttgaaatcggacctttttgcattgtaggagaaaaagttaaagtaaaatctggttcaaaactgctttctcatgtagttttgaaggggccaacaactgttggaaagaataatgttttttatcagttctgtactataggtgaagatactccagataagaaatttaagggtgaagaaacaactctagaaataggagatgaaaatgtctttagagagggcgtaactgtccatagaggaactgtccaagataaaagcacaactataattggtaacaagaatttatttatggcatatgctcatgttgctcatgattgcgtcgttggtagcgataatgtttttgctaataatgcaggcatagctggtcatgtaactgtaggcaataatgtgacaattggtgctttgaccactattcatcaattttgtcagatgggggactattctttcgcaggcatgaatgcttcaatcacaatggatgtgcctgcatacataaaagtagcatcaaatcctgcaagggttgtcggccttaattcagtaggtatggaaagagggggtattgatcaggaaacaataactattcttaaaaaagcatataaaactatctatagaaagggatttaatcttaaggatgcaatagagaaagttgaatctatggagtccaatggtgtcaaagaagtccgaaactttgtagactctattaaatcttcagaaagaggcattctcagatag

SEQ ID NO: 233959 - DNA, 778 bp, Unknown
  Bacterial polypeptide expressing nucleotide sequence isolated from the Sargasso Sea
atgtctattcacgaatcctcaataatacatccttctgccgaaatcgatgaaaatgttgaaatcggacctttttgtgttgtaggagaaaaagttaaaataaaatctggttcaaaactgctgtctcatgtagttttgaaggggccaacaactgttgggaagaataatgttttttatcagttcagcaccataggcgaggatactccagataagaaatttaaaggtgaggaaacaactcttgaaattggagatgaaaatatctttagagagggtgtaactgtccatagaggaactgtccaagataaaagcacaactataattggcaacaagaatttatttatggcatatgctcatgttgctcatgattgcgtcgttggtagtgataatgtttttgctaataatgcaggcatagccggtcatgtaactgtaggcaataatgtgacaattggtgctttaaccactattcatcagttttgtcagatgggtgactattcttttgcgggcatgaatgcttcaatcacaatggatgtacctgcatacataaaagtagcatcaaatcctgcaagggttgtcggtcttaattcagtaggaatggaaagaggaggcattaatcaggaaacaataaccattcttaaaaaagcatataaaactatatatagaaagggatttaatcttaaggatgcaatagagaaagttgaatctatggagtccaatgatctccaagaagtccaaaactttttagacactattaaatcttcagaaagaggcattctcagatagg

SEQ ID NO: 233960 - DNA, 796 bp, Unknown
  Bacterial polypeptide expressing nucleotide sequence isolated from the Sargasso Sea
atgacagatattcatgatacagcaattattaaccctaaggttaaaattggagataatgtctcaatagggccatattgcaatatagatggcgatgtaaccattagagataatgtcactcttgtatctcatataagtatttcaggatccactactatcggtgaaaatacaaagatatggcctttttctgttataggttctgaacctcaagatttaaaatacgatagtgaagatggtaaacttgtaataggagctaataataaaattcgtgaacatgtaacaatgcattctggaacaaaagaaggaggaatgcttactgaaataggtgaaaataatttattcatggtgggcgctcatattgctcacgattgtaaagttggaaataattgtgttttcgccaataatgctacattagctggacatgttgaggttggtgactgggcaatcttgggtggtttagcagcagttcatcaatggagtcgcataggctgccattcatttattggaggattagctgcagtaactcgtgatttattaccatttggtatggctgtaggtaatagagcaaatcttgagggaataaatcttgtaggtatgcgaagaagaaatttttcgaaaagtgaaatagatgaagttaaaaaagcttattcaattctatttgataataatgatcttgagttcaaaaatagaataaaaaaattgaaagatgaagaatttaaacttaattccgccaaaattattactaattttgtatcagtagaaactaatagagcttatgtttcaccatctgaagtataga

SEQ ID NO: 233961 - DNA, 772 bp, Unknown
  Bacterial polypeptide expressing nucleotide sequence isolated from the Sargasso Sea
catgtcccagattcatgccacatccctcgtcgaaaacggtgccgtcatcggcaaaaatgttgaaatcggtccattctgtcatgttggggccaacgtcagtatcggagacgggtgtattttaaaatcacatgtggtgatcgatggttggaccaccctgggagaaaaaaataccatttatccttttaccagcatcggcggagaacctcaggatcttaagtatcaaaacgaaaaaaccctggttaccattggcagtgaaaacatcatccgagaaggagtaacgatacaccgtgggacgaagggaggaggaggagaaaccaatcttggagatcacaatctgctgatgggatatgttcatattgctcatgactgccatatcggaaatcacaatattctttcaaactatacgggtctcagcggtcactgcaccctggatgaccatatcaatctcggcgggcaaaacgggatcgctcagtttcttcatatcggctcgtatgtgtttaccggtggaggttctctgatcgaccgtaacatccctccttattccaccggttttggcaaccgtttcgaagttaaaggggtcaacattgtcgggctgaagaggaagggtttttccagggaagcaatcagtgaaatcctggaagcacaccgcctttattttcgtgctgacctgaaaagcgatgaggcattgagaatcattgaggaaacatacggtgaccgcaaagaaatccgggaatttcttgatttcatggttaaaaccgatggaactgcctga

SEQ ID NO: 233962 - DNA, 781 bp, Unknown
  Bacterial polypeptide expressing nucleotide sequence isolated from the Sargasso Sea
atgattattcataaaacatcaattgtgcatccatcatctaagatagatgattccgttgaaattggaccattctgtatagttggagaaaatgttgaaatcaagaaggatacaaagctgctaagtcatgttgttattaaagggccaacatctataggcgccaataatattttttatcaattttcaacaattggtgatgacactccagataaaaaatttaaaggagagaaaacaaaacttgaaattggagataataatatttttagggaaggagtaactgttcatagaggcactgttcaagataaaggattaactaaaattggctctgacaatttattaatggcatacagtcatgttgctcatgattgtgttgttggaaatgataatgtttttgcaaataatgctggaatagcaggacatgtaaacgtaggaaacaacataacgattggagcattaacaactgttcatcaattttgcaaattgggcgatttttgttttgttggtatgaatacatcaataaatatggatattcctgcatatcttaaggtggctgcagatccagcaagagtaataggattaaatacagtaggcatgacaagaaatggcatcgaaaaggaatcaataagcctaataaaaaaagcatataaacttgtttataaaaagaatctaaagataaatacagccataaatgaaatgaagaaattaaatcacgattctcaaaatacttatctcaatacttttatagcttccatagaggcatctgaaagaggaattctgagataag

SEQ ID NO: 233963 - DNA, 796 bp, Unknown
  Bacterial polypeptide expressing nucleotide sequence isolated from the Sargasso Sea
atgacaaatattcacgaaacagcaattatcagccctgatgtaaaaattggagataatgtctcaataggaccctattgcaatataaatggagatgtaagcattaaagataatgttactcttatatctcacataagtatttcaggatcgaccactattggtgaaaacacaaaaatatggcctttttctgttataggttctgaacctcaagatttaaaatatgacagtgaagatggaaagcttgtaataggcgctaataataaaattcgtgaacatgtaactatgcattctggaacaaaagaagggggaatgcttaccgagattggtgaaaataatttatttatggtaggtgcccatattgctcacgactgtaaagttggaaataattgtgttttcgctaataatgctacattagcaggacatgttgaggttggtgattgggcaattttgggtggtttagctgcagtccatcaatggagtcgcataggctgtcattcatttattggaggattagccgcagtaacccgagatctattaccatttggtatggctgtaggcaatagagcaaatcttgaaggcataaatcttattggaatgcgtagaagaaatttttcaaaaagtgaaatagatgaagttaaaaaagtatattcaattttatttaatgctaacgatcttgagtttaaaaataagataaataaactaaagaaagaaaaattttcatctgatccagccaaaataattactgattttgttaatgttgaaacgaacagagcttatgtttcgccaactgagatataaa

SEQ ID NO: 233964 - DNA, 781 bp, Unknown
  Bacterial polypeptide expressing nucleotide sequence isolated from the Sargasso Sea
catgagcattcattcttcatcaattatccacccttcatcagtaatagatgagtcagtacatataggacctttttgtataataggtgaggatgttgaaattaaaaaaggttctaagcttttaagtcatgttgtgctaaaagggccaactacaattggtgaaaataatactatttatcaatttgcaacagtaggcgatgacacaccagataaaaaatataaaggagaaaaaacaaaattaattgtcggagataacaatatatttagagagggcgttactattcatagaggaacaatacaagatcagggaataacacagataggctctaataatttatttatggcatattctcatgtcgctcatgattgtattgttggtgataataatgtttttgctaatcttgctggaattgctggacatgtttctattggtaacaatgtcaatgtaggagccataactacagttcatcaattttgtaagatgggtgatttttcttttgcaggcatgaatacatcaataactatggatgttcctgcatttgttaaagtggcttctgatcctgctagagtaattggtttaaattcagttgggatgaaaagaaataatatcaatgaagaatcaattagtttaatgaaaaaggcatataaattactttataggaagaacttgaagattgatgaagcaattaaaaaaattaaagaattacatagtgagtcaaatgattcatgtctagaaacttttatctcctctattgaagtgtccgaaagagggattctaagataa

SEQ ID NO: 233965 - DNA, 496 bp, Unknown
  Bacterial polypeptide expressing nucleotide sequence isolated from the Sargasso Sea
tatgactaattctgtaattgattcttctgcaaaaattgataagtcagtcaaaattggcccattttgcgtaatagggcctgatgtagaaataggtccaaattgtattctccattctcatgttgtaataaaagggccaactaagattggtatggggaatagttttttccaattttcaacaattggggaagacactcctgataaaaaatatgctggagaagcaactactttagagataggagataacaatatttttagagagggagttacagtgcatagaggcactgttcaggatcaatcaaaaactctgatagggaacgaaaatttatttatggcatatgtccacatagctcacgattgtattgttggtgacaataacgtatttgctaacgcaacttgtttggcaggacatgtaaaggtaggaaataatgtagtcttaggtggagtaactctcgtgcatcaattttgttctctcggggatcactcatttacgggaaat

SEQ ID NO: 233966 - DNA, 838 bp, Unknown
  Bacterial polypeptide expressing nucleotide sequence isolated from the Sargasso Sea
tctgtaccgccgagctgatgtgcgccaaacgcgaggtttaacacacgtgatcgaccagactgccatcattcacgatactgccgtcgtccatgagtctgccgtcatcggtaaaggggttgaaatcggccccttttctgtcatcggtgccgaggtggaaatcggcgacaacacctgggtcagctcccatgtggtgatcaagggcccgaccaagattggtcgcggcaacaagatcttccagcacacctccatcggtgaggattgccaggacaagaagtacgccggcgagcgcaccttcctcgagatcggcgacaacaacgtctttcgcgagaactgcaccgtgcaccgcggcaccatccaggatcagtccctgaccaggatcggcagcggcaacctgttcatggtcaacgtccacgttgcccacgactgcatcatcggtgacaactgcatcttcgccaacaacgcgaccctggcgggccacgtggtgatcggtgatttcgtgatcttcggcggtctctccgcgatccaccagttcggccgcgtcggctcccacgccttcgtcggtggctgcgccgccctcaacaaggacgtgccgccctacgtgatggccgccggcaactacgccaaaccgttcggggtcaactccgaggggctgcgtcgccgtggttatacgcctgaggccatctccgccgtcaagcgcgcctacaaagagatcttccgctccggcaagaccatcgaagaggtgctgccagtgctgactgagatggcgcaagccgagccggccatccagctctacgtggatttcctcaaagacaacgagcgcgggatcatccgtgcctga

SEQ ID NO: 233967 - DNA, 541 bp, Unknown
  Bacterial polypeptide expressing nucleotide sequence isolated from the Sargasso Sea
gctggtgattggcgataacaatgttatccgcgaaaactgcacgattcaccgtggcacggttcaggaccggggcgaaacccgcattggcagcggcaacctgctgatggcctatgtgcacgtggcccatgattgcatcgtaggcgacaacaccatcctggccaactgcgccacgctggccggccacgtttccgtaggcgaccacgctattctcggtggtggcaccatggtgcaccagttctgccacatcggcccccacagcatggcggctggcggcagcatcgtactcaaagacattcctgcctatgtgatggcgtctggccagtctgcccagccccatggcatgaatgtggaaggcctgaagcgtcgtggcttcagcaaagacgtgctgatggccctgcgccgcgcctacaaggtggtttaccgtcagggcctgaccaccgagcaggcgattgaagaactcgagaagtcctttaatgacgtgccggaagtccgcccgctgattgactcgctccggggagcggatcgcggcatcattcgctga

SEQ ID NO: 233968 - DNA, 430 bp, Unknown
  Bacterial polypeptide expressing nucleotide sequence isolated from the Sargasso Sea
gttcatgtggcccatgactgcaccgttggtgacaacaccattctggccaattgtgcgaccctggcgggccatgtatccgttggtgatttcgccattctgggcggcggtactatggttcaccagttctgccatattggcgctcacagcatggcagccggtggcagtattgtgttgaaggatatccctgcgtatgtgatggccagcggccagtcggcggagccacacggcatgaacgtggagggcctcaagcgtcgtgggttcagtaaggacgtattactggctctgcgccgggcgtacaaggtcatataccggcagggcctgaccaccgaacaggccgtcgaagagcttgagaagtcctattccgatgttgcagaaatacgtcccctcattgactccctgcgtggagctcaccgcggcatcatccgctaac

SEQ ID NO: 233969 - DNA, 433 bp, Unknown
  Bacterial polypeptide expressing nucleotide sequence isolated from the Sargasso Sea
tatgaattcgattgatcctcgggccattatcgatccgtcggccaagctggccgacggcgtcgaggtcggcccttggtcgatcgttggccctgatgtcgaaatcggggagggcaccgttatcggcccgcatgttgtgctcaaaggcccgacccgcatcggcaagcacaaccgtatctttcagttttcctcgatcggtgaagacaccccggaccttaagtacaagggtgagccgacgcgcctggtgatcggcgatcacaatgtgattcgcgaaggggtgaccatccaccgcggtactgttcaggaccgctcggaaaccaccgtgggtgaccataacctgatcatggcctatgcccatattggccacgacagtgtcatcggcaaccactgcatcctggtcaacaacacggcgtggcaggtcatgtacatgtgggtg

SEQ ID NO: 233970 - DNA, 772 bp, Unknown
  Bacterial polypeptide expressing nucleotide sequence isolated from the Sargasso Sea
tatgatccatcctaccgctgtgatagaacccggtgccgtacttggtcaaaacgtcaaagttggaccattttgttatattgctgctaacgtggtgattggcgatgacacagtgcttgaatctcatgtggtgctgaaaggcccaaccgtcatgggcaaaggcaatcatttttaccagttcaccagcataggtgaagattgccaggacaaaaaatacaatggcgagccgacagaactgattattggtgacaacaatgtgttccgtgaaaactgtactgtgcatcgtggtactgtgcaggataaaggcgtcacccgtattggctcgaataacctctttatgaacaatacccacgttgctcacgactgtgtgattggcgataacgtgatttttgccagtggtgctcagtcagctggtcatgtgcatattggcgattgggctattttaggtggcatgagtggtattcatcagttctgccatataggcgctcacgcctttatcggcggtggttctatagtggtgaaagacgtacctccttacctgatggcgcacggctcacatgctgtaccagctggtttaaaccttgaaggtttaaaacgccgtggctttagcagcgatgctattttggaagtacgtcgggcttacaaagaagtctatcgtaaaggtttaacagtgcaggaagctttggatgctctggcagaaaaatctgccgaattcccggaagtcaaagccttcactgattttatcgccaactccagccgtggcattattcgctaa

SEQ ID NO: 233971 - DNA, 346 bp, Unknown
  Bacterial polypeptide expressing nucleotide sequence isolated from the Sargasso Sea
atgtttgtgatcgataaaacggctgtcatccatccgaccgcggtgattgaagagggcgctgtgattggtgccggcgttcgcattggtccttattgctgcgtcggcggcgatgtcgagattggtgaaggcaccgtactgaagtcgcacgttgtcgtaagcggccatacccgcattggccgggacaacatcgtctacccgttcgccacgattggagaggacaaccaggacctgaagtacgccggtgagccgacgctggtggaaataggcgatcggaacagaatccgggagagcgtcacgatccatcgcggcacggtccagggcggcggcgttacccgggtggaaacga

SEQ ID NO: 233972 - DNA, 864 bp, Unknown
  Bacterial polypeptide expressing nucleotide sequence isolated from the Sargasso Sea
tttgaacatattagggctcttatgacgagaggtaactccatagaattctttcctgagggaggaaggagtagaactggcctaagtcttccttccagaccaggattgctttctttagtaattagaagctttgcttctttaaaagatcaaaatgtaaaaatcgttccagtttatataggttatgaaaaaatactcgaaggccaaagttatttatccgaacttacaggtggaaaaaagaaaaaagaaagtttcatggatccaataaaggtttttaaagacttcagaaattatctaggaaattcatatcttaattttgctgacccaattgatcttgatactttccttaaagatcaagtgaatgatgattactctatatctagtcctcaagaaaaacctgaatggctaccagatgcaacaggtaaattagggcagtctgttattagagcgataaataattcagttgccgtgacttctacaagtttattttccgttgctttattaacttcatcaactcaaactatggatgaagatgatttagaagaaagaataaatttctttatttctcttatcgagaaatcccctgactataaagatgtatggattacacagcgagaagccaaggatatgatttctaagactaaaaaattaggttttattgaaccgattatgattgccgctaaaaaagtttataggccgacatcagatcaagtggcaactttgtcattttataagaataatataatccacctcttcattctttattctttaatatgcgaatctctaaaatttataaagaaagcttctaaagaggaaatcataaaactcattgagatgatttaccccatcttgcaaaagattttcattgaa

SEQ ID NO: 233973 - DNA, 1652 bp, Unknown
  Bacterial polypeptide expressing nucleotide sequence isolated from the Sargasso Sea
agatttaaaagcgggggaaaatattgcacttagacgtgccgctcgactgcttcgcactaaatttaggctacaaagagaggctacgcttggtcctaactttacagatcgaaaacagttcatagaagaattagcaaacagcaggagagtcaggaaggagattgaacagttggcacaaaccgaaaaatctcaaatgaagaagagacttcgagcgttccagatcagcaacactgtggtggcaaatatgtctcacaggaaactccgcattttctatcgtctactctcttggttctggaacaaaatctacgacggacttgcgattaccggtgccaatgaagtgatgatcacaagtgaatctcataccctagtttatgtcccatcccatcgaagccacatcgactatatggcactgagctatagtctttacgaggtgggattgatgaccccacacatcgccgcgggagacaatcttaatctccctatgctaggtaattttcttcgcgggagtggcgctttcttcatgcgcagaacttttagagaagacccactttattccgccattttttcagagtacgttcacaaattactctacaaaggccattgcatagaatttttcccagaaggaggtagatcgaggacaggcagactgttaagagcaaagtacgggctgctgaaactatgtttagaaagccacctaacagatctccccaagccaattgccttcgttcccgtctatttcggttacgagagaattcttgaagcaaacacttatattgagcaactgaagggaactaaaaagaaaactgagaaacttttagatattttgagtgctctaaaatttacacgaaactattacggtcgactcagcgtaaatttagggaaacccatcgaattagatacatggttagaagcgagaaaagacagaaaaacggttcgatcgtttgacgcgacccttatcgctctgggcaatcatctgatgcacagcataaacaagaaagccatagcaaacgatgtcaacttctgtgcaacgattctccttaatacgcgcgctaattcgatgagcctcgaggaatatgaaaggcacaccatcttttttagggatttgctcataagagtgaacggtaattcttcgacgacaacggctcatgatagcaaccaaacggtaatagataggctactgaaacttgaatttataaacgtctcaaaccaagaaacgggaacaatagtttcgctaaaagagaacgctttacaatctgctcattggtatcagaacaacactatccatctatttatgcccagcgcagtcatcgcgtttcttttaacgagacagaaaactgggataacagcgctaagccttcgagcaatctcaagaagggtttaccaatatctttatgatggcccatcagaagagtcttcaatgcagattaaaaaaagtcttgaactgttaagctctagggagactctctcagtgaaggatggaaggctgtggccacccaagcgaaaagaccctggatattcggaactcaaaatcctcagtcgcctcgtagaaccaatcttggaagaactttttgtaatattgtcgctagcttcaacaaggcgattcaacgaattacacttaagagacaagactgaatcgattttgagctatctagggg

SEQ ID NO: 233974 - DNA, 2305 bp, Unknown
  Bacterial polypeptide expressing nucleotide sequence isolated from the Sargasso Sea
aaatgttgtatttgctcttccgttagactcagcgagtgatttaatggcactagccatagctaaccatgagaatcagactccctcccctttagataaattgacgtctagcaacattgaaaggtttatttgcctgaaggaccctacatatatcatttctgaacaaaagataaagagacaaaatccagaaaatcttaaagagatactagatttacagaaagaaaaactgctaatagttccagtatctttcacatggggaaaacacccagataagcaacagtctatttttaaaattatcttttctccttcttggcgaacgagtggatctataaaaaaattttttaaaattatctttcatggcagaaacctattgattacatttcataacccattgcaggtagattcgttagttgaactctcaaattcaaatgaaaaaaatacccaactattaagccgctacctaagggctttgttcagaaaatctaagcaagcgatgttaggacctgatatatctcacagaagaacgatggtaagaagtcttgtaaaaaacattaatgttagagaagaaattaataaacaatcaaatgggagaaaatcaagaaaaagaagattgaaaaaaaaggcttacaagtatgcaagagaaatgtgctcggatttaaactacccaatcgttagaatgcttgtaagaggtttcacttggttttggaatagtaggtatgatggtctcaatattagaaatattgatcatattaaatctatttctaaagataatgcgcttgtttatgttccttgtcacagaagccacatagactattgcgccttaacatttattctttatgagaatggactcatgcttccccaaattgctgctggaaataaccttaaccttccagttcttggaagtatattaagaggagctggtgcaatcttcatgaggagatcgttcatgaataatgcagtctatagtactgttttctttgaatatattaaatcgctaatggttagaggcagttcgatagaattttttccagaaggaggaagaagcaggacaggcttaagtttaacccctagacctggtctgttatctctagtcttaaggagttttgcttcattgagagggcaaaaagtgaaaattattcctatttatataggctatgaaaaaattttagagggtcaaagttatctatctgaattatccggatccaaaaaaaagacagaaagtgtgcttgatccttttaaggtactaaaagattttaataattatttaggaaatgcgtatttaaattttggtgagcccgtagacttagaaaagtttttaattgagaacgtttcaaaagatttccatattgattcccctcttgataaacctgattggttaaagcctactaccagtttattgggagacactattataaggtctgtgaataattcagttgctgtaagttcaacaagtctttttgcaatgggcctccttacagatcctactcaaactttaaataaagaaactctaaaaaatagaatttctttctatgttgatctcataaaaaactcagaaagctataaagatgtttggttaacggaagaaagtgctgaagaaataatagatagaagtgaaaaattacgatttataaaacatcagctaattggttctgatgaagtatatagaccaaatgctagtgaagttgctgcactttcattttataaaaataatataagtcacatatttatgctttattctctgatttgtgaatcagtgagatacgttgatgaaatatcgaaagatgagatgtataaactaattaaaatggtgtatccgatttttagtagagagtactttctaaaatcaacaaacataaccaaagaagaaatcgatcaagctttaacgacacttttagacaaaggagtgcttgattctaaaacccaaaaaatttactgcaagccgcaagataaagacgataatataaataaatatctatctctatgtaatatttgtgaacctagcttgaaaaggttctacataactatgagtgtattatgggaaaaagaaaatatttctaaagatatgcttcaaactatctgtgattcaatttcaaaaaacttagaaaccattgaaggctggccctaccccgagttttctgactctacgaaattccaaaattttattgaatttttaattactgaaagatatgtaaaaaaagatgaacaatcaggtaacctttcagcatcaaaaattactttaaaagcccaaaaaagttataaaactttcttcgatagtaaattcttaaagttaatgcaaaatattaactag

SEQ ID NO: 233975 - DNA, 2374 bp, Unknown
  Bacterial polypeptide expressing nucleotide sequence isolated from the Sargasso Sea
attgagcttttttattaagcctcttatctcgtccaagttaaggactgaagatctaaataaattagaaagtaatagaaatattgtatacgcgctcgcaagcgaatctgtaattgatttagctgcactgaatgaaatttgtaaacaaaataatttgccgagccctcttgaaaatctctctagtattggatccaaaagatttatatgtttaaagagtccaaagtatttaatttcagagcagaaatttaagagacaaaaaactcataatttagaggaaattctcagttacgaagatgacatagccattattccagtgactatatcctggggaaataggcctgacaaagagcaatccttattcaaaattatattctctccttcttggaggccagccggtacagtaaaaagaatttttaagctaattattcatggtagaaatttaactattcaattcgagagattgttcgatatcaagcaagaagttgaacaaaataattctacagaaaaaaatgctctgataataagtaggtatctaagagcagtgtttagaaaatcaaagcaagctatgttaggtcctgatatctcacacagaagaactctcgttaaatctctagttagaaacaaatatgtgagaaatgaaattaagacattggcagatggaaataattctagaaaaaggcaactaacaaaaaaagcttacagatatgctaatgagatttgttcggacttgaactatccgatagttaacctacttgcttcaggttttacctggttttggaatacacgatatgaagggttgcacactaaaaatttagaagaaattagagaactttctaaagacaattctttaatctatttaccctgtcacagaagtcatatcgattactgtgccttgacctatttgctctatgaaaatggtttgatggttcctcaagtagcagctgggaacaatcttaatcttcctattattggaggtattttgaggggtgcaggagcagtatttatgcgaagaacatttatgagcaatgctttgtatagtactgttttttttgaacatattagggcgttaatgactaggggcaactccattgaattcttcccagaaggcggtagaagcaggacaggtcttagccttccatcaagacccgggttactgtctttaataatcagaagttacgcttccttgaaaaatcaaaatgtaaaaattgtccctgtatatattggctatgaaaaaatattagaaggtcaaagctatctttctgagttagcaggaggcaaaaagaaaaaggagagtatatttgatccattaaaggtttttaaggacttcagaaattatctaggaaatgcttatcttaacttttccgaaccaattgatcttgatagtttcttaaaagaacatgtgggagattactcaatttcttctcctcaagaaaaacctgaatggctgcagcaggcaacaagtcagttaggacaaaaggttattaagtccatcaacaactctgtagctataacttccacaagtcttttctccgttgcgcttctcacttcttcaacacaagctatgagtgaggaggatatgataagcagaataaaattttttatgacattaattagcaattcctcagattataaagatgtatggtttacgcaagaggacatacaggagatgattcataaaaccgagaaactgggatttgtatctcctacttttgtttcgtcgaagaaaatctatcgcccttctgcagatcaaatatcgacattgtctttttacaaaaacaacatcgcccatctatttattctttattcgttgatttgtgagtcaattaaatttgttaagaaagcttcggaagatgatgtcgtaaacctattggtcatgatctacccaatttttgctaaagatttccatttgaagcaaagtatagctagcactgaaaccgttaaagcagccatggtagttcttaaaggcatgggtgtattgaatagcgacgaggaaggtaatatcgtaccgccatcagaaaatagcccttcttttaataattatattgccctttctaatctgtgtgagcccagtttgaagaggttttatattgttatgagctctatatggaaaaaagaaaaaatcatgaaagaagatcttaaaattcaatgcaaggaattagcagagagcttagaattgatagaaggatggccttatcctgaattttcagacaaagctaagtttgataactttgtatatatgatgaaagaaactaagtattttaaagaagatgaggaaggttatttgtctgcctcaaagattaccaaaagagcaaaaaagctatataaacaattttttgataaggatttcttagaattcgttgatagctttcctagttga

SEQ ID NO: 233976 - DNA, 1100 bp, Unknown
  Bacterial polypeptide expressing nucleotide sequence isolated from the Sargasso Sea
gtcattattcaaaataattttctcaccatcttggaggcctgccggtactttgaaaagaatttttaaattaatagttcatggtagaaatttaaaattacaacttgaaaaaacctttcacgtaaaagaagagatagaacaaaaaaatggaattaagaaaaatgcattaatcttaagcagatatcttagggcagtatttagaaaatcaaaacaagcgatgctgggcccagatatttcgcataggagaactctagtgaaatctcttgttagaaataaatatgttagagaggaagttaagaaacttgcaaatggcaataaatcaagaaaaaaaaggcttacaaaaaaggcatacaagtacgcaaatgaaatctgctctgatacaaattattcaatcttgagcttactggactcgggttttacttggttttggaatacaagatatgagggattacatacaaacaacctagaaaaaatcaaagagctttccaaagataattctttaatatatctgccatgtcacagaagtcatattgattattgtgctttaacatatcttctctatgaaaatggcttaatgattcctcaagtagctgcaggaaataatctaaatgtaccaattgtgggtagtatccttagaggagcaggtgcagtttttatgcggagaactttcatgagcaattccctatatagtactgttttctttgaacatattagggctcttatgacgagaggaaactctatagaattctttcctgagggaggaaggagtagaactggtctaagtcttccatctaggccgggattgctttctttagtaataagaagctttgcctctttaaaagaccaaaatgtaaaaattgttccagtttatataggttatgaaaaaatactcgaaggccagagctatttgtccgaacttactggtggaaaaaagaaaaaagaaagtttaatggatccaataaaggtttttaaagacttcaggaattatttaggaaattcatatcttaattttgctgatccaattgatcttgatactttccttaaagctcatgtgaatgatgaatactccatatctactcctcaggaaaaacaggatggataac

SEQ ID NO: 233977 - DNA, 1309 bp, Unknown
  Bacterial polypeptide expressing nucleotide sequence isolated from the Sargasso Sea
aaaggttacccggtaaagtattattcggaaggcggtcgtagccgcactggtcgtttattgcagcctaagaccggtatgctggcaatgacagtgcaagctgcactgcgtggtatagacagacctatcagcttagtgcctgtataccttggttatgagcatgtaatggaagtcaatacctacctgaccgaactcaaaggctccagcaagaaaaaagagtccattagcggcgtatttagtgcagcccgtaaactgcgggattatggctatggctatgtcaattttggccagcctatttcactgaacgcgtttttaaaccagcaggcacctgactggcgcgcgtcgatggagacggccgatacgcaaaaaccagcctggttaaatcctgcggtagcgacactggccaccgaaatgatgcagcggattaatcaggcagcagcgctgaatagtattaacctgatcgccacctgtttactggcgacacgccagcattcactgacgcggcaggagctgacccgtcagttggagttttaccgtaacttacaacactatgcgccttaccatgccggtgtcactctgcctgaaggctcggtcagtcaatggattgatcatgccattagcctgaagaaagttgaggtgtcacaagacagcttcggtcagattattcaactgacacccgaaaacgcgattttattaagttactaccgcaataacgtctgccatttatttatgctgccggcaattttggctacagctttattgcagcatccacagttaagcaaagtacaattgatcaatatttgtcagttgttacaacctttgctgcaacatgagctgtttttaaagccagagcactttaatgcatatatagaacagctactggaacagctgcaaaaacaccagctcatcgaagctgtgggtgcatctttacaagccgttccggtgcagcaggccgggcattttatgctggaactattggcacacaatgcgcaagacgtgctgcagcgttatgcggtggtgctgaatttactgcaactacatagcccgctgacgcgtgccgatttagagcagcaaagccatgaactggcacagcgtttaagcactttgcatggcatcagctctccggaataccttgataagcagctgtttgcgactctaatcacggcacttcgcgaagcaggttattgtcatactaacgagcaaaacgagttggaagccacggctattttgttaccattgcaacaaacagtaaacggcctgctaagagcagatatactgcagactgtgctgagcatagtgaaaaaaacataac

SEQ ID NO: 233978 - DNA, 2377 bp, Unknown
  Bacterial polypeptide expressing nucleotide sequence isolated from the Sargasso Sea
ttgagcttttttgtaaggcatttaagttcttcctctttaaaaaaagaagaacttaaaataattcattctgaaaaaaatatagtctatgctcttccaactgaatcactaattgatttagcgtcgttaaatgagatttgtaagcaaaataatttacctctcccagtagagaatatccaagatacaaaactcaaaaggtttatttgtttacagagtcctaaatacttaatctccgaacaaaagtttaaaagacaaaaaactcataacttagaagaacttttaaagcttgatcatgagatatcaataattccggtatccatatcttggggaaatagacctgataaaaaacagtcattattcaaaatcatcttctcaccatcttggaggcctgccggctctttaaaaaggatttttaagttaatagttcatggtaggaatttaaaattacaagttgaaagaaccttttacgttaaagaagagatagatcaaaagaatgatattaaaaaaaatgcattaatcctaagcagatatctaagggcagtatttagaaaatcaaaacaagcgatgctgggtccagatatttctcacaggagaaccctcgtcaaatctcttgtaagaaacagatatgtaagagaggaagtcaagaaacttgcagatggaaataaatcaagaaaaaaaaggctcacaaaaaaggcatacaagtacgcaaatgaaatctgctctgatacaaattattcaatcttaagcttattagactcgggtttcacttggttttggaatacaagatatgagggattacatacaaacaacctagaaaaaattaaaaagctttcaaaagataattccttaatttatctgccgtgtcacagaagtcatattgactattgtgctttaacatatctgctctatgaaaatggcttaatgattcctcaagtagcggcaggaaataatctaaatgtaccaattttgggtagtatccttagaggagcaggtgcagtctttatgcggagaacttttatgagcaattctctatatagtactgttttctttgaacatattagggctcttatgataagaggtaactctatagagttctttcctgagggaggaaggagtagaactggtctaagtcttccatctaggccaggattgctttctttgataatcagaagttttgcctctttaaaaaaccaaaatgtaaaaattgttccagtttatataggttatgaaaaaatactcgaaggccaaagttatttatccgaacttacaggtggaaaaaagaaaaaagaaagtttgatggatccaataaaagtttttaaagattttagaaattatctaggaaattcatatcttaattttgctgacccaattgatcttgattctttccttaaaactcatgtgaatgatgaatacactatatccagtcctcagaaaaaaccggaatggctaacagaagtgacagttaaattaggacaatccgttattagagctatcaataattcagttgcagtgacttctacaagtttattttccgttgccttattatcttcctcaactcaaactatggatgaagaaaatttagaagaaagaataaatttctttatttcccttattgagaaatcttccgactataaagatgtgtggattacgcagcgagaagtcaaggacataatctcaaaaacaaaaaaattaggttttattgaacctattatgattgcctctaggaaggtttataggccgacatcagatcaagtggcaacattatcattttataaaaataatatagtccatatctttattctctattctttaatatgcgaatctttaaaatttataaagaaagctcaaaaagaagaaattataaaactcatcgagatgatatacccaatcttcgcaaaagattttcatttgaaaaatgaaataattgataaagaattaatttcaaatgctatcagggtacttcaaatcaaaggcatccttttagaagataaagctggaaatatcaaacctccatctgagaatagtttagtttttcagcattacattgcattgtccaatctttgtgagccaagtttgaaacggttctacatagttatgagtacaatatggaaaagtgaatctatcttaaaagaagacttaaatatgaaatgtaaaaaattggctgaagatcttgaagaaattgagggttggccttacccagaattctcggataaagcaaaattcgataatttcatatatatgatgaaacaaactaaattttttaaagaagatagtgaaggtaaattatcagcctctctaattactaagaaggctaaaaacctttatgaacaattctttgataaggattttttggaatttatagaaaggcaatctaattagt

SEQ ID NO: 233979 - DNA, 913 bp, Unknown
  Bacterial polypeptide expressing nucleotide sequence isolated from the Sargasso Sea
gcggactcgatcgcctcgaatatgtctaccccaacgataagagctctaacctttctactaaactggttttggaaccgaatatatgaaggaatagagctcaaaggaatcgataaagttaatgctgtgtccagaacacactccctaatttatgtcccctgtcacagaagtcatgtcgattatcttttacttagcttcctgctgtttcacaaaggcctgatgattccccatatagcagccggtgataatttgaatattccaatattaggaagaatacttcgccagggaggcgcattttttatgcgccgctcctttagtggcgacgagctttactcgcaggttttcaaggaatacctctatcaaacatgcaatcgaggacactctatagaatttttccctgagggcggcagaagccgaactggtagactcctatctccaaaacttgggtttctcaatatgtgtgtcgaaagccacgaacgaggactgaataagcctgtcgcttttatccctgtctacataggttatgaaaagattattgagggggctacctacgtttctgagatgagaggcgctcaaaaaaccaccgagagattgagcgatattctgatcaacttaaagctaataaaacaaaatttcggcaaagttcaagtaaacataggacaaatcttaaaacttgacgagtgggcagtcaaatcaaaaaaaccaaaccagaattccactgaatttctagctagaaaaattatgtgcgctatcaatgacgcggcaacagttaatgcggtgaatttggctgctttagtattcctaggtacagcaagacaatctctggacgaggaaacacttaaagaacaactcgagctatatattaatttggtaaaaaatctctatgacagcgaaacactaactaacaatgtagaag

SEQ ID NO: 233980 - DNA, 838 bp, Unknown
  Bacterial polypeptide expressing nucleotide sequence isolated from the Sargasso Sea
cctgcccgtcaagaacgggccatcccattcgtttttctttctgtacaagcggattggcggcctgttccgcggcggccggcacaagcccgttcccaccagggaattcggtgacctggtccgtttcgggctggaacaccccgagcaggacgtacagattgttccggtttccctgttctggggtcgctctccggacaaggaaaaatccctggtgaagttgctgctgtccgacacctggtcagtcgccggccgcttacagaagttcctgattatcctggtccacgggcgcaacacctacgtgcagttcaaccagccgctgtcactcaaccaggtggttgaggaataccggaataacgagcagaaagccaaccgcaaactggcgcgcctgctgcgcacccatttccgtcgggtacgccaggcggtactggggccagacctgtcccaccgccgcacattggtggaaggcctggtacgcacccaggcggtaaaagaagccattcgcgaaaccgccgccaaggacgatattccccctgagaaagtccgggccaaggcctacaagtacgccgacgaaatcgccgccagcatgtccattgtcaccatacgcttcctggaactggtgctggcctggttgtggaaccggatctacaacggtattgccatcaacaacatcaaggtggccaaggaaacagcacaggacaatgccgtggtctatgtgccctgccaccgctcgcacatcgactacctgctgctgtcttatgtgctgtacaagaacggtctgatgccgccccacattgctgccggcatcaacctgaacatgcccgttgtcgggccgatcctgcgc

SEQ ID NO: 233981 - DNA, 847 bp, Unknown
  Bacterial polypeptide expressing nucleotide sequence isolated from the Sargasso Sea
gaagtcgccacgtatcacaaagagttaagtggcaagaaaaaacaaaaagaatccgtttggcaagtttttggagccattcgcaagttaggtaattttggtcaaggttatgtgaactttggagagccgattaccctgcaaacctttttaaacgaaatggcacctaactggcgcgcagagcttgccgatgatcctgaacaaaagccaacttggttaactccagcggttaacgtgttagcaaatcgggtgatgacacgtattaatgatgcggcagcggccagttccgtcacgctcaccagtttagctttattggcttctgagcaaaatgcgcttgagcgttgtttgttagaacgtcagttagatttgtacctcacgctgctgaagcgggtgccttatacctcttttacttctgtcgcggaaggtgatggtaagcatcttgttcaacagggtattgatttaaataagttttcagtatcctgcgatcctttaggtgagatagtgtctatcgatgctaatcaggccatttcgatgacctattatcgcaataatattatccacttatttattattccttctcttattgcgagttgtttgacccataatgagcaaagtcagcgacagcaaattgtggcaatcgtgaatgacttttatccgttgctaaaggctgagctgtttatgggaattaaggatataccttcctatgtcaatcaagtgctggatctctttattgagcaaggcttaataactgagtcagataacttatcagttgtaacggaacattccagtcagttggtattgctctcaggatcggtcagtgagacattgcaacgctatgccatcattttttaat

SEQ ID NO: 233982 - DNA, 844 bp, Unknown
  Bacterial polypeptide expressing nucleotide sequence isolated from the Sargasso Sea
cgctcgcgcaccgggcgcatgctgcggccgaagaccggcatgctggccatcaccctgcgcagcttcctgcgcagcaaccgcctgcccatcgtcttcgtgccggtgtacatcggctacgagcgcgtgctggaaggccgcacctacctgggcgagctgcgtggcgcgagcaagaagaaggagtcgatcttcgacctgttcaaggtgctcggcgcgctcaagcagcgcttcggccaggtctcggtgaacttcggcgagccgatcaagctggccgaattcctcgaccagcagcagcccggttggcgtgaacaggagctggggccgcagtaccgccctgcctggctcaacgacaccaccaatcgcctgggcgagcgcgtggcgcgtcacctcaacgaggcggcgtcgatcaacccggtcaacctggtggccctcgcactgctgtccaccagcaagctggcgctggatgaccgcgccctggcgcgcgtgctcgacctgtacctggcgctattacgtgcggtgccttattcgccgcacaccaccctgccggacggcgacggcgcgacgctgatcgagcacgtcaagggcatggacctgctggccgagcagaaggatgcactgggcaagattctctatctggacgagcagaacgccgtcctgatgacctactaccgtaacaacgtgctgcacatcttcgccctgccggcgctgctggccagcttcttccagagcagtgcgcggatcagccgcgagcagatcctgcgctacgccggcgcgctgtatccgtatctgcaatccgagctgttcatccgctgggagcagagcgagctggaaggcgtgatcgacccag

SEQ ID NO: 233983 - DNA, 847 bp, Unknown
  Bacterial polypeptide expressing nucleotide sequence isolated from the Sargasso Sea
cctgctgtttcacaaaggcctgatgattccccacatagcagccggtgataatttgaatattccaatattaggaagaatacttcgcaagggaggcgcattttttatgcgccgctcctttaatggcgacgagctttactcgcaagttttcaaggaatacctctatcaaacatgcaatcgaggccactctatagaatttttccctgagggcggcagaagccgaactggcagactcctgtctccaaaacttgggtttctcaaaatgtgtgttgagagccacgaacgaggactgagtaagcctgttgcttttatccccgtctacataggttatgaaaagattattgaaggggctacctacgtttcagagatgagaggcgctcaaaaaaccacagagagattgagcgatattctgatcaacttaaagctaataaaacaaaatttcggcaaagttcaagtaaacatagggcaagtcttaaaacttgacgaatggacagccgaatcaaaaacaccaaaccagaattcaactgaatttctagctagaaaaattatgtgcgctatcaatgacgcggcgacagttaatgcggtgaatttgactgcgttagtattcctagctacagcaagacaatctctagacgaagaaacactcaaagaacaactcgagctatatattaatctggtaaaaaatctctataacagcgaaactctaactaacaacgtagaagatgcaaattcaataattctacgtctaacctcccttggactcttaaaaatggatgtcgaggaattcggtcaagttttttatcttgaaccgttttcagcagtcttgatgacttggtatcagaacaacgtc

SEQ ID NO: 233984 - DNA, 857 bp, Unknown
  Bacterial polypeptide expressing nucleotide sequence isolated from the Sargasso Sea
acgcccggtggccgatgtggcggtgggcgaccacgtcgagccggccgcgttcttctttctcaacccggcaacgagctggtttggccgacgcacgcgtctggtggcgccgccaacgctggtccggctggtcggcgcactggagcacaacgcggtggaaaacgcgcagatcatcccggtcagcgtgttctgggggcagtcgccgaatcgcgagaccagcgcctggaagctgctgttcgccgacagctgggcggtcaccgggcgcctgcgcaaactgctcagcattctggtgctgggccgcaagacccgcgtgcagttctccgcaccgatccagctcaacgagctgatcgcactgaacaagggccacgagcgcaccctgcgcatggtccatcgcatgctgcgcgtgcacttccgcaaccagaagaccgccgtgatcggccccgacctgtcgcaccggcgcaatctggtcaagggcctggtccacgcaccgcaggtccggcaggcgattcgcgacgaggccgagcgcgagaacatttccatcgagcgggccgaagccagggcgctgcgctacggcaacgaggtggcctcggactacgcctacaccgccgtgcgcttcctcgaagtggtgctgtcctggttctggaacaagatctacgacggcattcgcgtcaaccatatcgagccactgcaggaagccgtgcgcggctacgaggtgatctacgttccctgccatcgcagccatatcgactacctgctgctgtcctatctgctgttccgcaacggcctgacgccgccgcacattgccgccggcatcaacctcaacatgccagtcattggtagcctgctgcgccgcggcggcg

SEQ ID NO: 233985 - DNA, 907 bp, Unknown
  Bacterial polypeptide expressing nucleotide sequence isolated from the Sargasso Sea
atccaaaatcaaaaagcaacgactcttggtccaaatttcgaaaacagaactgaattactaaactcaattgctaccagcaatgcagtaaaagacagcttaacgaatcatcctgatcaatctgaaacctttccaagaaaaattgcggactcgatcgcctcgaatatgtcttaccctacgataagagctctgacctttctactaaactggttttggaaccgaatatatgaaggaatagagctcacaggaatcgataaagttaatgctgtgtccagaacacactccctaatttatgtgccctgtcacagaagtcatgtcgattatcttttacttagcttcctgctgtttcacaaaggcctgatgattccccacatagcagccggtgataatttgaatattccaatattaggaagaatacttcgccagggaggcgcattttttatgcgccgctcctttagtggcgacgagctttactcgcaggttttcaaggaatacctctatcaaacatgcaatcgaggacactctatagaatttttccctgagggcggcagaagtcgaactggcagactcctgtctccaaaacttgggtttctcaaaatgtgtgttgagagccacgaacgaggactgagtaagcctgttgcttttatccctgtctacataggttatgaaaagattattgaaggagctacctacgtttcagagatgagaggcgctcaaaaaaccaccgagagattgagcgatattctgatcaacttaaagctgataagacaaaatttcggcaaagttcaagtaaacataggacaagtcttaaaacttgacgagtggacggcccaatcaaaaacaccaaaccagaattcaactgaatttctagctagaaaaattatgtgcgctatcaatgacgcggcgacag

SEQ ID NO: 233986 - DNA, 1354 bp, Unknown
  Bacterial polypeptide expressing nucleotide sequence isolated from the Sargasso Sea
actggttaaagcccacagcattccagttaacgttgaaaccgaattaggaatagataaaagtaaacctatcgtttatctactccccaccaactcagtgacagaccaacttgcactgagaatgtcgactaaagcgctaggtttacctagtcctacagaaaccctcacattagcggggcgagagtattcgtcgaccttatttttacgcaaaacccagcctcttttccgttcgtcggctaaagatacgggaattgaagacgtttttactgacctctttcatttgcatagagaccatgaaaacctagatttacaagttgttcctgtctatgtgacgtggggccgtgccccgggtcgtggtaagccaggcttaagcgatctcattgctgataaagcggcgccaagttggcttcgtaagttgttcattgtgctgtttttgggccgcgacaactttattaactactctaaagccgtttctgcacgcgcgatgtccaatcaacatggtagtgaccaaagtattgcacataagcttgtgcgcgtagcaagcactcactttcaaagaaagcgccaaagcatgactggccctacgctgttagagcgccaagaactcaataatagtgtgttgggctctgatgcagtgcgtcgcgctattgctgaggaatcaagaagtaagaaagtgtctcatgaaaaagcgaaagagactgcccaaacctacatcacagaaatcgcggcagactaccgcgaagggctaattcgttttggcgacagactacttacccgaatctggaacaaaatttataacggtattagtgtaggtcatgccgatcgcattcgtgaattggcggctaatggtcatgaaatcatctacgtaccgtgccaccgtagtcacatggattacctattattgacttacgtgatttatcacgaaggtatggttacgccacatatcgctgcaggtatcaatctgaacttttggccggttggaaaaatgttccgtcgtggcggtgcttttttcttacgccgcagttttgcaggcaacaagctctacacagctgttttcagagaatatctagagctgctgtttaacaaaggctattcggtaaaatactatcccgaaggtggccgcagccgaaccggccgtttgatcccaccgaaaacgggcatgctagccatgaccattcaagccatgctcaaaggcgttaaccgtcccgttagtatcgtgcctgtctatattggctatgagaacgtgatggaagtgaagagctacttgaacgaactcaaaggctctaagaagaaaaaagaatctaaccttcaggtgttctcagctattcgtaaactcaagattatggtcacggatacg

SEQ ID NO: 233987 - DNA, 1108 bp, Unknown
  Bacterial polypeptide expressing nucleotide sequence isolated from the Sargasso Sea
gtatctgtgttctggggccgtcggccggaaaaagagaactcaatgtggcgcatcctgttctccgataactggtcgcccgccggtttcatcaagaaattcttcatcatcattactcagggacggcagctctacgttcagtttagtcagcccctgtcactacgtaccctagtcgaccagtgccagactgacgatcaagccgttcgcaaagcatcacgcatcctgcgggtccatttccgccgccaacaggaagccgccatcgggccagatctgtcgcacaggcgtaccctgactaacactgtggtggattccatctcggtgcgtgaagtcattagcgctgaagcgaaacggcaagaccttagtgaagaaaagctggaagccaaggcccgcgcttatgccatggaaattgcagcagactattctcacaccgtgatccgaacccttgagttgtttttaaactggttatggaaccgcctatacggaggcattcgcctctacaatatggacaacctgaccaaggtcgccggcgatcacgaagttatctatgtgccctgccaccgtagccacatagattacctgctgctgtcctttgtgatgttccgtaacggcttggttccaccgcatattgccgcgggtattaacctgaacctgccgatcgtgggaacggtcctgcgccgtggtggcgctttcttcatgcgtcgcagcttccgtggcaacccactatacgccgccgtattcagcgaatacttgcacacgattaccacacgcggcttttccattgaatattttgtagaaggaggtcgcagccgcagtggtcgcatgcttaagccccgcaccggcatgctggccatgaccgtacgcagcttcctgcgcgattcgcgcaagccgattgcctttgtgcctgtctatgtgggctacgaaaaagtgattgaagctggctcctatatcggcgaactgcacggcaaaaaaaagcaaaaagaatcggtgggcggcttgatgaagtcactgtctgtactgcgtagccactttggccaggtgcacctgaattttggggagcctattaagctggtggactatctggacgggcacaatccaaaaatggcgcaatgaa

SEQ ID NO: 233988 - DNA, 913 bp, Unknown
  Bacterial polypeptide expressing nucleotide sequence isolated from the Sargasso Sea
acccgcgatccgcttcctggaagtggtattgagctggttctggaacaagatctacgacggtatcaaggtcaataacatcgagggcgtgcagaaggtggcccaaggctacgaggtgatctacgtgccttgccaccgcagccacatcgactatctgctgctgtcctacctgctgttcaagaacggcctgaccccgccgcacatcgccgccggcatcaacctcaacatgccggtgatcggcagcctgctgcgccgtggcggtgcgtttttcatgcgccgcaccttcaagggcaaccctttgtacacctcggtgttcaacgaatacctgcacaccctgtttaccaagggtttcccggtggaatacttcgtcgaaggcgggcgctcgcgcaccgggcgcatgctgcaaccgaaaaccggcatgctggcgatcaccttgcgcagcttcctgcgttcctcgcgcatgcccatcgtgttcgtgccggtgtatatcggctatgagcgcgtgctcgaaggccgcacttacctgggcgaactgcgtggcgcgagcaagaagaaagagtcgatcttcgatattttcaaagtggtcggcgcgctcaagcagcgcttcggccaagtggcggtcaacttcggtgagccgatcaagctggcggagttcctcgacgccgagcaaccggactggcgcgcccaggaactggggccgaactacaaaccggcgtggctcaacgagaccaccaatcgcctcggcgaacaggtggcgcgccacttgaacgaagccgctgcggtgaacccggtgaacctggtcgcgctggcgctactgtccaccactcgcctggcgctggatgaacaggccatggcccgccaactggacctgtacctggcgttgttgcgtcgtgtgccctactcgccccataccact

SEQ ID NO: 233989 - DNA, 702 bp, Unknown
  Bacterial polypeptide expressing nucleotide sequence isolated from the Sargasso Sea
ctctaccgcggcctctcggtcaacggcgccgagaaagtgcgccagctggcccaggaaggacacgagatcgtctatgtgccctgccatcgcagccacatggactatctgctgctctcctacgtcatctaccaccagggtatggtgccgccccacatcgcggcgggcatcaacctcaacttctggccggcgggcccgatcttccgccacggcggcgccttcttcatccgccgcaccttcaagggcaacccgctctacagcacggtattccgggaatacctcaacctgctgtttgccaaaggttattcggtggagttcttcaccgagggcgggcgttcgcgtaccggccgcctgctgccgcccaagaccggcatgctggcgatgaccctgcaggccatgatgcgcgggctggacagaccggtgaccctggtgcccgtctatctgggctacgagcacgtgatggaggtgaacacctaccacaacgagctcaagggcagccgcaaggagaaggagagcttcctgcaggtgctcggcatcctgcgcaagctgcgcaactacggccggggcttcgtcaacttcggcgaaccgctgaccctcaacagctacctgagcgagcatatacccgactggaaacagcacatcggagaagaggagcgtccggagtggatggcgggcaccgtcaaccagctggccgagctgctgatg

SEQ ID NO: 233990 - DNA, 763 bp, Unknown
  Bacterial polypeptide expressing nucleotide sequence isolated from the Sargasso Sea
tgaagcaaaagctaaaaatattagccaaaccgaagctcgtcaaaatgcgcttaagctacttgatgaaatagccgcaaactattctgaagcaatgatacgcgttgctgatcgctttttaacatggctttggaataagctatacaacggcatacacataaaacacacagagcaattgcatgaactaactaataaaggccatgaaattatttacatgccttgtcatcgtagccatatggactacttgcttcttacttactctatttaccatttaggtttggtgccaccgcatatagccgcaggtgttaaccttaacttttttcctgccggtggcatatttcgccgctcgggtgcgttttttattcgccgctcgtttgcaggcaataaactgtactcagctatttttaaagaatatttgagtcagttatttattaaaggttactcagttaagttttacacagaaggcgggcgtagccgtactgggcgtttgttaccgcccaaaacaggtatgcttgcaatgacctttcaagccatgctacgcggtatcgatcgaccagtatcaatagtccctgtgtatattggctacgaacatgtcatggaaataaatacgtaccttaaagagcttgctggaaaagataagaaaggcgagtcggtatttggtatttttaaagcgataaaaaaccttaaaaactacggacgtggttacctaaattttggcgatcctatttcggttaaccaatatttaaatgataaccaacccgactgg

SEQ ID NO: 233991 - DNA, 880 bp, Unknown
  Bacterial polypeptide expressing nucleotide sequence isolated from the Sargasso Sea
cgcgagtctatcgatcctatcgaagccgtgcgtccagcctggctgacgccaacggtgaacgggattgcggcagagctgatggtgcgtattaacaacgcgggtgcggcaaacgccatgaacctgtgctgcaccgcgctgctagcttctcgtcagcgttcgctgacccgcgagcaactgaccgagcagctcaactgttatctggatctgatgcgcaatgtgccgtattcctctgattcgaccgtgccgtctgtcagcgccggcgatcttatcgatcacgcgttgcagatgaacaagttcgaagtcgagaaggataccattggcgatatcatcattctgccgcgcgagcaggcggtgctgatgacctactatcgcaataacatcgcgcatatgctggtgttgccttcactgatggcggcgatcgtcacccagcatcgtcatatttcccgtgaagcactgctgcaacacgttgacgtgctctacccgatgctgaaagccgaactgttcctgcgctgggagcgtgatgaactggcaggcgtgattgacgcgctgacggctgaaatgcagcgccaggggctgattaccgttcaggacgacgagctgcatatcaacccggcccactcccgcacgctgcaactgctggcggcgggcgcgcgcgaaacgctgcaacgctatgccatcaccttctggctgctgagcgccaacccgtctatcaaccgcgggacgctggagaaagaaagccgcaccgtggcgcagcgtttgtccgtgctgcacggtatcaacgcaccggaattcttcgacaaggcggtgttcagctcactggtgctgaccctgcgtgacgagggttacatcagcgataccggcgatgcggaaccgggcgaaa

SEQ ID NO: 233992 - DNA, 900 bp, Unknown
  Bacterial polypeptide expressing nucleotide sequence isolated from the Sargasso Sea
ccgcggtcggccccgtttaccggcgcgccatgacctgttcaagaagctgctggcgtcaaaagccatcgccaaagcggtagaagacgaagcgcgcagcaagaaaatttcccacgagaaagcccagcagaacgctattgcgctgatggaagagatcgcggcgaacttctcctacgagatgattcgtttgaccgaccgcatcctcagctttacctggaaccgtctgtaccagggcattaacgtgaacaacgccgagcgcgtacgccagctggcgcacgacgggcatgaaattgtctatgtgccgtgtcaccgcagccacatggactacctgctgctctcttacgtgctttatcaccaggggctggtgccgccgcatatcgctgccggtatcaacctgaacttctggccagcgggcccgattttccgtcgcctgggcgccttctttattcgccgtacctttaagggcaacaagctctactccaccgtgttccgcgaatacctcggcgagctgttcagccgtggttactccgttgagtactttgtggaaggcgggcgttcccgtaccggccgtctgctggacccgaaaaccggcaccctgtcgatgaccatccaggcgatgctgcgcggcggttcacgtccgatcaccctggtgccgatttacatcggctacgagcacgtgatggaagtggggacctacgccaaagagctgcgcggtgcgaccaaagagaaagagagcctgccgcagatgctgcgcggcttgagcaagctgcgtaatctgggccagggctacgtcaacttcggcgaacccatgccgctgatgacctacctgaaccaccatgtgccggagtggcgcgagtctatcgacccgatcgaagccgtacgcccagcctggctgacgccgac

SEQ ID NO: 233993 - DNA, 1265 bp, Unknown
  Bacterial polypeptide expressing nucleotide sequence isolated from the Sargasso Sea
cctgctgctgtcctacctgctgttccgcaatggcctgacgccgccgcacatcgccgccggcatcaacctcaacatgccggtgatcggcggcctgctgcgccgtggcggcgccttcttcatgcgccgcaccttcaagggcaacccgctgtatacggcggtgttcaacgaatacctgcacaccctgttcagcaagggtttcccggtcgaatacttcgtcgagggcggccgctcgcgtaccggacgcatgctgcggccgaagaccggcatgctggccatcaccctgcgcagcttcctgcgcagcaatcgcctgcccatcgtcttcgtgccggtgtacatcggctacgagcgcgtgctggaaggccgcacctacctgggcgagctgcgtggcgcgagcaagaagaaggagtcgatcttcgacctgttcaaggtgctcggcgccctcaagcagcgcttcggccaggtctcggtgaacttcggcgagccgatcaagctggcagagttcctcgaccagcagcagcccggctggcgtcaacaggagctggccccgcagtaccgcccggcctggctcaacgacaccaccaaccgcctcggcgagcgcgtggcgcgtcacctcaacgaggctgcgtcgatcaacccggtcaacctggtggcgctggcgctgctgtccaccagcaagctggccctggacgaccgcgccctggcgcgtgtgctcgacctgtatctggcgctgctgcgcgcggtgccctactcaccgcacaccaccctgccggaaggcgacggcgcagcgctgatcgagcacgtcaagggcatggatctgctggccgaacagaaggatgcgctgggcaagattctctatctggacgagcagaacgccgtcctgatgacctactaccgcaacaacgtgctgcacatcttcgccctgccggcgctgctggcgagcttcttccagagcagtgcgcggatcagccgcgagcagatcctgcgctacgctggcgcgctgtatccctacctgcaggccgagctgttcatccgctgggagatcgaacagctggacgacgtggtggaccagtggctggcggccttcgtcgagcagggcctgctcaaggtggaaggcgatgtgtacgtgcgcccggcgcccagctcacgccagttcgtgctgctgaccttgctgtcgcgttcggtggcgcagaacctgcagcgcttctacatggccatcgccctgctgctcaacgccgggcagaacgcgatcagcgccgaggagctgg

SEQ ID NO: 233994 - DNA, 2425 bp, Unknown
  Bacterial polypeptide expressing nucleotide sequence isolated from the Sargasso Sea
aatgcctaaacaagactctctttggttgaaatcattacgctggatccaaaaacacttagtgcacactattgttgtgccgcaggatccctttgccgatctgaatctggacgcctccagaccgcttgcttatgtaatgaaaacagaatccctgagtgatattgctgcgttaagcgagatcactactaagctgggtttgccaagcccctacgagccgctcgtggtaaatggcgttgtcgcgccccgcgtagtttgcctcgaagggcgtaagcctttgtttggcgaccgtgccagcaatgagccattcctcgaatgttttatgcgtttgttggccgtacataaagaaaagcctgagttagatattcagctggtgcctgtgagcctgtattggggccgtactccgggtaaagaagacgacaccatgaaggcggctgtgcttgaacgcgagaatccaacttggttgcgtaagtgcctgatgattctatttttaggtcgtcacaactttgttcagttttctaatgcggtatcgctgcgttacatggccgacgagcacggcaccgatatggggattgcccataagcttgcgcgggtggcgagagtgcatttccgtcgccagcgcaaagtgatgacagggcctgtgctgcctaatcgtcaggcgatgttccactccctgttgaaatccgaatccttacgcaaggcgattcaggaagaagcggcgagtaagaagatttccgaaacccaagctcgtgaaacagcaattgaatatcttgatgaaattgcagcgaattattccgatagcctagtgcgtattgccgagcgtttcttaacttggttatggaacaagctctacagcggtatcaatatcaaaggtgccgagcaaatccgccagctgcaccatgatggtcacgagattgtgtatgtaccttgccatcgcagccatatggattacctactgttatcttacattctgtattaccaaggcatggtgccaccgcatattgcggcggggattaacctaaacttctggccagctgggccgttgttccgccgtggcggggctttctttattcgccgtagttttaacggtaataaactctatacggccgtgttccgtgaatacctcgatcagctgtttgctaagggatattcggttgagtatttctctgaaggtggtcgttctcgtaccggtcgtctattggcgccgaaaacaggcatgatcgccatgacgatcaacagtgtgctacgtggcatcgaacgcccagtcaccttagtgcctgtgtatttaggttacgatcacgtgatggaagtggcgacttatcacaaagagctgagtggtaagaaaaaacagaaagaatctgtatggcaagtctttggtgctattcgtaaattaggtaattttggccaaggatatgtcaactttggtgagccgattaccctgcaaaacttcttgaatgaaacggcccctaactggcgcactgaagtggccgacgatcccgaacaaaaaccgacttggttaaccccagcggtgaacgtgttagcgaatcgtgtgatgacccgtattaacgatgctgccgccgccagttctatcactttgaccagcttagtgctgctggcatcggagcaaaatgccctagagcgttgcttgctcgagcgtcagttagatttgtacctaactctgcttaagcgtgtgccttacacttcgtttacgtcggtggccgaaggtgatggcaagcacttagtgcaacaaggattagagctgaataagttctccatccacgccgatcctctgggtgagattgtatctattgacgcgaatcaagcgatttcaatgacttattatcgtaacaatatcatccacttgtttatcattccgtcgttgattgccagctgtttaaccaacaataagcagatttcaagagcccagattttgggaattgtgagtgacttctacccgctactgaaggcggagttattcatgggtatcaaggatctgccaagctatgtgaatcaagtgctggatctgtttattgaacagggcttagtgcaggaaagcgatacgctgtcggtggtgactgagcacactagccaaatgttgttgctggccggaagcgttagcgagactttgcaacgctatgcgattattttcaatctgctggcccacagacctaagatggagcgttcggagctggagtctgaaagccatctgcttgcccaacgtttaggggcgctgcatggaattactgcaccagaattctacgacaagaaactctataacaccttgagtgttaagcttaaagagttgggttatttctccgagaaggaagataaatccgacgttgagcgcattcgcgatcaagctaatagcttacttcgagcctcagtgagacaaaccatagtggcgagcgtgaccgcggagcatatcgtttaa

SEQ ID NO: 233995 - DNA, 1126 bp, Unknown
  Bacterial polypeptide expressing nucleotide sequence isolated from the Sargasso Sea
gggcagagctccgggtaaagaagacagtgtgaaatctatgctcggcgaatctgaatccccaagctggctggccaagctgtttattgtgttgatttcaggtcgtcacaccttggtgcgtttcagtaaagccgtctctgtaaggcagatcattgaaaatgccacagtcaacgaagacacggcccataaattattacgtgtggcgcgttttcatttttatcgccaacgtttggctgcaactggtcccaaattaccggacagagctgcattatttaactctttactggcttcagatgcattaaaaaaagccattgaagaagaagcccagtctaaaaaaatcagcatcagagaagcccgtgctgaagccttaaagttgctggaagaaatagcagcggattatcgcgaatccaccttaagagtgggcgatcgtttccttggctggttgtggaaaaagctgtactcaggcttaaaaattaccaatggtcaggtgctgacggatttagtgcaaaaaggccatgagattgtttatgtgccctgccatcgcagtcatatggattatctgttgcttagctacgtcatttaccatcagggtttagctccgcctcacatagccgctggtattaacctgaatttctggcctgtaggtaattttttccgccgcggtggtgctttttttattcgccgtagttttagcggtgagaaactctattctgctgtgtttcgtgagtacttaagccaactgttcagcaaaggttatccggtgaagtattactccgaagggggccgcagtcgcacaggccgtttattacagccaaaaaccggtatgctggcgatgacagtgcaagctgtattgcgtggcatagacagacctatcagcttagtacctgtttacttgggttatgagcatgtgatggaggtcaacacctacctgaccgagctcaaaggctccagcaagaaaaaagaatctatagggggtgttttcagcgctgcccgtaagttacgggattatggttatggttatgtgaacttcggtcagcctatctctctgaatgcctttttaaaccaacaggcaccggattggcgagcatcgctagaaacagcggatctacagaagccaagctggcttaaa

SEQ ID NO: 233996 - DNA, 2425 bp, Unknown
  Bacterial polypeptide expressing nucleotide sequence isolated from the Sargasso Sea
atgtcccttggacagaacatttccagagccatcttgcaatggccggtcagtggcttggtcaatcacaagagcctgccggaaaatcccatcaccgagctcaagctggatccggccagacccatcgtctacgccctgaagaccagctcgatcaccgacctgatgaccctgcaacagtgctgcgaggatctcggcctgcccggccccttcaccccgctggagctgaacggccagttgctgccccgttatgtctgtctggaccgtccgcctcccctgttcggcaagcgcagcaagccgctgcccttcctgcaggagttccaccagctgctggatctgcacaagcaggatccggcgctggatatccaggtggtgcccgtcaccctgttctggggccgcgcccccggccgggaaggcgaggaggcctccggctggaacatcatcagcagcctggcgccaaatcgcctcaagaaggcgctgatcgtgatcctgaaagggcgcgagaacctggtgcgcttctccccgccgctctccctgcgtcacatggcggacaagcacggcaccgacgaggccatcgcccacaagctggcgcgggtcgcccgcacccacttcagccgccagcagctggccgctaccggccccaagctgcccaaccgcaacctgctgttcaaacagctgctcgattcgaacgtcattcagcaggccatcgaggaagaggcccagcgcgaggggatcagcctggagaaagcccagaaacgggcccacggctacatggacgagatcgcctccgacttctcctaccggctgatccggctcggcgagagcttcctcggctggctgtggaacaagctctaccgcggcctgtcggtcaacggggccgagaaggtgcgccagctggcccaggaagggcacgagatcgtctatgtgccctgccatcgcagccacatggactatctgctgctctcctacgtcatctaccaccagggcatggtgccgccccacatcgcggcgggcatcaacctcaacttctggccggcgggcccgatcttccgccacggcggcgccttcttcatccgccgcaccttcaagggcaatccgctctacagcacggtattccgggaatacctcaacctgctgtttgccaagggttattcggtggaattcttcaccgaaggcgggcgttcgcgtaccggccgcctgctgccgcccaagaccggcatgctggcgatgaccctgcaggccatgatgcgcgggctggacagaccggtgaccctggtgcccgtctatctgggctacgagcacgtgatggaggtgaacacctaccacaacgagctcaagggcagccgcaaggagaaagagagcttcctgcaggtgctcggcatcctgcgcaagctgcgcaactacggccgtggcttcgtcaacttcggtgagccgctgaccctcaacaattacctcaacgagcacgtgcccagctggaaggagcatatcggcgaggaggagcgtcccgagtggatggcgcctaccgtcaaccagctggccgagctgctgatgacccgcatcaacggggccgccgccgtcaacggcctgaccctgagcgcactggcgctgctggccgccgagcgccacgcgctgacccgcgacgaactgcaggcccagctcaacacctatctggacctgctcaagcaggtgccctacagcccgcacagcaccatcccggacgaggatgccaagaccctgctggatcaggcgatggagctcaacaagttcgaggtgagcgaggacaagctgggccagatcgtcagcctggaccgctatcaggcgatcctgctgacctactaccgcaacaacatcctccatctgttcgccatgccctccctggtggcggccctgatcgagcgctgcgaggggatctcccgcagcgagatcgttgcccgctgcatcgacatctacccgctgctcaagaccgaactgttcctgcgctatgaagaggacgagctgccggagctggtcgatgccctgctggccgagctgcaacgccagcagctgatcgaggcccgcgacggcggcttctgggtcaatccggtcaaccagacccgcctgctgctcttggccgagagcatccaggagaccctgcaacgctacgccatcgtgctgacccgggtgctggcacagccccgcatcgaggccgagcagctggaggcggacggcctgatgatggcagagcgcctcggcaccctgcacggcatcaatgcccccgagttcttcgaccagaagctgttcagcaccctgatccacaccctgcgcagcgaaggctacctcgacccgggctgcaagccggatctgggccgcttccaggcgctggccgacaacatagtgccgctgctgagcaccaagatccgccgcaccatccaggccggcaaccggctctgac

SEQ ID NO: 233997 - DNA, 2425 bp, Unknown
  Bacterial polypeptide expressing nucleotide sequence isolated from the Sargasso Sea
atgcctaaacaagactctctttggttgaaatcattacgttggatccaaaagcacttagtgcacactattgttgtgccacaggatccctttgccgatctgaatctggatgcctccagaccgcttgcttatgtaatgaaaacagaatccctgagtgatattgctgcgttaagcgagatcaccacgaaacttggtttgccaagcccttacgagccgctggtggtgaatggcgttgtggcgccacgggtggtatgccttgaaggtcgtaagcctttatttggtgaacgcgccagcaatgagccattcctcgaatgttttatgcgtttgttggccgtccataaggaaaagccagagttagatatacagctggtgcctgtgagtctgtattggggtcgtactccgggtaaagaagacgacaccatgaaggcggcagtgcttgagcgcgagaaccctacttggttacgtaagtgcttgatgatcctatttttgggccgtcataactttgtgcaattttctaatgcggtatcgctgcgttacatggccgacgaacatggtaccgatatgggcattgcccataaattggctcgagtagcgagagtgcatttccgtcgccaacgtaaggtgatgacggggcctgtgttgcctaatcgtcaggcgttattccattccttgctgaaatctgaatccttacgtaaggcaattcaggaagaagccgcgagcaagaagatttctgaaacccaagcgcgtgaaacggcaattgaatatcttgatgaaattgcggcgaattattccgatagtctcgtacgtattgccgagcgctttttaacgtggttatggaacaagctctacagcggtattaacatcaaaggtgccgagcatattcggcagttacaccacgatggtcatgagattgtgtatgtgccctgccatcgcagccatatggattacctgctgttatcttacattctgtattaccaaggtatggtgccaccgcatattgctgcgggtatcaacctaaacttctggcctgcggggccgctgttccgccgtggcggggctttctttattcgccgtagttttaacggcaacaaactctatacggcagtgttccgtgagtacctcgatcagctgtttgctaagggatattcggttgagtatttctctgaaggtggccgttctcgtaccggccgtctattggcgcctaaaacgggtatgatcgctatgacgatcaacagtgtgctgcgaggcatcgaacgccctgtcaccttagtgcccgtgtatttaggctacgatcacgtgatggaagtggcgacctatcacaaagagctaagcggtaagaaaaaacagaaagaatctgtatggcaagtctttggtgctattcgtaaattaggtaattttggccaaggttatgtcaactttggtgagccgattacattgcagaacttcttgaatgaaacggcaccaaactggcgcagtgaagtggctgatgatcctgagcaaaaaccgacttggttaactcctgcggtgaacgtgttagcaaatcgggtgatgacgcggattaacgacgccgctgccgccagctctattaccttgaccagtttagtgttgttggcgtcggagcaaaatgccttagagcgttgtttgctcgaacgtcagttagatttatacctgaccctgcttaagcgtgtgccttacacgtcgtttacgtcggttgccgaaggtgatggcaagcacttagtacaacaaggattagagctgaacaagttctccatcaacgccgatcctttgggtgagatagtatcaattgatgaaaaacaagcgacgtcaatgacatactatcgcaataatatcattcacttatttattattccgtcattaattgccagctgtttaatcaataataaacagatttcaagagcgcaaatccttgggatagtgaacgacttttatccgttattgaaggcggaattgtttatggggatcaaagatctcccaagctatgtgaatcaagtgcttgagctgtttattgagcaaggtctagtgcaggaaagcgatatgttgtcggttgtgaccgagcacaccagccaaatgttattgttggctggcagcgttagtgagaccttgcaacgctatgccattatcttcaatctgctggcccacagacctaagatggagcgttcggatctcgagtctgaaagccatctgcttgcccaacgtttaggggcgctgcatggcattaccgcaccagaattttacgataagaaactctataacaccttgagtgttaagctaaaagagttgggttatttctctggtaaggaagataaatctgatgttgagcgcattcgcgatcaagctaatagcttactcagagcctctgtaaggcaaacgattgtcgccagcgtgaccgcggagcatatcgcttaat

SEQ ID NO: 233998 - DNA, 818 bp, Unknown
  Bacterial polypeptide expressing nucleotide sequence isolated from the Sargasso Sea
tatgcaagaagccgtaattattgatgctgttcgaacaccaatgggtaaatcaaaagaaggtatgttcagaaatgtccgtgctgagaatttgtcctcggcattgattattgaattactggatagatatcccgagcttaatccggatgatgtagaagatgtaatatgggggtgtgtaaaccaaactaaagaacaaggatttaacattgccagatttgcttcattgttaactcctttgccgcatacttgttccgcgcaaacaatcaaccgtttatgcggttcatcgatgactgcagttcatacagcatccatgtctatcatgtgcggagtgggggatgtttttatctgcggaggagttgagcacatgggtcatgtacctatggatcatgggttagatcctaatccaagcatgagcaaattttctgcaaaggcatctggaatgatgggtttaactgctgaaatgctttctattatgcataaaatttcgcgtcaggatcaggatgaatttgctctgcgctcacataataacgcttcttttgctgcaaaatcaaaacgatttaaaaaggagattgttcctatagaggggcatgacgaagaaggtagattaaagctatgctcagaagatgaagtcattagacatgatgcaaatatggaagctctcgcttcactgcctcctgttttcaatccagtttccggaacagtcacagcaggaaattcttctgcaatttctgatggagcttcagcagttttgcttatgtcttcacaaaaagcagaagacttaggattgaatcccttagctaaagtcaaatcaatggccactg

SEQ ID NO: 233999 - DNA, 346 bp, Unknown
  Bacterial polypeptide expressing nucleotide sequence isolated from the Sargasso Sea
tatgcaagaagctgtaattattgatgctgttcgtacaccaatgggacgttcaaaaggcggtatgttcaggaatgtacgtgctgaaaatttgtccgctgcactgatcattgaattactggatcgatatcctgaccttaatacggatgaagtagaagatgtaatctggggttgtgtaaaccagactaaggaacagggtttcaatatagcccgatttgcttcacttttaacaccattgccgcatacttgttcagctcagacagtcaatcgtttatgtggatcatcaatgactgcagttcattcagccgccatgtcaataatgtgtggagtcggggaagtttttatctgt

SEQ ID NO: 234000 - DNA, 1312 bp, Unknown
  Bacterial polypeptide expressing nucleotide sequence isolated from the Sargasso Sea
atgaaagagccattgaaactgacgactcgccagggcgaacggattgccgtcgtggcgggtttgcgcactccctttgccaagcaggccaccgcctttcacggcgtgcctgcggtggatctgggcaagctggtggtgagcgagatgctcgctcgcaccgatctcgatcccaagctcatcgaccagctggtgttcggccaggtggtacagatgccggaagcccccaacatcgcccgcgagatcgtgctcggcaccggcatgagcgtcagcaccgatgcctatagcgtgtcgcgcgcctgcgccaccagtttccaggccgtcgccaacgtcaccgaatccatcatggccggcacggtggacatcgccatcgccggcggcgccgactcctcctccgtgctgcccatcggggtgagcaagaagctggcccgcgccctggtggatctcaataaggcgcgcaatctgcagcagcgtttcaatatcctgcgccagttgcgggtcaaggatctgctgccggtgccacccgccgtggccgagtactccaccggtctctccatggggcagaccgccgagcagatggccaagagccaccagatcagccgcgaggcgcaagatgcgctggcgcaccgctcccacaccctggccgcgcaggcctgggccgatggcaagttgagtggcgaggtgttcaccgcccacgtgcctccctacaaggcgccgctggagcgagacaacaacatccgcgaaagctctgatctggcgagctacgccaagctcaagccggtgtttgaccgggtgcacggctccgtcaccgccgccaacgccaccccgctcaccgacggcgccgctgccgtgctgctgatgcgcgaagggcgggcccgcgagctgggcctcgagccgctcggctatatccgcagtttcgcgttctctgccatcgacgtgtggcaggacatgctgatgggcccctcctacgccaccccgctggcactggatcgcgccggcatcacgctggctgacctgactctgatcgacatgcacgaggcctttgccgcccagaccctggccaacctcaagatgtttgccagcaaagagtttgcccagagcaagctgggtcgcgatcaggccatcggcgaggtggacatggacaaattcaacgtcctcggtggctcgctggcctttggtcacccctttgccgcgaccggtgcgcgcatgatcacccagaccctgcacgagctgcggcgccggggtgggggattggggcttaacaccgcctgtgcggcgggtggtctcggcgtggccatggtgttggaggtagagtgat

SEQ ID NO: 234001 - DNA, 745 bp, Unknown
  Bacterial polypeptide expressing nucleotide sequence isolated from the Sargasso Sea
aatgaaacaagcagtgatagttgattgtatccgtacccctatgggtcgttctaaagcaggtatcttccgtaacgtgcgtgcagaggaattatcggcttatgtgatggccgctctggttgaacgtaacccggctttagatccggctgaaattgacgatgtgatctggggttgcgtacaacaaactttggaacaaggttttaacgtcgcccgtaacgccgctttgttggcaggtatcccacattctgtgccagctgtgacggtaaaccgcctttgtggttcatccatgcaagccttacacgacgcagtacgtgccattcaaaccggcatgggtgatgtgtacttaattggtggtgtggaacatatgggccatgtgcctatgacccacggcgtggatttccacccaggtttaggcaaaaacattgccaaagctgcaggcatgatgggtttaaccgctgagctgttaggtaaactgcacggcatcagccgccagcaacaagacgaatttggtgcccgctctcaccgtttggcgtatgaagccacgctgcagggtcgttttaaaaacgaaatcatcccggtgcaaggccatgacgctgacggcgtactgaaagtctttgataccgacgaagtgattcgtcctgaaactacagtagaagccttagcaggcctgcgtccggtgtttgacccggccaacggtactgtgactgccggtacttcttctgccttatcggacggtgcttctggcatg

SEQ ID NO: 234002 - DNA, 780 bp, Unknown
  Bacterial polypeptide expressing nucleotide sequence isolated from the Sargasso Sea
catgaaacaagctgttatcgtagactgcattcgtaccccaatgggccgttctaaggctggggtatttagaaatgtacgtgcagaaacattgtctgcagaactaatgaaagcacttctagtgcgtaatccgcaactagacccaaacgacattgaagatgttatttggggttgtgtacaacaaacactagagcaaggttttaacattgcccgtaacgcatcattattagcaggtattcctaaaacggctggtgctgtaacggtaaaccgtttatgtggttcatcaatggatgcccttcaccaagcggctcgcgccattatgacaggtcaaggcgacacctttattattggtggtgttgagcacatgggtcatgtaccaatgaaccatggcgtagactttcatccaggcctagcaaatcgcgttgctaaagcatctggcatgatgggcttaaccgctgaaatgttaggtaaaatgcacggtattactcgtgagcaacaagatgcgtttgcagtacgttcacatcagcgtgcccatgcagccaccatcgaaggtcgctttgctaaagaaatttggggcattgaaggccacgatgccaacggtgcgttaattaaagtcatgactgacgaagtaatccgcccagaaacatcattagagtctttagccggcttacgcccagcatttgacccagccaatggtacggtcactgctggtacatcatcggcgttatcagacggtgcttctgcaatgttagtgatggaagaatctaaagcgcgtgctttagg

SEQ ID NO: 234003 - DNA, 475 bp, Unknown
  Bacterial polypeptide expressing nucleotide sequence isolated from the Sargasso Sea
atgcaggaagctgtaattattgatgctgtgcggactccaatgggacgatcaaaaggaggcatgtttaggaacatccgtgctgaaaatatgtctgcaattctgataattgaattactggatagatatcctgagcttaatccagatgaagtagaagacgtaatatggggatgtgtaaaccaaactaaagaacagggattcaatattgctagatttgcttcacttttaacacagttaccgcatacatgttcggctcaaactgtaaatcgtttatgcggatcatcaatgactgctgtccacacagctgccatgtctatcatgtgtggggtcggagatgtattcatatgtggtggagttgaacacatggggcatgtgcctatggaccatggactggatccgaatccaagcaccagcaaattctcagcaaaggcatccggaatgatgggactaactgcagaaatgctttcaattatgcata

SEQ ID NO: 234004 - DNA, 1165 bp, Unknown
  Bacterial polypeptide expressing nucleotide sequence isolated from the Sargasso Sea
gatggaagaagcagtcatcatcgatgcggttcggaccccaatgggccggtccaaaggcggaatgttccgaaacgtgcgtgcggaaaacctttcagcggtgctgatcaacgaaattctggaaaggcatcctgaggtgaaacctgacgaggtggaggatgtcatctggggctgtgtcaatcagaccaaagagcagggttttaacattgcccgttttatttcactgatgactccgctgcctcacagttgtgcagctcagaccgtgaaccggctttgtgcgtcttcaatgaccgcaattcacagcgccgcaatggcgatcatgagcggtcagggggaagtgtttttctgtggcggagtcgaacacatgggtcatgtgccgatgaatcatggagtcgatccgaatcctgccagcagtcttttttccgcgaaggcttcaggaatgatgggactgactgcggaaatggtggcgattcagcaccgggtctccagggaaaatcaggattcttttgcattcagatcccatcagcgtgcctcgaagtccactacatcgggacgattctccagggagattgtaggagtagaaggtcacgatcaggaaggcaacctccagttttgtctggaagacgaagtaatccgtcatgatgctaagcttgttgaaatcgcagcattgaagccagtattcaacccggtttcagggacagtgaccgcagggaattcttctgcaatttcagacggtgcatcggcggtgctgatgatgtcccacaaacgtgccaaagaactggtattgaaaccgatggcgaaggtgagggcaatggcttcaacgggagttgatccgtcgatcatgggttatggaccggttccagcggtttggaaagcgctcaaaaggggtggattggaaatcaatgatatcgaactgtttgaactcaatgaggctttcgcagcacaatcattgccggttctcagggatctcaaactggaagacagcatggaagagcgggtcaacctgaatggaggtgctattgccctcgggcatcccttgggctgttcaggagcacggatcacgacaaccttgctgcacgagatgaaagaaaaggatgcccaacttggagtggcaacaatgtgtgtcggactgggtcagggtgtggccacggtgtatgagcggatctga

SEQ ID NO: 234005 - DNA, 1108 bp, Unknown
  Bacterial polypeptide expressing nucleotide sequence isolated from the Sargasso Sea
gatggaagaagcagtcatcatcgatgcggtacggactcccatgggccggtccaaagggggaatgttccgaaacgtgcgtgcggaaaacctttctgcggcgctgatcaacgaaattctggaaagacatcctgaggtgagccctgatgaggtggaggatgtcatctggggctgtgtcaatcagaccaaagagcagggttttaacattgcccgttttatttcactgatgactcccctgcctcacagttgtgccgctcagaccgtgaaccgactttgtgcctcttcaatgaccgcaattcacagcgctgcaatggcgatcatgagcggtcagggggaagtatttttctgcggcggcgtcgagcacatggggcatgtgccgatggatcatggagtcgatccgaatccttccagcagtcttttttccgcaaaggcttcaggaatgatgggactgaccgcagaaatggtcgcgattcagcaccgggtttccagggaagatcaggattcttttgcgttcagatcccaccagcgtgcctcaaagtccaccacatcgggacgattctccagggaaattgtgggagtagaaggtcacgatcaggaaggcaacctccagttctgtctggaagacgaagtaatccgtcatgatgcgaagctcgatgaaatcgcagcattgaagccagtattcaacccggtttcagggacagtgaccgcagggaattcttctgcgatttcggatggtgcatcggcggtgctgatgatgtcccacaaacgtgccaaagaactgggattgaaaccgatggcgaaggtgatggcaatggcttcaacgggagttgatccttcgatcatgggttatggacctgttcctgcggtcaggaaagcactcaaaagggggggggtggaaatcagtgatatcgaactgtttgaactcaatgaggctttcgcagcacaatcattgccggttctcagggatctcaaactggaagacagcatggaagagcgggttaacctgaatggcggtgctattgccctcgggcatcccttaggatgttcaggagcacggatcacgacaaccttgcttcacgagatgaaagaaaaggacgcccaactggagtag

SEQ ID NO: 234006 - DNA, 973 bp, Unknown
  Bacterial polypeptide expressing nucleotide sequence isolated from the Sargasso Sea
caggcttcacgttgcacgtaacgcgcaactactaacaaaaattccacgcacaacaggcgcggtaacggttaaccgtttatgtggttcatcaatgcaagcccttcacgatgcaacaagcggcatcatgagcggtcgtggtgacatttacatgattggtggtgttgagcacatgggtcacgtaccgatgaactacaacatcgacttccaccctggtcttgctaagtacacggcgaaagcgtcgggcatgatgggcatgacagctgagctacttggtcgtcagaacggcattactcgtgaacaacaagacgcatttggcgcacgttcgcaccagctagcgcacaaagcacaccttgaaggccgctgggctaacgagattgtgcctgttgaaggtcacgatgcaaacggcgtattaaagcttattgatcatgacgaagtggtacgccctgaaagtacagtagagagcatggcggcacttcgcccagtgttcgaccctgtaaacggtacagtaactgcggggacatcgtctgcgctgtctgacggtgcgtcgggcatgctacttatgtcagcagaccgtgctaaagagcttggcctaacgccacgtgcgaaaattcgctcgatggcagtagctggttgtgatgcagcaattatgggttacggccctgtgccagcaacacagaaagcccttaagcgcgctggcctaacaatggacgacattgaacttgctgagtttaacgaagcgttcgcggcacaggcgctatcgtgcattaagcagctaggttggatggaccacctagatactaagattaaccttaacggtggtgcgattgcacttggtcacccactaggttgttctggttcacgtatctcgggtacgcttatcaacctaatggaatcacaagacgtaagcctaggcttagcgactatgtgtattggtttaggccaaggtattgctactgtatttgagcgtgtataa

SEQ ID NO: 234007 - DNA, 963 bp, Unknown
  Bacterial polypeptide expressing nucleotide sequence isolated from the Sargasso Sea
acgagtgtcgcatagcgatgtttctcgcgggatttccaaaggaggtgccggtgcgcacgacgaatcgacagtgttcgtccggtttgcaggcgtgcgcggacgtcgcggcggggatcaaggcgggatattacgatatggggatcggcgccggggtggagacgatgacggcgaatccgatgaagtgggagggtggatttaatccgagaatcgcgtcgtctagcgacgcgcaaaattgtttaattcccatgggggtgacgagcgaaaacgtcgccgaaaagtttggcatctcgagagaggcgcaggacaccatggcggcgagatcgcacgcgcgagcggcgaacgcgcgagcgacgggacggttcacgcaggagatcgtgccggttcggacgaagaatgcggagggcgtgaacgtcgtcgtgtcggaggacgacggcattcgcgagggcaccaccgtcgccacgctcgcgaaacttcccgccgtgttcaaaaagggtggaagcacgacgccggggaacgcctcgcaggtgtccgacggtgccgcggcggtggtgttggcccgacgctcgtacgcggagaagcacggattgcccattttggcgacgtggcgatccttcgccgccgtcggttgcgatcccgccatcatgggcgtcggtcccgcggtggcgattcctgaagctttacgcgccgtaaacttgaatgtgaacgatgtcgatttgtacgaattgaacgaggcgttcgcttctcaggcgacgtattccatcgaaaagttgggtctcgatccggagcgggtgaacgtgaacggtggcgcgatcgcgttgggtcacccgttgggagcaaccggagcgcgatgcctcgcgacgctcattcacgagatgcacagacgcgggggtaaggttggcatctgcagcatgtgtattggatctggaatgggagccgccgccaccttgacgcgggacgactaac

SEQ ID NO: 234008 - DNA, 1165 bp, Unknown
  Bacterial polypeptide expressing nucleotide sequence isolated from the Sargasso Sea
atgcaagaagctgtaattattgatgctgttcgtacaccaatgggacgatcaaaaggcggtatgttcaggaatgtccgtgctgaaaatttgtctgctgcactgatcattgaattacttgatcgatatcctgagcttaatacgaatgaagtagaagatgtaatctggggttgtgtaaatcagactaaggaacagggtttcaatatagcccgatttgcttcacttttaacaccgttgcctcattcttgttccgctcagactgtcaatcgtttatgcggatcatcaatgactgcagttcattcagccgccatgtccataatgtgtggggtcggggaagtttttatctgcgggggagttgaacacatggggcatgtaccgatggatcacggactgaatccaaacccaagcacaagcaaattttcagcaaaggcatccggaatgatgggactaactgccgaaatgctttcaattatgcataaaatttctcgtcaggatcaggatgaatttgctctgcgatcacataaaaatgcttcacttgcgacaaaatccaaacgatttgaaaaggaaatagtgcctatagagggtcatgacgaattgggaagattacagctctgctcagaagatgaagttattcgtcatgatgcaaatatggaagctcttgctgcgctccctcctgttttcaatccggcctcaggaacagttacagcagggaattcttctgcaatttcagatggagcttcggcagttttaatgatgtcttcacaaaaagcgaaagaccttaacttgaatcctctcgcaaaaatcaaatcgatggcaaccgcaggtgttgacccagctattatgggatacggtcctgtccctgcggtcaggaaggctctgaaacgcagcaagcttgaaattgaagatattgatatagttgagttaaatgaggcatttgctgctcagtctttgacagtgcttcgcgatcttaaaattggtgatttgattgaagaaaaagtcaatcctaatggaggggcaatttctcttggtcacccacttggttgttcaggtacccgtattcttgggactctactgcatgagatgagggagaaggatgctgaacttggtgttgctacgatgtgcatcggactcggacagggagttgctacagttgttgaacgtgtctgag

SEQ ID NO: 234009 - DNA, 781 bp, Unknown
  Bacterial polypeptide expressing nucleotide sequence isolated from the Sargasso Sea
catgagccgtaacgtggcgaaagccgcggggatgatgggcctgaccgccgagatgctctctcgtctgcacggcattagccgtgaaatgcaggatgcctttgccgcgcgctctcacgctcgcgcatgggccgccacgcagtctggtgcctttaagaacgagatcatcccgaccggcggccacgacgctgacggcgtactgaagcagttcagctacgacgaagtcatccgcccggaaaccaccgtagaagcgctttctaccctgcgccctgcgtttgatccggtcaccggtacggtaacggcaggtacttcgtcggcactgtccgacggtgccgccgcgatgctggtgatgagcgaaagccgcgcccgcgagctgggcttaacgcctcgcgctcgggtacgttcgatggcggtcgtgggctgcgatccttcaatcatgggttacggcccggttccggcctcgaagctggcgctgaaaaaagcgggattaaccgccagcgacatcgacctgtttgaaatgaacgaagcgttcgccgcgcagatcctgccgtgcattaaagatctggggttaatggagcagatcgacgagaagattaacctcaacggcggcgcgatcgccctcggtcacccgctgggctgctccggagcgcgtatcagcacaacgcttatcaacctgatggaacgcaaagatgcccagtttggtctggcaacgatgtgtatcgggctgggtcagggtatcgcgacggtgttgagagagtgtaaatcaggaaaagtatctcaaagc

SEQ ID NO: 234010 - DNA, 742 bp, Unknown
  Bacterial polypeptide expressing nucleotide sequence isolated from the Sargasso Sea
atggaacaggttgtcattgtcgatgcagttcgtaccccgatgggccgttcaaagggcggcgcctttcgccacgtgcgcgcagaagatctctccgcgcacctgatgcgtagcctgctttcacgcaacccatcccttgaagccagcacgattgacgatatttactggggctgcgttcagcagactctggaacagggcttcaatattgcccgcaacgcggcgctgctggcggaaatcccgcattcggtacccgccaccacggtcaatcggctgtgcggttcttccatgcaggcgcttcacgacgcggcacgcatgatcatgaccggcgacgccagcgtatgcctgattggcggcgtagagcatatgggccacgtcccgatgagccacggcgtagatttccatccgggcctgagccgtaacgtcgccaaagccgccggaatgatggggctgacggcagaaatgctggcgcgcctgcacggcatcagccgcgagatgcaggaccagtttgcggctcgctcccacgcccgcgcctgggctgcgacgcaatccggcgcattcaaagcggaaattgtcccaaccggcggtcacgacgccgagggcgtgctgaagtcttacagctacgacgaagtgattcgcccggagacaacggttgaagcgctggccgcgcttagacccgctttcgatccggtaaccggaaccgtgacggcgggaacctcatccgccctctccgatggcgccgcagcca

SEQ ID NO: 234011 - DNA, 1165 bp, Unknown
  Bacterial polypeptide expressing nucleotide sequence isolated from the Sargasso Sea
catgaaagacgtagtcattgtcgactgtatccggaccccgatgggccggtccaagggcggcgccttccgcaacgtgcgtgcagaagacttgtcctcgcacctgatgaaatccatcctgctgcgcaaccccaacctcgacccgaacgagatcgaggatatctactggggctgcgtgcagcagaccctggagcagggcttcaacatcgcccgcaacgccgcgctgctggccggcattccgaagcaggtgggggcggtcaccgtcaaccgcctgtgcggctccagcatgcaggcgctgcacgatgcctcccgcgccatccaggtgggtgatggggatatcttcatcatcggcggcgtcgaacacatgggccacgtgccgatgagccacggggtggacttccaccccggcatggccaaatcggtggcgaaagcctccggcatgatggggctgaccgccgagatgctcggcaagctgcacggcatcagtcgtcagcagcaggacgagtttgccgcccgctcccatcgccgcgctcacgccgccactgtggaagggcgtttcgccaaggagatcgtcgggctggaaggccatgacgccagcggcgcccgcttcttctacgactacgacgaagtgatccgcccggagaccacggttgaaaccctgagccagctgcgcccggtgttcgacccggtcaacggtaccgtcaccgccggcacctcgtcggccctgtccgatggcgccgccgccatgctggtgatgagtgcggatcgcgccaaggcgctcggcctcaccccgcgcgccaagatacgtgccatggccgtcgccggctgcgatgccgccatcatgggttacggcccggtaccggccacccagaaggcgctcaagcgggccggcctgaccatcggcgacatcgacctgttcgagctgaacgaggcgtttgccgcccagtccctgccttgcgtgaaggatctgggtctgcaagacgtggtggatgagaaggtgaacctgaacggcggcgccatcgcgctgggtcacccgctcggctgctccggcgcccgcatctccaccaccctgctcaacctgatggaagagaaggacgccaccctgggggttgccaccatgtgcatcggcctgggtcagggcatcgccaccgtgttcgaacgagtgtaa

SEQ ID NO: 234012 - DNA, 1126 bp, Unknown
  Bacterial polypeptide expressing nucleotide sequence isolated from the Sargasso Sea
tatgggccgctctaaggctggggtgttccgtaatgtacgtgcagaaacactctctgccgaattaatgaaaggtctattactgcgtaacccgcaattagatcccaatacgattgaagacgttatttggggctgcgtgcagcaaaccctagagcaaggcttcaacattgcccgtaacgcatcattgctggcaggtatcccgaaaacggctggcgctgtgacagtgaaccgcctatgtggttcttcaatggaagccatccaccaagccgctcgcgcaattatgaccggtatgggcgacacctttatcatcggtggtgttgagcatatgggccatgtgccgatgaaccatggtgtggacttccaccccggtttagccaataacgtcgctaaagcctccggcatgatgggcttaaccgcagaaatgctcggcaagctccacggcatcacccgtgagcagcaggatgcctttgctgttcgttcacaccaacgcgcttacgcagccacagttgaaggccgttttgccaaggaaatctatggcatcgaaggccatgatgctaacggtgcactgattaaagtactgcacgacgaagtgattcgcccagaaacgaccatggaatcgttagcagcactgcgcccggtattcgatcctgcaaacggtactgtgactgcgggaacatcatcagccttatccgacggcgcttcggccatgttgataatggaagaatctaaagcacgcgcacttggcttaccaattcgtgcacgtattcgctctatggcggttgcaggttgtgatgcggcaattatgggttacggcccagtaccagccacgcaaaaagcacttgctcgcgccggtattaccgttgccgacttagatgtgattgaactgaacgaagcctttgctgctcagtctttaccttgtgtgaaagatttaggtttagcagatgtggttgatgacaaaatcaacctcaacggcggcgcaattgcactaggtcacccactgggttgttctggcgcgcgtatttcaacgacgctgatcaacctgatggaacacaaagatgcgaccttaggtttagccactatgtgtatcggtttaggccaaggtattgcaaccgttttcgaacgcgtttaa

SEQ ID NO: 234013 - DNA, 1168 bp, Unknown
  Bacterial polypeptide expressing nucleotide sequence isolated from the Sargasso Sea
aatgaaacaagcagtgatcgttgattgtatccgtacccctatgggtcgttctaaagcaggtatcttccgcaacgtgcgtgcagaggaattatccgcttatgtaatggccgctctggttgagcgcaatccggctttagatccagctgagatagacgacattatctggggttgtgtacaacaaactctggaacaaggttttaacgtggcccgtaacgcgtcgttattggctggcattccgcattctgtgccggctgtaacggtaaaccgcctttgtggttcatcgatgcaggcattacacgacgcagtgcgtgccattcaaaccggcatgggtgacgtgtatttaattggtggtgtggaacatatgggccatgtgcctatgactcacggtgtggatttccacccgggtttaggtaaaaacatcgctaaagcttctggcatgatgggcttaacggctgaactcttaggtaaattgcatggcatcagccgccagcaacaagacgagtttggcgcccgctcgcaccgtttggcgtatgaagctactttgcagggtcgttttaaaaacgaaattatcccggtacagggccatgacgctgacggcgtactcaaagtctttgatacagacgaagtgatacgtccagaaactacggtagaagctttagctgctttacgtccggtgtttgacccagccaatggtactgtgactgccggtacttcttcagctttatcagacggtgcttctggcatgctggtgatgagcgaagaaaaagccaaagctttgggtttaaaaatccgcgctaaagtcataggtatgggtatagctggttgtgatccgtctatcatgggttacggtccggtgccagccagtcaaaaagccttaaaagctgcaggtatcactattgccgatatcgactacgccgagttaaacgaagcctttgctgctcaggctctgcctgtaatgaaagatttaggtttactggaacatatgaacaccaaagtgaacttaaacggcggagccatagccctcggacacccgctgggctgctctggttcacgtatcagcacaaccttgattaacgtgatggaagacaaaggcggcaaatacggtttagccactatgtgtatcggtttaggccagggtatagcgacagtatttgaaagagtcgaataa

SEQ ID NO: 234014 - DNA, 1171 bp, Unknown
  Bacterial polypeptide expressing nucleotide sequence isolated from the Sargasso Sea
catgaataatccagtaattgtagattgtatccgcacaccaatgggtcgctcaaaaggcggcgtatttaaaaacaagcgtgcggaagacttaagcgctcatttaatgaagggcttactagaacgcaacccagcggttgatccagcatcaatcgacgacatttattggggttgtgtacagcaaacattagagcaaggctttaacgttgcacgtaacgcatcactacttgcgggtattccacactcagtaccagcaaccacagttaaccgtttatgtggttcgtcaatgcaagcattgcacgacgcagcacgcgctattatgacgggcgctggcgacacttacctaattggtggtgttgagcacatgggccacgttcctatgactcacggtaacgactttcacccaggcttagcaacttcaattgcacaagcgtctggctctatgggtttaacagcagaataccttgcgactattcacggtatcagccgtcagcagcaagatgaatttgcttatcgctcacatcaacgtgcacatgctgcaacagttgaaggccgtttccgccgcgaaattttagcaatggaaggtcatgcagcagatggttctttaattttagttgaagatgatgaagtaattcgtcctgaaacaacagttgaaggtttatctcagcttcgcccagtatttaaccctgcttcgggttcagtaacagccggtacgtcttcagcactatctgatggcgcatcagctatgttagtaatgagcgaagaaaaagcaaaagagctaggtttaccaattcgtgcgcgcattaaagcaatggcggttgctggttgcgatccatcaatcatgggttacggcccagtaccagcaagtaaaaaagcacttgcccaagctggtatcactattgatgacatcgacgtagctgagcttaatgaagcctttgctgcgcaatcactaccagtacttaaagacttaggtttagctgatgtggttgacgaaaaagttaacttgaatggcggcgctatcgcactgggtcaccctctgggttgttctggttcgcgtattagcacctcgctaattcacttaatggaagacaaaaatgctaagtacggtttagcgacaatgtgtattggtttaggccaaggtatcgcaactgtatttgagcgtgttcaagactaa

SEQ ID NO: 234015 - DNA, 1165 bp, Unknown
  Bacterial polypeptide expressing nucleotide sequence isolated from the Sargasso Sea
tatgaaacaagctgttatcgtagattgcattcgtactcctatgggccgttctaaggctggggtgttccgtaatgtacgtgcagaaacactctctgccgaattaatgaaaggtctattactgcgtaacccgcaattagatcccaataccattgaagacgttatttggggttgcgtgcagcaaaccctagagcaaggcttcaacattgcccgtaacgcatcattgctggccggtatcccgaaaacggctggcgctgtgacagtgaaccgcctatgcggttcttcaatggaagccatccaccaagccgctcgcgccattatgactggcatgggtgacacctttatcattggtggtgttgaacacatgggccacgtgcccatgaaccatggtgtggacttccacccaggtttagccaataacgtcgccaaagcgtctggcatgatgggcttaaccgccgagatgttaggtaagcttcacggcatcagccgcgagcagcaagatgcctttgctgtgcgttcacaccaacgcgctcacgctgctactgttgaaggccgctttgccaaggaaatctatggcatcgaaggccatgatgctagcggcgcgctgattaaagtgctgcacgatgaagtgattcgcccagaaacctcaatggaatcattagcggcgctgcgcccagtattcgacccagcaaacggtactgtgactgccggtacctcttcagcattatctgacggtgcttcggcaatgttagtgatggaagaatctaaagcacgcgctttgggtctaccaatccgtgcccgtatccgctcaatggcggttgctggttgtgacgcggcaattatgggttacggtccagtacctgcaactcaaaaagcactggcccgcgcaggcatcacagtcaatgatttagatgttatcgaactgaacgaagcgttcgctgctcagtctctaccctgcgttaaagacctaggtctgctcgatgtggtagaagacaagatcaacctcaatggtggcgcgattgcgctagggcacccactgggctgttctggtgcgcgtatttcgacaacgttgatcaacctgatggaacacaaagatgcaaccttaggtttagcgactatgtgtatcggtttgggccaaggtattgcgaccgttttcgaacgcgtttaa

SEQ ID NO: 234016 - DNA, 1168 bp, Unknown
  Bacterial polypeptide expressing nucleotide sequence isolated from the Sargasso Sea
atgaaacaagcattgatcgttgattgtatccgtacccctatgggtcgttctaaagcaggtatcttccgcaacgtgcgtgcagaggaattatccgcttatgtgatggccgctttggttgaacgtaatccggctttagacccagccgaaattgacgacgtgatctggggttgtacccaacaaactctggaacaaggttttaacgtcgcccgtaactctgctttattagcaggtcttccgcattcagtgccggctgtgacggtcaaccgcctttgcggttcatcgatgcaggccttacacgacgcagtacgtgccattcaaaccggcatgggcgaggtgtatttaattggtggtgtggaacatatgggccacgtgcctatgactcacggcgtggatttccaccctggtttaggcaaaaacatcgccaaagccgcaggtatgatgggtttaacagctgaactcttaggtaaactgcatggcatcagccgtcagcaacaagacgagtttggcgcccgttcacaccgtttagctcatgaggctactatacaggggcgtttcaaaaacgaaattatcccggttgaaggccatgacgctgatggcgtattaaaagtatttgatacagacgaagtaatacgtccagaaactacagtggagacactgggtgctttacgtccggtatttgacccggccaatggtactgtcacagctggtacttcttctgctttatctgacggtgcttctggcatgctggtgatgagcgaagaaaaagccaaagctttaggcttaaaaatccgcgccaaagtcattggcatgggtgtagctggttgtgacccttctattatgggttacggtccggttccggctacgaaaaaagccttaaaagctgcaggtatcactattgctgatatagactacgccgagttaaacgaagctttcgctgctcaggctctgccagtgatgaaagacttaggtttactggaagtgatggatagcaaagtgaacttaaacggtggcgccatagccctcggtcacccgctgggctgctcaggttcacgtatcagcactacgctgatcaacgtgatggaagacaaaggcggcaaatacggcttagccactatgtgtatcggcttaggccagggcatagcgacagtgtttgaacgcgtagagtagt

SEQ ID NO: 234017 - DNA, 1009 bp, Unknown
  Bacterial polypeptide expressing nucleotide sequence isolated from the Sargasso Sea
cgtgatctggggctgcgtcaaccagaccctggagcagggctggaacattgcgcgcatggcgtcgctgatgacccagatcccgcacaccagtgccggccagaccgtcagccgcctgtgcggctcgtcgatgagcgccctgcacactgccgtgcaggcgatccagaccggcaacggcgacgtgttcgtcgtcggcggtgtggagcacatgggccacgtcggcatgatgcacggtgtcgacccgaacccgcacctgtcgctgtacgccgccaaggcgtccggcatgatgggcctgaccgcagaaatgctgggcaagatgcatggcatcagccgtgaggcgcaggacgccttcggtgagcgctcgcaccgtctggcgcacaaggccaccgtcgaaggcaagttcaaggatgaaatcatcccgatgcaaggctacgacgagaacggcttcctcaaggtgtacgacttcgacgaaaccattcgtccggaaaccaccctcgagagcctggctgcgctgaaacctgcgttcaacccgaaaggcggcaccgtgactgcaggtacttcctcgcagatcaccgacggtgcttcctgcatgatcgtcatgagcgcccagcgcgcccaggacctgggcatccagccgatggcggtggttcgcgccatggccgttgccggtgtcgatccggcgatcatgggttacggcccggtgccgtccacgcagaaggcgctcaagcgcgccggtctgagcatggctgacatcgatttcgtcgagctcaacgaagccttcgccgcccaggccctgcctgtgctgaaggacctgaaactgctcgacaagatggaagagaaggtcaacctgcacggcggtgcgatcgccctgggtcaccccttcggttgttccggtgcccgtatctccggtaccctgctcaacgtcatgaaacagaacggcggcaccttgggtgtttccaccatgtgcgtgggccttggccaaggcatcaccaccgtcttcgagcgcgtttaa

SEQ ID NO: 234018 - DNA, 571 bp, Unknown
  Bacterial polypeptide expressing nucleotide sequence isolated from the Sargasso Sea
atgaccaactattttgatagcccttttaagggcaagttactttccgagcaagtgaaaaacccaaacattcaagtggggcgctacagctattattctggctactatcatgggcatccattcgaagaatgtgcgcgatacctgttgtctgatcgtgaagatgtggacaagttaattatcggcagtttctgctctatcgggagcggagcttctttcatcatggctggcaaccaaggacaccggtacgattgggcgtcgtcttacccatttttctatatgcaggaagagccggcgttttcaagctcacttgacgctttccaaaaagctggagacaccgtcattggtaatgatgtctggattggctctgaggctatgataatgcctggaatcaaggtcgggcatggcgctgtaataggtagtcgcgcactggtaacaaaagacgtagagccttataccattattggcggaaatccagccaagcagatcaagaagcgtttctgcgatgacgaaattgtattgctattagaaatggaatggtggaattggtcgctcgatcagatcaaagccgcaatgc

SEQ ID NO: 234019 - DNA, 511 bp, Unknown
  Bacterial polypeptide expressing nucleotide sequence isolated from the Sargasso Sea
aatgaactttaataaaattgatttagacaattggaagagaaaagagatatttaatcattatttgaaccaacaaacgacttttagtataaccacagaaattgatattagtgttttataccgaaacataaaacaagaaggatataaattttaccctgcatttattttcttagtgacaagggtgataaactcaaatacagcttttagaactggttacaatagcgacggagagttaggttattgggataagttagagccactttatacaatttttgatggtgtatctaaaacattctctggtatttggactcctgtaaagaatgacttcaaagagttttatgatttatacctttctgatgtagagaaatataatggttcggggaaattgtttcccaaaacacctatacctgaaaatgctttttctctttctattattccatggacttcatttactgggtttaacttaaatatcaataataatagtaattaccttctacccattattacagcagga

SEQ ID NO: 234020 - DNA, 285 bp, Unknown
  Bacterial polypeptide expressing nucleotide sequence isolated from the Sargasso Sea
gttacggtgaaaacctggcctatttccctaaagggtttattgagaatatgtttttcgtctcagccaatccctgggtgagtttcaccagttttgatttaaacgtggccaatatggacaacttcttcgcccccgttttcaccatgggcaaatattatatgcaaggcgacaaggtgatgatgccgctggcgattcaggttcatcatgccgtttgtgatggcttccatgtcggcagaatgcttaatgaattacaacagtattgcgatgagtggcagggcggggcgtaat

SEQ ID NO: 234021 - DNA, 663 bp, Unknown
  Bacterial polypeptide expressing nucleotide sequence isolated from the Sargasso Sea
aaatggctggcgcgtttttaagtaccatagcccgttggttaacaggagtggaaattcaccctggcgcaaaaattggccgtcgcttttttatcgaccatggtatgggtgtagtgataggtgaaactgctgaaattggtgatgacgtgacgctgtaccatggcgtgactttaggtggtaccagctggaaccccggtaaacgtcacccgactttaggtaacggagtggtgataggggctggtgcaaaagtattagggcctttgtatgtcggcgaatctgcccgtattggttctaatgctgtggtggtgaaggatgtacctcctggcgcgactgtggtcggtattccggggcgtattgtcgctaaacaagatatgaccttgactgagcaacgtcagcaaatggcgaaaaagtttggttttgatgcctatgcggtctccagtgataacccggacccagtcgccaatgcgatgggacgcatgctggatcatatgcactttctggataacaaagtgacggagctgtgccaaagcatcaataaactcggtggtaacgtctgcgagatggtgccggaaatcgctattgaggatgagacttttattcaggccgagcgtgaagccgctgagcaacgcaagaaagctgtagaggcttttgacccgacgatttaag

SEQ ID NO: 234022 - DNA, 574 bp, Unknown
  Bacterial polypeptide expressing nucleotide sequence isolated from the Sargasso Sea
atgagcgagttcttagaatcaataaaaaaaagagaccctgcggctaaatcgatacttagtattatcctgacatatccaggagtaaaagcagttttgttccacagaatttcaaatttttttcatgtggctagcttttacctcatagcaagaattatatctcaaacttctagatttttaactggtatcgaaattcatccaggtgcaaaaattggtaaaaatttatttatcgatcatggtatgggtgtcgtcatcggagaaacttcggagataggtgacaatgttacaatctatcatgccgttactttaggcggaagttcaccgagtattgatagtgagagacaacgacatgaaaaaagacacccaacgattggagatgatgtcgtaattggatctggagctcaaattattggtccagttgtagttggaaagaatgctagaattgcagctaacgcagttgtagttaaagacgttcctgaaagcgcaacaatggttggtatacctgctaaagcagtcaagttagaaaataaaggaaagttcataccctatggtgtagatgataaagttaaagatgagt

SEQ ID NO: 234023 - DNA, 358 bp, Unknown
  Bacterial polypeptide expressing nucleotide sequence isolated from the Sargasso Sea
catgaatgattttataaattccataaaaaaaagagatccagctgcgacatcctcgctaggtataatcttaacgtatcctggagtaaaagcagtttttttttataaaatatcaaatttttttcatattgcaggatttaaacttcttgcaagagtgatgtctcaagcagtcagatttttcactggagtagaaattcacccaggcgctaaaataggtaaaaatttatttatagatcacggcatgggcgttgtaataggagaaacctcagaaataggtgatgatgtcacaatttatcaagcagtcacacttggaggtatttcaccaagtatagatagcgagagacaaagacacgcaaaaaga

SEQ ID NO: 234024 - DNA, 724 bp, Unknown
  Bacterial polypeptide expressing nucleotide sequence isolated from the Sargasso Sea
atgttcgcccgtatcaaagatgacattaaaggggttttccatcgcgacccagcggcaagaaatacctttgaagtgctaactaattaccccggtctacatgcagtatggctacaccgcgtaagccacaagttgtggaaggctgaatggaagtggttggcacgcacgttatcaacctttagtcgctggctgacgggcatagaaattcaccctggagcaacactgggcaggcgggtatttatagaccatggtatgggcgtggtcattggcgaaaccgcagagattggtgacgatgttacgctatatcatggcgttacgcttggtggtactagctggaaagccggtaaacgtcatccaacccttaaaaaaggggcggtagtaggcgctggcgctaaagtgttagggcctattatcattggtgaaaatgccaaagtcggctcaaattccgtagtggtgaaagatattccagacggcgccactgcggtgggtatccccggtcgtattattatctcaaagcaggatgatgggaaagcgacggttaacccccagcgtgacaaaatagcgcaaaaatacggttttgatgcgtacgctgtagcgcccgataacccagatcctgtggccaatgccatgggagtaatgcttgagcacatgcatcaaatggataccaaagttgaggaaatgtgcaaggtcattcagtcattaggtggtgatgtgtgtaccgaataat

SEQ ID NO: 234025 - DNA, 580 bp, Unknown
  Bacterial polypeptide expressing nucleotide sequence isolated from the Sargasso Sea
catgaatgaatatttacaatcaataattgatagggatcctgctgctcgttcaaaattaagtgtcattctgacttacccaggtgtaaaagcagttttcttttataaaattgcaaattttttttcactggcaaaatttcatctggttgcaaaaataatttctcaatttgcaagatttttaacaggaatagaaattcatccaggagctaaaatcggaaaaaatttatttatagatcatggcatgggtgttgttatcggagaaacatcagatattggagacaatgttacaatttaccataatgtaactctagggggaatatctcctagtataaactcagacgaacaaagaaataataaacgacacccaacaattaaggacaacgcagtgattggatcaggagcacaaatacttggaccaattattgttggtaaaaattcaaaaattggatcaaatgcagttgttacaaatgatgtccctgagaatgcagtaatggttggtataccagcaagaaatattggcgtatcatcagaagagtttaaaccttacgcagttactgaggaaactaaaaaagaaaaaagatag

SEQ ID NO: 234026 - DNA, 577 bp, Unknown
  Bacterial polypeptide expressing nucleotide sequence isolated from the Sargasso Sea
tatgaaagattatttagattctattaaaaaaagagatcctgcggcaaaatctttactgagtatcgttcttacgtatccaggggttaaagcggttttctttcatcaaatatccaattttttttacaaagctggatttgatttaatagcgagaattgtttcacaaacaataagattttttacaggtgtggaaattcatcctggagccaaaattggtaaaaatttatttattgatcatggtatgggagtagtaatcggcgaaacttctgaaattggagacaatgttactatatatcatgctgtgactttaggcggaagctctcctagtatagacagcgaaagacaaagacatgaaaaaagacatccaacgattgggaatgatgttgtgattggttctggtgctcaaataattgggccaattaaagttggtaacaatgcaagaattgccgctaatgcagttgtggtaaaagatgttccagaaaacgcaacgatggttggcatccctgctaaagcagtcaagttagaaaacaaaggtagtttcagaccttacggtgtggatgacaaagtaaaagatgagtaa

SEQ ID NO: 234027 - DNA, 580 bp, Unknown
  Bacterial polypeptide expressing nucleotide sequence isolated from the Sargasso Sea
atgaaaaattatttagaatctataaaatcacgtgatcctgcggcaaaatctttattgagtattattctcacttacccaggtgtcaaagccgtattctttcataaaatttcaaactttttttatatcgcaggttttgatttaattgcgcgaataatttcgcaaactgtaagatttttcacgggtatagaaatccaccctggagcaaaaataggtaaaaatttatttatcgatcacgggatgggagttgtaattggagagacatctgaaataggtgacaacgtcactatttatcacgcagtaacattaggaggtatttctccaagcattaatagtgataaccaaagaaatgaaaaaagacatccaagcattggagatgacgtagtaataggatccggcgctcaaataataggtccaattaaaataggtaacggttcaagaatagcagctaatgcagttgtggttaaagatgttcctgataattctactatggttggaatacctgctaaagcagtaaaagtcggaaatcaaggaaactttaggccttatggagtagacgataaagtaaaagatgaacaataat

SEQ ID NO: 234028 - DNA, 412 bp, Unknown
  Bacterial polypeptide expressing nucleotide sequence isolated from the Sargasso Sea
atgctcgaccacatccgcgccgacctcgcaatcatccgcgagcgtgatcctgctgcccgcggctggttggagatcttcttttgctatccggggttccatgccatcagcttgcaccggctgagccatcgactctggagctgccatctgccgctgaagctgctggcccgctgcctcagccaggtggggcgagccctgactggcattgaaattcatcctggcgcccgcatcggcactggtgtgttcatcgaccacggcatgggtgtggtgatcggtgaaaccgccgaagtgggacatcgctgcctcctctaccagggcgtgaccctgggcggcaccggcaaggagcacggcaaacgccatcccaccctggccgagaacgtggtggtgggcgcgggcgccaaggtgctgggggcca

SEQ ID NO: 234029 - DNA, 296 bp, Unknown
  Bacterial polypeptide expressing nucleotide sequence isolated from the Sargasso Sea
tatgttcagaacttttaaatcagatatagaaataataaaagagagagatccagctgctagaggaatcttggagattttcctttgctaccctggattccaatcaatagtaatacatagattaacccataaattatggcaattaaaatttcctttaattccacgcttattaagtcatttaaatagattggctacgggaatagaaattcatccaggagctaaaataggtaaaagagtattcatagatcatggaatgggagttgtaattggagagactgccgaaataggaaacaactgct

SEQ ID NO: 234030 - DNA, 652 bp, Unknown
  Bacterial polypeptide expressing nucleotide sequence isolated from the Sargasso Sea
atggcgaatttagaagaaaaatatgttcagttagatcctgtttgggatagattgcgtaatgaggcagaagatgctgtgatagcagagccagcgattggcggatttattcaaactagtatccttcaacatccaagctttgagaacgctttagcccatcgggttgcttccaaattagcatcagctgaaatttccgagcaaactctgagagatatttgcagcaaggctatttctaaagatccgcagattgcaaatgctgcaagagccgatgttatggcggtggtagatagggacccagcctgtaacaggtatatgcagcctcttttgtatttcaagggcttccttgcagtccaagcgtatcgggtttcaaactggctttggatgaatagtcaaagggatatggcatattttttccaaatgagaacctcagaagtttttggaatagacatacatccagcagcaaaaattggaaaaggattgatgatagatcatgcgcattcgatcgtaatcggtgaaacatcggttgttggtgataatgtctctatgctccactcggttactttaggtggcactggtaaggaagatgaggatcgtcatccaaaaataggtgatggtgtaatgataggagctggtgctaaggtgctaggcaatataa

SEQ ID NO: 234031 - DNA, 577 bp, Unknown
  Bacterial polypeptide expressing nucleotide sequence isolated from the Sargasso Sea
tgctgatccgcagatcgccaatgctgcaagagccgatgttatggcggtggtagatagagacccggcctgtaatagatatatgcaacctcttttgtattttaagggcttccttgcggttcaggcatatagggttgcaaactggctttggattaatagtcagaaggatatggcatatttttttcagatgagaacttcagaattttttggaatagacatacatccagctgcaaaaattggaaaaggcttaatgatagatcatgcgcattcgatcgttattggtgaaacatcggttgttggagataatgtttcgttgcttcactcggttaccctaggtggaactggtaaggacaatggggaccgtcatccaaaaataggggatggtgtgatgattggtgcaggcgctaaagttcttggcaatataaaagttggaagttgctgtcgtatcgcagctggttcggttgtattacaagagataccacctaagaaaacagtcgcaggggttccggctaaaatagttggtgaggctggttgtagcaggccttcaatcaaaatggatcagattctcttgtccgactga

SEQ ID NO: 234032 - DNA, 328 bp, Unknown
  Bacterial polypeptide expressing nucleotide sequence isolated from the Sargasso Sea
tatgatcgattatttaaaatctattaaatctagagaccctgcggcaaaatctttagtgagtatcattctcacttacccaggagttaaagctgtattttttcacaagattgcgagctttttttttatagctggttttgaattattagctaggattatttcacaaacaacaagattttttaccggtattgaaatacatccaggagcaaaaataggaaaaaatttatttatagatcatggtatgggagtagtaattggagagacatccaagattggtgacaatgttacaatttaccatgcagttactttaggtggcatatctcctagcata

SEQ ID NO: 234033 - DNA, 506 bp, Unknown
  Bacterial polypeptide expressing nucleotide sequence isolated from the Sargasso Sea
catcgaccacggcatgggggtggtgatcggcgaaaccgccgaggtgggccaccgctgtctgctgtatcagggtgtgaccctgggtggcaccggcaaagaccacggcaaacgccatcccacgctggctgagaacgtggtggtgggagctggcgccaaggtgctgggggccatcaacatcggagccaacacccggatcggcgctggctctgtggtggtgcgtgatgtggacgccgattgcacggtggttggaatcccgggtcgggtgattcaccagagcggcgtgcggatcaatcccctggcccactccgccctaccggatgcggaagccaacgtgattcgcaacctgatggagcggatcgacgaactggagagcacggtgagcaatctgcagcgctgtctcaaggaagttgcagaagggcgtcagctgcgggacgtctgccgtggcgagtcccaaagccttaaagatcgcgagattctggagtttctgggggagaacacaggctgaa

SEQ ID NO: 234034 - DNA, 526 bp, Unknown
  Bacterial polypeptide expressing nucleotide sequence isolated from the Sargasso Sea
ctggggcaaaattggtaaaagagttttcatagatcatggaatgggagttgtaattggagaaacagctgagataggaaataattgtcttctatatcagggagttacattaggaggtactggtaaaagccatggcaaaagacacccaaccttaatggaaaatgttgtagttggggcaggagcaaaagttcttggatccatcacagtaggatctaatacacgtatcggcgccggttcagtagttgttcgaaatgtagaggggaatagcaccgtggttggagtgcctggcagggtagtgcatcaaagtggtgtaaaagtaaatccgttagcacattcggcgttaccagacgcagaagctaatgtgataaaaaatttaatggataggatagactctcttgaaaatgaaattcttaaattacaaaaaactctgcaatgtatagcaagttcagaatctattgatatttctaaactaggtgattctcaaaatcttaaagacaaagaaatttttgaatttcttggagatgattaa

SEQ ID NO: 234035 - DNA, 503 bp, Unknown
  Bacterial polypeptide expressing nucleotide sequence isolated from the Sargasso Sea
tttcatagaccatggaatgggcgttgtaattggtgaaactgctgagataggaaataactgtttgctttatcagggagtaacattaggaggtactggtaaaagccacggcaaaagacaccccaccttaatggaaaatgtcgtagtaggagctggcgcaaaagttcttggatccataacggtaggatctaatacccgtattggtgctggctcagtagttgtacgaaatgtagagggtaacagtactgttgtgggagttcctggcagggtagtgcatcaaagtggtgtcaaagtaaatccgttagctcactctgccttaccagatgcagaagctaatgtgataaaaaatttaatggataggatagattctcttgaaaatgagattcttaaattgcaaaatactctacaatgtatagccagctcagaatcaattgatattcctaaactcggtgattctcaaaatctcaaagacaaagaaattttagaatttcttggagataattaaa

SEQ ID NO: 234036 - DNA, 583 bp, Unknown
  Bacterial polypeptide expressing nucleotide sequence isolated from the Sargasso Sea
aatgagtgactttttacaatcaattattgatagagatccagcagcgaaatccaaattaagtttaattttgacttatccaggtgttaaagctgtattttttcatagattggctcattttttttcagtagctaaatttgatttaattgcgagaattatttcgcagttttcaagattcctaaccggtattgaaattcatcctggtgcaaagattggtaaaaatttatttatagatcatgggatgggagttgtgataggtgaaacatctgaaattggtgataatgtaacaatatatcatatggtaactttaggaggtatatctccaagcataaattctaataatcaaagaaatataaaaagacatcctaccttaatggataatgtagtcgttggatctggtgcacaaatattaggtcctgtaatagtaggaaaaaattcaaaaattggagcaaatgctgttgtaacaaaaaatgttgaggagaatgctgtgatgataggaataccagcaaagaatgttggaactgctacagaagaatttaaaccttatgctgtcgaaaatgataattcagaaaaaaataatgattaa

SEQ ID NO: 234037 - DNA, 407 bp, Unknown
  Bacterial polypeptide expressing nucleotide sequence isolated from the Sargasso Sea
tatagagattcatccagctgcaaaaattggaaaaaatttattcattgatcatggtatgggagttgtaattggagaaacttcagaaataggaaataatgttactctttatcacgctgtaacactcggtggagtctctcctagtattgacagtgaaagtcaaagatcagttaaacgtcatcccacacttgaaaatgatgtagtagttggctctggcgcacaaatacttggaccaattaatattggtcaaaatgctaaaataggggcaaatgctgttgtaactaaagatgttcctaaagatgctgtgatgattggaatcccagcaaaaaatattaataaagatgatagtattaaagataaaaaatttagaccatatggcattacaactgatatagataaagaaagttaaa

SEQ ID NO: 234038 - DNA, 577 bp, Unknown
  Bacterial polypeptide expressing nucleotide sequence isolated from the Sargasso Sea
atgaatgattatttagaatccataaaaaaaagagatcctgcggcaaaatctataatgagtattattctcacgtaccctggtgtaaaagcagtattctttcatcaaatatcaaactttttttacaaagctggatttgatttaatagctagaattgtttcacaaacaataagattttttacgggaattgaaattcatcctggggccaagataggtaaaaatttatttattgatcatggtatgggtgtagtaattggtgaaacatctgaaattggagacaacgttactatatatcacaatgtcactttaggtggtagttctcctagtatagatagtgaaagacagcgagatgaaaaaagacatcctacgattggcaatgatgttgtaatcgggtcgggtgcacagataatcggaccaattaaaattggtaacaatgcgagagtagcagctaacgcagttgtagtaaaagatgttccagaaaatgcaacgatggttggcatccctgctaaagcagttaagttagaaaacaaaggtagcttcagaccttatggtgtagacgataaagtaaaagatgaataaa

SEQ ID NO: 234039 - DNA, 454 bp, Unknown
  Bacterial polypeptide expressing nucleotide sequence isolated from the Sargasso Sea
atgatcgattatttagaatctataaaaaaaagggatcctgcggcaaaatctatactcagtatcattttaacatatcctggcgttaaggcagttttctttcatcaaatatctaattttttttataaagctagctttgaccttgttgcaagaattatttcccaaacggtaagattttttacaggtattgaaattcatccgggagcaaagattggtaaaaatttatttatagatcacggaatgggcgtagtaattggcgaaacttccgaaattggaaataatgttactatttatcacgcagttactttgggaggtagttcacctagcatagacagtgaaagacagcgtcatgaaaaaagacacccaactattggagataatgttgtaattggctctggtgctcaaataattggtccaattaaagttggtaataactcaaaggatagccgcaaacgca

SEQ ID NO: 234040 - DNA, 556 bp, Unknown
  Bacterial polypeptide expressing nucleotide sequence isolated from the Sargasso Sea
atgaatgaatatttacaatcaataattgatagagatcctgctgcccgttcaaaattaagtgttattctcacttacccaggtgtaaaggcagtattcttttataaaattgcaaattttttttcactggcaaaatttcatctggttgcaaaaataatttcacaatttgcaagatttttaacaggaatagaaattcacccaggagctaaaatcggaaaaaatttatttatagatcatggtatgggcgttgttattggagaaacatcggatattggagataatgttacaatttaccataatgtaactcttggcggaatatctcctagcataaactcagaccaacaaagaaatattaaacgacatccaacaattatgaataatgcagttattggagcaggagcacaaatacttgggccaattattgttggtaaaaattcaaaaattggatcaaatgctgtagttacaaatgatgttcctgaaaatgcagtgatggtcggtataccagcaagaaatattggagtttcaaatgaagaatttaaaccttatgcagttacagaag

SEQ ID NO: 234041 - DNA, 293 bp, Unknown
  Bacterial polypeptide expressing nucleotide sequence isolated from the Sargasso Sea
catgaacgattttttagagtctataaagtctagagacccggcagcaaagtctgttttaagtatagttttaacttatccgggagtaaaagctgtattttttcataaatttgcgcatttattttatgttgctggttttgatctaattgctcgtattatttctcaaactataagattttttacaggtattgaaatacatccaggtgcaaaaattggaaaaaatttatttattgaccatggtatgggagttgtaattggggagacatcagagattggagataatgttactatctacc

SEQ ID NO: 234042 - DNA, 536 bp, Unknown
  Bacterial polypeptide expressing nucleotide sequence isolated from the Sargasso Sea
aatccatcctggggcaaaaattggtagacgagtattcatagatcatggaatgggagttgtaataggcgaaacagctgagattggaaataattgtttgctctatcaaggagtgactttaggaggtactgggaaaagtcatgggaaaagacatccaactttaatggaaaatgttgtagtcggagcaggtgcaaaagtgcttggatctattacagtaggaagtaatacacgtattggtgcgggttcagtagttgtccgtaatgtagagggaaacagtactgtagttggagtccctggcagagtagttcatcaaagtggtgttaaagtaaatccactagctcattctgccttaccagatgcagaagctaatgtgataaaaaatttaatggatagaatagattcgcttgaaaacgaaattcttaagctacaaaaaactttacaatgtatagctaactctgaatctatagatatttctaaactcggtgactctcaaaatcttaaagacaaagaaatttttgaatttcttggagatgattaaa

SEQ ID NO: 234043 - DNA, 577 bp, Unknown
  Bacterial polypeptide expressing nucleotide sequence isolated from the Sargasso Sea
tatgatcgattatttagaatctataaaaaaaagggatcctgcggcaaaatctttactgagtgtcattctcacatatcctggcgttaaggcagttttctttcatcaaatatctaattttttttataaagctggctttgacctcgttgcaagaattatttctcaaacggtaagattttttacaggtattgaaattcatccgggagcaaagattggtaaaaatttatttatagatcacggaatgggtgtagtaattggcgaaacgtccgaaattggaaataatgttactatttatcacgcagttactttgggaggtagttcacctagcatagacagcgaaaggcaacgtcatgaaaaaagacatccaactattggagacgatgttgtaattggttctggtgctcaaataattggaccaattaaagttggcaataactcaagaatagccgcaaacgcagtagtagttaaagatgttccagataacgcaaccatggtcggtattcctgcaaaagcagtgaagttggaaaataaaggaagctttaggccttatggtgttgatgataaagtaaaagatgagtaa

SEQ ID NO: 234044 - DNA, 271 bp, Unknown
  Bacterial polypeptide expressing nucleotide sequence isolated from the Sargasso Sea
cctacattctgttactttaggaggtactggaaaagaagagggagataggcatccaaaaattggtaatggagttttgttaggtgctggtgcaaaagttttaggtaatataaacgtaggagattgcgcaaaaatagcatcgggttcagttgttttaactgatgttccagatagaaaaactgtagctggaattcctgctaaggtagttggtgaagttccagaagagattttaccatcaaaatcaatggatcataagttaaacgataataattaa

SEQ ID NO: 234045 - DNA, 805 bp, Unknown
  Bacterial polypeptide expressing nucleotide sequence isolated from the Sargasso Sea
atgatattcaaaggtgtatttcatcgcgacccagcggccagaaacacctttgaagtgctaaccaactaccctggacttcatgcagtgtggctgcatcgcattagtcacaaactatggaaggctgaatggaaatggttggcacgcagtttatcaacctttagccgttggcttacggggattgaaattcatcctggtgccacgttaggacgacgggtatttatcgaccacggtatgggtgtggtcattggtgaaactgcagaaattggcgatgatgtcaccctttaccacggcgttactcttggaggcactagctggagagcaggtaagcgccacccaacccttaaaaaaggcgctgtagttggggctggtgctaaagtgttagggcctattattataggtgaaaacgctaaagtagggtctaactctgtggtcgtaaaagatattcctgatggcgctacggcggtgggaatcccgggtcgtatcattatctcgaagcaaaaagagatgaatgcgtcggtaaaccccgagcgagataaaattgcccagaagtatggttttgatgcctatgctgtcgcgccagataaccctgatcctgtggccaatgcgatgggcataatgctagagcacatgcaccaaatggacaccaaagtggaagagatgtgcaaggtcattcagtcactaggtggcgatgtgtgtaccgataatttacacaatattagcgctgaagatttcgcagaaacgggtttcgacctaacggaaacccaagagcgagagaaggctcattcttctttcgaccccgctattt

SEQ ID NO: 234046 - DNA, 610 bp, Unknown
  Bacterial polypeptide expressing nucleotide sequence isolated from the Sargasso Sea
tatgttcgcccgtataaaagatgatattcaaggtgtctttcatcgcgatccagcggccagaaacacctttgaagtgctaaccaactatcctggcctccatgcagtgtggctgcatcgcattagtcacaaactatggaaggctgaatgtaaatggttggcacgcagtttatcaacctttagccgttggcttacggggattgaaattcatcctggtgccacgttaggacgacgggtatttatcgaccacggtatgggtgtggtcattggtgaaactgcagaaattggcgatgatgtcaccctttaccactgcgttactcttggaggcactagctggagagcaggtaagcgccacccaacccttaaaaaaggcgctgtagttggggctggtgccaaagtgttggggcctattattataggtgaaaacgctaaagtagggtctaactctgtggtcgtaaaagacattcctgatggcgctacggcagtggggatccccgggcgtatcattatctcgaagcaaaaagagatgaatgcgtcggtaaaccccgagcgagataaaattgcccagaaatatggttttgatgcctatgctgtcgcgccagataaccctgat

SEQ ID NO: 234047 - DNA, 634 bp, Unknown
  Bacterial polypeptide expressing nucleotide sequence isolated from the Sargasso Sea
gcgtcgcaagaaatgagtgagcaaatcctacgtgaattatgcgatgatgcttacaaaagtgagggtgagctttccatggctggccgtgctgacatagtcgctgtttatcaaagggatcctgcttgcaatacttatctccaacctcttttattttttaaggggttccaagccttgcaagcgtacagagttgcgcattggctttggatgaagggtcgaaaggatatggcttactttctacagatgcgctgttctgaagtctttggtattgatatacatccaggtgctcgtatcggtaagggaattatgatcgatcatgcacactcaattgttattggagaaaccgctgtggtaggagataatgtttctatgctacattctgtaactcttggtggtacgggtaaagatgatgaaatcaggcatcctaatataggagatggtgttcttttaggggcgggagctaaagtgcttggtaatatttcagttggtagttgttcacgggttgcagcaggatctgtggtgttgcagaatgtgccggaaaaaacaactgtcgcaggtgttcccgcaaaggttgttggcgcagctggatgcactaacccatcgatcagtatggatcaaataattaaaagaaagtaac

SEQ ID NO: 234048 - DNA, 532 bp, Unknown
  Bacterial polypeptide expressing nucleotide sequence isolated from the Sargasso Sea
taaatctttagccagtattgtgcttacctatccaggtgttaaggcagtgtttttccatataatttcaaattttttttataaagcaggttttgacctattagctagaataatctcccagagcgtaagattctttacaggtattgagatacatcccggagcaaaaattggaaaaaatttatttattgatcatggaatgggcgtggtgataggtgaaacatctgaaatcggagataacgtaactatttaccatgctgtaactttaggaggtagctcaccaagtatagatagtgaaagtcaacggtatgaaaaaagacacccaacaattggtgatgatgtagttattgggtcgggtgcgcaaataattggacctatcaaaataggaaacaactcaagaattgcagcaaacgctgtcgttgtaaaagatgttcctgaaaatgcaacaatggttggaattccagctaaagcggtcagactagagaacaaaggaaacttcagaccttacggagtagacgacaaggttaaagatgagtaa

SEQ ID NO: 234049 - DNA, 580 bp, Unknown
  Bacterial polypeptide expressing nucleotide sequence isolated from the Sargasso Sea
tatgatcgattatttagaatctataaaatctagagaccctgcggcaaaatctttagtgagtatcattctcacttacccaggtgtgaaagctatattttttcataaaatagcaaattttttctctgttgcaggatttgacttaattgctagaattatttctcaaacagcaagattttttacagggattgaaatacatccaggagcaaaaattggaaaaaatttatttatagatcatggaatgggagtggttataggtgaaacttcagaggttggagataatgttacaatttatcatgccgttacattaggaggtatttcaccaagtatagatagcgaaagacaaaggcatgaaaaaagacacccttcgattggaaataatgttgtaataggttcaggtgctcaaattttaggtccagtaaaaattggagacaatgcaagagtagctgctaacgctgttgtggttaatgatgttaaagagaatgcaacagtgataggaattcctgctaaagaaattaaaattggaaacaaaggcacattcaaaccttacggcgttgatgacaaagtaaaagatgaaaagtaa

SEQ ID NO: 234050 - DNA, 808 bp, Unknown
  Bacterial polypeptide expressing nucleotide sequence isolated from the Sargasso Sea
tatggggaagaaaaaagaagtgctagacgcactcgaccctgtttgggaaagaattcagatcgaagccaaagctgccgttgaaaaggagccactgcttggaggctcgcttcactcctgcattcttcaccacagttcaattgaacaggctttggcctatcgaatagcctctaaacttgcgtcgcaagaaatgagtgagcaaatcctgcgtgaattatgcgatgatgcttataaaagtgagggtgagctttccatggctggccgtgctgacatagtcgctgtttatcaaagggatcctgcttgcaatacttatctccaacctcttttattttttaagggattccaagccttacaagcgtatagagttgcgcattggctttggaagaagggtagaaaggatatggcttactttctacagatgcgctgttctgaagtttttggtattgatatacatccaggtgctcgtatcggtaagggaattatgatcgatcatgcacactcaattgttattggagaaaccgctgtggtaggagataatgtttccatgctacattctgtaactcttggtggcacgggtaaagatgatgaaatcaggcatcctaatataggagatggtgttcttttgggggcgggagctaaagtgcttggtaatatttcagttggcagttgctcacgggttgcagcaggatctgtggtgttgcagaatgtgccggaaaaaacaactgtcgctggtgttcccgcgaaggttgttggcgcagctggatgcaccaacccatcgatcagtatggatcaaataattaaaagaaagtaa

SEQ ID NO: 234051 - DNA, 577 bp, Unknown
  Bacterial polypeptide expressing nucleotide sequence isolated from the Sargasso Sea
atgaatgattttattaaatctataaaagaaagagaccctgcggctaaatcaacattaagtatagttttgacttacccaggagtaaaagctatttttttacatcaaatagcaaacttttttcatgtggctggatttgatttaatcgcaagaataatttctcaaacaagtagattttttactggcattgaaattcatccaggagcaaaaattggaaaaaatttatttattgatcatggcatgggtgttgtgattggtgaaacttctgaaattggaaacgatgttactatttatcatgctgtcaccctcggaggtatctctccaagtgtagatagtgaaaggcaaagaaatgaaaaaagacaccctacgattggaaacaaggtagtaattggatctggtgctcaaattattgggccagttaaagttggagacggatctagaattgctgctaacgctgttgtagttaaagatgtagaagaaaacactactatggtaggtgttcctgcaaaagcggttaaaagtgcaaaccaaggaaattttaggccgtatggtgttgatcaagaagtaaaagatgagtaaa

SEQ ID NO: 234052 - DNA, 808 bp, Unknown
  Bacterial polypeptide expressing nucleotide sequence isolated from the Sargasso Sea
gatggtaaattttgaaaaaaaatatgctcagttagatcccgtttgggatagattgcgtaatgaggcagaagatgctgtgatagcagagccagcgattggcggatttattcaaactagtatccttcaacatccaagctttgagaacgctttagcccatcgggttgcttctaaattagcatcggctgaaatttccgagcaaactctgagagatatttgcagcaaggctatttctaaagatccgcagattacaaatgctgcaagagccgatgttatggcggtggtagatagggatccggcctgtaacaggtacatgcagccccttttgtatttcaagggcttccttgcggtccaagcgtatagagtttcaaactggctttggatcaatagtgaaggggatatggcatattttttccaaatgagaacgtcagaagtttttggaatagacatacatccagcagcaaaaattggacaaggattaatgatagatcatgcgcattcgatcgtgattggtgaaacatcggttgttggagataatgtctctatgcttcactcggttactttaggtggcactggtaaggaagacgaggatcgtcatcccaaaataggtgatggtgtgatgataggcgctggtgctaaggtgctcggcaatattaaagttggaagttgttgtcgtatcgcagcaggctcggttgtgttacaggatataccacctaagaaaaccgtcgcgggggttccggctaaaatagttggtgaggctggttgtagcacgccttcgatcaaaatggatcagatactgtcgtcggactga

SEQ ID NO: 234053 - DNA, 405 bp, Unknown
  Bacterial polypeptide expressing nucleotide sequence isolated from the Sargasso Sea
catgaatgatttcttagaatccataatgcatcgtgaccctgctgcaaaatctaaaataagtattattttaacttatcctggtgttaaggcggtcttttttcacagaattgcaaattttttttctgttgcaaaattagatttaattgccagaattatttctcaattttcaagatttatgactggaattgaaattcacccaggagcaaaaattggaaaaaatttatttattgatcatggtatgggtgtcgttattggagaaacatctgatattggtgataatgtaactatttatcatatggctactttaggaggtattgctccaagtataaactcagataatcagagagatgtaaaaagacatccgactttaaaagataatgtttgtgtttggatcgggtgctcaaa

SEQ ID NO: 234054 - DNA, 229 bp, Unknown
  Bacterial polypeptide expressing nucleotide sequence isolated from the Sargasso Sea
gaccgccatcctaagattcgatccggtgtactaatttcggccggagccaaagtcctgggtaatattgaaattggggaaggtgcaaaaattggcgcaggtagcgtggttttaaatagcgttcccccacacaccactgtcgtaggagtccccgctcgagttgttggaacccctgcatccaactcccccgccgaaacaatgcaacaaaatgttcttgaagatgaacagtgat

SEQ ID NO: 234055 - DNA, 580 bp, Unknown
  Bacterial polypeptide expressing nucleotide sequence isolated from the Sargasso Sea
tatgatcgattatttagaatctataaaatctagagaccctgcggcaaaatccttagtgagtatcattctcacttacccaggtgtgaaagctgtattttttcataaaataggaaattttttctttgttgcaggatttgatttaattgccagaattatttctcaaacagcaagattttttacagggattgaaatacatccaggagcaaaaattggaaaaaatttatttatagatcatggaatgggagtagttataggtgaaacctcagagattggagataacgttacaatttatcatgctgttacattaggaggcatatcaccaagtatcgatagcgatagacaaaggcatgaaaaaagacatccctcaattggaaataatgttgtaattggatcaggtgcacaaattttaggtccagtgaaaattggagataatgctagagtagctgctaatgcagttgtggttaacgatgttaaagaaaatgcaacagtgataggaattcctgctaaagaaattaaaattggaaacaaaggtacattcaaaccttacggcgttgatgacaaagttaaagatgaaaagtaa

SEQ ID NO: 234056 - DNA, 583 bp, Unknown
  Bacterial polypeptide expressing nucleotide sequence isolated from the Sargasso Sea
tatgagtgagtttttacaatcaattattgatcgagatccagcagcgaaatccaaattaagtttaatattgacttatccaggtgttaaagctgtattttttcatagattggctcattttttttcagtagctaaatttgatttaattgcgagaattatttcgcagttttcaagattcctaaccggtattgaaattcatcctggtgcaaagattggtaaaaatttatttatagatcatgggatgggagttgtaataggtgaaacatctgaaattggtgataatgtcacaatatatcatatggtaactttaggaggtatatctccaagtattaattctaataatcaaagaaatataaaaagacatcctaccttaatggataatgtagtcgttggatctggtgcacaaatattaggtcctgtagtagtaggaaaaaattcaaaaattggagcaaatgctgttgtaacaaaaaatgttgaggagaatgctgtgatgataggaataccagcaaagaatgttggaactgctacagaagaatttaaaccttatgctgtagaaaatgacaattcagaaaaaaacaatggttaa

SEQ ID NO: 234057 - DNA, 421 bp, Unknown
  Bacterial polypeptide expressing nucleotide sequence isolated from the Sargasso Sea
atgattaattttttagaatctataaaatctagagatcctgcggcaaaatctatagtgagtattattctcacttatcctggggttaaggcagtatttttgcataaaattgcaaatttttttttcatagcaggctttgatttaatcgctagaataatttctcaaacatcaagattttttacaggaatagaaattcatccaggagccaaaataggaaaaaatttatttattgatcatggcatgggggtcgtaataggtgaaacttcagagataggcgataacgtaacaatatatcatgcagttactttaggtggtatatcaccaagtatagacagcgaaagacagagacacgaaaaaagacatccatcgattggaaacaatgttgtaaattggttccggagctcaaatcttaagtccagttaaa

SEQ ID NO: 234058 - DNA, 739 bp, Unknown
  Bacterial polypeptide expressing nucleotide sequence isolated from the Sargasso Sea
atggtattgaaaacttttaaatcagatatagaaattatccgagaaagagatcccgctgcaagaggaatattagagatatttctttgctacccaggctttcaatcaatagttattcatagatttacgcataaattatggcaattaaagattcctttgattccccgcttactcagtcatcttaataggctagcaacaggtattgaaatccatcctggggcaaaaattggtaaaagggttttcatagaccatggaatgggcgttgtaattggtgaaactgctgagataggaaacaactgtttgctttatcagggagtgacattaggaggtacaggtaaaagccatggcaaaagacatcccaccttaatggaaaatgttgtagtcggagcgggcgcaaaagtccttgggtccatcacggtaggatctaatacccgtattggtgctggctcagtagttgttagaaatgtagaggggaacagtactgtggtcggagttcctggcagagtagtgcatcaaagtggtgtcaaagtaaatcctttagctcactctgccttaccagatgcagaagctaatgttataaaaaatttaatggataggatagactctcttgaaaatgaaattcttaaactacaaaaaactctacaatgtatagtcagctcagaatctattgatatttctaaactcggtgattctcaaaatcttaaagataaagaaatttttgaatttctaggagatgattaaa

SEQ ID NO: 234059 - DNA, 413 bp, Unknown
  Bacterial polypeptide expressing nucleotide sequence isolated from the Sargasso Sea
gcgccgttcgctggcactctacctgcagaatcagatctcggtggtgtttggggtggacgtacacccggccgcccgcatcggcaagggcatcatgtttgaccacgccaccggcatagtggtgggcgagacggcggtgatcgaggacgatgtctccatcctgcagagcgtcaccctgggtggtaccggcaaagagagtggcgatcgtcaccccaagatccgggaaggggtgatgataggggcgggcgccaaggtgctcggcaacatcgaggtgggcatgggggccaagattggcgccggcagcgtggtgatcaacccggtgccgccgcacaccacggtggcgggcgtacccgccaagatcgtgggtcgtccggagtgtgacaagccttcgctagacatggatcagtgtctctgat

SEQ ID NO: 234060 - DNA, 778 bp, Unknown
  Bacterial polypeptide expressing nucleotide sequence isolated from the Sargasso Sea
tgaagtttgggaagaactgaatagtgaagcagagaatgttggtcgagaggaaagactccttcatgattacctctccgagtgtattttaacgcatgattcgtttgaatccgcgctcagttttatcttggctaataaggtttctgatgatgtcatgtcagcagatacacttagagcgctgttcttagatatcttaaaaacgtcaccatcaattgttgactgcgcaattgaagacataaaagcagtctatgatagagatccagcagtatgcagctttttatctgtaattctatatttaaaaggataccaagctattcaagtccatcgtttagcaaattttttgtggaatgatcatcgtaaggaattagctctgtttattcagagccgaaacactgaggtattttcagttgatatccatcctgcttgcgaaatcgggcgcggaattatgttcgatcatgcaactggtattgtcattggtgaaacgacaatcattgaggataatgtgtccatcctccaacaagtcactcttggcggcaccggcaatgagcaaggcgatcgccatcctaagattcgatccggtgtactaatttcggccggagccaaagtcctgggtaatattgaaattggggaaggtgcaaaaattggcgctggtagcgtggttttaaatagtgttcccccacataccactgtcgtaggagtccccgctcgagttgttggaacccctgcatccgactcccccgcagaaacaatgcaacaaaatgttcttgaagatgaagaatga

SEQ ID NO: 234061 - DNA, 751 bp, Unknown
  Bacterial polypeptide expressing nucleotide sequence isolated from the Sargasso Sea
aatgtttcgatcaataagatctgatttcgcaataatcaaagaacgagatccagcagctagaggtgtttgggaaataatattttgctatccgggctttcaagctttatcacttcatagaattagtcacaaactttggaaatacaaacttccgcttttgccaaggttactgagtcaaattactagattcttgactggggtagaaattcatccaggcgcaagaattgggaaaggtgttttcatagatcatggcatgggtgttgtcattggagaaacaagtgaaataggagatagatgtttgctatatcaaggagtaactttgggtggtactggaaaagaaagtgggaaaagacatcccacacttgaagctaatgttgttgtgggtgcaggagcaaaggttcttggcggtatttgcgttggaactaatacaagaattggagcaggctcagttgtagtcaaaaatgttgaagctaatagtacggttgtaggaattcctggacgaatagttcatcaaagtggagtaaagatcaatcctctagcgcactctgcattaccagatacagaagctaacgttcttagaaatcttatggacagaattgatcagctggaaagtcaaatcatagaattacaacatttagccaaaaataatcaaactaatatgaaagcaaaaactctcttaattggagaatcacagaatctaaaagataaagaaatcatagaattcattggagatgattcaatcgaaatagactaa

SEQ ID NO: 234062 - DNA, 581 bp, Unknown
  Bacterial polypeptide expressing nucleotide sequence isolated from the Sargasso Sea
tccacgcttattaagtcatctcaacaggtcaattacaggcatagaaattcatcctggggcaaaaattggtaaacgggtgttcatagatcatggaatgggagttgtaattggtgaaacagccgagataggaaataattgtctgctttatcagggagtaacattagggggcactggcaaaagtcatgggaaaagacacccaaccttaaaggaaaatgttgtagttggagcaggtgcaaaagttctaggatctatcacagtaggatctaatacccgtattggtgcaggttcagtagttgttcgtaatgtagagggtgacagtactgtggttggagttcctgggagagtagtgcatcaaagtggagtcaaagttaatcctttagcgcactctgctttaccagatgcagaagctaatgtaataaaaaatttaatggatagaatagattttcttgaaaatgaaattctcaaattacaaaaaatcctacattgtctagccaactcagaatctattgatatatcaaaactcggagatgctcaaaatattaaagacaaggaaattttagaatttcttggagatgattgaa

SEQ ID NO: 234063 - DNA, 700 bp, Unknown
  Bacterial polypeptide expressing nucleotide sequence isolated from the Sargasso Sea
atgttaaggactttcaaatcagatatagaaatcatcagagaaagagatccagctgctagaggtatattagaaatttttctttgctatccaggctttcaatcaatagttgttcataggtttactcacaaattatggcaattaaaaataccattaattccacgcttgttaagtcatctcaacaggctagtaacaggcatagaaatccatccaggagcaaaaattggcaaacgagtttttatagatcatggtatgggtgtagtaattggagaaacagctgagataggaaataattgtctgctttatcaaggagttacattaggaggtactggtaaaagtcatgggaaaagacatccgactttaatggaaaatgttgtagttggagcaggtgcaaaagttcttggatcaatcacagtagggtctaatactcgaattggtgcgggttcagtagttgttcgtaatgtagagggaaacagcactgtagttggagtacctggaagagtagttcatcaaagtggagtcaaagttaatccattagctcactccgccctaccagacgcagaagcaaatgtgataaaaaatttaatggatagaatagattctcttgaaaatgaaatacgtaaattacaaaaagctttacaatgtataaataactcagaatctgttgatacctctaaacttggtgatgctcaaaattcttaaa

SEQ ID NO: 234064 - DNA, 601 bp, Unknown
  Bacterial polypeptide expressing nucleotide sequence isolated from the Sargasso Sea
gatgctaagaacttttaaatcagatatagaaattatcagagagagggatcctgccgctagaggaataatcgagatatttctttgctacccgggctttcaatccatagttatacataggtttacgcataaattatggaaattaaagattcctttaattccccgcatgttaagtcattccaatagactattaacaggcattgaaatacatcctggagccaagattggtaaacgggttttcatagatcatggaatgggagttgtaattggagaaacagctgagataggaaataattgtctgctatatcagggagttacattaggaggtactggtaaaagccacggaaaaagacacccaaccttaaaggaaaatgttgtagttggtgcaggagcaaaaattcttggatccatcacagtaggatctaatacacgtatcggcgcgggttcagtagttgttcgaaatgtagagggtaacagtactgttgttggggtccctggcagggtagtgcatcaaagtggtgttaaagtaaatccgttagctcactctgccttaccagatgcagaagctaatgtgataaaaaatttaatggataggatagactct

SEQ ID NO: 234065 - DNA, 375 bp, Unknown
  Bacterial polypeptide expressing nucleotide sequence isolated from the Sargasso Sea
tatgttaaggacttttaaatcagatatagaaatcattaaggaaagagatcctgctgctagaggtataatagaaatttttctttgctacccaggctttcaatcaatagttattcataggtttactcataaattatggcaattaaaaatacctttaattccacgcttgttaagtcatctcaacaggctagcaacaggtattgaaatccatccaggagcaaaaattggcaaacgagtttttatagatcatggtatgggtgtcgtaattggagaaacagctgagataggaaataattgtctgctttatcagggagtaacattaggaggtactggtaaaagccatgggaaaaggcatccgaccctaatggaaaatgtagt

SEQ ID NO: 234066 - DNA, 631 bp, Unknown
  Bacterial polypeptide expressing nucleotide sequence isolated from the Sargasso Sea
gatgtttgatcacatccatgccgacctcgcaatcattcgcgagcgtgatcctgctgcccgcggatggctggagattgtgtgctgctatcccggcttccaggcgatcagcctgcatcggttcagtaatcgcctctggacctgccgtctgcctctgaaattggccgcccgcttcctaagccagatcggtcgtgccctcacaggcattgagatccaccctggagcccgcatcggccacggcgtgttcatcgaccacggcatgggagtggtaatcggcgaaaccgccgaaatcggtaaccgttgcctgctctaccagggggtgaccttgggaggcacgggcaaagagcacggcaaacgccaccccaccttggcggagaacgtggtggtgggcgcaggcgccaaggtgctgggtgccatcacaatcggcgccaacacccggatcggcgccggatccgtggtagtgcgcaatgtggaaagcgactgcacggttgtgggtatccctggacgggtgatccaccaaagcggcgtaaggatcaatccccttgctcactccgccttgcccgacgcggaggcaagcgtgatccgcaacctgatggaacggatcgatgaacttgagagcaccgtcgggaatttg

SEQ ID NO: 234067 - DNA, 541 bp, Unknown
  Bacterial polypeptide expressing nucleotide sequence isolated from the Sargasso Sea
attgaaatccatcctggggcaaaaattggtaaaagagttttcatagaccatggaatgggcgttgtcattggtgaaactgctgagataggaaataactgtttgctttatcagggagtgacattaggaggtactggtaaaagtcatggcaaaagacaccccaccttgatggaaaatgttgtaattggagcgggcgcaaaagttcttggatccatcacagtgggatctaatactcgtattggtgctggctcagtagttgttcgaaatgttgagggaaacagtactgtggtaggagttcctggcagggtagtgcatcaaagtggtgtcaaagtaaatcccttagctcactctgccttaccagatgcagaagctaatgttataaaaaatttaatggataggatagactctcttgaaaatgaaattcttaaattacaaaaaactcttcaatgtatagccagctcagaatctattgatatttctaaacttggtgattctcaaaatcttaaagataaagaaattttagaatttcttggagatgattaaa

SEQ ID NO: 234068 - DNA, 706 bp, Unknown
  Bacterial polypeptide expressing nucleotide sequence isolated from the Sargasso Sea
atgttaaaaacattgaagtcagatatagaaataataaaggaaagggatcctgctgcaagaggaatattagagatttttctttgctatcctggttttcaatcaattgtcatccatagatttactcacaaattatggcaattaaaattacctttaattccaagaatgcttagtcatcttaatagactatttacaggaatagagattcatccaggtgcaaaaattggtaaaaaagtttttatagaccatggaatgggagttgtgataggagaaacagcaaaaattggagataattgccttctttatcaaggagttacattaggaggaactggcaaaagtcatgggaaaaggcatccaaccttaatggaaaatgttgtagtaggcgcaggtgcaaaagtacttggttcaataattgttggttcaaatactcgtattggtgcagggtctgtagttgttcgtgatgttgaggagaatagtactgttgtaggtataccaggaagagtagttcatcaaagtggggttaaagttaatcctttagcacactctgccctaccagatgctgaagctaatgtaattaagaaccttatggatagaattgatcaacttgaaaatgaaattcttaaattacaaaaaacccttgaatgtttagtaaattctgaatctattgaaatctctaatgttggtgatgcccaaaaatctaaaggataaa

SEQ ID NO: 234069 - DNA, 379 bp, Unknown
  Bacterial polypeptide expressing nucleotide sequence isolated from the Sargasso Sea
gaagattggccgcgggatcatgctggaccacgctaccggcatcgtcgtcggcgaaacggcggtgattgaagacgacgtatcgattctgcaatccgtgaccctgggcggtaccggtaaaaccagcggcgatcgtcatccgaaaattcgcgaaggggtgatgattggcgccggggcgaaaatcctcggcaatatcgaagtcgggcgcggggcaaaaatcggcgcgggttcggtggtgctacagccggtgccgccgcatactaccgccgcaggcgttcccgcccgaatcgtgggcaagccggagagcgataagcccgcgatggatatggatcagcactttaacggcatacaccataccttcgagtacggcgacggtatttga

SEQ ID NO: 234070 - DNA, 229 bp, Unknown
  Bacterial polypeptide expressing nucleotide sequence isolated from the Sargasso Sea
ggcgtcatgattggcgccggtgcgaagatcctcggtaatatcgaagttggtcggggggcgaaaattggcgccggttccgtggtgctacagcccgtaccgccgcacaccaccgcagccggcgtaccggcgcgtatcgtcggtaagccagagagcgacaagccggcgatggatatggatcagcactttaacggtattcaccataccttcgagtacggcgacggtatctaga

SEQ ID NO: 234071 - DNA, 739 bp, Unknown
  Bacterial polypeptide expressing nucleotide sequence isolated from the Sargasso Sea
catgatattgagaacttttaaatcagatattgatattatcaaagagagagatcctgcagctagaggaatattagagatttttctttgctatcctggcttccaatcgatagttattcatagattgactcataaattatggcaactaaaaattcccttaattccccggctgttcagtcatctcaataggctattcacaggaattgaaatccatcctggggccaaaattggtaaacgcgttttcatagatcatggaatgggagttgtaataggtgaaacagctgagataggtaataattgtctactttatcagggagtgacattaggaggtactggcaaaagtcatgggaaaagacatccaaccctaatggagaatgttgtggttggagctggtgcaaaagttcttggatcgatcatagtaggctctaatacccgcattggtgctggttcagtagttgttcgtaatgtcgaaggaaatagtactgtggttggtgttcctggcagagtagtgcatcaaagtggtgtcaaaattaatcctttagctcactctgcattaccagatgcagaagctaatgtgataaaaaatttaatggatagaattgacttgcttgaaaacgaacttcttaaattacaaaaaactctacaatgtcttgtcaattcagaatctattgatatttctaaacttggagattctcaaaatcttaaagataaagaaattatagaatttctcggagatgattaa

SEQ ID NO: 234072 - DNA, 718 bp, Unknown
  Bacterial polypeptide expressing nucleotide sequence isolated from the Sargasso Sea
atgtttgatcacatccgtgccgatctcgcgatcatccacgagcgtgatccggccgcccgtgggccgctagaaattctgctctgttatcccggcttccaggcgttgacactgcaccgcctcagccatcggctctggcggtgcaggctcccactgaaattgccagctcggctgttaagccaactgggccggagcctgaccggcgtggagatccaccctggcgccacaatcggacgtggtgtgttcatcgaccacggcatgggggtcgtgatcggcgaaacggccgaagtgggcgatcgctgcctgctgtatcagggcgtcaccctgggcggaaccggaaaagatcacggcaaacgccaccccacactcgccaacaacgtggtgattggcgctggcgccaaggtgcttggtgcgattgaggtgggtgccaatacccgtgtgggggcgggatcggtggtggtgcgcgatgtagaagccgattgcacggttgtgggcattcctggccgcgtcatccaccagagcggcgttcgcatcaaccccctggcccattccgcactcccagatgccgaagccaatgtgatccgcaatctgatggaacgcatagaccaactggaaagccaggtgcgcaaccttcaagacaacctcagaaccatggctgaagacaacggaagcagcctgggcgcagtgcgcagcggacaagcccagaacctcaaggaccggg

SEQ ID NO: 234073 - DNA, 505 bp, Unknown
  Bacterial polypeptide expressing nucleotide sequence isolated from the Sargasso Sea
cgtgttcatcgaccacggcatgggggtggtgatcggcgaaacggctgaggtggggcctcgctgcctgctgtatcagggggtgaccctgggcggcaccggcaaagaccacggcaagcgtcacccgaccctggcggaaaacgtagtggtgggagctggcgccaaggtgctcggagcaatcaacgtgggtgccaacacccgcatcggtgctggttcggtggtggtgcgcgatgtggaggcggactccaccgtggtgggcatcccaggccgggtgatccaccaaagcggcgtgcgaatcaaccccttggcccactccgccctaccggatgcggaagccaatgtgattcgcaacctgatggagcggattgatgaactggaaagcacggtcagcaatctgcagcgctgcctacaagagttagcggcaggacgaaatattcgagaagaatgctcaggcgaatcacaaagcctcaaagatcgcgagattatggaattcctaggcgatcaataa

SEQ ID NO: 234074 - DNA, 823 bp, Unknown
  Bacterial polypeptide expressing nucleotide sequence isolated from the Sargasso Sea
atgggtgtgatagctaggctaaaagaagacattgaatctatatatcaccgtgatcccgcggcgcgtagcgcctttgagatcttggtcaactatcctggcatgcacgccatttggctgcaccggataagccataaattatggaagcgtgattggcgcttaatggcccgttgtttatcgactttttcgcgctggttgacgggagtggagatccatcccggtgccaccattggcgatcgattctttatcgaccatggtatgggcgtggtgataggtgaaaccgccgagattggcgatgattgtactttatatcacggcgtgacattgggcggcaccacctggcaagcgggtaaacgccatcccacactgggtaataacgtggtcgtgggcgcaggggctaagattttaggtcctatcactatgcatgatggggcgcgtgtcggctctaactctgtggtggtgaaagatgtgcctaaggatacgactgtggtcgggatcccggggcgcgtagtggccacaccttcgccacaatcgaaagagaagtctgagcgtcgcagcgccatggccaagaaatatggtttcgatgcgtatgctgtgtcccccgataatccggatcccgtcgcgaacgctatcggtcaaatgctggaccatatgcatttaatggattcaaaagtgcaggaattgtgtcaagccattcagcgcttaggtggcgatgtctgcaccgaaagattgccagagctgaatgtgggtgagtttaacgacgcggaaaaagccgccgcagataagcgccagagtgcgctcgatgagtttgaccccagcatctaat

SEQ ID NO: 234075 - DNA, 748 bp, Unknown
  Bacterial polypeptide expressing nucleotide sequence isolated from the Sargasso Sea
gatgttcgatcacatccgcgccgacttcgcgatcatccgtgagcgcgacccggcagctcgtggctggctagagatcatctgctgttatccaggctttcaggccctgagcctgcatcgcctcagccacagcctgtggcgcagcccactccccctgaagctggcagcccgctgcctcagccagatcagccgcaccctcaccggcatcgagattcatcccggagcccgcataggccgcagcgtattcatcgaccacggcatgggggtggtgatcggcgaaaccgccgaggtgggccaccgctgtctgctgtatcagggtgtaaccctgggtggcaccggcaaagaccacggcaaacgccatcccacgctggctgagaacgtggtggtgggcgctggcgccaaggtgctgggggccatcaacatcggagccaacacccggatcggcgctggctctgtggtggtgcgtgatgtggacgccgattgcacggtggttggaatcccgggtcgggttattcaccagagcggcgtgcggatcaatcccctggcccactccgccctaccggatgcggaagccaacgttattcgcaacctgatggagcggatcgacgaactggagagcacggtgagcaatctgcagcgctgtctcaaagaagttgcagaagggcgtcagctgcgggacgtctgccgtggcgagtcccaaagcctcaaagatcgcgagattctggaatttctgggggagaacacgggctga

SEQ ID NO: 234076 - DNA, 736 bp, Unknown
  Bacterial polypeptide expressing nucleotide sequence isolated from the Sargasso Sea
gatgctaaaaacttttaaatcagatatagaaattatcaaagagagagatcctgccgctagaggaataatagaaatatttctttgctacccaggctttcaatcaatagttattcataggtttacgcataaattatggcaattaaagatgcctttggtaccccgcttaatgagtcatcttaataggttagtaacaggtattgaaatccatcctggggcaaaaattggtaaacgggttttcatagatcatggaatgggcgttgtaattggagaaacagctgagataggaaataattgtcttttatatcaaggtgttacattaggaggtactggtaaaagccacgggaaaagacacccaacgttaaaagaaaatgttgtagttggtgcaggagcaaaagttcttggatccatcacagtaggatctaatacacgcatcggcgcgggttcagtagttgttcgaaatgtagaggggaacagtactgtggttggagttcctggcagggtagtgcatcaaagtggtgtcaaagtaaatcccttagctcactctgcattaccagatgcagaagctaatgtgataaaaaatttaatggataggatagactctcttgaaaatgaaattcttaaattacaaaaaactctacaatgtatagcaaactcagaatctattgatatttctaaactcggtgattctcaaaatcttaaagacaaagaaatttttgaatttcttggagatgattaa

SEQ ID NO: 234077 - DNA, 733 bp, Unknown
  Bacterial polypeptide expressing nucleotide sequence isolated from the Sargasso Sea
attgaaaacttttaaatcagatatagaaattatcagagagagagatcccgctgcaagaggaatagtagagatatttctttgctacccgggctttcaatcaatagttatacataggtttactcataaattatggcaattaaaaattcctttaattccccgcttacttagtcatcttaataggctagcaacaggtattgaaatccatcctggggcaaaaattggtaaaagagttttcatagaccatggaatgggcgttgtaattggtgaaactgctgagataggaaataactgtttgctttatcagggagtgacattaggaggtactggtaaaagccacggcaaaagacaccccaccttaatggaaaatgttgtagtaggagcgggcgcaaaagtgcttggatccatcactgtaggatctaatacccgtattggcgctggctcagttgttgttcgaaatgtagaggggaacagtactgtggtcggaattcctggcagggtagttcatcaaagtggtgtcaaagtaaatccgttagctcactctgctttaccagatgcagaagctaatgtgataaaaaatttaatggataggatagactcgcttgaaaatgaaattctcaaattacaaaaaactctacaatgtatagccagctcagaatctattgatatttctaaactaggtgattctcaaaatctaaaagacaaagaaattttagaatttcttggagatgattaa

SEQ ID NO: 234078 - DNA, 823 bp, Unknown
  Bacterial polypeptide expressing nucleotide sequence isolated from the Sargasso Sea
catgggtgtgatagctaggctaaaagaagacattgaatctatatatcaccgtgatcccgcggcgcgcagcgcctttgagatcttggtcaactatcctggcatgcacgccatttggttgcatcggataagccataaattatggaagcgtgattggcgcttaatggcccgttgtttatcgactttttcgcgctggctgacgggagtggagatccatccgggtgccaccattggcgatcgtttctttatcgaccatggtatgggcgtggtgatcggcgaaaccgccgagattggcgatgattgtactttgtatcacggcgtgacacttggcggcaccacttggcaggcaggtaaacgccatcccacactaggcaataacgtggtcgtgggcgcaggggctaagattttaggtcctatcactatgcatgatggggcgcgtgtcggctctaactctgtggtggtgaaagatgtgcctaaggatacgactgtggtcgggatccctgggcgcgtggtcgccacaccttcgccacaatcgaaggagaagtctgagcgtcgcagcgccatggccaagaaatatggtttcgatgcgtatgctgtgtctcctgacaatccggatcctgtcgcgaacgctatcggtcaaatgctggaccatatgcatttaatggattcaaaagtgcaggaattgtgtcaagccattcagcgcttaggtggtgatgtatgcaccgaaagattgccagagctgaatgtgggtgagtttaacgacgcggaaaaagccgccgccgataagcgccagagtgcgctcgacgagtttgatcccagcatttaa

SEQ ID NO: 234079 - DNA, 361 bp, Unknown
  Bacterial polypeptide expressing nucleotide sequence isolated from the Sargasso Sea
atgttaaggacttttaaatcagacatagaaatcattaaagaaagagatcctgctgctagaggcataatagaaatttttctttgctacccaggctttcaatcaatagtttttcataggtttactcataaattatggaaattaaaaataccattaattccacgtttgttgagtcatatcaataggctagtaacaggtattgaaatccatccaggagcaaaaattggcaaaaaagtttttatagatcatggtatgggtgtcgtaattggagaaacagctgagataggaaataattgtctgctttatcagggagtaacattaggaggtactggtaaagccacggaaaaagacatccgaccctaat

SEQ ID NO: 234080 - DNA, 358 bp, Unknown
  Bacterial polypeptide expressing nucleotide sequence isolated from the Sargasso Sea
gatgctaagaacttttaaatcagatatagaaattatcagagagagagatccagctgcaagaggaatagtagaaatatttctttgctacccaggctttcaatcaatagttatacataggtttacgcataaattatggcaattaaagattcctttaattccccgcttactaagtcatcttaatagattagcaacaggtattgaaatccatcctggagcaaaaattggtaaacgggttttcatagaccatggaatgggcgttgtaataggcgaaactgctgagataggaaataactgtttgctttatcaaggagtgacattaggaggtactggtaaaagccatggcaaaaaagacacccca

SEQ ID NO: 234081 - DNA, 823 bp, Unknown
  Bacterial polypeptide expressing nucleotide sequence isolated from the Sargasso Sea
atgggtgtgatagctaggctaaaagaagacattgaatctatatatcaccgtgatcccgcggcgcgcagcgcctttgagatcttggtcaactatcctggcatgcacgccatttggctgcaccggataagccataaattatggaagcgtgattggcgcttaatggcccgttgtttatcgactttttcgcgctggttgacgggagtggagatccaccccggtgccaccattggcgatcgtttctttatcgaccatggtatgggcgtggtgatcggtgaaaccgccgagattggcgatgactgtactttgtatcacggcgtgacattgggcggcaccacctggcaagcgggtaaacgccatcccacactgggcaataacgtggtcgtgggcgcaggagctaagattttaggtcctatcactatgcatgatggggcgcgtgtcggctctaactctgtggtggtgaaagatgtgcctaaggatacgacggtggtcgggatccctgggcgcgtggtggccactccttcgccacaatcgaaagagaagtctgagcgtcgcagcgccatggccaagaaatatggtttcgatgcgtatgctgtgtctcctgacaatccggatcctgttgcgaacgctatcgggcaaatgctggaccatatgcatttaatggattcaaaagtgcaggaattgtgtcaagccattcagcgcttaggtggcgatgtctgcaccgaaagattgccagagctgaatgtgggtgagtttaacgacgcggaaaaagccgctgccgataagcgccagagtgcgctcgacgagtttgaccccagcatttaat

SEQ ID NO: 234082 - DNA, 541 bp, Unknown
  Bacterial polypeptide expressing nucleotide sequence isolated from the Sargasso Sea
attgaaatacatcccgggagccaaaattggtaaacgagttttcatagatcacggaatgggagttgtaattggagagacagcagagataggaaataattgtctgctatatcagggagtcacattaggaggaactggcaaaagtcatggaaaaagacaccctaccttaatggaaaatgttgtagtcggagcgggcgcaaaagttcttggatccatcacggtaggatctaatacccgtattggtgcaggctcagtagttgttcgaaatgtagaggggaatagtactgtggttggagttcctggaagagtagtccatcaaagtggtgttaaggtaaatccgttagctcactctgccttacctgatgcagaagctaatgtgataaaaaatttaatggataggatagattctcttgaaaatgaaattcttaaattacaaaaaacactagaatgtatagctagctctgaatctattgatatttctaaactcggtgattctcaaaatattaaagataaagaaatttttgaatttcttggagatgattaa

SEQ ID NO: 234083 - DNA, 379 bp, Unknown
  Bacterial polypeptide expressing nucleotide sequence isolated from the Sargasso Sea
aaagcaggaatttttgctgctgcagcaaaatcaagtacacaaaatatagcaatgaatgaagttgcaagggaatccataagaaaagataaaaattttcataatggtaactacttagaacataacgttattccaaaaaatggaattaaaacagcaagaatgttaggacatataacatatttatctgaaaaacatatggatcttagatttggaagaaaatttcaagatgatgcttcaaaagtagataagaaagtagattttgaggttgagaactatcttcaatataaaggtgaaaaattttcggaatcatttgatgctaattcttacatcataatgacaaaggccatggatggatatgatgctgctggagaaaccgaaagtc

SEQ ID NO: 234084 - DNA, 997 bp, Unknown
  Bacterial polypeptide expressing nucleotide sequence isolated from the Sargasso Sea
gcgacaggtacaacagtggcagatgcagatagagtggtcttcaatgataatggtaccatggtgcaagttgcagtaactgatctatcagcatattttgatgatgagatcacatccatgcctaatttggcaaccactgctgcaaccacagttggggcattgaactctggttccatcacatcaggatttggcacgatcgataatggaagttctgcgatcactacaacgggtactgtgacctacgggaccttaaatgatgggtcaaccaacttaacaacaactgttgcagaattgaataagatagatggcggtacgtcagctacaggtacaacagtggcagatgcagatagagtggtcttcaatgataatggtaccatggtgcaagttgctgtaactgacctatcagcatattttgatgatgagatcactgccatgcctaatttggtaacgacaggtgcattgaactctggttccatcacatcaggatttggtacgataaataatggaagttctgcaatcaccacaacggggaccgtcacttacgggaccttaaatgatgggtcaaccaacttaacaacaactgttgcagaattgaataaaattgatggaaacacatctgcaacaagcacaacagttgcagatgcagacagagtggtccttaatgatgctggcactgtggtccaggtcgctatgacagatattgatacttatatatctgcaacttctaaaactttgactaacaagacactgacttcacctacaatcaacacacctacgattacagggaatactacttttagtgatggatcttacaattttaatatagcttctcatgatgggactaatggtctttcattagcagggactgttgtgactgcaacagcagcagaattaaataagatagatggtggtacgtcagcgacaggtacaacagtggcagatgcagacagagtggtcctgaatgataatggtaccatggtccaagttgcagtaactgacc

SEQ ID NO: 234085 - DNA, 586 bp, Unknown
  Bacterial polypeptide expressing nucleotide sequence isolated from the Sargasso Sea
atgaatactgagaaaaacataaaaactttaattgtaaataaaccactaaaattagactgtggaaagaccataaaagattttccgatagcctatgaaacttacggttcacttaattcaaaaaaagataatgcaatattagtttttcatgctctaacaggagatcaatttgtaaccggaataaatcctgtaactaacaaggagggttggtggagttatgcagtaggtcctgataaagctatcgatacaaataaatattttgttatttgctctaacgtaattggtggatgtatgggatcatacggaccaagtcataaagatcctgatcaaaaaatttttggaacaaattttcccgttattacaattaatgatatggtgaatgctcaatataatttacttgatcattttggtattgataaactgttttctataactggtggttcaatgggaggtatgcaagtccttcagtttattagcaactttcctgataaatccaaaacagtgataccgatagcaaccacatctagtcattcagctcaaaatattgcttttaacgagctaggtagacaagctattacagctgacagta

SEQ ID NO: 234086 - DNA, 811 bp, Unknown
  Bacterial polypeptide expressing nucleotide sequence isolated from the Sargasso Sea
tatgagcttacccgaggtatccgttagacgctttgtttttgcaataatgatcaatttggttattgttctttttggcttaatatctgccaatcgaatctcaatagatcgctctccggatatcgacttttcattgatctcagtcacaactattttgccgggtgctaatcccgatgtagtcgactccagtgtgaccaatatcattgagagcgcggtgaatagcattcctggaattgatgatgttcgatccagatcagcgccgggtgtatccaatgttttcatacagtttttattggaaaaagatcttgatatcgccttcaatgaagttcaatcaaaagttgggcaaatcaattcgcaattgcccgatgatgcggaaacgccaatcatcagtaaaattgaaaccggcgaaatacccatcatctggctggctttgagaggcaataggacgcttcaagatttgagcgtttatgcaaaaaataccgtaaaaagaaagctggaaaccattaatggtgtcggcagtgtagttattgggggagagcaggaacgaaatattcgagtcaatcttgattttgaccgaatgagtgcgttcggcatcactgttcaagacattgtcatggcatttaaaaatgagcacatcaagctgcccggtggatttctcattgataacagcaaagaagatttattgaagctggatcttgagtcacacaatgttgaagaaattgaaaacatcattgtcaactatgatcagaatcgtgcaatcaagctaagagacatcgctgaggtaaaagatgatgttaaagatctaagaagcatg

SEQ ID NO: 234087 - DNA, 574 bp, Unknown
  Bacterial polypeptide expressing nucleotide sequence isolated from the Sargasso Sea
tatggacaagttaaaaaaggtaaagactataataataaaaaaaccgcaaaaattagattgtggaaaagaaatttctaattttccaatttcatacgagacatatggagctttaaacgaaaaaaaagataatggtattttagtatttcatgcattaacaggtgatcaatttgcttctggaaaaaaccctattacaaataaagatggttggtggagttatgcacttggatcaggaaaagctatagatacagagaaattttttgtgatatgcgccaacgtaattggaggatgtatgggctcatatggtccaagcacaatagatgaggaaacaggcaaacccataggaacaaattttccagttatcacaattaatgatatggttaatgctcaatataatttattaaagcattttgaaatagaaaaattatttgcagtaattggtgggtccatgggtggtatgcaggtattacaatttgtttccaattttcccgataaagcacatattgcaatacctattgcctgtacatcaagtcattctgcacaaaatattgcattcaatgaacttggaagacaagca

SEQ ID NO: 234088 - DNA, 414 bp, Unknown
  Bacterial polypeptide expressing nucleotide sequence isolated from the Sargasso Sea
agcagcgtgaccagatctcttacggttttgatgcggattttgaagtggaatcatatttacgacaccaaggaagtagttttgtggaacgatttgacgcgaattcatacctttatattacacgtgccatggattattttgatttagcggcagaacatgaaggtgtgcttgcaaatgcctttcgtaacaccaaggtgagatattttatcgtctccttttcgagtgactggctttatcctactattgagagtcgtgcagtagtgcacgcgcttaacgcagttgccgctaatgttagttttcttgaggtccaaacagataaagggcatgatgcgtttttgttagatgaacctgttttacatgagacactttcggggtttctagaaggcgcaattcggcatagtggattaggcttatgac

SEQ ID NO: 234089 - DNA, 724 bp, Unknown
  Bacterial polypeptide expressing nucleotide sequence isolated from the Sargasso Sea
taaaaaactacttttgtgctactgggaggatcaatggggaggaatgcagacacttcaattttgtgcaacctttcctgatagaaccttctctgcagttccgattgcatgtagtacaaatcacagtgctcaaaacattgcactaaacgagctagcaagacaagctataatggcagatccagtatgggataaggggaaataccaaaaaaaaaatattcaacccaaaaacggattagctgtagcgagaatggtcggacatattagttatttatctgaaaagggtatgcaagaaaaatttggaagaaaacttcaggaaaaagcagattacgagtttagctttgatgctgattttcaagtagagagctatttaagacatcagggttttgcatttgttgaaagatttgatgccaattcaattttgtacattacaagagcaatggattactttgaccttgcaaaacaatttaaaggaggattggttgaagcttttaaaaatcaaaaaactaaattcttagtaatatctttttcatccgactggctttatacaaccaaacagaataaagatacggtcattgcactaaatgctgcaggggcagatgtgtcatttgctgaaattaaaacagataaagggcacgactcctttttagtaaatgaaccagaatttcttaaaactctaaaaggttttatagactctatgtatttaaaatttaaaactgataataaatga

SEQ ID NO: 234090 - DNA, 1007 bp, Unknown
  Bacterial polypeptide expressing nucleotide sequence isolated from the Sargasso Sea
tatgagcttacccgaggtatccgttagacgctttgtttttgcaataatgatcaatttggttattgttctttttggcttaatatcagccaatcgaatctcaatagatcgctctccggatatcgacttttcattgatctcagtcacaactattttgccgggtgctaatcctgacgtagttgactccagcgtgaccaatatcattgagagtgcggtgaatagtattcctggaattgatgatgttcgatccaggtcagcgccgggtgtatccaatgttttcatacagtttttattggaaaaagatcttgatatcgccttcaatgaagttcaatcaaaagttgggcaaatcaattcgcaattgcccgatgatgcggaaactccaatcatcagtaaaattgaaaccggcgaaatacccatcatctggctggctttgagaggcaataggacgcttcaagatttgagcgtttatgcaaaaaataccgtaaaaagaaagctagaaaccattaatggtgttggtagtgtagttattgggggagagcaggaacgaaatattcgagtcaatcttgattttgaccgaatgagtgcgttcggcatcactgttcaagacattgtcatggcatttaaaaatgagcacatcaagctgcctggtggatttctcattgataacagcaaagaagatttattgaagctggatcttgagtcacacaatgttgaagaaattgaaaacatcattgtcacctatgaccaaaatcgtgcaatcaagctaaaagacatcgctgaggtaaaagatgatgttaaagatctaagaagcatgggtcgattcaatggtgacccatccattggaattggcgtaaccaaaattcgcggagaaaatacggtagaaatcatcgagaaggtaaaaactaaaatcagatccgacattgagccaacattgcctgccggaatgacgctcgacattggcacagacgatagcagttacatctatgaattaatcagcggacttggtcaga

SEQ ID NO: 234091 - DNA, 405 bp, Unknown
  Bacterial polypeptide expressing nucleotide sequence isolated from the Sargasso Sea
atttaaaatttggatttgatgccgactttcaaattgagagttatttgagatatcaaggctctgtatttgtagatagatttgatgcaaatagttatttgtatataacgagagcgatggattattttgatttaactaaacaatttggtggaaacctttccaaagcatttaaaaataccaaaacaaaattttttattatatcctttacttctgattggttatacccaacatctgagaataaggatattgtgatagcacttaatgcaataggtgccgatgttggttttgttgaaattaaaactgataaaggtcatgattcctttttattagacgtaccagattttttaagcactattaaaaattatttaaacacaacttattctaatattaatgaaagaagaatttaaa

SEQ ID NO: 234092 - DNA, 939 bp, Unknown
  Bacterial polypeptide expressing nucleotide sequence isolated from the Sargasso Sea
ttggatattgttggtagaaatgcaattaaaactgaccttaattttaagaaaggtgattattaccaatctaatgaaaagccagaagatggccttgcaattgcaagaatgttggctcatattacttatgtttcaaatgattcacttaaaagaaagtttgataattcaagatatgaccctaaagatatatcgactgaatttgaaaatagattttcagttggatcctatttggcttatcaaggctctaaatttgtaaataggtttgatgcaaatagttatataactctttctacggcagttgattattttgatattgggcaaaatgttaaagagatttcaaaaacattagaaaaaagtaaatgcaaatggttagttataagtttttcaagtgattggctttatccgccatttcaatctgaagagattgttaatgcattaataaatttagataagcctgtttcatacagttgtataaaaagtaatgcaggccatgatgcctttctgcttgagaggggctacggaaaactttcttcatcttttttagaaaatatttctggtatttccacattaaaaaaatcacaaaacctaagcaggtcaaccacaaatattttttttgatgaaaggatagatttgaagttcattactgatttaattaatgacaatgaaagagttcttgatttaggatgtgaagatgggacgttattggaagaactcaagaaaaaaaattgtaaaaaattagtaggggttgaaatagataataaaaaggttattgaaggtgtttcaaaaggaattgaagtaatcaatttagatatcaatactggactaaaaagatttaatgataatcagtttgacgtggtgatattgtctcaaactcttcaatcgataaagaatgttgatgaaacgattgaagaaatactaagaatatctaacaggtctataatt

SEQ ID NO: 234093 - DNA, 550 bp, Unknown
  Bacterial polypeptide expressing nucleotide sequence isolated from the Sargasso Sea
atgaatgataaaataaatattgttgaagaggctactctagattgcatggttgcttatttttcagatactaattttgtattagaatctggatttaaattaagtgaatttaaaattgcttttaaaacttttggaaatctaaacaaagaaaaaagtaatgttattcttgtttgtcatgccctcacaggagatcaatatgttacgggatataatccaattacaaaaaaagatggttggtggtcaagaatggttgggccaaataaacctattgatacaaataaattttttgttatttgttcaaatgtattaggaggatgtgcaggctcacttggtccaaaagaaattaaagataataaaaaatttccatcaataacaataaaggatattgttattgctcaaaattatctcttagattctcttaagataaaaaaattacatgctgtgatagggggttcaatgggtgctatgcaagctcttcaatggtcaataagttttccagaaaagataaataatataatacatatagctggagctcttaaacattctgcacaaa

SEQ ID NO: 234094 - DNA, 232 bp, Unknown
  Bacterial polypeptide expressing nucleotide sequence isolated from the Sargasso Sea
tatgagtgaaagtgtaggtaaagttacagaacaaatatttaagttacccaacgagctattgcttgaatgtggtcaaacccttaaaaatatagaattaacttatgaagcatatggagagttaaattctgatgcttctaatgctatcttgatttgccatgccttaagtggcagtcatcatgctgctgggtattataaagacaagaatgaaagacttggatggtgggatgcctta

SEQ ID NO: 234095 - DNA, 293 bp, Unknown
  Bacterial polypeptide expressing nucleotide sequence isolated from the Sargasso Sea
tatgaatagtgaattaaaaagtgtaaaaaaattaattgtcaatcaatctcttgaacttgattgcggaaaaactattaaagattttcctttagcctatgagacctatggaactttaaataaaaataaaaataatgccatacttgctttccatgcattaacgggagatcaattttgtgcagatactaatcctataactaaaagagaaggttggtggacaacagcagtgggtccgggaaaggcgattgatacaaataaatattttataatttgtgccaatgttttaggaggatgta

SEQ ID NO: 234096 - DNA, 637 bp, Unknown
  Bacterial polypeptide expressing nucleotide sequence isolated from the Sargasso Sea
gatgaatgtaaaatttgaaaatattaaaagacttaacgtttctgagccactaaaactagattgtggaaagacaattagtaattttccgttagcatatgaaacttacggtactctgaatgacaataaagataatgccattttagtattccatgcactcacaggcgatcaatttgtgactgatactaatccgataaccaataaagagggttggtgggttactgctgttggtcccggtaaagccatagataccaataaatattttgtaatatgtgcgaatgtgattggcggttgtatgggatcacttggaccaagaaatataaatcctgacacaaataagccctatggattagagtttccagttataacaattaaagatatggttcgtgcacagcaatcattactaaaccatttaggaattaaaaaacttttgtgcgcaactgggggatctatgggaggaatgcagctattacaattttgcgcaacgtttcccaataaaactttttcagctattccaatagcttgtagttcaagtcatagtgctcaaaatattgctttaaatgaattagctagacaagcaatcatggcagatccggtttgggataatggaaaatacgctttaaaaaatgtcagccaaaaa

SEQ ID NO: 234097 - DNA, 375 bp, Unknown
  Bacterial polypeptide expressing nucleotide sequence isolated from the Sargasso Sea
ttcaaattgaaagttatctgagatatcaaggaaaatcttttgtagatcgttttgatgctaacagctacctctaccttactagggccatggattattttgatgttgttaaagatttttctagatctatagagtttccaacaacaaccaatgaccatataaattaccttatcatttcctttacttctgattggttatttcctacaaatgaaaatgaagaaatttcgaaaaaattaaatttttttaatcgtaatgttagttttattgaaatagaaacagacaaaggtcatgatagttttttattggatgagcctgagttagatttaactataagtggttttttaaaaagtaattttaatagattaatagaaaaatgaa

SEQ ID NO: 234098 - DNA, 622 bp, Unknown
  Bacterial polypeptide expressing nucleotide sequence isolated from the Sargasso Sea
aatgattgtcgagacaaaaaaaatacttattaattctagattagaatgtgcttcgggggagactcttgaaaactttgagctaatgaccgatttttatggggagctaaatgaaaagaaagataatgcagtccttgtatgtcatgcattctctggaagtcatcatgctgcaggaaaaagagataataacattggttggtgggatgagttcattggtcctgataaaacaatagatacaaatcgtttctttgtgatctccgtaaataatcttgggagttgttttggttctagcggccctcttagtaaagataaaaatggggagaggtttaataataattttcctcagttagaagttattgattgggttgaatctcaaaaaatgcttgccgataaattaggaataaaaaagtggcatttagtcattggtggaagtttaggcggaatgcagtcacttcaatgggctgtaagctatcctaaaatggtaaaaaaagttggcattcttgccgctgcagctaaaacgagctctcaaaatattgctttgaatgaagttgagagagaagttattaaaaaggatgctgattttcatggcgggaagtatcttgaattcaataaatctccagttaaa

SEQ ID NO: 234099 - DNA, 631 bp, Unknown
  Bacterial polypeptide expressing nucleotide sequence isolated from the Sargasso Sea
tgttccaatagcatgcagcacaaatcacagcgctcaaaacattgcacttaatgagttagctagacaagctataatggcagatcctgtctgggaaaaaggtaaatattataaaaaaaatattcagccaaaaaacggtttggcagtagctagaatggttggacatataagttatttatctgagaaaggtatgcaagagaagtttgggagaaaacttcaggaaaaagctgactacgaatttagttttgatgctgactttcaggttgaaagctatcttagacatcaaggatttgcttttgttgaaagattcgacgcaaattcaatattgtatattactagagcaatggattattttgatctttctaaacaatttaaaggtgggttagtggaagcatttaaaaatcaaaaaacaaaattcctggttatatctttttcatctgattggctttatacaacaaaagaaaataaggatactgtaattgcactcaattctgctggggctgatgtatcttttgctgaaattaaaacagataaaggacatgactcttttttagtaaatgaacctgaatttcttaaaactttaaaaggttttatagactcaatgcatattaaatttaaaaatgaaaaaaaatga

SEQ ID NO: 234100 - DNA, 393 bp, Unknown
  Bacterial polypeptide expressing nucleotide sequence isolated from the Sargasso Sea
atttaaaatttagttttgatgctgattttcaaatagagagttatttaagatatcaaggatcagtttttgttgatagatttgatgcgaatagctatttatatattacaagagcaatggattattttgaccttacaaaaaaatttggtggtaatttatcaaaagcatttgaaaaaagtcatacaaaattttttataatatcttttacctcagattggctttatccaacttctgaaaatagagatatagtaatagctcttaatgccattggtaaaaatgttggatttgttgaaatttcatctgataaaggtcacgactcttttttacttgatgttccagactttctaaacaccgttaagaattttttaaatacttcttatgaaaatattaaatgaa

SEQ ID NO: 234101 - DNA, 195 bp, Unknown
  Bacterial polypeptide expressing nucleotide sequence isolated from the Sargasso Sea
attgcaagaaagagatgatttaaaatttggatttgatgcagaattttcaaatagaaagctatttaagaatatcaagagttcagtttttgtagatcgtttcgatgcaaatagttatttatttataacaagagcaatggattattttgatctaataaaacaatttaatggaaatctttctaaagcatttgagaaaag

SEQ ID NO: 234102 - DNA, 715 bp, Unknown
  Bacterial polypeptide expressing nucleotide sequence isolated from the Sargasso Sea
aatgaacaaaactgaaaaggtaaaaaatttaattattgataaaccattaaagttagattgtggaaaaactattgttaattttccattggcttatgaaacatatggtcaactcaacgaaaaaagggacaatgctattttagcatttcatgcactaactggggatcaatttgcggctgagataaatcccataactaaaaaagaaggctggtggagcaatgctttgggtcccggaaaagctatcgatacaaacaaatattttgtaatttgtgcaaatgtaattggtggatgtatgggatcttatggtcctagcaatatcaatccggaaaacagtaaaccatttggaactaattttccggttatcaccattaacgatatggttaatgcccagtatcatctattagaattctttaaaattgacaaattattttcagtagttggtggttcaatgggaggtatgcaagtactacaattcgtttctaattttccaaataaatcaagaactgccattccaatagcttgtacagctagtcactcggcgcaaaatattgctttaaatgaacttggaagacaatcaataatggcagatcacaattggtcaaatgggttttatgaagaaaataaaaaattacctgataaaggtttagcagttgcaagaatggctgctcatattacatatttatctaaaaaaggtttacaagaaaaatttggaagaaaa

SEQ ID NO: 234103 - DNA, 268 bp, Unknown
  Bacterial polypeptide expressing nucleotide sequence isolated from the Sargasso Sea
tatgagttattcaataggattagtagaaccaaaaaaggttaccttagataaaggtctgagattagaaagtggtaaagagcttaaaaagattgagcttatttatgaatcttacggcaacctaaacgaggaccattcgaacgccatacttatatgccatgccctaagtggcaatcaccatgctgctggaatgtacgaagatgaaaaaagagctggctggtgggatgcccttaattggtcctggaaaagctatagatacaaacaaaatttt

SEQ ID NO: 234104 - DNA, 349 bp, Unknown
  Bacterial polypeptide expressing nucleotide sequence isolated from the Sargasso Sea
ttaagataccaaggatcagtttttgtagataggtttgatgcaaatagctatttgtatattacaagagctatggattattttgacttaacaaaaaaatttggcggaaatttatcaaaagctttcgaaaaaagtgatactaagttttttattatatcgtttacttcagattggctatatccaacttctgaaaacagagatattgtaattgctctaaatgctattggtaaaaacgtaggatttgtcgaaatttcttctgataagggtcacgattcttttttacttgatgttccggattttttaaacaccgttaaatattttttaaatacttcttacaaacaaattaaatgaa

SEQ ID NO: 234105 - DNA, 661 bp, Unknown
  Bacterial polypeptide expressing nucleotide sequence isolated from the Sargasso Sea
acttttccagataaaactttttcagctgttcctatagcctgtagttcaagtcatagtgcacaaaatattgctctaaacgaattagctcgccaggcgataatggctgatcctgtgtgggataatggaaagtatgttctgaaaaatgtacaaccaaaaaacggattggctgttgcaagaatggttggtcatattagttatttatctgaaaaaggtatgcaagaaaaatttggtagaaaactacaagaaaaagcagattatgaattcagtttcaatgcagattttcaagtagaaagttatttaagacatcaaggttatgcattcacagaaagatttgatgcaaactctatactttatataacaagagctatggattattttgacctttcaaaacaatttaaaggtggtttaattgaagctttcaagaatcaaaaaacaaagtttttaataatatctttttcttcagattggctttacacatcaaaagaaaataaagatatagtaatagcgttgaatgcttcaggagcagatgtttcatactctgaaattataactgataaaggtcatgactcctttttactcgaggaacctgaatttttaaaaacacttaaaagttttatagactcaatgtatgagaaatttaaatatgaaaaaagaatttaaa

SEQ ID NO: 234106 - DNA, 644 bp, Unknown
  Bacterial polypeptide expressing nucleotide sequence isolated from the Sargasso Sea
tatgaatattaaagagaatataaaaacacttattattaaaaaaccattaaatcttgattgtggtaaaactattaataattatccactagcctatgaaacttatggttcacttaataaaaataaagataatgcgattcttgtttttcatgcacttaccggtgatcaatttgttacgggaattaatcctatcacaaaaaaagatggttggtggtcttatgcagtgggtcccaacaaatcaatagatacaaataaatattttgttatttgtgcaaatgttataggtggttgtatgggatcatatggtccaagccacaaaaatcccgatacaaataagatttacggcacagattttcctgtaattactattaatgacatggtgaatgcacaagtaaatttattagatcattttaaaatcaaaaaacttttttcagttgttggtggatcgatgggaggaatgcaagttttacaatttattagtaattatccagataaagctagtacagtagtaccaatcgcatgtacctctaatcattctgctcaaaatattgcttttaatgaattgggtagacaagcgatagcatcagatcataactggtcagacggaaaatatttatctaataatactcttcccgataaagggttat

SEQ ID NO: 234107 - DNA, 667 bp, Unknown
  Bacterial polypeptide expressing nucleotide sequence isolated from the Sargasso Sea
ttgctcgacctttccgaatagatctttttctgcgattccaatcgcttgtagctcaagtcacagcgcacaaaatattgctttaaatgagttggctcgccaggccataatggccgatccagtatgggataaaggtaagtattttcttaagaatgttcagccaaaaaatgggttagcagtcgcaagaatggttggccatataagttatttatcagaaaaaggtatgcaagaaaagttcggaagaaaattacaggaaaaagcagattacgaatttagctttaatgccgactttcaagttgaaagttatttaaggcatcaaggttatgcatttgttgagagatttgatgcaaactccgttttatacattacgcgagcgatggactattttgatctttctaaacaatttaaaggtggtttagttgaagcttttaaggggcagaaaactaaatttttgattatttctttctcatctgattggctttacacaaccaaagaaaacaaagatatagttatagctttaaatacttcgggagctgatgtttcttattcagaaattgtcacagacaaagggcatgactctttcttgctacaagtaccagattttcttaaaacattaaaaagttttatagactcaatgtatgaaaaatttaaaaatgaaaaaagaatttaa

SEQ ID NO: 234108 - DNA, 542 bp, Unknown
  Bacterial polypeptide expressing nucleotide sequence isolated from the Sargasso Sea
tatgagtaaatttgataatataaaaaaattaatagttaaggataaacttaagcttgattgtggtcaaactatatctgattttcctatagcttatgaaacatacggaaaattaaactcaaaaaaagataatgctattttagtttttcatgctttaactggagatcaatttgtatcggatattaacccaataacaaaaaaggacggttggtggaagcatgctgttggatcaggaaaagcacttgatacaaacaaattttttataatttgtgcaaatgtgttggggggctgcatgggatcatttggaccaagtagtctaaatacaaagactggaaaatcttatggaaatgatttcccagtaatcacaattaacgatatggtaaatgctcaatattttttacttaaacattttaaaatagaaaaattattttgtgtaactggtggatctatgggtggaatgcaagttttacagtttgtatcaaactatccttatgcggctcaaacagctgttccaatagcctgtacttcaaatcactctgcacaaa

SEQ ID NO: 234109 - DNA, 439 bp, Unknown
  Bacterial polypeptide expressing nucleotide sequence isolated from the Sargasso Sea
tatgaaatatagatcaatattagaattaaagaataaaatcattgagttaaaaaagtatgacaatgttattgtttttactaatggatgttttgatatacttcataaaggccatattacgtatttatctgaagcaaaagaattaggtgactatttaattgtaggtttaaactctgatagatcagttactcaaattaaaggtcctgaaagacctataaacaaccaatgctttcgttctgaaaaattattagaattgaattcagttgatgatgtaataatatttgatgaagatacacctcaaaatctaattaatgagctacaaccaaatattctagtcaaaggaggagattataagaaaaatgagattgtaggagctagagaagttgaaaaaaaaggaggggaagtggttattcttccacttgttccaggatatagtactact

SEQ ID NO: 234110 - DNA, 620 bp, Unknown
  Bacterial polypeptide expressing nucleotide sequence isolated from the Sargasso Sea
tatgaatattaaagataaaattaaaaaaattattatcaaaaagccactaaagctagattgtggagagacaatagtcgaatatcctctagcgtatgaaacttatggtaagcttaatgaaaaaaaagataatgcaattttggtgtttcacgctttaacaggtgaccaatttgcctctggcacaaatccaatcactaaaaaacaaggatggtggtcctatgtaattggtccatctaaggcattagatacaaacaaattttttgtaatttgttctaatgttataggaggatgcatgggatcttttggtccaggaaatattaaccctaaaacaaataaagaatttggaacagattttccagtcataacaattaatgacatggtaaatgctcaatacaacctactagatttttttaaaattgataaacttcatagcgtaataggtgggtcaatgggtggaatgcaagtacttcaatttgttgcgaactttcctaacaaaacaaaaactgcaattcctatagcttgtactgcaagtcactctgcacaaaatattgcctttaatgaacttggtagacaatctattatggcggatgttaattggaaaaatggaaattattctttattta

SEQ ID NO: 234111 - DNA, 751 bp, Unknown
  Bacterial polypeptide expressing nucleotide sequence isolated from the Sargasso Sea
atggctaaaaagacattagtttttaatgaagtagcaagaaaaggacttgaagctggtgttaataaactagcagatgttgtaaaagtaacactcggtccaaagggtagaaacgtagttttagaaaaaaaatggggtgctccaacaatcactaacgatggagtaacaattgcaaaagaagttgatctagaagatccatatgaaaacatgggtgctcagctagcaaaagaagttgcatctaaaactaatgatgtagctggtgatggtacaacaactgctacagtgcttgctcaagcaatggtaaatgaaggcatgaaagctgttgcaacaggtgtaaatcccatggaagtcaaaagaggcatgttagaagcatcaaaagctgtaacagacttcattgcaggattttcaaagtcaataggtggaaaagatgaaattgctcaagtagcatcaatatctgctgcagatactgaaatcggtgaaacaattgcagaagcaatggacaaagttggtaaagatggtgttatcactgttgaagaaggccaaacttttggtatggagcttgaatttacagatggaatgcagtttgacaaaggatttatatctccttattttgtaactgatgctgataggcaagaagcagttttagagaatccatatattttaattgttaattccaaaataacagctgtaaatgacttattgccattacttgaaaaagtaatgaattcaggaaagccgcttttaatcctcgcag

SEQ ID NO: 234112 - DNA, 664 bp, Unknown
  Bacterial polypeptide expressing nucleotide sequence isolated from the Sargasso Sea
attgaagcttgattgtggacaaactatatcaaattttccattagcatatgaaacttatggaaaacttaatgataaaaaagataatgcaattttagcctttcatgctcttaccggtgatcaatttgcctcaggtttaaatccaataactaaaaaggaaggttggtggaattatcttataggccctggtaaggcaatagatacaaaaaaatattttgtaatttgtgcaaatgtaattggaggatgcatgggttcttatggtccaagtaacattaatccaaaaactaataaaaattttggaacagattttccagttataactataaatgacatggttaacgctcaatatcacttattagaattttttaagattaagaaattattttcagttttaggtgggtcaatgggtggaatgcaagtactacaatttgtatccaattttccagataaatcagaaactgctatccctatagcttgtacacatagtcattcagcacaaaacattgctctaaatgagcttggaagacaatcaattatggcagatcataattgggaaaatggattttatgttgataataataagtctccaaataaaggactggctgttgctagaatggctgcacacattacatatttatctaaaaaaggcttacaagaaaaatttgga

SEQ ID NO: 234113 - DNA, 451 bp, Unknown
  Bacterial polypeptide expressing nucleotide sequence isolated from the Sargasso Sea
atgcataaagatataaaaacactaattatcaaaaaacctctaaggctagattgtggccaaactattgataactttccccttgcttacgaaacgtatggggtacttaatgaaaaaaaagataatgcgattttaatttttcatgctcttactggagaccaatttgttacaaatttaaacccagtgaccaaaaaagatggttggtggtcttatgcagttggtcccgataaatctatagatacaaataaatattttataatttgcgcaaatgtaattggtggctgtatggggtcatttggtccaagtcatataaacccaaaaacaaaaaaaatatttggaactggatttcctattattacaattaatgacatggttaatgctcaaataaatctattggatcattttggtataaaaaaactttttgcagtagtaggtggttcaatgggaggaatgc

SEQ ID NO: 234114 - DNA, 439 bp, Unknown
  Bacterial polypeptide expressing nucleotide sequence isolated from the Sargasso Sea
gcaggtcttcaagaaaagtttgggtagaaaacttcaagaaagagatgatttaaaattcagctttgatgctgactttcaaatagaaagttacctgagatatcaaggctcagtttttgtggataggtttgatgcaaatagctatttatatatcacaagagctatggattattttgacttaacgaaaaaatttggtggtaatttatcaaaagcttttgagaaaagtgatacaaaattttttattatatcttttacatcagactggctatacccaacatctgaaaacagagaaatagtgatagcacttaatgcaattggtaaaaatgttggatttgttgaaattacatctgataaaggacacgactcttttttacttgatgttccagatttcctcaacactgtgaagaattttttaaacaaatcttatgagaaaatttcatga

SEQ ID NO: 234115 - DNA, 849 bp, Unknown
  Bacterial polypeptide expressing nucleotide sequence isolated from the Sargasso Sea
gggaattctacaccaacctcatcatatactaccattgcaggcgatctgagagttgatggtggtgacataggagtgtcaggagatacggatctcattacattagcatcaggacgagctacaatagatggtgaattagtcgtaacatcattagatataggcggcactgacataacttcaactccagcagagatcaataccattgatggtaatacttctgcaacaggtacaactgtagcagacgccgatagagtgttgctaaatgataatggtactatggttcaagctgcggtgacagacttagcagcatattttgatgatgagttaactgctatgcctaatttggtaacaacagctgcaactacggtaggggcccttaactctggttctatcacatctggcttcggtgcaattgataatggaagttctaacataaccacaacgggaacagttacctatggtactctaaatgatggttcaaccaatctaacaacaactgtagccgaattaaacatagtagatggtaatacatcggctactaacacaaccgtagcagatgcagatagagtagttatgaatgatggtgcaactatggttcaggttgctgtaacagacttagcagcatattttgatgatgagttaactgctatgcctaatttggtaacaacagctgcaactacggtaggggcccttaactctggttctatcacatctggcttcggtgcaattgataatggaagttctaacataaccacaacgggaacagttacctatggtactctaaatgatggttcaaccaatctaacaacaactgtagccgaattaaacatagtagatggtaatacatcggct

SEQ ID NO: 234116 - DNA, 634 bp, Unknown
  Bacterial polypeptide expressing nucleotide sequence isolated from the Sargasso Sea
tatgaatattgagaaaaacataaaaactttaattgttaataaaccactaaaattagactgtggaaaaactataaaagattttccaatagcctatgaaacttatgggtcacttaattcaaaaaaagataatgcaatattagtttttcatgctctaacaggagatcaatttgtaactggaataaaccctgtaactaacaaagatggttggtggagttatgcagttggtcctgataaggctatcgatacaaataaatattttgttatttgctctaacgtaattggtggatgtatgggatcatacggtccaagtcataaagatcctgatcaaaaaatttttggaacgaattttccagttattacaattaatgacatggtaaatgctcaatataatttacttgaacattttggtattgataaactattttctataactggtggttcaatgggaggtatgcaagtgcttcagtttattagtaactttcctaataaatctaaaacagtgataccgatagcaaccacatctagtcattcagcacaaaatattgcttttaacgagcttggtagacaagctattacagctgatagtaactggagagatgggaactattcatcaaacgaaactaatcctgggaaa

SEQ ID NO: 234117 - DNA, 343 bp, Unknown
  Bacterial polypeptide expressing nucleotide sequence isolated from the Sargasso Sea
tgtttttgtagacagatttgatgcaaatagttacttatatattacaagagcaatggattattttgatttaactaaaaaatttaatggaaatctttcaaaagcatttaaaaaaactaaaactaaattctttattatttcttttacttctgattggctatacccaacttcagaaaataaagatattgtaatagcattaaatgcagttggagctgatgtaggatttgttgaaataaaaactgacaaaggtcatgactcttttctattagatgttcctgattttcttaatactattaaaaattatttaagctcaacatattttaaattaaatgaaaaaagaatttaa

SEQ ID NO: 234118 - DNA, 522 bp, Unknown
  Bacterial polypeptide expressing nucleotide sequence isolated from the Sargasso Sea
aaaatgttcaaccaaaaaatggcttggctgtcgcaagaatggtgggtcatatcagttatttatctgaaaaaggaatgcaggaaaaatttggtagaaagcttcaggaaaaagctgattacgaattcagttttgatgctgactttcaagttgaaagttatttaagacatcaaggttacacatttgttgaaagatttgatgcaaactctgttttatacatcactagagcgatggattattttgacttatccagacaatttaaaggggggctcgttgaggcttttaaaaatcaaaaaacaaaattcttagttatttccttctcttctgattggctttacacaacaaaagaaaataaggatactgttattgctcttaatgcctcaggagctgatgtttctttcgctgaaatcaaaactgacaaaggtcatgattcttttttagtaaatgaaccagaatttctaaaaactttaaaaggatttatagactcaatgtatataaaatttaaaaatgaaaaaagaatttaaa

SEQ ID NO: 234119 - DNA, 535 bp, Unknown
  Bacterial polypeptide expressing nucleotide sequence isolated from the Sargasso Sea
atgaatgataaaataaaaaatattaaaagactgagtatatcaaaacctcttttgttagactgtaaacaaactgttagggactttcccttagcatacgaaacttatgggacattaaataaaactaaagacaatgctgttttaatttttcatgcccttacaggtgatcaatttgttagcggagtcaatccaattacaaaaaaggatggttggtgggtaacagctgtggggcctggtaaagctattgatacaaataaatattttgtaatttgtgcaaatgttattggtggatgcatgggttcatgggggcctaaagaaatagacaaaaaaacaaatgaaccttacggattaaattttccagttataacaataagggatatggttaaggcacaagagactcttttagatcacttgggaatagaaaaacttctttgcgccacaggaggctctatggggggaatgcagttacttcagttttgtgcaacattcccaaatagaactttttctgcagttccaattgcttgtagtacaagtcata

SEQ ID NO: 234120 - DNA, 368 bp, Unknown
  Bacterial polypeptide expressing nucleotide sequence isolated from the Sargasso Sea
ttttcaaatcgaaagttatttaagatatcagggatcagtttttgttgataggttcgatgcaaatagctacttatatataacacgagcaatggactactttgatttaacaaagcaatttaatggtaatctttcagatgcttttaaagagagtaaaactaaattttttgtagtatctttcacttcagattggctctacccaacaacagaaaatagagagatagttattgctttaaatgctataggtgcagatgtcggatttattgagataacatctgataaaggtcatgactcttttctgttggacgttcctgattttttaaatgcagttaagaattttttaaataattcgtataaaaaatatttatgaa

SEQ ID NO: 234121 - DNA, 532 bp, Unknown
  Bacterial polypeptide expressing nucleotide sequence isolated from the Sargasso Sea
gttgattattgaaaaaccactcaaattggattgtggtcagattattaataattttcctttagcgtatgaaacttatggctcactcaataatgaaaaagataacgcaattttagtatttcatgctttaacaggtgatcaatttgtaacaggtataaatccagtgaccaaaaaggatggttggtggtcttatgcggtaggctctggcaagtcgatagatacagataagtattttgtaatctgtgcaaacgtaataggcgggtgtatggggtcttttgggcctagccatgaaaatcccaagacaaaaaaaatttatggaacaaattttccagtcatcacaattaatgacatggtaaatgcacaaattaatttgttggatttttttggaataaaaaaacttttttcagttgtaggtggttcaatgggaggaatgcaagtcctacaatttattagcaattatcctgataaagctaaaacagcaataccaatcgcttgtacttcaagccattctgcacaaaatattgcttttaatgaa

SEQ ID NO: 234122 - DNA, 553 bp, Unknown
  Bacterial polypeptide expressing nucleotide sequence isolated from the Sargasso Sea
atgaatgatcctaattggcacaaaggaaattatactgaagaaaaaactattccagagagaggattatcagttgcaagaatgattgctcatataacttatttatcagaagatgcgatgcacagaaaatttggaagaaaattacaatcaagagatataatatcatttggattcgatgctgattttcaaattgaaagttatttacgttatcaaggaagatcatttgtggaaagatttgatgcaaactcttacttgtatcttacaagagcaatggattattttgatcattctgaatcatatcgcaaaacactagaatttgttaataatgcaaataaacatattaattatctagttatatcttttacttcagattggttgttccccactagagagaacaaagaaattgtagaaatattaaataatttatcaaagaatgttagttttttagaaattgaaacagataaaggtcatgacagttttttacttgatgaacaaaatttagatagtgtgatcaaagggtttttagtaagtaattttaggaaaaaaaatgaataat

SEQ ID NO: 234123 - DNA, 675 bp, Unknown
  Bacterial polypeptide expressing nucleotide sequence isolated from the Sargasso Sea
tacaattttgctcaacttttccagataaagcattttcagcaattcctattgcttgtagttctagtcacagtgcacaaaatattgctttaaatgaactggcacgacaagccataatggccgacccagtatgggataagggtaaatatgttcttaaaaatgtccagccaaaaaatggattagcggttgcaagaatggttggacatataagttacttatcggaaaaaggtatgcaggaaaaatttggaagaaaattgcaagaaaaagcagattatgaatttagctttaatgcagattttcaagttgaaagttacttaagacatcaaggctatgcatttgtagaaagatttgatgcgaactctattttatatattacaagagcaatggattattttgatctttctaagcaattcaatggtggtttagttgaggcttttaaaggacagaaaactaaatttttagttatttcgttctcttctgattggctttacacaactaaagagaacaaagatatagttattgccttgaatgcttcaggagcagatatttcttattcagagatagttacagacaaaggacatgattcttttttattagaagtgccagattttttaaaaacaatcaaaagttttatagactcaatgtatgaaaaatttaaaaatgaaaaaagaatttaaa

SEQ ID NO: 234124 - DNA, 757 bp, Unknown
  Bacterial polypeptide expressing nucleotide sequence isolated from the Sargasso Sea
atgaacaaaagtgaaaaggtaaaaaatttaattgtcgacaaaccgttaaagctagattgtggaaaaactatcgttaattttccattagcctatgaaacatatggtcaactaaacgaaaaaagagacaatgctattttagcttttcatgcattaactggggatcagtttgccactggaattaatccaattacaaaaaaagaaggctggtggagctatgctttaggtccgggaaaagcaattgatacaaataaatattttgtaatttgtgcaaatgtaattggaggatgtatgggttcttatggtcctagcaacatcaatccagaaaatagtaaaccctttggaactaattttccagttattactattaacgatatggttaatgctcagtataatctattagaattctttaaaattgataaattgttttcagtagttggtggttcaatggggggtatgcaagtactacaattcgtctctaattttccaaataaatcaagaactgctattccaatagcatgtacagctagtcactctgcacaaaacatagctttaaatgaacttggaagacaatcaataatggcagatcacaattgggcaaacggtttttatgaagaaaataaaaaattacctgataaaggtttagcggttgcaagaatggctgctcatatcacttatttatctaaaaaaggcttgcaagaaaaatttggaagaaaacttcaagaaagagatgatctaaattttagttttgatgctgatt

SEQ ID NO: 234125 - DNA, 387 bp, Unknown
  Bacterial polypeptide expressing nucleotide sequence isolated from the Sargasso Sea
atgctgactttcaaattgagagttatttaagatatcaaggctcagtttttgtggatagatttgatgcaaatagttacttatatattacaagagcaatggactactttgatttgacaaaacaatatggtgggaatctttctagagcttttaaagatagtaagacaaaatttttcattatttcatttacttcagattggttatatccaacttctgaaaataaagacattgtaatagcactaaatgctataggatctgatgttggttttgtagaaattaaaactgacaaaggtcatgactcatttttattagatgtgccagattttttaagcactattaaaaactacttaaacactacttatttaaatatagatgaaagaagaatttaaa

SEQ ID NO: 234126 - DNA, 640 bp, Unknown
  Bacterial polypeptide expressing nucleotide sequence isolated from the Sargasso Sea
atgagcttacctgaagtatctgttagacgctttgttttcgctgtaatgatcaacttggtcattgttctttttggtctaatatcagttaatcggatctcaatagatcgttctcccgatatagacttttcactgatctcagtcacaacagttttaccaggtgccaatcccgatgtagttgattcgagtgttacaaatatcattgagggtgcagtaaatagcatacctggaattgatgatgttcgatcgagatcagctcctggtgtatccaatgtttttatacaatttcttttagaaaaagacctcgatattgccttcaatgaagtccaatcaaaagtaggacaaatcaattctcaattacccgatgaagctgaaacaccaatcatcagcaagatagaaactggtgagataccaattatctggctggctctaagaggcaatcggacgcttcaagacttaagtatttatgcaaaaaatgttctcaaaagaaagctggaaaccattgatggtgtaggaagtattgttattggcggagaacaagagaggaatatccgagtcaatctagacttcgaccgaatgagcgcttttggaatcactgtacaagatattgttatggcgttcagaaatgagcacatcaaactac

SEQ ID NO: 234127 - DNA, 343 bp, Unknown
  Bacterial polypeptide expressing nucleotide sequence isolated from the Sargasso Sea
atgaattattctgtaaaaattgaaaaaaatcataaattagattgtgatattgctaatttttcaaaagctaactttgtcattgattctggttacaagtttgataattttaaaatagcatacaaaacttttggtaaaataaatagtgataaaagcaatgtaattcttgtttgtcatgctctaacaggagatcaatttgtttcaggtaagaatcccattaccaataaagatggatggtggagcagaatggtaggaccaaacaaacccattgatacaaataagtattttgtaatatgttcaaatgttttaggtggttgcataggatcaacaggtccaaaagaaataa

SEQ ID NO: 234128 - DNA, 361 bp, Unknown
  Bacterial polypeptide expressing nucleotide sequence isolated from the Sargasso Sea
agaaagttatttaagatatcagggctcagttttcgtagatagatttgatgcaaatagctatctttatattactagagctatggattattttgatttagctaagcaattcaatggtaatctttcagaagcatttaaaaaaacaaacgcgaaattttttataatttcatttacttcagattggctttatccaacccaagaaaataaagatattgtgattgctttaaactcaataggagctgatgttggatttgtagaaattgagtcagataaaggtcacgactcctttttattagatgttcctgatttcttaagtgcacttaaaaactttttagataaatcttacgaagaaaattacttatga

SEQ ID NO: 234129 - DNA, 1630 bp, Unknown
  Bacterial polypeptide expressing nucleotide sequence isolated from the Sargasso Sea
atggctaaaaagacattagtttttaatgaagtagcaagaaaaggacttgaagctggtgttaacaaactagcagatgttgtaaaggtaacactcggtccaaaaggtagaaacgtagttttagaaaaaaaatggggtgctccaacaatcacaaacgatggagtaacaattgcaaaagaagttgacctagaagatccatatgaaaacatgggtgctcagctagcaaaagaagttgcatctaaaacaaatgatgtagctggtgatggtacaacaactgctacagttcttgctcaagcaatggtaaatgaaggcatgaaagctgttgcaacaggagttaatcctatggaagtcaaaagaggcatgcttgaggcatcaaaggctgttacagactttattgcaggattttcaaagtctataggcggaaaagatgaaattgctcaagtagcatcaatatctgcagctgacagtgaaattggtgaaacaattgctgaagcaatggacaaagttggtaaggatggagttattactgttgaagaaggacagacctttggtatggagcttgaattcactgacggaatgcagtttgataaaggatttatatctccttattttgttacagatgctgataggcaagaagctgttttagaaaatccatatatcttgatcgtgaattcaaaaatcactgcagtaaatgatttacttccattacttgaaaaagtaatgaattcaggaaaaccacttttgattcttgctgaagatgttgaaggtgaagctttagcaacactagtagttaacaaactaagaggaacatttacctctgttgcagtaaaagctcctggatttggcgaaagaagaaaagcgatgttacaagatattgctattttgactggcggagaggtaatttctgaagaacttggtttaaagactgaaaacactaccgtagacatgcttggtgaagctgcaagagttgttgtgaaaaaagatgctacaactattgttgacggaaaaggcaagaaagctgatgttgatggcagagttaagcaaatacaagctgaaattgacgaatcagactctgactgggataaagaaaaacttcaagaaagattagctaaattatcaggcggagtagctgttgtaaaagtaggtgctgcaactgaagtagagcttaaagaaaaaaagatgagaattgaagatgcattagctgctaccagagctgctgttgaagaaggaatagttgctggtggtggtgtaacactaataagagcacaagagtcaatagataaaatttctggtggaacagagggagagatagttggaagaaatatagttcaaaaagctcttgaatctccactaagacaaatagcagtaaatgctggttatgaaggtggcgtaatggttgagaaagtcaagtctgaaaaaggtaatgtaggacttaatgcagcaactggtgaaactactgacctcgttaaagaaggtgtaattgatcctgcaaaagtaacaagatcaactgttcaaaatgcaacttcaatagcttcattggtattaactacagaagcattagttgcagaagagccagaagatgaaccaccaatgcctccaggcggaatgggcggcatgggaggtatgatgtaat

SEQ ID NO: 234130 - DNA, 517 bp, Unknown
  Bacterial polypeptide expressing nucleotide sequence isolated from the Sargasso Sea
tatgaactctgaaataaaaaatataaaaaaaataattgtcgatcaaactcttgagttggattgcggaaaaacaattaaaaattttcccatagcttacgagacttatggaactttaagtaaaaataaagacaatgcgatacttgcttgccatgctttgactggagatcaattttgcacaaatattaaccccataactaaaagagaaggctggtggacatttgcagtggggccggggaaggcaattgatactaataaatattttgtaatctgcgctaatgttttaggaggatgcatgggttcttatggacctaaagaaataaatcctgaaactaataaattatttggaacaacatttccagtaataacaataagagatatgatcagagctcaaaaacatttattagactatttgggcattaaaaaattactttctgtaataggtggatcaatgggcgggatgcaagttttgcagtttgccgctttatatccagaactatcacattctgctattccaata

SEQ ID NO: 234131 - DNA, 3040 bp, Unknown
  Bacterial polypeptide expressing nucleotide sequence isolated from the Sargasso Sea
aatgatcaacttggtcattgttctattcggtttgatatcggttaatcgaatctcgatagatcgttctcctgatatagatttttcactgatttcagtcacaacagttttgccaggtgccaatcctgatgtagttgattcgagcgtcacaaatatcattgagggtgcagtaaatagcatacctggaattgatgatgttcgatcgagatcagccccaggtgtatccaatgtttttatacaatttcttttagaaaaagacctcgatattgccttcaacgaagtccaatcaaaagtaggacaaatcaattctcaattacccgatgaagctgaaacaccaatcatcagcaaaatagaaaccggtgaaatacccattatctggctggctttgagaggtaatcgcacacttcaagatttgagtgtttatgcaaaaaatgttctcaaaagaaagctggaaaccattgatggtgtgggaagtattgttattgggggagagcaagagaggaatatccgagtcaatctagacttcgaccgaatgagcgcttttggcattactgtccaagatattattatggctttcagaaatgagcacatcaaactacctggtggttttttaattgataacagtaaagaggatttattaaagcttgatcttgaatcgcataatgttgaagaaatcgaggacatcattgtcacctatgatcgaaatcgtgcaataaagataaaagacattgccgaggtaaaagatgatgtcagagatctgaggagcatgggtcggtttaatggcgatccatcaatcggtattggtgtaactaaaatccgaggagaaaatacggtcgagatcattgagaaggtaaaagccaaaattaaatccgatattgagcctacattgccagctggaatgacgctcgatattggaacagatgacagcagttacatttatgaattaatcagtgggctaggacagaatatatttgttggattcattatcgcatcgcttattgttctcttatttctaagaagttattcaagcatggccattgtgagcatcaccataccagtctcactttttggtgcaattttcattatgtatgcatttggtctcacgcttaataccatgaccatgcttgcattgcttttgctcattgggattgttgtagatgatgccattgttgtgcttgaaaatgcacaaaggaatttaaatgaagacacgcctgaagagcgtatcagagcgagtatcactggtgccaatgaggttttcttaccaattgtttcatccacacttgtattggtggcattgttcactgttgttttttttatggaaggaattgcggcaagattttttagatcattcggtgttgtggtttctactggcgtccttgtttcaacttttgtggctttgacactcacgcctacacttgcttcaaaattcctaaaaaccaagaaagagtcaaatcgagtatttgatggcttcaatcggagattcaccatcattgaaaatcgttatcgagaaatgattgagtggtcactgaatgaaaagaaaaaagttttatcttacgccggtctttttgttttattgtcgtttgtcggatttacccaattgagtggtgggttttttcctgaggaagacgaaggccaatttacaatcaccgttaaaacacctgttggaacaggcattgactatacaaatgatcgattatcagtggtagagaacttgttggaggaatatgaagacattgaatcctatttcaccatcatgggttctggtattgaaagtcaggcagtgaatattggggtagtctatgtcaggcttacacccagtaatgttcgtggatataaacagtatgaaatcatccccatactcagagagagactgaataagattccaggaatcaaagcatttcctgcacctatgtcatttgcctctgggacaagaggtgaggctatgcaattcacagtttcaggaccagatcttaatatcctcaatgaatccatcaatgctttcctcagcaagcttgctgaaacaccagaactgggagatgttgactcaagcatcgaattaaatctgccccaagtgaacttggaaataaaaagagaactagcttcagaaatgggcttatcaacaaggttaattgctgaggctgcaaatatcttcgcaggaggtattgatgtagctcgcttcaatgacgcagttggtgatggagagaggtacaaagtgaggctaaagggtcaatatgatatgtccattgatgatttggataagatctatctcagaaccccatcaaaagaattggttcgacttgatacagttgcaacctttaaagaaacagttggcccatcagaaataaccaggttggatagaatgtacagcgcatatttctatagtgatcccacaacatctttgagtaatgcaattcagctgattgaagatgctgcagctgaaacacttcctgtgggctatgaagtcggcttctttgctagagcaaaagagtttaaaagaaccagtaatcagatgctttttgcatttcttaccggcctaatcttggtttatatggttcttgccagtcaatttaactcatttagacaaccattgattgtgatgatctcacagccactagctgtcattggaggaacatttggaatctggatagttggatcagatcttaatatattttcgatgaccgggcttgttttactgactgggcttgtggcaaaaaattcgatcctattgattgatcgaaccaaccaagaaagacaaaaaggcttggaaattgatgaagccttattgaatgcatgcccgaggagactcagacccattttaatgacatcactgacattaatacttgccatgatgatgcccgctctcggaattggttctggtgttgaattgagtcaaccactggctattgcgattgtgggaggaatgatcagttctacattcttaacattggtgatcgtaccaatcatttactcctctgctgagaaaagaaagcttaggaaaagactttataatctagaaagaagtgcttctaactcaaatacgtga

SEQ ID NO: 234132 - DNA, 573 bp, Unknown
  Bacterial polypeptide expressing nucleotide sequence isolated from the Sargasso Sea
gttctcaaaatattgctttgaatgaggttgagagagaagttataaggaaagatagtgattttcatgatggaaagtatcttgagttcaataaatctccagtcaaaggcctcaaggctgcaaggatgcttggtcatataacttatttatctgctaaaaatatggatcagcgctttggaagaaagttacaagatactgattccaaaatagctgaagatattgattttgaaattgagaactaccttcagtataagggaggaaaatttgcgaaatcatttgatgcgaattcatatattcttttaacaaaagttatggataaatttgacattgctcatggatatggagacagtcttgagactgctcttgggaacatttctgccgaagttctggttgtatcatttgcctcagattggatgttccctacaagcaatggaaaagagatttgcttggcatccatcaaagcgaataaaaaatgttcatatgttgaattagaaggagagcacggtcatgacagcttcctttatccaaatgaagattaccaaaatgctataaaaaactttatcgaatcaaaatgaa

SEQ ID NO: 234133 - DNA, 412 bp, Unknown
  Bacterial polypeptide expressing nucleotide sequence isolated from the Sargasso Sea
aagaaagttacaagaaagagaagatcttaaatttggatttgatgctgattttcaaatagaaagttatttaagatatcagggctcagttttcgtagatagatttgatgcaaatagttatctttatatcactagagctatggattattttgatttagcaaagcaattcaatggtaatctttcagaagcatttaaaaatacaaatgcgaaattttttataatttcatttacttcagattggctttatccaacccaagaaaacaaagatattgtgattgctttaaactcaataggtgctgatgttggatttgtagaaattgaatcagataaaggtcatgactcctttttactagacgttcctgatttcttaagtgcacttaaaaactttttagataaatcttacgaagaaaattaa

SEQ ID NO: 234134 - DNA, 387 bp, Unknown
  Bacterial polypeptide expressing nucleotide sequence isolated from the Sargasso Sea
acgctgactttcaaattgagagttatttaagatatcaaggctctgtttttgtagatagatttgatgcaaatagttacttatatattactagagcaatggactactttgatttaactaaacaacatggtggtaatctttctaaagcttttaaagaaagtaagacaaaattttttattatttcatttacttcagattggttatatccaacctctgaaaataaagatattgtaattgcactaaatgctataggagctgatgttggttttgtagaaattaaaactgacaaaggccatgactcatttttattagatgtgccagattttttaagcactataaaaaactacttaaacactacatatttaaacattaatgaaagaagaatttaaa

SEQ ID NO: 234135 - DNA, 703 bp, Unknown
  Bacterial polypeptide expressing nucleotide sequence isolated from the Sargasso Sea
atgaacaaaattgataatttaaaaaaatatatagttaaagataagttaaagttagattgtggtaaagaaatatcaaattttcctatagcttatgaaacttttggtaagttaaatgagggtagaaataatggtattttaatatttcatgctttaacaggagaccagtttccacacgggataaatcctataacaaacaaagaaggttggtggaattatgcacttggaccaaacaaagctattgatacaaataaattttttgtgattagtgccaacgttatcggaggatgcatgggatcatttggaccttctagcattgatccttctacaaacataccgtatggatctaactttcctgttattacgattaatgacatggtaaacgcgcaaaattttctgttagatcattttaaaatcaaaaaattatttgcagtcataggtgggtctatgggtggtatgcaagttctacaattcgtttctaattttccaaataaagcggatgtagcaataccaattgcttgtaccgcaagtcattcagcgcagaacatagcattgaatgagttaggtagacaggcaattatggctgataaagaatgggataaaggtaaatatttggaaaatggaaaatctccatctaaaggtttagctgttgcgcgaatggcagcccacataacttatttatctaaaaaaaggtttgcaggaaaaa

SEQ ID NO: 234136 - DNA, 301 bp, Unknown
  Bacterial polypeptide expressing nucleotide sequence isolated from the Sargasso Sea
gatgtcagaaaacttaggaattattgaaccaaacttctttgattacaaagaagactttcatcttgaatctggaaagcttttgaaagggtttaagattatttatgaaacctatggatctctaaatgaaaacaaatccaatgcgattcttatctgtcacgctctgagtggaaatcaccatgctgctggatattccaaggaggatcaagataaagccggctggtggaatgagttaatcggtcctgacaaggccttcgatactaataagtattttgttgtgtctctcaataacctttggtggatg

SEQ ID NO: 234137 - DNA, 499 bp, Unknown
  Bacterial polypeptide expressing nucleotide sequence isolated from the Sargasso Sea
tgaaagaggattatctgtagctagaatgatagctcatataacttacttgtcagaagatgctatgcatagaaagttttgtagaaagcttcaatcaagagacattatttcatttggttttgatgcagattttcaaattgaaagttatttacgttatcaaggtaggtcatttgtagaaagatttgatgcaaattcatatttgtatttaacaagagcaatggattattttgatcattctgaaagctatagaaaaacacttgagtttgttaataatccaaaaaatcatataaaatatcttgtaatatcgttcacatccgattggctgtttcctactaaagagaataaagaaatagttgaaattttaaatagtttatcaaaaaatgtaagctttttagaaattgatacagataaaggtcatgatagtttcttgctagatgagccagaacttgattatgtgatcaaaggttttattgagagcaactacggaaaaataaatgaataa

SEQ ID NO: 234138 - DNA, 415 bp, Unknown
  Bacterial polypeptide expressing nucleotide sequence isolated from the Sargasso Sea
gaaagagatgatttaaagtttggtttcgatgcagattttcaaattgaaagctatcttagacatcaaggttctgtttttgtagatagatttgatgcaaatagttatctttatataacaagagctatggattattttgatctttcaaaacagtttgatggaaatctttcaaaggcatttgaaaaaactaatactaaattttttattatatcttttacttcagattggctatatccgacatctgaaaatagagagatagttattgcactaaattctattggaaaaaatgttgggtttgcagaaataacatctgataaaggtcatgactcatttctattagaggttcctgattttcttaatactataaaaaattttttaaacacatcatataataaactgaatgaaaaaagaatttaat

SEQ ID NO: 234139 - DNA, 626 bp, Unknown
  Bacterial polypeptide expressing nucleotide sequence isolated from the Sargasso Sea
ttccgataaagttaaaaaagtagcaataattgcagcctcatcaaaaattagtactcaaaatattgcactaaatgaagtggctagggaaataattagaaaagatgaaaatttccataatggcgattacttatctaaggatgtatctcctaaaaaaggtcttaaagctgcaagaatgcttgggcatataacttatttatctgaatctaacatgcgaaaaagatttggaaggagattacaagatccagagaataaaatagatgcagatgtaaactatgaggtagaaaattatcttcagtacaaaggcgagcaatttgccaacacctttgatgcgaatagctatatcctgatgactaaagccatggatagttttgatccagctaaagatttcgacaatgatttagttaaatgtcttaaaaccattcaagctaaattacttattatatcttttgactcagactggctatttccaaaagagtatggggtagaaatccaaatgtctgcaattaaagcaggcattaatagctcatacatagaactagaaggtgattatggtcatgatagttttcttttttattccgaacagtattctgccgcgctgaaaaacttcttaaactctaatggataat

SEQ ID NO: 234140 - DNA, 525 bp, Unknown
  Bacterial polypeptide expressing nucleotide sequence isolated from the Sargasso Sea
tatgaataatattgaaattactgatgataataatttaaaatgtcgctttgccatttttaaaaatacaaatttaaaacttacatctggtgaagttttaaagaattttaaattagcttttaaaacatttgggtcgctgaatgaaaataaaacaaatgcaatattaatttgtcatgccttaacaggagatcaatacgttacaggaaataacccaataactggcaaagacggttggtgggcaagaatggttggtccagacaaacctattgatacaaataagttttttgtgatttgttcaaatgtacttgggggttgcgcaggttcaacaggtccaaaagaaaaaaatactaacgaccaagatatttatggagcagattttccatcagtgaccataaaggatatggttaatgctcagtcaaaattattggatgtattacaaattgatcaattatttagtgtggttggaggatcaatgggagcaatgcaagcattacaatggtcaattgattttcctgataaaattaaatc

SEQ ID NO: 234141 - DNA, 1630 bp, Unknown
  Bacterial polypeptide expressing nucleotide sequence isolated from the Sargasso Sea
atggctaaaaagacattagtttttaatgaagtagcaagaaaaggactcgaggctggcgtaaacaagcttgcagatgtagtaaaagttacattaggccctaagggaagaaatgttgtccttgaaaaaaaatggggtgcaccaacaattacaaatgatggtgtgactattgcaaaggaagtagatttagaagatccatatgagaacatgggtgcacaactcgcaaaagaagttgcctcaaaaacaaatgatgttgctggtgacggaactactactgctacagttttagcacaagcaatggtcaacgaaggtatgaaagctgttgctacaggtgttaatccaatggaagttaaaagaggaatgcttgaagcatcaaaatctgtaacagactttattgcaggattttcaaaatcaattggtggcaaagatgagattgctcaagtagcttctatatctgcagctgacacagagattggcgaaacgattgcaggagcaatggacaaagttggaaaagatggagtcataactgtagaagaaggacagacctttggaatggaacttgagttcacagatggtatgcaatttgataagggttttatatctccttattttgttactgatgctgatagacaggaagcagttttagagaatccatacattcttattgttaattcaaaaattactgcagtcaatgatttattaccattactcgaaaaagtaatgaattcaggtaaaccattattgattttggccgaagatgtagaaggtgaagcgttagcaactttagttgtaaataacctaagaggaacatttaaatcagtagctgtaaaagctccaggatttggcgaaagaagaaaagcaatgcttcaagacattgcaatccttactggtggtgaagttatttctgaagagcttggcttaaagactgaaaacacaactgttgatatgcttggtgaagcagcaagagtagtagtaaaaaaagatgctacaacaattgttgacggaaaaggcaaaaaagctgatgtagaaggtagggtaaagcagatccaagctgaaatcgatgaatctgattcagactgggacaaagaaaaacttcaggaaagacttgcaaaactctctggtggagttgccgttgtaaaagtaggtgcagcaactgaagttgagctaaaagaaaagaaaatgagaattgaagatgccttagctgctacaagagctgctgtcgaagaggggattgtagctggtggtggtgtcactcttattagagcacaagactctattgataaaatttcaggtggttctgagggagaagtcgttggcagaaatattgtcaaaaaagctcttgaagctccattacgccagattgcaatcaatgctggttatgaaggtggtgttatggttgaaaaagttaagtctgaaaaaggtaatgttggacttaatgctgctactggagatacaacagacctcgtcaaagagggagttattgacccagcaaaagtgactagatcaactgttcaaaatgcaacatctattgcttcactagtattaacaactgaggctttagttgcagaagagccagaagatgaacctgcaatgccagctggaggaatgggtggcatggaaggcatgatgtaat

SEQ ID NO: 234142 - DNA, 481 bp, Unknown
  Bacterial polypeptide expressing nucleotide sequence isolated from the Sargasso Sea
ggtgggtcacataagttatttatccgaaaaaggtatgcaggaaaaatttggaagaaaattacaagaaaaggcagattatgaatttagttttaatgctgacttccaggttgaaagctatttgagacatcaaggctatgcatttgttgaaaggtttgatgctaactcagtactatatataaccagagcgatggattattttgatctttcaaaacaatttaaaggaggtttagtagaagcatttaaaaatcaaaaaacaaaattcttaataatatcattttcctctgattggctttacacaacaaaagataacaaagatatagtaatagcattaaatgcatcgggtgcagatgtttcatattctgagataattacagacaagggacatgattcttttttacttgatgaacctgaatttttaaaaacactaaaaggttttgtagactctatgtatgaaaaatttaaaaatgaaaaaagaatttaa

SEQ ID NO: 234143 - DNA, 535 bp, Unknown
  Bacterial polypeptide expressing nucleotide sequence isolated from the Sargasso Sea
tgaaaagtatttaaaaaaaatatttcacccaaaaaatgggttagcagtagctagaatggttggacatataagttatttatctaagaaaggtatgcaagagaaatttggtagaaaacttcaggaaaaagctgactacgaatttagttttgatgctgactttcaagttgaaagctatcttagacatcaaggatttgcttttgttgaaagattcgatgcgaattcaattttgtatattaccagagcaatggactattttgatctttctaggcaatttaaaggtggattagtagatgcttttaaaaatcaaaaaacaaaatttctaattatatctttttcatctgattggctttatacaacaaaggaaaataaagatactgtaattgctctaaactcagctggagccgatgtttcttttgctgaaattaaaacagataaagggcacgactcctttttggtaaatgagcctgaatttcttaaaactttaaagggctttatagattcaatgcatattaaatttaaaaatgaaaaaaaatga

SEQ ID NO: 234144 - DNA, 1919 bp, Unknown
  Bacterial polypeptide expressing nucleotide sequence isolated from the Sargasso Sea
gagcttacctgagatatctgttagacgctttgttttcgctgtaatgatcaacttagtcattgttctctttggtcttatatcagttaatcggatctcaatagatcgttctcctgatatagatttttcattgatctcagtcacaacagttttgccgggtgctaatcccgatgtagttgattcgagtgttacaaatatcattgagggtgcagtaaatagcatacctggaattgatgatgttcgatcgagatcagcgcctggagtatcaaatgtttttatacaatttcttttagaaaaagatcttgatattgccttcaatgaagtccaatcaaaagtaggacaaatcaattctcaattacctgatgatgctgaaactccaatcatcagcaaaattgaaactggcgaaatacccattatctggctggctttgagaggcaatcgcacacttcaagatttaagtgtttatgcaaaaaatgttctcaaaagaaagctggaaaccattgatggtgtgggaagtattgttattgggggagagcaagagaggaatattcgagtcaatctggattttaatcgaatgagtgcttttggcatcactgtccaagatatcgtagtggcattcagaaatgagcacatcaaactacctggtggtttcctcattgataacagtaaagaggatttattaaagcttgatcttgaatcgcataatgttgaagaaatcgaaaacatcattgtcacttatgatcgaaatcgtgcaataaagataaaagacattgctgaggtaaaagatgatgtcagagatctgaggagcataggtcggttcaatggtgatccgtcaatcggaatcggagtaaccaaaatccgtggggaaaatacggtcgagatcattgagaaggtaaaagccaaaattaaatctgacattgagccaacattaccagctggaataacactcgatatcggaacagatgacagcagttacatctatgaattaatcagtgggcttgggcagaacatatttgttggattcattatcgcatcactgattgttctcttgtttttaagaagttattcaagcatggccattgtgagtatcaccataccagtctcactttttggtgcaattttcattatgtatgcatttggtctcacacttaataccatgacgatgctcgcgttgctattactcattgggattgttgtagatgatgccattgttgtgcttgagaatgcacaaaggaatttaaataaagacacgcctgaagagcgtatcagagcaagcatcattggtgccaatgaggtcttcttaccaattgtttcatccacccttgtgttggtggcattgttcacggttgttttttttatggaaggaattgcagcaagatttttcagatcattcggggttgtggtttccactggcgtccttgtttcaacttttgtggctttgacgctcacgcctacacttgcttcaaaattccttaaaaccaagaaagagtcaaatcgagtatttgatggctttaatcggagattcactgtcattgaaaatcgttatcgagaaatgattgagtggtcactgaatgaaaagaaaaaagttttatcttacgccggtctttttgttttattgtcgtttgtcggatttacccaattgagtggtgggttttttcctgaggaagacgaaggccaatttacaatcaccgttaaaacacctgttggaacaggcattgactatacaaatgatcgattatcagtggtagagaacttgttggaggaatatgaagacattgaatcctatttcaccatcatgggttctggtattgaaagtcaggcagtgaatattggggtagtctatgtcaggcttacacccagtaatgttcgaggatataaacagtatgaaatcatccccatactcagagagagactgaataaga

SEQ ID NO: 234145 - DNA, 634 bp, Unknown
  Bacterial polypeptide expressing nucleotide sequence isolated from the Sargasso Sea
actgaattgcgagcgcttaaaaaaaaccgctaaaaatagttttttttctcacaattcaaatattagctttgatatgaatactaataataatattaaaaccttgatagtaaaaaaaccattaaagttagattgtggaaaaactattaatgaattcccaatagcatacgaaacttatggttcattaaataaaaaaaaagataacgctattttggtttttcatgcattaactggagatcaatttgtcactggcctaaatccaataacaaagaaagatggttggtggtcttatgcagttggtcctgataaagcaatcgatactaaaaaatattttgttatttgtgcaaatgtaatgggcggatgcatgggctcatttgggccaagccatgaagaccctaatactgggactgcttttggtacaaattttccagttataaccataaacgatatggtaaatgcgcaatacaatttgcttgaccattttggtatagacaaacttttttcaattgcaggtggctcaatgggtggtatgcaagtactacagtttataagtaattttcctgataaagctaaaactgttattccgattgcatgtacttctagtcactcagcacaaaatattgcatttaatgaatta

SEQ ID NO: 234146 - DNA, 682 bp, Unknown
  Bacterial polypeptide expressing nucleotide sequence isolated from the Sargasso Sea
ttccgtaattggtggttctatgggtggtatgcaagctcttgaatgggctgcctcctaccctgaaagattgaaatcagctattccaatagctacttcctctagacatactgctcaaaatattgcctttcatgaattaggtcgtcaggcaataatggccgatgtaaattggaattccggaaattataaagataaaaatactaatccttcaaaaggcctttcaattgcgaggatgacagctcatgttacttatttatctgaagcttcactaacaaagaaatttggtagaaaattacaggataaaacagatcttggttttggttttgatgctgattttcaaattgagagttatttaagacatcaaggtcatacatttgttgatagatttgatgccaactcctatttatacataacaagggcaatggattactttgacttagaaaaaacccataaaaagtctcttacagaaatatatgctaatactaatttaaaattcctaattgtatcatttactggagattggctttatccaacatctgaaaacttaatgatagttagggctctcagcgcaggtggagttgatgtaagttttgttgaaattgactccgataaaggtcatgatgcatttttattagatgagccagaatttgatgtttgtctggatggatttcttaaatcattatga

SEQ ID NO: 234147 - DNA, 736 bp, Unknown
  Bacterial polypeptide expressing nucleotide sequence isolated from the Sargasso Sea
atgaatacagaaaaaaatattaagacattaattgtaaaaaaaccccttaaattagattgtggtaaaactataaacaattttccagttgcattcgaaacttatggttctttaaatgagaataaagacaacgctatattagtatttcatgcactaactggagatcaatttgtaactggtttaaaccctattactaaaaaagatggttggtggagttttgctgtaggtccagacaaagcaatagataccaataaatattttgttatttgttcaaatgtaattggcggatgcatgggatcttatggaccaagtcataaagatcctgaaacacaaaaaacttttgggactgattttccagttattacaattaatgacatggtgaatgcacaatataatttacttgaacattttgaaattcataaactatttgcaattactggaggttctatgggaggtatgcaagttcttcaatttatcaccaactttcctgataaagctaaaactgttatacccattgccacaacttcgagtcattcggcacagaatattgctttcaatgaattaggaagacaggcaatcactgctgacagcaattggaaagatggaaattatgaaactaataacacaaatccaggtaaagggcttgctgttgcaagaatggcagctcatataacttatctctcaaaaaaaggtttgcaggaaaaatttggaagaaaaagcaagaaagagaagatttgaa

SEQ ID NO: 234148 - DNA, 709 bp, Unknown
  Bacterial polypeptide expressing nucleotide sequence isolated from the Sargasso Sea
atgaaatcaataacaaagcttattaattttactgaaggcatagctttagagtcaggtaaaagacttgattcatttgatttaatggtggaaacctatggggagcttaatgaatctaaaaccaatgctattcttctatgtcacgccttttctggcaatcatcatgccgctggtaaaaatgaagatcggggtattggttggtgggatcaaattgttggaccaagtaaagcaatagatacagacgaatattatgttgtttgttgcaataatattggtggatgctctgggtcctctggtccaacaagtatcaatcctaatactaataaagcatatggaagtgacttcccaatagtcagtgttagtgattgggtaaatactcaaaaaatgcttatggataaattagatattccacattggcattttgttgccggaggaagtttgggtgggatgcaagcccttcaatggtctattgcttatccagacaaaataaaaaaagcaggaatttttgctgctgcagccaaatcaagcacacaaaatattgcaatgaacgaagtagcaagagaatcaataagaaaagataaaaatttccacaatggaaactatattgagcaaaatgttattccaaaaaatggaattaaaactgcaaggatgctaggccatataacatatctttcggaaaagcatatggatcttaggtttggtagaaaattca

SEQ ID NO: 234149 - DNA, 477 bp, Unknown
  Bacterial polypeptide expressing nucleotide sequence isolated from the Sargasso Sea
tggctgctcatattacctatttatctaaaaaggggcttcaagaaaaatttggtaggaatctccaggaaagagatgatcttaaatttggatttgatgctgattttcaaatagaaagttatttacgctatcaaggttcagtatttgtagatagatttgatgctaacagttatctttatataactagagcaatggattattttgatttggttaaacaatttgatggcaatctatcaaacgccttcaaaaaaactaaaactaaattttttattatgtcttttacatcagattggctttatccaactcaagagaataaggatatagttattgctttaaacgcaattggtgcaaatgtaggttttgttgaaatagattctgataaagggcatgactcttttttactagaagttccagattttttaaatgcactcaaaaattttttagataaatcttatacagaaagtaataatgaaaactgaa

SEQ ID NO: 234150 - DNA, 871 bp, Unknown
  Bacterial polypeptide expressing nucleotide sequence isolated from the Sargasso Sea
taaggccatagatactaacaattattatgtggtttgctgcaataatcttggtgggtgttctggatcatcagggccaacaagtatcaatccagacacaagtgaggttttcggaaaagattttccacaggtatctgtaaaagattgggtgaaatctcaaaaaatgctttctgatcacctaggtatagataaatgggaattagttttaggtggaagtttaggtggtatgcaagctctccaatgggcaatttcgtatcctcaatccctaaaaaaagcaggtatatttgctgctgcggcaaaatcaagcacacaaaacatagctatgaatgaagtagctcgggaatcaattagaaaagatcaagattttcataatggtgactatatcaagcacaatacaaagccaaaaaatggattaaaagctgcaagaatgctcgggcatatcacatatttatctgaagaacatatgaatattaggtttggaagaaaatttcaagatgttaattcaagagtagctggagaagtcgattacgaagttgaaaattatttacaatacaaaggagaaaaattttctgatatttttgatgcaaattcttatatattaatgacaaaggcaatggatgattacgatgcatcatctgatgcagatggtaaattagaaaaagcattagcagcaattgaagcaaaattattaattattggctttgactcagactggctttatcctccttcgcgaggaaaagaaattcaaatggctgcaatgaaaaataacattgcttcatcttatatttgtttagatggtgctcaaggtcacgatagttttctatttgccacagaaaaatacacaaaaattattaaaacattcctggaatcataa

SEQ ID NO: 234151 - DNA, 466 bp, Unknown
  Bacterial polypeptide expressing nucleotide sequence isolated from the Sargasso Sea
aatggcagctcatattacttatttatctaaaaaaggtttgcaggaaaaatttggaagaaagttacaagaaagagaagatcttaaatttggatttgacgctgattttcaaatagaaagttatttaagatatcagggctcagttttcgtagatagatttgatgcaaatagttatctttatattactagagctatggattattttgatttagctaagcaattcaatggtaatctttcagaagcatttataaatacaaacgcgaaattttttataatttcttttacttcagattggctttatccgacccaagaaaacaaagatattgtgattgctttaaactcaataggagctgatgttggatttgtagaaattgagtcagataaaggtcacgactcctttttactagacgttcctgatttcttgagtgcacttaaaaactttttagataaatcttacgaagaaaattaa

SEQ ID NO: 234152 - DNA, 676 bp, Unknown
  Bacterial polypeptide expressing nucleotide sequence isolated from the Sargasso Sea
atgattgtaaagacaaaaaaaatacttattgattcaaaattagaatgtgcttcgggagaggctcttgaaagctttgagttgatgaccgatttttatggagagctaaatgaaaaaaaagataatgcagtccttgtatgtcacgcattctctggaagtcatcatgctgcaggtaaaaggggtgatagtgtcggttggtggaatgagttcattgggcctgataaaacaatagatacgaatcgtttctttgtagtctctataaataatcttggaagttgttttggatctagtggtccacttggtgaggataaaaatggagaaaaatttaataatgactttcctcagttagagattattgattgggttgagtctcaaaaaatgcttgcagataaattaggtatagaaaagtggcatttagtcattggtggcagtttaggtggaatgcagtcgctccagtgggctgtaagttatcctaaaatggtaaaaaaagttggcattcttgctgcggcagcgaaaacaagctctcaaaatattgctttgaatgaagttgagagagaaattataaggaaagatgaagattatcatgatggaaaatatcttgattttaataagtctccagttaagggtctaaaagctgcgaggatgcttggccacataacttatttatctgctaaaaata

SEQ ID NO: 234153 - DNA, 736 bp, Unknown
  Bacterial polypeptide expressing nucleotide sequence isolated from the Sargasso Sea
tatttaattgatcatttagaaataaaaaaattattttcagtggttggtggttcaatgggagcaatgcaggcacttcaatggtcaatagattatcctgatcgtatagaaacaatgattcatattgctggtgctttaaagcactcagctcaaaatatagcatttcatgaagtaggaagacaagcaataatgaatgactcaaattggcaaaaaggagattaccaaagtaaaaatttagttcctgaaagaggtctttcagtagcgcgaatgattgctcacattacttatttatccgatgatgctatgcaccgtaaatttggtcggaaacttcaatctagagacattatttcatttggttttgatgcagattttcaaatagaaagctatcttagatatcaaggaaaatcttttgttgatagattcgatgcaaattcatatttatatctaaccagagctatggattactttgaccatgcagaatcatatgaaaaatcaatagagtttgcacaaatacctaatagccatattaaacatttaattgtttcttttacttctgattggttatttccaacaatcgaaaataaagcaatagttgaaactttaaatagtttttcaaaacaggttagttttattgagattgaaacagataaaggtcatgatagctttttattaaatgaaccaagtttagattttgttataaagggatttttagaaaataacttaaataaattagtatgaa

SEQ ID NO: 234154 - DNA, 823 bp, Unknown
  Bacterial polypeptide expressing nucleotide sequence isolated from the Sargasso Sea
atgaatataaaacttgagaatataaagaaattagatgttgctaaaccgcttaaactagactgcggaaaaactattaaagattttcctatcgcttacgagacttatggaaaattgaatgataacaaagacaacgcaatcctagtatttcatgcattaactggagatcagttcgtgacaggaactaatcctattactaataaagaaggttggtgggttactgcagtagggcctggtagagcaatagatacaaataaatattttgttatttgtgcaaatgtaatcggaggatgtatgggttcatttggtcctaaagatattaacccagtaacaaaaaaaccttatggattggattttccagttataacgattaaagatatggtaaaagctcaggagtccttacttgaacatctaggaattaaaaaacttttatgcgcgactgggggttcaatgggtggaatgcaacttttacaattttgtgcaacatttccggataaagctttttcagcggtgccgatagcctgtagctctagccatagcgctcaaaatattgctcttaatgaattagctcgtcaagcaattatggcagatcctgtatgggataatggaaggtatgttttgaaaaattctcaaccaaaaaatggtttggctgtagcaagaatggttggtcacattagctacttatcagaaaaaggtatgcaggaaaaatttggtagaaaattacaagagaaggcagattatgaatttagttttaatgctgacttccaggttgaaagttatttaagacatcaaggctatgcattcgttgaaagatttgatgctaatt

SEQ ID NO: 234155 - DNA, 915 bp, Unknown
  Bacterial polypeptide expressing nucleotide sequence isolated from the Sargasso Sea
aatgacagatttttatggggagctaaataagaaaaaagataatgcagtacttgtatgtcatgcattctctggaagtcatcatgctgcaggaaaaagggatagcaacattggttggtgggatgagttcattggtccagataaaacaatagatacaaatcgtttctttgtgatctccataaacaatcttggcagttgctttggttctagtggcccccttagtaaagataaaaatggagagaggtttaataataattttcctcagttagaagttattgattgggttgagtctcaaaaaatgcttgccgataagttgggtataaaaaagtggcatttagtcataggtggaagtttgggtgggatgcaatcgcttcagtgggctgttagttatcctaaaatggtaaaaaaagttggtattcttgccgctgcagccaagacaagctctcaaaatattgctttgaatgaagttgagagagaggttattaagaaagatagtgattttcatgacggaaaatatctcgaatttaataaatcgccaattaaaggcctgaaagctgcgagaatgcttggtcatataacttatttgtccgctaaaaatatggatcagcgctttggaagaaagttacaaagtactggttccaaaatagctgaagatgttaattttgaaattgagaactaccttcagtataagggaggaaagtttgcagaattatttgatgctaattcatacattcttttaacaaaagttatggataaatttgatattgctcatggatatgaagacagtcttgaggccgctcttgaaaacgtttctgcagaaatgctggtcgtatcatttacctcagattggatgttcccagctagcaatggaaaggagataatgttggcatccattaagcgaataaaaaatgttcatat

SEQ ID NO: 234156 - DNA, 717 bp, Unknown
  Bacterial polypeptide expressing nucleotide sequence isolated from the Sargasso Sea
aattattttgcgtaacgggaggatctatgggtggaatgcaagtcttacaatttgtggctaactatcctaatgcagcccaaacagctgtgccaatagcgtgtacttctaatcactcagcacaaaatattggtctaaatgaacttggaagacaagctattatggccgatgccaactggcaaaatggaaggtatgaggaaactaaatcttcaccagataaaggtttgtctgttgcgagaatggctgcacatataacatatttatctaaagatgctcttcaagaaaaatttggaagaaagttacaagaaagagatgatttaaaatttagttttgacgctgattttcaaattgaaagttatttgagacatcaaggatcagttttcgttgatagatttgatgcaaatagctatctatatattactagggcaatggattattttgatttaaataaaaaatttggaggaaatctttcgaaggcatttgaaaaaagtaaaacaaaattctttataatttcatttacttcagactggctttatccatcatctgaaaataaggaaattgttatagccttaaattcaattggagcagatgtcggctatgttgagattgactcagataaaggtcatgactcatttttattagatgttccagattttcttcaagctttaggaaactttttaaataaatcatatgaaagattaaatgaaaaaggaatttaga

SEQ ID NO: 234157 - DNA, 535 bp, Unknown
  Bacterial polypeptide expressing nucleotide sequence isolated from the Sargasso Sea
atggctgacccaaattggaaaaaagaaaattcttctcctgataaaggtttagctgtagcaagaatggctgcacatattacttatctatctaaaaaaggattggaagaaaaatttggaagaaaactccaagataagggaagtttaaagttcagcttcgatgctgattttcaaatagaaagttatttgcgttatcaaggtgccacttttgttgatagatttgatgcaaatagctatttatatatcactagagcaatggattattttgatttggaaaaacaattcaagggtaatttatctcatgcttttaaaaataataaatcaaaattttgtataatatctttctcctctgattggctttatccaacgactgaaaataaagatatagtcatagctttaaatgcctgtggggcaaatgtacgttttgtggaggtcaattctgataaaggtcatgattcttttttattagatgttccagaatttttaaacacattaggtcaatttatcagttcaacttataatgaaataaaaaaatgaa

SEQ ID NO: 234158 - DNA, 880 bp, Unknown
  Bacterial polypeptide expressing nucleotide sequence isolated from the Sargasso Sea
taatcctattactaataaagagggttggtggattactgcagtggggcctgggagagcaatagatacaaataaatattttgttatttgtgcaaatgtgatcggaggatgtatgggttcgttaggccctaaaaatattaatccaataacaaaaaaaccttacggattagattttccagttataacaattaaagatatggtaaaagctcaggagtccttacttgaacattttggaattaaaaaacttttatgtgcgactggaggttcaatgggtggaatgcaacttttacaattttgtgcaacatttccggataaagctttttcagctgtgccaatagcctgtagctcgagccatagcgctcaaaatattgctcttaatgaattagctcgtcaagcaattatggcagatcctgtatgggataatggaaattatgttttgaaaaatgttcaaccaaaaaatggcttagcagttgcaagaatggttgggcatataagttatttatctgaaaaaggtatgcaggaaaaatttggtagaaaattacaagaaaaggcggattatgaatttagttttaatgctgacttccaggttgaaagttatttaaggcatcaaggttatgcatttgttgaaagatttgatgcaaattcagtactttatataacaagagcgatggattattttgatctttcaaaacaatttaaaggaggtttggtagaggcatttaaaaatcaaaaaacaaaatttttaatcatatcattttcctctgattggctttacacaacaaaagataacaaagatatagtaatagcattaaatgcgtcaggtgcagatgtctcttactctgagataattaaagaaaaaggacatgactcttttttacttgag

SEQ ID NO: 234159 - DNA, 622 bp, Unknown
  Bacterial polypeptide expressing nucleotide sequence isolated from the Sargasso Sea
atggataattttgttaaaatagaagaaaatgaaaaattaaaatgtagtgttgcacattttaataatgctaattttacattagattcaggttataaatttaatgattttaaaatagcatttaaaacatatggaaagataaataaggataaatctaatgtagttttaatatgtcatgcattaacaggggatcagcatgtagcaagtaaaaatcccattactaataaggatgggtggtggagcaaaatagttggacccaataaaccaatagatacaaatagtttatttgttatctgttcaaatgttcttggaggatgcttgggatcaacaggacctaaagaaaataattcagaaacaaacaatcaatatggaactgattttccatctataacaataggagatatagttaaggcacaaaaatatttattagatgctcttaaaattgataaaatttttgctgtcatagggggttcgatgggagctatgcaagttttacaatggactattgattttccagaaaaagttttaaacgcaatacatattgctggagctctaaagcattctgctcaaaatattgcttttcatgaagttggcagacaagctataatgaatgatccggctggaa

SEQ ID NO: 234160 - DNA, 969 bp, Unknown
  Bacterial polypeptide expressing nucleotide sequence isolated from the Sargasso Sea
attaatgagaaaaaagacaatgcaatattagccttccatgcactgtctggagatcagtttgtaactggaacaaatccaataacaaacaagtctggttggtggtcgtatttagttggtcctaataaagcagtagatacaaataaattttttgtaatatgtgcaaatgtaattggtggatgcatgggttcttatggtcctagtagtattgacataaaaacaaacaaaaaaattggcacaaattttccaataataacaattaacgatatggttaatgctcaatacaatttattaaatttctttaaaatagataagttgtttagtgtaatgggtggatcaatgggaggaatgcaagttttacaatttgttgcaaattatcctgataaaacaagaactgcaattcctatagcttgtacggccagtcactctgcgcaaaatattgctctaaacgaattaggtagacaagcaataatggctgatagtaattggcaaaagggagattatcttaatttaaaaaattccccagacaaaggtttgtctgttgcaagaatggctgctcatatcacatacctttcacaaaaaggtttacaagaaaaatttggaagaaaactacaagaaagagatgatttaaaatttagttttgatgcagactttcaaattgaaagttatctaagacatcagggttcagcatttgttgatagatttgacgcaaatagttatctttatataactagagcaatggactattttgatttaacaaaacaatataaagaaaatcttgcagatgcttttaaagataccaacgtaaaattttttgtaatttcttttacttctgattggctttatccaacatctgaaaataaagaaattgttattgctttaaatgcagcaggcgcagatgttggtttcattgaagttacaagtgataaaggacacgattcatttttgctagatgttccagatttttttaaa

SEQ ID NO: 234161 - DNA, 848 bp, Unknown
  Bacterial polypeptide expressing nucleotide sequence isolated from the Sargasso Sea
tattaaaaaattaaacatatcaaaacctcttttgctagactgtaaacaaaccgttaaagatttttctttggcatatgagacttatggaaaactaaatgaatccaaagataatgctattttggtttttcatgctcttacgggcgatcagtttgtgagcggaataaatccgataacaaaaaaagaaggttggtgggtaacagctgtaggacccgataaagccattgatacaaataaatattttgtaatttgcgcaaatgttattggtggatgtatgggttcgtggggtcctaaagaaatagataaaaaaacaaatgagccttatggattaaattttccagttataacaataagagatatggttaaagcacaagaagctcttttagatcatttgggaataaaaaaacttctttgtgcaacaggggggtctatgggtggaatgcagttacttcagttttgtgcaacatttccaaatagaactttctctgcagtacccattgcttgtagtacaagccatagcgcccagaatattgctctcaatgagttagctagacaagctattatggctgaccctgtttgggataaaggaaaatatctaaaaaaaaatactcaaccaaaaaatggtttggctgttgcaaggatggtaggtcatataagttatttgtctgaaaaaggtatgcaagaaaaattcggtagaaagcttcaggaaaaagctgattacgaattcagttttgatgctgactttcaggttgaaagttatttaagacatcaaggttacacatttgttgaaagatttgacgcaaactctattttatacattactagagcaatggattattttgatttatcta

SEQ ID NO: 234162 - DNA, 587 bp, Unknown
  Bacterial polypeptide expressing nucleotide sequence isolated from the Sargasso Sea
agctcaaaatattgcttttaacgaactaggtagacaagctattacagctgatagtaactggagagatgggaattatacatcaaacgacactaatcctggaaaaggattggcagtagctagaatggcagctcatattacttatttatctaaaaaaggtttgcaggaaaaatttggaagaaagttacaagaaagagaagatcttaaatttggattcgacgctgattttcaaatagaaagttatttaagatatcagggctcagttttcgtagatagatttgatgcaaatagttatctttatattactagagctatggattattttgatttagctaagcaattcaatggtaatctttcagaagcatttataaatacaaacgcgaaattttttataatttcttttacttcagattggctttatccaacccaagaaaacaaagatattgtgattgctttaaactcaataggagctgatgttggatttgtagaaattgagtcagataaaggtcacgactcctttttactagacgttcctgatttcttgagtgcacttaaaaactttttagataaatcttacgaagaaaattaat

SEQ ID NO: 234163 - DNA, 778 bp, Unknown
  Bacterial polypeptide expressing nucleotide sequence isolated from the Sargasso Sea
gttgtttgtaaaaaaacccttaaagttagactgtgggaaaactatcaatgactttccgatagcgtatgaaacctacggttcattaaatgaaaaaaaagataatgctatactaatttttcatgcattaaccggggatcaatttgttaccggcttaaatccaataacaaaaaaagaaggttggtggtcttatgcagttggacctgataaggcaattgataccaaaaaatattttgttatttgctcaaatgtaataggtggatgcatgggttcatttggaccaagccatactgatcctcttactgggaatgtatttggtacaaatttccctattttaacaattaacgatatggtgaatgcccaattaaacttacttgatcattttggaatagataaacttttttctatcgctggtggctcaatgggaggtatgcaagtacttcaatttattagtaattttccagataaatctaaaacagtagtaccaattgcatgtacttcaagtcactcagctcaaaatatcgcgtttaatgaattaggaagacaagcaatagctgctgatagtaattggaaagatggaacttattcttctaacaatacaaatccaaacaaaggtttggctgttgccagaatggccgctcacataacttacttatcaaaaaaaggtcttcaggaaaaatttggaagaaaacttcaggaaagagaagatgtaaaatttggttttgatgctgattttcaaatagaaagttatttaagatatcaaggttcagtattgtcgata

SEQ ID NO: 234164 - DNA, 611 bp, Unknown
  Bacterial polypeptide expressing nucleotide sequence isolated from the Sargasso Sea
tatggcgaaagaaaattacaattcagatttatatagaacaggagatacgtccaaatatcttaaaaattttctttatggggataagtttcatcttaagtcaggagatattcttgatgaattaaacatatcttatgaaacttatggaaatttaaataaagataaatcaaatgttgttctaatatgccatgctataagcggcgactctcacgttgcaaaacatgataaggaagatattccagggtggtgggatataatggtaggtcctggtaaacctattgatactgaaaattattttgttatatgcagcaatgtaataggaggatgcaagggttctacaggacccaactcaattgatccatcaacaggaactcattacggttctaattttcctaatatcactgtagaagatatggtaagcgcacaaaatcttcttatagaacatttaggaataaaatctattctttgtgtaacgggaggatcgatgggtggatttcaatcgatacaatgggcaaggcaatatccagataaaattaaaagcgtgattggtttagctacttcagcaagacttaccaaccaagccttagcttttgatattgtaggaagaaatgcaa

SEQ ID NO: 234165 - DNA, 736 bp, Unknown
  Bacterial polypeptide expressing nucleotide sequence isolated from the Sargasso Sea
tatggttaaagcacaagttaggttaatagataaccttggaatagaaaaattagtttccgtaattggtggttctatgggtggtatgcaagcacttgaatgggctgcctcctaccctgaaagattgaaatcagcaattccaatagctacttccgccagacatactgcacaaaatattgcctttcatgaattaggtcgtcaggcaataatggccgatgtaaattggaattctggaaattataaagacaaaaatactaatccttcaaaaggcctttcaattgccaggatgacagctcatgttacttatttatctgaagcttcactaacaaagaaatttggtagaaaattacaggataaaaaaagtcttggttttggttttgatgctgattttcaaattgagagttacttaagacatcaaggtcatacatttgttgatagatttgatgctaattcctatttatatataactagggcaatggattactttgacttagaaaaaacccataaaaagtctcttacagaaatatatgcgaatactaatttaaaattcctaattgtatcatttactggagattggctttatccaacatctgaaaacttaatgatagttagggctctcagcgcaggtggggtcgatgtaagttttgttgaaattgactccgataaaggtcatgatgcatttttattagatgaaccagaatttgatgtttgtctggatgggtttcttaaatcattatga

SEQ ID NO: 234166 - DNA, 558 bp, Unknown
  Bacterial polypeptide expressing nucleotide sequence isolated from the Sargasso Sea
tggtacaaactttccaattataacaataaacgacatggttaatgctcaatacaatcttttagaatattttaaaattgaaaaattgttcagtgttattgggggatccatgggtggaatgcaagtacttcagtttgtctccaattttcccaataaagcttttactgcaattccaattgcttgtactgcaagtcattcggctcaaaacatagctttaaatgaacttggaagacaatcaataatggctgatataaattggcaagatggattttatgaagaacaaaataaacagccagataaagggcttgcagttgcaagaatggcggctcatattacttatttatctaaagtaggtcttcaagaaaaatttggaaggaaactgcaagaaagagatgatttaaaatttagttttgatgctgactttcaaatagaaagttatttaagatatcaaggatccgtttttgttgatagattcgatgcgaatagctatttatatattacaagagctatggattatttcgacttaacaaaaaaatttggtggaaatctatcaaaagcttt

SEQ ID NO: 234167 - DNA, 505 bp, Unknown
  Bacterial polypeptide expressing nucleotide sequence isolated from the Sargasso Sea
acaaaataaacagccagataaaggtcttgcagttgcaagaatggcagcacacataacttatttatccaaagcaggtcttcaagaaaagtttgggagaaagctgcaagaaagagatgatttaaaatttagctttgacgctgactttcaaatagaaagttatctaagatatcaaggctcagtttttgtggataggtttgatgcaaatagctatttatatatcacaagagctatggattattttgatttaacaaaaaagtttgggggcaatctatccaaagcttttgaaaaaagtaatacaaaattttttattatatcttttacatcagactggctctatccaacatctgaaaacagagaaatagtgatagcacttaatgctattggtaaagacgttggatttgttgaaattacatctgataaaggacacgactcttttttacttgatgttccagacttcctcaacactgtgaagaattttttaaacaaatcttatgaaaaaatttaa

SEQ ID NO: 234168 - DNA, 601 bp, Unknown
  Bacterial polypeptide expressing nucleotide sequence isolated from the Sargasso Sea
atgaatagcaggattataaaagatcaaaaattagagtgcgagattgcactttttgacaatattaattttaaattagaatcaggtgagataattaaggatttaaaaattgctttcaaatcatacggaagattgaatagtaataaaacaaatgcgattttagtatgccatgctcttactggagatcagtatgttgcaggaaataatccaactactggcagggatggctggtgggcaagaatggttgggcctaataaaccaattgatacaaatagattttttgtaatatgttccaatgttattggaggttgttctgggtcaactggaccaaaggaaattaataaagagactaatattgtttatggtggagattttccgtcaattacaattaaagatatggttaaagctcaatctcttttaattgaaaaattaaatatagataaattattttctgtaattggtggttcaatgggagccatgcaagcgttacaatgggcaatagattttcctgaaaaaatttcaaatattattcatatagctggagcactaaaacattcagctcaaaatatagcttttcatgaagtaggtagacaagcaattatga

SEQ ID NO: 234169 - DNA, 667 bp, Unknown
  Bacterial polypeptide expressing nucleotide sequence isolated from the Sargasso Sea
tatgcaggtccttcagtttattagcaactttcctgataaatccaaaacagtgataccgatagcaaccacatctagtcattcagctcaaaatattgcttttaacgagctaggtagacaagctattacagctgatagtaactggaaagatgggaattatacatctaacgatactaatcctggaaaaggattggcagtagctagaatggcagctcatattacttatttatctaaaaaaggtttgcaggaaaaatttggaagaaagttacaagaaagagaagatcttaaatttggatttgacgctgattttcaaatagaaagttatttaagatatcagggctcagttttcgtagatagatttgatgcaaatagttatctttatattactagagctatggattattttgatttagctaagcaattcaatggtaatctttcagaagcatttaaaaatacaaacgcaaaattttttataatttcatttacttcagattggctttatccaacccaagaaaacaaagatattgtgattgctttaaactcaataggagctgatgttggatttgtagaaattgagtcagataaaggtcacgactcctttttactagacgttcctgaattcttaagtgcacttaaaaactttttagataaatcttacgaagaaaattaa

SEQ ID NO: 234170 - DNA, 667 bp, Unknown
  Bacterial polypeptide expressing nucleotide sequence isolated from the Sargasso Sea
tgtgcaacatttccggaaaaaactttttctgctattccgatagcttgcagctctagtcatagcgctcaaaatattgcactaaacgaattagcgcgccaagctattatgtctgatccggtatgggacaatggaaaatatcttttaaaaaatgctcagccaaaaaacgggttggctgttgctagaatggttggccatattagttatttgtcagagaaaggtatgcaagaaaaatttggaagaaaactccaagaaaaagctgattatgaatttagtttcaacgctgactttcaagttgaaagttatttgagacatcaaggatattcatttgtagatcgatttgatgctaattcaattctttatataactagagctatggattattttgatctatcaaaacaatttaaaggaggtttagtagaagcttttaaaaacttaaagacaaaatttttagtaatgtcgttttcttctgactggctttatacaacaaaagaaaataaagatatagttattgcccttaattcctcaggtgcagacgtttcatattcagaaataattacagataaaggccatgactcttttttacttaatgaaccagaatttttaaaaactttaaaaagttttgtagattccatgtatgaaaaatttaaaaatgaaaaaagaatttaaa

SEQ ID NO: 234171 - DNA, 742 bp, Unknown
  Bacterial polypeptide expressing nucleotide sequence isolated from the Sargasso Sea
attacttgattacttaaaaatcaaaaaactattttctgttattggtggatcaatgggtggaatgcaagttttgcaatttatatcaaactatccagataaatcacataccgctattccaattgcctgtactgctagtcattcagcacaaaacatagcgcttaatgaattaggaagacaatcaattatggctgataacaattggcaaaatggattttatgaagaaaaaaatatatcaccagcgaaaggattatcggtagctaggatggctgcacatattacttatttgtcaaaaaaaggtttacaagaaaaatttggaagaaaacttcaggagagagatgatcttaagtttagctttgatgctgattttcaaattgagagttacttaagatatcaaggatcagtatttgttgataggtttgatgcaaatagctatttatacataactcgtgctatggattattttgatttaactaaacagtttaatggaaatttatctaaagcttttgaaaaatctaataccaaattttttataatatcttttacctcagattggttgtatccaaccgcagaaaatagagaaatagtaattgctttaaactcaattggaaaaaatgtgggctttgttgaaattaaatcagataaaggtcatgactcatttctattagatgttcctgattttttaagttctgtaagaaattttttaaatacttcctataaaaaattatatgaaaaaagaatttaa

SEQ ID NO: 234172 - DNA, 709 bp, Unknown
  Bacterial polypeptide expressing nucleotide sequence isolated from the Sargasso Sea
taaaaaattactagctgtaattggtggttctatgggtggaatgcaagttttgcaatttagctctttgtatccaaatctggcacattctgctgtacccatagcttgcagcgcaagtcactctgcgcaaaatattgcattaaatgagttagggcgacaagccattatggctgatcctaattggaagaaagaaaattcatcgcctgataaaggtttggcagttgctagaatggccgcgcacattacttatctttcaaaaaaagggttgcaggaaaaatttggtagaaagttacaagataaaggaagtttaaaatttagtttcgatgcagattttcaaatagagagctatttacgttaccaaggatccacttttgtagataggtttgatgctaatagttatttgtatattacgcgagcaatgcattattttgatctagaaaaacaattcaatggaaatctcactcttgcttttaaaaataccaaatctaagttttgtgtaatatcattttcatcagactggctttacccctctgctgaaaataaagaaatagttatagctttaaatgcatgtggggcaaacgtcggttttgtagaaattaattcagataaaggacatgattcttttttattagatgtgccagattttttaaaaacaataagcgagtttcttaattcaacttataatgaagtaaataatgaaaaaagaatttga

SEQ ID NO: 234173 - DNA, 773 bp, Unknown
  Bacterial polypeptide expressing nucleotide sequence isolated from the Sargasso Sea
aatgaaaagtatattaattaaagaacctcttaaacttgattgtggaaaagaaatatcaaattttccattagcttatgagacttatggaaatcttaatgaaaaaaaagataacgccatattaatttttcatgcgctaacaggagatcagtttgcctcagacataaaccctgtgacaaataaagaaggatggtggaattatgcagttggtccaggcaaagcgtttgatactgaaaaattttttgtgatttgtgcaaatgtcattggtggttgtatgggatcatacggaccaggaactattgatccattgactaacaaacctatagcaacaaattttccagttattacaataaacgatatggttaatgctcaatacaaacttttggatcactttaaaatagaaaaattatttgcagttgctggtggttcaatgggtggtatgcaggtattacaatttgtatcaaattttccgaacaaagctaaggttgccttaccaattgcttgtacagctagtcactcagcccaaaatattgcattcaatgaacttggaagacaagcaattatgtcagatattaattggaaagatggtttatatgacgggaagacatttaatccagacaaaggtttggctgtagctagaatggcagcacatattacatatttatcaaaaaaaggattacaagaaaaatttggtcgaaatctacaagaaaggtctgatttaaaatttggttttgatgctgactttcaaattgagagttatttaagatatcaaggct

SEQ ID NO: 234174 - DNA, 697 bp, Unknown
  Bacterial polypeptide expressing nucleotide sequence isolated from the Sargasso Sea
tgcaataataggtggatcaatgggtggaatgcacgttctgcaatttgcctctctctatcctgacataagtcactctgcaatacctatagcatgcagcgctagtcactcggctcaaaatattgcactaaacgaattaggtagacaagctattatggctgacccaaattggaaaaaagaaaattcttctcctgacaaaggtttggcggtagcaagaatggctgctcatattacttatctctctaaaaaaggtttacaggaaaaatttggtcgaaaactacaagaaaaaggaagtttaaaatttagttttgatgcagattttcaaatagaaagttatttacgttaccaaggcgcaacttttgtagatagatttgatgctaatagttatctttatatcaccagagcaatggattattttgatttagagaaacaatttaaaggtaatctttctctagcttttaaaaatacaaaatcaaaattttgtgtaatatcattttcatcagattggctttatcccactctcgaaaacaaagaaatagttatagctttaaatgcctgtggagcaaatgtaggatttgttgaaattaattcagataaagggcacgattcttttttactaaatgttccaaattttttaaaaactatcagtgaatttcttaactcaacttataatgaaataaataatgaaaaaagaatttga

SEQ ID NO: 234175 - DNA, 707 bp, Unknown
  Bacterial polypeptide expressing nucleotide sequence isolated from the Sargasso Sea
gcagttgctggtggttccatgggtgggatgcaagtattacatttgtatcaaatttccaaacaaggctaaggttgctttgccaattgcttgtacagctagtcactcagctcaaaatattgctttcaatgagcttggaagacaagcaatcatgtcagatacaaattggaaggatggtttatatgacggaaagacaagtaatccagacaaaggtttggctgttgcaaggatggctgcacatattacgtatttatcaaaaaaaggattacaagaaaaatttggaagaaatctgcaagaaagatcagatttaaaatttggatttgatgctgactttcaaattgagagttatttaagatatcaaggctctgtttttgtggatagatttgatgcaaatagctacttatacattacaagagcaatggactactttgatttgacaaaacaacatggtggtaatctttctcaagcttttaaagagagtaagacaaaattttttattatttcatttacttcagattggttatacccaacctctgaaaataaagatattgtaattgcactaaatgctataggagccgatgttggctttgtagaaattaaaactgacaaaggtcatgactcttttttgttagatgtgcctgattttttaagcactataaaaaactacttaatcactacttatttaaatataaatgaaagaagaatttaaa

SEQ ID NO: 234176 - DNA, 933 bp, Unknown
  Bacterial polypeptide expressing nucleotide sequence isolated from the Sargasso Sea
tatcgggtggtgggatcaactggttggatctgataaagccattgatacagataaatatttcgtggtttgctgtaataatcttggtggctgctctggttcttctggaccaacaagcataaatcctcaaactggaaaaatatatggaaaagatttcccacaagtaagtgttttagattgggtaaattctcaaaaaatgttaagtgagaaattaggaataaataagtggtacttagttattggtgggagcttaggtggtatgcaagccttacaatggtccattacatttccagattcagttaataaagcaggaattctggcggcagcagcaaaatcaagtacacaaaatattgcattaaatgaggtagcaagagaggcgataagaaaagatccaaactttatggatggtgactattctataaatcaagttaaaccaaaggatggtataaaaacagcaagaatgcttggacatattacttacctatcagaaaaacatatggatttaagatttggaagaagatttcaagaagaagactcaaaagttagcaaaaaagttgattttgaggttgagaattacttgcagtacaagggtgaaaaattttctgagaatttcgatgccaatagctacatccttatgactaaggcaatggacgggtatgatattgctcaagataagaatactctcgaaactaatcttcaaaatgtaaaagcatcacttcttattgttggcttttacacagattggttatatccacctgaaagaggaaaagacattcaaattgctgcgattaatcaaaacgtaaaatcttcttatattgttctaagtggtgagcatggacatgatagttttttatttgaaaatgaaaaatatgttaaaactttgaaagaattattgaatcaaaatgaccatgaaaaaatatcacattataaaaaaaa

SEQ ID NO: 234177 - DNA, 673 bp, Unknown
  Bacterial polypeptide expressing nucleotide sequence isolated from the Sargasso Sea
tatgagtaatattgaattaataaatgataaaaatttagattgtagttttgctatttttaaaaacgcaaacttaacacttgagtcaggatcaatattaaaaaattttaaattagcatataaaacttttggatcacttaataagaataaatcaaatgcaatattagtttgtcatgctttaactggcgatcaatatctttcaggacataatccaattacaggaaaggatggttggtggtcaagaatggttggcccaaataaaccaattgatacaaataagtttttcgttatttgttctaatgtgcttggtggctgtgcaggttcaacaggcccaaaagaaacaaaagaaaatgaacaaaatatttatggaagagattttccatccgtaactattaaagatatggtaagcgcccaggtaaaattattggacgcattagaaattgatcaattgtttagtgtagtgggaggatctatgggggcaatgcaagctttacaatggtcaattgattttccaaacagagttcagtctattattcatattgctggagctcttaaacattctgcacaaaatattgcttttcatgaagtaggtaggcaagcgataatgaatgatcccaattggcataaaggaaattataccgaaaataatgcaatccctgaagaggattatctgtag

SEQ ID NO: 234178 - DNA, 661 bp, Unknown
  Bacterial polypeptide expressing nucleotide sequence isolated from the Sargasso Sea
ggaatgcaagttctcccagtttgttgcaaattttcctaacaaaactaaaactgctattccaatagcttgtactgcaagtcattcagcacaaaatatagcacttaatgaattaggaagacaggcaatcatggcagatagcaactggaaaaatggagattatttaaatttggaaaactctccaaataaaggtttatcggtagctagaatggctgctcatataacgtatctttctcaaaaaggcttacaagaaaagtttggaagaaaacttcaagaaagagatgatttaaaatttagttttgatgcagattttcaaatagaaagttatcttagacatcaaggttctgcttttgttgatagatttgatgctaatagttatctttatattaccagagcaatggattattttgatttagttaaagaatacaaaggaaatgtttctgatgcatttaaaaaaattaaagtaaaattttttataatatcttttacatctgattggctttatccaacagctgaaaataaagaaatagttattgctttaaatgcagctggtgcagatgtgggttttattgaaattaaaagtgataaaggtcatgactcttttttgttaaatgtacctgattttttaattactattaaaaatttcttacaagcaaattattaa

SEQ ID NO: 234179 - DNA, 923 bp, Unknown
  Bacterial polypeptide expressing nucleotide sequence isolated from the Sargasso Sea
aacaaataaagatggctggtggtcttatgcagtaggtcctaataaagcaattgacactaaaaaatattttgtaatttgctcaaatgttattggtggatgtatgggatcttatggaccaagtcagaaagatcctgatacagaagaagtttttgggacaaattttccagtaattactattaatgatatggtaaatgctcaagaaaatttacttaatcatttcaaaattgataaacttttttctgttgttggaggatcaatgggtggcatgcaagttcttcaatttgttagcaacttccctgaaaaaacaaaaactgctgttccaatagcctgtacatccagtcattcagctcaaaacattgcattaaatgaacttggaagacaagctatagctgctgatagtaactggaatgaaggaaattatgaatcaaaaaataccaatcctaataaagggttagcagttgcaagaatggctgctcacatcacttatctttcaaagaaaggactgcaagaaaaatttggtagaaatttacaagaaagagaagatcttaaatttagttttgatgcagattttcaaattgaaagttatttaagatatcaagggtcagtttttgtagatcgatttgacgcgaatagctatctttatattactagagctatggattattttgatttagcgaggaaatttgagggtaatctatctaatgcttttaaaaaaactaaaactaaatttttcataatatcttttacttcggattggctttatccaactcaagaaaataaagatatcgtaattgctttaaatgctatcggtgctgatgttggttttgttgaaattgagtcagataaaggtcatgattcctttttgcttgaagttccagattttttaagtgctcttaaaaattttttagaaaaatcttattaaa

SEQ ID NO: 234180 - DNA, 603 bp, Unknown
  Bacterial polypeptide expressing nucleotide sequence isolated from the Sargasso Sea
gcactgcaagtcattcagctcaaaatattgctcttaatgaacttggtagacagtctataatggcagataggaattggcaggatgggttttatgaagaacaaaataaacagccagataaaggtcttgcagttgcaagaatggcagcgcacataacctatttgtccaaagcaggtcttcaagaaaagtttggtagaaagctgcaagaaagagatgatttaaaatttagctttgatgctgactttcaaatagaaagttatctaagatatcaaggctcagtttttgtggataggtttgatgcaaatagctatttatatatcacaagagctatggattattttgacttaacaaaaaagtttgagggcaatttatccaaagcttttgaaaaaagtaatacaaaattttttattatatcttttacatcagactggctctatccaacatctgaaaatagagaaatagtgatagcacttaatgctattggtaaagatgttggatttgttgaaattaaatctgataaaggacacgactcttttttacttgatgttccagacttcctcaacactgtgaggaattttttaaacaaatcttatgagaaaatttaat

SEQ ID NO: 234181 - DNA, 283 bp, Unknown
  Bacterial polypeptide expressing nucleotide sequence isolated from the Sargasso Sea
atgtccttcatcgccacaccacaatccatgcacttcgacgagccgctgccgctgcagggcggcggctcgatccgtgactacgacctcgcctacgagacctacgggcagctcaacgccgaccgcagcaatgccgtgctggtctgccatgcgctcaacgcctcccaccatgtggccggcgtgtacgagggccagcccaagagcgagggctggtgggacaacatgatcggccccggcaagcccgtggacacgaaccggttcttcgtgatcggcgtgaacaacctgg

SEQ ID NO: 234182 - DNA, 655 bp, Unknown
  Bacterial polypeptide expressing nucleotide sequence isolated from the Sargasso Sea
tttccagataaatctgaaactgctatacctatagcttgtacacatagtcattctgcacaaaatattgctctaaatgaacttggtagacaatcaattatggcagatcataattgggcaaatggattttatgaggacaataataaatctccatctaaaggactggctgttgcaagaatggcggcacatattacatatttatcaaaaaaaggtttgcaagaaaaatttggaagaaaactacaagaaagagatgatttaaagtttggctttgatgcagattttcaaattgaaagttatctaagacatcaaggttcagtctttgtagataggtttgatgctaatagttatctttatattacaagagctatggattattttgatctttcaaaacaatttgatggaaatctatcaaaagcatttgaaaaaactaatactaaattttttattatatcttttacttcagattggctatacccaacatctgaaaatagagaaatagttattgctctaaattcgattggaaaagatgttggttttgctgaaataacatctgataaaggtcacgactcatttctattagatgtccctgattttcttaatacaataaagaattttttaaatacatcgtttaataaaaaaaatgaaaaaagaatttaat

SEQ ID NO: 234183 - DNA, 658 bp, Unknown
  Bacterial polypeptide expressing nucleotide sequence isolated from the Sargasso Sea
aagtaactttccagataaatcaagaacagtaataccgattgctacaacttcaagtcactcagctcaaaatatagcttttaatgaattaggaagacaagcaatcatggctgacagtaattggaaagaaggagattatagttctaataattcaaatccaggtaaagggttagctgttgctagaatggctgcacatattacatatttatcaaaaaaaggtttgcaggaaaaatttggcagaaaattacaggaaagagaagatttaaaatttggttttgatgcagactttcagatcgaaagctacctaagatatcaaggctcagtctttgttgatagatttgatgcaaatagttatctttatataactagagccatggattatttcgacctagctaaacaatttaatgggaatctgtctgatgcatttaaattaacaaaagctaaattttttataatttcttttacttcagattggctttacccaactcaagaaaataaagatattgttatagctttaaattctatcggggctgatgtgggatttgttgagatagagtcagataaaggacatgactcgttcttgttagatgtcccagattttttaaatgcacttaaaaactttttagataaatcatacgaagaaattaaatatgaaaaatga

SEQ ID NO: 234184 - DNA, 867 bp, Unknown
  Bacterial polypeptide expressing nucleotide sequence isolated from the Sargasso Sea
gattaatcctgtaactaataaaagtggttggtggtcacatttggttggtcctaataaagcagtagatacaaacaaattttttataatatgcgcaaatgtaattggcggatgtatgggctcatatggtccaagtagtactgatccaatgacaagtaaaaaacttggaactaattttccagtaattacaattaatgatatggttaacgcacaatataatttattagatttttttaagatcgataaactttttagtgtaatgggaggctcaatgggaggaatgcaggttctacaatttgttgctaatttcccagataagacaagaacagcaatacctattgcatgtgcagcaagtcattctgcacaaaatattgcacttaatgaattaggtagacaagcaataatggcagacggcaattggcagcagggagactatcttaacaaaaatatttctccggataagggtttgtccgttgcaagaatggctgctcatattacatacctctctcagaaaggcttacaagaaaaatttggaagaaaactgcaggagaaagatgatctaaattttagttttgatgctgactttcaaattgaaagctatcttagacaccaaggctcagtatttgttgatcgtttcgatgctaatagctacctatatataactagagcaatggattattttgatttaataaaagaatatgagggaaatctttcagatgcatttaaaaatagtaaagtaaaatttttaataatttcctttacttctgattggttatatccaacatctgaaaacaaagaaatagttatagcattaaattctgcaggtgctgatgtaggctttattgaaataaaaagtgataaaggacatga

SEQ ID NO: 234185 - DNA, 361 bp, Unknown
  Bacterial polypeptide expressing nucleotide sequence isolated from the Sargasso Sea
tatgagtgattcgataggaaaagtaaaggcacaaaaagttactctggagggtaaatttgagcttgagtgcggccaaagtttcaatgatatagaactggtttacgaaacttatggtgttcttaatgcagataggacgaatgcgatacttatctgtcatgcattgagtggtaatcatcatgctgctggaaaatacggaaacgaagaaaaacctggctggtgggatgcgcttattggacctggtaaagcggtggatacaaacaaattttttgtagtttgcccaaacaacataggtggttgtcatggttccctcggaccaagttcaattaaccatgatactggagattattatggacctgacttc

SEQ ID NO: 234186 - DNA, 796 bp, Unknown
  Bacterial polypeptide expressing nucleotide sequence isolated from the Sargasso Sea
agatacaaatcgtttctttgtggtctccgtaaataatcttggaagttgttttggttctagtggtcctcttagtaaagataaaaatggagagaggtttaataataattttcctcagttagaagtcattgattgggttgaatctcaaaaaatgcttgccgataaattaggaataaaaaagtggcatttagtcattggtggaagtttgggcgggatgcagtcacttcaatgggctgtaagttatccaaaaatggtaaataaagttggtattcttgctgctgcagctaaaacaagctctcaaaatattgctttgaatgaagttgagagagaagttataaggaaagatagtgattttcatgacgggaagtatctcgaatttaataaatctccagttaaaggcctcaaagctgcaaggatgcttggtcatataacttatttgtctgctaaaaacatggatctgcgctttggaagaaagttacaaaatactgattccaaaatagctgaaaatattgattttgaaattgagaactaccttcaatataagggaggaaagtttgcagaatcatttgatgctaattcatatgttcttttaacaaaagttatggataaatttgacattgctcatgggtatggcgacagtcttgaggctgctcttgaaaacattgatgccgaagttctggttgtatcatttacctcagattggatgttccctacaagcaatggaaaagagatatgtttggcatccatcaaggcgaataaaaattgttcatatattgaattagagggagagcatggtcat

SEQ ID NO: 234187 - DNA, 952 bp, Unknown
  Bacterial polypeptide expressing nucleotide sequence isolated from the Sargasso Sea
atgattgttaagacaaaaaaaatacttatttattctgaattagagtgtgcttcgggtgaggctcttgaaaactttgagctaatgactgatttttatggggagctaaataagaaaaaagataatgcagtccttgtatgtcatgcattctctggaagtcatcatgctgcaggaaaaagagatggtaacattggttggtgggatgagtttattggtccagataaaacaatagatacaaatcgtttctatgtggtctccgtaaataatctaggaagttgttttggttctagtggtcctctcagtaaagataaaaatggggaaagatttaataataattttcctcagttagaggttattgattgggttgaatctcaaaaaatgcttgcagataaattaggaataaaaaagtggcacttagtcattggaggaagtttgggaggcatgcaatctcttcaatgggctgtaagttatcctaaaatggtaaaaaaagttggcattcttgctgctgcagctaaaacaagctctcaaaatattgctttgaatgaggttgagagagaagttataaggaaagatagtgattttcatgacggaaagtatctcgaatttaataaatctccagttaaaggccttaaagctgcaaggatgcttggtcatataacttatttatctgcaaaaaatatggatcagcgctttgggagaaagttacaaaatactgattctaaaatagctgaagatattgattttgaaattgagaattaccttcaatataagggaggaaagtttgcagaatcttttgatgctaattcatatattcttttaacaaaagttatggataaatttgacattgctcatgggtatgacgacagtcttgagtctgctcttgaaaacattagagccgaagttctggttgtatcatttacctcagactggatgttccctacaagcaaggaaaaga

SEQ ID NO: 234188 - DNA, 585 bp, Unknown
  Bacterial polypeptide expressing nucleotide sequence isolated from the Sargasso Sea
taaatgaactaggtagacaagcaattatggcggacaatgagtggagtaatggaaaatatttagaaaatggaaaatctccatcaaaaggtttgtcagtagctagaatggcagctcatattacatacctatctaaaaaaggattacaagaaaaatttggaaggaaacttcaggagagagatactctaaactttagttttgatgctgattttcaaattgaaagctatttaaggtatcaaggttcagtttttgtcgataggttcgatgcaaacagttatttatatattacaagagcaatggattacttcgatttaacaaagcaattcaatggtaatctttcagatgcttttaagcacagcaaaactaaattttttataatttcattcacatctgattggctttacccaactaatgaaaatagagaaatagttattgctttaaatgctattggagcagatgtaggatttattgaaataacttctgataaagggcatgactcgtttttattggatgttcctgattttctaagtgctataaaaaattttctaaataattcgtataaaaatattaatgaaacaagaatttaaa

SEQ ID NO: 234189 - DNA, 805 bp, Unknown
  Bacterial polypeptide expressing nucleotide sequence isolated from the Sargasso Sea
accttatggattagattttcctgtaattacaattaaagacatggttagagcacaggagactttgctagaataccttggaattaaaaagcttttatgtgcaactggcgggtcaatgggtggtatgcaacttttacagttctgtgcaacttttccagataaaactttttcagctattccgattgcttgtagctcaagtcatagcgctcaaaatattgctttaaatgaattagcgcgtcaagccataatggctgaccccgtctgggataagggtaagtattttttaaagaatgttcagccaaaaaatggattggcagtagcaaggatggttggacatattagttatttatcagaaaaaggtatgcaagaaaaatttggaagaaaattacaggagaaagctgattacgaatttagctttaatgcagactttcaagttgaaagttatttaagacatcaaggctatgcattcgtagaaagatttgatgctaactcagttttatacatatctagagcaatggattattttgatctttcaaagcaatttaaagggggtttggttgaggcctttaagactcaaaaaaccaaatttttgataatatctttctcctctgattggctttacacaacgaaggaaaataaagatattgttatagctttaaactcatcaggtgcagatgtttcattctcagagattattacggacaaagggcatgattcatttttgttaaatgtaccagaatttttaaaaacacttaaaagttttatagactcaatgcatgataaatttaaaaatgaaaaaagaatttaa

SEQ ID NO: 234190 - DNA, 810 bp, Unknown
  Bacterial polypeptide expressing nucleotide sequence isolated from the Sargasso Sea
aaaaaccatatggattagattttccagttattacaattaaagacatggtcagagcacaagaatctttattagatcatctaggtattaaaaaacttttatgtgcaactggtggttcgatgggtggtatgcagctcttacagttctgcgctacattccctgaaaagaccttttctgctgttcctattgcatgcagttcaagtcatagtgcacagaacattgctcttaatgaattagctcgtcaagcaataatggctgaccctgtttgggataatggtaaatattttcttaaaaatgtgcagcctaagaatgggctagcagttgctcgaatggttggtcacattagttacttatctgaaaaaggtatgcaagaaaaattcggaagaaagttacaagaaaaagctgattatgaatttagttttgatgcagatttccaagtagaaagttatttaagacaccagggttacgcatttgttgaaagatttgatgctaattccattctttatattacaagagcaatggattactttgatctttccaaacaatttaaaggaggcctagtcgaagcttttaaaaatcaaaaaacaaagtttttcataatgtctttttcttcggattggctttatacaactagagagaataaagatatagtaattgctttaaatgcatctggtgctgatgtttcatattctgaaataattactgataaaggacatgattcatttttacttaacgtaccagaatttttaaaaaatttaaaaaattttatcgacacaatgtatgagaaatttaagaatgaaaaaagaatttaaa

SEQ ID NO: 234191 - DNA, 916 bp, Unknown
  Bacterial polypeptide expressing nucleotide sequence isolated from the Sargasso Sea
gttggaccagataaagctatagatactaataaatattttgtgatttgtgcttatgttattggtggatgtatgggttcatggggtccgaaagaaataaataaaagtactaatgaaccttatggtttaaattttcctgtaataacaatcaaagacatggttaaagcacaagaaacattattagaccatttaggaataaaaaaattactttgtgccactggtggatctatgggggggatgcagttacttcaattttgtgcaacatttccaaataggactttttcggctgttccaattgcatgcagcacaaatcacagtgctcaaaacattgcacttaatgagttagcgagacaagctataatggcagatcctgtctgggaaaaaggtaaatactataaaaaaaatattcaacctaaaaacggtttggcagtagctagaatggttggacatataagttatttatctgagaaaggtatgcaagagaagtttgggagaaaacttcaggaaaaagctgactacgaatttagttttgatgctgactttcaggttgaaagctatcttagacatcaaggatttgcttttgttgaaagattcgacgcaaattcaatattgtatattaccagagcaatggattattttgatctttctaaacaatttaaaggagggttagtggaagcatttaaaaatcaaaaaacaaaattcctggttatatctttttcatctgattggctttatacaacaaaagaaaataaggatactgttattgcactcaattctgctggggctgatgtatcatttgctgaaattaaaacagataaagggcatgactcttttttagtaaatgaacctgaatttcttaaaactttaaaaggttttatagactccatgcatattaaatttaaaaatcaaaataaatgaa

SEQ ID NO: 234192 - DNA, 613 bp, Unknown
  Bacterial polypeptide expressing nucleotide sequence isolated from the Sargasso Sea
tgtgctgcagtcactcagcgcaaatattgcttttaatgaattggcgcgacaagcaataatggctgatccagaatgggattcaggaaattatatctcatctggaaaagtaccaagaaaaggtttagcaattgctagaatggcaggacatataagctatttgtctgaacaaggattgcaaaataaatttggaagaaaattacaagaagaccagggattacaattttcatttgatgctgattttcaggtcgaaagttatttaaaatatcaaggttattcttttgtagatagatttgatgcaaattcctacttatacataactagagcgatggattattttgatttatataaagaaaataatgggaacttatctttagctttcaaaaattctaaaataaaatattgtattatatcatttagtactgattggttatacccaacaagtgaaagtaaaaaaattgtaattgcattaaattctataggtgcagaagttagttttgtgaatattgtaactaataatggccacgactcttttttagtgaacgaaccaaagtttttagaaacattaaaaggatttctagattctagttatgaggattttaaaaatgaaaattga

SEQ ID NO: 234193 - DNA, 882 bp, Unknown
  Bacterial polypeptide expressing nucleotide sequence isolated from the Sargasso Sea
atatgtgcaaatgttatcggtggatgtatgggttcatggggtcctaaagaaatagataaaaatacaaatcaagcatatggtttaaattttccagtgataacaattaaagatatggttaaatctcaagaaacattgttagatcatttaggtatagataaacttctttgtgctgcaggaggttctatgggtggaatgcaacttcttcaattttgtgcaacgtttccaaataaaactttttctgcagtcccaatagcgtgcagtacgaatcatagtgctcaaaatattgcactaaatgaattagctagacaagcaattatggctgatcctgtatgggataatggaaaatatttaaaaaaaaatattcaaccaaagaatggattagcagtagccagaatggttggacatataagttatctatctgagaaaggtatgcaagaaaagtttggtagaaaacttcaggaaaaagcagactacgaatttagttttgatgctgactttcaagttgaaagctatcttagacatcaaggatttgcttttgttgaaagattcgatgcaaattcaattttatatattaccagagctatggattattttgatctttcaagacaatttaaaggtggactagtagaggcatttaaaaatcaaaaaacaaaatttctgattatatctttttcatctgattggctttatacaacaaaagaaaataaagatactgtaattgctctaaactcagctggagctgatgtttcttttgctgaaattaaaacagataaagggcacgactcctttttggtaaatgaacctgaatttcttaaaactttaaagggttttatagactcaatgcatattaaatttaaaaatgaaaaaaaagaaaaaagaatt

SEQ ID NO: 234194 - DNA, 805 bp, Unknown
  Bacterial polypeptide expressing nucleotide sequence isolated from the Sargasso Sea
acttgaagagataaagaaaattatagtaactaaaccgcttaaattagattgtggaaaaacaataaataattttccgctggcatatgaaacgtatggtaaccttaataaagataaagacaatgctattttagttttccatgcacttactggggatcaatttgtttctgatactaaccctataacaaataaagatggatggtgggttactgctgtaggcccgggtaaagctatagatacaaataaatattttgtaatttgcgcaaatgtgattggcggttgtatgggttctctgggacctaaagatttaaatcctgaaactaaagaaccctacggattagattttccggtaattacaataagagacatggtaagagcccaagagtcattgcttaatcatcttggaataaaaaaacttttatgtgcaactggagggtcgatggggggtatgcagcttttacaattttgttcgacttttcctgacaagactttttcagctgttcctattgcatgtagttcgagtcatagtgcacaaaatattgctttaaatgaattggcgcgtcaagcaataatggctgacccggtatgggacaaaggtaaatattttcaaaaaaatgaacaaccaaaaaatggattggcggtagcaagaatggttgggcatataagttacttatctgaaaaaggtatgcaggaaaaatttggtagaaaattacaagaaaaagcggattatgaatttagttttaacgcagattttcaagttgaaagttacttaagacaccaaggctacacatttgtagaaagattcgat

SEQ ID NO: 234195 - DNA, 914 bp, Unknown
  Bacterial polypeptide expressing nucleotide sequence isolated from the Sargasso Sea
cccaaccaaaagggtgtgggatgatattgtcggctccggaaaagcaatagatacagacgaattttttgttgtctgcataaatgtccttggcggttgccaaggtagcacgggtccatcttcacttaaccctgcaaacaacagaccgtatgggagtgtgtttcccaatattacaatccgagacatagtaagagctcaagcaaaagttgctgattacctcggaattaacaaatggcatgccatcatcggtggatcaatgggcggaatgcaggtccttgagtggggaacaatgttcccagagcgagcacccagaattgctcccgtagcgacatcgcttgccgccagcgctcaacagatagcgtggagcgcagtcggtagagcagctatagcgcttgaccctagatggcgagatgggaactactatgaagcagatcccggagacggaccacatgcaggattagcaacagcgcgtgcaatagctcaaattcattaccgaagcgatgcgagctttcaatcacgctttggtcgggacttagtcgacaaggactctctttttggcttatgggatagattcgaagttgagtcttatcttgattatcatggcgagaagttaatacgcagatttgatgccaactcttatcttgtcctgaatcgcgcaatggatactcatgatttgtccagaggaagaggttcattagagaatgccgcaaggagaataaaggctaaagtcgtaaccgcgagtatctcaacagatatcctttatccacctcaccagcaaaatgagattcaaaaggttattcaatcagttggaggaagctgcagctacgaagagatagaagatccaaatggtcatgacgggtttcttctcgctacgaccgaaataggcgctatctttaagcagtttctagaagactagt

SEQ ID NO: 234196 - DNA, 735 bp, Unknown
  Bacterial polypeptide expressing nucleotide sequence isolated from the Sargasso Sea
tttggatttcaaatttgtatccggtactactctaaagaacttaaaaattgcatttaaaacatttggtaaactgaataaagaaaaaacaaatgctattctaatttgtcatgcgttaaccggtgaccaatatgtaactggtcataatccaattaccaatagagatggatggtggacaaggatggtggggccagagaagcctatagacaccaacaaattttttgttatttgctctaatgtattaggtggctgtgctggttcaacaggaccaaaagaaatacatgatgaagaaggaaaaatttttggcacaagctttccatcgattacaattaaagatattgtaaatgctcaagctttattagttgaagcattaaatattaaaaaattatattctgttattggtggttcaatgggagcaatgcaagctttacaatggtcaatagattttccggataagattgatactatagtacatattgcaggagcgttaaaacactctactcaaaatattgcttttcacgaagttggtagacaagctataatgaatgatccaatgtggaaaaatggtcagtatagtatagaaaaaactgttccagaaagaggattgtctgttgcaagaatgatagcacatataacatatctatcagaagatgctatgcatagaaaatttggacgtaaacttcaatcacgtgatataatttcttttggctttgatgcagattttcaaatagaaagtta

SEQ ID NO: 234197 - DNA, 503 bp, Unknown
  Bacterial polypeptide expressing nucleotide sequence isolated from the Sargasso Sea
tatatcagaaaaaaaacacccgggaaagggtttggctgttgctagaatgacagcgcatattacttatctatcagaaacttcgttacaaaagaaatttggtagaaatttacaagacaaagatttttattcatttcattttaaaccagattttcaggtagaaagctatctgcattatcaaggctatagttttattgaacgttttgatgccaattcatatttgtatattacaaaggcactcgattattttgacttagaaactgattttaatggcaatttagtttctgcttttgcggaaacttctaagtataagccaaaattttgtgtaatatcattttcagatgactggctgtttccgccatcggaggcaaccaagcttgtcaatagtttgatcttaagtaatttagatgttagttcagtttcaattgaaagctcgtcgggtcatgactccttcttgattgagagtgattatttaaaaaatattatcaaaggctttatttcataac

SEQ ID NO: 234198 - DNA, 753 bp, Unknown
  Bacterial polypeptide expressing nucleotide sequence isolated from the Sargasso Sea
agctcaaaaaatatttgattgatgcattagaaataaaaaaattatttgctgttatagggggatcaatgggcgcaatgcaagtattgcaatggactattgattatcccgaaaatttattgaacgctattcatatagcaggcgcattgaaacattctgctcaaaatattgcttttcatgaagtaggtaggcaagcaattatgaatgatgcttcatggagtgaaggtaagtatttaaataagaatttaaaaccagaaagaggattgtcagttgcaagaatgattgctcacataacatatttgtcagatgatgcgatgcatagaaaatttggaagaaaacttcaatctagagacataatttcttttggatttgatgcggattttcagattgaaagttatttaagatatcaaggtagatcatttgtagaaagatttgatgcaaatagttatttatatttaacaagggctatggattattttgataattcagaaaaattctctaaatctctagaattttcgttatctcaaaataatcatattaactatttgataatttctttcacttcagactggttatttccaactaaggaaaataaacaaatagttgatattttaaattttaatgcaaaaaaagtaagttttacagaaatacatacagataaggggcatgatagtttcttgttagatgagcctgaattagatcaaactatttctggctttcttaatagtaattataataaaatcacaaaaatatgac

SEQ ID NO: 234199 - DNA, 643 bp, Unknown
  Bacterial polypeptide expressing nucleotide sequence isolated from the Sargasso Sea
caactttcctgataaatctaaaacagtgataccaatagcaaccacatctagtcattcagctcaaaatattgcttttaatgagctaggtagacaagctattacagctgatagcaactggaaggatggaaattatacatcaaacgaaactaatcctggaaaaggattggcggtagctagaatggcagctcatattacttatttatctaaaaaaggtttgcaggaaaaatttggaagaaagttacaagaaagagaagatctcaaatttggatttgacgctgactttcaaatagaaagctatttaagatatcagggctcagttttcgtagatagatttgatgcaaatagttatctttatattactagagctatggattattttgatttagctaagcaattcaatggtaatctttcagaagcatttataaatacaaaagcgaaattttttataatttcatttacttcagattggctttatccaacccaagaaaacaaagatattgtgattgcgttaaactcaataggagctgatgttggatttgtagaaattgaatcagataaaggtcacgactcctttttgctagacgttcctgatttcttaagtgcacttaaaaactttttagataaatcttacgaagaaaattaa

SEQ ID NO: 234200 - DNA, 653 bp, Unknown
  Bacterial polypeptide expressing nucleotide sequence isolated from the Sargasso Sea
atttataagtaactttccagataaatcgaaaacagtaataccgattgcaacaacttcaagtcactcagctcaaaatatagcttttaatgaattaggaagacaagcaatcatggctgacagcaattggaaagaaggagattatggttctaataattcaaatccaggtaaagggttagctgttgcgagaatggcagcacatattacatatttatcaaaaaaaggtttgcaggaaaaatttggcagaaaattacaagaaagagaagatttaaaatttggttttgatgcagactttcagattgaaagctatctaagatatcaaggctcagtctttgttgatagatttgatgcaaatagttatctttatataactagagctatggattattttgacctagctaaacaatttaatgggaatctgtctgatgcatttaaattaacaaaagctaaattttttataatttcttttacctcagattggctttacccaactcaagaaaataaagatattgttatagctctaaattctatcggggctgatgtgggatttgttgaaatagagtcggataaaggacatgattcattcttgttagatgtcccagattttttaaatgcacttaaaaactttttggataggtcatatgaagaaaattaaa

SEQ ID NO: 234201 - DNA, 657 bp, Unknown
  Bacterial polypeptide expressing nucleotide sequence isolated from the Sargasso Sea
gttgattgttgaaaaaccgctcaaattggattgcggtcagactattaataattttcctttagcgtatgaaacttatggctcactcaataatgaaaaagataatgcaattttagtatttcatgctttaacaggtgatcaatttgtaacaggtataaatccagtgaccaaaaaggatggttggtggtcttatgcggtaggctctggcaagtcgatagatacagataaatattttgtaatctgtgcaaatgtaataggcgggtgtatgggatcttttgggcctagccatgaaaatcccaagacaaaaaaaatttatggaacagattttccagtcatcacaattaatgacatggtgaacgcacaaattaatttattggatttttttgggataaaaaaacttttttcagttataggtggttcgatgggtggaatgcaagtcctacaatttattagtaattatcctgataaagctaaaacagcagtaccaattgcttgtacttctagccattctgcacaaaatattgcttttaatgaacttggcagacaagccattgcggcagatcataattggtctaatggagattatgattcaaaaaatattgtaccagataaaggattagctgtagctagaatggctgcacatattacttatctctcaaa

SEQ ID NO: 234202 - DNA, 832 bp, Unknown
  Bacterial polypeptide expressing nucleotide sequence isolated from the Sargasso Sea
gattttcctttagcatatgaaacttatgggaaattaaataagcttaaagataatgctatcttggtttttcatgccctaacaggtgatcaatttgttgctggtgtaaatccgctaacaaaaaaagaaggttggtggataacggctgtaggcccaggcaaggctatagacacggacaaatattttgtaatttgtgcaaatgttattgggggatgcatgggttcgtggggtcccaaagaaacagacaaaaaaacaaatgaaccttatggattaaattttccagttattacaattagagatatggtcaaagcccaagaaactcttttagatcatttaggaatagaaaagcttctttgtgccacaggaggatctatgggaggaatgcaggcactccaattctgtgcaacatttccaaatagaactttttcttcaatcccaattgcttgtagcacaagccatagcgcacaaaatattgctcttaatgaattagctagacaagctattatggcagatcctgtatgggataaaggaaaatatttaaaaaaaaatactcagcccaaaaatggtttagctgttgcaagaatggttggccacatcagttacttatctgaaaatggaatgcaagaaaagtttggcagaaaacttcaagaaaaagctgactatgaattcagttttgatgctgattttcaagtcgaaagctatttaagacatcaaggttatacatttgttgaaagatttgatgcaaattctattttgtacataacaagagcgatggattactttgatttatccagacagtttaaaggtggacttgttgaggcttttaaaaatcaga

SEQ ID NO: 234203 - DNA, 579 bp, Unknown
  Bacterial polypeptide expressing nucleotide sequence isolated from the Sargasso Sea
aaaatattgcttttaatgaattaggcagacaagctatcgcggccgatcataattggttagatggaaaatattcatctaagaatattgtacctgacaaaggtttagcagtagcaagaatggcagcacatattacttatttatctaaaaaaggacttcaagaaaaatttggtagaaatcttcaagaaagagattctcttaaatttggctttgatgctgactttcaaattgaaagttatttgaggtatcagggttctgtattcgtagatcgttttgatgcaaacagctatctatatatcacgagagcaatggactattttgacttggtcaaacagtttaatggtaatttatctaatgcttttaaaaatacgcgtgctaaattttttataatatcttttacttcagattggctttatccaacacaagaaaataaagatattgttattgccttaaatgcgattggtgctgatgtaggatttgtagaaataaagtctgataaaggacatgattcttttttacttgatgttcctgattttttaaaagctttaaaaaattttttagataaatcttatgatgattaat

SEQ ID NO: 234204 - DNA, 331 bp, Unknown
  Bacterial polypeptide expressing nucleotide sequence isolated from the Sargasso Sea
ttaaaaatagaaaaattatttgcagttgctggcggctccatgggtggaatgcaagttttacaattcgtatcaaactttccgaataaggctaaagtagctttaccaattgcttgtacggctagtcattcagctcaaaatattgcttttaatgaacttggaagacaagcaataatgtgtgatagcaattggaaagagggattgtattatgaaaaatcaacaaatccagataaaggtttagctgttgctaggatggctgctcatatcacgtatttatcaaaacaaggtttacaagaaaagtttggaaggaatcttcaagaaagatctgatttaa

SEQ ID NO: 234205 - DNA, 544 bp, Unknown
  Bacterial polypeptide expressing nucleotide sequence isolated from the Sargasso Sea
ttaggtcgtcaggcaataatggccgatgtaaattggaattccggaaattataaagataaaaatagtaatcgttcaaaaggcctttcaattgcgaggatgacagctcatgttatttatttatctgaagcttcactaacaaagaaatttggtagaaaattacaggataaaacagatcttggttttggttttgatgctgattttcaaattgagagttatttaagacatcaaggtcatacatttgttgatagatttgatgccaactcctatttatacataacaagggcaatggattactttgacttagaaaaaacccataaaaagtctcttacagaaatatatgctaatactaatttaaaattcctaattgtatcatttactggagattggctttatccaacatctgaaaacttaatgatagttagggctctcagcgcaggtggagttgatgtaagttttgttgaaattgactccgataaaggtcatgatgcatttttattagatgagccagaatttgatgtttgtctggatggatttcttaaatcat

SEQ ID NO: 234206 - DNA, 511 bp, Unknown
  Bacterial polypeptide expressing nucleotide sequence isolated from the Sargasso Sea
agtcctgataaaggattggctattgctagaatggcagcacatattacttatttatcaaaaaaaggtctccaggaaaaatttggtagaaagttacaagagagagatgatttaaaatttagttttgatgctgattttcaaattgagagttatcttagatatcaaggatcagtgtttgttgatagatttgatgcaaacagttatttgtatattactagagcaatggattacttcgatttatcaaaacaatttaatggtaatctatcagcagctttcagtaagaccacatctaaattttttgtaatttcgttcacttcagattggttatatccaactgctgaaaatagagagatagttatagctttaaatgcaattggtgcagatgttggttttgtagaaatagagtcagacaaaggacacgactcatttcttttaaacgtgccagaatttttagatactttagggaactatttaaaaacaaattataaaactataaatgaaaaaagaatttaaa

SEQ ID NO: 234207 - DNA, 823 bp, Unknown
  Bacterial polypeptide expressing nucleotide sequence isolated from the Sargasso Sea
tatgagtaattttgataagataaaaagtataactattaagcaacctcttaaacttgattgtggaaaggaaatatcaaattttccactagcttatgagacttacggaaatcttaatgaaaaaaaagacaatgcaatacttattttccatgcattaactggagatcaatttgcttcaggtgtaaaccctgtgacaaataaagaaggatggtggaattatgcagttggtccaggtaaagcttttgatactgaaaaattttttgtaatttgtgcaaatgttattggtggatgtatgggttcatacggaccaggaagtgttgatcctaaaactaacaaaccaataggaacgaattttcctgttataacaataaacgatatggttaatgctcaatacaatcttttggatcatttcaaaatagaaaaattatttgcagtagctggtggttcaatgggtgggatgcaagtattacaatttgtctcaaattttccaaacaaggctatggttgctttaccaattgcttgtacagctagtcactcagctcaaaatattgctttcaatgagcttggaagacaagcaatcatgtcagatataaattggaaggatggtttatatgatggaaagataagtaatccagacaagggtttagctgttgctagaatggctgcacatattacgtatttatctaaaaaaggattacaagaaaaatttggacgaaatctgcaagaaagatcagatttaaaatttggatttgatgctgactttcaaattgagagttatttaagatatcaaggctctgtttttgtggatagatttgatgcaaatagt

SEQ ID NO: 234208 - DNA, 686 bp, Unknown
  Bacterial polypeptide expressing nucleotide sequence isolated from the Sargasso Sea
ggagatggttgctggtggaagtttaggtggaatgcaagcacttcaatgggcaatctcatatcctaacagagttaaaaaggctgcaataatagcagcctcatcaaaaattagtactcaaaatattgcattaaatgaagttgctcgggaaataattaaaaaagatgaagattttcataatggtgattatttgtctaaggatgtctctcctaaaaaaggtttgaaggctgcaagaatgcttgggcatataacttatttatctgaatctaacatgagcaaaaggttcggaaggaggctacaagatccaaagaataagatagatgcagatgtaaactatgaggtggaaaattatcttcaatataaaggcgagcaatttgctaatacctttgatgcgaatagctatatcctaatgactaaagccatggacagttttgatccagctaaagattttgataataatttaattaaatgtcttcaaaccattcaagctaaattacttgttatatcttttgattcagattggctgtttccaaaagagtatgggatagaaatccaaatgtctgcaattaaagcaggaatcgatagctcatatatagaacttgaaggtgattacggtcatgatagctttcttttttattccgaacagtattcggttgcgctttcaaacttcttaaaatctgatggataat

SEQ ID NO: 234209 - DNA, 715 bp, Unknown
  Bacterial polypeptide expressing nucleotide sequence isolated from the Sargasso Sea
ttatgtgcgacagggggttcgatgggtggtatgcagttattacaattttgtgctgcatttcctaataaaacattttcagctattccaatagcatgtagctcaagtcacagcgctcagaatattgctttaaatgaattagcgcgtcaagctattatgtctgatcctgtttgggacaatggaaaatatgttttaaagaatgttcaaccgaaaaatggattagctgttgcaagaatggtagggcatattagttacctatcagaaaaaggtatgcaggaaaagtttggaaggaaattgcaggaaaaagcagattatgaatttagttttaatgcagatttccaagtagaaagttatttgagacatcaaggtttcgcttttgttgaaaggtttgatgcaaactcagtgctatatattacaagagcgatggattatttcgatttatcaaaacaatttaagggaggtcttatagaggcatttagtagtcaaaaaactaaatttttagttatctctttttcatcggactggttatatacaacgaaagataacaaagatatagtaatagcgttaaatgcttctggagcagacgtatcctattctgagatagttacagataaaggacatgactcatttttactaaatgaaaccgagtttttaaaaaccttgaaagggtttattgactccatgcatgaaaaatttaaaaatgaaaaaagaatttaaa

SEQ ID NO: 234210 - DNA, 439 bp, Unknown
  Bacterial polypeptide expressing nucleotide sequence isolated from the Sargasso Sea
gatgcatagaaaatttggaagaaaacttcaatcaagagatattatttcttttggatttgatgctgattttcaagttgagagttatctgagatatcaaggtaaatcatttgttgaaagatttgatgcaaattcatatctttatttaacaagggctatggattattttgatcatgatgaaacatttagaaaaaatattgagtttagtcataatccaaataaccatttaaaatatttaattgtctcatttacctcggattggttattccctacaatagaaagtaaaatgattgtaaatcaattaaattctctatcaagagaagtaagctttctagaaattgatactgataaaggacatgatagttttttattagaggaaccacagttagatgatgtaataaaaggtttcctaacgaacaactttgcgaaaatagatgaataa

SEQ ID NO: 234211 - DNA, 753 bp, Unknown
  Bacterial polypeptide expressing nucleotide sequence isolated from the Sargasso Sea
taaagcaatagatactaataaatattttgtcatttgtgctaatgttattggtggatgtatgggtagctatggtcctaaagaaataaatccagaaactaataaattatttggaacaacattcccggttataacaataagagacatggtaaaggctcaaaaatatttaatagatcatttgggcataaaaaaattacttgcggtaataggtggctcaatgggtggaatgcaagttttacaatttgcctctttatatcctgatatgtcttattctgctataccaatagcatgtagtgctagccattctgctcaaaacattgcactaaatgaattgggtcgacaagctattatggctgatccaaactggaaaaaagaaaatgcttccccagataaaggtttagctgtcgcaagaatggctgctcatattacttatctttctaaaaagggccttcaagaaaaatttggaagaaaacttcaagataaaggaagtttaaaatttagttttgatgcagattttcaaatagaaagttacttgcgttatcaaggatcaacttttgtagatagattcgatgctaatagttatttgtatattactagagcaatggattattttgatttagaaaaacaatttcaaggaaatctatctctggcttttaaaaatacaaaatcaaagttttgtataatctcattttcttctgattggctttatcctactattgaaaataaggaaatagttatagctttaaattcttgtgg

SEQ ID NO: 234212 - DNA, 865 bp, Unknown
  Bacterial polypeptide expressing nucleotide sequence isolated from the Sargasso Sea
agattaactagccaaagtatagcatttgatattataggaagaaacgctattcgaagagatccaaattttcatgatggtcaatactatgataaaaaagaaactccggatacaggattagcattggcaagaatgcttggtcatattacgtatttgtctcaagaatcaatgagtgaaaaatttgaccaagacaggtatgatcctaaagatattgatacaaattttgaaaagcaattttctgtaggctcatatttagcttaccaaggagataaatttgttgaaagatttgatcctaattcatatatagttctttcagaggcaatggataaatttgatctgggagaaaatagtacttcgatatcaaataaacttaaaaataaaaatttaaaatggtttttgattagtttttcaagtgactggttattccctacttctttatctcaagaattaactaaagctttatttatggctaaagaacaggtgagttttattgaagtgcctagcaattgcggacatgatgcttttttattagatgatgatattaattattatggcaactatgtttcaaattttatagaagatatatttgctgatattaataaaactaatataaaacaagctaataaaacattaagttttaatcatgaattgatattagattttgttacggaatccaaaagcataatagatatgggctgcggagatgggagtttgctagattatataaatcaccataaccaagcagaatctttacttggtattgataatgatttagacgaacttttacaagcttcaaagaaaggaatccctgtattaagtttagatttaaattcagatttgacaattattggtgataaacagttcgata

SEQ ID NO: 234213 - DNA, 823 bp, Unknown
  Bacterial polypeptide expressing nucleotide sequence isolated from the Sargasso Sea
attgatcctaaaaccaacaatccaataggaacaaattttcctgttattacaataaacgatatggttaatgctcaatacaatcttttagatcatttcaagatagaaagattatttgcagttgctggtggctctatgggtgggatgcaagtattacaatttgtatcaaattttccaaacaaggctaaggttgctttgccaattgcttgtacagctagtcactcagctcaaaatattgctttcaatgagcttggaagacaggcaatcatgtcagatacaaattggaatgatgggttatatgacggaaagacaaataatccagacaaaggtttggctgttgctagaatggctgcacatattacatatttatcaaaaaaaggattacaagaaaaatttggacgaaatctccaagaaagatcagatttaaagtttggatttgatgctgactttcaaattgagagttatttaagatatcaaggctctgtttttgtgaatagatttgatgcaaatagttacttgtacattactagagcaatggactactttgatttgacaaaacaacatggtggtaatctttctaaagcttttaaagaaagtaagaccaaattttttattatttcatttacttcagattggttgtacccaacctctgaaaataaagacattgtaattgcactaaatgctataggagctgatgttggttttgtagaaattaaaactgacaaaggccatgactcatttttattagatgtaccagattttttaagcactataaaaaactacttaaacaccacttatttaaatataaatgaaagaagaatttaaa

SEQ ID NO: 234214 - DNA, 634 bp, Unknown
  Bacterial polypeptide expressing nucleotide sequence isolated from the Sargasso Sea
gccttgccaattgcttgtacagctagtcactcagcacaaaatattgctttcaatgaacttggaagacaagcaattatgtctgatattaactggaaaaatggtttatatgatggaaaaacatttaatccagacaaaggtttggctgtagctagaatggcagcacatattacatatttatcaaaaaaaggattacaagaaaaatttggtcgaaatctacaagaaagatctgatttaaagtttggtttcgatgctgactttcaaattgagagttatttaagatatcaaggctcagtttttgtggatagatttgatgcaaatagttacttatatattacaagagcaatggactactttgatttgacaaaacaatatggtgggaatctttctagagcttttaaagatagtaagacaaaatttttcattatttcatttacttcagattggttatatccaacttctgaaaataaagacattgtaatagcactaaatgctataggatctgatgttggttttgtagaaattaaaactgacaaaggtcatgactcatttttattagatgtgccagattttttaagcactattaaaaactacttaaacactacttatttaaatatagatgaaagaagaatttaaa

SEQ ID NO: 234215 - DNA, 817 bp, Unknown
  Bacterial polypeptide expressing nucleotide sequence isolated from the Sargasso Sea
aaaaaagccttttggattagattttccagtaattacaattaaggatatggttaaagctcaagagtctttattggatcatctgaaaatagataaattactttgtgctactggtggttcaatgggtggaatgcaagctttacaattttgcgctatatacccagaaaaaactttttcagctattccaatagcttgtagctcaagtcatagtgcacaaaatattgctttaaatgaattagcacgtcaagcaattatggctgaccctgtgtgggatgatggaaaatatgttttaaagaatactcaaccaaaaaatggtttggcagtagcaagaatggttggacatataagttatttatctgaaaaaggaatgcaggaaaaatttggaagaaagttacaagaaaaagcagattatgaatttagctttaacgcagactttcaagtagaaagttatttaagacatcaaggttatacttttgtagaaagatttgacgctaattcaatactttatataacaagagcaatggattattttgacctttcaaaacaatttaaaggtggtctcattgaagcttttaaaaatcaaaaaactaaatttttaattatatctttttcttctgactggctttatacaacaaaagataacaaagacattgtaatagctttaaatgcatcaggtgcagatgtttcatattcagaaataatttctgacaaaggtcatgactcttttttacttgatgaaccagaatttttaaaaactttaaaaggatttatagactccatgtacgaaaaatttaaaaatgaaaaaaagaatttaaagtaa

SEQ ID NO: 234216 - DNA, 682 bp, Unknown
  Bacterial polypeptide expressing nucleotide sequence isolated from the Sargasso Sea
aagtgataacggtaaacctttaggaacaaattttccagtaataactattaatgatatggtaaatgctcagtataacctcttagatttttttaaaattaacaagttattttctgtcattggaggctctatgggcggaatgcaggtacttcaatttgtctcaaattttcccgaaaaatcacatactgcaattccaattgcgtgtactgcaagtcattctgctcaaaatattgcactaaatgaattaggaaggcagtcaattatggctgaccataattggatggacgggttttatgtagagaataaaaaagttcctgataaagggctcgctgttgctaggatggctgctcatatcacttatttgtcaaaaaaaggtttacaggaaaaatttggaagaaagcttcaagaaagagatgatttaaaatttggttttgacgctgattttcaaatagaaagctacctgagatatcaaggctctgtttttgtagatagatttgatgcaaatagttatttatatataaccagagcgatggattattttgatttaacaaaacaattcaatggtaacttatctaaagcttttgaaaagacaaattctaaattttttgtcatctcatttacatctgactggttatatccaacatctgaaaatagagatatagttatagctttaaaattcatttag

SEQ ID NO: 234217 - DNA, 756 bp, Unknown
  Bacterial polypeptide expressing nucleotide sequence isolated from the Sargasso Sea
tatgaatacaaaatttattactgatacaaaacttgaaagcgaaatagcttatttcgataatattagtttaaaactagaatcaggagatataatagatagttttaaactagcattcaaaacttttggtaaattaaatacagataaatctaatgctattcttgtgtgtcacgctcttactggagatcaatatgtttctggcaataatcccattactggaagagaaggttggtggtctagaatggttgggccaaataaaccaattgatacaaacaaattttttgtaatttgttcaaatgtacttggcggttgtgctggttcaactggtcctaaagaattacaaaatggaagtgatgttgcgtatggaggtaattttccttccgtaacaataaaagatatggtgaaggctcaatctttattaattgaaagtttaaatatagataaattattttctgtgattggcggttcgatgggggcaatgcaagcacttcagtggtcaatcgattttccagataaaattttaaatataatacatattgcaggagccttaaaacattcagctcaaaatattgcctttcacgaagttgggcgacaagcaataatgagtgatcctatctggaaaaatggaaaatattttgaaaataatgaggtgccagaaagaggtctatcagtagcaagaatgattgcacatatcacatatttatctgaagatgcaatgcatagaaaatttggaagaaaacttcaatcaagagatattat

SEQ ID NO: 234218 - DNA, 505 bp, Unknown
  Bacterial polypeptide expressing nucleotide sequence isolated from the Sargasso Sea
gcaaaataaacagccagataaagggcttgcagttgcaagaatggcagcacacataacttatttatccaaagcaggtcttcaagaaaagtttggtagaaagctgcaagaaagagatgatttaaaatttagctttgatgctgactttcaaatagaaagttatctaagatatcaaggctcagtttttgtggataggtttgatgcaaatagctatttatatattacaagagctatggattattttgatttaacaaagaagttcgggggtaatctatccaaagcatttgaaaaaagtgatacaaaattttttgtaatatcttttacatcagattggctctatccaacatctgaaaacagagaaatagtgatagcacttaatgctattggtaaagacgttggatttgttgaaattacatctgataaaggacacgactcttttttacttgatgttccagacttcctcaacactgtgaggaattttttaaacaaatcttatgagaaaatttaa

SEQ ID NO: 234219 - DNA, 865 bp, Unknown
  Bacterial polypeptide expressing nucleotide sequence isolated from the Sargasso Sea
ttggtccaaaataaaccaatagatacaaataaattctttgtaatttgttcaaatgttctaggtggttgtgcaggaacttctggtcctaaagaaattgaattaaaaaacgaaaaaccctacggtgttaaatttccttctataacaataaaagatattgttaaagcacaaaattatttaatagatgctctggaaattaaaaaactatttgctgttattggtggatcaatgggagcaatgcaagctcttcaatggtcacttgattttcctgataaaatttataatgtaattcatattgcaggagctcttaaacactctgcacaaaatatagcttttcatgaagtaggtaggcaagcaatcatgaatgatgctaattggaataaaggagaataccagcaaaaaaaaattattcctgaaagaggtttagctgttgcaagaatgatagctcatattacttacctttctgatgatgctatgcatcgtaaatttggaagaaagttacaatcaagagatataatctcttttggttttgatgcagattttcaaattgaaagctatttaagatatcaagggcgttcttttgtggaaagatttgatgcaaatagctatctttatttaacaagagcgatggattattttgatattactaaaaaattctcaactaatattgaatttccaacaatatcaaatacacatctaaattatttggtgatttcttttacttctgactggctatttccgactaacgaaaacaaagatattgtcaaaatacttaattatttcaatcgaaatgttagttttactgaaattgataaagacaaggggcatgatagttttcttttagatgagcccagatttggatataaca

SEQ ID NO: 234220 - DNA, 535 bp, Unknown
  Bacterial polypeptide expressing nucleotide sequence isolated from the Sargasso Sea
gatgaaaactggaaaaatggtagttatgagttagaaaataagtctcctgctaaaggattgtctgttgcaagaatggcggcccacataacatatttatcaaaaaaaggtcttcaggaaaaatttggcagaaaacttcaagagcgagacaaaattaaatttggttttgatgccgactttcaaattgagagttatcttagataccagggatcaatatttgttgatcgtttcgatgcaaatagctatctttatataacaagagcaatggattattttgatcttagcaaaaattctaatggcgatctttcaaaagtatttaaaaatacaaaaaccaaattttttataatttcatttacttctgactggttgtatccaacagctgaaaatagagagatagtgattgccctaaatgcgataaatgcagatgtgggatttttagaggtaaaatctgataaaggtcacgactcttttttattagatgttcctgattttgtaaatgcattaaagaattttgttgataactcatataaaaaataat

SEQ ID NO: 234221 - DNA, 877 bp, Unknown
  Bacterial polypeptide expressing nucleotide sequence isolated from the Sargasso Sea
ttttttttggatgaatataaaacttgagaatataaagaaattagacataactaaaccgcttaaactagattgcggaaaaaccataaaagattttcctctcgcttacgagacttacggaaaattaaacgataacaaggacaacgcaatacttgtgtttcatgcattaacaggagatcagttcgtaactggaaccaatcctattactaacaaagagggttggtgggtaactgcagtaggtcctggtaaagcaattgatacaaataaatattttgtaatttgtgctaatgttattggcggttgtatggggtcattaggacctagaaacattaatcctgatacaaaaagaccatacggcttagattttccagtaattacgattaaagatatggtgagagcccaagagtctttacttgaacatctgggtataaagaaacttttatgtgctactggtggttcaatggggggaatgcaattgttacaattttgtgcaacgtttcctgataaaactttttcagctattccgatagcttgtagttcaagtcatagtgctcaaaatatagctctaaatgaattagcgcgtcaagcaattatggctgatcctgtgtgggaaaatggaaaatacgttttaaaagatgttcaaccaaaaaacggattggctgttgctaggatggttggtcatattagctacttgtcagaaaaaggtatgcaggaaaaatttggaagaaaattacaagagaaagcagattatgaatttagttttaatgctgattttcaagttgagagctacttaaggcatcaaggttatgcttttgttgaaagatttgatgcaaactccagtgctgtatattaccagagcaatggattattttatcttcaa

SEQ ID NO: 234222 - DNA, 730 bp, Unknown
  Bacterial polypeptide expressing nucleotide sequence isolated from the Sargasso Sea
tttaaaattgaaaaattattttcagttgtgggtggatctatgggtggaatgcaagtattgcaatttgtatctaattttccaaataaatcacacacggctattccaattgcttgtacagctagtcactctgcacaaaacattgctttaaacgaactaggaagacaatcaattatggcagatcataactggttaaatggattttatgaagaaaataaaaaatcgccagataaaggattggctgttgccagaatggctgcacatataacttatttgtcaaaaaaaggtctgcaagaaaagtttggtagaaaacttcaagaaagagatgatttgaatttcggttttgatgcagattttcaaattgaaagctatcttagataccaaggttcagtctttgtagataggtttgatgctaatagttatctctatatcactagagcaatggactatttcgatcttataaaacaatttaatggaaatctttcaaaagcttttgaaaaatctaatactaaattctttattatatcttttacctctgattggttatatccaacatctgaaaatagagacatcgtcattgcattaaactctattggaaaagatgtgggctttgctgaaataaaatctgataaaggtcatgattcatttctactagacgttccagattttcttaatacaattaaaaattttttaaatacatcatataataaacttaatgaaaaaagaatttaac

SEQ ID NO: 234223 - DNA, 474 bp, Unknown
  Bacterial polypeptide expressing nucleotide sequence isolated from the Sargasso Sea
aaggcctttcaattgcgaggatgacagctcatgttacttatttatctgaagcttcactaacaaagaaatttggtagaaaattacaggataaaacagatcttggttttggttttgatgctgattttcaaattgagagttatttaagacatcaaggtcatacatttgttgatagatttgatgccaactcctatttatacataacaagggcaatggattactttgacttagaaaaaacccataaaaagtctcttacagaaatatatgctaatactaatttaaaattcctaattgtatcatttactggagattggctttatccaacatctgaaaacttaatgatagttagggctctcagcgcaggtggagttgatgtaagttttgttgaaattgactccgataaaggtcatgatgcatttttattagatgagccagaatttgatgtttgtctggatggatttcttaaatcattatgat

SEQ ID NO: 234224 - DNA, 529 bp, Unknown
  Bacterial polypeptide expressing nucleotide sequence isolated from the Sargasso Sea
tatgaagaaaacaaaaaatcacctgataaaggtttagctgttgcaaggatggctgctcatatcacatatttatcaaagaaaggtttacaggaaaagtttggaagaaaattgcaagaaagagatgatttaaaatttggatttgatgcagactttcaaatagaaagctatttaagatatcagggttcagtttttgttgatcgtttcgatgcaaatagttatttatttataacaagagctatggattattttgatctaacaaaacaatttaatggaaatctttctaaagcatttgagaatagtgaaacaaaattttttgttatttcttttacatctgactggctataccctacatccgaaaatcgggaaatagtaatagcacttaacgcaatcggaaaagacgtcggatttgcagaaataacatcggataagggacatgattcatttttattagatgttccagattttcttagtgctgttaaaaattttttaaaagcttcttataaaaaaatcaatgaaaaaagaatttaat

SEQ ID NO: 234225 - DNA, 590 bp, Unknown
  Bacterial polypeptide expressing nucleotide sequence isolated from the Sargasso Sea
ttccgcacaaaatattgcatttaatgaacttggaagacaggcaatagcagctgaccacaagtggcaagatggtgaatattcatctaaaaatactattccagataagggtttagcagtcgctcgaatggctgcacatataacttatttgtcaaaaaaaggtcttcaagaaaaatttggaagaaaacttcaagaaagagatgatttaaaatttggatttgacgctgactttcaaatcgaaagttatttaaggtaccaaggatcagtatttgtagatcgatttgatgctaacagctacttatatattaccagagcgatggattattttgatttagtaaaacaaaataatggtaatctatcaaatgctttcaaaaataccaaagcaaaattttttataatatcatttacatcagattggctttatccaacgcaagaaaataaagatatagttattgcattaaatgccattggagcaaatgtgggatttgtagagattaaatctgataaaggacacgactcctttttgttagatgttccagattttttaaaagctcttaaaaattttttagataagtcatttttagagaaataaa

SEQ ID NO: 234226 - DNA, 679 bp, Unknown
  Bacterial polypeptide expressing nucleotide sequence isolated from the Sargasso Sea
atgaaatcaaaaacagagcttattaattttagtgagggtattacattagaatcaggtaaaaaattagattcatttgatttaatggtagaaacttatggggaactaaatgaatcaaaaactaatgccatactattatgtcatgcattttctggtaatcatcatgctgcaggtgagaataaaaataaagaaattgggtggtgggatcaacttgttggtccaaataaagcaattgatacaaacaaaaattttgttgtatgttgtaataatattggtggatgtgctggttcttctggcccaacaagcattaaccctgcaactaagaaggcttatggaagtgacttcccaatagttagtgttagtgattgggtaaattctcaaaaaatgttaatggataggttaaatatcccatattggcattttgttgctggaggcagtttaggtggaatgcaagcattggaatggtctattgcctatccagataaaataaaaaaagcaggaatttttgctgctgcagcaaaatcaagtacacaaaatattgctatgaatgaagttgcaagagaatcaattagaaaagataaaaattttcataatggtaactatatagaacataacgttgttccaaaaaatggtattaaaactgcaagaatgttgggccacattacatacttatctgaaaagc

SEQ ID NO: 234227 - DNA, 811 bp, Unknown
  Bacterial polypeptide expressing nucleotide sequence isolated from the Sargasso Sea
gatatgaatattaaagaaaatattaaaacgttaataataaataaaccacttaagctagattgtggtcaaacaataaataattttcctttagcgtatgaaacttatggtacgcttaacaagaaaaaagataatgcaattttagtttttcatgcattaactggtgaccaatttgtcactggtataaatccaataaccaaaaaagatggttggtggtcttacgctgttggtccaaacaaatctattgatacaaataaatattttgtaatctgcgctaatgttatcggcggttgtatgggatcatttggtccaagccacgaaaatccaaaaacaaaaaaaatttatggaacagattttccagtcattacaattaatgacatggttaatgcccaaataaatttattagatttctttggtattaaaaaacttttttcagttgcaggtggttctatgggcggaatgcaagttttacaatttataagcaattttccagataaagccaaaacagttatacccattgcgtgtacatctagccactcagcacaaaatattgcttttaacgaacttggtagacaagctatcgctgcagaccacaactggcagaatggaaaatatacctcacagaatacaattcctgataaaggattagcagttgcaagaatggcagcacatattacttatctctccaaaaaaggacttcaagaaaaattcggaagaaaattacaagagagagatgatcttaaatttggttttgatgctgactttcaaattgaaagttatttaagataccaaggttcagtgtttgttgatcgat

SEQ ID NO: 234228 - DNA, 571 bp, Unknown
  Bacterial polypeptide expressing nucleotide sequence isolated from the Sargasso Sea
tttgaatgaattaggaagacaagcaattacagctgatagtaactggaaagatggaaattatagttcaagcaatacaagtccaggaaaaggattagcagtagctagaatggctgcccatataacttatctgtcaaaaaaaggtttacaggaaaaatttggaagaaaattacaagaaagagaagatcttaaatttggttttgatgcagatttccaaattgaaagctacttaagatatcaaggttcagtttttgtagatagatttgatgctaatagttatctttatatcacaagagctatggattattttgatttaactaaacaattcaaaggtaatttgtcagatgcatttaaaaatacaaaagctaaatttttcataatttcttttacttcagattggctttatccaactcaagaaaataaagatatagttatagcattaaattcaattggagcagatgtagggtttgttgaaattaagtctgataaagggcatgattcttttttattagatgtccctgactttttaaatgccctaaaaaactttttagataaatcttatatagaaaattaa

SEQ ID NO: 234229 - DNA, 779 bp, Unknown
  Bacterial polypeptide expressing nucleotide sequence isolated from the Sargasso Sea
tggtgatcaatttgcatcgggcataaatccaattacaaaaaaagatgggtggtggaaatatgctttaggtccaggtaaagcatttgataccgaaaaattttttgttatatctgcaaatgttattggtggatgtatgggctcatatggaccaagcacaattaatgaaattactagtaaacctttaggaacagattttccagttattacaataaatgatatggtaaatgctcaatacaatcttttagattttttcaaaatagaaactttatttgctgttgcaggaggttctatgggtggaatgcaagttttacagtttgtttcaaactttccaaataaagcaaaagtagctgttccaatcgcttgtacagcaagtcattctgcacagaacattgcattaaatgaacttggaaggcaatcaattatggctgatacaaactggcaaaatggttcatatggagaaagagaaaaaagtcctgataaaggtttggctgttgcaagaatggcagcacacattacatatttatcaaaaaaaggattgcaagagaagtttggaagaaaactccaagaaagagatgatttaaaatttagttttgatgctgattttcagattgaaagctatttaagacatcagggagctgcttttgtagatcgatttgatgccaacagctacctatatattacaagagctatggactattttgatttaactaaaaaatttgatggaaatttatcaaaagcttttgctaacagtaaaacaaagttttttgttatatcgttta

SEQ ID NO: 234230 - DNA, 900 bp, Unknown
  Bacterial polypeptide expressing nucleotide sequence isolated from the Sargasso Sea
gtccaggaaaagccattgataccgacaagtattttgtaatttgcgcaaacgtcatcggaggatgtatgggatcttttggaccaagccacattaataacgagaataataaaccttatggaactaattttccagtcattacaattaatgacatggtaaacgcccaagtaaacctattagatttttttggtatcaaaaaactgttttcagtaattggaggatctatgggaggaatgcaagtattgcagtttgtttcaaactttcctgacaaatcgtttactgccttaccaattgcttgtacttcaagtcactcggctcaaaatattgctcttaatgaacttggtcgtcaatcaataatggctgatgtaaattggaacaaaggaagctactatgaaaacaaattttctcctgataaaggattggcagttgccagaatggcagctcatatcacttatttatcaaaaaaagggcttcaggaaaaatttggaagaaaactgcaagaaagagattatttaaattttagtttcgatgcggattttcaaattgaaagctatcttagatatcaaggttccgtttttgtagatagattcgatgcaaatagctatttatatataacaagagcaatggattattttgatttatcgaaaaaatttaatggaaatttgtcgcttgcattcaaacatactgatactaaattttttattatctctttctcatctgactggctttatcctactgctgaaaatcatgaaattgtcatagctttaaatgcaataagtaaagatgttggttttattgaaattaaatctgataaggggcatgactcttttttattagatatacctgattttcataaagcagtcagaaattttttaaacaattcttacgaaaaaataaaatgaa

SEQ ID NO: 234231 - DNA, 814 bp, Unknown
  Bacterial polypeptide expressing nucleotide sequence isolated from the Sargasso Sea
gcaatattaacttttcatgctttatcaggtgaccaatttgttacaggtacaaatccaataactaataaaaacggctggtggtcatatttagtaggacctaataaggcagttgatacaaacaaattttttgtgatatgtgcaaatgtaattggcggatgtatgggttcctatggtccaagtagtgttgatttaaaaacaaataaaagacttggtacaaattttccagtaattacgatcaatgacatggttaatgctcaatataatttattagatttttttaaaattgaaaaattatttagtgtgatgggaggatcaatgggaggaatgcaagttttacagtttgttgcaaactatcccaagaaaactaaaactgctattcccatagcctgcacagctagtcattcagcgcagaatattgctcttaatgagttgggtagacaagcaataatggcggatagtaattggaaaaaaggagattatttaaatttagaaaattctccagacaaaggtttgtctgttgctagaatggcagctcatattacttatctttctcaaaaaggtttacaagaaaagtttggaagaaaacttcaagaaagagatgacttaaaatttagttttgatgcagatttccaaattgaaagctatcttagacaccaaggttctgcatttgttgatagatttgatgcaaatagctatctttatataacaagagcaatggattattttgatttaataaaacagtataaaggaaatctttctcatgcttttaaagattcaaaagtaaaattttttataatttcttttacttctgatt

SEQ ID NO: 234232 - DNA, 886 bp, Unknown
  Bacterial polypeptide expressing nucleotide sequence isolated from the Sargasso Sea
ccgctcaaattagattgtggaaaaacaattaataattttccactagcctatgaaacttatggaaagttgagtaaagataaagacaatgcaattttagttttccatgcgctaacaggtgatcaatttatttctgaaactaatcctattacaaacaaagagggatggtggacgactgctgttggtccagggaaagccatagataccgataaatattttgtaatttgtgcaaatgtaataggtggttgcatgggttctttagggcctaaagatattaatcccgaaactaaacaaccttacggattggattttccagtaattacaattagagatatggtgagagcccaagaatcattacttgatcatcttgggataaaaaaacttttatgtgcaaccggaggatcaatgggtggcatgcagcttttacaattttgctcgacttttcctgataaagcattttcagctattcccattgcttgtagttctagtcacagcgcacaaaatattgctttaaatgaattggcgcgtcaagccataatggcagacccagtttgggacaaaggtaaatactttctcaaaaacgttcaaccaaaaaatggattagcagttgcaagaatggttgggcatataagttatttatcagaaaaaggtatgcaggaaaaatttggcagaaaattacaagagaaagcagattatgaatttagctttaatgcagattttcaagttgaaagttacttaaggcatcaaggctacgcatttgtagaaagattcgatgcaaactctgttttatatataacaagagcaatggattattttgacctttctaaacaatttaaaggtggtttagttgaagcttttaaaggtcaaaaaactaaatttttaattattt

SEQ ID NO: 234233 - DNA, 622 bp, Unknown
  Bacterial polypeptide expressing nucleotide sequence isolated from the Sargasso Sea
aaaactaaaactgcaattcctatcgcatgtaccgcaagtcactctgcacaaaatattgccttcaacgaacttggcagacaatcaattatggctgatgctaattggaaaaatggaaattactcatatttaaattctacaccagacaaaggtcttgcggttgcaagaatggcagcacatatcacttatctttcaaaaaaaggtctgcaagaaaaatttggtaggaagcttcaagaaaaagatgacttaaattttagttttgatgcagactttcaaattgagagctatttaagatatcaaggatcaatttttgtagatagatttgatgcaaacagttacttgtatataacaagagcaatggactattttgatcttgtaaaacaatataacggaaatttatcaaaggcctttgaaaattctaaaaccaagttttttattatttcttttacttccgattggttatatccaactgcagaaaataaagaaattgtaattgccttaaatgcagcaggtgttgaagtgggttttatagaaataataagcgataaaggacatgattcatttcttttagacgtaccagaatttttaaaaactgtaaaaaattttttagaagctaattattaat

SEQ ID NO: 234234 - DNA, 713 bp, Unknown
  Bacterial polypeptide expressing nucleotide sequence isolated from the Sargasso Sea
tatgaataatgagaaaagcataaaaactctaattgttaagaaaccactaaaattagactgtggaaagacaataaaagattttccgatagcctatgaaacttatggttcacttaattcaaaaaaagataatgcaattttagtatttcatgctctaacaggagatcaatttgtaactggagtaaatcctgtaactaacaaagagggttggtggagttatgcagtaggtcctgataaggctatcgatacaaataaatattttgttatttgctccaacgtaattggtggatgtatgggatcattcggaccaagtcataaagatcttgatcaaaaaatttttggaacaaattttccagttattacaattaatgacatggtgaatgctcaatataatttacttgatcattttggtattgataaactattttccataacaggtggttcaatgggaggtatgcaagtccttcagtttattagtaactttcctaataaatctaaaacagtgataccgatagcaaccacatctagtcattctgcacaaaatattgcttttaacgaactaggtagacaagctattacagctgatagtaactggaaagatgggaactatacatcaaacgaaactaatcctggaaaaggattggcagtagctagaatggcagctcatattacttatttatctaaaaaaggtttacaggaaaaatttggaagaaagt

SEQ ID NO: 234235 - DNA, 693 bp, Unknown
  Bacterial polypeptide expressing nucleotide sequence isolated from the Sargasso Sea
tatgaatatattaaaacaggcaaaaaatattataataacaaaaccacaaaaattagattgtggaaaagaaatttctaattttccaatttcatacgagacatatggaacactaaacgaaaaaaaagataatgctattttagtatttcatgccttaacaggtgatcaatttgcttctggaaaaaaccctattacaaataaagatggttggtggagttatgcacttggttcagggaaagctatagatacagagaaattttttgtgatatgcgccaacgtaattggaggatgtatgggttcatatggtccaagcacaattgatgaggaaacaggcaaacccataggaacaaattttccagttataacaatcaatgatatggttaatgctcagtacaatctactagagcgctttaaaatagataaattatttgcagttatcggtgggtccatgggtggtatgcaggtattacaatttgtatctaattttccggataaggcacatattgcaataccgattgcctgtacatcaagtcattctgcacaaaatattgcgttcaatgaacttggaagacaagcaattcttgctgatgctaattggaagaatggtttgtacgaacaaaataaaacaagtcctgataaaggtttagctgttgcgagaatggcggcacatattacttatttgtcaaaaaaaggtct

SEQ ID NO: 234236 - DNA, 808 bp, Unknown
  Bacterial polypeptide expressing nucleotide sequence isolated from the Sargasso Sea
atggatgaaaaattgaaaaatattaaaaaattaaacgtttcaaaacctcttttgctagattgcaagcaaactgtaaaagatttttctttagcatatgaaacttacggaaaattaaatgaatctaaagataatgccattttagtctttcatgcactaactggtgatcaatttgttagcggggttaatccaatcacaaaaagagagggttggtgggtaactgctgtgggtcctggaaaggccatagacactaataaatattttgtaatttgtgcaaacgttattggagggtgcatgggttcgtggggtcctaaagaaatagacaaaaaaacaaatgagccctatggattgaattttccagtaataaccataagagatatagttaaagcacaagaaactcttctagattatttgggaataaaaaaacttctttgtgctacaggaggctctatgggcggaatgcagttacttcagttttgtgcaacatttcctaatagaactttttctgcagttccgattgcttgcagcacaagccatagtgcacaaaatattgctcttaatgaattagccagacaggctattatggcggatcctgtttgggacaagggaaggtatttaaaaaaaaatgttcaaccaaaaaatggtttggctgttgctagaatggttggacatattagttatttatcagaaaaaggaatgcaggaaaaatttggaagaaaacttcaggaaaaagctgattacgaattcagttttgatgctgattttcaggtcgaaagttatttaagacaccaaaggtttcacatttgtgaaa

SEQ ID NO: 234237 - DNA, 667 bp, Unknown
  Bacterial polypeptide expressing nucleotide sequence isolated from the Sargasso Sea
ttcatttatcaccaactttccagataaagctaaaactgttatacccattgctacaacttcaagtcattcggcacagaatattgctttcaatgaacttggaagacaggcaatcactgctgacagcaattggaaagatggaaattatgaagctaataatacaaatccaggtaaagggcttgctgttgcaagaatggcagctcatataacttatctctcaaaaaaaggtttgcaggaaaagtttggaagaaaattgcaagaaagagaagatttgaaatttggttttgatgcagattttcaaattgaaagttatttgagataccaaggatctgtatttgtagatagatttgatgcaaacagctacctctacataacaagagctatggattattttgatttagttaaacaatttaatgggaatttatctgatgcatttaaaaatactaaagctaaattttttgtaatttcttttacatctgattggctttatccaacccaagaaaataaagatattgttatagctttgaattctattggagcagatgttggttttgtagagattgtgtctgataaaggtcacgactcttttttattggatgttcctgattttttaaacgcactaaagaatttcttagacaaatcttatacagagttaaaaaatgaaaaatga

SEQ ID NO: 234238 - DNA, 802 bp, Unknown
  Bacterial polypeptide expressing nucleotide sequence isolated from the Sargasso Sea
tatggataaatttaataatataaaaaaattaattataaaagatcaacttaagcttgattgtggtcaaactatatctgattttccgatagcttatgaaacctatggaaaactaaattcaaaaaaaaataatgcaattttagtctttcacgctttaacaggagatcaatttgcaactggtataaatccaataactaaaaaagatggttggtggaaatatactcttggaccaggaaaagcaattgatactgaaaaatattttgttatttgtgcaaatgttttgggtggttgcatgggatcatttggacctagcagtgttaatccaaaaactggcaaaatttatgaaattgattttcctgtcattacaataaacgacatggttaatgctcaatattttttaataaaacattttgaaatagaaaaattattttgtgtaacaggtggatcaatgggtggtatgcaagttttacaatttgttgcaaattatcccaatttatctcagatagctgtaccgattgcttgcacatcaaatcactcagcacaaaatatagctttaaatgaacttggtagacaagccatcatggcagatgctaactggcaaaatggaaaatatgaaggtaccaatgaatctccaaacaaaggtctctctgttgctagaatggcagctcatataacatatttatctaaggacgctcttcaagaaaaatttggaagaaagttacaagaaagagatgaattaaaatttagttttgatgcagattttcaaattgaaagttatttaagacaccaaggatcagtttttgtg

SEQ ID NO: 234239 - DNA, 888 bp, Unknown
  Bacterial polypeptide expressing nucleotide sequence isolated from the Sargasso Sea
aatagtaataaagacaacgcgatacttgttttccatgcattaacaggagatcagttcgtgactggaactaatcctattactaataaagagggttggtgggtaactgcagtagggcctgaaagagcaatagatacaaataaatattttgttatttgtgcaaatgtgatcggaggatgtatgggttcgttaggtcctaaagatattaacccagtaacaaaaaaaccttacggattggattttccagttataacaatcaaagatatggttaaagctcaggagtccttacttgaacatctaggaattaaaaaacttttatgtgcgactgggggttcaatgggtggaatgcaacttttacaattttgtgcaacatttccggacaaagctttttcagcggtaccgatagcctgtagctcgagtcatagcgctcaaaatattgctcttaatgaattagcacgtcaagcaattatggcagatcctgtatgggataatggaaagtatgttttaaaaaatgttcaaccaaaaaatggcttagcagttgcaagaatggttgggcatataagttatttatctgaaaaaggtatgcaggaaaaatttggtagaaaattacaagaaaaggcagattatgaatttagttttaatgctgactttcaggttgagagttatttaagacatcaaggctatgcatttgttgaaagatttgatgctaattcagtgctttatataacaagggccatggactattttgatctttcaaaacaatttaaaggaggtttggtagaggcatttaaaaatcaaaaaacaaaattcttaatcatatcattttcctctgattggctttacacaacaaaagataacaaagatatagtaatagcattaaatgcgtcgggt

SEQ ID NO: 234240 - DNA, 846 bp, Unknown
  Bacterial polypeptide expressing nucleotide sequence isolated from the Sargasso Sea
actggggcctaatcaaataaatagtgtaactaataaatattggggagcagattttccggaaatatctatatcggatatggttttagttcaatccaaattaatagaacatttaggtattaaaaaattggtttctgtggtcggcggatctttgggtgcatatcaagctattcagtgggggatacaatttccagaaaaaactcaaagtgttgtgtctttggcaggaggctctagattaacgagccaaagtatagcatttgatattatagggcgaaatgcaatacgaagagatccttatttttatggtggacaatattatgacaaagaagaatctcctgatacaggattggctcttgcaagaatgttaggtcatattacttatttgtctcaacaatctatgagcgacaaatttgacgatgatagatatgaacctaaagatgttgatacaaattttgaaaaacaattctccgtaggttcttatttagcgtatcagggagacaagtttgttgaaagatttgatcctaattcgtatatagtactctctcaagcaatggataaatttgatcttggtgaaaatagtatttcgatatcaaataaattaaaaaataaaaatttaaaatggtttttgattagcttttcaagtgattggttattccccacaagcttatcacaagaattaacaaaggctttatttatggctaaagaacaagtgagttttgttgaagtccctagcaattgtggtcatgatgcttttttgttagaagatgatatagattattatggtaaatatgtttcaaattttatagaacatatttttattgaggatgaaaatactaattccaaacaaaa

SEQ ID NO: 234241 - DNA, 541 bp, Unknown
  Bacterial polypeptide expressing nucleotide sequence isolated from the Sargasso Sea
gctgatgaaatggcaggaaggatttaccaagagcaaaacaaacaacccgataaaggacttgcagttgcaagaatggcagcacatataacttatttatctaaagtaggtcttcaagaaaaatttggaagaaagctgcaagaaagggatgatttaaaatttagttttgatgctgattttcaaatagagagttatttaagatatcaaggatcagtttttgttgatagatttgatgcgaatagctatttatatattacaagagcaatggattattttgaccttacaaaaaaatttggtggtaatttatcaaaagcatttgaaaaaagtcatacaaaattttttataatatcttttacctcagattggctttatccaacttctgaaaatagagatatagtaatagctcttaatgccattggtaaaaatgttggatttgttgaaatttcatctgataaaggtcacgactcttttttacttgatgttccagactttctaaacaccgttaagaattttttaaatacttcttatgaaaatattaaatgaa

SEQ ID NO: 234242 - DNA, 850 bp, Unknown
  Bacterial polypeptide expressing nucleotide sequence isolated from the Sargasso Sea
gtgataggtggttgcatgggttcttttgggccaagtgatattaaccctaatactaaaaaaccttatggaacaaactttccagttataacaattaacgatatggttaatgctcaatataaccttttagagtactttaaaattgaaaaattatttagtgttattggaggatccatgggtggaatgcaagtacttcaatttgtatctaacttccctaataaagctattactgcaattccaattgcctgtacagcaagtcattcagctcaaaatatagctcttaatgaacttggtagacaatctataatggcagatagaaattggcaagatggattttacgaagagaaaaataaacaaccagataaaggacttgcagttgcaagaatggcagcacacataacctatttatcaaaagtaggacttcaagaaaaatttggaaggaagttgcaagagagagacgatttaaaattcagctttgatgctgactttcaaatagaaagttatttaagatatcaaggatctgttttcgttgataggtttgatgcaaatagctatttatatattacaagagctatggattacttcgacttaacaaaaaaatttggtggcaacttatcaagagcttttgaaaaaagtgacacaaaattttttattatatcatttacttcagattggctatatccaacttctgaaaacagggatatagtaattgcactaaatgcaattggtaaaaatgttggatttgtagaaatctcatctgataaaggtcatgactcttttttacttgatgttccagactttcttaatactgttaagaattttttaaatacttcttataaaagaactaaatgaa

SEQ ID NO: 234243 - DNA, 644 bp, Unknown
  Bacterial polypeptide expressing nucleotide sequence isolated from the Sargasso Sea
taaaactaaaactgttatacccattgctacaacttcgagtcattcggcacagaatattgctttcaatgaactaggaagacaggcaatcactgctgacagcaattggaaagatggaaattatgaaactaataacacaaatccaggtaaagggcttgctgttgcaagaatggcagcacatataacttatctctcaaaaaaaggtttgcaggaaaagtttggaagaaaattgcaagaaagagaagatttgaaatttggttttgatgcagattttcaaattgagagttatttgagataccaaggatctgtatttgtagatagatttgatgcaaacagctacctctacataacaagagctatggattattttgatttagttaaacaatttaatgggaatttgtctgatgcatttaaaaatacaaaagctaaattttttgtaatttcttttacttctgattggctttatccaacccaagaaaataaagatattgttatagctttgaattctattggagcagatgttggttttgtagagattgtgtctgataaaggtcacgactcttttttattggatgttcctgattttttaaatgcactaaagaatttcttagacaaatcttatacagagttaaaaaatgaaaaatgaa

SEQ ID NO: 234244 - DNA, 654 bp, Unknown
  Bacterial polypeptide expressing nucleotide sequence isolated from the Sargasso Sea
ttccagataaagcaaaactcgcaataccgattgcttgtacatctagtcactcggcacaaaacatagcgtttaatgaattaggaagacaagcaattatggctgacagtaagtgggaaaatggattttatagtaattacaaattaaatcctgacaaaggtttagcagtagcaagaatggcagcacatattacttatctttctgaaaaaggattgcaggaaaaatttggaagaaaattacaagatagagatagcctaagatatggatttgaggcagattttcaaattgagagctatcttagatatcaaggatctgtgtttgttgatagatttgatgctaatagttatctatatataactcgtgcaatggattattttgacttatccaaacagtacaaaggaaatttatctgatgcattcaaaaaaaccaaaacaaaattttttgtaatatcatttacatcagattggttgtatccaacatcggagaatagagaaatagttatagcattaaattctattggtgcagatgtcggatttgttgaaatagaatctgataagggacatgactcttttttgcttgatgttccaagtttcctaaagacacttggcgattatattaattcaacctacaaaattataaatgaaagaagaatttaat

SEQ ID NO: 234245 - DNA, 869 bp, Unknown
  Bacterial polypeptide expressing nucleotide sequence isolated from the Sargasso Sea
tatgaacgatttaagtaaggtaaaaaagataataattaaaaaaccactaaaattagattgtggaaaagaaatttcaaattttcctttagcatatgaaacttatggtaagttgaatgaaaataaagataatgcaattttagtttttcatgctttaacaggcgatcaatttgcatctggtataaatccaattacaaacaaagatggatggtggagtcatgcattaggtccaggaaaagcatttgatactgaaaaattttttgtaatatctgcaaatgttattggtgggtgtatgggctcttatggaccaagtacaatcaatgaaaatacaaaaaaacctttaggaacagattttcccgttattacaataaatgacatggtcaatgctcaatttaatcttttagatttttttaaaatcgaaactttattcgctgtagctggaggctctatgggtggtatgcaagttttacagtttgtttcaaattttccaaataaagcaaaggtggcagttccaatagcatgtacggcaagtcattcagctcaaaatattgctttaaatgaacttggtagacaatctattatggctgacataaattggcaaaatggttcatatggtgaaaaagaaaaaaatcctgataaaggtttagctgtagcaagaatggctgctcatattacttatttatcaaaaaaaggtttacaagaaaaatttggtaggaaactacaagaaagagatgacttaaaatttagttttgatgctgattttcagatagaaagttatttaagacaccaaggagcggcttttgtagatcgttttgatgccaatagctatctatacattacaagagctatggattattttgatttaacaaaaa

SEQ ID NO: 234246 - DNA, 619 bp, Unknown
  Bacterial polypeptide expressing nucleotide sequence isolated from the Sargasso Sea
attgcgtggtgctttaaaacattctgcacaaaatatcgcttttcatgaagttgggagacaagccataatgaatgacgtgaattggcataaaggaaattatgtaacaaataattcaattcctgaaagaggtttagctgtggctagaatgatagcacatattacttacttatctgaagatgcaatgcatagaaagtttggaagaaaacttcaatcaagagatattatttcatttggttttgatgcagattttcaaattgaaagctacttacgttatcagggtagatcatttgtagagagatttgatgcaaattcatatttgtatttaacaagagcaatggattattttgatcactctgaaagtttcaaaaaaacactcgaatttattaataaccctaatgaccatcttaagtatcttgtgatatctttcacatcagattggttatttcctactagagaaaataaagaaatagttgaaattttaaatagtttatcaaaagatgtaagttttttagaaatagaaacagataaaggacatgatagtttcttattagacgaacctgatcttgattttgctattacaggtttccttgagagcaattatggaaatgagtatgaataa

SEQ ID NO: 234247 - DNA, 847 bp, Unknown
  Bacterial polypeptide expressing nucleotide sequence isolated from the Sargasso Sea
tttagcgtatgagacttatggaaacctaaatgaatctaaagataatgctattttaatttttcaccctctcaccggagatcaattcgtaagtggggtaaacccagtaacaaaaaaagaaggttggtgggtaacagctgtggggcctggtaaagctatcgatacaaataaatattttgtaatttgtgcaaatgttattggggggtgtatgggttcatggggtcctaaagaaatagataataaaacaaatgagccctatggattaaattttccagttataacaataagagatatggttaaagcacaagagactcttttagatcatttaggagtagaaaaacttctttgtgccacaggaggttctatgggtggaatgcaattgcttcaattttgtactacatttccaaacagaactttttcagcagtcccgattgcctgcagcacaagtcatagtgctcaaaatattgctcttaatgagttggctagacaagctattatggcagatcctgtttgggacaaaggaaaatatctaaaaaaaagtgttcaaccgaaaaatggtttggctgttgcaagaatggtcggtcatattagttatttatctgaaaaaggaatgcaagaaaaatttggaagaaaactacaagaaaaagctgattacgaattcagttttaatgctgatttccaagttgaaagctatttaagacatcagggttatgcattcgttgaaagatttgatgcaaattcaattttatatatcactagagcgatggattattttgatttatcgagacagttcaaaggaggcctagtaaaaggatttaaaaatcaaaaaacaaaatttttagtcatttcc

SEQ ID NO: 234248 - DNA, 891 bp, Unknown
  Bacterial polypeptide expressing nucleotide sequence isolated from the Sargasso Sea
tggtggaattatcttatagggcctggaaaagctattgatacacaaaaatattttgtaatttgtgcaaatgtaattgggggatgtatgggttcttatggcccaagcaatattaatccaaaaactaataaaaattttggaacagaatttccagttataactataaatgatatggttaatgcgcagtatcatttattagaattttttaaaattaaaaaattattttcagttttaggtggatcaatgggtggtatgcaggtacttcaatttgtatctaactttccaaataaatcagagaccgctatccctatagcttgtactgcaagccattctgcgcaaaatattgcgctaaatgaactgggaagacaatcaattatggcagatcaaaactggttaaatgggttttatgaggaaaataaaaagtcacctgataaaggattggctgttgcaagaatggcagcacatattacttatttgtcaaaaaaaggtttagaagaaaaattcggaagaaaacttcaggaaagagatgatctaaagtttagttttgatgcagattttcaaattgaaagctaccttagatatcaaggttcagtttttgtagatagatttgatgcaaatagttatctttatataacaagagcaatggattattttgaccttacaaaacaatttaatgggaacctttcaaaagcatttgaaaaatctaatacgaagttcttcattatatcttttacttctgattggttatacccaacatctgaaaatcgggaaatagtgattgcattgaattctattggaaaaaatgttggatttgctgaaataacatctgataaaggtcacgactcatttctattagatgttcctgattttcttaatacaattaaaaattttaaa

SEQ ID NO: 234249 - DNA, 736 bp, Unknown
  Bacterial polypeptide expressing nucleotide sequence isolated from the Sargasso Sea
tatgaatagtgaagaaaacataaaaactttaattataaaaaaaccgctaaaattagactgtggaaagactatcagagactttccgatagcctatgagacttacggttcccttaattcaaaaaaagataacgcaatactagtttttcacgccttaacaggagatcaatttgtgactggaataaaccctgtaaccaagaaagagggctggtggaattatgcggtaggtcctaataaagctatagacacaaataaatattttgttatttgctccaatgtaattggcggatgcatggggtcatatggacctagtcataaagatcctgatcaaaatatctttggaacaaattttccagttatcactattaatgatatggtaaatgcacaatataatttactcgaccattttggtattgataaactattttctataactggtggttcaatgggaggaatgcaagttcttcaatttattagcaactttcctgataaatcaaaaacagtaatacctatagcaaccacctctagtcattcagcgcaaaatattgcttttaatgaattaggtagacaagcaattacagcagatagtgattggaaagatggaaactatacatcaaataaaactaatccaggaaaaggattagcagtggctagaatggcagctcatataacttacttatctaaaaaggggttgcagggaaaattttggaagaaaattacaagaaagagaagaatctaa

SEQ ID NO: 234250 - DNA, 820 bp, Unknown
  Bacterial polypeptide expressing nucleotide sequence isolated from the Sargasso Sea
tatgaataaatttaaagatattaagaaaataattattaaaaaaccattaaagttagattgtggtcaaacaattaacaattttcctttggcttatgaaacatacggaaaactaaatagtgaaaaaaataatgctatattaatttttcatgctctgactggagaccaatttgcctcaggaacaaatccaattacaaaaaaagatggttggtggagttatgctcttggacctggaaaagctattgatacagaaaaatatttcgtaattgcagcaaatgttataggtggttgtatgggatcttttggaccaagtgatattaacccaaatacaaaaaaaccttacggcacaaacttcccagtaatcacaataaacgatatggttaatgctcaatataatcttttagagtattttaaaattgaaaagttgtttagtgttattggaggatctatgggtggaatgcaagtacttcagtttgtctcaaattttcccaataaagctttaacagcaattccaattgcttgtaccgcaagccattctgctcaaaatatagctctaaatgaacttggaagacaatcaataatggctgatggaaattggcaggaaggattttaccaagagcaaaacaaacaacccgataaaggacttgcagttgcaagaatggcagcacatataacttatttatctaaagtaggtcttcaagaaaaatttggaagaaagctgcaagagagggatgatttaaaatttagttttgatgctgattttcaaatagaaagttatttaagatatcaaggatcggtttttgttgatagatttgatgcgaat

SEQ ID NO: 234251 - DNA, 651 bp, Unknown
  Bacterial polypeptide expressing nucleotide sequence isolated from the Sargasso Sea
aatcaaaataaaaagatgaaaaaaaaaaaaattattaaaaagattcattttttcgagcgacttaccttagattctggtaaaattttatcggaatacgaaattgcatacgaaacttatggtaaattaaacaaaaaaaaaagtaatgcaatttttatttgtcatgcactgacgggcgaccaattttgtagctttaaaaaccctgttaataataagaatggttggtggaattctttagttggacccggaaaagtaattgatacaaattttttttttgtcatttgtagtaacgtacttggtggttgtatgggaacaactggtccagaatctatacacccaaaaacaaaaaaaccttatggcctgaagtttcctgtaattacaattaatgatatggttaaggttcagaatagactggttgatgccttaaatattaagaagctatttgctgttataggaggttcaatgggtggtatgcaagcattagaatgggctgtttcttttagtcataaagttcattctgttataccgatcgccacgtcctacagacactctgctcaaaatattgcatttcatgagataggtaggcaagctataatggctgatcctaattggaaaaaaggcgcatactatgataaaaaaaaatatccgaaaaga

SEQ ID NO: 234252 - DNA, 705 bp, Unknown
  Bacterial polypeptide expressing nucleotide sequence isolated from the Sargasso Sea
tatgaatattaaagagaatataaaaacaattactattgagaagccgctcaaattagattgtggtaaaactatcaataattttcctttagcatatgagacttacggctcattaaataaaagtaaggataatgcaattttagtttttcatgcattaactggagatcaatttgttactggtattaatcctataacaaataaagatggatggtggagttatgctgttggacccggtaaatctattgatacagaaaaatattttgtaatttgtgcgaatgtaattggtggctgcatgggttcatttggacctagccatcaaaatcctaaaactaaaaaaatttatggtactgattttccagtaattactattaatgatatggtcaatgcgcaagtaaatttgttagatcattttggtattagtaaacttttttcagttgttggaggatcaatgggtggaatgcaagttttacaatttgttagtaattatcctgagaaaactaaaactgcagtgcctatagcttgtacgtcaagtcactctgcacaaaacatagcttttaatgaacttggaagacaggctatagcagctgaccataattggcaagatgggcaatattcttcaaaaaatacaattccagacaaaggattagctgtagctagaatggctgctcatattacttatttatcaaaaaaaggtcttcaagaaaagtt

SEQ ID NO: 234253 - DNA, 688 bp, Unknown
  Bacterial polypeptide expressing nucleotide sequence isolated from the Sargasso Sea
ggtggaatgcaagtactacaatttgtatcaaattttccagataaatctgaaactgcaatacctatagcttgtacgcatagccattcagcacaaaatattgctctaaatgaacttggaagacaatcaattatggcagatcctaattgggcaaatggattttacgacgaaaatattaagtctcctgataaaggactggctgttgccagaatggctgcacatattacttatttgtctaaaaaaggattacaagaaaaatttggaagaaaactacaggaaagagatgatttaaaatttggttttgatgcagattttcaaattgaaagctatcttagacatcaaggttcagtttttgtagatagatttgatgcaaatagttatctttatataacaagagctatggactatttcgatctatcaaaacaatttgatggaaatctttcaagagcatttgaaaaaactaatactaaattttttattatatcttttacttcagactggctatatccaacatctgaaaatagagaggtagttattgcattaaattctattggaaaagatgttgggtttgctgaaataacatctgataaaggtcacgattcatttctattaaatgttcctgattttcttaatacaataaaaaactttttaaacacatcatacaataaactgaatgaaaaaagaatttaat

SEQ ID NO: 234254 - DNA, 667 bp, Unknown
  Bacterial polypeptide expressing nucleotide sequence isolated from the Sargasso Sea
aatgcaagttcttcaatttattagtaactttccttataaatccaaaacggttataccaatagcaactacctcaagtcattctgcacaaaatattgcttttaacgaattaggtagacaagcaatcacagctgatagtgactggaaagatggaaactattcatcgaataatactaatcctggaaaaggattagcagtagctagaatggcagctcatataacatatttatctaaaaaaggtttacaggaaaaatttggaagaaaattacaagaaagagaagatcttaaatttggatttgatgctgattttcaaatagaaagttatttaagataccaaggttcagtttttgtagatagatttgatgcaaatagctatctttatatcactagagcaatggattactttgatttagcaaaacaattcaaaggtaatctttctgatgcatttataaatacaaaagctaaattttttataatttcatttacctctgattggctttatccaactcaagaaaataaagatattgtaattgctttaaactcaataggagctgatgttgggtttgttgaaattaaatcagataaaggtcacgactcttttttattagatgtaccagattttttaagtgcactaaagaactttttagataaatcttacaatgaaaattaa

SEQ ID NO: 234255 - DNA, 526 bp, Unknown
  Bacterial polypeptide expressing nucleotide sequence isolated from the Sargasso Sea
aaagagaattcaacaccggataaaggtttggcagtagcaagaatggctgctcatattacttacctttcaaaaaaaggactacaagaaaaatttggacgaaagctacaagataaaggaagtttaaaatttagttttgatgcagattttcaaatagaaagttatttacgttaccaaggtgcaacttttgtagataggtttgatgctaatagttacctatatattaccagagcgatggattattttgatttggaaaaacaatttaatggcaatttatcacttgcctttaagagtacaaaatcaaagttttgtgtaatttcattttcatctgattggctttatcctactattgaaaataaagaaatagttatagcccttaacgcttgtggcgcaaatgttggttttgttgaaattaattctgataaaggtcatgattcgtttttactagaagtaccagaatttttaaaaacgctaagtcaatttcttaatgcaaattataatgaaataaataatgaaaaaagaatttaaa

SEQ ID NO: 234256 - DNA, 787 bp, Unknown
  Bacterial polypeptide expressing nucleotide sequence isolated from the Sargasso Sea
tcaattacaataagagatattgttaaagctcaatcatatcttattgattctctaagtatcaaaaaaatatttgcagcagttggggcctctatgggggctatgcaggtacttcaatggacaatagattttcctgataaaataattaacgcaattcatattgctggcgctcttaaacattcagcccaaaatatagcttttcacgaagttggtagacaagcaattatgaatgataattcatggtcaaaaggtaattattatgctgataatataaaaccagaaagaggattgtcagttgctagaatgatagctcatataacatacttatcagatgatgcaatgcatagaaaatttggaagaaaattacaatcaagagacattatatcttttggttttgatgcagactttcagattgaaagttatcttagatatcagggaaaatcatttgtggaaagatttgatgcaaatagttatttatatttaactagagcaatggattatttcgatctggtagaaaaatttagacaaacaatagaatttccaaccatttctaacaatcacattaattatttaattgtttcatttacatctgattggctatttcctactagagaaaataagcaaatttcagatattttaaattttaattcaagaaaagtgagtttcactgaaattgaaactgataaaggtcatgatagtttcttattagatgaacctgaatttgatgatactatttctggctttttagcaaataattataataaaaaggaatcagaaaattatgaataaa

SEQ ID NO: 234257 - DNA, 745 bp, Unknown
  Bacterial polypeptide expressing nucleotide sequence isolated from the Sargasso Sea
tatggtaaatgctcaatataatcttttagaatattttaatattaaaaaattgttttctgtaattggtggttcaatgggtggaatgcaagttctacaatttatatcaaactttcctgataaatctcatacggtaataccaatagcttgtactgcaagtcattcagctcaaaatattgccttaaatgaattgggtaggcaatcgattatggcagataataattggatggaaggtttctatgcagaaaacaaaaaaaaccctgataaaggactggctgtagcacgaatggcagcacatataacctatttatcaaaaaaaggattacaagaaaagtttggacgaaaacttcaagaaagagatgatttaaaatttggttttgatgcagattttcaaattgaaagttacttaagatatcaaggttctgtttttgttgatagatttgatgctaacagttatttatatattactagagcaatggattattttgatttaacaaaacagttcaatggcaacttatctaaggcatttgaaaaaacaagttctaaattttttataatttcttttacctcagattggctttatccaactccagaaaatagagagattgtaattgctttgaatgcaattggaaaaaatgtaggatttgtggagattaattcagataaggggcatgactcctttttattagatatcccagattttcttaatgcagtaaaaaattatttagaaacctcatataaaaaataa

SEQ ID NO: 234258 - DNA, 316 bp, Unknown
  Bacterial polypeptide expressing nucleotide sequence isolated from the Sargasso Sea
gttgaaatctgggaaaatgctcaaggaatatgagttagcttacgagacatatggtgttttaaataaaagtagagataatgccgttttaatttgtcatgccttgtctgggaatcaacatgctgcaggaaaatataaagatgacgaaaagccaggatggtgggataacatgattggatctggcaagccaataaatactgatcatttatttgttgtatctttaaataatttaggagggtgtcatggatctactgggccaaagtcaattaatcctgaaactaataaaatttatggctctaatttttctattgtaacagtt

SEQ ID NO: 234259 - DNA, 219 bp, Unknown
  Bacterial polypeptide expressing nucleotide sequence isolated from the Sargasso Sea
aagacaattaatccagacaaaggtttggctgttgctagaatggcagcacatattacatatttatcaaaaaaaggattacaagaaaaatttggtcgaaatctacaagaaagatctgatttaaagtttagtttcgatgctgactttcaaattgagagctatttaagatatcaaggctcattttttgtggatagatttgatgcaaatagttacttatatatt

SEQ ID NO: 234260 - DNA, 874 bp, Unknown
  Bacterial polypeptide expressing nucleotide sequence isolated from the Sargasso Sea
aaaacactaaaattagattgtggaaaagaaatttcaaatttccctttagcatatgaaacatatgggaagttgaataaaaataaggacaatgccattttggtttttcatgcattaacgggagaccagtttgcctcaggtataaatccagttacaaataaagaaggatggtggagtcacgccttagggcctggaaaagctcttgatactgaaaagttttttgtaatatgtgctaatgtcattggtggttgtttaggttcatacggacctagtacaatagacacaaaaacaaataaacctctaggtacaaattttccagttataacaattaatgatatggttaatgctcaatataatattttagattacctgaatattgaaaaattatttgctgttgctggtggatctatgggtggtatgcaagttttacagtttgtttcaaactttccaaacaaagctcaagtagcagtacccatagcttgtacagctagccattctgcgcaaaatattgcattaaatgaacttggaagacaagcaattatggctgacacaaattggcaaaatggtttgtatggagaaaaagaaaaaagtccagataaaggattagcggtagcaagaatggctgcacatataacatatttatccgaaaaaggacttcaagaaaaatttggaagaaaactccaagaaagagataatttaaaatttggttttgatgcagactttcaaattgagagctatttaagatatcaaggatctgtttttgtagatcgttttgatgctaatagctacttatatataaccagagcaatggattattttgatttaactaaaaaatttaacggaaacttatcaaaagcattgaaaaaagtaaaacaaa

SEQ ID NO: 234261 - DNA, 850 bp, Unknown
  Bacterial polypeptide expressing nucleotide sequence isolated from the Sargasso Sea
atgggttcgtggggtcctaaagaagtagacaaaaaaacaaatgaaccatatggtttaagttttccagtgattacaataagggatattgttagagcgcaggaaacacttttagattatttaggtgtagaaaaacttctctgtgctacgggaggctcaatgggtggaatgcaaacactacaattttgcgcaacatttccaaatagaacatattcagcaatgccaattgcctgtagcacaagtcatagtgcgcaaaatattgcacttaatgaattagccagacaggctgtgatggccgatcctgtatgggataaagggaaatatattaaaaaaaacgttcaaccaaaaaatggtttagcagttgcaagaatggttggtcatataagttatttatctgagaaaggtatgcaagaaaaatttggtagaaaacttcaagagaggggtgactatgattttagttttaatgcagattttcaagttgaaagttatttaagacaccaaggttttgcatttgtagaaaggtttgatgccaattcaattttatatattacaagagcaatggattattttgatttatcaagacaatataaaggtggattgaccgaagcgtttaaaaatcagcaaacaaaatttcttgtgatatcattttcttctgattggctttatacaactaaagaaaataaagatacggtaattgctctaaacgcagctggtacggatgtttcttttgcagaaattaagactgacaaaggtcatgactcttttttagtagatgagccagagtttttaaaaaccataaaaggttttatagattcaatgcatatcaaatttaaaaatgaaaaaagaatttaaa

SEQ ID NO: 234262 - DNA, 376 bp, Unknown
  Bacterial polypeptide expressing nucleotide sequence isolated from the Sargasso Sea
tatgagtgattcgataggaaaagtaaaggcacaaaaagttactctagagggtaagtttgagcttgagtgcggccaaagtttaaatgatatagaactggtctatgaaacttatggtgctcttaatgcagatgcgacgaatgcaatacttgtctgccatgcgttaagtggtaatcatcacgctgctggaaagtacgaaaacgaagaaaaaccaggctggtgggattctcttattggcccaggtaaagcagtggatacaaacaagttttttatagtttgcccaaataacataggtggttgtcacggttccctcggacaaattcaattaaccatgatactggagattattatggacctgactttccaattattactgtaa

SEQ ID NO: 234263 - DNA, 789 bp, Unknown
  Bacterial polypeptide expressing nucleotide sequence isolated from the Sargasso Sea
tatgaaaacagtatctgaaaaaatctcttttggagactctttgacccttaagtcaggacaaatactatctggttttgaattaatgactgaaacctatggagagctcaactcagaaaaaacaaatgctgtcttagtgtgtcacgccttctctggtaatcaccatgctgctggtgctcaagacggggaagtaaaggctggttggtgggatgaaatgattggagatggcaaaaccattgatacaacaaaattttttgtcgtatctctaaataatatcggtggctgtaatggcacttctgggccgacaactattgagccacaatcaggcaaaccttatggtgcaaattttcctgaagtgtcagttagtgattgggttgaaactcaaaaattactagctgatcattttggaattaattgctgggaaatggtagctggaggaagcttaggcggaatgcaggcgctgcaatgggcaatttcatatcccgataaaattaaaagggctgcaattattgctgcttcatcaaaaattagtacacaaaatattgccctaaatgaagttgctagagaaataattaaaaaagatgagcatttctataatggtaattatttagcaaagggtgagtcgccaattaagggcttgaaagctgcaaggatgcttggtcatataacttatttatctgaatctaatatgagcaaaaggtttggaagaaagttacaagatccagaaaaaaagatggatgcagacgtaaactatgaagtggaaaattatcttcagtataaaggtgagcaatt

SEQ ID NO: 234264 - DNA, 733 bp, Unknown
  Bacterial polypeptide expressing nucleotide sequence isolated from the Sargasso Sea
atggtagattatgctataaaaattgaaacaaaccttaaattagattgtgaaattgcgtatttctcaaaagctaattttgttattgattctgggtacaaatttgatgattttaaaatagcatataaaacattcggcaaaataaataacgataaaacaaatgtaatttttatttgtcatgcattaacaggggatcagtttgtatcaggaaaaaatccactcacaaataaagatggatggtgggataggatggtcgggccaaataaaccaatagatacaaataagtattatgtaatttgttcaaacgtattaggcggatgtattggatcaacaggtccaaaagaaaaaaattttattacaggaaagccatttggtactgaatttccatcaatcacaatacgagatattgttaaagcacaaaaatatttaattgatgctttgaaaattgataaaatttttgcagtcattggtggttctatgggtgccatgcaagttttgcaatggacgattgattatcctgagaaactattaaatgctattcatatagctggagcactaaaacattccgcacagaatatagcatttcatgaagtaggaagacaagctattatgaatgatcaatcttggaataaaggaaactattattttgaaaatactaaaccagaaagaggtttatccgttgcaagaatgattgctcacataacttatctatcagatgatgcaatgcatagaaaat

SEQ ID NO: 234265 - DNA, 733 bp, Unknown
  Bacterial polypeptide expressing nucleotide sequence isolated from the Sargasso Sea
attgattgttgaaaaaccactcaaattagattgtggtcagactattaataattttcctttagcgtatgaaacttatggttcactcaataatgaaaaagataatgcgattttagtatttcatgctttaactggtgatcaattcgtaacaggtataaatccgataactaaaaaggatggttggtggtcttacgcagtaggctctggtaagtcgatagatacagataaatattttgtaatatgtgcaaatgtaataggtggatgtatggggtcttttgggcctagccataaaaatcctaagacaaaaaaaatttacgggacagatttcccagttattacgattaatgacatggtaaatgcacaaataaatttgttagatttttttggaataaaaaaacttttttcagttgtaggtggttcaatgggtgggatgcaagtcctacaatttattagtaattttcctgataaagctaaaacagtgataccaattgcttgtacttcaagccattctgcgcaaaatatagcctttaatgaacttggcagacaagccattgcggcagatcataattggtcagatggaaattataattcaaaaagtattgtacccgataaaggattagctgttgctagaatggctgcgcatattacttatctttcaaaaaaagggcttcaagaaaaatttggaagaaaacttcaagaaagagatgattttaaatttggttttgatgctgacttt

SEQ ID NO: 234266 - DNA, 713 bp, Unknown
  Bacterial polypeptide expressing nucleotide sequence isolated from the Sargasso Sea
aatagattctcagttgggtcatatttagcttaccaggggtcaaaatttgttgatagatttgatgcaaatagctatattactttatctactgtggtagattactttgacataggtcagaatatagaacaaattactaaaactcttgaaaagagtacttgtaaatggctagtaatcagcttctctagcgattggctctatcctccatatcaatctgaagaaatagtaaatgcattaattaatttagatagatctgtttcctacagctgcattaaaagtaaagcaggtcatgatgcatttttacttgaaagagactacgggaagttatcgtcatcattcttagaaaatatttctggatctacttcttcaaagaaaaccaaaaatattagcaagtcatcaacaaatatttttttcgataaaaggatagaccttaaatttattacaaatttagtgaataaaaatgatagagtgcttgatttaggatgtgaagacggaacattattatatgaattaaagaaaaaaggttgcagcaaattagttggagtagaaattgacaacaaaaaggtttttgaagctataaacaaaggaattgaagtaataaatttagatattaataatggacttaaaagatttaatgataatcaatttgatatcgtaatcttatctcaaacacttcagtcaataaaaaatgtagaagaaactattgaaaaaatttt

SEQ ID NO: 234267 - DNA, 913 bp, Unknown
  Bacterial polypeptide expressing nucleotide sequence isolated from the Sargasso Sea
cctggggaaagcaatagatacaaataaatattttgttatttgtgcaaatgtgatcggaggatgtatgggttctttaggtcctaaagatactaatccagaaacaaaaaaaccttacgggttggattttccagttataacgattaaagatatggtaaaagctcaggagtccttacttgaacatctgggaattaaaaaacttttatgtgcgactgggggttcaatgggtggaatgcaacttttacaattttgtgcaacatttccggataaagctttttcagcggtgccgatagcctgtagctcgagtcatagcgctcaaaatattgctcttaacgaattagctcgtcaagcaattatggcagatcctgtatgggataatggaaagtatgttttaaaaaatgttcaaccaaaaaatggcttagcagttgcaagaatggttgggcatataagttatttatctgaaaaaggtatgcaggaaaaatttggtagaaaattacaagagaaggcagattatgaatttagttttaatgctgacttccaggttgaaagttatttaagacatcaaggctatgcatttgttgaaagatttgatgctaattcagtactatatataacaagagcgatggattattttgatctttcaaaacaatttaaaggaggtttggtagaagcatttaaaaatcaaaaaacaaaattcttaatcatttcattttcctctgattggctttacacaacaaaagataacaaagatatagtaatagcattaaatgcgtcaggtgcagatgtctcttactctgagataattacagagaaagggcatgattcttttttacttgaagagcctgaatttttaaaaacacttaaaggttttatagactctatgtatgaaaaatttaaaaatgaaaaaagaatttaa

SEQ ID NO: 234268 - DNA, 622 bp, Unknown
  Bacterial polypeptide expressing nucleotide sequence isolated from the Sargasso Sea
gcttgtactgcgagccattctgctcaaaatattgcattaaacgaactcggaaggcaatctataatggcagatcataattggttaaatggattttatgaagaaaataaaaaattacctgataaaggtttagctgttgctagaatggctgctcatattacctatttatcaaaaaaaggattacaagaaaaatttggaagaaagctgcaagaaagtgatgacttaaagtttagttttgatgcagattttcaaatagaaagttatttaagatatcaaggatcagtttttgtagatcgttttgatgctaatagttatttatatattacaagagctatggattattttgatctaataaaacaatttaatggaaatctttcaaaagcttttgaaaaaagtgaaacaaaattttttgttatttcttttacctctgattggctttatcctacatctgaaaatcgtgaaatagtaattgcacttaatgcaataggaaaagatgttggatttacagaaataacttctgataaaggtcacgattcttttttattagatgttcctgattttttaaatgcagtaaaaaattttttaaactcttcatataataaaattaatgaaaaaagaatttaat

SEQ ID NO: 234269 - DNA, 550 bp, Unknown
  Bacterial polypeptide expressing nucleotide sequence isolated from the Sargasso Sea
atggaaatagaagatttaggaatagtaaaaccaaagattttcagacatgaggctgatttagctcttgagagtggtaaatcacttgatacgtttgaattgatctatgaaacctatggggagttaaacgaaaatagatcaaatgcaattcttgtctgtcatgccttaagtggaaatcatcattctgcgggttttcatgaaggtgatgcgaagccaggatggtgggataatctaataggaccaggtaaggccatagacacaaataagtattatgttgtttcacctaataacctaggtggatgtcatggctcaacaggaccttcgtcgataaatcctgaaacaggaaaagtatacggtcctgattttccggtattaactgtagaagactgggtgaatagtcaggcactactagcacaacatttaggaatagaagtttggcatgcagtaataggtggaagtctagggggaaagcaggctcttcagtgggctatctcttatccaaataaaaaaaagaaatcatgtgtgatagctgctgcctataaattaagtgctc

SEQ ID NO: 234270 - DNA, 753 bp, Unknown
  Bacterial polypeptide expressing nucleotide sequence isolated from the Sargasso Sea
gctggattgtaaagttgtaaatttttccaatataagtttcaaaatagaatcaggctatgtttttgaagaatttaaaattgcttttaaaacttttggaaaactaaatgaagataaatcaaatgctattcttgtctgtcatgctttaactggagatcagtttgttgcaggtaaaaatccaattacaaatagagatgggtggtgggaaagaatggtaggtccaaataaaccaatcgatacaaataaatattttgtaatttgcacaaatgttttaggaggatgtgttggctctactggtccaaaagaaattaatcacaaaactaactctatatatggtcaagattttccaacaattacaattaaagacatagttaaagctcaaaaatatcttctggatgctttagaaattaaaaaactattttctttaattggtggatcaatgggtgcaatgcaagttctgcagtggacaattgattatcctgaaaacttattaagtgcaattcacatagcaggtgctctcaaacactcagcacaaaatattgcttttcatgaagttggcaggcaggcaattatgaatgatcctgattggaatgatggaaattatatcaatttgaatactaagccagaaagaggacttgcagttgcaagaatgattgcacatataacttatctatcagatgatgcgatgcatagaaagtttgggagaaaacttcaatcaagagatattatatcttttgggtttgatgccgattttca

SEQ ID NO: 234271 - DNA, 1117 bp, Unknown
  Bacterial polypeptide expressing nucleotide sequence isolated from the Sargasso Sea
aatgagtgaaaacaaaatagtagaattagcaaaagaacaggctcttgtactggattgtggtaaatcgctgaaaagcattaaaacagcttatacaacttacggtaaattaaatgccactaaggataatgctattttgatttgtcatgctctcactggcgatcagtatgttgcgagcaaacacccaattacaaaaaaagaaggatggtggtcatatattgttggtcctgaaaaaccaatcgatacaaataaattttttgtagtctgtcctaatgttattggtggctgcatgggttcaactggtccaaaggaagtaaattcagaaactggtaaagaatatggtacagattttccagttattacaattgctgatatggtaagagctcaaaagctacttattgactatttaggtattgaaaaaattttttgtgtgacaggtggatctatgggcggaatgctagttcttgaatggctatcaaaatttcctaagatggttcattctgcgattccaattgcaactgcgacaaatcattcagcgcagaatattgcattaaatgaacttgctagacaatccattatggctgatccaaattggaattcaggtaattattataattctgacaataaacctttaaaaggtctatcagttgcgagaatggcagcccatatatcttatctatctaaagacgctttgcacagcaagtttggaagaaatctgcaagataaaaatagtttagattattcttttgatgctgatttccaaattgaaagttatttaaggcaccaaggatttacatttgtagaccgctttgatgctaatagttatttatatattactcgtgcaatggattattttgatgtttcgtcaagcaataatggctcactaattgaatcatttaaaaacacaagctcaaaagttttgtgtatttcttttacgagtgattggctttacccaacctcagagaataaaaaaattgtaaaagtatttaatactttaggaataaatgtcagttttattgagattgaaactgacggtggacatgactcatttctacttgaagaacctaagctttttgaagctatgcaaggatttattaaatcaacttatgaaaatttatga

SEQ ID NO: 234272 - DNA, 1018 bp, Unknown
  Bacterial polypeptide expressing nucleotide sequence isolated from the Sargasso Sea
atgaataaatttaaaaatataaagaaattagttgttgaaaaaccgttaaagctagattgtggccagactataaataattttccattagcttatgaaacatatggaaaattaaataatgaaaaaaataatgccatattaatttttcatgctttaactggagatcaatttgcctcaggaataaatccgataacaaaaaaagatggttggtggaattatgctcttggacctgggaaagcaattgataccgataaatattttgtgatagcagcaaacgtaataggtgggtgcatgggttcttttggaccaagtgatattaaccctgataccaaaaaaccatttggaacaacctttccggtaataacaattaacgatatggtgaatgcccaatataatcttttagagcattttaaaattgataaattattcagtgttataggaggatccatgggaggaatgcaagtgcttcaatttgtatctaatttcccaaataagtctttcactgcaataccaattgcatgtactgcaagtcattcagctcaaaatatagctcttaatgaacttggtagacaatcaataatggcagatagaaattggcaagatgggttttatgaagaacaaaataagcagccagataaaggacttgcagtcgcaagaatggcagcacatataacttatttgtctaaggcaggtcttcaagaaaaatttgggagaaaattacaagaaagagatgatttaaaattcagttttgatgctgattttcaaatagaaagttatttaagatatcaaggatctgtttttgtagatagatttgacgcaaatagctacttatatattactagagctatggattatttcgatttaacaaaaaaatttggtggcaacttatcaaaagcatttgaaaaaagtgatacaaaattttttattatatcttttacttctgattggctatacccaacctctgaaaatagaaatatagtaattgctcttaacgcaattggtaaaaatgttggatttgtcg

SEQ ID NO: 234273 - DNA, 664 bp, Unknown
  Bacterial polypeptide expressing nucleotide sequence isolated from the Sargasso Sea
atgcttccctcgatcgagctcgtatacgaaacatatggcgaaattaatgcagataaaactaatgcggttttagtttgtcatgccttttctggaagtcatgaagcagcaggtttaactagtgatgggaataaaaccggttggtgggatgaaattattgggccgggcaaagcaattgacaccgaaaaatattttgtggtgtcggtgaataacttagggagttgctatggatcttctgggccgaagtccataagcatggaaacaaatgagccctatggctcaaagtttcctgatgtttgtgttttggattgggttaattcacaaaaacttttgatggatgaactagaaattggttgttgggaaatggttgcgggtggaagtttaggtggtatgcaagcccttcagtgggcagtatcctacccagaaaaaattaagagagcagcaataattgcagccactgcacaaacttctcctcagaacattgcgctcaatgaagttgcacgccaaataattagaaaagactcttcctttaataacggtgaatatattacgcataacacaacgccaaaagaaggcttaaaaactgcgaggatgctgggacatattacttacctgtctgagactaatattcaaagaaggtttggaagaaaaaaacaagcgcctggaa

SEQ ID NO: 234274 - DNA, 1102 bp, Unknown
  Bacterial polypeptide expressing nucleotide sequence isolated from the Sargasso Sea
atgaaagtaaatacagagaaagtttcatttgttgagcccttagctcttgagtctggggaggttttgcatagctttgatcttatgacagaaacatatggagagctgaattatgcgaaagataacgctgttttagtttgtcatgctttttctggaaatcatcatgcagcaggtaaaagagatggagaaaaaaagcctggttggtgggatgaattaattggagacggcaagacaattgatacaaggaattattttgttgttgctgtaaataatattggtggttgtcatggctcaactggaccagcaacacctaataatgaatcaaatcaattcagtggtgcaagttttccagaagtgtcagtaagtgattgggttaaaactcaaaagttgctggctgatcattttggaattgattgttgggagatggttgctggtggaagcttaggcggaatgcaagcacttcaatgggcaatctcatatcctaacagagttaaaaaggctgcaataatagcagcctcctcaaaaattagtactcaaaatattgcattaaatgaagtagctcgggaaataattaaaaaagatgaagattttcatgatggtgattatttatctaaggatgtatatcctaaaaagggtttgaaggctgcaagaatgcttgggcatataacttatttatctgaatctaacatgagcaaaaggtttggaaggaggctacaagatccaaaaaataaaatagatgcagatgtaaactatgaggtggaaaattatcttcagtataaaggcgagcaatttgctaatacctttgatgcgaatagctatatcctaatgactaaagccatggacagttttgatccagctaaagattttgacaatgatttaattaaatgtcttcaaactattcaagctaaattacttgttatatcttttaattcagattggctatttccaaaagagtatgggatagaaatccaaatgtctgcaattaaagcaggaatcgatagctcatatatagaacttgaaggtgattacggtcatgatagctttcttttttattccgaacagtattctgttgcgcttacaaacttcttaaaatctgatggataat

SEQ ID NO: 234275 - DNA, 776 bp, Unknown
  Bacterial polypeptide expressing nucleotide sequence isolated from the Sargasso Sea
aattactataagagacatggtcagagcgcaagaaactttacttgaaaatcttggtattaaaaaactactttgtgctacaggtggctctatgggcgggatgcaattacttcaattctgctcaacttttcctgataaaactttttcagctattccaattgcttgtagcgcaagtcatagtgcacaaaacattgccttaaatgaattggctcgtcaatcaataatggctgaccctgtgtgggataacggaaaatattttcttaagaatgttcagccaaagaatggtttagcggtagcaaggatggttgggcatataagttatttatccgaaaaaggtatgcaggaaaaatttggacgtaaactacaagaaaaggctgattacgaatttagttttaatgcagatttccaagtcgaaagctatttgagacatcagggttacgcatttgttgaaaggttcgatgcaaattcaattttgtatataaccagagccatggattattttgatctatcaaaacaatttaagggaggcttagttgaagctttcaaaaatcaaagaacaaaatttttggtaatatctttctcgtctgattggctttacacaactaaggataataaagatatagttattgccttaaatgcatctggtgcagatgtctcatattctgagatagttacagataaagggcacgactctttcttactagatgaaccagattttttaaaaacattgaagggttttatagactctatgtatgagaaatttaaaaatgaaaagtgaa

SEQ ID NO: 234276 - DNA, 1135 bp, Unknown
  Bacterial polypeptide expressing nucleotide sequence isolated from the Sargasso Sea
aatgaacaatatagaaaaggtaaaaagattaattatcgataaaccattgaagcttgactgtggaaaaactatatctaattttccgttagcatacgaaacctatggtaagttaaatgataaaaaagataatgcaattttagcatttcatgctctttcaggagatcagtttgcttcgggtataaatcccataaccaacaaagaaggttggtggaattatcttataggacctgggaaagctatagatacagaaaaatatttcgtaatttgtgcaaatgtaattggaggatgcatgggttcttacggtccaagcaatataaatccaaaaactaataaaaattttggaacagaatttccagttataactataaatgatatggttaatgctcaatttcatttattagaattttttaaaattgaaaaattattttcagttttaggtggatcaatgggaggaatgcaggtactacagtttgtttctaattttccagataagtcacaaactgctatacctatagcctgtactgcaagtcattctgcacaaaatattgcgctaaatgaacttggaagacaatctattatggcagatcataactggtcaaatggattttatgatgaaaacaaaaaatcacccgataaaggtttggctgttgcaagaatggcagcacatattacttatttgtcaaaaaaaggtttggaagaaaaatttggaagaaaacttcaggaaagagatgacttaaagtttagttttgatgcagattttcaaattgaaagttatcttagataccaaggctcagtttttgtagatagatttgatgcaaatagttatctttatataacaagagcaatggattattttgatcttacgaaacaatttaatggaaacctttcaaaagcatttgaaaaaactgatacaaaattcttcattatatcttttacttctgattggttatacccaacctctgaaaatcgagaaatagtaattgcattaaattctattggaaaaaatgttggatttgctgaaataacatctgataaaggccacgattcatttctattagacgttcctgattttcttaatacaattaaaaattttttaaacacatcatataaaaaactaaatgaaaaaagaatttaa

SEQ ID NO: 234277 - DNA, 475 bp, Unknown
  Bacterial polypeptide expressing nucleotide sequence isolated from the Sargasso Sea
gctgctcatattacctatttatctaaaaagggacttcaagaaaaatttggtaggaatctccaggaaagagatgatcttaaatttggatttgatgctgattttcaaatagaaagttatttacgttatcaaggttcagtatttgtagatagatttgatgctaacagttatctttatataactagagcaatggattattttgatttggttaaacaatttgatggcaatctatcagacgccttcaaaaaaaccaaaactaaattttttattatgtcttttacgtcagattggctttatccaactcaagaaaataaagatatagttattgctttgaacgcaattggtgcgaatgtaggttttgttgaaatagattctgataaagggcatgactcctttttgttagaagttccagattttttaaatgcactcaaaaattttttagataaatcttatatagaaggtaatagtgaaagctgaa

SEQ ID NO: 234278 - DNA, 1120 bp, Unknown
  Bacterial polypeptide expressing nucleotide sequence isolated from the Sargasso Sea
tatggaagaaaataaaatagttgaattatcaagtaaagagaggccattacttcttgattgtggcaagagcttaggtcccgtaaaaattgcctatactacttatggcaatttgaatgaacaaaagtcgaatgcaatactcatttgccatgctctgactggagatcagtatgttgcaagtcagcacccaattacaaaaaaagaaggctggtggtcaaatgtagtaggccctaataaatcaattgatacaaataaattttttgtaatctgtccaaatattattggaggatgtatgggctcaacaggcccaaaggaaattgatccactcacccaaaaagaatttggactcaattttcctgttattactatttctgatatggtgaaagcacaaaagttattaattgattatttatcaattgaaaaactattctgtgttactggtggatctatgggaggaatgcttgtacttgaatggctgtcaaaatttcctgaatatgttcactctgcaataccaatagcaacttctgtaaatcattcagcacaaaatattgcacttaatgaattagcgagacaatcaataatggctgatccaaattggcaatctggaaactattatgaaacagataatcaaccaacaaaaggtttgtctgttgcaagaatggcggcacacatatcttatctttctaaagagtcacttcatcaaaaatttggtagaaatctccaagataaaaatgaattagattattcatttaaagctgattttcagattgaaagttacttaagacatcaaggtatttcgtttgttgatcgatttgatgcaaatagctatctttatatcactagagcaatggattattttgatattactgcaaatagcaatggctcattgattgaagcatttaaagatacaaaatcaaaagttttatgcatttcgtttacaagtgattggctatatccaacttctgaaaataaaaaaatagtaaaaactctaaatgctcttggtattgatgtaagttttttagaaatagaaacggaaaacggacatgactcctttttattgcatgagccagaattttttgacgctctaaatggctttataagttcaacctggagagaattatga

SEQ ID NO: 234279 - DNA, 718 bp, Unknown
  Bacterial polypeptide expressing nucleotide sequence isolated from the Sargasso Sea
tttaaaattgatagattattttcagtagttggtggttcaatgggaggtatgcaagtactacaattcgtctctaattttccaaataaatcaaaaactgctattccaatagcatgtacagctagtcactcagcacaaaatattgctttaaatgaacttggaagacagtcaataatggcggatcataattggtcaaatggattttatgaagaaaataaaaaattacctgataaaggtttggcggttgcaagaatggctgctcatattacatatttatctaaaaaaggcttgcaagaaaaatttggaagaaaacttcaagaaagagatagtctaaaatttagttttgatgcagatttccaaatcgagagttatttaagatatcaaggatcagtttttgtagatcgatttgatgcaaatagctatttatatataacaagagcaatggattatttcgatctaacaaaacagtttaatggaaacctttcaaaagcatttgaaaaaactgatacaaaattttttattatttcttttacttctgattggctatatccaacacctgaaaatcgtgacatagtaattgcattaaattctattggaaaagatgtaggttttgctgaaataacatcagataaaggtcatgattcatttttactagatattcctgattttttaaatactgtaaaaaattttttaaatacttcttattataaaaaaatatgaa

SEQ ID NO: 234280 - DNA, 472 bp, Unknown
  Bacterial polypeptide expressing nucleotide sequence isolated from the Sargasso Sea
ttggctgttgcgaggatggcagcccatatcacatatttgtctcaaaaaggtttgcaagaaaaatttggaagaaagcttcaagagactgataatataaatttcggttttgatgcagattttcaaattgaaagttatttacgataccaaggctctgtttttgtggatagatttgatgctaacagttatctttatattacaagggcaatggactatttcgatctaacaaagcaatataatggaaagctttctgatgcatttaaaaattgtagtaccaaatttttggtaatttctttcacttccgattggctttatccaactcatgaaaataaagatatagttatagctttaaatgcctgtggtgcagatgttggatttattgaaataataagtgataaaggtcatgactcatttttattagatgtacctgagtttcttacaactattaaaaaatttgtggatgctaattactaat

SEQ ID NO: 234281 - DNA, 910 bp, Unknown
  Bacterial polypeptide expressing nucleotide sequence isolated from the Sargasso Sea
tatgaatacagaaacaaaaattataaagtttgaagaaggcattactctggaatcaggaaatcatttagagagttttgaattaattgttgaaacctatggtcagctgaataaatcaaagtcaaatggtgtccttttgtgtcatgctttttctggtaatcatcatgcagcaggaaagtctgaggatgggtctatcgggtggtgggatcaactggttggatctggtaaagccattgatacagataaatatttcgtggtttgctgtaataatcttggtggctgctctggttcttctggaccaacaagcataaatcctaagactgaaaaaatatatggaaaagatttcccacaagtaagtgttttagattgggtaaattctcaaaaaatgttaagtgaaaaattaggaataaataagtggcatttggttattggtggaagcttaggtgggatgcaagccttacaatggtccatcacatttccagattcagttaataaagcaggaattcttgcagcagcggcaaagtctagtacacaaaatattgcattaaatgaggtagcaagagaggcgataagaaaagatccaaactttatggacggtgactactcaataaatcaagttaaaccaaaggatggtataaaaacagcaagaatgcttggacatattacttacctatcagaaaaacatatggatttaagatttggaagaagatttcaagaagaagactcaaaagttagcaaaaaagttgatttcgaggttgaaaattatttgcagtacaagggtgaaaaattttctgagaatttcgatgccaatagctacatccttatgactaaggcaatggacgggtatgatattgctcaagacaagaatactctcgaaactaatcttcaaaatgtaaaagccatcactacttat

SEQ ID NO: 234282 - DNA, 787 bp, Unknown
  Bacterial polypeptide expressing nucleotide sequence isolated from the Sargasso Sea
ttggattgtggacaagaaatttcaaacttccctttggcttacgaaacttatgggaaattaaatgaaaataaagacaatgcaattttagtttttcacgcattaactggtgatcaatttgcatctgatataaatccaattacaaaaaaagatggatggtggaggcatgctttaggtccaggtaaagcatttgataccgaaaaattttttgtaatatgtgcaaatgttattggtgggtgcatgggttcatatggacctagcacaattgatgaaaatactaacaaacctttaggtacaaattttccagttattacaattaatgatatggtaaatgcacaatatagtcttttagatttttttaagattgaaacattatttgctgttgcaggaggttctatgggtggaatgcaagttttgcagtttgtttcaaactttccaaacaaagcaaaagtagcagttccaatagcttgtacagcaagtcattctgctcaaaatatagcattaaatgagcttggaaggcaatctattatggctgacataaattggcaaaatggttcttatggagaaaaagaaaaaaatcctgataaaggtttagctgtagcaagaatggctgctcatattacttatttatcaaaaaaaggtttacaagaaaaatttggaagaaaactgcaagaaagagatgatttaaaatttagttttgacgctgattttcagatagaaagctatttaagacaccaaggagccgctttcgtagatcgatttgatgccaatagctatctatatattacga

SEQ ID NO: 234283 - DNA, 1090 bp, Unknown
  Bacterial polypeptide expressing nucleotide sequence isolated from the Sargasso Sea
atgattgttgagacaaaaaaaatatttattgattctaaattagagtgtgcttcgggggtggctcttgaaaactttgagctaatgactgatttttatggagagctaaatgagaaaaaagataatgcagtccttgtatgtcatgcattctctggaagtcatcatgctgcaggaaaaagggatagtaacattggttggtgggatgagtttattggtccagataaaacaatagatacaaattgtttctttgtggtctccgtaaataatctaggaagttgttttggttctagtggtcctctcagtaaaggtaaaaatggggaaagatttaataataattttcctcagttagaggttattgattgggttgaatctcaaaaaatgcttgccgataaattaggaataaaaaaatggcacttagtcattggaggaagtttgggaggcatgcaatcacttcaatgggctgttagttatcctaaaatggtaaaaaaagttggtattcttgctgctgcagctaaaacaagctctcaaaatattgctttgaatgaggttgagagagaagttataaggaaagatagtgattttcatgacgggaagtatctcgaatttaataaatctccaattgaaggccttaaagctgcaaggatgcttggtcatataacttatttatctgcaaaaaatatggatcagcgctttggaagaaaattgcaaagtactgattccaaaatagctgaagatgttgattttgagattgagaactaccttcagtataagggaggaaagtttgcagaatcatttgatgctaattcatatattcttttaacaaaagttatggataaatttgatattgctcatgggtatgaagatagtcttgagactgctcttgaaaacattgctgccgaagttctggttgtatcgttcaccacagactggatgttccctacaagcaatggaaaagagatatgtttggcatccatcaaggcaaataacaaatgctcatatattgagttagaaggagagcatggtcatgacagcttcctttatccaaatgatgattaccaaaatgcaattaaaaactttatcgaatcaaaatgaa

SEQ ID NO: 234284 - DNA, 1090 bp, Unknown
  Bacterial polypeptide expressing nucleotide sequence isolated from the Sargasso Sea
aatgattgttgagacaaaaaaaatacttattgattctaaattagagtgtgcttcgggagaggttcttgaaagctttgagctaatgacagatttttatggggagctaaatgagaaaaaagataatgcagtccttgtatgtcatgcattctctggaagccatcatgccgcaggaaaaagagatgataatattggttggtgggatgagttcattggtccggataaaacaatagatactaatcgtttctttgtggtctccgttaataatcttggaagttgttttggttctagtggtcctcttagtaaagataaaaatagggagaggtttaataataattttcctcaattagaagtcattgattgggttaaatctcaaaaaatgcttgccaataaattaggaataaaaaagtggcatttagtcattggtggaagtttgggcgggatgcaatcacttcaatgggctgtaagttatcctaaaatggtaaaaaaagttggtattcttgctgccgcagctaaaacaagctctcaaaatattgctttgaatgaagttgagagagaggttataaggaaagatagtgattttcatgacggtaagtatctcgaatttaataaatctccagttaaaggcctaaaagctgcaaggatgcttggtcatataacttatttgtctgctaaaaacatggatctgcgctttggaagaaagttacaaaatactgattccaaaatagctgaagatgttgattttgaaattgagaactaccttcaatataagggaggaaagtttgcagaatcatttgatgctaattcatatattcttttaacaaaggttatggataaatttgacattgctcatgggtatgacgacagtcttgaggctgctcttgaaaatattgctgctgaagttctggttgtatcatttacctcagattggatgttccctataagcaatggaaaagagatatgtttggcatccatcaaagcaaataaaaaatgttcatatattgaattagaaggagagcatggtcatgacagcttcctttatccaaatgaagattaccaaaatgctataaaaaactttatcgaatcaaaatga

SEQ ID NO: 234285 - DNA, 1141 bp, Unknown
  Bacterial polypeptide expressing nucleotide sequence isolated from the Sargasso Sea
tatggatgaaaaattgaaaaatattaaaaaattaaacgtttcaaaacctcttttgctagattgcaagcaaactgtaaaagatttttctttagcatatgaaacttacggaaaattaaatgaatctaaagataatgccattttagtctttcatgcactaactggtgatcaatttgttagcggggttaatccaatcacaaaaagagagggttggtgggtaactgctgtgggtcctggaaaggccatagacactaataaatattttgtaatttgtgcaaacgttattggagggtgcatgggttcgtggggtcctaaagaaatagacaaaaaaacaaatgagccctatggattgaattttccagtaataaccataagagatatagttaaagcacaagaaactcttctagattatttgggaataaaaaaacttctttgtgctacaggaggctctatgggcggaatgcagttacttcagttttgtgcaacatttcctaatagaactttttctgcagttccgattgcttgcagcacaagccatagtgcacaaaatattgctcttaatgaattagccagacaggctattatggcggatcctgtttgggacaagggaaggtatttaaaaaaaaatgttcaaccaaaaaatggtttggctgttgctagaatggttggacatattagttatttatcagaaaaaggaatgcaggaaaaatttggaagaaaacttcaggaaaaagctgattacgaattcagttttgatgctgattttcaggtcgaaagttatttaagacaccaaggtttcacatttgttgaaaggtttgatgcaaactcagttttgtatattactagggcaatggattattttgatctagccagacaatttaaaggaggacttgttgaggcatttaaggatcagaaaactaaatttttagttatttctttttcttcagattggctttacacaacaaaagaaaacaaagatacagttattgctcttaacgcttcaggagctgatgtttcttttgctgaaattaaaaccgataaaggtcatgactcttttttagtaaacgaaccagagtttcttaaaaccttgaaaggatttatagactcaatgtatttaaaatttaaaaatgaaaaaagaatttaa

SEQ ID NO: 234286 - DNA, 1090 bp, Unknown
  Bacterial polypeptide expressing nucleotide sequence isolated from the Sargasso Sea
atgattgttgagacaaaaaagatactaattgattctaaattggaatgcgcttcgggagaggctcttgaaggctttgagctaatgacagatttttatgggcagctaaatgataaaaaagataatgcagtccttgtatgccatgcattctctggaagtcatcatgctgcaggaaaaagagacaataacattggttggtgggatgagttcattggtccagataaaacaatagatacaaatcgtttcttcgtgatctcggtaaataatcttggaagttgttttggttctagcggccctctcagtaaagataaaaatggagagaggtttaataataattttcctcagctagaagttattgattgggttgaatctcaaaaaatgcttgcagataaattaggaataaaaaagtggcatttagtcgttggtggaagtttaggcggaatgcagtcacttcaatgggctgtaagttatcctaaaatggtaaaaaaagttggcattcttgccgcagcagctaaaacaagctctcaaaatattgctttgaatgaggttgagagagaagttataagaaaagatagtgattttcatgacgggaagtatctcgaatttaataaatcaccagctaaaggccttaaggctgcaaggatgcttggtcatataacttatttatctgctaaaaatatggaccagcgctttggaagaaagttacaaaatactgattctaaaatagctgaagatgttgattttgaaattgagaactaccttcaatataagggaggaaagtttgcagaatcttttgatgctaattcatatattcttttaacaaaagttatggataaatttgacattgctcataggtatgacgacagtcttgagtctgctcttgaaaacattacagccgaagttctggtcgtatcatttacctcagactggatgttcccaacaagtaatggaaaagaaatatgtttggcatcgatcaaagcgaataaaaaatgttcatatattgaattagaaggagagcatggtcatgacagcttcctttatccaaatgaagattaccaaaatgctataaaaaactttatcgaatcaaaatgaa

SEQ ID NO: 234287 - DNA, 910 bp, Unknown
  Bacterial polypeptide expressing nucleotide sequence isolated from the Sargasso Sea
ttggaaaaaataagtaattcagacgactatagaactaataaattttctaaatatttaagaaaatttcaagttccacataccctagaacttgaaagaggagaaactctagaagaagtcgtaattgcctatgaaacttatggtgaaataaattctgataagagtaactgtatattagtttgccacgcaataactggagattctcatgtagccaaacatgatgaagatgatcttcctgggtggtgggatattatggtgggacctaataaacctattgatacgaataaatactttgtgatttgttcaaatgttttgggaagctgcagaggaactaccggtccaaattcagttaatcctaaaacaagtcaatattatgcaaatgatttccctgttgtaactataaaagacatggtgaaagttcaaaaaatattagttgaaagcttaggaataaaacaactactaggagttgttggtggttctttaggaggatttcaatgtttagaatgggctactgaatatccagaaatgataaaagcttgtttgccaatagcgagttctcctcgtctcacaactcagggattagcctttgatgttgtagctcgaaacgcgataataagtgatccaaactttaattctggtaattattatgattatgaaaaaaaacctgatgtaggattggctttagcaagaatgcttgggcatattacttatctttcaaaagaatcaatgaatgaaaaattcgaaattgatagaaataatcctagagatatatcaacaagttttgaaaaaaaattttctgtaggaagttatttagcatatcaaggtgaaagatttgttgagcgttttgatgcaaatagttatattacactatctacggcgttagatttatttgatttaggggatgaaaaaagac

SEQ ID NO: 234288 - DNA, 946 bp, Unknown
  Bacterial polypeptide expressing nucleotide sequence isolated from the Sargasso Sea
aatgattgtcgagacaaaaaaaatacttattgattctaaattagaatgtgcttcgggggagactcttgaaaactttgagctaatgaccgatttttatggggagctaaatgaaaagaaagataatgcagtccttgtatgtcatgcattctctggaagtcatcatgctgcaggaaaaagagataataacattggttggtgggatgagttcattggtcctgataaaacaatagatacaaatcgtttctttgtcatttctataaacaatcttggaagttgttttggttctagtggtcctcttagtaaagataaaaatggagagagatttaacaataattttcctcagttagaagttattgattgggttgaatctcaaaaaatgcttgccgataaattaggaataaaaaagtggcatttagtcattggtggaagtttaggaggaatgcagtcacttcaatgggctgtaagttatcctaaaatggtaaaaaaggttggtattcttgccgctgcagctaaaacaagctctcaaaatattgctttgaatgaggtagaaagagaagttataaggaaagatggtgattttcatgatggaaattatctcgaatttaaaaaatctccagttaaaggccttaaagctgcgaggatgcttggtcatataacttatttatctgctaaaaacatggatcagcgctttggcagaaagttacaaaatactgattccaaaatagctgaagatgttgattttgaaattgagaactaccttcaatataaaggaggaaagtttgcagaattatttgatgctaattcatatattcttttaacaaaagttatggataaatttgacattgctcatgggtatgacgacagtcttgagactgctcttgaaaatattactgccgaagtcctggttatatcatttacctcagattggatgttccctagcaagtaa

SEQ ID NO: 234289 - DNA, 726 bp, Unknown
  Bacterial polypeptide expressing nucleotide sequence isolated from the Sargasso Sea
tatgaaatcaataacaaagcttattaattttaataaaggcatagctttagagtcaggtaaaagactagattcatttgatctaatggtggaaacatatggggagcttaatcaatctaaaactaatgctattcttctatgtcatgccttttctggcgatcatcatgccgctggcaaaaatgaagatcagggcattggttggtgggaccaaatcgtaggaccaagcaaagcaatagatacagacgaatattatgttgtttgttgcaataatattggcggatgctctggatcctctggcccaacaagcatcaatcctaatactaaaaaagcatatggaagtgacttcccaatagtcagtgttagtgattgggtaaatactcaaaaaatgcttatggataaattaaatattccatattggcattttgttgccggaggaagcttgggtgggatgcaagcccttcaatggtctattgcttatccagacaaaataaaaaaagcaggaatttttgctgctgcagccaaatcaagcacacaaaatattgcaatgaacgaagtagcaagagaatcaataagaaaggataaaaatttccacaatggaaactatattgagcaaaatgttatcccaaaaaatggaattaaaactgcaaggatgctaggccatataacatatctttcggaaaaacatatggatcttaggtttggtagaaaatttcaagacgatgctcaaaa

SEQ ID NO: 234290 - DNA, 941 bp, Unknown
  Bacterial polypeptide expressing nucleotide sequence isolated from the Sargasso Sea
tttccggaatcatcatgcagctggagaagataaagaattgggtattggatggtgggaccagatagttggtccaaagaaagcaatagatacagaaaaatattatgtggtttgctgtaataatttaggtggatgtgctggttcctctggccccacaacaataaacacagcaacaaataaagtctttggtaaagattttcctttggttactgttgatgattgggtaaattctcaaaaaatgcttatggataaattagatataccctactggcatttagtcgctgggggtagcttgggaggaatgcaggccttgcaatggtctattgcttatccagataaaataaaaaaagctggaatttttgctgcagcagcaaaatctagcacacaaaatattgctatgaacgaagttgctcgagaatcaataaggaaagataaaaattttcataatggagattattatgatcacaacgttacgccaaagaatggaataaaaactgctcgtatgcttgggcatataacttatttatcagaagaactaatggattcaaggtttggaagaaaatttcaagatgaagcttcaaaagttgatcaggatgttgattttgaagttgagaattacttgcaatataaaggcgagaaattttcagaattttttgatgccaattcctatattcttatgacaaaagctatggatggatacgatgctggcaaaggtatagatttagaagaagctatggaaaatataaaagctgaattgctaatagttggattttattctgattggctttatccagctgaaagaggcaaagaaatacaaattgcaggtatgaataataatatcaaatcatccttcgttgtctttgatggcgagcatggccatgatagtttcttgtttcactccaaagaatattcaaatgtaattaaaaaatttattgaatcataat

SEQ ID NO: 234291 - DNA, 574 bp, Unknown
  Bacterial polypeptide expressing nucleotide sequence isolated from the Sargasso Sea
atattgcttttatgaacttggtagacaggcaatcactgcagatcataattggtctaaaggagaatactccctaaataatacgattcctgataaaggtttggctgtagcaagaatggctgcacatattacttacttatctaaaaaaggtcttcaagaaaagtttggaagaaaacttcaagaaagagatgatcttaaatttggctttgatgctgattttcaaatagaaagttatttgagatatcaaggttcagtttttgtcgatagatttgatgcgaatagttatctttatatcactcgtgcaatggattattttgatttagcaaaacaatttaaaggtaatttatctaatgcttttataaaaactaatacaaaattttttgttatatcttttacatctgattggctttatccaacacaagaaaataaagatatagtaattgcattgaatgctataggagcaaatgttggcttcgttgaaatagaatctgataaaggtcacgattcatttttattggatgttccagattttttaggtgcacttaaaaattttttagatcaatcttataaagaataa

SEQ ID NO: 234292 - DNA, 1135 bp, Unknown
  Bacterial polypeptide expressing nucleotide sequence isolated from the Sargasso Sea
atgaacgatattgagaaagtaaaaaaattaattattgataagccattaaagcttgattgcggacaaactatatctaattttccgttagcttatgaaacttatggaaagcttaatgataaaaaagataatgcaatcttagcatttcatgcactgactggggaccaatttgcttcaggtacaaatccaataactaaaaaagaaggttggtggaattatcttataggacctggcaaggcgatagatacacaaaaatattttgtaatttgtgcaaatgtaattggaggatgtatgggttcttatggtccaagtaacattaatccaaaaaataataaaaattttggaacagaatttccagtcataacaataaatgacatggttaacgctcagtatcacttattagagttttttaagattaaaaaattattttcagtcttaggtggatcaatgggtggaatgcaagtgttacaatttgtgtccaattttccaaataaatctgaaactgcaatacctatagcttgtacacatagtcattctgcacaaaatattgctctaaatgaactcgggagacaatcaattatggcagatcataattgggcaaatggattttatgagggcaataataagtctcctgataaagggttggcggtagctagaatggcagcacatattacatatttatctaaaaaaggcttgcaagaaaaatttggaagaaaactgcaagaaagagatgatttaaagtttggtttcgatgcagattttcaaattgaaagttatttaagacatcaaggttcagtttttgtagataggtttgatgctaatagttatctttatataacaagagctatggattattttgatctttcaaaacaatttgatggaaatctctcaaaagcatttgaaaaaactaacactaaattttttattatatcttttacttcagactggctatatccgacacttgaaaatagagaaatagttatagcgttaaattctataggaaagaatgtagggtttgccgagataacatctgataaaggtcacgattcatttttgttaaatattcctgactttcttaatacaataaagaattttttaaatacatcatataataaatcgaatgaaaaaagaatttaat

SEQ ID NO: 234293 - DNA, 1093 bp, Unknown
  Bacterial polypeptide expressing nucleotide sequence isolated from the Sargasso Sea
atgaatacagaaacaaaactcataaagtttgaagaaggcattactctggaatcaggaaatcatttagaaagttttgaattaattgttgaaacctatggtgaattgaataaatcaaagtcaaatggtgttcttttgtgtcatgctttttctggtaatcatcatgcagtaggaaagtctgaggatgggtctatcgggtggtgggatcaactggttggatctgataaagccattgatacagataaatatttcgtggtttgctgtaataatcttggtggctgctctggttcttctggaccaacaagcataaatcctcaaactggaaaaatatatggaaaagatttcccacaagtaagtgttttagattgggtaaattctcaaaaaatgttaagtgagaaattaggaataaataagtggcacttagttattggtgggagcttaggtggtatgcaagccttacaatggtccattacatttccagattcagttaataaagcaggaattctggcggcagcagcaaaatccagtacacaaaatattgcattaaatgaggtagcaagagaggcgataagaaaagatccaaactttatggatggtgactattctataaatcaagttaaaccaaaggatggtataaaaacagcaagaatgcttggacatattacttacctatcagaaaaacatatggatttaagatttggaagaagatttcaagaagaagactcaaaagttagcaaaaaagttgatttcgaggttgagaattacttgcagtacaagggtgaaaaattttctgagaatttcgatgctaatagctacatccttatgactaaggcaatggacgggtatgatattgctcaagataagaatactctcgaaactaatcttcaaaatgtaaaagcatcacttcttattgttggcttttacacagattggttatatccacctgaaagaggaaaagacattcaaattgctgcgattaatcaaaacgtaaaatcttcttacattgttctaagtggtgagcatggacatgatagttttttatttgaaaatgaaaaatatgttaaaactttgaaagaatttattgaatcaaaatgac

SEQ ID NO: 234294 - DNA, 557 bp, Unknown
  Bacterial polypeptide expressing nucleotide sequence isolated from the Sargasso Sea
aagacaggctatagcggctgatagtaattggaaagatggagattattcatcaaaaaatacaatcccaaataaaggtttagctgttgcaagaatggctgcacatataacttatctctcaaaaaaaggtctccaagaaaaatttggaagaaaacttcaagagcgagaggatttgaaatttggttttgatgcagattttcagatagaaagttatttgcgatatcaaggctcagtatttgtcgacagattcgatgcaaatagctatctttatataacaagagcaatggattattttgacttagcaaaacaattcaagggtaatttatctgacgcttttagagctacaagagcaaagttttttataatatcttttacatctgactggctttatccaactcaagaaaacaaggatattgtcattgccttaaattctattggtgcagatgtaggttttgttgaaatagagtctgataaaggtcacgactcatttttattagatgtcccagactttttaaatgcattaaaaaactttttagataaatcctacatagaaaattaat

SEQ ID NO: 234295 - DNA, 1129 bp, Unknown
  Bacterial polypeptide expressing nucleotide sequence isolated from the Sargasso Sea
aatgaatagaaaacttgaaaatattaaaaagcatattgtctctaaacctttaaaattagattgtggtaagactataaataattttcccctagcttacgaaacttacggaaaattaaatgaaaataaagacaatgctgttcttgtatttcatgctttaaccggagatcaatttgttgctggaactaaccctatgactaataaggaaggttggtgggtcactgcagtaggtccaggaaaagcaatagatacaaataagtattttgtaatttgtgctaatgttattggtggatgtatgggatctttagggcctcgtgaaacaaaccctgagtctaatcagccttatgggttaaattttcctgtaatcactattaaagatatggttagagcacaagagtctttactagagtttcttggtatcaaaaaactcctttgtgctacaggtgggtcaatgggaggaatgcaactgttacaattttgtgcaacatttccaaataaaactttttcggctattccgatagcatgtagttctagtcatagtgcacaaaacattgctttaaatgaattagcgcgccaagctataatggctgatccagtgtgggataatggaaaatatgttcttaagaacgtgcagcccaaaaacggtctagctgtagccagaatggtaggacatataagttatttgtctgaaaaaggaatgcaggaaaaatttggaagaaaattgcaagaaaaagctgattacgaattcagctttgatgcggattttcaagttgagagttatttaagacatcaaggtttcgcatttgtagaacgatttgatgccaattcagtgctttatattactagagcaatggattatttcgacctttcgaaacaatttaaaggtggacttgttgaagcatttaaaaatcaaaagacaaaatttttagtcatatctttttcttcagattggctttacacaactaaagaaaataaagatattgtaattgctttaaatgcttcaggcgcagatgtttcatattcagagataatttcagataaagggcatgattccttcttgctcgaggaacctgaatttttgaaaactttaaaaagttttttagactcaatgtacgataaatttaaaaaatga

SEQ ID NO: 234296 - DNA, 940 bp, Unknown
  Bacterial polypeptide expressing nucleotide sequence isolated from the Sargasso Sea
aatgcagcgaagaccaatgttattttaatttgttatccgttaacggggtcatcaaacgccatggaatggtggccaaaaattgttggccctggtttggccattgataccaatcagtattttgtgatttgcaccaatgcactgggcggatgttctggaacaacgggtccggcatccatcaaccccaaaaccaacaccccttatttgttggattttccagtggtcaccattgcggacatggtgagggtgcaacgtgaactcattggccatctaggaatcaataagattaaaatgatcattgggggctccatgggggggatgcaggcccttgaatgggtggcacaagcgccagagctcattgaatcgtgtgttccaattgcgtccacaacaaaggtaagcccattggccgtagcatttgattctgtgggccgtaaatccattatggagcaattaaagtcagggcatggtgaagctggattagcagtggcccgacaattgggccatatcacatatttatcggaagaggccatggagcaaaagttttcaaggaatttgcaacatagcgatgcgtatcaatatcatttggaaccagaatttcaaattgaaagttatttaaactatcaaggggaaaaatttttaggacgatttaatttatatgcctatttggtcctaacaaaggcggtgagttattttgatctcgagcgatcttatggatccattgagaaagccatcggtcattcatcggccaagtttttggtgatggcaatcacctccgactggctctatacagcgaatcaaagcaaggccttggcctatcaattgatgaaactaaacaagcacgtgagttatgttgaaattgattctgattatgcccacgatacatttttaattgattcagacgaaaccaaacaagtgataaaatgttttttggatagcttatgaa

SEQ ID NO: 234297 - DNA, 760 bp, Unknown
  Bacterial polypeptide expressing nucleotide sequence isolated from the Sargasso Sea
atggttaacgcacaatatcatttactagaattttttaaaattgaaaaactattttcagttgttggtggatcaatgggtggaatgcaggtattacagtttgtatctaactttccagataaatctttcactgccatacctatagcgtgtacagctagtcattctgcacaaaatattgcactaaacgagctaggaagacaatctattatggcagatcataattggtcaaatgggttttatcaggaaaataaatcacctaataaggggctagcagtggctagaatggctgctcatattacatatttatcaaaaaaaggtttgcaagaaaaatttggaagaaagttacaagaaagggatgatttaaaatttggctttgatgcagactttcaaattgagagttacttaagataccaaggatcagtttttgttgatagatttgatgctaacagctatttatatattacaagagccatggattattttgatctaacaaaacaatttaatgggaatctttcaaaagcatttgaaaaatctaatacaaaattttttattatatcttttacttctgattggttatacccaacatctgaaaatcgtgaaatagtaattgcattaaattcacttggtaaagatgtaggatttgcagaaataacatctgacaaaggccacgattcatttctattagatgttcctgattttttaaatacggttaaaaattttttaaatacatcatacaaaaaaataaatgaaaaaagaatttaac

SEQ ID NO: 234298 - DNA, 633 bp, Unknown
  Bacterial polypeptide expressing nucleotide sequence isolated from the Sargasso Sea
caataccgattgcgtgcacatctagtcactcggcacaaaacatagcgtttaatgaattaggaagacaggcaattatggctgacagtaagtgggaaaatggattttatagtaattacaaattaaatcctgacaaagggttagcggtagcaagaatggcagcacatattacttatctttctgaaaaaggattgcaggaaaaatttggaagaaaattgcaagatagggatagcctaagatatggatttgaggcagattttcaaattgagagttatcttagataccaaggatctgtgtttgttgatagatttgatgctaatagttatttatatataactcgtgcaatggattattttgacttatccaaacagtacaaaggaaacttatctgatgcattcaaagaaactaaaacaaaattttttgtaatatcatttacatcagattggttgtatccaacatcggagaatagagaaatagttatagcactaaattctattggtgcagatgtcggatttgtagaaatagaatctgataaggggcatgactcatttttgctcgatgttccaagtttcctaaagacacttggcgattatattaattcaacctacaaagttataaatgaaagaagaatttaac

SEQ ID NO: 234299 - DNA, 1129 bp, Unknown
  Bacterial polypeptide expressing nucleotide sequence isolated from the Sargasso Sea
aatggaaaatgttaaaaaattaaatatatctaaatctctattacttgactgtaaacaaacggttaaagattttcctttggcttatgagacatacggaaagttaaatgaaaataaagacaatgctatattagtatttcatgctcttacaggtgatcaatttgtaaccggaataaacccaataactaaaaaggaaggttggtggggaactgctgttggaccaggtaaggcaatagataccaataaatattttgtgatatgtgcaaatgtaattggtgggtgtatgggttcgtggggtcctaaagaggtagacaaaaaaactaatgaaccatatggtttaagttttccagtgattacaataagagatattgttagagcgcaggaaacacttttagattatttgggtgtggaaaaacttctctgtgctacgggcggctcaatgggtggaatgcaaacactacaattttgtgcaacatttccaaatagaacatattcagcaatgccaattgcctgtagcacaagtcatagtgcacaaaatattgcactaaatgaattagccagacaggctgtgatggccgatccagtatgggataaagggaaatatattaaaaaaaacgttcaaccaaaaaatggtttagcagttgcaagaatggttggtcatataagttatttatctgagaaaggtatgcaagaaaaatttggtagaaaacttcaagagagaggtgactatgattttagttttaatgcagattttcaagttgaaagttatttaagacaccaaggttttgcatttgtagaaaggtttgatgccaattcaattttatatattacaagagcaatggattattttgatttatcaagacaatataaaggtggattgaccgaagcatttaaaaatcagcaaacaaaatttcttgtgatatcattttcttctgattggctttatacaactaaagaaaataaagatacggtaattgctctaaacgcagctggtacggatgtttcttttgcagaaattaagactgacaaaggtcatgactcttttttagtagatgagccagagtttttaaaaactataaaaggttttatagactcaatgcatataaaatttaaaaatgaaaaaagaatttaa

SEQ ID NO: 234300 - DNA, 639 bp, Unknown
  Bacterial polypeptide expressing nucleotide sequence isolated from the Sargasso Sea
cccttcagtggtcaattgcctacccagataagattaagaaagctggtatttttgcagcagctgctaaatcaagcacccaaaatattgctatgaatgaggttgcgcgtgaatcaataagaaaagatcaaaacttccacaatggtaattatattaatcatggggttataccaaaaaatggaataaaaactgcaagaatgttgggtcatattacatacctgtcagaagagcatatggattctagatttggaagaaaatttcaagataatgataccaaagttaatcaaggtgtagattttgaagttgaaaactatttacagtacaaaggcaaaaaattttcagaaatctttgatgctaatacatacatcttgatgacaaaggctatggatggatatgatgctgctgaaggattgtcctcgcttaatgatgccctaaatagtgtaactgcgcagttattaattatcggtttttactctgattggttgtatccaccagaaagaggaaaagagatacagattgctgcaatgaataataatattaaatcatcctatgttgtattagagggtgaacacgggcacgacagttttctatttcataatgaacgttacgcaaaaataataagtaaatttttagaatcttaat

SEQ ID NO: 234301 - DNA, 1090 bp, Unknown
  Bacterial polypeptide expressing nucleotide sequence isolated from the Sargasso Sea
aatgattgttgagacaaaaaagatactgattgattcaaaattagaatgcgcttcgggagaggcacttgaaagctttgagctaatgacagatttttatggagagctaaatgagaaaaaaaataatgcagtccttgtatgccatgcattctctggaagtcatcatgctgcaggaaaaagagacaacaacattggttggtgggatgagttcattggtccagataaaacaatagatacaaatcgtttctttgtgatctccataaataatcttggaagttgttttggttctagtggccctctcagtaaagataaaaatggggagaggtttaataataattttcctcagttggaagttattgattgggttgaatctcagaaaatgcttgcagataaattaggaataaaaaagtggcatttagtaattggtggaagtttaggtggaatgcagtcacttcaatgggctgtaagttatcctaaaatggtaaaaaaagttggcattcttgccgcagcagctaaaacaagctctcaaaatattgctttgaatgaggttgagagagaggttataagaaaagatagtgattttcatgacgggaagtatctcgaatttaataaatcaccagctaagggccttaaagctgcaaggatgcttggtcatataacctatttatctgctaaaaatatggaccagcgctttggaagaaagttacaaaatactgattccaaaatagctgaagatgttgattttgaaattgagaactaccttcaatataagggaggaaagtttgcagaatcctttgatgctaattcatatattcttttaacaaaagttatggataaatttgacattgctcaggggtatcacgacagtctcgaggctgctcttggaaacattgctgccgaagttcttgttgtatcatttacctcagattggatgttcccaacaaacaatggaaaagagatatgtttggcatccataaaagcgaataaaaaatgttcatatattgaattagaaggagagcatggtcatgacagcttcctttatccaaatgaagattaccaaaatgctataaaaaactttatcgaatcaaaatga

SEQ ID NO: 234302 - DNA, 1087 bp, Unknown
  Bacterial polypeptide expressing nucleotide sequence isolated from the Sargasso Sea
atgaagacggaaacaaaattaattcatttttcagaaggaattgaacttgaatcaggtgagaagctcaattcattcgatttaatggtagaaacctatggtgaacttaatgaaggcaagtcaaatgcaattcttctttgtcatgcattttcaggaaatcatcatgcagcaggaagttctgaagattttggaattggttggtgggatcagttagttggtcctagtaaaacaatcgacaccaataaatattttgttgtctgttgcaataatctaggtggatgtgctggttcctcgggaccatcttcaattgatccttcatcgcaaaaaatatttggaaaatcttttcctcaagtaagtgtcctggattgggttaactcacaaaaaatgcttatggataaattaaacatagagtgttggcattttgtagcaggtggaagtttgggcggaatgcaagctctgcaatggtcaatttcatatccagataaagttaaaaaggctggaatttttgctgcagcttcaaaatctagttctcagaatattgcgatgaatgaagttgcaagagaatctataagaaaagatgagaactttcataatggaaattattatgagcacaacgttatacctaaaaatgggattaaaactgcaagaatgcttggtcacattacatatctttcagaagaacatatggattcaagatttgggagaaaatttcaagatgaaggttcaaaagtagaagagtccgtaagctttgaagtcgaaaattatttgcaatataagggtgaacagttctcagagctatttgatgcaaattcatatattttaatgacaaaagtaatggatagttatgatgctggaaaagataaacccctagttgaggctttaaaagaagtgaaagctgagttcttaattgtaggtttttactcagattggctatacccaccagaaagaggaaaggaaatacaaatagctgcaatgaataataatataaggtcctcttttgtggttctccagggagatcatggacacgatagttttctttttagttcaaaaacttactcaaatttaattacaaatttcatagaatcataat

SEQ ID NO: 234303 - DNA, 543 bp, Unknown
  Bacterial polypeptide expressing nucleotide sequence isolated from the Sargasso Sea
gtcaggcaataatggccgatgtaaattggaattctggaaattataaagacaaaaatactaatccttcaaaaggcctttcaattgccaggatgacagctcatgttacttatttatctgaagcttcactaacaaagaaatttggtagaaaattacaggataaaaaagatcttggttttggttttgatgctgattttcaaattgagagttacttaagacatcaaggtcatacatttgttgatagatttgatgctaattcctatttatatataaccagggcaatggattactttgacttagaaaaaacccataaaaagtctcttacagaaatatatgcgaatactaatttaaaattcctaattgtatcatttactggagattggctttatccaacatctgaaaacttaatgatagttagggctctcagcgcaggtggggtcgatgtaagttttgttgaaattgactccgataaaggtcatgatgcatttttattagatgaaccagaatttgatgtttgtctggatgggtttcttaaatcattatgat

SEQ ID NO: 234304 - DNA, 493 bp, Unknown
  Bacterial polypeptide expressing nucleotide sequence isolated from the Sargasso Sea
aaaggtaacttccatccgaaaagaggattgggactagctagaatgcttggtcacataacctatctctcagaggaaatgatgaaagaaaaatttggaagagatttaaaaaaggaaaagtatgagtacgggtttgacgtagagtttgaagttgaaagctatttgagatatcaagccgacgcgttttcagagaaatttaatgcgcatacctacttattgatgacgaaagcattagattattttgatccatccagagattatgaaaacgacttaactaaaactttagaaaaaacaaattcagattttttagtcttgtcattttcttctgattggagatttgctcctgaaagatcaaaggaaattgtaaatgcactaattgcttcaaaaaagtcagttagttatgcagaaattaaaagttctcaaggccatgacggctttctgtttcctgatgaaagatatgttaaaagtatccaaactttccttgaaaatgaatagt

SEQ ID NO: 234305 - DNA, 822 bp, Unknown
  Bacterial polypeptide expressing nucleotide sequence isolated from the Sargasso Sea
cccagaaacaaaaaaacccttacggattagattttccagttataacgattaaagatatggtaaaagctcaggagtccttacttgaatatctaggaaataaaaaactcttatgtgcgactgggggttcaatgggtggaatgcaacttttacaattttgtgcaacatttccggataaagctttttctgcggtgccgatagcctgtagctcgagccatagcgctcaaaatattgctcttaatgaattagctcgtcaagcaattatggcagatcctgtatgggataatggaaaatatgttttgaaaaatgttcaaccaaaaaatggcttagcagttgcaagaatggttgggcatataagttatttatctgaaaaaggtatgcaggaaaaatttggtagaaaattacaagagaaggcagattatgaatttagttttaatgctgacttccaagttgaaagttatttaagacatcagggctatgcatttgttgagagatttgatgctaattcagtactctacataacaagagcgatggattattttgatctttcaaaacaatttaaaggaggtttggtagaagcatttaaaaatcaaaaaacaaaattcttaatcatatcattttcctctgattggctttacacaacaaaagataacaaagatatagtaatagcattaaatgcgtcaggtgcagatgtctcttactctgagataattacagacaaaggacatgactcttttttacttgatgagcctgaatttttaaaaacacttaaaggttttttagactctatgtatgaaaaatttaaaaatgaaaaaagaatttaaa

SEQ ID NO: 234306 - DNA, 508 bp, Unknown
  Bacterial polypeptide expressing nucleotide sequence isolated from the Sargasso Sea
atctaataatactcttcctgataaagggttatcagtagcgagaatggctgcacatataacctatttgtctaaaaaaggtttacaagaaaaattcggcagaaaacttcaagaaagagatgctcttaaatttgggtttgatgcagattttcaaatagagagttatctaagatatcaaggatcagtttttgtagatcgatttgatgctaatagttatctttatatcacaagagcaatggattattttgatctagttaaacaatttgatggtaatttatctaatgcatttaaaaaaactaaggctaagttttttataatatcttttacctcagactggctctatccgacccaagaaaataaagatatagttatcgctcttaatgcaattggtgctgatgttggatttgttgaaataaaatctgacaaaggtcatgattcttttttattagatgttccagactttttgaaaacccttaaaaattttttagataaatcttactcagagagataa

SEQ ID NO: 234307 - DNA, 655 bp, Unknown
  Bacterial polypeptide expressing nucleotide sequence isolated from the Sargasso Sea
tttccaaataaaactaaagttgctttgccaatagcttgcacagcaagtcattctgctcaaaatattgcatttaatgaacttggcagacaggcaataatgtctgattctaattggaaggatggtttatatgaagaaaaaaataataatcctgataaaggtttagcagttgcaagaatggcggctcatattacttatttatcaaaaaaaggtctgcaagaaaaatttggaagaaaacttcaagaaagaagtgatttaaaatttggttttgatgcagactttcaaattgaaagctatttaagatatcaaggatctgtattcgtagatcgttttgatgcaaatagctatttatatatcactagagcaatggattattttgatttaacaaaaaaatttaatggaaatctttcaaaagcatttgaaaaaacaaaaacaaaattctttgtcatttcttttacttctgattggttgtatccaacttctgagaatagagatatagtaattgctttaaatgcaattggtgctgaagtaagttttgtagaaataaaatcagacaaaggacatgactcttttctattagatgttccagactttcttaatactattaaaaattacttaaacgcaacatttttagaattaaatgaaacaagaatttaaa

SEQ ID NO: 234308 - DNA, 1117 bp, Unknown
  Bacterial polypeptide expressing nucleotide sequence isolated from the Sargasso Sea
atgagtgaaaataaaattgttactttagcagaagatgaaccattaaatttggatggaggtggaagtttatctaaatttaaaactgcatataccacatatggcaaacttaacgataaaaaaaataattcaatcttagtttgtcatgccttgactggcgatcaatatgtagcaagtgatcatcccattacaaaaaaaaatggctggtggtcgatggttgtagggcccgataaaccaattgatacgaacaagttctttgtcatttgccctaatgttattggtgggtgcatgggatcaacgggtccaaaagaaataaatcctgaaaacggtaaagaattcgcgactgattttcctgtaattacaattgcagatatggtcagagctcaaaaattattaattgattatttgggaattgaaaaaatattctgtgttactggcggatcgatggggggcatgttggtactcgaatggctttcaaagtttcctgaaatggtacattcagcagttcctattgcaactgcaacaaaccattcggctcaaaacattgcattaaatgagcttgcaaggcagtccataatggctgatccaaactggcaatcagggaattactatcattctgataaaaaacccatgaaagggctttcagtagctagaatggcagcacatatttcatatctatctaaagaagctctacaaagtaagtttggaagaaatctccaagataaaaatagcttggattattcttttgatgccgattttcaaattgaaagttacttaagacatcaaggatttacttttgttgatcgctttgatgcaaacagctatctgtatatcactcgggcaatggattattttgatgtttcctcagcaaataatggctccttaatagaggcctttaaaaatacgcaatctaaaattctttgtgtgtcatttaccagtgattggctatacccaacatctgaaaacaaaaaaattgtaaaagttttcaattctcttgggcttaatgtcagttttattgaaattgaaactgaaaacggtcatgactcattcctattggatgaaccaaagttttttgaggcgataaaaggattcattaattcaacatttgaaaatttatgag

SEQ ID NO: 234309 - DNA, 1087 bp, Unknown
  Bacterial polypeptide expressing nucleotide sequence isolated from the Sargasso Sea
aatgaaaaaaaacagtcaattaatttcatttccagatggtattacacttgaatctggccatattctaaattcttttgatttgatgatagagtcctatggagagcttaacgaatcaaaatctaatgctatcctggtgtgtcatgcattttctggcaatcatcatgttgctggtgaagataaagagttaggtaaaggatggtgggatcaaatagtaggacccgataaagccttagatacaaataaatactatgtcgtatgttgtaataatttaggtggctgtgcagggtcatctgggcccaacacaattaatcctgacacagataaaatttatggtggtgcttttcctcaagtaagtgttgaagattgggtaagatcacagaaaatgttaatggacaaattaaatattccatattgggaaatggttgctggcggaagccttggtgggatgcaagctctccaatggacaattgcctatccagataaagtgaaaaaggctggtatttttgcagcagcaccaaaatcaagcacacaaaatatagcaatgaatgaagttgcccgcgaatctattagaaaggataaaaatttttatgatggcaattatcatgatcatgatgtaattccaaaaaatggcctaaaaactgctcgtatgcttgggcatatcacttatttgtctgaggagcatatggacaatagatttggcaggaggttccaagactcagaatcaaaaatgaataaaggtatcgactttgaaatagagaactatctacaatacaagggaaatcagttttccgaatcgtttgatgcaaattcatatatccttatgacaaaagcaatggacaactatgatgctggaaaatctaaaggtcttattgaaagtcttaaaaacataaaagcaaaacttctcattgtaggattctattctgattggctatatccaccagaacgtggcaaggagattcaattggctgcaatgcaaaataatattaactcttcctacgtcatccttgctggagaccatggacatgatagctttctatttcatacagacaagtactcaaaaattatcagaaattttatcgcatcataa

SEQ ID NO: 234310 - DNA, 829 bp, Unknown
  Bacterial polypeptide expressing nucleotide sequence isolated from the Sargasso Sea
attgaagcttgattgcggacaaactatatctaattttccattagcatatgaaacttatggaaaacttaatgataaaaaagataatgcaattttagcattccatgcactaactggagaccaatttgcttcgggtgtaaatccaataactaataaagaaggttggtggaattaccttataggaccaggtaaagcaattgatacacaaaaatatttcgtaatttgtgcaaatgtaattggagggtgcatgggttcttatggtccaagtaatattaatccaaaaactaataaaaattttggaacagaatttccagttataactatcaatgacatggttaacgctcagtatcacttattagatttttttaagattaaaaaattattttcagttctaggtggttcaatgggtggaatgcaagttctacaatttgtatccaattttccagataaatctgaaactgccattccgatagcatgtactcatagtcattcagcacaaaacattgctctaaatgaacttggaagacaatcaattatggcagatcataattgggtaaatgggttttatgagagtaataataagtcccctgataaaggattggctgttgctagaatggcagcacatattacatatttatctaaaaaaggtttacaagaaaagtttggtagaaaacttcaggaaagagatgatttaaagtttggttttgatgcagattttcaaattgaaagctatctaagacatcagggttcagtttttgtagacaggtttgatgctaatagttatctatatataacaagagctatggattattttgatctttcaaaacaattt

SEQ ID NO: 234311 - DNA, 877 bp, Unknown
  Bacterial polypeptide expressing nucleotide sequence isolated from the Sargasso Sea
tttttcgttatttgttctaatgtgcttggtggctgcgcaggatctactggaccaaaagaaaaagaaaatgatgaacaaaatatttatggaggaaatttcccatcagtaactattaaagacatagtaagtgctcagttaaaattattggacgcattggcgattgatcaattgtttagtgtagttggaggatctatgggggctatgcaagctttacaatggtcaattgactttcctgaaagagttcaatcaattatacatattgctggggctcttaaacattctgcacaaaatattgcttttcatgaagtggggaggcaagccataatgaatgacccaaattggcataagggaaattatttcgaaaataattcaattccagaaagaggattatctgtagctcgaatgatagcgcatatcacttacttatcagaagatgctatgcacagaaagtttggtagaaaacttcaatcaagagacattatttcatttggttttgatgcagattttcaaattgaaagttatttacgttatcaaggtagatcatttgtagaaaggtttgatgcaaattcatatttgtatttaacaagagcaatggattattttgatcattccgaaagctatagaaaaacacttgaatttgttaataaacaaaacaatcatataaaatatcttgtaatatctttctcatctgattggttatttcccactaaagagaataaagaaatagttgaaattttaaatagtttatcaaaaaatgtaagttttttagaaattgaaacagataaaggtcatgatagtttcttgctagatgagccagaccttgattatgttataaaaggtttttttgaaagcaactttggaaaagtaaatgaataat

SEQ ID NO: 234312 - DNA, 805 bp, Unknown
  Bacterial polypeptide expressing nucleotide sequence isolated from the Sargasso Sea
ggttcctcaggcccaacctcaataaatccagctacaaaaaaagtctatggcaaaacttttccaaaagtgagtgttgatgattgggtaaattcacaaaagatgctcatggataaattaaatatcgatttttggcatttagtagctggaggaagtcttggaggaatgcaagctctgcaatggtcaatttcgtatcctgaaaaagttaaaaaagcaggtatatttgcagcagcagttaaatcaagcacacaaaatattgcgatgaatgaagttgcgagagaatcgattagaaaagacaaacatttttatgatggcaattattatgaacataatgcgtcaccaaaaaatggtattaaagcggcgagaatgttaggtcacattacttacctatctgaagaactgatggatacaagatttggaagaaagtttcaagatgaagcatcaaaagttgatgaatcagttaattttgaagttgaaaactatttacagtacaaaggagagaagttttctgagatttttgatgcaaattcttatattttaatgactaaagctatggatgattacgatgcaggaaaaaacaaaacacttgaagaaaaactaagggatgtaaaagcggagtttttaataattggattttatagcgattggctttatccacctgaaagaggaaaagaaatacaaatagctgctatgaataataatataaaatcatcttttattgttcttgatggccaacatggccacgatagctttctgttcgattcacaaccatatacaacattaataaaaaactttatagaatcataat

SEQ ID NO: 234313 - DNA, 844 bp, Unknown
  Bacterial polypeptide expressing nucleotide sequence isolated from the Sargasso Sea
gggtcttatggtccaagtgatattaatcctgaaaataaaaaaatatttggaacagattttcctgttattactattaacgacatggtcaatgcacaatatgaattgctagctcatctaaaaattgaaaaattattttcagttattggtggatctatgggtggaatgcaagttttacaatttatctcaaactttccagataaatctcatacagcaataccaatagcttgtactgcaagtcattcagcacaaaatatagctcttaatgaattaggaaggcaatcaattatggcagatagtgattggcaaaatggcttttatgaagaaaaaaataaatctcctgcaaagggattatctgttgctaggatggcggcacatattacgtatttatcaaaaaaaggtttacaggaaaaatttggaaggaaacttcaagaaagagatgaccttaaatttagctttgatgcagattttcaaattgaaagctatttaagatatcaaggatctgtatttgttgatagatttgatgctaatagctatttatatatcactagagctatggactattttgacttaaccaaacaatttggtggtaacctgtcaaaagcattccaaaaatctaatacaaaattttttataatttcttttacatcagattggttatatccaactgcagagaatagagaaattgtaatcgctcttaattcactgggtaaagatgttggttttgttgaaataaaatcagataaaggtcatgattcatttttattagatgtgcctgattttttaagtgcagtgaaaaattttttaaatacctcttatagaaaaataaatgaaaaaagaatttaat

SEQ ID NO: 234314 - DNA, 1027 bp, Unknown
  Bacterial polypeptide expressing nucleotide sequence isolated from the Sargasso Sea
gatgcccagtttagctgggctttttttttggatgaatataaaacttgagaatataaagaaattagatgttactaaaccgcttaaactagactgcgggaaaactataaaagattttcctctcgcttacgagacttatggaaaattgaataacaacaaagacaacgcaatacttgtatttcatgcattaactggagatcagttcgtgactggaactaatcctattactaataaagaaggttggtgggttactgcagtagggcccgggagagcaatagatacaaataaatattttgttatttgtgcaaatgtgatcggaggatgtatgggttcgttaggtcctaaagatattaatccagtaacaaaaaaaccttacggattggattttccagttataacaattaaagatatggtaaaagctcaggagtcattacttgagcatctaggaatcaaaaaacttttatgtgcaactgggggttcaatgggtggaatgcaacttctacaattttgtgcaacatttccggacaaaactttttcagcagtgccaatagcatgtagctctagccatagcgctcaaaatattgctcttaatgaattagctcgtcaagcaattatggcagatcctgtatgggataatggaaagtatgttttgaaaaatgttcaaccaaaaaatggattagcagttgcaagaatggttgggcatataagttatttatctgaaaaaggtatgcaggaaaaatttggtagaaaattacaagagaaggcagattatgaatttagttttaatgctgacttccaggttgaaagttatttgagacatcaaggctatgcatttgttgagagatttgatgctaattcagtactatatataacaagagcgatggattattttgatctttcaaaacaatttaaaggaggtttagtagaagcatttaaaaatcaaaaaacaaaattcttaataatttcattttcctctgattggctttacacaacaaaagataacaaagatatagtaatagcattaaatgcg

SEQ ID NO: 234315 - DNA, 759 bp, Unknown
  Bacterial polypeptide expressing nucleotide sequence isolated from the Sargasso Sea
tatgaatataaaagaaaagataaaaactattgttattgataagcctttgaagcttgactgtggtcagacaataaataaatttcccttggcttatgagacatacggatctcttaatgaaaataaagataatgcaattttagtatttcatgcattgacaggagatcaatttgttactggtttaaaccctataaccaataaagatggatggtggtcatttgcagttggtccaaataaatctatcgatacaaataaatattttgtaatttgttcaaatgtattaggtggatgtatgggatcatttggtccaagtcatgaaaatcctgaaacaaaaaaaacatatggtacagattttccagtaattacaattaatgatatggttaatgcacaaataaatttattagatcattttggtatcaaaaaacttttttctgtagttggaggttcaatgggtggaatgcaagttctgcagttcgtgagtaactttcctgacaaaacaaaaactgcagtgcctattgcttgtacatctagccattcagcacaaaatattgccttaaatgaacttggtagacaagctattgctgcagatcataattggatgaatggaaattacacatctaaaaatacagttccagataaaggtttagctgtagctagaatggcagcacatataacttatttatcaaaaaaaggtctccaagaaaaatttgggagaaagcttcaagagagagatgatcttaaatttggttttgatgcagattt

SEQ ID NO: 234316 - DNA, 1171 bp, Unknown
  Bacterial polypeptide expressing nucleotide sequence isolated from the Sargasso Sea
atgcccagtttagctgggctttttttttggatgaatagaaaaattgagaatataaataagattactattactaaaccactcaagcttgattgtggaaaaaccattaagaattttcctctagcctatgaaacctatggaaaacttaatgaaaataaagataacgctattttggtattccacgctttaacgggcgatcaatttgtaactggtacgaaccctgtaacaaataaagaaggctggtggataactgctgttggtcctggcaaggctattgatacagatagatattttgtgatttgcgcaaatgtaattggtggatgtatgggatctcttggaccaaaagatacaaatcctgaaaacaaccagccctacggtttagattttccagtcatcactattaaagatatggtgaaagcacaagagtctttactggaacatcttggtataaaaaaacttttatgtgctactggtggatcaatgggtggaatgcagctattacaattttgcgcaacatttccagataaatctttttcggctattccgattgcttgtagttcaagtcatagtgctcagaatattgcattaaacgaactagcgcgccaagctataatggctgaccctgtgtgggataatggaaaatatgtatcgaaaaaagtacaaccaaaaaatggtttagcagttgcaagaatggttggtcatatcagttatttatctgaaaaaggtatgcaggaaaaatttggaagaaaattacaagaaaaagctgattatgaatttagttttaatgctgattttcaggtagagagctatttaagacaccaaggttatgcttttgtggaaagattcgatgcaaattcaattctttatataactagagcaatggattattttgatctttctaagcagttcaaaggtggtttagttgaagcttttaaaaatcaaaaaacgaaatttttagtaatatcattttcttctgactggctttatacaacaaaagaaaataaagatatagtaattgcattaaatgcatctggtgctgatgtatcctactcagaaataataacagacaaaggacatgactccttcttacttaatgaaccagaatttttaaaaactcttaagggttttgtagacacaatgtatgaaaaatttaaaaatgaaaaaagaatttaaa

SEQ ID NO: 234317 - DNA, 940 bp, Unknown
  Bacterial polypeptide expressing nucleotide sequence isolated from the Sargasso Sea
gatgcccagtttagctgggctttttttttggatgaatataaaacttgagaatataaagaaactagacgtcaaaaaaccactcaaattggattgtggaaaaactattagtaattttcctttagcttatgaaacttatggaaaattaaacaagaataaagataacgccattcttgtttttcatgctttaaccggtgatcagtatgtcactgggaccaatccaataactaacaaagaaggttggtggatcactgcagtgggtccaggtaaagctatagatactaacaaatatttcgttatttgcgctaatgtcattggaggatgtatgggttctttaggtccacgaaatattaaccctaaaacaaatcaaccatatggactagattttccggttattaccattaaagatatggtgagagctcaagagtctttacttgatcatcttggaattaaaaagcttttatgtgcaactggtggttctatgggcggaatgcaattattgcagttttgtgtaacttttccagataaaactttttctgctattccaatagcctgcagctcaagtcatagcgcacagaatattgctttaaatgagttagcacgccaggcaattatggctgatccagtgtgggagaatggaaaatatgttttaaaaaatgttcagccaaaaaatggtttggctgttgcaagaatggttggacatataagttatctatctgaaaagggtatgcaggaaaaatttggaagaaaattgcaagagaaagctgactatgaatttagttttaatgctgattttcaagtagaaagttacttaagacatcagggttatgcatttgttgaaagatttgatgcaaattctgttctttatataacaagagcaatggattattttgatctttcaaaacagtttaaaggcggtctgatagaagcatttaaaaatcaa

SEQ ID NO: 234318 - DNA, 889 bp, Unknown
  Bacterial polypeptide expressing nucleotide sequence isolated from the Sargasso Sea
ttttataatgatcccgaatcattattgctagaaagtggacaaataattaatggccacgatatagcatataaaacttacggatcattaaattcaaaaaaagataacgcaatactaatttgtcatgcactttcaggcgaccaatatgttgctagtcaacacccaatcacgaagaaagagggttggtgggaaagaatggttggtaaagataaaccaatagatactaaccgattttttgttatatgcataaatgtcttaggggggtgtatgggatcaacaggaccagcatccattaatcctgaaaccagcaaagtatttgcagtaaattttccgataataacgatagctgatatggttaaagcacaagttaggttaatagataatcttgaaatagaaaaattagtttccgtaattggtggctctatgggtggtatgcaagctcttgaatgggctgcctcctaccctgaaagattgaaatcagctattccaatagctacttcctctagacatactgcacaaaatattgcctttcatgaattaggtcgtcaggcaataatggccgatgtgaattggaattccggaaattataaagacaaaaatactaatccttcaaaaggcctttcaattgcgaggatgacagctcatgtaacttatttatctgaagcgtcactaacaaagaaatttggtagaaaattacaggataaaaaagatcttggttttggttttgatgctgattttcaaattgagagttacttaagacatcaaggtcatacatttgttgatagatttgatgctaactcctatttatacataacaagggcaatggattactttgacttagaaaaaacccataaaaagtctcttacagaaatatatgctaatactaatttaa

SEQ ID NO: 234319 - DNA, 963 bp, Unknown
  Bacterial polypeptide expressing nucleotide sequence isolated from the Sargasso Sea
aataaaatgaaaagtatactgattgaaaaaactcttaagcttgattgtggcaaagaaatatcaaactttccattagcttatgagacctatggaaatcttaatgaaaagaaagataatgctatattaatttttcatgctctaactggtgaccaatatgcttcaggcatcaacccaattacaaaaaaagagggttggtggaactatgcagttggtccaggtaagtcattcgatactgataaattttttgttatctgtgcgaatgttattggtggatgtatgggatcctacggaccaggaactattgatcctttaaccaataaacctataggtacaaattttcctgtgattacaattaacgatatggttaacgctcaatacaatctattagactattttaaaatagaaaaattgtttgcagttgctggtggctccatgggtggaatgcaagttctgcaattcgtatcaaactttccaaataaggctagagtagcattaccaattgcttgtacagctagtcattcagctcaaaatattgcttttaatgaacttggaagacaggcaataatgtctgatagtaattggaaagagggattgtatgatgaaaaatcaacaaatcctgataaaggtttagctgttgctaggatggctgctcatattacgtatttatccaaacaaggtttacaagaaaaatttggaagaaatcttcaagaaagatctgatttaaaatttggatttgatgcagactttcaaattgagagttatttgaggtatcaaggctctgtatttgtagatagatttgatgcaaatagttatttgtatataacaagagcgatggattattttgatttaactaaacaatttggtggaaacttgtctaaagcatttaaaaataccaaaacgaaattttttataatctcctttacttctgattggttatacccaacatctgagaataaggatatt

SEQ ID NO: 234320 - DNA, 886 bp, Unknown
  Bacterial polypeptide expressing nucleotide sequence isolated from the Sargasso Sea
tgggacgatatggttggtccaaacaaagcgtttgatacgaacaagtatttcattgttggttgtaataatttaggcggctgccacggtagcacaggtccaaattccattaatccagaaaacaatatagcttacggctcctccttcccgatggtcacagttgaagactgggtcaaaagccaagatttgttgcgcactcatctcggactgccctattggtatgctgttgttggcggcagtctaggcggtatgcaagctttacaatggtccatagattaccccgaccttgttaaaaaaattgtggtgatagccgcagcggccaagttgagcgctcagaacattgcttttaatgaaatagccaggcaagccatcttggctgatccaaactataactctgaggataagcttccgaagacgggtttagggctagcgagaatgcttggtcacattacttacctatcagatgatgcaatgcgagagaaatttgggcgagatatgaaaaaaggcgaagtgaatttctcctacgatgtcgagttcgaagtagaaagctatttaaggtatcaaggcgaaagtttttctaatagatttgatgctcacacttacctgcttatgactaaagttttagactattttgatcctgctgagtctcatgaaggtgatttagctaaaactcttaattcggttactgcgaaaactcttcttatcgcattttcatccgactggcgattttcaccggaaagatccagagagttagccgatgcttttattgaagctgaaaaagacgtctcctttttagaaatagattcaccgcatggtcacgatgcttttttaatgccaagcgaaacttacgatagcgcaattgagacattcttagagaaaaatgaataag

SEQ ID NO: 234321 - DNA, 828 bp, Unknown
  Bacterial polypeptide expressing nucleotide sequence isolated from the Sargasso Sea
agtatgtcatgcactctctggaaaccatcatgttgcgggtttacacaaaggcgatgaaaaacctggatggtgggataatatgataggttctggtaaaccaataaatacagataaacttttcgttgtctgtatgaataatttaggaggctgtcatggttcaacaggacctactagcattaatgaagaaacaaataatccatatggctttgagttcccgattgttacagttcaagattgggtgaatagtcagaaagtcttaatggatgaattcggtattgataaatggcaatttataattggtggaagcttgggtggaatgcaagcattacaatggtctcttgattatccggataatgtcaataatgcaattataattgcagcatccccgaaattaactgcacagaatatcgcctttaatgaagttgcaagacaagctatcacaagtgatccagattggtgtggtggtaattatataaaggaaaataagatacctaaaagaggccttgctctcgctagaatgttagggcacattacatatctatcagatgaatcaatggctaagaaatttggcagagatctcaaacaagataaaatcaactttaatttcgatgtggaatttcagatagagagttatttaagatatcaaggtgaaaaatttgtaacttcttttgatgcaaatacttacctacttatgactaaagcattagattattttgatcccttcaatgagactgattttatcgagagaatgagtaagtctagatcaagatttcttggtatttcattcacctcagactggagatttcctcctagggagtctgaagaaat

SEQ ID NO: 234322 - DNA, 631 bp, Unknown
  Bacterial polypeptide expressing nucleotide sequence isolated from the Sargasso Sea
aatataatacatattgcgggcgctttaaaacattcggctcaaaatattgcatttcatgaagttgggcgacaggcaataatgagtgatcctatttggaaaaatggaaagtattttgaaaataatgaagtgcctgaaagaggtctatcagtagcaagaatgattgcgcatattacatatttatccgaaaatgcgatgcatagaaaatttggaagaaaacttcaatcaagagatattatttcttttggatttgatgctgattttcaagttgagagttatctgagatatcaaggtaaatcatttgttgaaagatttgatgcaaattcatatctttatttaacaagggctatggattattttgatcatgatgaaacatttagaaaaaatattgagtttagtcataatccaaataaccatttaaaatatttaattgtctcatttacctcggattggttattccctacaatagaaagtaaaatgattgtaaatcaattaaattctctatcaagagaagtaagctttctagaaattgatactgataaaggacatgatagttttttattagaggaaccgcagttagatgatgtaataaaaggtttcctaacaaacaactttgcgaagatagatgaataaa

SEQ ID NO: 234323 - DNA, 910 bp, Unknown
  Bacterial polypeptide expressing nucleotide sequence isolated from the Sargasso Sea
actggtcgtgccacaagtggcgcacttcagcgaaccgctggccctggcctgcggccgttcgttgccagcctacgacctgatctacgaaacctatggccagttgaacgccacggcgagcaacgccgtgctgatctgccatgccttatccggccatcatcacgccgccggcttccatagcgttgacgaccgcaagcccggctggtgggacagttgcatcggccccggcaagcccatcgacaccaacaagttctttgtggtcagcctgaacaacctcggcggctgcaacggctccaccggccccagcagcctcaacccggaaaccggcaagccgttcggcgccgacttcccggtgctgacggtagaggactgggtgcacagccaggcacgcctcgccgacctgttgggcatcagccagtgggccgccgtgattggcggcagcctgggcggcatgcaggccctgcaatggaccatcacttacccggaccgtgtgcgccattgcctggctatcgcctcggcgcccaagttgtcagcgcagaacatcgccttcaacgaagtggcgcgccaggcaatcctcaccgatcccgagttccacggcggttcgttccaagaagcaggcgtgatccccaagcgcggcttgatgctggcgcggatggtcggccacattacctacctgtccgacgattccatgggcgagaaattcggccgtggcctcaagagcgagaagctcaactacgacttccacagcgtcgagttccaggtggaaagctacctgcgttaccagggcgaggagttctcggggcgtttcgacgccaatacctacctgctgatgaccaaggccctggactacttcgacccggccgccaatcacgatgacgacctggcgaaaaccttcgagcacgccacggccaag

SEQ ID NO: 234324 - DNA, 849 bp, Unknown
  Bacterial polypeptide expressing nucleotide sequence isolated from the Sargasso Sea
actgggtgatcaatttgttacaggtataaatccagtgacaaaaaaagatggttggtggtcatttgcagtaggtccaaataaagctattgatacaaataaatactttgtaatttgcgcaaatgttattggtggatgtatgggttcatttggcccaagcgatgaaaatcctgaaacaaaaaaaatttatggtacagattttccagtaataactattaatgatatggtcaatgcacaagtaaatttattagatcactttggtataaaaaaacttttctctgtagttggtggctcaatgggtggtatgcaagttttacaatttgtaagtaattatcctgataaaactaaaacagcaattccaattgcatgtacatccagtcattcagctcaaaatattgctttcaatgaacttggcagacaggccatagctgcagatcataattggttagacggaaaatatagttccaaaaacattgttcctgataaaggtctggctgtagctagaatggctgcacacattacatacttatcaaagaaaggtcttcaggaaaaatttggtagaaagcttcaagagagagatgatcttaaatttggttttgatgcagactttcaaattgaaagttacttaagatatcaaggttcagtatttgtagatcgttttgatgcaaatagttatctttatattacaagagcgatggattactttgatttagctaaacagttcaaaggaaatctttcagatgcatttataaatacaaaagcaaaattttttataatctcatttacttcagattggctttatcctactcaagaaaacaaagatattgtaattgctttaaactccattggagc

SEQ ID NO: 234325 - DNA, 643 bp, Unknown
  Bacterial polypeptide expressing nucleotide sequence isolated from the Sargasso Sea
tatgaaaaataaattcgatgaaaattctgttggaattgttgctccaagaactgttgagattaaacagaagcttgatcttgattgtggaaaaatactcgagaatttttctttaatttatgaaacctatgggaaattaaataaagacaaaactaacgctattttaatttgtcatgcattatcgggtgatcatcatgctgcgggatttcatgaggtagacgataagaaaccaggttggtgggattcatgcattggtcctggaaagccttttgatacaaacagattttttattgtatctttaaataatttgggcggttgtatgggatcaactggtccaaattcaattaatattaaaacaggaagcgaatatggtccagattttccaattgttacagtaaatgattgggtgaaaagccaaaaactcttggctgattttttagaaatagaaagttgggcatgcgttattgggggtagtcttggtggtatgcaggcattgcaatggacaattacttatcctgaaaaaataaaaaattcaataataatagcagcagcagcaaaattatctgcacaaaacatagcttttaatgaggttgcaagacaagctatcattaccgaccctgagtttcacgacgggcggtataataat

SEQ ID NO: 234326 - DNA, 586 bp, Unknown
  Bacterial polypeptide expressing nucleotide sequence isolated from the Sargasso Sea
tatgaatgaagaacataaaaaaaatgattgtttattttataatgatcccgaatcattattactagaaagtggacaaataattaatggccacgatatagcatataaaacctacgggacattaaattcaaaaaaagataacgcaatactaatttgtcatgccctatcaggcgaccaatatgttgctagtccacacccaatcaccaagaaagagggttggtgggaaagaatggttggtaaagataaaccaatagatactagccgattttttgttatttgcataaatgtcttaggggggtgtatgggatcaacagggccagcatccattaatcctgaaaccaataaagtatttgcagtaaattttccgataataacgatagctgatatggttaaagcacaagttaggttaatagataaccttagaatagaaaaattagtttccgtaattggtggttctatgggtggtatgcaagcacttgaatgggctgcctcctaccctgaaagattgaaatcagcaattccaatagctacttccgccagacatactgcacaaaatattgcctttcatgaattaggtcgtcaggcaata

SEQ ID NO: 234327 - DNA, 818 bp, Unknown
  Bacterial polypeptide expressing nucleotide sequence isolated from the Sargasso Sea
cgaacttatggaaaactagaccaaaacaagacaaatgccatactagtttttcatgccttgtcaggagaccaatttgttacaggtatcaataaagtaactgggaaagatggttggtggaacttagtagttggagcaaataagccaattgatacaaacaagtattttgttatctgtgctaatgtaattggtgggtgcatgggtagtacaggtccaaaagaaatttgtaaggaaacgggtaaaccatatggtttaaattttccagtcataacaattaaagatatggttaaagcgcaagcttatttgttggatcatcttggtataaagaaaacattatctgttctcggaggctcaatgggcggtatgcaagctctgcagttttgctcaatttttccagatagaacctttactgcagttccaattgcttgtgctgcaagtcactcagcacaaaatattgcttttaatgaattagcgcgacaagcaataatggctgatccagaatgggattcaggtaattatatttcatccggtaaagtaccaagaaaaggtttagcaattgctagaatggcaggacatataagctatttatctgaacaaggattacaaaataaatttggtagaaaattgcaagaagacaaaggattacagttttcgtttgatgctgattttcaggtcgaaagttatttaaaatatcaaggttattctttcgtagatagatttgacgcaaattcttacttatacataactagagcgatggattattttgatttatataaagagaataatggtaacttatctttagctttcaaaaattccaaaat

SEQ ID NO: 234328 - DNA, 883 bp, Unknown
  Bacterial polypeptide expressing nucleotide sequence isolated from the Sargasso Sea
ttttataatatgtgctaatgtcatcggtggctgtatgggtagttctggaccaaatgagataaatcctagtaccaataagccttatggcttagattttccggtgattacaataaaagatatggtaagtgctcaggcacatcttttggattttttaggagtaaagaaaactctatctgttctaggaggttcaatggggggcatgcaggcactacagttttgttctttatttccagatcgaactttctcagctgttcctatagcttgtgcggctagtcactctgctcaaaatattgcatttaacgaacttgcgagacaagcaattatggctgatccaaattgggattcaggtaattattttttgagtggaaaaatacctagaaatggtcttgcagtcgcaagaatggcaggtcatattagttatttgtctgagcagggtttacaaaataaatttggaagaaaattacaagaaggtgaaggtcttaatttttcttttgatgctgattttcaggttgagagttatttaaagtaccaaggctacgcttttgttgatcgttttgatgctaattcatatttatatattacgagagcaatggactattttgatttatatagattgaataatggagatttatcgaaagcttttaaagacactaaagtaaaattttgtattatttccttttccactgactggttatatccaactcaagaaagtaaaaaaatagtcatagcactaaattcaattggtgcgcaggtaagtttcgttaatatcataaccaacaatggtcatgattcatttcttgttgaggagccagaattttttcaaaccttaaaaggttttttagactcaacgtacgaggattttaaaaatgaaaattcaagatga

SEQ ID NO: 234329 - DNA, 472 bp, Unknown
  Bacterial polypeptide expressing nucleotide sequence isolated from the Sargasso Sea
atgtccgaactacctgccgattctgtcggcctggtcaccccccagcgccacacctttaccgagccgctgccgctggcctgcggcagagcgctgccgagctacgagctggtgtatgagacctacggcgagctgaacgccagcgccagcaacgcagtgctgatctgccacgccctgtccgggcaccatcacgccgccggttaccacagcatggatgagcgcaagcccggctggtgggacaactgcatcggccccggcaaggccatcgacaccaaccgcttctttgttgtcagcctcaacaacctcggcggctgccacggctccaccggcccatccagcatcaacccggaaaccggcaacagttacggcgccagcttcccggtgctgaccgtcgaggactgggtacacagccaggcgcgcctggcggatgtgctgggcatcacccagtgggcagcggtcgtaggcggcagcctgg

SEQ ID NO: 234330 - DNA, 904 bp, Unknown
  Bacterial polypeptide expressing nucleotide sequence isolated from the Sargasso Sea
tggaactatgcagttggtccaggtaagtcattcgatactgataaattttttgttatctgtgcgaatgtaattggtggatgtatgggatcctatggaccaggaactattgatcccttgaccaataaacctataggtacaaattttcctgtaattacaattaatgatatggttaacgctcaatacaatctattagattactttaaaattgaaaaattatttgcagttgctggcggctctatgggtggaatgcaagttttacaattcgtatcaaattttccgaataaggctagagtggctttaccaattgcttgtacggctagtcattcagctcaaaatattgcttttaatgaacttggaagacaagcaataatgtcagataccaattggaaagagggattgtatgatgaaaaatcaacaaatcctgataaaggtttggctgttgctaggatggctgctcatatcacatatttatcaaaacaaggtttacaagaaaagtttggaagaaatcttcaagaaagatccgatttaaaatttggatttgatgctgactttcaaattgagagttatttgagatatcaaggttctgtgtttgtagatagatttgatgcaaatagttatttgtatatcacgagagcaatggattattttgatttaactaaacaatttggtggaaacctttccaaagcatttaaagacaccaaaaccaaattttttatcatttcctttacttctgattggttgtacccaacctctgagaataaggatattgttatagcactcaatgcaataggtgccgatgttggttttgttgaaattaaaactgataaaggccatgattcctttttattagatgtgccagattttttaagcactattaaaaattatttaaacacaacctattcca

SEQ ID NO: 234331 - DNA, 943 bp, Unknown
  Bacterial polypeptide expressing nucleotide sequence isolated from the Sargasso Sea
tgcttcaggaataaatccagttactaacaaagaaggttggtggaatcatgcggtaggtgcaggaaaaccatttgatacagataagttttttgtaatatgtacaaatgttatcggtggttgtatgggatcatacggaccaaatacaattgactctaatacaaaaatatccataggaacaaattttccagttataaccattaacgatatggtaaatgcgcaatataatattttagatttttttaaaattgaaaaactgtttgctgtaacgggaggctcgatgggtggaatgcaagtcttgcaatttgtatcaaactttccagataaggctcaagttgcaataccaatagcttgtaccgcaagccattcagcccaaaatatagcattcaatgaacttggtagacaggcaattatggctgatgaaaattggaaaaatggtttatacgaaaaaaataacaataatcctgacaaaggtttagcggtggcaagaatggcagcacacattacttatttatcaaaaaaaggattgcaggaaaagtttggaagaaaattgcaagaaagtgaagatgtaaaatttggttttgatgcagactttcaaatagaaagttatttaagatatcaaggatcgatgtttgtagatcgttttgatgcaaatagttacttgtatataacaagagcaatggattattttgatttaactaaacaattcggtggaaatttatctaaagcatttgaaaaaagtaaaactaaattttttataatctcatttacatcagattggctgtacccaacttctgaaaacagagatattgttattgcattaaatgcaattggagctgatgtaggttttgttgaaattaaatcagataaaggacatgattcatttttactcaatgtaccagacttccttgacacattaaaaaaattattaaaaaaacaacttact

SEQ ID NO: 234332 - DNA, 781 bp, Unknown
  Bacterial polypeptide expressing nucleotide sequence isolated from the Sargasso Sea
tggtactgattttccagtaatcacaattaatgatatggtcaatgcgcaaattaatttattagacttttttggtataaaaaaacttttttcagttgtaggtggttctatgggtgggatgcaagttttacaattcattagtaattttccagataagtctaaaaccgtaatacctattgcatgtacttcaagtcactcggcacaaaatattgcctttaatgaacttggtagacaagctattacagcagatcataattggaaagatggaaaatatattttacaaaacacagtaccagataaaggattagcagttgcaaggatggcggcacatattacttatttgtccaagaaaggacttcaggaaaagtttggaagaaaactacaagaaagagatgaccttaaatttggttttgatgctgactttcaaatagaaagttatctacgttatcaaggatctgtatttgtagatcgatttgatgcaaacagctacttgtatatcacaagagcaatggattactttgacctagttaaacaacataatggtaatctatctaatgcgttcaagaacacacaggctaaattttttgttatatcttttacttctgattggctttacccaactcaagaaaataaagatattgtcattgccttaaatgcaattggtgcaaatgtaggatttgtggaaattaaatcagacaaaggacatgattcatttttactagatgtgccagattttttaaaagctcttaaaaactttttagacaaatcttatttagaggaataa

SEQ ID NO: 234333 - DNA, 819 bp, Unknown
  Bacterial polypeptide expressing nucleotide sequence isolated from the Sargasso Sea
ttccctttggcatatgaaacttatggttcattatttgaaaataaggataatgcaattttggtttttcatgctttgactggcgatcaatttgtaactgggataaatccaataaccaaaaaagatgggtggtggagttatgctgttggaccaaataaatctatcgatacaaataaatattttgtaatttgtgcaaatgtacttggtggatgtatgggatcttttggtccaagtcatgaaaatcccaaaaccaagatgatatatggaactgatttcccagtcattacaataaatgatatggttaatgctcaagtaaatttattagatttttttggaataaaaaaacttttttcggtcgtaggtggttcaatgggtggaatgcaagttttacaatttgtaagtaattttcctaacaaagctaaaactgctatacctattgcttgtacatctagtcattcagcacaaaatattgcattcaatgaactaggaagacaagcgattgccgcagatcacaattggttagatggaaaatatacatcaaaaaatactgtgcctgacaaaggattggccgtagctcgaatggctgcacatattacttatttatcaaaaaaaggacttcaagaaaaatttggaagaaaactacaagagagagatgaccttaaatttggttttgacgcagactttcaaatagaaagttatttaagatatcaggggtctgtgtttgttgatcgatttgatgcaaatagttatctttatataactagagcaatggattattttgatttaattaaacaatttaatggtaatttatctaatgctttc

SEQ ID NO: 234334 - DNA, 494 bp, Unknown
  Bacterial polypeptide expressing nucleotide sequence isolated from the Sargasso Sea
gaggcatggtttatctgtagctagaatgattgcacatataacttatttatctgaaggagcatttcaaaaaaaatttggtagagatatgcaaagtaaagtactttcttggggctttgatgcagattttcaagtagaaagctatttaaggcatcaaggaacatcatttgttgatagatttgatgcaaacagctatttatatataactagggctatggattattttgatttaaccgaaagctataatggaaatttatctcaagcattcaaaaaaactaaatgtaagtttcttattatatcttttacaagtgactggttatttccaagctctgagagccaacatattgtaaaagcactaaataaaactgctgcagatgtaagttatattgaaatagaatctgataaaggacacgatagcttcctacttgaagtaaatgacttttatgatattcttacaggctttatatcaggcgcagcaagaaaattaaatatataaa

SEQ ID NO: 234335 - DNA, 820 bp, Unknown
  Bacterial polypeptide expressing nucleotide sequence isolated from the Sargasso Sea
taattcaaaaaaagataatgcaatattagtttttcatgctctaacaggagatcaatttgtaactggaataaaccctgcaactaacaaagaaggttggtggagttatgcagtaggtcctgataaggctatcgatacaaataaatattttgttatttgctctaacgtaattggtggatgtatgggatcatacggaccaagtcataaagatcctgatcaaaaaatttttggaacaaattttccagtaattacaattaatgacatggtgaatgctcagtataatttacttgatcattttggtattgataaactattttctataactggtggttcaatgggaggtatgcaagtccttcagtttattagtaactttcctgataaatctaaaacagtgataccgatagcaaccacatctagtcattcagcacaaaatatcgcttttaacgagctaggtagacaagctattacagctgatagtaactggaaagacgggaattatacatcaaacgaaactaatcccggaaaaggattggcagtagctagaatggcagctcatattacatatttatctaaaaaaggtttgcaggaaaaatttggaagaaagttacaagaaagagaagatcttaaatttggatttgatgctgattttcaaatagaaagttatttgagatatcagggttcagtttttgtagatagatttgatgcaaatagttatctttatattactagagctatggattattttgatttagcaaaacaattcaatggtaatctttcagaagcatttaaaaatacaaacgcgaaattttttataatttcattt

SEQ ID NO: 234336 - DNA, 351 bp, Unknown
  Bacterial polypeptide expressing nucleotide sequence isolated from the Sargasso Sea
tgggcgacaggcaataaagagtgatccaatttggaaaaatggaaagtattttgaaaataatgaagtgccagaaagaggtctatcagtagcaaggatgattgcacatatcacatatttatccgaaaatgcgatgcatagaaaatttggaagaaaacttcaatcaagagatattatttcttttggatttgatgctgattttcaagttgagagttatctgagatatcaaggtaaatcatttgttgaaagatttgatgcaaattcatatctttatttaacaagggctatggattattttgatcatgatgaaacatttagaaaaaatattgagtttagtcataatccaaataacca

SEQ ID NO: 234337 - DNA, 607 bp, Unknown
  Bacterial polypeptide expressing nucleotide sequence isolated from the Sargasso Sea
ccttcacgaggtggcgcgccagtccatccttaccgaccccaatttccacggcggccgctattacctgcacgacacctacccccgccaggggctgatcctggcgcgcatggtcggccatatcacctacctgagcgaagatgccatgcgcatgaagttcggccgcgacctgcgcgccggccgcttccatttcggcttcgacgtggaattccaggtggaatcctacctgcgccatcagggcgaggtgttctcgcgtaatttcgacgccaacacctacctgctgatgaccaaggcgctggattatttcgacccggcccgagagttcgataattccctggaaaccgccctggcaaagccggagtgcaaattcctggtcatgtcgttcacttccgattggcgttttgcgccggagcgcagccgcgaaatcgtcaacggcctggtccatgccggccgcgatgtgagctacgcggaaatcgatacgcccaaaggccacgacgccttcctgctggatatccccgaatacaccaagctgttcggcgcctatatgcacagggtcgccaacgaagtggaaaacggcgtcaacaatgtggaggcaggcaaccatgcgtga

SEQ ID NO: 234338 - DNA, 862 bp, Unknown
  Bacterial polypeptide expressing nucleotide sequence isolated from the Sargasso Sea
gctctaacaggagatcaatttgtaaccggaataaacccagtaactaacaaagagggttggtggagttatgcagtgggtcctgataaagccatcgatacgaataaatattttgttatttgctctaacgtaattggtggatgtatgggatcatacggaccaagtcataaagatcctgatcaaaaaatttttggaacaaattttcccgttattacaattaatgatatggtgaatgctcaatataatttacttgatcattttggtattgataaactgttttctataactggtggttcaatgggaggtatgcaagtccttcagtttattagcaactttcctgataaatccaaaacagtgataccgatagcaaccacatctagtcattcagctcaaaatattgcttttaacgagctaggtagacaagctattacagctgatagtaactggaaagatgggaattatacatcaaacgacactaatcctggaaaaggattggcagtagctagaatggcagctcatattacttatttatctaaaaaaggtttgcaggaaaaatttggaagaaagttacaagaaagagaagatcttaaatttggatttgacgctgattttcaaatagaaagttatttaagatatcaaggctcagtttttgtagatagatttgatgcaaatagttatctttatatcactagagccatggattattttgatttagctaagcaattcaatggtaatctttcagaagcatttataaatacaaacgcaaaattttttataatttcttttacttcagattggctttatccaacccaagaaaacaaagatgttgtgattgctttaaactcaataggggctgatgttggat

SEQ ID NO: 234339 - DNA, 721 bp, Unknown
  Bacterial polypeptide expressing nucleotide sequence isolated from the Sargasso Sea
agccgattttttgttatatgcataaatgtcttaggggggtgtatgggatcaacaggaccagcatccattaatcctgaaaccaataaagtatttgcagtaaattttccgattataacgatagctgatatggttaaagcacaagttaggttaatagatagccttgaaatagaaaaattagtttccgtaattggtggttctatgggtggtatgcaagctcttgaatgggctgcctcctaccctgaaagattgaaatcagctattccaatagctacttcctctagacatactgcacaaaatattgcctttcatgaattaggtcgtcaggcaataatggccgatgtaaattggaattccggaaattatagagataaaaatactaatccttcaaaaggcctttcaattgcgaggatgacagctcatgttacttatttatctgaagcttcactaacaaagaaatttggtagaaaattacaggataaaacagatcttggttttggttttgatgctgattttcaaattgagagttatttaagacatcaaggtcatacatttgttgatagatttgatgccaactcctatttatacataacaagggcaatggattactttgacttagaaaaaacccataaaaagtctcttacagaaatatatgctaatactaatttaaaattcctaattgtatcatttactggagattggctttatccaacatctgaaaact

SEQ ID NO: 234340 - DNA, 358 bp, Unknown
  Bacterial polypeptide expressing nucleotide sequence isolated from the Sargasso Sea
catgaacaaattagacaattctgttggtttggtgatagaaaaatcgtttaaagaaccaaatccctttttgctcaaatcaggactgacactccccgaatttgaaataatttatgaaacctatggtgaacttaaccaaaaaaaatcaaacgcaatactaatttgccatgcgctttccggccaccatcatgctgctggctatcattcacccaaagatcaaaagccagggtggtgggactcatgcattggaccaggcaaaccaatagacacgaataaattttttgtggtcagcctgaacaacttaggaggctgtcatggaagtactggcccatcaagtatcaatccagaaacaggcgaaata

SEQ ID NO: 234341 - DNA, 703 bp, Unknown
  Bacterial polypeptide expressing nucleotide sequence isolated from the Sargasso Sea
tttgctgttattggtggatcaatgggcgctatgcaagtattgcaatggacagttgattttccagaaaacttaaataatgcaattcatatagcaggtgcattaaagcattcagcacaaaacatagccttccacgaggtaggacgtcaagctatcatgaatgaccctacttggaaaagtggcaattataatgttaatgaaaaaccggaaatgggtttagctgttgctagaatgatagctcatataacatatttatctgatgatgcgatgcatagaaaatttggacgaaaacttcaatcaagagatataatttcttttgggtttgatgccgatttccaagttgaaagttatttgagataccaaggtagatcttttgtagatagatttgatgcaaacagttatctttatttaactagggcaatggattattttgatcttactgataagtttaatcaatcaatagaattttctttaaaacctaataaccatattaactatttgataatatcatttacctctgattggcttttccctacgagagaaaataaaagaatagttgataaactcaattataatactagaaaagtaagttttactgaaattgaaaccgataaaggtcatgatagttttttactagatgaaatagaattagataaaactatttcaggttttttgaacagtaattttgaaaagatgactaaataat

SEQ ID NO: 234342 - DNA, 774 bp, Unknown
  Bacterial polypeptide expressing nucleotide sequence isolated from the Sargasso Sea
attggatattattaaggaacataagctttcaatagatataccattgaaactaaagtctggtaaaacattaaattcatatgatttggtttatgaaacatatggtcagctcaatgataataaagataatgctgttctaatttgtcatgctctgtctggtaatcatcatgtagctggctatcacgaaggcgataacaaacctggctggtgggataatatgattggctcaggcaaacctattaatactaataaactctttgttgtatgtgtcaataacataggtggatgtcatggttcaaccggaccggcaagtattaatacagaaacaggaacaaattatggttttgattttcctgtcgttacagtacaagattgggtaaatagccaaaaagttctaatggataatttggacattaacaaatggcaattcgttgttggaggtagtcttggcggtatgcaggctttccaatgggcgcttgattttccagattatattgacaatgcaattattattgctgctgccccaaaattaacagctcaaaatattgcattcaacgaagttgctagacaagcaatcatgaacgatccagattggtgtggaggtaattatttaaaagaagataaaataccaaaaagaggattagctttggctagaatgctaggtcacataacatatttatctgataaatctatggctgagaaatttgggcgtgatttaaagcaagaaaagattggcttcaattttgatgtagaatttcaaataaaaagctacctaag

SEQ ID NO: 234343 - DNA, 871 bp, Unknown
  Bacterial polypeptide expressing nucleotide sequence isolated from the Sargasso Sea
atgaaaagagaagatttaggaatagtaaaaccaaagattttcagacatgaggctgatttagctcttgagagcggtaaatcccttagcgcgtttgaattgatctatgaaacttatggagagctaaacgaaaatagatcaaatgctattcttgtctgtcatgccttaagtggaaatcatcattctgcgggttttcatgaaggtgatgcgaagccaggatggtgggataatctaataggaccagataaggccatagacacaaataagttttatgttgtttcacctaacaacctaggtgggtgtcatggctcaacaggaccttcgtcgataaatcctgaaacaaacaaagtatatggtcctgatttcccagtattaactgttgaagactgggtgaatagtcaggcacttctcgcacaacaattaggaatagaagtttggcatgcagtaataggcggaagtctagggggaatgcaggctcttcagtgggctatctcttatccaaataaaataaagaaatcatgtgtaatagctgctgcttctaaattaagtgctcaaaatattgcgtttaatgaagtggctagacaagcgataacaagtgaccctgattttcaaaatgggaattatcttgcaaatgatacttctccgagaagaggtctgagattggcgagaatggtaggtcatataacttatctatcagacgagtccatgaaagaaaagtttgatagagatttgaaagaagaagaattgggttatggctttgatgtcgatttccaagttgaaagctatctaaggcatcaaggagattcattttcaagaagttttgatgctaacacttacctattgatgacaaaaatattagattacttcgatccag

SEQ ID NO: 234344 - DNA, 712 bp, Unknown
  Bacterial polypeptide expressing nucleotide sequence isolated from the Sargasso Sea
tatgggatcatacggaccaagtcataaagatcctgatcaaaaaatttttggaacaaattttcctgttattacaattaatgatatggtgaatgctcaatataatttacttgatcattttggtattgataaactgttttctataactggtggttcaatgggaggaatgcaagtccttcagtttattagcaactttccagataaatccaaaacagtgataccgatagcaaccacatctagtcattcagctcaaaatattgcttttaacgaactaggtagacaagctattacagctgatagtaactggaaagatgggaattatacatcaaacgacactaatcctggaaaaggattggcagtagctagaatggcagctcatattacttatttatctaaaaaaggtttgcaggaaaaatttggaagaaaattacaagaaagagaagatcttaaatttggatttgacgctgattttcaaatagaaagttatttaagatatcagggctcagttttcgtagatagatttgatgcaaatagttatctttatattactagagctatggattattttgatttagctaagcaattcaatggtaatctttcagaagcatttataaatacaaacgcgaaattttttataatttcttttacttcagattggctttatccaacccaagaaaacaaagacattgtgattgctttaaactcaataggagct

SEQ ID NO: 234345 - DNA, 888 bp, Unknown
  Bacterial polypeptide expressing nucleotide sequence isolated from the Sargasso Sea
aaggaaatatcaaattttccactagcttatgagacttacggaaatctaaatgaaaaaaaagacaatgccatacttgtttttcatgcattaacaggagatcagtttgcttcaggtcaaaacccggtgacaaataaggaagggtggtggaattatgcagttggtccaggtaaggctttcgatactaaaaaattttttgtaatttgtgcaaatgttattggtggttgtatgggttcatacggaccgggaactattgatcctacaactaacaaaccaataggaacgaattttccagttattacaataaacgacatggttaatgctcaacataatcttttagatcatttcaaaatagaaagattatttgcagtagctggaggttctatgggtgggatgcaagtattacaatttgtatcaaattttccaaacaaggctaaggttgctttaccaattgcttgtacagctagtcactcagctcaaaatattgctttcaatgagcttggaagacaagcaatcatgtcagatataaattggaaggatggtttatatgatggaaaaaaaagtaatccagacaagggtttggcggttgctagaatggctgcacatattacgtatttatcaaaaaaaggattgcaagaaaaatttggacgaaatctgcaagaaagatcagatttaaaatttggatttgacgctgactttcaaattgaaagttatttaagatatcaaggctctgtttttgtagatagatttgatgcaaatagttacttgtatattactagagcaatggactattttgatttgactaaacaacatggtggcaatctttctaaagcttttaaagaaagtaagacaaaattttttattatttcatttacttcagattggttatac

SEQ ID NO: 234346 - DNA, 733 bp, Unknown
  Bacterial polypeptide expressing nucleotide sequence isolated from the Sargasso Sea
tataatttacttgatcattttggtattgataaactgttttctataactggtggttcaatgggaggtatgcaggtccttcagtttattagcaactttcctgataaatccaaaacagtgataccgatagcaaccacatctagtcattcagctcaaaatattgcttttaacgagctaggtagacaagctattacagctgatagtaactggaaagatgggaattatacatctaacgatactaatcctggaaaaggattggcagtagctagaatggcagctcatattacttatttatctaaaaaaggtttgcaggaaaaatttggaagaaagttacaagaaagagaagatcttaaatttggatttgacgctgattttcaaatagaaagttatttaagatatcagggctcagttttcgtagatagatttgatgcaaatagttatctttatattactagagctatggattattttgatttagctaagcaattcaatggtaatctttcagaagcatttaaaaatacaaacgcaaaattttttataatttcatttacttcagattggctttatccaacccaagaaaacaaagatattgtgattgctttaaactcaataggagctgatgttggatttgtagaaattgagtcagataaaggtcacgactcctttttactagacgttcctgaattcttaagtgcacttaaaaactttttagataaatcttacgaagaaaattaat

SEQ ID NO: 234347 - DNA, 868 bp, Unknown
  Bacterial polypeptide expressing nucleotide sequence isolated from the Sargasso Sea
aaatattttgttatttgctctaacgtaattggtggatgtatgggatcatacggaccaagtcataaagatcctgatcaaaaaatttttggaacaaattttccagtcattacaattaatgatatggtgaatgctcaatataatttacttgatcattttaatattgataaactattttctataactggtggttcaatgggaggtatgcaagtccttcagtttattagtaacttccctagtaaatctaaaacagtgataccaatagcaaccacatctagtcattcagcacaaaatattgcttttaacgagctaggtagacaagctattacagctgatagtaactggaaagatgggaattatacatcaaacgaaactaatcctggaaaaggattagcagtagccagaatggcagctcatattacttatttatctaaaaaaggtttgcaagaaaaatttggaagaaagttacaagaaagagaagatcttaaatttggatttgatgctgattttcaaattgaaagttatttaagatatcaaggctcagttttcgtagatagattcgatgcaaatagttatctttatatcactagagctatggattattttgatttagctaaacaattcaaaggtaatctttcagaagcatttataaatacaaaagctaaattttttataatttcatttacttcagattggctttatccaacccaagaaaacaaagatattgtgattgctttaaactcaataggagctgatgttggatttgtagaaattgaatcagataaaggtcacgactcctttttactagatgttcctgacttcttaagtgcactaaaaaactttttagataaatcttacgaagaaaattaat

SEQ ID NO: 234348 - DNA, 885 bp, Unknown
  Bacterial polypeptide expressing nucleotide sequence isolated from the Sargasso Sea
gagctattgcttgaatgtggtcaaacccttaaaaatatagagttaacttatgagacgtatggagagttaaattctgatgcctctaacgccatcttaatttgccatgccttaagtgggaaccatcatgctgcagggtattataaagacaagaatgaaaggcttgggtggtgggatgccttaataggcccaaacaaagcaatagatacaaataaatactttgtggtttgcccaaacaatattggcggatgtcatggctccactggcccctcttctattaatccagttacccaaagatactatggaccagagtttccggtgcttacagttaaggactgggttaacagtcaggcggagctggcagattatttaaatataaaatgttggcatgctgcaatcgggggaagccttggagggatgcaagctcttgaatggagtcgtttattccctgacagaatttccaaagcggcagtaattgctgcggctccgaaacttagcgcacaaaacatagcttttaatgaagttgctagacaagcaattatcacagatccagatttccaagaaggtaactacctagattcagaaaaatccccaaaaagaggtctgagattagcaaggatggtgggccatataacttacctgtctgatgaagctatgcgagataaatttggtagggaacttaaggagggaaaattaaattttggttttgatgttgagtttgaagttgaaagttatctcagacatcaaggcgatgttttttcagaatcttttgatgcaaacacttacctcctgatgacaaaacttttagactattatgatccagcagaaaaatacgagggcgaccttgtaagggcctttgaaaccataaactctaaaattatggttatt

SEQ ID NO: 234349 - DNA, 798 bp, Unknown
  Bacterial polypeptide expressing nucleotide sequence isolated from the Sargasso Sea
gaggttgcatataaaacatttggtaaactaaatagagataaatcgaatgcaattttagtttgtcatgctttatcaggtgatcaattttgttcaggtattaatccacttacaaagaagagaggatggtggagtattttaattggtcctggaaaggtcattgatacaaatattttctatgtaatatgcagtaatgtattaggcggttgtatgggtagttctggaccttcctcaaagaatccgaaaacaaaaaaagaatacgggttgaattttccagttattacaataagcgacatggtaaaagttcaagaaaaacttatctcgaagttaggtattaagaggttgtttgctgtgataggtggctcaatgggtggcatgcaaacactggaatgggcaaccaaatttaacagtaaaataaatgctgcaataccaattgcaacctcatatagacattctgctcaaaacatagcattccatgaaatagggagacaagctattatggctgatccaggttggaatagaggtaattattataaaaagaaaatcggacctaggcgaggactttctgttgccagaatgattgcccatataacttatctctcagaacatgcgcttcaaagaaaatttggtaggaatcttcaaaacagtgattttttttcctttaattttgatacagactttcaaatcgaaagttatcttaaacaccagggaagttcattcgtagagaggtttgatgctaatagttatctttatataacaaaagcaatggattattttgatttatctatgaaaaaaggaggt

SEQ ID NO: 234350 - DNA, 837 bp, Unknown
  Bacterial polypeptide expressing nucleotide sequence isolated from the Sargasso Sea
attgataatcgagaaaccactaaaattagattgtggtcaaactatcagtaattttccattagcctatgagacctttggaactcttaatgaaaataaagacaatgcaattttagtttgtcatgctttaacgggagatcaatttgttactggtataaatccaataactaaaaaagatggatggtggacatatgctgttggtccaaataagtctattgatacaaataaatattttgttatttgtgcaaatgtacttggtggttgtatgggatcttttggacctagccatgaaaatcctaaaacaaaaaaaatttatgggacagacttcccagtcattacgatcaatgacatagtgaatgcccaagtaaatttattagacttttttggtattgataaacttttttcagttgtgggtggatcaatgggtggaatgcaagttttacaatttgtaagtaattttcccaacaaagctaggacggcaatacctatagcctgtacatctaatcattctgctcaaaatattgcttttaacgaactaggtaggcaagcaattacagctgatcacaattggttagatgggaattataatttaaaaaacactgtacctgacaaaggattagcagttgcacgaatggctgcacatataacttatttatcaaaaaaagggcttcaagaaaaattcggaagaaagttgcaggaaagagatgatcttaaatttggttttgatgctgattttcaaatagaaagttacttaagatatcaaggttcagtatttgtagatagatttgatgcaaatagctacctttatataactagagcaatggattattttgatttagt

SEQ ID NO: 234351 - DNA, 722 bp, Unknown
  Bacterial polypeptide expressing nucleotide sequence isolated from the Sargasso Sea
atctcaatctttgttatctgattctcttggtatagaaaaatggcatgccgttgttggaggtagtttgggtggaatgcaggcccttgaatggtctcgcctttttccagacaaaattaaaaaggccggaattattgcagcagctccaaaactaagcgcccaaaacattgcttttaatgaagtggccagacaagcaatactcaatgacccagacttcgtggctgggagatatttagataccggtaaatctcctaagcagggtttgaagcttgcaagaatggtaggtcatattacttatctgtctgaagaagccatgaaaagtaaatttggcagagacctcaaggaagaaaaattaaattttgtttacgatgcagaattcgagatcgaaagttatttgcgttaccaaggtgatgtattttctgaaaattttgatgctaatacttaccttttgatgacgaaaatcttagattattttgatccagcagatgatcatcatggagatcttgcaaaagctttcgagccgatagaagcacaattactagttgtatctttcacaaccgattggaggtttgcacctgagagatctagagaaattgtaaatgcccttatagctgcgaaaaagagagttagttatcttgagattgatagtccacatggacatgattcattcttgtttgctgaagaagattacaccaatggcttatcgtctttcttggaaaattaaa

SEQ ID NO: 234352 - DNA, 761 bp, Unknown
  Bacterial polypeptide expressing nucleotide sequence isolated from the Sargasso Sea
tattaatgacatggtaaatgcacaatataatttactagatcattttggtattgataaactattttctgtaactggaggttcaatgggaggtatgcaggtccttcagtttattagtaactttcctgataaatctaaaacagtgataccaatagcaaccacatctagtcattcagcacaaaatattgcttttaacgaactaggcagacaagctattacagctgatagtaactggaaagatggagactacacatcaaaagaaactaatcccggtaaaggattggcagtagctagaatggctgcacatataacttatttgtctaaaaaaggtttacaagaaaaatttggacgaaagttacaagagagagaagatcttaaatttggatttgacgctgattttcaaatagaaagctatttaagatatcagggctcggttttcgtagatagatttgatgcaaatagttatctttatattactagagctatggattattttgatttagctaagcaattcaaaggtaatctttcagaagcatttataaatgcaaaagcgaaattttttataatttcatttacttcagattggctttatccaacccaagaaaacaaagatattgtgattgctttaaactcaataggagctgatgttgggtttgtagaaattgagtcagataaaggtcacgactcttttttactagacgttcctgatttcttaagtgcacttaaaaactttttagataaatcttatgaagaaaataaataat

SEQ ID NO: 234353 - DNA, 934 bp, Unknown
  Bacterial polypeptide expressing nucleotide sequence isolated from the Sargasso Sea
aatgcaaagttcattaccaaaaaatagtgtaggccttgttaaaccaagtaaagttcactttgaggaaaaattattgctggcttcgggaagtagtctaaatggctttgatcttgtttatgaaacctatggtgaattaaatgctgaatgctcaaatgctatattgatatgtcatgctctaagtggagatcatcatgttgctgggtatcatacacctgaagataaaaaacctggatggtgggacaatgcaattggtccaaataaagtaattgatactaataaattctttgttgtttgcccaaataatatcggtggttgcggaggctcaactggcccactagcgagcaatccagatactggagaactttatgggccaaattttcctttagtaacggttaaagactgggttaaaactcaagtaatgttggcagatcatcttggtattgaaacatgggcggtaattattggtgggagcttaggtggtatgcagtgtatggaatggtcaattacgtaccctaacaggctaaaacatacttttgttattgctgctgctccaaagttatcaactcaaaatattgcttttaacgaagtcgcaagacaagttattcgttccgaccgtgattttaatgatggttattattacaaaaatgataacaaacctactcatggtttaatgcaggcaagaatgctgggtcacattacatatttgtctgatgatgctcttgatgaaaaatttggacgtcaacttagggacggagaaataaagttcggctacgatgtcgagtttcagattgaaagttatttaagatatcaagggcgttcattcgttgatagatttgatgcaaatagctacctattaataactaaggtattagattattttgatcctgccgctgaaactgatggcaacttagccgaggcaatgtctccctgctag

SEQ ID NO: 234354 - DNA, 763 bp, Unknown
  Bacterial polypeptide expressing nucleotide sequence isolated from the Sargasso Sea
gaacaaattttttgtagtttgcccaaataatataggtggttgtcacggttcactcggaccaaattcaattaaccacgatactggagattattatggacctgactttccaattatcacagtaagagattgggtaaactcacaagccaaactttctgatttattgggcatagaaaaatggcatgctgtcatgggaggcagtctaggtggaatgcaagctcttgaatggtcctatctttatcctaaaagaataaaaaaagcaggaattattgctgcagcaccgaagttaagtgcacaaaatatagctttcaatgaagttgcaagacaagccatattaaatgatccagattttgaaggaggtagatatctagataaaagtaagtacccaaaacaaggtctcaaattagcgagaatggtagggcacattacgtatctctctgaggaagcaatgaggagcaaatttggaagagaactgaaaaaggaaaaattaaattttggttatgatgcggagttcgaaatagaaagttatttaaggtatcaaggtgatgttttttcagaaagttttgatgctaatacttatcttctgatgacaaagattcttgactacttcgatccagcaagtaattttgaaggcaaattggtaagtgcctttgagtccattgaggcacagttattagttgtatctttctcaactgattggaggtttgctcctgaaagatcaaaggaaattgtaaatgcccttatcgaagccaaaaaaaatgtgagt

SEQ ID NO: 234355 - DNA, 771 bp, Unknown
  Bacterial polypeptide expressing nucleotide sequence isolated from the Sargasso Sea
gaaagatggatggtggtctttcgcagtgggtccaaacaaatcaattgatacaaataaatattttgtaatttgtgcaaatgttattggtgggtgtatgggatcttttggtccaaaccatgaaaatcctaaaacaaaaaaaaattacggtacagattttccagtaattacaattaatgatatggtaaatgctcaagtaaatttattagatcattttggtattaaaaaacttttttctgttgctggtggctctatgggtggaatgcaagttttacagtttgtaagtaactttcctgataaagctaaaactgcaattcctattgcttgtacatctagtcattcagcacaaaacattgcttttaatgagcttggtagacaagcaattgcagcagaccataattggttagacggtaaatatacatctaaaaatactgtcccggataaaggcttggctgtagccagaatggctgcacacattacttatttatctaaaaaaggtcttcaagaaaaatttggaagaaagctccaagaaagagatgatcttaaatttgggtttgatgcagactttcaaatagaaagctatttaagacatcaaggttcagtatttgtagatcgttttgatgcaaactcttatctttatatcacaagagctatggactactttgatttagttaaacaatttgatggtaatttatctaatgcttttaaaaataccaagactaaattttttattatatcttttacatcagattggctttaccctacacaagaaaa

SEQ ID NO: 234356 - DNA, 518 bp, Unknown
  Bacterial polypeptide expressing nucleotide sequence isolated from the Sargasso Sea
aatgaaattaaaaatagaatctgaagtacttaaatttaaaaagttggtaagattagattctggtaaaagaataaattcttgtgaaatagcatttaaaacatatggtaatttaaataagaataaaacgaatgcaattttagtttgccacgctttgtctggagaccaatattgtgcaggtatgaatccacatacgaataagaaaggttggtggaatgttttaataggtcctggaaaggttatagatacaaatatcttttttgtaatatgtagtaacgttttaggaggatgtatgggaagtactggtccttcctcattaaaaccaaaaacaaaaactcgttacggactgcagttccctgttattactataagtgatatggtaagacttcaagaaaagttaataacctatcttggaataaaaaaattattcgcagtaattggtggatcaatgggtggtatgcaagttttagagtgggctgcaaaatttaataataaaataaatgctgcaattccaattgcaa

SEQ ID NO: 234357 - DNA, 916 bp, Unknown
  Bacterial polypeptide expressing nucleotide sequence isolated from the Sargasso Sea
ttgttggagaaataagccaattgatacaaataaattttttgtgatttgcgcaaacgttattggaggctgcatgggatcttacggaccgagtacgataaatgagtccactggtaaacaaataggaactgattttcccattataactattaacgacatggttaacgctcaatttgaactaattaaatatttagaaattgaaaaactttttgctgtagtaggcggttcaatgggtggaatgcaggtactacaatttgttgccaattttcctgataaagcaaaactcgcaataccgattgcttgcacttctagtcattcagcccaaaatatagcgtttaatgaattgggaagacaggcaattatggctgacagcaaatgggaaaatggattttatagtaattacaaattaaatcctgacaaagggttagctgtagcaagaatggcagcacatattacttatctttctgaaaaaggattgcaggaaaaatttggaagaaaattgcaagatagagatagtctaagatatggatttgaggcagattttcaaattgagagttatcttagataccaaggctctgtgtttgttgatagatttgatgctaatagttatctatatataactcgtgcaatggattattttgatttatccaaacagtacaaagggaatttatctgatgcattcaaaaaaagtaaaacaaaattttttgtaatatcattcacatcagattggttgtatccaacatcggagaatagagaaatagttatagcattaaattctattggtgcagatgtcggatttgttgaaatagaatctgataagggacatgactcatttttgcttgatgttccaagtttcctaaagacacttggagattatattaattccacgtacaaagttataaatgaaagaagaatttaa

SEQ ID NO: 234358 - DNA, 955 bp, Unknown
  Bacterial polypeptide expressing nucleotide sequence isolated from the Sargasso Sea
atgaaaacaaaatttactactgacactaaacttgaaagcgaaatagcctatttcgagaatattaatttaaagctagaatcaggagacataatcaatagtttcaaactagcattcaaaacttttggtaaattaaatactgacaaaacgaatgctattcttgtgtgtcatgctttaactggagatcaatatgttgctgggaataatcccattactgggagagaaggttggtggtctagaatggttgggccaaacaaaccaattgatacaaacaagttttttgtaatttgttcaaatgtacttggcggttgtgctggttcaacaggtcctaaagagttacaaaatggaagtgatgttacatatggtagtaattttccttccgtaacaataaaagatatggtgaagactcaatctttattaattgaaagtttaaatatagagaaattattttcagtcattggaggttcaatgggagcaatgcaagcacttcaatggtcaatcgattttccagataaaattttaaatataatacatattgcgggagcattaaaacattctgctcaaaacattgcatttcatgaagttggacgacaagcaataatgaatgatcctatttggaaaaatggaaagtattttgaaaataaagaggtaccagaaagaggtctatcagtcgcaagaatgattgcacatatcacatatttatctgaagatgcaatgcatagaaaatttggaagaaagcttcaatcaagagatattatctcttttggatttgatgctgattttcaagttgaaagctatctaagatatcaaggtaaatcatttgttgaaagatttgatgcaaattcatatctttatttaacaagagctatggattattttgatcatgatgaaacatttagaaaaaatgtcgagtttagtcataatccaaataaccatttaaaatatttaatagtctcat

SEQ ID NO: 234359 - DNA, 922 bp, Unknown
  Bacterial polypeptide expressing nucleotide sequence isolated from the Sargasso Sea
atggatggtggtcttttcgcagttggtccaaataaatctattgatacaaataagtattttgtaatttgtgcaaatgttattggtgggtgtatggggtcttttggtccaagccatgaaaaccctgaaacaaaaaaaatttatgctacagattttccaataattacaatcaatgatatggttaatgctcaagtaaatttattagatcattttggaattaaaaaacttttttctgttgccggaggttcaatgggtggaatgcaagttttacaatttgtaagtaactttcctgataaaactaaaactgcagttcctattgcttgtacatatagtcactcagcacaaaatattgcattcaatgaacttggtagacaggcaattacagcagatcataattggttagatggaaaatatacatctaaaaatactattcctgaaaaaggattagctgtagctagaatggcagcacatattacttatttatctaaaaaaggtcttcaggaaaaatttggaagaaagcttcacgaaagagatgttcttaaatttggttttgatgctgactttcaaatagaaagttatttaagataccaaggctcagtatttgtagatcgttttgatgcaaatagttatctttatatcaccagagcgatggactactttgatttagctaaacaatttgatggtaatttatctaatgcttttaaaaatacaaaaactaaattttttataatatcttttacatcagattggctttacccaactcaagaaaataaagatatagttattgctttaaatgcaattggtgcagatgtgggttttgtagaaataaaatccgataaaggacatgactcatttttattagatgtaccagattttttaaaagcacttaaaaattttttagataaatcatatacagggcaataat

SEQ ID NO: 234360 - DNA, 526 bp, Unknown
  Bacterial polypeptide expressing nucleotide sequence isolated from the Sargasso Sea
catgggtacaagtgcagacatatccggtgatcagtcccggaaccaagaggagcaaaagttggcgtttgaaatggtcacgtttcaatcaagccaacccctacgcctcgattccggcgaagatttgtaccctgtcgtccaagcctacaatacctacgggaccttgaacgccgacaattccaacgcagtcctggtctgccatgccctgacgcttgatcaacatgcagccaatgtacacccggcaaccggcaaggagggttggtggcaagggatgatcggccccggttgtccaatcgacaccaaccggttctttgtgatctgcccgaacgtcgtcggcggctgccagggaaccactggacctgagtccattaacccggaaacaggcaagccctacggcctggatttccccgtaatcaccattgccgacatggtgcgggcacaagtgcagttgatcgaccatctgggcatcgacaagctcttttgcgtcgctggcgggtcaatggggggcatgcagacgctcgaatgggcg

SEQ ID NO: 234361 - DNA, 691 bp, Unknown
  Bacterial polypeptide expressing nucleotide sequence isolated from the Sargasso Sea
tatgggttcatacgggccaggaactattgatcctaaaactaacaagccaataggaacaaattttcccgttattacaataaacgacatggttaatgctcaacacaatcttttagattactttaaaatagaaagattatttgcagtagctggcggttctatgggtgggatgcaagtattacaatttgtatcaaattttccaaacaaggctagggttgctttaccaattgcttgtactgctagtcactcagctcaaaatattgcttttaatgagcttggaagacaagcaatcatgtcagatacaaattggaaggatggtttatatgacggtaagacaattaatccagacaaaggtttggctgttgctagaatggcagcacatattacatatttatcaaaaaaaggattacaagaaaaatttggtcgaaatctacaagaaagatctgatttaaagtttagtttcgatgctgactttcaaattgagagttatttaagatatcaaggctcagtttttgtggatagatttgatgcaaatagttacttatatattacaagagcaatggactactttgatttaactaaacaacatggtgggaatctttctagagcttttaaaatagtaagacaaaatttttcgttatttcttttacttcagattggttatatccaacttctgaaaataaagacattgtaa

SEQ ID NO: 234362 - DNA, 907 bp, Unknown
  Bacterial polypeptide expressing nucleotide sequence isolated from the Sargasso Sea
tatgaataataaagataatataaaaacattaactattaataaaccactcaaactagattgtggcaaaactattaataattttcctctagcttacgaaacctatggttcattaaacaaagataaaaataatgcaattttagtttttcatgccttaacaggagatcagtttgttactggaattaatccagtaacaaataaagatggttggtggagttatgctgttggtcctggtaaatctattgatacagaaaaatattttgtaatttgtgcaaatgttattggtggttgtatgggttcttttggaccaagtcatcaaaatcctgagaccaaaaaaaaatatggtactgattttccagtaattactattaatgatatggtaaatgcacaaataaatttgttagatcattttgatattaaaaaacttttttcagttgttgggggatcaatgggtggaatgcaagttttgcaatttgttagcaattatcctgataaaactaaaacggcagtacctatagcttgtacctctagtcattctgcacaaaatattgcatttaatgaacttgggagacaagcaatagcagctgaccacaaatggcaagatggagaatatttatcaaaaaatactattccagataaaggtttagcagttgctagaatggctgcccatattacttatttatcaaaaaaaggtcttcaagaaaaatttggacgaaaacttcaagaaagagatgatctgaaatttggatttgatgctgactttcaaattgagagttatttaagataccaaggatctgtatttgtagatcgatttgatgctaatagctatttatatattactagagctatggattactttgatttgataaaacaaaataatggtaatttatcaaatgcattcaaaaatacc

SEQ ID NO: 234363 - DNA, 676 bp, Unknown
  Bacterial polypeptide expressing nucleotide sequence isolated from the Sargasso Sea
caagctctgcagttttgctcaatttttccagatagaacctttactgcagttccaattgcttgtgctgcaagtcactcagcacaaaatattgcttttaatgaattagcgcgacaagcaataatggctgatccagaatgggattcaggtaattatatttcatccggtaaagtaccaagaaaaggtttagcaattgctagaatggcaggacatataagctatttatctgaacaaggattacaaaataaatttggtagaaaattgcaagaagacaaaggattacagttttcgtttgatgctgattttcaggtcgaaagttatttaaaatatcaaggttattctttcgtagatagatttgacgcaaattcttacttatacataactagagcgatggattattttgatttatataaagagaataatggtaacttatctttagctttcaaaaattccaaaataaaatattgtattatatcatttagtactgattggttatatccaacaagtgaaagtaaaaaaattgtaattgcattaaattctataggtgcagaagttagtttcgtgaatattgtaactaataatggacacgactcttttttagtggacgaaccaaagtttttagaaacattaaaaggatttatagactctagttatgaggattttaaaaatgaaaattgaa

SEQ ID NO: 234364 - DNA, 743 bp, Unknown
  Bacterial polypeptide expressing nucleotide sequence isolated from the Sargasso Sea
tctactagagcattttaaaatagataaattatttgcagttatcggcgggtccatgggtggtatgcaggtattacaatttgtttcaaattttccggataaagcacatattgcaataccgattgcctgtacatccagtcattctgcacaaaatattgcatttaatgaacttggaagacaagcaatacttgctgatactaattggaaaaatggtttgtatgagcaaaataaaacaagtcctgataaaggtttggctgttgctagaatggcggcacatattacttatttgtcgaaaaaaggtctccaggaaaaatttggtagaaagttacaagagagagatgatttgaaatttagttttgatgcagattttcaaattgagagttatcttagataccaaggatcagtgtttgtagataggtttgatgcaaatagttacttgtatataactagagcaatggattacttcgatttatcaaaacaatttaatggtaatctatcagctgctttcagtaatacgacttctaaattttttgtaatttcattcacttctgattggctatatccaactggtgaaaatagagagatagttatagcgctaaacgcaattggtgcagatgttggttttgtagaaatagagtctgacaaaggacacgattcatttcttttagatgtaccggattttttagatactttagggaactatttaaaaacaaactataaaactgtgaatgaaaaaagaatttaaa

SEQ ID NO: 234365 - DNA, 943 bp, Unknown
  Bacterial polypeptide expressing nucleotide sequence isolated from the Sargasso Sea
caaaaaagagggttggtggaactatgcagttggtccaggtaaatcattcgatactgataaattttttgttatctgtgctaatgttattggtggatgtatgggatcctacggaccaggagctattgatcctttgaccaataaacctataggtacaaattttcctgtaattactattaacgatatggttaacgctcaatacaatctgttagattactttaaaatagaaaaattatttgcagttgctggtggatccatgggtggaatgcaagttttacaattcgtatcaaactttccaaataaggctaaagtagctttaccaattgcttgtacggctagtcattcagctcaaaatattgcttttaatgaacttggaagacaagcaataatgtctgatagcaattggaaagagggattgtataatgaagaatcaacaaatcccgataaagggttggctgttgctaggatggctgctcatatcacatatttatcaaaacaaggtttacaagaaaagtttggaaggaatcttcaagaaagatctgatttaaaatttggatttgatgctgactttcaaattgagagttatttgagatatcaaggttctgtatttgtagatagattcgatgcaaatagttatttgtatatcactagagcgatggattattttgatttaactaaacaatatggaggaaacctttccaaagcatttaaagataccaaaacaaaatttttcatcatttcctttacttctgattggttatacccaacctctgagaataaagatattgtaatagcgcttaatgcaattggtgctgatgttggttttgtagaaataaaaaccgacaaaggccacgattcctttctattagacgtaccagattttttaagcactattaaaaattatttaaatacaacttattctaatatcaatgaaagaagaatttaa

SEQ ID NO: 234366 - DNA, 839 bp, Unknown
  Bacterial polypeptide expressing nucleotide sequence isolated from the Sargasso Sea
gaatttagtagttggagaaaataaaccaattgataccaaaaaatatttcgtaatctgtgctaatgtgattgggggatgcatgggtagcacaggaccaaaggaaatttgcgaagggacaggtaagccatacggtttaagctttccggtgattacaataaaagatatggtaaaggctcaagcttatcttttagatcatctaggaataaagaaaacattagctgtacttggtggctcaatgggcggtatgcaagcacttcaattttgctctctctatccagataagacttttactgctgtaccgattgcttgcgctgcaagtcactctgcgcaaaatattgcttttaatgaattagctcggcaggcaataatggctgatccagaatgggacgcaggtaattatatttcagcaggaaaggttccaagaaaaggccttgcaattgctcgaatggcaggacacataagttatttatcagagcaaggattacaaaataaatttgggagaaaattacaggaagataagggattacaattttcatttgatgctgactttcaagtcgagagttatttaaaatatcaaggatattcttttgtagatagatttgatgcaaattcttatttatatattactagagccatggattattttgatttatacaaagcaaataatggcaacttatctttagcgttcaaaaatactaaaattaaattttgtattatatcatttagcactgactggctgtatccgacaagtgaaagtaaaaaaattgttattgcattaaattctatcggtgcggaagtaagttttgttaatattgtaactaataatggtcacgactctt

SEQ ID NO: 234367 - DNA, 772 bp, Unknown
  Bacterial polypeptide expressing nucleotide sequence isolated from the Sargasso Sea
atgaacaaattagacaattctgctggtttggtcatagaaaaatcgtttaaagaaccaaatccctttttgctcaaatcagggctaacactccccggatttgaaatagtgtatgagacctatggtgaacttaactataaaaaatcaaacgcaatacttatttgccatgcgctttctggccaccatcatgctgctggctaccattcacccgaagatcaaaagccaggatggtgggattcatgtatcgggccaggcaaaccaatagacacgaataaattttttgtggtcagcctgaacaatttagggggctgtcatggaagcactggtccatctagtatcaatccagaaacaggagaaatatatggttcggacttcccttcagttgctgtggaagattgggtaaaaagccaaaccatgctttcggattacttagggatacaaaaatatgccgctattataggaggcagcctaggaggcatgcaggcgatgcaatgggccattgactatcccgagcgcctagacaacgcggtagtcattgcggcggcttcaaaactctctgctcagaatatcgccttcaatgaaatcgcaagacacgctatagagaccgatcaggactttcattcaggcaattacataaaatacggtaaacgtcctactcatggccttatgctcgctagaatggtagggcacgtcacgtacctttctgatgatggcatgggaaacaaatttggaagagaacttcaaaacccaacagaaggtcaagacagcgaattca

SEQ ID NO: 234368 - DNA, 905 bp, Unknown
  Bacterial polypeptide expressing nucleotide sequence isolated from the Sargasso Sea
gctatactttgcttttcatgcattaaccggagatcagttttgtttgaacattaatcctataactaaaagagaaggttggtggacaacagctgtaggaccgggaaaggcaattgatactaataaatattttgtaatttgcgccaatgttttaggaggctgcatgggtagctatggacctattgaaataaatccagaaactaataaattatttggaaccacgtttccagttataacaataagggatatggttaaagctcaaaaatatttgatagaagatctgggtattaaaaaattactctccgtaataggtggatcaatgggtggaatgcaagttttgcagtttaccgctctatatccgaatctagcatattctgctattccaatagcatgcagtgctagtcattcagctcaaaatattgcactaaatgaattaggtcgacaggctatcatggctgatccaaactggaaaaaagaaaattcttcacctaataaaggtttggcagtagcaagaatggctgctcatattacctatctatctaaaaaaggattgcaggaaaaatttggacgaaaacttcaggaaaaaggaagtttaaaatttagttttgatgcggattttcaaatagaaagttatttacgttatcagggagcaactttcgtagataggtttgatgctaatagttatttatatattaccagagcaatggattactttgatttagaaaaacaattcaaaggcaacctctctcttgcctttaaaaatacaaaatctaagttctgtataatatctttttcatcagactggctctatcctacagtcgaaaataaagaaatagttatagctttaaatgcttgcggagcaaatgttggctttgttgaaattaactctgacaaaggccatgattctt

SEQ ID NO: 234369 - DNA, 928 bp, Unknown
  Bacterial polypeptide expressing nucleotide sequence isolated from the Sargasso Sea
ccaatagcctatgaaacttacggttcacttaattcaaaaaaagataatgcaatattagtttttcatgctctaacgggagatcaatttgtaaccggaataaaccctgcaactaacaaagagggttggtggagttatgcagtaggtcctgataaggctatcgatacaaataaatattttgttatttgctctaacgtaattggtggatgtatgggatcatacggaccaagtcataaagatcccaatcaaaaaatttttggaacaaattttccagtaattacaattaatgacatggtgaatgctcaatataatttacttgatcattttggtattgataaactattttctataactggtggttcaatgggaggtatgcaagtccttcagtttattagtaactttcctgataaatccaaaacagtgataccgatagcaaccacatctagtcattcagcacaaaatattgcttttaacgagttaggtagacaagctattacagctgatagtaactggaaagatgggaattacacttcaaacgaaactaaccctggaaaaggattggcagtagctagaatggcagcacatattacatatttatctaaaaaaggtttgcaggaaaaatttggaagaaagttacaagaaagagaagatcttaaatttggatttgatgctgattttcaaatagaaagttatttgagatatcagggttcagttttcgtagatagatttgatgcaaatagttacctttatatcactagagctatggattattttgatttagcaaaacaattcaatggtaatctttcagaagcatttataaacacaaacgcgaaattttttataatttcttttacttcagattggctttatccaacccaagaaaacaaagatattgtgattgctttaaactcaataggagctgatgttggat

SEQ ID NO: 234370 - DNA, 826 bp, Unknown
  Bacterial polypeptide expressing nucleotide sequence isolated from the Sargasso Sea
ggaccactaactactaatcccgatacaggcgaaatttatggtcctaattttccacttgtaacagtaaaagattgggttaaaactcaagcaatgctggccgatcatcttgatattgatgtctgggcggtagtgattggggggagtttaggtggtatgcaatgcatggagtggtctattgcctacccagatagactaaaacatacctttgttattgcggcggcaccaaaattatctacacaaaacattgcctttaatgaagtggcaaggcaagtaatccgctcagatcgtaatttcaatgaaggttactactataaagatggtaacaaacctatacaaggtttaatgcaggcaaggatgctgggacatattacttatctatctgatgatgcgttagacgaaaaatttggacggcaactacgtgatggagaaattaaatttggttatgatgttgaatttcaaattgaaagttatctaagatatcaagggcgctcttttgttgaccgctttgatgcaaatagttatttattgataacaaaagtactagattattttgaccccgcttctgaaacgaacggtgatttagcaaaagcaatgtctccagcattagctgaatttttgattatttcttttagtagtgactggcgtttttcaccgtcgcgctcagtagaaatcgtgggagcactacttgaaacaggtaaaagggtaagttatatagaaatacaatctaaggaagggcatgactcctttctaaaagaaataccaatttatcatcaagcaataaaaaccgctcttaatcgtattgcaatggaaattggtgtttcatgaa

SEQ ID NO: 234371 - DNA, 777 bp, Unknown
  Bacterial polypeptide expressing nucleotide sequence isolated from the Sargasso Sea
attttccagtaataacaataaaagatatggttaaagcccaaaaatttcttttagaccatttgggtattaataaattacttgctgtagtcggaggatcgatggggggaatgcaagttttacaattttgttctttgtatccagagaaggcacattctgcaatcccaatagcatgtagtgctagccactctgctcaaaatattgcattaaatgaattaggcagacaagcaataatggcagattctaattggaaaagggaaaatgcaactccagataaaggattggcagtagcgagaatggctgctcatattacttatctttcaaaaaaaggtttgcaggaaaaatttggaagaaaattgcaagataaggggagtttaaaatttagttttgatgcagattttcaaatagaaagttatctacgttatcaaggagcaacatttgtagacagatttgacgctaatagctacttatatattactagagcaatggattattttgatttagaaaaacaatttaatggaaatttatctgctgcatttaaaaatacaaagtctaaattttgtataatttcattttcatccgattggctttatccaacagtagaaaataaagaaatagtaatagcattaaatacctgtggtgcaaatgttggttttgttgaaattgattctgataaaggtcatgactcttttctattaaatgtaccagagtttttgaaaacactaagcgaatttataaattcaacttttaacgaaattaaaaatgaaaaaagaatttgaa

SEQ ID NO: 234372 - DNA, 883 bp, Unknown
  Bacterial polypeptide expressing nucleotide sequence isolated from the Sargasso Sea
tggtggagttatgctgtaggtccaggtaaagctatagatacaaataaatattttgttatttgttcaaatgtcatcggtggatgtatgggttcttacggaccaagtcacaaagatccgaatactcaaagtatttttggaaccaattttccagttattactattaatgatatggttaatgctcaatacaatttgctagatcattttggtattgataaactattctgtttaacaggtggttcaatggggggaatgcaagttcttcaattcataagcaactttcctgataaatctaaaaccgtaattccaattgcaacaactgcaagtcattcagcgcaaaatattgctttcaatgagttgggaaggcaagcaattacagctgatggtaattggaaaaatggaaattataattctaacaatactaacccaggtaaaggactagcggtagcaagaatggcagctcatatcacttacctatctaaaaaagggttacaagaaaaatttggaagaaaattacaggaaagagaagatcttaaatttggatttgatgcagactttcaaattgaaagctatttgagatatcaaggttcagtttttgtggatagatttgatgcaaatagttatctttatattactagagcgatggattattttgatttaactaaacaatttaaaggtaatctttcggaagcattcagagatacaaaggctaaattttttataatttcttttacttcagattggctttatccaacacaagaaaataaagatatcgttatagccttaaattcaattggagctgatgttggatttgttgaaatagagtcagataaaggtcatgattcatttttattagatgtaccaaattttttaaatgcgcttaaaa

SEQ ID NO: 234373 - DNA, 736 bp, Unknown
  Bacterial polypeptide expressing nucleotide sequence isolated from the Sargasso Sea
ctcatataatttacttgatcattttggtattgataaactgttttctataactggtggttcaatgggaggtatgcaagtccttcagtttattagcaactttcctaataaatctaaaacagtaataccgatagcaaccacatctagtcattcagctcaaaatattgcttttaacgaactaggtagacaagctattacagctgatagtaactggaaagatgggaattatacatcaaacgatactaatcctggaaaaggattggcagtagctagaatggcagctcatattacttatttatctaaaaaaggtttgcaggaaaaatttggaagaaagttacaagaaagagaagatcttaaatttggatttgatgctgattttcaaatagaaagttatttaagatatcaaggctcagttttcgtagatagatttgatgcaaatagttatctttatattactagagctatggattattttgatttagctaaacaattcaatggtaatctttcagaagcatttaaaaatacaaacgcgaaattttttataatttcttttacttcagattggctttatccaacccaagaaaacaaagatattgtgattgctttaaactcaataggagctgatgttggatttgtagaaattgaatcagataaaggtcacgactcctttttactagacgttcctgatttcttgagtgcacttaaaaactttttagataaatcttacgaagaaaattaa

SEQ ID NO: 234374 - DNA, 759 bp, Unknown
  Bacterial polypeptide expressing nucleotide sequence isolated from the Sargasso Sea
tggtccaaataagtctattgatacaaataaatattttataatttgtgcaaatgtacttggtggatgtatgggatcttttggacctagccatgaaaatcctaaaacaaaaaaaatttatggaacagattttccagtcattacaataaatgacatagtgaatgctcaagtaaatttattagacttttttggtattgagaaacttttttcagttgtaggaggttcaatgggtggtatgcaagttttacaatttgtaagtaattttcctgacaaagctaaaactgcaataccaattgcttgtacatctaatcattctgctcaaaatattgctttcaacgaactaggtaggcaagcaattacagctgatcacaattggcttgatggaaattataacttaaaaaaaactgtacctgaaaaaggattagcagttgcacgaatggctgcacatataacttatttatcaaaaaaagggcttcaagaaaaattcggaagaaagttgcaggaaagagatgatcttaaatttggttttgatgctgactttcaaattgaaagttacttaagatatcaaggttcagtatttgtagatagatttgatgcaaatagctatctttatataaccagagcaatggattattttgatttggtaaaacaatttaatggtaatctatctaatgcttttaaaaatacaaaaactaaattttttgttatatcttttacttctgactggctctatccaactcaagagaataaagaaattgttat

SEQ ID NO: 234375 - DNA, 901 bp, Unknown
  Bacterial polypeptide expressing nucleotide sequence isolated from the Sargasso Sea
attgagaaagataacaaataatacagattatccaggttttcttctatcttgtgaagagagtcttttattagactcaggaaaatcaataaataaatttcaaattgcttatcaaacctatggtgaattaaattcaaataaagataatgcaatcttaatctgtcatgcactaactggagatcaatttccagcagaagaaagccccataacaaaaaaaaatggttggtgggatttaatggttggtcccaataaacctattgacacaaataagtatttcgttatctgctcaaacgttttaggcggttgtgttggcactactggtcctaatgatattaatcctgaaacatcaaaaatttatggtttagatttccctacaattaccattagagatatggtcaaagttcaaaaaatacttattgatgaactgggtatagctaaactcagatcagtcattggtggttctatgggagcaatgcaagttcttcaatgggctgctacttttccggaattagtgaaatcaactgtttgtatagctggatctttaaagcattcagctcaaaatatagcttttgatgaagccggaagacaatcaattatgttagacccaaactggaatcagggaagatatatagagtttgatcaaaaaccagaaaatggattgtctgttgcaagaatgattgctcatattacttatctctcagagacagcctttcaaaataaatttggaagaaatcttcaagaaaaaaaggatctttcttttggttttggaattgactttcaagtagaaagctatcttcgttatcaaggtcgatcttttgtcgaccgatttgatgctaatagttatctatatatgacgagagctatggattactttgatgtctctgaggaaatcaaaaaatatcaa

SEQ ID NO: 234376 - DNA, 717 bp, Unknown
  Bacterial polypeptide expressing nucleotide sequence isolated from the Sargasso Sea
cacctggcctacgagacctatggctcgctcaatgccgaccgctccaacgccgtgcttgtgtgccatgcgctcaacgcctcacaccatgtagcgggcgtgtacgcggggcaggacaagagcgaggggtggtgggacaacatgatcggccccggcaagcccgtggacaccgaccgcttctttgtcattggcgtgaacaacctcggctcctgcttcggctcgaccggccccatgcacccgcaccccgacacgggcgaggtctatggggcggacttccccgtagtcacagtggaggactgggtcaacgcccaggcccgcctgctggaccgcctgggcatcacgcagctggccgccgtactgggcggcagcctgggcggcatgcaggcattgagctggacgctgcagtaccccgagcgcatgcgccacgccgtggtggtggccagcgcgcccaacctcacggccgagaacatcgccttcaacgaagtggcccgccgcgccatcgtgaccgacccggacttccacggcggccacttttaccgccacggcgtgatccccaagcgcggcctgcgcatcgcccgcatgatcggccacatcacgtacctcagcgacgacgtgatgaacgagaagttcggccgacaactgcgcgaaggcatcgacctgaagtacagcacgcaggacatcgaattccagatcgaaagctacctgcgctaccagggcgac

SEQ ID NO: 234377 - DNA, 478 bp, Unknown
  Bacterial polypeptide expressing nucleotide sequence isolated from the Sargasso Sea
aatgatagctcatataacatatttatcagaaaaagctttacaacaaaaatttggaagaaaacttcaatcaagagaaatgatatcttttggttttgatgccgattttcaagttgaaagttatttgcgttaccagggtcgttcttttgtaaatagatttgatgctaatagctatttatatatgacaagagcaatggactattttgatgttacaaaaatttttcctaaatcaattgaatttaactcgcaagacaacagtcatatacatcattgcattatttcttttacctctgactggcttttcccaacagatgagaataaagagattgtaaaaatacttaataagcacgggaaaaaagtaagttttactgaaattgaaagtgatagaggtcatgatagtttcttgcttgatgttcaagattttactgaaacagtttcaagttttctaaatggtaattttaaaacacaaagacaaagttga

SEQ ID NO: 234378 - DNA, 709 bp, Unknown
  Bacterial polypeptide expressing nucleotide sequence isolated from the Sargasso Sea
tatttgctctaatgttataggaggatgtatgggttcgtatggaccaagtcacaaagatcctgaacaaaatattttaggaacgaattttccagttatcacaattaatgatatggtaaatgcacaatataatttacttaatcattttggtattaataaactattttctataactggcggttcaatggggggaatgcaagttcttcaatttattagtaactttcctgataaatctaaaacagtaataccgatagcaactacctcaagtcactcagcacaaaatattgcttttaacgaattaggtagacaagctattacagctgataatgattggaaaaatggagactatacatcaaacaaaactaatccagggaaaggattggcagtagctagaatggcagctcatataacatacttatctaaaaagggactacaggaaaaatttggaagaaaattacaagaaagagaagatcttaaatttggatttgatgcagattttcaaatagaaagttatctgagataccaaggttcagtttttgtagatagatttgatgcaaatagctatctttatatcacgagagcgatggattattttgatttaacaaaacaatttaaaggtaatctttcaaatgcatttaaaaatacaaaagctaaattttttataatctcatatacctcagattggctttacccaactcaagaaaataaagaa

SEQ ID NO: 234379 - DNA, 866 bp, Unknown
  Bacterial polypeptide expressing nucleotide sequence isolated from the Sargasso Sea
aaagaacttaaagatattgaagtctgttaccagacatacggcaccctaaacgaagataaaagcaacgtgattttagtctgtcatgcactatccggaagtgcccatgccgcctttaagaacgaaaccaacgaatacggctggtggtcccattatattggtccgcataaagcaatcgataccacacagttttttataataagctcaaatgttttgggcagctgttatggaacaacaggaccaaaaagcatcgacaaaagtactggcaggcaatatggccctaatttccccattatcaccataagtgatatggtaaccgttcaaaaagcactgatcgatgcattagagatccctcgcttacattctgttgttggcggttcgatgggcgggatgcaagcattggaatggagtgtctcatacccagacatggtaaagcaatgtgttgccatcgcttcaacagcatgtgtttccgctcaagttattgcctttgatactgtaggtcgtcacgctattacatccgataaacactggaaaaatggcgattacaccagagaatcatcaccaaaagaagggttaagtattgcccggatgattggccacatcacctatttatctaacgaatcaatcgccacaaagtttggtcgaaatttacaacagaaacccgatttcgattatacctttgaaaatgaatttcaaatcgaaagctatctcaagtaccaaggcgataaatttgtcaattattttgaccctaactcctatctatatttaacaaaagccatcgactattttgatttaactaaaaaacatggctcattagaaaaggcatttgccgcaactcagtcaaaatatttgcttgtttctatcaactc

SEQ ID NO: 234380 - DNA, 896 bp, Unknown
  Bacterial polypeptide expressing nucleotide sequence isolated from the Sargasso Sea
tgctattttaatttgtcatgcactaacgggaaatagtcatgtaacagcgggcgatacaaacgaaaagggctggtgggaacctatggtaggcccaggtaaagccattgatactaataagtactttgttatttgttcaaattctattggaagttgcaaagggtctacaggacctgcaacaatagatcctgaatcaaacaagccctatggattggccttcccaattattaccatgacagatattgttaatgcgcagcattatttattagagcatttagatataacatgtctagatgctgttgtgggcccttctatggggggaatgcaagcactcttgtggtcaatgttatatcctaaaaaacttaaaaaatgtatagtgattgcttcttcagcaagtttatcgccacaggctttagcctttggaaccgttgcaagaaacgctattatttcagataaagagtttaatcaaggaaattacactgcagattctaaacccaaaaaaggcttagctattggtcgaatgataggccatattacttatttatctaaagaatccattacaaaaaagtttggccgaaagttacaatcaaaagaaaactataattatgactgggatacagactttcaagttgaaagttatttgaaacatcaaggcgataaatttgttgatcaatttgatgccaattcttttttatatttgtcaaaagcgttaagttattttgatttggaaaagcaatttgggtcactaaaaaaagcatttcaaaccgttgatgctaacatgttgtttatttcaatttcatccgattggttatatccaacagacttatctaaagaaatggtttcttcctgcatgaaaaataataaacacgttagtttctgtgaagttcagtcagattagg

SEQ ID NO: 234381 - DNA, 619 bp, Unknown
  Bacterial polypeptide expressing nucleotide sequence isolated from the Sargasso Sea
atgaataatttgactgactctgttggcatcgttaaaccacaaaaagctgtttttgattcaccgcttcaattagattgtggtaaagaattaaaaaaaattgaattagtttatgagacatatggctcattgaacgagcgaaaagataatgctgttctcatatgccatgcactatccggcgatcatcatgctgccggttttaacagccctgaagataaaaaaccaggttggtgggatgtttgtataggtccaggtaaaccatttgacacaaataaattttttatagtttgcccaaataatattggtggatgtaagggttcgtcaggcccaaacactgttaatccagaaacaggtcaactctatggcccaagctttccgattgtaacagttgaagattgggtaaatacacaaaatcttttaggtgatagtcttggtataaaaaaatgggcttgcatcatcggtggaagtttgggtggaatgcaagctttgcagtggacaatttcatttcctgaaaaagttcaaaatataatatcagttgccgcagcttcaaaactatctgcgcaaaatattgcttttaatgaagttgctaggcaatcaataattaatgatcctgattttcgtg

SEQ ID NO: 234382 - DNA, 910 bp, Unknown
  Bacterial polypeptide expressing nucleotide sequence isolated from the Sargasso Sea
gttggtccaggcaagtcattcgatacagataaattttttgttatatgtgcaaatgtgattggtggatgtatgggatcctacggaccaggaactattgatcctttgaccaataaacctataggtacaaattttcctgtaattacaattaacgatatgattaacgctcaatacaatctattagattacttaaaaatagaaaaattatttgcagttgctggcggctccatgggtggaatgcaagttttacaattcgtatcaaactttccgaataaggctagagtagctttaccaattgcttgtacggctagtcattcagctcaaaatattgcttttaatgaacttggaagacaagcaataatgtctgatagcaattggaaagagggactgtatgacgaaaaatcaacaaatccagataaaggtttggctgttgctaggatggctgctcatatcacttatttatcaaaacaaggtttacaagaaaagtttggaaggaatcttcaagaaagatctgatttaaaatttggatttgatgctgactttcaaattgagagttatttgagatatcaaggttctgtatttgtagatagattcgatgcaaatagttatttgtatataactagagcaatggattattttgatttaactaagcaatttgggggaaacctttccaaagcatttaaagataccaaaacaaaatttttcatcatttcctttacttctgattggttatacccaacctctgagaataaagatattgtaatagcgcttaatgcaattggtgccgatgttggttttgtagaaattaaaactgacaaaggtcacgattcctttttgttagacgtaccagattttttaagcactattaaaaattatttaaatacaacttattctaatattaatgaaagaagaa

SEQ ID NO: 234383 - DNA, 718 bp, Unknown
  Bacterial polypeptide expressing nucleotide sequence isolated from the Sargasso Sea
taaattatttgcagttatcggcgggtccatgggtggtatgcaggtattacaatttgtttcaaattttccggataaagcacatattgcaataccgattgcctgtacatctagtcattctgcacaaaatattgcattcaatgaacttggaagacaagcaatacttgctgatactaattggaaaaatggtttttatgaacaaaataaaacaagtcctgataaaggtttagctgttgctagaatggcggcacatattacttatttgtcgaaaaaaggtctccaagaaaaatttggtagaaagttacaagagagagatgatttgagatttagttttgatgcagattttcaaattgaaagttatcttagatatcaaggatcagtgtttgtagataggtttgatgcaaatagttacttgtatataactagagcaatggattacttcgatttatcaaaacaatttaatggtaatctatcagatgctttcagtaatacggcttctaaattttttgtaatttcattcacttcagattggctatatccaactgctgaaaatagagaaatagtcattgcgctaaacgcaattggtgcagatgttggttttatagaaatagagtctgacaaaggacacgattcatttcttttagatgtaccggattttttagatactttagggaactatttaaaaacaaactataaaactgtaaatgaaaaaagaatttaa

SEQ ID NO: 234384 - DNA, 874 bp, Unknown
  Bacterial polypeptide expressing nucleotide sequence isolated from the Sargasso Sea
gaaaaagcaatagataccaataaatattatgtgctttgtcctaacaacatagggggatgtcatggttcaactggcccctcttctatgaacccagatactcaaaaattttatggaccagaattcccagttataactgtccaagattgggtaaaaagccaggctcttttagcagaccatttaaaaattaattgctggcatgctgctatcggagggagccttggcggaatgcaggcccttgaatggactagactgtttcctgatagaatcttaaaagcagctgtaatagctgcggccccaaaacttagtgcacaaaatattgcttttaatgaagttgctagacaggcaattattactgacccagattatcaagaaggtaaatatctggattctgataaatccccaaaaagaggacttaggctagccagaatggtaggacatattacctatttgtctgatgaagcaatgcgagataagtttgggagagaacttaaagagggtaaattaaattttggttttgatgttgaattcgaggtcgagagctaccttagacatcaaggcgatgttttttctgaatcttttgatgcaaatacctatcttctgatgaccaagattttagattactacgacccagccgaaggccatgacggcgatcttgtaaaagctttcgaatcaataaaggccaaagttatggttatttcattttcaagtgattggagattttcacctcaaagatcaaaagaaattgtaaatgctttgttggctgccgaaaaagaagcaacctacctagaaattgaatcttcccatgggcatgattcctttctttttgcagaggatagatacgtgaatgcattaagtgcatttttaggaaattaaa

SEQ ID NO: 234385 - DNA, 889 bp, Unknown
  Bacterial polypeptide expressing nucleotide sequence isolated from the Sargasso Sea
tatgaataaagaaacaaaaaatataaaaaaactaattattgatcaatcttttgagcttgattgtggtaaaactattaaaaactttcctttggcatatgaaacctatgggtctctaaataaaaataaaagtaatgcaattttagctttccatgcattaactggagatcaattttgtacaaatattaatcctattacaaaaagagaaggttggtggaccacagcggttggaccagataaagcaattgataccaacaaatattttgtgatttgcgcaaatgttttaggtggatgtatgggaacttatggacctaaagaaataaacccagaaaccaataaaatatttggtaccacttttccggtgataacaattagagatatggtaaaagctcaaaaatacttgctggatcattttggtattaataaattgcttgccgtaataggaggatccatgggaggaatgcaagttttacaatttgcatctctatatcctgataaatcatactctgcgattccaatagcatgcagcgctagtcattctgcacaaaatattgcgttaaatgagttaggacgccaagcaatcatggcggatccaaattggaaaaaagaaaactcaacacctgataaaggtttagcggtagcaagaatggcagctcatattacttatctttctaaaaaaggacttcaagagaaatttggaagaaagcttcaagataaaggaagtttaaaatttagttttgacgcagattttcaaatagaaagctatttacgttaccaggggtcgacttttgtagataggtttgatgcaaatagctacttatatattactagggcaatggattattttgatttagaaaaacaattcaatggcagcctatcactcgcatcaaaa

SEQ ID NO: 234386 - DNA, 739 bp, Unknown
  Bacterial polypeptide expressing nucleotide sequence isolated from the Sargasso Sea
catgaaggaggagatccccgcaaacagtgtcggtctggtcacaccacagatcgccgaatgcgacacgcccttcacttttgctaatggggcactgctcggtagccatgaactggtttacgagacctatggcgaactgaacagcgctggcgacaatgccgtgctgatctgccatgcgttatcgggttcgcatcacgctgccggctttcatgcgaacgatgacccccgtcccggctggtgggacctggcaatcggtccgggtaaaccgatcgataccgggcgtttatttgtggtctgctccaataatttggggtgttgtgacggctcctcaggccccaatgcgatcaacccggacaccgggaagccctggggcggtcaatttccacaaccccaggttcaggattgggttcgcagtcagaagtggctggccgaacacttgggtatttcgcgctgggccgctgtcatgggcgggagcttgggcggtatgcaagccctgcagtgggcgatcgattttcccgattgggtcgagcactgtgtcgcgctggccgccgcacccggcctcacggcacagaatattgccttcaacgaaatcgcacgccacgcgatcctctccgaccccgactggcatgaaggcgactatctggcaacaggtgcactgccgacgcggggggttgcactggcgcgaatggtcggccacctcacctatatgtctgccgacggtatgagtgaccgatttggccgg

SEQ ID NO: 234387 - DNA, 439 bp, Unknown
  Bacterial polypeptide expressing nucleotide sequence isolated from the Sargasso Sea
cacatatctttctgatgattccatgagacaaaaatttggcagagacctcaaagaaggaaagctaaactttagttatgatgttgattttcaggtagagagttatctaagatatcaaggaaaatcttttgttgataaatttgacgcaaatacttacttactgatgacaaaagttttagattactatgatcctgcatcaagatttggaggcgatttatctaaagcttttgaaaaatctattagtaattaccttattgtatcttttacaagcgattggagattttctcctgaaaggtcgcaagaaattgttgaagcgcttgttggtgcaaagaaaaatgtcacctatagtgagattgaagcaaataacggtcatgatgcatttttaatgccaataccaaattatctaaatattttaaagaattttatggacagtattttatga

SEQ ID NO: 234388 - DNA, 1132 bp, Unknown
  Bacterial polypeptide expressing nucleotide sequence isolated from the Sargasso Sea
aatgaacacagaaaaaaatattaagacattaattgtaaaaaaacctcttaaattagattgtggtaaaactataaacaattttccagttgcattcgaaacttatgggtctttaaatgagaataaagacaatgctatattagtatttcatgcactaactggagatcaatttgttactggtttaaaccctattactaaaaaagatggttggtggagttttgctgtaggtccagacaaagcaatagatactaataaatattttgttatttgttcaaatgtaattggcggatgtatggggtcttatggaccaagccataaagatcctgaaacacagaaaacttttggaactgattttcctgttattacaattaatgacatggtgaatgcacaatataatttacttgaacactttggaattgataaactatttgcaattaccggaggttctatgggaggtatgcaagttcttcaatttatcaccaactttccagataaagctaaaactgttatacccattgctacaacttcaagtcattcagcacaaaatattgctttcaatgaactaggtagacagtcaatcactgctgacagcaattggaaagatggaaattatgaagctaataacacaaatccaggtaaagggcttgctgttgcaagaatggcagctcatataacttatctctcaaaaaaaggtttgcaggaaaagtttggaagaaaattacaagaaagagaagatttgaagtttggttttgatgcagattttcaaattgagagttatttgagataccaaggatctgtatttgtagatagatttgatgcaaacagttatctctacataactagagctatggattattttgatttagttaaacaatttaatggaaatttgtctgatgcatttaaaaaaacaaaagctaaattttttgtaatttcttttacttctgattggctttatccaacccaagaaaacaaagatattgttatagctttgaattctattggagcagatgttggttttgttgagattgtgtctgataaaggtcacgactcttttttattggatgttcctgattttttaaacgcactaaagaatttcttagacaaatcttatacagagttaaaaaatgaaaaatga

SEQ ID NO: 234389 - DNA, 1153 bp, Unknown
  Bacterial polypeptide expressing nucleotide sequence isolated from the Sargasso Sea
tatgaagaatattgaattaataaatgataaaaatttagattgcaattttgctatttttaaagatgcaaacttaacacttgcatctggatcaatattaaaaaatttcaaattagcatataaaacttttggatcacttaatgaaaataaaacaaatgcagtgctagtttgccatgccttaactggtgatcaatatgtttcaggtcataatccaattacaggcaaggatggatggtgggcaagaatggttggaccaaataaaccaattgacacaaataagttttttgtcatttgttcaaatgtacttggtggctgtgcaggatcaacaggcccaaaagaaacaaaagaaaatgaacaaaatatttatggaagagattttccatctgtaactattaaagatatggtaagcgcccaggtaaaattattggatgcattaaaaattgctcaattgtttagtgtagttggagggtctatgggggcaatgcaagctttacagtggtcaatcgattttccaaacagagttcagtctattattcatattgctggagctcttaaacattctgcacaaaatattgcttttcatgaagtaggcaggcaagctataatgaatgatcccaattggcataaaggaaattatactgaaaaaaatgcaattcctgaaagaggattatctgtagctcgaatgatagctcacataacttacttatcagaagatgcaatgcacagaaaatttggcaggaagcttcaatcaagagacattatatcatttggttttgatgcagattttcagattgaaagttatttacgttatcaaggaagatcatttgtagaaaggtttgatgcaaattcatatttgtatctaacaagagcaatggattattttgatcattctgaaagctatagaaaaacacttgagtttgttaataatcaaaaaaataatataaaatatcttgtaatatcgtttacatccgattggttgtttcctactaaagagaataaagaaatagttgaaattttaaacagcttatcaagaaatgtaagctttttagaaattgatacagataaaggtcatgatagtttcttgctagatgagccagaacttgattatgttataaaaggtttttttaatagcaactatggaaaaataaatgaataa

SEQ ID NO: 234390 - DNA, 1147 bp, Unknown
  Bacterial polypeptide expressing nucleotide sequence isolated from the Sargasso Sea
aatggaatcgatcggtatcgtcgctccccaaaaaatgcatttcaccgagccgctgctcatgcagaacggcagctcgctggccggttacgacctgatggtcgagacctacggcacgctcaacgccgcgcgcagcaatgccgtgctggtgtgccacgcgctcaacgcgtcgcaccacgtggcgggcgtgtacgcggacaatccgaaggacatcggctggtgggacaacatggtcggcccgggcaagccgctcgacaccaaccggttcttcgtgatcggcgtgaacaacctgggttcgtgcttcggctcgaccgggccgatgagcatcgatccggctaccggcaagccgtacggcgcgacctttcctgtcgtgacggtggaagactgggtgaacgcccaggcgcgcgtcgccgatgaattcggcatcgcgcgcttcgcggcggtgatgggcggcagcctcggcggcatgcaggcgctcgcgtggagcatgatgtatccggaccgtgtgggccattgcatcgtcgtggcgtccaccccgaagctgtccgcgcagaacatcgcgttcaacgaagtggcgcgctcggcgatcctgtcggaccccgacttccacggcggcaactactatgcgcacaacgtgaagccgaagcgcggcttgcgcgtcgcgcgcatgatcggccacatcacgtatctgtcggacgacgacatggccgagaaattcggccgctcgctgcgtcgcgcggaaggcgcggtggacgcgtacaacttcaacttcgacgtcgagttcgaagtggagtcgtatctgcgctaccagggcgataaattcgccgactacttcgatgcgaacacctacctgctgatcacccgcgcgctcgactatttcgatccggccaaggctttcgacggcgacctgaccgccgccgtcgcgcacaccaccgcgaaatacctgatcgccagtttctcgaccgactggcgtttcgcgccggcccgctcgcgcgagctggtgaaggcgttgctcgaccacaagcgcaccgtgacctacgcggaaatcgacgcgccgcatggtcacgacgccttcctgctagacgacgcgcgctatcacaacctgatgcgcgcctactacgaacgcattgcaaacgaggtgaacgcatga

SEQ ID NO: 234391 - DNA, 855 bp, Unknown
  Bacterial polypeptide expressing nucleotide sequence isolated from the Sargasso Sea
tatgaatgaagaacataaaaaaaatgattgtttattttataatgatcccgaatcattattgctagaaagcggacaaataattaatggccacgatatagcatataaaacctacgggacattaaattcaaagaaagataacgcaatactaatttgtcatgccctatcaggtgaccaatatgttgcaagcccacaccctatcacgaagaaagagggctggtgggaaagaatggttggtaaagataaaccaatagatactaaccgattttttgttatatgtataaatgtcttagggggatgtatgggatcgacagggccagcatctattgatcctgaaaccaacaaagtatttgcagtaaattttccgataataacaatagctgatatggttaaagcgcaagttaggttaatagataaccttggaatagataaattagtatctgtaattggtggctctatgggcggtatgcaagctcttgaatgggctgcttcctatcctgaaagattgaaatcagcaattccaatagcgacttcctctagacatactgcacaaaatattgcctttcatgaattaggtcgtcaggcaataatggccgatgtaaattggaattctggaaattataaagataaaaataccaatccttcaaaaggtctttcaattgcaagaatgactgctcatgttacttatttatctgaagcttcactgacaaaaaaatttggtagaaaattacaagacaaaacagatcttggttttggttttgatgctgattttcaaattgagagttacttaagacatcaaggtcatacatttgttgatagatttgatgcaaactcctatttatacataactagggcaat

SEQ ID NO: 234392 - DNA, 1111 bp, Unknown
  Bacterial polypeptide expressing nucleotide sequence isolated from the Sargasso Sea
tatgaatgaatcagttggtatagtagagcccaaaaagcttacccttcagggtaagttggatctagagtgtggccaatcacttacagatatagaaattgtctatgaaacgtacggcaacctaaatcaagattcttcaaatgccatacttatctgtcatgctctaagtggtaaccatcatgctgctggcgtctatgaaggagaaaagaggcctggctggtgggactctcttataggtccgggaaaagccatagatacaaataagttttatgttgtctgcccgaataatatcggtggttgtcacggatcattaggaccctcttcgattaacaaagaaacaggtgactattttggccctgattttccaattattactgttaaagactgggtgagatctcaatctttgctatctgattctcttggtatagaaaaatggcatgccgttgtaggaggtagtttggggggaatgcaagcccttgaatggtctcgcctttttccagacaaaattaaaaaggccggaataattgcagctgctccaaaattaagcgctcaaaacattgcatttaatgaagtggccagacaagcaatactcaatgatccagatttcgcggctgggagatatttagatactggacaatctcctaagcagggcttaaagcttgcaagaatggtaggtcatattacttatctgtctgaagaagccatgaaaagtaaatttggcagagacctcaaggaagaaaaattgaattttgtttacgatgcagaattcgagatcgaaagttatttgcgttaccaaggtgacgtattttctgaaaattttgatgcgaatacttaccttttgatgacaaaactcttagattattttgatcctgcagatgatcatcaaggagatcttgcgaaagctttcgaagcaatagaagcgcagttactagtagtgtctttcacaactgattggaggtttgcacctgagagatctagagaaattgtaaatgcccttatagcagcgaaaaagagagttagttatcttgagattgatagtccacatggccatgattcattcttgtttgctgatgaagactacaccaaaggcttatcgtctttcttggaaaattaa

SEQ ID NO: 234393 - DNA, 1147 bp, Unknown
  Bacterial polypeptide expressing nucleotide sequence isolated from the Sargasso Sea
aatggaatcgatcggcatcgtcgctccacagaccatgcacttcgccgaaccgctgcgcttgcaaagcggcagcgtgatcggcaactatcagctcgtcgtcgagacgtacggcgaactcaacgccgcgcgctcgaacgcggtgctcgtctgccacgcgctcaacgcgtcgcaccacgtcgccggcgtctacgcggacgatccgcgcagcaccggctggtgggacaacatggtcgggcccggcaagccgctcgacaccaaccgcttcttcgtgatcggcgtgaacaacctcggctcgtgcttcggctcgaccggcccgatgagcatcgacccgtcgtccggcaagccgtacggcgcaagctttccggtcgtcaccgtcgaggactgggtgcacgcgcaggcacgcgtcgccgacgcattcggcatcgagcgcttcgccgccgtgatgggcggcagcctcggcgggatgcaggcgctcgcgtggagcctgatgtatccggagcgcgtcgcgcactgtatcgacatcgcgtcgacgccgaagctgtccgcgcagaacatcgcgttcaacgaggtcgcgcgctcggcgatcctgtccgatcccgacttccacggcggcgactactacgcgcacggcgtgaagccgaagcgcggcctgcgcgtcgcgcggatgatcggccacatcacgtacctgtccgacgacgacatggccgagaaattcggccgtgcgctgcgccgcgccgacggcgcgctcgacgcctacaacttcagcttcgacgtcgagttcgaggtcgagtcgtacctgcgctaccagggcgacaagttcgccgactacttcgacgcgaacacgtacctgctgatcacgcgcgcgctcgactacttcgacccggcgaaggcgttcgacggcaacctgacggccgcgctcgcgcacacgcaggcgaaatacctgatcgcgagcttctcgaccgactggcgtttcgcgccggcccgctcgcgcgagatcgtgaaggcgctgctcgacaacaagcgcacggtcagttacgcggaaatcgacgcgccgcacggccacgacgctttcctgctcgacgacgcgcgctatcacaacctgatccgcgcgtattacgaacgaatcgccaacgaggtgggcgcatga

SEQ ID NO: 234394 - DNA, 1090 bp, Unknown
  Bacterial polypeptide expressing nucleotide sequence isolated from the Sargasso Sea
ctgaaagttgatcagcctctagaattgaaatcagggaaaatcctaaagagatatgatttagcttacgagacatatggtgttttaaataaaagtagagacaatgcggttttaatatgtcatgccctatcaggcaatcaacatgctgcaggaaaatataaagatgacgacaagccaggatggtgggataacatgattggatctggtaaaccgatagatactgatcatttattcgttgtctctttaaataatttaggagggtgtcacgggtctacagggccaaagtcaattaatcctgaaaccaaaaaaatttatggttctgattttcctattgtaacagttgaagattgggtaaattctcaatgtaaattgatggagagtttaggtattacgaaatggaagttcgttattggaggtagtcttggtggaatgcaagctttccaatggactttacaattcccagacaaagtggagaagtgtattataattgcagcagcaccaaaactaacagcacagaacattgcattcaatgaagttgctaggcaagcaatcatgaaagatcctaattggcataatggacattatctcgaaaaaaatgtcattccaaatcaagggcttgctctagcaagaatgttaggtcatataacatacttatccgatgattcaatgaagcagaagtttggacgcgacttacaaaaacaaaagcttaatttcaactttgatgttgagtttcagattgagagttatttaagatatcagggtgagaaatttggtaattcttttgatgctaacacatatttactcatgaccaaatcattagactattttgatccaattaaagactttggcgatgatttaaatacgcgactcagtaaaacttgttctaaatatctaattatatcatttacttctgattggagattcccgccatcaagatctaaagaaattatgaaacttcttatccacaataataaaaatgtaagctactcagagattgattcttcaggcgggcatgatgcttttctaatggaaaatgaagattattttcaaataatgagaaactttatctcaggtgataataatggggtttaga

SEQ ID NO: 234395 - DNA, 1120 bp, Unknown
  Bacterial polypeptide expressing nucleotide sequence isolated from the Sargasso Sea
tatgaatgatgcaagtaaaaaaaatgattgtttattttatagtgatcccgaaccattactgctcgagagtggacaaacaatacatagccacgatgtagcatataagacctacgggacattaaactcaaataaagataatgcaatacttatctgtcacgccttatcaggtgatcaatatgttgcaagctcacacccaattacaaataaagatggttggtgggcaagaatggttggtgaaaacaaaccaatagatacaaatcgtttttttgttatttgtataaatgttttaggtggatgcatgggatcaactggacctgcttctatcgaccctgaaactaaaaaagaatttgcaataaattttccaataataacgattgccgatatggtcaaagcacaagttagattaatagatcaccttggcatagaaaaattagtctcagtgatcggtggatctatgggcggcatgcaagcacttgaatgggctgcttcctttccaaaaaggttaaagtcagcaataccaatagcaacttcttctaggcatacagcccaaaatattgcattccatgaattaggtcgtcaggcaattatggctgatataaattggaattcaggcaattataaagataaaggaactaatccctctaaaggtctatctattgctaggatgactgctcatgttacttatttgtcggaagcatcactgacaaaaaaatttggtagaaaattacaagataaaaaagatctaggatttggttttgatgctgattttcagattgagagttatttaaggcatcaaggtcatacatttgttgatagatttgatgccaattcctatttatacataacaagagcaatggattattttgatctagaaaaaacgcacaaaaaaactttaacagagatatttactgacacaaatttaaaattcttagttgtatcatttactggagattggctttatccaacctctgaaaacctcatgatagtaagagcccttagcgcaggaggggctgatgttagctttgttgaaattgaatccgataaagggcatgatgcatttttattagatgagcctgaatttgatgcttgtatggatggttttctaaaatcattattatag

SEQ ID NO: 234396 - DNA, 1162 bp, Unknown
  Bacterial polypeptide expressing nucleotide sequence isolated from the Sargasso Sea
atgaattacaagtttaatattattgatgacaaaagtttagaatgtaaaattgtagaattttctaatgctaattttaaattagattctgattatattctaaataacttcaaaatagcctttaaatcatttggtactttaaataaaaaaaagaataatgtcattttggtttgtcatgcactaaccggcgatcaatatgtaacaggatataatcctgtaacaaaaagagagggatggtggtccagaatggtaggtccagataaaccaattgatactaataagttctttgtaatttgttctaatgtcattggaggatgtgcagggtcaactggtccaaaagaaatagatgttaacacaaattctccttttggaggtaaatttccttccataactattaatgatattgttaatgctcaaaattatttattagaatctctatctataaaaaaactatttgcagtaataggcggatccatgggggctatgcaagccatacaatggtcattaaactatccagataaaatagaaaatattatccatattgctggagccctaaaacactcttcacaaaatattgcatttcatgaagttggcaggcaagcaattatgaatgataataattggaataaagggtcttataatgaaaatggaaaaagacctgaaacaggattagctgttgctagaatgattgcacatattacttatttgtcagaaaatgctatgcatcgtaaatttggtcgtaaattacaatcaagagatattatatcttttggatttgatgcagattttcaagttgaaagctatcttcgatatcaaggtcgatcatttgttgaacgatttgatgctaatagttatctttatctcactagagccatggattattttgatattgtagataaattttctaaagctatagaatttcctacaataccaaataaacatattaattatttggtggtttcttttacttcagattggttgtttccaacaattgagaataaagaaatagtaaaaaaattaaattatttcaatcggaatgtaagctttacagaaattgaaactgataaaggacatgatagctttttgttagatgaactagagttagactttaccattaatggctttcttgaaagcaattatagaaagttagaatcacatgaataat

SEQ ID NO: 234397 - DNA, 1057 bp, Unknown
  Bacterial polypeptide expressing nucleotide sequence isolated from the Sargasso Sea
attggactctggtaaaaaaattaagaattttcaaatcgcttatcaaacatatggaagtcttaatgctcaaaaaaataatgcaattttggtttgtcatgcattaactggtgatcaattccctgcagaggaaaatcctataactaaaaaaaatggttggtgggaattaatgattggacccgataagcctattgatacgaataaatactttgttatctgctcgaatgttcttgggggctgtgttggaacgacaggtcctaatgatactaatcctgatacctcaaaaatatatggtttagattttcctaccataacgattagagatatggtgagagtacaaaaaatacttgttgatgagcttggaatatccaaattgctttctgtagctggtggttcaatgggtgcaatgcaagttctacaatgggctgctacttatccggagagtgtaagatctattatgagtatagcaggttcattgaaacactctgcccaaaatattgcatttgacgaggcaggaagacaatccattatgttggatcctaattggcaaaatggaagatatttggagagtaatgaaaaacctgagaatggtctctctgttgcaagaatgatagctcatattacttacttatctgagaaagcttttcaaaataaatttggtcgaaatttacaagaaaaaaatgatttatcttttggctttggaatagactttcaggtcgaaagttatcttcgttatcaaggtagatcttttgttgatcgatttgatgctaatagctatctatatatgactcgagcaatggattattttgacgtgaaagatgaaattattgcaaataaaaaaactataattgataattcgatccgatttctagttttatcatttaccagtgattggctatttccaacaaaagagtcaagagagatagtatctttattaaattctattgggtccaatgttagttttgctgaagtcgtatcagatagaggtcacgatagttttttattagatgagccacaattttttaaagttgctcagggatttttaaagggaataaaatga

SEQ ID NO: 234398 - DNA, 1114 bp, Unknown
  Bacterial polypeptide expressing nucleotide sequence isolated from the Sargasso Sea
tatgagtaaaagtgtaggaaaagtaacagagcaaaaaattaaattgcctactgatctattgcttgaatgcggtcaaactctcaaaaacatagatcttacttacgaaacttatggtgagttaaatgatgattcatcaaatgctatattaatatgccatgctttaagtggaaatcatcacgctgcagggttttataaagatgatagtgagaggcccggctggtgggatgctttaataggaccagataaagcaatagataccaataaatattatgtggtttgtcctaacaacatagggggatgtcatggttcaactggcccctcttctataaaccccgatactgcaaaattttatgggcctgaatttccagttataacagtccaggattgggtaaaaagccaggctcttttagccgaccatttaaaaattaattgctggcatgctgctatcggaggtagccttggcggaatgcaggcccttgaatgggctagactgtatcctgacagaatcttaaaagcagctgtaatagctgcggcccctaaacttagtgcacaaaatattgcttttaatgaagttgctagacaggcaattattactgacccagattatcaagaaggtaaatatctggattctgataaatccccaaaaagaggacttaggctagccagaatggtgggacatattacctatttgtctgatgaagctatgcgagataagtttgggagagaacttaaagagggtaaattaaattttggttttgatgttgaattcgaggtagagagctaccttagacatcaaggcgatgttttttctgaatcttttgatgcaaatacctatcttctgatgaccaagattttagattactacgacccagctgaagaccatgacggcgatcttgtaaaagctttcgaatcaataaaggccaaagttatggttatttcattttcaagtgattggagattttcacctcaaagatcaaaagaaattgtaaatgctttgttggcttccgaaaaagaagcaacctacctagaaatagaatcttcccatgggcatgattcctttctttttgctgaggatagatacgtgaatgcattaagtgcatttttaggaaattaa

SEQ ID NO: 234399 - DNA, 1057 bp, Unknown
  Bacterial polypeptide expressing nucleotide sequence isolated from the Sargasso Sea
tatgaatagtacaaataaattttataaaacttttggtccaatagaattacagctagagggtggtcacttattaaaaaaaacctctatagcttataatacttggggaaaattaaatgctaaaagatctaatgcaattctagtttgtcatgcactaactggagaccaatttgtaactggtaaaaatcctattacaaatagaaaaggatggtgggaaaatatagtagggcctaataaaatactggacacaaataagtattttataatttgtacaaatgttcttggtggctgcatgggaactactggaccttcttctacaaatttggaaacttctaaaccttatggaatgcaatttcctatatttacaattaaggatatggttaatttgcagctaaaattaattgagagtttaaatatagataaattgttctcaattattggagggtctatgggaggaatgcaagttttagaatgggctgcaagttaccctgataaattatattctgctatacctatcgcaacttcttaccgacattctgctcaaaatattgctttccacgaggtgggaagacaagcaattatgaatgatccagattggaataatggaaattattataataatggaaataaaccgaggcatggtttatctgtggctagaatgattgcacatataacatatttatctgagggagcatttcaaaaaaaatttggtagagatatgcaaagtaaagtactttcttggggctttgatgcagattttcaagttgaaagctatttaaggcatcaaggaacatcatttgttgatagatttgatgcaaatagctatttatatataactagggctatggattattttgacttaaccaatagctataaaggaaatttagctcaagcattcagaaatacgaaatgtaaatttcttattatatcttttacaagtgactggctatttccaagctcagaaagccaatatattgtaaaagcactcaataaaactgcttcagatataagttatattgaaatagaatctgataaaggacacgatagcttcctacttgaa

SEQ ID NO: 234400 - DNA, 1084 bp, Unknown
  Bacterial polypeptide expressing nucleotide sequence isolated from the Sargasso Sea
atgaatgaagaacataaaaaaaatgattgtttattttataatgatcccgaatcattattgctagagagtggacaaataattaatggccacgatatagcatataaaacctacgggacattaaattcaaaaaaagataacgcaatactaatttgtcatgcactatcaggcgaccaatatgttgctagttcacacccaatcacgaagaaaaagggttggtgggaaagaatggttggtaaagataaaccaatagatactagccgattttttgttatatgcataaatgtcttaggggggtgtatgggatcaacaggaccagcatccattaatcctgaaaccaataaagtatttgcagtaaattttccgattataacgatagccgatatggttaaagcacaagttaggttaatagatagccttgaaatagaaaaattagtttccgtaattggtggttctatgggtggtatgcaagctcttgaatgggctgcctcctaccctgaaagattgaaatcagctattccaatagctacttcctctagacatactgctcaaaatattgcctttcatgaattaggtcgtcaggcaataatggccgatgtaaattggaattccggaaattataaagataaaaatactaatccttcaaaaggcctttcaattgcgaggatgacagctcatgttacttatttatctgaagcttcactaacaaagaaatttggtagaaaattacaggataaaacagatcttggttttggttttgatgctgattttcaaattgagagttatttaagacatcaaggtcatacatttgttgatagatttgatgccaactcctatttatacataacaagggcaatggattactttgacttagaaaaaacccataaaaagtctcttacagaaatatatgctaatactaatttaaaattcctaattgtatcatttactggagattggctttatccaacatctgaaaacttaatgatagttagggctctcagcgcaggtggagttgatgtaagttttgttgaaattgactccgataaaggtcatgatgcatttttattagatgagcccagaatttgat

SEQ ID NO: 234401 - DNA, 925 bp, Unknown
  Bacterial polypeptide expressing nucleotide sequence isolated from the Sargasso Sea
atgacaaaattagtcaaatataccactaatgattttaatttagcttcaggaaaatcaatttcacccctcgaaattgcatacgagacatatggaaagctcaataaagacaaaacaaatgccgttctaatatgtcacgcacttaccggtgatcaatatgcatgcgctattaatccaataacaaaaaaaccaggttggtgggatattctcgttggaaaaggtaaaccaatcgacactgataaatatttcataatttgctcaaatgttttggggggttgtatggggacaaccggtccaaaatcacaaaacttaatcacgaatgaaccatatgggcttaattttccagtaataacaatcagcgatatggtaaaatcacaagtattactcttggaccacttagaaataccaaaagttttgacagtaattggtggatcaatggggggcatgcaggtactggcatggatgtctgaatatccagatcgaataaaatcagcaattcctattgctactgctgcgtatcatacctcgcaaaatattgcgttccatgaagttgggcggcaagcagtaatggctgacccaaaatggcatgaaggtaaatattttgaacataatacctctcctgaaaaaggtctatcggtagcacgaatgacagcccatattacctatttatctgaagttgccctacaaaataaatttggaagaaatttacaagatagagcaaaaaaaacatttagctttgatgctgactttcaagtcgagagctatctacgatatcaaggtgttaattttgttaaaagatttgatgcaaatagttatcttttcttaacgagagctatggactattttgatttgatttcggaaaatgatggggttttagcgaatgcatttaatgatttaaatgcctctgtttgtgtcatttctttcacag

SEQ ID NO: 234402 - DNA, 1099 bp, Unknown
  Bacterial polypeptide expressing nucleotide sequence isolated from the Sargasso Sea
gataggaaaagtacaggcacaaaaagttactctagagggtaaatttgagcttgagtgcgggcaaagttttaatgacatagaactggtctatgaaacttatggtgctcttaatgcagatgctacgaatgcaatactcatctgccatgcgctaagtggtaatcatcatgctgctggaaaatacgaaaacgaagaaaagccgggctggtgggattcgcttattggcccaggtaaagcggtggatacaaacaaattctttatagtttgcccaaataatataggcggatgtcacggctccctaggaccaagttcaattaaccacgatactggagattattatggacctgactttccaattattacagtaaaagattgggtaaattcacaagccaaactttctgattcattgggcatagaaaaatggcatgctgttataggaggaagcctaggtggaatgcaagctctagaatggtcctatcttttcccgaaaagaataaaaaaagcaggaattattgctgcagcaccaaagttaagtgcacaaaatatagctttcaatgaagttgcaagacaagccatattaaatgatccagattttgaaggaggtagatatctagataaaagtaagtacccaaaacaaggcctcaaattagcaagaatggtagggcacattacgtatctctctgaagaagcaatgaggagcaaatttggaagagaactgaaaaaggaaaaattaaattttggttatgatgcggagttcgaaatagaaagttatctgaggtatcaaggtgatgttttttcagaaagttttgatgcaaatacttatcttctaatgacaaagattctagactacttcgatccagcaagtaattttgaaggcaaattggtaaatgcctttgagtccattgaagcacagttattagtagtgtctttttcaactgattggaggtttgctcctgaaagatcaaaggaaattgtaaatgcccttatcgaagccaaaaaaaatgtgagttacttagaaattgatagtcctcacggacacgactcgtttttgtttgcaaatgaagattatgtaaagggtttatcggcttttcttgaaaattaa

SEQ ID NO: 234403 - DNA, 1015 bp, Unknown
  Bacterial polypeptide expressing nucleotide sequence isolated from the Sargasso Sea
atgagtaattttgataaaataaaaagtataactattaagcaacctctaaaacttgattgtggaaaagaaatatcaaattttccactagcttatgagacttacggaaatcttaatgaaaaaaaagataatgccatacttgtttttcatgcattaacaggagatcaatttgcctccggtcaaaacccagtcacaaataaagaagggtggtggaattatgcagttggtccaggtaaggcttttgatactgaaaaatttttcgtaatttgtgcaaatgttattggtggctgtatgggttcatatggaccaggaactattgatcctaaaaccaacaatccaataggaacaaattttcctgttattacaataaacgatatggttaatgctcaatacaatcttttagatcatttcaaaatagaaagattatttgcagttgctggtggttctatgggtgggatgcaagtattacaatttgtctcaaattttccaaacaaggctaaggttgctttgccaattgcttgtacagctagtcactcagctcaaaatattgctttcaatgagcttggaagacaagcaatcatgtcagatgcaaattggaaggacggtttatatgacggaaagacaagtaatccagacaaaggtttggctgttgctagaatggctgcacatattacatatttgtcaaaaaaaggattacaagaaaaatttggacgaaatctgcaagaaagatcagatttaaaatttggatttgatgctgactttcaaattgagagttatttaagatatcaaggctctgtttttgtggatagatttgatgcaaatagttacttgtacattactagagcaatggactactttgatttgacaaaacaacatggtggtaatctttctaaagcttttaaagaaagtaagaccaaattttttattatttcatttacatcagattggttgtacccaacctcagaaaataaagacattgtaattgcactaaatgctataggagccgatgttggctttg

SEQ ID NO: 234404 - DNA, 1117 bp, Unknown
  Bacterial polypeptide expressing nucleotide sequence isolated from the Sargasso Sea
atgaatactgagaaaaacataaaaactttaattgtaaagaaaccactaaaattagactgtggaaagaccataaaagattttcctatagcctatgaaacttacggttcacttaattcaaaaaaagataatgcaatattagtttttcatgctctaacaggagatcaatttgtaaccggaataaaccctgtaactaacaaagagggttggtggagttatgcagtaggtcctgataaggctatcgatacgaataaatattttgttatttgctctaacgtaattggtggatgtatgggatcatacggaccaagtcataaagatcctgatcaaaaaatttttggaacaaattttccagttattacaattaatgatatggtgaatgctcaatataatttacttgatcattttggtatagataaattattttctataactggaggttcaatgggaggtatgcaggtccttcagtttatcagcaactttcctgataaatctaaaacagtgataccaatagcaaccacatccagtcattcagcacaaaatattgcttttaacgaactaggcagacaagctattacagctgatagtaactggaaagagggaaactatacatcaaacgatactaatcctggaaagggattggctgtagctagaatggcagctcatataacttatttatctaaaaaaggtttgcaggaaaaatttggaagaaagttacaagaaagagaagatcttaaatttggatttgatgctgattttcaaatagaaagttatttgagatatcaaggctcagtattcgtagatagatttgatgcaaatagttatctttatataacaagagctatggattattttgatttagctaagcaattcaatggtaatctttcagaagcatttaaaaatacaaacgcgaaattttttataatttcatttacttcagattggctttatccaacccaagaaaacaaagatattgtgattgctttaaactcaataggagcagatgttggatttgtagaaattgagtcagataaaggtcacgactcctttttactagacgttcctgatttcttaagtgcacttaaaaactttttagataaatcttacgaagaaaattaat

SEQ ID NO: 234405 - DNA, 1138 bp, Unknown
  Bacterial polypeptide expressing nucleotide sequence isolated from the Sargasso Sea
atggaagattataacaaacacgccattctcggtgttaaacaaccacttgttttggaatgtggcgttagtctaaataattttcctgtttactatcaaacttacggatcgttatcagaaaaaaaagataacgctgttctagtttgtcatgcattaagcggtgaccagtttttagccggggttaatccaactactggaaaggtgggttggtggaacttagtcgtaggaccagataaggtaatagatacaaatagatattttgttatttgtactaatatcttgggtggctgtatgggtaccgtaggtccgaaggaggtaaacagcgaaactggtgaaatttggggctcaaattttccaatgattactatccaagatatggttaaggcacaggccttgttaattgatcacctcgatatagataaattattttgtgttatcggcgggtcgatggggggtatgcaagtattagaatgggctgctacctatccagacagagttcttactgctgtacctattgcagctgcggctcaacattcggcgcaaaatattgctttccatgaggttgggcgacaagcaattatggcagaccccaattggtgtggaggtaattattatgcgtctgatatattcccagataggggcttagctatagcaaggatggtggcgcatatcacttatctatctgagccctcgcttcaaacaaaatttggccggcgtctgcaggatagagagagtatcacttttggatttgacgcagactttcaggtagagagttatctacgacatcagggtagcacgtttgttgatcgttttgatgctaattcctacctatatatcactcgagcaatggattattttgatttatctgaacgctttgatggcggattggcggaggcttttcgaggttcaaaaacaaggttttgtgttatttccttctctagcgactggctttacccaacctctgagagtcgtatggtagtacatgcccttaattcagttgcagctagtgtaagttttgcagaaataaggtctgacaagggacatgactcatttttgctcgatgaaccagaattttggagtgtattaagagggtttttatctggttcagctgattattttggtttagacgagtttagttgaa

SEQ ID NO: 234406 - DNA, 1075 bp, Unknown
  Bacterial polypeptide expressing nucleotide sequence isolated from the Sargasso Sea
atgaaaacaaaatttactactgacacaaaacttgaaagcgaaatagcctatttcgagaatattaatttaaaactagaatcaggagatataatagatagttttaaactagcattcaaaacatatggcaaattaaatgctgataaaactaatgctattcttgtttgccatgctttaactggagatcaatatgttgctgggaataatcccattactgggagagaaggttggtggtctagaatggttgggcctaataaaccaattgatacaaacaaattttttgtaatttgctcaaatgtactcggcggttgtgctggctcaactggtcctaaagagttacaaaatggaagtgatgttgcatatggtggtaattttccttccgtaacaataaaagatatggtgaaggctcaatctttattgattgaaagtttaaatatagagaagttattttctgtcattggtggttcgatgggagcaatgcaagcacttcaatgggcaatcgattttccagataaaattttaaatataatacatattgcgggcgctttaaaacattcggctcaaaatattgcatttcatgaagttgggcgacaggcaataatgagtgatcctatttggaaaaatggaaagtattttgaaaataatgaagtgccagaaagaggtctatcagtagcaagaatgattgcacatatcacatatttatccgaaaatgcgatgcatagaaaatttggaagaaaacttcaatcaagagatattatttcttttggatttgatgctgattttcaagttgagagttatctgagatatcaaggtaaatcatttgttgaaagatttgatgcaaattcatatctttatttaacaagggctatggattattttgatcatgatgaaacatttagaaaaaatattgagtttagtcataatccaaataaccatttaaaatatttaattgtttcatttacctcggattggttattccctacaatagaaagtaaaatgattgtaaatcaattaaattctctatcaagagaagtaagcttcctagaaattgatactgataaaggacatgatagttttt

SEQ ID NO: 234407 - DNA, 1114 bp, Unknown
  Bacterial polypeptide expressing nucleotide sequence isolated from the Sargasso Sea
atgagtaaaggtctaggaaaagtaattaagcaatcttttaaattgccaagtgacctattgcttgaatgtggaaaaacgcttaaaaatattgaacttacttatgaaacttacggtgaactgaacgcagatgcttcaaacgccatattaatatgtcatgctttaagcgggaatcatcatgcagctggatattatgaagatgagaatgaaagacctggatggtgggatgctttaataggtccaaacaaagctatagataccgataaattttttgtggtttgtcctaataacattggaggatgtcatggttccactggaccctcctctatcaaccctgaaaccaaaaaattctatgggccagactttccagttattacagtaaaagattgggttaatagccaagcattattagcagatcatttaaatgtaaaatgttggcatgctgcaattgggggaagtttaggaggtatgcaagctcttgagtggtgtcgtttatttcctgacagaattttaaaagcatctgtgattgctgcagcaccgaagttaagtgctcaaaatatagcttttaatgaagttgctagacaagcaattatcaccgatccagatttccaagaaggtcattatctagatacagaaaaatctccaaaaagaggtcttagacttgcaagaatggttgggcatataacttacctatccgatgaggctatgagagataaatttgggagagaactaaaagaaggaaagttaaattttggctttgatgttgaatttgaggttgaaagttacctgagatatcaaggtgatgttttttctgaatcatttgatgcaaacacctacctcttaatgacgaaacttttagattactacgacccagcagaaaaatatcatggcaacctggttaaagcatttgaaaccataaaggccaagattatggttatttccttttcaagtgattggaggttttctcctgaaagatcaaaagaaatagtaaatgccttgttagctgcagaaaaagacactacttaccttgagattgaatcatcacatggacatgattcatttcttttcgccgaagatagatatgtaaatgcattaagtgcatttctagaaaattaga

SEQ ID NO: 234408 - DNA, 1114 bp, Unknown
  Bacterial polypeptide expressing nucleotide sequence isolated from the Sargasso Sea
atgagtggaagtgtaggtaaagttatcaagcaaatatttaatttgccaactgatctattgcttgagtgcggacaaacactgaaaaatatcgaacttgtttatgaaacctatggtgagttaaatgctgattcttcaaatgctgtattaatttgtcatgctcttagtggaaatcatcacgcagccggttattatgaagacacgaacgaaaggccaggttggtgggatgctttaataggtccgaataagcctatagatacgaacaaatattttgtggtttgtcctaataatattggtggatgtcacggttctactggtccctcttcaattaaccaagaaacaagtgagttatacggtccagattttccggtcataacggttaaagattgggtaaacagtcaagcattgctggcagactatttgaatataaattgctggcacgcagtaattggtggaagtctaggaggcatgcaagctctagaatggagtcgcttgtttcctgacaggatatctaaatctatagtaattgctgcagctccaaaacttagtgcacaaaatatagcttttaatgaagtggctagacaagcaataattactgacccagattttcaagaaggacgttacttagatgctggaaaatctccaaaaagaggtcttagattagcaagaatggtaggtcatattacttatctatcagatgaagccatgcgcaacaaatttggaagagaactcaaagaaggaaagttaaatttcggtttcgatgttgaatttgaagtagagagctatctaaggtaccaaggtgacgttttttcagaatctttcgatgctaacacctatctcttaatgacaaagcttttagattattatgacccagcagaaagctttgatggaaatcttgttaaagctttagaaccaataaaagctaaaactatggttatatcattttcaagtgactggagattttctccggaaagatctaaagaaatagtaaacgcgctgctagctgcaaataaagaaattacttatctagaagttgattcacctcatgggcatgattcatttctttttacagaagatagatatataaatgcattaactgcttttctaggaaattaga

SEQ ID NO: 234409 - DNA, 1135 bp, Unknown
  Bacterial polypeptide expressing nucleotide sequence isolated from the Sargasso Sea
atggataatttaagtaaggtgaaaagtataatagttaaaaaatcattaaaattagattgtggaaaagaaatttcaaactttcctttagcttatgaaacatatggtaagctgaatgaaaaaagagataacgctattttagtttttcatgcattaacaggcgatcagtatgcctctggaaaaaatccagtaacaaataaagatggttggtggagttatgcagttggtccagaaaaagcatttgatacaaaaaaattttttgtaatatgtgcaaatgttattggtggttgtatgggatcttatggaccaagtacaattgatccaaatacaaaaaaacctttaggaacagatttcccagtaattactattaatgacatggttaatgctcaatataacctattagagttttttaaaattgaaaaattatttgctgttgctggtggttctatgggaggaatgcaagttctacaatttgtttcaaactttccaaacaaaaccgaagtcgctttaccaatagcttgtacggcaagccattctgctcaaaatattgcatttaatgaacttggcagacaggcaataatgtctgattctaattggaaggaaggtttatatgaagaaataaatagcaatcctgataaaggtttagctgtagcaagaatggcagctcatattacttatttatcaaaaaaaggtctgcaagaaaaatttggaagaaaacttcaagaaagaagtgatttaaaatttggttttgatgcagactttcaaattgaaagttatttaaggtatcaaggatcggtattcgttgatcgttttgatgcaaatagttatttatatatcactagagcaatggattattttgatttaacaaaaaaatttaatggaaatctttcaaaggcatttgaaaaaacaaaaacaaaattctttgttatttctttcacttcagattggttatatccaacttctgagaatagagatatagtaatcgctttaaacgcaattggcgctgaagtaagttttgtagaaataaaatctgacaaagggcatgactctttcttattagatgttccagactttcttaatactattaaaaattatttaaacgcaacatttttagaattaaatgaaacaagaatttaaa

SEQ ID NO: 234410 - DNA, 1123 bp, Unknown
  Bacterial polypeptide expressing nucleotide sequence isolated from the Sargasso Sea
aatgagagaaataactgcaaatactgattatccaggttacttactaaagtgcaatgaagagttattactagactctggaaaaaaaattaaagattttcaaatcgcgtaccaaacatacggaaagcttaacaaccaaaaagataatgcaattttggtttgtcatgcattaactggtgaccaatttccagcagaagaaaatcctattactaaaaagaaaggttggtgggaattaatgattggtcctaataaacctatagacacaaataaatattttgttatatgcacaaatgttcttggtggatgtgtagggacgacaggtcccaatgacataaatcctgaaacttcaaagatatatggcttagattttccaaccataactattcgagacatggtgaaggcacaaaaaattcttattgacgaacttggaatatctaaattactttctgtagctggtggatcaatgggtgcgatgcaagtacttcagtgggctgctacttatcctgagagtgtaaggtcgataatgagcattgcaggttccttaaaacactctgctcaaaatatagcttttgatgaagctggcagacaatcaattatgttagatccgaattggcaaaatggaagatatttagagggtaatgaaaaacctgaaaatggtctttctgttgccagaatgattgctcatattacctatttatctgaaaaagcttttcaaaataaatttggtagaaacttacaggaaaaaaatgatttatcttttggctttggaatagactttcaggttgaaagttatcttcgttaccaaggtaggtcttttgtagatcgatttgatgccaacagctacttgtatatgacaagagctatggattattttgatgtaaaaaacgaaataattgaaaataaaaaaactattattaataattcaattagatttctagttttatcatttacaagtgattggttatttccaacaaaagaatcaagagaaatcgtatctctattaaattcaattggatctaacgtgagttttgctgaggttgtctctgatagaggccatgatagctttttacttgatgaacctcaatttttcaaagttgcacagggttttttaaagggaataaaatga

SEQ ID NO: 234411 - DNA, 1111 bp, Unknown
  Bacterial polypeptide expressing nucleotide sequence isolated from the Sargasso Sea
tatgagtgattcgataggaaaagtaaaggcacaaaaagttactcttgagggtaaatttgagcttgagtgcggtcaaagtttcaatgatatagaacttgtttatgaaacttatggtgttcttaatgcagattcgacgaatgcaatacttatctgccatgcgttgagtggcaatcatcatgctgctggaaaatacgaacacgaagaaaaaccaggctggtgggattctcttattggcccaggaaaagctgtggatacaaacaaattttttgtagtttgcccaaataatataggtggctgtcacggttctctcggaccaagttcaattaaccacgatactggagattattatggacctgactttccaattattacagtaagagattgggtaaattcacaagccaaactttctgatttattaggcataggaaaatggcatgctgtcatgggaggcagtctaggtggaatgcaagctctagaatggtcctatctttatcctaaaaggataaaaaaagcaggaattattgctgcagcaccgaagttaagtgcacaaaatatagctttcaatgaagttgcaagacaagccatattaaatgatccagattttgaaggcggtagatatctagataaaagtaagtacccaaaacaaggtctcaaattagcgagaatggtaggacacattacttatctctctgaggaagcaatgaggagcaaatttggaagagagctgaaaaaggaaaaattaaattttggttatgatgcggagtttgaaatagaaagttatttaaggtatcaaggtgatgttttttcagagagttttgatgcaaacacttatcttctgatgacaaagattctagactacttcgatccagcaagtaattttgaaggcaaattggtaagtgcttttgagtccattgaagcgcagttattagtggtatctttctcaactgattggaggtttgctcctgaaagatcaaaggaaattgtaaatgcccttatcgaagccaaaaaaaatgtgagttaccttgaaattgatagtcctcacggacacgactcatttttgttcgcaaatgaagattatgtaaagggtttagcggcttttctagaaaattaa

SEQ ID NO: 234412 - DNA, 1792 bp, Unknown
  Bacterial polypeptide expressing nucleotide sequence isolated from the Sargasso Sea
ttgaatagcataaatagttcagatgatcttagaactgataaattctcaaaatatattgaagaatttgagatcccatttaccctaaatcttgagaggggggatcagttagagaatgttaaagttgcgtatgagacttatggtgaattaaatcaagataagtctaattgtattttagtttgccatgctattacaggggattctcatgttgctaagcatgatgaaaatgatgttcctggatggtgggatataatggttggtccaggtaaacctttagatactaataaatattttgtaatctgttcgaatattcttggaagctgcagaggaacaactggccctaattcgatcaatccaaaaacaggtaaatattatggagctgattttccagttgtaacaattaaggatatggttattgtccaaaaatatctgattgatcatctaaagattgataaattattaggtgtaattggaggctcattaggtgggtttcaatgtttagaatgggctacacaatttccagacaaagttgagggttgcttacctatagcatcttcttcaaggctgactacgcaagggttggcatttgatgttgttgcaagaaattcaataattagtgatccatattttaactcaggaaattattatgaaaatgataaaaagcctgacgtaggcttagcattagctagaatgttaggtcatattacatatctttctagagaatcaatgaatgataaatttgaaattgatagaaatagcccaagagatatttcaacaagttttgaaaaaaaattttccgttggaagctatttagcatatcaaggagaaaaatttgtagaaagatttgatgctaatagttatattactctttcaacagctttagatttatttgatctaggagcaactaaagaacttctttctgaaaatcttagtaaatctcattgtgagtggttactcataagttttacaagtgattggctatatcctgcttttcaatctctagatattgtagaagccttgatttcacactctaaaaaagtttcttattgtaatgtaaagtctaatgctggtcatgatgcattcctcttaaaagaggatatagaacattatggtgagttaacaaagtcttttttcaataaattaaataataaatctaaacttaaaggtgatgtaaagaaattagactctactgttaagattgggctgaataatagaattgattttcaatacatagcagaattaatacctgagaaatcaagtatattagatttgggttgtgaagaaggggaattaattgaacaactttcaacaattggaatttccagagcactaggagttgaaataaatcaaaacaatgttatctcatgttttgctaaagggataaacgtaattcatagtgatttagctagccgtttagaaaaattttatgattctcagtttgatgttgctattttgtctcaaacccttcaggctattaagaatgttgaaaaaattcttaaagaaatgactagagtttcaaaatcaagtatagtatctttccctaattttgcttttaagccaatgagagaaatgttctacaatgagggtaaagcacctaagatttcgggctggtatggttataactggtatgacactccaaatgttagattcccatcaataaatgactttttagaattctgtgaagaaaaagatattagtatcaaagagtcgctttatttagatactttgaataataaaaaaattacagataatccaaacttaaatgcagacagtgctatttttgtgatttcttaat

SEQ ID NO: 234413 - DNA, 587 bp, Unknown
  Bacterial polypeptide expressing nucleotide sequence isolated from the Sargasso Sea
aactgcacaaaatattgcattcaacgaggtagctagacaagcaataatgaaagatcctaactggtgtgatggtaattatctagaaaataatgtttcacccaatcaaggactcgcgcttgctagaatgttaggtcacataacttatttgtcagatgaatctatgaaagaaaaatttggaagagacctcaagctatcgaaattaaactataattatgatgtagaattccaaattgagagttatctaagatatcaaggtgaaaagtttgtatctggttttgatgcaaatacatatttattaatgacaaaatcattagattactttgatcctatcaaagatatgggggatatgttcatttcaaatctcaatattactaatgcaaaatttcttgtaatctcctttacttcagattggagatttcctccaatcagatcaaaagagattgttaaaatattaattaataataacaaacgaatcagctattcagaaatcaatgcagatggaggtcatgatgccttcttgatgaataatcaggattattttgatgttatgaaggaatttatagacgaggcatgcaatggcatttaga

SEQ ID NO: 234414 - DNA, 976 bp, Unknown
  Bacterial polypeptide expressing nucleotide sequence isolated from the Sargasso Sea
ttttcatgctctaacaggagatcaatttgtaaccggaataaaccctgtaactaagaaagagggttggtggagttatgcagtgggtcctgataaggctatcgatacaaataaatattttgttatttgctctaacgtaattggtggatgtatgggatcatacggaccgagtcataaggatcctgataaaaagatttttggaacaaattttccagttattacaattaatgacatggtgaatgctcaatataatttacttgatcattttggtattgataaactattttctataactggtggttcaatgggaggtatgcaagtccttcagtttattagtaactttcctaataaatctaaaacagtgataccgatagcaaccacatctagtcattcagcacaaaatattgcttttaacgagctaggtagacaagctattacagctgatagtaactggaaagatgggaactatacatcaaacgaaactaatcctggaaaaggattggcagtagctagaatggcagctcatattacttatttatctaaaaaaggtttgcaggaaaaatttggaagaaagttacaagaaagagaagatcttaaatttggatttgatgctgattttcaaatagaaagttatttaagatatcagggctcagttttcgtagatagatttgatgcaaatagttatctttatattactagagctatggattattttgatttagctaagcaattcaatggtaatctttcagaagcatttataaatacaaaagcgaaattttttataatttcatttacttcagattggctttatccaacccaagaaaacaaagatattgtgattgctttaaactcaataggagctgatgttggatttgtagaaattgagtcagataaaggtcacgactcttttttactagacgttcctgatttcttaagtgcacttaaaaattttttagataaatcttacgaagaaaattaa

SEQ ID NO: 234415 - DNA, 1198 bp, Unknown
  Bacterial polypeptide expressing nucleotide sequence isolated from the Sargasso Sea
ctgaattgcgagcgctttaaaaaaaccgctaaaaaagttttttttctcacaattcaaccttcagcttttattatggatataaaacaaaatataaaaacgttgattgttgaaaaaccactcaaattggattgtggtcagactattaataattttcctttagcctatgaaacttatggctcactcaataatgaaaaagataacgcaattttagtatttcatgctttaacaggtgatcaatttgtaacaggtataaatccagtgaccaaaaaggatggttggtggtcttatgcggtgggctctggcaagtcgatagatacagataagtattttgtaatctgtgcaaatgtaataggcgggtgtatgggatcttttgggcctagccatgaaaatcccaagaccaaaaaaatttatggaacggatttcccagtcatcacaattaatgacatggtaaatgcacaaataaatttgttagatttttttggaataaaaaaacttttttcagttgtaggtggttcaatgggtggaatgcaagtactacaatttattagtaattatcctgataaagctaaaacagcaataccaattgcttgtacttcaagccattctgcgcaaaatattgcttttaatgaacttggcagacaagccattgcggcagatcataattggtctgatggagattataattcaaaaaatattgtacccgataaaggattagctgtagctagaatggctgcacatattacttatctctcaaaaaaagggcttcaagaaaaatttggtagaaaacttcaagaaagagatgatttaaaatttggttttgatgctgactttcaaattgaaagttatcttagataccaaggttcggtatttgtagatcggttcgatgcgaatagctatttgtatattactagagcaatggattattttgatttagtaaaacaatttaatggaaatttatctgatgcttttaaaaatacaaaagcgaaattttttataatatcttttacctcagactggctttatccaacactagaaaataaagacattgtaattgccttaaactcagttggtgcaaatgtaggttttgttgaaattgagtctgataaaggccacgactcttttttgcttaatgttcccgatttcttaaaagctctaaaaaattttttagataaatcttatgcagaaaaacatctatgaa

SEQ ID NO: 234416 - DNA, 784 bp, Unknown
  Bacterial polypeptide expressing nucleotide sequence isolated from the Sargasso Sea
aacgaataatccatatggctttgagttcccgattgttacagttcaagattgggtaaatagtcagaaggtcttgatggatgaattcggtatagataaatggcaatttattattggtggaagcttaggtggaatgcaagcattacaatggtctcttgattatccagataatgtcaataatgcaattataatagcagcctcgccgaaattaactgcacagaatatcgccttcaatgaagttgcaagacaagctattactagtgatccagagtggtgtgatggtaattatctgaagcaaggcaagataccaaaaagaggcctagccctcgctaggatgttaggacatattacatatctatcagatgaatcaatggcaaagaaatttggcagagatctcaagcaagataaaattaatttcaacttcgatgtagaatttcaaatagaaagttacttaagataccaaggtgaaaagtttgtaacttcatttgatgcaaatacttatttacttatgactaaagcattagattattttgatcccttcaatgagattgattttgtggagagaatgagcaaatctaggtcaagatttcttgttatttcattcacctctgactggagatttccaccaaaaagatctgaggaaattgtaaagacactgattaagtttaataaagatgtctcttatacctgtataaagtctgatggaggacatgatgcatttcttatgaaaaatgataattattttgaaatcatgagaacttatatcgaggctaatataaatggctag

SEQ ID NO: 234417 - DNA, 880 bp, Unknown
  Bacterial polypeptide expressing nucleotide sequence isolated from the Sargasso Sea
ttttgtgatttgtgcaatgtcattggtggttgtatgggatcatacggaccagtaactattgatccattgactaacaaacctatagcaacaaattttccaattattacaataaacgatatggttaatgctcaatataaacttttggatcactttaaaatagaaaaattatttgcagttgctggtggatcaatgggtggaatgcaagtattacaatttgtatcaaattttccaaacaaggctaaggttgccttgccaattgcttgtacagctagtcactcagcacaaaatattgctttcaatgaacttggaagacaagcaattatgtcagatattaattggaaagacggtctatatgacgggaagacatttaatccagacaaaggtttggctgtagctagaatggcagcacatataacatatttatcaaaaaaaggattacaagaaaaatttggtcgaaatctacaagaaagatctgatttaaaatttggttttgatgctgactttcaaattgagagttatttaagatatcaaggctctgtgtttgtggatagatttgatgcaaatagttacttatatattacaagagcaatggactactttgatttgactaaacaacatggtgggaatctttctaaagcttttaaagatagtaagacaaagtttttcattatttcatttacttcggattggttatatccaacttctgaaaataaagacattgtaatagcactaaatgctataggagctgatgttggttttgtagaaattaaaactgataagggtcatgactcttttttattagatgtgccagattttttaagcactattaaaaactacttaaacactacttatttaaatataaatgaaagaagaatttaaa

SEQ ID NO: 234418 - DNA, 1096 bp, Unknown
  Bacterial polypeptide expressing nucleotide sequence isolated from the Sargasso Sea
ctgatagtaaaaaaacctttaaagttagattgtggaaaaactattaatgaattcccaatagcatatgaaacttatggttcattaaatgaaaaaaaagacaatgctattttagtttttcatgcattaactggagatcaatttgtgactggtttaaatccaataacaaagaaagatggttggtggtcttatgcagttggccccaataaagcaatcgataccaaaaaatactttattatttgtgcaaatgtaattggtggatgcatgggttcttttggaccaagccatgaagaccctaataccggtagtgcttttggtacaaattttccagttataactattaatgatatggttaatgcacaatacaatttgcttgaccattttggtatagataaacttttttcgattgcaggcggctcaatgggtggtatgcaggtacttcaatttattagtaattttcccgataaagctaaaacggttgtcccaattgcatgtacatccagtcactcagcgcaaaatattgcatttaatgaattagggagacaggcaatagctgctgatagtaattggaaagatggaaattactcctctgaagatacaatcccaaataaaggtttagctgttgcaagaatggctgcacatataacttatctttcaaaaaaaggtctccaagaaaaatttggaagaaaactacaagaacgagaagatttgaaatttggttttgatgcagattttcagatagaaagttatttacgatatcaaggctcagtatttgtagataggttcgatgctaatagctatctttatatcacaagagcaatggattattttgatttagcaaaacaatttaagggtaaattatctgatgcatttagagctacaagagcaaagttttttataatatcttttacatctgactggctttatccaactcaagaaaacaaggatattgtaatcgctctaaattctattggtgcaaatgtaggtttcgttgaaatagagtctgataaaggtcacgactcatttttattagatgtcccagactttttacacgcactaaaaaactttttagataaatcctacatagaaaatttatgaa

SEQ ID NO: 234419 - DNA, 976 bp, Unknown
  Bacterial polypeptide expressing nucleotide sequence isolated from the Sargasso Sea
gatcaatttgcttctggaataaatcctataacaaataaagaaggttggtggagttatgctgttggacctaataaagcatttgatactaataaattttttgtaatttgcgcaaatgttataggtggttgtatgggatcttatggaccaggttcaattgatcctaacacaaataaagtttttggaacaaattttcccgtaattactattaatgatatggtaaacgctcaatataatattatagaattttttaatatagaaaaattatttgccgtagctggaggatcaatggggggtatgcaggttttacaattcgtatcaaacttcccaaacaaagctaaagttgctttaccaattgcttgcactgctagccattcagcacaaaatattgcattcaatgagcttggtagacaagcaataatgtctgactcagattggaaagaaggtttatatgaaacgaataaagataacccagataaaggtttagcagttgccagaatggctgcccatatcacatacctatcaaaaaaagggttgcaagaaaaatttggaagaaaacttcaagaaagaactgatttaaaatttagttttgatgcagattttcaaattgaaagttatttaagatatcaaggatctgtttttgtagatagatttgatgccaacagctacctatatattactagggcaatggattattttgatttgactaaaaaatttaatggaaatctttcaaaagcatttgaaaaaactaaaactaaattttttattatttcttttacttctgattggctgtacccaacttcagaaaataaagatattgtaatagcgttaaatgcagtaggagccgatgtaggctttgttgaaataaaaactgataaaggacacgactcttttcttttagatgttcctgattttcttaatactattaaaagttatttaagcacaacatattttaaattaaatgaaaaaggaatttaaa

SEQ ID NO: 234420 - DNA, 899 bp, Unknown
  Bacterial polypeptide expressing nucleotide sequence isolated from the Sargasso Sea
gattggtcctaacaaaccaatagatacagataagctatatgtagtctgtttaaacaatctaggaggatgccatggctcaacaggacccacaagcataaatcctaaaactaaaaaaatatatgggtcagagtttcctatcatgacggtaagtgattgggtaaattcacaaaaagaacttatgacctaccttgatattccttgctggagatttattgtgggaggcagtctaggagggatgcaggcatttcaatggacgattcaaaatcctacgcttgttgaaaactgtgttattattgcagcagctcctaaactaaccgcccagaatatagccttcaatgaagtagcgagacaagctattatgaaggaccctaattggcatgatggaaattacatagaaaagggtgttataccttctcaaggtttagccttagctagaatgcttggtcatataacttacttatcagatgaatcaatgggagagaaatttggaagggatctaaaaaaaacaaaacttaattttaattatgatgtagaatttcaaattgagagttatctaagatatcaaggtgaaaaatttgtaactggatttgatgcaaatacatatttgcttatgactaaatctttagactattttgacccaataaaagattttggtaattctttaaaaaatatttttaagaaagttaactcaaaatatttaattatttcgtttacatcggattggagattcccccctaaaaggtcgagagagttagttaaattattactggataacgacaaaaacgtaagctattctgaaatcaattctgaaggcgggcatgatgcttttcttatggataataaagattattttgatgtaatgagatcttttatagatgaggcaagtgatggcgtttaga

SEQ ID NO: 234421 - DNA, 1135 bp, Unknown
  Bacterial polypeptide expressing nucleotide sequence isolated from the Sargasso Sea
atgaacaatttaaataaaatgaaaagtatactgattgaaaaaactcttaagcttgattgtggcaaagaaatatcaaactttcctttagcttatgagacctatggaaatcttaatgagaagaaagataatgctatattaatttttcatgctctaactggtgaccagtatgcttcgggcatcaacccaattacaaaaaaagagggatggtggaactatgcagttggtccaggtaagtcattcgatactgataaattttttattatctgtgcgaatgttattggtggatgtatgggatcctacggaccaggaactattgaccctttgaccaataaacctataggtacaaattttcctgtcattacaattaacgatatggttaacgctcaatataatctgctagattattttaaaatagaaaaattatttgcagttgctggtggctcaatgggcggaatgcaagttttacaattcgtatcaaactttccaaataaggctagagtagcattaccaattgcttgtacggctagtcattcagctcaaaatattgcttttaatgaacttggaagacaggcaataatgtctgatagtaattggaaagagggattgtatgatgaaaaatcatcaaatcctgataaaggtttagctgtcgctaggatggctgctcatatcacgtatttatcaaaacaaggtttacaagaaaagtttggaagaaatcttcaagaaagatctgatttaaaatttgggtttgatgctgactttcaaattgagagttatttgagatatcaaggttctgtatttgtagatagatttgatgcaaatagttatttgtatattacgagagcaatggattattttgatttaactaaacaatttaatggaaacctttctaaagcatttaaagatacgaaaacaaaattttttattatttcctttacttctgattggttgtacccaacctctgagaataaagatattgttatagcactcaatgcaataggtgccgatgttggttttgttgaaattaaaactgataaaggccatgattcctttttattagatgtgccagattttttaagcactattaaaaattatttaaacacaacttattctaatattaatgaaagaagaatttaaa

SEQ ID NO: 234422 - DNA, 871 bp, Unknown
  Bacterial polypeptide expressing nucleotide sequence isolated from the Sargasso Sea
tatgaatattaaagagaatataaaaacgcttgttattaaaaaaccattgaaacttgattgtggtaaaactattaataattttccactcgcgtatgaaacttatggttcgcttaataaaaataaagataatgcaatccttgtttttcatgcgcttactggtgatcaatttgttacgggtattaatcccgttacaaaaaaagatggttggtggtcttatgcagtgggtcctaacaaatcaatagatacaaataaatattttgttatttgtgcaaatgtaataggtggttgtatgggctcatttggtccaagccacaaaaatcctgatacaaataaaatttacggaactgattttcctgtaattactattaatgacatggtcaacgcacaagtaaatttattagatcattttgagataaaaaaacttttttcagttgttggtggatcgatgggaggaatgcaagttttgcaatttattagtaattatccggataaagctagtacagtagtgccaatcgcatgtacctctaatcattctgctcaaaatattgcttttaatgaattgggtagacaagcgatagcatcagatcataactggtcagacggaaaatatttatctaataatactcttcctgataaagggttatcagtagcgagaatggctgcacatataacctatttgtctaaaaaaggtttacaagaaaaattcggaagaaaacttcaagaaagagatgctcttaaatttgggtttgatgcagattttcaaatagagagttatctaagatatcaaggatcggtttttgtagatcgatttgatgctaatagttatctttatataacaagagcaatggattatttcgatctagttaaacaa

SEQ ID NO: 234423 - DNA, 1198 bp, Unknown
  Bacterial polypeptide expressing nucleotide sequence isolated from the Sargasso Sea
cctgaattgcgagcgctctaaaaaaaccgctaaaaaagttttttttctcacaattcaaatttcagctttaattatgaatataaaacaaaatataaaaacgttgattgttgaaaaaccactcaaattggattgcggtcagactattaataattttcctttagcgtatgaaacttatggctcactcaataatgaaaaagataacgcaattttagtatttcatgctttaacaggtgatcaatttgtaacaggtataaatccagtgaccaaaaaggatggttggtggtcttatgcggtaggctctggcaagtcgatagatacagataaatattttgtaatctgtgcaaatgtaataggcgggtgtatgggatcttttgggcctagccatgaaaatcccaagacaaaaaaaatttatggaacagattttccagtcatcacaattaatgacatggtgaacgcacaaattaatttgttggatttttttggaataaaaaaacttttttcagttgtaggtggttcgatgggtggaatgcaagtcctacaatttattagtaattatcctgataaagccaaaacagcagtaccaattgcttgtacttctagccattctgcacaaaatattgcttttaatgaacttggcagacaagccattgcggcagatcataattggtctaatggagattatgattcaaaaaatattgtaccagataaaggattagctgtagctagaatggctgcacatattacttatctctcaaaaaaaggacttcaagaaaaatttggtagaaaacttcaagaaagagatgatttaaaatttggttttgatgctgactttcaaattgaaagttatcttagataccaaggttcggtatttgtagatcggttcgatgcgaatagctatttatatattactagggcaatggattattttgatttagtaaaacaatttaatggaaatttatctgatgcttttaaaaatactaaagcgaaattttttataatatcttttacctcggattggctttatccaacacaagaaaataaagacattgtaattgctttaaacgcagttggtgcaaatgtaggttttgttgaaattgagtctgataaaggccacgattcttttttgcttaatgttcccgatttcttaaaagctctaaaaaattttttagataaatcttatgcagaagaacattcatga

SEQ ID NO: 234424 - DNA, 1107 bp, Unknown
  Bacterial polypeptide expressing nucleotide sequence isolated from the Sargasso Sea
tatgaatattgagaataatattaaaacattgtttgtaaaaaaacctttaaagttggattgtggaaaaactattgataactttccaatagcatatgaaacctatggttcattaaatgaaaaaaaaaataatgccatactggtttttcatgcattaacaggagatcaatttgtcactgggttaaacccaataacgaaaaaagaaggttggtggtcttatgcggttggacctaataaagcaattgatactaaaaaatattttgttatttgttcaaatgtaataggtggatgcatgggttcatttggaccaagccatactgatcctcatactggcaaagtatttggtacaaatttccctattttaactattaacgatatggtgaatgcccaattaaatttacttgatcattttggaatagataaacttttttctattgctggtggctcaatgggaggtatgcaagttcttcaatttattagtaattttccagataaatctaaaacagtagtaccaattgcatgtacttccagtcactcagctcaaaatatcgcgtttaatgaattaggaagacaagcaatagctgctgacagtaattggaaagatggaacttattcttcgaaaaatacaaatccaaacaaaggtttggctgtagccagaatggcagctcacataacgtacctatcaaaaaaaggtcttcaagaaaaatttgggagaaaacttcaggaaagagaagatgtaaaatttggttttgatgctgattttcaaatagaaagttatttaagataccaaggttcagtatttgtcgatagatttgatgcaaacagctatctctatattacaagagcaatggattattttgatttatcaaaacaattcaatggtaatttgtcaaatgctttcaaagcaacgaaggcaaagttttttataatgtcttttacatctgattggctttacccaactcaagaaaataaggatattgttattgccttaaattctattggtgcagatgtaggctttgtagaaattaaatctgataagggtcacgactcctttttattggatgttccagactttttaagtgcacttaaaaactttttagacaaatctta

SEQ ID NO: 234425 - DNA, 938 bp, Unknown
  Bacterial polypeptide expressing nucleotide sequence isolated from the Sargasso Sea
tatgaatattaaagagaatataaaaacgcttgttattaaaaaaccattgaaacttgattgtggtaaaactattaataattttccactcgcgtatgaaacttatggttcgcttaataaaaataaagataatgcaatccttgtttttcatgcgcttactggtgatcaatttgttacgggtattaatcccgttacaaaaaaagatggttggtggtcttatgcagtgggtcctaacaaatcaatagatacaaataaatattttgttatttgtgcaaatgtaataggtggttgtatgggctcatttggtccaagccataaaaatccagatacaaataaaatttacggaaccgattttcctgtaattactattaatgacatggtcaatgcacaagtaaatttattagatcattttgatataaaaaaacttttttcaattgttggtggatcaatgggaggaatgcaagttttgcaatttattagtaattttccggataaagctagtacagtagtgccgattgcatgtacctctagtcattctgctcaaaatattgcttttaatgagttgggtagacaagcgatagcatcggatcataattggtcagacggaaaatatttatctaataatactcttcctgataaagggttatcagttgcgagaatggctgctcatataacttatttgtctaaaaaaggtttacaagaaaaatttggaagaaaacttcaagaaagagatgctcttaaatttggatttgatgcagattttcaaatagagagttatctaagatatcaaggatccgtttttgtagatcgatttgacgctaatagttacctttatattacaagagcaatggattattttgatctagttaaacaatttgatggtaatttatctaatgcatttaaaaaaactaaggctaagttttttgtaattctttcacctc

SEQ ID NO: 234426 - DNA, 1135 bp, Unknown
  Bacterial polypeptide expressing nucleotide sequence isolated from the Sargasso Sea
atgagcaatttaaataaaatgaaaaatataattattgaggaaactcttaagcttgattgtggcaaagaaatatcgaactttccattagcttatgagacttatggaaatcttaatgagaagaaagataatgctatattaatttttcatgcgttaactggcgaccagtatgcttcgggcatcaatccaattacaaaaaaagagggttggtggaactatgcagttggtccaggtaaatcattcgatactgataaattttttgttatctgtgcaaatgttattggtggatgtatgggatcctacggaccaggaactattgatcctttgaccaataaacctataggtacaaattttcccgtaattacaattaacgatatggttaacgctcaatacaatctattagattacttaaaaatagaaaaattatttgcagttgctggcggctccatgggtggaatgcaagttttacaattcgtatcaaactttccgaataaggctagagtagctttaccaattgcttgtacggctagtcattcagctcaaaatattgcttttaatgaacttggaagacaagcaataatgtctgatagcaattggaaagagggattgtatgatgaaaaatcaacaaatccagataaaggtttggctgttgctaggatggctgctcatatcacgtatttatcaaaacaaggtttacaagaaaagtttggaaggaatcttcaagaaagatctgatttaaaatttggatttgatgctgactttcaaattgagagttatttgagatatcaaggttctgtatttgtagatagattcgatgcaaatagttatttgtatatcactagagcgatggattattttgatttaactaaacaatatggaggaaacctttccaaagcatttaaagataccaaaacaaaatttttcatcatttcctttacttctgattggttatacccaacctctgagaataaagatattgtaatagcgcttaatgcaattggtgctgatgttggttttgtagaaattaaaactgacaaaggccacgattcctttttgttagacgtaccagattttttaagcactattaaaaattatttaaatacaacttattctaatattaatgaaagaagaatttaaa

SEQ ID NO: 234427 - DNA, 1120 bp, Unknown
  Bacterial polypeptide expressing nucleotide sequence isolated from the Sargasso Sea
tatgaatactgagaataatattaaaacactaatagtaaaaaaacctttaaagttggattgtggaaaaactattaatgaattcccaattgcttatgaaacttatggttcattaaatgaaaataaagataatgccattttagtttttcatgctttgactggggatcaatttgttactggtgtaaatccaataaccaaaaaagatggctggtggtcttatgcagttggtcctaacaaggctatagatacaaaaaaatactttgttatttgtgcaaacgtcattggtggatgcatgggttcttttgggccaagttataaagactctcaaactggaaaagcttttggcacaaattttcctataataacaattaacgatatggttaatgcacaatataatttgctagatcattttggaatagataaacttttttctatcgcaggtggctcaatgggaggtatgcaagtacttcaatttattagtaattttcctgataaagctaaaaccgttattccaattgcatgcacttctagtcactctgcacaaaatattgcatttaatgaattaggaagacaagcaatagctgctgacagcaattggaaagaaggaaattattcttcaaacgatacaattccaaataagggcttggctgttgcaagaatggcagcacatataacctatctctcaaaaaaagggctccaagaaaaattcggaagaaaacttcaggaaagagaagatataaaatttggttttgatgcagattttcagatagaaagttatttacgatatcagggttcagtatttgtcgatagatttgatgctaacagctatctttatatcacaagagcaatggactattttgatttagcaaaacaatttaaaggtaatttgtctgatgcttttaaagctacaaaggcaaagttttttataatatcttttacgtctgactggctttatccaacccaagaaaacaaggatattgtgattgccttgaattccattggtgctgatgttggttttgttgaaattgagtctgataaaggtcacgactcgtttttattagatgttccagattttttaagtgcacttaaaaactttttagataaatcttacatagagagttaa

SEQ ID NO: 234428 - DNA, 679 bp, Unknown
  Bacterial polypeptide expressing nucleotide sequence isolated from the Sargasso Sea
tatgcctagaaatttctcattaaaaaaatcacctcttgcccctattcgtgagcctaagttaatgccggtgcaaggtttaaatctctatacattttctgcgcgtctttataataaaaaaagagatgatattgcaatttttgtatttcctaaaaactcgtctgttgcagaagtatttacaaactcatcaataagatcttttactttagattggaatgagaaaattttaaaaaataaaaagattcacgcactttttgttaactctggaaatgccaatacatttacaggtaatcatggaaaacaatcaataagattgattgttaatcaaattaagaaaacatatctgatcaatgacaataatatttttgtagcttcaacaggtgttattggtgagaagtttcctgttgaacaggttttaaaaacaattactaaacctaagatgactaaggaatggatggattctgcaagagcaattatgactacagatacttttccaaaagggatgtcagtaacttcaatgattgaaggaaagaaggttacaatcacaggcatttctaaaggttcaggtatgattaagcccaatatggctacaatgttaggtttcatttttatcgatgcagatttaggatcagaaattttgaaaaaacttttaaaagaaaatatatcttacagttttaattca

SEQ ID NO: 234429 - DNA, 897 bp, Unknown
  Bacterial polypeptide expressing nucleotide sequence isolated from the Sargasso Sea
agtttttacaaagtctgaaacctcaagtgcagcggtaaaatattgtaaaaaaaatttaagcccaaatagagataataatactgtaaaatctattctagttaattctggaaatgctaatgcttttactggtaaaaagggtgagaaaactgtaagtgaaatcataaaatttctaagtgacttgcaaaattgtaatccaaaggaaattttcactgcctcaacaggtgttattggtgaatttttagattcaggaaaaattattaatagtataaaaaaagatatgcctttctcaaaaaactcctggttagaagcttcaaaagcaatcatgacgacagatacatttcataaaatttctagcgcaaaatgtaaaatagaaaatgaagaagttaatattattggtattgcaaaaggatctggaatgattgctccaaatatggcaactatgttagcctttattttcactgatgcaaatatatcatctcaagttcttcaaaaaattttattatatcaaaatgaaagaacttttaactctatttctgtagatagcgatacatctacaagtgatacagttttattagtatctacaaataaaaaaaataataaatttattacttcctataatgatcctaaagtacgtaaatttgaaaataaagtttatgaactcatgttgagtctagcaaagcaaattgttagagatggagaaggggcatcaaaattcatagaattaaatattttaaatgcaaaatcatttaaagctgctaaaaaaataggaatgtcaattgctaactctcctcttgttaaaactgcaattgcaggtgaagacgcaaattggggtaggataattatggccataggaaagtcatatgaaaaaattattcccaacaaaattaaaatttattt

SEQ ID NO: 234430 - DNA, 619 bp, Unknown
  Bacterial polypeptide expressing nucleotide sequence isolated from the Sargasso Sea
atttcttcatcaactttaaaacagatacttaatttaaatattaagactacttttaatgctataacatgcgatggagacactagcacaaatgacatggtttcaatattttctacaggtaaagcaaacaataaagaaataaaaagttttaaagatccaaaattaaagcaattcattaatagtgttcatcaggtcatgcttaacctagctaaaagagttgcgagtgatggagagggagcaacaaaatttgttacaattaaatgcctcaatagtaaaacggagaaggatgcaaaaaatatttgtttctcaatagctaactcaccattagttaaaactgcaatttttgcagaagatccaaattggggaagaatcgcgatggcaattggaaaaagtggagcaactgttaaacatgaaaaactatctatatcaatgggttccaatattattctcaaaaatggcaagttagataaaaattataatgaaaatattttaagtgattatatgaaaaatgaaaaaatagagattactattgatctatccattggaagtaaaaaatttacagcgtatactatggatttatctaaggaatatattgaaattaattctgattacagatcttagg

SEQ ID NO: 234431 - DNA, 753 bp, Unknown
  Bacterial polypeptide expressing nucleotide sequence isolated from the Sargasso Sea
caaagccaaaaattgccatggaagaatgtaagataggcagtgagaaagttaaaatttatggaatttctaaaggttctggcatgatacatcctaatatggcgacaaccttggcttatatttttacagatgcaagcttatctaatgatattttaagtaaattattaaaaaaaaatatatttaacacttttaatgctatttcttgtgatggagatactagtacgaacgatatggtatctatttttgcaactaataaaataaataattcacaagtaaaaaatataaatgaaaataaaattaaaaattttgacagagctttgaataatgttttattaaatttagctaaaagagttgtttcagatggtgagggggcatctaaatttatctctataaatgtttctaaatgtaaaaatgaaatagatgcaaaaaaaatagctttttcaatagcaaattcacctttagtaaaaacagcaattgcaggtggagatccaaactggggaagaattattatggcaattggtaaggctggaccaaaaattaatataaaaaaactttgtataaagttaggaaatttaaagatagtacaagaagggaaactctaccaaaactatagtgaagaggtggcatctaaatatatgaaaaaagaaattatagaaattagcgttgaagtttacacaggaacaaaagattttactgcgtacactatggacttaactaagaaatatatagatattaatgcagactatagaagctaag

SEQ ID NO: 234432 - DNA, 874 bp, Unknown
  Bacterial polypeptide expressing nucleotide sequence isolated from the Sargasso Sea
aagggcgggccacgatgatctcgtggtcatcgccctggccccgggtactcgcacgtcggcgctatttacccagaatgcgtttcgcgccgcccccgtgcggctcgcccagacgcatctcattttggccgaggcactcccgcgttatctgttgattaataccggtaatgccaacgccggcaccggtgaggctggtatccagtcggcaggtgattgttgcgcagtgctggcgcagctgaccgagaccgacgccacggctgtgctgccgttctccaccggtgtcatcggcgaactactgccggttgggcagatcagtgccgctttgcctaccgcgctggatgacctccgcgacacaggttgggagcgtgccgccggtgcgatcctcaccacagatacccgcgccaaactgcggagcactgaggtcgagctggacggccagcgctgcacgattaccggcatcgccaagggggcgggcatgatctgtcccaatatggcgaccatgctggccttcttggccaccgatgccgctattgaagccccgctccttgataagttgctcttggtggcggtagaagcgagcttcaatcgcatcacggtcgatggcgatacctcaactaacgacgcggtcacgctgtctgccactggacagagtggcgtcgagattacagcaggttccgaacacgccgagcactttgcgcgggcgctagcgacgctgatgattgagctggcgcaagatattgtgcgtgacggtgagggcgccagtaagtttgtcgagattcgtgtcatcggaggagaatctgaagcggcttgcgatcaggtggcgcgtaccgtggctcattcccctttggtcaaaaccgctttgtttgcctcggatccc

SEQ ID NO: 234433 - DNA, 967 bp, Unknown
  Bacterial polypeptide expressing nucleotide sequence isolated from the Sargasso Sea
ggtcaagcaaatgcatgtacaggaaatcttggcatccaacattttcaaattgcgacaggaaagattgcggaacttttaggaataaaagaagaagaagttttaatgtgctcaactggtgtaattggtgttccaatacaaataaatgatttagtaaaaaatttaccgagtttagttagtgatttaaagggtaataattttgcaaatgcagcagaagcaattttaactactgatttgactttgaaaaaagtgtcaatagagacgattattcaaagtagaaaaataacaatagcaggatttgcaaaaggttcaggaatgatttaccccaatatggctacaatgcttgcttttctaacctgtgatgtgggtattcaaaaagaagaatgggacaaaatgattgctattgcggttcaaaaatcttttaatgcaatatcagttgatggagagacaagcacaaatgattcttttgttggaataaatgcaggagagaaaattgaaaaaaggttttttccaattatccaacaagggattgatattgtatgtcagaacttggcaaaaaatattgcaagggatggagagggagcaaattgtttattagaagttttggttcaaggagcaaaaaatacagatgatgcaattatgctcgcgaaatctatttgtaattctgccttggtaaaaactgcgatacatggttgtgatccaaattggggacgaatcatttctgctgcaggtaattctggagttaaattcaatttaaatgacgttgacttgtatataggaaacgcccacattttggaaaaaggcaagttaaataaatatgatccacaaaaagtcacagactatattaagtccagaatgaaaggtagatatttggtagatgatattgtaaatattatgattaatttaaattcaggcgaatcgaaaggcacagcttgggggtgcgatctttctaaaaaatatgttgaaataa

SEQ ID NO: 234434 - DNA, 749 bp, Unknown
  Bacterial polypeptide expressing nucleotide sequence isolated from the Sargasso Sea
tccaaaaatagcgatggaagaatgtaaaataggaaatattaatataaaaatttatggtgtagctaagggatcaggaatgatatttcctaacatggcaacaactcttggatatatttttactgatgcaaaaatttcttcaaagatattaaagaagcttttaaagaaaaatatagaaaccacttttaatgcaattagttgcgatggagacactagtacaaatgatatggtaagtatatttgctacaggaacggcaaataatacgattatcaataacattaatgacgatcgaattacaaattttgataaaagtttgcatgaagttttgctaaatttagcaaaaagagttacagcagatggagaaggagcgtctaaatttatttcaatatctgttgtaaatgtaaaaaaagatattgatgccaaaaaaattgccttttctattgcaaactctcctcttgttaaaactgccttcgctggagaagatcctaactggggaagaattataatggcaataggaaagtcacaagtccagattaatttaaataaaattaatatatcaataggtgataataaaattattgaaaaaggcgaactagtaaatgattataacgagagtatattaaaagaaaccatgaaaaatgaaaagattgatctcaagattgatttaaaaatgggatcaaaaaaatttacagcttataccatggacctaactaaaaaatatatcgaaattaattctgattatagaagctgac

SEQ ID NO: 234435 - DNA, 908 bp, Unknown
  Bacterial polypeptide expressing nucleotide sequence isolated from the Sargasso Sea
ccagaaggcagtatttttagtgggatgtttactcaatcaatagttcgagcttcttgtgtggatatttgtgaggaaaggattaaaacaacttcaggttttgtaagagcaatactaattaattctggtcaagcaaatgcatgtacaggaaatcttggcattcaacattttcaaattgctacagggaagattgcggaacttttaggaataaaagaagaagaagttttaatgtgctcaactggtgtaattggtgttccaatacaaataaatgatttagtaaaaaatttaccgaatttagttagtgatttaaaaggtaataattttgaaaatgcagcagaagcaattttaactactgatttgactttgaaaaaagtgtcaatagagacgattattcaaggtagaaaaataaaaatagcaggatttgcaaaaggttctggaatgatttaccccaacatggctacaatgcttgcttttctaacctgtgatgcgggtattcaaaaagaagaatgggataaaatgattgctattgcggttcaaaaatcttttaatgcaatatcagttgatggagagacaagcacaaatgattcttttgttggaataaatgcaggagagaaaattgaaaaaaggttttttccaattatccaacaagggattgatattgtatgtcagaacttggcaaaaaatattgcaagggatggagagggagcaaattgtttattagaagttttggttcaaggagcaaaaaatatagatgatgcaattatgcttgcgaaatctatttgtaattctgccttggtaaaaactgcgatacatggttgtgatccaaattggggacgaatcatttctgccgcaggaaattctggagttagatttaatttaaatgacgttgacttgtatataggaaacgccca

SEQ ID NO: 234436 - DNA, 723 bp, Unknown
  Bacterial polypeptide expressing nucleotide sequence isolated from the Sargasso Sea
aaataggatctgcaaatataaaaatatacggaattgcaaaaggctcaggtatgatttatccaaatatggcaactgcgcttggttttatttttactgatgccagcttatcttcttcaattttgcaaaaagttcttaatgaaagtataaaaaccacatttaatgctatatcttgtgatggagacacaagtactaatgacatggtgtcacttttttcaacaaataaagcaagtaatccaagtataaaaaattataatgatcctaagttaaaaaattttcgtcaatctttgacagatgttttattaaacctggcaaaaagaatcgctgccgatggagaaggcgcttctaaactaatttgtataaaatgtaagaatagcaaaactgaagaagatgcaaaaaatatatgtttctctatagcaaattctcctttagttaagactgcaatttcaggcgaagatcctaattggggtagaattgtaatggccatcggaaaaagcaatgcaaagattaatgaaaaaaaactatcaattgatatagggccttttaaagttttagtaaaaggaaatgtatataaagagtacgatgaaaaaactgtaagcgaatatatgcaaaatgaattattagaaattactgtagatattggtataggaaaaaaatattttactgcatatacaatggatttaacaaaaaaatatatagaaataaatgcagattataggtcttgaa

SEQ ID NO: 234437 - DNA, 811 bp, Unknown
  Bacterial polypeptide expressing nucleotide sequence isolated from the Sargasso Sea
gaaaacataaaatggaatattaaacaaagaccaaaaaagatattttctcttattataaacacaagaaatgctaacgcttttacgggaaaacaaggttacgaaagtttaaaaaaaatagcagatttaactgctaaacaattaaataaaaaacaagaagaagacgaagaaaatcctaaaaaaatttctaccaaaaatataatttttggttgcacaggaactattggagaaatttttccttatgaaaaaatttctaataatattccaaatttaataaataaaattcgttatacacaaaataaatttatttggatgaaagcagcgcttgcaattatgacaacagacacaaagccaaaattagctatggaagagtgtcaaattggaagtgaaaaagtaaagatatatggaatagccaaaggctctggtatgatttatccaaatatggcaactactttagcttatgtatttaccgatgcaactttatcaaatgatattttaggaaagttattaaaaaaaaatataacgaacacatttaatgcaatctcttgtgatggagatacaagcactaacgatatggcaactatctttgcaactaatgaagtaaaaaattatcaagtaaaaagtgtaaatgaaaataaaattaaaaattttgacaaagctcttaataacgttcttttgaatttagccaaaagagttgtttcagacggcgaaggagcatcaaaatttattacgataaatgttagtaaatgcaaaaatgagattgaagctaaaaaaattgctttttcagttgcaaattctcctttagtaaaaactg

SEQ ID NO: 234438 - DNA, 825 bp, Unknown
  Bacterial polypeptide expressing nucleotide sequence isolated from the Sargasso Sea
gatagttagccgtaaccgtttatcaaatgacactcatcgtggaatagtagtaaacagcggatgtgctaattgtagtgttgggtctcaaggtgtattagatgcagaagaaatgatttctttagcaagcaaaaacttagaagtttctcctgacgatttatttgtggctagcacgggaatgataggtgtagagttgcctatggctttgatacgccaaaatattggtaatataaagttagataataattctggctctgactttgcaaaatctatgatgaccacagatacttatcacaaagaaagagcagtatcttttatacatgatggcgagactgttgttattggaggtgcgtcaaaaggagttgggatgatccatcctaacatggcaacgatgttatgttttatttccacagatgcaaatgttgacaaattatttttacaggaagtcttgtcagacgttgtcaatgattctttcaatatgatcgatgttgatggagatcaaagtactaatgattcggttattttgttagctaacggtgcatcagaaacatcgcaaataaataaaggctctgattctgctgatgcatttaaagaagctttatcttatgtttgcgttgaacttgctaaagaattagttaaagacggggaaggggcaaaaactttagtggaggtttctgtcgaaggagccagaactaaagaggatgcacgtaaatcatcaagagcgatagcatcatctattttggttaaagcaatggttcacggcaaagatccaaattggggccgtattgtgatggccttgggtagctctggtatagatatcgaagaaaa

SEQ ID NO: 234439 - DNA, 837 bp, Unknown
  Bacterial polypeptide expressing nucleotide sequence isolated from the Sargasso Sea
tttcaatttagttgataaattaagagagagacaaaataagtttgtttggtttaaagctgcttcatcaattatgacaacagatacaagaccaaaattagcttacgaggaatgcagactatggaataaggatattagaatttgtggaattgcaaaaggttctggtatgatagctcctaatatggctactacactagcatttgtttttacagatgcagatattccatcaatttatttaaaaggccttttaaaaagaactgttggaaattcatttaatgcaattacagttgatagtgatacttctactaacgatatgattggaattttttctacaaataaagttaaaactggtaaaatctataatttattagatccaaaattgagagattttgagaatgctcttaaaagattgttacttaatttagcaaaacaagttgttagcgacggggaaggatcaaaaaaatttattacagtcaaagttattaatgcaagatctcaacagatggcaaaaaatatatctttttcaattgccaattctcccttattcaaaaccgcaatggccggtgaggatcctaattggggtagaattataatggcaataggaaaatctggggaaaaaatttcacctgataagatagaaattaaatttggggatttaaaggtcgctgaaaaaggaaaaatttcagaagaatacgatgaagaaaaactaaaaaaatacatggaatgggaatctttagtagtggaagttaatctaaagcttggtcaaggttcatttgagtgctatacttgtgatttaactaaggagtatgtaaatattaacgcagactatagaaatttatg

SEQ ID NO: 234440 - DNA, 886 bp, Unknown
  Bacterial polypeptide expressing nucleotide sequence isolated from the Sargasso Sea
acaagcgaaacagttaaaattaaagatttaatttttgcttcaactggtgtgatcggggaagagtttccagtagaaaaaattagagatagaataccggacttggtagatagactaagaagtgaacataataaaatgtattggataaaaatggcatcatctattatgacaactgataccaaaccgaaattagcttatgaagaaataattattggcgatgagctaataaaaatctgcgggattgccaaagggtcaggaatgatagctcctaacctagcaactatgctgtcttttatatttacaaatgctgatataaattcgaatttattaaaaactctattgaaaagagctgttgcaaattcatttaatgcaataactgttgatagcgatcaatcaactaatgacatggttacaattttttctacgaggactattaaaattggtcaaaatatttctttgaatgataaggcagtacaaaaatttgaagttgctttaaaaaaactatgtttaaatttggcaaaacaaattgtcgttgatggtgaaggttctaaaaaatttgttacaataaatgtgataaatgctaaatcattaggaagcgcaaaaaatgttgccttctcaatcgccaattcaccgttagttaaaaccgctgtagcgggtgaagatcctaattggggaagaattgctatgggtataggaaaatcaggagagattgttgatcaaaaaaaattaagaattaagattggaaattttatagttgctgaaaatggaaaaatttccgatagttacgatgaaaaaaaacttaaagaatatatgcagtggggctctattgagatagaagttaatttaaaactcggaaatgatgcttttaaatgttatacatgcgatttac

SEQ ID NO: 234441 - DNA, 878 bp, Unknown
  Bacterial polypeptide expressing nucleotide sequence isolated from the Sargasso Sea
gataagcgaacttgtttcaaataaatttaatgtttcaaaaagtaaaatattttttgcatctacgggcattataggagaagaatttcctgagaaaaaaataatagatgcgataagaaaaaataaaattaaaaacaacaattggatggctgcagcaaaggccataatgacaacagatacttttcctaaagctatttcatcaaagactaaggttgatagcaaagtagtaacaattacgggaattgctaaaggatctggaatgatcgagccaaatatggcaaccatgttaggatttatattcattgatttggaaatttctcagaaaattttacaagctttattaagacaacttaatgccaagtcatttaatagaatttctgttgatggcgatgagtctacaaatgatacagttatacttgcaagctcgaataaaattaagcttaaaaacaaaattaattctataaatgataaaagaataaatagcttaaagatctctctagataaagtgtttaactctttatcggaacaaatcgttagagatggtgagggagcaactaaattagtcaaaattaaagtgaaaaaagccaagaatattctgcaggcagagaaaattggaagatctatcgcaaattcaaatttatttaaaactgcaatttacggaaaagatgctaattgggggagaataatcatggcgattggcaaaacatatgaaaaaattaatcaaagcaaattaaagatttactttggtagctacctagtagcaatgaatggaaaagctaatactaaaataaataattccgatattaagaagtacttaggtcaaaaagaggttgaaatacaaagtgatctcgcaataggaaattcacaggctgatatttaac

SEQ ID NO: 234442 - DNA, 848 bp, Unknown
  Bacterial polypeptide expressing nucleotide sequence isolated from the Sargasso Sea
ggaaggatcggtgttcccctacccatgagccgaatcaccgcgggcatccgcgacgccacggacgatgttcttcaggggttcgacggtgctcaagcctttcaggaagccatccttacttcagatacctgcaccaaatcctgttccgcaaagattgacacccccggcggagaaatcacggtgggcggagtggtcaaaggagctggaatgatcgaacccaatatggcaaccatgcttgcgtttctcaccacggatgcgggaggctccccggaacttctgaaaaccattctgaaacaggcgaccgatcaatccttcaacctcatgaccattgatggagacatgagcaccaatgactccgcagtccttctcgccaatcagggtgggggaatcaatttggacaaggaagagccagctgtggtccggaaatttcaacaggcggtcaacgcagtctgtgccgcccttgcccgaaaatgcgtaagcgatggagaaaaagtgaccaagttcgtcaaagtacgtatcctcggtgcacctagcccaaaagatgccgaaaaagtcgcccgttgcatcgcaaactcccttttggtcaaaagttcgtggtacggatccgaccccaattggggtcggttggtggatgccgctggatacgccaagattggcttaattttcgatcagttggatctcttctacgaagaggttccggccttgcttagcggagaacccatcgtgggcaataagagccagtggcaggagattgtggcgaaaaaggaatttaccattactctggatctcaagataaaaaaaggaacagcagaaatttggaccaatgacttgagcgaggaatacgttaattt

SEQ ID NO: 234443 - DNA, 844 bp, Unknown
  Bacterial polypeptide expressing nucleotide sequence isolated from the Sargasso Sea
gtacaggggaaatcttggcattcaacattttcaaattgctacaggaaagattgcggaacttttaggaataaaagtagaagaagttttaatgtgctcaactggtgtaattggtgttccaatacaaataaatgatttagtaaaaaatttaccgaatttagttagtgatttaaaggataataattttgaaaatgcagcagaagcaattttaactactgatttgactttgaaaaaagtgtcaatagagacgattattcaaggtagaaaaataaaaatagcaggatttgcaaaaggttcaggaatgatttaccccaacatggctacaatgcttgcttttctaacctgtgatgcgggtattcaaaaagaagaatgggacaaaatgattgctattgcggttcaaaaatcttttaatgcaatatcagttgatggagagacaagcacaaatgattcttttgttggaataaatgcaggagagaaaattgaaaaaaggttttttccaatcatccaacaagggattgatattgtatgtcagaacttggcaaaaaatattgcaagggatggagagggagcaaattgtttattagaagttttggttcaaggagcaaaaaatacagatgatgcaattatgcttgcgaaatctatttgtaattctgccttggtaaaaactgcgatacatggttgtgatccaaattggggaagaatcatttctgctgcaggtaattctggagttaaatttaatttaaatgacgttgacttgtatataggaaacgcccacattttggaaaaaggccagttaaataaatatgatccacaaaaagtcgcagactatattaagtccagaatgaaa

SEQ ID NO: 234444 - DNA, 745 bp, Unknown
  Bacterial polypeptide expressing nucleotide sequence isolated from the Sargasso Sea
taaaatagcaatggaggaatgtaaaattggtaatactttagtaaaaatttatggaattgcaaaaggctccggaatgattcagcctaatatggcaacaacattaggctatatttttactgatgctgacatatctaatgatgtattaaaaaaattactgaaaaagaatgttgaaaatacatttaatgcaatttcttgtgatggagataccagcacaaatgatatgatttcaattttttctactggaaaagcaagaaattcacttataaaaagtatagccgataaaaaaattaaatcgtttgatgagtcgttaaataaagttttgttaaatctagcaaaaagggtggtagcagatggagaaggttcttcaaaatttataactattaatgtgttaaacgcaaaaactgaaaatgatgcaaagaaaataggtttttcaattgcaaactctcctttagttaaaactgcaattgctggtgaagatccaaactggggaagaataattatggcaattggaaagtcaaatgtagatataaatttgagcaaactatctattaagtttggagagttaattattattaataaggggaaaatttatagtcagtatgatgagactgaagttgagagttatatgaaaagttctgcaatcaatattagtattgatattggaaacggaaaaaaaagttttaccgtttatactatggacttaaccaaagagtatataaatattaatacagattatcgaagctag

SEQ ID NO: 234445 - DNA, 670 bp, Unknown
  Bacterial polypeptide expressing nucleotide sequence isolated from the Sargasso Sea
gatatttcctaatttggcaacaacattaggatttgtatttacagatgcaaatttatcatcatcaattttaaaaaatattcttaaagatactattgaaactacatttaatgcaatttcttgcgacggtgataccagcacaaacgatatggtatcattttttgcaacaaataaagcaaataatcctgaaattaatggccataaagataaaaaattacatgattttaaagagtcagttcatgaagttttattgaacttggctaagagagttgcagcagacggtgagggggcatcaaaatttgtgactatcaattgtcaaaaagcaaaaacaattgctgatgcaaaaaaaatttgtttttcaatttcaaattcacctttggttaaaactgcaatagcgggagaggatccaaattggggaaggattgctatggcgattggaaaaactgagataaaagtcgatattaataaattaactattttttttggacctcataaaatattttcaaaaaacaatttatccaaagattataatgaccaaaaagtcactgattatatgaaaaacgagtctatagaaataactgttgatatagggatgggaaaaaaaaattttacttcgtatactatggatttaactaaagattatattgagattaacgcagattatagatcttaa

SEQ ID NO: 234446 - DNA, 894 bp, Unknown
  Bacterial polypeptide expressing nucleotide sequence isolated from the Sargasso Sea
ttgcatgtacaggaactataggtgaaacgtttccacttaagaaaattaaaaatgcaattcttgatttgattaaaaaaattaaatatacacaaaataaaatgatatggatgaaagcagccatgggaatacttaccaccgacactagacccaagcttgcaatgtcagaatgtaaaattggatctacaattataaagatctatggaattgccaaaggctcaggcatgatatatccaaatatggcaacaacacttggttttgtttttactgatgcaaatttatcttcatctattttacaaaaagctcttaatgaaagcattcaaacaacatttaatgctatttcttgtgatggagacacaagcactaatgatatggtatcacttttttcaaccaatgaatcaagaaacccgattataaaagattttaaagactcaaaattaaaaaattttcgtcaatctttaaaagatgttttgttaagtttggctaaaagagtagcagcagatggagaaggtgcttcaaaatttatttctataacgtgtaaaaatacaaaaacagagcaagatgcaaaaaatgtttgtttttctatagctaactctcctctggttaaaactgcaattgccggtcaagatcccaattggggaagaattgcaatggccataggaaaaagcaatgcagagattgatataaaaaaattgtcaattaatataggcccattcaaagttctagttaaaggaaatttatttcaaggttatgatgaaaaattagtaagagaatatatgcaaagtgaattaatacatattacagtagatataggtataggaaaaaaagattttactgcgtatacaatggatttaacaaaaaaatatatagatattaatgctgattatagatcttgaa

SEQ ID NO: 234447 - DNA, 765 bp, Unknown
  Bacterial polypeptide expressing nucleotide sequence isolated from the Sargasso Sea
aatgactttaaatctgaaaaatttacttaatcccaaagttaaaatgtcaaaaatgggcgaatttcaagaattgcaacctattgaaggcttgcagatatcttcagtgtctgcagatctttatggagatggaagagatgatttgaccttatttttttttgatgagggagctaattttggagcagtatatacaaattccaaaattacttccgccagcattaactggaacatgaaaataaaaagacattttgtaaaggctcttatggttaataccaaaaatgcaaatacatttactggaactaaaggagctcaaggattaaaggaagttgcccaagcattgtcaaaagcccttactttaaaatcatcgcagtccccaaagggtgttaaagaagttataaaaataaccgatctactttttgcatcaactggagttatcggcgaagattttccacatttaaaaattaaaaatagaattccagaactagttaaaaaattaagaacagaacaaaataaatttgtatggttcaaggcggctagcgctataatgacaacggatacaagaccaaaagtggcctacgaagaatgtaaaataggtaataaattagtgaaaatttctggtatagccaagggttcaggtatgattgctcccaacatggcaaccatgttgtcatttatatttacagatgcagatataccgtctgtttttttaaaaggtattttaaaaaaggttacctcaacaacttttaattcgataactgttgatagtga

SEQ ID NO: 234448 - DNA, 775 bp, Unknown
  Bacterial polypeptide expressing nucleotide sequence isolated from the Sargasso Sea
tatgggaataataacaactgatctgaaaccaaaaattgcaatggaagagtgtaaaattggaaatgcaactgtcaaaatatacgggattgcaaaaggatcagggatgatttatccaaatatggccacaacactcgggttcatttttacagatgcaactttatcatcaacaatactaagaaagattttaaagaaaaatattgaaactacttttaacgctatttcttgtgacggtgatactagcactaatgacatggtaacaatattttcaacaaataaaataaagaacactgaaattaaaaatgcaaatgataaaaaactttttgagttcaaaaaaagtcttcataacgttcttttaaacctagcaaaaagagtggcatcagatggagaaggtgcctcaaaatttgttacaataagcactataaatagtaaaaatgaaactcaagcaaaaacaatctctttttcaattgcaaattcgccattagtaaaaacagctattgctggccaggatcctaattggggcagaataattatggcaataggtaaagcaaaaataaaaattgatattaaaaaattatcaataaaatttggtaaccataaaattatcgaaaaaggtgaattaataaataattataatgaggaagaagtatcaaattatatgaagagtgagaaaatagatatagttattgatctaggagtgggatcaaaaaatttcactgtctatacaatggatctaacaaaaaaatatattgagataaattcagattatagatcttaa

SEQ ID NO: 234449 - DNA, 787 bp, Unknown
  Bacterial polypeptide expressing nucleotide sequence isolated from the Sargasso Sea
ttagttttattttattttagagaaggcgcaaattatgcaaatgtttacactcaatctaaattagtctcggaaaatataaaatggaacaaaaaaataagggaaaaaaaaatttttgggattttaataaatacaagaaacgcaaatgccttgactggcaaagatggatataattctcttaaaaaaatttctttaaatttatcaaaatttttaacatcaaaacaaacctcagatgaagacaagccaagagaaattaaaccaaatcaaatattatttgcttgtactgggaccataggagaaaaatttcctgaggataaaatattgagtaacattaatcaattaatagaaaaaataaaatatactcaaaataaactaatttggatcaaagcggcccttggaattatgacaacagatactaaacccaaactatccatggcagagtgcaaaataggaggttctgatgtaaaaatatatggtattgcaaagggatctggaatgatctttccaaatatggcaacaaccttaggatttatttttactgatgccaatatttcttcatcaattttgaaacagatactaaatttaaatattaaaactacatttaatgctattacttgcgatggagatactagcaccaatgatatggtttcaattttttcaacaggcaaagcaaataataaagagataaaaagttttaaagatccaaaattaaagcaattcattaaaagtgttcatcaggttatgttaaacttagcaaaaagaattgcgagtgatggagagggagcaacta

SEQ ID NO: 234450 - DNA, 766 bp, Unknown
  Bacterial polypeptide expressing nucleotide sequence isolated from the Sargasso Sea
atatgacacagacaccagacctaaagttgcttacgaggaatgcaaaataggtaataaattaataaaactttctggtattgcaaaaggatcaggaatgatagctcctaatatggctacgatgttgtcgtttatatttaccgacgcaaatataccttcagtttttttaaaaagtattttaaaaaaagttgtagcaacaacatttaattctataactgtcgatagtgatacctctacaaatgatatggttggtatttttgctaccggaaaagcaaaaaattcaaaaatttacaatgtcctggatcctaaattacaggattttgaaaaagctttgcatagattaactttaaatttagcaaaacaaattgtagtagatggagagggtgctaaaaaatttatatcgataaatgtaattggagcgagatcgtttaacatggcaaaaaatattggattttcaattgcaaactcacctttatttaaaactgccgttgcgggtgaagatcctaactggggaagaattataatggcaataggtaaatctggtgaaaatattataccgactaaaattcaaataaagtttgggaactatttagtaacagagcacgggagagtagcaaaagattataacgaaaccgatttaaaagaatatatgaaatgggattcaataaatattgaagtgaatttaaatttaggcagcgcccaattcactgtctatacttgtgattttacacatgaatatattgatataaacgctgattatagaaattag

SEQ ID NO: 234451 - DNA, 928 bp, Unknown
  Bacterial polypeptide expressing nucleotide sequence isolated from the Sargasso Sea
tatttcaaaaatggtgctaattatgccacagtaaatacgactagcaccataatctcagaatcaatcatctggaacaatagctctcataaaaaatctataaagggtttgttggtaaatacaaaaaatgcaaatacttttacaggaaaacaaggaaaagaaagtttagatattttagcaaaaaatttatcaaggcttttgactttaagagagtcaaaatcagaacagggtacatccgaaacagtaaagatcaaagatctaatatttgcttcaacaggagttataggtgaacaatttccagttgataaaataaaagatgccctacctagtttagtagaaaaacttaaaagtgatcacaataaattattttggttaaaagttgcatcgggaattatgacaacagatactagaccaaaattggcttacgaagaaattataattggagacgagctggttaaaatatgcggtgttgcaaaaggttctggtatgattgctccaaatttagcaacaatgttatcatttatttttactaatgcagatataaattcaaatttattaaaatcgcttttaaaaagagcagttgctaatacttttaatgcaataactgttgatagcgatcaatcaactaacgatatggttgcgatattttcaacaaaagctattaaaataggtcaaaatctttctctgaatgataaaattgttcacaaatttgaattagctttaaaaaagttatgcttaaatcttgcaaaacaaattgtggttgatggtgaaggtgcaaaaaaatttttaacaataaaaataattaatgctaaatcattaagcagtgcaaaaaatattgctttttcaattgcaaactctcctttagtaaaaacagctgtagcgggagaagatcctaattggggaagaatagtaatgggaataggaaaatcag

SEQ ID NO: 234452 - DNA, 673 bp, Unknown
  Bacterial polypeptide expressing nucleotide sequence isolated from the Sargasso Sea
catgattgcacctaatatggctactatgctttcatttataattacagacataaaaatttcttatgctattttacaaaaaattacttctaatttatcaaataagacctttaattctataactgtagatagcgatacatctacatctgatatggttttggtgtcaactacctctagcgccaatatgaagccaatcaaaaagttttcagataatagaataaaacaattttcaaaaactttagaattagtaatgaaagaattagcaatagaaattgtaaaagatggtgagggttcaaataaattaattgaatatcaaattattggagctttaaatgataaaagtgcaaaaaatattgctctttcaatcgcaaattcacctttagttaaaacagcaattgcaggtgaagaccccaattgggggcgaattattatggcaataggaaaatctggtgaaaatattatccaagaaaaaattaaaatatattttggaaaatatttgattaccaataatggaagagttcataaaaaatatgatgaaaaaaaagcaaaagactatatgaaaaatactaacttattagttaaagtagatttaggcataggaaagggtatagcaaatgtttggggatgtgattttacaaaggagtatattgaaataaatgcagattatagatcgtaa

SEQ ID NO: 234453 - DNA, 742 bp, Unknown
  Bacterial polypeptide expressing nucleotide sequence isolated from the Sargasso Sea
atgaaaatcaaccccactccgccgattcccgtccagggatatttatggatgggccggaacatcggaatcaaggatcaaagtctcgatttcggagtattggccgcagttcatccctgtactgccgccgcagtttttacccgaagcaatctcccgggagccccggttatcgtgggacgtgaacatgcagctaagggaacacttcaggcaattgtggtcaactcaaaatgtgccaatgtaggattaggggagcagggattacaggatgccaggaaaatgtgccaatggaccgcagaagcgctcaagatacaacctgagttggtcctgccaggttcaacaggagtgatcggtctgcctttgccgatggataaaattcgtaaaggaaccctttccattgcaacaaacctggataactccccagaggccgtagagtcctttgcaagagccatcatgaccaccgacacccatccaaaatggagaaatgcccgatctggacatgctaggctgctcggagttgccaagggatcaggcatgatcgaaccgaacatggcaacgatgctgagctatttagtaaccgatgttgaaatcgatcactcaaaacttcagaagatgctgaaaagagctgttgattcatcttttaaccgtatcagtatcgatacggacacttccaccagtgatatggttgtgctgatggcaaacggaatggcaggccgggtgaacgaggatgaattgaaaaaaacctaac

SEQ ID NO: 234454 - DNA, 731 bp, Unknown
  Bacterial polypeptide expressing nucleotide sequence isolated from the Sargasso Sea
aaaacaaaatgatgatgaggaaaatccaaaaaaaattaaacctagcgatatattgtttgcttgcacaggaactattggtgaaaaatttcctttaatacaaataagaaattcaataccaaatttaatcaataagataaaatatacacaaaataaattaatttggatgaaagcggcaatgggaattataacaactgatttgaaacctaaaatttcaatgagcgaaactaaaattggatctgcaaatgttaaaatttatggaatagcaaaaggatctggtatgatttatccaaacatggcaacaactcttggttttttatttactgatgcaaatctttcatcatcagtactaaaaaatgttcttaaaaaaaacatacaaaacacatttaattcaatctcttgtgacggagatacaagtaccaatgatatggtttcattattttcaactaattgtgcaaaaaatcctgaaattaaaaatgcaaatgatccaaaactaaaaaattttgatcaagctattaatgaagtacttttaaatttagcaaagcaagttgcatttgatggagaaggtgcatcaaaatttattacagtaaattgtaaaggatgtaagagtgataaggatgcaaaaaatatatccttttcaattgccaattctcttttggttaaaactgcaattgctggcgaagatcccaattggggaagaatagctatggcaataggaaaaagtaatgcaagaa

SEQ ID NO: 234455 - DNA, 869 bp, Unknown
  Bacterial polypeptide expressing nucleotide sequence isolated from the Sargasso Sea
tatggagatctcagcaatttctgcagatttgtatggtacaggaagagatgatctatgtttattttattttaaggatggagcaaattatggagcagtatatacaaacaatacaatatgttcagaatcaattacctggaacagacacatcagaaaaaaaaatattaaagctattatgattaacacaaaaaatgcaaataccttcactggaactcaaggagcagaagctctagatagtttatcaaaaaatcttgcaaaaaatcttactttaagggaagcccaaaaaaagggtggaacaagtcaagtaattaaaccaaatgaaatattatttgcttctacaggtgttattggagagaagttccctactcaacaaataaaaaataatactccccaacttgtcgaaaaattaagagaaaaacaaaataaattcgtgtggttcaaagcagcctcatctataatgactaccgatactagaccaaaacttgcttacgaagagtgtagaatttggaataaagatataagactttctgcaattgcgaagggttcaggaatgatatctccaaatatggcaacaatgttagctttcgtttttacagatgcagaaatcccatcagtatttttaaaaagtttacttaaaagagcaatgacaaatacttttaatgctatcacagtagatagtgatacttctacaaatgatatggttgcaattttttcaagcaataaagtaaaaacaggaaaattttataatgttttagatccaaagcttaaagattttgaaatggcacttcaaagattactccttaatttagcaaaacaaatagttagtgatggagagggagcaaaaaaatttattacagttaaagttgtaaatg

SEQ ID NO: 234456 - DNA, 731 bp, Unknown
  Bacterial polypeptide expressing nucleotide sequence isolated from the Sargasso Sea
aaaaataagatacaagaaagataagatagaaatttttggtatttcaaaaggatctggaatgatttctccaaatatggcgacaatgctagcatatatttttattaatgtacctattgcaaaaaaaattctcgatggaattttaaaaaaatcaaatgagttaagttttaattctatttctgttgatggagatatgtctacaaacgactcagtcttatttttttcactttataacaagtctataaaaaaaattacaagtaaaagagataaaagatttaagattatagaaaaatctataattttattaatgcaagatttagcaaaaaaaatagtcttagacggtgaaggaatttctaaatttatagaaataaacataaaaaattcaaaaacaataaatcaagctagaactattgcaaaagcaatatcaaattcacctttagttaaaactgcaatagcaggatccgatccaaattggggcagaatcatagcttcaataggaagtacaacagaaaaattaaattctaataatattaaattaaaatttggaagatttgttatatgtgataggggtaaggttataaacaaatataacgaatcaaaagttaaaaaatatatgaaaagaaataaaataaaaatagatatagatttaagattaggaaaatattctaaacaattttggactacagatttaaatgaaaattatataagaataaataagggttatagaacataga

SEQ ID NO: 234457 - DNA, 301 bp, Unknown
  Bacterial polypeptide expressing nucleotide sequence isolated from the Sargasso Sea
aattgctaactcaccattagtaaaaacagctatttcaggagaagatccaaattggggaagaatattaatggcagctggaaaagcaggagtagagtttgaaatagatcgagtaaatttatttataggtgattataaaattttggataaaggacaactaaataagaattatgttgaaaaggaggttgcagattatatgaagcaacctaatttagaaattacaattgagattaataacggtaataaaaatttcacctgttatacaatggatctcactcaaaagtacatatcccttaattcagat

SEQ ID NO: 234458 - DNA, 675 bp, Unknown
  Bacterial polypeptide expressing nucleotide sequence isolated from the Sargasso Sea
gaatgatacatccagatatggcaactacattaggatttgtgtttacagatgcaaaaataaaaggaaatattttaaaacaacttttaaaaaaaaatattgaaaatacatttaatgcaattagctgtgatggagataccagtactaacgatatggttagtatatttgctacaggatatgcaaaaaataaagatgtaaattcttataaggataaatctttaaatgattttgataaatctttaaatttagttttaaaaaatttagccaagagcgtagcagctgatggagaaggtgcctctaaatttgtaactattaaagttgaaaaatgtaaaaatgaaaatgatgcaaaaaaaatttgtttttcaatagcaaattctccattggtaaaaacagctattgcaggggaagatccgaattggggaaggattgttatggcaataggaaaagcaaaagtaaaaacaaatcttagcaaattaaatataagtattggtccttttaaaattattgaaaatggtaaaatatctcagaattacaaagaagaagatgtggcagaatacatgggctctttagaaataaacattaatgtacaaattggcacaggaaagaaagattttgaagtttacacaatggatctgaccaaaaaatatattgaaattaatgcagattatagatcataaa

SEQ ID NO: 234459 - DNA, 874 bp, Unknown
  Bacterial polypeptide expressing nucleotide sequence isolated from the Sargasso Sea
ttatctagaatattaacaattaaagagtccaaaaatcaaaagggaacaagcgaaacagttaaaataaaggacttaatatttgcttcaacgggtgttataggcgaagaatttcctgttgagcaaattaaagacagacttacaaatttagttgataaattaagaaaagagcataacaagatgtattggataaaaatggcatccgcaattatgacaaccgatactaagccaaaggtagcctatgaagaggtgattataggagatgagctgattaaaatttctgctattgctaaggggtcgggaatgattgcaccaaatttggctactatgctctcattcattttcacgaacgccgatataaattctaatttacttaagacacttcttaaaagagctgtagctaattctttcaacgcaattacagtggatagcgatcaatccaccaatgatatggtttcaattttttctactagagcagtaaaaattggaccaaacatttcattaaatgataaagcagttcaaaaatttgagatagcgctaaaaaaactatgtttaaatcttgcgaaacaaattgtagttgatggtgaaggagctaaaaagtttgttacagtaaaagtaacgaattcaaaatctttaggcagcgcaaaaaatatagccttttcaattgcaaactcccctttatttaaaactgcaatagcaggtgaagacccaaattggggaagaattgcaatgggaatcggcaaatcgggagaaataattgaccaaaaaaaactaaagataaaaattggaaattttgttgttgcagaaaacggaaaaatttctgaaagttacgatgaacaaaagttgagagaatatatgcaatggggttcaatcgaaa

SEQ ID NO: 234460 - DNA, 779 bp, Unknown
  Bacterial polypeptide expressing nucleotide sequence isolated from the Sargasso Sea
acatttactggtttacagggccaagaaggattggattcaatatcaaaaagtttagctaaaaatttaactttaaaagaggctcaaaaagaggatggaacaactaatgtcgtaaaaaaaaatgaaatattattcgcttcaacaggtgtaattggtgaaaaatttccggctcaacaaattaagggaagtgtaccaaatcttgtagataaattaagggataaacaaaacaagtttgtttggtttaaagcagcctcatcaataatgacaaccgataccagaccaaaattagcttacgaagagtgtagaatttggaataaagatataagactatgtggaatagccaaagggtccggaatgatatctcctaatcttggaaccatgttgtcatttgtatttactgacgcagatattccttcagtatatttaaaaagtttactaaagaaggcagttgcaaattcttttaacgccattacagttgatagtgatacttcaactaatgatatggttgcaatcttttcgacaaataaaattaaaactggaaaaatttataatgttttggatccaaaattaaaagattttgaaaatgctctgcaaagacttctattaaatttagctaaacaaatcgttaatgatggcgaaggtgcaaaaaagtttgtaactgtaaaagttattaacgcaagatcacagcaaatggcaaaaaatatagctttttcaattgctaattctcccctatttaaaactgcaatggctggtgaggatcctaattggggaagaattatcat

SEQ ID NO: 234461 - DNA, 661 bp, Unknown
  Bacterial polypeptide expressing nucleotide sequence isolated from the Sargasso Sea
gatatggcaacaacattgggttttatttttactgatgcaaaattaaatgggggtgttctaaaacaattattgaaaaaaaatattgcaagtacatttaacgcgattagttgtgatggagatacaagtacaaatgatatggttagtatattttcgacaggatatgctaataacaaagttataaaatcctataaagataaaaatctaattcactttgacaaatctctaaataacgtattaaaaaatctagccaaaagtgtagccgcagatggtgaaggagcttcaaaatttgtaatcattaaagtagaaaaatgtaaaaaggaaattgatgcaaaaaaaatttgtttttctattgcaaactctccactcgtaaaaacagctatagcaggtgaagatcctaattggggaagaattattatggcaattggcaaggcaaaaataaaaataaatttaaataaactgaatatatttattggacctcacaggataattgaaaatggaaaaatatctcaaaattatagagaggaagaagttgcagattacatgaagtctttagaaataaaaattaacgtacaaattggaagtggaaataaagattttgaagtttatacaatggacctgacaaaaaaatatattgaaataaactcagattatagatcctaga

SEQ ID NO: 234462 - DNA, 697 bp, Unknown
  Bacterial polypeptide expressing nucleotide sequence isolated from the Sargasso Sea
ctatggaatagcaaaaggttcaggaatgatctatccaaatatggctaccacacttggttatatatttaccgatgctgatttatcaaatgttatcttaaaaaaattattaaaaaaaaatatagagacaacttttaatgcaatttcttgtgatggtgacacaagtacaaacgatatggtaacaatatttgccacgagcaaagttaaacattcaaaaataaataatattaatgatgaaaaattaaaagaatttgatgaggccttatataatgttttattaaatttagctaaaagagttgttgcagacggagaaggggcaacaaaatttattactataaatgttaaaaaaactaaaaatgtaaatgatgcaaaaaaaatatgtttttcgatcgcgaactcacccttagttaaaacagccattgctggcgaggatccaaactggggtagaattttaatggctattggaaaatctaacgtaaatataaatttaaataaaatatctcttaaaattggaaattttaaaattattgaaaaaggacaaatttattcaaagtataatgaaaatgaagtttcagaatatatgaagaatatggatataaatattgaagcagaaattaatacgggaaacaaagattttacatcatacacaatggatttgacaaaaaaatatattgaaattaatacagattataggacttag

SEQ ID NO: 234463 - DNA, 825 bp, Unknown
  Bacterial polypeptide expressing nucleotide sequence isolated from the Sargasso Sea
cgctaactgcttcacaggcaatcaaggctacagaagtcttgaaagaattgccgatattttatctcttaaactatctgaaaagcaaaaagaggatgatgaggagcctaaaaaaattaaatctaaggaaattatctttgggtgtactggtactattggtgaaatttttcctgaagaagaaattaaaaataaaatccctgatttggtgaataacattaaatatactcaaaacaaatatatctggatgaaagcagcacttggcatgatgactacagatacccagccaaaaatggctatggaagaatgttttattagtagtagtaaaataaaaatttttggagttgctaaaggctcaggaatgattcagccaaatatggcaactacattgggatatatttttactgatgcaaacatacaaaatgatattttaaaaaaacttttaaaaaaaaatatatctaacacttttaatgcaattacttgtgatggggatacaagtacaaatgatatggtttcaatattttcgactggaaaaaagaaacattcattaataagaaatataaatgatgaaaaaattgctgattttgacctagcactaaataaagttttacttaatttagcaaaaagagttgtgagtgatggtgagggtgcctccaaatttatcactgttaatgtaaaaaattgtaaattagaaaaagatgcaaaaaaaattgctttttcagttgccaattcttcattagttaaaactgcaatagctggagaagatcctaattggggtcgtatagttatggctattggaaaagctggtatcactattaatttaaataaaat

SEQ ID NO: 234464 - DNA, 755 bp, Unknown
  Bacterial polypeptide expressing nucleotide sequence isolated from the Sargasso Sea
ttttccaaaaggagtgtccgtaacttcaatgattgaaggaaagagaattacaattactggtatttctaaaggttcgggcatgattgaacccaatatggctacaatgctaggttttatatttatcgatgcagattttagatcggaaattttgaacaaactattaaaagaaaatatatctaacagttttaattcaatatctgtagatggtgaagaatcaacaaatgatacagtcattcttgcttctactagagcaataaaatttaaaaaaccaattaaaaatatcaatgataaaagaattattgattttaagaaaaaattaaaaaaagtatttatgaaattatcagagctcattgtaagagatggagaaggcgctactaaattaattgaaattaatgttttaaatgccagaaatgaaaaagacgcaaacacatttggaaagtcaattgcaaattcacctctagtgaagactgctatacacggctcagatcctaattggggaagaattataatggctttaggaaaaacttatataaatataaacactaaaatacttaaggtttattttggtaaatatttagtaataaaaaatggtacagctcactccaaagtggatgataaaataatttctaaatacttgggaaaagacaatattaaaattacggttgatttaggtttgggaattaagtcatctagaatacttacctgtgatttaagtaaacagtacatagatattaatgcatcatataagacatgaa

SEQ ID NO: 234465 - DNA, 655 bp, Unknown
  Bacterial polypeptide expressing nucleotide sequence isolated from the Sargasso Sea
gctactacacttggatatctatttactgatgccgacattcctaacaatattttaaacaaattattaaaaaaaaatatttcttctacttttaatgcaattagttgcgatggggatactagcacgaatgatatggtttcaatattctcaacaggaaaagcaaaacatgcaaaaataaaaaatttaaatgatccaagattaaaagaatttgatgaagcattaaataaagttttattaaatttagccaaaagagttgtgcttgatggtgaaggtgcaacaaaatttattacaataaatattctaaattgtaaaattgagaacgacgcaagaaaacttgcattttcaattgcaaactccccattagtgaaaactgctattgctggtgaagatcctaattggggtagaattattatggcaattggaaaatctttaataaatcttgatttagaaaaactctcaatcaaatttggcaatcaccatattatctcaaatggtaaaatgtcatccctctacaatgagactgaattaaagaattatatgaaaaattctaatattgatattaatgtagatatttcttgtggttcaaaaaactttacagcttatacaatggatttaacaaaaaaatatatagatataaatgcagattatagatcttaat

SEQ ID NO: 234466 - DNA, 619 bp, Unknown
  Bacterial polypeptide expressing nucleotide sequence isolated from the Sargasso Sea
ataaaaaatcatatcctaaaaaaacttttaaaaaaaaacatatctacaacatttaatgctataacatgcgatggagacacaagcactaacgatatggtttcaatattctcaactggaaaagtgaaacattctaaaataaataacataaatgatcaaaaaattatttcttttgatcaagcgctcaataaagttttacttaatctcgcaaaaagagttgttaatgatggtgaaggtgcttcaaaatttataacagtaaatgttcaaaattgtaaatttgataaagatgcaaaaaaaattgctttttcgattgcaaattcatctttagtgaaaacagctatcgcaggagaagatcctaattggggaagagtagtcatggcaattggtaaatcaggtatttcaataaatattgaaaaaatatctatcaagtttggtgagttatcaataatccaaaatggatatttaaattcaaactataacgagtcagatgttgcaagttatatgaaaaataatcatatagaaataaacataaacttatcactcggaacaaagagtttcacttgttacacgatggatttaacaaaaaaatatattgaaataaattcggattatagaagttaaa

SEQ ID NO: 234467 - DNA, 812 bp, Unknown
  Bacterial polypeptide expressing nucleotide sequence isolated from the Sargasso Sea
agcaaacgaaattctttttgcatgcacaggaactataggagaaaattttcctacagaaaaaattcataaaagcatctatgatttaattaaaaaaatcaaatatacacaaaataaatacatatggatgaaagctgccatgggaattttaactactgatttaaaacctaaaattgctatggaagagtgttatattggaaataaattagtaaagatttatggaattgccaaaggatcaggaatgatttatccaaatatggcaactactttaggatttgtttttactgatgcaacaattccatcagctattttaaaacagttattaaaaaataatattcaaaaaacatttaatgcaatatcatgtgatggtgacacaagcactaacgatatggtttctttatttgcaactaataaagtttcaaataaaaaattgaaaaactctaaagataaaaaattaaatgaatttaattccgctttatttaaagttttactaaatctttcaaaaagagttgctgcagatggtgaaggtgcctcaaaatttgttacaataaaagtaaaaaattgcaaaactgaggaagatgcaaaaaaaatttgtttttcaattgcaaattctccattagtaaaaacagcaatagctggtgaagatcctaattggggtagaattataatggcaattggaaaagctaaagtaaatttaaatccaagaaaattagcaattcaaattggaaaaattaaagttatagaaaatggaaaaatatccccagcttacaatgagcaagaggccgcaaattatatgaaagagaaatcaattgact

SEQ ID NO: 234468 - DNA, 787 bp, Unknown
  Bacterial polypeptide expressing nucleotide sequence isolated from the Sargasso Sea
atgaaagcggccatgggtataattacaactgatacaaaaccaaaactagcaatggcagaatgtaaaattggatctgcaaatattaaaatttatggaattgctaaaggatcaggtatgatttatccaaatatggcaacaactcttggatttgtttttactgatgcgagcttatcttcttcaattttacaaaaaattcttaatgaaaatataaaaacaacatttaatgctatatcctgcgatggggatacaagcactaatgatatggtatcacttttttcaactaatgaagccaataatccaattatcaaagattttaaagactccaaattaaaaaattttcgccaaagcttaaaagatgttttattaaatttggccaaaagagttgctggagatggtgaaggtgcctcaaaatttatttctataaaatgtaaaaatgcaaaaacagaagaagatgcaaggaatgtatgcttttcaatagcaaattctcccctagtcaaaactgcaattgcaggcgaagatcctaattggggaagaattgcaatggcaataggaaaaagtaatgcaaatatcgatgtaaaaaaattgtcaattcaaataggaccttttaaagttttagttaaaggaaatctattccatgattatgatgaaaaaatagtatgtgaatatatgcaaaatgaattattagatatttcagtagatatcggcttaggaaaaaaagattttactgcatatacaatggatttaacaaaaaaatatatagaaattaatgcagattatagatcttgaa

SEQ ID NO: 234469 - DNA, 600 bp, Unknown
  Bacterial polypeptide expressing nucleotide sequence isolated from the Sargasso Sea
ttgttaaaaaaaatgttaaaaaaatcacctttagcgccaaaaagcttaagaaatattattcagataaaaggtgtagaattgtatgctcaatctgctcatttgtacaaggagagacggcttgatttagttttatttctttttaaaaataaaactacggtttctgaagtttttacaaagtcctcactaaggtcatgtacacttgactggaacgaaaagaatttaagaaataaagaaatacaggtgttagttgttaattccggcaatgcaaatacttttacaggccaagctggtgctaatgccttgatcaaaataagtaaaattgtttctaataaatttaaagtctcaactaaaaaagtattttttgcttctacgggagttataggagaaaaatttcctgaacagaagataataaatgcattaaaaaaaactaagtccaaatctaagaattggctgcaagcagctcaagcaattatgacaactgacacatttccaaaagcgatttctgtaaaaacaaggattgaaaacaaaacaatcacaatcacaggaattgcgaaagggtctggcatgatagagccaaacatggctacaatgttaggattt

SEQ ID NO: 234470 - DNA, 655 bp, Unknown
  Bacterial polypeptide expressing nucleotide sequence isolated from the Sargasso Sea
ttgaaaagtgtgcctggattttcatggcttgggataaatctaggaattaaggataaaactcctgattttggagtaattgcttctgattgcaaatgctctgctgcaggagtttttactaggaacaacatacaaggcgcaccagtaatcataggccggaaacacatacagaatggtcagctgcaggccatagttgtcaactcaaaaattgccaatgtagctacagggaaacatggaattgaggacgcaaaaaaaatgtgccgctggacagcatccacccttggtattgctccagagcaggtcttaccatcttcaaccggtgtaattggtttacggctacccattgataaaataaagtcaggatgtgaatctattcttgaaaatcttggttccactacagaatatattgaaaattttgcccgtgcaatcatgacaacagatacaaaaccaaaatggggttgtgaatcaattggaaatgcaacattgcttggggttgcaaaaggtgctggaatgattgaacctaatatggcaactatgcttggttattttgttaccgatgcgagtatcgatcacgagttgctacaaaaaatactgggccgagttgtcaataagtccttcaaccgtatctctatcgatactgatacttccaccaagcgat

SEQ ID NO: 234471 - DNA, 934 bp, Unknown
  Bacterial polypeptide expressing nucleotide sequence isolated from the Sargasso Sea
gaagaacttcctaaagaaataaaatctaatgaaatattatttgcatgcacaggaacgataggtgaaaaatttccactagataaaataaaaaatacgattcctaatttaattgaaaatattaaatatacacaaaataaaataatttggatgaaagcagctatgggaataattactacagatacaaagcctaagctagcaatgtcagaatgcaaaattggttctacaaatgtaaaaatctatggaattgccaaaggatctggaatgatttacccaaatatggctactacacttggttttgtttttacagatgctagcctttcttcttcagttttacaaaaaattcttaatgaaagtataaaaacaacatttaatgccatctcttgtgatggggacacaagtactaatgatatggtttcacttttttcaactaatgaagcaaataataaaattataaaagactacaaagattcaaaattaaaaaattttcgccaatctttaaaagatgtcctattaaatttggctaaaagagttgcaggagatggagaaggttcttcaaaatttattactataaaatgtaaaaatgctaaatcagataaagatgcaaaagatatatgtttttccatagctaactctcctctggttaaaactgcaattgcaggtgaagatcctaattggggaagaattgctatggcaataggcaaaagttatgcaagaatagatgtaaaacaattatctattaacataggaccctttaatgttttggtcaaaggaaatttatttcaagattacaacgaaaaattagtaagcgagtatatgcaaagtgaattaatagatatttcagtagatattaatttaggaaataaaaattttactgcttatactatggatttaacaaaaaaatatattgaaataaatgcagattatagatcttgaa

SEQ ID NO: 234472 - DNA, 787 bp, Unknown
  Bacterial polypeptide expressing nucleotide sequence isolated from the Sargasso Sea
gatgaaagctgcattaggtattatgacgacagataccgttcctaaaatgtcaatgacagattgtaaaattggaacctctgatataaaaatatatggtatagctaagggatcaggtatgatttatccaaatatggcaactacacttggttatatttttactgatgctaatatttcatccacaatattaaaaaaattattaaaaaaaaatatcgagacaacttttaatgcaataagtgtagactctgacacaagcacaaatgatatggtatcaatatttgcaacaaagaaagcaagccacattaaaataaaaaatataaatgataaaaatttaaaaaactttgataaagctattaatgtagttttattagaattagcaaaaaaagttgcttttgatggagaaggggcatctaaatttgttcaaattgatgttttgaatactaaaaatgttcaggacgcaaaaaaaattgccttttcaatagcaaactcaccacttgtaaaaacagctattgcaggagaagatcctaattggggaagaattgttatggctattggaaaagcatatgtgaattttaatgtaagtaaattagaaattaaacttggaaaattgaaagtagttgaaaaaggcttaatctcaaaaaattatagagaagatttattaaaagaatatatgaaaaacaaagatataaatattgttgtagaaataaattcaggaaaaaaaagttttacaacatatacaactgacctcacaaagaagtatattgaaattaatgctgattatagaacctag

SEQ ID NO: 234473 - DNA, 916 bp, Unknown
  Bacterial polypeptide expressing nucleotide sequence isolated from the Sargasso Sea
catagttcgcgcttcttgtgtggatctttgtgaagaaaggattaaaacaacttcaggttttgtaagagcaatactaattaattctggtcaagcaaatgcctgtacaggaaatcttggcattcaacattttcaaattgctacaagaaagattgcggaacttttaggaataaaagaagaagaagttttaatgtgctcaactggtgtaattggtgttccaatacaaataaatgatttagtaaaaaatctaccgaatttagttagtgatttaaaggataataattttgaaaatgcagcagaagcaattttaactactgatttaactttgaaaaaagtgtcaatagagacgattattcaaggtagaaaaataaaaatagcaggatttgcaaaaggttcaggaatgatttaccccaacatggctacaatgcttgcttttctaacctgtgatgcgggtattccaaaagaagaatgggacaaaatgattggtattgcggtcaaaaaatcttttaatgcaatatcagttgatggagagacaagcacaaatgattcttttgttggaataaatgcaggagagcaaattgaaaaaaggttttttccaattatccaacaagggattgatattgtatgtcagaacttggcaaaaaatattgcaagggatggagagggagcaaattgtttattagaagttttagttcaaggtgcaaaaaatacagatgatgcaattttgctcgcgaaatctatttgtaattctgccttggtaaaaactgccatacatggttgtgatccgaattggggaagaatcatttctgctgcaggtaattctggggttaaatttaatttaaatgacgttgacttgtatataggaaacactcaaattttggaaaacggcaagttaaatgaatatgatccacaaaaagtc

SEQ ID NO: 234474 - DNA, 774 bp, Unknown
  Bacterial polypeptide expressing nucleotide sequence isolated from the Sargasso Sea
tggtctatcaatttcagtactgagtgcaaatttatataaaaatgatagagatgatttatcaatgttttatttcagagatggtgcaaatcacgcctcattatatacacagtctaaaattgtttctgaaaatattaaatggaacttaaatcaaaaaactaaaaaagtattttctttaattgttaacactagaaatgcaaatgcgtttacaggtaaacaaggatatgaaagtttgaaaaaattagcagatttagtgtcaaaaaatttaacagagaaacaaaaacaagacgaggaaacaccaaaaaaaataaatccaaaagaaattatatttggctgtacaggaacaataggagaagagtttccatttgaaaaaatatctaatcaaatacctaatttaattaataaaattcgttacactcaaaataaatttatctggatgaaagctgctcttggaataatgactactgacactaagccaaaaattgctatggaagagtgcaatataggaagtgagaaagttaaaatttacgggattgctaaaggctctggcatgatacatcccaatatggcaacaactttagcttacatttttacagatgcgagtttatctaatgatattttaagcagactactaaaaaaaaatatcttcaacacttttaatgccatttcttgtgatggggatactagtacaaatgacatgttgactatttttgcaaccaataaaatcaataattcaaaaataaaaagtataaatgaaaataaaataaaaaactttga

SEQ ID NO: 234475 - DNA, 710 bp, Unknown
  Bacterial polypeptide expressing nucleotide sequence isolated from the Sargasso Sea
tgcaggtgtttttacaaaatctactacagcttctgaggctgttaaatggtgtcaaaaaataataaaaaataatgatattagagcaattattgtaaatgctggtaatgctaacgtctttaatggcgaacttggcaaaagcgcaataaataaaattatttcaaaattgtcatcatgtctaaagatatttaaaaatcaaattttaatagctcaaactggggtaattggagaacctcttaaaacccataaaataatagatgcgatatcaaacttaactgataatttaaattctaataattggcaaagtgcagcaaaagcaattatgacaactgacacttatccaaaatattcaagtctacgctataattttgaaggttcaaaaatacatataactggaatagctaagggctctggtatgattgcaccaaatatggcaaccatgttagcatttatttccactgatattaaaatttctaaaccgattttacaaaaacttctggaagatgtaagtgaggaaacttttaattcaatctctgtagatggagatacttcaactagtgatagcgttattctttcagctacaggtatgtcagataataaaattttaaaaaacaaaaaagataaacattatgaaaaattcaaagatgctttattaaaaattagtaaggatttggctctcctaaattgtaagagacggggaaggagcatctaaa

SEQ ID NO: 234476 - DNA, 862 bp, Unknown
  Bacterial polypeptide expressing nucleotide sequence isolated from the Sargasso Sea
tcctttagaaaaaataaaaaattcaattcctaatttagttgacaatattaaatataatcaaaataaattaatatggatgaaagcagcctcaggcatcaaaacgacagataccaagcctaagctagcaatgtcagagtgcaaaataggcaacacaccaataaaggtttatggcattgccaaaggctctggtatgatatttcctaatatggcgacaacattaggatttttatttacagatgcaaatttatcatcatcaattttaaaaaatatacttaaagataatattgaaactacttttaatgcgatttcttgtgatggagataccagcacgaacgacatggtatcaatttttgcaacaaataaagcaaataactatgaaattaaaagccacaaagataaaaaattacatgattttaaagcgtcagttcacgaagttttgttgaacttggctaaaagagttgcagcagatggcgagggggcatcaaaatttgtgactatcaattgtcaaaaagcaaaaacaattgccgatgcaaaaaaaatttgtttttcaatttcaaattcagctttggttaaaaccgcaatagctggagaggatccaaattggggcaggattgccatggcaattggaaaaactgaaataaaaattgatattcaaagattaactattttttttggccctcataaaattttctcaaaaaacgaattatccaaagattatgatgagcaaaaagtaaccgattacatgaaaaatgaatctatagagataactgttgatttagggatgggaaaaaaaaattttacttcatatactatggatttaactaaagattatattgagattaatgcagattatagatcttaa

SEQ ID NO: 234477 - DNA, 580 bp, Unknown
  Bacterial polypeptide expressing nucleotide sequence isolated from the Sargasso Sea
tctggtattttagaacaacttttaaaaaaaaatattgataatacttttaatgcaattacttgcgatggagacacaagcacaaatgatatggtttcaatattttcaacttgtaaaataaacaatcccaaaatacacaacataaatgacaaaaaattaaatgaatttgataaaagtcttaattctgtattattaaatttagcaaagagtgtcgtttctgatggagaaggtgcatcaaaatttatagaaattacttgtgtcaattcaaaatcaaaagatgatgcaaaaaaaatttctttttcaattgcaaattccccattggtaaaaactgctatagcgggagaagatcctaattggggtagattaattatggcaattggaaaagctaatgttagattagatttaaaaaaaatttcaataaaattaggtaatcacaaaataattgataaaggagaaaaatccaattcttataatgaaaaagatttaaaaaaatacatgcaagacgaaaggataaatataataattgatcttggtattggaaaagaaagttttacagcttatacaatggatttaacaaaaaaat

SEQ ID NO: 234478 - DNA, 667 bp, Unknown
  Bacterial polypeptide expressing nucleotide sequence isolated from the Sargasso Sea
atggcaaaattagaaaaggtttcaccgttagctcccgctagctttcctgatattcctgctataaatggggtaaattttgcaacagcgtctgctggtattaaatatcagggtcgaagcgatgtaatgttggcagttttagatcctgggacagaaattgctggtgtttttacatcttcttctactagatcgtttgcggttatagattgtgaggaaaaaatccatctaacagatagctcgtcaggggcagctatagttgtaaattcaggcaatgctaacgcgtttaccggttcgcgaggaaaggtttctgtacaagcaattacaacagcagcagcagaagttttaaatatacctaggtctagggtgttttcctcttcaactggtgtaattggtgaggaattacctcacaatttaatcattgatgcattaggtaaaatggtggttgaaaaaactaagcacgatattcttgaagctgcaaaagcaataatgaccactgacacatatcccaaagggtctgttagaaaggttttaaccgatcaaggcgcaataactattgctgggatcgccaaaggttcagggatgattgctccaaacatggctacaatgttagtgtacctatttacagatgcatctgtaaaaaaagaagtgtgcaatcttatctatccgaaat

SEQ ID NO: 234479 - DNA, 868 bp, Unknown
  Bacterial polypeptide expressing nucleotide sequence isolated from the Sargasso Sea
aggtcttcaacattgtcaaaaacctgtggctaaaaatttaactataaaagaagcccaaaaagaagatggcacaacaaatgttattaaaccaaatgaaattttatttgcttcaaccggtgttattggcgaaaaatttccaacccaaaaaataaaatctagtattccgaatttagttgataagctaagagataaacataataaatttgtttggttcaaggcagcatcatcaattatgacaactgataccagaccaaaacttgcttatgaagaatgtagactgtggaataaggatataagaatctgcggaatagccaaaggctcaggaatgatcgctcctaacttgggaactatgctggcattcatttttacagatgcagatattccatcaatctatttaaaaggtttactaaaaagaacagttaatagttctttcaattcgataacagttgatagcgatacatcaactaatgatatggttgcaattttttctacaggaaaagtaaaaactggaaaaatttacaatctattggatcctaaactcaaggattttgaaaatgcacttcaaagactaatgcttaacctgtcaaaacagattatcatagatggtgagggggcaaaaaaatttgtaacagttaaagttattaacgcaaggtcacagcaaatggcaaagaatatagctttctcaattgctaactcccctctttttaaaactgctatggccggggaagatcctaattgggggagggtagtaatgggcattggtaaatctggtgaaaaaatttcaccagataaaatagaaattaaatttggagatttaaaagtagctgaaaaaggaaaaatatctgaagaatatgatgaaaaaaaatta

SEQ ID NO: 234480 - DNA, 814 bp, Unknown
  Bacterial polypeptide expressing nucleotide sequence isolated from the Sargasso Sea
cagggtttagaaagtttagatgaaatagcaaaaaatttatcaaagacacttactttaagagaatcgcaaagtgaagagggcgtaaatgaagctgtaaaaataaaagatatattatttgcttcaactggtgttattggtgaaaaatttccagctgataaaataaatcaaagagttcaagaacttgtagacaaattaagaccggatcaaaataaacttatttggttaaaaacagcatctgctattatgacaacagatacaaaacctaaactagcttatgaagaatttaccgttggaaataaaatgatcagaatagctggtttagccaaaggttctggtatgattgctcctaatttagccaccatgctttcatttatttttacagatgtcgagatcccttctaatatattaaggatattacttaaaagagttgctcaaaattctttcaatgctattacagttgacaatgatcaatctactaatgatttgatagccattttctctacaaagaaagttaaaattgggcataatagaaatataactgatcccattattcaaaagtttgaatcagctctaaaaaaacttacattaaatttagcaaaacaaatagttgttgatggtgagggagccaaaaaatttataactgttaaaatcataaatgcaaagtcaatcaccagtgcaaaaaaaattggtttttcaatagctaattctccattagtaaaaacagcagttgcaggagaagatccaaactggggaagaattgtaatgggtattggtaagtcgggagaaaaaattgacagtgaaaaattaataatca

SEQ ID NO: 234481 - DNA, 610 bp, Unknown
  Bacterial polypeptide expressing nucleotide sequence isolated from the Sargasso Sea
gtttacttaaagagcttacttaaaaagactgtaggaaatagctttaatgctataactgtagatggagatacttcaactaacgacatggtggcaatttttgcaacaaacaaagtaaagactgggaagatttataatattttagatccaaaactaaaagattttgagtcagcccttcaaaaattgttgcttaatttagcaaaacaaattgtttcagatggagaaggggcaaaaaaatttgtaacagttaaggttattaatgcaagatcacaaaacatggcaaaaaatatcgctttttcaattgcgaactcccctctttttaaaacagctatggccggcgaagatcctaactggggaagaattgttatgggaattggaaagtcaggcgaaaacattactccagaaaaaatagaaataaaaattggagattttaaagtagcagaaaagggaaaagtttctgaagaatataacgaaaaaaaaatcaaggaatatatggcatgggattctatattcattgaggtcaatcttaagttgggacaagcttcattcgagtgttatacgtgtgattttaccaatgattatgttaatataaacacagattatagaaattaaa

SEQ ID NO: 234482 - DNA, 835 bp, Unknown
  Bacterial polypeptide expressing nucleotide sequence isolated from the Sargasso Sea
aggttttgtaagagcaatactaattaattctggtcaagcaaatgcctgtacaggaaatcttggcattcaacattttaaaattgctacaggaaagattgcggaacttttatcaataaaagaagaagaagttttaatgtgctcaactggtgtaattggtgttccaataccaataaatgatttagtaaaaaatttaccgaatttagttagtgctttaaagggtaataattttgaaaatgcagcagaagcaattttaactactgatttgactttgaaaaaagtgtcaatagagacgattattcaaggtagaaaaataaaaatagcaggatttgcaaaaggttcaggaatgatttaccccaatatggctacaatgcttgcttttctaacctgtgatgcgggtattcaaaaagaagaatgggacaaaatgattgctattgcggtgcaaaaatcttttaatgcaatatcagttgatggagagacaagcacaaatgattcttttgttggaataaatacaggagataaaattgaaaaaaggtttttcccaatcatccaacaagggattgatattgtatgtcagaacttggcaaaaaatattgcaagggatggagagggagcaaattgtttattagaagttttggttcaaggagcaaaaaatacagatgatgcaattatgctcgcgaaatctatttgtaattctgctttggtaaaaactgcgatacatggttgtgatccaaattggggacgaatcatttctgctgcaggtaattctgaagttaaatttaatttaaatgacgttgacttgtatataggaaacgcccacatttggaaaaaggccagt

SEQ ID NO: 234483 - DNA, 787 bp, Unknown
  Bacterial polypeptide expressing nucleotide sequence isolated from the Sargasso Sea
aaatgcagcagaagcaattttaactactgatttgactttgaaaaaagtgtcaatagagacgattattcaaggtagaaaaataaaaatagcaggatttgcaaaaggttcaggaatgatttaccccaatatggctacaatgcttgcttttctaacctgtgatgcaggtattcaaaaagaagaatgggacaaaatgattgctattgcggtgcaaaaatcttttaatgcaatatcagttgatggagagacaagcacaaatgattcttttgttggaataaatacaggagataaaattgaaaaaaggtttttcccaatcatccaacaagggattgatattgtatgtcagaacttggcaaaaaatattgcaagggatggagagggagcaaattgtttattagaagttttggttcaaggagcaaaaaatacagatgatgcaattatgctcgcgaaatctatttgtaattctgctttggtaaaaactgcgatacatggttgtgatccaaattggggacgaatcatttctgctgcaggtaattctggagttaaatttaatttaaatgacgttgacttgtatataggaaacgcccacattttggaaaaaggccagttaaataaatatgatccacaaaaagtcacagactatattaagtccagaatgaaaggtagatatttggtagatgatattgtaaaaattatgattaatctaaattctggagaatcgaaaggcacagcttgggggtgcgatctttctaaaaaatatgttgaaataaatagcgaatatacgacctaa

SEQ ID NO: 234484 - DNA, 805 bp, Unknown
  Bacterial polypeptide expressing nucleotide sequence isolated from the Sargasso Sea
aatgatctttctgataagttaacgaaaaagcaaagtgaagatgaggaatatcctaaagatattaaatcaaatgaaatattatttgcttgtacaggaactataggggaaaaatttccaattgataaaattaaaaatgcatttcctaatttaattaaaaatttaaaatatactcaaaacaaattaatttgggtaaaggcggccatgggaataatcacaacagatacaaaacctaaacttgcaatggcagaatgtaaaattggaactaccaatgtaaaaatctatggaattgcaaagggttcaggtatgatatatccaaatatggctacaactctaggatttgttttcactgacgctaatttatcttcgtcaattttaaaaaaaactcttaatgagagtattaaaaatacatttaacgcaatatcttgtgatggagatacaagtacaaatgatatggtttcacttatttcaactaataaagccaataatccaaaaataaataatttcaaagactcgaagctaaaaaattttcgtcaatctttgaatgatgttttgttaaatttggccaagagagttgcttcagatggcgaaggtgcttcgaaatttattaccataaactgcaaaagtagcaaaacagaacaagatgccaaaaatatatgtttttctatagctaattccccgttagttaaaaccgcaattgcaggcgaagaccctaattggggaagaattgcaatggcagttggaaaaagtaatgctaagattgatgaaaaaaaattatctataaacataggttcttttaaagttttag

SEQ ID NO: 234485 - DNA, 727 bp, Unknown
  Bacterial polypeptide expressing nucleotide sequence isolated from the Sargasso Sea
tgtaaaatttggaaataccaatgtaaaaatctatggaattgcaaagggttcgggtatgatatatccaaatatggcaacaactctaggatttgttttcactgacgctcatttatcttcatcaattttaaaaaaaactcttagtgagagtattaaaaaaacatttaacgcaatatcttgtgatggagatacaagtacaaatgatatggtttcacttatttcaacgaataaagctaataatccaaaaataaacgattacaaagacacgaagctaaaaaattttcgtcaatcattaaatgatgtattgttaaatttagctaagagagtagcttcagatggtgaaggtgcttcaaaatttattactataaactgtaaaaatagcaaaacagatcaagatgccaaaaatatatgtttttctatagccaattccccattagttaaaaccgcaatcgcaggagaagaccctaattggggaagaattgcaatggcagtaggaaaaagtaatgctaagattgacgaaaaaaagttatctataaatattggttcttttaaagttttagttaaaggaaatttatatcaagattatgatgaaaaaattgtcagtgaatatatgcaaaatgaattaatagatattaccgtcgatataggtttaggaaataaaagttttacagcatatacaatggatttaactaaaaggtatatagaaattaattctgattatagatcttaa

SEQ ID NO: 234486 - DNA, 825 bp, Unknown
  Bacterial polypeptide expressing nucleotide sequence isolated from the Sargasso Sea
aaagtaggacattttcaagatctagatcatttagatggattgtctatttcaacggtgagctgcggactttatgaaaaaaaaagagatgatttagtttttttttactttagggaaggtgcttcgcacgcttcagtatttacacaatctaaattaatctcagaaaatattaaatggaataaaaaaatcagagaaaaaaaagtttatggaattttaactaatacaaaaaatgctaatgctttaacaggtattgagggttataattctttaaagaaaatatctataaatttatcaaagttattaaatttgaaacaaatttcagatgaagataaaccaaatccaatcaaaccaagtcaattgttatttgcttgtacagggacaataggcgaaaagtttccagaaagtaaaattttaaataatttagaaaatttagtacaaaaaataaaatataatcaaaataaactaatttggattaaagccgcacttggaataatgactacagatactaaaccaaaattatcaatggcggaatgtaagataggaacttcaatagttaaaatttacggaattgcaaaaggatctggaatgatatttccaaatatgggaacaactttagggtttatttttacagatgctaatatttcatctcccctactaaaacaaattttaaatatgaatataaaaactacatttaatgcaattacatgtgatggggatactagtacgaatgatatggtttcaatttttgcaaccggtaaggcaaataatagagaaattaaaagtattaaagatacaaaattaaaacagtttattggttctgtcatcaag

SEQ ID NO: 234487 - DNA, 796 bp, Unknown
  Bacterial polypeptide expressing nucleotide sequence isolated from the Sargasso Sea
tagtttacagaatgctgcagaagctattttaactactgatttagttgacaaaaaaataactatagaaacatttattgaaggtagaaaggtaaagatatctggcttcgcaaaaggatcaggaatgatttatccgaatatggctactatgttagcctttcttacatgtgatgttggtgtagataaagaagaatgggacaagatgatttctattgctgttaaaaagtcttttaatgctatttccgtggatggagagacaagtactaatgatgcctttataggaattaattcaggaaaaaaaattgataagaaatttttatcaaagattcaatcaggaattgatattgtatgccagagtttggcaaaaaatatcgctagagatggagaaggcgcaaattgtttgctagaggttttggttgagggagccaagaataattcagatgcaattaaaatagcgaaatctatatgtaattcttcactggtaaaaactgcaattaatggttgtgatcctaattggggcagaattatttcagctgctggtaattctggaattaattttaaattagatgaccttgatttatatattggagactttcagattttgaaaaagggtaagttaaataaatatgatgccaataaagttgcttattatatgcaaataaaaatgaatggtaaatatttagttgaggatatagtatcgataactcttaatcttaattctggtacagaaaaaggaactgcttggggttgtgatttgtctaaaaagtacgttgaaataaatagcgagtatacgacctaa

SEQ ID NO: 234488 - DNA, 553 bp, Unknown
  Bacterial polypeptide expressing nucleotide sequence isolated from the Sargasso Sea
ttgcgatggagatactagtactaatgacatggtttcaattttttcaacaggtaaagccaataataaagtgataaaaagttttaaagatccaaaattaaaacaattcattaaaagcgttcatcaggttatgcttaacttagcaaaaagggttgcaagtgatggagagggagcaacaaaatttgttaccattaattgccttaattgcaaaacagagaaagatgcaaaaaatatatgtttctcaatagccaactcaccattagttaaaacagcaatctttggagaagatcctaattggggaagaatagccatggcagttggaaagagtgatgcaactattaaacatgaaaaactatctatattaatgggacctaatattatccttagagatggtaaattagataaaaattataatgaaagtattttaagtgagtatatgaaaaatgaaaatatagagataacgattgatctatctattggaaataaaaagtttacagcatataccatggatttatctaaggaatatattgaaattaattcagattatagatcctag

SEQ ID NO: 234489 - DNA, 790 bp, Unknown
  Bacterial polypeptide expressing nucleotide sequence isolated from the Sargasso Sea
tttggttaaagcagcatcttcaattatgactacagacacaagaccaaagctagcttttgaaacatgtaaactctggaataaggatataagactctctgctatcgctaaaggatcaggaatgatttccccaaaccttggtacaatgctttctttcgtttttacagatgcagatattccgtctatttacttaaaaaatctgttaaaaaaagcagtttcaaatacttttaatgcaattactgtagatagtgacacttcaacaaatgacatggtagcaatttttgcaactggaaaagtaaaaacaggaaaaatttataatgtattagatcctaaacttaaagactttgaggcagctcttcaaagattgcttcttaacttagcaaaacagattgtaagcgatggagaaggggcaaaaaaatttgttaccgtcaaaattgttaatgcaaggtctaataatatggcaaaaaatattgctttttcaattgcaaattctccattatttaaaacagcaatggcagcaggtgatcctaattggggaagaattgtaatgggaatcggaaaatctggagaaaaagtttctgctgaaaaaattgatataaagataggcgaatttaaagttgctgaaaagggaaaaatatcaaaagaatatgatgaggaaaaattaaaagaatatatgcagtgggactcaatagtcattgaagtaaatttaaaattaggccaagcttcatacgaatgttatacgtgcgattttaatgaagattacatcaaaataaacgctgattatagaagttag

SEQ ID NO: 234490 - DNA, 798 bp, Unknown
  Bacterial polypeptide expressing nucleotide sequence isolated from the Sargasso Sea
aatatatttggatgaaagcagcaatgggtattttaacgacagatctaaagcccaaactaacaatggaggaatgtaggattggtcaaacaaatataaagatttatggggttgcaaaagggtcaggaatgatacagccaaatcttgcaaccaccttaggtttcatttttactgatgcaaatctttcctcaggtattttaaaaaaaatgttgaaaaaattgatggcgaatacttttaacgcaataagttgcgatggtgatactagtacaaatgatatggtatctatttttgctacttgcgcagctaaaaattcagaagttaaaaatataaatgacaaaaaattaaaggattttgaaagtaaattagagtcagttttattaaatttagctaaaagtgtagtggcagacggtgaaggtgcctcaaaatttgtgactgtaaatgttcaaaattgcaaaaaagaagatgatgctagaaagatcgccttttcaattgcaaactcgagtctggtcaaaacagccatatctggagaagatcctaattggggaagaataattatggccattggtaaggccggtataaaacttaatttaaaaaaactatctgtgttattaggaaatataaatataattgataaaggtgagctcaatgaaaagtataaagaaagtgaggctaaagattatatgcttggtaaaaatattgatatatttgtaaatttaaatattgggaataaaaatttcacaagttacacgatggatttaacaaaaaaatatatcgaaattaatggagattataggtcttgat

SEQ ID NO: 234491 - DNA, 821 bp, Unknown
  Bacterial polypeptide expressing nucleotide sequence isolated from the Sargasso Sea
ggccacaggaggcaacgctcgagctgtgctcattaattcgggtcaggccaacgcctgcacgggtgatttgggcctgattgacagccagcgcgctacccaggcggtggctgatcagctggggctgaacgcagacgaggtgctgatctgctccacaggtgtgattggtgtgccaattccgatggacacgctgctggccggggttgcacccttggttttggccttgagctcaaccccagaagcagcagctgcggcggctgacgcgatactcaccaccgacctgattgataagcaggtggccctggaggccgagttgggtggccgcaccgtgcgcatcggtggcatggccaagggctcgggaatgattcatcccgacatggccacgatgctggggtttttcagctgtgatgcggccgtaccagctgatgtttggcaagcgatggtgcgccgtgcggtgcagcgctcgttcaacagcatcacggtggatggcgataccagcaccaacgacaccgtgctggcctatgccgccggagagccattggctgttgaacaccacaacgcgctcgagcagggattgaccaccgctatgcagcagctggcgcgcgccattgcccgcgatggggaaggggccacgttgctgttggaagtgcaggtgcaaggcgctgctgatgaagcggcagcccaggccattgctcgcacggtgtgtggctcctcgctggtgaagactgccgtgcatggccgcgatccgaactggggccgcattgttgcggctgctggccgcgctggggtgccaatggatcctgatgctgtggctctttggcttg

SEQ ID NO: 234492 - DNA, 760 bp, Unknown
  Bacterial polypeptide expressing nucleotide sequence isolated from the Sargasso Sea
attacttctcaaaaattaacagaaaaacaaaaagaagatgatgaagaaccaaaaaaaattaaatcaaaagaaataatttttggctgtacaggcacaattggagaaaattttccagaagataaaataaaatcaaaaatacctgaactaataaataaattaaaatatacacaaaataaattagtttggatgaaggcagcactaggaataatgaccactgatactcaaccaaagatggcaatggaaaaatgttttattggaaatagtgaaattaaaatatttggagttgccaaaggttccggtatgattcagccaaatatggctactactttaggttatatatttacagatgcagatattaaaaatgatattttaaagaaacttttaaagaaaaatatagcaacaacatttaacgcaattagttgtgatagtgatactagcacaaatgatatggtttctattttttcaacaggaaaaataaaacatcctaaaattaacagtttaaatgatgaaaaactaaaagactttgataatgcattgaataaagttttattaaatttggctaagagagttgtagctgatggagaaggagcatccaaatttattactgttaatgttaaagaatgtaagaatgatattgaagctaaaaaaattgcattttcgatatctaattctcctttagtaaaaacggcaatagctggcgaagatcccaattggggaagaattaaaatggcgataggaaaagcaggtgttcaactaaatt

SEQ ID NO: 234493 - DNA, 859 bp, Unknown
  Bacterial polypeptide expressing nucleotide sequence isolated from the Sargasso Sea
tttcctgttgagccgattaaagaaagactcgcagaacttgttgacaaattaagagaggatcacaacaaaatgtattggttaaaaatagcatcatcaattatgactaccgatacaaagccaaagctagcctatgaagaattaatagttggagatgaattgataagaatttgtggaatagcaaaaggttctggaatgatagcaccaaatttagcaactatgctatcttttatttttactaatgcagacataaattcaaaccttttaaaaacacttttaaagaggtctgtagcaaattcatttaatgcaatatctgttgatagcgaccaatctactaatgatatggtgtctatattttctacaagagctttaaaagttggacaaaatttatctttaaacgataagataattcaaaaatttgagcttgctcttaaaaagctatgtttaaatttagcaaagcaaatagttgttgacggagaaggagcaaagaaatttctaaccgtaaaagttattaatgcaaaatctttgggaagtgcaaaaaatattgcattttcaattgcaaactctcctttagttaaaactgctgtagcaggtgaagacccgaattggggaagaatagtcatgggaataggtaaatcaggtgaaataattgatcctaaaaaattaaagattaaaattggagattttatagttgcagaaaatggaaaaatttcagaaacctacaacgaaaaaaaattaaaagaatatatgcagtgggaatctatagaaattgaaataaatttaaaacttggtaatgatgcgtttaaatgttacacttgtgattttacccatgattacatagatattaactcccgattataga

SEQ ID NO: 234494 - DNA, 748 bp, Unknown
  Bacterial polypeptide expressing nucleotide sequence isolated from the Sargasso Sea
ataaaaaaaaataaggaagatttgttattaattatagtccctaaaaatgcctccatttcaggtgtattgacaaaatctttaagctgcagctctgctgttaatttttgtaaaaacaatttaaaatccaaaaataaaaaagttagagcaatcttagttaattctggaaactctaatgcctttacaggtataaagggagaaaaatgtgtaaggactatattatcttacctttcaaaaaaattgaattgtacggaagaagaaatctatactgcttccactggggtaattggggagtttttggatcctggaataattatcactgcacttaaaaaaaatgaaccttcatctattaactcatggccagaagcagccaaatcaatcatgacaacagatacctttcataaagtattttatgaaacttgttatattaatgaaagtttaataaatatcgttggaattgcaaagggctctggcatgatagccccaaacatggcaactatgttgtcttttatttttactgatgcaaacatatcttctaacgtattacaaaaaatacttgccaacgaaaatgaaaaaacatttaattcaattaccgtagatagtgacacttcaacaagtgatacagttttattaacatctaccaacaccaaaaatcacaaaaagataataaactttaatgacccagatttgaatcaattcaaaaatgctctttttaatttaatgttaaacttagctaaacaaatagtaaccg

SEQ ID NO: 234495 - DNA, 661 bp, Unknown
  Bacterial polypeptide expressing nucleotide sequence isolated from the Sargasso Sea
gattgagcctaatatggcaacaatgcttgcttattttgttacagatgcaagtctcagccaagatttactgaaaaaaatgctggatcgtgttgtaaacaagtccttcaaccgtatttccattgatagcgacacttctacaagcgatacagtaattatccttgccaacggcaaggctggtgaagtagatccagaaacatttgaagaagctttcacaagaattgcagttaagctgggcaaagaaatagctcgtgatggagaaggatcaaaaaaattggtagaactaactgtatctggagctgaatctcaacaaatggctttgcaaattgcaaaatcaatcataaattcacctttagtcaaaactgcaatccatggagcagatccaaactggggacgatttgtaatggccgtaggaaaagtttttcaatacccggttaaactggacgaattatccattcaatttggttgcgaaagcaaaggtttgactttaaatgctcaaaacattgaccatagtaaagtaatcctgaatgaaatttcagagtatctgcaaaaccaagaattacaaatgaaagtaacagtcggaaaagggatgttttctgaaacggtctggggctgcgatctaactaaggagtatattgagataaatgccttttatacaacgtga

SEQ ID NO: 234496 - DNA, 595 bp, Unknown
  Bacterial polypeptide expressing nucleotide sequence isolated from the Sargasso Sea
tttactggaaaacaaggatatgaaagtttaaaaaaattagctgagtcaacctctaaattacttaataaaaaacaagaggaagatgagcaaagtcctaaaaaaatttctcctaaaaatattatatttggatgtacgggtactattggagaaaaatttccatatgaaaaagtttcaaataatattccaaatttaattaaaaaaattcgttatacacaaaataagtttatttggatgaaagcagcacttgcgattatgactacagatactaaaccaaaattagctatggaggaatgtcaaataggaactgaaaaagtaaaaatttatggaatagctaaaggatcaggaatgatatatccaaatatggcaacaaccttagcctatatatttactgatgcaacattatcaaatgatgttttgggaaagttattaaaaaaaaacatcacaaatacattcaatgcaatatcatgtgatggagatactagcactaatgatatggcaactatttttgcaaccaatgaagtaaaaaattctcaagttaaaagtattaatgaaaataaaattaaaaattttgataaatctttaaataatgttcttt

SEQ ID NO: 234497 - DNA, 757 bp, Unknown
  Bacterial polypeptide expressing nucleotide sequence isolated from the Sargasso Sea
tttgactttgaaaaaagttttaatagagacgactattcaagatagaaaaataaaaatagcaggatttgcaaaaggttcaggaatgatttaccccaacatggctacaatgcttgcttttctaacctgtgatgcgggtattcaaaaagaagaatggcaaaaaatgattgctattgcagttaaaaaatcttttaatgcaatatcagttgatggagagacaagcacaaatgattcttttgttggaataaatgcaggagagaaaattgaaaaaaggttttttccaattatccaaaaagggattgatattgtatgtcaaaatttggcaaaaaatattgcaagggatggagagggagcaaattgtttattagaagttatggttcaaggagcaaaaaatacggatgatgcaattatgctcgcgaaatctatttgtaattctgctttggtaaaaactgctatacatggttgtgatcctaattggggaagaatcattgctgctgcaggtaattctggagttaaattcaactttaatgacgttgacttgtacataggaaacgctcagattttgaaaaaaggcaagttcaataaatatgatccacaaaaagtcacagactatattaagtcccgaatgaaaggtagatatttagtagatgatattgtaaaaattatgattaatctaaattctggcgaatcgaaaggcacagcttgggggtgcgatctttctaaaaagtatgttgaaataaatagcgaatatactacttaa

SEQ ID NO: 234498 - DNA, 504 bp, Unknown
  Bacterial polypeptide expressing nucleotide sequence isolated from the Sargasso Sea
tatggcgaccatgctggccttcttggccaccgatgccgctattgaagccccgctccttgatgagttgctcttggtggcggtagaagcgagcttcaatcgcatcacggtcgatggcgatacctcgactaacgacgcggtcacgctgtctgccactggacagagtggcatcgagattacagcaggttccgaatacgccgagcactttgcgcgggcgctagcgacgctgatgattgagctggcgcaagatattgtgcgtgacggtgagggcgccagtaagtttgtcgagattcgtgtcatcggaggagaatctgaagcggcttgcgatcaggtggcgcgtaccgtggctcattcccctttggtcaaaaccgctttgtttgcctcggatcccaactggggccgtattctggcggcgattggtcgcacggggcttgaagatctcaataccgaagcggtgtctatccacctgaacggcgttctggtcgccgagcacggcgctcgcgccgc

SEQ ID NO: 234499 - DNA, 634 bp, Unknown
  Bacterial polypeptide expressing nucleotide sequence isolated from the Sargasso Sea
atgattaatgtaaaagggtttaaattttcaggaataagctgtgggttaaaaaaatctaagaaaaaagatttgggattaatcatctcctcaaatgaatgtatatcacatgcagtattcacaaaaaataaagttatagctgcaccattaattgtttcgaaggaaataattaataaaaataaattaagagcaataattgttaatagtggaaatgcaaatgcttgcactggtgatgagggtataagaaacgttaaatcagtaatcaatcaagctgcaaaagtttcgggcctacctaaaaataatttttttatatcatcaacaggaataattggagaacaattagatgtcaaaaaaatcaatacaaaattatcaaaactttttaaggatgcaaaaccaaataaatcagtagattttgctgaagcaataagaaccactgataaatatataaagattgaatcaacaaagatcaaaattgggaataaaacagggactttattaggaatcgcaaaaggtgcagggatgattcatccaaacatggcaaccatgctttgctatttaattacagatatcaagattaataaatcaacttttaaaaaatttattaattatgcaacaaaaaattcatttaattcaatca

SEQ ID NO: 234500 - DNA, 925 bp, Unknown
  Bacterial polypeptide expressing nucleotide sequence isolated from the Sargasso Sea
aattttatcggaaaatattaaatggaatcttaaaattagagcaaaaaaaattaaaggattactagtaaatactagaaacgcaaatgcatttactggaaaaaaaggatttaagggcttgaaagtaattgcagatgatatttcagagctacttacatttaaacaaaaagaggatgagagtgacccaaaaaaaattaaaccagaggaaatattattctcctgcacaggtacaatcggggagccgtttcctacaacaaaaatcaaatctgctcttccaacgctagttaaaaatatcaaatatactcaaaataaatacatttggatgaaggctgctatggctattttaacaacagatacaaaaccaaaattagcaatggaagaatgttacattgggaaaacacaggtaaaaatatatggaattgcaaaaggatcgggtatgatttttccaaatatggcaactacattagggtttttatttactgatgcagatttgtcttcgagaattttggacaaaattttaaaaaaaaatattgaaaatactttcaacgcaatttcagtggatggagacacaagtactaacgacatggttgtatttttttcaacctgcaaagcaaagaatcaagaaattaattctattcatgataaaaaacttagtaattttaatagctctgtaaatagagtacttctaaatttagcaaaaagaattgcttcagatggtgagggagcatcaaagttcgttgaggtaaaagtatctgcatgtaagtcaaaagaacatgccaaaaaagtaggattttctattgctaattcaccattagtgaaaacagctcttaacggcgaagatccaaattggggcagaataataatggctattggaaaatctgatgtaaaaatcaacttaaataaacttttaataaaaattggagaatat

SEQ ID NO: 234501 - DNA, 787 bp, Unknown
  Bacterial polypeptide expressing nucleotide sequence isolated from the Sargasso Sea
gatgaaagccgctatgggaattataactaccgaccttaaaccaaaaattgctatggaagagtgtaaaataggtagctcaactgtaaaattatatgggatagcaaaaggttcaggaatgatttatccaaatatggcaaccactcttggttttatctttactgatgctactttgtcttccaatgtattaaagaaagttttaaaaaaaaatattgaaactacttttaatgctatttcgtgtgatggagatacaagcacaaatgatatggtagcaatattttccactaacaaagtaaaaaatagtgaaattaaaaatataggtgataaaaagctttcggaattttccaaaagtcttcataatgttcttttgaatttagcaaagagagtggcagctgatggcgaaggggcttcaaaatttatctcaattagtaccattaattgtaaaaatgaaaaacaagctaaaacaatttcattttctgttgcaaactcgccacttgtaaaaactgcaattgcaggcgaggatccaaattggggtaggataataatggcaataggtaaagcaaaaataaaaattgatgtaaaaaaattatctataagatttggtaatcataagattattgaaaagggtgagttaattaataattataatgaagaggaagtttcatcatatatgaaaagtgaaaaaatagacataattattgatgtcggaagtggtttaaaaaattttactgtatatacaatggatttaaccaaaaaatatattgaaataaattctgattatagatcctaa

SEQ ID NO: 234502 - DNA, 851 bp, Unknown
  Bacterial polypeptide expressing nucleotide sequence isolated from the Sargasso Sea
tcttttctattttagagatggagccaactacgcatctgtttttacacaatctaaaactatttcagaaaatataaaatggaacctcaaagttaaatctaaaaaattgtatgcacttttagttaatacaagaaatgctaatgcattaacaggggcagaaggatatcaatcattaaaagagttatctttagaattatctaaatatttaagtgataagcaaaataaagatgaagaaaatccaaaaaaaataaatccatatgaaattatgtttgcatgcactggcactataggtgaaaaatttccttcagataaaatcaaatcatgcatacccaagttaattgaaaaattaaaatatacacaaaataaattgatttggattaaagcagcacttggtattatgacaacagatacaaagccaaaaatttctatgtctgaatgtaaaattggatcaaaattggttaaagtttatggaattgcaaaaggatctggaatgatatatccgaatatggcaacaactcttggttttttgtttacagacgcaaatttatcatcgttaacacttaagcaagttttaaaaaaaaatattgaaaatacttttaatgcaatatcttgtgatggagatactagcacaaatgatatggtatctattttttcaaccaacaaggcaaacaattctataattaaaaattttaatgatccaaaattaaaaaactttaataattcagtcaaagaagttttattaaatttagctaagagagtagtttctgatggagaaggagcatcaaaacttattagtataaattgtaaaaattgtagaactgaaaatgatgctaaaaaaattctttctctgtagc

SEQ ID NO: 234503 - DNA, 604 bp, Unknown
  Bacterial polypeptide expressing nucleotide sequence isolated from the Sargasso Sea
atgaaaaccaatcccacgccaccgattcccgtgcagggttttttatggatgggccggaacatcggaatcaaggatcaaagtctcgatttcggagtattggccgcgtctcatccctgcagtgccgccgcagtgtttacccgaagcaatctcccgggagccccggttatcgtaggacgtgaacatgcagctaaggggacacttcaggcaatcgtggtcaactcgaaatgtgccaatgttggattgggtgagcagggattgcaggacgccaggaaaatgtgccagtggaccgcagaagcactcaaaatacaacttgagttggtcctcccagcttcaacaggagtgatcggtctgcctttgccgatggataaaattcgtgaaggaaccctttccattgcgacaaacctggacaactccgcagaggccgtagagtcctttgcaagagccatcatgaccaccgacacccatccaaaatggagaaattcccgatctggacatgcaagtctgctcggagtggctaaaggatcaggcatgatcgaaccgaacatggcaacgatgctgagctatttagtgaccgatgctgaaatcgatcattcaaaacttcaag

SEQ ID NO: 234504 - DNA, 796 bp, Unknown
  Bacterial polypeptide expressing nucleotide sequence isolated from the Sargasso Sea
actaaaaaaagctgatataaatcaattagattgtttatcccagtcgattatgacaacagatactcaccctaaaaaaatatctagaactttagttttagacggagaagaaataaaaatagttggtattgctaagggtgcaggaatgattgagcctaatatggctaccatgttagcttttattttaacagatgctaaaattaattctataaatttacaaacagctttaaaggatgctgtagatcatagttttaatcgaataacaattgatggtgatcaaagtacaaatgactcagtacttattttagcaaatggagcagcaaatcaagaagagttaacttcgtcttcagaggattggtcagtatttacgaaagctttacatgaaatatgttttgaattagctatgatgattgtacatgacggagaaggtgctgatagatttgttactttacatgtaacaggtgcagtatctaatcaagaagctgacgcggctgctcgatcagttgccaattcattattaaataagactgcatgggctggtagttatcctgattggggaaggattatggacgcgattgggtattcgtcagcaaagataattgaagaaaatacaaatattttttatggagatgttcaagctgcaaaaaatggttgccaatccgcggtagatcataaagatttagtatcagcagtttctgcaaaagagttattaataaatgttgatttaggtttaggtaaaggaagtgcggtaatttatacatgtaattgtacagaaagatacgttcgaattaattattaa

SEQ ID NO: 234505 - DNA, 852 bp, Unknown
  Bacterial polypeptide expressing nucleotide sequence isolated from the Sargasso Sea
tccaaaagaaattaattataacgaaatattatttggaagcacaggaactataggagaaaagttccctcttagtaatattaaaaattcaatcccaaatttaataaaaaatataaagtatacacaaaacaaactaatttggatgaaagcagctatgggaataattactactgacaccaaaccaaaacttgcaatgtcagaatgtaaaattggatcaaataatataaaaatatatggaatagctaaaggctcaggtatgatttatccaaatatggcaacaacacttggctttgtttttacagatgcaaatttatcttcttcaattttacaaaaaattcttaatgaaagtattaaaacgacatttaatgctatttcttgtgatggagacactagcacaaatgatatggtttctattttttcaactagtaaagcaaataatccaattataaaagattttcgagattcaaagttaaaagattttcgtcaatctttaacagatgttttgctgaatttagcaaaaaggattgctgcagatggtgaaggtgctagtaaatttattagtataaaatgtcaaaatactaaaacagaagaagatgcaaaaaaaatatgtttttcaatagctaactcccctttagttaaaactgcaattgcaggtgaagacccaaactggggaagaattgcaatggcaataggaaaaagtaacgtaacaattagtgaaaaaaaattatctattaatataggcccttttaaagttttagttaaagggaatttgcataaagattatgatgaaaaaatagtgagtgaatacatgcaaaatgaattaatagatattattgtagacataggtttaggaaa

SEQ ID NO: 234506 - DNA, 693 bp, Unknown
  Bacterial polypeptide expressing nucleotide sequence isolated from the Sargasso Sea
tatattggtaagagtaacattaaaatatatggaattgcaaaaggttctggaatgatacagccaaatatggcgaccacacttggttttatttttacagatgcagatatttcaaacgaaatattaaaaaaacttcttaaaaaaaatatagccacaactttcaatgcgatcacttgtgatggtgatacaagtacaaacgatatggttaccatattctcaactggaaaaataaaacactccagaatcaaaaatattaatgatgtaaagattgctgaattcgataaagctttaaataaaattttattaaatttagcaaaaagagtagtttctgatggggaaggagcttcaaaatttgttactataaacgtaattaaaagtaaaaatgaagtagatgcaaaaaaaattgctttttcaatcgccaactcaccattagtaaaaactgcaattacaggtgaggatcctaattggggaagaataattatggcaattggaaaatctggtgtgccaattaatttaaaaaagttatctattaaatttggaaatacaaatattattcagaatggaaaaatgaatgttaactataatgaaaaagatgtctctagttatatgaaaagtgacaatattgatatttatatagacatttcaaatggttcaaaaaaatttacagcatacacaatggattttacaaaaaaatat

SEQ ID NO: 234507 - DNA, 573 bp, Unknown
  Bacterial polypeptide expressing nucleotide sequence isolated from the Sargasso Sea
aactttatctaatgatgttttaggaaagctattaaaaaaaaatataaccaatacatttaatgctatttcttgtgatggagataccagcaccaatgatatggcaactatctttgcaactaatgaagttaaaaattctcaagtaaaaagtgtgaatgaaaataaaattaaaaattttgataaagcattaaataatgttcttttgaatttggccaaaagaattgtttcagatggtgaaggtgcatctaaattcataacaataaatgttagcaaatgtaaaaatgagatagatgcaaaaaaaattgctttatctgttgcaaattctccactagtgaaaaccgcaatttctggagaagatccaaattggggccgagttataatggcaatcggtaaagctgggcctaaaattaatttaaaaaagttatccgttaagtttggaaatatagcaattgtagaaggtggaaaattaaatcaaagttatgatgaaaaacaaacagcaaattatatgaaatctgaaaatatagaaataaacattgaaacttttacagggaataaaaactttacagcttataccat

SEQ ID NO: 234508 - DNA, 778 bp, Unknown
  Bacterial polypeptide expressing nucleotide sequence isolated from the Sargasso Sea
gcttccaaagcaatcatgacaacagataaatttaacaaaattatttctcaaaaaattacagtttcgggcaagaaggtaacagtaaacgcaatttgtaaaggagctgggatgattgagccaaatatggctaccatgctttcttttgtatctattgatttaaatatttcaagaaaaaatctaaaccaaattttaaagaaaattgttaataagacatttaatagaatatctgtagatggtgatatgtcaacgaatgacagtgtagcgcttattgctactggaggaaatcctaatatcaagactgatagttttataaatatgaaagaaatagaatgtaagcttgaaaaaatatttaatcacctctcggaaatgattgtaatggatggagagggagctacaaaattaattacaataaatatattaaaatcaaagacagaatcaattgccaaaaaaatatcatatgcaattgcaaattcaaatttatttaaaaccgcaatgcatggttctgatccaaattggggtagaattattgctaaacttggctctattgagggtattaattttactccctccaaagtaaagttattcattaatgatattttactttttgataacgagactaatgctaaaagagtcaaccataaaaaacttaaaactagtatgaaaaataaaaaaattaaaattgatctattccttaataatggaagacaatcatatacgatcaaaacatctgatttatctaaacaatatattcatttaaattcagcttatcctacttaat

SEQ ID NO: 234509 - DNA, 812 bp, Unknown
  Bacterial polypeptide expressing nucleotide sequence isolated from the Sargasso Sea
catgagtagtacaggtgtcataggagtagaaatcccagttggattaataattaattcaatagaaaaatttaatttagacattcatggaggtgaaaaattttcaagagctataattaccactgattcaaaaactaagaatatttcaattgaagtaaaatcaaaaaaaggaacttataagattggtggggtggcgaaaggaagcggaatgattcatccaaaaatgggaacgatgttaagttacataactactgatgcggtaatatcatcaagtaacttaacaaatattcttagaaactctgtaaaaaattcttttaaccaagttgatgtagatggagatacgagtacaaatgatacggttgtaataatgtccaatggtttatctggggcaattataaacactaaagaagatattgatgaattccaagaggctttaaattatgtaacgaagcatttagcacgtttaatagcagaggacggagagggtataagtcacctaattacagttacagttacgggtgcaaaagatgaaaaagatgctcttgaagtttctaatacagtagtttcatcctctttagttaagactgcaatttttggcaaagatccaaattgggggagaataatgatggcaatcggtaatgctaatgcagaaataattagagacaaggtaaaaatttatgttaatggtattcaaattgccgaagatggaaaatcaatttcatttcattatcaatccgttttatctgctttagataaattccaaattgatattgaaatagatttaggcattggcgatggtaaaggtattgcatggg

SEQ ID NO: 234510 - DNA, 936 bp, Unknown
  Bacterial polypeptide expressing nucleotide sequence isolated from the Sargasso Sea
tctacggtgagtgcaaatctttataatgctaaaagggatgatttagtcatgttctatttcagagatggggcaaattttgcatccgtttatacaaaatctaaaattatatctgaaaatataaagtggaaccttaatcaaaaagcaaaaaagatattttctttaattgtgaataccagaaatgcgaatgcttttactggtgaccaaggctacaaaagtatgcaaaatattgctgaggtaatatcattagaattaactaataaacaaaaacaggatgaaagtgatcctaaaataattaaaccaaaaaatattttatttggttctacaggaactataggagaaatttttccatttcaaaaaataatttccaaaattccagaactaataaaaaatattaaatatacgcaaaataaacttatttggatgaaggcagctcttggaattatgaccacagacactcagcccaaaatggctatggaggaatgctatataggaaaaactaagattaaaatttatggaatagcaaaaggttcaggcatgatacatccaaatatggcaacaacacttggatacgtttttacagatgcagatctttcaaatgatatccttaaaaaacttttaaataaaaatattgaaacaacatttaatgcaattagctgtgatggagatactagtacaaatgatatggtttcaattttttcgaccagtaaagcaaaacatataaagataagtagtatgaaagataaacaactaaaagattttgatcaatcacttaataaagttttattgaatttagctaaaagagtagtcgccgatggagaagggtcatcaaaatttattactatcaatattaatgatgcaaaatcagatgccgatgccaaaaaaattgctttttccataggaaattctccattagtgaaaacagcaattgctggtgaa

SEQ ID NO: 234511 - DNA, 829 bp, Unknown
  Bacterial polypeptide expressing nucleotide sequence isolated from the Sargasso Sea
tatgtatattctgcaggcttgtacaataagaaacgactggatttagctttgtttcttttcaaaaataaaacttcagttgctgaagtttttacaaagtcctcattaagatcatgcacactggactggaacgaaaaaaatttaaaaaataaagaaatagaagcattgattgttaattcaggaaatgcaaacacttttacaggccaggcaggtattaatgcgttaacgaaaataagtaactttgtttctaataaattcaaagtctcagttaagaaggtattttttgcatctacaggtgttattggagaaaaatttcctgaaaacaaaatagtaaatacattaaaaaaagataaatcaaaaactaataattggttacaagcagctgaatcaattatgacaactgatacttttccaaaagcaatttctattgaaacaatgattgaaaacaaaacaatcacaatcacagggattgcaaaagggtctggaatgatagagccaaacatggcaacaatgttgggatttatttttatagattgtttaatacctcaaaatattttacagaaattattaaaagatcttgtagataagtcattcaatcaaataactgttgatggagatgaatctacaaatgatactgtaattatgactagcactaatagtgtttcattaaaaaataagatttcatcaataaaagataagagaatatcaaaaataaaaaactctttgcttcctgtcgttaaatatttagctgaacaaattgtacgagatggtgaaggtgcaacaaaattaataaacataaaagttgaaagtgccaaaaatcaccgcaagcaaa

SEQ ID NO: 234512 - DNA, 843 bp, Unknown
  Bacterial polypeptide expressing nucleotide sequence isolated from the Sargasso Sea
aatttccattagaaaaaattaaaacttccttaacacagttagttgagaaaataaaatatacacaaaataaattaatctggatgaaagctgcaatgggcataatcacaacagatttaaaacccaaagtagcaatggccgaagcaaaaattggctcatcaacaattaaaatttatggagtcgcaaaaggctcaggtatgatttatccaaatatggcaactacattaggttatatatttactgatgcaactttatcctcatcagttttaaatgatgtcttaaaaaacaacataaagacaacattcaatgcaatttcatgtgatggtgacacaagtacaaatgatatggtttctatattttctacaagtaaagtaagtcatccagaaattaaaaaatatagcgatagtagacttaaaaattttaataaggcagttcatgaagttttattaaatttagccaagcaagttgtttctgatggagaaggagcttctaaatttatttcaattaactgtattaattgcaaaacagaaaaagatgcaaaaaatatatcttttaaaatagcaaactcattattagttaagtcagcaattgcgggagaagatccaaattggggaagagtagctatggcaattggaaaaagtaacactaaaattaatgaacaaaaattatctatttcttttggaccttataaaatttatcataagggatctttatacaaatcttatgatgaaaaaaaagttatggaatatatgaaaggccaatcaattgaaatagaggttgatattggtcagggaattaaaaaatttaaatcgttcactatggatttaacaaaaaaaatatattgaa

SEQ ID NO: 234513 - DNA, 658 bp, Unknown
  Bacterial polypeptide expressing nucleotide sequence isolated from the Sargasso Sea
catggctactatgctttcatttattttcaccgatgcaaatataccttcggtatttttaaaagccattttgaaaaaaaatgttgcgactactttcaactctataactgtcgatggtgatacatcaacgaatgatatggttgcaatttttgctacaagcaaagcgcaaaatccaaaaatatataatattttagaccctaaacttgtagagtttgaaaaagctttgcatagactaactttaaatttagctaaacaaattgtggtagatggagaaggagcaaaaaaatttattactattaaagtcattaatgctagatcaaccaatatggcgaaaaatattggtttttctattgcaaattcacctttgtttaaaacagctatagctggagaagatcccaactggggaagaattgttatggctgttggtaaagcaggtgaaaatattacagctaacaaattacaaataaaaattggaaattatcttattgtagatcagaacaaaagggcacctgactacgacgagcaacaaataaaagattacatgaaatgggattcaattgagattgaggtaaatctaaatattggaaacggttctttcactgtttatacatgtgattttacacacgattatatagatataaatgcagattatagaagttaa

SEQ ID NO: 234514 - DNA, 641 bp, Unknown
  Bacterial polypeptide expressing nucleotide sequence isolated from the Sargasso Sea
ttatgtgttcaccgacgcgattattgataaagatactttagataagatcacagctagactggtcaacggatcatttaaccgcattacgattgacggtgatacttcgactaatgacgctgcaatgttggcggcaactggtaagtcagaaatttcgatctctaacttggaaactacggagcaggaaaaatatttttcatgtcttcagtatgtctttgagcgattggctattgagttagtcaaagacgcagaaggggcaactaaattcataacgattaatataagtgagggcaaagacgaacaagaatgcttaaaggttgcttactgcgtggctgagtctctcttagtcaaaactgcattatttgcctctgatccaaattggggtaggattctagcggttattggcagagctggattagagagtttagaaatctataaggttgatattgatgtaggtaatgttcggatcgtgtccggaggaaaaattgctgattcttatactgaggaagatggtcaagctgtaatgaagcacgaagaaatatgtattaccataaacttaggtcgaggtaatgccaaagaaactgtctggacgtctgacctttctcatgattatgtccgaatcaatgccgactaccgcacatgag

SEQ ID NO: 234515 - DNA, 592 bp, Unknown
  Bacterial polypeptide expressing nucleotide sequence isolated from the Sargasso Sea
attgaaaaaaaatataactaacacatttaatgcaatttcttgtgatggggatacaagcaccaacgatatggcaactatttttgcaactaatgaagtaaaaaattctcaagtaaaaagcgtgaatgaaaataaaattcaaaattttgataaagctttaaacaatgtccttttaaatttagcaaaaagagttgttgcagatggggaaggagcatcaaaatttattacaataaatgttagtaaatgtaaaaacgagatagatgcaaaaaaaattgctttttcagttgcaaattcgcctttggtaaaaactgcgatagctggacaagacccaaattggggaagagttattatggcagttggtaaagctggaaccaaaattaatttgaaaaaactaactattaaatttggaaatataataattgtagaaggtggtaaattaagtcaaagttatgatgaaaaactgacatcaaattatatgaaaaccgaaaatatagaaataaatatcgaaatttttacaggaaagaaaaattttactgctttcacgatggatttaacgaaaaaatatgttgaaattaattcagattatagaagttaa

SEQ ID NO: 234516 - DNA, 787 bp, Unknown
  Bacterial polypeptide expressing nucleotide sequence isolated from the Sargasso Sea
atgaaagcagcaatgggaataataacaactgatataaagccaaaaattgctatggaagagtgtaaaattggaaactcttctgtaaaaatttatgggattgctaaaggttcaggaatgatttatccaaatctggcaactacccttggttttatttttaccgatgcgactttgtcttcaaatgtactaaaaaagattttaaaaaaaaatattgaaactactttcaatgctatttcttgcgatggagatacaagtactaacgacatggttacaatattttcaacaaataaggtaaaaaactctgaaatcaaaaatgttggagataaaaaacttttggaatttagcaaaagtcttcataatgttcttttgaatttggcaaagagagtagctgcagatggtgaaggtgcttcaaaatttgtaactataagcacaatcaacagtaaaaatgaaaatcaggctaaaacaatttgtttttctgttgcaaattcacctttggtaaaaacagcaattgctggagaagatccaaactggggaagaataataatggcaattggcaaagcaaaagtaaaaattgatattaaaaaattatcaataaaatttggacatcataagattattgaaaagggtgagctaataaataattaccaggaagatgaagttgcctcatacatgaaaagtgaaaaaatcgacattacaattgatctaggatgtggatctaaaaattttacagcatatacaatggatctaacaaaaaaatatattgaaataaattcagactatagatcttgaa

SEQ ID NO: 234517 - DNA, 751 bp, Unknown
  Bacterial polypeptide expressing nucleotide sequence isolated from the Sargasso Sea
atgacaaccgacaaatattataaaataaaaaaaagcgaaataagtattggtacaaaaaaaggttcaataataggtattgctaaaggtgcgggaatgattcatcccaacatggctaccatgctttgttatttgttaacagatatcaaatttgatacaaaaacattcaagaattttataaatagagctgttgattcaacatttaactgtataagtgttgatggagaaatgtctaccaatgacactgtattgggtttatcaaatggtttgcttggaaataaaaaaataaatgataaatccccacaagcaaacaaaatttataaatccattgaaaatattttttatggattatcaaaagatatagtattagatggagaaggctcaactaaaatttgtaaaattattgttaaaggtgcaaaaaattctagagattcaaaaagaattgcaagaaatatagcaaattcattattatttaaaaccgcattatttgggtctgatccaaattggggaagaataatatcagctgtcggttcaactcagattaaatatattgatcagaattcaatagatatttatattggtgacaagttagttgtgaaaaacggtctgggtctaaagttatcaaaaaaaataaatcaaataatgagaaaaaaagaaattaaaataataattgacttaaaaaaaggtaaatatgaatcttttatgttaacaaatgatattggacatgagtatattaaaataaattcactatata

SEQ ID NO: 234518 - DNA, 741 bp, Unknown
  Bacterial polypeptide expressing nucleotide sequence isolated from the Sargasso Sea
acggatactaagccaaaattagctatggaggaatgccatattggaagcgaaaaagttaaaatatatggaattgctaaaggatcagggatgatatatccaaacatggggacaacacttgcatatgtttttactgatgcaactttatctaatgatattttggggaagttactaaagaaaaatataaacaatacatttaacgcaatttcttgtgatggggacactagtaccaatgacatggtgactatctttgcaaccaatgcagttaaaaactcacaagttaaaagtataaatgaaaataaaattaaaagttttgacaaagctctaaataatgtgcttttaaatttagctaaaagagttgtgtcagatggagaaggagcatctaaatttattacaataaacgttagtaaatgcaaaaatgagatagaagctaaaaaaattgctttttctgttgcaaactctcctttagtaaaaactgcgattgcaggagaagatccaaattggggacgagttataatggcgatcggtaaagcaggtcctaaaattaatttaaataaattattaataaaatttggaaatattattattgtagatggtggaaaattaaatcaaagttacgatgaaaaacaaatagcaaattacatgaaatttgaaaatatagagataaatattgaaacttttacaggaaagaaaaatttcacagcatatacaatggatttaacaaaaaaatatattgaaattaat

SEQ ID NO: 234519 - DNA, 703 bp, Unknown
  Bacterial polypeptide expressing nucleotide sequence isolated from the Sargasso Sea
gaaaatatatggaatagcaaagggttcaggcatgatttatccagatatggcaacaactttaggatttatttttacagatgctaaaataaatgggaatattttaaaacttttattaaaaaaaaatattcaaaatacatttaatgcaataagttgtgatggtgacactagcacaaatgatatggtgagtattttttcaacaggatatgcaaataataaaaaaattaactcttataaggataaatcattaaatgaatttgataaatcacttaatacagttttgaaaaatttagctaagagtgtcgcagctgatggcgaaggagcctcaaaatttattataataaaagtagaaaaatgtaaaaatgaaaatgatgctaaaaatatttgtttttcaatagcaaattctccgttggtaaaaacagcaattgcaggcgaagatcccaactggggtagaatagttatggccttaggaaaatcaaaagtaaaaataaacttaaataaattaaatataagtattggtccaaataaaataattgaaaatggaaaaattaatccaaactataatgaaagtgaagttgcagagtatatgaaatcttatgagataaatattaatgtacaaataggtggtggaagcaaagaatttgaagtttatacgatggatttaacaaaaaaatacatcgaaattaatgcagattatagatcttag

SEQ ID NO: 234520 - DNA, 841 bp, Unknown
  Bacterial polypeptide expressing nucleotide sequence isolated from the Sargasso Sea
tcagtcaaaaattttgtctgaaaatataaaatggaacctaaaacaaaataataaaaaaatatattcactcatagttaacacaaggaatgctaatgcttttactggtaagcagggttatgaaagtttaaaaaaattagctgatatagtttcaaaaaaattaactgaaaaacaaaatgaagatgaaactacatctagaaaaattgaaccaaaagaaattatgttcggttgcactggaacaataggagaattgtttccatatgataaaatagctagtaaagttcctgatttgataaataaaattcgatacactcaaaataaattcatttggatgaaagcagctcttggaattatgaccacagatacaaagcctaaattaacaatggaggaatgtaagattggaaatgaaaagatcaaaatttatggaatagcaaaaggagccggtatgattcatccaaatatggctactacattggcatatatttttacagatgctactttatctaatgatattttaaaaaaactgttgagcaaaaatattgccactacctttaatgcaattacatgtgatggagatacaagtactaatgatatggttactatttttgcaacaagtaaagttaaaaattctacagttaaaagcttaaatgacaaaaagatttcaagttttgataatgctttaaacaaagttttattaaatttagcaaaaagagttgtgtctgatggtgaaggatcttctaaatttatcactataaatgttaaaaaatgcaaaactgaaaatgatgcaaaaaaaattgctttttcaatagctaattcgcctttagtaaaaactgctgtgcaggcg

SEQ ID NO: 234521 - DNA, 871 bp, Unknown
  Bacterial polypeptide expressing nucleotide sequence isolated from the Sargasso Sea
aagagatgatttaactatgttctatttcagagaaggagcgaattacgcttctgtttacactcagtcaaaaatagtatctgaaaatataaaatggaatattaatcaaagaccaaaaaaaatttattctcttattgtaaataccagaaacgcaaacgcatttactggaaagcaaggttatgaaagtttaaaaaaaatagcagatttgacggccaaacaattaaataaaaaacaaggagaagatgaggataatcctaagaaaatttctacaaaaaatataatttttggttgcacaggcacaattggagaaatttttccttacgaaaaaattttgaataatattcctaatttaataaataaaattcgatatacacagaataaatttatttggatgaaggcagcgcttgcaataatgactacggatacgaagccaaaattagctatggaggaatgtcatattggaagtgaaaaagtaaaaatttatggaatagccaaaggatctggaatgatacatccgaatatggcaacaacactagtttaccttttcacagatgcaaccttatctaatgatattttaggaaaattattaaaaaaaaatataaccaatacatttaatgcaatttcttgcgatggagataccagtactaacgatatggcaactatttttgcaaccaataaagtaaaaaattcccaagtaaaaagtgtgaatgaaaataaagttaaaaattttgataaagctctaagaaatgttcttttgaacctagctaaaagagttgtgtcagatggtgaaggagcatcaaaattcataaaaataaatgttgctaaatgtaaaaatgagatagatgcaaaaaaaattgtttttcggttgcaaatt

SEQ ID NO: 234522 - DNA, 758 bp, Unknown
  Bacterial polypeptide expressing nucleotide sequence isolated from the Sargasso Sea
agacctagtgccaaaaattgctatggaagagtgtaaaataggaaatataaatgttaaactgtatggggttgcaaaaggatcagggatgatacacccaaatatggcaactactcttggatacatatttacagatgcgagaatttcgtcaaaaattttaaataaacttttaaaaaaaaatattgaaactacgttcaatgcaattagttgtgatggtgatacaagtacaaacgatatggtaagtttatttgctaccggagaagcaaagaataccgttattaataatattcatgatgaaagaattaaaaattttgataaagctttgcacaatatattattaaatttagcaaaaagggtgactgcagatggtgagggagcatctaaatttattaccatcaatattgaaaatgcaaagacagaaaaagatgcaaaaaaaattgctttttcaatagctaattcaccattagttaaaactgcattcgcaggagaagatcctaattggggtagagtaataatggcaattgggaaatcgcaagtacagataaatattaataagattaatatttcatttggagaaaataaaattgttgaaaagggtgaattatcaaaagattataatgaagttgaactcaaagagtttatgaaaaatgaaaaaatagatcttaatatagatctaaaaatggggtcaaagaagtttattgcttacacaatggatttaacaaaaaaatatatagagattaactcagactatagaagttaaa

SEQ ID NO: 234523 - DNA, 820 bp, Unknown
  Bacterial polypeptide expressing nucleotide sequence isolated from the Sargasso Sea
atagtatctgaaaatattaaatggaacataaaccaaaaaccaaaaaaaatatattctcttattgtaaatacaagaaacgccaatgcttttactggaaaacaaggttatgaaagtttaaaaaaaatagcggatttaacagtaaaactattaaacaaaaaacaagaagaagacgaggataatcccagaaaaattacaacaaaaaatataatttttggttgtacgggtactataggagaaatttttccatatgtaaaaatttccgacaatattccaaatttaatcaaaaaaatcaattatacccaaaataaatttatttggatgaaagctgcgctcgcaatcatgaccacagataccaagccaaaattagctatggaagagtgccatattggaagcgaaaaagtaaaaatatatggaatagcaaaaggttctggtatgatccatccaaatatggctacaacacttgcttatatatttactgatgcaactttatctaatgatattttaggaaagttattaaaaaaaaatatatcaaatacatttaattcaattacttgtgatggagatactagcaccaatgacatggtatctatttttgcaactaatgaagtaaataatcaccaagtaaaaagtataaatgaaaataaaattaaaaattttgataaagctctaaataatgttcttttgaatttagctaaaagagttgtttcagatggagaaggagcatcaaaattcataacaatcaatgttagtaagtgtaaaaatgagatagatgcaaaaaaaattgctttctcagttgcaaattctccattagtaaaaaccg

SEQ ID NO: 234524 - DNA, 727 bp, Unknown
  Bacterial polypeptide expressing nucleotide sequence isolated from the Sargasso Sea
acaaaaatcggttcatcaacaattaaaatttatggaattgcaaaaggctcaggcattatttatccaaatatggcaactacattgggttatatatttactgacgcaactttatcctcatcagttttaaaggatgtcttaaaaaacaatataaagacaacattcaatgcaatttcctgtgatggtgacacaagcacaaatgatatggtttctatattttcaacaaacaaagttaataatttagaaattaaaaaatatagtgatgtaagacttaaaaattttaacaaggcagttcatgacgttttattaaatttagcaaagcaagttgtttctgatggagaaggagcttctaaatttatttctattaattgtattaattgcagaactgataaggacgcaaaaaatatatcttttaagatagcaaactcattattagttaaaacagcaattgcaggagaagatccaaactgggggagagtagctatggcaattggaaacagtgactccaaaattaatgaacaaaaattatctatttcttttggaccatataaaatttatcacaagggatctttatacaaatcttatgacgaagaaaaagttatggaatatatgaaaggtaagtcaattgaaatagaagttgatataggtcaggggaataaaaaatttaaatcgtatactatggatttaacaaaaaaatatatagaaattaacgctgattataggacttagc

SEQ ID NO: 234525 - DNA, 1240 bp, Unknown
  Bacterial polypeptide expressing nucleotide sequence isolated from the Sargasso Sea
ttgagccagttagattccaattggtcgtttgttgatgacagtaaggtaacacccaaggggtttctttttgctgggatatctgctggtttaaaagcttctaataaaaaagatttagcactaatactcgctccagaaggaagtatttttagtgggatgtttacccaatcaatagttcgagcttcttgtgtggatatttgtgaggaaaggattaaaacaacttcaggttttgtaagagcaatactaattaattctggtcaagcaaatgcatgtacaggaaatcttggcattcaacattttcaaattgctacaggaaagattgcggaacttttaggaataaaagaagaagaagttttaatgtgctcaactggtgtaattggtgttccaatacaaataaatgatttagtaaaaaatttacctaatttagttagtgatttaaagggtaataattttgcaaatgcagcagaagcaattttaactactgatttgactttgaaaaaagtgtcaatagagacgattattcaaggtagaaaaataaaaatagcaggatttgcaaaaggttcaggaatgatttaccccaacatggctacaatgcttgcttttctaacctgtgatgcgggtattcaaaaagaagaatgggacaaaatgattgctattgcggttcaaaaatcttttaatgcaatatcagttgatggagagacaagcacaaatgattcttttgttggaataaatgcaggagagaaaattgaaaaaaggttttttccaattatccaacaagggattgatattgtatgtcagaacttggcaaaaaatattgcaagggatggagagggagcaaattgtttattagaagttttggttcaaggagcaaaaaatacagatgatgcaattatgctcgcgaaatctatttgtaattctgccttggtaaaaactgccatacatggttgtgatccgaattggggaagaatcatttctgctgcaggcaattctggggttaaatttaatttaaatgacgttgacttgtatataggaaacgctcagattttggaaaacggcaagttaaatgaatatgatccacaaaaagtcacagactatattcagtccagaatgaaaggtagatatttagtagatgatattgtaaaaattatgattaatcttaattctggcgaatcgaaaggcacagcttgggggtgcgatctttctaaaaagtatgttgaaataaatagcgaatatacaacttaac

SEQ ID NO: 234526 - DNA, 684 bp, Unknown
  Bacterial polypeptide expressing nucleotide sequence isolated from the Sargasso Sea
aaggatcaggaatgatacatccaaatatggcaacaacacttgcgtatatatttactgatgcaactttatctaatgatattttaggaaagttattaaaaaaaaatataaccaatacatttaacgctatttcttgtgatggggatacaagcaccaatgacatggcaactatttttgcaactaatgaagtaaaaaactaccaagtaaaaaatgtaaatgaaaataaaattaaagattttgataaagctctaaataatgttcttttaaatttagctaaaagagttgttgcagatggtgaaggagcatcaaaattcataacaatcaatgttagtaagtgtaaaaatgaaatagaagcaaaaaaaattgctttctcagttgcaaattcttcattagtaaaaactgcaattgctggagaagatccaaattggggacgagttataatggcaatcggtaaagctgggcctaaaattaatttaaataaattattaattaaatttggaaatataataattatagaaggtggaaaattaaatcaaagttacgatgaaaagcaaacagcaaattatatgaaaggagaaaacatagagataaatgttgaaacttttacaggaaagaagaactttacagcttacacgatggatctaacaaaaaaatatattgaaattaatgcggactatagaagttaac

SEQ ID NO: 234527 - DNA, 723 bp, Unknown
  Bacterial polypeptide expressing nucleotide sequence isolated from the Sargasso Sea
aaattggttcatcaaaaattaaaatttatggaattgcaaaaggctcgggcatgatttatccaaatatggcaaccacattgggctatatattcactgatgcaactttatcgtcatcagttttaaatgatgtcttaaaaaataatatcaagacaacatttaatgcgatttcatgtgatggtgacacaagtacaaatgatatgctttctatatttgcaacaagcaaagtaaatcattcagaaattaaaaaatataacgatagtagacttaaaaattttaacaaggcagttcatgaggttttattaaatttagctaagcaagtagtgtctgatggagaaggagcttctaaatttatttctattaattgtataaattgtagaaccgaaagagatgcaaaaaaaatatcttttaaaatagcaaactcattactatttaagacagcaattgccggagaagatccaaactggggaagagtagctatggcaattggaaacagtgacgctaaaattaatgaacaaaaattatctatttcttttggatcatataaaatttattacaaaggatccttatacaaattttatgacgaagaaaaagttaaggcatacatgaaaggccaatcaattgaaattgaagttgatattggacagggaattaaaaaatttaaatcgtacactatggatttaacaaaaaaatatattgaaattaacgctgattataggacttaac

SEQ ID NO: 234528 - DNA, 1016 bp, Unknown
  Bacterial polypeptide expressing nucleotide sequence isolated from the Sargasso Sea
aatgcctacaaagtttgtcacactaaagttaggaataaaaaaaaatataattgatggtcttctgatacatattccaccaggcagtaatacagctatgattacaactaagaataagtttgctgcatctccagttattatttcgagagagaatatcaaatctggaaccataaaatacatatttataaactcaggcaatgctaatgcatgtacaggcaaagaaggacataagaataccaaacgaatactcgatatattatcaaagaaactcaactgctctttggatcagatcctgataatgtctacgggtataattggaagacaacttccgatcaaaaaaattattgaatctataactaacagcaagttagacatttattcaaatataaaaaaagcagcatcagcaattatgaccactgataaatttcctaagcatctgacaaagtcatatacaataggagcaaaaaaaattacttttagaggtatttgtaaaggtgcgggcatgatagagccaaacatggctaccatgctaagttttattgagacaaatgctgatttatcgaagtccctactaaacaaatatataaagcattgtgcaggtgtatcatttaacagcatatctgttgatggcgatatgtctacaaacgacactgtagcattttcttcgactggaaatataaaattaaacacaaaaaataaatctatcgaagctaaatttatagcatgtgcatctgatttttttataagactatcttcacttatagtcaaagacggtgagggagcaactaaattcatcaagttgaatgtaataaatgcaaaaagtataattcttgctcaagaaatatcaaagaaattatctaactcgattcttgtaaaaactgctatgtttggagaggaccctaattggggcaggataattgcaagtattggatctattcaatccacacatataaaacctcttaagataacactgatgataaataacattctatgtttcaaaaatggaatatcgatagata

SEQ ID NO: 234529 - DNA, 961 bp, Unknown
  Bacterial polypeptide expressing nucleotide sequence isolated from the Sargasso Sea
tttgagagagtcaaaaaaaaaagaaggtatttcggaaactgtaaaaattaaagatctaatatttgcatcaaccggagtaatcggagagacattcccagttgaaaaaataacaaataatatgagcgatctagtatcgaaattaagagatgaccaaaataaattaatatggattaagactgcttctgcaataatgacaactgatacaaaaccaaaattggcatacgaagaatttacttttaataacaaaattatccgtatagcagctattgctaaaggatcaggaatgattgcacctaacctcgctacaatgctctcatttatttttaccgatgctgacatcccctcaaatctacttaagactttgttaaaaaaagcagtggccaatacttttaatgcaataactgttgatagcgatcaatcgactaatgatatggtttcaattttttcgacaagaaaaataaagattggacacaatagagggataactgatccagttattcagaaatttgaaacatcgcttaaaagtgtatgcttaaaccttgcaaaacaaatagttgtagatggggaaggagcaaaaaaatttttaacaataaatgtcgttaatgcaaaatctattttaagtgcaaaaaaaatagccttttcagttgctagttctccactagttaaaactgcgattgcaggagaagaccctaactggggaagagttataatgggtataggtaaatcaggagaaaaagttgataaaaataaaatatctatcaagtttggagaatttttattagctgaaaatggatcaccagtagagaatttggactataataaagtgagagaatacatgaagtgggactcaataattatagagattaatttaaatactggttcagacttttttgaatgctatacttgtgactttactcacgactatatagacattaatgcagactataaaaatgcaacttga

SEQ ID NO: 234530 - DNA, 1303 bp, Unknown
  Bacterial polypeptide expressing nucleotide sequence isolated from the Sargasso Sea
tatggcaataaagataagtaatttcttcaattatcaaaataataactctaaaattggagattttcaggatttagagcatatagatggtgtctcaatttcagctacaacagctaatctatataacattaaaagagatgatgtggttatgttttattttagaaaaggtgcttcatatgcttccgtgtatacccaatcaaaaattatttcagaaaatattaagtggaatcaaaaaattaaaaccaaaaaaattagagcaattattattaataccagaaatgcaaatgcttttacaggagctgagggtttcaaaagcttaaaagttatagctgaaaacttagctgatggtcttagcattaaacaaaaaagtgatgaggaacaaccagtaagaattaaaccaaatgagttactattcgcatgtacagggactattggtgagcctttcccccaaaaaaaaattattgattgcataccttctcttttgaaaaacttaaaatatacacaaaataaatatctttggataaaggcttcaatgggtattttgaccactgatacaaaaccaaaaatggcgatggatgaatgcaaaattggaaatacagttgtaaaaatttacggaattgcgaaaggctcaggaatgatttatccaaacatggcaacaacattgggatttatttttacagacgctaagttatcatcatctatattaaaaaaaatattgaaaaaaagtatagcaaattcttttaatgcaatttcgtgtgacggagacacaagcaccaatgatatggtaactatttttgctaccggtgaagcaaaaaattctgaaataaaaaatgttaatgaccagaaattaagtgaatttcaaaagaaagtcgacaatgtaatgcttaatcttgccaaaagtgttgtagcagatggggaaggagcgacaaaatttattaccatatcagtattaaattgtaagaacgaggaagatgcaaaaaaaattgccttttcaattgctaattcacccttggtaaaaacagctattaatggtgaagatccaaattggggtagaattataatggcagttggaaaaactagtgcaaaattaaatttaaaaaaattaaaaataatgtttggcggtgttaaaataatcgaaaatggagagttatattcaaaatataacgaacaagatgcctcagattatatgaaaaatgaaaaaattgacatttttgtagatttgaacatgggaaataaaaattttacagcttatacaatggatcttagcaaaaaatatatagatataaattctgactatcggacatag

SEQ ID NO: 234531 - DNA, 1303 bp, Unknown
  Bacterial polypeptide expressing nucleotide sequence isolated from the Sargasso Sea
atggtttttaacataaacaacttttttgatgatagaaatagaaagtcaaaaatagctgattttcaagatctagatcatatagatggggtttctatttcaacagttagtgcgaatttatatgataaaaaaagagacgatttagtgttattttattttagaaacggtgctagtcatgcatcagtgtatactcagtcaaacatagtatcagagaatataaaatggaataaaaaaattaaatcaaaaaaattaaatgctttactaataaatactcgaaatgcaaacgctttaactggatcaagtggttttatagccattaaacaaattgctaaagaattatctaataagttatcagaaaagcaaaaattagacgaagaacatccaaaagaaattaaatcaagcgagatattattcgcttgtacaggaaccataggagaaaaatttccactaaataaaataaaaaatacaattcccaatttaattgaaaatattaaatatacgcaaaataaaataatttggatgaaagcagctatgggaataattaccacagatactaaacctaaacttgcaatgtcagaatgcaaaattggttcaacaaatataaaaatttatggaattgcaaaaggatcaggaatgatttttccaaatatggcaacaacacttggctttgtcttcactgatgcaagcctatcttcttcggttttacaaaaaactctaaatgaaagtataaaaaccacatttaatgctatatcttgtgacggtgatacaagcactaatgacatggtatcacttttttcaaccaataaagcaaataatccaattataaaagattacaaagattcaaaattaaaaaattttcgtcaagcattaaaagatgtgatgttaaatttggctaaaagagttgcaggagatggcgaaggtgcttcaaaacttattactataaaatgcaaaaatgctaaatccgaagaagatgcaaggaatatatgtttttccattgccaattctcctttggttaaaactgctattgcaggcgaagatcctaattggggaagaattgctatggcaataggaaaaagtaatgcaaggattgatgtaaaaaagctgtcaattaatattggaccttatgatattttagttaaaggaaatctatttcaagattataatgaaaaattagtaagtgagtatatgcaaaatgaattaatagacataacaatagatattagtttaggaaataaacattttaccgcttacactatggatttaacaaaaagttatatagaaattaatgcagattatagatcttgaa

SEQ ID NO: 234532 - DNA, 1048 bp, Unknown
  Bacterial polypeptide expressing nucleotide sequence isolated from the Sargasso Sea
gatggttaatactaaaaatgcaaatacttttactggatcgcaaggttttgaaggagtggaaactctttctaaaacgcttgccaaaaatttaactttaagagaagcacaaaaaaaagaaggaacaacaagcgtaatcaaaccaaatgaaatattatttgcttcaacaggagttattggtgagaagttcccgacgcaaaaaataaaagaatgtattccaaatttagttgaaaaattaagagatagacaaaataaatttatttggtttaagtctgcatcttcaataatgacaacagataccagacctaaattagctttcgaagagtgtaaatttggtaatcacgacattagactttgcgggatagcaaaaggttctggcatgatagcaccgaatttaggaactatgctttcatttgtttttaccgatgcagatataccatcaatttatttaaaaagtttactaaaaaaagcagtttcaaattcttttaattccataacagtggacagtgatacttctacaaatgatatggttgctattttttcaacaaacaaatttaaagcaggtaaagtctacaatgctttagatccaaagctaaaagattttgaaaatgcattacaaaaacttttattaaatttagcaaaacaaattataatcgacggggaaggtgcaaagaaatttgtaacagtaaaagttattaacgctagatcacaacaaatggcaaaaaaaattgcattttcggttgcaaattctcctctttttaagacagctatggcaggtgaggatccaaattggggaagagttatcatgggcataggaaaatcaggagaaaaagtttctgtagataaaatcgaaatcaaatttggagatcttaaagttgcagaaaaagggagaatatcagaccaatacgacgaaaaaaaacttaaagaatatatgaagtgggattcattattaattgaaattaatctcaaacttgggcaaggctcatatgaatgttatacatgtgattttacaaatgattatgttaatattaatgctgattatagaaactaa

SEQ ID NO: 234533 - DNA, 1210 bp, Unknown
  Bacterial polypeptide expressing nucleotide sequence isolated from the Sargasso Sea
atatcgacaactactgcaaatttatattcaaaacaaagagatgatttagttttgttttattttagaaagggagccaatcatgcatcagtttatacacaatcaaaattaatttcagaaaatataaagtggaatttaaaaattaataaaaaaaaaattaaagcactactaattaacactcggaatgcaaatgcttttactggaaaggatggttataaaggattaaaaattttagctgataatttatcagatgaattaacacaaaaacaaaaaaatgatgaagaaaaacctgaaaaaattgaaccaaatgatatcttatttgcatgcactggtacaataggagaaacttttccaacagagaaaattaaaaagtctattccaagcttaataaaaaaaattaaatatactcaaaataaatatatatggatgaaagcagcacttggtatattaacaactgatttaaagccaaaactcgcaatggaagaatgctatattggaaataaagtggtaaaaatttatgggattgcaaaaggctcaggaatgatttttccaaatatggcaactacattgggttttgtgtttacagatgctacaatttcatcaactattttaaaacaattattaaaacaaaatatacaaaaaacatttaatgcaatttcatgcgatggagatacaagtaccaatgatatggtctccatttttgctacaggagaagtttcaaatttaagtttaagtagtgttaaagataaaaaattatctgagtttaattcttctttatataatgttcttttaaatcttgcaaaaagagtagctgctgatggagagggagcttcaaaatttatttcaattaaagtaaaaaattgtaaaactgaggaagatgcaaaaaaaatatgtttttcaattgcaaactcacctttagtaaaaacagctatagccggagaggaccctaattggggtagaattattatggcaattggtaaggctaatataagtttaaatccaaataaattagtaattaaatttggcgacattttaattattgagaacggaaagctatcatcatcatataacgaggatgaagctgcaacttatatgaaagaaccaaaaattgatttattagtaaatttaaatatagggaaaaaagaatttacttcttacactatggatttaactaaaaaatatattgaaattaattcagattatagaacataaa

SEQ ID NO: 234534 - DNA, 1216 bp, Unknown
  Bacterial polypeptide expressing nucleotide sequence isolated from the Sargasso Sea
tatgaaagaaaataattcacaagactttaaaccaattaaaggtattttaatatcttcaggctgccttggactatatgataataaaagaaatgatatctcattgatttcactagaaactgatgcaacggtatgtggttacttcacccaaaatatttataggtctgcaacagtagtgatttctgaaaaaaatataaaagaaaatccaccaaaatatataattgtcaatgctggcaatgcaaatgcctgtactggttatgagggggagcttgatatcaaaaaatattgtgaaaaaatttcagagctaaccaatattaaagagaacttaatatgtcctttgtcaacaggagtaatcggtgaaagaattaatgttgaaagatttataaaaattattccattattattagatagcttatctattaataattataaaaaattttctaagtctataatgactactgatacctataataaattgtgttcttctagttttcactgtaagaatggagaagaaataatcattaatggagttgcaaaaggctcaggaatgatttttccaaaaatggcaactacattaggattttttttcacaaatttaagaatatcaaaaaaaagtttagataaaatatgcactcaatgtttagaagaaagttttaactctataactgttgatggtgagacgtctacaaatgattcacttttagtaatttcatcaaatacatcaaatattgaatatgaaaaattaaacaatgaagataaaataaagtttgaaaacaccttaagaaattctatgatttatcttgcaaaagaagtggttagagatggcgagggtgcatcaaaatttataactataaatgttcaaggtttaagaaatacgcaagatgctaaaaaagctgcattatgtatagcaaactcaaatcttgtaaaaacagccttgtttgctgaggatcctaactggggtagagtagtctctgctttaggaaactctaatatttcatatatagattgtaaagacttaaatctaaaaattaataatttggctgtttttgagaataactcaatatctgatcaatatgatgaagaagcggttaaaagatctatgaaggacaaaaacatagaaatttctcttatcttttctcacggaaaaagtaatgcaacagtgtggacttcagatttgacttataattatgtaaaaattaatgcagaatatagatcttaa

SEQ ID NO: 234535 - DNA, 685 bp, Unknown
  Bacterial polypeptide expressing nucleotide sequence isolated from the Sargasso Sea
aaaggatcgggcatgatttacccaaacatggctacaacattaggatttatttttacagacgcaaagctatcatcgtcaatattaaaaaaaatactgaaaaaaggtatagctaattcttttaatgcaatttcgtgtgatggagatacaagtaccaatgatatggtaactatttttgcaaccggcgaagcaaaaaattcggaaataaaaaatgtcaacgaccagaaattaaatgaattccaaaagaaagttgatactgtaatgcttaatcttgctaaaagtgttgtagcagatggggaaggagctacaaaatttattacaatatcagtattaaattgcaagaacgaagaagatgcaaaaaaaattgccttttcgattgccaattcacccttagtaaaaacagccattaatggtgaagatccaaattggggtagaattataatggcagttggaaaaactagtgcaaaattaaatttaaaaaaattaaaaataacgttcggcaatgttaaaataatcgaaaatggtgagttatattcaaaatataatgaacaagaagcttcggattatatgaaaaatgaaaaaatagaaatctttgtagatttaaatatgggaaataaaaattttacagcctatacaatggatcttagcaaagaatatatagatataaattctgattacaggtcataga

SEQ ID NO: 234536 - DNA, 1252 bp, Unknown
  Bacterial polypeptide expressing nucleotide sequence isolated from the Sargasso Sea
aatgggcgattttcaagatcttgatcatattgatggattgtcaatatcagtcactagcgctaatttatattcaaaacaaagagatgatttagttttgttttattttagaaatggagtcaaccacgcttcagtttatacacaatccaaattaatttcagaaaatattaagtggaacttaaaaattaataaaaaaaagattaaagctttattaattaatacaagaaatgcaaatgcttttacaggaaaagaaggtttcaaaggattaaaaattttagctgatagtttgtcacaagaacttactcaaaaacaaaaaagtgatgaagaaaaaccaataaaagttgaacctgatgaaattttatttggatgcacaggaactataggagaaatttttccaacagaaaaaattaaaaaaaatattccagatttaattaaaaaaattaaatacacccaaaataaatatctttggataaaagcatcaatgggaattttgacaacagatctaaaacctaaacttgcaatggaagaatgttatattggaaataaattggtaaaaatttatggaattgcaaaaggttctggaatgatttatccaaatatggcaacaacattgggatatatatttacagatgcaacaatttcttcatcaattttaaaacaattgttaaaacaaaatattcaaaatacttttaacgcgatttcttgtgatggagatactagcactaatgacatggtttctatttttgcaacaggagaagtagaaaattcaaacgtaaaaagtgccaaggataaaaaattagctgagtttaacttgtctttaaacaatgtcttactcaatcttgcaaaaagagttgctgcagatggagaaggagcttcaaaatttatttcaataaaagtaaaaaattgcagaacagaagaagatgcaagaaaaatatctttttcaattgcaaactctccattagtaaagacagctattgcaggagaagaccctaattggggaaggattattatggctattggaaaagctaatgtaaatataatacctaataaaatatcaattaaatttggaaatataaatgttattgaaaatggtaaattatcaaattcttataacgaaattgaagcagccaattatatgaaagaagaaaaaattgaattattgataaatttaaatttaggaaaaaaagaatttacttcttatacaatggatttaacaaaaaaatatattgaaattaattcagattatagaacctaa

SEQ ID NO: 234537 - DNA, 1234 bp, Unknown
  Bacterial polypeptide expressing nucleotide sequence isolated from the Sargasso Sea
aatgacaaattctgaaagtccacttaaaccaaaacaagtaaaaaaaatttatactatctcaggcgtaaacctttctttaaccaattcagaagagaggtatataggtagagatgatttaattttgatttcttttaagaataaatcaaattttgcaggtgtttttacaaaatctacagcagcttctgaggctgttaaatggtgtcaaaaaataattaaaaataatgatattagggcaattattgtaaatgctggtaacgctaacgtctttactggcaaacttggcaaaagcgcaataaataaaattgtttctaaattatcatcatgtctaaaaatatttaaaaatcaaattttaatagctcagactggagtaattggggaacctcttaaaacccataaaataatagatgcgatatcaaacttaactgataatttaaattctaataattggcaaagtgcagcaaaagcaattatgacaactgacacttatccaaaatattcaagtctttgctataattttgaaggttcaaaaatacatattactggaatagctaagggctctggtatgattgcaccaaatatggcaaccatgttagcatttatttccactgatattaaaatttctaaaccgattttacaaaaacttctggaagaagtaagtgaggaaacttttaattcaatctctgtagatggcgatacttcaactagtgatagcgttattctttcagctacaggcatgtcagataataaaattttaaaaaataaaaaagataaacattatgaaaaatttaaagatgctttattaaaaattagtaaggatttggctcttcagattgtaagagacggggaaggagcatccaaattaattacaattcgtgtctcagggacaaaaaataaaatcatttcaaaaaaagttgctttttcaatagctaattcaccattagttaaaacagctatagcagcagaggatgcaaattggggaagaattatcatggcaattggtaaaacaaatgagatttttgatcataaaaaattgagtatatatatagggaaatatttaattacttatgacgggagaagaaataatggatataatgaaaacaaactttcaaaatatatgaaaaatagtgaaatagaaattagtgtagaatttggtagtaagaaaaataaggctactatttggacatgtgatttaacacaaaaatatatcgatataaatggtaagtatagaagttaa

SEQ ID NO: 234538 - DNA, 637 bp, Unknown
  Bacterial polypeptide expressing nucleotide sequence isolated from the Sargasso Sea
tatttttacagatgcaagtttgtctaataatattttaagtaaattattaaaaaaaaatatttttaacacttttaatgctatctcttgtgatggagatactagtacgaacgatatggtatctatttttgcaacaaataaaatcaataattcaaaagttaaaagcattaacgaaaataaaattaaaaattttgacagcgctttaaataatgttttattaaatttagctaaaagagttgtttcagatggtgagggagcatctaaatttatctctataaatgtttctaaatgtaaaaatgaaatagatgcaaaaaaaatagctttttcaataggaaattcacctttagtaaaaacagcaattgcaggtgaagatccaaactggggaagaattattatggcaattggtaaggctggaccaaaaattaatttaaaaaaactttgtataaagttaggaaacttaaagatagtacaagagggaaaactctaccaaaactatagtgaagaggtggcatctaaatatatgaaaaaagaaaatatagaaattagcgttgaagtttacacaggatcaaaagagttttctgcgtacactatggacttaactaagaaatatatagatattaatgcagactatagaagttag

SEQ ID NO: 234539 - DNA, 1245 bp, Unknown
  Bacterial polypeptide expressing nucleotide sequence isolated from the Sargasso Sea
actttcagaatttagagcatcttgatggtatttctatatctacaataagtgccaatttatatgatagtaaacgagatgatttggtgatgttttattttagagatggagcaaattatgcatcagtttacactcagtcaaaaataaaatctgaaaatattaaatggaacctgaatttaaaaaataaaaaaataaatgcattaatgattaatgcaagaaatgcaaatgcttttacaggaaaaaaaggctaccaaggtttaaaggaaatagctgacgaactagcaattcagttatcaattaagcaaaaaaatgatgaggaaaaaccaataacgattaaaccaaatcaaattctttttgggtgtaccggaacaattggagaaaaatatccaactgaaaaaataaaaaagagcattccagatttgattgaaggaattaaatatacacaatccaaatatatttggatgaaagctgccttgggcattatgacaaccgatttagtgccaaaacttgcaatggaagaatgtaaaattggaaatgttgatgtaagaatatatggaatagcaaaaggatcgggaatgatttttccaaatatggcaacaaccttaggttatgtttttactgatgcaagtctttcttcaagtatactgcaaaaattacttagaaaaaatattgaaactacatttaatgcaataagttgtgatggcgacacaagcacaaatgatatggttacaatatttgcaacaaataaatcaaaaaattccatgattaaaactatcaatgattcaaaactagaagaatttgaaaaatcattgcacaatgtactcttaaacctttcaaaaagaatagcagctgatggagaaggcgcttccaaatttataactgtaaatgttaacaattccaaaactcaggaagaagcaaaaaaaattgcattttcaattgcaaattctcctctagttaaaaccgcaatagcaggggaagatccaaattggggaagaattataatggcaataggcaaagcaaatgtaaatattagtttaagtaagttagaaattacatttggaaaaataaaaataattgaaaagggtcagttatcaattaattataatgaaatagaagttgccgagtatatgaaaaatgaaaaaattgacttaactatcaatctaaacatgggaaaaaagaatttttctgcatatactatggattttactaaaaaatatgttgaaataaattcagattatcgaagttaat

SEQ ID NO: 234540 - DNA, 856 bp, Unknown
  Bacterial polypeptide expressing nucleotide sequence isolated from the Sargasso Sea
aataaaataaaaaatacaattcccgacttaattgacaacattaaatatacccaaaataaaataatttggatgaaggcagctatgggaataattaccacagataccaaaccaaagctcgcaatgtcagaatgcaaaattggttcaacaaatataaaagtttatggaattgcaaaaggatcaggaatgattttcccaaatatggcaacaacacttggctttatcttcactgatgcgaacctatcttcttcggttttacaaaaatcgctaaatgaaagtataaaaactacatttaatgctatatcttgtgatggggacacaagcactaatgatatggtgtcacttttttcaaccaatgaagcaaataatccaattataaaagattataaagactcaaaattaaaaagttttcgtcaagcattaaatgatgtgatgttaaatttggctaaaagagtcgccggagatggagaaggtgcttcaaaatttatttccataaaatgcaaaaatgctaaatctgaagaagatgcaaagaatatatgtttttccatagctaattctcctttggttaaaactgctattgcaggtgaagatcctaattggggaagaattgctatggcaataggaaaaagcaatgcaagaattgacgtaaataagttgtcaatcaatattggaccatttaatgttttagttaaaggaaatctatttaaagattataatgaaaaattagtaagtgagtatatgcaaaatgagttattagatattacaatagatattagtttaggaaaaaaaaattttactgcctacactatggatttaacaaaaaaatatatagaaattaatgcagattatagatcttgaa

SEQ ID NO: 234541 - DNA, 1237 bp, Unknown
  Bacterial polypeptide expressing nucleotide sequence isolated from the Sargasso Sea
gatgacgcacccctggcgtgccatcgagggtgggatcacggcaccggctggatttcaggctgccggcatcaccgccggtttgaaggccagtggccgctctgatttggcgttggtgttggcaccagccggagcggcttgcgggggcagtttcaccaccaaccgcgtgcgagcggcctgcgtggatctttgcgcggagcggctcgaggccacaagcggcaaggcccaggccgtgttgatcaactccggccaggccaatgcctgcacgggtgatttgggtttgatcgatagccacagggccacccaggcggtggctgatcagttggggctgagccaagacgaggtgctgatctgctccaccggggtgatcggcgtgccgattccgatggacacgctgctggccggcgttgcgcccttggtgtcggccttgggttcaactccagaagcagcagctgcggcggctgacgcgatcctcaccaccgatctgattgataagcaggtggccctggaggccgagttgggtggccgcaccgtgcgcatcggcggcatggccaaaggctcgggaatgattcatcccgacatggcaacgatgctggggttctttagttgtgatgccgccgtgccagctgatgtgtggcaagcgatggtgcgccgtgctgtccagcactcgttcaacagcatcaccgtcgatggcgacaccagcaccaacgacaccgtgctggcttacgccgctggagagccattggccgttgaacaccacagtgggctcgagcaagggctgaccacggcgatgcagcagctggcccgcgccattgcccgcgatggggaaggagccacattgctgttggaagtgcacgtagaaggcgctgctgatgaagcggcagcccaggccattgcccgcacggtgtgtggctcctcgctggtgaagaccgccgtgcatggccgcgatcccaattggggccgcatcgttgcggccgctggccgcgctggggtgccgatggatcctgatgccgtggccctgtggctcggcgaacatcagctcatggccgctggtcagcctttggcctttgatcgcgcagcggccagcgcctacatgcgcgagcgggcggcgagctcgtatctgcttgatgacaccgtggtgattcgcttggtggttggtcagggttcaggcacagcaacggcctgggggtgcgacctttccgatcaatacgtgcgcatcaacgccgactacaccacgtga

SEQ ID NO: 234542 - DNA, 1303 bp, Unknown
  Bacterial polypeptide expressing nucleotide sequence isolated from the Sargasso Sea
catgaaatttaacataaacaattttattaaaactagtagtcaaagctctaaaattgttgattttcaggatttagatcatatcgatggagtttcaatttctgcagtcagtgctggcttatataaatttaggagagatgatttggttttattttattttagaaatggtgcaaattatgcctctgtatatactcaatcaaagttaatatcagaaaatttaaaatggaataaaaaaattaaagcaaaaaaaatatttgcattattagttaacactagaaatgctaatgctttaactggtccagatggatatgatgcattgaggaaaatttctttagacttatcctcaaaattaactgagatacagaaaagagatgaagatgctccaaaacaaatttcgccaaaagaaatactttttggttgcactggtacaataggagagaaatttccattagaaaaaattaaaaattcattaccagaattagttgagaaaataaaatatacacaaaataaattaatctggatgaaagcctcaatgggtataatcacaacagatttaaaacccaaagtatcaatggctgaaacaaaaattggttcttcaacaataaaaatttatggaattgcaaaaggctcaggcatgatttatccaaatatggcaactacattgggttatatatttaccgatgcaactttatcctcatcaattttaaatgatgtcttaaaaaataatataaagacaacattcaatgcaatttcatgtgatggtgacacaagtacaaatgatatggtttctatattttcaacatgcacagttaatcactcagaaattaaaaaatatactgatactagacttaaaaaatttaacgaggcagttcattatgttttattaaatttagccaagcaagttgtttctgatggagaaggagcttctaaatttatttctattaattgtataaattgcaagacagaaaaggatgcaaaaaatatatcttttaaaatagcaaactcattattagttaagacagcaattgcaggtgaagatccaaactggggaagagtagctatggcaattggaaacagtgaccctaaaattaatgaacaaaaattatctatttcttttgggaattataaaatttttcataagggatctttatacaagtcttatgacgaagaaaaagttatggaatacatgaaaggccaattaattgaaataaaagttgatattggtcaaggaattaaaaaatttaaatcatacaccatggatttaacaaaaaaatatattgaaattaatgctgattataggacttaa

SEQ ID NO: 234543 - DNA, 1126 bp, Unknown
  Bacterial polypeptide expressing nucleotide sequence isolated from the Sargasso Sea
atcagtttatacacaatccaaaataatttctgaaaatattaagtggaacttaaaaattaaaacaaaaaagattaaaggtttgttggttaacactagaaatgcaaatgcatttactggcaagcaaggatttaatggcattaaagagttagccaatgacttatctgaaaaacttacagaaaaacaaaaaatagatgaagaagaaccaacaaaaatatatccccaagatttgttatttgcatctacaggcacaattggtgaagaatttcctacagaaaaaattaaattaaatttaaataaactagttgaacaaattaagtatacacaaaataaatatatttggataaaagctgcaatgggaatattaactacagatttaaaacctaagcttacttgtgaagagtgtaagattggaaaatcaaatgttaaaatttatggtattgcaaaaggatcaggaatgatagcacccaatatggctaccacccttggatttatttttacagatgcaaatctttcttctggtattttagaacaaattttaaaaaaaaatattgataatacttttaatgcaattacttgtgatggagacacaagcacaaatgatatggtttcaatattttcaacgtgcaaaatcaacaatccaaaaatacacaatataaaagacaagaaattaaaagaatttgataaaactcttaattctgtattattaaatttagcaaagagagtcgtttctgatggagagggtgcatcaaaatttatagaaattacttgcgtaaattcaaaatcaaaagatgatgcaaaaaaaatttctttttcaattgcaaactccccattggtaaagactgctatagctggagaagatcctaattggggtagattgattatggcaattggaaaagctaatgttagattagacttaaaaaaaatctcaattaaattaggtaatcacaaaataattgataaaggagaaaaatctaattcttataatgaaaaagatttaaaaaaatatatgcaagacgaaaggatagatataataattgatcttggtattggaaaagaaagttttacagtttatacaatggacttaacaaaaaaatatattgaaattaattcagattacagaacataa

SEQ ID NO: 234544 - DNA, 1219 bp, Unknown
  Bacterial polypeptide expressing nucleotide sequence isolated from the Sargasso Sea
atgaaatttaacataaacaattttataaataccagcagtcaaagctcgaaaattgttgattttcaagatttagatcatattgatggagtttcaatttctgcggtcagcgctggcttatataaatttaagagagatgaattagttttattttattttagagatggtgcaaattatgcctctgtgtatactcaatcaaagttaatatcagaaaatctaaaatggaataaaaaaatcaaagcaaagaaaatatttgcattactagttaatactagaaatgccaatgcactaacaggttcagaaggttacgatgcattgaaaaaaatttctttagacttatcctcaaaattaactgagatacagaaaagagatgaggatgttccaaaacaaatttcttcaaaagaaatactttttggttgtacaggtactataggagagaaatttccattagaaaaaattaaaacttcactaccagaattagtagagaaaataaaatatacacaaaataaattaatctggatgaaagctgcaatgggtataataacaacagatttaaaaccaaaattatcaatggctgaaacaaaaattggttcatcatcaattaaaatttatggaattgcaaaaggctcaggtatgatctacccaaatatggctactacgttgtgttatatatttactgatgcaactttatcctcatcagttttaaatgatgtcttaaaaaacaatataaagacaacattcaatgcaatttcatgtgatggtgacacaagcacaaatgatatggtttcaatattttcattaagtaaagttaatcattcagaaattaaaaaatatagtgatagtaaacttaaaaattttaacaaggcagttcatgacgttttattaaatttagcaaagcaagttgttattgatggagaaggagcttctaaattaatttctattaattgtattaattgcagaaccgaaaaagatgcaaaaaatatttcttttaagatagcaaactcattattagttaagacagcaattgcgggagaagatccaaactggggcagagtggctatggcaattggaaatagtgactctaaaattaatgaacaaaaattgtctatttcttttggaccatataaaatttttcacaaagggtctttgtacaaatcctatgatgaagaaaaagttatggaatacatgaaaggtaaattaattgaaattgaggttgatattg

SEQ ID NO: 234545 - DNA, 847 bp, Unknown
  Bacterial polypeptide expressing nucleotide sequence isolated from the Sargasso Sea
aaaaggtcagatccaagacttggtagagaaattaagagagaaacaaaataaatttgtatggtttaaagctgcttcatcaataatgaccacagatacaagaccaaagctagcatttgaaacatgtagggtatggaataaagatattagaatttcagccatagcaaaaggctcaggcatgatagcgcccaacatgggaactatgctatcttttgttttcactgatgcggacatcccctcagtttatttaaaaagtttattaaaaaaaacagtttcaaatacttttaatgcaataacagttgatagtgacacgtcaacaaatgatatggtcgctatatttgcaacaggaaaggttaaaacaggaaaattttacaatgttttggacccaaaactaaaagattttgaaattgcgcttcaaaaagttcttttaaatttagcaaaacaaattgtaagtgatggagaaggagcaaaaaaatttgttactgtaaaagtttcaaatgcaagatcagtcaatatggcaaaaaatattgctttttcagttgctaactcccctcttttcaaaacggcaattgcagcagaggatccaaattggggaaggattgtcatgggcattggaaagtctggtgaaaatatctctcctgaaaaaatagaaataaaaataggtgaatttaaagtcgcagaaaaaggaagaatggctgaaaatattgatgaaaagaagattaaagaatatatgcagtgggactcaattgatattgagattaatttaaagattggtcaggcaaattttgagtgttatacttgtgactttactaacgagtatataaatatcaatgcaaattatagaagttaa

SEQ ID NO: 234546 - DNA, 766 bp, Unknown
  Bacterial polypeptide expressing nucleotide sequence isolated from the Sargasso Sea
tatgactactgacacctaccctaaaataagatataaaaagtttaaattagaaaataagtttgtttcagttgtaggtatagctaaaggatctggaatgatagctccaaatatggcaactatgctggcattcatgataaccgatgttaaaatttcatatggtattttaaaaaaattaacagctaatttgtgtgataaaacattcaattctataactgttgatagtgatacatccacttcagatatggtattaatttctgctacatctaaagtagaaatgatgccaatcgaaaagttgtctgacaacagaatattgaaattttcaaaaatgttagaattaattatgaaagaactggcattagatatagttaaggatggagagggtgcaaaaaaattagttgagtatcaaattgttggagcaaaaaatgataatagtgcaaaaaatattgctttttcaatagcgaattcacctttagtaaagactgcagttgcgggtgaagacccaaattggggaagaattataatggcagttggaaaatcaggtgaaaaaattgatcaagaaaaaattaagatttattttggtcaatatttaattactaaaaatggaaaagtttattcagaatatgatgaggaaaaggcaaaaaattatatgaagaaaactgaattacttataaaggtagatttgggcataggaaaaggcagttcaactatctggggttgtgatttaacaaaagaatatattgatataaatgcagactatagatcgtaa

SEQ ID NO: 234547 - DNA, 554 bp, Unknown
  Bacterial polypeptide expressing nucleotide sequence isolated from the Sargasso Sea
ttgtgacggggatacaagcacaaatgatatggtttcattattcgcaactggtaaagccaataactcagagattaaaaatataaatgatcaaaaactcaaaggttttgaaaaatctcttttcaatgttttattaaatctagcgaaaagagtagctgcagatggtgaaggagcttcaaaatttataactataaatgttaaaaattgcaaaagcgatgaagatgcaaaaaaaatttctttttcaatagcaaattctcccttagtaaagacagctattgcgggagaagatccaaattggggaagagttgtaatggctattggaaaatcaaacgttagtttaaaattaaataaattatttttaaattttggttcatataaaattattgaaaatggaaatttatccaaatcttataatgaaaaagaagttgcaaattatatgaaaaatgaaaacattgatattatagttgatttgggaattggaaaaaaggaatttacatcctatacgatggatttaactaaaaagtatatagaaataaattctgattatagatcataaa

SEQ ID NO: 234548 - DNA, 943 bp, Unknown
  Bacterial polypeptide expressing nucleotide sequence isolated from the Sargasso Sea
aaaaatgatgaagaaaaaccaaaaaaaatagaagcaagtgaaattctttttgcatgtacaggaaccataggagaaaattttccaactgaaaaaattaaaaaaagcatttctgatttaattaaaaaaattaaatatacacaaaataaatatatatggatgaaggctgctatgggaatattaaccactgatttaaaacctaaaattgccatggaagagtgttatattggaaataaattagttaagatttatggaattgcaaaaggatcaggaatgatccatccaaatatggcaactactttaggatttgtttttactgatgcaacaatttcatcaagtattttaaaacagttgttaaaaacaaatattcaaaaaacatttaatgcaatttcgtgcgatggtgatacaagcacaaacgatatggtttctttgtttgcaaccaacaaagtagcaaacaaaaaactaagaaattcaaaagataaaaaattgaacgaatttaattctgctttatttaaagttttattaagtctttccaagagagttgctgcagatggcgaaggtgcttcaaaatttgttacagtaaaagtaaaaaattgcaaaaccgaagaagatgcaaaaaaaatttgtttttcgatagcaaattctccattagtcaaaacagctattgctggggaagatcctaattggggtaggataataatggcaattggaaaagccaatgtaaatttaaatccaaaaaaattggcaattcagattggaaaaattaaagttatagaaaatggaaaaatatgcccatcttacaatgagcaagatgccgcaaattatatgaaagaaaaagcaattgatttgtctgtaaatttaaatttaggaaaaaaagaatttacatcctatacaatggatttgacaaaaaagtatattgagataaatgcagattatagaacctaaa

SEQ ID NO: 234549 - DNA, 1216 bp, Unknown
  Bacterial polypeptide expressing nucleotide sequence isolated from the Sargasso Sea
gatggaatctgagattaagataaataaaaaaggagatatatgttctccaaaaggttttttgtctggttctatattttctggaatcaaatcgccaggtcaagataaaagagatattggaataatttattctgaatcagattgtattagtgcaggaacttttactcaaaatactgttgtttcaccatcagttacatggacaaaagatattacttctaatggtaatgttagggctattgtagctaactctggatgtgcaaattgtgctgttggagaacaaggtctcatagatgccaaggaaatggcatctattgctgctaatactttgggcatagatcaaaaagaagttgcagttgcgtctactggaataattggtgtagagcttcctatggcgttaatgagaaaatttattccagaaattaagatgtcaaaaaatgatggaaatggttttgcaaggtcaatactaactacagatactaaaactaaagagatttcagtttcttttgaaattgatggtaaagaaataaatgtagctggagttgctaaaggttcaggaatgattcatccaaacatggcaactatgttggcattcataactagtgatatagatattgaaaaatctgctcttcaagaaattctaaaaaattcagttaaaaaatcgtttaaccaaattagtgtagacggagatcaatcaaccaatgatactgtgctgctcttggcaaatggaatggctaaaaataaaaaaataaatacacaaggcgaatctaaaaaatttattgaagcattagatattgtttgtacatttttagctaaagagatcgcaaaagatggagagggtaacacaaggctaattgaggctactgttacaggagccaaaactgaagaagatgctatgcttgcatctaggtttattgtaacctcaaatctcgttaaaacagctgtatatggtcgtgatcctaattggggtagaataattatggccttaggagcatctcaaattcctcttgaagaatctaagattgaaatatttgtaaatgatattcaaattgtttctgaaggaattgcaatttcatataatcatcagagtatagttatagctatgggtgaagagttaattcgatttaagattaatcttaatattggatcagaatctggagtagcctggggtagtgaattgacagaagaatatgtagttttcaactcagcttatacaacttaa

SEQ ID NO: 234550 - DNA, 757 bp, Unknown
  Bacterial polypeptide expressing nucleotide sequence isolated from the Sargasso Sea
ttgactttgaaacaagtgtcaatagagacgattattcaaggtagaaaaataaaaatagcaggatttgcaaaaggttcaggaatgatttaccccaatatggctacaatgcttgcttttctaacctgtgatgcgggtattcaaaaagaagaatgggacaaaatgattgctattgcggtgcaaaaatcttttaatgcaatatcagttgatggagagacaagcacaaatgattcttttgttggaataaatacaggagataaaattgaaaaaaggtttttcccaatcatccaacaagggattgatattgtatgtcagaacttggcaaaaaatattgcaagggatggagagggagcaaattgtttattagaagttttggttcaaggagcaaaaaatacagatgatgcaattatgctcgcgaaatctatttgtaattctgctttggtaaaaactgcgatacatggttgtgatccaaattggggacgaatcatttctgctgcaggtaattctggagttaaatttaatttaaatgacgttgacttgtatataggaaacgcccacattttggaaaaaggccagttaaataaatatgatccacaaaaagtcacagactatattaagtccagaatgaaaggtagatatttggtagatgatattgtaaaaattatgattaatctaaattctggcgaatcgaaaggcacagcttgggggtgcgatctttctaaaaaatatgttgaaataaatagcgaatatactacttaag

SEQ ID NO: 234551 - DNA, 1024 bp, Unknown
  Bacterial polypeptide expressing nucleotide sequence isolated from the Sargasso Sea
atgcacccagtgtctcgcggcggatcagcggtggcgatggcttcttcttggcaaccgatccagggtggtgtgacggcaccgaatgggttccaggccgctggcatcgttgccggtctcaagccctcaggtaagcctgatctggcgctggtgttggcaccagagacggctgtttgtgcgggcaccttcaccacctccgtggtgcgggcggcctgtgttgacctctgccgtgatcgcctcgtcagtactgccggccaggcccgtgccgtgttgatcaactccggtcaggccaatgcctgcaccggcgatcgcggtctggtcgacagtcagcgcgccacccaggtgctggccgatcagctcggcgtcgatgcggagtcggtgttgatctgctccaccggagtgattggtgtgccgattccgatgcccacccttctggccgggttggctcctttgatggaggccttggatgacgcggggggtgatgccgcggccaacgccattctcaccaccgatctggtggacaagcaggtggcgcttgaactggaactggaggggcgccgggtgcgcatcggagggatggccaaaggctcgggaatgattcatcccgacatggccacgatgctcggctttttcagttgtgatgccggcgtcgatgccggcgtttggagggggatggtgcagcgtgcggtgcagcgttccttcaacgccatcaccgttgatggagacaccagcaccaacgacactgttttggcctttgcggcaggcccaccgctgggccaacaacaccatgccgtgttggaacagggcctcactcaggccatgcaacagctggcccaggccattgcccgggatggcgaaggggcgacctgtctgatcgaggtgcaagtggagggtgcggttgacgaggtcgcggcattgcaggtggctcgtacggtctgtggttcgtccctggtcaagaccgcagtccatgggcgggatccgaactgggggcggatcttggcggctgcgggtcgctctggtgtgtcct

SEQ ID NO: 234552 - DNA, 871 bp, Unknown
  Bacterial polypeptide expressing nucleotide sequence isolated from the Sargasso Sea
gacaagtacccaacacaaaaaattaaggaaaatttaccggaattagttgaaaaattaagagaaaagcaaaataaatttatttggttcaaagctgcctcatctattatgacaacagacactagaccaaaattagctttcgaaacatgtagggtttggaataaagatataagaatttcagcaatcgcaaaaggatctggaatgatagctccaaatcttggaacaatgctttcattcgtttttacagatgcggatataccgtcagtctttttaaaaagtttactcaagagagctgtaaccaatacttttaattccattaccgttgacagcgatacatcgaccaacgatatggtcgcaatatttgcaactggaaaggttaagactggtaaattttataatgtacttgaccctaagctaaaagactttgagttggcattacagaaagtattgttaaatcttgccaagcaaattgttagcgatggtgaaggggcgaaaaaattcgtagtagtaaaagttgccaatgcgagatcaatcaatatggcaaaaaatattgccttttcagttgccaattctccactttttaaaacagcaatggccgccgaagaccctaactggggaagaatagtaatggggattggaaagtcaggagaaactgtttcgcctgaaaaaattgaaattaaaattggagaatttaaagtagcagaaaagggaaaggtttatgaaaatattgatgagaaaaaaattaaggagtacatgcaatgggattcaataacaatagaaattaatttaaaattaggccaagcaaattatgagtgttatacttgcgattttacaaaagattatatagatcttaatgctgattacagaagttaat

SEQ ID NO: 234553 - DNA, 766 bp, Unknown
  Bacterial polypeptide expressing nucleotide sequence isolated from the Sargasso Sea
gatgactacagacctaaaaccaaaacttgctatggaggaatgcaagattggtaataaaattataaaaatttatggaatagccaaaggttcgggaatgatttatccaaacatggcaactactctaggatatatttttacagatgccgatatttcatcaaaaatattgaaacaactattaaaaaaaaatattaacacaacatttaatgcgatttcatgcgatggtgatacaagtacaaacgatatgttgtcaatttttgccacaggtaaggcaaaaaatatagaagtaaaaaatattaacgacaacagactagtagaatttaataattctttaaattcagttctattaaatttagctaaaagaattgctgcagatggggaaggtgcttcaaaatttattactataaatactttaaactgtaaaacagaagatgatgcaaaaaaaataagtttttctattgcaaactctcctttagttaaaactgcaattgctggagaagatccaaattggggaagaattattatggctataggtaaagcaaacgtaaatatcaacccaaacaaaatatcaataaaaattggtccatataaaataattgaaaaagggcaaattcataattcgtacaaagagcaagaagtttcaaattatatgaaagatgaaaaaattgatatatttgttgatctaagtatcggaaaaaaaaattttattgcatatacaatggacttaactaaaaaatatattgaaataaattctgattataggacctaa

SEQ ID NO: 234554 - DNA, 658 bp, Unknown
  Bacterial polypeptide expressing nucleotide sequence isolated from the Sargasso Sea
catgggaaccatgctatcgtacatatttactgacgcaaacgtggatggcactcttttgaaaagtttacttattgatgcaacgaaaaacagcttcaattcaatcacggttgatggcgaaacttcaactagtgacactgtaatgctaatatcaactaatgaagccagtaatgatatgatcaccaaagaagatgatccaagaattaatttgttcagaaatgctttgaattatgttgctacagacttagcaaaacagattgtacaagatggagagggcgcaacaaaatttgttgaaataattgtatctggagcaaaaaataaggatattgcaacaaatatagcaaaatcagttgcaaattcgcctcttgtcaaaacagcaatttatggggaagatccaaattggggaagaataattgcagcaattgggaaatcctacgaggagataaatcatgaggcgcttggattattttttggtgaacataagataatttctgcaggaatggcacttgataattataatgaagaaatcgtgaagcaatacatgaaaaaagatgaaattcaaatcattattgatcttggtatgggaagctctgatcatacagtttggacttgtgatttttcacacaaatatattgatataaatacagattacagatcttga

SEQ ID NO: 234555 - DNA, 1267 bp, Unknown
  Bacterial polypeptide expressing nucleotide sequence isolated from the Sargasso Sea
tatgggtatcaatttaacaaactttttatcatctaaatcaaaaaacaagagaatgatggaatttcaggatctagaccatatagatggggtatcaatttcgactgtaagcgctaatctgtatgaaaataatagagatgatcttgtcatgttttattttagagatggagcacaacatgcttctgtttacacgcagtctaaaattgtgtctgaaaatattaaatggaatctaaaccaaaaagtaaaaaaaattttttcacttataataaatacaagaaatgccaactgctttacaggtaaacaaggatataagagtttagagagaatagctgagttagcttcagaaaaactatcagaaaagcaaaaagaagacgaagatgagccaaaaaaaataagaaataaggaaatagtttttggatgcactggtacaattggagaaactttccctgaagaaaaaatcaaaaataaaatttctgaattaattagtaaattaaaatatacgcagaataagtatatttggatgaaagcagcccttggtatgatgacaacagatactcaacctaagatgtcaatgaaagagtgtttgattgggagcagcaaagtcaagatatatggtattgctaaaggctcaggaatgatacaacctaacatggcaactactttaggctacatttttacagatgcagatatttctaatgatatattaaaaaaacttctgagaaaaaatatagagaccacttttaatgcaataagttgtgatggagacacaagcacaaatgatatggtttctattttttctacaggaaaagctaaacatcctaaaataaataatgttaacgatgaaaaaataaaattttttgaagagtcacttaatgaggttttattgaacttagcaaaaagagttgttgccgatggtgaaggagcatcaaaatttataactataaacgtgcaaaattgtaaaacagaaaacgatgcaaaaaaaattgctttttcaatagctaactcgccattagttaaaacagctattgcaggtgaagatccaaattggggaagaattgtaatggcaataggtaaggctggggttataccaaattacgataaactatctataaaatttggtgattttaatattgttcaaaatggtaaacttaatgctaactataatgaaattgaaacagctgactatatgaaaaatgataatatagaaatatttgtagacatttcaaatggtacaaaaaatttattgcttacacaatggattttactaaaa

SEQ ID NO: 234556 - DNA, 1003 bp, Unknown
  Bacterial polypeptide expressing nucleotide sequence isolated from the Sargasso Sea
atgggaataaatttatcaaactttttatattcaaaatcaaaaaacgccagaatgattgattttcaggacttggaccacattgatgatttatcaatttctgttgttagcgcaaacttatataaagataacagagacgacctatcaatgttttattttagaaatggtgcaaattatgcatccgtttatacgcagtctaatattgtatctgaaaatataaaatggaatttaaatcaaaatagtaaaaagatattttcacttgttgttaataccagaaatgcaaacgcttttacaggaaaacaaggttacgatagtttaaaaaaattatctaatatcttgtcaaaagagttatctaataaacaagaacaagatgaggaaattcctaaaaaaatctcaccaaaggaaattatgtttggctgtacaggaactattggagaattatttccgtatgataaaatagttagtcaaattccaaatttgataaataaaattcgatatacacaaaataaatttatttggatgaaatctgcacttgcaatcatgacaacagatacaaaacctaaattaacaatggaggaatgcaagataggaaatgaaaaaattaaaatttatggaatagccaaaggatcaggaatgatatatccaaatatggcaacaacattagcttatatttttacagatgctagtttatcaaatgatattttaggaaaattattaaaaaaaaatataactacaacttttaatgcaatttcatgcgatggtgatacgagcactaatgacatggcaaccatatttgcaactaataaagttaaaaattctttagtaaaaagcataaatgataaaaaaattagaaattttgataacgctttacataatgttttattaaatttagctaaaagagttgtctcagatggcgaaggagcatcaaaatttgtaactgttaatgtaaaaaaatgtaaaaatgaaattgatgctaaaaaaattgcattttcaatagctaattcgc

SEQ ID NO: 234557 - DNA, 1303 bp, Unknown
  Bacterial polypeptide expressing nucleotide sequence isolated from the Sargasso Sea
tatgggtattaatttaaccaattttttatcttctaaatcaaaaagtaagagaatgatggaatttcaagatttagatcatattgatggtgtatcaatttctacagttagtgcgaatttatacaatagttcgagagatgatttagttatgttttatttcagagatggggcaaatagtgcttctgtatacactcagtcaaaaataatatctgaaaatataaaatggaatttaaatcaaaaagccaaaaaaatattttcattattaattaacacaagaaatgctaactgttttactggaagacaaggttacaaaagtttagaaaaaattgctgagattatttctcaaaaattaacagaaaaacaaaaagaagatgatgaagaaccaaaaaaaattaaattaaaagagataatttttggctgtacaggcactattggagaaaattttccagaagataaaataaaatcaaaaatacctgagctaataaataaattaaaatatacacaaaacaaattagtttggatgaaggcagcgctaggaataatgacaactgatactcaaccaaagatgacaatggaaaaatgttttattggaaatagtgaaattaaaatatttggggttgccaaaggttctggcatgattcagcctaatatggcaactactttaggttatatatttacagatgcagatatcaaaaatgatattttaaagaaacttttaaagaaaaatatagcaacaacatttaacgcaattagctgtgatagtgatactagcacaaatgatatggtttcaattttttcaacaggaaaatcaaaacatcctaaaataaatagtataaatgatgaaaaactcaaagactttgataatgcattaaataaagttttattaaatttagctaagagagttgtagccgatggagagggcgcatcaaaatttattacagttaatgttcaagaatgtaagaatgatattgaagctaaaaaaattgccttttcgatatctaattctcctttagtaaaaacagcaattgctggcgaagatccgaattggggaagaattattatggcaataggaaaagctggtgttcaactaaattatgaaaaattatctattaaatttggaagtataatgatagttcaaaatggcaaagttaatcctaattataaagaggaagaagctgcagagtacatgaaaaatgacagtattgatatttttgtaaatacctcaagtggatcaaaaaattttacagcatatacaatggatctaactaaaaaatatattgaaattaatgcagattatagaagctaa

SEQ ID NO: 234558 - DNA, 1162 bp, Unknown
  Bacterial polypeptide expressing nucleotide sequence isolated from the Sargasso Sea
atgggcattaattttaccaattttttatcctcaaaatcaaaaaataagagaatgttagaattccaagatttagatcatattgatggagtatcaatttcaacaattagtgcaaatttgtatgaagaaccaagagatgatttagtaatgttttattttagagatggagtgaattatgcatcattatatacccagtcaaaaataatatcagaaaatataagatggaatttaaatcaaaaaacaaaaaaaatattttcattaataataaatactagaaacgctaattgttttactgggaaacaaggttataaaagtttagaaaaaattgctgagctaatatctcaacaattgacaaaaaaacaattagaagatgaggatcaaccaaaaaaaattaaacctaaagaaataatttttggatgcacaggtactataggagagatttttccagaagaaaaaataaaagataatattcccgaactagtaaataaaattaaatatacacaaaataaatatatatggatgaaagcagcacttggtataatgacaaccgatactcaacctaagatggcaatggagaaatgttttattggaaatacagaaattaaaatatttggagttgcaaaaggttcaggcatgatacagcctaatatggcaactacattagcatatatttttacagatgctgatatttctaatgatatattaaaaaaattacttaaaaaaaatatatcaaatacatttaatgcaattagttgtgatagcgatactagtacaaacgatatgatttctattttttcaactgcaaaatcaaaacactcaaaaattaataatttaaatgatgaaaagttaaaaaattttgataattcattaaacaaagttttattaaatttagcaaaaagggtagtcgcggatggagaaggtgcatctaaatttattacaattaatgttcaaaattgtaaaaatgaaaatgatgctaaaaaaattgctttctcggttgctaattctccacttgtaaaaactgctatagctggtgaagatcctaactggggtcgaattattatggcaattggtaaagccggagtacaatttaatcatgataaactatcaataaaatttggaaacttaaatattattcaaaatggaaaaatttatactaactataatg

SEQ ID NO: 234559 - DNA, 1108 bp, Unknown
  Bacterial polypeptide expressing nucleotide sequence isolated from the Sargasso Sea
atgggtatcaatttaggcaatttcttatcttctcaatcaaaaaataagagaatgaaggaatttcaagatttggatcatgttgatggggtatctatatcaactatttgcgcaaatttatataaagatccaagagatgacttggttatgttttattttagagatggcgccaattatgcctcagtatacactcaatcaaaaattatatctgaaaatattaaatggaatctaagcagtaaagtaaaaaaagtattttcacttcttataaatacaagaaatgcaaattgttttacgggcaaacaaggatttaaaagtttagagaaaattgctgaattgatttcagaacaactcacaaaaaaacaaaaagaagatgaggagaaacccaaaaaaattaaatcaaaagaaattatttttggatgtactggcacaataggcgaaacttttcctgaggagaaaataaagataaaaatccctgatttaataagtaaaattaagtacacacaaaataaatatatttggatgaaggcagcacttggaatgatgactacagacacccaaccaaaaatggcaatggaagagtgtttaataggtaatagtaaaataaaaatatttggtgttgcaaaagggtcaggcatgatccagcccaatatggctactacacttggctacatattcactgatgcagatattacaaataatattttaaaaaaattgttaaaaaagaatatatctacaacatttaatgcaatcagttgcgatggtgacacaagcacaaatgatatggtttcaatattttctacaggaaaagctaaacattcaaagattaataatttcaatgatataaaaattaaagagtttgataatgcattaaataaagttttacttaatttagcaaaaagagtagttgccgatggtgagggggcatctaaattcataacaattaaagttcaaaattgtaaaaatgaaaacgatgcaaaaaaaattgccttctcaattgcaaattcaccattaataaaaactgctatagctggagaagatccaaattggggaagaataattatggcagttggcaaagctaatgttccaattaatataagaaaacttatcaata

SEQ ID NO: 234560 - DNA, 1087 bp, Unknown
  Bacterial polypeptide expressing nucleotide sequence isolated from the Sargasso Sea
aatgacaattaacatcaaaaacttcctaaaagataattctaaattatcgaaaatgggcgagtttcaaaatttaaaacaaattgaaggcatggaaatgtcttctatatccgctgacctctatggtgacggaagagatgatttagctttattttattttagcaaaggtgcaaattatgcaactttaactactactaactctataacttctgaatttattccttggaataacagctctcataaaaagattataaaggcattattagtaaatactaagaatgccaacacttttacagggaaacaaggaaaagaaagcattgatatattggcaaaaaacctttcaagaattttaaccttaaaagagtcaaaatcaaaaaagggcacaagtgaaacagtaaaaatcaaagatttaatatttgcctcaactggagttattggagaagaatttcctgtggaaaaaataaaagagagactgcaagatttggctgataagttgaggagtgatcaaaataaaatgtattggttgaaaatagcttcagctataatgacaacagataccaaaccaaaagttgcttatgaagaaataatcattggagatgaactaattagaatatgtggaatagcaaaaggctctggtatgatagctccaaatttagcaacaatgttatcttttatttttactaatgcagatattaattctaatttattaaaaactttattaaaaagagcagcggctaattcttttaatgctataactgtagatagtgatcaatcaactaatgatatggtttcaattttttctacaagagatttaaaaattggccaaaatttatcgttaaatgataaagtggttcaaaaatttgagttagcattaaaaaaattgtgtcttaaccttgctaaacaagttgtagtagacggagaaggagcaaaaaaatttttaactattaacgtaattaatgcaaaatctcttggcagcgcaaaaaaaattgccttttcaattgctaattctcctttagtaaaaacggctgttgctggagaggaccctaattggggaagaatagctatgggtctaggaaaatctggagagccc

SEQ ID NO: 234561 - DNA, 1306 bp, Unknown
  Bacterial polypeptide expressing nucleotide sequence isolated from the Sargasso Sea
atgacaataaacctaaaaaattttttaaaagacaaaccgaaattgtcaaaaatgggggaatttcaagaactccaagaaattgatggtcttgaagtgtctgcggtttcagctgatttatacgggagcggcagagatgatttagcactcttttattttaaagatggtgcaaattatgcagctgtttatacaaataactcgatatgttctgagtctatagtttggaacaaagggattagaaaaacatctataaaagccttaatggtaaatactaaaaatgcaaacacctttactggaccccaaggttttgaaagtttagatagtatttcaaaaaacttggcgaaaaatttaactttaagagaagcacagaaacaagagggaactaaaaatgttgttaagcctaacgaaatcttatttgcctcaactggagttataggtgaaaagttccctacacaaaaaataaaagatagtattccaagtttagttgaaaagctaagagatagacaaaataaatttatttggttcaaatctgcctcatcaattatgacaactgacacaagaccaaaactagcttacgaagagtgtaaatttggtaatcatgatattaggctttgtgggattgccaaaggttcaggcatgatagcaccgaatttaggaaccatgctctcattcgtttttacggatgcagatataccttcaatttatttgaagagtttacttaaaaaggcagtttcaaactcttttaattctataacagtagacagtgacacttccacaaacgatatggttgctattttttcaacaaataaattcaaaacaggtaaagtttataatgctttagacccaaaactaaaggattttgaaaatgctttacaaaaacttttattaaatttagcaaaacagattgtaagtgatggcgaaggtgcaaaaaaatttgttacagtaagagtcatcaatgctaggtcacaacaaatggcaaaaaaaattgcgttctcggttgcaaattcacctctatttaagactgcaattgcgggagaggatcctaattggggaagagtaattatgggaataggaaaatctggagaaaaagtttctgtagataaaattgaaataaaatttggagatcttaaagttgctgagaaaggtaaaatttatgataattatgatgaaaaaaaacttaaggaatatatgaaatgggactcgctattaatagaaatcaatcttaaacttggacaaggctcatatgactgttatacatgtgactttacaaatgattatgtaaaaattaatgctgattatagaaactaat

SEQ ID NO: 234562 - DNA, 1009 bp, Unknown
  Bacterial polypeptide expressing nucleotide sequence isolated from the Sargasso Sea
tgaaaaaaatttagaaagtaaagaaatacaagcattaattataaattctggaaatgcaaacacttttactggtcaggctggtgttaaggcattgaccaaaataagtaaggttgtttcaaataaatttaaagtctcaatcaagaaggttttctttgcttctacaggtgttataggagaaaaatttcctgaacagaaaatagtaaatgtattaaaaaaaaataaatctaattctaaaaactggctgcaagcagctaaagcaattatgacaactgatactttcccaaaggcaatttcagtcaaaacaagaattgaagataaaacaatcactatcacaggaatagcaaaaggatctggaatgatagagcccaacatggctacaatgttgggattcatatttatagattgcttaataccgcaaaatatattgcaaaaattattaaaagatcttgtagataattcatttaatcaaataactgttgatggagatgagtctacaaatgatactgtaattatgactagtactaatagtgtttcattaaaaaatacaatttcatcaattaaagataaaagaatactaaaaattaaaaattctttacttactgtgtttaaatatttggcagaacaaattgtgcgagacggtgagggtgctacaaaattattaaatataaaagttgaaagtgctaaaaatttatcccaagcaaaaaaaattgctaaggcagttgcaaattccccactggtaaaaacagccttttacggaaatgatccaaactgggggagaatcgtaatggctattggaaaaacgtatgaaagaataaaccctaaaaaacttaagattcatattggtaagcaaatagttgtaactaatggaacagaacataaaaaattaaatttacacaaattaaaaaggtatatggcaagtaaagaaattgatattaaacttgatcttggacaaggaaatgtttttatcaatcgcaaacatgtgattttcacacaaatatgtgatatcaat

SEQ ID NO: 234563 - DNA, 766 bp, Unknown
  Bacterial polypeptide expressing nucleotide sequence isolated from the Sargasso Sea
gctgctcttggtataatgactactgacaccaaaccaaaaatagctatggagcagtgtaatataggaggtgaaatagttaaaatttatgggattgccaaaggctctggcatgatacatcctaatatggcaacaaccctggcttacatttttacagatgcaagtttatccaacgatattttaaataaactattaaaaaaaaatatctttaacacttttaatgccatttcttgtgatggggatactagcacaaacgacatggtgactatttttgcaactaataaaatcaacaattcaaaaataaaaaatataaatgaaaataaaattaaaaattttgacagagctttaaataatgttctattaaatttagctaaaagagttgttgcggatggtgagggagcatcaaaatttatttctataaatgtgtctaagtgtaaaaatgaaatagaggcaaaaaaaatagctttttctataggaaactcagccttagttaaaactgcaatagcaggtgaggatccaaattggggaagagtaataatggcaattggtaaagctggaccaaaaattaatttaaaaaaactttgtataaaatttggaaacttaaaaatagttcaagacgggaagttgtaccaaaattatagtgaagaagtagtatctaaatatatgaaaaaggaaaatattgaaataaatgttgaagtatacacaggaaaaaaagattttactgcttacacgatagatttaaccaagaaatatatagatatcaattcag

SEQ ID NO: 234564 - DNA, 793 bp, Unknown
  Bacterial polypeptide expressing nucleotide sequence isolated from the Sargasso Sea
atgtctggttcaagctgctagcgcaatcatgacaacagacacgagaccaaaagttgcttatgaggaatgtaagataggtaataagttaataaaaatttctggaatagcaaaaggttctggtatgatttatccaaatatggcaactatgttggcctttatatttactgacgcaaatataccttctgtttttttgaaagctattttaaaaaaagttgtttcaacaacatttaactccattactgtagacggtgatacctcaacaaatgatatggttggaatttttgcaacaggtaaagcaaaaaattcaaaaatatataacgtgttggatcctaaactacaagattttgaaaaagccttacacagattgtcattgaatcttgctaaacaaatagtggtagatggagaaggggcaaaaaaatttatttctgtaaatgtaattggcgcaagatcaactagaatggcaaaaaatgttggtttttcaattgctaactcccctctttttaaaacagctgtagctggagaagatccaaattggggaagaatagcaatggctatcggaaagtctggtgaaaatgttattcaaaacaagatacaaataaaaataggaaattatttagttgctgagcaaagcaggatggtaaaaaattataacgaaagtgacataaaaaaatatatgcagtgggactcaatcgatattgaagtaaatttaaatattggcaacgaatcttacacagtttatacttgtgactttacacatgattacattgatataaatgctgattataggaattaa

SEQ ID NO: 234565 - DNA, 826 bp, Unknown
  Bacterial polypeptide expressing nucleotide sequence isolated from the Sargasso Sea
aaaaatattttctttattagtaaataccagaaatgccaactcatttactggcacccatggttataaaagcatgcaaattattgcagaaaatatctccctccagttatcagataaacaaaaacaagatgaagatagtcccaaaaaaatcaaaccaaagaatatactatttggatgtacaggcactattggtgaaatttttccaacaaataaaataaattcaaaaataccagagctaattaaaaatataaaatacactcaaaataaacttatatggatgaaagccgcacttggaattatgaccacagacacacaacctaaaatggctatggaggaatgttatattggaaaaacattaataaaaatttatggaatagctaaaggttcaggaatgatacatccaaatatggcaacaactttaggatatattttcacagatgcagagctatcaaatgagatattaaaaaaacttttaaaaaaaaatatagagagaacatttaatgcaataacttgcgatggagatacaagcacaaatgatatggtttcctttttttccactggcaaagccgatcatgtaaaaataaaaaacatcaatgataaaagattaattgattttgataattcccttaataaagttttacttaatttggctaaaagagtagttgctgatggagaaggcgcatcaaaatttataaaaataactgtatcagatgctaaaacagacttggacgcaaaaaaaattgctttttcaataggcaattcttcactcgtaaaaactgcgattgcaggagaagatcctaattggggaagagtaatcatggcgattgga

SEQ ID NO: 234566 - DNA, 892 bp, Unknown
  Bacterial polypeptide expressing nucleotide sequence isolated from the Sargasso Sea
ttgtgctgcgcccgtacaaatttcaaaagataatctaaatgaatcgaaaccacgtatttgcttaattaatgccggtaatgcaaatgctgggacaggtgaatcaggtatccaaaatgcaagaattgtttgtgaaactttggcaaatcttacgcattgctcaaaaagtgaaatacttcctttttcaacaggagtaattggagaagatctgccagttgaaaaaataaataaagtactcccaattttgcttaaaaatttatctggagaccattggcttgatgttgcaaagtcaattatgacgactgatacaataccaaaagctatatcgggacaggtaaaaattttaaattcaactattagtattactggtattgcaaaaggatctgggatgataaaaccaaatatggcgactatgctgtcttttttagcgactgatgcgaacgtaaccaaagattgtttagatgaaataaaggatagagcaataaaaaaaagcttcaacagaattatagtagatggtgatacatcaactaatgattcatttcttttaatttcaacatgtaaagcaaataattcaattataaacaataaggacagtaaggaatttaaagtattagaaaatgaaattacaaaagtctgttgtaacttggctcaagctattgtccgtgacggagaaggtgcaacgaaatttatttcaattgtggttgaggaaggtaaagatgaggctgaatgtctttctgtggcatataaaattgcacaatcaccccttgtaaaaactgcatttacagcttctgatccaaattggggaagaataatagctgcaataggtaatgctaatgtaggcagactagatactaccaaggtaaatatacacattaataatgtatgtgtagttgat

SEQ ID NO: 234567 - DNA, 698 bp, Unknown
  Bacterial polypeptide expressing nucleotide sequence isolated from the Sargasso Sea
cttgttgaaaaattaagagagaagcaaaataaatttatatggtttaaagcggccgcatctataatgacaactgatactagacctaagcttgcttacgaagagtgtagaatttggaataaagatattagactttctgcaattgcaaaaggttctggaatgatatctccgaatatggcaacaatgctagcttttgtttttacagatgcagaaatcccatcggtattcttgaaaagtttacttaaaagagcaatgacaaatacttttaatgcaataacagtagatagtgatacttctacaaatgacatggtagcaattttctcaagcaataaagtaaaaacaggaaaattctacaatgttttagatcctaagctaaaagattttgaaatggcacttcaaagattactccttaacttggcaaaacaaatagttagtgatggagagggagcaaaaaaatttataacggttaaagttgtaaatgcaagatctcaacaaatggcaagaactattgctttttcgattgccaattcacctctttttaaaacagctatggccggtgaagatccgaattggggaaggataattatggcaattggaaaatcaggagaaaaaatttcacctgataaaattgaaattaaattcggagaattgaaggtagctgaaaaaggaaaaatttctgatgaatacgatgaagcaaaatt

SEQ ID NO: 234568 - DNA, 766 bp, Unknown
  Bacterial polypeptide expressing nucleotide sequence isolated from the Sargasso Sea
tatgacgacagatactagacccaaactggcctatgaagagtgtaaaattggaaataaacttataaaaatttcaggtattgcgaaaggatcaggcatgatagctcctaatatggctacaatgttatcttttatatttactgacgcaaatataccttctgtatttttaaatgcaattttaaaaaaagtttgtatgacaacttttaattctataactgtagatggagatacttcaactaatgatatggttgcaatttttgcaacaggtaaagcaaaaaattctaaaatttataatgttttagatcctaaattacaagattttgaaaaagctttgcatagactagcgcttaatcttgctaaacaaattgttgtagatggggaaggagcaaaaaaatttattacaattaaagttatcggcgcaagatcaagcacaatggcaaaaaaaattggtttttctatcgctaattctccacttgttaagactgctattgctggagaagatccaaattggggtagaattgttatggcaattgggaaatctggagaaaatattgccccaaacaaaatacaaataaaaattggtgattatttaattgctgaacaaagtaaagcggccaaagattataatgaaaaagatatcaaaaattatatgaaatgggattcaattgcaattgaagtaaatttaaatttaggtaacgcgtatcatacagtttatacatgtgattttacgcatcgctatattgaaataaatgctgattatcgaaactaa

SEQ ID NO: 234569 - DNA, 891 bp, Unknown
  Bacterial polypeptide expressing nucleotide sequence isolated from the Sargasso Sea
gcttacagaaaacaaaaagaagacgaagattatcccaaaataattaagccaaaaaatattatttttggatgcactggaacaattggtgagaaatttccggaagaaaaaataaaattgagaattcctgaccttattaaaaatataaaatatacccaaaataaatacatttggatgaaagcggctttatcaataatgactaccgatacgcagccaaaaattgcaatggaggaatgtaaaattggaaatacactggtaaaaatttatggtatagccaagggttctggcatgatacagcctaacatggctacaacattaggttatatttttactgatgcagatatttcaaatgatgtattaaaaaagttacttaagaaaaatattgagaacacatttaacgctatttcatgtgacggagatactagcactaatgatatgatctcaattttttcaacgggaaaagcaaaaaacaccttgatcaaaacaattaatgataaaaaactcaaatcttttgatgtatctttaaataatgttttactaaatttggctaaaagagtagttgcagatggagaaggagccacaaaatttgtaacaataaacgttttaaattctaaaaccgaactcgacgctaagaaggtgggtttttcaattgctaactcttctttggttaaaactgctattgctggagaagatccaaattggggaagagtaattatggcaataggaaaatccgggatagatataaatttaagtaaattatctttaaaatttggcgaatttataattgtaaacaaaggtaagatttatagccagtataatgaaaatgaagctgcgaagtatatgaaaaattctgatattaatattagtattgatattggaaatggaaaaaaaatt

SEQ ID NO: 234570 - DNA, 805 bp, Unknown
  Bacterial polypeptide expressing nucleotide sequence isolated from the Sargasso Sea
taagaaaacatatttgataaatgacaataacatttttgtagcctcaacaggtgttattggtgagaaatttcctattagtcaggttttaaaaacaattactaaacctcagatgactaaggaatggatgaattctgcaagagcaattatgactacagatacttttccaaaaggagtgtccgtaacttcaatgattgaaggaaagaggaatacaattactggtatttctaaaggttcaggcatgattgagcccaatatggctacaatgttaggtttcatttttatcgatgcagattttggatcggaaattttgaataaactattaaaagaaaatatatcttacagttttaattcaatttctgttgatggtgatgagtcaacaaatgatacagttattcttgcttctactagagcaataaaatttaaaaaaccaattaaaaatgtcaatgataaaagaattattgattttaagaaaaaattaaaaaaagtatttatgaaattatcagagctcattgtaagagatggagaaggtgctactaaattaattgaaattaatgttttaaatgccagaaatgaaaaagacgcaaacacatttgcaaagtcaattgcaaattcacctctagtgaagactgctatacacggctcagatcctaattggggaagaattataatggctttaggaaaaacttatataaatataaacattaaaaaactaaaggtttattttggtaaatatttagtaataaaaaatggtacagctcactccaaagtggatgataaaataatttctaaatacttgggaaaagac

SEQ ID NO: 234571 - DNA, 858 bp, Unknown
  Bacterial polypeptide expressing nucleotide sequence isolated from the Sargasso Sea
ttgaaaaaatatcccatcaaataccaaatttaattaataaaattcgttatacacaaaacaaatttatttggatgaaagcagcacttggaatcatgactaccgacactaagccaaaaattgccatggaagaatgcaagataggaaatgagaaagttaaaatttatggaattgccaaaggttcaggcatgatacatcctaatatggcaacaaccctggcttatatttttacagatgcaagtttatctaatgatattttaagaaaattattaaaaaaaaatatttttaatacttttaatgctatttcctgtgatggagatactagtactaacgatatggtatctatttttgcaactaataaaataaataattcacaagtaaaaaatataaatgaaaataaaattaaaaattttgatagagctttaaataatgttttattaaatttagctaaaagagttgtttcagatggtgagggagcatctaaatttgtgtctataaatgtttctaaatgtaaaaatgaaatagatgcaaaaaaaatagctttttcaataggaaattcacctttagtaaaaacagcaattgcaggtgaggatcctaactgggggagaattataatggcaattggtaaggctggacctaaaattaatttaaaaaaactttgtgtaaaatttggaaatttaaagatagtagaggaagggaagctctacaaaaattatagtgaagaggtggcaattaaatatatgaaaaaagaaaatatagaaattagtgttgaagtttacactggaaaaaaagaatttactgcatacactatggacttaacaaagaaatatatagatattaatgcagattatagaagctaaa

SEQ ID NO: 234572 - DNA, 869 bp, Unknown
  Bacterial polypeptide expressing nucleotide sequence isolated from the Sargasso Sea
gatcggggagtttttacctatgagtaggctcgcgggagcgattttagaggcttcgactaagctagactctggtgggtgggaacgagcggcaaccgcgataatgactaccgatacgagatccaagatagtcagctctcaaactaatatagcaggacaattgattacgattacaggaatagcaaagggttctggaatgattaagcctgatatggcaaccatgcttgcatttattgcgtcagacattccaatcgaaaggaccctgttaaaaaagctattggctgagatatgcgacaaaagtttcaatcgaattacagttgatggagatacctctacaaatgactgttttatgttggcatgtactggcgcagctgacatgcccatgatttcaagtgaagccgatcgacgctatgaacaagttaagagtgtttttttggagcaggcaagaaatctggctcaatccatagttagggatggggagggagcaactaaatttatttccgtgttagtacagggtggtgtcgatgaagaagagtgtttagccgtcgcttactcaatagcagagtcgcctctagtaaaaactgccttatttgcaggtgatccgaattggggacgtttttgtatggctattggtaaagcgcccgttgataatatcgacacaagtttagtcgagctctggctagatgatgttctcgttgccaaagaaggaatgcttagcagttcttatagcgaagatcagggtgtcaaggttcttgcgcaggacgaatttttagtgaaagtttgcttgggtcggggggattcgtcggcggagatctggacaacagatctttcttacgaatacgtgaaaatcaatgcggaataccgtacttgat

SEQ ID NO: 234573 - DNA, 868 bp, Unknown
  Bacterial polypeptide expressing nucleotide sequence isolated from the Sargasso Sea
atgtttggttgtacaggaactattggagaattatttccatatgataaaatagttggtcaaattccaaatttgataaataaaatccgatatacacaaaataaatttatttggatgaaagctgcacttggaatcatgaccacagatacaaaacctaaattggcaatggaggaatgtaagataggaaatgaaaaaattaaaatttatggtatagccaaaggatcaggaatgatatatccaaacatggcaacaacattagcttatatttttacagatgctagtttatcaaataatattttaggtaaattattaaaaaaaaatataaccacaacttttaatgcaatttcatgcgatggagatacgagcactaatgacatggcaacaatatttgcaactaataaagtcaaaaattctttggtaaaaagtataaaagataaaaagattaaaaattttgatacagctttacaaaatgttttattaagtttagctaaaagagttgtttctgatggtgaaggagcttcaaaatttgttactgttaatgtaaaaaaatgcaaaaatgaaattgatgcaaaaaaaattgctttttctatagccaattcacctttagtgaaaactgcaattgcaggagaagatcctaattggggaagaattataatggcaataggcaaagcaggaccaaaaataaatttgaataaattatcaattaagcttggcaatattaaaattgtgcagaacggaaaattacaccaagaatatgatgaaaaattagcagcgaattatatgaagaatgaaaatattaatttagatattgaggttttgagtggcaataaaagttttacagcttatacgatggatcttacaaataaatata

SEQ ID NO: 234574 - DNA, 787 bp, Unknown
  Bacterial polypeptide expressing nucleotide sequence isolated from the Sargasso Sea
atgaaagcagcactaggaataatgacaactgatacacagcctaaaatggcaatggaacaatgtttgataggaaatgcaaatataaaaatttatggaattgcgaaaggatcagggatgatacagcctgatatggcaacaacacttgcttatatttttacagatgcagatatatctaatgatattttaaaaaaattattaaaaaaaaatgtgtataatacttttaacgctatcacttgtgatggagataccagtacaaatgatatgataacaatattttcaacttctaaagcgaatcatacaaaaattaatagtatttcagatcctaaaatcaaagaatttgatgaagcgttaaataaagttttacttaatttagcaaaaagagttgttgctgatggagagggtgcatcaaagtttataacaattaatgttaaaaattgtaaaacagacgaagacgcaaaaaaaattgcattttcaatttctaattcttcattagttaaaactgctattgcaggagaagaccctaattggggaagagtagttatggcgataggaaaagctggagcaacaataaatttagaaaaattatcgattaaatttggaaatataattattgtctctaaaggcaaagttaatagtaattatagtgagtctgaagttgcaaattatatgaaaaattctaatattgatattcatattgatggatcaagtggcactaaaaattttattgcttatacaatggatttgacaaaaaaatatgttgaaattaattcagattataggtcttaaa

SEQ ID NO: 234575 - DNA, 782 bp, Unknown
  Bacterial polypeptide expressing nucleotide sequence isolated from the Sargasso Sea
ttttggttgcacaggtactattggagaaatttttccatatgaaaaaatttcaaataatattccaaatttaataaaaaaaattaattatactcaaaataaatttatttggatgaaagcagcacttgcaatcatgactacagacacaaagccaaaattagctatggaggaatgtcatattggaagtgaaaaagtgaaaatatatggaattgctaaaggttcaggaatgatatatccgaatatggctactacactcgtgtatatatttaccgatgcaacattatccaacgacattttaggaaagttattaaaaaaaaatataacaaatacatttaattctatctcttgtgatggagatactagtaccaatgatatggcaactatttttgcaactaatgaagtaaaaaattctcaagtaaaaagtattaacgaaaataaaattaaaaattttgataaagctttaaataatgtccttttgaatttagctaaaagagttgtttcagatggtgaaggggcatcaaaatttataacaataaatgttagtaaatgtaaaaatgagaaagacgcaaaaaaaattgctttctcagttgcaaattctccattagtgaaaactgcaattgctggagaagacccaaattggggacgagttgtaatggcaatcggtaaagctggacctaaaataaatttaaataaattatcaattaagtttggaaatttaacagttgtagaagctggaaaattaaatcaaagttatgatgaaaaacaaacagcgaattatatgaaat

SEQ ID NO: 234576 - DNA, 898 bp, Unknown
  Bacterial polypeptide expressing nucleotide sequence isolated from the Sargasso Sea
ggtattaatgcgttaacgaaaataagtaactttgtttctaataaattcaaagtctcagttaagaaggtattttttgcatctacaggtgttattggagaaaaatttcctgaaaataaaatagtaaatacattaaaaaaagataaatcaaaaactaataattggttacaagcagcccaatcaattatgacaaccgatacttttccaaaagcaatttctgtaaaaacaatgattgaaaataaaacaatcacaatcacagggattgcgaaagggtctggaatgatagagccaaatatggcgacaatgttgggatttatttttatagattgtttaatacctcaaaatattttacagaaattattaaaagatcttgtagataagtcattcaatcaaataactgttgatggagatgaatctacaaatgatactgtaattatgactagcactaatagtgtttcattaaaaaataagatttcatcaataaaagataagagagtatcaaaaataaaaaactctttacttcctgtcattaaatatttagcggaacaaattgtacgagatggtgaaggtgcaacaaaattgataaacataaaagttgaaagtgccaaaaattcaccgcaggcaaaaagaattgctaaggcagtcgcaaactccccacttgtaaaaacagctttttacggaaatgatccaaattgggggagaattgtaatggcgattggtaaaacatatgaaaaaatagatccaaaaaaacttaagatttatataggtaagcaaacagttgttgctaatggagcggagtataaaaaattaaatttacaaaaattaaaaaaatatatggcaagcaaagaaattgatctaaaacttgaccttggacaaggcaattattctttgaaacacaaac

SEQ ID NO: 234577 - DNA, 997 bp, Unknown
  Bacterial polypeptide expressing nucleotide sequence isolated from the Sargasso Sea
ctccccggagcccccgttatcgtcggacgtgaacatgcagctaagggacacttcagggcaatcgtggtcaactcgaaatgtgccaatgtcggattaggggagcagggattgcaggatgccaggaagatgtgccagtggaccgcagaagcgcttatgataaaacctgagttggtcctgccagcttcaacaggagtgatcggcctgcctttgccgatggaaaaaattcgtgaaggaaccctttctattgcaacaaacctggacaactccgcagaggccgttgagtcctttgcaagagccatcatgaccaccgacacccatccaaaatggagaaatgcccgatctggacatgcaagtctgctcggagtggccaaaggatcaggcatggtcgaaccgaacatggcaacgatgctgagctatttagtgaccgatgctgaaatcgatcattcaaaacttcaggagatgctgaaacgagcggttgattcatcttttaatcgtatcagtatcgatacggacacttccaccagcgatatggttgtgctgatggcaaacggaatggcaggccgggtaaacgaggatgaatttgaaaaaaacctaaacggcctctgtcaggatctggccaaagaccttgtgagagacggtgaaggggtaaccaaactgatagaattgaaaatcagtggtgcagattcaccacagatggctcagaaaatcggtaaatccatcatcaattctccgctgatcaaaactgcagtgcatggggctgacccgaattgggggcgtttcgtgatggcggttgggaaagtctttgaacatcctgtaaggcttgaggaactggaaatacgctttggtttgggtgagaaaatgcaggccgtcaattcacaacttctgaaagaggaggcggtaaagttggaaagcattagcgaacttcttcagaaggataccattccaattgaggtggttgtcggtcatggagatcacgccgaaatcttttggggctgcg

SEQ ID NO: 234578 - DNA, 913 bp, Unknown
  Bacterial polypeptide expressing nucleotide sequence isolated from the Sargasso Sea
tattagaaaaaattttataaaagccttactagtaaacaccaagaatgcaaatacattttcaggaccaaatggccaagaaggacttcaaactatatctaaaactttggccaaaaatttaactttaaaagaagcacaaaaagaagatggtacaactaatgtaataaagccaaatgaaattttgtttgcctcaacaggtgtgattggtgaaaaatttccaacacaaaagataaaaggaagtatacctaacttggtggaaaaattaagagataaacaaaataaatttgtttggtttaaagcagcctcatctatcatgacaactgataccagaccaaaacttgcgtatgaggaatgtagactttggaataaagatataagactttctgcaatagcaaaaggatcaggtatgattgctccaaatatggcaactatgttggcatttgtatttacagatgctgatattccgtcagtttatttaaagggactcttaaaaagaactgttaacaattcttttaacgcaattacagttgatagtgatacatcaacaaatgatatggttgcgattttttctacaaataaagttaaaactggtaaaatttacaatcaactggatccaaaattaaaagattttgaaaatgctcttcaaagactactacttaatttagcaaaacaaattgtaagcgatggtgaaggagcaaaaaaatttatcacagtaaaagtactaaatgccagatctcagcaaatggcaaaaactatagcattttcaatagctaactccccactgtttaaaactgcaatggctggtgaagatccaaactggggaagaatcattatggcaataggaaaatctggagagaaggtttcaccagaaaagattgaaaataaatttggagaactaaaggtcgctgagaagggt

SEQ ID NO: 234579 - DNA, 712 bp, Unknown
  Bacterial polypeptide expressing nucleotide sequence isolated from the Sargasso Sea
gttgccggtccccggcgtgcggcttgccgcggttgaagcgggtatcaagaaagcgaatcgtaaggatttggtgctgctggagttggcagagggtagccgtgtcagcggggtcttcacgcttaatcgtttctgtgcggcgccagttcaggtggcgaaagcccgcttggccacgaccacgcctcgctatctgatgatcaataccggttacgccaatgccggcacgggtaagaaaggtctggaaaactgtttggcgagttgtgagctgctagccaaagcggcgggctgtcaggcggatgaaattttgccctactccaccggagtgattggtgagcagtttcctttgacggcgtttgcttccggtttgccaaaggctctggctgcgctcgaccctcaccattggggacgagcgtcggaaggtatcatgactacggatacttacccgaagctcaccagccggcgggtggaaatgaatggtgtgccggtgacggtgacggggatgtccaagggctcaggcatgatcaagccgaacatggccaccatgcttgggtttatcgccaccgatgcaccaattgccaagccgttgctggaccagtgggtgaaagcgttggcagataaatctttcaaccgggtgacggtcgatggtgatacctccacgaatgacgcctgcatgttaattagcacggcccaggcggaaatggatcagattacggca

SEQ ID NO: 234580 - DNA, 844 bp, Unknown
  Bacterial polypeptide expressing nucleotide sequence isolated from the Sargasso Sea
agaaaaataaaagataaaaagatttacggcattctaatcaacacaagaaatgcaaatgctttaacaggaaatgatggatataattctctaaaaaaaatctctttaaatatatcaaaactattaactgcaaaacaaattgaagatgaggacaaaccaagagagattaaaccaaaccaaatattatttgcctgtacaggaactataggagaaaaatttcctataaatgcaattttaaataatactaaaaacttagttgataaaataaaatacaatcaaaataaactaatctggattaaagctgctcttggaatcatgacaacagatactaagccaaaattatcaatggcagaatgtaaaataggtggttccaatgttaaaatatatggtgtcgcaaaaggatcaggtatgatctttccaaatatggcaacaactttaggatttatttttactgatgccaacatctcttcgtcaattttgaaacagatacttaatttaaatattaagactacttttaatgctataacatgcgatggagatactagtacaaatgacatggtttcaatattttcaacaggaagcgcaaataataaagagataaaaagttttaaagatccaaaactaaagcaatttattaatagtgttcaccaggttatgctaaacttagcaaaaagagttgcaagtgacggagagggggcaacaaaatttgttaccatcaaatgccttaatagcaaaactgagaaagatgcaaaaaatatctgtttctcaatagccaactcaccattagttaaaacagcaatttttggagaagatcctaattgggggagaatcgcgatgcaatcggaaa

SEQ ID NO: 234581 - DNA, 838 bp, Unknown
  Bacterial polypeptide expressing nucleotide sequence isolated from the Sargasso Sea
gccgaagcagttgcagaagcatcgtctaaattgactcctggcgaatgggaaagagcggctaccgcgataatgactaccgataccaggcccaagatagtcagctctcaagtcaaaatagcaggacagttagtcacgattacgggagtggcaaaaggttcaggaatgattaagccagatatggcaaccatgcttgccttcattgcatcagacattcctattgaaagaaccttgttaaaagaactgttgacagaaatttgtgataaaagtttcaaccgaattaccgtcgatggagatacgtccacaaatgactgctttatgctggcatgtactagtgtggttgatatgcccgttatttctagtcaagacgaccctcgctatgatcaagttaaagatatttttttggatcatgcaaaagtgctcgctcagtccataattagggatggggaaggagcaactaaatttatttctatattggtagaaggtggtgtcaatgaagaagagtgtctagctgtggcctactctgttgcagagtctcctctagtaaaaactgcgttatttgcaggtgatccgaattggggtcggttttgtatggctattggcaaggcgccagttgatcaaattgatgtgaatttggttgagctatggctagatgacgttcttgtcgccaaacaaggaatgcttagcagctcttatagcgaagatcagggtgtcaaggttctcgcgaaagacgaatttacagttcgaatttgtctgggtcggggggaatcttcggcggagatttggacaactgatctgtcatacgattacatcaaaatcaatgccgaataccgtacttgat

SEQ ID NO: 234582 - DNA, 919 bp, Unknown
  Bacterial polypeptide expressing nucleotide sequence isolated from the Sargasso Sea
aggcgcccaaggtctaaaggaggtagctaatgcagtttcaaaagctttaacattaaaatcttcacagacaccaaaaggagtaagtgatgtagtaaaaataaccgatttattatttgcgtcaacaggagtaattggtgaagaatttccttatataaaaattaaaaaccgcgtcccagaattagtaaaaaaattaagaatagaacaaaataaatttgtttggttcaaaacagccagcgcaattatgacaacagacaccaggccaaaacttgcttatgaagagtgtaagataggtaataaagtaattaaaatttctggtattgccaaaggttcaggaatgatacatccaaacatggccactatgctttcctttatttttactgacgcaaatattccttcggtttttttaaaatctattttaaaaaaagttgcagccactacatttaattctataacagtagatggagatacatcgacaaacgacatggttggaattttttcaactggaaaagcaaaaaattccaaaatatacaatgtattagatcctaaattgcaagattttgaaaaagcactacacagactttgtttaaacctagcaaaacaaattgtagtggatggagagggagcaaaaaaatttattacaataaaagtaattggagcaagaacaaatgcaatggcaaaaaatattggtttttctgttgctaactctcctctgtttaaaactgctatagccggggaagatcccaactgggggagaattgtcatggctataggaaaatcaggagaaaatgtaattgcaaacaaaattcaaattaagattggtgattttttggtagcagagcaaagtaaagttgccaaagattatgatgaggaaaaactcaaagaatatattgaaatgggattctatcgacatagagataaa

SEQ ID NO: 234583 - DNA, 826 bp, Unknown
  Bacterial polypeptide expressing nucleotide sequence isolated from the Sargasso Sea
ctgcccgatgttgcccgtaaacttggaaaagctaggtgggcggacgcagcggccgcaattatgactaccgatacgtttccgaaggccgcaatgcgcaaggtcaccattggaaaatcatcggtgacgctggttgggatcgccaaagggtcagggatgattgcacctgacatggcgaccatgctgtctttcatcttcaccgacgcaaagattccggcgccggtactacagcgtttgctgaaagacaccaccgatcgttcctttaatagcatcaccgttgacagtgacacgtcgaccagtgatacggtattgctagtggcgaccgggcaggcgaagcatgcgcaggtttccggcattggcgacaagcatttgaaggcatttcgggccgctttgcgtgaaatcgcgattgaccttgcgacccaggttgtgcgggacggtgaaggagcgcaaaaatttgtgaccattgatattacaggcgcggaatccgcgtctgcggccaggcgcatcggtctagcggtcgccaattctccgcttgtcaaaacggcgattgctggcagtgacccaaattggggtcggatcgtaatggctgttggtaaagcgggagaaaaagcggaccgggacctgatgtctattggcatgggtggggtgcctatcaccgtgaatggccagctcgttgacggttatgacgagactgtaactgaaaatcacatgatggggcgtgacatcacgatttccattgatgttggggtcgggcgcggcagggcgcgagtttggacatgcgacctcacccacggttatatcgagatcaacgcagattatcggacgtaag

SEQ ID NO: 234584 - DNA, 901 bp, Unknown
  Bacterial polypeptide expressing nucleotide sequence isolated from the Sargasso Sea
caaaaagataaaagataaaaaaatttttgggattttaatcaacacaagaaacgcaaatgccttgacaggaaaggatggttataattctcttaaaaaaatttctttaacgttatcaaaattattaacatcaaaacaaatctcagatgatgacaaaccaagagaaattaaagcaaaccaaatattatttgcttgcacaggaactataggagaaaaatttcccgaaaatgtaatattaaacaatacaaaaaatctagtagaaaaattaaaatatacacaaaataaattaatttggatcaaagcagcccttggaattatgacaacagatacaaaaccaaagctatcaatggcagagtgtaaaataggaagttctgaagtaaaagtatatggtatagcaaaaggatctggaatgatctttccaaatatggcaacaactttaggatttatttttactgatgcaaatatcccttcttcaattttaaaacaaatacttaacttaaatattagaaccacatttaatgctataacctgtgatggagatactagtacaaatgatatggtttccattttttcaacaggtaaagccaataataaagagataaaaagttttaaagatccaaaattaaaacaatttattaatagtgttcatcaggttatgttaaacttggctaaaagagtggcaagtgatggagaaggagcaactaaatttgttactatcaaatgtcttaatagtaaaacagaaaaagatgcaaaaaatatttgtttttcaattgctaattctccattagttaaaacagctatttttggacaagatcctaactggggaagaattgctatggctattggaaagagaggtgcaaccgtaaaacatgaaaaattatccatatcaatgggatccaatata

SEQ ID NO: 234585 - DNA, 787 bp, Unknown
  Bacterial polypeptide expressing nucleotide sequence isolated from the Sargasso Sea
atgaaagctgctttagggataatgactacagatacaaaagccaaattagctatggaggaatgtcaaattgcaggaaaaaaagtaaaaatttatggaattgcaaaaggatctggaatgatttttccaaatatggcaacaacattaggttatctttttaccgatgcagatttaagtagttctgtgttaaaacaattattgaagaaaaatattgaaaccacatttaacgctatttcttgcgatggtgatacaagcactaatgatatggtctctatattctctacaaagaaagtcaaaaatccatacataaaaaatattcatgacaaaagaattagagaatttgaccaatcattaaatagaatattattaaatttagcaaaaagagttgcgggtgacggagaaggagcaactaagtttatcacaataaatgtaaaaaattgtaaaaaagataaagatgctaaaaaaattgctttttcgattgcaaattcacctttagtgaaaactgcaattgccggtgaagatcctaattggggaagaattatcatggctattggaaaatctggaattaaaatccaactaaacaaactatctatgaaatttggtaatataaaaattatcgataaaggagaaatttcagataattatagtgaagaaagtgcagcgaattatatgaaagaaaataaaattgatttaacaattgattttggaattggtataaaaaattttaccgcttacacaatggatttaacaaaaaagtatattgaaataaacgcagactatagaacgtaga

SEQ ID NO: 234586 - DNA, 799 bp, Unknown
  Bacterial polypeptide expressing nucleotide sequence isolated from the Sargasso Sea
aaatttatttggttcaaagctgcatcgtctattatgacaacagataccagacctaaattagcgtttgaaacatgcagagtatggaacaaagatataagactttcagctattgcaaaaggatcagggatgatagcgccaaacatggcaaccatgttatcttttgtatttacagatgcagatatcccttcggtttacttaaaaagtttacttaagaaggccgttacaaatacttttaacgctataacagttgatagcgatacatctacaaatgatatggttgcgatatttgctactggaaaagttaaaacaggaaaattttacaacgttttagatccaaaattaaaagattttgaatctgctttacaaaggcttcttttaaatttagcaaaacaaatagtgagcgatggagaaggagcaaaaaaatttataactgtaaaagttataaatgctagatctattaatatggcaaaaaatattgccttttcagtttccaactcacctctatttaagacagctatggccgctggggacccaaactggggaagaatagtaatgggcattggaaaatctggagagaaagtttctcctgaaaaaatagaaattaaaataggagaatttaaggttgcagaaaaaggaagagtggctgaaaatattgacgagaaaaaaattaaagaatatatggaatgggattcaataactgtagaaattaatttaagaatgggacaagcatactatgagtgttatacctctgatttaaccaaggattatattgatataaatgcagattatagaagttagg

SEQ ID NO: 234587 - DNA, 787 bp, Unknown
  Bacterial polypeptide expressing nucleotide sequence isolated from the Sargasso Sea
gatgaaagcagctttaggtattatgacaacagatacccaacctaaaatggctatggaaatttgccaaattggtaacactgaaattaaaatttttggtgttgcaaagggatctggaatgatacaaccaaacatggcaacaacattaggttatatttttacagatgcaaatctttcaaatgaaatattaaaaaaattattaaaaaaaaatattgctacaactttcaatgctattacttgcgatggtgatacaagtacaaatgatatggtttctattttttcaactggtaaagcaaaacattcaaaaataaaaaatgtgaacgatgacaagataaaagattttgaacttgctcttaataatgttttattaaatttagcaaaaagagttgtagctgatggggaaggagcatcaaaatttattactataaatgttgaaaattgcaaaaatgagaatgatgcaaaaaaaatcgcgttttcaattgcaaactctccgctagtaaaaactgcaattgctggagaagatccaaactggggaagagtagtaatggcgatcgggaagtcaggtgtaattttaaatcttgataaattatcaataagatttggcgatatctatattgtacaaaatggtaaattattcacaaattacaatgaatctgaagtttcaagttatatggaaggtgataatatagatattaatgtgagtatttccagtggatcaaaaaaatttaccgcatatacaatggatctaactaaaaagtatcttgaaattaactctgattatagaagttga

SEQ ID NO: 234588 - DNA, 925 bp, Unknown
  Bacterial polypeptide expressing nucleotide sequence isolated from the Sargasso Sea
cctaaaaaattacaagcaaaaatataattttttggttgcacaggtactattgggagaaatttttccttacgaaaaaatttctaacaatattccaaatctagtaaaaaaaattcgttatacacaaaataaatttatttggatgaaagcagcgcttgcaattatgacaacagatacaaagcctaaattagccatggaagaatgccttataggaaacgaaaaagtaaaaatttatggaattgctaaaggatctggcatgatttacccaaatatggctacaactctagcttacatatttactgatgcaactttgtctaacgacattttaagcaagttattaaaaaaaaacataacaaatacttttaatgcgatatcttgtgatggagacactagtactaacgacatggtgactatttttgccactaatgaagttaaaaattctcaagtaaaaagtataaatgaaaataaaattaaaaattttgacaatgctcttaataatgttcttttaaatttagctaaaagggttgtttcagatggggaaggggcatcaaaatttatcacaataaatgttagcaaatgtaaaagtgaaacagatgcaaaaaaaattgctttttctgttgcgaattctcctttagtaaaaactgcaattgcaggacaagatccaaattggggaagagttattatggcaattggtaaagctggacctaaaattaatctcaaaaaattattaattaagtttggaagtatgataattgtcgaaagtggtaaattgaataaaaattatgatgaaaaacaaacagagaattatatgaaaggtgaaaatattgaaataaatattgaaacttttacaggaaacaaaaattttacagcctattcaatggatctaacaaaaaaatatatagaaattaatgcagattatagaagttaa

SEQ ID NO: 234589 - DNA, 732 bp, Unknown
  Bacterial polypeptide expressing nucleotide sequence isolated from the Sargasso Sea
ttcactaagaattacttttgtgctgcacctattaaagtttcaaaagataatttgattaaagaaaaaccacgttactgtttgattaacgcaggtaatgcaaatgcaggaacaggtgaaaccggactttctaatgcaaaagctacatgcaaagagctgtctaggataacaaattgttctgaatatgaagtacttccattttcaacaggagtaattggtgaaaatttaccagtagaaaagatttgtaaagtattgccacgtttagtgaaggatttatctgataacagttggctcgatgttgcaaagtctattatgacgacagatacgatacctaaggctttttcaacccaagtaaaccttaacggttcaatggcgagtgtaactgggattgcaaagggctcaggaatgattaagccaaatatggcgactatgcttgcatttatagcaacggatgcaaatgttacaaaagatacacttgataaaattaaggccaatgttctctctaaaagtttcaatagaattacagttgatggtgatacctcaacgaatgattcctttatcttgatttcaacatgccaattaggtaataaagtaatagatcagcagaatagtagtgagtataaagcactggaaaataagatagaaaaaatatgttgtgaattagctcaggccattgttcgggatggtgagggggcaacaaaatttatatctattaaggtcaatgaaggtaatagt

SEQ ID NO: 234590 - DNA, 943 bp, Unknown
  Bacterial polypeptide expressing nucleotide sequence isolated from the Sargasso Sea
aattttttctcttataattaacacaaggaatgccaactcattcacaggtgagcaaggatataaaagtatgcaacatctggcagatttaatttcaaaacaattaacagaaaaacaaaaagaagacgacaatcatcctatattgattaaacctaaaaatattatttttggatgtactggaactattggtgaaaaattccctgaggagaaaataaagttaaaaataccagagcttataaaaaaaattaaatatacccaaaataaatatatttggatgaaagtagctttagcaataatgactaccgatacacagccaaaaattgcgatggaagagtgtaaaattggaaacacaactgtaaagatttatggaatagcaaaaggctcaggcatgatacagcctaatatggcaacaacattagcatatatttttacagatgcagatatttctaatgatgtcctaaaaaagctacttaaaaaaaatattgagaatacttttaatgcaatctcatgtgatggtgataccagtactaatgatatgatttcaatcttctccacaggcaaagccaaaaatactttgattaagacgattaatgataaaaaggtaaaatcttttgatgagtctttaaacaagttgctattaaatttagcaaagcgggttgtagcagatggagaaggtgcttcaaaatttgtaacaataaatgttttaaattctaaatctgagcaagatgcaaaaaaaattggtttttcaattgcaaattctcctttagtaaaaactgctattgcgggagaagatccaaattggggtagagtaattatggcaataggaaaatctaaagttaatataaatttaaataaattatcaataaaatttggtgatttgattattgtaaataaaggaaaaattcataatcaatatgatgaaaatgaagctgcaaaatatatgaaa

SEQ ID NO: 234591 - DNA, 795 bp, Unknown
  Bacterial polypeptide expressing nucleotide sequence isolated from the Sargasso Sea
tgaaatcctttttgcttcaacaggtgtaattggtgaaaaatttccaactcaacagataaaaggaagtatcccaaatttagtagaaaaattaagagatagacaaaataaatttgtatggtttaaggcagcttcgtcaattatgacaactgacacaagaccaaaacttgcttatgaggagtgcagattgtggaataaagatataaggctttcagctatcgcaaaaggttcaggtatgattgccccaaacatggcaactatgttagcatttgtttttacagacgcggatattccttcagtttatttaaaaggtcttttgaaaagagctgttacaaattcttttaatgctatcactgttgatagtgatacttcaacaaacgatatggttgcaattttttccacaagcaaagttaaaactggaaaaatttacaatgtattggatccaaaattaaaagattttgaaaatgctcttcaaagactattacttaacttagccaaacaaattgtaagcgatggcgaaggtgcaaaaaaatttatagtggtaaaggttataaatgctagatcacaacaaatggcaaagagtattgctttttcaatagccaactctcctctttttaaaaccgcaatggcaggtgaagatcccaattggggaagaataattatggcaattggaaaatctggagaaaaaatttcaccaggaaaggtcgaaataaaatttggagacttaaaagttgctgagaaaggaaaaatttcagaagagtatgatgaggaaaaattaaaagaatatatgaaatggga

SEQ ID NO: 234592 - DNA, 896 bp, Unknown
  Bacterial polypeptide expressing nucleotide sequence isolated from the Sargasso Sea
cttaacaggaaaacaaggttatagttctatcagtcaattagcagatgaattatcaaaaaaattaaaatttaagaaaaatgaaatactattttcatcaacgggtgttatcggagagaaattccctttagatacaataaagaataaaattcaagaattgaccgaaaaccttggatcaatgaataaattaaagtggataaaatctgcaagagcaatcatgactactgataccacccctaaaatgacttactcccaacttaagataaataaacaaatttactctatttcaggaattgcaaaagggtcaggaatggtttttcctaacatgggtactatgttaggatttatttttacagatattaaaatcagtcaaaagttattaagtaatgctttaaaagaaaatttaaattcaacttttaatgcgataagcgtggatggtgatacatctacaaatgatatggtaattgttttttctacacaaaaagcaaagaacaaaataatagataaaacaaatagtaaagaatttattgattttaaaaaaaatctgcacgaagtcatgcttaatctgtcaaaacaaatcgttatggatggagagggagctaaaaaatttattgagataaatgtaaataatgcaaaaagcgaaaactctgcaaagaaaatagctttcgcgattgctaactcacaactcgtgaaaactgcaattgcaggtgaggatccaaattggggaagaatcttaatggctgcaggtaaaagcggtgaaaatataaatgtaaacaagataaatttaaaaataggaaattacataattttctcgagtggaataataaataagaattataacgaggagaatgttaaaaaatatatgaagaacaaatttttgaatattgaaatttctattg

SEQ ID NO: 234593 - DNA, 1327 bp, Unknown
  Bacterial polypeptide expressing nucleotide sequence isolated from the Sargasso Sea
gttgcggcggcccgcgcgtgcggccgctggttcttccaatcgatgccggcgcatgccggcattttccatccggcaggtgtgccccatggctgtcaattttccgtcgatcgatcccgcccaactgcatcctgtcgccggcgtcacgctcggctgggcggaagcgaacatccgcaagccgaatcgcaaggacgtgctggtcatctccgtcgacgaaggcgcgacggtcgcgggcgtgttcaccgaaaaccgtttctgcgcagcgccggtcaccgtctgccgcgagcacctggcgaaggtgcgcgcaggcggcgcgggcattcgcgcgctcgtcgtgaatacgggcaatgcgaacgcgggcaccggcgagccgggcctcgtgaacgcacgcgaaacctgcacggaactcgcgcgcctcgcgggcatcgagccggcgcaggtgctgccgttctcgaccggcgtgatcctcgagccgctgccgatcgatcgcctgaaggccggcctgccggccgcgctcgcgaatcgcacggccgcgaactggttcgacgccgcgcaggcgatcatgacgacggacacgctgccgaaggccacgtcgcgccaggtgacgatcgacggccatacggtcacgctgacgggcatcagcaagggcgcgggcatgatcaagccgaacatggcgacgatgctcggcttcctcgcgttcgacgcgaacgtcgcgcagccggtgctcgacacgctcgtgaaggaagtagccgaccgctcgttcaactgcatcacgatcgacggcgatacgtcgacgaacgactcgttcatcctgatcgcgtcgggcaagagcacgctgccggcgatcacgtcgaccgattcgccggcctatgcggcgctgcgcgatgcggtgacggaagtcgcacaggtgctgtcgcaactgatcgtgcgcgatggcgaaggcgcgacgaaattcatgacggtgcaggtcgaaggcggcaagagtgtcgcggaatgccgccagatcgcttacgcgatcggccattcgccgctcgtgaagacggccttctacgcatccgaccccaacctcggccggattctcgcggcgatcggctatgcaggcgtcgcggatctggacgtcgacaagatcgacctttatctcgacgacgtgctcgtcgcgaaggcgggcggccgcaacccggcttaccaggaagaagacggccagcgcgtgatgaagcagagcgaaatcacgatccgcgtgctgctcggccgcggcgacgcgcaggccaccatctggacgtgcgacctgtcgcacgactacgtgagcatcaacgcggattaccgctcctga

SEQ ID NO: 234594 - DNA, 1342 bp, Unknown
  Bacterial polypeptide expressing nucleotide sequence isolated from the Sargasso Sea
actggtgatttcgcggtggttcggcaacgcgctcgagccatcagtttccgtttccatcgatgccggcgcctgccggcattttcttcgacaggtcgcgaccatggctgtcaatttcccttcgatcgatcccgctcaactccaccccgtcgccggcgtcacgctgggctgggcagaggcgaatatccgcaaaccgaaccgcaaggacgtgctggtcatctccgtgggcgatggcgcgacagtaggcggcgtgttcacgcagaatcgcttttgtgccgcgcccgtcaccgtgtgccgtgagaatctggagcgtgtacggcagggcggcaagccgattcgcgcgctggtgatcaacaccggcaacgcgaacgcaggcacgggcgaacccggcctcgtcgctgcacgcgaaacctgcgccgaactcgcgcgtctcgcggacatcgcgccggagcaggttttgccgttttcgacgggcgtgattctggaaccgctgccggtcgatcgtctgaaggcggggctgcccgctgcgctggcaaaccgcaaggaagccaactggtacgacgccgcccaggcgatcatgaccacggacacgctgccgaaagccgtctcgcgccaggtcacgatcgaggggcacacggtcacgctcaccggcatcagcaagggcgccggcatgatcaagccgaacatggcgaccatgctcggtttcctcgcgttcgacgctgctgtcgcgcaaccggtgctcgacgcattggtcaagcacgtggcggaccgctcgttcaactgcattacgatcgacggcgatacatcgaccaacgattctttcatcctgatcgcttcgggcaaatcgagcctgccggcgatcacgtccaccgattcgcccgcttatgcagcgctgcgcgacgcggtgaccgaagtcgcccagacccttgcgcaactgatcgtgcgcgacggcgaaggtgcgaccaaattcatgaccgtgcatgtggaaggcggctcgagcgccggcgaatgccgccagatcgcttatgcgattgggcattcgccgctcgtgaagacggctttctatgcatcggatccgaatctcggccgcattctcgcggccatcggctatgccggcgtggacgatctcgacgtcggcaagatcgatctgtatctggacgacgtgctggtcgccactgccggcggccgcaatccggcctaccgcgaagaagatggccagcgcgtcatgaagaagagcgagatcggcattcgcgtcgtactcggccgcggcaatgcgcaagccacgatctggacttgcgatctgtcgcacgactacgtgagcatcaacgccgactatcgttcgtaa

SEQ ID NO: 234595 - DNA, 809 bp, Unknown
  Bacterial polypeptide expressing nucleotide sequence isolated from the Sargasso Sea
taatcaaaataaactaatttggataaaagcagctcttgggattatgacaacagataccaagcctaaattatcaatggcggaatgtaaaataggtggttcagaagtgaagatttatggtattgcaaaaggatctggcatgatctttccaaatatggctacaaccttaggatttatttttaccgatgcaaatatctcttcttcaattttgaaacagatactaaatttaaatattaagactacatttaatgcaataacttgtgatggggacactagcactaacgatatggtatctattttttcaacaggcaaagctaataataaagagataaaaagttttaaggatccaaaattaaaacaatttattaatagtgttcaccaggttatgctaaatctagcaaaaagagttgcgagcgatggagagggagcaactaaatttgtaactataaaatgtcttaacagcaaaagtgagaaagatgcaaaaaatatttgtttctcaatagcaaactcaccgttggttaaaacagcaatctttggcgaagaccctaactggggaagaattgcaatggcaatcggaaagagtggtgcaacagttaaacatgagaaattatctatattaatgggatctaatatgatccttaaagatggtaaattagttaaagattacaatgaaagtattttaagcgactatatgaaaaatgaaaatatagagataacaatcgatctatccattggaaataaagaatttacagcttacactatggacctatcaaaagaatatattgagattaactcagattatagatcataga

SEQ ID NO: 234596 - DNA, 1303 bp, Unknown
  Bacterial polypeptide expressing nucleotide sequence isolated from the Sargasso Sea
atgggaattaatataacaaattttttatcttcaaaatcaaaaaatgccaaaatgattgattatcaagatttggaccatattgatgggctttctatttctgttgtaagtgcaaatttatataaagataatagagatgatttatcaatgttttattttagagatggggcaaattatgcttctgtttatactcagtcaaaaattttgtctgaaaatataaaatggaacctaaaacaaaataataaaaaaatatattcactcatagttaatacaaggaatgctaatgcttttactggtaagcagggttatgaaagtttaaaaaaaatagctgatatagtttcaaaaaaattaactgaaaaacaaaatgaagatgaaactacatttagaaaaattgaaccaaaagaaattatgtttggttgtactggaacaataggagaattatttccatatgataaaatagctagtaaaattcctgatttgattaataaaattcgatatactcaaaataaattcatttggatgaaagctgctcttggaattatgactacagatacaaagcctaaattatcaatggaggaatgtaagattggaaatgaaaaaattaaaatttatggaattgcaaaaggagctggtatgattcatccaaatatggctactacactggcatatatttttacagacgctactttatctaatgatattataaaaaaactgttgaacaaaaatattgctactacctttaatgcaattacatgtgatggagatacaagtactaatgatatgattactatttttgcaacaggtaaagttaaaaattctacagttaaaagcttaaatgacaaaaagattgcaagttttgataatgctttaaacaaagttttattaaatttggctaaaagagttgtatctgatggtgaaggatcttctaaatttatcactataaatgttaaaaaatgtaaaaccgaaactgatgcaaaaaaaattgctttttcaatagctaattcacctttagtaaaaactgctgttgcaggcgaagatcctaattggggaagaatagtaatggccatcggtaaagctggatgtgaaattaatttaaaaaaactatctattaattttgggaaaataaaaatattagagaatggtaacttacatcaaagttatgatgaaagagaaacagcaaattatatgaaaaatgaaaatattgattttgatattgaaatttcaactggatcaagaaattttacagcatatacaatggatcttactaaagaatatattaaaattaatgcagattatagaagttaaa

SEQ ID NO: 234597 - DNA, 787 bp, Unknown
  Bacterial polypeptide expressing nucleotide sequence isolated from the Sargasso Sea
gatgaaagcagctttaggaataatgacaactgatacacaacccaaattggcaatggaagagtgcaatattggcaacaccttagttaagatttatggaatagcaaaaggatctggcatgatacatcctaatatggccacaacattagggtatgtttttactgatgcaaatatttcaaatgaaattttaaaaaaattattaaaaaaaaatatttctaatacttttaatgccattagttgtgatggagatactagtacaaatgatatgttaacaattttttcaactggcaaagcaaatcatgctaaattaaatggtattaatgataccaagataaaagaatttgatgaagcattaaatagagttttactaaatttagcgaaaagagttgttgctgatggagagggcgcttcaaaatttgtaacaatcaatgtaaaaaattgtaaaacggagaacgatgcaaaaaaaattggtttttcaatagcaaattcacctttagtaaaaaccgctattgctggagaggatcctaattggggaagaattattatggctataggaaagtctgaagtgcttttaaatttaaaaagattgtcaattaagtttggaaatttaaatattgttcaaaaaggcaaagtcaatgttaactataatgagaaagaagctgccaattatatgaaaaatatgaatattgatattaatgttgatgttgcctgtggatctaaagattttacggtttatactatggacttaacaaaaaaatatgttgaaattaattcagattatagaagttag

SEQ ID NO: 234598 - DNA, 1248 bp, Unknown
  Bacterial polypeptide expressing nucleotide sequence isolated from the Sargasso Sea
catggattttggtataaacaacttttttgataagaaatacaaggactctaaaataggtcattttcaagatcttgagcatattgatggagtgtctatctcaacaattagctgtggcctttatgaaaaaaaaagagatgacttagttttattttattttagagagggtgcaagttatgcaaatgcatacacacaatctagcttagtctctgaaaatataaaatggaataaaaaaataaaagaaaaaaaaatttttggtattttaatcaatacaagaaacgcaaatgccttgacgggaaatgacggctataattctcttaaaaaaatatccttaaaattgtcaaaattattagtgtcaaaacagtcggcagatgaggaaaaaccaagagaaattaaaccaaaccaaatattattcgcttgtacaggaactattggggaaaaatttcctgaaaatgtaattttaaataatattgaaaatttagttgataaaataaaatacaatcaaaataaactagtttggattaaagcagctcttggaattatgactacagatactaaaccaaaattatcaatggcagaatgtaaaataggtggttccaacgtaaaaatatatggcgttgcaaaaggatcaggaatgatatttccaaacatggcaacaactttaggatttatttttactgatgccaacatttcatcatcaattttgaagcagatacttaatttaaatattaagactacatttaatgctatatcatgtgatggtgacactagcacaaatgacatggtctcaatattttcaacaggcaaagccaataacaaagaaataaaaagttttaaagatccaaaattaaaagaattcattaataatgttcaccaggtcatgctaaacttggcaaaaagagttgcgagtgatggagagggagcaacaaaatttgttacgataaaatgtcttaatagcaaaacagaaaaagatgcaaaaaatatctgtttctcaatagcaaactcaccattagttaaaacagcaattttcggagaagatcctaattggggaagaatcgcaatggcaatcggaaaaagtggtgcaaaagttaaaaatgaaaaattatcaatattaatgggatccaatattatccttaagcatggtaagttggataaaaactataatgaaaatattctaagcgattacatgaaaaatgaaaatattgagataacaatagatctatctattggaaacaaaaaatttacagcata

SEQ ID NO: 234599 - DNA, 1243 bp, Unknown
  Bacterial polypeptide expressing nucleotide sequence isolated from the Sargasso Sea
atgaaattaaaaaaatcaccattggcgcctacaaaatttccaactttaccttctgtaaaaggagtaaatattggcacttctgtatcgaattctaaatacaaaagaagacaggacattttaaccattacatttaataatcctgcatctgttgcaggtgtgtttacattatcacaaatgcctgctgccccagttcaattttgtaaaaaaaatatagtaaatggatatgcaaatgccttagttgtaaatgctggaatagcaaatagttttacaggtaaaaagggaatagaaaataatagattgattgctagttacttctctaagttaataaactctagacaaaaagatgtttatatttgctctactggagttattggagaacaacttccagttgccaaaataaaaaaggctttaaagagttcttttctcggaagaaagaaagattttaaaagtgcagcaaaagctatcatgacaaccgatacattccctaaagcaagtggaaaaaaaattaaaataggtgatgaagaaatctctattgttggaatatcaaaaggatcaggaatgatagctccaaatatggcaactatgcttgcttttatttttactgatgcacttatagagccaaaactctttcaagcgcttttaaacttaggtgtaagagatagttttaattcaattagtgttgatagtgatacatcaactaatgatacagttttgggttttgcgactggagaagcaatggcaggtaagaatgttaaacctatgagcaagattggcgataaacgacttgctaaatttagagaagctctagaagatgttatgaaggacctcgctattcagattgttagagatggggaaggggccacaaagttaattcaaattaatgttagaaatgcaactagcatatcatcagctaagaaagtagctatctctattgcaaattcaccacttattaaaacagctattgcaggctcagacccaaattggggaagaatcataatggctattggaaaaactaaagaaaatttctcgcatgaaaatttaaaaataaaaattggcaataatattgttattaaaaatggtgaattagctagaagatattctgagagaaaaacaaaaaaatatatgaaaaatgagaaaatattaatagatgttgatctaggggtagggactggtttttcttctttttggacatgcgatcttactgaagaatatgtaagaataaatactgattatagatcttaaa

SEQ ID NO: 234600 - DNA, 1243 bp, Unknown
  Bacterial polypeptide expressing nucleotide sequence isolated from the Sargasso Sea
aatgaaattaaaaaagtcaccattggctcctgaaaaatttccaattttaccctctattagaggagtaaatattggcacttctgtatctaattcaaaatacaagagcagacaggatattttaacaattacatttgacaaacctgcatctgttgctggagtttttacattgtcacaaatgcccgcagctccagttgagttttgtaaaaaaaatatagttaatggatatgcaaatgccttaattgtaaacgctggaatagcaaatagttttacgggaaaaaagggaactgaaaacaatagaataatagctaattatttttcaaagttaataaattcaaggcaaaaagatatttatatttgttctacaggtgttattggtgaacaacttccggttccaaaaataaaaaaagcattaaaaaaatctctttttggaaaaaataaagactttaaaaacgcagcgaaagcaataatgacaactgatacatttcctaaaggtagtgctaagacgattacaattgataatgagaaaatttctattgttggaatagcaaagggatcaggaatgattgctccaaatatggcaaccatgctttcttttatttttacagacgcacttattgaaccaaaacttttgcaaactttacttaatttaggagtaagagatagttttaattcaattagtgttgatagtgatacatcaactaatgatactgttttggcttttgctactggccaagggatgttaggtaaaaacactaaacccattagtaagattggcgataaacgacttattaaatttagaaaagccttagatgatgtaatgaaagatcttgcaatccagattgttaaagatggagagggtgctactaaattagttcaagttaatgtcagaaatgcaataagtatttcgtcagctaaaaaagtagctatgtctatagcaaattcaccacttattaaaactgctattgcaggctcggacccaaactggggaagaataataatggctatcggaaaaacaaaagaacaattttctcatgaaaaattacttataaaaattggtaataatatcgttattaaagatggagagctggcaaaaagatactctgagagaaaaacacagaaatatatgaaaaatgataatattttaatagatgttgatttaggtattggaactggcttttcctctttttggacatgtgaccttactgaagaatatgtaagaataaatacagattatagatcctag

SEQ ID NO: 234601 - DNA, 1303 bp, Unknown
  Bacterial polypeptide expressing nucleotide sequence isolated from the Sargasso Sea
catggattttggtataaacaacttttttgataagaagcacaaggactctaaaataggacattttcaagatcttgaacatattgatggattatctatctcaacaattagctgtggtctttataacaaaaaaagagacgacttagttttattttattttagggatggagcaagttacgcaaatgtatatacaaaatctagtttagtatctgaaaatataaaatggaataaaaaaataaaagataaaaaaatttatggcattctaataaatacaagaaacgcaaatgccttaacagggaatgatggctataactctcttaaaaaaatttccttaaatttgtcaaaattattaacatcaaaacaaatagaagatgaggaaaagccaagagaaattaaaccaaaccaattactatttgcttgcacaggcaccataggggaaaaatttcctgaaaatgaaattttaagtaacactaaaaacttagttgataaaataaaatacaatcaaaataaattaatttggatcaaagcagctcttgggattatgacaacagacactaaaccaaaattatcaatggcagaatgtaagatagctggttccgatgtaaaaatatatggagttgcaaaaggatcaggaatgatctttccaaatatggcaacaactttaggatttatttttactgatgccaatatttcttcatcaattttgaaacagatacttaatctaaatattaagactacttttaatgctataacatgcgatggtgatactagtacaaatgacatggtttcaatattttcaacaagcaaagcaaacaacaaagagataaaaagttttaaagatccaaaattaaagcaattcattagtagcgttcatcaggtcatgttaaacttagcaaaaagagttgcaagtgatggagagggagcaacaaaatttgttaccatcaaatgcattaatagcaaaaccgagaaagatgcgaaaaatatttgtttctcaatagctaactcaccattagttaaaacagcaatatttggagaagatcctaattggggtagaattgcgatggcaatcggaaaaagtggtgtaactgtcaaacaagaaaaattatctatattaatgggatctaatttgatccttaaagatggaaaattagataaaaattataacgaaaatatccttagtgattatatgaaaaatgagaatatagagataacaattgatctatctattggaagtaaaaaatttacagcgtatactatggatttatctaaggaatatattgaaattaattctgattacagatcttag

SEQ ID NO: 234602 - DNA, 1231 bp, Unknown
  Bacterial polypeptide expressing nucleotide sequence isolated from the Sargasso Sea
cctagaccatattgatggcgtctcagtatcgacgacttctgctaatttatataataatgaaagagatgatttagtgcttttttattttagacatggcgccgaacacgcatcagtttatacccaatcccaggtaatttctgaaaacattaagtggaataagaaaataaaaacaaaaaaaattcgtgctcttttagtaaatacaagaaatgctaattcgcttacaggaaaaaaagggtacgaagcacttgaagaaatctcagaggaaatatctacaaatttaacaaagaaacaaaaagatgatgaagatcatccaaaaaaaattaaaccaaacgaagttctatttgggtgtactggcacaataggagaaatctttccaaaagaaaaaataaagtcctcaatcaaagatttggtaaacaagattaaatatacccaaaataagtatttatggataaaagctgctatgggtatcttaactaccgatctaaaaccaaaacttgcaatggaagaatgcaatattggaaatactaaagtaaaaatttatggtcttgccaagggatctggaatgatttttccaaatatggggacaaccttagcttatatttttactgatgcagacctttcatcaaatgtattaaaaaagattttgaaaaaaaatattcataacacttttaatgcaattagttgcgatggtgataccagtacaaatgatatggtaacaattttttcaacaggaaaagcaaaaaataaatctattaacaatataaacgatataaaactcaaagattttgatttagctctaaatagtgttttgttaaacttagcaaaaagggttgtgagtgatggcgaaggtgcctcaaagtttataaagatcaattcttttaagtgttctagtgaaagtgatgcaaaaaaaatatcattttcgattgctaactcaccattagtaaaaacagcaattacaggagaagatccaaattggggaagaatattaatggcggcaggaaaagcgggtgtagagtttgaaatagatcgagtaaatttatttataggagagcataaaattttggagaaaggacagctgaataaaaattataacgaaaaagatgttgcagattatatgaaacaagataatttagaaatcacgattgagattaataacggcaacaaaagttttacttgttatacgatggacttcactcaaaagtacatatctattaattcagattatagaagt

SEQ ID NO: 234603 - DNA, 1303 bp, Unknown
  Bacterial polypeptide expressing nucleotide sequence isolated from the Sargasso Sea
catggattttggtataaacaacttttttgacaggaaacacaaggactctaaaataggacattttcaagatcttgaacatattgatggattatctatctcaacaattagctgcggtctttataataaaaaaagagatgacttagttttattttattttagagatggtgcaaattatgcaaatgtatataccaaatctagtttagtgtctgaaaatattaaatggaataaaaaaataaaagataaaaaaatttatggcattttaataaatacaagaaacgcaaatgccttaacaggaaatgatggctataactctcttaaaaaaatttccttaaatttgtcaaaattattatcatcaaaacaaatagaagatgaggaaaagccaagagaaattaaaccaaaccaaatattatttgcttgcacaggtaccataggggaaaaatttcctgaaaatgaaattttaagtagcactaaaaacttagttgataaaataaaatacaatcaaaataaactgatttggattaaagcagctcttgggattatgacaacagacactaaaccaaaattatcaatggcagaatgtaagatagctggttccgatgtaaaaatatatggagttgcaaaaggatcaggaatgatctttccaaatatggcaacaactttaggatttatttttactgatgccaatatttcttcaccaattttgaaacagatacttaatctaaatattaagactacttttaatgctataacatgcgatggggatactagtacaaatgacatggtttcaatattttcaacaggcaaagcaaaaaacaaagagataaaaagttttaaagatccaaaattaaagcaattcattagtagtgttcatcaggtcatgctaaacttagcaaaaagagttgcaagtgatggtgagggagcaacaaaatttgttaccattaaatgcattaatagcaaaactgagaaagacgcaaaaaatatttgtttctcaatagctaactcaccattagttaaaacagcaatctttggagaagatcctaattggggtagaattgcgatggcaatcggaaaaagtggtgtgactgttaaacaagaaaaattatctatattaatgggatctaatatgatccttaaagatggaaaattagataaaaattataacgaaaatttattaagtgattatatgaaaaatgaaaatatagagataacaattgatctatctattggaagtaaaaaatttacagcgtatactatggatttatccaaggaatatattgagatcaattctgattacagatcatag

SEQ ID NO: 234604 - DNA, 1208 bp, Unknown
  Bacterial polypeptide expressing nucleotide sequence isolated from the Sargasso Sea
aattgttgattttcaagatttagatcacttagatggagtatctatttctgctgtaagtgcagatttgtatgataaaaaaagagatgatttagtattattttattttagagatggagcaaattatgcttcggtttttacccaatccaaaattgtatcagaaaatataaaatggaataaaaaaataaaagctaaaaaaataaaagctctttttgtcaatacaaggaatgcgaatgcattaacaggaactgctggatatcaatctttaaaagaattatctttagatatatcaaaaaaactatctgataaacaaaatatagatgaagaaattccaaaaataataaatccaaaagaaataatgtttgcttgcactggtactattggtgaaaaatttccaatagagaaaataaaaaaaagtattcccgatcttattaaaaaaataaaatatactcaaaataaattagtatggattaaagctgcacttggaataatgactacagatacaaaaccaaaactttcaatggctgaatgcaaaattggaaatactgaagtaaaaatttatggaatagcaaaaggatcaggaatgatttatccaaatatggcaacaacccttggttttatatttactgatgcagatttatcatcttctctacttaagcaaattcttaagaaaaatattgatactacttttaatgctatatcttgtgacggtgatacaagtacaaatgatatggtttcatttttttcaactaataaagcaaaaaatcccataattaaaaatataaatgatccaaagttgaaaaaatttaattattctgttcatgaagtattgttaaatttagcaaaaagagttgtagctgatggcgagggtgcttcaaaatttgttacaattatttgtaaaaattgcaaaaccgagaaagatgcaaaagcaatttcattttcagttgctaattcgtcgcttgtaaaaactgcgattgcaggagaagatccaaattggggaagaattgtaatggcaattggcaagagtggcgtaaaagtagatataaaaaaactttcaatttttataggtccatttaaagttttaattaagggaaatttagttagagattataacgaaataagtgtcagtgattatatgaaaaatgaatctatagatattaatattgatttgggattaggaaataaaaaatttactgcttatactgctgatt

SEQ ID NO: 234605 - DNA, 1303 bp, Unknown
  Bacterial polypeptide expressing nucleotide sequence isolated from the Sargasso Sea
tatgggaattaatttaacaaattttttatcatctcaatcaaaaaatacaaaaatgattgattttcaagaccttgatcatctagatggtctttcaatttcagttgtttcagcaaatttatataatgatatcagagatgatttaacaatgttctattttagagaaggtgctaattatgcttctgtttatactcaatcaaaaatagtatctgaaaatataaaatggaatattaaccaaagaccaaaaaaaatattttctctaattgtaaatacaagaaatgcaaatgctttcacaggaaaacaaggttatgaaagtttaaaaaaaatagcagatttaacttcaaaacaattaaataaaaaacaagaagaagacgaagctaaccctaagaaaatttcctcaaaaaatataatttttggttgcactggtactattggagaagtttttccatatgaaaaaatttctaataatatttcaaatttaatagataaaattcgttatacacaaaataaatttatttggatgaaggcagcacttgcaattatgactacggatactaagccaaagctagcaatggaggaatgtcatattggaagtgaaaaagtgaaaatttatggaatagccaaaggatcaggaatgatatatccaaatatggctacaacacttgcatatatatttactgatgcaactttatctaatgacattttaggaaagttattaaaaaaaaatataaccaatacatttaatgctatttcttgtgacggggatacaagtaccaatgacatggcaactatttttgcaactaatgaagtaaaaaattaccaagtgaaaagtacaaatgaaaataaaattaaaaattttgataaagcattaaataatgttcttttgaatttagctaaaagggttgtttcagacggagaaggagcatcaaaatttatcacaataaatgttagcaagtgtaaaaatgagatagatgcaaaaaaaattgctttctcagttgcaaattctccattagtaaaaactgcaattgctggagaggacccaaattggggacgaattataatggcaattggtaaagcaggacctaaaatcaatttaaaaaaattattaattaagtttggaaatataacaattgttgaaggtggaaaattaaatccaagttatgatgaaaaacaaacagcaaattacatgaaatctgaaaatatagagataaatattgaaacttttgccgggaagaaaaactttactgcttataccatggatttaacaaaaaaatatattgaaattaatgcggactatagaagttaa

SEQ ID NO: 234606 - DNA, 1192 bp, Unknown
  Bacterial polypeptide expressing nucleotide sequence isolated from the Sargasso Sea
aatgaaacccaatctaacgccaccgattcccgtgcagggatttttatggatgggccggaacatcggaatcaaggatcaaagtctcgatttcggagtattggccgcagttcatccctgcagtgccgccgcagtgtttacccgaagtaatctcccgggagccccggttatcgtaggacgtgaacatgcagctaaggggacacttcaggcaatcgtggtcaactcgaaatgtgccaatgtcggattaggtgagcagggattgctggatgccaggaaaatgtgccagtggaccgcagaagcgctaaagatacaacctgagttggtcctgccagcttcaacaggagtgatcggcctgcctttgccgatggataaaattcgtgaaggtaccctttccattgcaacaaacctggacaactccgcagaggccgtagagtcctttgcaagagccatcatgaccaccgacacccatccaaaatggagaaatgcccgatctggacatgcaagtctgctcggagttgccaaaggatcaggcatgatcgaaccgaacatggcaacgatgctgagctatttagtgaccgatgctgaaatcgatcattcaaaacttcaggagatgctgaaacgagctgttgattcatcttttaaccgtatcagtatcgatacggacacttccaccagtgatatggttgtgctgatggcaaacggaatggcaggcggggtaaacgaggatgaatttgaaaaaaacctaaccggcctatgtcaggatctggccaaagaccttgtaagagacggtgaaggggtaaccaaactgatagaattgaaaatcagtggtgcagattcacttcagatggctcagaaaatcggtaaatccatcatcaattctccgctgatcaaaactgcagtgcatggggctgacccgaattgggggcgtttcgtgatggcggttgggaaagtctttgaacaccctgtacggcttgaggaactcgaaatacgctttggtttgggtgagaagatgcaggccgtcaattcacaacttctgaaagaggaggcggtaaagttggaaagcattagcgaacttcttcagaaggataccattccaatcgaagtggttgtcggtcatggagatcactgcgaaaccttttggggctgcgatctctccaagggctacatcgatgaaaacgcattttacaccacatga

SEQ ID NO: 234607 - DNA, 1070 bp, Unknown
  Bacterial polypeptide expressing nucleotide sequence isolated from the Sargasso Sea
aaaaaaaaatattaaagctattatgaataacacaaaaaatgcaaacaccttcactggaactcaaggagcagaagctctcgagagtttatcaaaaaatcttgcaaaaaatcttactttaagggaagcccaaaaaaagggtggaacaagtcaagtaattaaaccaaacgaaatactatttgcttctacaggtgtaattggagaaaagtttccaatacaacaaattaaaaatagtactcctcaacttgtagaaaaattaagagaaaaacaaaataaattcgtgtggttcaaagcagcctcatctataatgactaccgatactagaccaaaacttgcttacgaagagtgtaggatttggaataaagatataagactttctgcaattgcgaagggttcaggaatgatatctccaaatatggcaacaatgttagctttcgtttttactgatgcagaaattccatcagtatttttaaaaagtctacttaaaagggcaatgacaaatacttttaatgcaatcaccgtggatagtgacacctcaacaaatgatatggttgcaattttctcaagcaataaagttaaaacgggaaaattttataatgttttagatcctaaattaaaagattttgaaatggcacttcaaagattacttcttaacttggcaaaacaaatagttagtgatggagagggagcaaaaaaatttattaccattaaggttataaacgcaagatctcaacaaatggcaagaactgtcgctttctcaattgccaactcacccctttttaagactgctatggctggcgaagatcctaattggggaaggataataatggcgataggaaaatctggagaaaaaattaccccagaaaaaatagaaattaaatttggagaattaaaagttgctgaaaaaggcaagatctccgaagaatacaatgaagagaaattaaaagaatatatgaaatgggacgatttacttgtagaagtaaatctaaagattggccaaggatcttttgagtgttatacatgcgatttaacaaatgaatatataaatattaatgctgattacagaaactaat

SEQ ID NO: 234608 - DNA, 1102 bp, Unknown
  Bacterial polypeptide expressing nucleotide sequence isolated from the Sargasso Sea
tatgggaattaatttaacaaattttttatcatctcaatcaaaaaatactaaaatgattgattttcaagaccttgatcatttagatggtctctcaatttcagttgtttccgcaaatttatataaagatatcagagatgatttaacaatgttctatttcagagaaggtgcgaattacgcttctgtttatactcagtcaaaaatagtatctgaaaatataaaatggaacataagccaaaaaccaaaaaaaatatattcccttattgtaaatacaagaaatgcaaatgctttcacaggaaggcaaggctatgaaagtttaaaaaaaatagcagatttaactgcaaaacaattaaataaaaaacaagaggaagatgaggataatcctaagaaaatttctacaaaaaatataatttttggttgcactggcactattggagaaatctttccgtatgaaaaaatttctaaaaatattccaaatttaataaataaaattcgttacacccaaaataaatttatttggatgaaggcagcacttgcaatcatgaccacggatacaaagccaaaattagctatggaggaatgtcatattggaagtgaaaaagtaaaaatatatggaatagctaaaggatcaggaatgatatatccaaatatggctacgactcttgcatatatatttactgatgcaactttatctaatgatattttaggaaagctattaaaaaaaaatataactaatacatttaacgctatttcttgtgatggggatactagcaccaacgatatggcaactatttttgcaactaatgaagtaaaaaattaccaagttaaaagtataaatgaaaataaaattaaaaattttgacaaagctctaaataatgttcttttaaatttagctaaaagagttgtttcagatggtgaaggatcatcaaaatttatttcaataaatgttagtaagtgtaaaaacgagatagatgcaaaaaaaattgctttctcggttgcaaattctccattagtaaaaactgcaattgcaggagaagatccaaattggggacgagttataatggcaatcggtaaagcaggacctaaagttaatcttaataaatat

SEQ ID NO: 234609 - DNA, 787 bp, Unknown
  Bacterial polypeptide expressing nucleotide sequence isolated from the Sargasso Sea
atgaaagcagccttaggaataatgaccactgacacaaaaccaaaacttgcgatggaacaatgtaaaattggagataaagaggtaaaaatttatggtgtcgctaaaggttcaggtatgatatttccaaatatgggaaccactttggcgtacatatttacagatgccaacttatcgaatgatattttaagtaaattattaaaaaaaaatattactaatacatttaatgctatctcgtgtgatggagacactagcacaaatgatatggttagtatttttgcaacaaataaagcaaacaatttaaatattaaaagtattaatgatatgaaactaaaaaaatttgacaaagcattaaacaatgttttgttaaatttagccaagagagtagtttctgatggagaaggagcatcaaaatttgttactataaatattaataaaagcaaaagtgaaaaagatgcaaagacaattgctttctcaatagcaaattcagctttagtgaaaacagctatagcgggtgaagatccaaactggggacgaatagtgatggcaataggaaaagcaggaccaaaaataaatttaaataaattaggtttgaaatttggaaattatcaaataattcaggatggaaaattacacaataactacgatgaaaaattagtaggagaatatatgaaaggtgaaaatatagatatcactgtatatttgtttactggcgctaaaagctttactgcttttaccatggattttacaaaaaattatattgagattaatgctgattatagaagttgaa

SEQ ID NO: 234610 - DNA, 994 bp, Unknown
  Bacterial polypeptide expressing nucleotide sequence isolated from the Sargasso Sea
atgccaataggattggagcaacctaaatccctgctaaatataaagggcattcgtctatcggcttgctcagcggggatctatgataaaaaacgtgatgatttagcactaatagaaatttgcaaggatagtattgtaaccacggcttttactaaaaatattttttgtgcagctccagtaaaaatatcaaaaaataatttaaccaaaactagccctttatattgtttaattaattcaggtaatgctaatgctggtacaggtaaaactggcctttctaacgcaaaagcaatatgtaaagagcttgcaaatatagtaagttgttcagaagatgagattctgccattttccacaggtgttattggagaagatcttccagttgaaaaaataaaaaaaacaataccagatcttataaaaaaattatcagatcattcatggcttagtgctgcgaaagcgattatgacgacagacacaatacctaaagctatctccgatcaaattaaaattggtggtacgacaattaatatcacaggcattaccaagggctctggtatgataaaaccaaatatggcaacaatgctatcatttatagcaactgatgcgagagtaacaaaagacgttctagaaagaataaaattaaatgcattgtcaaaaagttttaataggataacagttgatggcgacacatcaactaatgactcatttattctaattgcaacatccaaagctaagactccaataatagataaactagatagtaatgaatttctaattttagaaaatgcgataatgagcatatgtaagaaattagcacaggctattgttagagacggtgagggagctaataaatttatttctattaaagttgatggaggggctaatgagagcgaatgtctatcagcagcatatactattgcagaatctcctcttgttaaaaccgccatttacagcatcagatccaaattggggcagaataatagctgcattaggcaatgctaaa

SEQ ID NO: 234611 - DNA, 1051 bp, Unknown
  Bacterial polypeptide expressing nucleotide sequence isolated from the Sargasso Sea
ttgttagtcaatacgcaaaacgcaaacacatttactggtaaacaaggtttagaaagcttggatgaaatagcaaaaaatttgtctaaaacattaacaataaaagagtcaaaatctgcagatggtgtagacgaggctgtgaagatcaaagatattttatttgcctctacgggagtaataggtgaaaagtttccagtagataaaattaatggatcaatacaaactcttgtcgataaactaaaagaagaacagaataaattaatttggatgaaaattggatctgcaattatgactactgatacaaaacctaaacttgcctatgagcaattcactgccggaaataaaataataagaatagctgggatcgctaaaggctctgggatgattgctccaaatttagcaacaatgttatcttttattttcacagatgttgatttaccttcaaatattttaagatcattattaaaaaggtctgtgtccaactcttttaatgcaataacagtcgatggtgatcaatccactaatgatatggtaggaattttctctacaaaaagagttaaaataggacaaaatagaaatattgctgatccaataattcaaaaatttgaaatggctttaaaaaagctcacactaaacttagctaaacaagttgtagttgatggagaaggtgcaaaaaaatttgtaactgttaaagtaatcaacgctcaatctattttaagtggaaaaaaaattgctttttctgttgcaaactctccactggtaaaaactgcaatagcaggcgaggatccgaattggggaagagttattatgggcattggaaaatcaggagaaaatattgacaaaaacaaattaacagtaaaatttggtgaatttttagtgtgcgaaaagggtcaaatttctgaaagctatgatgaacaaaaaattaaagaatatatgcagtgggattctgtgttaattgaaataaatttaaatcaaggcaatgactcttttgagtgttacacttgtgattttaataaagactatattgatataaatgtaaactatcgaaattaag

SEQ ID NO: 234612 - DNA, 1250 bp, Unknown
  Bacterial polypeptide expressing nucleotide sequence isolated from the Sargasso Sea
tatgggaattaatttaagaaattttttatcatctcaatcaaaaaatactaaaatgattgattttcaagacctggatcatttagacggtctttcaatttcagttgtttcagcaaatttatataaagatataagagatgatttaacaatgttctatttcagagaaggcgccaattactcttctgtttacactcaatctaaaatagtctctgaaaacataaaatggaatataaaccaaagaccaaaaaaaatttattctctcattgtcaatacaagaaacgctaatgcttttactggaaagcaaggatatgaaagtttaaaaaaaatagcagatttaacagctaaacaacttaacaaaaaacaggaagaagatgaggataatccaaaaaaaatttcttcaaaaaatataatttttggttgtacgggtactattggagaaatttttccatatgaaaaaatttccaacaatattcaaaatttaataaaaaaaattagttacacccaaaataaatttatttggatgaaggcagcacttgcaattatgaccacggatactaaaccaaaattagctatggaggaatgttatattggaagtgaaaaagtaaaaatatatggaatagctaaaggatcaggaatgatacatccaaatatggctacaacacttgcatatatatttactgatgcaactttatctaatgatattttaggaaagttattaaaaaaaaatataacaaatacatttaacgctatttcttgtgatggggataccagcactaatgatatggcaactatttttgcaactaatgaagtaaaaaattaccaagtaaaaagtattaatgaaaataaaattaaaaattttgacaaaggtctaaataatgttcttttgaatttagctaaaagagttgtttcagatggagaaggagcatctaaatttattacaataaatgttagtaaatgcaaaaatgagatcgatgctaaaaaaattgccttttcagttgcaaattctcctctagtaaaaactgctattgcaggagaagatccaaattggggacgaattataatggcaattggtaaggcaggacctaaagttaatttaaataaattattaataaagtttggagatatgacaattgtagaaagtggaaaattaaatcaaggttatgatgaaaaacaagcagcaaattatatgaaaggagaaaatattgaaataagtatcgaaactttcactgggaagaaaaactttatagcttata

SEQ ID NO: 234613 - DNA, 1306 bp, Unknown
  Bacterial polypeptide expressing nucleotide sequence isolated from the Sargasso Sea
atgacaattaatgtaaaaaattttttaaaggacaaaccaaagctgtcaaaaatgggcgaatttcaagaactgcagccaatcgagggtatggagatctcagcaatttctgcagatttgtatggtacaggaagagatgatctgtgtttattttattttaaggatggagcaaattatggagcagtatatacaaataatacaatatgttcagagtcaattacctggaacagacacatcagaaaaaaaaatattaaagctattatgattaacacaaaaaatgcaaacaccttcactggaactcaaggagcagaagctctcgacagtttatcaaaaaatcttgcaaaaaatcttactttaagggaagcccaaaaaaagggtggaacaagtcaagtaattaaaccaaatgaaatactatttgcttctacaggtgttattggagagaagttccctattcaacaaataaaaaataatacttctcaacttgtcgaaaaattaagagaaaaacaaaataaattcgtgtggttcaaagcagcctcatctataatgactaccgatactagaccaaaacttgcttacgaagagtgtaggatttggaataaagatataagactttctgcaattgcgaagggttcaggaatgatatctccaaatatggcaacaatgttagctttcgtttttactgacgcagaaattccatcagtatttttaaaaagtctacttaaaagggcaatgacaaatacttttaatgcaatcaccgtggatagtgacacctctacaaatgatatggttgcaattttctcaagcaataaagtaaaaacgggaaaattttataatgttttagatcctaaattgaaagattttgaaatggcacttcaaagattacttcttaacttggcaaaacaaatagttagtgatggagagggagcaaaaaaatttattaccgttaaggttataaacgcaagatctcaacaaatggcaagaactgtcgctttctcaattgccaactcacccctttttaagactgctatggctggcgaagatcctaattggggaaggataataatggcgataggaaaatctggagaaaaaattaccccagaaaaaatagaaattaaatttggagagcttaaagtcgctgagaaaggaaaaatttctgatgagtatgacgaagcaaaattaaaggaatatatgaaatgggatgatttaaaaatcgaggtgaatttaaaattggggcagggttctttcgaatgttatacttgtgatcttacaaatgattatattaatataaatgcagattatagaaactaat

SEQ ID NO: 234614 - DNA, 1303 bp, Unknown
  Bacterial polypeptide expressing nucleotide sequence isolated from the Sargasso Sea
atgggaattaatttaaccaattttctatcttcacaatcaaaaaataccaaaatgattgattttcaagacctagatcatatagacggtttgtcaatttcagtactgagtgcaaatttatataaaaatgacagagatgatttatcgatgttttatttcagagatggcgcaaatcacgcctcactttatacgcagtctaaaattatttctgaaaatataaaatggaacttaaatcaaaaaactaaaaaagtattttccttaattgttaatactagaaatgcaaatgcatttacaggaaaacaaggatatgaaagtttaaaaaaattagcagatctagtttcaaaaaatttaacagaaaaacaaaaacaagacgaagaaatacctaaaaaaataaatccaaaagaaattctatttggttgtacaggcactattggagaagagtttccatttgaaaaaatatctcatcaaataccaaatttaattaataaaattcgttatacacaaaataaatttatttggatgaaagcagcacttgcaatcatgaccactgacacaaagccaaaaattgccatggaagaatgtaagataggcagtgagaaagttaaaatttatggaatttctaaaggttctggcatgatacatcctaatatggcgacaaccttggcttatatttttacagatgcaagtttatctaatgatattttaagtaaattattaaaaaaaaatatatttaacacttttaatgctatttcttgtgatggagatactagtacgaacgatatggtatctatttttgcaactaataaaataaataattcacaagtaaaaaatataaatgaaaataaaattaaaaattttgacagagctttgaataatgttttattaaatttagctaaaagagttgtttcagatggtgagggagcatctaaatttatctctataaatgtttctaaatgtaaaaatgaattagatgcaaaaaaaatagctttttcaatagcaaattcacctttagtaaaaacagcaattgcaggtggagatccaaactggggaagaattattatggcaattggtaaggctggaccaaaaattaatttaaaaaaactttgtataaagttaggaaatttaaagatagtacaagaagggaaactctaccaaaactatagtgaagaggtggcatctaaatatatgaaaaaagaaaatatagaaattagcgttgaagtttacacaggaacaaaagattttactgcgtacactatggacttaactaagaaatatatagatattaatgcagactatagaagctaag

SEQ ID NO: 234615 - DNA, 296 bp, Unknown
  Bacterial polypeptide expressing nucleotide sequence isolated from the Sargasso Sea
attgaattattcagaaaaatttaaagcatcaattaataaattgaaatttgaaggtagatatcgccattttaatgaaattgaaagacatgcaggtctacatccaatagcttcttggaaagttaattataaaaaatctgacattgtagtatggtgttcaaatgattatttaggaatgagccaaaatgatctaaccattaattcgatgattaatgctgttaaaaaaatgggaataagttctggaggaacaagaaacatttccggcaatagttctgcaattgtcaacttggaaaaagaat

SEQ ID NO: 234616 - DNA, 214 bp, Unknown
  Bacterial polypeptide expressing nucleotide sequence isolated from the Sargasso Sea
ttgaattattcggatatatttaaatcatccataaacaaacttaaaatcgagggtagatataggtatttcaatgaaattgaaagaaaagtaggtaagcaccccagtgctttgtggatatcagacacaaaaaaaaatgacataattgtttggtgttcaaatgattatttgggcatgagccaaaataaagttgtcataaattcaatgataaattcag

SEQ ID NO: 234617 - DNA, 533 bp, Unknown
  Bacterial polypeptide expressing nucleotide sequence isolated from the Sargasso Sea
aatggactataaaaaatttttttctaattctatagatactctaaaaaaatctggtgaatacagaatatttagagatattgtcagaaaagcaggctcgtttccaaatgccaaatttaatgaccaaattaaaaaagaaaatataattgtatggtgtagtaacgattatttaggaatgggacaacatccttttgtttttgaagcaattgaaagaacaatgaaagaagttggcgcaggctcaggtggcacaagaaatatttcaggaacaaatagatttcatattgctttagaaaatgaaatttcagaaattcatcaaaaagaggcgtctttagtttttacttcaggttatgtggcaaacgatgcatctttaagtattcttggttctaaattaaaagattgtataattttttctgatgaaaaaaatcatgcttctataataaatggtattagaaatagcaaagctgagaaatttatatttaaacataatgatgctaaacaccttgaatctcttttaaaaacagtaaatattgatagac

SEQ ID NO: 234618 - DNA, 514 bp, Unknown
  Bacterial polypeptide expressing nucleotide sequence isolated from the Sargasso Sea
ttgacgtctttcaaaaatcaaataaaaaaaataaattccttgggctacttaagaacaaggtctattataaattttgagaagagtactaaagtaaatttagacaacaaaatagtgacatccttccttagcaatgactatcttggaatgtcaaagaatcgcactataataaatgaattaaagaaatcagctaatactcatggaataggctctggatcctctcctcttatttctggttatagcaaatcacatcattatcttgaaaaagagattgcagaatatttaaatgcagaatcttgcctagtggttaacagtggatatatggcaaacctatgtcttttgaatatttttgatcaggaaatgaatgtcgttcaagatagacagtctcataactcgataattgaatcctctaaaataaataaaataaaaattaatcggtataagcatcttgataattctcagttagaaaaacatttaagaaatggaaagcaagatattatttttagtgaatctatat

SEQ ID NO: 234619 - DNA, 397 bp, Unknown
  Bacterial polypeptide expressing nucleotide sequence isolated from the Sargasso Sea
ttgaattattcagataaatttaaagcgtcaattagtaaattgaaatttgagggtagatatcgccattttaatgaaattgaaaggcatgcaggtctacatccaaaagcttttaggaaggggaattttaaaaaatctgacattatagtatggtgttcaaatgattatttgggaatgagtcagaatgatctaatcattagttcgatgattgatgcagttaaaaatatgggaacaagttctggaggaacaagaaacatttctggcaatagttctgcaattgtggatttggaaaaagaattagcagttttacatggtaaagaaaaagcaatagtattttcctctgggtatgtagcaaacgaatctagtattagtaccttactaggtttattggatgatgatg

SEQ ID NO: 234620 - DNA, 632 bp, Unknown
  Bacterial polypeptide expressing nucleotide sequence isolated from the Sargasso Sea
ggaaggtataagatcgcctattgttaaaattgtagagttagcagaaaaatataactgtatgacatatctggatgaagttcattcagttggactttacggtgaagaaggtaaaggtattgcagtagaaatgggagttgaagataaaatagatattattaatggaactttagctaaagcatatggtcaaatgggaggttatattgcagctagttcagaaataattgattacattagaagtttcgctccaggttttatttttacaacttcaatctgcccatcaattgctgcaggagcagctaaagcaatagatattgtttctctggcagaacaactaagaataagaataaaagaaaatgctgctttaataagggaaaatttagattccttagcaatcccttatttggatacaaattctcatattgtagcagtattaattaatgatccttttttatgtaaaaaagtgtctaaagatttaattgatgatcatggtatctatgcacaaccaattttttatccaactgtgcccaaaggtctagaaagactaaggataactgttaccccaaaacatagaaaagagcatattgaaaaaatgattaaggctcttgatatagtttggtctaaaaataatttac

SEQ ID NO: 234621 - DNA, 485 bp, Unknown
  Bacterial polypeptide expressing nucleotide sequence isolated from the Sargasso Sea
cttgacgtcttttaaaaatcaaataaaaaaaattaattcctcaggctacttaagaacaaggtctgttataaattttgagaatagtactaaagtaaatttaaagaataaaatagtgacatccttcctcagtaatgactatcttggaatgtcaaagaatcaaactataataactgaattaaagaaatcagctaatgctcatggaataggctctggatcctctcctcttatttctggttatagtaaatcacatcattaccttgaaaaagaaattacagaatatctaaatgcggaatcttgcctagtggttaacagtggatatatggcaaacctatgcctattgaatatttttgatcaggaaatgaacgtcgttcaagatagacagtctcataactcgataattgaatcctctaaaataaataaaataaaaattaacaggtataaacatcttgataatgctcatttagaaaaacatttgcgaaatggaa

SEQ ID NO: 234622 - DNA, 354 bp, Unknown
  Bacterial polypeptide expressing nucleotide sequence isolated from the Sargasso Sea
cttgggaaaggcatatggagtagtgggcggatatattactggttcgaagggcctgtgtgatttcattagatcctttgcaagtgggtttatttttacaacagctcttcctcctgcagctgcagctggggcattggcttcaataaaacaccttaaggaaagtgagattgaaagggctgcccaaaagaggcaagttaatctattaagagggaaattggatgcggccggtattccacatcttgaaaatccgagccacatagtccctgtcatgatcaaagaccccataaagtgcaaaaaaataagtgattggcttctagaagattatggcatttatgtccaacctataaactatccaac

SEQ ID NO: 234623 - DNA, 526 bp, Unknown
  Bacterial polypeptide expressing nucleotide sequence isolated from the Sargasso Sea
agtctcagaagaattaggctttcaaaaagatattgatatattacaaggtactcttgcaaaagcttatggcaatattggtggctacattgccagcaataaacttatttgcgattatataaggtctacagctagtggttttatctttacaacctccctaccaccttctgttacagaagctgccaaaaatgcaattcagtatttaaagcttcatgataatgaaagaaacctccaaaaagaaaatgttaaatttttaaagaataaattgacggaatataaaattaattttttccaaaacaaaactcatattgttccagtgatgataaatgatgcagataaatgtactaaagtcagccaatttcttttaaataattatggtcactatattcaaccaattaattacccaactgttcctaaaggtacagaaagattaagaattactccaggaccattacatacaaaaaaaatgattacagatttagttaaatctttaagggaaactatagataaaattaatttaacaatttaa

SEQ ID NO: 234624 - DNA, 241 bp, Unknown
  Bacterial polypeptide expressing nucleotide sequence isolated from the Sargasso Sea
attgaataaaaactttgagaaaaaacttcaagatttaaaaaaagaaaatttatttcgacaaagagtattaaaagaatctggctcttcaagcgaaattataattgatggaaaaaaatatctctcttttgcaagtaatgattaccttggcatgtcaaataattatgagcttcaagaagctctttccgagtcttgcaaaaaaaatgggctaggatcaggttcatccccactcatctccggctat

SEQ ID NO: 234625 - DNA, 478 bp, Unknown
  Bacterial polypeptide expressing nucleotide sequence isolated from the Sargasso Sea
cttgacatctttcaaaaatcaaataaaaaaaataaattcctcgggctacttaagaacaaggtctgttataaatgttgagaagagtactaaagtaaatctaaacaataaaatagtgacgtccttccttagcaatgactatcttggaatgtcaaagaatcgaattataataaatgaattaaagaaatcagctaatactcatggagtaggctctggatcctctcctcttatttctggttatagtgaatcacatcattatcttgaaaaagaaattgcagaatatttaaatgcagaatcttgcctagttgttaacagtggatatatggcaaacctatgtcttttgaatatttttgatcaggaaatgaatgtcgttcaagatagacagtctcataactcgataattgaatcctctaaaataaataaaataaaaattaatcgatataaacatcttgataatgctcatttagaaaacatttgctaa

SEQ ID NO: 234626 - DNA, 576 bp, Unknown
  Bacterial polypeptide expressing nucleotide sequence isolated from the Sargasso Sea
tggtaattatgttgaattagcgaaaaaatacaatgccatgacctatcttgatgaagttcatgctgttggcttgtacggaaaaagaggtgaaggagtagctggtgaatgtggattttctgatcaaattgacgttataaatggcactctagctaaagctgttggtcaaattggtggttacatcacaggagatcgtgacattattgaattcatcagaaatcaagcaccaggttttatcttcacgacatcaattatgcctgctgttgcagcggcggctaagactagtctaaatatcattgaaaatgcagatgatttaagacaagacatttttaaaaaagcaaattatatcaaaagcaaactttctgaaaaaaatatttcacatatagacagcaaaagtcacattatccctgttttaattggatctgcagatagatctaaagaaatatcaaaaaaacttatggaagactataatatttatgtacagcctattttctatccaactgttcccaaagatagttccagactaaagataacagttactcctaagcacacttatcaggatatagattatttgatttt

SEQ ID NO: 234627 - DNA, 556 bp, Unknown
  Bacterial polypeptide expressing nucleotide sequence isolated from the Sargasso Sea
acaggtgcaggaatttcagaaaaatttaatttgcaaaatgacattgatattattcaaggaacactcgctaaagcttttggaacaatgggaggctatatagcatctgatgatcttgtctgtgatgctgttagatctacagcgagtggctttatcttcaccacttcgttgcctccattagtggccgaaagtgcaagagcatctattaaatatcttaactctaacagtgaattaagaatcaaacagcaagaaaacgttaaatttttaaaaaatgaacttttaaaacatgatatagagatacttaaaaatacaacacatattatcccagtgatgattagagatgctgaattatgtaatgaaattagtaaacacttacttgataaccatggccattacatacaaccaattaactacccaacagtaaaaaaaggagaagagaggttaagaattacgccaggtccatttcataataaaaaaatgatgttagatttagttgatagtttagaaaaaacatttagaaaatttaattttactaaaaccagcattaacgccgcgtaaa

SEQ ID NO: 234628 - DNA, 217 bp, Unknown
  Bacterial polypeptide expressing nucleotide sequence isolated from the Sargasso Sea
atgacgtacgacacggcaattcataattcgatcattgagctccacaagaccggaaagtatcgtacgtttgccaacttgaaacgtcaagttgggcgctttccgagggcaacgtaccatcctgaggaaggtccagcattcgaagttgaggtgatgtgcagcaacgattacctcggaatgggccaccatcaggtagtgcgggatgcgtgcaaagcggccg

SEQ ID NO: 234629 - DNA, 708 bp, Unknown
  Bacterial polypeptide expressing nucleotide sequence isolated from the Sargasso Sea
cttgacgtctttcaaaaatcaaataaaaaaaataaattccttgggctacttaagaacaaggtctgttattaatgttgagaagagtactaaagtaaatttagacaataaaatagtgacatccttccttagcaatgactatcttggaatgtcaaagagtcgcgctataataactgaattaaagaaatcagctaatactcatggaataggctctgggtcatctccacttatttctggttatagtgaatcacatcattatcttgaaaaagaaattgcagaatatttaaatgcagaatcttgcctagtggttaacagtggatatatggcaaacctatgccttttgaatatttttgatcaggaaataaatgtcattcaagatagacagtctcataactcgataattgaatcctctaaaataaataaaataaaaattaatcggtataaacatcttgataattctcatttagaaaaacatttgcgaaatggaaagcaagatattatttttagcgaatctgtattcagtatgtcaggtgatgcaacaaatattaaagaacactataagttaaaaaagaaatataaatcttttttatttgttgatgatgcacatggatttggtatagcaaagtgtaaaataaaaaataattctatagaaaactcatgttcatcttttaatattagaatctcaaacattgatgcatacatgggaacttt

SEQ ID NO: 234630 - DNA, 454 bp, Unknown
  Bacterial polypeptide expressing nucleotide sequence isolated from the Sargasso Sea
ttgaactattcagatatatttaaatcatccctaaataaacttaaaatcgagggtagatataggcatttcaacgaaatcgaaagaaaagtaggtaagcacccaaatgctttttggatatcagactcaaaaaaaaacgatataattgtttggtgttcaaatgattatttaggaatgagtcaaaataaacttgtaataaattcaatgataaattcagttaaaagaatgggtacaggttcaggcggaacacgcaatatatctggaaacagtaatgctattgtacaattagaaaatatactggctgattttcatttgaaagaaaaggcagtagtattttcatctgggtatgtagcaaatgaatcaacaataagcacccttctcaatttattgaaagatgtaattgttttttctgatgaaaaaaatcatgcttcaataatttcaggtataaaaaaatcaa

SEQ ID NO: 234631 - DNA, 505 bp, Unknown
  Bacterial polypeptide expressing nucleotide sequence isolated from the Sargasso Sea
tttggcaacattcaaagataaacttaaatctatagagtctgagggatacttaagaaagagggatataataagtctcacgacctcctcgcgcacgcaaataggaactaaactcgtgacctcttttagcagcaatgactaccttggtatgtcatcacatagagatgttataaatgaactcaagcaatccgcgagtcaatatggtgttggatccggctcttctccactgataactggatatactaaatctcatcaattccttgaaaaagaaatttgtgaatatctagatgcagaaagctgtgtcgtcgtaaacagtggttatatggctaacctttgtctattgagtgtttatgacaaggaagttaatgttatccaagataaagaatcacataattctataattgaatcatcaagattaaataaaataaaaattaatagatactcccatctagatgattcacagataacaaaacatatatcgaaaaataatgacatattattcagcgaa

SEQ ID NO: 234632 - DNA, 310 bp, Unknown
  Bacterial polypeptide expressing nucleotide sequence isolated from the Sargasso Sea
cttgacgtcttttaaaaatcaaataaaaaaaataaattcctcaggctacttaagaacaaggtctgttataaatgttgagaagcacactaaaattaatttaaacaatagaatagtgacatcattccttagtaacgactatcttggaatgtcaaaaaatcgctctataataagtgaattaaagaaatcagctaacacttatgggataggctctggatcttctcctcttatctctggttatagtgaatcacatcattatcttgaaaaagagattgcagaatatttaaatgcagaatcttgcctagtggttaac

SEQ ID NO: 234633 - DNA, 428 bp, Unknown
  Bacterial polypeptide expressing nucleotide sequence isolated from the Sargasso Sea
cgattttgttaggtcttctcaaagtggattcatattacaaactgcgctcccaccatcaatcgctgccggtgcacttgcctcaataaagcatttaaagtcttctgaaatagagcgagcagatcagaaacgtaaagtaaaatatttgagagaaaagctagatcatcataatattccacacctgcataatgctagccatatcgttcctgttatgattaaagatcccgttaagtgtaagatgattagcgatattttaatggaaaattatggaatttatgtgcaacccattaactacccaaccgttcctaaagggacggagaggttaaggataacaccatcgcccgttcactctttttcagatatagattgtctggtgaatgctatgaatgagctgtggagccaatgtgccctttcacgcgttgtagcttaaa

SEQ ID NO: 234634 - DNA, 1072 bp, Unknown
  Bacterial polypeptide expressing nucleotide sequence isolated from the Sargasso Sea
tttggcaacatttaaagataaacttaaatctatcgaatctgagggatacttaagaaagagagatgtaataagccttacaacctcctcgcatactcaaataagagataaaaccgtgacctcttttagcagtaatgactatctcggtatgtcaactcacagagatgttataagtgaactcaagaaatctgcaaatcaatacggtattggttcgggctcatccccattgataaccggatatactcaatctcatcaataccttgaaaaagaaatttgtgaatatctagacacagaaagttgtatcgttttaaacagtggttatatggctaacctttgtctattgagtatttatgacagagaggttaatgttatacaagacaaagagtcacataattctataattgaatcatcaagattaaataagataaaaatcaatagatactcccatctggatgattctcagataacaaaacatatatcgaaagataatgacatattatttagtgaagctgtttttagtatgacaggggatatgacaaacttaaaaaaccatttgaatataaaaagaaagtttaatgcacagctgtatattgatgatgctcatggttttgcaatagcccaaaagtctagtaataacacaacaatagaaacatcatgtgagttatttgggatgaaaccctcagatgctgatgcgtatatgggcacttttggtaaagcagttggaacaattggagccttcatctgtggcaacaaagacctaatagaaatgattattcaaaaaggtagaccatatatttattcaacatcacaaccaagatgcatgattgatgcaacaagaaaaagtttgaacatcctatcattggataaaagtcgctataaaaaattacatgaaaatatcacatactttaacgatgtttgcaaaataaaaaaaatacctacaaatctaaatcaagtacctataaaaacagtattgttgggaaatcctcaccttgcgctcaaagtgaaggaattgctcttggaaaagacatattctgatacaagctatcagatatccaacagtaccaaaaaacaatga

SEQ ID NO: 234635 - DNA, 643 bp, Unknown
  Bacterial polypeptide expressing nucleotide sequence isolated from the Sargasso Sea
gttaggcttgctaaaaaatataatgcactaacctatcttgatgaagtacatgctgttggattatatggtaaaaaaggtcgaggagttgcccaagaatgtggcgtttcagatcaaatcgatattatcaatggaactcttgcaaaaggctttggacaaataggtggttatattacaggagatgaaatactaattgattttatcaaatcatttgctcccggctttatttttacaacatctatgatgcctgcaatagcagctgcagcatcaaaaagcattgagatcgttcaaacattggatgaggaaagaaaattagttttttcaaaagctaattacattaagaaccaattgaagaaagtcggtattgattttattgatagtgatagccatataatcccagtacttgcctacgatgaatcaaaggtcaaagattattcaaatacccttctaaacaagcataatacatatttgcaaccaattttctacccaactgtaccaaaaggcagcgcaagattaaggataacggtcactccaaaacattcaataaccgatatcaatgatctcatttcctcattaagaatgacatggggaaaacattcacaaagagttattagtgccccattgcagcccgcaatggccttataaa

SEQ ID NO: 234636 - DNA, 928 bp, Unknown
  Bacterial polypeptide expressing nucleotide sequence isolated from the Sargasso Sea
tttgcctttaattgaattagaaaaggaaattgctcttttacatcaaaaagaaaatgctttggcatttacatcaggatatgttgctaatgaaagtactattagctcacttataaaattatttccatcttgtgttgtgttttcagaccaacaaaatcatgcttcaataatttctggtttaaaaaaaagttatactaacaaaataatttttcctcataatgacattagtgcattagaaaagaaaataagttccatagattaccatgtcccaaaaataattatttttgaatccatttattctatggatggcactttaggtaagattcgtgaaatagtatctatagcaaaaaaatacaatgctttaacgtacattgatgaagttcacgctgtaggtatgtatggtcaaacaggtggtggaatctcagaagaattaggcattcaaaaagatattgatatattgcaaggtactcttgcaaaagcttatggcaatattggtggctacattgccagcaataaacttatttgcgattatataaggtctacagctagtggttttatctttacaacttccctaccaccttctgttgccgtagctgccaaaaatgcaattcagtatttaaagcttcatgataatgaaagaaacctccaaaaagaaaatgttaaatttttaaagaataaattgacagaatataaaattaattttttgcaaaacaaaactcatattgttccagtgatgataaatgatgcagataaatgtactaaagtcagccaatttcttttaaataattatggtcactatattcaacctattaattatccaactgttcctaaaggcacagaaagattaagaattactccaggtccattacatacaaaaaaaatgattacagatttagttaaatctttaaaggaaactatagataaaatttaa

SEQ ID NO: 234637 - DNA, 190 bp, Unknown
  Bacterial polypeptide expressing nucleotide sequence isolated from the Sargasso Sea
tttggaaaaaaataatacctcttatccatttgcaaacttggttaatgacaataataaaaaagaaatcattatttggtgttcaaatgattacttgggcatgagtcaaaaaaagtcaattatagatgccgcaaaaaaatcactctcagattatggaactggctctggtggaacaagaaacattttctggtag

SEQ ID NO: 234638 - DNA, 835 bp, Unknown
  Bacterial polypeptide expressing nucleotide sequence isolated from the Sargasso Sea
catggaaaaattaaactataaaatattttttcgtgatttaattaaaacatttcgtttaaaaggattttttagaagatttactcctattgttagggagagagaatcttttcctttttcaaaagtctcatatggtaataacgtaaaattacaaccttacgagggtgacttaaaaatatggtgtacaaatgattacctgaacatgagccataaccaagaggttgtcgatgaaatggtgtctgttatcaataaagttggcactggctcaggaggcactcgcaatatatccggtacaactccatatcaccaaattttagagcaagcccttgccgaatttcatggcagagaggcagctctagtttttaattctgcttatcttgctaatcagaccacaatttggacattatgtaaagcacttgaaaatgtatgtgtattttcagatagtcttaatcatgcttcactcattcaaggaattaaaaattcaaatagtgaatgtaagatatttgatcataatgatcttaaacatcttgaaggtcttctaataaatactgatatcgataggcctaaattaatcgtatttgagtccctgtactcaatggatggcactatagttccagttgataaatatgttgatctagcaaagaaatataatgctctcacttacttagacgaagttcacgctgtgggtctttatggtgagcaaggtcgaggaatagcagagaagcttggcgtggctaaagatgtggacattattaacggtacgcttgcaaaagcttttggccagattggtgggtatattgtcgctaataacgaaatcattgattatgttaagagctac

SEQ ID NO: 234639 - DNA, 739 bp, Unknown
  Bacterial polypeptide expressing nucleotide sequence isolated from the Sargasso Sea
aaagaaacagatatcaaaaggcctaagctaatagtgtttgagtccttgtattcgatggatggtactatcgtcgaggttgataggtacgtagcgttagcaaaaaaatataatgcgctgacatacttagatgaggtgcatgctgttggattatatggtgataaaggtagaggtattgctgcaaaattgggggtagcagaccaggttgatatcattaatgggacgttggctaaatcttttggacagattggtggctatatagtagctgataattacctgattgaatatattcggagttttgcgcccggttttatttttacgacatcaattatgccatcggttgctgccgcagcaaccaagagtatcggtattgtaaaagaagcagatcataaaagatcacatgttatgaaacacgctgaatatctaagagataaactaacaagctatggcataccgttcattgatagtgatagtcatattgttcctgtgatggcctatgagtctaagttagcaaaatcctactcaaaggatcttaatgaaaaattcggtatctacgttcagcccatattttacccaacagtaccaaaagactcagcaagactaagaattaccataactccgaagcacagcacccatgatattgatgaccttgtagatgcacttgtaacggtaacaggaaaaattattccaaaaagtcaatcagcagagtctagccatcaattctctggcacctttgtttaga

SEQ ID NO: 234640 - DNA, 466 bp, Unknown
  Bacterial polypeptide expressing nucleotide sequence isolated from the Sargasso Sea
ttgaactatgacaagatttttagtaataaactaaacaggttgaaaagcgagagccgctacaggacatttgttgagcttgagcgacaagtaggccgtcacccttacgctcaatggaatagtcccgatggcccaaaggatgtggttgtctggtgttctaatgattaccttggaatgggacaaaatccaaaagttattgaagcgctaaccgctgcaattgactcgcatggcaccggagctggcggcactcgcaacatttcaggtaacagcgccgcaatcgtggcattggaggcagaactggccgacctgcacggcaaagaacgcgcacttgttctaaccagcggctatgttgcaaatgaggcaagcataagcgcgattgccaaatcgcttgatgatgctttgatattatcagatgaaatgaaccacgcttccattatttctggcattcagcatgcacgctgtgataaag

SEQ ID NO: 234641 - DNA, 809 bp, Unknown
  Bacterial polypeptide expressing nucleotide sequence isolated from the Sargasso Sea
tatgagtcaacacccagaagtcgtaaatgaaattgtgaaaacactacttgaatatggttctggttcaggtggaacaagaaatatttctggtacatcaacctatcatactgaacttgaaaaaaaactagcaaatgttcataataaagaggcggcattagtttttgcttctgcttatacagcaaaccaatctactttatggactttaggaaaaaaaattaaagatattgagatattttctgatgaattaaatcacgcatctttaatacaaggtattaagaatagtggagctaagtgtcatatatttaaacacaatgacattgatcacttagaacagttactaaaagagtcaaatgtaaataatcctaagttaatcgtttttgaaagtttatactctatggaaggtataagatcgcctatagttaaaattgtagagttagcaaaaaaatataactgtatgacatatcttgatgaagttcattcagttggactttacggtgaagaaggtaaaggtattgcagtagaaatgggagttgaagataaaatagatattattaatggaactttagcaaaagcatatggtcaaatgggaggttatattgcagctagttcagaaataattgattacattagaagttttgctccaggttttatttttacaacttcaatctgcccatcaattgctgcaggagcagctaaagcaatagatattgtttctttggcagaacaactaagaataagaataaaagaaaatgcagctttaataagagaaaatttagattccttagcaatcccttatttggatacaaatt

SEQ ID NO: 234642 - DNA, 898 bp, Unknown
  Bacterial polypeptide expressing nucleotide sequence isolated from the Sargasso Sea
aaaagttttccaaatgcagatgaaagttttaaaaacaaagaaagagaagttgaggtttggtgctctaatgactatctaaacatgagtcagcatccagaggtagtaaatgaaattgtaaaaacactacttgaatatggatcaggttcaggtggaacaagaaatatttctggtacatcaacctatcatactgaacttgaaaaaaaactggcaaatgttcacaataaagaagcagcattagtttttgcttctgcgtatacagcaaaccaatctactttatggactttaggaaaaaaaattaaaaatattgagatattttctgatgaattaaaccacgcatctttaatacaaggtattaagaatagtggagctaagtgtcatatatttaaacacaatgacattgatcatttagaacagttactaaaagagtcaaatgtagataatcctaagttaatcgtttttgaaagtttatactctatggaaggtataagatcgcctatagttaaaattgtagagttagcaaaaaaatataactgtatgacatatcttgatgaagttcattcagttggactttacggtgaagaaggtaaaggtattgcagtagaaatgggagttgaagataaaatagatattattaatggaactttagcaaaagcatatggtcaaatgggaggttatattgcagctagttcagaaataattgattacgttagaagtttcgctccaggttttatttttacaacttcaatctgcccatcaattgctgcaggagcagctaaagcaatagatattgtttctctggcagaacaactaagaataagaataaaagaaaatgcagctttaataagagaaaatttagattccttagcaattccttatttggatacaaattctcatatgt

SEQ ID NO: 234643 - DNA, 891 bp, Unknown
  Bacterial polypeptide expressing nucleotide sequence isolated from the Sargasso Sea
aaataaagaaagagaagtagaggtttggtgttctaatgattatctgaacatgagtcagcacccagaagtcgtaaatgaaattgtaaaaacactacttgaatatggatctggttcaggtggaacaagaaatatttctggtacatcaacctatcatactgaacttgaaaaaaaactggcaaatgttcataataaagaggcggcattagtttttgcttctgcttatacagcaaaccaatctactttatggactttaggaaaaaaaattaaagatattgaaatattttctgatgaattaaatcacgcatctttaatacaaggtattaagaatagtggtgctaaatgtcgtatatttaaacataatgacattgatcatttagaacagttactaaaagagacaaatgtagataatcctaagttaatcgtttttgaaagtttatactctatggaaggtataagatcacctatagtaaaaatagtagagttagcaaaaaaatataactgtatgacatatctggatgaagttcattcagttggactatacggtgaagaaggtaaaggtattgcagtagaaatgggagttgaagataaaatagatattattaatggaactttagcaaaagcatatggtcaaatgggaggttatattgcagctagctcagaaataattgattacattagaagttttgctccaggttttatttttacaacttcaatctgcccatcaattgctgcaggagcagctaaagcaatagatattgtttctctggcagaacaattaagaataagaataaaagaaaatgcagcttttataagagaaaatttagattccttagcaatcccttatttggatacaaattctcatattatagcagtattaattaatgatccttt

SEQ ID NO: 234644 - DNA, 837 bp, Unknown
  Bacterial polypeptide expressing nucleotide sequence isolated from the Sargasso Sea
tttgggtatgggtcaacattcttatgttcttgatagtatgaaaacggcattagatacggctggcgcaggtgccggtggtactcgtaatataagtggtacgactcattatcatgttgcattagaaacagaattagcaaaacttcataacaaagaaagtgcattattatttacaagcgcctataatgcaaatcaaacaacattagaaactataccaaaagtattaggtgatgtgttatatatttcagatgaaatgaatcactcatctattatacaaggcataagacatagtaaagcaagaaaagaaatatttaaacataatgatgtaaaagatttagaaggtatcttaatgtcaaatacaggcacaaagatagttgtatttgaatctgtttatagtatggacggtgatattgcacctgtaaaagaaatagttgagttatgtaaaaagtataaagcaataagttatattgatgaagtacacgcagttggtatgtatggtaaaaatggtgctggtatttgtgaaagagataatgttgatgtagatattataaacggaacattagcaaaggcatttggtgtacaaggtggctatattgcaggcaaacaaatattcatagacgcaataagaagtttagcaagtgcgtttatatttacaacaagtttatcgccagttatttgtgctggtgcattaacaagtattaagtatgtaagagatcatccagaattaagagaaaaattacatgaaagatcacaggcgactaaaaagattttaaaagaacataatataccagttatggataacgattcacatattgtaccagttatgattaatgacgctaa

SEQ ID NO: 234645 - DNA, 403 bp, Unknown
  Bacterial polypeptide expressing nucleotide sequence isolated from the Sargasso Sea
atggactataatgcaatttttaagaaaaaaattgagaatttaaaacaagagggtaattatagaatatttgctgatctagagagatatcaaggttctttcccccgtgctaggaattatagtggaaatacagaaagggatgtaactgtttggtgttcaaatgattatttaggcatggggcaaaatgaagctgtgataaactcaatgaaagatgcaatcgacaaatgtggagcaggagcaggtggcactagaaatatttcaggaacaaatcactaccatgttttgctggaaaaagagctagccgaacttcatggaaaagaggctgctttactgttcacctcaggctatgtctctaattgggcttctttgtctgtcttaggggcaaacctagaaaactgcgttatcc

SEQ ID NO: 234646 - DNA, 665 bp, Unknown
  Bacterial polypeptide expressing nucleotide sequence isolated from the Sargasso Sea
ttattcaatggatggagactttggtgacattgaaaatatagtaaacattgcaaaaaagtatagtgcactaacttatttagatgaagtacatgctgttggtatgtatggaaataccggcgctggtatagctgaaatgatgaatttacaaaattcaatagatataatccaaggtacacttggtaaagcttatgggactatgggtggttatatttcatcttctcaagaaatttgtgacgcgatcagaagttatgctagcggttttatttttactacagcaatgccacctgcactggcaaaaactgcaactgagtctattaagtatttgaaaaaatcaaattatgagagaattttacaaaaacaaaaaacaaataagcttaagaattatttatcaaaagaaaacatcaattatttagatcacaactcacacattgtaccagtaatggtcaacaatccaattagatgcagtgaaataagtaatattttgctgaatgactttggacattacattcaacctattaactatcccacagttcccaaaggaacagaaagacttaggatcaccccaggacctcttcatacagataaaatgatatctgatttgactatcgcgcttaaacatgcatttaacaaaacagataatattgtatataaaaaatatgcataaa

SEQ ID NO: 234647 - DNA, 298 bp, Unknown
  Bacterial polypeptide expressing nucleotide sequence isolated from the Sargasso Sea
cttagaaatcatcttagcaatcttgatccgtctgttccaaaaattattgcttttgaatctgtttattcaatggatggagatatctcacctatctccgatatatgtgatgtcgctgacgaatttggagctctaacatatttagatgaagtgcacgcggtcggtctttatggaaaacgaggaggcggagtctccgagagggatggagttgctgatagagtatctataatagagggaactctagggaaagcttttggtgtgctcggcggttacatcaggggttcaaaagaggtttgtgatt

SEQ ID NO: 234648 - DNA, 425 bp, Unknown
  Bacterial polypeptide expressing nucleotide sequence isolated from the Sargasso Sea
gctgacctggacgagaccagagctttgtaatgccacgaccgtcggcaaactgcgtgacactgcaaagagacaggcgaaagaaaaaagtatgaattacaacaccttcttcaaagatgcgttggctggcctcaaggctgagggccgatatcgtgtattcgccaatctcgaacgtattgtcggtaaattccccaaggcgctctatcaccctgacaatggcgaagctccgcgcgaaattaccgtttggtgttccaacgattatcttggcatgggccaacaccccaaagtgcttgaagccatgcaaaatgccatcaccggccagggtggcggcgcgggtggaacgcgcaacatttccggttccaaccacttgcatgtcgcgcttgagcgtgaactcgccgacctgcatagcaaggaagccgcccttctga

SEQ ID NO: 234649 - DNA, 901 bp, Unknown
  Bacterial polypeptide expressing nucleotide sequence isolated from the Sargasso Sea
ggtaaaacaaaagaaatagatgtgtggtgctcaaatgattatttgattatgagtcaaaacgaggatgtgatgtcagcaatgaaaaacgctgtcgatcagttaggtgcaggatctggaggaactagaaatatatctggtacaacaagatttcacgtcgaattagaggaaaaaattgcaaaacttcacggtaaagaaagagctttggcttttaactctggttacagcgcaaatgactctgctttaacatcaattttatccgcaattgataactgcttagttttaagtgatgaattaaatcatgcttctttaatagaaggaattcgtgctagtaaaaaggaaaaagttatttataaacataatgatgtagatcatttaagaggcgtgctaaaaggtattccgttcagtcgtcctaaaatgattgttttagagtcagtatattcaatggaggcagactttgctccgctccaaaatatagttgaaattgcccatgaaagtggtgctttaatttatcttgatgaagtgcatgcagtcggtctttacggatcaaatgctgcaggagttgctgagcaagaaggtgtctcagatcaaattgatattataaatggtacgcttgctaaagcttttggattagccggaggatatattgcatctacacattctgttattgattttgttagaagtttttcaaaaggatttatatttacaacctcaatgtgtccggcagttgccgcgggaacattaaaaagtgttgaaacagttcaaaacaaacctgaaataagatcaaaattttttgataatatcaaattagtaaaatctgaattagaaacagctggtattccttttttagactccggttctcacataataccagtaattattggagaaagtaaactttgtaaaa

SEQ ID NO: 234650 - DNA, 887 bp, Unknown
  Bacterial polypeptide expressing nucleotide sequence isolated from the Sargasso Sea
attggattataccgaaaaatttaaaagttcattaaatagattgaaatttgatggtagatatcgtttttttaatgaaattgaaagaaaagctggtagccaccctatagctttttggaataataatttatcaaaatctgaaataattgtatggtgctctaatgattacttaggaatgagtcaaaatcgactagttacaaattcaatgatacaagctgttgaaaacatgggaacaggttcaggcgggactaggaatatatctggtaatagtagtgcaatagttaatttggaagaggaattagcaaacctacactcaaaagaaagaggaattgttttttcttcaggttatattgccaacgaagctaccattagtactctgctagaaattttaacagatgcaattgtattctcagatgaaaaaaatcatgcgtcaataatttcaggtataaaaaaatctaaatctaaaaaagaaatttttaagcataatgatatgaatgatttagaatttttaataaaaaaataccctcatgacaaacctaaactaattgtctttgaatcaatatattcaatggatggtgattttggaaacatagaaggtattgtaaatattgctaaaaaacataatgctatgacgtatattgatgaagtgcatgcagttggcatgtatggcaaaactggagctggtttatcggaacaattctctttaaacaattccatagatattattcaaggaactttaggaaaagcctatggaaccatgggaggatatataactgcatctgacataatatgtgacgctataagaagctacgcaagtggatttatttttactacggccatgcctcccgctctagcaacagctgctaatgaatcaattaagtatttaaaaa

SEQ ID NO: 234651 - DNA, 967 bp, Unknown
  Bacterial polypeptide expressing nucleotide sequence isolated from the Sargasso Sea
ggtgaatatgtgagcaccgcgaagtgggacacacaggactacaccgccaagttccagagcaccgtggatgagatccgccacgctggtagataccgcaccttcgctgacctggagcgcaagaagaacgagttcccccaggcgcagtaccacggaacgaagcctcatggtgaactcgaagtggaaaaagaggtcaccggctggtgcgcgaacgactacctctgcatggggcagcaccctaaggtgttggatgccatgcatggcgccattgagaagtcgggcgctggctctggaggtacgcgcaacatttccgggaccaaccacttccacgtgcttctagaagaggagttagcagatctgcatggccaggagtccgcgctgctcttcacctcatgctacgtggcgaacgactccactctcgagacgcttggcaagatcttcccagatctggtcgtcttctcagatagcgagaaccacgcatccatgatccagggcgtacgtcacggtcgttcaaaaaagcatatataccggcacaacgacaccgcccacctgatcgagctgctggaggcgacccctgccaacgtaccaaagatgatcctcttcgagtctgtcaactcgatggaggggactgtggcaccgatggaggagatatgcgacattgctgaacgatacggcgcgctgaccttctgcgacgaagtgcacgccgtggggctctacggcgagcgcgggggcggcgtgggcgagcgcgacggtgtgatgtcgcggatcgatatcacgtcggggacgctggcgaagggttacggggtgatgggtgggtacattgcgggcaaccacgcgctcgtcgacgcgatccgcagcaccgcgagcggtttcatcttcacgacctcactgccgccctcgctagccgccggtgccctcgcgagcgtgcaacacctgaaggagagtaaggggagcgcacgatcagcacgag

SEQ ID NO: 234652 - DNA, 808 bp, Unknown
  Bacterial polypeptide expressing nucleotide sequence isolated from the Sargasso Sea
acctgatattttgtttatatcagacgcacaaaatcactcttctatcatacaaggtattagacatagtaaagcaaaaaaagaaatatttaaacataatgatgtaaatgatttagaaagtattttaatgtcaaatactggtcctaaatgtgttatctttgaaagtgtatactcaatggatggtgacattgcacctgtaaaagatattgtagatgtatgtaaaaaatataatgcaataacttttatagatgaagtacacgctgtaggtttatatggtcctacaggtgctggtatatgtgaaagagataatatagatgtagatataataaatggaactttagcaaaggcgttcggtgtacaaggtgggtacattgcaggaaagagagagtttattgacgcaataagaagtttggcaagtgcatttatttttacaacaagtttatctcctgtactatgcgctggtgcattaacaagtattaagtatgttaaagaccacccagagttaagagataagatacaagaaagagcaaagaaaacaaaagaagaaatagaaagacaaggtatagaagtcttaaaaaacgatagtcatattgtacctgtaatcataggagacgccaagaaatgtaaggcagtatcagatgagttactttacaaagatggtatatatgtacaacctattaactatccaacggtggcagtaggtactgaaagattaagatttacaccaacaccttttcatacggacgcacacatatttgatatggttgtgaaattaaaatctgcaatgaaaagatgtggtaaaaagaaataa

SEQ ID NO: 234653 - DNA, 829 bp, Unknown
  Bacterial polypeptide expressing nucleotide sequence isolated from the Sargasso Sea
cactaaatttcctaaagctgatgaaaccaatattgataactctcgtgatgtagaagtttggtgtactaatgattatcttaatatgagccaacatccagaagttgttaataaaactgtcaagacattacttgaattaggtactggatcaggtggtactcgtaatatttcaggcacaacttcctatcatgtagccttggaaaagcgattagctgatgttcacaataaagaagctgcattactttttgcctcagcatatacaacaaatcaatctactttgtggcttttagggaaaaaaataaaagatcttcaaattttctcagatgaacttaaccatgcttcattaattcaaggaattaaaaatagtaattcagattgtcacatatttcatcacaatgatgttgagcatttagaagaattattaaaaagtgttgaccctcagcttcctaaattaattgtttttgaaagtttatattctatggagggaataagagctccaattaagaagattgttgaattagcaaaaaaatataatgctcttacttatctagatgaagttcactccgtgggcctttacggaaaaaatggaaaaggaattgctgtagaaatgaacgttgatcaggatatagatataattaatggtactttagcaaaagcatatggacaaatgggtggatatattgcagctaatcatgaaataattgattatgtaagaagctttgcaccaggctttatattcacaacatctatttgtccttcaattgcagctggaacattaaaagctattaatatagtttcaatggctgaacaacttagaataaagattcatcaa

SEQ ID NO: 234654 - DNA, 1237 bp, Unknown
  Bacterial polypeptide expressing nucleotide sequence isolated from the Sargasso Sea
aatggattattcaaaattttttaatacagagttggaaaaattaaaaaaagaaggtctttatcgtaaatttagagaaatagatcgtcctataaagaaattcccaaaggcagatgagattcagggtgaagaagatagagacgttgaagtatggtgctctaatgattatttaaatatgagccaacacccagaagttgtcaatgaaactgttaaaacacttttagaaattgggtcaggttctgggggaacaagaaacatctctggcacaagctcttaccatactgctcttgagagaaaattagcagcagtacataataaggaaaatgcactaatattcgcatcagcttatacagctaatcaatctactttatggactttaggtaaaaaaattaaaaatttagaaatattttctgatgaacttaatcacgcatctctaatacaaggtataaaaaatagtagtgcaaattgtcatatttttcaacataatgacgttgatcatcttgaacaacttctaagaaatactgatcagaatcatcctaaattaattgtatttgagagcttatattcaatggaagggataagatctcctattttaaaaattgttgaactcgcaaaaaaatataacgcaatgacatatctggatgaagttcattcagttggtttgtatggagacaaaggtaaaggtatagctgtagaaatgaaagttgaccaaaaaattgatattataaatggaactcttgcaaaagcttatgggcaaatgggtggatatattgcagcaaataaagaaataattgattatatcagaagttttgcaccaggttttatttttactacttcaatatgcccatcaattgcagcgggagcaagtaaagctatagatattgtatcattagctgatcaattaagaattaaaattcatgagaatgcgtccactataagacaattacttgaatcaatagctataccatatatcgacactaacagtcacataatatccgtcttaattaatgatccatttctttgcaaaaaagtatctgaaaaattaattgatgatcacggtatttatgctcaaccaattttttatcctacagttccaaaaggacttgaaagacttagaattacagtaactcctaaacacagaaaagatcacatagaaaaaatgattaaatctcttgataaagtatggtctgatttaagtttaccaagaaaaaattcagcaaaaattcatattaacaactag

SEQ ID NO: 234655 - DNA, 1225 bp, Unknown
  Bacterial polypeptide expressing nucleotide sequence isolated from the Sargasso Sea
aaaactaaagcgtctggtttttacagagaatttgttcctatcattcgcgaaagaaaaacattcccattttcctatattgcgcatgaagcaagtagcgatgatcagtttaataatgagacaaaaatttggtgtacgaatgattatttaaatatgagtcaaaatgaagttgtaattgaagaaatgatagatgtgatcagaaaagtgggtgcaagctctggaggtacacgaaatatttcaggcacaaccccttatcatattgagcttgaaaataagattgcacaatttcatagcagagaaaaagcattagttttcaattctgcatatcttgcaaatcagacatcactttggaccttatgtaaaaaaattcccaatatccaaatattctcagatgagttaaatcatgcatctttaattcaaggtattaaaaatgctggagctaattgtcacatcttcgcacacaacgatactatgcagctagaaaagcttttgtctcaatttgataaatcaacccccaagctgattgtttttgaatcgttgtattctatggatggaacaaaagccaaaattggtaattatgttgaattagcgaaaaaatacaatgccatgacctatcttgacgaagttcatgctgttggcttgtatggtaaagaaggcaaaggggtagctagcgaatgtggattttctgatcaaattgacattataaatggcactttagctaaagctgttggtcaaattggtggttatatcactggagattacgatattattgaattcatcagaaatcaagcaccaggttttattttcacgacatcaattatgcctgctgttgcggctgcggctaagactagtcttaatattattgaaaacgcagatgatttaagacaagatatttttaaaaaagcaaattatatcaaaagcaaactttctgaaaaaaatatttcatatatagacagtgaaagtcacattattcccgttctaattggatctgcaaatagatctaaagaaatatcaaaaaaacttatggaagactataatatttatgtacaacctattttctatccaactgttcctaaagatagttctaggctaaggataacagttactccaaagcacacttaccaagatatagattatttgatttttgcaattaatgaaactattaacgctagaaagactaaaagagattcatttaatataaaagttaaatcaccctcttacgcttaaa

SEQ ID NO: 234656 - DNA, 1147 bp, Unknown
  Bacterial polypeptide expressing nucleotide sequence isolated from the Sargasso Sea
aaaattttcccaatggctgaagaaagctttaaaaataaagaaagagaagtagaagtttggtgctctaatgattaccttaatatgagccaacatccagaagttgtaaatgaaattgtaaaaacattattagaatacggttcaggatcaggtggaactcgaaatatttctggcacatctacttatcataccaatttagaaaaaaaattagctaatattcataataaagaatctgctttattatttgcctccgcatatacagctaatcaatctacattatggaccttaggtaaaaaaattaaaaatattgagatattttcagatgagcttaatcatgcatctttaattcagggaattaaaaattgtggagctaagtgtcatatttttaaacataatgatatcgatcaccttgaattattgcttaaagaaacagatattaacaatccaaaactaatagtttttgaaagtctgtattctatggaagggattagatcaccaatagtaaaaatagtggagttggctaaaaaatataactgtatgacttatttagatgaagttcattctgtcggattatatggtgaagaaggtaaaggtattgctgtagaaatgggtgttgacgataaaatagatattattaatggaacattagctaaggcatacggtcaaatgggtggatatgttgcagcaaatttagaaattattgattacataagaagcttttcaccaggttttatttttactacctcaatttgcccctctattgcagcaggtgcttctaaagctatagatatagtttctttagctgaacaattaagaataagaataaaagaaaatgcagctttaattcgagagcatttagactctattgcaattccttatatagatacaaattctcacattgttgcagttttaattaatgatcctttcttatgtaaaaaagtttctcaagatttaattgatgaacatggtatatatgcacaaccaattttctatccaactgttcctaaaggcttagaaaggcttagaattacagttacacctaaacatagaaaagaacatatcagcaagatgattaatgcacttgataaagtttggtcaaaaaacaatttgcctagaaaaaatattaatcaagtatcaagtaaaatctaat

SEQ ID NO: 234657 - DNA, 1336 bp, Unknown
  Bacterial polypeptide expressing nucleotide sequence isolated from the Sargasso Sea
ctgagcgcgcgtgccgagcaaggcttgctgcgccagcgccactgccaacaatacgaaaaagacaacattatttgtattaacggtgagcactatcttaacttttcaagcaatgactacctaggcatgcgccagcatgagggtgtattgcaaagttgggttgaggggctagcgcagtttggtggtggcagcggtgcatcgcctttggtaactgggcacacacaggctcacttggcgctagaagcctacattgccgatgggttaaaccgagaagctgcgctgttgtttaactctggctttgccgccaatcaggcactgtgcatggcactttttcctcacatgtctcactctaataaaagcgtaagagcagggcacataattgctgataagctcatgcacgcttcgtttttagagggggcgcaatgtgtatctgatagcgccaagcttcgccgtttcaagcataacgatctaagtcatttagagagcctgctatcgagcgtttgtcaaagccaggtgcccgatgcggttggtaattctggtgcaaaccagcaagacactctgattgccagtgaaggtgtgtttagtatggacggtgacgtagcgccttgtgaagatatcgctgaactggccgctaaatataatgcatggttcatgttagacgatgcacacggtatgggtgtattgggtgaaaacggcttcggcacagcagaagcactaaacttaaaccagcaacaagcgcctattgttatgggaacatttggcaaagcagtgggcacggccggcgcctttattgcgggaagccaaaccctaattgattatctggtgaatttttctaaacattatgtgtattccactgccatgccaccagcacaagcggtcgcgacgttgtactctctcactcatatcgccagtgatactgcccgccgcgaaacgctgcataacaatatcgcctatttcagagactcgtttcaaaagcgctttggacagacacttaatacaagcgagaaaggcgatgcatcaattgaaatcactttggggcagtcgcaaagcgcgatccagcccattattgttggtagcccagaacgtgcagttgcactaagtgaggggctaaagcagcgcggtatctgggcaacggctatcaggcagcctactgtaccgaaaaaccaagacaggctgcgtattacgcttacgtcaaatcattcatcacaagatattgacgtattgcttgatgccctagagctttcacttaataacttggtgctaagtgagacttcagaaaaaagaggacctgaaagcgctatgtgtgcttctgactctgtaagtaaacaagagatgtaac

SEQ ID NO: 234658 - DNA, 927 bp, Unknown
  Bacterial polypeptide expressing nucleotide sequence isolated from the Sargasso Sea
gatgacaaaagaaatagataaaagtttttatgagcagaaactcaatgctgcgttagaaagcctgcatttagagggaagatatcgcacttttattgaaatagagcgcgctagaggcagttttccaaatgcacgatggatagcaaaagataatatagaaagatcagttactgtctggtgcggtaacgattacctcggcatgggcgaaagcgatgttgttttaaaagcaatgcaagatgcgcttagtagcgctggtgctggttctggaggtactagaaatatatctggaactactgtgcatcacaaaaaacttgaacatgagttagccagcctgcatgacaaagaggcttgtcttttattcacaagcgcctacgtagccaacgattcagccctttcaactctttcaaagctcttgcccaatctgattatatactctgacgagttaaaccatgcttcaatgatcgaaggaatacgtagaaatggtggtgagcggagaatttttcgtcataatgacgtagaacacttgcgtatacttttaaaggctgatgatccaaaagctcccaaactgatagcttttgaatccatttattctatggatggcgattttgcgccgatcaaagaaatatgtgatttagctgaagaattttcagccttaacatacattgatgaggtccatgctgttggaatgtacgggaagaccggtggtggactagctgaacaggaaaatttactatctcgtattgatattattaacggaaccttggcaaaagcttttggagtcatgggtggatatattgcttcatctgagaaactttgcgatgctttaagatcttatgcaccagggtttatatttacaacctcgttaccgcctgcaattgcggctggcgcggccgcatctgtagaacacttaaaagctaatcatttgctccg

SEQ ID NO: 234659 - DNA, 604 bp, Unknown
  Bacterial polypeptide expressing nucleotide sequence isolated from the Sargasso Sea
atggataaaaatttatatgatcaaaaactgaatgctgcgttagaaagcctgcatttagagggaagatatcgcacatttattgaaatagaacgttccaggggcaacttcccgaatgcaagatgggtatcggaaaataagatagagagacctgtaactgtttggtgcagcaatgattatctcggcatgggacaaagcagtattgtcttggaagcaatgcaagatgctctaaaaaggactggcgctggctctggcggaacaagaaacatatctgggacaactgtatatcacaaagaacttgaacatgaattggccggcttacatcaaaaagagtcttgcctacttttcacaagcgcctatgtcgccaatgacgcagctctttcaactctcacaaagctatttccaggtttgattatttactctgacgaattgaaccacgcctctataatcgaaggaatacgcagaaatggaagtgagagaaggatttttcgtcataatgatgttgaacacttgcgtgaacttttagagacggatgatcctaaagcgccaaaactaatagcctttgaatcaatttactctatggacggcgattttgcgcacgattagt

SEQ ID NO: 234660 - DNA, 886 bp, Unknown
  Bacterial polypeptide expressing nucleotide sequence isolated from the Sargasso Sea
tcgggtttttgctgatctaaagagatatcaagggtttttccccaaggcaaaaagttttaaaaaagatggtaacgccgatgttactgtttggtgttccaacgattatttaggtatgggtcaacacccaagcgttctgggtgcaatgggaggcgctattgaagaatgcggtgccggagcgggtggaacgagaaatatttctggaaccaaccactatcatgttttgcttgaagaagagttggctgatctgcacaataaagagtctgcgcttttgtttacttctggatatgtttctaattgggcggcattgtctaccttgggatcaaggctacgaaactgtgtaatcctctctgatgaattaaatcatgcttcaatgattgaaggaattaggcattcaagggctgaaaaagtaatatggaaacacaatgatgttagagacctggagaaaaagctaagcttaatagaaaaagacgtacccaaattaatagcttttgaaagtgtttattctatggatggagatatagcgcccataaaagaaatttgcgatttagcagaagcctacggcgcgatgacatacttggatgaagttcatgcagtcggcctttatggtcagcgtggaggtggaatttctgagcaggctggtgtgtcccataggattagtattattgagggtacgttgggaaaggcctttggcgttatggggggatacatcgctgcatctaatacaatttgtgactttataagatcttttgccagtggttttatttttacaactgcacttccaccagcaatcgctgctggagctcaggcatcagtaaaacatctaaaagtcagtgaattggagcgaaaaggcaaagagttcaagttgaaaaacttcgatctaaactag

SEQ ID NO: 234661 - DNA, 848 bp, Unknown
  Bacterial polypeptide expressing nucleotide sequence isolated from the Sargasso Sea
aatggattttgatgctttattttctgatcaattagatctgctcaaaaaagagggtaattatcgaatttttgctgaattagagcgtcaatgtggggccttccctaaggcgaaaagttatgacaaagactctcctgaaaatgtgacggtctggtgttcgaatgactatctaggaatgggacaaagccaaattgtcaaagacgctatgaaatcggttattgatacaaatggatgtggcgctggtggtacaagaaacatatcagggaccaatcatcatcatgtattattggaaaaagaattagcagatttgcatcgaaaagaggcggcacttttgtttacctcggggtatgtttcaaattgggcttctcttggaactttaggttcgaaattacccaatgcggtaattctttctgatgctgccaatcatgcgagtatgattgaaggtattaggcactcacgcgcggacaaagtaatttggaagcacaatgatccagaagatctcgatagaaagttaaaggcaataggtccgaaccgtcccaaaattgtagcctttgaatctgtttattccatggatggcgatatttctccaatgcaagaaattgttgaagtggcagaaagtcataatgccatgacatatttggatgaagttcatgcagttggtttgtacggtccaagaggtggaggcatatcggaagagttggggcttgcagaacgaattacccttatagagggcacccttgggaaagcgtatggcgtgatgggtggatatataactggatctaaacttctctgtgattttataagatcattcgcaagtggatttatatttacgactgctctgccctcagcag

SEQ ID NO: 234662 - DNA, 847 bp, Unknown
  Bacterial polypeptide expressing nucleotide sequence isolated from the Sargasso Sea
acttttgtttacgtcgggctatgtcgctaatgatgcggccatttcaaccatcgccaagctgatccccaattgcgtcatcctgtcggacgaatggaaccatgcgtcgatgatcgccgggatacgcaattcgggatgtgaaaaacacatttatcgccattgcgatatgacccatctggaggaattacttcaagagatagactcggatcgaccgaaactaattgtcttcgaatcagtctattctatggacggtgacatctcgccgatcggtgaaatttgcgacctggccgataagtatgacgccatgacttatatcgatgaggtgcacgcggtcggcctttacggcgagacgggtggcggcatatccgagtgcgacgggctagcggaccgcctgaccgtaattgaagggaccctggcaaaggggttcggcatggtcggcggctatattgcagcatcgactgcgctggttgacgccatccggtccaacgcgccggggttcatattcaccacgacgttaccgccgccggtgatcggtggcgcaatcgcatccgtgcgctttgtgcgcgaacacagcgaactgcgcatcaaacaccaagaacgcgccgccacccttaaaagaatggtcggggatgcaggcctacccttgatggacaccgccacccatatcgtgccggtgatggttggcgatccggtgctgtgcaaacgcgccacagatatgctgctggaagactacaatatatacatccagcccatcaattatccaaccgtgcccaaaggcaccgagcggctgcggatcacgccaacgccattccattcggatgaactgatggaagacctcgtccgcgccctg

SEQ ID NO: 234663 - DNA, 655 bp, Unknown
  Bacterial polypeptide expressing nucleotide sequence isolated from the Sargasso Sea
gatgacaaaaaaaatagataaaagtttttatgagcaaaaactcggtgctgcgttagataggctacattcagagggaagatatcgcacttttattgaaatagaacgcgctagaggtaatttcccaaatgcaagatggatagcaaaagataatacagaaagatcagttacagtctggtgcggtaacgattacctcggcatgggccaaagtgatatcgttttagcagcaatgcaagacgcgctcagcagcgctggtgctggttctgggggcacaagaaatatatcaggaactactgtacatcacaaaaaacttgaacatgagttagccagcctacatcaaaaagaggcttgtctcttattcactagcgcctatgtagccaatgattcagccctttcaactcttacaaagctcttgcctaatctgattatatactctgatgagttgaaccacgcctcaatgatcgaaggaatacgcagaaatggaggtgagcggagaatttttcgtcataatgacgtagaacatttgcgtaaacttatggaggctgatgaagcaaaagctcccaaactgatagcctttgaatccatttattctatggatggcgattttgcgccgatcaaagagatatgtaatgtagctgaggaattttcagccttaacc

SEQ ID NO: 234664 - DNA, 904 bp, Unknown
  Bacterial polypeptide expressing nucleotide sequence isolated from the Sargasso Sea
acatcgaaaagaggcggcacttttgtttacctcggggtatgtttcaaattgggcttctcttggaactttaggttcgaaattacccaatgcggttattctttctgacgctgccaatcatgcgagtatgattgaaggtattaggcactcacgcgcggacaaagtaatttggaagcataatgatccagaagatcttgatagaaagttaaaggcaataggtccgaaccggcccaaaattgtagcatttgaatctgtttattctatggatggcgatatttgtccaatgcaggaaattgttgaagtggcagaaagtcataacgccatgacatatttggatgaagttcatgcagttggtttgtacggtccaagaggcggtggcatatcggaagagttaggactttcagaacgaattacccttatagagggcacacttggaaaagcatatggcgtgatgggcgggtatataactggatctaaacttctctgcgattttattagatcttttgcaagtggatttatctttacgactgctctgcctccagcagttgcctcaggagcgaaagcatctatagctcatttaaaatcttctcagttggaaagaaaacgtcagcaaaagcaggttcaaaaacttagaaatgatttggatagagctgggataccacatatgcataattcatcacatattgtcccagttattattaaagatcccgtgaaatgtaagatgttatcagatattttaatgcgggattttggtatatatgtgcagccaattaattatcctacagtaccgaaaggaacagagagattgcgtttcactccatctccattgcattcagataaagatatagatcacttagtgaatgcattaaatgtgttatggaaacagtgcgcgattgctagggtagtg

SEQ ID NO: 234665 - DNA, 664 bp, Unknown
  Bacterial polypeptide expressing nucleotide sequence isolated from the Sargasso Sea
atggactacgaaaaattttataaagaaaaaattgattcactaaaagatgaaggtagatatcgtgtgtttgcagagttatctcgacaaaaagataattttccagttgcgactcattttcatgacaatgctaagaatgatgtagttgtctggtgttcaaatgactatttgggaatggggcagaataaaaatgtcatccaagctatggagaatgcccttcacgaatgtggtgccggagcgggtggaacgagaaatatatcaggtactaactattatcatgttttattagaaaaagagattgcatcgtggcacaataaagaagctgccttaatttttacatcaggttatatatctaatgaggctactcttactaccctagcaggtttaatacctgaatgtgtaattttctcagatgaaaataaccatgcttcaatgatagctggaataaaagcaagtaaatcagaaaaaaagattttccgtcataatgatatcaatcatctagaggagctcctaaggcaaacagacataaataaaccaaaaattatagcttttgaatcagtttattctatggatggtgatattgctcctataaaagagatttgtgatttagcagataaatataatgcaatcacataccttgatgaagtgcatgccgtagggctttagg

SEQ ID NO: 234666 - DNA, 901 bp, Unknown
  Bacterial polypeptide expressing nucleotide sequence isolated from the Sargasso Sea
tatgatgataatgcgccagaagaagttacagtgtggtgttctaacgattatcttggaatgggacaaaacccaattgtacaaaatgcaatgaaggatgttatcgactcatgtggatgtggtgcaggtggcactagaaatatttctggtactaatcatcatcatttacttttagagaaggaacttgcagatcttcataacaaagaggctgctcttctgtttacttctggatatgtgtctaattgggctgcgttaagtactttgggctctcgtttgcctaaggctgttatactatctgatgcatcgaaccatgctagtatgattgaaggcataaggcaatcaagagctgagaaagttatttggagacataatgaccctgaggatctggatagaaaactagccgctctagaccgtgaccggccgaagatcgtagcgtttgagtcggtttattccatggatggagatatttgcccgatgcaagaaattgtggaagtttcagaaaagcatggggcaatgacttatctggatgaggtgcatgctgtcggtctctatgggcccaggggtggaggagtttctgaacaacttgggctatcagacagaataacattaattgaaggcacactgggaaaggctttcggtgtattaggtgggtatattacaggatctcatcacttgtgtgatttcattcgttcgtttgctagtggatttattttcactacagctcttccaccagccattgctgctggtgcgcgcgcttcagtagctcacttaaaggtttctgaaaaggaaagattacgtcagcgagagcaggttgcaaaattaagggcagggttagacaaagctgggattccacacttggaaaattcctcacacattattcccgtcatgatcaaagatccaataa

SEQ ID NO: 234667 - DNA, 829 bp, Unknown
  Bacterial polypeptide expressing nucleotide sequence isolated from the Sargasso Sea
gctggaaaagcagatcgcggccttgcaccaaaaagaggccgcgctggtattttcctccggctataatgcgaatgaggcgacgctttctacgctcggcaagcagcttcccaactcggtgcttttatccgatgcctgcaaccatgcttcgatgatccacggcatccgcaatagtcggatggaaaaacatgttttccgccataatgatacggtgcatctggaagaggtgctaagctccatcgatattaaccgccccaaagtggtggcgtttgagtccgtctattcgatggacggtgatgtcggcctcatccgcgaattttgcgagatcgccaagaaatatgacgccatcacctatattgatgaagtccatgccgtcggcctctacggacctcacggcgcgggcatcgcagagcgcgacggactaatgggcgagctggatattatccaaggcacactcggcaaagccttcggcgtgatgggcggctacatcgcaggttccgccgccttgattgatatgatccgcagctatgcgcccggttttatctttaccaccaccatgccccccgcgcaggcagcaggtgcgttggcgagtattcgttatttgatggagagcaacaaagagcgcgagcaacatcaggccaatgtgcaaaaagtgcggcagatgcttctgcaagagggtatcacggtgatgcccaccgaaacgcatatcctaccgctactcattggcgacccgcagcgttgcaaacaggcgagtgacctgctgttgaaaaaatatgatatttacgtccagcccatcaacttccccactgtcccccgcggaacagagcgccta

SEQ ID NO: 234668 - DNA, 556 bp, Unknown
  Bacterial polypeptide expressing nucleotide sequence isolated from the Sargasso Sea
aatcattatcatgttctattagaggaagagattgcttcttggcatcgaaaagaagctgcattaattttcacgtcaggttatatctctaatgaggccacactcagtactttggctggtctaattccagattgtgtgattttttctgacgaaaataatcatgcttcaatgatatcaggtattaaggctagtaaatctgaaaaaaaaatatttcgtcataatgatgttcaacaccttgaagaacttttaaaacaaacagataaaaataagcctaaaataattgcttttgaatctgtttattctatggatggagatattgcaccaattaaagaattttgtgatttggcagataaatataatgcaattacctatctcgatgaagtccatgcagttggtctttatggagaaaaaggtggtgggatttctgagagagatggtttaactgataggataacagttatcgagggaactcttggtaaggcggttggtgtaatgggtggatatattgccgcttctaaaaacatcgttgatgtagttagaagttatgcggctcccattt

SEQ ID NO: 234669 - DNA, 726 bp, Unknown
  Bacterial polypeptide expressing nucleotide sequence isolated from the Sargasso Sea
aatggactatgaaaaattcttcgctgaaagaatttccgacttaagggcagaaggccgctatcgcgttttcgccgatttggaacgccaagctgggttttttcccagggccacaagccacggggccgatggcgccgacgaagtgaccgtctggtgctccaacgattacctgggcatgggccagaacgaggttattcgcgcggcgatgaaggaagccatcgacaaggtgggcgccggcgcgggcggtacccggaatatttccggcaccacgcactatcatgtgcttctggaagaggaactcgccgatcttcacggcactgaagccgcgctcgtcttcacatcgggttacgttgccaatgaagccgccttgtcgaccatcggcgcgcatataccggactgcgtattgctgtccgatgcggataaccacgcctccatgattgccggcatacgtcacagcctgaccgacaaagtcgtctttgcccacaacgatctcgccgatctagaatgcaagctgcagggcatcgatcgggaccgtccgaaagtgatcgtttttgaatccgtctattcgatggatggtgacatttcgcccatcaacgcgatctgcgatctagccgataagcacaacgccatgacttacctggacgaagtccatgctgtcggtatgtatggtccgcgcggcgccggcattgcagaacgtgacggcgccatggcgcggttgacggtcattca

SEQ ID NO: 234670 - DNA, 571 bp, Unknown
  Bacterial polypeptide expressing nucleotide sequence isolated from the Sargasso Sea
catggattatgaccatttatttaattcacaacttcaaaagttaaaagacgaaggaaattacagaatttttgccgaacttgaaagatgtcaaggtaacttccctaaggctaaaaattattttaaaagtaataaaacttcagaggtcaccgtttggtgttcaaatgattatttaggtatgggacaaaatccaagtgttttatcatctataaaaaatgccttgaatgagtgtggagctggagctggtgggacaaggaacatttctggaacaaaccactatcatgttctacttgaaaaagaattagcagatttgcataaaaaggagtctgcattattgtttacatcaggctatatttcaaattgggcaactctttcaactttaggtgcaaggttgccaggctgtactattttatctgatgaaaaaaaccatgcttctatgatagagggaataagacattctcgggcaggtaagctaatttggaaacataatgatccagaagatttaagaaataaattatcctctttacccaatgacgctccaaaaatagttgcatttgaaagtgtttattctatg

SEQ ID NO: 234671 - DNA, 778 bp, Unknown
  Bacterial polypeptide expressing nucleotide sequence isolated from the Sargasso Sea
atggactatgatgcaatttttgccacccagctcaatcagttaaaagaggaaggcaattacagaattttcgcagaacttgagcgtcagtcaggagcctttcccaaggctaaaagttatgatgacaatgcgccagacgaagttacagtgtggtgttctaacgattatcttggaatgggacaaaacccaattgtacaaaatgcaatgaaagatgttatcgattcatgtgggtgcggtgcgggtggcaccagaaatatttctggtactaatcaccatcatttacttttagagaaggaacttgcagatcttcataacaaagaggctgcgcttctatttacttctggatatgtgtctaattgggctgcattgagtactttggggtctcgtttgccgaaggctgttatactatctgatgcatcgaaccatgctagtatgattgaaggcataaggcactcaagagctgagaaagttatttggagacataatgaccccgaagatctcgatcgaaaactggccgctatagaccatgaccgtccgaagatcgtagcgtttgagtcggtttactccatggatggagatatttgtccgatgcaagaaattgtggaagtttcagaaaagcacggggcaatgacatatctggatgaagtgcatgcggtcggtttgtatgggcccaggggtggaggagtttctgaacaacttgggctgtcagatagaataacattaattgaaggcacactgggaaaggctttcggtgtattaggtggttatattacaggatcta

SEQ ID NO: 234672 - DNA, 853 bp, Unknown
  Bacterial polypeptide expressing nucleotide sequence isolated from the Sargasso Sea
atggattttgatgctttattttccgatcaattagatctgctcaaaaaagaaggtaattatagaatttttgctgaattagagcgtcaatgtggagcttttccaaaggcgaaaagctatgacaaaaactctcctgaaaatgttactgtttggtgttccaatgattatcttggaatgggccaaagccaaattgtaaaagatgctatgaaatctgttattgatacaaatggatgtggcgctggtggtacaagaaacatatcggggaccaatcatcatcatgtattattggaaagagaattagcagatttgcatcgaaaagaggcggcacttttgtttacatcgggttatgtttcgaattgggcttcccttggaactttaggttcgaaattacccaatgcggttattctttctgacgctgccaatcatgcgagtatgattgaaggtattaggcactcacgcgcggacaaagtaatttggaagcataatgatccagaggaccttgatagaaagttgaaggcaataggtccgaaccgtcccaaaattgtagcctttgagtctgtttattctatggatggcgatatttctccaatgcaagaaattgttgaagtggcagaaagtcataatgccatgacatatttagatgaagttcatgcagttggtttgtacggtccaagaggtggaggcatatcggaagagttagggcttgcagaacgaattacccttatagagggcacccttggaaaagcatatggcgtgatgggtggatatataacgggatctaaacttctctgtgattttataagatccttcgcaagtggatttatatttacgactgctctgcctccagcagttgctg

SEQ ID NO: 234673 - DNA, 1252 bp, Unknown
  Bacterial polypeptide expressing nucleotide sequence isolated from the Sargasso Sea
tttcaacgaccaagtggaagagaaataatgaactatgaagaccatattgaagctgccataaatcgtttgcacgaagaaggccgatatagaaccttcattgatatagaacgcgaatgcgggaattttccgtacgcagcatggaaatcgccgaacggtgacctagacaaaataacagtttggtgcggaaacgattatctgggaatggggcaaaataatttagtccttgaagctatgcacgaggcgctcgacgaggcaggagccggttcaggcgggacgagaaatatctctggaacaactgtttaccacaatgaacttgaaagagagttggcggaccttcactccaaagagtcgtctttactgtttacgagtgcgtacatcgcaaatgatgcaactctatctacattagcaaaattactccctaatttggtaatatattctgatgaactaaaccacgcctccatgattgaaggtattcgcagacatggtggcgaaaaaagggtctttaagcataatgatatgaagcaccttcgcagacttttacaagaagacaacagttcaaacccaaaattgatagcgtttgagtcaatttattcaatggacggtgactttgcaccgataaaagagatctgtgacttggctgaagagttttcggccatgacgtatatagatgaagttcacgcggtaggcatgtatggagccaccggtgcgggggtcgcacagcaagaagagctaatgggccgaatagatataatcaatggaaccctcgcaaaagcatacggggtgatgggtggatacattgcagcaagtgcaaaggtttgtgatgcaatcagaagttatgccccgggttttatatttacaacttcattatctccagctttagtggccggcgctttagcttcagttcggtatttgagagagcaccaggaggttagagacaagcatcaattgaacgcaaagatactaaaaatgcgtttaaaaagtctaggattaccaattattgatcatgggtctcatatcgtacccgttattgtaggtgatccagttcataccaagaaactatctgatctattattggtaaaccacaaaatctatgttcagcctataaatttcccaactgtacccagaggaacagaaagactgcgctttacaccttctccaatgcatggaacccaggaaatcgattatttggttagagtgatggacgaactatggtctcattgcgcactgaataggactgaacttaccgcctagc

SEQ ID NO: 234674 - DNA, 703 bp, Unknown
  Bacterial polypeptide expressing nucleotide sequence isolated from the Sargasso Sea
catggattatgatcatctttttaatttacaacttcaaaaacttaaagatgaaggaaattatagggtttttgctgaactagaaaggtgtcgtggtaattttccaaaagctaaaaactatatcgaaagtaatcaaacatctgaagttactgtttggtgttctaatgattatttaggtatgggacaaaatcaaaatgttttaaatgcaataaaaaaagctttaaatgaatgtggggctggagctggaggaactagaaatatttcaggtacaaaccattatcatgtattacttgaaaaagaattggcagatttacatcaaaaggaatctgccttgttatttacatccggatatatatctaattgggcaacattatcaactttaggagctcgattgcctggatgtactattttatcagatgagaaaaatcatgcatctatgattgaaggaataagacattctagggcaggaaagatgatatggagacataatgacccagaagacttaagaaataagttgtcttccttacctgctggtgctcccaaaatagttgcttttgaaagtgtatattctatggatggtgatattgcacctattgatgaaatttgtgaagttgcaaaggaatttggtgcaatgacatatttagatgaggttcatgcagtaggtctttatggaaaaaatgggtgggggtatatcgcaacaaaaagg

SEQ ID NO: 234675 - DNA, 736 bp, Unknown
  Bacterial polypeptide expressing nucleotide sequence isolated from the Sargasso Sea
tatgaattataataaatttttttcaaatgcattagattctcttaaatctgaaggaagatatagagtttttaatgatataaaaagaactttaggaaagtttcctaatgcaattcattattctaactcagaagaacgagaagtttctgtttggtgttctaatgattatttaggaatgggacaaaataaaaaagttttaaatgctatgcatgaggctattgactcttctggagcaggttcaggaggtactcgtaatatatctggaacatctcattatcatgttttgttggaaaaagaattggcagatcttcataataaagaatcagcattattatttacgtctggttatatttctaatgaagcatctttaagtacaattgcgtcaattttgccagactgtgtagtactatcagatgaattaaaccatgcttctatgatacagggtatgaaaaatagtaaggcagaaaggtttatttttaaacataataaccctaaacacttagaagaaatacttcagaatattcaccctgatcgtccaaaattagtagcttttgaatcagtttattccatggacggagatatagctcctataaaagaattgtgtgaagtagcaaaagcaaataatgctcttacttatttagatgaagtacatgcagtgggtatgtatggaccgcgtggaggaggtattgctgaaagagaagggttaatggatgaattagatataatagaaggaacttta

SEQ ID NO: 234676 - DNA, 610 bp, Unknown
  Bacterial polypeptide expressing nucleotide sequence isolated from the Sargasso Sea
gatgttttctgtaatttttcctggtcaaggttcacagatagtcggtatgggaaaattgttatatgaaaaatatgacattgtaaaaaaattatttaataaagcagataatgtactaggaattgaaatatctaaaattatattagacggacctaaagaagaattagatttaacaataaatactcagcctgcaatttatttaataagctattcaatatttaatataatcacaaaagaatttaatataaaccttaataaggcaaaatattttgctggtcattcgttaggagagtattctgctttatcatgtgctggatatttaaattttgaagagacaattaagattttaagagctagaggagacgcgatgcaaaatgctatgcccaaaggtcaaggtggcatgattgcagttctgggctctaaaattgatttaatagagaaaattttaaatgataataaaaataatttttttgctcaaatagccaatgataattctgaagggcaattagtacttagtggtaaaaatgaagatttacaaaaattaactgaagaactaaaaaaaaatagtatcaaacatattaaactacctgtgagcgctccttccactgtagtc

SEQ ID NO: 234677 - DNA, 940 bp, Unknown
  Bacterial polypeptide expressing nucleotide sequence isolated from the Sargasso Sea
catgtctgcatccctcgcattcgtcttccccggtcaaggctcgcaagccctgaccatgcttgccgaccacggtgcccagcagaagctggtgctcgatactttcggcgaagcttccgaagcgctcggctacgacctctgggcactgacccagcaaggcccggaagagcagctgaaccagaccgacaagacccagccggccattctcactgcttccatcgcgctgtggcgtctttggcaggcagagggtggtgccaagccggctttcgttgccggtcacagcctgggtgagtattccgcgctggtcgccgctggtagcatcgcttttgtcgatgccgtgaagctggtagagcgtcgtggtcaattgatgcaacaggctgtgccggccgggcagggcggtatggccgccatcctcggtctggaagatgccgacgtactggctgcctgcgccgaagccgcgcagggcgatgtggtcagcgcggtgaatttcaacgcgcctggccaggtggtgatcgccggtagcgctgctgctgtcgagcgcgccatcgaggcatgcaaggcccgtggcgccaagcgcgccatggcgctgccggtcagcgtaccgtcgcattgcgcgctgatgaaaccggccgccgagcgtttcgccgagtcggtggaagcgctgagctggcaggcaccgcaaatcccgctggtgcagaacgtcagcgctgccgtggtgtccgatctggtcaccctgaaggctgatctgctggcgcagctgtacagtccggtacgctgggtcgagtcgatggtgcgtctgtccgaacagggcgtgaccgatctgatcgaatgcggccctggcaaggtgctgagcggcctgaacaagcgctgcgtcaaaggcatcaatactcacaacctggataccccggatgcttttgctgccgctcgcgcagccctggcttga

SEQ ID NO: 234678 - DNA, 928 bp, Unknown
  Bacterial polypeptide expressing nucleotide sequence isolated from the Sargasso Sea
tatggcacaaaaaattgcacttctattcccaggtcaaggttcgcaaagcgtaggtatgttacaagcgcttttagaaacctctgacattgtaaaatcaacgtttgcagaagcatcaaccgcattgggatacgacttagcagcgttagttcttaacggtccagaagaaaaactaaacgaaacccaccgaactcaacctgcattattaaccgcaagcgttgcgatttatcgcgactggttagctaaaaacccagacgccgatgttgtaatggcaggacacagcttaggtgaatattcagcactggtatgcagtaacgtaattagtttaagcgaagcggttaaattagttgaaaaccgtggcttgtacatgcaagaagccgtaccagcaggtgtgggatctatggcggctattattggtttaggcgacgacgaaattaaagcggcgtgtgcagcatcagcgcaaggcgaagttgtatcgccagttaactacaattcaccaggtcaagttgtaatagccgggcataaagcggcagtagatagagcctcagtagcctgtaaagaagcgggcgcaaaacgcgcattaccgttatcggttagtgtgccttcgcattgtgaactaatgaagccggcagcagaaaaactggcgaatgatttagccgctttaacatttaatacacctaagtgtgatgtaattaataatgtagatgtaaaagcagaaagttcagctgacgcgattaaagatgcacttgtgcgtcaattatacagtccagtacgctggacagaaaccgtgcaagctttagtggcgcaaggtgtaacgcaaagctacgaatttggcccgggtaaagtattaacaggcctggcaaaacgaattgataaagcaatggtatgtggctcagtaaacgacgccgcttcaattgatacagctaaataa

SEQ ID NO: 234679 - DNA, 332 bp, Unknown
  Bacterial polypeptide expressing nucleotide sequence isolated from the Sargasso Sea
tatggataatatatcttttgtttttccgggacaggggtctcaaaaacttggaatgctttctgatctagcggaatcttttcctgtcattaagtctacatttcaagaggcgtccgaggtgatcggcgaggacctttgggaagtcatccagacagatagtaaagggatcctctcaaaaacggagatcacgcagccggttctactcacggcatcagttgcgatatggcgggcatggactgcactcacagaagttaagcctgatgttttggcgggacatagcctaggagagtactcggcatttgtttgttctgacgcgctctctttcgaagaggcgg

SEQ ID NO: 234680 - DNA, 829 bp, Unknown
  Bacterial polypeptide expressing nucleotide sequence isolated from the Sargasso Sea
ggcccctggcatgttagccgagctggctgctgtacagccgatcgtgggacaaacctttgtcgaagcgagtgaggtgttagggtatgatttgtgggcattagtgcaagacggccccgttgaaaccttaaatgaaaccgataaaactcagcctgctttattagcggcaagtgtggcgatttggcgtgcctatgttgcctctggtaaagctatgcctgcgatgttagcgggtcacagcctaggcgaatattctgcattagtttgtgctggtgtgatcgactttaaagatgcgatcaaactggttgaactacgtggtcaattgatgcagcaagccgtacccgccggtactggcgctatgtacgcgattatcggtttagataatgacggtattgctaatgcgtgtattgaagccgctcaaggcgaagtggtaagcccagttaacttcaacagccctggccaagtggttatcgccggtcaaaaagatgcggttgaacgcgctgctgcggcctgtaaagcggcgggcgccaaaatggcggtagccttgcctgtcagcgtgccatcacactgcgcattaatgaaacctgctgctgataaattagctcttgcgttaaacgatgtgcagtttaatgcgccgagcattaccgttattaataacgtagatgtggcatcacccactgcggttgccgacattaaagatgcgctggtgcgtcaactgtattgccctgtacgctggagcgaaactgttgaattaatggccgaaaaaggcattacccagttagttgagtgcggtcctggtaaagtattgacaggtcttgcgaaacgcattaataaa

SEQ ID NO: 234681 - DNA, 928 bp, Unknown
  Bacterial polypeptide expressing nucleotide sequence isolated from the Sargasso Sea
tatggaaaatgtagcttttgtattcccaggccaaggttcacaggccctaggcatgttagccgagttggctggtgcgcagccgatagtgggacaaacctttgccgaagcgagtgaggtgttagggtatgatctgtgggctttagtgcaagacggccccgtagaaaccctaaatgaaaccgataaaacccagcctgccttattagcggcaagtgtggcgatttggcgtgcctatgttgcttctggcaaggccatgcctgcgatgttagcgggtcacagcctaggcgaatattctgcattagtttgtgctggtgtcatcgactttaaagatgcgatcaaactggttgagctccgtggtcaactgatgcagcaagccgtaccagccggtactggcgctatgtacgcgattatcggtctggataatgacggtattgccaatgcgtgtattgaagccgcccaaggcgaagtagtgagtccggttaacttcaacagcccaggccaagtggttatcgcgggtcaaaaagaagcggttgaacgtgcagctgcggcctgtaaagcggcgggcgctaaaatggcggtagcgttgcctgtcagcgtgccatcacactgcgcattaatgaaacctgccgctgataaattagcccttgcgttaaacgatgtgcagtttaacgcgccaagcatcagcgttatcaataacgtagatgtggcatcaccaaccgcggtcgccgacattaaagatgcgctggttcgtcaactttattgcccagtgcgctggagcgaaaccgttgaattaatggctgaaaaaggcattacccagttagttgagtgtggcccaggtaaagtattgacaggtcttgcgaaacgcattaataaatctctttctgcccaagcagttaatgacgttgcatcccttgccgcgttaactgaataa

SEQ ID NO: 234682 - DNA, 340 bp, Unknown
  Bacterial polypeptide expressing nucleotide sequence isolated from the Sargasso Sea
atcgattatattaatgctcatgcaacatcaacacctcttggtgatcttgctgaatgtaatgcagttaaatctatttttgatgcaccgccgccaattagttctaccaaatctatgacaggtcataccttgggtgcggctggagcagtagaatcaatattttcaattttatctattgttaataatatttctccacccacaattaatttaaataatcctgatgaaggctgtgatttggatttcactccaaaagaagctagagatatgaaaatagatgtttcgttaaataattcatttggttttggtggaactaactcaactcttattttcaagtctgtctaat

SEQ ID NO: 234683 - DNA, 268 bp, Unknown
  Bacterial polypeptide expressing nucleotide sequence isolated from the Sargasso Sea
tcatgccagagcactaaccataagttcaaacaagtcgatgataggccatttacttggcgcctctggatctgccgaagcgattatttcagtcctcacgatagctgatcaggtagtccctcctacaataaatcttgaaaacccagaggagggctgtgatcttgactatgtccctcatacggctcgtacacaatcaatcaatgtcgtgttaagtaattcgtttggcttcggtggaacaaatggaagtttgatattctccaagttttcatag

SEQ ID NO: 234684 - DNA, 409 bp, Unknown
  Bacterial polypeptide expressing nucleotide sequence isolated from the Sargasso Sea
gcatgcaaatgcattaaatgatgcaaaaattaattcagaaaaaatagattatattaatgcacatgggacctcgacaccttcaggggacaaagttgaagttttggctattgagcgaatgttcgaagagtgtaaaaaaaaaataaatgtttcttctactaaatctcaaattggtcatttattaggtgctgctggtggcgttgaagcagcatattctattttatgcataaataataaaaaattaccttatacattgaatttagaaaatgtcattgatgcaaataatatcaattttattagagaaaaggcaatggactctgatgttaacttcgttctatctaactcatttggttttggcggaacaaatgtttctcttattttaaaaaagtttaatgaaagtaagttacaataa

SEQ ID NO: 234685 - DNA, 556 bp, Unknown
  Bacterial polypeptide expressing nucleotide sequence isolated from the Sargasso Sea
tatgataaaactagagatggatttgtaatttctggaggtggaggagttttggttatggaagaatatgaacatgctaaagctagaggtgcgaaaatatatgccgaaattactggttatggggcaacatctgatggatatgacatggtagctccttcaggagaaggcgctgtaagatgtatgaatatggccttaagtacagcaaaaaataaaattgattatataaatactcatggaacttcaacgccagtaggcgatattacagaactaaaagcagtaggtgaagttttctcgaaatataagcctaagattagttcaacaaaatctttatctggacattctcttggggctacttcagttcatgaagctatctacagtttaataatgatgaaaaataactttatatcagcctctgctaatattatagatatggatgatgaggctaaaaaatttccaattgtaactaaagttgaaaaagacgtagctctaaatgcaattatgtctaacagctttggttttggtggaactaatgcaacattagtattcgagaaagtataat

SEQ ID NO: 234686 - DNA, 283 bp, Unknown
  Bacterial polypeptide expressing nucleotide sequence isolated from the Sargasso Sea
cttgggagacggtattgccaactactcttccgtcagttcaaccaaatccatgacaggccaccttctaggtgccgcagcagccatagaagctgttttctgcgttaaagccctgcaccactcttacatcccgcccaccattaatatcaacgagctggatccggaatgtgattttgatgtcacaccgaatgaaggccgctctcgggaaatagacgttgctatgtctaattccttcggttttggaggaaccaatgcgtctgtgattttccgtaaaatgtattcctga

SEQ ID NO: 234687 - DNA, 721 bp, Unknown
  Bacterial polypeptide expressing nucleotide sequence isolated from the Sargasso Sea
ccactgtattggcaatgccgtagaacagattcaactgggcaaacaagacgtggtatttgccggcggtggtgaagaagaacactggaccttgagctgcttattcgatgctatgggggccctatccagcaagtacaacgacacccccgaacaggcgtcacgggcgtacgatgccacccgtgatggcttcgtgatcgccggcggcggcggcatggtggtagtggaagagctggaacacgccaaggcccgtggagcgaccatttatgcggaagtgttaggctacggcgccaccagcgatggccacgacatggtggcccccaacggcgaaggcgcggcacgttgtatgcgtcaggcgctagccacggtggatggctccattgattacatcaacgcccacggcaccagcacacccgtgggagacgtggccgagctgaaagctatccgcgaagtgtttgcagatcagtgcccctcaattggttccaccaagagcctgtccggccacagcctgggcgcagccggggttcaggaagcaatctactgcatgctgatgatgcagaacgacttcaccgccgtcagtgccaatattcaaacattggatgaacaagccgaaggcatgccggtactcgtgaaaggcaaagatagcggccccaccaccgtactgagcaacagctttggtttcggtggcaccaatgccagcctggtgttgcgcaaatggcaggactaa

SEQ ID NO: 234688 - DNA, 466 bp, Unknown
  Bacterial polypeptide expressing nucleotide sequence isolated from the Sargasso Sea
ctttgggtgggaggacgaaattttgagatcagacggaattggtgcagagtggttaaaaatcaaagcaggaggatcactataccctacttcaaaagagacttttgaaaaaaaatggcattatattacacaagacggaaagactgtttttaaatcagcagtttcagaaatggcaaatgcaacagagcagattattattagaaataatcttgatccagatgaaataaaatatttattacctcatcaagctaataaaagaattattgatgctaccgcagaaaagattaatttagataaaaataaagtattaatgaatatcgaagaatatgggaatacaacagcagcaacaatacctctgctaatgcatgactatgagaataatttcaaaaaaggagataaaattattcttgccgctttcggagctggtctcacttggggtgcagcatatttaacgtgggcctataattaa

SEQ ID NO: 234689 - DNA, 625 bp, Unknown
  Bacterial polypeptide expressing nucleotide sequence isolated from the Sargasso Sea
attgaaacgagttgtcattacaggtatgggaattgtttccagcataggtaacaataaaattgaagttttagattctctaaaaaatagtaaatctggtattcaacattcacctgagtatgcggaactagaatttcgttcacatgttcatggctcaatagatatcgacctaaatgctttaatagaccgtaaacaaaaacgatttatgggtgatagtgctgcatactgttatgtggcaatgcaagaggcaattgatgacgctaatctcaatgaagctaaaatttcaaatgaaagaactggattaattgttggtcaaggaggtagttctaatgaaaatatgctggacgttatagacacccttcgttcacgtggtgcacgcaaagttggaccaactatggtacccagaataatgactagttcgaatagcgcatgtttatctgttgcatacaaaattaaaggtgttaattattcaataagctcggcttgtgcaacaagtgctcattgcattggtaacgcatatgaaattattcaatctaacaaacaggatttaattttcgcaggtggtggagaagagatacattggacatcaacattacttttcgacagccatgggagctttgtcgtcaaa

SEQ ID NO: 234690 - DNA, 358 bp, Unknown
  Bacterial polypeptide expressing nucleotide sequence isolated from the Sargasso Sea
gaaaaagttgattacataaatgctcatggaacaagtacatcagctaatgataaaaatgaaacttctgcaattaaatctatttttcgagacagatcttacctcattcctgtaagctctactaagtcgatgacaggtcatctcttaggaggctcaggaggaatagaagctgtagcttgtatactttctttgacacataattttatccctcctacaattaactacgtcaatccagatcctgaatgtgatcttgattatgtaccaaataatgcaagagaagctcaagtaagagttgctctttctaattctttcggctttggtggtcacaatgtttgccttgctttcagcaaaatgaattgaa

SEQ ID NO: 234691 - DNA, 700 bp, Unknown
  Bacterial polypeptide expressing nucleotide sequence isolated from the Sargasso Sea
tgcagcagatctcatcaagtctggtcaacaggacgtggttattgctggaggtagtgatgatgaacattggagttcatcatgcctatttgatgctatgggtgcattatcttcaaattttaatacaagtcccacctcggcatctagaccgtacgatgttaatagggacggttttgttatttcaggtggagcaggaatgataatacttgaagaggaagagcatgcaaaaaaaagaggagcaaaaattttggcaaaattatcaggatattttgcaaattcagatggttacgacatggttgcaccgtctggtgaaggtgcaatcagatgtatggatggagctattaagcaatctaaagtcgaaattgactatataaatactcatggaactagcacacctgttggggatttagcagaattaaatgcaattaaaaaactttttaaagttgatatacctatgattagttctactaaatcaatgactggacattctcttggagcaacaggggcacatgaggccatatattcaattatgatgataaatgaggactttatagcaccctcaataaatatagagtcgctctgtgatgaggcaaaagggattaatattattactgaaacaaaagagactgaagtaaaaaatattctaagtaattcatttggttttggcggaacaaatgcaagccttgtaattagcaaatattaa

SEQ ID NO: 234692 - DNA, 772 bp, Unknown
  Bacterial polypeptide expressing nucleotide sequence isolated from the Sargasso Sea
aacaggaatgattatgggctcaggaggtccttcaatagaaaatgtaatactagctgcggataagactagagaaaaaagtcctaagaggatgggaccttttgtagttcctcgaacaatgtctagtacagcatcagcaactcttgctgtgccgtttaaaattaaaggtgttaactacaccattagttctgcgtgtgctactagtggacattgtattggaaatgcaatggagttgattcaactaggaaaacaaaaaatcatttttgcaggaggtagtgatgaggttcattttgcaatgacagctatgtttgatgcgatgacagctttgtcttcaaaatataatgacactcctgaaaaagcatcaagaccttacgataaaactcgagatggctttgtaatctctggtggcggtggagttttagttttagaagactacgagcatgctaaatcaagaggtgcaaaaatttatgccgaactaacaggatatggtgctacctcagatggttatgatatggttgctccttcgggagaaggagcagtgagatgtatgaaaatggcattaagtactgcaaaaaataagattgattatataaatacgcacggaacatctacacctgttggtgatataactgagttgaaagctgtaggggaagtgtttagtagctacaagccaaaaataagctcaacaaaatctcttgcgggacactctctaggagcaacatcagtgcatgaggctgtttacagtttaattatgatgaaaaataattttataaaa

SEQ ID NO: 234693 - DNA, 947 bp, Unknown
  Bacterial polypeptide expressing nucleotide sequence isolated from the Sargasso Sea
accaaacataaaattagaggatcatgtagatagaaaatttattagatttatggggccaggatctgcttataattatatttcaatgatggaagcagtgaaagatgctggtttagaagaaaaagatgtaagtaatatttcatctggtatgattatgggctcaggaggaccgtcaattgagaatgttattttagctgcagataaaactagagaaaaaaatccaaaaagaatgggaccatttgttgttccaagaactatgtctagtactgcatcagctacacttgcagtgccatttaaaattaaaggagtaaattatacaatttcttcagcatgtgcaactagtggacattgtattggaaatggaatggaattaattcaattagggaaacaaaaaataatatttgctggtggaagtgacgaagttcattttgctatgaccgcaatgtttgatgcaatgactgcattatcatcaaaatataatgatactccagaaaaagcttctagaccttatgataaaactagagacggatttgtaatatctggtggtggaggcgtactagtattagaagaatatgaacatgcaaaagctagaggagcaaaaatttatgctgaattaactggatatggagctacttcagacggatatgatatggttgctccatctggagaaggtgctgaaagatgtatgaaaatggctttaagtaatactaaaaataaaattgactacataaatactcatggaacatcaacaccagtaggagatattacagagcttaatgcagttggaaaagtgtttacagattataaacctaaaataagttcaacaaagtcgttagcaggacattctctaggagcaacatcggtgcatgaagcagtttatagtttaataatgatgaaaaataattttatatctgcatctgtaaatattacagatatggatgatgaagcaa

SEQ ID NO: 234694 - DNA, 990 bp, Unknown
  Bacterial polypeptide expressing nucleotide sequence isolated from the Sargasso Sea
ggagctgcctacaactatattgcgatgaaagatgctatagacgactcagggctggaggataatgatatttcaaatgaaatgactggtataattgttggttcaggtggtccatctacacaaaatttatttaagtcttctgaaattgggaaaagttcgggttcaaaaaaaattggaccatttatggtgccaagagcaatgtctagtacaaattctgcaactcttgcgactccttttaaaattaaaggagttaactattcaattacttcggcatgttctacaagttcacattgtattggtaatgcgtacgaactaattcagatgggaaaacaaaatattgtttttgctggaggaggtgaagagctccattggactttatcgattttatttgatgcaatgggtgctttgtcatcaaaatataattctactccaaacaaatcttcaagggcatatgatgcagatagggatggttttgtaattgctggtgggggtggaactttagtacttgaagaattagagcatgcaaaagctagaggagctaaaatatatggtgaaataacaggatatggagcaacctcagatggatacgatatggtacagccttctggagaaggagcagaaagatgcatgaagcaagcattaaaaaatattgatggtgaaattgattatataaatacacatggaacaagcactccaataggagatgttaaagaattggaagcaatcaaatatgtttttggttcaaatattcctaaaatgagctcaacaaaatctttgactggtcattctttaggggcaactggtgtgcatgaagcaatttatagtttattgatgatgaaaaataattttattagtggttctgctaatattgaaaatcttgataatagtgccaaagattgtaatattcttttaaaaacggaaaatgatgttcaaattgagcatgttatgtcgaatagttttggttttggcggtacaaatgcaacattagtattt

SEQ ID NO: 234695 - DNA, 784 bp, Unknown
  Bacterial polypeptide expressing nucleotide sequence isolated from the Sargasso Sea
tatcaatctttattaaattcaaaatcaggaatttcattttctgaagaatataaagaatataatttaaaaagtcatgtacatggtttaccaaatattcaattggaagatcatgtagatagaaaaataataagatttatgggtgaaggttctgcatataactatgtagcaatgaacgaagctgtaaaagattctggtttagaagaaaaagatattagtaatataaatacgggaatggttatgggatcaggtggtccctcaataaaaaatgtaatccttgcagcagataaaactcgggaaaaaaatccaaaaaaaatgggaccttttgtagttccaaggacaatggcaagtacggcatcagcaacgttagctgttccttttaaaattaaaggagttaattatacaattagttccgcatgcgcaaccagtggacattgtattggtaatgcaatggaattaattcaactgggaaaacaaaatataatttttgcaggtggtagtgatgaagttcattttgctttaactgcaatgtttgatgctatgaccgccttatcatcaaaatataatgataaaccagaaactgcttcaagaccttacgataaaactcgagatggatttgttatttctggaggcggaggcgtattggttatggaagaatatgaacacgcaaaggctaggggtgcaaaaatatacgcagaaatcactggttatggagcaacatcagatggatatgacatggtggctccttcacggggaaggcgctgtaagatgcatgaatatggcctta

SEQ ID NO: 234696 - DNA, 853 bp, Unknown
  Bacterial polypeptide expressing nucleotide sequence isolated from the Sargasso Sea
aaagaacacaatcttaaaagtcatattcatggaaagcctaatatcaaacttgaggatcatgtagataggaaaacaattagatttatgggttctggatctgcttacaattatattgcaatgaaagaggcgattgaggactctggtttagaagaaagtgaagttagtaattttaaaactggaattgttatgggttcaggaggaccttcaattgaaaatgtaattttagcagcagataaaactagagccaaaactccaaaattaatgggaccatttatagttccaagaacaatggcaagtacagcatcagcaacacttgctgttccttttaaaattaaaggtacaaactatacaatgagttcagcctgcgcaacaagtggacactgtataggaaattctatggaacttatccaaatgggaaaacaagatattgtttttgcaggtggtagtgaagagatacactgggcaatgactgcaatgtttgatgcaatgactgcattatcctctaaatataatgatacgcctgagaaagcatcaagagcttatgacaaaactagagatggttttgtaattgcagggggtgcaggagttttagttcttgaggaatatgagcatgctaaagctagaggagcaaaaatatacgcagaattaacaggttacggagcaacctcagatggatatgatatggtagcaccttctggtgaaggtgcagtaagatgtatgcaaatggctatggcaacttcaaaaaataaagtagattatataaatactcatggaacttctactccagttggagatattactgaattgaatgctgttaaagaagcttttggaaatgaaattccaaaaaattagc

SEQ ID NO: 234697 - DNA, 871 bp, Unknown
  Bacterial polypeptide expressing nucleotide sequence isolated from the Sargasso Sea
tgaaattgatagacgaacattaagatttatgggggatggagctgcatataattatgtatctatgaaaaatgccattgaggattcggatttaaatgaaaatcaagtttctaatgaaatgacaggaattattgtaggctctggagggccctctacatttaatctaatgaagtcatttgatttagctaaaaatggtggttccaaaaaagtaggaccgtttatggttccaagatcaatgtcgagtacaaattctgcaacacttgcaactccttttaaaataaagggtgttaattactcaattacatctgcctgttcaactagttctcattgtattggcaatgcatacgaacttattcaaatgggtaagcaaaatataatttttgcaggtggaggtgaagaattacactggacaatgtccattctttttgacgctatgggtgctttatcctctaaatataataatgatccaaaaaaatcatcaagagcatatgatgcgaatagagatggttttgtaatttctggaggaggaggaacgattgttcttgaagaattagaacatgcaaaatcaagaggggcaaaaatttatgctgaaataactggttatggcgcaacttctgatggccacgatatggtccaaccttcaggagagggtgcgataagatgtatgaaattagcgcttaaaaaaataaatggtaaaatcgattatataaactcacacggaacaagtactccaataggagatataaaagaactagaggcaatttcagaagtttttaatgaagacaaaccttatataagctctacaaaatcactaacaggccattctttaggtgcaactggagtacatgaagcaatatattcattattaatgtta

SEQ ID NO: 234698 - DNA, 552 bp, Unknown
  Bacterial polypeptide expressing nucleotide sequence isolated from the Sargasso Sea
gggaaggagctgcggttctaattcttgaagaattgaatcatgctcttaagcgaaatgcaaaagtaatttgcgaaataaaaggttatggaatgtcatcagatgcttttcattatacactacctgatagttcgggtgatggagcatatagagcaatgaagaattccctgcaggatgcgaaccttatttcaaatgagatacaatacataaatgctcatggtacttcaactcctgcaggtgatgaagcggaagcaatcgctattgataggctattttcagacagtaaagagaaagtatatgtttcttcaacaaaatctcaaattggtcatttgcttggcgctgcaggtgctgttgaagctatatacgcaattatgagtttaaataacggacttattcctattaacttaaatttaaaagatgaattagaaacaaaaaaaataatttttataaagaatgagccatttaaagttagtcttgcaaatgttatgtctaattcgtttggttttggaggaactaatgtttctttagtattttcaaagtttgatgaaaaataat

SEQ ID NO: 234699 - DNA, 388 bp, Unknown
  Bacterial polypeptide expressing nucleotide sequence isolated from the Sargasso Sea
gggagcaaggagatgcatgagtgaggcaattgaagcattcggatctgatgtagattacattaatgctcatggtacaagcactccagttggagatcttgctgaacttgtagcaataaaagaagtttttggaaaaagcgctccaattattggatctacaaaatcaatgacaggtcattccttgggagctactggagctcaagaagctatttattctattttaatgatgcaaaataattttattgctccgtcaattaatattgacaccttggtggaagaagcagaggggcttaaaatagcccaatcaatgttgaagcatgaattaaacgctgtaatgagtaattcatttggttttggtgggactaatgcaagtttaatttttagtaaataa

SEQ ID NO: 234700 - DNA, 751 bp, Unknown
  Bacterial polypeptide expressing nucleotide sequence isolated from the Sargasso Sea
catgaaagctactattaccgccactgcccatcatgtacctgaaaaaatattaaccaatcatgatatcgaaaagatggttcaaacctctgatgaatggattcaaaataggactggaataaaacagaggcatatagtttctgaaggagaagcctcatcagacctttctactcatgtagccaacaagctcttggttacaagaggtatcgacgcaagtgaaatcgatgtaataattgttggcacagtaacgcctgatcatcttacaccatctactgccgcaatagtgcaaaataacataaaggctgtaaatgcatgggcatttgatttaagtgcagcatgcagtggattcttatttggcttagagacaggttcaaaactcattgaatcaggagattacaatagggtgatggtaattggtgttgatacaatgacatcaattctagattttgatgatagggaaacatgcgtaatatttggtgatggtgcaggtggagtaattcttgaacccacaaaactagataacggaattataagctcgattctaaaaacagatggttctggagcatctagcctaaacgtagaagctggaggcagtagaaaaccagcctcagaagaaacaatagctaatagagagcattttattagacaagatggtaaaaaagttttcaaatttgcagtaaagagaatggcagatgtttctgagaaaattctcaagaaaaatggtctagatggaaacgatataaaactttttatt

SEQ ID NO: 234701 - DNA, 823 bp, Unknown
  Bacterial polypeptide expressing nucleotide sequence isolated from the Sargasso Sea
tatgagaagagtagttgttactggaatgggtttgctcacttcgattggtaatgatgcaaaaagttcgtggcaaaatctcataaattctaaatctggaataaaaaaaattaatcatttcgaagtatcagatctgccagcaaaaattgctggatatttaaataatgatcccgaagctaatgattattttaataagacattatctttagaagcaaaagatattaaaagaaatgatagatttattcagtatggtttagtagctgcaaaaatggcaatagaagatgcaggtttagaaaacttaactgataatgaaaaactaagagttggagtttctgttggatcaggaattggaggtttagaaacaatttatgaaggatctttaacaattaataatgaaaaaccaaaaaaattgtcccctttttttattccttcgtctttagtaaatttattgtctgggcaaatatctataaaatatggatttaaaggtcctaatcattctgtagtgactgcttgtgctactggagcacattcaattggagattcaggagaaatgattaagaggggagcagcagatgttatgatagcgggaggatcagaggcagctgtttgtagattaggaatagcagggttttgtgctgctagaagtcttagtacttcttttaatgatgagcctcatcttgcctccaggccttgggataaagatcgtgatggttttgtaatgggagaaggttcaggtattattgtattggaagaatttgaatatgcaaaaaaaagaggtgcaaatatatatgctgagttagttggatatggtatgtcaggagatgca

SEQ ID NO: 234702 - DNA, 806 bp, Unknown
  Bacterial polypeptide expressing nucleotide sequence isolated from the Sargasso Sea
caaactaattcctgatattgcaccaggcatgatttcaattagacatggctttacagggcctaattttgcaactgtttcagcttgtgcttcatctgctaacgctttaattgactcgttaaattatatacggctgggttattcagatgtggttgtttgtggcgggtctgaggcaggagttactattgctggaatcggtggcttcaacgctgttcaagctctttcaaaaagaaatgacgatccaaagactgcatcaaggccatttgattttgacagagacggctttgtattaggagaagggggtggttgtttgattttagaagagtatgatcacgcggttgcaagaggggtgacaatatatgcagaagtaattggcgctgggctttccgctgatgcttatcacatgacagctcctcatcctgatggaaatggagcaattgcagttatgaaaaactgcttaaaggatgctggaatcaaacctgaagatgtagatgcaattaatatgcacggaacatcaacacctcttggtgataaagctgaggcaaaagctataaaacaagtttttggggagcactcatataatataaatataaactctacaaaatcgatgaccggacatttactaggtgctgccggcgcaattgaagcaatttcgtgtattttatcaatgaaaaacagtgtcgttcccccaacaataaatcattttactgatgatccagaaattgaccctaaaatgaactttacttttaataaagcgcaaaacagggaggttaattttgctttaagcaacacatttggttttggaggtc

SEQ ID NO: 234703 - DNA, 383 bp, Unknown
  Bacterial polypeptide expressing nucleotide sequence isolated from the Sargasso Sea
agatgccatgagtcaggctattaaagaatatggttctgatgtagattatataaatgctcatggtaccagtactcctgttggagatcttgctgagcttaatgcaataaaagaagtatttggaaaaagtgcgcctgttattggatcaactaaatcaatgacggggcattctttaggcgcaactggcgcacaagaggcaatttactctattctgatgatgcaaaatgattttatcgccccatcaattaatataaataccttagttgaagaagcagaaggtctaaacatatctcaattaatgataaaacaaaaattaaatgctgttatgagtaattcatttggttttggtggaaccaatgcaagtttaatttttagcaagccttaag

SEQ ID NO: 234704 - DNA, 355 bp, Unknown
  Bacterial polypeptide expressing nucleotide sequence isolated from the Sargasso Sea
gaagatgttgattatgttaatgcacacggcacatcaactcccgctggagataaagctgagacagatgcaataaagaaatcattcgctgaacatgcatataaagtcgcaataagttctactaagtcaatgacaggccatttacttggagcagcaggaggtgttgaggcaatttttacaatacttgcgcttaaaaataatattatcccccctacgattaacttaaataatccagatccggaatgtgatttagactatgttccaaagacagctagagaaaaagtgattaattacgctttatcaaattcttttggatttggcggaactaatggaactctagtttttaaaaaatcttaat

SEQ ID NO: 234705 - DNA, 469 bp, Unknown
  Bacterial polypeptide expressing nucleotide sequence isolated from the Sargasso Sea
atctggttatggtatgagcgcagatgcatatcatatgacattgccatctgagacaggagaaggcgcacaaagaagtatgagtaatgctattagtgatgcaaacttgagcgttgaggatattaattatataaatgcacatgggacatcaacccctgcaggagatatagttgaggcaaaggctgttgaatctctactcggtagtcattcgaaaaatatcgttgtcaattctacaaaatcaatgattggccatcttttaggtgcagctggcggggttgaggctatcgcaacagtgctttcattaaaagatcaacgagtccatcaaacaataaatgttgataatcaagacccagaatgcaacctagactttaacattgattcatctagacagatggacattcagcatgctttaacaaattcttttggttttgggggaactaatggttctctaatattttctaaatatgactag

SEQ ID NO: 234706 - DNA, 480 bp, Unknown
  Bacterial polypeptide expressing nucleotide sequence isolated from the Sargasso Sea
caaaaatatacgcagaggtgataggatttggaactagttctgatgctcatcatgtgacagctcctcctgaagatggaagaggagcagttctgtcaatgactaatgcaataaatgatgctgagattcatccatctgaaattgattatataaatgcacatgggacatctacacccttgggtgacattgctgaaacaactgctcttaaaaaagtattcggtgataacgttccacaaattagttcaaccaagtcaatgaccggacatactcttggtgcagcgggcgcaatagaatcaatattctgtattcaagccataaatcacggaattattcctccgacaatcaatctagataaaccagatccattgtgtgatttaaattatactcccttggtatctgctgaaaaaaacgttagagttgctatgaataattcatttggattcggaggaactaactctacacttgtcttcaaacaaatctaaa

SEQ ID NO: 234707 - DNA, 772 bp, Unknown
  Bacterial polypeptide expressing nucleotide sequence isolated from the Sargasso Sea
tcctctgtttcaacagcttgcgctgccggttcaaatgcaatttgtgattcctttagattgttacaactaggcaaggcagatgcaatgatctgtggaggggcagaagcaagtattacacctcttggtgtagctggtttcgctagtgccaaagctctttctttcagaaatgagagtcctcaaactgctagcagaccttttgatgcagaaagagatggatttgttattggagagggatctggaattcttgttttagaaactttagaaaatgcacaaaaaaggaatgcgagaatttatgcagaaatcattggatatggaacaacatgtgatgctcatcacattactgctccatctccaggcggggttggaggggctgaagctatcaaactagcaattgaagacgcttctcttagccttgaaagagttgattacataaatgctcatggaacaagcacatcagctaatgacaaaaatgaaacttctgcaattaaatctatatttaaagacagatcttacctcattcctgtaagctctactaagtcgatgactggtcatctcttgggaggctcaggaggtatagaagctgtagcttgtatactttctttgacacataattttatccctcctacaattaactacgtcaatccagatcctgaatgtgatcttgattatgtaccaaataatgcgagagaagctcaaataagagttgctctttcaaattctttcggctttggtggtcacaatgtttgccttgctttccgcaaaatgaattaaa

SEQ ID NO: 234708 - DNA, 778 bp, Unknown
  Bacterial polypeptide expressing nucleotide sequence isolated from the Sargasso Sea
tgcttgggtaataatcaagaagaagtacatcagtcattattgaaaacaaagtctggaatatctttttgtgaagaatacagagaacataatttaaaaagtcatgtacatggtaagccaaatataaaacttgaagatcatattgatagaaaaacaataagattcatgggatcaggttctgcttacaactacatagcaatgaaagaagcaatcgaagattctggattagaggaaagtgaagttagtaactttaaaacaggaataattatgggttcgggtggtccatcaattgaaaatgtaattttagcagcagataaaactagagctaaaactccaaaattaatgggaccattcattgttccaagaacaatggctagtacagcatcagctacacttgctgttccatttaaaataaaggggacgaactacactatgagttctgcctgtgcaacaagtggccactgtattggaaactcaatggaattaattcaaatgggaaaacaagatattgtttttgcaggtggtagtgaggagatacactgggcgatgactgcaatgtttgatgccatgacagccttatcttcaaaatataatgatgtaccagagtcagcatcaagagcatatgataaaactagagatggatttgtaattgctggtggtggtggagtgttagtgctagaagaatacgaacatgctaaagcaagaggggctaaaatatatgcagaattaactggttatggggcaacttcagatggatacgatatggtggctccatcaggag

SEQ ID NO: 234709 - DNA, 295 bp, Unknown
  Bacterial polypeptide expressing nucleotide sequence isolated from the Sargasso Sea
gctgaaactattgctcttaaaaaagtatttggtgaatcagtcccgcaaattagttctactaagtccatgactggccatactttaggagcagctggtgcgattgaatcaatattttgtataaaggcaattaatgatggaattattccaccaacaattaatctagataatccagattccctatgtgatttaaattatactcctttggtatcaactgaaaaaaaagttaatgttgccatgaacaattcttttggatttggaggaaccaactctacccttgtcttcaaaaaaatctaaa

SEQ ID NO: 234710 - DNA, 337 bp, Unknown
  Bacterial polypeptide expressing nucleotide sequence isolated from the Sargasso Sea
tatgaatggtaattttgtttttaaaaatgcggttcttagattcgaggaagttattaatgaggcattaagttattcaaacttaaaatcagaggacatctctcttttaattcctcatcaggcaaatcttagaattagtcagtatatacaaaaaagacttaatttatctaatactaaagtttataataatattatgaaatatggtaatactacagctgcatctattcctattgctttaaaagaagctttagatgaggaaaagttgaagaaaggagatattctatgtttggctgctttcggtagtggttttacttgggcttcagcacttattaaatggtaa

SEQ ID NO: 234711 - DNA, 949 bp, Unknown
  Bacterial polypeptide expressing nucleotide sequence isolated from the Sargasso Sea
cttttgatcaattcaaaatcaggaattacattttgtaatgaatacaaagaatacaatttaaaaagtaatattcatggtaagccaaatattaaattagaagattatattgatcgaaaagtaataagatttatgggcgaaggatcagcttataattatatagctatgagcgaagcagttaaagactctggtttgcaagaaaaagatataagtaatatttcaagtggtatgattatgggatcgggtggtccttcaattaaaaatgttattttagctgcagataaaacacgtgaaaaaaatccgaaaaaaatgggaccgtttgttgttccaagaacaatggctagtacagcttcagctacactagcagttccatttaaaataaaaggagtaaattatacgataagttctgcttgtgctactagcggacattgtattggtaatgcaatggaattaatacaattaggaaaacaaaaaataatatttgcaggtggaagtgatgaagttcattttgcattaacagcaatgtttgatgcaatgacagctctatcgtcaaaatacaatgacactcctgaaaaagcatctagaccttatgacaaaaatagagatggatttgttatatctggtgggggtggcgttttagttttagaagagtatgatcatgctaaagcaagaggagcaaaaatttatgctgaaattactggttatggggctacatcagacggatatgatatggtagcaccttcaggagaaggagcggcaagatgtatgaaattggctctaagtacaactaaaaataaaattgattacataaatacacatggcacctcaaccccagttggagatattactgaacttaaagcagttcatgaggtatttaaagactccataccaaaaataagctctacaaaatctttgtctggtcattcattaggagcaacttcagtacatgaag

SEQ ID NO: 234712 - DNA, 823 bp, Unknown
  Bacterial polypeptide expressing nucleotide sequence isolated from the Sargasso Sea
gaacttggcattgatgtcggagtgtttctcgcttcagggatcggtggctttggtaccattgaacgcgaacatcgggcgttattaaagggcgggcctcggaaaatatcaccattctttattccgtcagccattattaatttagctgcgggccaagtttcgatacgtttcggcgccaaaggacctaattcggctacagctactgcttgtgctgcctctgcccacgcaatcggagacgcacttcagattattagacgtggtggcgcggaggtcatgattgctggcgggtctgaggcggccattacccctatgggcgtcggtggattcgcctcaatgcgggccttgtcaactcgcaatgatgaccctcagagggcaagtcgaccctttgatcgtgaccgtgatggtttcatcattggcgagggagctggtgtcgtaattcttgaagaacttgagcatgcgcaggctcgtggcgcacaaatttactgtgagctggtcggctatggtatgtcggccgatgctcatcacatgactgctccggcggaggatggtgccggtgcggtccgtgtcatggagaacgccattaaggacgctgggatcgttccttccgagattcaatacgttaatgctcacgggacgtcgactccgtacaatgacaaaattgagacgctggcgataaaaaagtgttttggtgaacatgcacaaaagttagcgatctcctcgacaaaatctatgactggtcatctgctgggtgctgcaggaggattagaggctggtatttctgcattggcgattcagcatcagattgtgccacccaccattaacctag

SEQ ID NO: 234713 - DNA, 856 bp, Unknown
  Bacterial polypeptide expressing nucleotide sequence isolated from the Sargasso Sea
agtgagtccatttacagtcccaatgatgatacccaatatggcgacgggactagctgctattgctttaggtgcaaaaggaccaagctcttctgtttccacagcttgcgctgctgggtctaatgcaattggtgattcctttagattactccaactcggaaaagctgatgcgatgatctgtggtggggcagaagcaagcataactcctcttggagtagctggttttgccagcgcgaaagcactttctttcagaaatgaaagtcctcaaacagctagtagaccttttgatgcagaaagagatggatttgttataggggaaggatctggaattcttgttttagaaactttagaaaatgcacaaaaaaggaatgcaagaatctatgcggaaattgttggatatggaacaacatgcgatgctcatcacattactgctccatctccaggcggggttggaggagcagaagctatcaaactagccattgaagatagtaatctaagcattgaaaaaattgattacataaatgctcatggaacaagtacatcagcaaacgacaaaaatgaaacttctgcaattaaatccatatttagagacagatcttaccttattcctgtaagctctactaagtcgatgactggtcatctgctaggaggttcgggaggtatagaagctgtggcttgtatactttctttgacacataattttatccctcctacaataaactacgtcaatccagatcctgattgtgatcttgattatgtaccaaataatgcaagagaagctcaagtaaaagttgctctttctaattctttcggctttggtggtcacaatgtttgtcttgctttcagcaaaatgaattga

SEQ ID NO: 234714 - DNA, 874 bp, Unknown
  Bacterial polypeptide expressing nucleotide sequence isolated from the Sargasso Sea
aatggggaagaaataagctatgattgtttagttttagcttcaggggcaaaagctagaaatttaccatctcaaatattacaaaataataaacaatttgttttaaggaactttaatgatgctttgaaacttcaaaatgcattaactgaagaaaaagaagtaatgattataggtggaggatatataggacttgaaatagcttccagtttaagaaagaaaggtcataaaattagagttttggaggttgctggaaggttgcttgctagagtagctagtccagaattatcaaattactttttaaaccttcataaggaaaatgaagtaaaaataagttttggagaatctataaataatattaaggagtttgacaaaaaaatatcaatagaaacaagtagtcataataactatattgcagatcttatcattgtaggtattggagtttcgcctgaaatagacttggcttatgaagcaggtcttgattgcgataatggaattgttgttgatgcaaactataggtcaagttattcgaatatattcgcaataggagattgtgcattgaataaagatgaatatggaattagaatagaatctgtccatcacgctcagttcagtgcttcaagagtttcttcatgcattttaggtctggaaatgcctaaatatgaagagccgtggttttggtctgatcaatacaacgttaaattgcaatctgttggaattataaaagatattaaaaatacaatctcaagaaatggcagaagggaaggttcaaaatcttggtggtcttttagtagtgatggtttggtcgcagttgaagcagtaaatgatccacaatcttatgttgttgcaaaacatatactgcaaaataaaataaaggttg

SEQ ID NO: 234715 - DNA, 835 bp, Unknown
  Bacterial polypeptide expressing nucleotide sequence isolated from the Sargasso Sea
gataattaatatgccatcaggatatgtttccatcaaatataatttaaaaggtcctagctattcaacagtatcagcttgcgcatcaggagctcatgcaatcggtgagtcttttagattaattcagcacggacaggcagatattatggtggctggcggaacagaatctacaatttgcccaaccgcaatagaaggatttacatcctgtagagcgttgagtttaaaatttaatgaccaacctgaaaaatcttcaagaccgtttgataaagaacgagatgggtttgtaatgggtgaaggagcaggaacaatcattcttgaagagttagaacatgcaaaaaagagaaatgcagaaattttatgcgaaattaaaggttatggaatgtcttcagatgcatttcattatactttacctgagccaactggtgatggagcatatagagcaatggcaaattgtattaatgatgctaaaatttcgtttgaagaaattaactatataaatgcacatggaacttctacccctgctggtgataaagttgaagttttagcaatagaaaaaatttttaaaaataatcctaagaaaataaatgtatcttctacaaaatcgcaaataggacaccttttaggcgctgcaggggctgttgaggctatttattccatgaaatcgataaaagagagtattttgcctcagacaaacaatttagataatcctatgccttcatcaaacataaattttattaaaaaggagcctatggaattaagtgtaaataatgtgctatcaaattcatttggatttggcggtacaaatgtatcgctaatattttcaaaatttaatggataa

SEQ ID NO: 234716 - DNA, 649 bp, Unknown
  Bacterial polypeptide expressing nucleotide sequence isolated from the Sargasso Sea
cggagtagctggttttgccagtgccaaagctctttcttccagaaatgaaagccctcaaactgctagtagaccttttgatgcagaaagagatggatttgttattggagagggatctggaattcttgttttagaaactttagaaaatgcacaaaaaaggaatgccagaatttatgcagaaataattggttatggaacaacatgtgatgcccatcatataactgctccatctccaggcgggattggaggcgccgaagctatcaaattagcaattgaagacgcttgtcttagccctgaaaaagttgattacataaatgctcatggaacaagtacatcagctaatgacaaaaatgaaacttctgcaataaaatctatttttaaagacagatcttacctcattcctgtaagctctactaagtcgatgacaggtcatctcctaggaggctcaggaggtatagaagctgtggcttgtatactttctttgacacataattttatccctcctacaattaactacgtcaatcgagatcctgaatgtgatcttgattatgtaccaaataatgcaagagaagctcaaataggagttgctctttctaattctttcggctttggtggtcacaatgtttgccttgctttcagcaaaatgaattaa

SEQ ID NO: 234717 - DNA, 207 bp, Unknown
  Bacterial polypeptide expressing nucleotide sequence isolated from the Sargasso Sea
tggaaaagttgaattttgaacctaataaagttataagcacagtgtcaaatcatggcaatacttctgcagcttcgataccattagctttggattttgcgttaacttcaaataaaataaaagaaggggatcttttggcttttcaagctattggtggtggtctatcttggggttcaattattgtaaagtttggtaagccaaaaaaataaa

SEQ ID NO: 234718 - DNA, 652 bp, Unknown
  Bacterial polypeptide expressing nucleotide sequence isolated from the Sargasso Sea
aatggcaggatttgctgcagcaagagctttgagtactaaatttaataatgaccctatatccagttcaagaccatgggatcaagatagagatggtttcgttatgggtgaaggttctggtgttgtagttttagaagaaagagaacatgctattgccagaggagctaaaatatatgctgaaataaaaggctatggcatgtcaggagatgctcatcatatcactgctcccgctgaaaatggtgatgggggatttagagcaatgaaattggctttaaatgatgccaaaattaatagttcagagcttgattatattaatgctcatggaacttccactccacttggagatgtgattgaattaaaagcaataggaagactacttaatcaaaaaatagaaaatgtaagtattagctcaactaaatcagcaactggacatcttttaggtgcagcaggcgcgattgaggccatatattcaattttgtcaattataaatcaaactgtaccacctaccaataatttgatatcgcctgataaagaggcaacaggatttgacttggttccaatccattcaaaaaaaagaaatattaaaaacgttctatctaattcatttggctttggtggaaccaatgctagcctagttatcagttgctcagattga

SEQ ID NO: 234719 - DNA, 854 bp, Unknown
  Bacterial polypeptide expressing nucleotide sequence isolated from the Sargasso Sea
tggaattgttatgggttcaggtggaccttcaatagaaaatgttattttagcagctgataaaacaagagctaaaactccaaaattgatgggaccctttattgttccaagaacaatggcaagtactgcgtccgcaacactcgctgttccttttaaaattaaaggtactaactatacgatgagttcagcttgtgcaacaagtggtcactgtataggaaattcaatggaattaattcaaatgggtaaacaagatattgtatttgcaggcggtagtgaagaaatacattgggcaatgacagcaatgtttgatgcaatgactgcactatcttcgaaatataatgatatgcctgaaaaagcctcaagagcttacgataaaactagagatggttttgtaattgcaggaggcgcaggggtgcttgttctcgaagagtacgaacatgcaaaagctaggggtgctaaaatatacgcagaattaactggttatggagcaacttcagatggttatgatatggtagcaccatctggtgaaggagcggttagatgtatgaaaatggcaatgtcaacttctaaaaataaaatagattatattaatactcatggaacatctactccagtaggagatattacagagttgaatgcagtgaaagatgcttttggaaatgaaattccaaaaataagttcaactaaatctttgtcaggtcatccattaggagctgcttcagttcacgaagcaatatattgtttaattatgatgaaaaacaattttattgctgcatcagctaacataagtgaaatggatgaagaggctcaaaaatttccaatcgtcgctaaaacagaaataggggcaactttaaata

SEQ ID NO: 234720 - DNA, 844 bp, Unknown
  Bacterial polypeptide expressing nucleotide sequence isolated from the Sargasso Sea
atgagcaagccgatcccaaaagccggcattatggatatcgacgcatatgtcggcggcttgcatacggtcgatggtgtcggcgaagttgtcgttttggcctcaaacgaagggccgctcggtgcaagtcctttggctatggaagcctacgagcgcgaagcgcgtcgtctgcacctctatccggatggtggtgcgaaagaattgcgtgacgcaatcggccaacgctttggcttggcccccgcgcgcatcgtttgcggcgccgggtcggacgagatcatatcgctcttgatcagagcttatgcgggcgttggcgatgaggtgctctactcggcgcacggcttcttgatgtatcagatcaacgcaaagtccgcaggcgcgacgccggtggccgcgccagagacgaacctgaccgcgaatgtggatgcgttgctggacgcggtcacgcaccggacgaaaatgctcttccttgccaatccgaacaatccgacgggcagctatttgccggccgatgagcttcggcgcttgcgtgaaggattaccggaccatgttttgatggtagtcgacgccgcctacgccgaatacgtcagccggaacgactatgtgtccggtgcagagctggtagagaaacatgacaacgtggtgatgacccgcaccttctcgaaggcgttcggtctggcggccgtccggcttgggtgggcatattgccccgccgaggtggcggatgtcctcaaccgcgtccgaaatcccttcaacgtgaccgcgccggcgcaagccgccgggatcgcggcggtaagcgatctctcacataccgatgcggcgatcgcccacaacgatgaatggctgctca

SEQ ID NO: 234721 - DNA, 250 bp, Unknown
  Bacterial polypeptide expressing nucleotide sequence isolated from the Sargasso Sea
atgaagggcatccgcctgtgcggcagtggagccgcggtgccgcgcatccgcgtgagcaatgacgatctcagcggacgggtcgaaaccagcgatgagtggatccgcacccgcacagggattgcggctcgccgcgttgctgacgagcaagaaagcctcaccagcctggcggccgccgccggccagcaagcattggagcgcgctggctgggacgccagcagcgttgatctgatcctgctggccacctccagcc

SEQ ID NO: 234722 - DNA, 487 bp, Unknown
  Bacterial polypeptide expressing nucleotide sequence isolated from the Sargasso Sea
gcatgctaaatctagaggtgcaaaaatttatgctgagcttacgggttatggtgctacttcagatggttatgatatggtagctccgtctggggagggtgctgtaagatgtatgaatatggctttaagcactgcaaaaaataaaattgattacataaatactcacggtacatcaacaccggtaggagatataacggagttaaacgctgttggcaaagtatttacagactacaagcctaaaataagttcaacaaaatccttagctggacactctcttggagcaacatctgttcatgaagcagtttatagtcttataatgatgaaaaataattttattgccgcatctgctaacattacagatatggatgaagaagctaaaaaatatccaattgttactaaagttgagaaagacgtcagtttaaattctataatgtctaatagttttggttttggtggtacaaatgcaactttagtatttgaaaaggtttga

SEQ ID NO: 234723 - DNA, 438 bp, Unknown
  Bacterial polypeptide expressing nucleotide sequence isolated from the Sargasso Sea
atggtaaatttttaaaagatttgtggtgtgaggctcctggaacttcaaataatcctcgactttcaaaagatattttagataaaggaaagcatcttccgtatatgaatggaagagaagtttttaagaatgctgtaagaaggtttcctgaagtaataaaagaagcaatggatgcaaacgaattaactatagatgatatttctcaaattataccacatcaagcaaatcaccgaattagtgaagcggttgcaaaacgtatgggtgttgggatggataaagtatttagcaatatcaaatactatggtaatactactgctgcatcaatcccaattgcaatgtgtgaagcaagagacaaaggactgttttctgatggtgatataataattttagcagcattcggggcgggatttacttgggcatctgctgctatacgttggtaat

SEQ ID NO: 234724 - DNA, 386 bp, Unknown
  Bacterial polypeptide expressing nucleotide sequence isolated from the Sargasso Sea
ggccctggccgatggcggcatcgatccttcagagatcgattacgtgaacgcccacggcaccagcacccctgcaaacgacaagaacgagacctcggccatcaagagtgctctgggggatcgtgcgctgcagatcccggtgagctccaccaaatcgatgaccggccacctgctgggtggatccggcggcatcgaagcggtggcctgcgtgctggccctccagcatggggtcgtgcccccaaccattaaccacaccaacccggatcctgactgtgatctggatgtcgtgcccaatcaggcgcgggatcagacactgggaacggtgttgtccaactccttcggcttcggcggccacaacgtctgcctggctttcaaacgcgccagttgag

SEQ ID NO: 234725 - DNA, 810 bp, Unknown
  Bacterial polypeptide expressing nucleotide sequence isolated from the Sargasso Sea
tgtcaggtcatatttcaattaagtacaatcttaaaggccctaatagctcgccagtaacagcatgtgcaactggcactcatgccataggagactctttctcaataattaaaaatgataaagctgatattatgatctgtggtggtgctgaggcagcaatatgtcctttaggaatctctggtttttctgctgctagggctctgtgcgatacatttaatgaaacaccagaaaaaggttctaggccatgggacagagatagatcaggatttgtgatgggtgaaggtgctggagttttagtattagaagaatatgaacacgcaaaaaaaagaaatgccatgatttatggtgaagtaaaggggtatggaatgtcaggagatgcttttcacataactaagccttctgaagatggtaatggaggttttagagctatggagatggctctaagagaatcaaagttaaacactgatgaaataggatatgtaaatgctcatggaacatcaactccagtaggagataccattgagttgaaagctgtggaaaaattattcaaatctaacgataatttatttatgagttcaaataaatcagcaattggtcatcttttaggtgcagctggtgctgttgaagctgtattttcatttatgtctttaaaaactaaaaaccttccaccaactttaaatttagacaatccagatgtaactacctcaattaatttaattccccatgagtcaatatctaaatctgtaaaaaatataatttcaaattcttttggttttggaggcacaaacgctagtattattcttggtgtttaaa

SEQ ID NO: 234726 - DNA, 727 bp, Unknown
  Bacterial polypeptide expressing nucleotide sequence isolated from the Sargasso Sea
aatgtttaaaaatgaattatatcggtacaagttttaccttatattaataccaacacttctaaattttcatagtttatttagccaaggaaaccccaatccaagtgctttaattgacagccttattttaaatgaaatgacggataaaaatctacctggggtgtctactgtaattgttaaaaatggtaaaatagtttgggtggagtcttacggatatgcagatgtagaaaacttagttcctgtagaagacagtactgtttttatgctcgcttcggtatctaaattgtttaccggtaccgttgctatgatgttgcatgaaaataatgtaatcaatataaacgaaaacataaacaactatttaccgtggaatattgaaatccctggcttcaattccgataccataacttttcatcaattgatgacgcacacatcgtctattaaagacaattgggctaccatgggaaattattacaattctcctgaccctacaataactttaggagattgtatgtaccgttatttcaacgctaacggagttgactacaattcatcaaataattttttagcctactctcccggaactttttataaatactccaatatggcatctgcattaaatgggtatttggttgagttggcaacttctactccttttgaccaatattgtaacgacaatttatttagtcctttatgtatggataaaacttcttggttttttgctgatttttga

SEQ ID NO: 234727 - DNA, 394 bp, Unknown
  Bacterial polypeptide expressing nucleotide sequence isolated from the Sargasso Sea
catgaaatcaagaatcacatcaattggaagttatacaccgaacaatatagtgaccaataaagatcttgaaaaaagagttgatacaactgatgaatggattgtatctagaacaggaatcaaagaaagaccaatagctgatgattcacaagcgacatctgatttagcatttgaagctgccaagattgcaattgagagagccgatatcgacaagaatgagattgatctcattattgtcggtacatgcacgcctgatgttgcaacaccaaatgttggtacgattgttcaaaaacgactagaactcaaaaattttcctgccttcagtattgaggcggcttgtagtggtttcatttatgctctgaatattgcaaaaaggttcataaaatcaggtgagtca

SEQ ID NO: 234728 - DNA, 713 bp, Unknown
  Bacterial polypeptide expressing nucleotide sequence isolated from the Sargasso Sea
tatacagtatggtgatgcggatgtgatgtttgcgggtgggacggaatctgttatcactcctctttgtgtggctgggttcaacgcagctaaagcattgtcacatcgtaataatgatcctcaaggtgcaagccgcccctttgatatggatcgagatggcttcgtaataggggaaggttgtggtgtacttatccttgaggaactagaatttgctaaaaaaagacaagctccaattcttggggaaattatcggatattcgcttaatggagatgctcatcatattacggcaactgctccaggcggtgaaggtgcggctcgttgtattaatctggcattaaagaacgccgggattaataaagaggatgttgattatatcaatgctcatggaacctctacagcagcagatgcaacagaaacccaggcaataaaaactgtttttaaggatcacgctaaacaactcccggtcagttcaacgaaatcgatgactggacatcttttaggtgctgccggaggagtagaagctatctattcactcatggcgataaaaaatggaaccttacctcccacaataaattacaccactccagatccagagtgcgaccttgattatgttccaaatcaagctagggaagcaaagattgatatatgtatttcaaactcctttggttttggtggtactaatggtgttttggtttttaaaaaattttcggggtagg

SEQ ID NO: 234729 - DNA, 631 bp, Unknown
  Bacterial polypeptide expressing nucleotide sequence isolated from the Sargasso Sea
aatgaatcgtgtagttgtaacaggattgggcattgtttcttgtataggaaacgatcaaaaaactgtaacagataatttaaaaaatttaaaatcaggaattacttatgctcctgaatatgaagagttttcttttagaagccttgttcatggaaaacctgaaatagatttagaaaaaaaaattgatagaagactattaaggtttatgggtgatggagctgcatacaattatatttcaatgaaagatgctatagacgattctggtttagaacaaaacgaaatatctaatgaaatgacaggaattattgttggttctggaggtccatcaacaaaaaatatgcaccaagcttttaagataggtagtcaacaaggatcaaaaaaagttggcccttttatggttcctagaactatgtctagtacaaattcagcaactttagcaacgccttttggaattaaaggtgtaaattattcaatatcatctgcttgctcaactagttcccattgtattggtaatgcttatgaacttattcaaatgggtaagcaaaatattatgtttgcagggggtggtgaagaattagattggactatgtcaattttatttgatgctatggggagccttatcttcaaagtataa

SEQ ID NO: 234730 - DNA, 604 bp, Unknown
  Bacterial polypeptide expressing nucleotide sequence isolated from the Sargasso Sea
aaacgaaactccttcagaagcatgtagcccatttgataaaaatcgagatggttttgtaatggcagagggttctacagtattagttttagaaagtgaggaatcagcaaaaaaaagaggagttgatatttacgggtatatagatggatatggctctacttctgatgcccatcacattacagcaccatcagaaggtggagagggagcgtttagggcaatggaaaaagctattgaagatgcagatttgcaacttactgaaatagattacataaatgcacatggaacctctactccaataaatgataaaaatgaaacaaatgctatcaaaacacttttttctgataaagcatacgatttacaaatatcctctacaaaatcaatgacaggtcatttgcttggaggtgcaggtgcttttgagtcaatggtctgtttactttcaattaaatataataaaatcgcaccgactattaacttaaatgttcccgatgatgaatgtgatttaaactatacacctaactcagccttagagaaagaagtccaaacagcaatgtctaactcatttggatttggtggtcacaatgctgtattggtattttcaagtatttaa

SEQ ID NO: 234731 - DNA, 612 bp, Unknown
  Bacterial polypeptide expressing nucleotide sequence isolated from the Sargasso Sea
tgtcaagtaagtataatcatgaaccaaaaaaggcttcacgagcatttgatgctgatagggatggttttgtaatcgcaggaggtgggggagtaatagttcttgaagaattagagcatgcaaaatcaaggggagcaaaaatttatgctgaagtaattggttacggtgcaacttctgacgggtttgatatggtggcaccctcaggggagggtgcagagagagccatgaagttagcgatttcatcctgtagacacagacaaattgattatataaatgcgcatggaacttctacgccagcgggagatgtgacagaagttcaagcggtcaggcaagtattttctgagcgcaagtttcctcttattagttctacaaaatcactcactggtcatagtcttggggcggccggtgttcaagaagcaatttattcaatcctgatgatttctaataatttcgttgcgggcagtgcaaatatttttaatcttgatcctgatctgaaaaatgaagagatagctttagaagcaattgaagaaattgagttggatgcagtattatcaaatagttttggctttggaggaacaaatgcttctctggcactagcccgatatttagattaga

SEQ ID NO: 234732 - DNA, 799 bp, Unknown
  Bacterial polypeptide expressing nucleotide sequence isolated from the Sargasso Sea
tcagtcattattgacaacaaagtctggaataacttttagtgaagaatacaaagaacataatttaaaaagccatgttcatggcaagccaaatataaagcttgaagatcatattgatagaaaaacaataagattcatgggttcaggttctgcttacaactatatagcaatgaaagaagcaatcaaagattctggattagaagaaagtgaagtcagtaattttaaaacaggaatagtaatgggttcgggtggtccatcaattgaaaatgtaattttggctgcagataaaactagagctaaaactccaaaattaatgggaccattcatcgttccaagaactatggctagtactgcttcagcaacacttgctgttccatttaaaataaaaggtactaattacacaatgagttctgcttgtgcaacaagcggtcactgtattggaaactcaatggaattaattcaaatgggaaaacaagatgttgtttttgcaggtggtagtgaagaaatacactgggcgatgaccgcaatgtttgatgcaatgactgccttatcctcaaaatataatgataccccagacacagcatcaagagcatacgataaaacaagagatggttttgtaattgctggtggtggtggagtgttagtgcttgaagaatacgaacatgctaaagcaagaggggctaaaatatacgcggaattaacaggttatggggcaacttcagatggatacgatatggtggctccatcaggagaaggtgctgtgagatgtatgaagatggctatggcaacatcaaaaaaataa

SEQ ID NO: 234733 - DNA, 841 bp, Unknown
  Bacterial polypeptide expressing nucleotide sequence isolated from the Sargasso Sea
gatgcttctgatctttcctgtagaattggtggagagatacctactggtccttatagtgaaggtaaactagacctaaatgaatggcttaatattaaagaacaaagaaaacttgatagatttatcatgttgggactaatagcagctgaagaagctataaaagactctaatattgagatttctaatgaagaagtttccaaaaaaactggagtaattgttggatctggtattggaggtttaaaaaccatttcagaaacatcaattttattggaagaaaaaggtcctagaaggatttcaccattttttattccgtcttcattaattaatttaatttcaggtcaaatatctattaaatatggttttaaaggacctaaccattcagttgtaactgcatgttctacaggtagtcatgctataggtgatgcttatagaataatttcaacttgtgatgcagatataatgattgctggaggagctgaagcagcaatttgtaagcttggggttgcaggatttgcagctgcaagagctttatctacatcatttaatgataacccaaaagaagcatcaagaccttgggataaaaatagagatggttttgttatgggagaaggcgcaggaatactagttttagaagaatttgaacatgcaaaaaaaagaggtgcaaaaatatatgctgagattattggttatggtatgtctggtgatgcgtatcatataacagcacctgaaccttcaggagctggcgcattaagcgcaatgactaatgctttaaaaaatgccaaattaaactcagaaaaaatagattacattaatgcgcatggaacatctacaccattaggtgatt

SEQ ID NO: 234734 - DNA, 817 bp, Unknown
  Bacterial polypeptide expressing nucleotide sequence isolated from the Sargasso Sea
acggtgccgatgatgattcccaacatggcaacgggtctcgccgccattgcccttggcacgaaagggccgagttccgcggtggccaccgcctgtgctgccggctcaaatgccattggtgatgccttccgtctgctgcagctgggcaaggccgacgcgatggtctgcggcggagcggaatcggcgatcacacctctgggcgttgccggcttcgccagcgccaaagccctgtcgttccgcaataacgaccccgctaccgccagtcgtccgttcgacaaggagcgcgacggcttcgtcatcggcgaaggtgcgggcatattggtactcgaaactcttgagcacgcgcaagccagaggcgccacgattcttggcgaaatccttgggtacgggatgacctgcgacgcccaccacataacgtcacccacaccgggcggtgtcggcggcgctgaagcgatgcggctggccctggctgatggcggcatcgatccttctgcgatcgactacgtcaacgcccacggcaccagcacccccgccaacgacaagaacgagacctcggccatcaagagcgccctgggagatcgtgctctccagattcctgtgagctccaccaaatcaatgaccggtcacctgctgggtggatccggcggcatcgaggctgtggcatgcgtgctggccctccagcatggggtcgtgcccccgaccatcaaccacaccaatcccgatcctgactgtgatctggatgtcgtgcccaatcaggcgcgggatcagacactgggaacggtgttgtccaactccttcggcttcggcggccacaacgtct

SEQ ID NO: 234735 - DNA, 535 bp, Unknown
  Bacterial polypeptide expressing nucleotide sequence isolated from the Sargasso Sea
gatggagctggttcattggtacttgaagattttgatcatgctaaagcaagagatgcaaaaatatatgcagaggtgataggatttggaactagttctgatgctcatcatgtgacagctccccctgaagatggaagaggggcagttctgtcaatgactaatgcattaaatgatgctgagattcatccatctgaaattgattatgtaaatgcacatgggacatctacacctttgggtgacattgctgaaacaactgctcttaaaaaagtatttggcgattacgttccacaaattagttcaaccaagtcaatgaccggacatactcttggtgcagcgggcgcaatagaatcaatattctgtattcaagccataaatcacggaattattcctccgacaatcaatttagataaaccagatccattgtgcgatttaaattatactcccttggtatctgttgaaaaaaacgttagagttgctatgaataactcatttggattcggaggaactaactctacacttgtcttcaaaaaaatctaaa

SEQ ID NO: 234736 - DNA, 727 bp, Unknown
  Bacterial polypeptide expressing nucleotide sequence isolated from the Sargasso Sea
tacctcactcatgggaacttatgcagctgagaaggcaatcagtgattcgggattggataaaaatgatattgattttataattttttcaacccttagtccagattattatttcccaggatcaggtgttttgttgcaaaaaaatttaggaattaaagaggttggagctttggatgttagaaatcaatgctcaggttttatttatggattatcaattgcagaccagtatattaaatctggaatgtataaaaatattttggttgtgggtagtgaaattcattctggcggtcttgataaatcctcaagaggaagatcagtctctgtaatatttggtgatggggcaggtgctgcagtagtttctgcaactgactcagattcctgtattttatcaactcatttacattcagaaggaaaatttgctgaggaacttgctgtaattaaacctgcaactactttttggattgataagattgttaaaaatgatgatgataaaagttatttcccatatatgaacggaaactttgtttttaaaaatgcagtagtaaggtttgaacaagtaatttttgaagcattgaattattcaaatttaaaaacagaagatataaatatgttaattacccatcaggctaatttgagaattagccaatacattcaaaaaaggttgaagctaacagattcacaagtctttaataacataatgaaatatggaaatactacagctgcatcaatt

SEQ ID NO: 234737 - DNA, 486 bp, Unknown
  Bacterial polypeptide expressing nucleotide sequence isolated from the Sargasso Sea
atgcaaaatcaagaggtgctaaaatatatgctgaaataactggttatggagcaacttctgatggatatgatatggtcgccccttcaggtgaaggagcagttagatgtatgaatatggctctaagtacaagtaaaaataaaattgattatataaacactcatggaacttctactccagttggagatataacagaattaaatgcagtaggagaggtttttaaagaaaaagttccaaaaataagttctacaaaatcacttgctggacattctttaggagcaacttcagtacacgaagccatttatagtttaattatgatgaaaaataattttatatctgcctcaataaacataaatgaaatggatgaaggagctaaaaaatttcccatagtaacaagtgttgaaaaagatgtaactttgaattctattatgtctaatagttttggatttggaggaactaacgcaactttagtttttgaaaaggtttaat

SEQ ID NO: 234738 - DNA, 502 bp, Unknown
  Bacterial polypeptide expressing nucleotide sequence isolated from the Sargasso Sea
aagcaaaggggagccaggatctattgcgaacttgtaggatatggtgcgagttccgatgccttccatatcactgcaccttccaccgagggtcctgcccatgcggtcaagattgcagtcaaggacgcggaggttgattcagaaaagatcgattacattaatactcatggtacttccaccccggcaggggatatcaatgaattgaaggcattgaaattggctttgggagacgctattgccaaccacacttcggtcagttcaaccaaatccatgacaggccatcttttaggagcagcagcagccatagaagctgttttctgcgttaaagccctgcaccactcttacatcccgcccactattaatatcaacgagctggatccggaatgtgattttgatgtcacaccgaatgaaggccgctctagggaaattgatgttgccatgtccaattccttcggttttggtggaaccaatgcgtctgtgattttccgtaaaatgcattcctgaa

SEQ ID NO: 234739 - DNA, 965 bp, Unknown
  Bacterial polypeptide expressing nucleotide sequence isolated from the Sargasso Sea
atttaaaaagccacattttcatggaaaaccaaatattaaacttgccgatcatgttgatagaaaagctttaagatttatgggaaatggatcagcatataattatgtagcgatgaaagaggctattagtgactctggtttggaggacaaagatgtaagtaatattaattctggtatggtcatgggatcagggggtccctctatagaaaatgtaattttagctgcggacaaaacaagagaaaaaaatccaaaaaaaatggggccatttattgttccaaggacgatggcaagcactgcttcggcaaccttggctgttccttttaaaataaaaggtgttaactatacaattagttctgcttgtgcgactagtgggcattgcattgggaatgcaatggaacttattcagtttggaaaacaaaaaattatatttgctggtggtagtgatgaaatacattttgcaatgacagcaatgttcgatgctatgactgcgttatcttctaaatataacgacaatcctcaaaaagcatctagaccttacgataaaacaagagatggatttgtaatagctgggggggcaggagttttagttttggaggaattagaacatgcaaaatcgagaggagcaaaaatttatgctgaactcactggttatggagctacttcagatggttatgatatggttgcgccatctggtgagggagcaactagatgtatgaatttagcactaaagacaactcgtaataaagttgattatataaatgctcatggaacttcgactcctgtgggagatataacagagttaaaagcgataaaagatgctttcaaagataatgttccaaaaataagttcaaccaaatctctttctggacacccgctgggtgcagcttcagttcatgaagcaatttattcattaataatgatgaaaaataattttattgctgcctcagcaaatgtaaatgaaatggatg

SEQ ID NO: 234740 - DNA, 889 bp, Unknown
  Bacterial polypeptide expressing nucleotide sequence isolated from the Sargasso Sea
aaagaacataatcttaagagtcatattcatggcaaaccgaatataaaacttcaagatcatattgatagaaaaacaattagattcatgggttcgggatcagcttataattatattgctatgaaagaagcaattagagattctggattagaagaaaaagatgtaagtaattttaaaacaggcattgttatgggttcaggtggaccatcgattgaaaatgtaattttagcagctgacaaaacaagagctaaaacaccaaagttaatgggaccttttattgttccaagaactatggcaagtacagcatcagcaacacttgctgttcccttcaaaatcaaaggaactaattatacaatgagctctgcatgtgcaactagtggacactgtattggaaattctatggaactaatccaaatgggaaaacaagatattgtttttgccggaggaagtgaagagttacactgggcgatgacagctatgtttgatgcaatgactgcattatcttccaagtacaatgataaaccagaaacagcatcaagagcttatgacaaaactagagatggttttgtaatagctggaggtggaggagttttagtacttgaagaatatgagcacgcaaaagctaggggagcaaaaatatatgcagaattgactgggtatggtgcaagttctgatggatacgatatggtagctccatctggcgaaggtgcaattagatgcatgaggatagcgctttcaacatctaaaaataaaattgattatataaatacacatggaacctcaactcctgtgggagatatcacggagttaaatgcagtggctgagacttttggaaaggatattccaaaaataagttctacaaaatctttatccggtcatcctttaggtgcag

SEQ ID NO: 234741 - DNA, 263 bp, Unknown
  Bacterial polypeptide expressing nucleotide sequence isolated from the Sargasso Sea
catgagacaactacacagaagagttgtagttacaggcttgggtatattatcaccaattggtaatactttggctgaagcctgggattcttgtataaatggagtatcaggtatctcaagaatagagatagatttaaaaaataatccagttgaagttggcggtcgtttaaaaaattttaatcctgaagattttcttgattctaaagaaattagaagaattgatcccttcattcaatacggaataattgctgctaatcaatctataa

SEQ ID NO: 234742 - DNA, 859 bp, Unknown
  Bacterial polypeptide expressing nucleotide sequence isolated from the Sargasso Sea
taaaactcaatttgcttgtgagctcaaaggttatgatccaatggacttttttgaccgtaaagaaggaagaaaacttgacaagttctctcaatatgcaattgtaagctcggatgaagcaataaatgattctggactaaatagtgaaggtatagataaaggaagggttggtgtaatttggggctcaggaatcggtggtctgaaaacatttcaagaagaggtcacaaactttgtgaatggtgacggaactcctagatataatcctttttttatccctaaaatgatcccagacattgctgcaggcgttatctcaatacgccatggttttaaagggccaaactttgctacagtttcagcctgtgcatcttctgcaaatgctcttattgatggcgtaaattatattaggcttggctatgcagatgcgattgtttcaggaggctctgaagccggcattattaaatcaggaattggtggctttaatgctgttcaagctctttcaaaaagaaatgacgacccaaaaactgcatcaagaccttttgatttagatcgagacggttttgttttgggagaaggtggtggttgtgtgattttagaagaacttaatcacgcaatcagtagaggggctaagatttatgcagaagttgtagggattggactttcatcggacgcctatcacatgactgctccccatcctgacggggaaggtgcgattagtgtgatgaataactgtattaaagactccggtttgacgtataaagacgttgatgtcgttaatatgcatggcacttcaacgccacttggtgacaaggctgaggctaaggcgctgggagcggtctttaaagaccacctatattcaatgaat

SEQ ID NO: 234743 - DNA, 577 bp, Unknown
  Bacterial polypeptide expressing nucleotide sequence isolated from the Sargasso Sea
tgggataaagatagagatggttttgtaatgtcagaaggttcaggtattttagttctagaggagcttgaacatgcaaaattaagatctgcaaatatatatgccgaagttcttgggtacggactttcaggtgatggttatcatccaacagctcctgatccgaggggtgcaggcggaacaagagcaatgaaaatggcaattaaagattcaaaacttaatattgatgatataaattatatcaatgcacacggcacttcaactcctcttggagatgaaatagaattcaattcagtaagtgaaatttttgggaagagtaaagagaaattatttatgtcttcaaccaaatcctctacaggacatttgcttggagcatctggagcggtagaatcaatcttttcaattttaacgataaaaaataatattattccaccaacactaaacttagaaaatccatctattcaatcaaaaaaaataaaccttgttcccaactcaagtttgaatgaaaatattgattgtgtattaacaaattcttttggatttgggggaacaaatgcttcacttatttttaaaagattttaag

SEQ ID NO: 234744 - DNA, 898 bp, Unknown
  Bacterial polypeptide expressing nucleotide sequence isolated from the Sargasso Sea
aatgaaaagagtagttataacaggattaggaatcgtttcatgtctaggaaataatcaacaagaagtttttgagtccctaatcaattcaaaatctggaataacatttgctgaagaatacaaagaatacaatttaaagagtcatgttcatggtataccaaatataaaattggaagattatgttgatagaaaagtaataagatttatgggaaaaggatctgcatataattacattgcaatgaatgaggctctaaaagactcaggtttagaagaaaaagatattagtaatataaaaacagggatggttatgggttctggaggtccatcaattgaaaatgtgattcttgctgcggataaaaccagagaaaaaaatccaaaaaaaatgggaccttttgtagtgccaagaacaatggcaagcacagcatcagcaactcttgcggtaccttttaaaataaaaggtgtaaattatacaataagttcagcctgtgctacaagcggacactgtataggaaatgcaatggaattaatccaattaggaaaacaaaatattgtttttgctggtggaagtgatgaggtgcattttgcaatgacagcaatgttcgatgcaatgacagcattatcttctaaatataatgatacaccagaaaaggcttcaagaccttatgataaaactagagatggttttgtaatatctggtggaggaggagttttggttgttgaagaatatgaacatgctaaagcaaggggtgcaaaaatttatgcagaattaacaggttatggagctacttctgacggttatgatatggttgcaccatcaggagaaggtgctgtaagatgtatgcaaatggccatgagtaccggaaaaaataaaattgattatattaatacacatggaacttca

SEQ ID NO: 234745 - DNA, 481 bp, Unknown
  Bacterial polypeptide expressing nucleotide sequence isolated from the Sargasso Sea
taaagcaagaggcgcaaaaatctatgctgaattaactggttatggggcaacttcagatggatatgatatggtcgctccatcaggagaaggagctgtaagatgtatgcaaatggctttaaacacaagtaaaaataaaattgattatataaatacacacggcacttcaactccagttggagatataacagaattaaaagctgttggagaggtttttaaagacaatattcctaaaataagttctacaaaatctctttcaggtcattcgttaggagctacatcagtacacgaggctgtttatagtttaatcatgatgaaaaataactttatatcagcatctataaatataaccgatatggatgaagaagcaaaaaaatatccaatagttactaaagttgaaaaagatgtaactttgaattctataatgtctaatagttttggatttggtggaactaatgcaactttagtttttgaaaaggtttaa

SEQ ID NO: 234746 - DNA, 865 bp, Unknown
  Bacterial polypeptide expressing nucleotide sequence isolated from the Sargasso Sea
agaagaagttcaccaatcacttttaaactcaaaatcaggtattaccttttctgaggagtacaaagaacataatttaaaaagccatgttcatggaaaacctaatattaaacttgaggaccatgtagatagaaaaactattagatttatgggatctggctcagcttataactatattgcaatgaaagaagcaattaaagactctggcttagaggaaaatgaagtaagtaatttcaaaactggaattgtgatgggttctggaggtccttctatcgaaaatgtaattttagctgcagataaaactagagctaaaactccaaaattaatgggtccatttattgttccaagaacaatggcgagtacggcttccgcaacactagcagtaccatttaaaataaaaggaacgaactacacaatgagttcagcttgtgcaactagtggacactgtattggaaactctatggaattaattcaaatgggtaaacaaaatgttgtatttgcaggaggaagtgaagaaattcactgggcaatgactgcaatgttcgatgcaatgactgctttatcatcaaaatataatgatacaccggaaacagcttcaagagcttatgacaaaactagagatggttttgtaattgcaggtggaggtggagttttagttcttgaagaatatgaacatgccaaagctagaggtgcaaaaatatatgcggaattaacaggttatggagcaacttcggatggatacgatatggtagctccatctggtgagggtgcagtaagatgtatgcagatggcaatggctacagctaaaaataaaattgattatatcaatactcatggaacttctactcccagttggagatatcaccag

SEQ ID NO: 234747 - DNA, 487 bp, Unknown
  Bacterial polypeptide expressing nucleotide sequence isolated from the Sargasso Sea
catgcaaaagctaagaggggccaaaatatatgcagaattaactggttacggagcaacttctgatggatatgatatggtagcgccatcaggtgaaggagctgtaagatgtatgaaaatggctatggcaactgctaaaaataaaattgattatataaatactcatggaacctctactccagttggagatattactgaattaaatgcagtaaaagaaacttttggaactgaaattccaaaaataagttcaacaaagtctttatcaggtcatccattaggtgcagcttcagttcatgaagcaatctattgtttaattatgatgaaaaataatttcattgctggttcagcaaatataaatgaaatggatgaagaagcagaaaaattcccaattatcgcaaaaactgagacaggggtaactttaaatacagttatgtctaatagttttggatttggtggtactaatgccgcattaatttttgaaaaggtttaa

SEQ ID NO: 234748 - DNA, 892 bp, Unknown
  Bacterial polypeptide expressing nucleotide sequence isolated from the Sargasso Sea
catggaaaaccaaaaatgaaacttgaggattatattgatagaaaaactattaggttcatgggttcaggttctgcatataattttattgcaatgaaagaagcaattaaagactcaggattagaagataaggatgttagtaattttaaaactggtattgttatgggttcaggcggaccatcaattgaaaatgtaattttagcagctgataaaacaagagcaaaaactccaaaattaatgggaccctttatagtaccaagaactatggcaagcacagcctcggcaacactagcagttccatttaaaataaaggggactaattacacaatgagttctgcatgtgctacaagtggacactgtattggtaattctatggagctcattcaaatgggaaaacaagatatagtatttgcaggtggaagtgaggaaatacactgggcaatgacagcaatgtttgatgcaatgactgcactttcatcaaaatataatgatacaccagaaaaagcatcaagagcgtacgataaagcaagggatggttttgttattgcaggaggtggtggagttttagtactcgaagaatatgagcatgcaaaagctagaggtgcaaaaatatatgcagagttaacaggctatggcgcaacctcggatggatacgatatggtggcaccatctggtgaaggagctgttagatgtatgaaaatggctatggcaacttcaaaaaataaaattgattatataaatacccatggaacctcaactccagttggagatattactgaattaaatgctgtaaaagaagcattcgggactgaaatacctaaaataagctcaactaagtctctatcgggacatccattaggagcagcttcagtacatgaagcaatatattgtctaa

SEQ ID NO: 234749 - DNA, 319 bp, Unknown
  Bacterial polypeptide expressing nucleotide sequence isolated from the Sargasso Sea
atgtataattcaaaaatagctggattaggtaaatatctgcctgataacgttgtaaccaatgatgatctttctaagattatggatacaactgatgaatggatcatagaaagaacaggaattaaagaaagaaggcacataaaaaaaggtgatggtgacacaactgctagcatgggagttaaagctgcaaaaattgcaattgaaagagccggaattgataaaaatgatattgaattaattctttttgcaactcttagtccagattattatttccctggaagtggagtgctagttcaagaacttttagatatccctacatgtc

SEQ ID NO: 234750 - DNA, 754 bp, Unknown
  Bacterial polypeptide expressing nucleotide sequence isolated from the Sargasso Sea
ttgtgcagccggatccaatgccatcggtgatgcctttcgcctgctgcagctcggcaaggcagacgccatggtggccggcggggccgaatcggcgatcaccccgctgggcgttgcaggatttgccagcgcgaaggcgctgtccttccgcaacgacgaccccgcaaccgccagccgccctttcgatgccgagcgtgatggcttcgtgatcggcgagggcgctggtgtgcttgtgctcgaaactcttgaacacgccgaagcgcgcggtgcttcgattctggctgaggttgtcggatacggaatgacctgtgacgcgtatcacatcacttcacccaccccaggaggcgtgggtggtgcagaagcgatgcgcctggctctcagcgatggcggccttgatccatccgagatcgattacgtgaacgcccacggaacgagcacgccagcgaacgacaaaaacgaaacctccgccatcaagagcgctcttggtgcaagagcttttgagatccccgtgagttcaaccaagtcaatgaccggccacctgctgggtggctccggcgggattgaagcggtggcctgtgttctggcgattcagaacaacatggttccccccacaatcaaccacgccaaccctgatcctgactgtgatctggatgtcgtcccgaacaccgcccgggaacgcaaactggtaacggtgctttccaactccttcggcttcggcggtcacaacgtctgcctggccatccgacgcatgacctga

SEQ ID NO: 234751 - DNA, 274 bp, Unknown
  Bacterial polypeptide expressing nucleotide sequence isolated from the Sargasso Sea
atggcaaaagcagggatagaagccaaggaagttgattgggttgtacctcatcaagccaatgtcaggatcatacaaggtacggcacgaaagatgggcatacccgatgaaaaagttattaaaactgttcaagaccatggcaatacatctgcagcatcaattcctttagcactgtcagtagcttcaaagtccggaaaaataaaacaaaatgatttgatcgtaactgaagctataggaggaggtctggcctggggagcaatagtactaagatggtaaa

SEQ ID NO: 234752 - DNA, 443 bp, Unknown
  Bacterial polypeptide expressing nucleotide sequence isolated from the Sargasso Sea
agaagaccgaggtattttatcagtagatcttaattcggatggcagctttagggacatcctatacgttgacggcggggtttctcaaaaaacaaccggctacttgagaatggagggaaaagaggtatttaagcacgctatagacaaattagcgaaaacatcagaaacagctatgattaaagcagggatcgaagctagtgaagttgattgggttgtccctcatcaagctaacgttaggatcattcaaggtacggcacgtaagatgggtattcccgatgaaaaagttattaaaaccgttcaagatcatggaaatacatccgcagcttccattcctttggcactatccgtagcttcaaaatccggacaaatagaaaaaaatgatttaattgtaactgaagctattggtggaggattggcttggggagcaatagtgctaagatggtgaa

SEQ ID NO: 234753 - DNA, 925 bp, Unknown
  Bacterial polypeptide expressing nucleotide sequence isolated from the Sargasso Sea
atgaaaagagtagtggttaccggtattggaatagtttcgtgtcttgggaataatcaaaaagaagtctatgagtctcttgttaattctaagtctggaatttcttttgcagaagaatataaaacacataatttaaaaagcaatgttcatggaaaaccaaatataaaacttggtgaccatgtagatagaaaagcactaagattcatgggaaatggttcggcctataattatgttgcaatgaaagaagctgtaaaagactctggtttaaaagaaaacgaagtaagtaatgtttcaactggaatggttatgggatccggaggaccgtcaatagaaaatgttattcttgctgctgataaaacacgtgaaaaaaatcctaaaaaaatgggaccctttattgtacctagaacaatggcaagcacagcctctgctacactagcggtaccttttaaaattaaaggcgttaattacaccataagctccgcatgtgcaactagcggacactgtattgggaatgctatggagcttattcagtttggaaaacaaaaaataatttttgccggtggaagtgacgaattacactttgctatgacagcaatgtttgatgctatgacggcactttcctcaaaatataatgataatccagataaagcatcaagaccttacgataaaacaagagatggttttgttattgcaggcggagcaggagttttagttttagaagaaatggaatatgcaaaagcccgaggtgcaaaaatttatgctgagttaacaggttatggagctacatccgatgggtttgacatggttgcgccatctggtgagggagcaacaagatgcatgaatttagcattaaaaacaacaagaaacaaagtagattatattaatgcacacggtacatcgactcctgtggagacattacagaactaaa

SEQ ID NO: 234754 - DNA, 513 bp, Unknown
  Bacterial polypeptide expressing nucleotide sequence isolated from the Sargasso Sea
aatgaaaagagttgtagtaactggaattggagttttgtcttgcttaggtaataaccaaaaagaagtttacgaatccttgataaattcaaaatcaggaataacattttgtcaagaatacaaagattataatttaaaaagtaatgttcatggaaaacctaatataaaacttgaagatcatatcgatagaaaaataatcagatttatgggtgaaggttcggcatacaattatattgctatgaatgaagcagttaaagattctggattagaagaaaaagatataagtaacgatttaactggaatgataatgggttccggaggaccttcaattaaaaacgtaatattagctgctgataaaactagagaaaaaaatccaaaaaaaatgggaccatttgttgtcccaaggactatggctagtactgcatctgccactttagctgtaccttttaaaattaaaggagttaattatacaattagttcagcctgcgcaactagcgcacattgtattggtaatgc

SEQ ID NO: 234755 - DNA, 622 bp, Unknown
  Bacterial polypeptide expressing nucleotide sequence isolated from the Sargasso Sea
aatgtttgatgctatgaccgctctctcttctaaatacaataatactcctgaaaaagcttcaagagcatacgataaaactagagatggtttcgtcatagcaggagggggtggagttttagttcttgaagaatacgaatatgcaaaagcaagaggtgcaaaaatttatgctgagataactggttacggagcaacttcagatggatatgacatggtagcaccatcgggagaaggagcagttagatgcatgcagattgccctaaaatcatctaagaacaaaatagactatattaatactcatgggacatctactccggttggagatattacagaattaaaagctataggagagacttttaaagaaaaagttccaaaaataagttcaacaaaatctttatcgggacaccctttaggggctgcttcagttcatgaagctatttactgtttgattatgatgaaaaataattttattacaggttcagctaatattaatgaaatggacgaagaagcaaaaaaatttccaatagtaattaaaactgaaaaagaagttaatttagacgcagttatgtcaaatagctttggatttggtggtacaaatgcaacattaatttttgaaaaggtataa

SEQ ID NO: 234756 - DNA, 766 bp, Unknown
  Bacterial polypeptide expressing nucleotide sequence isolated from the Sargasso Sea
atgcgaagagtagtaattacaggtttgggaattgtttcatgtcttggaaataaccgagaagaagttcatcaatctttattaaacactaaatcaggaatttctttttcagaagaatacaaagaacataatcttaaaagtcatattcatggaaaacctaatatcaaactagaggatcatatagatagaaaaacaattagatttatgggttcgggatctgcttacaattatattgcaatgaaagaggcgattgaagactctggtttagaagatggtgaagtaagtaatttcaaaacaggcattgtaatgggttcaggtggaccttcaattgaaaatgtcattttagcagccgataaaacgagagccaaaactccaaaattgatgggacctttcattgtgccaagaactatggcaagtacagcatcagcaactttagctgttccatttaaaattaagggaacaaactatacaatgagttcagcctgtgcaactagcgggcactgcattggaaattctatggaacttattcagatgggaaagcaagatgttgtttttgcaggtggtagtgaagagatacactgggcgatgactgcaatgtttgatgcaatgactgcattatcttcaaaatataacgatacacctgagaaagcatcaagagcttatgacaaaactagagatggttttgtaattgctgggggtgcaggggttttagttcttgaggaatatgaacacgctaaagctcgaggagctaaaatatacgcagaataac

SEQ ID NO: 234757 - DNA, 961 bp, Unknown
  Bacterial polypeptide expressing nucleotide sequence isolated from the Sargasso Sea
aagaggaggttcatcagtcattgctaaattcaaaatcaggaattcattcagtcaagaatataaagagcataatttaaaaagccatattcatggaaagccaaatataaaacttgaagatcatatcgatagaaaaacaattagatttatgggttctggttcagcttataattatatagctatgaaagaagctattgaggactctggactagaagaaaaagatgtaagtaattttaagacaggaattgtgatgggttcaggcgggccttcaattgaaaatgttattttagcagcagataagactagagctaaaactccaaaattaatgggaccttttgtagttcctagaacaatggctagcaccgcttctgcaacacttgctgttccttttaaaattaaaggaactaattatacaatgagttctgcatgtgcaactagtggacactgtattggaaattctatggaactaattcaaatgggtaaacaagatattgtttttgcaggtggtagtgaagagatacactgggcaatgactgctatgtttgatgcaatgacagctttatcatcaaaatataatgatacaccagagactgcatcaagagcttatgacaaaactagagatggtttcgtaatagctggaggtggtggggtactagtactcgaagaatacgagcatgccaaagctagaggtgctaaaatatacgcggaattaactggttatggagcaacttcagatggatacgatatggtagctccatcaggtgaaggagctgtcagatgtatgcaaatggcaatggctactgctaaaaataaaattgattatatcaatactcatggaacatcaacgccagttggtgatattacagaattaaatgctgtaaaagaaacttttggagaagaaattcctaaaattagttcaacaaaatctttatcagggcatcctttaggagctgcttcagttcat

SEQ ID NO: 234758 - DNA, 337 bp, Unknown
  Bacterial polypeptide expressing nucleotide sequence isolated from the Sargasso Sea
tatgaatggtcagttagtatttaaaaatgcagtggttagattttcagaggtcataatggaggggttaaatcataatgatcttaagcctgatcaaatagatatgttaattcctcatcaggcaaacctcagaatatctcaatttgttcaaaaaaagtttggtttatcagataatcaagtctataataatattcaaaaatatggtaatactactgctggatcaattcctattgcattaacagaggcatttcaggaaggtaaaataaaatcaggtcatatagttgttctagcagcttttggaagtggttttacatggggaagtacaattattaaatggtag

SEQ ID NO: 234759 - DNA, 616 bp, Unknown
  Bacterial polypeptide expressing nucleotide sequence isolated from the Sargasso Sea
aatgaaaagagtagttgtaacaggacttggtgtagtttcatgtttaggaaataatcaagatgaagtttatcaatctttagttaatacaaaatcaggaataacattttcagaagaatataaagaacataatttaaagagccatgttcatggtaaacctaatatcaaattagaggattacattgatagaaaagttattaggtttatgggagctggctcagcatataattatgttgctatgagtgaagcagttaaagattctggattagaggagaatgaagttagtaatatttcaactgggatggtaatgggatcaggaggaccatcaattgagaatgtgatattggcatcagataaaactagagaaaaaaatccaaaaaaaatgggtccatttatcgttccaagaactatggcaagtactgcttctgccactctagcagttccatttaaaataaaaggcactaattacacaataagttctgcatgcgcgacgagtggtcattgcattggtaacgcaatggaacttattcaattaggaaaacaaaatattatttttgcaggtggaagtgatgaagttcactttgctatgactgcaatgtttgatgcaatgaccgcacta

SEQ ID NO: 234760 - DNA, 485 bp, Unknown
  Bacterial polypeptide expressing nucleotide sequence isolated from the Sargasso Sea
gcgtagtgatgatgaaagccagatattatcaacacatctccattcacaaggaaaagatttaaaaaatttatggatggaagcacctgggacctgtaagggaagttggtttaaagaaaataaatttgataagaaaaaatttactccgaagatgaatggtagagaagtattcaagaatgccgtgaaacgatttcctgaggtaatccatgaagctattgattacaataatttagattttaatgatattaaattaatcattccacatcaggcaaattatcgtattagcgaagcggttgccaagaggcttggagtaggaatggataaagtttatagcaatattcacaagtatggaaatacaacagctgcatctattcctatcgcccttactgaagctgtcaattcaaagaaaataaataaaaaagacattattattttagttgcatttggagcaggttatacttgggcatcagcagctattaagtggtaat

SEQ ID NO: 234761 - DNA, 900 bp, Unknown
  Bacterial polypeptide expressing nucleotide sequence isolated from the Sargasso Sea
gatgagacgtgccgttatctcaggaatgggaatcgtatcttgcataggcaataataaaacagaggtgaccgattctctcaagcaagggcgaagcggaatcaagcataacgagtcttatgcagaagttggtatgcggagccatgtcagtggatcggtagaaatcgataccaaaactttaatagaccgcaaatttttgcgctttatgggcgatgcctctgcttatagtttcattgcaatgaacgaagcaatcgaagattcaggcctaaatcaaaaccaagtttctaacactaggactggactcgtggcaggcagcggaggtggttcccccgaggatcaacttaattcaacagatatagtacgtgaaaaaggtgtacgcagagtcggagcatatcgagtgccccgcactatgagtagttccgtttcagcatgccttgctactcccttccaaatcaagggggtgaattattctatatcttccgcatgcgcgacaagtgcgcattgcattggacatgcggctgagcttatacaattaggtaagcaagacgtcatttttgcaggtggtggagagtcagaacattggactttatctcatatgttcgatgcaatgggcgccctgtcaacagactataatgaaactcccgaaaaggcatctcgcgccttcgatgcggaccgagacggttttgtaatagcaggtggtggtggcatggtcgtagtagaggagcttaatcatgctctgcaaagaggtgcgaaaatctatgcggaaattactggatacgcggctacctctgatggatatgatatggtagctccctccggcgaagggggcgctcgcgctatgaaatcagcattagggaaaaataataagtcagtcgattatataaatacacatggaactagcac

SEQ ID NO: 234762 - DNA, 319 bp, Unknown
  Bacterial polypeptide expressing nucleotide sequence isolated from the Sargasso Sea
cgttcacgaccggctcgagaccctggcgatcaagcgctgctttggcgagcatgcccacaagctggccatctcgtccactaagtcgatgaccggacacctgctgggtgctgcgggcggactcgaggctgggatcgcggccttgaccgtccgggatcaggtcattcccccgaccatcaacctcgataacccggatccggactgcgacctggactatgtcccgaaggttgcccggccggccacgatcaactacgcgctctcgaactcgttcgggttcgggggtaccaacgcgtccctgttgttcaagcgctacgaggggtga

SEQ ID NO: 234763 - DNA, 867 bp, Unknown
  Bacterial polypeptide expressing nucleotide sequence isolated from the Sargasso Sea
catggaaagcctaatatcaaacttggaggatcatatagataggaaaacaattagatttatgggttcaggatctgcttacaattatattgcaatgaaagaggcgattgaagactctggtttagaagaaagtgaggttagtaattttaaaactggaattgttatgggctcaggtggaccttcaattgaaaatgtaattttagcagcagataaaaccagagccaaaactccaaaattaatgggaccatttatagttccaagaacaatggcaagtacagcatcagcaactcttgctgttccttttaaaattaaaggtacaaactatacaatgagttcagcctgcgcaacaagtggtcactgtataggtaattctatggaacttatccaaatgggaaaacaggatattgtttttgcaggtggtagtgaagagatacactgggcaatgactgccatgtttgatgctatgacagcattatcttcaaaatataatgatacacctgaaaaagcatcaagagcttatgacaaaactagggatggttttgtaattgctggaggtgcaggagttctagttctagaagaatatgagcatgccaaagctagaggagctaaaatatacgcagaattaactggttatggagcaacttcagatggatatgatatggtagcaccttctggtgaaggtgcagtaagatgtatgcaaatggctatggcaacttcaaaaaacaaagtagattacataaatactcatggaacttctactccagttggagatattactgaattgaatgctgttaaagaagcttttggaaatgaaattccaaagattagctcaactaaatctttatcaggtcatccattaggagctgcatc

SEQ ID NO: 234764 - DNA, 730 bp, Unknown
  Bacterial polypeptide expressing nucleotide sequence isolated from the Sargasso Sea
gccattgtataggcatgcagttgagcaaatacagctaaacaagcaagacatagtttttgcaggaggaggggaagaattagattggacactttcctgtcttttcgacgcaatgggtgcaatgtccagcaaatataacgatacaccagaaaatgcttcaagagctttcgacagagatagagatggtttcgttattgcaggtggcggtggagtagttgttgtagaggaattacatcacgcaattgccagaggagcaaaaatatatgctgaggtcacgggttatggcgcaacctccgatggttatgacatggtagcaccatcaggcgaaggagctgagagatcgatgagattagctttggcttctttgaacggtagaaaggttgattatattaatgcacatggtacttcaactccagcaggtgatgtcactgagatacaagcggttagaaatgtatttagtgaagaaaaacaacctttagttgcttccacgaaatcacttactggccatagtcttggtgctgcaggtgtccaagaagctatttattcactgattatgatggaaaacaactttatatctgcaagtgccaatgtttttaatttggatgaagaaatcagttctaatgaagtggctactggattgatcgaaggtattgaattggacactgttttatcgaatagctttgggtttggaggtaccaacgcctcgttagccttaagcaagtttactggataa

SEQ ID NO: 234765 - DNA, 247 bp, Unknown
  Bacterial polypeptide expressing nucleotide sequence isolated from the Sargasso Sea
attggatcaactaaatcaatgacggggcattctctgggcgcaactggagcacaagaggcaatttattctattctgatgatgcaaaacgattttatagccccttcgattaatatagataccctagtggaagaagctgagggtctgaacatatctcaatcaatgatggaacataaattaaatgctgttatgagcaattcatttggttttggtggaaccaatgcaagtttaatttttagcaaaatttaag

SEQ ID NO: 234766 - DNA, 541 bp, Unknown
  Bacterial polypeptide expressing nucleotide sequence isolated from the Sargasso Sea
aatgggtgaaggtgctggagttttagtgctagaggaatatgagcatgccaaaaaaagaaatgctaaaatttatggcgaagtaaaaggatatggaatgtctggagatgcttttcacataacaaaaccctctgaagatggtaatgggggttttagggcgatggaaatggctttaagggagtcaaatctaaacgctgaggaaatagaatatgttaatgcccatggaacctcaacccaagtaggagatatgattgaactttcagctgttgaaaaattatttgaattgaatagtaatctatttatgagctcaaacaaatctgctattggccatttacttggtgctgctggagctgttgaggcagtattttcatttaaatctcttgaaactaaaactcttcctccaactttaaatttagataatccaagcactaatacttcgataaatcttatacctcatgaggcaatatccaagagtgtcagtaatataatatctaattcatttggctttggaggcacgaacgcaagtataattattggtgattaa

SEQ ID NO: 234767 - DNA, 529 bp, Unknown
  Bacterial polypeptide expressing nucleotide sequence isolated from the Sargasso Sea
tcttgttttagaaactttagaaaatgcacaaaaaaggaatgcaaggatttatgcagaaatagttggatatggaacaacatgtgatgctcatcacataactgctccttctccaggagggattggaggcgccgaagctattaaattagcaattgaagacgcttgtcttagcctagaaaaagttgattacataaatgctcacggaacaagtacatcagctaatgataaaaatgaaacttctgcaattaaatctatttttagagacagatcttaccttattcctgtaagctctactaagtcgatgacaggtcatctcctaggaggctcaggaggtatagaagctgtagcttgtatactttctttgacacataattttatccctcctacaattaactacgttaatcgagatcctgaatgtgatcttgattatgtaccaaatattgcaagagaagctcaagtaggagttgctctttctaattctttcggctttggtggtcacaatgtttgccttgctttcagcaaaataaattga

SEQ ID NO: 234768 - DNA, 524 bp, Unknown
  Bacterial polypeptide expressing nucleotide sequence isolated from the Sargasso Sea
tatgaaacgagtagtagttacaggactaggtataatttcgtgtataggaaatgatgctcatacagttacaaataatttaaaacacttaaattctggaatatcctcagcacctgaatatgaagaattttcatttagaagtcttgttcatggaaagccaaaaataaatttagaagaaaatattgatcgtcgccttttgcgttttatgggtgatggtgcagctttcaactatattgctatgaaaaatgctatcaaagactcaggattagaagaaaaaaatatatcaaatgaaatgactggcattattgtaggttcaggtggtccatctactatgaatttgtataaagcttcagaattgggaaaaaatagtggttcaaaaaaagttggaccatttatggttccaagaagtatgtctagcactaattcagctaccttagctacaccatttaaaattaagggggtaaattattctattacatccgcctgctcaacaagctcacattgtataggcaatgcttatgaactaa

SEQ ID NO: 234769 - DNA, 778 bp, Unknown
  Bacterial polypeptide expressing nucleotide sequence isolated from the Sargasso Sea
aatgattgcaatattgccggtggacacttatcaatcatatggggacttagaggtccaaatcaaacagtaacatcagcatgcgcttcggctactgatgcaattggtatggccatgagactgatattgtctggcgatgcggatgcaatggtaactggtggcaccgaagccagtgttacagcattaactattgcagggtttgcaaatatgaaagctctttcgcaatctaatgaaattccagaaagagctagtagaccatttgataaagatagagatggttttgttttaggtgagggatctggaatgctagttattgaacgagaatcccatgcaaaaaacaggggtgctcatattttagctgaacttgcaggatatggatcaacagatgatgcttttcatattactcaaccatctaaaggagggtctggagctttaaaagcaatggagagagcaattaaagatgctggtctaaacatagatgatattgactatattaatgcacatggtacttcgactccctataatgacaaaaatgagtcagctgcaattacagagctttttaaaaaccactgtgaaaaacttaaggttagctcaacaaaatctatgacagggcacttattaggtgccgcgggtggaattgaagcagttgcatcagtaaaatctgttttagagcaaacactgcctccaactataaactatgatactcctgatcctgagtgtgcactagattatgtaccaaatattgcacaatcttccaatgttaattcggtcctatcaaata

SEQ ID NO: 234770 - DNA, 601 bp, Unknown
  Bacterial polypeptide expressing nucleotide sequence isolated from the Sargasso Sea
aagccctcaaactgccagcagaccttttgatgcagaaagagatggatttgttattggagaaggatctggaattcttgttttagaaactttagaaaatgcacaaaaaaggaatgcgagaatttatgcagaaatagttggttatggaacaacatgtgatgctcatcacataactgctccatctccaggcgggattggaggcgcagaagcaatcaaattagcaattgaagatgcttgtcttagccttgaaaaagttgattacataaatgctcatggaacaagtacatcagctaatgataaaaatgaaacttctgcaattaaatctatttttagagacagatcttacctcattcctgtaagctctactaagtcgatgacaggtcatctcctaggaggctcaggaggtatagaagctgtagcttgtatactttctttgacacataattttatccctcctacaattaactacgtcaatcgagatcctgaatgtgatcttgattatgtaccaaataatgcaagagacactcaagtaggagttgctctttctaattctttcggctttggtggtcacaatgtttgccttgcttttagcaaaatgaattga

SEQ ID NO: 234771 - DNA, 273 bp, Unknown
  Bacterial polypeptide expressing nucleotide sequence isolated from the Sargasso Sea
aagacagatcttacctcattcctgtaagctctactaagtcgatgacaggtcatctcttaggaggctcaggaggtatagaagctgtagcttgtatactttctttgacacataattttatccctcctacaattaactacgtcaatcgagatcctgaatgtgatcttgattatgtaccaaataatgcaagagaagctcaaataggagttgctctttctaattctttcggctttggtggtcacaatgtttgccttgctttcagcaaaatgaattgaa

SEQ ID NO: 234772 - DNA, 862 bp, Unknown
  Bacterial polypeptide expressing nucleotide sequence isolated from the Sargasso Sea
attggaatcgtatcttgtcttgggaacaatcaagaggaagtatatcagtctttattaaattcaaaatctggaattactttttcagaggagtacaaagaatataacttaaaaagtaacatacatggaaaaccaaacataaaattagaggatcatgtagatagaaaatttattagatttatggggccaggatctgcttataattatatttcaatgatggaagcagtgaaagatgctggtttagaagaaaaagatgtaagtaatatttcatctggtatgattatgggctcaggaggaccatctattgagaatgttattttagctgcggataaaacaagagaaaaaaatccaaaaagaatgggaccatttgttgttccaagaactatgtctagtactgcatcagctacacttgcagtgccatttaaaattaaaggagtaaattatacaattagctcagcatgtgcaactagtggacattgtattggaaatggaatggaattaattcaattaggcaaacaaaaaattatatttgctggtggaagtgacgaagttcattttgctatgaccgcaatgtttgatgcgatgactgcattgtcatcaaaatataatgatactccagaaaaagcttctagaccttatgataaaactagagatggatttgtaatatctggtggtggaggtgtattagttttagaggaatatgaacacgcaaaagccagaggagcaaaaatttatgctgagttaactgggtatggagctacttcagacggatatgatatggttgctccatctggagaaggggctgaaagatgtatgaaaatggctttaagcacttcaaaaaataagattgattacataaatactc

SEQ ID NO: 234773 - DNA, 924 bp, Unknown
  Bacterial polypeptide expressing nucleotide sequence isolated from the Sargasso Sea
catggggatgttgtccccggtagggaacgatgtcagtacctcctggagcgcagtgtgtgccgggcgcagtggcattggccagatcgaccggttcgatgccagcgagtatggcacgcgcatcggcggggcggtaaaggacctggatatcgaaccctggctgtcttccaaagaagcccgcaagcttgacgccttcattcactatggcctgattgccgcccagcaggcggtggacgacagtggcctggaacagttcgacaagctcgacaaggagcgggtgggcattgccatcggctccggtattggcggcctggagtacatcgaaaagaacattattcagatggaaaaggccggcccccgcaaggtatctccgttctttgtgccggcgtctgtgatcaatatgatttccggtaatgcggctatccggtttggctacaaaggcccgaacatcgccattgtgaccgcctgcaccaccggtacccacaacattggctatgcggcccgcaccatcgcctacggcgatgctgacgtgatgctggccggcggcgccgaaatggccaccacccgttccggcattgccgcgttctcttccgcccgtgccctgtcgacccgcaatgatgagccggaaaaggccagccgcccctgggacaaggagcgcgacggctttgtgttgagtgatggcgctggcgtgctggtcctggaaggtctggaacatgcaaaagcccgtggcgcgacgatttacggcgaagtggtcggctttggcatgagcgatgacgcccatcacattaccgcaccccctgcggacggcgacggcgctgcccggtctatggccaatgccttgcgggatgcgggcctgaagccggaagaagtggattacatcaacgcccacggcacatcgaccctggtaggggatgtagccgaagtggc

SEQ ID NO: 234774 - DNA, 172 bp, Unknown
  Bacterial polypeptide expressing nucleotide sequence isolated from the Sargasso Sea
gaagataaaattattatgacagtcgataagcacggtaatacctcagcagcctcaatccctttggctctagattatggagtaagtagtggtatggtaaaaaaagatcatttgattatttttgaggcttttggagctggatttacttggggttcaacattattaaagttttaaa

SEQ ID NO: 234775 - DNA, 832 bp, Unknown
  Bacterial polypeptide expressing nucleotide sequence isolated from the Sargasso Sea
aatgaaaagggtagtgattacagggattggtgtagtatcgtgtttaggtaataatcagaaggaagtctataattctttaatcaattcaaagtcaggaataactttttctgaggaatataaagaatataatttaaaaagtaatatacacggaaaaccaaacataaaacttgaagattatgttgacagaaagtttatacgatttatgggacctggttcagcttacaattatatttctatggctgaagcagttaaagactcgggcttggaggaaaaggaggttagcaatatatctacaggtatgattatggggtctggaggtccatctattgagaatgttattttagcggcagataaaacgagagagaaaagtcctaaaagaatgggtcctttcgttgttccaagaacaatgtcgagtacagcttcagcaacattagctgtaccatttaaaattaagggagttaattatacaattagctccgcttgtgcaactagtggacactgtattggaaatgcaatggaattaattcaattaggtaaacaaaatataatttttgcaggagggagtgatgaggttcattttgcaatgacagcaatgtttgacgccatgacagcactttcgtctaaatacaacgatacacctgaaaaagcttcaagaccttacgacaaaacaagagatggatttgtaatctctggtggaggaggtgttttagttttagaagaatttgagcacgctaaggcgagaggcgctaaaatctacgccgaaattacaggttatggtgcaacatcagatggatatgatatggttgctccttctggagagggagcggtaaga

SEQ ID NO: 234776 - DNA, 796 bp, Unknown
  Bacterial polypeptide expressing nucleotide sequence isolated from the Sargasso Sea
atgaaaagagttgtgattactggtttaggagtggtttcatgtttaggaaacaaccaagatgaggtatatcattctctattaaattcaaagtctggaatatcttttagtaaggaatataaagagcataatcttaaaagccacatccacggtaagccaaatataaaacttgaggattttattgatagaaaaacaataaggtttatgggatcaggttcagcatacaattatattgcaatgaaagaagcaatcgcagactctggtctcgaagaaaatgaggttagtaattttaaaactgggatagttatgggctcaggcggcccgtcaattgaaaacgtaattttggccgcagataaaactagagctaaaactccaaaattaatgggaccctttattgttccaagaacaatggcaagcactgcttcagctactctagctgtaccttttaaaataaaaggtactaattatacaatgagctcagcttgtgcaactagcggacattgtataggaaactctatggagcttattcaaatgggaaagcaagatattgtcttcgctggtgggagtgaagaaattcattgggccatgactgctatgtttgatgcgatgacagccttatcctcaaaatataatgatacacctgaaactgcctcaagagcttatgataaaacaagagatggttttgttattgctggtggtggtggagtattagtgcttgaagaatatgaacacgccaaggctagaggtgccaaaatatatgctgaacttacaggatatggagcaacctctgatgggtatg

SEQ ID NO: 234777 - DNA, 290 bp, Unknown
  Bacterial polypeptide expressing nucleotide sequence isolated from the Sargasso Sea
tttgaaaggaataaatttaaatcaaatcggagtctcatttaaaggaagtggaagtttcgtgccaaatcaaattcttactaatgaggatataagtaagaaagttgatacgagtgatgaatggataaaatcgagaacaggtatatctaagagaagggtatctgggttaaaggaagatgtgagtcaaatgggttataaagcagcattagcagcaattaaaatgactaaatgggatttagatacagttgatttaataattctagccacttcaaccccaaatgatttatttggat

SEQ ID NO: 234778 - DNA, 460 bp, Unknown
  Bacterial polypeptide expressing nucleotide sequence isolated from the Sargasso Sea
catgagcgcagatgcgtatcatatgacacttccatctgaaacaggtgagggtgcatctagatgtatgacattagctcttgaagatgcaaacttagatccatcaaacattgattatattaatgcacatgggacttccacacctgcaggtgatattttggagttagaagctgtaaagaaaactttcaaagctcattcgaaaaatcttattatcaattcaacaaagtctatgattggtcaccttttgggtgcagcaggcggtgtagaggccatagtatgcatcctttcgatattaaacggcaagattcatcaaactataaatattgaaaacctagatgaaaattgtgatttgaatgtaaaccatgaatcttctatcgattgtgatattaattttgccttatccaattcatttggctttggtggtacaaacggatctttaattttttctaaattcaaagattaa

SEQ ID NO: 234779 - DNA, 720 bp, Unknown
  Bacterial polypeptide expressing nucleotide sequence isolated from the Sargasso Sea
tatgggtgaaggatctgcgtataattatattgctatgaatgaagcggttaaagattctggtctcgaagaaaaagatataagtaatatttcaactggtatgattatgggatctggcggtccatcaattaaaaatgttattttagctgctgataaaactcgtgaaaaaaatcccaaaaaaatgggcccatttgttgttccaagaacaatggcgagcactgcatctgctacactggcagttccttttaaaattaaaggtgttaattatacaattagttctgcatgcgccactagtggtcactgcattggaaacgctatggaattaatacaattaggtaaacaaaaaattatctttgctggtggcagcgatgaagttcattttgcattaactgcaatgtttgacgcaatgactgcattatcttcaaaatataatgatactccagaaaaagcgtcaagaccttatgacaaaaccagagatggcttcgtaatatcaggaggaggtggtgttttggttgttgaagagtatgatcatgcaaaagcaagaggtgcaaaaatttatgctgaaatcacaggttatggagctacatccgatggatatgatatggtcgccccttctggagaaggtgcggtaagatgtatgaatattgcattaagcactagtaaaaataaaattgattatataaatacacatggaacctcaacaccagttggagatataactga

SEQ ID NO: 234780 - DNA, 763 bp, Unknown
  Bacterial polypeptide expressing nucleotide sequence isolated from the Sargasso Sea
tctgcatgcgcatcctctgcaaatgcaattatagatggtttaaattatataagaatgggatactctgatatcattgtagctggaggatcagaagcaccaattacaatttctggtatcgctgggtttaatgcaatgcatgctctttctactagaaatgatgatcctttaactgcatccaggccttttgatagagacagggacggttttgtcttaggcgaaggtggaggtgctctaattctcgaagaatatgaacatgcaaaaacaagaggtgctaaaatgtatgctgaagtttctggatttggtttgtctagtgacgcatatcatatgaccgctcctcacccagatggaaaaggagcaattaaagttatgaagcattgccttgatgatgctaaattaaattcatctgaaattgatttaattaatatgcatggaacgtctacttcacttggagatattgctgagactaaagctgttaaagaagtctttcaagaagacgtttataacctgaatattaattctacaaaatctatgactggtcaccttttaggtgctgctggagcaatagaagggatttcttgtattctatcaatgaataacagtatggtccctccaacaattaatcattttaatagagatgaaaatattgatccaaaactaaatctaactttttcgaaacctcaaaagaaagaagttaatgcctccctttcaaatacttttggatttggaggacataatgcatgcgttatatttaaaaaattataat

SEQ ID NO: 234781 - DNA, 892 bp, Unknown
  Bacterial polypeptide expressing nucleotide sequence isolated from the Sargasso Sea
atgagaagagtagtaattactggtataggagttgtatcttgtcttggcaacaatcaagaagaagttcatcaatctcttttaaattcaaaatcaggaatatctttttgtgaggaatataaagaacacaatttaaaaagtcatgttcatggtaaaccaaaaataaaacttgaggatcatattgatcgaaaaacaattagatttatgggttctggttcagcttataattatattgcgatgaaagaagcaattgaggattctggactagaagaaaaagaagtaagtaattttaaaactggaattgttatgggttctggagggccatcaatagaaaatgtaattttagctgcagataaaactagggccaaaactccaaagttgatgggaccgtttattgttccaagaactatggctagcacagcatctgctacacttgcggtccctttcaaaataaaaggaaccaattatacaatgagttcagcttgtgcaaccagcggacattgcattggaaattcaatggaacttattcaaatgggtaaacaagatgttgttttcgccggtggtagtgaagaaattcattgggccatgactgcgatgtttgatgcaatgaccgcattatcatcgaaatataatgacacacctgaaacagcttcaagagcttatgataaaactagagatggttttgtaattgctgggggtgggggtgttttagtacttgaagaatatgaacatgcaaaagcaagaggggctaaaatatatgcggagctaactggttatggtgcaacttctgatggatacgatatggtagctccatctggtgaaggagcagtaaggtgtatgaaaatggcaatgggaacttcaaaaaataagattgattatatcaatacgcacggta

SEQ ID NO: 234782 - DNA, 575 bp, Unknown
  Bacterial polypeptide expressing nucleotide sequence isolated from the Sargasso Sea
cgaagttcaatcaaccgctttagatctttcagatgaaggtagaaatatttctgttctttttgctgatggcgctggagcggctgttttgcaagcaacagaaaataataaaggaattttatctactcatctacattcggatggtaaatttttaaaagatttgtggtgtgaggctccaggaacttcaaataatcctcgactttcaaaagatattttagataaaggaaagcatcttccatatatgaatggaagagaagtttttaagaatgctgttagaagatttcctgaagttataaaagaagcaatggattcaaacgaattaactatagatgatatttctcaaattataccacatcaagctaatcaccgaattagtgaagcagttgcaaaacgaatgggtgttggaatggataaagtatttagtaatatcaaatactatggaaatactactgctgcatctatcccaattgcaatgtgtgaagcaagagaaaaaggcctattttcggatggtgatataataattttagcagcattcggggcgggatttacttgggcatctgctgctattcgttggtaat

SEQ ID NO: 234783 - DNA, 769 bp, Unknown
  Bacterial polypeptide expressing nucleotide sequence isolated from the Sargasso Sea
caatctttattaaatactaaatcaggtatttctttttcagaagaatataaagaacacaatcttaaaagtcatatacatggaaaacctaatatcaaacttgaggatcatatagatagaaaaacaattagatttatgggttcgggatctgcttacaattatattgcaatgaaagaggcgattgaagactctggcttggaagaaagtgaagtaagtaatttcaaaacaggaattgttatgggttcaggtggaccttcaattgaaaatgttattttagcagcagataaaactagagctaagactcccaaattaatgggaccatttatagttccaagaaccatggcgagtacagcatcagcaacactcgctgttccctttaaaattaaaggtacaaactacacaatgagttcggcctgcgcaactagcggacactgtattggaaattctatggaacttattcagatgggaaaacaagatgttgtttttgcaggtggtagcgaagaaatacactgggcaatgacggccatgtttgatgcgatgacagcattatcttcaaaatataacgatacacctgagaaagcatcaagagcttacgacaaaactagagatggctttgtaattgctggaggtgcaggggttttagttcttgaggaatatgaacacgctaaagctagaggagctaaaatatacgcagaattaacaggttatggagcaacttcagatggatatgatatggtagcaccttctggtgaaggtgcagtaagatgtatgc

SEQ ID NO: 234784 - DNA, 834 bp, Unknown
  Bacterial polypeptide expressing nucleotide sequence isolated from the Sargasso Sea
gtttaataaaccttgcatcagggcacatctctataaaatataccctcaaaggacccaatcattcggttgtaacagcatgtgcatctggtgcccatgcaataggtgactcatttagaataatttcttatggagatgctgatgtaatgatagcaggtgggacagaagcagcttgcactcgatttggtatttctggtttttgtgcaatgagagcattatcaactaaatttaatgataatcccgaaaaagcttctagaccatgggacaaaggtagagatggttttgtactatctgaagggtcaggaatgttagttcttgaggaattagaacatgcaaaaaaaaggtcagctaatatttatgcagaaattgttggttatggtttaactggtgatgcttatcatccaacagcgccggcaagtgatggtagcggaggttttagagccatgaaaatggctttgaataacgcaaatattcctactgatcaggttgactacattaatgcacatggtacttcaactcctttgggagatgagatagaattaaatgcagtaaaaagaatttttgaaaatagtaaaaaaaatttgtttatgtcatctacaaaatcatctactggtcatttgctaggagcctctggagcaattgaatcaattttctcaattttgtcattaaaagatggagtcattcccccgacattaaacctaacaaacccgtcttcagattgtgaaggaataaacctagtaccaaaagaaagtattaataacacaaataggttttctctctctaattcatttggttttggtggtaccaatgtctcgttggtatttaaaaaaaaatagt

SEQ ID NO: 234785 - DNA, 916 bp, Unknown
  Bacterial polypeptide expressing nucleotide sequence isolated from the Sargasso Sea
ttctcatgctgaagaatacaaagagcataatttaaaaagccatgttcatggtaaaccaaatattaaactagaggatcatatcgacagaaaaacaattagatttatgggttcaggttcagcttacaattatattgcaatgaaagaggctattgaagactccggattagaggaaagtgaagtgagtaattttaaaactggaattgtaatgggttccggtggcccatcaattgaaaacgtaatacttgcagcagacaaaacaagagctaaaactccaaaactaatggggccctttattgttccaagaacaatggccagtacagcttctgcaacacttgcagtaccatttaaaattaaaggaactaactacacaatgagttctgcatgtgcaactagtggacactgcataggaaattctatggaattaattcaaatgggtaaacagaatattgtgtttgcaggtggaagtgaagaaattcattgggctatgacagcgatgtttgatgcaatgacagcattatcttcaaaatataatgatactccacaatctgcatctagagcttatgataaaactagagatggatttgtaatcgcaggaggagcaggtgtattagtacttgaagaatatgaacatgctaaagcaagaggtgctaaaatatatgcagaattaactggttatggtgcaacttcagatggatacgatatggtagcaccatcaggtgaaggtgctgttagatgtatgaaaatggcaatggcaactgctaaaaataaaattgattatattaatactcacggaacatctactccagttggagatataactgaacttaatgctattcaagaaacttttggagaagacattccaaaaattagctcaacaaaatctttatcaggtcatcctctaggagccgcttcagta

SEQ ID NO: 234786 - DNA, 519 bp, Unknown
  Bacterial polypeptide expressing nucleotide sequence isolated from the Sargasso Sea
gaggtggagttttagtactagaagaatatgaacatgcaagagctaggggagccaaaatatacgcagaaataactgggtatggtgctacatctgacggatatgatatggtagccccctcaggagaaggcgctgtaaggtgtatgaatatggcattaaatacatcaaaaaataaaattgattatattaatactcatggaacttcaactccagtaggtgatattactgaattaaaagctgttggggaagtatttaaagattataaacctaaaattagctcaacaaaatctttatctggacattcattaggagcaacttcagttcatgaggctatatatagtcttataatgatgaaaaataattttatatctgcttctgctaatattacggatatagatgatgaagctaaaaactattcaattataacccaagtagaaaaagatgtaacactaaatgcaataatgtctaacagttttggttttggcggaacaaacgcaacattggtttttgagaaagtataat

SEQ ID NO: 234787 - DNA, 732 bp, Unknown
  Bacterial polypeptide expressing nucleotide sequence isolated from the Sargasso Sea
gacctaggtttaagagcatgtgaatctctttttcaaagtaaccctaaaattaaaaatcttatagatggtttaattttttgtacacagagtagtgattatataatgccaccaaattcaacaatactgcatggagctttaggtttatctgaacaagtatttgcatatgattttaatttagcatgctctggttttgtttacggcttatcaatggctcatgggttgatttgtggtggaattgcaaaagaaatccttttaattaatgctgatacttactcaaaatacattcatgaaaaagatagatctacaaaagttctttttggtgatgcggcaagtgttagctatttgaaaaagtctacaagcaatgaagggataatgagatacttatcttcgacttctggaaaaaaccataaaaaatttattatacctgctggtggaaatagaaatccaaaatctgaaaaaaccagtaagattatagctaataacagtggagttcaacgtactgctgaacatatccatatggatggcatgggtatttttgcatttgtaaataccaaagttccaaaacagattaaagatattttgtcccaacagaatttaaagattgatgaaatagatttatttgttttccatcaagcaagtaaactcgctattgagtcgctaacaaaaattttaaaaattgaaaaaagtaaagtatatacaaacatagataaagtaggaaatactgtgtcggct

SEQ ID NO: 234788 - DNA, 610 bp, Unknown
  Bacterial polypeptide expressing nucleotide sequence isolated from the Sargasso Sea
gctgcccctcaactccggtggcgtgctgctcaggggctgcggcagcgccacaccatctcgatcgatcagcaacaccgagctgggtcaacgagtggagaccagcgacacctggattcgctctcgcacgggcatcagcgcccgccgaattgtcggcacagacgaatcgctgaccgatctcaacgtcgctgccgctgaagcagctctagcgatggccggttggtccgccgacagcctggacctgatcctgctggcgacctccacaccggaagacctgttcggatccgcgccgcaactgcagagccgtctgggcgcctcgcacgctgcagccttcgatctgaccgcggcatgcagcgggttcctgtttgctctcatcacagcggcccagtacctccgcactggagcgatgcgccgcattctcgtggtcggtgccgatcagctcagccgctgggtcgattgggatgaccgacgctcttgcgttctgttcggtgatgccgccggtgctgtcgttctggaggcgggcccggccgagcacgatgacctgggcggatttctgctccgctctgatggcagccgcggcgaggtgttgcaattgccccaagtgcaggagcat

SEQ ID NO: 234789 - DNA, 348 bp, Unknown
  Bacterial polypeptide expressing nucleotide sequence isolated from the Sargasso Sea
attacattaattcccatggaactagcacacctataggtgatataaaagaattggaagcaattaaaaatgtttttggagatagcattccaaatattagttcaacaaagtctttaaccggtcactctttgggagccactggtgtgcatgaagcaatatattgcctacttatgttaaataataatttcctatgcggatccgcaaacataagtaatttagatgtaagtgctcacaatcataatattcttttagaaactaaaaataatactaaaattgaaaatatactatcaaatagttttggttttggtggaacaaatgcaactttgctaatgtctaaatataatgattaaa

SEQ ID NO: 234790 - DNA, 292 bp, Unknown
  Bacterial polypeptide expressing nucleotide sequence isolated from the Sargasso Sea
tgcaattaaatctatttttagagacagatcatacctcattcctgtaagctctactaagtcgatgacaggtcatctcctaggaggctcaggaggtatagaagctgtagcttgtatactttctttgacacaaaattttatccctcctacaattaactacgttaatcaagatcctgaatgtgatcttgactatgtaccaaataatgcaagagaatctcaagtaggagttgctctttctaattctttcggctttggtggtcacaatgtttgccttgctttcagcaaaatgaattga

SEQ ID NO: 234791 - DNA, 636 bp, Unknown
  Bacterial polypeptide expressing nucleotide sequence isolated from the Sargasso Sea
caatgactgcgatgttcgatgcgatgacagccttatcttcaaaatataatgatacccctgagaaggcgtcaaggccttatgataaaactcgagatggttttgttatctcaggcggtggtggtgttttagttttagaagaatatgaacatgctacatcaagaggtgcaaaaatttatgcagaattaacaggctacggcgccacgtcagatggttatgatatggttgctccatcaggagaaggagcggtccgatgtatgaaaatggcgctgagcaccgcaaaaaataaaattgattacataaatactcatggaacatcaacgcctgttggagacattactgaattaaaagcagttggggaagtatttagggacaacaaaccaaaaattagctcaactaaatctcttgcgggtcattctcttggagctacatcagttcatgaagctatctacagtttaataatgatgaaaaataattttatagctgcttctgctaatattaaagatatggacgaagaagcgaaaaaatatccaatcgtcactaaagttgaaaaggaagtaaatttaaattctgtaatgtcaaatagttttggttttggaggaactaatgctactttggtttttgaaaaggtgaaataat

SEQ ID NO: 234792 - DNA, 845 bp, Unknown
  Bacterial polypeptide expressing nucleotide sequence isolated from the Sargasso Sea
tatgggcgagtcagccggatattcatatttagcagcattagatgcattagaaatggcaaatttagaagaaaaagatttagattctccaaggataggtatcgtggctggatcaggtggagcctctacaaggataatggttcaaaatggtgatataactcgcgaaaaaggtcctaaaagaattggtccgtatggagtgacaaagagtatgtctagctctatatcagcaattctagcaacggctcttaaattaaaaggcataaattattctatttcttctgcatgtgcgactagcgcacattgtattggtcatgctgctgaattaattaaaagcgggcaacaagatatagtaatagctggaggtagtgatgatgaacactggacctcttctgctttgtttgatgctatgggagctttatcttcaaactttaactcatctccatcagaagcttctagaccatatgattctgatagagatggttttgttatatctggaggttctggaattgttattttagaagatgaagaacatgcaaaaaaaagaaatgcaaatattttggccaaactttcaggttattttgctaactctgatggatacgatatggtcgcaccttcaggtgaaggggctataagatgtatgcaaggagctatagaaaactctaaatgtaaaattgattatataaacactcatggtacaagcactcctgttggtgatatagctgaattaaatgcaattaaggaagtatttggtgatgattcacctttaattagttctactaaatctatgacaggtcactctttaggggcaactggtgcacatgaagtaatatattcaaccatgatgataa

SEQ ID NO: 234793 - DNA, 807 bp, Unknown
  Bacterial polypeptide expressing nucleotide sequence isolated from the Sargasso Sea
aaaaaatataattttagaagtcaagttataggaaatgtaaaaaatttaaattttaaagatcatattgatagaaaacaattaagatttatgggagacggttctgcttataactatatcgctttaaaagaagctatagaagagtctggtttgcaagaaaaggatgtaagtaacgaaaaaacaggaattgtaatgggatccggcgggccttcaataaaaaatgtttactttgctgtcgataccataagaaaatcttcaccaaaaaaaatggggccttatatagttcccagaacaatggcaagtacatgttccgcaactcttgctgttccttttaaaataagaggaataaattattcaattagctcggcttgtgcaacaagtggacattgtattggaaatggaatggaactaattcaatttggaaaacaagatattatgtttgtcggaggtggagaagagttggattgggctctttcaggtatgtttgatgctatgccagcattatcttcaaaatataataacaatccagaaaaggcatcaagaccttatgatgctaatagagatggttttgttattgcgggaggtgcaggagctctagttttagaagagtatgaacatgctaaagccagaggtgcaaaaatatatgccgaattaactggatatggagctacttcagatggatatgatatggtcgctccttctggagaaggtgcaataagatgtatgaaaatggcattaaaaacaaaaagaaatgaaattgattatattaatacacatggcacatcaacacctgtgggtgatattactgaa

SEQ ID NO: 234794 - DNA, 721 bp, Unknown
  Bacterial polypeptide expressing nucleotide sequence isolated from the Sargasso Sea
acttgaacgttctaatacagatccaaatgaagtagatgtaattattatagcaactgttactcctgatatgccaactccagcaacagcctctttagttcagaatagaattggtgcaaataatgcttgggggtttgatttatctggcgcttgtacaggatttatatatgcattagatactggatctagattaatagaatcaggaaaatataaaaaagtaatagttattggctccgatactatgagctcaatattagattatacggaccgcaatacctgcgtgttatttggagatggtggaggaggcgtaatgctcgagcgtgcaaaagatagtgatagtggtgttattgattctattcttcgtactgatggatcaggaagcgactatttaaaaattcctggaggaggaagtctccaccctgcttcatatgaaactgtagataaacacttacattatattagacaagatgggcaagttgttttcaagtatgcgataaaaggtatggctgatattagtgaagaaatacttaaaaaaaataatatagacagcaattctatcagcctatatgtccctcaccaggcaaataaacgtatcattgatggcgctgctcaacggtgcggtttcaaagatgatcaagtttatataaatattaataaatatggtaataccactgcaggtacaattccaatttgtttagatgaagcaaaagagcttggcaggatt

SEQ ID NO: 234795 - DNA, 1006 bp, Unknown
  Bacterial polypeptide expressing nucleotide sequence isolated from the Sargasso Sea
gcagaggaatacaaagagcataatttgaaaagtcatgttcacggtagaccaaatattaaactgaaagatcacattgatagaaaaactataagatttatgggttcaggttcagcttataactatattgcgatgaaagaggcaataaaagattccggcctagaagaaaatgaagtaagtaattttaaaacaggaattgtaatgggttctggagggccttcaatagaaaatgtaattctagcggcagataaaactagagcaaagactccaaaactgatggggccttttattgttccaagaacaatggctagtactgcctccgcaacacttgctgttccttttaaaatcaaaggaacaaactacacaatgagttctgcttgtgcaacaagtgggcactgtattggaaactctatggaattgattcaaatgggaaaacaagatgttgttttcgctggtggaagtgaagaaattcattgggcaatgaccgcaatgtttgatgcaatgactgcactatcctcaaaatataatgattcacctgagtcagcttctagagcttatgataaaacaagagatggatttgtgattgctggtggcgctggggtattggtgctagaagaatacgaacatgccaaagcaagaggggctaaaatatacgcagaattaacaggttatggggcaacctcagatggatatgatatggtagctccgtcaggtgagggtgcggtgagatgtatgaaaatggcaatgggagctgttaaaaataaaattgattatatcaatactcacggaacatctactccagttggagatataactgaacttaatgctattagagaaacttttggagaggaaattccaaaaataagttcaacaaaatctttgtcaggacatccattgggagctgcatctgtacatgaagcaatttattgtttaataatgatgaaaaataatttcattgctggctcagcaaatattactgagatggatgatgatgctaaaaaattccaat

SEQ ID NO: 234796 - DNA, 487 bp, Unknown
  Bacterial polypeptide expressing nucleotide sequence isolated from the Sargasso Sea
catgcaaaagctaggggtgcgaaaatctatgcagaaattacgggatatggagccacttcagacggatttgatatggttgctccttctggtgagggtgccgtaagatgtatgaacatggctttaaaaacaagtaaaaataaaattgattatattaacacacatggaacctctactcctgtgggagatataacagaactaaaggctgttggtgaagtttttaagaattcaataccaaagataagttctactaaatcacttgccggtcattctctgggagctacatctgttcatgaagctatttatagtttaattatgatgaaaaataatttcatatctgcttctatcaatattaatgaaatagatgaggaagccaaaaaatatccgatagtgactaatgttgaaaaagatgtaactttaaattcaataatgtctaacagttttggatttggtggtactaacgctactttagtttttgaaaaaatttaac

SEQ ID NO: 234797 - DNA, 565 bp, Unknown
  Bacterial polypeptide expressing nucleotide sequence isolated from the Sargasso Sea
gtcagaccttatgataaaactagagatggatttgttatttcaggtggtggaggagttttagttcttgaagagtatgatcatgctaaggcaagaggtgctaaaatttatgcagagataactggctatggtgctacctcggatggtcatgatatggtcgctccatcaggcgaaggagcagtaaggtgtatgcaaatggctttgaatactgcaaaaaataaaattgattatattaatactcacggaacatcaacgcctgttggagacataaccgagttaaaagcagttggagaagtgtttaaagattataaaccaagaattagctctactaaatcactagctggtcattcacttggagctacttcagttcatgaggctgtttacagtttaattatgatgaaaaataattttatagcagcatctgccaatattacagatatggatgatgaggcaaaaaaatatcctattgtcactaaggttgagaatgatgctaaagtaaattctgttatgtctaatagcttcggatttggtggaacaaacgcaacattggtattcgagaaagtataaa

SEQ ID NO: 234798 - DNA, 467 bp, Unknown
  Bacterial polypeptide expressing nucleotide sequence isolated from the Sargasso Sea
ttatcaactcacctacattctgagggtaaaatatgctgaggaacttgctcttattaaaccagctactacattttggattgataaaataattgatgatgagaatgaggatggaacaggctattctccagtaatgaatgggaattttgtattcaaaaatgctgtaattcgatttgaagaggtaatatacgaggcactaaaacattcaagtttaaaacctgatgatatatcccttcttattccacaccaagctaatcttagaattagtcagtatatacaaaagcgtcttaaattatcaaattcccaggtttataataatattatgaagtatggaaatacaaccgcagcttcgatacccattgctctaaaagaggcattagatgaaaataaattaaacaaaggagatatattatgtttagctgcttttgggagtggttttacatgggcttctgcactaattaaatggtaaa

SEQ ID NO: 234799 - DNA, 867 bp, Unknown
  Bacterial polypeptide expressing nucleotide sequence isolated from the Sargasso Sea
cgcgtcgttatcactggtctgggcatcgtgtcgtgcctgggcaatgacaaagctaccgtcaccgaaaacctgcgcaacagccgtccgggtatccgttacaacccggaatacaaggaaatggggctgcgtagccaggtttccgggtccatcgacctcaacctcgaagaactgatcgaccgcaaagtctaccgcttcgtcggccacgctgctgcctacgcctacctggccatgcaggacgcgatcaaggacgccggcctgaccgaagagcaggtttccagcccgcgtaccggcctggtagccggctctggcggcgcctcgaccctgaaccagatggaagcgctggacaccctgcgcgagaaaggcgtcaagcgcgtcggcccataccgcgttacccgcaccatgggcagcaccgtttcggcgtgcctggccaccccgttcaagatcaagggcatcaactactcgatctcgtcggcctgcgccacttcggctcactgcatcggtaccgcgctggagcagatccagtggggcaagcaagacatcgtcttcgccggtggcggtgaagaagagcactggagccagtcgttcctgttcgatgccatgggcgctctgtcgaccaagcgcaacgaaaccccggaactggcctcgcgtgcctacgacgccgaccgtgatggcttcgtcatcgctggcggtggcggcatggtggtggtcgaggagctggaacacgccctggcccgtggcgccaagatctacgccgaaatcgttggctacggcgccacgtccgacggctatgacatggttgccccgagcggcgaaggtgccatccgctgcatgcagcaggcactgtccaccgtcgacaccccgatcgac

SEQ ID NO: 234800 - DNA, 249 bp, Unknown
  Bacterial polypeptide expressing nucleotide sequence isolated from the Sargasso Sea
agcaaatcgatatgttaatacctcatcaggcaaatcttagaatttctcaatttgttcagaagaaatttggtctatctgatgatcaagtgtataataatattcaaaaatatggaaatactacagctggatctatccctatagctttaacagaagcttggcaagaaggaaaaatcaaatcaggagacttgattgtgttagctgcatttggtagtggatttacttggggaagtacaataattaggtggtaaa

SEQ ID NO: 234801 - DNA, 761 bp, Unknown
  Bacterial polypeptide expressing nucleotide sequence isolated from the Sargasso Sea
catggtggacggtctccatcgcgtcgtcgtcacgggcctcggcgcggtcacaccgatcggcaacacggttcaggactactggaacggcctgacttccggacggaacggggtcgatgccatcaccctgttcgatgcgtcctcccacgcctgtcgcttcgcagcggaagtgaaggacttcgacccggctggcctgatcgaaccgaaagaagccaagcgctgggatcgcttttgcaaatttggcgtggttgccgccaaacaggccatcacccatgcagggctcaccatctccgaagccaatgccgaccgcattggcacgatcattggctccggcgtcggcggtctcctcaccatggagacccaggcgcatgtgctggagggcaaagggccgggacgcgtcagtccgttcacggtgccgatgatgattcccaacatggcaactggattggcggcaattgccctcggcacgaaggggcctagctccgcggtggccaccgcctgtgctgccgggtccaacgccatcggtgatgccttccggctgctgcagctcggcaaggccgacgcgatggtgtgcggtggcgcggaatcggcgattactccccttggtgttgccggctttgccagtgccaaagccctgtccttccgcaatgacgatccagccacagccagtcgcccattcgacaaggaccgcgacggtttcgtgatcggcgaaggcgccggcgttttggtgctcgaaaccctggagcacgcgcaagccagaggcg

SEQ ID NO: 234802 - DNA, 747 bp, Unknown
  Bacterial polypeptide expressing nucleotide sequence isolated from the Sargasso Sea
ttagttaccccactaggtgccaacgctgaggcttcatggagtaatctattacgaggcgaatcgggtataaagccggtgcaaaactttgacgtcactgatcttccagcaaaaatagccggtactataagccagagtgaagacgaccaaaattcattccgacccgacgattggctggaaccaaaggaacaacgaaaaatagataggtttatccttctaggcctcgttgctgctacccaagcagttaacgactcaggatgggcgccgaagactgaggaggagcaagctaagaccggtgttattattgggtctggaattggcggccttcagcagatctacgataatagcatcaaattaaaggaggccggtccacggcgaatttcacctttttttattccagctgctctcattaacttagtatctggacacgtctcaataaaatttggttttaaaggacccaatcattctgtggttacagcgtgttcgacaggcgcacatgctattggcgatgccggccggttggtaatgttgggtgatgctgacgttatggttgcagggggcgccgaggcggccgtaaatcggcttggttttgccggttttgctgcagcgagagccttgtctaccaattttaacgatacaccaacggaggcgtctaggccttgggacaaagatagagacggttttgttatgggagaaggtgccggcattgtggttgttgaggaattggagcacgcaaagagaagaggagct

SEQ ID NO: 234803 - DNA, 497 bp, Unknown
  Bacterial polypeptide expressing nucleotide sequence isolated from the Sargasso Sea
tttggtcgcgcagccgttcaggtccgctggtgtgctgctgaggggctgtggcagcgccaccccgtcccgttcgatcagtaacgctgaccttggccaacgggtcgaaacaagcgacagctggatccgcagccgtaccggaatcgccgcgcgacgggtgctcgggccgtcggaatccctgattgatctgtgcgctgcgtctgcatccagcgccctaaccatggcgggctgggagcccgacagcctcgacctgatcctgctcgccacctcaacaccggaagacctgttcggatctgccccacgactccagagtcgactcggtgcacatcgcgctgttgccttcgacctcaccgcagcctgcagcggcttcctgttcgccgtgatcaccgccgctcagtacctgcgcagcggggccatgcagcggatcctggtggtcggtgccgaccagctgagccgttgggtggactgggatgaccgacgctcctgcgttctcttcggag

SEQ ID NO: 234804 - DNA, 386 bp, Unknown
  Bacterial polypeptide expressing nucleotide sequence isolated from the Sargasso Sea
catgcgtgacgcgggcatcaatgccgaccaggtgcagtacatcaacgcccacggcacctcgacgcctgcgggcgatatcgccgaagccgcggcagtgaagagcgtgttcggtgatcatgcctacaagctgtcggtcagttcgaccaaatccatgaccggccacctgctcggtgcggcaggtgcggtcgaggcgatcttcagcgtgctggcgatccgtgatcaggtcgcgccgccgaccatcaacctggacgagccggacgaaggctgcgacctggacttcgtgccgcatcaggccaaggccatgccgatcgaaatcgccctgtcgaactccttcggcttcggcggcaccaacggttcgctgctgttccgtcggtaccacggctgat

SEQ ID NO: 234805 - DNA, 787 bp, Unknown
  Bacterial polypeptide expressing nucleotide sequence isolated from the Sargasso Sea
ggttgttgtaacaggtataggtatagtttcaagcataggaaacaatgtagctgaagtagctaactcactgcacagcttaaaatctggtatatcgcataatgatattaatgcggaacttggacttaggagtcatgtatcaggttctattaagaatttagactgtaaagaattaatagatagaaaactatacagatttatgggcgatgcagctgcttattcgtacataagtacacaagaggctattaatgatgccaatctaaaagagacagaattatcaaactacaagactggtcttataatgggttcaggtggcgcttcttcagaggatcaaatagattcagcagatatccttagatcaaaaggtttgaaaagaataggtccttatagagttacgaaggcaatgggcagtactgtttctgcatgtctagcaacatcttttggtattaaagggataaattattcaatctcttctgcttgtgctacaagtgctcattgtattggttctggaatggaacaaattcaactaggtaagcaagatattgtaattgctggtggtggtgaggctgaacattggggcatgactagtctttttgatgcaatgggcgccttatcaacaaaatataatgaaaatcctgagaaagcttcgagagcttatgacaaggatagagatggttttgttatagctggtggtgcaggtactgttatcttagaagagaagcaacatgcattagataggggtgctcatatttatgcgcaactaacaggctatgctgctacttcagacggt

SEQ ID NO: 234806 - DNA, 482 bp, Unknown
  Bacterial polypeptide expressing nucleotide sequence isolated from the Sargasso Sea
aaaagcaagaggtgcaaaaatatatgctgaattaactggttatggtgctacttctgatggttacgacatggttgcaccttcaggtgaaggtgcggtaaggtgtatgaaaatggcattaagtacagcaaaaaacaaagttgattatataaatactcacggaacttcaaccccagtaggagacattactgagctaaaagcagttggagaagtatttaaggactctgttcctaaaataagctctacaaaatcacttgctggtcattcattaggagcaacttcagtgcatgaagcagtttatagtttgattatgatgaaaaataattttatttctgcctcaatcaatattaatgatatggatgatgaagcaaaaaaatttccaatagttacaaaagttgaaaaagatgtaactttaaattctattatgtctaacagctttggatttggtggaactaatgcaactttagtttttgaaaaggtttaat

SEQ ID NO: 234807 - DNA, 877 bp, Unknown
  Bacterial polypeptide expressing nucleotide sequence isolated from the Sargasso Sea
ataaatcaaattccaagatttaatcctttttttataccaaaactattccctgatatttgtcctggacttatttcaataaaatataatctcaatggtccaaattttgcaactgtatcagcttgtgcttcaagttcaaacgcaataatagatgcttataattatataaagcttggatatggtgatatatttatttcaggaggttcagaggctccaattaataaagcagccttgggaggatttaatgcacttaaagctttatctgaaagaaacgattctccaaaaactgcttcaagaccttttgataaggatagagatggttttgttcttggagaaggctcaggtgcattaattattgaagaattagaacatgccttaaatagaaacgcgaaaatctattcagaaataattggagtaggaatgtcatcagatgcatatcatattacagcaccacaccctgaaggcaaaggagcagaattagtgatgaaaaacgttttgaaaaatgctaaaatatctccaaaagatattgattacataaatgttcatggaacatcaactccattgggtgatatagctgaaattactgctattgaaaatgtttttaaagaaaatacaaaaaatataaatattagctctacaaagtcaatgactggacatcttttaggagcagctggtgcaatcgaaacaattgcatcaattttggcaattaactataaaaaagttcctcctacaataaatcattttaataatgatgataaaataaataaaaaattaaactttacatttaataaaactcaacaaagagaagtaaaaattgcaattaataatacatttggttttggaggtcacaatacctcaattgcatttaaaaaatattagt

SEQ ID NO: 234808 - DNA, 700 bp, Unknown
  Bacterial polypeptide expressing nucleotide sequence isolated from the Sargasso Sea
aatgaatagagtagtagtaacaggtctgggtatagtttcttgcattggaaataatcaaaaagaagtagtagacaatttaaaaaacctaaagtctggtatttctagtgctaaagaatatgaggaattttcttttaagagccttgttcacggtaaaccaaatattaatattaaagaatctattgatagaagactacttcgttttatgggtgatggtgctgcatataactatattgccatgaaagatgctatcgaggattcaggtttagaagaaactgatatctcaaatgagatgactggaataattgtaggatcaggaggtccatctactcaaaatttatttaaatcctcagaaataggaaaaagtttaggctcaaaaaaagtcggaccatttatggtgccgagatcaatgtctagcactaactcagcaacacttgctacaccatttaaaatcaaaggagttaattattcaattacctctgcatgctctactagttctcattgtataggtaatgcttacgaacttattcaaatgggaaaacaaaatattgtttttgctggaggaggcgaagaattacattggactttatctatattatttgatgccatgggcgctttatcatctaaatacaatagtacaccagagttatcatcaagagcttacgactcaaatagagatggattttgtattgcaggcggagga

SEQ ID NO: 234809 - DNA, 345 bp, Unknown
  Bacterial polypeptide expressing nucleotide sequence isolated from the Sargasso Sea
attttcaaatggatgggcgagcagtttgggactttgcagtcgaggcatttcctgaagcggttaattctgtattggaaaaagtaaaaatggatatagaggatgtagatataattattcctcatcaagcaaatcttaggattattgaggcgggaatgaataaattaggcttgaatatggataaagcatatactaacatagaaaggtatggaaatacagctggggctagtattccaatagcactaaaggaagcagtagatactaaaagagtgaaaactggaaatttagtaattactgttggttttggtggaggtctttcatggggtgcaaacgcaattatttggtaga

SEQ ID NO: 234810 - DNA, 347 bp, Unknown
  Bacterial polypeptide expressing nucleotide sequence isolated from the Sargasso Sea
ttacataaatgcccatggaacatcaactcctgccggtgacatagccgagacattggcaattaaatcagtgtttaaaaactctgctcaagatctgatagttagttcaactaaatctatgactggtcatcttttaggtgcagctggagctattgaagctatattttctatattggcaattagagataatatttgccccccaactataaatttagagaacccagatgagggatgtgacttaaattattctgccaatcaagcaactcacaaagacatcaactattctttatctaattcatttggttttggtggaacaaatgcatctttgatctttactgatgtagaataag

SEQ ID NO: 234811 - DNA, 994 bp, Unknown
  Bacterial polypeptide expressing nucleotide sequence isolated from the Sargasso Sea
gttcatcaatcattagtcaattcaaattcaggtatttcttatgctgaagaatataaagagcataatcttaaaagtcatgttcatggtaagccaaatataaaactggaagatcatattgatagaaaaacaattagatttatgggttcaggttcagcttataattatattgcaatgaaagaagctattgaggactctggattagaagaatctgaagtaagcaattttaaaactggaatagttatgggttcaggcggaccttcaatcgaaaatgtgattttagcagcagataaaactcgagctaaaactccaaaattaatggggccattcattgttccaagaacaatggcaagtacagcgtctgctactcttgctgttccatttaaaattaaaggaaccaactacacaatgagttctgcttgtgcaacaagtggacactgtattggtaattcaatggaattaattcaaatgggcaaacaagatgttgtttttgcaggtggaagtgaagaagttcactgggcaatgactgcaatgtttgatgcaatgactgccttatcatcaaaatataatgatgctcctgaaacagcatcaagagcatatgacaaaacaagagatggttttgtaattgcaggtggtgcaggtgtactagtgcttgaagaatacgaacatgctaaagctagaggtgctaaaatatacgcagaattaactggttatggagcaacttcagatggatacgatatggtagctccatctggtgaaggagctgtaagatgtatgcaaatggcaatgtctacagctaaaaataaaattgattatatcaatactcatggaacttctactccagttggagatatcaccgagctaaatgcagttaaaaatactttcggagacaatatcccaaagattagttcgacaaaatctttatcgggacatccacttggtgcggcttcagttcatgaagcaatttactgtttgataatgatgaagaataattcat

SEQ ID NO: 234812 - DNA, 766 bp, Unknown
  Bacterial polypeptide expressing nucleotide sequence isolated from the Sargasso Sea
aagtatcaaacttggctttaaaggaattaactatactgtcgcgagtgcttgcgcttctagtgcccatgctattcaagtggccatgcaagagattcagcttggcaggcaagatgcgatgattacaggtggaactgaaagtgtgctttcgaatttaacgatttgtgggtttgctaacatgagagctctttctcgccgtaatgatgagccaagtaaggcatcacgaccttttgataaagatagagatggctttgtaatgggagaaggcgcaggaatcattattcttgaagattatgaaaaagcgcaagctcgcggcgcaaatatcattgctgaggttgttagttgcggagctagctcagatgcgaatcatatgacagcacctcaccctgaaggtgaaggtgcaattgcagctatgaaccaagcacttgaacttgcaggtctaaaggcccaagacattgactacgtaaatgctcatggaacttctactccacttggtgatggaattgaaacagctgccattaaaaaagtttttggtgagcatgcaagcaatcttgttgttagctctactaagtcaatgataggtcatctacttggatcagcaggaggtatggaaacaatattctgtgccaaagcaattgagaaggggattattcctcctacgatgaaccttgataacccaagcgaagactgtgaccttaattacagtcctaaccaggcaaccaaaaaagaaattaaatatgcgctaaataattctttcggattcggggga

SEQ ID NO: 234813 - DNA, 796 bp, Unknown
  Bacterial polypeptide expressing nucleotide sequence isolated from the Sargasso Sea
atgaaaagagtagtagtaactggaataggaattgtttcttgtattggtaacgaccaaaaaacagttattaaaaatttaaaagaattaaattcaggtatatctaaagctccagaatatgaagagtattcttttagaagtttagttcatggaaaaccaaatatcaaattggaagacgaaattgatagacgcacattaagatttatgggtgatggcgctgcatataattatatatctatgaaagatgctataaaagattctgggttaagtgaaagtcaagtttctaatgaaatgacaggtatcattgtaggttccggaggaccttctacatttaatctaatgaagtcctttgatttagctaaagctggtggttcaaaaaaagtaggaccatttatggtcccaagatcaatgtcgagcactaattctgcaacacttgcaactccttttaaaataaaaggagtgaattactctattacctctgcttgttctactagttctcattgtattggcaatgcatatgaacttattcaaatgggaaaacaaaatataatttttgcaggtggcggtgaagaattacattggacaatgtctattctttttgatgctatgggtgctttatcctctaaatataatgacaatccaaaaaaatcatcaagggcatatgatgcaaatagagatggttttgtaatttctggaggaggaggaacgattgttcttgaagaattagaacatgcaaaatctaggggagcaaaaatttatgctgaaataactggttatggtgcaacttctgatggccacg

SEQ ID NO: 234814 - DNA, 784 bp, Unknown
  Bacterial polypeptide expressing nucleotide sequence isolated from the Sargasso Sea
actgtatctgcttgcgcttcatctgctcatgctataggagagtcgtttcgattaatacagcatggtcaggcagatataatgatgactggaggtgccgaggcaacaataagcccaattgggattgagggttttactgcgtgtaaagcacttagcaccaagtataatgaaagcccgcaaaaagcatctaggccatttgatgaagcacgtgatggatttgttatgggtgagggatcagcagttcttatcttagaagaaatggaacatgcactacgtcgcaatgcgagtatattagctgagattagtggatatggtatgtcgtctgatgcctatcattatacgttgccagaaccctcaggggatggggcgtatagagcaatgaaaaacgcactggatgatgcaaaaatcacttcagataaattagattacattaatgctcatgggacttctactccatcaggtgacaaagttgaagcattagctattgagcgaatatttgagagctgtaaaagaaaaattaaagtttcttcaacaaaatctcaaataggacacttattaggtgcagccggtggcgttgaagcagtatattctattttatgtttaaataataaaaaattgcctcataccttgaatttagaaagtgcaatcgaaacaaaaaaaattgattttattgcagaaaaggcaatagattatgatacaaattatatcttatctaattcgtttggttttggaggaacaaatgtttctcttgttttagaaaagtttgatgaaagcaaattacagtaaa

SEQ ID NO: 234815 - DNA, 319 bp, Unknown
  Bacterial polypeptide expressing nucleotide sequence isolated from the Sargasso Sea
tcagctaatgataaaaatgaaacttctgcaattaaatctatttttagagacagatcttacctcattcctgtaagctctactaagtcgatgacaggtcatctcctaggaggctctggaggtatagaagctgtagcttgtatactttctttgacacataattttatccctcctacaattaactacgtcaatcgagatcctgaatgtgatcttgattatgtaccaaataatgcaagagaagctcaagtaggagttgctctttctaattctttcggctttggtggtcacaatgtttgccttgctttcagcaaaatgaattaaa

SEQ ID NO: 234816 - DNA, 826 bp, Unknown
  Bacterial polypeptide expressing nucleotide sequence isolated from the Sargasso Sea
ggggtcgaggaaagctggaagcgcttgctgaatgggcaatcgggggcggggacgatcacccgtttcgatccgcagaacgtggcgacgaaatatgcctgcgaagtgccgcttggcgatggcagcgacggaaccttcaacgccgatgatcacatggccccgaaagagcgccgcaaggtggatgattttatcctttacggccttgcagccgccgatcaggcggtggccgacgcgggctggaccccggaagacgaagaaagcctgatgcgcaccggcgtgatgctgggctcgggcatcggggggctgcaatccattgaacagacgacacttttgatccgtgacaagggtgtgcggcgggtatcgcccttcttcattcccggtgcgctgatcaacctgatcagcgggcaggtgagcattcgctatggtttcaaggggccgaaccacgcggtggtgaccgcctgttcgacgggggcgcatgcgatcggcgatgccgcgcgcctgatcaaatacgacgatgccgacgtgatggtggccggcggggccgaggcggcgatctgcgagatcgggatcgcggggttcaatgcctgcaaggccctgtcgaccaagcgcgccgatgatccgcaggcggccagccgcccttatgatgcggatcgggatggtttcgtgatgggcgagggcgccggggttgtcgtgctggaggaatacgaacacgccaaggcgcgcggcgcgaagatctatgccgaggtgctgggctatggcctgtcgggcgatgcttatcatatcaccgcgccgtcggaagatggcgacgggggcttccgcgcgatgcagg

SEQ ID NO: 234817 - DNA, 665 bp, Unknown
  Bacterial polypeptide expressing nucleotide sequence isolated from the Sargasso Sea
gtttgcaggtggatgtgaagaactacatcgggctatgactgctatgtttgatgctatgacagctttatcatcaaaatataatgatacccgtgaaaaagcttcaagagcatatgataaaactagagatggatttgttattgctggaggtggaggagttttagttcttgaagaatatgagtacgcaaaagcaagaggtgctaaaatttatgctgagataactggatatggagcaacatcagatggatatgatatggtagcgccctctggagaaggagcagttagatgcatgcagatagcattaaaaacatctaggaataaaatagattatattaacactcatggtacatctactcctgtaggagatattacagaattaaaagccataggtgaaacgtttaaagacaaaattccaaaaataagttctactaaatctttatcaggtcatcctttaggtgctgcatcggtacatgaagctatctatagtttaataatgatgaaaaataattttataactggatccgctaatatcaatgaaatggatgaagaagcaaaaagatttccaataattagtaaaaccgaaaaggaagtaactttaaatgcagtaatgtctaatagttttgggtttggtggaacaaatgcaacattaatttttgaaaaggtataaa

SEQ ID NO: 234818 - DNA, 362 bp, Unknown
  Bacterial polypeptide expressing nucleotide sequence isolated from the Sargasso Sea
gatgaatgccagaataactgttacatcccataatacaccagacaacgtaatgacaaatgttgatctggaaaaacttgtggatacttcagacgaatggatacaatcgcgtacagggattgtacaaagacatattgttagcgatgatgaggcaagttctgatatatcaactcggatagcaaaatcactcatcaaaaaaagagatatttcccctgatcagatagatttaataatcgtgggcactgtaacaccagaccactttactccttctacagcggctttagttcaaaagaatattggagcaacaaatgcttggggatttgatttgagtgcagcttgctcaggatttatttatggactggaaa

SEQ ID NO: 234819 - DNA, 823 bp, Unknown
  Bacterial polypeptide expressing nucleotide sequence isolated from the Sargasso Sea
atgaaccgagtggttataaccggattaggaatagtctcgtctatcggtaataatgcaaaagaggtactcagcagtttgcgggctggtaagtcaggcattacttctaatgcagatatgatcgagtatggttttagaagtcaggtggcaggtgatataaagttagaggtcacagattttgtagataaacgaactttacgatttatgggccctggcgctgcttatgcacacatagcaatggagcaggcgataaaagatgcgggcttagagcaaaacgaaatttctaactttagaactggcttgattgctggttcaggcggaccttcaacatcagcaatgttggccgcacatcaaatcgttttaaaatctggtgctccaaaacgcattggaccatttgctgtaccaaaatgtatgtcatcaacaatttccgcaaatctatcaaccgcttttaagataaagggattaaattattctataacatcagcctgttctacttctttgcactgcattggaaatgcaacagaacagattatgatgggtaagcaagatattatgtttgccggtggtggagaagaactagattggaccttgtcctgtctttttgacgccatgggagcgatgtcatcaaagtataatgaaacccctgaaaaagcatctagagcatttgatgttgacagagatggttttgttataggcggtggtggagctattttagtgttagaaaacctagagcatgcaaaagctcggggagccaaaatttatgctgaagtaatgggatttggagcaacttcagatgggcatgatatggtggcaccctctggtgaag

SEQ ID NO: 234820 - DNA, 691 bp, Unknown
  Bacterial polypeptide expressing nucleotide sequence isolated from the Sargasso Sea
atggtcgccggaggcgcggaagcagcaatttgccggatgggcatagccggctttgcggcagcgaaagcactctcgacgggatataatgatacgccggaggttgcctcccgtccgtgggatgtcggtcgcgatgggtttgtaatgggcgaaggtgctggtgttgttgttcttgaagagtttgaacacgcgaaggcccgcggtgccaagatttatgccgaagtcacaggttacgggctttcgggcgacgcttatcacattacggcgcccgcatccgacgggagtggtggctttcgggcgatgaaagcggctttaaagcgagcgagactaaatgtggatgctatcgattatattaacgcacatgggacatcgaccccgttgggcgatgaaattgagttgggagcggtgaagcgactgttcggcgaacatgcctataatctatccatgtcttcgacaaagtccgccattggtcatctattgggagcagccggagccgtagaagcagtcttttccattaaagctatagagacaggtgctgtgccaccgacgctaaatttggagaatccgtccgaaggatgcgatcttgacttggtggcaaaagaggcgaaagagcgcatcgttcgtaacgcaatgtcaaattcttttgggtttggtggaacgaatgctagtctggttttaagctctgtcgaataga

SEQ ID NO: 234821 - DNA, 535 bp, Unknown
  Bacterial polypeptide expressing nucleotide sequence isolated from the Sargasso Sea
gtttgtatagcaggtggaggtggtgtattagttttagaagaatatgaacatgcaaaagcaagaggtgcaaatatttatgctgaaataacagggtatggagctacttcagatgggagtgatatggttgctccttcaggtgagggtgctgtgagatgtatgaatatggctttaaaaacctctaaaaataaaattgattatattaatactcatggaacctcaactcctgttggagatattactgaactaaaagctgtttcagaagcctttaaagaaaagatcccaaaaattagctcaactaaatctctttctggtcatccgcttggtgccgcttctgttcatgaggccatttatagcttgataatgatgaaaaataattttatcgcagcttctgctaatgtaaatgatatggatgatgaggcaaaaaagtttccaatagtaactaaggttgaaaaaaatgttactttaaattctgtaatgtctaatagtttcggttttggtgggacgaacgctactttggtttttgaaaaggtttaat

SEQ ID NO: 234822 - DNA, 104 bp, Unknown
  Bacterial polypeptide expressing nucleotide sequence isolated from the Sargasso Sea
tgagaagaagttaaaaaaaggggataaattattgttagctgcatttggtgctggccttacatggggagcagcatatttaacatgggcatataacaaaaaataat

SEQ ID NO: 234823 - DNA, 829 bp, Unknown
  Bacterial polypeptide expressing nucleotide sequence isolated from the Sargasso Sea
gttgtagtcactgggttgggagcggttacaccgcttgctgatggtgtaaaggaaagctggaaacgtcttataaatggcgattctggtgtcgctcaaattacgtcttttgatgtttctgacttgccttgtaagattgctgcccaggttcctagaggtgatggaagtgggcaatttaatccaataaaatatatggctgcaaaagatgtccggaaaatggatgactttatagtctatgcactcggtgcggcttcaggagctatagaagacgctaattggtatccagaaacagatgaacagaaagaccgtacaggtgtaatgatcggctcgggaattggtggattgcgtgctattgagcagggagcgattcttgttaatgaaaagggcccgaggcgtttgagtccattttttataccttcaagtcttatcaacttggcatcgggacatgtatccattaagcatggttttcgtggcccaaatcatgcggtagtgacagcttgctctactggcgcacatgccataggtgatgcttcaagattaattatgtttgatgatgcggatgttatggttgcgggaggagcagaggcgggtgtttgtaggttaggagttaccggattttcagctgctcgggcacttagtactagctacaatgagaccccaaagaaagcttcaagaccttgggataaaaatagagatggatttgtaatgggagatggatccggtgtcgttgtattagaagaattagagcatgcaaaaaaacgtggagccaagatttacgcagagattactggttatggtatgagtggtgatgctcatcatgttactgctccag

SEQ ID NO: 234824 - DNA, 112 bp, Unknown
  Bacterial polypeptide expressing nucleotide sequence isolated from the Sargasso Sea
gctagcgttaaatgaagctgtttataataataatattagcaaaggggatattgttttattagcagcaatgggcggaggttttacatggggttcaagcttaattagatggtag

SEQ ID NO: 234825 - DNA, 526 bp, Unknown
  Bacterial polypeptide expressing nucleotide sequence isolated from the Sargasso Sea
ggtggagctggagttttagttttagaagaaatggaacacgcaaagtcaagaggggcaaaaatatatgccgaattaacaggctacggagctacttctgacggtttcgatatggttgcaccatctggagaaggtgccgctagatgtatgaatatagcattgaaaacaacacgaaataaagttgactatattaatgctcatggaacttccactcctgttggcgacataacagaattaaaagcaattaaagaagcttttggagataaaataccaaaaattagttcaacaaaatccctttctggtcacccactaggtgcagcttctgtgcatgaggctatttattctttaattatgatgaaaaataattttattgctgcttctgcaaatgtaaaagagattgatgatgaagctaaaaaatttccaatagtaactaaaatagaaaaaggcataacattaaattctgtaatgtctaatagctttggttttggtggaactaatgctaccttaatttttgaaaaggtttcataat

SEQ ID NO: 234826 - DNA, 256 bp, Unknown
  Bacterial polypeptide expressing nucleotide sequence isolated from the Sargasso Sea
tttaattgtcagttcaactaagtctatgacaggtcatctcttaggtgctgcaggagctatagaagctatattttctgtgctcagcctccgagatgatatttgcccaccaacaatcaacctagaaaaccctgatgaaggttgtgatttaaattattcggccaaaaaagctacccacaaaaaattaaaatactccctttcaaactcttttggttttggaggcactaatgctactctaatttttagaaaattagattaa

SEQ ID NO: 234827 - DNA, 883 bp, Unknown
  Bacterial polypeptide expressing nucleotide sequence isolated from the Sargasso Sea
atttaagtcttctgaaattggaaagagttcaggttcaaaaaaaattgggccatttatggtaccaagagcaatgtctagtacaaattctgcaactcttgcgactccttttaaaattaaaggagttaactattcaattacttcagcatgttctacaagttcacattgtattggtaatgcatacgaactcattcagatgggaaaacaaaacattgtttttgctggagggggtgaagagctccattggactttatcaattttatttgatgcaatgggcgctttgtcatcaaaatataattctactccaaacaaatcttcaagggcatatgatgcagatagagatggttttgtgattgctggtggaggtggaactttagtacttgaagaattagagcatgcaatagctaggggtgctaaaatatatggtgaaataacaggatatggagcaacctcagatggatacgatatggttcagccttctggagaaggagcagaaagatgcatgaagcaagcgttaaaaaatattgatggtaaaattgattatataaatacacatggaacaagtactccaattggagatgttaaagaattagaagcaatcaaaaatgtttttggtttaaatattccaaaaatgagctcaacaaaatctttaacaggacattctttaggggcgactggtgtgcatgaagcaatttatagtttattgatgatgaaaaataattttattagtggttctgctaatattgaaaagctcgatgatagtgccaaggattgtaatattcttttaaaaacggaaaatgatgttgaaattgagcatgttatgtcaaatagttttggttttggtggtacaaatgcgacattagtattttcaaaatatcatggctag

SEQ ID NO: 234828 - DNA, 832 bp, Unknown
  Bacterial polypeptide expressing nucleotide sequence isolated from the Sargasso Sea
aaaataaaattagaagatcatgttgatagaaaagtaatacgatttatgggagcaggatctgcttataactatgttgcaatgagtgaggctgtaaaagattctggtttagaagaaaaagaagtaagtaatgtttcaactggaatggttatgggttctggaggaccatcaattgaaaacgtaatccttgcagcagataaaacacgagaaaaaaatcctaaaaaaatgggaccttttgttgttccaagaacaatggcaagcacagcatcagcgactttggctgttccttttaaaattaaaggagttaactatacaattagctcagcgtgtgcaactagcggtcattgcattggaaatgctatggaattaattcaacttggaaaacaaaatataatttttgcaggaggaagtgatgaagttcattttgctttaactgcaatgtttgatgctatgactgctctatcatcaaaatataatgataaaccagaaacagcttctagaccttatgacaaaacaagagatggatttgtaatttcaggaggaggaggagttttagttatggaagagtatgagcatgctaaggctagaggtgctaaaatatacgcagaaataactggctatggagcaacatctgatggatatgacatggtagctccttcgggagaaggtgctgtaagatgtatgaatatggctttaagcacagcaaaaaataaaattgattacataaatacacatggaacttcaactccagtaggtgatattacagaactaaaagcagtaggtgaggctttcccagaatataaacctaaaattagttcaacaaaatctttatctg

SEQ ID NO: 234829 - DNA, 867 bp, Unknown
  Bacterial polypeptide expressing nucleotide sequence isolated from the Sargasso Sea
gctattgaggtcacagactcactcagagaaacaaagtctgggatatcttttgatcaatctcataaagatatgaattttcgcagtcatgtaagtggacaaattaagataaatcttcaagagttaattgatagaaaatttttaagattcatgggtgatggtgccagttataattatttagcaatgcttgaggcacttaaagattctggattagatgaaaatcttatttctaatcctatgacaggccttattatgggatcaggtggaccatcaactaaaaatttattgagagcttttgatattacaagagatactggtccaaaaaaaattggtcctacgagtgtaccaaaggtaatgtgtagtacaaactctgcaacattatctacattctttaaaattaagggaatgaactattctataagctcagcttgtgcaacaagcgctcattgcataggtcatggagcagagcttattcaaatgggaaaacaggatattgtctttgctggtggcggagaagaattagactggtcattgtctgccttgtttgatgctatgactgctctatcttcaaaatataatgatactcctgagactgcatcaagagcatttgactcttctagagatgggtttgtaattgctggtggtggtggtgtgctggttttagaagaacttgaacatgcaaaatcaaggggtgcaaaaatttatgctgaattagttggatatggagcaacttcagatggttacgatatggtacagccttcgggtgaaggtgctgcaagatgtatgaaaatggcaatcaaaaatttggatgaaaaagttgattatataaatgcccacggtacttcaactcctgtgggtgataacgcagag

SEQ ID NO: 234830 - DNA, 412 bp, Unknown
  Bacterial polypeptide expressing nucleotide sequence isolated from the Sargasso Sea
tatggttgcgccatctggcgagggagctttaagatgtatggagggagcaatcaaacaatctaacgtaaaaatagattatataaacacacatggcacaagcacgcctgttggagatgctgctgagttgaatgccatcaagcaactatttaattcagatgctcctatgattagctctacaaagtcaatgaccggtcattctctgggtgctacaggtgcccatgaagcaatatattcaatcataatgattaatgaaaactttatagcaccatcaattaatattgaatcattgtgtgaagaagcaaagggtcttgatgttgttactgagacaaaagaagcaacgatagagaatatactaagcaactcttttggttttggtggaactaatgcaagtctagttattagtaggtattaa

SEQ ID NO: 234831 - DNA, 82 bp, Unknown
  Bacterial polypeptide expressing nucleotide sequence isolated from the Sargasso Sea
caggattcaaagaggacaattgattcttatggaggcattcggtggcggctttacatggggctcagtattaatgaggtactaa

SEQ ID NO: 234832 - DNA, 895 bp, Unknown
  Bacterial polypeptide expressing nucleotide sequence isolated from the Sargasso Sea
gccatctaccaaaatttatttaagtcttctgaaattggaaagagttcggggttcaaaaaaaattggaccatttatggtaccaagagcaatgtctagcacaaattctgcaactcttgcgactccttttaaaattaaaggagttaactattcaattacttcagcatgttctacaagttcacattgtattggtaatgcgtatgagctcattcagatgggaaaacaaaatattgtttttgctggagggggtgaagagctccattggactttatcaattttatttgatgcaatgggagctttgtcatcaaaatataattctaccccgaataaatcttcaagggcatatgatgcagatagagatggttttgtaattgctggtggaggtggaactttagtacttgaagaattagagcatgcaaaagcaagaggtgctaaaatttatggtgaaataacaggatatggagcaacctcagatggatacgatatggtgcaaccttctggagaaggagcagaaagatgtatgaatcaagcattaaaaaatattgatggtaaaattgattatataaatacacatggaacaagtactccaataggagatgtaaaagaattggaagcaatcaaaaatgtttttggctcaaatattcctaaaatgagctcaacaaaatctttaactggccattctttaggggcaactggtgtgcatgaagcaatttatagtttattgatgatgaaaaataattttattagtggttctgctaatattgataagctcgatgataacgccaaagattgtaatattcttttaaaaacagaacatgatgttgatattgagcatgttatgtcgaatagttttggttttggtggtacaaatgcaacattagtattttcaaaatatcat

SEQ ID NO: 234833 - DNA, 721 bp, Unknown
  Bacterial polypeptide expressing nucleotide sequence isolated from the Sargasso Sea
atgaatggcagggagtacatatatgtgccaggcgaggagagaatctatcgcatcctgattcaccctgaatctttcgagctagatgcatattggcaaccaacctacagagaactaaccgatatacagggaatggcgtgggacacctgtatttctgatgattacttgtggctgatggacaacggcgatattgagaccgtaagagcaatttttaatcagcatccaaatggtcgcttcaccgaactggttccatcacttgattggcgagatcccgcgccctggagtggtcagcagcgcttgatcaggatgtctctcgacactggtgaaataaagtgcatcacgccatttccagcgtccggtggcgctattattgcgccgccagcatacattccttcaaaaaaattatgtgtttgttgggactctgtaaatggcggggtagctggagttcggagtaaagaggatagtttagaggttgtatggttgagacccgatgtccgccccacgatgcagccccttgtatacgaggatgagaactattttgttattaaccattttgatggcaggtcagatcatttattggtgatggatatagaatctggcgatatggtttgcgacgtagatacagggagccctctagcaaacggaatgttccttaccccggggctgaacaatgatgtgctctactgctcaaccgtcagttacgcaaggatttcctgggattgaa

SEQ ID NO: 234834 - DNA, 950 bp, Unknown
  Bacterial polypeptide expressing nucleotide sequence isolated from the Sargasso Sea
tatgtttaataggcgcgttgtagtaacgggaattggtattgtttcgccacttggtttaggccaaaaaaataattggaagaggcttatttcaggtgaaagtgggatagataccataaagtcttttgaagcctcggaacttacgtgtaaaattggaggtgaaattccttttggttcttttgaagaaggaaacctaaatctaaacgaatggtttgacatcaaagatcaaagaaaattagatagatttataatgttaggattaatagcttcggaagaagctataaaagattctaacattgatctttcaaatgaacaaattttagaaaaatcgggagtaattgttggttctggaattgggggattgaaaacaattgcagagacttcagttttattagagcaaaaaggtccaagaaggatctctcctttttttattccttcatctttaataaatttaatatctggtcagatatcaattaaatatggttttaaaggtccaaatcattctgtagtaactgcttgttctactggcagccatgctattggagatgcttcaagaataatctcagatggagatgcagatattatgattgccggaggggcagaggccgctatatgtaaattaggtgttgctgggtttgctgcagctagagccctttcaacctcatttaatgacagtcctgaaaaagcatctagaccttgggataaagatagagatgggtttgtgatgggtgagggtgctggtatacttattcttgaagaatatgaacatgcaaaaaaaagagacgcaaatatttatgcagaagttattgggtatggtatgtcaggtgacgctcatcatattacagctcctgagccaacaggattaggggctttaaaatcaatgcaaaatgctctaaaacgtgcttgtatagacccattagatttagattatattaatgcacatgggacatcaa

SEQ ID NO: 234835 - DNA, 532 bp, Unknown
  Bacterial polypeptide expressing nucleotide sequence isolated from the Sargasso Sea
atgaaaagagtagttgtaacaggacttggtgtagtttcgtgtttgggaaataatcaagatgaggtttatcaatcattagttaatacaaaatcaggaataacattttctgaggaatacaaagagcataatttaaaaagccatgttcatggtaaacctaatatcaaattagaagattatattgatagaaaagttattaggtttatgggtgctggatcagcatataattatgttgcaatgagtgaagcagttaaagattctggattagaggagaatgaagttagcaacatttcaactgggatggtcatgggatctggaggaccatctattgaaaatgtgatactagcatcagataagacaagagaaaaaaatccaaaaaaaatgggaccatttatagttccaagaacaatggcaagcaccgcttctgcgactcttgcagttccatttaaaataaaaggcactaattacacaataagttctgcatgcgcaacgagtggtcattgtattggaaatgctatggaacttattcaattag

SEQ ID NO: 234836 - DNA, 1213 bp, Unknown
  Bacterial polypeptide expressing nucleotide sequence isolated from the Sargasso Sea
aatgcgaagagtggtaattactggcttaggtataatttcttgccttgggaacaaccaagatgaagtaaaacaatcattgcttaattcaaaatctggaatttctttttctgaagaatataaagagcataatcttaaaagtcatgtacatggaaaaccaaaaataaaacttgaagatcacatagatagaaaaactattagatttatgggatctggctctgcatataattatattgctatgaaagaagcaattgaggactctggtttacaagaaaaagatataagcaattttaaaacaggaattgtaatgggttcaggtggtccttcaattgaaaacgttattttagcagcagacaaaacaagagctaaaaccccaaagttgatgggtccttttattgttccaagaacaatggctagtacagcatcagcaacacttgctgttccatttaaaattaaaggaacaaattatacaatgagctcggcttgtgcaactagtggtcactgtattggaaattccatggagcttattcaaatgggcaaacaagatattgtttttgctggaggaagtgaagaaatacattgggcgatgactgcaatgtttgatgctatgactgctttatcttcaaaatataatgatactcctgaaaaagcatctagagcttatgataaaactagagacggttttgttattgcaggtggagcaggggtactggtgcttgaagagtatgaacacgctaaagcaagaggcgcaaatatttatgcagaattgactggttatggtgcaacatcagatggatatgacatggtagctccatctggagaaggagctgtcaggtgtatgaaaatggcacttgcaacatcaaaaaatagaattgattatttaaatactcatggaacttcaacacctgtaggagatattactgaattaaatgctgtaagtgatacttttgaaacaaatattccaaaaataagttcaaccaaatctttatcaggtcatccattaggggcagcgtctgttcatgaagctatttactgtttaattatgatgaaaaataatttcattacagcttcagcaaatataaatgagatagatgaagatgctaaaaaatttccgatagttacaacaactgaaaaaaatgttgaattaaaagcagtaatgtctaatagttttggtttcggtggaactaacgcaactttaatttttgaaaaggtctaa

SEQ ID NO: 234837 - DNA, 715 bp, Unknown
  Bacterial polypeptide expressing nucleotide sequence isolated from the Sargasso Sea
tgtataggtaatgggatggagttaattcaatatggaaaacagaagattgtttttgctggcggaagtgatgaactacattatgctatgaccgcaatgtttgatgctatgacagcactttcttcaaaatacaacgaagatccagaaaaagcttctagaccctacgacaaaacaagagatggtttcgtaattgcaggaggagcaggagttttggttttagaagagatggaacacgcgaaagcaagaggagcaaaaatctatgctgaactaacaggctatggagctacttctgatggttttgatatggttgcaccatccggcgaaggggctgccagatgcatgaatttagctttaaaaaccactcgaaataaagttgactatattaacgctcacggaacttcaacacctgttggtgacataacggaattaaaagctattaaggaagcttttaaagacaaaattccaaaaattagttcaacaaaatccctttctggtcatccccttggtgcagcttcggtgcatgaggccatttattctctaattatgatgaaaaataattttattgctgcttctgcaaatgtaaatgagatggatgaggaagcaaaaaaatttccaatagtgactaaagttgaaaaaaacgtaacgttaaattctgtaatgtctaatagttttggttttggtggaacaaatgctactttggtttttgaaaaggtataat

SEQ ID NO: 234838 - DNA, 543 bp, Unknown
  Bacterial polypeptide expressing nucleotide sequence isolated from the Sargasso Sea
aaggagccgggatgctgattttggaggaatacgaatttgccaagaaaagaggagccaggatctattgtgaacttgtaggatacggagccagttccgatgccttccatatcacagcaccttccaccgagggtcctgcccatgcggtcaagattgccgtcaaggacgcgggggttgattcagaaaagatcgattacatcaatactcatggtacttcaaccccggcaggggatatcaatgaattgaaagcattgaaattagctttgggaaacgggattgccaactacacttccgtcagttcaaccaagtccatgaccggccatcttttaggtgcagcagcagccatagaagctgttttcagcgttaaagccctgcaccactcttacatcccgccaaccattaatatcaaagagctggatcaggaatgtgattttgatgtcacaccgaatgaaggccgttctcgggaaatagacgttgccatgtccaattccttcggttttggaggaaccaatgcgtctgtgattttccgtaaaatgcattcctgaa

SEQ ID NO: 234839 - DNA, 1029 bp, Unknown
  Bacterial polypeptide expressing nucleotide sequence isolated from the Sargasso Sea
catgagaagagtagtaattacaggtttaggaatagtctcttgtcttggaaataatcaagaggaagtctatcaatcattgttaaactcaaaatcgggaatttcatacgcagaggaatacaaagaacataaccttaaaagtcacgtgcatggtaaacctaatataaaactttcagattttgtagatagaaaaacaattagatttatgggatctggatctgcctataactatattgctatgaaagaagcaattaaggattcaggcctagaggagaaagaagttagtaacttcaaaactggaattataatgggctccggggggccctcgattgagaatgtaattcttgctgcagataaaactagagcaaaaactccaaaattaatgggtccatttattgtgccaagaactatgggaagtacagcatcagctacactagcggttccatttaagattaaaggcactaattatacgatgagttctgcttgtgccacaagcggacattgcattggaaattcaatggagctaattcaaatgggtaaacaagatattatttttgcaggcggtagtgaagaaatacattgggcaatgaccgcaatgtttgatgcgatgacagcattatcctcaaaatacaatgataaaccagaaactgcttcaagagcttacgataaaactagagatggttttgttattgcgggtggagctggtgtcttagttcttgaagaatatgaacatgctaaagctagaggtgcaaaaatttacgccgaactcacaggatatggagcaacttctgacggttacgacatggttgcgccttctggtgagggtgccgtgaggtgtatgaaaatggcgatcgaaacttctaagaataaaattgattatataaatactcatggaacatcgacacctgtaggtgatataacagaattaaatgctattcaaaaaacttttggagaagaaattcctaaaataagctcaacaaaatctttatccggccatccattaggagcagcatcagtgcatgaagctattta

SEQ ID NO: 234840 - DNA, 955 bp, Unknown
  Bacterial polypeptide expressing nucleotide sequence isolated from the Sargasso Sea
ccaggctggatgtctcatcgggagcgcgttgggaggtatgcagacttttgcgacggcgacggagaatttggtgacgattgggcacaggaagatgaacccgttttgcattccgttcgcgattaccaacatggggagcgcgctgacggctatggatattggcttcatgggacccaactactcgatcgcgtccgcgtgtgcgacgggtaacttttgcatcttaaatagtattatgcacattcaaaacggtgaggccgatttgatgctcgctggggcgagcgatgcgtgcgtcattcccgtcggtatggctggattctccgccgccaaggcgctgagtacacgtaacgacgatcccgcggctgcctccagaccgtgggatgcgaatcgtgacggttttgtcatgggtgaaggtgccggtgtgctcgttctcgagtccttggagagcgcgctcgagcgtggcgcgccgatcgtagcggaagttttgggtggattcgcgacgtgtgatgcgcatcacatgacagagccgcgacccgacggtgtgggtgtcaactttgccatcgacaaggcactcgaattgactgatgtgaaggctgaagatgtcaactatatcaacgcgcacgcaacgtccactccggctggcgatcttgccgaactccgcgtgttgcagaacaagttcaaggcgtcgggcgctagaatcaatagcacgaagagcatgataggccacttgctcggcgctgcttccgccgtcgaggcggtcgtgtgcatcaaggcgatcaccaccggagaggtccacccgaacatcaacttggaaactccggatgaaggcgtcgatacctctatgttagtcggcccgactcgggaaaagattgatgtgaaggttgcgttgtccaactctttcggatttggtggacacaactccgcggtattgttcgcgccgtacgtgcctaagagagcttaa

SEQ ID NO: 234841 - DNA, 657 bp, Unknown
  Bacterial polypeptide expressing nucleotide sequence isolated from the Sargasso Sea
gatgaatgccagaataactgttacatcccataatacaccagacaacgtaatgacaaatgttgatctggaaaaacttgtggatacttcagacgaatggatacaatcgcgtacagggattgtacaaagacatattgttagcgatgatgaggcaagttctgatatatcaactcggatagcaaaatcactcatcaaaaaaagagatatttcccccgatcagctagatttaataatcgtgggcactgtaacaccagaccactttactccatctacagcggctttagttcaaaagaatattggagcaacaaatgcttggggatttgatttgagtgcagcttgctcaggatttatttatggactggaaactggagctaactttataagttcaggaaaatataataaagtaatggttataggtgtcgataccatgacctccattttagattatcaagatagagatacatgtgtgatatttggtgatggtggtggtggcgtcatactagaaccttcaaataataaatcaggaatagttgactctatattacacatggatggttctggtggtgaatatctaattgtcccaggtggaggaagtcggatgccctcaacaaaggcatcagtgaattcaagacaacattatattaagcaagatgggaaaac

SEQ ID NO: 234842 - DNA, 952 bp, Unknown
  Bacterial polypeptide expressing nucleotide sequence isolated from the Sargasso Sea
atgaaaagagttgtagtaactggtattggagttgtctcatgtctgggaaataatcaagaagaagtttatcaatctttattaaattcaaaatctggaattacattttctgaagaatataaagaatataatttaaaaagtaatgttcatggtaaaccaaatattaaacttgaagaccatgtagatagaaagtttattagatttatggggccaggttcagcatataattatatttcaatggttgaggcggttaaagattctggattagaagataaagatataagcaacgttttaactggaatgattatgggatctggtggaccatcaatacaaaatgttattcttgcagctgacaaaacaagagaaaaaaatccaaaaaaaatgggaccatttgtagttccaagaactatgtctagtacagcttctgctacattagcagttccatttaaaattaaaggagttaattatacaattagctctgcatgcgcaactagtggccattgtattggaaatgcaatggaattaatccaacttggaaaacaaaatgttgtctttgctggaggaagtgatgaagttcattatgcaatgactgctatgtttgatgcaatgactgcactttcttcaaaatataatgaaacacctgaaaaggcatctagaccatacgacaaaacaagagatggatttgtaatttcggggggtggtggagttttagttatagaagaatatgaacatgcaaaagcaaggggagcaaaaatttatgctgaattaacaggttatggagcaacttctgacggatttgatatggtagctccctctggagaaggagctgtaagatgtatgcaaatggctttaaatacaagcaaaaacaaaattgactacataaatacacacgggacttcaacgccagttggcgatataactgaattaaaagctgtgggagaagtctttaaagata

SEQ ID NO: 234843 - DNA, 545 bp, Unknown
  Bacterial polypeptide expressing nucleotide sequence isolated from the Sargasso Sea
cggatttgtaattgccggtggcgcaggagttcttgttcttgaagaaatggaaaaagccaaagcaaggggagcaaaaatttatgctgaaattgttggctatggagcaacatctgatgggcatgatatggttcaaccttctggagagggggctgtcagatgtatgaaaatgtcaatggaaaatattggttgtgaaattgattatattaatccacatgcaacatcaacgcctattggagatgaaaaagaggttgaagctataagagagacatttggaagcaaaattccaaatataagcgccacaaaatctttaactggtcatagtcttggtgcagctggtgttcaagaagctatctattctatactaatgatgcaaaatgattttattgcaaaatctgccaacattgaaaatattgatcctaagtttgaggacttacctattaataaagagagaattgataatgcaaatataggatgtttattatccaacagttttggatttggcggaactaatgcttcattagtctttaagaatccaaatttataaa

SEQ ID NO: 234844 - DNA, 835 bp, Unknown
  Bacterial polypeptide expressing nucleotide sequence isolated from the Sargasso Sea
atgaaaagagtagtagtaactggaataggaattgtttcttgtattggcaacgaccaaaaaacagttattaaaaatttaaaagaattaaactctggaatatctaaagctccagaatatgaagaatattcttttagaagtttagtacatggaaaaccaaatatcaaattggaagatgaaatcgataggcgtactttaagatttatgggcgatggtgctgcatataattatgtatctatgaaagatgccataacagattctgggttaactgaaagtcaagtttctaatgaaatgacaggcataattgtaggttctggaggaccctctacatttaatctaatgagatcatttgatttagctaaaactggtggttcaaaaaaagtagggccatttatggttccaagatcaatgtcgagtacaaattctgcaactcttgcaactccttttaaaataaaaggggttaattactctattacatctgcctgttctactagttctcattgtataggcaatgcttatgaacttattcaaataggtaaacaaaatataatttttgcaggtggaggtgaagaattacattggacgatgtctattctttttgatgctatgggcgctttgtcttccaaatataatgatgatccaaaaaaatcatcaagggcatatgacacaaatagagatggttttgtaatttctggaggaggaggaacgattgttcttgaagaattagagcatgcaaaatctagaggagcaaaaatttatgcagaaataacgggttatggtgcaacctctgatggacacgatatggttcagccttcaggagagggtgctattagatgta

SEQ ID NO: 234845 - DNA, 773 bp, Unknown
  Bacterial polypeptide expressing nucleotide sequence isolated from the Sargasso Sea
aatgagaagagtagttattacagggttaggaattgtttcttgtttaggaaacaaccaagaggaagttcatcaatctttattaaattcaaaatcaggtatttcttatgctgaagaatataaagaacataatcttaaaagtcatgttcatggtaagccacatataaaactagaagatcatattgatagaaaaacaattagatttatgggctcgggctcagcttataattatattgcaatgaaagaggctattgaggactctgggctagaagaatctgaagtaagcaattttaaaactggaattgtgatgggttcaggtggaccttcaattgaaaacgtaattttagcagcagacaaaactagagctaaaactccaaaattaatgggaccattcattgttccaagaacaatggccagtactgcttctgcaacccttgcagtaccatttaaaattaaaggaactaactacacaatgagttccgcatgtgcaactagtggccactgcataggtaattcaatggaattaattcaaatgggcaaacaagatgttgtttttgcaggtggaagtgaagaagttcattgggctatgacagcaatgtttgatgcaatgactgctttatcatcaaaatataatgatgctcctgaaacagcatcaagagcatatgacaaaacaagagatggttttgtaattgcaggtggtgcaggtgtgctagtgcttgaggaatatgaacatgctaaagcaagaggggctaagatatacgcagaattaactggtt

SEQ ID NO: 234846 - DNA, 844 bp, Unknown
  Bacterial polypeptide expressing nucleotide sequence isolated from the Sargasso Sea
atgacatcaagaagagttgtagtaactggaatgggagctttaactccaattggtaatgatctagaatcatattggaacggtcttataagtggtactagtggttgtgctaatatcactcattttgatgccacaaattttaaaacaaagtttgcctgtgagctaaaaggatttgatcctgcagaccactttgaaaaaaaggaatttagaagatatgaccgtttttctcaatatggaatcgttgctgctagtgaggctattaatgattccaaattaattgacagtagcccaaattatgatagaatcggtgttatatggggagctggaattggaggtttagaaacatttcaaaatgaagttttaaattttgctgatggagatggaactcccaggtttaatcctttctttattccaaaaatgattccagatattgctcccggtcttatagcaatgaaatatggttttcagggtccaaactatgcaactgtatctgcatgtgcttcatcttctaacgctttaatcgatgcattaaattatatcaggattggtcatgctgatgtaattgttgcaggtggatcagaggcaccagttacaattgctggtgtagctggatttaatgcaatgcatgcattatctacaagaaatgacgatccaggatcagcttctagaccgtttgacagagacagggatggatttgtgctaggtgaaggtgctggagcattaattttagaagaatatgaacatgcaattaatagaggggctaaaatttatgcagagcttgctggaggagggttatcatgtgatgcctaccatatgactgcaccacatccagatggaaggggtgcaa

SEQ ID NO: 234847 - DNA, 1219 bp, Unknown
  Bacterial polypeptide expressing nucleotide sequence isolated from the Sargasso Sea
atgagtaacaaaagagttgttattacaggatacggtatagtttcttgtataggcgataacaaaaaagaggtcttgcaaagtttaaaagatgtgaaatctggtatcagtcattgtaaagaatatgaagagcttgggatgagaagtcacgtacatggcaaacctaaaataaatattgaagaaaatgttgatagaaaaattttacgttttatgggtgaaggtgctgcttataattatattgcaatgaaagaggcaattgaacactcaggacttgatgaaactctcatatcaaacgttaatactggattagtaatggggtctggtggtccatcaacatttcaattacaacaagcatttgatatagcaagagaaaaaggtgttaaaaaaattggaccatacatggttacaagaacaatggcatcaggaaattctgctaccttggcaaccccttttaaaattaaaggtgttaattattctatcagctcagcatgctcgacaagtttgcattgtattggcaacgcttacgatcttattagacatggacaacaagagattgtatttgctggtggtggagaagaaacgcattggacaatgtcaattttatttgacgctatgggagcgctttcaagcaaatataatgaaactcccgaggttgcctcccgagcgtatgactcttctagagatggctttgtcattggaggaggtgcaggcgttttagtagtcgaaagtcttgatagtgctaaaacaagaggtgcgaatattatagcggaaattcaaggttttggtcaaacatcagatgggtatgacatggttcaaccctctggagaaggggccgtaagatgtatgaatatggcaactcagggaaggcccgttgactatattaatgctcatggaacctccacccctgtgggagacatgattgaattaaaaggtataagagaagtttttggtgataatgttcctccaacaagttccacaaagtccttaactggtcactcactcggtgctactggcgtacaggaagctgtttactctcttttaatgatggaaaatgattttatggttgagtccgctaatatttcaaacctagatgaaaaggctgaaggaatgaatattcttcgagagaataaaaatgatgttaaaattaattctatcctatcaaatagttttggttttggtggaaccaatgcctctatctacctaactagttataatgactaag

SEQ ID NO: 234848 - DNA, 2386 bp, Unknown
  Bacterial polypeptide expressing nucleotide sequence isolated from the Sargasso Sea
ctgaacggtcgtgagcttctaggtatgggtgataaccgtggggttgagtttgacctttatccaacggaaatcatttcaaacattctggtatacaaaacaccagaagcgggcatgactacccaaaatatcggtggttcaattgaccttcaaacggttaagcctctaacggcagaaagcacgtttaccgtaaacggcacgttcgagaaaaatgctgaagactctccaaacccagattttgacaacgacggtcaccgcatttctgtaaactttgtcgatcaatttgccgacgatacgattggtttagcgctaactgttgcgagcatggagtctccacgtcaggagcaacacttccgcggttggggttacgccacagtaaacactacaccagaaaacacgtttgacgataacggaaatccgctttggaaccctcgtcgttatgatggtcaagacactgtagacgttcctgatggtactgttgtattgggcggtcacgattcattccagcgttcagcaatgctagaacgtgactcaattgccgctgtagtccagtgggcacctaccgataagctcaatatccaacttgatgcgctttatatcgatttcgttgaagacgatgtacgccgtggtcttgaagaaggcggtgcagagtggggtacaagcgcttacacaatcactggtgttgaaaacggtctggtaaccagcggttacactgatggtttctatagcgttgtacgtaacgatgcgcgtcgtcaagaagcagacctaaccacattaggcattaatgctgaataccaaatcaacgactcttggacactagagcttgattactctaccggtaaagttgaaaaagaaattgtcgatgtagaaagctactcaggtgtaggtcgtgctggtactgaaggccgtccaattactgcacgtagctgggaaatgacatcttctggagtaatgttctctgaccacccaactattgcaccggttgacctaactgacccaacacttattagccttgcaggtccgcaagcatggggcgcacgtcctttacttgagtctgacgcacaggatggtttcgtaaaccagccgcttttcgaagaagagcttgatacccttcgtttcgacgttaaaggctatgtagattggggtgtggtaactggcctatctgctggtgttgtatattctgaccgttctaaatctaaagacaataacggtgcttacctaacagcgccttcatatcctggaaatgctcctattcctgaagtgctaggcgtaacgaaccttaactttattggaattgacggcgtgctagcgtacgactcgctaggtcttttcgaaagtggttattactatgaaagcgatgcaagccgcgttcaaaacgatcgcttaggtgatacttataccgttgatgaagagctactaaccctttacaccaaactagacttggaaatggaagttggcgatatttgggttcggggtaatgttggtcttcaagttgttagtgccgaccagcagtcaacaggtttttttgcaacttcaaatagagaaggctttactgttgctaaccctgtatctggtggtgctgattacacagatgttcttccaacacttaacctttcagcagaagtggctgaggggcagtttgtacgcttaggcttgagtaaagttatttctcgtccgcgtatggatgacatgcgtccaaatactcaggttacgttctcgttcaacgataaccaaattactagcactgaaattgaaaatggtccatggggggggagtgctggtaaccctgaattgcgtccgcttgaagctaaccagtttgacctagcctatgaaaactactttgctgatacgggttatgttgctgtgtctttcttctataaagacattaaaaactggcaccgtagcacgtctattgtagctgactttacagaattctatattccagaagttcaccaaggttcagagggccaaactcctgtattgttcactggccaagtaggcagtgttcttgatggtttcgaaggctttgttcgcggttacgaattacaaggttcacttccatttgacatgatccatgattcacttgaaggcttcggtttgttcgcaagtgcaacctttatggatggtgaagttgacgcggctccgggtcaaactgaaacacgtattcctggactatctgaagagtcttacagtatgactttcttctatgagaatgctggtttcgaattccgtcttgcggcaacaaaacgcgatcagtacctaactgaagaacgtggtgttagtttggcgttagttgacgcaacgaaagcaggcggtacgcttgttgatgcgcaaattggctatgactttagcgagtctggtatcgaatatctagaaagcctacgtgtta

SEQ ID NO: 234849 - DNA, 1243 bp, Unknown
  Bacterial polypeptide expressing nucleotide sequence isolated from the Sargasso Sea
atgcataaaagaagagtagttgtaacggggcttggctgcataacaccccttggaaattctattgagtcttattggtctggattactagaaggaaagtctggtgcatctgaaattactcattttgatgcatctaacatgcccgttaaattctcttgtccaatcaaagattttaacaccgacaaatattttgattcaaaagagatgagaaaatatgatcttttcatgcaatatggcttagctgctgggatagatgcaataaatgactctgggctggaggactcaactgtagataaagaaagcgtgggagttgcgatagggtcagggattggaggattgccaaatatcgaaaatactcattcaacttatacaaagtcaggcgctagaagaatatctccattctttgttcctgcaagtattattaatatgatatcgggtaatctctctattaaatacggatataaaggaccaaatatttctatagttactgcgtgtactactggaacacataacattggtgagagttttagatatattcagcactcttatgcagacgtaatgatatgtggtggagcagagatggcatcgagcccactaggagttggtggatttgcatccgcaagagcactctcaactagaaacgatgatcctactaaagctagcagaccatgggacattgacagagatggatttgtcttaggtgatggcgcaggtgtaatagttttagaggaattagaacatgcaaaaaaaagaaatgctaaaatttatgcagagttaaaaggatatggagcaagcgctgatgcttttcatatgactcttccttcggaaaatggagagggtgcacagaaatgtatgggaaaagctttagctaatgcagagataaatattgatcaagttgaatatattaatgcacatggaacttcaacaccagccggtgatattgcagaaacttctgctattaaaaatcagttcggcaatcacgtggactcgcttgtagttaattcaactaaatcaatgataggacatctacttggtgctgctggtggagtagaggctattgcaaccattttatctattcaacatcaaataatacatcctactattaatatctttaaccaggatcccgcttgcgatttagattataattctaaagaatctagaaatttaaaaataactcatgccttgagcaactcatttggatttggaggaaccaacggttcacttattttttcaaaatattcgtagc

SEQ ID NO: 234850 - DNA, 1228 bp, Unknown
  Bacterial polypeptide expressing nucleotide sequence isolated from the Sargasso Sea
gatgagtactttaaaaagagcagtaataacaggaattggtgccatatcttgcataggtaacaatatttctgaaataacgaaatctcttaaatcgggtacatcagggatacgtttcaatgaatcatacaaagaactgggtatgcgaagtcatatttctggctccattaatttaaatctaaaggatctcattgatagaaaacatttgagatttatgggagaagcagcaagctatgcctatttaagtactgcagaggctataaaagactcaggcttggatctatcaaggttttcttcacaagacgttggggtcattgcaggttccggtggagcatcttctagaagccaggttgaagcagcagatatagttaagagcaaaggagttaaaagaataggaccttatagagttactcaaacaatgggaaacaccgtttcagcagctcttgcaactttttttggcatcaaaggggtgaatttctctatttcctctgcatgctcaacaagcgcacattgtattggatcagctctggaacaaattcaattgggaaaacaaaaaataatattagctggtggtgctgaagatgagcattggacaatgtctagtatgtttgatgccatgggagcgctgtcttcatcatataatgagagtcctgagaaagcatcaaggccttttgataaagatagagatggttttgttatagcaggtggagcgggcatgctcgtcattgaagaattagatcatgctctagaaagaaacgctgatatttatgctgaaattactggatatggagcaacttctgatggagatgatatggtccatccatccggagaaggagcaactaattgcatgttaaaggctgttgaaatgcatggaaaagataatattgattatattaatgctcacggaacttcaacacctgctggagatcctgtcgagttagaatctataaaaaaggttttcaaagataaaattcctcccataagctcaacaaaatcacaaactggacatacccttggtgccgctggggctttagaaagtattttttcactattaatgctaaaaaacagttttatatcaaaaacccttaatctttctagctctattgatgaaggtgaaggtttagacttagtttcagaagtcagaaatcaggatttggatgctgtaatgaataatagctttggctttgggggaactaacgttagtttagtttttgaaaagttaaaatcctaa

SEQ ID NO: 234851 - DNA, 810 bp, Unknown
  Bacterial polypeptide expressing nucleotide sequence isolated from the Sargasso Sea
ccatgtcctccaccacctccgcttgcctggccacccccttcaagatcaagggtgtcaactacaccatcagctccgcctgcgccacctctgcccactgcatcggtcacgctctggaactgatccagctcggcaagcaggacatcgtcttcgccggcggcggcgaggagctggactggtcttccaccatccagttcgatgccatgggcgccctgtccaccaagtacaacgacaccccggaaaaagcctcccgtacctatgatgcggatcgcgacggtttcgtcatctccggtggcggcggcatcctggtggtcgaggagctggaacacgctctggcccgtggtgcccacatctatgccgagatcaccggttacggtgccacttccgacggctacgacatggtcgcgccgagcggtgaaggcgcggtgcgttgcatgaagatggcaatgcagggtgtcggcaaggtggattacatcaacacccacggtacctccactccagtgggtgacaccaaggagctggaagcgatccagacgctgtttggcagcaatgcacccaagctctccgccaccaaggccatgaccggtcatgccctgggggctgccggcgtgcacgaggccgtttactccctgctgatgatggaacacggcttcatcgcccccagcatcaacatcgagaccctggacgagaaggccgaaggcctgcccatcgtgcgcgcgtacgaagaggcggatctcaataccgtcatgtccaacagcttcggctttggtgggaccaacgcctccctggtgttcagcaagttcaaggcttgat

SEQ ID NO: 234852 - DNA, 826 bp, Unknown
  Bacterial polypeptide expressing nucleotide sequence isolated from the Sargasso Sea
atgagaagagtagttattacaggtttaggagttgtttcgtgtttaggcaataatcaagaagaagtacatcaatctttagtaaattcgaaatcaggaatttcttatgcagaggaatataaagaacataatcttaaatgccatgttcatggaaaaccaaatataaaacttgaggatcatattgatagaaaaacaattagatttatgggttcaggctctgcttacaactatatagcaatgaaagaggcaatcgaagactctggattggaagaaagtgaagttagtaactttaaaactgggatagtgatgggttctggtggaccctcaattgaaaacgttatcttagcagccgataaaactagagccaaaactccaaaattaatgggaccgtttattgttccaagaacaatggccagtacagcttcagctactcttgccgttccgtttaaaattaaaggtactaactacacaatgagttcagcttgttcaacaagtggacactgtattggaaactcgatggaactaattcaaatgggtaagcaagatattgtttttgcaggcgggagtgaagaagttcactgggcaatgactgcaatgtttgacgccatgactgctttaacatcgaagtataatgataccccagagaccgcatcaagagcttatgacaaaactagagatggttttgtaattgcaggtggtggaggggtgttagtacttgaagaatacgaacatgctaaagcaagaggggctaaaatatacgcggaaataactggttatggagcaacttcagatggatacgatatggtagctccatcaggagaaggggcag

SEQ ID NO: 234853 - DNA, 610 bp, Unknown
  Bacterial polypeptide expressing nucleotide sequence isolated from the Sargasso Sea
catgggagcactttcatctaacttcaattcaactccaacgattgcatcaagaccatacgattcaaatagagatggatttgttatttcaggtggagctggaatgataattttagaagatgaagagcatgcaaagaaaagaggcgcaaatattctagctaagctttccggttattttgcaaactctgatggctatgacatggtagctccttctggtgaaggtgcatctcgatgtatgcaaggagcaattgataattcaaaaataaaaatcgattacattaatactcatggtacaagtactcccgttggagatgtggcagaaataaatgcaatcaagactctttttaattctgaaacaccaatgataagttcaactaaatcaatgacaggacactcacttggagctacaggtgctcatgaggccatatactcaattatgatgatcaatgaaaactttattgcgccatctataaacattgaatcattatgtgatgatgctgaaggccttgatatagttaccgaaacaaggaatacatcaatcaataatgttcttagtaattcgtttggctttggtggaaccaatgcaagtctagtaatcagtaggtatcaataa

SEQ ID NO: 234854 - DNA, 280 bp, Unknown
  Bacterial polypeptide expressing nucleotide sequence isolated from the Sargasso Sea
atatttaaagacagatcttaccttattcctgtaagctctactaagtcgatgactggtcatctcctaggaggttcaggaggtatagaagctgtagcttgtatactttctttgacacataattttatccctcctacaattaactacgtcaatccagatcctgattgtgatcttgattatgtaccaaataatgcaagagaagctcaagtagaagttgctctttctaattccttcggctttggtggtcacaatgtttgccttgctttcagcaaaatgaattaat

SEQ ID NO: 234855 - DNA, 258 bp, Unknown
  Bacterial polypeptide expressing nucleotide sequence isolated from the Sargasso Sea
taactcatgatgatgtcgactggtttatctatcatcaggccaatggagcgatgctcagaatggtcggtgatatggtggggtttgctccggaaaagaatttgatgaatattgacaagctcgcgaataccaccggtgcaactatcccctctgtttttcatatgtatgtagaagatggcacaatttctcgaggggacaccatatgctgtgttggctttggtggtgggctgacttcgggtagcattgtttttgagtattgat

SEQ ID NO: 234856 - DNA, 439 bp, Unknown
  Bacterial polypeptide expressing nucleotide sequence isolated from the Sargasso Sea
ccacatcacctcacccacaccgggtggcgtcggtggtgccgaagcgatgcggctcgccctggccgacggcggcatcgatgcttccgagatcgattacgtcaacgcccacggcaccagcacccccgctaacgacaagaacgagacctcggccatcaagagcgctctcggggatcgcgccctgcagatcccggtgagctccaccaaatcgatgaccggccatctgctgggtggctccggcggcatcgaggccgtggcctgcatgctggctctccaacatggggtcgtgcccccgaccattaaccacaccaacccggatcctgactgtgatctggatgtcgtgcccaatcaggcgcgggatcagacactgggaacggtgttgtccaactccttcggcttcggcggccacaacgtctgcctggctttcaaacgcgccggctga

SEQ ID NO: 234857 - DNA, 615 bp, Unknown
  Bacterial polypeptide expressing nucleotide sequence isolated from the Sargasso Sea
atgctatgggtgccctatcatcaaagcataataaaacaccaactatcgcatctagagcttttgatcaagatagagatggtttcgttgtttcaggtggagctggaatgttaattgttgaaagtgaggaacatgctgctaaaaggaatgcaaacatttttgcctacataactggatatgcagccaattcagatgggtttgatatggtctcgccctccggtagtggcgcagttttatgcatgagcaatgcgcttaaagaatctgatagaaagattgattatataaatgcacatggtaccagcactccagttggtgatatttcagaattaaatgccattgggtcaatttttaaaaatgactctcctctgatcagttcaacaaagtccatgacaggccattcacttggtgctgctggatcacaagaagcgatttattcaattcttatgatgcataacaattttgttgctccatcaataaacattttaaatctagttgatgaggcaagtaatctaaatatagttacagaaacaactgataaagaaattacatcagtcatgagcaattcatttggattcggtgggactaatgcaagccttgttttttctgactcggcttaaa

SEQ ID NO: 234858 - DNA, 799 bp, Unknown
  Bacterial polypeptide expressing nucleotide sequence isolated from the Sargasso Sea
gctgggaactaaaggtccaaatttttcaaccgtttcagcatgtgcttctgcagctgattcaattggacaaggattacacatgataagaagaggagaggcagatattgttcttgctggcggaagtgaagctgcaatctgtcctattggtattgctggattcaattctgctagagccttatcaacaaataatgacaatcctgaagaagcttcaagaccttttgatgcaaaaagagatgggtttgttctaggtgaaggagctggtctgattgtattagaagatgaagaacacgcgctcaaaagaggtgcaactataatttgtgagttatcaggatatggagcaacttctgatgcacatcatgtaacacagccccatccagaaggagaaggagcatctaaagcaatggatattgccataagtgatgcaggtatagaaaaagaaaaagttgcgtacataaatgctcatggtacttcaactcaactaaacgacaaatttgaaactatcgctatcaaaaaatcttttggagatcatgcaaaaaaattaaaaatttcatctacaaaatctatgacaggtcatttactaggtgccgctggaggaattgaggctgcattcacttgccttgcaataaacgaaaaagtagtccctcctaccataaatctattaaatcctgatccagaatgtgatcttgattatgtagcaaatcatgcattaaaaggaaatgttcctgcagctatttcaaactcacttggttttggtggtcataatgcttctttgttatttcaagattatcctaaccagtaa

SEQ ID NO: 234859 - DNA, 1084 bp, Unknown
  Bacterial polypeptide expressing nucleotide sequence isolated from the Sargasso Sea
gatgaaaaacgtagttataacaggtcttggaattaaatcttgtattggcaataactattcagatgtcctaaacaatcttagcaaaggtaattctggtattgaatttaataatacatattctgaaatgggatttaggagctgtgtttcaggatctattgacattaatttagcagaacaaattgatagaaaattatacaggttcatgggtgaatctgcaggatatgcttatcttgctgctaaagatgctcttgatatggctgggattgacgaaaaagatcttgattcaccaaatattggtattgttgctggatcaggaggagcttcaacaagagttatgcttgagagcggtgatatcgctagagaaaaaggcccaaaaagaattggtccttatggagttactaaaagtatgtctagttcaatatcagcaataattgctactgcacttaagctaaaaggaataaattactcgatctcatctgcatgtgccacaagtgcccattgtataggtcatgctgctgatttaataaggaatggtcaacaaaatatagttattgcaggcggcagtgacgacgagcactggagctcatcatgcttatttgatgcaatgggggccctatcttcaaactttaattcaaccccaactgttgcatccagaccatatgattctgatagagatggttttgtcatttcaggaggttctggaatgatagtgctagaagaagaggaacacgctaaaaaaagaggagcaaatattcttgcaaaattatctggatattttgcaaactcagatggatatgacatggttgctccttcaggagaaggtgcaattaggtgcatggagggtgcaataaaaagttgcgatggagaaatagattatattaatacccatggtactagcacgccagtaggagatatagcagaattaaatgcaataaagaaattatttaaatctaactctccaatgataagttctacaaaatcaatgacaggacattcattgggagctactggtgctcatgaagcaatatattcagtaatgatgataaacgaagggttcattgctccttcgattaatattgggacc

SEQ ID NO: 234860 - DNA, 478 bp, Unknown
  Bacterial polypeptide expressing nucleotide sequence isolated from the Sargasso Sea
agcaagaggtgcaaaaatttatgctgaactaactggctatggagcgacttctgatggatatgatatggtagctccatctggagaaggagctgtaagatgtatgcaaatggctttaaatacaagtaaaaataaaattgattatataaatacacatggaacttccactccagttggagatataacagaattaaaagctgtaggtgaagtctttaaagacaaagtacctaaaataagttctacaaaatctctttcaggtcattcgttgggagccacttcggtacatgaggcagtctatagtttaattatgatgaaaaataattttatttcagcttctataaatataacagacatggatgatgaggcaaaaaaatatccaatagttacaaaagttgaaaaagatgtaaatcttaatgctattatgtctaatagttttggatttggtggaactaatgcaactttagtttttgagaaggtttaa

SEQ ID NO: 234861 - DNA, 481 bp, Unknown
  Bacterial polypeptide expressing nucleotide sequence isolated from the Sargasso Sea
aaagcaagaggtgctaaaatatacgcagaattaaccggatatggagcaacatcagatggatatgatatggttgcaccatctggtgagggagcggtgagatgtatgaaaatggctctaacaacttcaaaaaataaaattgactatattaatactcacggaacatctacacctgtaggagatattacagaattaaaagcagttggtgaagcttttccagactataaacctaagataagttctacaaaatctttgtcaggtcattctttaggcgcaacttcagttcatgaagcaatttacagtttgataatgatgaaaaataattttatttcagcttcagcaaatatttccgaaatggatgatgaagcaaaaaattatccaattgttacagaagtcgaaaaagatgtaaatttaaacgcaattatgtctaacagctttggttttggtggaaccaatgcaacattagtgtttgagaaagtttaga

SEQ ID NO: 234862 - DNA, 229 bp, Unknown
  Bacterial polypeptide expressing nucleotide sequence isolated from the Sargasso Sea
tatgacgggtcacttgctgggcgctgcgggtgcggttgaagcgattttcactctgcttgcgctgcgcgatcaagccgtaccaccgaccatcaacctcgataatccagatgaaggctgtgatttagacttcgtggcgcacactgcccgtgatgtaaagttagagtatgctctgtgtaactccttcggatttggtggcactaacggttcattgctgtttaagaaagtctaa

SEQ ID NO: 234863 - DNA, 871 bp, Unknown
  Bacterial polypeptide expressing nucleotide sequence isolated from the Sargasso Sea
tatgagacgagtagtagtaactgggcttggtatagtttcatgtataggtaacaatgctgaaacagttactgataatctaaaaaatttaaactctggaatatctgcagctcctgaatatgaagaattttcatttagaagtcttgttcatgggaagccagaaataaatttagaagaaaatattgatcgtcgccttttgcgttttatgggtgatggtgcagcatttaactacatagctatgaaaaaagctattgaagactcaggtttagaagaaacagatatatcaaatgaaatgacaggtattattgtaggatcaggtggaccctccacaatgaatttatataaagcatcagaattgggaaaaaatagtggatcaaaaaaggttggaccttttatggttccaagaagcatgtctagtacaaattctgccactctagccacaccatttaaaataaagggtgtaaactattctataacatctgcctgttctacaagctcacattgtataggaaatgcatatgagttaattcaaatgggaaaacaaaatattatttttgctggtggaggtgaggagttgcattggactttatcaatattatttgatgctatgggagctttatcatcaaagtataatgataatcctaaaatagcatcaagagcgtatgactctgatagagatggttttgtgatctctggtggtggtgggactttagttcttgaagagcttgaacatgctaaagctaggggagctaaaatatacggtgaaataaatggatatggcgctacttcagatggatttgacatggttcaaccatcaggtgaaggggcagagagatgtatgaaaatggcaatcaaaaacataaatcgaaaaatt

SEQ ID NO: 234864 - DNA, 865 bp, Unknown
  Bacterial polypeptide expressing nucleotide sequence isolated from the Sargasso Sea
atgaaaagagtagtagtaactggaataggaattgtttcttgtattggtaatgaccaaaaaacagttattaaaaatttaaaagaattaaactcaggtatatctaaagctccagaatatgaagagtatttttttagaagtttagttcatggtaaacccaatataaacttagaagatgaaattgatagacgtacattaagatttatgggggatggcgctgcatataattatgtatctatgaaagatgccataaaggattcaaggttaaatgaaaatcaagtttctaatgaaatgacaggaataattgtaggttctggaggaccttctacatttaatttaatgaagtcctttgatttagctaaagctggtggttctaaaaaagtagggccttttatggtcccaagatcaatgtcgagtacaaactctgcaacacttgcaactccttttaagataaagggggttaattactcaattacgtctgcttgttcaactagttctcattgtattggtaatgcttatgaacttattcaaatgggcaaacaaaatataatttttgcaggtggaggagaagaattacattggacaatgtctattctttttgacgctatgggtgctttatcatctaaatataatgacgatccaaaaaaatcatcaagggcatatgatgctaatagagacggctttgtaatttctggaggaggaggaacgattgttcttgaagagttagaacatgcaaaatctagaggagcaaaaatttatgctgaagtaactggttatggtgcaacttctgatggccacgatatggtccagccttcaggagaaggcgcaataagatgtatgaagttggcacttaaaaaaataaaacggt

SEQ ID NO: 234865 - DNA, 1204 bp, Unknown
  Bacterial polypeptide expressing nucleotide sequence isolated from the Sargasso Sea
catgactaaacaacgagtggttgtaacaggtcttggaacaattaatccactaggaaacaatgtaattgatacgtggaataacttaattagtggaatttctggaatagatcatattactttatttgatgcttctgatttacctgtgacgtttgcaggagaagttaaaaattttgatgcaaatgattatatgggaaaacaaaatgcaagaaagcttgataggtctggccatttatctatttttgctgcagaagaagcaattcaagatgctggatttgatttaagtaaaccgcttggtgaagattttggtattgtatttggaactggcatcggtggaataggagcaacggaagatgctgttagagtttacgatgaaagaggttcaacaagaataagtcctcttgctattacacaattaatgcccaattcaagtacaggtcaagttgcaattaaatacggaatacaaggtccttcattaacgattacaactgcttgcgcagcttctgcaaatgcaattggagaagctaagagaatgattgaacaaaacattgttgacaaagttcttgttggaggaacagaatctggtacaacttcaatgacaattggagcttttgcacagataaaagcactttcaaaacagaatgatgagcctcaaaaagcatgtaaaccttttgataaaaacagagatggatttgttatggcagaaggttctacagttttaatactcgaaagcgaaagttcagcaaaagatagagatgcaaaagtttacggatatatttctggatatggatcttcaacagatgcgtaccatataactgctccatcagaaggtggggttggtgctttaagagcaatggaacaggcaatctcaaacgctgatattagtaaggaaaatattgattatatcaacgcacacggaacatcaacgccagctaatgatttaaatgaaacacttgcgattaaatcacttatgaatgactacgcatatgaagttaatatctcttctaccaaatcaatgacaggacatttacttggaggaggtggagcttttgaggcaatggcatcattattatcaatgaaaaataatcaaattccaccaacgataaatctaaacgattcagataaggattgcgatttaaattacacagctaatcaatctgtagataaaaatatagaccacgttatgtctaattcatttggttttggt

SEQ ID NO: 234866 - DNA, 1246 bp, Unknown
  Bacterial polypeptide expressing nucleotide sequence isolated from the Sargasso Sea
aatgccaaatttccatcgagtagttattactggtatcggagcagtaactccaattggtaataacattgatgaatatttagtcggtcttcaaacaggtactaatggagtttcagatattactctctttgatcctgaacaacatccctgcaaatttgctgcagaagtaaaaaatcttcaatctgaaaattttattgaagctaaagaatccaaaagatgggatcgtttttcccagtttggagttattgctgcaaagcaagcctttaatgattctggacttgaaattactgaagctaatgcatcaagaattggagtgattattggttctggtgttggaggcttactaactatggaaagtcaagctcaaatattgagtcataaagggcctaaaagagtaagtccatttacagtcccaatgatgattccaaacatggccactggattggctgcaatcgctttgggtgcaaaaggaccaagttcctctgtttccaccgcttgcgctgccggttcaaatgcaattggtgattcttttagattactccaacttggaaaagcagatgcaatgatctgtgggggagcagaagcaagtattacgcctctcggagtagctggttttgccagtgccaaagctctttcttccagaaatgaaagccctcaaactgctagcagaccttttgatgcagaaagagatggatttgttattggagagggatctggaattcttgttttagaaactttagaaaatgcacaaaaaaggaatgcgagaatttatgcagaaatagttggttatggaacaacatgtgatgctcatcatataactgctccatctccaggcggaattggaggcgccgaagctatcaaattagcaattgaagacgcttgtcttagccttgaaaaagttgattacataaatgctcatggaacaagtacatcagctaatgataaaaatgaaacttctgcaattaaatctatttttaaagacagatcttacctcattcctgtaagctctactaagtcgatgacaggtcatctcttaggaggctcaggaggtatagaagctgtagcttgtatactttctttgacacataattttatccctcctacaattaactacgtcaatcgagatcctgaatgtgatcttgattatgtaccaaataatgcaagagaagctcaaataggagttgctctttctaattctttcggctttggtggtcacaatgtttgccttgctttcagcaaaatgaattga

SEQ ID NO: 234867 - DNA, 730 bp, Unknown
  Bacterial polypeptide expressing nucleotide sequence isolated from the Sargasso Sea
gctgctcgtttgattagggctaacgaagccgatgttatggttgctggtggatcagaggcagctattacacgtttaggtataggaggtttcgctgcagcaagagctctttcaactagttataatgataatccaacaacagcctcccgcccatgggatgaggggagagatggctttgtaatgggagaaggtgcaggatgtgtagttttagaggactatgaacatgctaaatctagaggagcaaaaatatatgctgaaatattaggatatggattatctgctgatgcatatcatataacagctccctctgaggatggagatggtggatatagagctatgcaagctgcaataattaatggaggagttgatatttcagaaattaattatattaatgctcacggaacttctacgccattaggagacgaaattgaattaggtgcagtaaaaaaactatttcaagataatatttctaatttatctgtcagttctactaaatcttctgttggacacatgttaggagctgctggggcagtagaagcaattttctctatacttgctgttagtaatgatattattcctccaacgttaaatttagagaagccttgtgatagcgcagaaggtatagatttagtgcctttaaaggccaaagaaaaaaaagtaaatatagctttatcaaattcttttggttttggaggaacaaatgcttcattaattgtaggtaaggttaaatagt

SEQ ID NO: 234868 - DNA, 1039 bp, Unknown
  Bacterial polypeptide expressing nucleotide sequence isolated from the Sargasso Sea
atgaggagagtggttattacaggtttaggggtagtttcttgcttaggaaataatcaagaagaagttcatcaatctttattaaattccaaatctggaatttcttttgctgaagactataaacaacataacttaaaaagccatgttcatggtaaaccgaatattaaacttgaagatcacatagatagaaaaacaattagatttatgggttcaggctcggcttacaattatattgcaatgaaagaggctatcgaagactctggattagaagaaagtgaagtaagtaattttaaaactggaattgtgatgggttcagggggaccttctatagaaaatgtaattttagcagcagacaaaactagagcgaagacaccaaaattaatgggaccttttattgttccaagaactatggccagtaccgcttcggcaacacttgccgttccatttaaaataaaaggaactaattatacaatgagctctgcatgtgcaactagtggccactgcataggaaattctatggaattaattcaaatgggtaaacaagatattgtatttgcaggaggaagtgaagaaattcattgggcgatgacagcaatgtttgacgctatgacagccttatcttcaaaatataataataccccacaatccgcgtctagagcttatgacaaaactagagatggatttgtaatcgctggtggggctggtgtattagtgctcgaagaatatgaacatgctaaagcaagaggagctaaaatatacgcagaattaactggttatggagcaacttcagatggatatgatatggtggcaccatctggtgaaggtgctgttagatgtatgaaaatggcaatggcgactgctaaaaataaaattgattacattaatactcacggaacatctactcctgttggagatataacagagcttaatgctattaaagaaacttttatagaggacattccaaaaataagttcaacaaaatctttgtcgggtcatcctttaggagcagcttctgttcatgaagccatctattgcttgataa

SEQ ID NO: 234869 - DNA, 502 bp, Unknown
  Bacterial polypeptide expressing nucleotide sequence isolated from the Sargasso Sea
tatgaacatgctttaaaaaggggtgcaaatatctatgcagagttagttggtttcggaatgagcgcagatgctcatcacatgacagctcctcctagtgatggttatggtgctgctttgtcaataaaaaatgccttgtctgatgcagggattgatactgatcaaattgattatatcaatgctcatgctacatctactcctttaggagatcttgctgagtgcaatgcaataaaatcggtattcaaaaatccacctattgtaagttcaacaaaatcaatgactggacatacacttggtgcagctggtgctattgaatcaattttttcaatcttatccattaaggataaccacgcacctcccactataaatctaaaaaatcccgatgatgattgtgatttagactttgttgcaaattcatcaagaaaatttgaaataaatactgcaatgaacaattcatttggatttggtggaacaaattcaacactaatttttcgctctatttaat

SEQ ID NO: 234870 - DNA, 507 bp, Unknown
  Bacterial polypeptide expressing nucleotide sequence isolated from the Sargasso Sea
ttttagaggagtacgaacatgcaaaatctagaggtgcaaagatttatgccgagctaacaggatatggtgctacgtcagatggttacgatatggtagctccttcaggagaaggggctgtaagatgcatgaagatggctttaagcactgctaagaataagattgattatataaatacgcacggaacatcaacacctgtaggagatataacagaattaaaagcagtaggacaagtatttactgactacaaacctaaaattagctcaactaaatcactcgcagggcattctctaggagctacttcagtacatgaagctgtctatagtttaattatgatgaaaaataattttatagctgcttcagccaatattaatgacatggatgaggaggcaaaaaaatatcctattgtaacaaaagttgaaaaagatattaatttagattctataatgtctaatagttttggtttcggtgggactaacgctactttagtatttgaaaaggtaaaataat

SEQ ID NO: 234871 - DNA, 504 bp, Unknown
  Bacterial polypeptide expressing nucleotide sequence isolated from the Sargasso Sea
ttggaagatatgaacatgcaaaagcaagaggtgcaaaaatttacgcagaaattacaggttatggggctacatctgatggttatgatatggtagctccttcaggagaaggtgctgtgagatgcatgaaaatggcattaagtacaagtaaaaataaaattgattatataaatacacatggaacatctactccagttggagatatcactgaacttaaagcagttagtgaagtatttgaaaattctatcccaaaaattagttctacaaaatctctttcgggtcactcattgggagcaacatcagtacatgaagctatttatagtttaataatgatgaaaaataattttatatcggcttcgataaatataaatgaaatagacgaagaagcaaaaaaatatccaatagtaacaaaagtagaaaaaggtgtaactctaaactcaataatgtccaatagtttcggttttggaggaacaaatgcaactttggtctttgaaaaattaaattagg

SEQ ID NO: 234872 - DNA, 562 bp, Unknown
  Bacterial polypeptide expressing nucleotide sequence isolated from the Sargasso Sea
gttttaggtgaaggctctggttgtttgattcttgaagaattagaacacgctaaagctagaggtgctaaaatttatgctgaggttgttggcggtggacttactgcagatgctcatcatataactgcccctcatcctgaagggctgggagcaattaatgttatgaaattaaccttagaagatgccggtatgaaaccagaagaggttgattacatcaatgttcatggaacttctactcctcttggagatattgctgaaacaatagctatcaaagaggtttttggtgaacacgcatttaacttaaacataagtagtacaaaatctatgacagggcatttgttaggtgctgctggagctattgaagcaattgcttgtgtaaaagctattcaaaatgacattgttccacctacaattaattttgaacatgaagatgaaaacatagattacaatttaaatctaactctaaataaagctcaaaaaagaacagtaaatgctgctttgagcaatacgtttgggtttggaggtcacaacacctctattgtcatgaaaaaatacaatgattaga

SEQ ID NO: 234873 - DNA, 970 bp, Unknown
  Bacterial polypeptide expressing nucleotide sequence isolated from the Sargasso Sea
aatgaaaagagttgtaatcacaggtttgggagtagtatcttgtttaggtaacaatcaagaagaagttcatcaatctcttttaaattctaaatctgggatatcatttagtgaagaatataaagaacataatctaaaaagccatgtccatggtaaaccaaatataaagcttgaagatcatattgatagaaaaactattagattcatgggatcaggttctgcttacaactacatagcaatgaaagaagcaatcgaagactctggattagaagaaagtgaagttagtaactttaaaacaggaatagttatgggttcgggtggtccatcaattgaaaatgttattttagcagcagataaaactagagctaaaactcctaaattaatggggccttttattgttccaagaacaatggctagtacagcttcagctacacttgctgttccatttaaaattaaagggacgaactacacaatgagttctgcttgtgcaacaagtggccactgtattggaaactcaatggaattaattcaaatgggaaaacaagatgttgtttttgcaggtggtagtgaggagatacactgggcgatgactgcaatgtttgatgccatgacagccttatcttcaaaatataatgatacaccagagacagcatcaagagcatatgataaaactagagatggatttgtgatagctggtggtggtggagtgctggtgcttgaagaatatgaacatgccaaagcaagaggtgctaaaatatacgcagaattaactggttatggagcaacttcagatggatacgatatggtggctccatcaggagaaggtgctgtgagatgtatgaagatggctatggcaacatcaaaaaataaaattgattatatcaatactcatggaacatctactccagttggagacattactgaattaaacgctgtgaaaaatacgtttggagataatattccaaaaaattag

SEQ ID NO: 234874 - DNA, 1228 bp, Unknown
  Bacterial polypeptide expressing nucleotide sequence isolated from the Sargasso Sea
ttgaaaaaaagagtagttataactggagaaggatcaatttctccattaggtcttaattcccaatctttatgggataatttagtaaatggcatatcaggcattgactatatttctaactttgatacggaaaatttttcagtaaaaattgctggagaagtcaaagaatttgatccaaataatttctttgaagctaaagaggttcgcaagcttgataggtttacaatgtttggtttaatagcagctgatcaagcacttaaaaattctaattatagttcctctgaagctggagttattgttggaacaggtgttggaggtatgcatacgcttgaagaagaacatcaaaaactaattaaaaaaggtcaacgtggcgtatcaccattttatgttccaaaaatgattccaaacatagctggtggacaaattgctatcaaacataatttacatggtttaaacttttcaatgtctactgcttgttcttcagctactgatgcaattgggatggcatatagattaatatccaatggttattccaaagctattctttgtggtggagctgagggaagcatcacccctcttactctttcaggatttgctaatatgaaagccttatcaaaaaataatgagaatcctcaaggtgcttcaaggccatttgataaagatagggatggatttattttatcagaaggtgcagggatgttaatgttagaagattatgatgaagcaaaaaaacgtgacgctaatatcattggagaaattattggttatggaatcacgaatgatgcttttcatattactcaacctgataatgaaagtactggtgcatcaaacgcaataactatggcactgaatgatgctgaaattgatacatctgaagtgggatatattaatgctcatggtacatcaacatattttaacgatatgctagaaactcaagccattaaaaaggtttttggtaaagatgctacaaatgtatctataagttcaacaaaatctatgacaggccatctactgggagctgctggagctattgaagctattgcatgtataaatactctaaataatggaattattccaccaactatcaattacaacaactctgattctgaatgcgatctagattatactccaaatgaagcactcaaaaaggatataaatatttcaatgagtaattcgtttggatttggtgggcataattctgttattatttttaagaaattttcttcttaag

SEQ ID NO: 234875 - DNA, 807 bp, Unknown
  Bacterial polypeptide expressing nucleotide sequence isolated from the Sargasso Sea
aatgaaaagggttgttataactggaattggtattgtatcttgtttaggcaataatcaagatgaggtatatcaatcattaataaattcaaaatctggaattacttttgcagaagaatacaaagaatataatttaaaaagtaatgttcatggaaaaccaaatataaaattagaagatcatgtagacagaaaatttattagatttatgggaccaggatctgcatacaattatgtttcaatgatggaagcagtaaaagactctggattagaagaaaaagaagtaagtaatatttcaactggtatgataatgggatctggaggaccatcaattgaaaatgttattttagcagcagataaaactagagagaaaatgccaaaaagaatgggtccctttgttgttccaagaactatgtcaagtactgcatcagctactcttgctgtgccatttaaaattaaaggtgttaattatacaattagctctgcatgtgcaactagtggacattgtattggtaatgcaatggagttaattcaattaggaaaacaaaaagttatatttgcaggtggaagtgatgaagtacattttgctatgacagcaatgtttgatgctatgaccgcactatcatcaaaatataatgatactccagagaaagcttcacgaccttacgataaaactagagatggatttgtaatctcaggtggtggtggagtattagttttagaagaacatgagcatgcaaaagctagaggtgcaaaaatttatgcagagataactggttatggagccacttctgacggctacgatatggttgc

SEQ ID NO: 234876 - DNA, 571 bp, Unknown
  Bacterial polypeptide expressing nucleotide sequence isolated from the Sargasso Sea
agcctctagaccttacgataaaactagagatggatttgtaatatctggtggaggtggagtcttggttatggaagaatatgaacatgcaagagctagaggtgcaaaaatttatgcagaaattactggttatggagctacttcagatggttacgatatggttgctccttcaggtgaaggagctgtaagatgtatgaatatggctctaagcacaagcaaaaataaaatcgattatataaatactcatggaacttctactccagtgggagatattacagaacttaatgcagtaggggaggtttttaaagataaagtcccaaaaattagttcaacaaaatccctttctggacattctttaggagcaacctcggtacatgaagctgtttatagcttaattatgatgaaaaataattttatatcagcatcagcaaacataggtgaaatagatgaaggggctaaaaaatttccaattgtaactaatgttgaaaaaggtgttaatttaaatgctataatgtctaatagttttggttttggtggaacaaatgcaacattaatatttgagaaagttgaataa

SEQ ID NO: 234877 - DNA, 1219 bp, Unknown
  Bacterial polypeptide expressing nucleotide sequence isolated from the Sargasso Sea
aatgaaacgcgctgttatcacaggaatgggaatagtatcttgcataggcaataataaatcagaggtgaccgattctctcaggcaaggaagaagtggaattaagcgtaacgagtcttatgcggaaattggtatgcgaagccatgttagtggatcaatagaaatagatacaaaaagtttaatcgaccgcaaatttttacgatttatgggcgatgcttccgcctttagcttcattgcaatgaaccaagcaattgaagattcagggctcaatcaaagtcaagtttccaacactcggacgggactcgttgcaggcagcggaggtggttcccccgaagatcaacttaattctacggatatagtccgtgaaaagggtgtccgcaaagtcggagcatatcgggtaccccgaacgatgagtagttccgtttcagcatgccttgctactccctttcaaatcaagggggtgaactattctatatcttccgcatgcgcgactagtgcgcattgcattggacacgcggctgagcttatccaattaggtaagcaagacgtcgtttttgcaggtggtggagagtcagaacattggaccttatctcatatgttcgatgcgatgggagccctatcgacagactataatgaaactcccacaaaggcatctcgcgctttcgatgcaaatcgagatggttttgtgatagctggtggtggtggcatgcttgtggtggaggaacttaatcacgctctacagagagacgcgaaaatctatgctgaaattaccgggtacgcggctacctctgatggttacgatatggtggcaccttccggcgaaggaggcgctcgcgctatgaaatcagcattagagcaaagtaaaaagtcagtcgattatataaatacacatggaaccagtacaccaactggtgatgtggctgaactcaaagctataaaggaggtttttggagaaaaaattccaacaataaattcaactaaatcattgaccggacactcactaggcgctgcaggtgtccaagaagcgatttatagcctaatcatgatggagcataattttattgcagcttcggcaaatatcgaaaacctagatccagaagctaaaggcttacccatagcaatcgacatgcaagataatgtaaaactagatagagtcttatcgaatagttttggctttggtgggaccaacgccagtttggtgttttctcgatacgagatctaa

SEQ ID NO: 234878 - DNA, 1146 bp, Unknown
  Bacterial polypeptide expressing nucleotide sequence isolated from the Sargasso Sea
aatgtcaaaacgaagagttgttgtaaccggccttggagtcctcgcccccaatggaaattccgttgaagattattggaatagcatctcaaacggtataagcggaataaaagaaatatccagttttgatgcttctggtttaagtgtcaggatcgcaggtgagttagacggcttcgaccctaatgaacattttgatagaaaagaactaaaaaaacttgatctttttactatttaccacatcgtatcatccagagaggccattgaacaatctggttttaaaaaacataatattgaccatgacagaattggagtaattatcggatcagggataggtggtattcaaacacttgagcagcaagcaaaaatttataacgaaagaggacagaggagagtttcccctttttttgttccaagaatgatagccaatatcgcagcaggaaacttggcaatagaatttggccttaaaggtcctaatcatacagtaatttctgcttgcgcttccggtactgatgctataggatgcgcagcgagaacaatacaatatggagatgcagatgtaattgtaacgggaggaactgaagcaagcataactggattaactatatctggatttgcaaatatcagagcgctatctacacaaaatgattatccttctaaagctagcaagccctttgacaaggatagagatggatttgtattatctgagggatcagcaacaatcgtattagaagaattggaacatgcaaaaaaaagaggggccaaaatcattgctgaatttgcaggttatggatcaacagatgatgcttatcatgtcactcaaccatcagaaggaggagtaggggcaataaaagcaatgtcaaatgcactaaaggattcaaacttaaatacaagcgatattgactacattaacgctcatggaacttcaactccatttaatgataagaccgaaagctcagcaataaaaaatcttttttctgaacactcaaagaacttaaaaataagttctacaaaatcaatgattggtcattcattgggcgcaagtggtgctttagaagcaattgcttcaatattagctattcaaaacaataaaattcctcctacaatcaattacaaaacacctgatcctgagtgcgatttagactatgtcca

SEQ ID NO: 234879 - DNA, 1037 bp, Unknown
  Bacterial polypeptide expressing nucleotide sequence isolated from the Sargasso Sea
tatgtcaaaaagaagggtagtaattaccggtattggcatggtatctcctgtaggtaattcggcttctgaatcatggggaaatatcatatctggaaaaagcggcgtctctaatattagtaaattcgaaacagaaggttttgaaacaaaattcgctgcaacagtaaatattaatatcgaagaattcttggaaaagaaagagataagaagaattgatgaatttattcaatttggcttaatagcttctgatgaatgtgttaatgattctaaactaaatcttgatgaagaaaatttagacagaattggagtttcaataggatcaggtattggtggattatctactattgaaaacaacaaaatattattgaatgatagaggtccaaaaaagatttctcctttttttgtacctggtgctatttcaaatatggtttctgggtatgcttctttaaggtttggttttagggggccaaatatatcaattgctagtgcatgctctagtgcaagtcattctatcgggtactcttttaggtctatatcctatggagatgctgacattatgttaactggaggtgctgaaatggcaacaactcctttaggtttagcaggttttaatgcagcaaaagctttatcgacaaataatgaaaatcctcaagctgctagcaggccttgggataaaaaaagagatggctttgtcttaggggaaggtgcaggttgtttaattctagaagaatatgagcatgcaaaaaaaagaggagctcatatttatgcagaaataattggttttggtatgagtgctgacgcatttcatataactgctccgccgcaagaaggtgagggcgctgctttggctatgcgaaatgcattattggatgcaaatatagataaaaatttaattgattacattaatgctcacggaacctcaactcctgctggagatattgctgaaaccttagcaatcaagtctgtttttgaaaattcgtctaaaaatttagtagtaagctctactaaatctatgactggtcatctattggagctgcaga

SEQ ID NO: 234880 - DNA, 619 bp, Unknown
  Bacterial polypeptide expressing nucleotide sequence isolated from the Sargasso Sea
ctatcttctgcatttaatgataaacctataaaggcatcaaggccttttgatgaggatagagatggttttgttatgggtgaaggtgctggggtagttgtgctcgaggagtatgagcatgcgataaaacgaggcgcaaaaatttatgcagaggtcaagggatatggcttgtctggtgacgccttccatataacatcaccatcagaagatggggatggcggctttagatcaatgtcagctgcgctaaataattctggtatcgctctcgataatattgactatgtaaatgctcatggaacatccacaccagctggggatgaaattgaaataaaggctgtggagagattatttggagaacacagtaaaaatttatatatgtcatcaacaaagtcttctattggacatttgttgggtgcggcaggttcagtcgaggcaatattttcaataatggcaattaatacaggaaaaataccagcaactctaaaccttgataatatttgcgttgatacaaaaataaatctggtaccaaaaaaatcactcacacgcgaggtcaaaagtgcgttgagtaattcattcggttttggtgggacgaatgcatcattgatttttacaaaagtctaat

SEQ ID NO: 234881 - DNA, 762 bp, Unknown
  Bacterial polypeptide expressing nucleotide sequence isolated from the Sargasso Sea
aaggaacaaattatacaatgagttctgcgtgtgcaactagtggtcactgtattggtaattcaatggaattaattcaaatgggtaaacaagatgttgtatttgctggtggtagtgaagaaattcactgggcaatgactgcaatgtttgatgcaatgactgctttatcatcaaaatataatgatagtccggagacagcatcaagagcttacgacaaaactagagatggttttgtaattgctggtggtggtggagttttggtccttgaggaatatgagcatgctaaagctagaggagcaaatatatatgcggaattaactggttatggagcaacttcagatggatacgatatggtagcaccatcaggagaaggtgctgtaagatgtatgaaaatggcaatggcaaatacaaaaaataaaattgattatattaatactcatggaacatctactcctgtaggagacattacagaattaaatgctgttaaagaaacatttaaagagaatattccaaaaataagttctactaaatctttatcaggacatcccttaggagcagcgtcagttcatgaagcaatttattgtttgattatgatgaagaataatttcattgctggatcagcaaacattagtgacctggatgaagaagctaaaaaatttcctatagttactaaaacagaaacaggagcaactttaaacactgttatgtctaatagttttggctttggtggaactaatgctactttaatttttgaaaaggtataat

SEQ ID NO: 234882 - DNA, 1243 bp, Unknown
  Bacterial polypeptide expressing nucleotide sequence isolated from the Sargasso Sea
atgtcacgagacaaagttgttataactggaataggtgctgttgctcctaatggaaataacgttaatgagttttggaccagtctgacaaatggaataagtggaataggaccaataacttactttgattcatctaatcaccgagtaaagatagctggggagttaaatgggtttcaacctgattctattcttgattcaaaagaaataagaaaattagacccattttctatctatgctttagttgcaacccaagaagcaatttcaatgtcaggcttagagagcgaatctttaaatccagatagaatcggtgtaactattgggacaggcgttggtggaattcaaacccttgaagaccaacaaagggtcattgaccaaaaaggtgcaagaagagtatctccacagtttgttccaaaaatgattgcaaatattgccggtggacacctatcaatcagatggggacttagaggtccaaatcaaacagtaacatcggcatgcgcttcggcaactgatgcaattggtatggccatgagactgatattgtctggcgatgcggatgcaatggtaactggcggcaccgaggcaagtgttacatcattaactattgcaggatttgcaaatatgaaagccctttcgcaatctaatgaaattccagaaagagctagcagaccatttgataaagatagagatggttttgttttaggtgagggatctggaatgctagttattgaacgagaatcccatgcaaaaaacaggggtgctcatattttagctgaacttgcaggatatggatcaacagatgatgcttttcatattactcaaccatctaaaggagggtctggagctttaaaagcaatggagagagcaattaaagatgctggtctaaacatagatgatattgactatattaatgcacatggtacttcgactccctataatgataaaaatgagtcagctgcaattacagagctttttaaaaaccactgtgaaaaacttaaggttagctcaacaaaatctatgacagggcacttattaggtgccgcaggtggaattgaagcagttgcatcagtaaaatctgttttagagcaaacactgccgccaactataaactatgatactcctgattctgagtgtgcactagattatgtaccaaatattgcacaatcttccaatgttaattcggtcctatcaaatacatttggttttggtggacataatgctgtgatttgcatccgaaaatacaattgaa

SEQ ID NO: 234883 - DNA, 418 bp, Unknown
  Bacterial polypeptide expressing nucleotide sequence isolated from the Sargasso Sea
ggcggggtggggaggagctaaagcaatcaaactagcaattgaagacgcctctattagccttgaaaaagttgattacataaatgcccatggaacgagtacatcagctaatgacaaaaatgaaacttctgcaattaaatctatatttaaagacagatcttacctcattcctgtaagctctactaagtcgatgactggtcatctcctaggaggctcaggaggtatagaggctgtagcttgtatactttctttgacacataattttatccctcctacaattaactacgtcaatccagatcctgaatgtgatcttgattatgtaccaaataatgcaagagaaactcaagtaggagttgctctttcaaattccttcggttttggtggtcacaatgtttgccttgctttcagcaaaatgaattga

SEQ ID NO: 234884 - DNA, 1249 bp, Unknown
  Bacterial polypeptide expressing nucleotide sequence isolated from the Sargasso Sea
catggctgagtcatcccgccgggtggtgatcacgggtcttggcgccgtgactcccatcggcaactccgtatctgagtactggtccggtctcactgaggcgcgcaacggggtggcaccgatcaccctgttcgatgcttcgcgtcatgcctgccggtttgcagccgaggtcaaagactttgaccccacaggcatcctcgatcccaaagaaaccaaacgctgggaccggttctgtcagttcggcgtggtggcggccaaagaggcactggcccacagcggccttgaaatcaacgacagcaaccgtcaacgcatcggcgtgatcatcggctctggtgtgggcggtctgctgacgatggagacacaggcccacgtgcttgagggcaaaggtccagggcgggtcagccccttcaccgtgccgatgatgatccccaacatggccacaggcctggcggcgatcgccctgggaacgcaaggtcccagctccgctgtggccacagcgtgcgccgcgggctccaatgccatcggcgatgcgctgcgtctgctgcagcagggccatgccgatgccatggtctgcggcggcgccgaatcggccatcacaccgcttggtgttgccggtttcgccagtgccaaggccctctcgttccgcaacgatgatccggccaccgccagccgcccatttgatgctgagcgcgatggctttgtcatcggtgaaggcgctgggatcctggtgctcgaaaccctcgagcatgcccagaaccgtggtgccaccatcctcggtgaagtgatcggatacggcatgacctgtgatgcccaccacatcacctcaccgatccctggcggtgtcggcggagcgcgggccatgagcctggccatcgctgatgcggggctgcagcccaaggacattgattacgtcaatgcccatggcaccagcacaccggccaacgacagcaacgaaacctccgccatcaagaccgccctgggtgatcgggccaggcagattccggtgagctccaccaaatccatgaccggtcacctgctgggcggcagcggcggtatcgaggctgtcgcggccgtcttggccctgcaacacggggtgatcccccccaccatcaaccaccagaatcctgatcccgcctgtgatctggatgtcgttccgaatcaggcacgagagcagataatctcaacggccctctccaactcgtttggattcggcggccacaacgtctgcctcgccttccgtcgctacgcgtga

SEQ ID NO: 234885 - DNA, 304 bp, Unknown
  Bacterial polypeptide expressing nucleotide sequence isolated from the Sargasso Sea
attgaaggcactgaaattggctttgggagacggtattaccaaccacacttccgtcagttcaaccaaatccatgaccggtcatcttttaggtgcagcagcagccatagaagctgttttctgcgttaaagccctgcaccactcttacatcccgcccaccattaatatcaacgagctggatccggaatgtgattttgatgtcacaccgaatgaaggccgctctcgggtaatagacgttgccatgtccaattctttcggttttggaggaaccaatgcgtctgtgattttccgtaaaatgtattcctga

SEQ ID NO: 234886 - DNA, 496 bp, Unknown
  Bacterial polypeptide expressing nucleotide sequence isolated from the Sargasso Sea
ggatatgaacatgcaaaatctagaggagcaaaaatttatgcagaaattacaggatatggagcaacttctgatggatatgatatggttgcaccgtctggcgagggtgcagttagatgcatgaaaatggccttgagcacaagtaaaaataaaattgattatataaatacacacggaacatctactcctgttggagatataactgaacttaaagcagtaggtgaagtgtttaaagataatgttccaaaaatcagttcaactaaatcattatctggacattctttaggagcaacctctgttcatgaagcagtttatagtttaattatgatgaaaaataattttatatcagcatcaataaatattaatgacatggatgatgaagctaaaaaatttcctattattactaaagtagaaaaaaatgttaatttaaattctatcatgtctaatagttttggatttggtggaacaaatgcaacactggtatttgagaaagtttaat

SEQ ID NO: 234887 - DNA, 997 bp, Unknown
  Bacterial polypeptide expressing nucleotide sequence isolated from the Sargasso Sea
aatgaaaagagtagttataacaggtttgggaattatttcatcaattggactgaacgcaaaagaagtaaccgaatctttaaaaaagggaaaatctggtattacattctctgaagaatacgaattccatggttttaggtcgcaagttcatggtatgccaaaaattaatctatctgatcatatagacaaaagacaattaagatttatgggtgatggagctgcttataattatattgctatggagcaagcaattaaagatagtggtttaactgaaactgaaatctctaatgaaagaacgggtctaattgtaggttcaggtggaccttcaacaaaaaacctttttgctgcccatcaaatagttttagaaaaaaagagcccaaaaagaatgggtccatttatggtgactagagggatgtcttcaactaattcagcgtgtttagctaccccttttaaaattaaaggagttaactattcaatttcatcagcttgttcgacatcggctcattgtattggcaatggtttagagcaaattcaattaggaaaacaagacattatatttgcaggtgggggagaagaattagattggaccttatcatgcctttttgatgcgatgggagcaatgtccagcaaatataatgatatacctgaaactgcatcaagggcttatgataaagatagggatgggtttgtaatttcaggaggggctggagtattagtattggaatgttacgaacacgcaaaagctagaggagcaaaaatatatgctgaaatcacaggatatggagcaacttctgatggtcacgatatggtagcaccttccggtgaaggaggtgaaaggtcaatgaagcttgctttgtctagtatagaagatcgtaaagtttcatatataaatgcacatggaacttcaacacctgcgggagatgtagttgaggttgaagccattagaagaatttttggaaacaaggatattccccctatttcatctactaagtctttgaca

SEQ ID NO: 234888 - DNA, 1076 bp, Unknown
  Bacterial polypeptide expressing nucleotide sequence isolated from the Sargasso Sea
aatgagaagggtagttataacaggtttaggagttgtatcttgcttaggtaataatcaagaagaagtccataaatcactattaaattcgaagtcaggaatttcttatgctgaagagtataaagaacataatcttaaaagtcatgttcatggcaaaccaaatataaagcttgaagatcatatagatagaaaaacaattagatttatgggttcaggttcggcttataattacattgcaatgaaagaagcaattgaggactcgggattagaagaaactgaagtaagcaattttaaaactggaattgttatgggttcagggggaccttcaatcgaaaacgtcatactggcagcagataaaactagagctaaaactccaaaattaatgggaccatttattgttccaagaacaatggcaagtacagcttctgcaactcttgctgttccttttaaaataaaaggcactaactacacaatgagttcagcttgcgcaacaagtggacactgtattggcaattcaatggaattaattcaaatgggtaaacaagatgttgtttttgcaggaggtagtgaagaagttcattgggcaatgactgcaatgtttgatgcaatgactgctttatcatcaaaatataacgatgctcctgaaacagcctctagagcatatgataaaacaagagatggttttgtgattgctggtggtgcaggtgtgttagtgcttgaagaatacgaacatgctaaagcaagaggtgctaaaatatacgcggaattaactggttatggagcgacttcagatggatacgatatggtggctccatctggtgaaggagctgtaagatgtatgcaaatggcaatgtctacagcaaaaaataaaattgattatatcaatactcatggaacttctactccagttggagatatcacagagttaaatgcagtaaaaaatacgtttggagaaaatattccaaagattagttcgacaaaatctttatcaggacatccacttggtgctgcttctgttcatgaagcaatctattgtttgatcatgatgaaaaataattttattgctggctcagcaaaca

SEQ ID NO: 234889 - DNA, 412 bp, Unknown
  Bacterial polypeptide expressing nucleotide sequence isolated from the Sargasso Sea
tatgcacaaatcaattattaaaggtttggggtattatatccctgaaaacgtggtaacaaacaatgacttgacaaaaatgatggatacatctgatgaatggattagagaaaggactggaattgaagaaagaagatgggtaaatgataataagttgtctacttctttaatgggaacattcgctgctgaaaaggcgattaagaatgctaatattgacaaaaatgatatagatttcataatttttgccactttaagtcctgactattattttcctggatcaggtgtgttattacaaagaaacttagaaattaaggaggtaggagcattagatgttagaaatcagtgttcaggatttgtttatgcctttatcattgcagatcaatacataaaatctggtatgtataaaaatattttg

SEQ ID NO: 234890 - DNA, 204 bp, Unknown
  Bacterial polypeptide expressing nucleotide sequence isolated from the Sargasso Sea
gccgagcggttctcgattccgaacgaaaaggtcttgagcacttggccctctacggcaacacgtcagccgccaccatccccttgatgctggatgaagcggtgcgggacggacggatccaaccgggacaccgcatcgccagcagtggcttcggcgcgggactgagctggggtgcagccctgctgcgttggagcgggcccgcgtaat

SEQ ID NO: 234891 - DNA, 354 bp, Unknown
  Bacterial polypeptide expressing nucleotide sequence isolated from the Sargasso Sea
cctacataaatgcgcatggaacatctacccctctaaatgataaatttgaaaccatagctataaaaagggctttcggagatcactcaaaaaaactaaaaatttcttcaacaaaatcaatgaccgggcatctcctaggagcagcaggtggtatagaagcagcatttactgtaatggctattaatgaaaaagtagttccacctactataaaccttcaaaatcctgatcctgattgtgatttagattatgtagccaaccatgctctaaaagggaatgttcctgctgcaatttctaattctctaggatttggaggacataatagttcacttctttttcaagactaccctaatcaataat

SEQ ID NO: 234892 - DNA, 1216 bp, Unknown
  Bacterial polypeptide expressing nucleotide sequence isolated from the Sargasso Sea
tatgcgtgaggttgttgtaacaggaattggtattgtttccagtatagggaacaatgttgaagaagtaactgaatcactaaaaactcttaaatcaggtatcgttaagaatgaaataaatttggaattaggtttaagaagtcatatttctgggtcggtaaaaaatcttgatcttaaagaacgcatagatagaaagttattcagattcatgggggaagctgcggcttttgcttatataagcacagaagaagcaataaaagattcgggtcttgatgaagaaagtttatctagcaaacgaacaggcttaattatgggatctggcggagcttcctccgaagatcaaatagactcagcagatatattgaggtccaaaggcttaaaaagaattggtccttatagagttacaaaagccatgggaagtactgtttcagcttgcttggccacctcttttggcataaaaggaattaactattcaatctcctccgcatgtgcaacaagtgcacactgcataggatctggaatggagcaaattcaattaggtaaacaagatatcatcatagccggtggaggagaggcagagcattggggcatgacaagtttgtttgatgcaatgggtgctctttctaccaaatataatgatagtcctgaaaaagcatcaagagcatatgacagagatagagatggatttgttattgcaggagggggcggagccataattttagaagaaaaagaacatgctattaaaagaggcgcaaaaatttatgcacaattaacaggttatgcagcgacatcagatggtgaagatatggttagtccctcaggcgaaggaggcgaaagatgtatgcggattgctctgggcatgactgggaaggaaaaagttgactatatcaatgcccatggaacaagtactcctgctggtgatattacagaactcaaagccattgagaatgtatttggcacagatttacctctaataagctctactaaatccctttcgggtcactctttaggagcagccggcgtccatgaatcgattttttgcttaataatgatgaaagaaggatttgctacaggttcagccaatatcgagaacctagacgaaggtgctataaattttccaattattcaaaaaaatctggaaactgagctgaaaaaaattctaagtaatagttttggatttgggggtactaacgcaactctaattttcgaaaagatttag

SEQ ID NO: 234893 - DNA, 625 bp, Unknown
  Bacterial polypeptide expressing nucleotide sequence isolated from the Sargasso Sea
atgcgtagagtggtcgtgactgggttgggaattgtctcaagtcttggaaataacatcgaggaagtgaccacttcattgagaaatggtaattccggaataacattctgtaaagaatatgaggaaatgggttttcggagtcatattcatggttcaatcaaacttgatccttcagagtgcgtggacaggaaggtgcttcgctttatggggaatggcgcagcatatgcttatattgctatgcaacaggctatcgaggactcgggccttgaaaaagaccaagtcagtaacgataaaacaggcttaattataggttctggtggcccttcgacttcaaatatgatgactgctttcgatttagctcgtaataaagggccaaagcgcgttggcccctatatggtccctcgggtaatgtctagtactgtctccgcaactttggctacttccttccagatcaagggactcagctattcaataagctcagcctgttcgactagtgcacactgtataggtaatgcttttgaaactattcaactgggcaaacaagatataatatttgctggcggaggtgaggaactgcactggaccctgtctgtcttattcgatgcaatgggagcactttcatctaaat

SEQ ID NO: 234894 - DNA, 250 bp, Unknown
  Bacterial polypeptide expressing nucleotide sequence isolated from the Sargasso Sea
aatgataagctctacaaaatcaatgacaggacattcattgggagctactggtgctcatgaagcaatatattcagtaatgatgataaaagaggggttcattgcgccctcaattaatattgaaaccttatgcgatgaagctaagggaatagatattgttacaaatactcgagaattccctgtttgtaatgttcttagtaattcatttggatttggaggaacaaacgcaagtttagtaatcagtaaatactaa

SEQ ID NO: 234895 - DNA, 742 bp, Unknown
  Bacterial polypeptide expressing nucleotide sequence isolated from the Sargasso Sea
gcttgttcaactagtgcacattgtataggaaacgcatacgagcaaataatccttaataatcaggacatagtcttggctggcgggggtgaagacgaacattggacccaatctatgatgttcgacgcgatgggtgccctttcaagcaaatataacgagaatccagagaaatcttcaagaccatttgatgaaggtagagacggttttgttatagcaggtggaggcggaatgataattttagaagagctaagtcatgccttatcaagagatgcgaagatttatggagaaatagtgggatattctgctacctctgatggtggcgacatggttgctccttcaggtgaaggagcgataaattgcatgcgtaatgcgttaataatgagtaatttagaaagtgttgattatttaaatgctcatggaacgtctactccaaccggagaccctgtagagctagaatcaatcaaagaagtttttaaagatgcccttccaattgtaggatctactaaatctcaaacaggacatgctcttggtgcagctggtgctttggaatgcatatatagtcttttgatgatgaaagaaagctatattgccgaatccataaacattgattctcctataaccgaatcatcaggcatagagcttgcaagggagtatacaaaaaaaaatgacttcaaagctttcatgtcaaacagttttggatttggcggaacaaatgtaagtttaatagttaagaaatactcttaaa

SEQ ID NO: 234896 - DNA, 1159 bp, Unknown
  Bacterial polypeptide expressing nucleotide sequence isolated from the Sargasso Sea
aatgaaaagggtagttgttactggaattggaattgtttcgtgtttagggaataatcagcaagaagtttacgaatctcttttgaatactaaatcaggaatttcgttttctgaagaatataaagaacataatttaaagagtaatatacatggaaaacctaacataaagcttagtgatcatgtcgaccgaaaagcactgagatttatgggtaatggttcggcttataactacgttgcaatgaaagaagctattaaggattctggtttaaaagaaaatgaaattagtaatgtttcaactggaatggtaatgggttcaggtggtccatcaatagaaaatgttattttagcagcagacaaaacaagagagaaaaatccaaaaaaaatgggtccatttattgttcctagaacgatggctagtacagcttcggcaaccttagcagtaccatttaaaattaaaggagtaaattatactataagttctgcatgtgctacaagcggacattgtattggtaatgccatggagcttatacagtttggaaaacagaaaattatttttgcaggaggaagtgatgaactgcactttgcaatgacggcaatgttcgatgctatgactgctctttcttcaaagtataatgactcaccaaaaggtgcttcgagaccatatgataaaacaagggatggttttgttattgctggaggagcaggagttttggttttagaagagatggattacgcaaaggctaggggcgcaaaaatctacgcggaattgacaggctacggagctacttccgacggatttgatatggttgcgccatcaggtgaaggggctactaggtgtatgaacttagctttaaaaacaactagaaataaaattgattatatcaatgcacatggaacatcaactcctgttggcgatataacagaattaaaagctattgagggcgcttttaaggacaaaattccaaaaattagttctacaaaatccttatctggtcatcctctcggtgctgcttcagttcatgaagctatctactctttaataatgatgaagaataattttattgcagcatcagcaaatgttaacgaaattgacgatgaggcaaaaaaatttccaatagtttacaaggttgagaataatgtaactttaaattctgttatgtcg

SEQ ID NO: 234897 - DNA, 775 bp, Unknown
  Bacterial polypeptide expressing nucleotide sequence isolated from the Sargasso Sea
aatgaaaagagtagtaataacaggtttgggaattgtttcttgcttaggcaatagccaagaagaagttcatcaatccttattaaattcaaaatcaggaatttcttttgctgaagaatataaggaacacaatcttaaaagccacattcatggtaaaccaaatataaaactcgaagatcatgtagatagaaaaacaatcagatttatgggttcaggatcagcttataattttatagcaatgaaagaagctattgaagattctggattagaagaaaaagatgtaagtaattttaaaactggaattgttatgggttctggagggccttcaatagaaaatgtaattttagctgcagacaaaactagagctaaaactccaaaattgatgggaccttttgtagttccaagaactatggctagcaccgcttctgctacacttgcagttccttttaaaatcaaaggaactaactacaccatgagttctgcatgtgcaactagcggacattgtattggaaattctatggaactaatccagatgggtaaacaagatattgtttttgctggtggtagtgaagaaatacactgggcaatgactgctatgtttgatgcaatgactgcattgtcttccaaatataatgatactcctgaaaaagcttcgagagcatatgataaaactagagatggttttgtaatagcaggtggtggtggtgtattagtgctagaggagtacgaacatgctaaagctagaggagccaaaatatacgcagaattaaccggttag

SEQ ID NO: 234898 - DNA, 697 bp, Unknown
  Bacterial polypeptide expressing nucleotide sequence isolated from the Sargasso Sea
gagttaattcaattaggtaaacaaaatattgtgtttgctggtgggagtgatgaagtccattttgcaatgacggctatgtttgatgcaatgacagctttgtcatcaaaatataatcaaacaccagagaaagcatcaagaccttatgataaaacaagagatggatttgtaatttcaggtggaggtggagttttggttctagaggaactagaacacgcaaaagccaggggtgcaaaaatatacgcagaaataactggttatggagcaacatcagatggctacgatatggtagcaccatctggagaaggagcagtgagatgtatgaatatggcattaagcactgctaaaaataaaattgattatataaatactcacggcacatctactccagtaggagatattactgaactaaaagctgttggtcagtcatttcctgactacaagcctaaaataagctctactaaatctttatctggacattcacttggggctacttcggttcatgaagcaatctatagcttagttatgatgaaaaataattttatatctgcatctgcaaatatttctgatatggatgatgaggcaaaaaatttcccaatagttactcaagttgaaaaggatgttaatctaaacgcagtaatgtccaatagttttggttttggtggaacaaatgcaacactaatttttgagaaggtttaat

SEQ ID NO: 234899 - DNA, 724 bp, Unknown
  Bacterial polypeptide expressing nucleotide sequence isolated from the Sargasso Sea
cattgcattggaaatgcatatgaacttattcaaatgggtaaacaaaacatagtatttgcaggtggtggagaagagttacattggactttatcaatactgtttgatgctatgggagctctttcatcaaagtacaatgataatccatcagtggcttctagagcatatgattctgaaagagatggctttgtaatttctggtggaggcggaacattagtgcttgaagaacttgatcatgcaaaagcaaggggatccaaaatatatggtgaaattactggatatggcgctacttctgatgggtacgatatggtgcaaccatctggtgaaggtgctgagaggtgtatgaagatggcaataaaaaatattaagggtaatgtagattatataaattcacatggcacaagtacaacaataggagacttaaaagaattggaagcaattaaaaatgtatttggaaaaaatataccaaaaattagttcaactaaatccttaactggacactctttgggagccacaggtgttcatgaagcaatatattctcttttaatgatgaataataattttctcagtggttcagccaatataaattcattagatgataaagcaaaggatcataatattcttttagaaactgaacaaaataacaaaattgaaaatatcctttcaaatagctttggttttggtggtacaaatgcagcactattaatttcaaggtataatgattaaa

SEQ ID NO: 234900 - DNA, 548 bp, Unknown
  Bacterial polypeptide expressing nucleotide sequence isolated from the Sargasso Sea
atttgataaaaatcgtgatggttttgttatgggagaaggttctacagttcttatattagaaagtgaagaatctgcaaaaagtagagatgcagaaatatatgcttatatagatggatatggctcaacaacagatgcatatcatattactgctccagctgaaggaggcgcaggtgcagtaaaagcaatggaaaaagctatagatgatgctggaattactccttcagatattgactatataaatgctcatgggacctctacaccagctaatgataaaaatgaaacagaagcaattaaaacagttctgggtgaaaaagcttctgaagtggtaatttcatcaactaagtctatgacaggacacttacttggaggtggcggggcttttgaatctatggcatcaatattgtcaataaagcacagtaaagttcctccaacaattaacttaaatgatcctgatgaggaatgtgatttaaactataccccaaataatgctgttgaccttagcattaaaactgcaatgtctaattcttttggattttggtgggcataat

SEQ ID NO: 234901 - DNA, 292 bp, Unknown
  Bacterial polypeptide expressing nucleotide sequence isolated from the Sargasso Sea
gcaattaaatccatatttaaagacagatcttacctcattcctgtaagctctactaagtcgatgactggtcatctcttagggggttctggaggtatagaagctgtagcttgtattctttctttgacacataattttgtccctcctacaataaactacgtcaatcctgatccagattgtgatcttgattatgtaccaaataatgctagagatgctcaaataagagttgctctttctaattcattcggctttggtggtcacaacgtttgtctagcatttagcaaacttgattgat

SEQ ID NO: 234902 - DNA, 1188 bp, Unknown
  Bacterial polypeptide expressing nucleotide sequence isolated from the Sargasso Sea
ttgaaatagtttcttgtttaggtaataatcaaaaggaagtatatgaatcacttataaattcaaaatcaggaatttcttttgctgaagaatacaaagaacataatttgaaaagtagtatacatggaaagccaaatataaaacttgaagatcatgttgatagaaaaccacttaggtttatggggaatgggtctgcttataactatgtagctatgaaagaagcagtcaaggactcgggtttaaaagaaagtgatgttagcaatgtatcttcgggtatggtaatggggtctggtggaccttcaatagaaaatgttattttggccgcagataaaacccgtgaaaaaaatccaaaaaaaatggggccttttattgttcctagaacaatggcaagtacagcttctgcaactttagcagttccttttaaaataaaaggagttaactacacaataagttcagcatgtgccactagcggacattgtataggaaatgggatggaacttattcagtttggaaaacaaaaaattgtttttgcaggtggcagtgatgaattacattttgcaatgacggctatgtttgatgctatgacagcactttcttcaaaatataatgatacaccgcaaaaagcttcgagaccatatgataaatcaagagacggatttgtaattgctggtggagcaggggttttagttttagaagaaatggaacatgcaaaagcaagaggagcaaaaatctatgctgaattaacaggttatggagctacatctgatggttttgacatggttgctccatctggtgagggtgcagcgaggtgcatggaaattgcaagaaaaacagctagaaataaaattgattatattaatgctcacggaacatctactccagttggagatataactgaattaaaagccatccaacaaacttttaaagataaaattccaaaaattagttcaacaaaatctctgtctggccatccactaggcgctgcttctgttcatgaagcaatatattcattaataatgatgaaaaataactttattgctgcttcggttaatgtaaatgaaatggatgacgaagcaaaaaaatttccaatagttactgaagttgaaaaaaatgtgaatttaaattctgtaatgtcgaatagttttggctttggtggaacaaatgccactctagtttttgaaaaggtataaa

SEQ ID NO: 234903 - DNA, 576 bp, Unknown
  Bacterial polypeptide expressing nucleotide sequence isolated from the Sargasso Sea
ttgatgcagaaagagatggatttgttattggagagggatctggaattcttattttagaaactttagaaaatgcacaaaaaaggaatgcgagaatttatgcagaaatagttggttatggaacaacatgtgatgctcatcacataactgctccatctccaggcgggataggaggcgccgaagctatcaaattagcaattgaagacgcttgtcttagccatgaaaaagttgattacataaatgctcatggaacaagtacatcagctaatgataaaaatgaaacttctgcaattaaatctatttttaaagacagatcttacctcattcctgtaagctctactaagtcgatgacaggtcatctcttaggaggctcaggaggtatagaagctgtagcttgtatactttctttgacacataattttatccctcctacaattaactacgtcaatcgagatcctgaatgtgatcttgattatgtaccaaataatgcaagagaagctcaaataggagttgctctttctaattctttcggctttggtggtcacaatgtttgccttgctttcagcaaaatgaattgaa

SEQ ID NO: 234904 - DNA, 1168 bp, Unknown
  Bacterial polypeptide expressing nucleotide sequence isolated from the Sargasso Sea
tcaatctttatgggaaaacttagttaaaggtaaatctggtattgatcatatctcaggctttgatactgaaaaattttcaataaaaattgcaggtgaagttaaagattttgatccgaataatttctttgaagctaaggaggctcgtaagctagataggtttacaatgtttggtttaatagcagcggaacaagcacttcaaaattctaattataaatcctctgatgctggagttattgttggtacaggtgttggaggcatgcatacacttgaagaagaacatcaaaaactaattaaaaaaggtcaacgcggcgtatcaccattttatgttccaaaaatgattccaaacatcgctggaggacaaattgctatcaaacataatttgcatggtttaaacttttcaatgtctactgcctgttcttctgctacagatgcaattgggatggcataccgattaatatccaatggatactccaaagctattctttgtggcggagctgaaggaagtattacccctcttactctttcaggatttgctaatatgaaagccttatcaaaaaataatgaaaatcctcaaggtgcttcaaaaccattcgataagcataggaacggatttattttatccgaaggttcaggaatgttaatgttagaagattatgatgaagcaaagaaacgtgatgcgaatatcattggagaaattatcggatatggaataacgaatgacgcttttcatatcactcaacctgacaatgaaagtactggtgcatcaaacgcaataactatggcactaaatgatgctgaaattgatacatctgaagtggaatatattaatgctcacggcacatcaacatattttaacgatatgctggaaactcaagccattaaaaaggtttttggcaagtatgctaaaaatgtatctataagctcaacaaagtctatgacaggccatctgctgggagctgctggagccattgaagctattacatgtataaatactctaaataatggtattattccaccaaccatcaattacattaatcctgaccctgaatgcgacctagactatactccaaatgaagcatttaaaaaggatataaatatctcaatgagtaattcatttggttttggtggacataactcagttgtgatttttaagaaattttcttcttaa

SEQ ID NO: 234905 - DNA, 1186 bp, Unknown
  Bacterial polypeptide expressing nucleotide sequence isolated from the Sargasso Sea
taacattgatgaatatttagttggtcttcaaaccggtactaatggggtctcagatattactctctttgatcctgaacaacatccctgcaaattcgctgcagaagtaaaaaatcttcaatctgagaattttattgaagctaaagaatccaaaagatgggatcgtttttcccagtttggagttattgctgcaaagcaagcttttaatgattctggacttgaaattactgaagctaatgcatcaagaattggagtgattattggatctggtgttggaggcttactaactatggaaagtcaagctcaaatattgagtcataaaggacctaaaagagtaagtccatttacagtcccaatgatgattccaaacatggcgactggattagctgccatcgctttaggcgcaaaaggaccaagttcatctgtttcaactgcttgcgctgctggttcaaatgcaattggtgattcttttagattactccaactcggaaaggcagatgcaatgatctgtggaggagcagaagcaagtattacccctcttggagtagctggttttgccagtgccaaagctctttctttcagaaatgacagtcctcaaactgctagcagaccttttgatgcagaaagagatggatttgttattggagagggatctggaattcttgttttagagactctagaaaatgcacaaaaaaggaatgcgagaatttatgcagaaataattggatatggaacgacatgtgatgctcatcatattactgctccatctccagggggggttggtggcgccgaagccatcaaattagcaattgaagatgcttgtcttagccttgaaaaagttgattacataaatgctcatgggacaagtacatcagctaatgacaaaaatgaaacatctgcaattaaatctatttttagagacagatcttacctcattcctgtaagctctactaagtcgatgactggtcatctcttaggaggctcaggaggtatagaagctgtagcttgtatactttctttgacacataattttatccctcctacaattaactacgtcaatccagatccagaatgtgatcttgattatgtaccaaataatgcgagagaagctccagtaggggttgctctttctaattctttcggctttggtggtcacaaatgtttgccttgctttcagcaaaatgaatga

SEQ ID NO: 234906 - DNA, 685 bp, Unknown
  Bacterial polypeptide expressing nucleotide sequence isolated from the Sargasso Sea
atgatagcaggtggagcagaagctgctgtctgtgagcttggtttagcaggtttctgtgcagctagaagcctaagcacatcttacaatgacaatcctgaattagcatcaaggccatgggataaaaacagggatggatttgtgatgggggagggcgcaggtattttagttttagaagaacttcagcatgcaaaaaaaaggggagctaaaatttatgcagagttgattggttatggcatgtcaggtgatgcacaccatattactgcgccatctgaagatggggatggcggttttagagcaatgaagcaatctataaatatggctaatatttctttagaggatataaattatgttaacgcacatggtacatctactataaaaggagatgaaattgaactaaatgctatcatgaaactatttaacaaacatgaaaatttatttgtaagttcaacgaaatcatcaattggacatttattaggagccgctggtagtgttgaatctattttttcaatccttgcaataaataactcaattgtgcctggaacacttaatcttaaagatcccatagactctaaaaatataaatcttgtagcaaatgaaccaaaagaaactaaaattaatattgctttaagtaattcgtttggttttggaggaactaatactgctttattatttaagaattattagc

SEQ ID NO: 234907 - DNA, 751 bp, Unknown
  Bacterial polypeptide expressing nucleotide sequence isolated from the Sargasso Sea
tgcaacgccataattgacggtctaaactacattaggcttggatacgctgatgttattgtatccggaggttctgaagctggtgtttcaatttccggcattggtggctttaatgctcttagagctctttcaacaaggaacgaaagcccaaaaacagcttcacggccattcgataaaaatagagacggttttgttctgggtgaaggtgctggctgtttaattctggaggagcttgaacacgcgttaaatagaggggcaaaaatttatgctgagctaattggaggagggctctcagctgatgcatatcacatgactgctcctttacctgatgggactggggcaataaaagtaatgcagaactgtatatcagatgcaaatataaagccctctgatgtcgatattgttaatatgcatggcacatcaactcctttgggggatgtagctgagtccaacgcattaaaacaagtttttgaggaccatctctacacaatgaatattaactcgacgaaatcaatgaccggacatttactcggtgcagctggcgcaatagaagccattgcttcaattctctcaattaacaacaaccttgtgccacccacaattaacttttctgaaccggatgagaatattgatgagaaaattaatttcaccttcaacaagtctcaaactcgggaagtaaattacgcaatgagcaacacgtttggttttggaggacataatgcctgtgttatttttagttcttttaatgactaaa

SEQ ID NO: 234908 - DNA, 934 bp, Unknown
  Bacterial polypeptide expressing nucleotide sequence isolated from the Sargasso Sea
atgagaagagtagtagttactggtctaggtatagtatcttgtttagggaataatcaagaagaagttcatcaatcacttttaaattctaaatcaggtatatcgtttgctgaagagtataaagagcataatcttaagagtcatgtgcatggaaaaccaaatattaaactctcagattttgtagatagaaaaacaattagatttatgggatctggttcagcttataattatattgcaatgaaagaagctattaaagattccggattagaggaaaaagaagtaagtaattttaaaactggaattgtcatgggttctgggggaccttctatcgagaacgtaattttggcagcagataaaactagagcgaaaactccaaaattaatggggccatttattgtgccaagaacaatgggtagtacagcttccgcaacacttgcggttccttttaaaattaaaggtacaaattatacaatgagttctgcatgcgcaactagtgggcactgcattggaaattctatggaactcatacaaatgggaaagcaagatgtggtttttgcaggtggaagtgaggaagttcattgggctatgacagctatgtttgatgctatgaccgctctttcatcaaagtataatgataaacctgaaactgcttcacgcgcttatgataaaaatagagacggttttgtaattgctggcggagctggtgtgctggtgcttgaagaatatgaacatgcaaaggctagaggagcaaaaatttatgctgaactaactggttatggtgcaacttcagatggatatgatatggttgcgccatcaggtgaaggagcagttagatgtatgcaaatggctatggttacttctaaaaataagattgattatataaatactcacggaacatcaacacctgtgggagatattacagaattaaatgcgtaaa

SEQ ID NO: 234909 - DNA, 273 bp, Unknown
  Bacterial polypeptide expressing nucleotide sequence isolated from the Sargasso Sea
aatgagacgttattcccgcattaccggcacaggcagctatctgcccccacgccggttgaccaacgccgatctggtcgcagaactgggccagcgcggcatcgaaacctcggatgaatggattgtggagcgcaccggtattcgggcgcgccactttgccgcgccggatgtcacggccagcgacctcggtctggaggctgcgcgcagtgccttgcaggctgccaatctgcagcccacagacatcgatctgatcatcgtggccacgtccacgccaga

SEQ ID NO: 234910 - DNA, 805 bp, Unknown
  Bacterial polypeptide expressing nucleotide sequence isolated from the Sargasso Sea
aatggatctttttatgcaatatggtatggctgctggtatggatgctgtagctgatgcaaaattattagaatctcaatgtaatcccgatagaattggtgtttctattggctcaggcataggcggacttcctaacatagaaaatactagagatacatttatcaaaagtggttcaagaagaatatcacctttttttgtacctgccagtatcataaatatgatttcaggtaacttatctatcaagtatggctttaaaggtcctaatttatcgattgttacagcatgcacaaccggaactcataatattggtgagggtttcagacaaatacaacactctcatgcagatgtgatgatatgcggtggagcagaaatggccacctcagatttaggtgtcggtggatttgcagctgccagagctttgtctactcgcaatgattcgcctgagacagcgagcagaccatgggataaagatagggacgggttcgttttaggagatggcgcaggagtgattgtcctggaagagttagagcatgcaaaaaaaagaggcgcaaagatatatgctgagataaacggttatggcatgagtgcagacgcctatcatatgactcttccatctgaaacaggtgaaggtgcatctagatgtatgacgttagcccttaaggatgcaaacttagatccatcaaatattgattatattaatgctcatggaacctctacacccgcaggagatattttggaattaaaagctgtaaagaaaacttttggagctcattctcaaaaccttattattaatcaacaaagtcaatga

SEQ ID NO: 234911 - DNA, 925 bp, Unknown
  Bacterial polypeptide expressing nucleotide sequence isolated from the Sargasso Sea
aagccatgttcatggcaaaccaaatataaaacttgaagaccatgttgatagaaagtttataagattcatgggaccaggttcggcttataattatatctcaatggctgaagcagttaaagattctggattagaggaaaaagatgtaagtaatatttctacaggtatgattatgggatcagggggtccttcaattgaaaatgtgatattagctgcagataaaactagggaaaaaagtccaaaaagaatgggtccatttgttgttccacgaacaatgtcaagtacagcctcagcaacacttgcagttccatttaaaattaaaggtgtaaattatactatcagttcagcttgtgctacgagtgggcattgcattggaaatgcaatggaattaattcaattaggaaaacaaaaaataatatttgctggtggtagcgacgaagttcattttgcaatgacagctatgtttgatgctatgactgcactttcatcaaaatataatgatactccagaaaaagcttcgcgaccatatgataaaacaagagatggctttgtaatatcgggtggtggtggtgttttggttttagaggaatatgaacatgcgaaatctagaggagcaaaaatttatgcagaaattacaggatatggagcaacttctgatggatatgatatggttgcaccgtctggcgagggtgcggttagatgtatgaaaatggctttgagcacaagtaaaaataaaattgattatataaatacacacggaacatctactcctgttggagatataactgaactaaaagcagttggtgaagtgtttaaagataatgttccaaaaatcagttcaactaaatcgttatctggacactctttaggagcaacctctgtccatgaagcagtttatagtttaatcatgatgaaaaataattttata

SEQ ID NO: 234912 - DNA, 484 bp, Unknown
  Bacterial polypeptide expressing nucleotide sequence isolated from the Sargasso Sea
ttggtcgagcagctccacaggaccggcggtgtgatgtttcgtggcagcggtagcgccactccacagcgttccatcagcaacaccgagctgggacaacgggtggaaaccagcgatgactggatccgcagtcgcaccggcatcgcagcccgacgggtcatcggggccgacgaaagcctgggtgaactgaacggccttgcggcagagcgcgcactgtccatggcgggatggtcggcggacagcctggatctgatcctgctggccacctccacacccgatgatctgtttggatccgcaccgcggctgcaggcccgcatcggtgcggtgaacgctgcggccttcgatctcaccgccgcctgcagcggttttctgttcgcagtggtcacggcagcccagtacctgcgcagcggggcgatgcgacggatcctggtggtgggagccgaccagctcagtcgctgggtcgactgggacgaccgccgctcctgtg

SEQ ID NO: 234913 - DNA, 658 bp, Unknown
  Bacterial polypeptide expressing nucleotide sequence isolated from the Sargasso Sea
ttagattggacgctttcgtgtctttttgatgcaatgggggccatgtcttcaaacttcaatgaaacgccagaacgtgcatcacgtgcttttgatgcaaatcgggatggttttgtaattgctggtggtggtggtatagtcgtgcttgaagaattggaacatgctaaggcccgcggtgcgaaaatttatgctgaggtgactgggtttggggctacatctgatgggcatgatatggtggcaccctcaggtgaaggtggtgaacgagcgatgcgtttggccttgggtactctaccagagggtcgtgcagtttcatatataaatgcacatggtacttccacgcctgtaggagatgttggcgaagttgaagcagtacgtagggtttttgagaataaagaaatgccgctgattagctccactaagtctatgactggtcattctcaaggcgctactggagcccaagaggctatttattgtttattaatgcttaaaaataactttattgctccatccatcaatattgaagaacttgacgccggtatcaactctggcgagatagcttgcgaattggtcgaaaatgtttctcatgatacagtgatgacaaatagctttggatttggtggtaccaatggatcaatgctactatctagatattatgaataat

SEQ ID NO: 234914 - DNA, 892 bp, Unknown
  Bacterial polypeptide expressing nucleotide sequence isolated from the Sargasso Sea
ttgaatactacaattactgcaacggctaagtatatccctgaaaaaatcctttctaactttgatttagaaaaaattgttgatacaactgatgattggataaaatctcgaacaggcataactaaaaggcatatagtccaagaaggtgaagccacttcagatatgtgtgcaaatattgcaaaaaaactactaaaaagctcaggcaaaacgcctgaagaaattgatattataataatagccactagcactcctgaccattttgttgtttctacagctgcgatagttcaagacaaaataggggcaataaatgcatggggttatgatctaacagctgcatgcacgggatttatttttgctttagaaacaggtgcaagactaattgagtctgggaaatacaagaatgcaatcatcatcggagctgatactatgagctctatcattgattataaagatagaaatacctgcgtaatttttggtgatggtggcggtggtgttttaattgaacaaacagatgatgattatggtattgttgattccattcttaaaactgatggcagtggaaatcaatttttaactgtgcctgctggagggagcagaaagcccgcatcagaaactacagttaaacaaagattacattatgtttatcaggatggcaaaacggtttttaaatatgcagttaataggatgagcgaagtaagtaaggaaataattgaaaaaaataaactttcctcacatgatataaagctgtttataccacatcaagccaaccaaagaattatagatgcaactgcaagaaaatgtggactagatctagatcaagtttttgtcaatattgataaatatggaaatactactgctggaaccataccaattgcaattgatgaagccaaataaa

SEQ ID NO: 234915 - DNA, 628 bp, Unknown
  Bacterial polypeptide expressing nucleotide sequence isolated from the Sargasso Sea
tcaatcctaactaatcaaaaaattagtcaaaaggttgatacaagcaatgaatggataaaatctagaactggcatttctgagagaagaatctctagcttagaagataatgttactgagatgggttataaggctgctctaactgctatagaaatggctaattgggatattaaaacgattgatttgattattttagctacttctactccgcatgatttatttggatcagccccatccattcaagctaaattaggtgcgtctaatgctgtagctttcgatttaactgcagcttgtagtggttttttatttgccttaataacagcttcacaatttttaaaagggggtagttttaaaagggctattgttattggagctgatcaattatcaagttttgttgattggaacgatagaagaagttgtattctttttggagatggtgccggtgcattagcaattgaagccacaaataaatttgataattttataggttttgatatgagaactgatgggggaaggggttcttttcttaatcttccatcaaaaaaaaataaggattcaatagttgatgaaattgacttttcaagtggagggttttctccaaattcagatgaatggtcaggaagtttataaa

SEQ ID NO: 234916 - DNA, 361 bp, Unknown
  Bacterial polypeptide expressing nucleotide sequence isolated from the Sargasso Sea
gatgaatggtcaggaagtttataaattcgcagttaaagaagttcccctaattcttgaaaagttattgaaaaaaatgaaatataattctgatcaagttgattggctcttgctgcatcaagctaatcaaagaatattggattctgtgggagaaaggttaaaaattaccagagaaaaaattcttagtaatttagaaaaatatggcaatacgtcagcagcaactattccactaatgatggatgaggctgtaagagattctagaattaaacaaaatgatattattgctacaagtggtttcggtgctgggctaagttggggtgcagccctatttaatgggggtaaaaacaagataggaacattatga

SEQ ID NO: 234917 - DNA, 832 bp, Unknown
  Bacterial polypeptide expressing nucleotide sequence isolated from the Sargasso Sea
tttctttgttccaggatcaattgtcaatatgatatctggccttgtttcgattgagcatcaatttaaggggcccaatcattcagtggttacagcttgttctactggcagtcattgcattggaattgctgcaagatctgtagcttacggtgaggcagatattatgattgctggaggtgcagaaatggcatcaaccccattaggaattgcgggttttgtttcatcaagagctctttcaactaatgataaccctgaagaggcttcaagaccttgggaccaggaccgagatggctttgtattgtcggatggtgctggtgcactagtccttgaggagttggagcatgcaaagtcaagaaatgccaatatatatgcagagctagtaggttttggaatgagttcagatgcttatcatatgaccgcgccaccagaatctggtgatggagcagctttggccatgtccaatgccttgagtgattcaaagctaaatccagatgaggttgattatataaatgcacatggaacttcaacaccgcttggtgatattgcagaaaccaaagcaattaaaaaagtttttttaaacccgccagttatttcttcaaccaaatcaatgactgggcatacccttggagctgcaggtgcattagagtctattttttcaatactagcgcttcaagatcaaatcattcctccaacaattaatctccataatcaagatcctgaatgtgatctagattacaatgctaatcaagccagagataaagaagttaatgtggtgatgaataattcctttggctttggaggaactaattcaactcttgtatttaaaaagatctaa

SEQ ID NO: 234918 - DNA, 792 bp, Unknown
  Bacterial polypeptide expressing nucleotide sequence isolated from the Sargasso Sea
tttggtcgagcagctccacaggaccggcggtgtgatgtttcgtggcagcggtagcgccactccacagcgttccatcagcaacaccgagctgggacaacgggtggaaaccagcgatgactggatccgcagtcgcaccggcatcgcagcccgacgggtcatcggggccgacgaaagcctgggtgaactgaacggccttgcggcagagcgcgcactgtccatggcgggatggtcggcagacagcctggatctgatcctgctggccacctccacacccgatgatctgtttggatccgcaccgcggctgcaggcccgcatcggtgcggtgaacgctgcggccttcgatctcaccgccgcctgcagcggttttctgttcgcagtggtcacggcagcccagtacctgcgcagcggggcgatgcaacggatcctggtggtgggcgccgaccagctcagtcgctgggtcgactgggacgaccgccgctcctgtgtcctgttcggggatgccgccggtgccgtggtgatggaagcctccgatgagcagaatgacctccaggggttcctgctgcgctccgatggcggccgtggagcggtgttgcagctgccccagagcagcgaacgagctcctctggtgggcgatgccagccatcagcgcggtggttttgagccgattcagatgaacggacaggaggtttacaaattcgccgttcgggaagtgccggcgattttggaggcgctgctgcagaaaaccgagacccaagcggattccctcgactggctgttgttgcatcaggccaa

SEQ ID NO: 234919 - DNA, 571 bp, Unknown
  Bacterial polypeptide expressing nucleotide sequence isolated from the Sargasso Sea
aatgtgctttggttgttggtgcagaacactctcaaggattacaaattgggatgatcgaaatacatgtgttctttttgcagatggagcaggtgctgccattttgaaaccatcggatgacacgggaattatattttccgagcttggcgcgaatggtgaatacgcagaacttctccatgtcccttatggaacatcaagaaagccagaaacgccaaatgtagatgactacaccttaaagatgagcgggaatgaagtgtttaaggttgctgtaaaaacacttgaagaaattgccattgatgcacttaaaaaatcaaatcttgagagtaaggatattgattggttcattccgcatcaggcaaatatgagaatcattcaagcggtggcaaaaagattggaattacccgaggaaaaagtaattctcagcatggacattcatggcaatacatctgcggcatccatacccttggcgtttgatcgcgctgttcaagatggcaggataaaaaaaggagacactatattaatgcaaagcttcggtgctggctttacatggggaagtgttattttagatttataa

SEQ ID NO: 234920 - DNA, 337 bp, Unknown
  Bacterial polypeptide expressing nucleotide sequence isolated from the Sargasso Sea
gggttcctcagtattcaagtttgcagtaacgaatatggctgatatctctgaggaaataatgaaaaagaataatttaaaagctgatgacatagcataccttgttcctcaccaagctaataagagaataattgatgctacagcaaatagaatgggtgtcggtccagataaagttctattaaatattgaaagatacggtaatacaacagctggaacaatacccctttgtttatgggattttgaaaagaaatttaaaaaaggagataacttaattttagctgcatttggaggtggatttacatggggatctctatatttgaaatggtcttataataattga

SEQ ID NO: 234921 - DNA, 649 bp, Unknown
  Bacterial polypeptide expressing nucleotide sequence isolated from the Sargasso Sea
gttgcagggtttgctgcagcaagagctctttcaacctcatttaatgaaagtccaacaagggcatctagaccttgggataaagatagagatgggtttgtgatgggtgagggagctggaatacttgttcttgaagaatatgatcatgcgaaaaaaagagacgcaaatatatatgcagaagttattggatatggtatgtcaggagatgcttatcatattacagcacctgagccaacaggacttggcgctttaaattcaatgcaaaatgcattaaaacgagcttgtattgatccatcagatttagattatatcaatgcacatggaacttcgactcctcttggagatataattgaactccaggctgttagtaaattgatgaacagccaacttgagaaacttgttatgtcaagtacaaaatcttctataggccaccttctaggagcagctggagctgttgaagctatattttcaatattatcaatgaaaaataaaacaatacctcctactattaaccttgacaataaggcaaatgaagcaattcattttaatttagctccaaacttttctatagagaaaaagattaattattgtctatctaattcttttggtttcggtgggacaaatgcatctttggtttttagaaatttgtaat

SEQ ID NO: 234922 - DNA, 911 bp, Unknown
  Bacterial polypeptide expressing nucleotide sequence isolated from the Sargasso Sea
attgttgcaggatctggaggagcctccacaagaataatggttcaaaatggtgatataactcgtgaaaaaggtcctaagcgaattggtccatatggagtcacaaaaagtatgtctagctcaatatcagcaattctagcaacagcccttaagttaaaaggtattaattattctatttcttctgcatgtgcaacaagtgctcattgtattggtcatgctgctgacttaataaaggctgggcaacaagatatagttatagctgggggaagtgatgatgagcattggagctcatcagcattatttgatgctatgggcgcattatcatcaaactttaactcttctccaacagaagcttctagaccatatgatattgatagagatggctttgtaatatctggtggttctggaataataatccttgaagatgaagaacatgctatcaaaagaaatgcaaatatcttagcaagactttcaggttattttgctaattctgatggatacgatatggttgctccatctggagaaggagctgttagatgcatgaagggagcaatcgataatgccaattgtaagattgattatgtaaatactcatggaacaagcactcctgtaggagatgctgctgaattaaatgcaattaaagaagtatttggttcatactctccatttattagttctacgaaatctatgacaggccactccttgggagcaactggtgtgcatgaagcaatatattcaactatgatgattaatgagagttttattgcaccatctattaatattaagaatttatgtgatgaagcaaagggattaaatattattactgagacgcatgaaacaaaattaaataatgttttaagtaattcctttggttttggtggaacaaacgcaagcttagtaataagtaaatatta

SEQ ID NO: 234923 - DNA, 763 bp, Unknown
  Bacterial polypeptide expressing nucleotide sequence isolated from the Sargasso Sea
cattcagtagttacagcatgtgccacaggtgcacattcaattggtgatgcaagtgaaatgattaaaagaggtgcatcaaatgttatgattgctggaggtgcggaagcagcagtttgtaaattaggtatagcaggtttttgtgcagcaagaagtctaagcacttcttttaatgattttccagaaaaagcatctagaccatgggataaagatagagatggttttgtaatgggtgaggggtctggcataattgtattagaggagcttgaatttgcaaaaaaaaggggagctaacatatatgctgaaatatgtggatatggaatgtccggtgatgcttatcacattacagctccatctgaagatggagatggaggttatagagctatgaaatctgcattagaaatggcaaacatttcaaatgatgatgttaattatattaatgctcatggaacttctacagttaaaggtgatgaaattgaattaagtgcaataacaaatttatttaatcataaagtaaacgtcagctcaactaagtcctctataggacatttactgggagcagcaggaagtgttgaggcaatcttttctatgttatctattaaaaataatattatgcctgcaactttaaatttagaaaatccaatagaatcaagaagtgctaatttaatatctaaagagccattagaaggtgttgttaaatacgctttaagtaattcttttggttttggaggtacaaatactgcgttattatttaaaagtatttagt

SEQ ID NO: 234924 - DNA, 628 bp, Unknown
  Bacterial polypeptide expressing nucleotide sequence isolated from the Sargasso Sea
aagtcttttaaaagagtatctccattttttgttcctggatccataataaatatgacacctggatacttaagtattattaaaggatatacaggtccaaatttatctattgtgactgcgtgcgcatcaagcaatcatgccattggaactagcgcaagattgatagcctatggagatgcagatgttatggttacaggaggttctgaaatggcaactacaccattgggagtttcaggttttcttgcatcaagagctttaagtaaatctgatgatccagaaacagcaagtaggccatgggataaagatcgtgatggttttgtattgtcagatggagctgcaattctagtgttggaagaatatgagcatgctaaaaatcggtcagcaaatatatacgcagaagttattggttttggcatgagttttgatgcatatcatatgactgcaccatcagaagatggaactggtgctgcattatcaatttcccgagcaatatcagatgcaggcatttcaacaaatgatattgattatataaatgctcatgctacatcaacacctctgggcgatcttgcagaatgtaatgcagttaaatctatttttgattctcctccacctattagctcaactaaatcta

SEQ ID NO: 234925 - DNA, 763 bp, Unknown
  Bacterial polypeptide expressing nucleotide sequence isolated from the Sargasso Sea
taaggggactaactatacaatgagttctgcgtgcgctactagtggccactgtattggtaattcaatggaattaattcaaatgggaaaacaagatattatttttgctgggggtagtgaagaaatacactgggctatgactgctatgtttgatgcaatgactgcattgtcgtctaaatataatgaaactcctgaaactgcctctagagcatatgataaaacaagagatggatttgtaattgcaggaggagctggggttttagtgcttgaagagtatgaacatgccaaagctagaggagctaagatatatgcagaattgactggttatggagcgacctcagatggatatgatatggtggcaccatcaggtgagggggctgtaagatgtatgaaaatggctatgacaactgccaaaaataaaattgattatataaatactcatggaacatctactccagttggagatattacagaactaaatgctgtcaaagaaacatttggatctaatattccaaaaataagttcaacaaaatctttatcaggtcatccattaggtgccgcttcagttcatgaagctatttattgtttaattatgatgaaaaataattttattgctggatcagcgaatattcatgaaatggatgaagaagctaaaaaattcccaatagttgcaaaaacagaaactggagttacattaaatacggttatgtctaatagttttggttttggtggaactaatgctgctttaatttttgagaaggtttag

SEQ ID NO: 234926 - DNA, 808 bp, Unknown
  Bacterial polypeptide expressing nucleotide sequence isolated from the Sargasso Sea
atgaagcgtcgcgtcgtcgtaaccggcctgggtatcgtctcgccgttgggcaatgatctggccagcagctgggaaggcatcacccagggtcgttcgggcatcggtccgctgaccaacgtttctgatgcctatctggatcggttcaccaccaagattgcaggtgaggtcaagggattcgacatcaccgccgacaatgaactgttcggcaagttccgggtcagcggcaaggatgccaagaagatggacccgttcatccattacggcctcggtgcctcgttcatggccctgcacgactcgggcctggaaatcaccgacgccaatgccgagcgcatcggcgccatcgtcggcgccggcatcggcggcctgctcggcatcgaagagcagaccatcgagttccatgagggcaagaagatctcgcccttctacgtgcccaagaccatcatcaacatgctgccgggccagctgagcatcatcaccggcctgaagggcccgtcgttctcggcggtgtcggcgtgtgcgacctcgaaccattcgatcggcaccgccatgcgcatgatccagtacggcgatgccgacgtgatggtggtcggtggtgccgagcgtggctcgtcgccgaccgcactgggcggcttctgcgcgatgaaggccatgagcacccgcaacgacgccccggaacaggcctcgcgcccgtgggacaaggaccgtgacggcttcgtgctgggcgacggcgccggcatcctgatcctggaagagtacgagcacgccaaggcacgtggcgcgaagatctactgcgaactggccggcttcg

SEQ ID NO: 234927 - DNA, 856 bp, Unknown
  Bacterial polypeptide expressing nucleotide sequence isolated from the Sargasso Sea
ttcgccgttcttcgtgcctggctcgatcatcaacatgatttccggcttcctgtcgatccacctgggtctgcaggggccgaactatgccatcgctacggcgtgcactaccggcacgcactgcatcggcatggccgcgcgcaacatcgcctatggcgaagccgatgtgatggtcgccggcggcgccgagatggccgcctgcggcctgggcatgggcggtttcggtgccgcgcgtgcgctgtcgacgcgtaacgacgagccgaccaaggccagccgtccgtgggacaagggccgtgacggtttcgtcctctccgatggttccggcgccctggtactggaagagttggaacacgccaaggcacgtggcgccaccatctacgccgagctgatcggctttggcatgagtggcgatgccttccacatgacctcgccacccgaagatggcgccggtgcggcgcgctgcatggcagcagccctgcgtgatgccggtatcaatgccgaccaggtgcaatacatcaatgcccacggcacgtcgacctcggctggcgacctcgccgaagccgcggcagtgaagagcgtgttcggtgatcatgcctacaagctggcggtcagctcgaccaagtcgatgactggccacctgctcggtgcggcaggtgcggtcgaggcgatcttcagcatcctggcgctgcgtgaccaggtagcgccgccgaccatcaacctggacgagccggacgaaggctgcgacctggacttcgtgccgcatcaggccaaggccatgccgatcgaaatcgccctgtcgaactccttcggcttcggcggcaccaacggctcgctgctgttccgtcggtacaacggctga

SEQ ID NO: 234928 - DNA, 399 bp, Unknown
  Bacterial polypeptide expressing nucleotide sequence isolated from the Sargasso Sea
tattgggcgcagactcacctaaacgtggtgactctcctgcacaagaggaagcttatatttacatgaagggaaatgaagtgtttaaatttgcggtgacacgtttaagtgaaatcgtagaagaaacacttgctcataacaatatggataaatcaaaagttgattggcttgtgcctcatcaagctaatttacgcataataaaagcggcagcaaaaaaactatcaatgccaatggagcaagttgttgtgacattagataagcatggtaatacttcagctgcgactattcctacagcacttgatgaagcaataagagatggccgcatcaaacgtggacaaactattctaatggaagcctttggtagtggttttacctggggttcagcccttattaaatattaag

SEQ ID NO: 234929 - DNA, 726 bp, Unknown
  Bacterial polypeptide expressing nucleotide sequence isolated from the Sargasso Sea
acaagtggacactgtattggaaatgcaatggaacttatccagctaggaaaacaaaatattgtatttgctggaggaagtgatgaagttcattttgcaatgacagcaatgtttgatgctatgactgctttgtcatcaaaatataacgatactccagaaaaagcttctagaccatatgataaaactagagatggatttgtaatatcaggcggtgggggtgttttagttttagaggaatatgaacatgcaaaagctagaggagcaaaaatatatgctgaattaactgggtatggagctacttcagatgggtacgatatggtagctccatcaggagaaggagctgtaagatgtatgaaattagctttaagtactagtaaaaataaaattgattatattaatacacatgggacctctactccagttggagatattactgaacttaaagctgttggagaagtttttaatgaaagtattcctaaaataagttctacaaagtcactttctggacattcattaggagcaacctctgtgcatgaagcagtttatagtttaattatgatgaaaaataatttcatatcagcgtctattaatatcactgaaatggacgatgaagcaaagaaatttccaatagttacaaaagttgaaaaaaatgtaactttaaattccatcatgtctaatagttttggatttggtggaaccaatgcaactttagtttttgaaaaggtttaa

SEQ ID NO: 234930 - DNA, 619 bp, Unknown
  Bacterial polypeptide expressing nucleotide sequence isolated from the Sargasso Sea
ttggtcgagcagctccacaggaccggcggtgtgatgttccgtggcagcggtagcgcaactccacagcgttccatcagcaacaccgagctgggacaacgggtggaaaccagcgatgactggatccgcagtcgcaccggcatcgctgcccgacgggtcatcggggccgacgaaagcctgggtgaactgagcggccttgcggcagaacgcgcactggccatggcgggatggtcggcagacagtctggatctgatcctgctggccacctccacacccgatgatctgttcggatcagcaccgcggctgcaggcccgcatcggtgcggtgaatgccgcagccttcgatctcaccgctgcctgcagcggttttctattcgcagtggtcacggcggctcagtacctgcgcagcggggcgatgcaacggatcttggtggtgggagccgaccagctcagtcgctgggtcgactgggacgaccgccgctcctgcgtgctgttcggggatgctgccggtgcagtggtgatggaagcctccgatgagcaggacgacctccaggggttcctattgcgttccgatggcggccgtggtgcggtgttgcagctgccccagagcagcgaacgagcac

SEQ ID NO: 234931 - DNA, 550 bp, Unknown
  Bacterial polypeptide expressing nucleotide sequence isolated from the Sargasso Sea
ggcgaagggtcaggtgtggttgttctcgaagagtatgaacacgcgaaagcacgcggcgcgaccatctatgcagaggttgcaggctatggcctttccggcgatgcctatcacatcacggctcctgcttctgatggggatggtggtttccggtcaatgcagatggcgctcggacattcaggtcttggcgttgccgacatcgactatgtgaacgcacacggcacatccactcctctgggagatgagattgagctcggcgcagtgtcacgcctcttcggaaattcaatcgagaccatgtccatgtcatcgaccaagtcttctattggtcatttgttgggcgcggcgggcgctgttgaggccattttctcgatcctcgcaatgcgggacaatatggtgccaccgaccatcaatctggaaaatccgtcggttgaaacggacatggatctggtcccgctcaaagcccgtgaaaaaccagtgaacgcagtgctcacgaactccttcgggtttggcggaaccaatgcgtcactcgtcatgaagaccgctgacgcttgag

SEQ ID NO: 234932 - DNA, 685 bp, Unknown
  Bacterial polypeptide expressing nucleotide sequence isolated from the Sargasso Sea
gttaacaggtgggtctgagatggctacaacccctttaggaatttctggttttaatgcagctaaagctctttctacaaacaacaacaatcctcaatcagcaagtagaccttgggataaagatagagatggttttgttttaggagaaggagcaggatgcttgatattagaggaatatgaacatgccaaattaagagacgcaactatttatgctgagatagttggatttggaatgagtgctgacgcataccatataaccgctccgcctgaagagggtgaaggtgcagctttatcaatgagcaatgctttgtcagatgcaaatttaactaatgaaaagattgactacattaatgcacatggaacctcaactccagcaggagatattgcagaaacattagcagttaaatcggtttttaatgaccacacagataagttggttatcagttcgactaaatcaatgactggacatcttttgggcgccgcaggagcaatagaagcaatattttctattcttgctattagagacaatatttgtccacctaccatcaatctagataatccagatgatgggtgtgatttaaattattctgcaaatgaagcaacacataaaaatataaaatactcattgtccaattcatttggatttggaggtacgaatgcatctttaatcttttgtgatgtagaataa

SEQ ID NO: 234933 - DNA, 694 bp, Unknown
  Bacterial polypeptide expressing nucleotide sequence isolated from the Sargasso Sea
attcagtatggaaaacaggatataatatttgcaggaggaggagaagaattagattgggctctatctggaatgtttgatgctatgcctgctttgtcttcaaagtataacaataccccagaaaaagcatctagaccatatgatgcaaacagagatggatttattattgcgggtggaggtggagctcttgttttagaagagtatgaacatgctaaagctagaggagcaaaaatatatgctgaattaactggttatggagctacatcagatggatatgatatggttgcaccatctggggaaggtgcagttagatgtatgaagatggcattaaaaacaaaaagaaatgaaattgattatatcaacacccacggtacttcaacaccagtgggtgatattacggaattaaattctataaaagaagcatttgaaaataaaattcctaaaattagttcaacaaaatcactgacaggtcatcctttaggtgcagcttctgttcatgaagcaatttattctttaataatgatggaaaataattttatagcagcttctgcaaatattgaaaatatagatgatgatgccaaaccttttccaatagttactaaggtagaaaaaaatgccacattgaattctgttatgtcaaatagttttggttttggtggtactaattcaactttagtttttgaaaaattaaattaaa

SEQ ID NO: 234934 - DNA, 689 bp, Unknown
  Bacterial polypeptide expressing nucleotide sequence isolated from the Sargasso Sea
cgccgaccgcgtgggcgcgaacccggcggccgcctacgatctcaacgccgcctgcgccggcttcgcctacggggtcgcccaggccgatgccctcatccgcgccggcgccgcccactacgcggtcgtcatcggtaccgagaagctcagcgacgtcgtggaccccaccgaccgctccatctcgttcctcctgggcgacggcgcgggcgcggtcgtcgtcggaccgagtgagactccgggcatcggtccgaccatctggggctcggacggctcgaaggcggatgccgtgggcatgaaccacacgctgaccgagttccgcgacggcctcgccccctggcccaccctccgtcaggagggcccgacggtgttccgctgggccgtctgggagatggtcaaggtcgcacggcaggccatcgaagccgccgggatcacccccgacgacctggccgccttcgtgccgcaccaggccaacatgcgcatcatcgacgagttcgccaagcagctgaagctgcccgagtccgtcgtgatcggtcgagacatcgagacgacgggcaacacctccgcggcatccattccgctggcgacgcaccgtctgctcgaagagcaccccgaactcagcggcggcctcgccctgcagatcggattcggagccggactcgtgttcggcgcccaggtcgtcgtcctcccgtgac

SEQ ID NO: 234935 - DNA, 793 bp, Unknown
  Bacterial polypeptide expressing nucleotide sequence isolated from the Sargasso Sea
ctcggcaacactagcagttccatttaaaataaaggggactaattacacaatgagttctgcatgtgctacaagtggacactgtattggtaattctatggagctcattcaaatgggaaaacaagatatagtatttgcaggtggaagtgaggaaatacactgggcaatgacagcaatgtttgatgcaatgactgcactttcatcaaaatataatgatacaccagaaaaagcatcaagagcgtacgataaagcaagggatggttttgttattgcaggaggtggtggagttttagtactcgaagaatatgagcatgcaaaagctagaggtgcaaaaatatatgcagagttaacaggctatggcgcaacctcagatggatacgatatggtggcaccatctggtgaaggagctgttagatgtatgaaaatggctatggcaacttcaaaaaataaaattgattatataaatacccatggaacctcaactccagttggagatattactgaattaaatgctgtaaaagaagcattcgggactgaaatacctaaaataagctcaactaagtctctatcgggacatccattaggagcagcttcagtacatgaagcaatatattgtctaataatgatgaaaaataattttattgcagcatcagcaaatataaatgaaatggatgatgatgcaaaaaaatttcctataatcgaaaaagttgaaactgatgtaacactaaactctgttatgtctaatagttttggttttggtggcactaatgcagcattaatttttgaaaaggtttaa

SEQ ID NO: 234936 - DNA, 679 bp, Unknown
  Bacterial polypeptide expressing nucleotide sequence isolated from the Sargasso Sea
atgatagcgggaggagctgaagctgctgtatgcaaattaggattagcaggtttttgtgctgcaagaagcttaagtacatcatttaatgatacgcctaatttagcttctagaccttgggataaagaccgtgatggttttgttatgggtgaaggatcaggtatacttgttcttgaggaattagaatttgctaaaaaaagaggcgctaatatatatgctgaaataattggatacggaatgtctggtgatgcatatcatataactgctccttcagaagatggtgatgggggatacagggcaatgaaagaggcattaaagatggcagatatttcttctgaaaacgtaaattatataaatgcacacggcacatcaactgtaaaaggtgatgaaatagaattaaatgctatctccaagttattcaaacataatatagatgtaagttctactaagtcttcaattggacatcttcttggagcagctgggagtgttgagtcaatatttgcaatattatctataaaaaataaagttttaccatcaacattaaatttaaataatcctatagataattttaatattaatttaattcctaatgtcccaattgaaaaaaagatagatatagctctaagtaattcatttggttttggaggaacaaatactgccttattatttaaaagtatttaaa

SEQ ID NO: 234937 - DNA, 667 bp, Unknown
  Bacterial polypeptide expressing nucleotide sequence isolated from the Sargasso Sea
gtgtttgctggaggaagtgatgaagttcatttcgcgatgactgctatgtttgatgctatgacggctttatcatcaaaatataatgataccccagagaaagcatcaaggccctatgataaaactagagatggtttcgtaatctctggaggaggaggtgttttagttctagaagaatacgaacatgcaaaggcaagaggtgcaaaaatttatgcagaaattagtggatatggcgctacttccgatggttatgacatggttgctccttctggagaaggtgccgtaaggtgtatgaaaatggcattaagcacaagtaaaaaaaaaattgattatataaatacacatggaacctctactcctgtaggagatattactgaacttaaggcagtaggagaagtatttcaaaattcggtcccaaagattagttctactaaatcactttctggccactcattaggagcgacctcagcacatgaagctatatatagtttaattatgatgaaaaataattttatatctgcatcaataaatattaatgagatggatgaagaagcaaaaaaatatccaatagtcacaaaagttgaaaaaaatgcaactttaaattcagtaatgtctaatagttttggttttggtggaactaatgctactctgatttttgaaaaaatttaat

SEQ ID NO: 234938 - DNA, 508 bp, Unknown
  Bacterial polypeptide expressing nucleotide sequence isolated from the Sargasso Sea
ggctatattgcacgaggagcaaaaatctatgcagagattattggttttggaatgagtgcagatgctcaccacattacctcaccaccaaatgaaggagaaggagctgcactatcaatgcaaaacgcaatttctgatgccggcatagaagtttcctcgattgactacataaacgctcatggaacatctactcctgctggagatatcgcagaaactaaagcaattaagtcaatttttaagaatgaagtagacgacctgattgtaagttcaactaaatctatgacaggacatcttttaggagcagctggtgcaattgaagctatattttcaatattaagcattaaagataatatctgtccgcctactataaatttggataatcctgatccagaatgtgatcttaattactctgcacacaccgcgacaaaaaagataataactcattctctttccaattcatttggatttggaggcacaaatgctactctaatttttaaagaattagattaag

SEQ ID NO: 234939 - DNA, 880 bp, Unknown
  Bacterial polypeptide expressing nucleotide sequence isolated from the Sargasso Sea
ttgagcacagaagaagccataaaggatgcatctttaaatgattctgaattatctaatcaaaagactggtttaattatgggctctggaggagcctctacagaggatcaaatagattctgctgatatcctcagagcaaaaggtttaaaaagaattggtccatacagggttactaaagctatgggtagtactgtttcagcgtgtcttgcaacctccttcggtatcaaaggcataaattattctatttcatctgcttgtgctacaagtgctcactgcatcgggtcaggaatggagcaaattcaattaggtaaacaagatattgtaattgctggaggtggggaagctgagcattggggtatgacaagtttatttgacgcaatgggagcattatctactaagtacaatgaagaacctgaaaaggcctctagagcttacgataaagatagagatggatttgtaatcgctggaggagcaggatcgatgatcctagaagaaaagcaacatgcaattgaaagaggagcaaaaatatatgcccaactgactggttatgctgctacatcagatggactagatatggttagtccttctggagagggtggagagagatgtatgcaaattgcctgggaaatgagtggcaatacaaatattgactatatcaatgctcatggcacaagtactccggccggagatatcacagaattaaatgcaattaaaaatgtttttggtgataaggttccctgtataagttccacaaagtctctttcaggtcactcattaggtgcagcaggtgttcaagaagctatctatggcttaattatgatggatgaaggttttatagctggttctgcaaatattgaaaacattgatgaaggtgcagaacctt

SEQ ID NO: 234940 - DNA, 614 bp, Unknown
  Bacterial polypeptide expressing nucleotide sequence isolated from the Sargasso Sea
aggagcagtagttgttgaagaaagtaaaaatgaagaagatggtgaaatctattctttttcaaatggtatgagttcagataaattagatattttagaaatacctaattttggttcagctatgaacagattcactccaaatgctgcggcagatgtagtttggacttttgaaggacaagaaatttttaagagtggcataagagcgatggcaaaatcttctgaagaagcaatagaaaaatctggattaaaaaaagaagatgttgatatccttattccccatcaagcaaacgtaagaataatagaaggattggaaagaactttgaagcttccaaatgcaactactttaaaatatggatataagtatggaaatacttctgctgcatctatccctactgcctttgttgatgcaattgaagatggaacaattaaaggaaatgacacccttgttataacagcagtgggagccgggttaacctggggtggggcagctttgagattaggaaatagaattactcctttaggtgagacagatgtagaccttccaccatatgaaggaaccggaatagatgttattagagaatcaattaactattttgttcctgataaagcagaataaa

SEQ ID NO: 234941 - DNA, 796 bp, Unknown
  Bacterial polypeptide expressing nucleotide sequence isolated from the Sargasso Sea
ttgaaagcagctgtatcagcaaccagtcgttatttaccaaaacaaataatgacaaatcatgatcttgaaaaaatggtcgatacatctgatgattggatacaatcaagaactggtattgttgaacgtagggttgtaagtgaaggagaaacaacttcagatatgtgcacacatattgcttatgaattattaaaacgctcagaaacagagccagatgaaattgatgtaattattgtagcaacggtcactcctgatatgcctactccggcaactgcatcaattgtacaaaatagaattaaagcaaataatgcttggggttttgatttatctggtgcttgtacaggatttatatatgctgtagatactggatctaggttaatcgaatctggtaaatataaaaaggttatggttattggtgtagatactatgagttcagtattggattatactgaccgaaatacgtgcgttttatttggcgatggtggtggaggaataatgctagagcctgcggaaaatgatgataatggaattattgactcaattttacgtacagatggttctggaggagattatttaaaaattcctggaggaggaagcttacaccctgcttctcatgatacggttgatcaaaatcttcattatattagacaagatgggaaaatagtttttaaatatgctgtaaaaggtatggcagatatcagtgaagaaattctaattaaaaataatataaatagtagcttaattgatctatatgttcctcatcaagcaaataaacgtataattgatagtgccgctgagc

SEQ ID NO: 234942 - DNA, 565 bp, Unknown
  Bacterial polypeptide expressing nucleotide sequence isolated from the Sargasso Sea
gagctcataatagattatacagatagaaatacttgtgtgatatttggagatggtggtggaggtgtaattttagaaccgacacaaagagatattggtattttagattctattttgcatactgatggtagcgggaacaagtacctaactgtacctggagggggaagttccaatcccacctcgagagaaacaatagataatagaatgcactatttatatcaagatggtaaaacagtatacaaatttgcagtaaaaaatatggctgatgttagtaaaaaaatcctcgataataataacttaaatggaactgacattaaattatttataccacatcaagcaaatatacgtataattgatgctgcagctaaaagatgtgggctaaaagatgaacaagtgttaataaatataaataaatatggcaatacaacagctggaactatacctatagcgcttgatgaagcagtagaaactaatcgtttggatgaaggtgacttattattactatctacttttggggcaggatttacatggggaagtatgctaatacgttggggaaatactcaatgaa

SEQ ID NO: 234943 - DNA, 860 bp, Unknown
  Bacterial polypeptide expressing nucleotide sequence isolated from the Sargasso Sea
aatgaaaagagtagttataacaggacttggtgtagtttcatgtttaggaaataatcaagatgaagtttatcaatctttagttaatacaaaatcaggaataacattttcagaagaatataaagaacataatttaaagagccatgttcatggtaaacctaatatcaaattagaagattatattgatagaaaagttataaggtttatgggtgctggatcagcatataattatgttgcaatgagtgaagcagttaaagattctgggttagaagaaaatgaggttagtaatatttcaacaggtatggttatgggatctggaggaccatcaattgaaaatgtgattttagcatcagataaaactagagaaaaaaatccaaagaaaatgggtccatttatagttccaagaactatggcaagtactgcgtctgcgactctcgcagttccatttaaaattaaaggaacaaattacacaataagttctgcatgcgcgacaagtggtcattgtattggtaatgcaatggaacttattcaattaggaaaacaaaatattatttttgcaggtggaagtgacgaggttcactttgcaatgactgcaatgtttgatgcaatgactgcactatcctcgaaatataacgatacccctgaaaaagcctcaagaccgtatgataaaacaagggatggttttgtaattgctggtggaggtggagttcttgttttagaagaatacgaacatgccaaagcaagaggtgctaaaatatatgcagaattaactggatatggagcaacatcagatggctatgatatggttgcaccatctggtgagggagcggtgagatgtatgaaaatggctttagcaacttcaa

SEQ ID NO: 234944 - DNA, 663 bp, Unknown
  Bacterial polypeptide expressing nucleotide sequence isolated from the Sargasso Sea
caggatttgtttatgcaatgcaaacagcagatcaatttattaagactgggatgtataaaaatattcttgttattggttctgaaactcagtctggagcaattgataaaacaaccagaggtagagatataggtgttatttttggggatggtgctggtgctgctgttttatcaagaagcaactccaaagattcaaatattatgtcttcccaccttcattcagaaggagagcatgcagaggagttaataatggagagtcctaatatgaataaatgggttacagaaattgtatctgataatgacccagaagatttatcttattatccatacatgaacggaaaacatgtatttaaaaatgcggtaactcgttttgaagaagtaataaatgctggtttgaatcataataatttaaaagctgaggatattaatcttttaattccacatcaagctaacttgagaatatctcaatttgttcaaaagaagtttaatctcagagatgatcaagtctacaataatataatgagatatggtaataccaccgcagcatcaattccaattgcattaacagaggcttgggaagaaggaaaggttaaagatggagatttaatagttttagctgcatttggagccggatttgcttggggaagtaatgttattaaatggtaaa

SEQ ID NO: 234945 - DNA, 820 bp, Unknown
  Bacterial polypeptide expressing nucleotide sequence isolated from the Sargasso Sea
tgcaaaatcaggtattacattttctgaagaatacaaagaatacaatttaaaaagtcatgttcacggaaaaccaaatattaaactagaagatcatgtagatagaaaatttataaggtttatggggccagggtctgcttataattatgtttcaatgaatgaagctgtaaaagactctggacttgaagaaaaagatgtaagcaatgtaacaacaggaatgattatgggatcaggaggtccttcaatagaaaacgttatattagcagcagacaagacgagagaaaaaagcccaaaaagaatggggccttttgtagttccacgaacaatgtcgagtacagcttcagcaactctcgcagtaccttttaaaattaaaggagttaattatactattagttcagcgtgtgcaactagcggacattgtattggtaacgctatggaattaattcaactaggaaaacaaaaaattatttttgcaggtggtagtgatgaggttcattttgcaatgactgcaatgtttgatgcgatgacagctttatcttcaaaatataacgatactcctgaaaaggcgtcaaggccttatgataaaactcgagatggatttgttatcgctggtggtggtggtgttttagttttagaggaatatgaacatgctaaatcaagaggtgcaaaaatttatgcagaattaacaggctacggtgcaacgtcagatggttatgatatggttgctccttcaggtgaaggtacaattagatgcatgaaaatggcattaagcaccgcaaaaaaaaaaattgactatataaatactcatggaacatctacacct

SEQ ID NO: 234946 - DNA, 157 bp, Unknown
  Bacterial polypeptide expressing nucleotide sequence isolated from the Sargasso Sea
atgtataattcaagaatttcaggattaggaatgtatgtacctgaaaatatagtatcaaacgatgatttatcaaaaatgatggatacatcagatgagtggatagttgaaagaactggaattaaggaaagaagacatattaaaaaaggtgatggtaatt

SEQ ID NO: 234947 - DNA, 372 bp, Unknown
  Bacterial polypeptide expressing nucleotide sequence isolated from the Sargasso Sea
aatgactaatttatattctaaagtaatatctactggaagctatcttcctcaaaaaatctatacaaaccatgatattgaaaaactcgttgatacatctcatgattggatagttgaaagaactggaataataagtagacatattgctgatgaaaatgagtctagcgttgatatggcatacgaagcatcttgtaaagcactagagaagtctggacttaaatacaatgatatcgatttaatattggttgcaacaaccactccggagagaaaatttccaagtactgctgttcttttacaaaacttgttaaataataataaagcttctgcatttgatgtgaatgcagcctgtacaggatttatatatgcattagatat

SEQ ID NO: 234948 - DNA, 893 bp, Unknown
  Bacterial polypeptide expressing nucleotide sequence isolated from the Sargasso Sea
ttttgcagctcatcaaatagttttagaaaaaaagagccctaaaagaatgggtccatttatggtgactagagggatgtcttcaactaattcagcgtgtttagctactccttttaaaataaaaggagttaactattcaatatcatcagcttgttcgacatcagctcattgtattggaaatggtttagagcaaattcaattaggaaaacaagacatcatatttgcaggtggaggagaagaattagattggacattatcatgcctttttgatgcgatgggagcaatgtccagcaaatataatgatattcctgaaactgcatctagagcttatgataaagatagggatggttttgtaatttcaggagggggtggagtattagtattagaatgttacgaacacgcaaaagcaagaggtgcaaaaatatatgctgagatcacaggatatggagcaacttctgatggccacgatatggtagcaccttctggtgagggaggtgaaaggtcaatgaagcttgctttgtctaatataaaagatcgtaaagtttcatatataaatgcacatggaacttcaacacctgccggagatgtagttgaggttgaagccattaggagaatttttggaaacgaggatgttccacctatttcatctactaagtctttgacagggcatagtttaggagcagctggtgttcatgaagctatatattcgatcttaatgatgagctcgggttttttatcagcaagttcaaatatttttaatttagatagtgatttacaaataaacgaaatattgatgaaaatgagaaataatgttgagtttgatactgtaatctcaaatagttttggatttggtggaactaatgcaactttagcttttagtaagttaagagattaat

SEQ ID NO: 234949 - DNA, 398 bp, Unknown
  Bacterial polypeptide expressing nucleotide sequence isolated from the Sargasso Sea
aatgctacctcgttcaaaaattctaggtcatggttattttttaccttcaaaagttttgaaaaatgaagatctccttgcatttgtcgatacttcggatgaatggattttcactaggactggaataaaacagaggcatatagttttaaaagatgaattaacttcagacttagctgtgatggcatcaaaaaatgctttaaaatctgctaatttaaaaagtgaagatattgattgcattatccttgcaactaccacaccagatgaaacattcccatcgactgctacaaaagttcaaacacaattaggtatgaaaaacattcctgcatttgatgttcaggcagtctgttcaggttttatctattctcttgaaattgcagattcactaataaagtgtaataaag

SEQ ID NO: 234950 - DNA, 903 bp, Unknown
  Bacterial polypeptide expressing nucleotide sequence isolated from the Sargasso Sea
agaaactggcattaaagaaagaagacatatactcaaggggaagtaatgatacaacatataatatgggagttaaggcctctaaaattgctattgaaagggctggtattaatcctcaggaaattgatttaatattattcgcgactcttagtcctgattattattttcctggctcaggtgttttagttcaagaggcattagaaatcccaaactgtccagcaatggatattcgaatgcaatgttctggttttgtttatgctgttgcaactgctgatcagtttattaaaacaggaatgtataaaaatgtgctagtaattggatcagaatatcactctggcggattggacatgacctcaaggggtagaaatatttctgttatttttggtgatggtgctggagctgtattaatgactcgtgagaaaagcaaaaaaaaaggtatcttaaattctcaattgcattctgaggggaaatatgctcaagaactttcgttaattggacctaatacaagacgatgggtaccagaaataatggaagaaaataacccagatgatatttcctattttcctcatatgaatggtcagtttgtatttaaaaatgcagtagttcgtttttcagaagtaataatggcaggattaaaaaaagcaggatggagacctcaagaaattgatattttaattccccaccaagctaatcttagaatttctcaatttgttcaaaaaaagtttggtctagtagacaaacaagtttacaataatatccaacgctatggaaatactactgcagcttctattcccattgccttaactgaagcttgggaagaagggaaggtcaaaaaaggaagtaaagtaattcttgccgcttttggcagtggatttacatggggaagtattacgatccaatggtaaa

SEQ ID NO: 234951 - DNA, 754 bp, Unknown
  Bacterial polypeptide expressing nucleotide sequence isolated from the Sargasso Sea
aaaagtccaaagagaatgggtccctttgtagtgccaagaactatgtcaagcactgcttctgcaacactagcagttccatttaaaattaaaggtgttaattatactatcagttcagcatgcgcaactagtggacactgtattggtaatgctatggaactaattcaattaggtaaacaaaaaattatttttgctgggggaagtgacgaagttcattttgctatgactgctatgtttgatgcaatgactgcattatcctcaaaatacaatgacacaccagaaaaggcttcgagaccttatgacaaaactagggatggattcgttatagctggtggtggaggagttttagttttagaggaatatgaacatgcaaaagcaagaggagcaaaaatttacgcagaattgactggttatggcgctacctctgatggttatgatatggttgcaccttcaggtgaaggagcagtaagatgtatgaaaatggctttaagcactgcaaaaaacaaaattgattacataaatacacacggaacatccacgcctgttggtgatattacagaactaaaggcagttggtgaaacatttaaagattacaaaccaaaaataagttctacgaaatcgttagctggccactcattgggggctacctctgttcatgaggcaatttatagtttaataatgatgaaaaatagttttatagcagcatctgcaaatattactgacatggatgacgaagctaaaaagtatccgatagtta

SEQ ID NO: 234952 - DNA, 804 bp, Unknown
  Bacterial polypeptide expressing nucleotide sequence isolated from the Sargasso Sea
acttgatggaaagtcccggaataaaaaaaatcaaacattttttactgatgaattcacttgcaaaatagctggctatatttctaaagatgagggagatacaaattattttgatatctcatcttacttagatgctagagaaattaaaagaaatgatagatttattcagtatggaatagttgcagcgaaaatggctgtagaagatgcaggaattcaagatttaggagaggaagataaacttcatactggagtaattgtaggctcaggtattgggggtttggaaacaatttataatggatcattaactattcaaaatagtggtcctagaaaattatctcctttttttattccttcttcacttattaatcttttatcaggacaaatttctattaaatatggatttaaagggccaaaccattctgttgttacagcttgtgctacaggggcacattcaataggtgatgctggtgaaattattaaaagaggggctgctgatataatgatagcagggggtgctgaagcagcagtttgtgaacttggccttgctggattttgtgctgctagaagtttgagtacatcatataatgatacacctgaactagcatctagaccttgggataaaaatagagatggttttgtaatgggagagggcgctggcatagtagttttagaagaacttgaacatgctcgaaagagaggtgctaaaatatatgcagagctaataggatatggaatgtctggagatgcacatcatattactgctccagcagaagatggagatggtggatttcgcgcaatgaagcaatc

SEQ ID NO: 234953 - DNA, 534 bp, Unknown
  Bacterial polypeptide expressing nucleotide sequence isolated from the Sargasso Sea
atagatcaacaagcatattatttggtgatggagcaggtgcagttttgattgaacctagcaaaaatgagtttggatgggaggacgaatttttgagatcagatggagttggtgcagattggttaaaaattaaagcaggaggatcattatacccaacttcaaaagagacctttgaaaaaaaatggcattatattactcaggatggaaagactgtttttaaatctgctgtttcagagatggcaaatgcaacagagcaaattataattagaaataaacttgatcgaaatgatataaaatatctattgcctcatcaagctaataaaagaattattgatgctaccgcagaaaagattaatttagataaaaataaagttttaatgaatatagaagaatatgggaacacaacagcagccactataccattgctaatgcatgactatgagagcaactttaaaaaaggagataaaattattcttgccgcttttggagcaggccttacttggggtgcagcatatctaacatgggcgtataattaaa

SEQ ID NO: 234954 - DNA, 676 bp, Unknown
  Bacterial polypeptide expressing nucleotide sequence isolated from the Sargasso Sea
acaaaaaattatttttgctgggggaagtgatgaggttcattttgctatgactgctatgtttgatgcaatgactgcactatcttcaaaatacaatgacacaccagaaaaggcttcgagaccttatgacaaaactagggatggattcgttattgctggtggcggaggagttttagttttagaggaatatgagcatgcaaaagcaaggggagcaaaaatttacgcagaattgactggttatggcgctacctctgatggttatgatatggttgcaccttcaggtgaaggagcagtaagatgtatggaaatggctttaagcactgcaaaaaacaaaattgattacataaatacacacggaacatccacgcctgttggtgatatcacagaactaaaggcagttggtgaaacatttaaagattataaaccaaaaataagttctacgaaatcgttagctggtcactccttaggagctacttcagttcatgaggcaatttatagtttaataatgatgaaaaatagttttatcgcagcatccgcaaatataactgacatggatgacgaggctaaaaaatatccgatagttaccaaagttgaaaaaggtgttaacttaaactccgtaatgtctaatagttttggttttggtggaactaacgcaacgctagtttttgaaaaggtttaa

SEQ ID NO: 234955 - DNA, 748 bp, Unknown
  Bacterial polypeptide expressing nucleotide sequence isolated from the Sargasso Sea
aaaatcaggaaaatcagcagaagatattgatcttattcttgttgctacaagcacaccggactttctagttgtttcaactgcagcattagtccaagataaaattggagctaaaaatgcttggggatatgatattgtagcagcatgtacaggttttgtttatgcgatggaaacaggtgcaaaatttattgaatcaggtagttataataatgtaattgttataggagctgatacaatgagctcaattatcgattacactgatagaaacacctgtgttatttttggtgatggtggtggtggtgttctgttagaacctacacaagaagaaattggtattatagattctattttgcatatagatggtagtggtcacaaatatctcactgtacctgctggaggaagtgcaaatccagcttcaaaagaaacattagataataaaatgcactatgtttatcaagatggtaaaaccgtatataaatttgctgtaaaaaatatggctaatgtcagcaaaacaattcttgataataataagttgcaaggcagtgacgttaaattatttatacctcatcaagccaatagaagaataattgatgctgcagcaaaaagatgcggcttaaaggatgatcaagtactagtaaatataaataaatacgggaatacaacagctggaactattcctatagcacttgatgaagccgtcgaaactggacggttaaacaaaaatgacttattattactcgctgcttttggt

SEQ ID NO: 234956 - DNA, 535 bp, Unknown
  Bacterial polypeptide expressing nucleotide sequence isolated from the Sargasso Sea
atttgttatttcaggaggtggtggagttttagttttagaagaatatgaacacgcaaaagcaagaggtgcaaaaatttatgctgagttaaccggttatggagcaacttccgatggatatgatatggtagctccatctggagaaggagctgtaagatgtatgcagatggcgttaaaaactagtaaaaataaagttgattatataaatacacatggaacttcaactccagttggagatattacagaactcaaagctgtaggagaagtttttaaagataatgtaccaaaaataagttctacaaaatctctttcaggtcactcattaggagcaacttcagtgcatgaggctgtttatagtttaattatgatgaaaaataattttatttcagcttctataaatataactgatatggatgatgaagcaaaaaaatatccaatagttacaaaagttgaaaaagatgtaactttaaattctattatgtctaatagttttggatttggaggaactaacgcaactttagtttttgaaaaggtttaa

SEQ ID NO: 234957 - DNA, 844 bp, Unknown
  Bacterial polypeptide expressing nucleotide sequence isolated from the Sargasso Sea
aatcttcttaatggtaaatcaggaataaaaaaaattaataattttaatacagatgaattcccttgcaaaattgctggttatatttccaataatgaaaatagtgataattattttgatattacttcacaacttgaatctagggaaattaaaagaaatgataggtttattcaatatgggattgttgccgctaaaatggctgttgaggatgcgggtatccaaaatttaagtgaacaagataaacttaataccggagttatagctggctcaggtataggtggattagagacaatttataatggtgcattgactattaataatagtggtccaaggaaattatcccctttttttattccatcatcacttataaatcttttatcaggtcaaatttctataaaatacggttttaaaggaccaaatcattctgttgtgacagcatgtgctacaggtgcgcattcaattggagatgctggtgaaattattaaaagaggagcagctgatattatgatagcaggaggtgcagaagcagctgtgtgtgagcttggtctagcaggtttttgtgcagctagaagtttaagcacatcttttaatgaaactcctgagttagcatctagaccatgggataaaaatagagacggttttgtaatgggtgaaggcgcaggtattgttgttttagaagagcttgatcatgctaaaaaacggggagctaaaatatatgctgagttagtaggttatggaatgtcaggtgatgctcatcatattactgctccatctgaagacggtgatggtggtttcagggcaatgaagcaatctatagatatggctaatatgccccagaggatataaa

SEQ ID NO: 234958 - DNA, 592 bp, Unknown
  Bacterial polypeptide expressing nucleotide sequence isolated from the Sargasso Sea
catgagaagagccgtaattaccggtatcggtgttgtatcaagcattggtaacaacaaagaagaagttttagagtcattaaaaacaggtaaaagtggtatcgctttcaaccaagagtttgctgactacaacttgcgcagcaacgtatcaggtaaaattgatataaacgttaaagaccatgttgaccgcaaagcaatgcgctttatgggtgatgctgctgcgtactcttacatttcgatgactcaagcaattgaagactcagggttatcagaagagcaagtgtcaaacgagcgcacgggtattatagttggctctggtggtggttcatctaaatggcaagtagaagccgccgatattttacgtgagaaaggcgtaaagcgtgtaggcccttacatggtgcctcgcactatggccagtacaacttcagcatgtttagcgactccttttaaaataaaaggggttaattattcaattagttcagcatgtgctacgtcggcgcattgtattggtaatgcggttgaacaaaattcacttggcaagcaagacgttgtgtttgctggtggcggtgaagagcttcactggacgcttgcaatg

SEQ ID NO: 234959 - DNA, 722 bp, Unknown
  Bacterial polypeptide expressing nucleotide sequence isolated from the Sargasso Sea
tggacattgtattggaaactctgttgaattaatacaaacaggaaagcagaaaataatgttcgcaggtggtagtgaagaaatacattgggctatgactgcaatgtttgatgctatgacagcactttcctcaaaatataatgatactccagaaaaagcttcaagagcttatgataaaacaagagatggttttgttattgcaggtggtgctggagttttagttctagaagaatatgaacatgcaaaagctagaggtgctaaaatttatgctgaaataacaggctatggagcaacttccgatggatatgatatggttgcaccatctggtgaaggagctgttagatgtatgcaaatggctcttaaaacatcaagaaataaattagactacattaatactcatggtacttcaactccagtaggtgatattacagaattaaaagctataggcgaaacatttaaagaaaaaattccaaaaataagttctacaaagtcactttcggggcatcctttaggagctgcatctgttcatgaagctatttatagtttaataatgatgaaaaataactttattgctggatcagcaaatataaatgaaatggatgaggaagcaaaaaaatttccaatagtaggaaagacagaaaaagatgtaaacttaaatgcagtgatgtctaatagttttggatttggtggcacaaacgcaactctgatttttgaaaaggtttaaa

SEQ ID NO: 234960 - DNA, 927 bp, Unknown
  Bacterial polypeptide expressing nucleotide sequence isolated from the Sargasso Sea
catgttgatagaaagtttataagattcatgggaccaggttcggcttataattatatttcaatggctgaagcagttaaagactctggattagaggaaaaagatgtaagtaatatttctacaggtatgattatgggatcagggggtccttcaattgaaaatgtgatattagctgcagataaaacgagggaaaaaagtccaaaaagaatgggcccatttgttgttccacgaacaatgtctagtacagcttcagcaacactcgcagttccatttaaaattaaaggtgtaaattatactatcagttcagcttgtgctacgagtgggcattgtattggaaatgcaatggaattaattcaattaggaaaacaaaaaataatatttgctggtggtagcgacgaagttcattttgcaatgacagctatgtttgatgctatgactgcactttcatcaaaatataatgatactccagaaaaagcttcgcgaccatatgacagaacaagagatgggtttgtaatatcgggtggtggtggtgttttggtcttagaggaatatgaacatgcaaaatctagaggagcaaaaatttatgcagaaattacaggatatggagcaacttctgatggatatgatatggttgcaccgtctggcgagggtgcagttagatgcatgaaaatggccttgagcacaagtaaaaataaaattgattatataaatacacacggaacatctactcctgttggagatataactgaacttaaagcagtaggtgaagtgtttaaagataatgttccaaaaatcagttcaactaaatcattatctggacattctttaggagcaacctctgttcatgaagcagtttatagtttaattatgatgaaaaaaaattttatatcagcatcaataaatattaatgacatggatgatgaagctaaa

SEQ ID NO: 234961 - DNA, 801 bp, Unknown
  Bacterial polypeptide expressing nucleotide sequence isolated from the Sargasso Sea
gtacagcttcggccactcttgcagttccttttaaaataaaaggcgttaactatactattagttcagcgtgtgcaactagcggacattgcataggtaacgcaatggaattaattcaactgggaaaacaaaaaattatttttgcaggtggcagtgatgaagttcattttgcaatgactgcgatgtttgacgcgatgactgctttgtcctcaaaatataatgatacccctgaaaaagcttctagaccgtatgacaaaactcgagatggtttcgtcatctcaggtggtggtggggttttagttttagaagaatatgaacacgctaaatcaagaggtgcaaaaatttatgcagagttaactggctatggtgctacatcagatggttatgacatggttgctccgtcaggtgaaggcgcagttagatgcatgaaaatggctttaagtactgcaaaaaataaaattgattacataaatactcacggtacatctacgccagttggagacataactgaactaaaagctgttggagaagttttcaatgattacaaaccaaaaattagctcaactaaatctcttgcaggtcactccctgggagctacctcggtccacgaggctatttatagtttaattatgatgaaaaataattttatagctgcttctgctaatattaatgatatggatgaagaggcaaaaaaatatccgattgtgacaacagtcgaaaaagaagtaaatttaaattctataatgtcaaatagttttggtttcggagggactaatgctactttagtgtttgaaaaggtataat

SEQ ID NO: 234962 - DNA, 659 bp, Unknown
  Bacterial polypeptide expressing nucleotide sequence isolated from the Sargasso Sea
catgaaatcaaaaattatatcgataggaagttacacaccgaataatatagttacgaatcaggatctagagaaacgggttgatacaaccaatgaatggattgtatctcgaacaggaatcaaagaaagacccattgccgatgattcgcaagcgacgtctgacctggcctatgaagcagccaagattgcaatagaaagagccaaaatcgataaaaatgagatcgatcttataattgtgggcacatgcacgccggatgttgccacaccaaacgttggaacgctcattcaaaaaagactggatctaaagaactttccagcattcagtattgaggcggcatgcagtggttttatttatgctttgaatatcgcagataagttcataaagtcgggggattcaaaatgtgctttggttgtcggtgcagagacgctctcaaggattacaaattgggatgaccgaaatacttgcgttctttttgcagatggagcaggtgctgccattttaaaatcatcggacgatacaggaattatattttccgagcttggcgcgaatggtgaatacgcagaacttctccatgtcccctatggaacatcaagaaagccagagagacccaaagaggatgactacactctaaagatgagcggggatgaagtgtttaaggttg

SEQ ID NO: 234963 - DNA, 261 bp, Unknown
  Bacterial polypeptide expressing nucleotide sequence isolated from the Sargasso Sea
aaattgacacaaataaaattgcttatttagttccacatcaagcaaataaaagaataattgatgccgtagctaaacgaatcaatattccttcagaaaaggtcatgaataatattgagaaatatggaaatacaactgcggcaactttaccgttattacttaacgactatgaaaaaaaacttagtccaggagataaattaatttttgctgcttttggtggaggattcacttggggggcagcctatctcacatggtcttattaaa

SEQ ID NO: 234964 - DNA, 880 bp, Unknown
  Bacterial polypeptide expressing nucleotide sequence isolated from the Sargasso Sea
tgtaattctagcagcagacaaaacaagagctaaaactccaaaactaatgggcccttttattgttccaagaacaatggcaagcactgcttcagcaacacttgctgttccttttaaaatcaaaggaacaaactacacaatgagttctgcttgtgcaacaagtggacactgtattggaaactctatggaattaattcaaatgggaaaacaagatattgtttttgccggtggaagtgaagaaattcattgggcgatgactgcaatgtttgatgcaatgactgccttgtcttcaaaatataatgataaacctgaaacagcttcaagagcttatgataaaactagagatggatttgtaatcgctggaggtgcaggcgtattagtgcttgaagaatacgaacatgctaaagcaagaggggctaaaatatacgcagaattaactggttatggagcaacttcggatggatacgacatggtagcaccatcgggtgaaggtgctgttagatgtatgaaaatggcaatggcaactgctaaaaataaaattgattacatcaatactcatggaacatctactccagttggagatataactgagcttaatgctattaaagaaacttttggagaagacattccaaaaataagttcaacaaaatctttatcgggtcatcctttaggggctgcttcagtgcatgaagcaatctattgtttgataatgatgaaaaacaatttcataacaggatcagccaatattacagatatggatgatgatgctaagaaatatccaatcgttgcaaaaactgaaacaggagcaaccttagatacagtaatgtcaaatagttttggctttggtggaactaatgctgcttttatttttgaaaaggtttag

SEQ ID NO: 234965 - DNA, 547 bp, Unknown
  Bacterial polypeptide expressing nucleotide sequence isolated from the Sargasso Sea
acattatctaggatacaaaattgggatgacagaaatacatgtgtactttttgcagatggagcaggggccgccatcttaaagccatcagatgacagagggattatattttccgagcttggtgccaatggtgaatacgcagatcttctccacgtaccctatggaacatcaagaaagccggagaaacccaatgcagatgactacaaattgaagatgagcggaaatgaagtatttaaggttgctgtaaaaacgctagaagaaattgctattgatgcacttgttaaagcaaatcttgaaagcagggatatcgattggtttatcccacatcaggccaacatgagaatcattcaagcggtggctaagaggctggtgttacctgaggaaaaagtgattctcagtatggacattcatggcaatacatctgcagcatccatacccttagcttttgatcgagccatccaagacggcaggataaaagaaggggacactattttaatgcaaagttttggtgcaggctttacttggggtagtgttattatggatttataaa

SEQ ID NO: 234966 - DNA, 462 bp, Unknown
  Bacterial polypeptide expressing nucleotide sequence isolated from the Sargasso Sea
catgaaatcaaaaatcatatcaattggaagttatacaccgaacaatatagttaccaataaagatcttgaaaaaaaggttgatacaactgacgaatggattgtatctagaacaggaatcaaagaaaggccaatagctgatgattcacaagcgacatctgatttagcatttgaagctgccaagattgcaatagagagagccgatatcgacaagaatgagattgatcttattattgtcggtacatgcacgcctgatgttgcaacaccaaatgttggtacgattgttcaaaaacgactagaactcaaaaattttcctgccttcagtattgaggccgcttgcagtggttttatttatgctctgaatattgcagataagttcataaaatcaggtgagtcaaaatgtgcattggtcattggtgctgagacactatctaggattaccaactgggatgacagaaatacatg

SEQ ID NO: 234967 - DNA, 889 bp, Unknown
  Bacterial polypeptide expressing nucleotide sequence isolated from the Sargasso Sea
cttcagaagacaaatagattctgctgatatcctcagaacaaaaggtttaaaaagaataggtccatacagagttaccaaagctatgggtagtactgtttcagcttgtcttgcaacatccttcggtatcaaaggtataaattattcgatttcatctgcttgcgctactagtgctcactgcatcggttcaggaatggagcaaattcaattaggaaaacaagatattgtaattgcaggaggtggtgaagctgaacattggggtatgacaagtttatttgatgcaatgggagcattatctactaagtataatgaggaacctgaaaaggcctctagagcttatgataaagatagagatggatttgtaatcgctggaggagcaggatcgatgatcctagaagaaaagcaacatgcaattcaaagaggagcaaaaatatatgcccaacttactggttatgctgcaacatctgatggggcagatatggttagtccttctggagagggtggagagagatgcatgcaaattgcttgggaaatgagtggtaataaaaatattgactatatcaatgctcatggtacaagtactccggctggagatatcacagaattaagtgcaattaaaaatgtttttggagataaggttccctggataagctctacaaagtccctttcaggtcactcattaggtgcagcaggtgttcaagaagctatctatggcttaattatgatggatgaaggttttatagccggttctgcaaatattgaaaaccttgacgagggtgcagaaccttttccaatagtaagagaaaatttctctacagaattacagagttttttgagcaatagttttggatttggtggaactaatgcaagtcttatatttgaaaaaatttaa

SEQ ID NO: 234968 - DNA, 916 bp, Unknown
  Bacterial polypeptide expressing nucleotide sequence isolated from the Sargasso Sea
gatttatcgaataatagaacaggtttaataatgggatcgggtggagcttcatcagaagatcaaatagattccgcagatatacttaggtccaaaggattaaagagaataggcccttacagagtaactaaagcaatgggaagcacagtatctgcatgcttagccacctcatttggtataaagggtataaatttttctatatcgtcagcttgcgctaccagtgcccactgcataggctctggcatggagcagattcaacttggcaaacaagatattgttatagcaggtggtggcgaagcagaacactggggcatgacaagcctcttcgatgcaatgggagctttatcgaccaaatataatgatcatcctcaatctgcttctagagcttacgacaaagacagagatggttttgtcatagctggtggggctggaacagtaatccttgaagaaaaacaacatgcgataaatagaggtgcggaaataatcgcccaactgacagggtacgcagctacctcggatggtgaagacatggtgagcccatctggagaaggtggtgagagatgtatgcaaattgctttagagatgagtggcaataaaacagttgactatattaatgcccatggaacgagcactccagcgggtgatattaccgaattgaatgctataaagtcagtttttggagatagcattccttggataagttctactaagtctctttcaggacattctctcggcgctgcaggcgtacaagaggctatatatggattaataatgatgaaagaagggtttattgtaggatcagcaaatattgaaaatatagacgaaggtgctgagtcatttccaatagtaagggaaaatttttctactgaattaaaaagttttttgagtaacagttttggatttggtggaactaacgcaa

SEQ ID NO: 234969 - DNA, 916 bp, Unknown
  Bacterial polypeptide expressing nucleotide sequence isolated from the Sargasso Sea
atgaaaagagtcgtagtaactggaataggtgtagtttcttgcttaggaaacaatcaagcggaagttttagagtcacttgttaacgctaaatccggaattacattttctgaagagtataaagaatataatttaaaaagtcatgttcacgggaaaccaaatataaaacttgaggaccatgtagatagaaaatttataagatttatgggacctggatcagcttataattatgtttctatgaatgaagctgtaaaggactcaggtttagaggaaaaagatgttagtaacgtaactactggaatgataatgggatctggtgggccttccattgaaaacgtaatactagctgcagataaaactagagaaaaaagtcccaaaaggatgggtccttttgttgtgccaagaactatgtctagtactgcatcagcaactcttgcagtgccatttaaaataaaaggagttaactacacaatcagttcagcttgcgcaaccagtggtcattgtattggtaatgcaatggagttaatccaattaggaaaacaaaaaattatttttgcaggtggtagtgatgaagtacactttgcaatgactgcaatgtttgatgctatgacagccctttcctctaaatacaatgatactcctgaaaaagcttctagaccctacgataaaacccgagacggttttgtaatctcaggcggaggaggagtattagttttagaggagtacgagcacgcaaaatcaagaggagcaaaaatatatgcagagcttacaggttacggtgctacatctgatggttatgacatggtagctccttctggagagggagcagttagatgcatgaagatggcattgagcaccgcaaaaaataaaattgattatataaatactcatggtacatcaacacctgtggagatataac

SEQ ID NO: 234970 - DNA, 674 bp, Unknown
  Bacterial polypeptide expressing nucleotide sequence isolated from the Sargasso Sea
aatcatatttgcaggggggagcgatgaagttcattttgcaatgacagcaatgtttgatgccatgacagctttgtcctcaaaatataatgatactcccgaaaaagcgtcgagaccatacgataaaactcgagatggctttgtgatctctggtggtggtggagttttagttttagaagagtatgaacatgcaaaatcgagaggtgcaaaaatttacgccgaggtaacaggttacggtgctacctctgatggttatgatatggtcgctccttcaggagagggggcagtgagatgcatgaagatggcaatgagcaccgcaaaaaacaagattgattatattaatacacacggtacatcaacacctgttggagatataactgaattgaaagcagtaggtaaagtatttagcgactacaaacccaaaattagttcaacaaagtctcttgctggacattctcttggagctacatcggtacatgaagccgtttacagtttaataatgatgaaaaataattttatagcagcttccgctaatattaatgatatggatgaagaagcaaaaaattatcctattgtcacaaaggttgaaaaaaatgttaatttaaattccgtaatgtcaaatagttttggtttcgggggaactaatgctactttagtatttgaaaaggtaaaataat

SEQ ID NO: 234971 - DNA, 858 bp, Unknown
  Bacterial polypeptide expressing nucleotide sequence isolated from the Sargasso Sea
gaagagagtagtaattacaggtttgggtattgtttcatgtcttggtaataaccaggatgaagtttttaattctttaattaatagtaaatcaggaataacattttgtgaagaatataaagcacacaatttgaaaagccatgttcatggtaaaccaaatattaaattaaatgaaattatagatagaaaaattattagattcatgggatctggttcagcttataattatgtagctatggatgaagctgtaaaggactcgggtttagaagaaaaagaagtaagtaatatatttacaggcatggttatgggctcgggcggaccttcaatagaaaatgtgattttagcagcagataaaactagagaaaaaaatccaaaaaaaatgggaccgtttgttgttccaagaactatggctagtactgcttcagcaactttagctgtaccatttaaaataaaaggaattaattacacaataagttcagcttgcgctactagtggtcactgtattggtaatgcaacagaattaattcaacttggcaaacaaaaaattgtatttgcaggaggtagtgatgaagttcattttgcaatgactgctatgtttgatgcaatgaccgcattatcatctaagtataatgaaacaccagaaaaagcatctagaccttacgataaaaatagagatggttttgttatatcgggtggaggcggtgtattagttttagaagaatatgagcatgcaaaagctagaggtgcaaaaatttatgctgaggtaactggttatggtgctacctctgatggttatgatatggttgccccatcaggagaaggggcagttagatgtatgaatttggcgttaagtactagcaa

SEQ ID NO: 234972 - DNA, 877 bp, Unknown
  Bacterial polypeptide expressing nucleotide sequence isolated from the Sargasso Sea
gaaacatccgatgattggatttctgaaaggaccggaattaagaataggagatgggttaatgataaaaagcttacaacatctctcatgggcacatatgcagctgaaaaggcaatagcagatgctggaatcgataaaaatgatattgactttataatcttctctactttaagcccagactattattttccaggctcaggtgttcttttacaacgaaatcttggcatcaaggaaattggtgccttagatgtcagaaatcaatgttcaggattcatctatggtttgtcgattgccgatcagtatattaagtcgggtatgtataaaaatatattgctagttggtagtgaaattcattccggaggattggataaatcaacaaaaggcagatcagtctcagtaatttttggtgatggtgctggtgctgccgtaatttcttctactgaatcagaaaatggcatattatctacacatctccactcggagggaaaatatgctgaggaattagcagttattaaaccagcaactacccattggattgataaaataaaatctgatcaaactgataagtcatattggccatatatgaatggaaattttgtgtttaaaaatgcagtagtcaggtttgagcaagtaattaaagaaggtttagaatattcaaatttaaatatagatgatatttcattactcattcctcatcaagcaaatcttaggataagtcaatttattcaaaaaaaattaaaactctctgattctcaagtttttaacaacataatgaagtatggaaatacaactgccgcttcaattccaattgctttgacagaagcataccaatcaaatttgataaaaaagaatgatattgtagtattagctgcttttggta

SEQ ID NO: 234973 - DNA, 598 bp, Unknown
  Bacterial polypeptide expressing nucleotide sequence isolated from the Sargasso Sea
tatcttcaaatataatgacacgccagaaaaagcttctagaccttatgacaaaacaagagatggatttgtgatagccggtggtggaggagttttggttttagaggaatatgagcatgcaaaagcacgaggtgcaaaaatatatgcagaactgactggttatggagcaacctctgatggttacgatatggttgcaccatctggtgaaggagctgtcaggtgcatgaaaatggcattaagcactgcgaaaaataaaattgattacataaacacgcatggaacatcaacacccgttggtgatattaccgaattaaaagcagttggagaaacttttacagattataaaccaaaaataagttcaacaaagtcattagctggtcactccttaggggctacttcagttcatgaggcaatttatagtttaataatgatgaaaaatagttttatagcagcatctgcaaatattactgacatggatgacgaggctaaaaaatatccgatagttaccaaagttgaaaaagatgttaatttaaactctataatgtctaacagttttggttttggcgggactaacgcgacactagtttttgaaaaggtttaa

SEQ ID NO: 234974 - DNA, 927 bp, Unknown
  Bacterial polypeptide expressing nucleotide sequence isolated from the Sargasso Sea
cgcgggattagtccctgagtttgatcttgagcagtacatgtctggcaaagaggcccgtaaaatggacccttttatccagtatggcatggtgagtgctattcaagcggtagagcagtcagggttgatggattctgattttgatccgactcgtgtcggcgtctcgattggatccggcattggtgggttaacactaattgagaatacgaccttgctcttgagtgaacgcggaccacgtaaggtttccccgttttttgtacccggatcgataataaacatgattgctggtaatttggcgatcaaatatggcttccagggccctaacattgcaattaccaccgcttgcactacttcgacgcattgcattggctttggtgcgcgtatgatcgcctacggagatgctgatgttgtgatagctggtggcgctgaaaaagcgtctacccagcttgggattgcagggttttgcgcggcacgtgccttatccactcgaaatgacgcccctgaagcggcaagtcgcccttgggataaagatcgggacggttttgtactggccgatggagcagcgaccatggtgcttgaagactatgagtcggcaaaagcgcgtggagctaacatcatagctgagctagttggtttcggcatgagtgatgatgctcatcacatgacggcgcccgctgaggatggtcgtggcgctcgctcggcgatggtcaacgccctaaaagacgcaggcttggccgtagacgaggtaagctatgtgaatgcacatgggacttcgaccccactaggagacgtggcggaatcacaagcgattgaagcattgatgggtacgtacgcaccacacgtcgcagtgagttcgacgaaatcaatgacagggcatgctctgggagctgccggtgcgctcgaggcctgtttttgtgttctttcaatccg

SEQ ID NO: 234975 - DNA, 553 bp, Unknown
  Bacterial polypeptide expressing nucleotide sequence isolated from the Sargasso Sea
tgataaaactagagatggatttgtaattgctggcggtggtggagttttagtgctagaagaatacgaacatgctaaagcaagaggggctaaaatatacgcggaattaactggttatggggcaacttcagatggatacgatatggtggctccatcaggagaaggtgctgtgagatgtatgaagatggctatggcaacatcaaaaaataaaattgattatatcaatactcatggaacatctactccagttggagacattacagaattaaatgcagtacaaaaagcttttggagataaaattccaaaaattagttcaacaaaatctttgtcaggtcatcctttaggtgccgcatcggttcatgaggcaatctattgtttaatcatgatgaaaaataatttcatagcaggatctgctaatattaatgaaatggatgaagaagctaaaaaatttccaatagttgctaaaactgaaacaggagtaaatttaaatacagtaatgtctaatagttttggttttggtggaaccaatgctgctttaatttttgagaaagtataa

SEQ ID NO: 234976 - DNA, 844 bp, Unknown
  Bacterial polypeptide expressing nucleotide sequence isolated from the Sargasso Sea
acgtgtaggaccttttgctgttcctaaagcaatgtcctcaacaaactctgcaacattagcaaccccatttgggataaaaggagtaaattattcaatttcatcagcttgtgcgacttcctctcattgtattggtaatgcctatgaattaattcaatatggaaaacaagacactatgtttgccggaggaggtgaagaattaaattgggctttatctgttttgtttgacgcaatgggagctatgtcttcgaagtacaatagcacaccggaaacttcgagcagagcgtatgataaagatcgagatggatttgtaatagctggtggggcaggtgtacttgtacttgaagaaatgggaaaggcaaaagctagaggagcgaagatatatgccgaaattgttggttatggagcaacctcagatgggcatgatatggttcaaccttcaggagaaggagctgtaagatgtatgaaaatgtctatggaaaatttaggctgtgaagttgattatattaatccacatgctacatcaactcctattggcgatgaaaaagaggttgaagctattagagaaacatttaaagacaaaataccagctataagcgccacaaaatccttaacagggcatagtttaggagctgccggtgttcaagaagctatatattctatcctaatgatgcataatggtttcattgctaaatcagccaatattgaaaatatcgatccaaaatttgaagaccttccgataaataaagacaccattgaaaatgccgaaataggttgtttactttctaatagctttggttttggcggaaccaacgcttcattagtgtttaagaatccaaaagtataa

SEQ ID NO: 234977 - DNA, 283 bp, Unknown
  Bacterial polypeptide expressing nucleotide sequence isolated from the Sargasso Sea
taaaacagttcttggtgaaaaagcttctgaagtagtgatttcatcaaccaagtctatgactggacacttgcttggaggaggcggtgcctttgaatcaatggcttcaatattgtcaataaagcataataaagttcctccaacaattaacttaaatgatcctgatgaggaatgtgatttaaactatacaccaaatgatgctgttgacttagaaatcaatactgcgatgtctaactcttttgggtttggtggacataatgcagttttggttttcaaaaaacaataa

SEQ ID NO: 234978 - DNA, 856 bp, Unknown
  Bacterial polypeptide expressing nucleotide sequence isolated from the Sargasso Sea
cccctaccgcgtgacgcggaccatggggtcgaccgtgtcggcggtgctggcgacggcgttcaagctgcaagggctgtcgtactccgtcagttctgcttgttcgactggtgcccacagcatcggcatgggcatggagcagattcaattgggcaagcacgacgtcatgttctgcgggtctggggagttggagaactggggcagcacgatcatgttcgacggcatgggcgccctctcgagcaaatataatgacgatcctacccatgcttctagagccttcgacaaggaccgcgacgggttcgtgatcgccgccggtggcggtgtcgtcatcgtcgaggagttggagcacgcgaaagctcggggtgccaaaatttatgctgagctagtaggttactcggcgacgtccgatggctacgacatggtcgcgccttccggcgagggcggcaagcgcgcgatgcgcgaggccatcgccatggcgaacaggctaggaggtgagaagaaagtggactacattaacacccatggtacttccacacctgtgggcgacgtcgctgaattgggcgccatcaaggacctcttcacgtccgagttcgactacattcccaacatcggttcgacgaaatcgttatctggccatgctttgtccgttgctggtgtgcatgaagcgatctattccctactgatgatggaccgagggtttttggcggaaagtgcgaacatcttcaacatcgtcgacgaggccgaggggttacccatcttgacggagcggaaggaggggcccgtttctagagtgatgtcgaactcgttcggcttcggcgggacgaacgcctgtttggtcttcgacaagtacgagggctag

SEQ ID NO: 234979 - DNA, 609 bp, Unknown
  Bacterial polypeptide expressing nucleotide sequence isolated from the Sargasso Sea
agactgcactatcatcaaaatataacgatacccctgaaaaagcttcaagaccatatgataaaacaagggatgtttttgtaattgctggtggaggtggagttcttgttttagaagaatacgaacatgccaaagcaagaggtgctaaaatatacgcagaattaactggttatggagcaacctcagatggctatgatatggttgcaccatctggtgagggagcggtgagatgtatgaaaatggctctagcaacttcaaaaaataaaattgactatattaatacccacggaacatcgacacctgtaggagatattaccgaattaaaagcagttggagaggctttcccagactataaacctaagataagttctacaaaatctttgtcaggtcattcattaggtgcaacttcagttcacgaagcaatttatagtttgataatgataaaaaacaattttatttcagcttcagcaaatatttcagaaatggatgacgaagcaagaaactatccgattgttacacaagttgaaaaaaacgtaaatttaaatgcaattatgtctaacagctttggttttggtggaactaatgcaacattagtgtttgagaaagtttaga

SEQ ID NO: 234980 - DNA, 568 bp, Unknown
  Bacterial polypeptide expressing nucleotide sequence isolated from the Sargasso Sea
gcctcaagaccgtatgataaaacaagagatgtttttgtgattgctggtggaggtggagttcttgttttagaagaatacgaacatgctaaagcaagaggtgctaaaatatacgcagaattaactggatatggagcaacatcagatggctatgatatggttgcaccatctggtgagggagcggtgagatgtatgaaaatggctctagcaacttcaaaaaataaaattgactatattaatacccacgggacatcaacacctgtaggagatattacagaattaaaagcagttggagaggctttcccagactataaacctaagataagttctacaaaatctttatcaggtcattcattaggtgcaacttcggttcacgaagcaatttatagtttgataatgatgaaaaacaattttatttcggcttcagcaaatatttcagaaatggatgacgaagcaaaaaactatccgattgttacacaagttgaaaaagaagtaaatttaaatgcaattatgtctaacagctttggttttggtggaactaatgcaacattagtgtttgagaaagtttaga

SEQ ID NO: 234981 - DNA, 633 bp, Unknown
  Bacterial polypeptide expressing nucleotide sequence isolated from the Sargasso Sea
caatgacagctatgttcgacgcaatgaccgctctttcttcaaaatacaatgataccccagataaggcatctagaccttatgataaaacaagagacggatttgtaatttcaggtggagggggagttttagttctagaagagtatgaacatgcaaaagcaagaggcgcaaaaatttatgctgaattaactggttatggggcaacttcagatggatatgatatggtcgctccatcaggagaaggagctgtaagatgtatgcaaatggctttaaatacaagtaaaaataaaattgattatttaaatacacatggcacttcaactccggttggggatataacagaattaaaagctgtaggagaagtctttaaagataacgttcctaaaataagttctacaaaatccctttcgggtcactctttaggagctacttcagcacatgaagctatttatagtttaattatgatgaaaaataattttatttcagcttctataaatataactgatatggatgatgaggcaaaaaaataccccatagttacaaaagttcaaaaggatgtaaccttaaattctattatgtctaatagttttggatttggaggaactaacgcaactttagtttttgaaaaggtttaat

SEQ ID NO: 234982 - DNA, 713 bp, Unknown
  Bacterial polypeptide expressing nucleotide sequence isolated from the Sargasso Sea
aatgattaaaagaggtgctgctgatattatgatagcaggaggagcagaagctgcagtttgtcaattaggagttgctggattttgtgctgctagaagtttgtcaaccggttttaatgataaaccagaggaagcttcaagaccttgggacaaagatagagatggttttgtaatgggtgaaggttcaggaattctggttttggaagaatatgaacatgcaaaaaaaagaaatgctaaaatttatgctgaaattataggttatggtatgtcaggtgatgcccatcatattacatcaccttcagaggatggtgatggtggatatagagcaatgattgaatcaattaaaatggcaaaaattaacgccgtagatatagattatataaatgcacatggaacttctactttattaggtgatgatatcgaattaaatgcaattatgaaatttactaaccaaaataaaaaactgaaagtgagttcaactaaatcttcaataggtcatttattaggagctgcaggaagtgttgaagcaatattttcaatattagctattaacaaaaatataattccagcaactttaaatttggaaaatccttctcatagttttaatgtggatttagttccaaaaaattctatcgatcataaagttaatatagctttaagtaattcttttggttttggagggacaaatactgcgttattatttaggactatttagt

SEQ ID NO: 234983 - DNA, 792 bp, Unknown
  Bacterial polypeptide expressing nucleotide sequence isolated from the Sargasso Sea
tatgacgacgccagttggtaataatgttagtgaaacatggaaaaatattcttgaaggaaaaagcggtatatctttgattgagcattttgatacttcagattttagtgttcgaattggtggttcaattaaaaatctttctttagataagtacatcacaaaaaaagaacaaaggagaatggacccctttattcattacggtataaccgcaggtgtacaagccatagaagattcaggtttagatgtcagtcataatactgaccgtattggtgttgcaattggttcaggaattgggggcttaccaggtattgaaaaaggtactgaattatttcactcaggtggacctagaaaaatatcaccattttatgtgccaagtaatattatcaatatgatttcaggacatttatccatcatgtatggtttagaagggccaaatttttcaatcgtgacagcttgcacaacaggtacccataatatcggtgatgctgcaagattaattgaatatggtgatgctgatgtaatgattgctggtggtgctgaaatggcaacatcaaagacaggcttagctggttttgctgcggcacgtgctctgtccactagaaatgaagagccagaattagctagtcgcccttgggacaaggatagggatggctttgtgctaagcgatggggcaggggcgatggttttagaagaatacgagtatgcaaaaaagcggggggcaaaaatttatgcggagttgattggttatggaatgagcgccgatgcatttcatataacagcaccctcagaaaatgg

SEQ ID NO: 234984 - DNA, 967 bp, Unknown
  Bacterial polypeptide expressing nucleotide sequence isolated from the Sargasso Sea
tacatatcaatggcggaagcagtaaaagattctggattagaagataaagacataagtaatatgtcaactggaatgataatgggttcaggagggccatcgattgaaaacgtaattttagcagccgataaaactagagctaaaagcccgaagagaatgggtccatttatagtaccaagaactatgtcaagtactgcttctgcaactttagcagttccatttaaaatcaaaggagtcaattatactatcagttcagcatgtgcaactagcggacactgtatcggtaatgcgatggagttaattcagttaggtaagcaaaaaattatttttgctggggggagtgatgaagttcattttgccatgactgctatgtttgatgcaatgactgcattgtcttcaaaatataatgatacaccagaaaaagcttctagaccctacgacaaaactagggatggatttgttatagctggtggcggtggagttttagttttagaggaatatgagcatgcaaaagcaagaggagcaaaaatttacgcagaattgactggttatggcgctacctctgatggttatgatatggttgcaccttcaggtgaaggagcagtaagatgtatgaaaatggctttaagcactgcaaaaaacaaaattgattacataaatacacacggaacatccacgcctgttggtgatatcacagaactaaaagcagttggtgaaacatttaaagattataaaccaaaaataagttctacgaaatcgttagctggtcactccttaggagctacttcagttcatgaggcaatttatagtttaataatgatgaaaaatagttttgtagcagcatccgcaaatattactgacatggatgacgaggctaaaaaatatccgatagttaccaaagttgaaaaaggtgttaatttaaactccgtaatgtctaatagttttggttttggtggaactaacgcaacgc

SEQ ID NO: 234985 - DNA, 766 bp, Unknown
  Bacterial polypeptide expressing nucleotide sequence isolated from the Sargasso Sea
tcaaaagaaactaattatacaatgagttctgcatgtgcaactagtggacactgcataggaaattctatggaattaattcaaatgggtaaacaagatattgtttttgcgggtggtagtgaagaaattcattgggcgatgacagcaatgtttgatgccatgactgctctatcgtccaaatataatgatacgcctctatcagcatcaagagcatatgacaaaactagagatgggtttgtaatcgctggtggagcaggtgtgttagttttagaagaatatgagcacgcaaaagctaggggtgccaaaatttatgcagaattgacaggttatggtgccacctcagatggatatgacatggtagctccatctggagagggagctgtaaggtgtatgaaaatggcaatggcaacaactaaaaacaaaattgactatattaatactcatggaacttctacaccagtaggtgacataactgaactaaaagctatcaaggaaacctttggggaagaaattccaaaaattagttcaacaaagtctttatccggtcaccctttaggcgctgcatcagttcatgaggccatatattgcttaattatgatgaaaaataattttattgctggatcagcgaatatcaatgaaatggatgaagaagctaaaaaatttccaatagttgctaaaactgaaactggagcaactttaaatactgtaatgtctaatagttttggttttggtggaaccaatgctgctttaatttttgaaaaggtttaat

SEQ ID NO: 234986 - DNA, 805 bp, Unknown
  Bacterial polypeptide expressing nucleotide sequence isolated from the Sargasso Sea
gcatctctaagatttggatttaaaggacctaatatatcaatagcaagcgcttgttctagcgcaagtcattctatcggttattcttttaggtcaatatcgtatggtgatgtagatatgatgttaactggaggcgcggagatggcaacaactccattaggagtatctggatttaatgcagcgaaagcactatcaacaaacaatgaaaatcctcaatctgcaagcaggccttgggataaaaaaagagatggttttgtattgggagaaggcgcaggttgtttaatgctagaagagtacgagcatgcaaaagcaagatgtgcaaatatatatgctgaaattataggatttgggatgagtgcagatgcttttcatataacagcacctcccgaagaaggtaaaggtgcagctcttgcgatgagtaatgctttactggatgcaaatttaaatcacaaaaagattgattatataaatgctcatggaacatctactccagctggagacatagcagagactttggcaattaagtcagtttttaaagactatgctcaaaaccttatagtaagttcgactaaatcgatgacaggacatcttttaggggctgcaggagccatagaagctatattttctatattggctattagagataacatttgtcccccaactataaatttagaagatcctgatgagggatgtgatcttaattattctgccaatcaagcaactgagagaaatatcagtcattctttaacaaattcttttgggtttgggggaacaaatgcatctttaatcttttgtgatgtaaaataga

SEQ ID NO: 234987 - DNA, 745 bp, Unknown
  Bacterial polypeptide expressing nucleotide sequence isolated from the Sargasso Sea
tgctcaccctcagctcattgcataggcaatgcttcagaattaattcaatacgggaagcaagatattatttttgctggtggcggagaagagttagattggacgctatcttgtctttttgatgcaatgaacgcaatgtccagtaaatataacgataaacctgagatagcttcgcgtgcattcgattctgatagagatggatttgtaatagcaggtggcggtggagtagttgttctagaagaactagagcatgctaaggcaaggggggccaaaatttatgctgaaattttagggtacggagctacatcagatggatttgatatggtagcaccttctggagaaggtgcgatcagagccatgaaattagctgtttcaacgtgcaagagtaggacggttagctatattaatgcccatggaacctctacgccagctggtgatgttactgaagtgcaagcagtcaggaaagtatttttaggaaaaaagtttcctttgataagttcaacaaaatcattgtccgggcatagtttgggagcagcgggagttcacgaaaccatatattcgttattaatgcttgaaaataattttattgctggcagtgcgaatatttttaatcttgaccctgagctaaattctaacgagatagcgacaacaataattgccgatacaaaattggatactatattatcaaatagtttcggatttggaggcacaaatgcatccttagctttgggtaaatacttggattagg

SEQ ID NO: 234988 - DNA, 480 bp, Unknown
  Bacterial polypeptide expressing nucleotide sequence isolated from the Sargasso Sea
catgaaatcaaaaatcacatcaattggaagttatacaccgaaaaatatagtgaccaataaagatcttgaaaaaagagttgatacaactgatgaatggattgtatctagaacaggaatcaaagaaaggccaatagccgatgattcacaagcgacatccgatttagcatttgaagctgccaagattgcaatagagagagccgatatcgataagaatgagattgatcttattattgtcggtacatgcacgcctgatgttgcaacaccaaatgttggtacgattgttcaaaaaagactagaactcaaaaattttcctgccttcagtatcgaggcggcttgtagcggtttcatttatgctcttaatattgcagataagttcataaaatcaggtgagtcaaaatgtgcattggttattggtgctgagacactatctaggattacaaactgggatgacagaaatacatgtgtcctttttgcagatgg

SEQ ID NO: 234989 - DNA, 337 bp, Unknown
  Bacterial polypeptide expressing nucleotide sequence isolated from the Sargasso Sea
aatggacggaagggaagtttggaattttgcggttaaggcattcccacaagcggttaggggcgtcttagaaagaactagcaaagggctctcggaggtcgatttgatcgttccccaccaagctaatcttaggataatagaggctggaatgaaagaattaggacttccaatggacaagactctaacaaacgtccagaagtatggtaacactgctggggctagcgttccgatagcattgaaagaggcagtcgacgagggattggttggtacaggcgacttgttggttacggcagcattcggaggggggcttgcctggggtgccaacgctatcgtatggtaa

SEQ ID NO: 234990 - DNA, 820 bp, Unknown
  Bacterial polypeptide expressing nucleotide sequence isolated from the Sargasso Sea
catgtttaagagtaaaattataggaatgggatattctgtcccagaaaatattattacaaatcatgatttatcaaaaatcatggatacatcagatgattggattcaatctcgatctggtatcaaagaacgtagatgggcaacggataatgtaacaacttcagatctagcatataaggcatgtaaacagacaattgaaaattcaaagattaatccgattgacattgatatgataattgtaggaactctttcttcagattattttttcccaggtgtaagcgcgcaacttcaagaaaaactaaatttaaaaaacgtgggggcatttgatataaaagctgcctgttcagcatttatatacagtatatctatagcggatcaatttataagaacaggagctgcaaaaactattcttgtagttggggcagaaacccaaacaaagttaatagaaaaatcaacagagggtcgtgatgttgctgttttatttggtgatggtgctggagccgctatattgacacgaagcgattcaaaaagtgaaatactatctacgcatcttcattcggatggcaaacacctaaaagatttatggatggaagcccctggtacaaataaaggaagctggattgatgatcctattaatctttcaaaatttaccccgaagatgaatggaagagaggtttttcgaaatgcagtaaccagatttcctgaggttattaatgaggccctatttgctaacgatctagacattgatgatgtcaagtatattgttccacatccagcgaattatcgaattagtgaaagcatcgcaaaaaaattaaatgtaaaa

SEQ ID NO: 234991 - DNA, 595 bp, Unknown
  Bacterial polypeptide expressing nucleotide sequence isolated from the Sargasso Sea
taaaaatgtcattgttattggatctgatacaatgagctcaataatagattatacagatagaaatacttgtgtgatatttggagatggtggtggaggtgtaattttagaaccgacacaaagagatattggtattttagattctattttgcatactgatggtagcgggaacaagtacctaactgtacctggagggggaagtttcaatcccacctcaagagaaacaatagataatagaatgcactatttatatcaggatggtaaaacagtatacaaatttgcagtaaaaaatatggctgatgttagtaaaaaaatcctcgataataataacttaaatggaactgacattaaattatttataccacatcaagcaaatatacgtataattgatgctgcagctaaaagatgtgggctaaaagatgaacaagtgttaataaatataaataaatatggcaatacaacagctggaactatacctatagctcttgatgaagcagtagaaactaatcgtttggatgaaggtgacttattattactatctacttttggggcaggatttacatggggaagtatgctaatacgttggggaaatacttaa

SEQ ID NO: 234992 - DNA, 781 bp, Unknown
  Bacterial polypeptide expressing nucleotide sequence isolated from the Sargasso Sea
agcttaggaaataatatttctgaagtaacaaattctctgagaaatttaaaatcaggtatctcagaaaatattatcaataaggagcttggtctaagaagccatgtatcagggtctattctaaacttagaaccaaaagacctaatagatagaaaactatatagattcatgggggacgctgcagcatatgcatacttgagcacagaagaagccataaaggatgcatctttaaacgtttctgaattatctaatgaaaagactggtttaattatgggctcgggaggagcttctacagaggatcaaatagattctgctgatatccttagatcaaaaggtttaaaaagaataggtccataccgagttaccaaagctatgggtagtacagtttcagcttgtcttgcgacctccttcggtatcaaaggcattaattattctatttcatctgcttgtgctaccagtgctcactgcattggatcaggaatggagcaaattcaattaggtaaacaagatattgtgattgctggaggcggcgaagctgaacattggggtatgacaagtttgtttgatgcaatgggagcattatctaccaagtataatgaggaacctgaaaaggcctctagggcttatgataaagatagagatggatttgtaatcgctggaggagcaggatcgatgatcctagaagaaaagcaacatgcaattgaaagaggagcaaaaatatatgctcaactaactgggtatgctgcaacatcagatggactagatatggttagtccttctggag

SEQ ID NO: 234993 - DNA, 379 bp, Unknown
  Bacterial polypeptide expressing nucleotide sequence isolated from the Sargasso Sea
gtgacggtagagggtgttgcggctggcgaacagtacatgcaaatggatggacgggctgtctttaaatgggcaattcgtcttgttgaggaaaacgtccagcaggtagttgatcactcaggtgtgccgattgagtcgattgatctcttcattctgcatcaggcaaatcttcggatcattgacggtattcggtcgtcacttggattgaaggaagacaagtttctcgtcaatctcgatcgatatggaaatacctcgagcggatctattccccttgctctcgatgaggcctggcgtgctggacggataggtcctggcagtacagtattgatttgtggttttggtggtggtctggcttggggtagtggtgtttggagactctaac

SEQ ID NO: 234994 - DNA, 952 bp, Unknown
  Bacterial polypeptide expressing nucleotide sequence isolated from the Sargasso Sea
atgagaagagtagttgtaactggcttaggcctattatcgtctattggtgaaaatttggataaaacttggtcgagtttaattaattgcaaatcaggaattaaaaacattgtatcatttgatacttctgatcttccttgcaaaattggcgggtttatctcccacaatgaaaacgatgaattttttttagatcggcttaaatttttagaacaaaaagaaattaatagaaatgatagatttattcagtatggtttaatagctgcccaaatggcaattgaagatgctggattaattaatttatcagaagaagataaattaaaaataggagtaacaattggttcgggaataggtggcttagaaacaatatataatggatcaataactttaaatgaaaaaggccctagaaagatttctcctttttttataccgtcatctttaattaatttattatcaggtcaagtatcaataaaaaatggttttaaaggccctaatcactcagtagtgacagcttgtgcaacaggagctcattcaattggcgatgcttcagaaataattaaaagaggagctgcacagattatggtagctggtggagctgaagcagcaatatgtaaattaggtgtcgcaggtttttgttctgcaagaagtttgtctacatcctataatgaccatccaacacaagcttcaagaccatgggataaagatagggatggttttgtaatgggagagggatcaggaattttagttcttgaagagtatgaaaatgctaaaaaaagaaatgctaaaatatatgcagaaatcattggatatggaatgtctggagatgctcaccatataacttcacctagtgaagatggtgatgggggttatagggcaatgtctaatgctttaaaaatggcatcaatggatgttgataaaattgattatattaatgctcacggaacatcaactcaattag

SEQ ID NO: 234995 - DNA, 884 bp, Unknown
  Bacterial polypeptide expressing nucleotide sequence isolated from the Sargasso Sea
aaatgttattttagcagcagataagacaagagcaaaaactccaaaattaatggggccattcgtggttccaagaacaatggctagtactgcatccgcaacattagcagtacctttcaaaattaaaggaacaaactatacaatgagctctgcatgtgcaacaagtggccactgcattggtaattcaatggaattaattcaaatgggtaaacaagatattgtttttgcaggcggtagtgaagaaattcattgggcaatgacggcgatgtttgatgcaatgacagctttatcctcaaaatataatgatactccagagacagcctcaagagcatatgataagactagagatggctttgtaatcgcaggtggaggtggggttttagtgcttgaagaatatgaacatgcaaaagcgagaggagcaaaaatatatgcagaattaactggttatggagcaacatctgatggatatgacatggtagcaccttcaggtgagggagctgtaagatgtatgcaaatggcaatagcaacatctaaaaataaaattgattatatcaatactcatggaacttctactccagttggagatattacagaacttaatgcggtcaaaagtacatttggagaaaatattcctaaaattagttccacaaaatctttatcaggtcatccattaggagctgcttcagtacatgaggctatatattgtttaattatgatgaaaaataattttattgcaggatcagcaaatattaatgaaatggatgaagaggctaaaaaattcccaatagttgcaaaaacagaaacggaaacaactttaaacacagtaatgtctaatagttttggttttggtggaaccaaatgctgctctaattttgaaaaggtttaat

SEQ ID NO: 234996 - DNA, 556 bp, Unknown
  Bacterial polypeptide expressing nucleotide sequence isolated from the Sargasso Sea
cgataaaacacgagacggttttgttatctcagggggaggaggagttttagttttagaggagtacgagcacgcaaaatcaagaggtgcaaaaatatatgcagagcttacaggatacggtgccacatctgatggttatgacatggtagctccttctggtgaaggagcagttagatgcatgaagatggcattgagcaccgcaaaaaataaaattgattatataaatactcatggtacatcaacacctgttggagatataacagagttgaaagctgtgggagaagtgttcaatgattataaaccaaaaattagctcaaccaaatctcttgcgggtcattctctaggagcgacatcagttcatgaggctgtttatagtttaattatgatgaaaaataattttatagctgcatcagccaatattagcgatatggatgatgaagcgaaaaaatatccaattgttacaaaagtagaaaaaaatgtgaatttaaattctgtaatgtcaaacagtttcggctttggcggaactaatgctactttagtttttgaaaaggtaaaataa

SEQ ID NO: 234997 - DNA, 739 bp, Unknown
  Bacterial polypeptide expressing nucleotide sequence isolated from the Sargasso Sea
tctgcatgtgcaactagtggtcactgtattggaaattcaatggaactaattcaaatgggaaaacaagatattgtttttgctggaggaagtgaagaacttcattgggccatgaccgcaatgtttgatgcaatgacagctttgtcttcaaaatataatgatacgccacaatcagcttcaagagcttatgataaaactagggatggttttgtaattgctggtggtggtggtgttttagtgcttgaagagtatgagcatgctaaagctagaggagctaaaatatacgctgaattaactggttatggagcaacatcagacggatacgacatggtagctccatctggtgaaggagcagtcagatgtatgaaaatggcaatggcgatgactaaaaataaaattgattatatcaatactcatgggacttcaacgcctgttggcgatattacagagttaaatgccgttaaagaaacatttggaacagatattccaaagatcagttcaacaaaatctctttcaggccatcctttaggtgctgcatcagttcatgaagcaatttattgtttaattatgatgaaaaataattttattgcaggctctgcaaacattagtgagatagatgaagaggctaaaaaatttccaatagttgctaaaacagaaacaggagcaactttaaatacagttatgtctaatagttttggttttggtggaaccaatgctgctctaatttttgagaaagtatgat

SEQ ID NO: 234998 - DNA, 835 bp, Unknown
  Bacterial polypeptide expressing nucleotide sequence isolated from the Sargasso Sea
atggggccctttgtagttcctagaacaatggctagtactgcctcggcgactctcgctgttccttttaaaattaagggaactaattatactatgagttcagcttgtgcaacaagcggccactgtatcggaaattcaatggagttaattcaaatgggtaaacaagatattgtctttgccggaggtagtgaagaaatccattgggcgatgactgcaatgtttgatgctatgactgctttatcatcaaaatataatgatactccagaaacagcatcaagagcttatgataaaactagagatggtttcgtgattgctggtggtggtggagtattagttttggaggaatatgaacatgctaaagctagaggtgcaaaaatttatgcggaattgactggttatggagcaacttcagatgggtatgatatggtagcaccctctggtgaaggagctgcaagatgtatgaaaatggcaatgtctacaaccaaaaataagattgattatattaatactcatggaacatccaccccggttggagatattacagagcttaacgcaattaaagatacatttggggatcaaattccaaaaattagttcaactaaatctttatcaggacaccctctaggagctgcatcagtgcatgaggctatctactgtttaattatgatgaaaaataatttcattgctggatctgctaatattaatgaaatggatgaagaagccaagaaatttccaatagtttctaaaacagaaagcggtataactttaaacactgttatgtctaatagttttggatttggtgggactaacgctgctttaatttttgaaaaggtttaat

SEQ ID NO: 234999 - DNA, 621 bp, Unknown
  Bacterial polypeptide expressing nucleotide sequence isolated from the Sargasso Sea
ttgatgcgatgactgctttatcctcaaaatacaacgatactcctgaaaaagcctctagaccatatgacaaaactcgtgatggttttgtaatttcaggcggtggtggagttttagttttagaggaatacgagcacgcaaaatcaagaggtgcaaaaatatatgcagaactgactggatatggtgctacttcagatggatacgatatggtggctccttccggagaaggagcagtaaggtgcatgaaaatggcattaagcaccgcaaaaaataaaattgattacataaatactcacggtacatctacacctgttggtgatattactgaattaaaagccgttggagaagtatttagtgactataaacctaaaattagctctactaaatctctagcgggacattctctaggagctacttcagtacatgaggctgtttacagtttaattatgatgaaaaataattttatagctgcatcagcaaatattaatgatatggatgatgaagcaaaaaaatatcctattgtcacaaaagttgaaaaaaatatcaatttaaattctgtaatgtctaatagttttggttttgggggaaccaatgccactttagtgtttgaaaaggtaaaataat

SEQ ID NO: 235000 - DNA, 806 bp, Unknown
  Bacterial polypeptide expressing nucleotide sequence isolated from the Sargasso Sea
ggctagtactgcttccgcaacacttgctgtgcctttcaaaattaagggaactaactatacaatgagttccgcttgtgcaactagtggccactgcattggaaattctatggaattaattcaaatggggaaacaagacgttgtatttgcaggaggtagtgaagaaattcattgggcaatgactgctatgtttgatgctatgacagccttatcctcaaaatataataatacaccagggacggcttcaagagcatatgataaaactagagatggttttgtaattgcaggtggtggtggtgtgttagtactcgaagaatacgaacatgctaaagcaagaggagctaaaatatacgcagaattaactggttatggagcaacttcagatggatacgatatggtagctccatcaggagaaggagctgtaagatgtatgaagatggctatggcaacttcaaaaaataaaatagattatatcaatactcatggaacatctactcctgttggagatattacagaattaaatgccattaaagaaatttttggagttgatattccgaaaattagttcaacaaaatctctatcgggacatcctttaggagctgcgtctgttcatgaagcgatctattgtttgattatgatgaaaaataattttatagcaggatctgcaaatataaatgaaatggatgaaggggctaaaaaatttccaatagttgctaaaacagaaactggagcaactttaaatactgtaatgtctaatagttttggttttggcggaactaatgctgcattaatttttgaaaaggtttaat

SEQ ID NO: 235001 - DNA, 931 bp, Unknown
  Bacterial polypeptide expressing nucleotide sequence isolated from the Sargasso Sea
aattacattttctgaagaatataaggaatataacttaaaaagtaatattcatggtaagccaaatattaaacttgaagattatgttgatagaaaatttataagatttatgggtcctggatcagcatataattacatttctatggctgaagctgttaaagattctgggcttgaagaaaaagatgtaagctgtgattcgactggtatgattatgggatctggtggaccttcaattcaaaatgttattttagcagctgacaaaacacgtgaaaaaaatccgaaaaaaatgggaccatttgttgttccaagaaccatgtcaagtactgcttccgctacattggcagtaccatttaaaattaaaggtgttaactatacaattagttctgcttgcgcaaccagcggacattgtattggaaatgcaatggaattaatccagcttggaaaacaaaatattatttttgctggaggaagtgatgaagttcactttgcaatgtcagcaatgtttgacgcaatgactgccttatcctcaaaatacaatgatactccagaaaaagcctctagaccgtatgacaaaactagagatggatttgtaatttcaggtggtggtggtgttttagtacttgaagaatatgaacatgcaaaagcaagaggggcaaaaatttatgctgaactaactggttatggtgctacgtctgatggttacgatatggtagctccatcaggagaaggtgcagtaaggtgtatgaaaatggctttaagtacaagtaaaaataaaattgattatttaaatacgcacggaacttcaacaccggtaggtgacataactgaactaaaagcagtaggggaagtttttaaagagaatgttcctaaaataagttctacaaaatctctttctggtcactcattaggagcaacttcggtgcatgaggccagt

SEQ ID NO: 235002 - DNA, 659 bp, Unknown
  Bacterial polypeptide expressing nucleotide sequence isolated from the Sargasso Sea
gttattttagcgctgctgataaaacaaggggaaaaaaatccaaaaaaaatgggcccttttgtttttccaagaacaatgtccagcacggcttcagctacattagctgtaccatttaaaattaaaggagttaattatacaattagttctgcatgtgcaactagtggccattgtattggaaatgcaatggaattaattcagcttggaaaacaaaaaattatgtttgcaggtggtagcgatgaagttcattatgcaatgacagcaatgtttgatgctatgacggctttatcatctaaatataatgatactcctgaaaaagcgtctagaccctatgataaaactagagatgggttcgtaatatcaggtggtggaggtgttctggttttagaagaatatgaacatgcaaaagcaagaggcgcaaaaatctatgcagaattaactggatatggtgctacctctgatggatatgacatggtagctccttcaggcgaaggtgctataagatgtatgaaattagccttaagtactagtaaaaataagattgattatttaaacactcatggaacatcaactccagttggtgacattacagaacttaaagcagttggagaggtatttaaagataatgtccctaaaataagctcaacaaaatcattatctgg

SEQ ID NO: 235003 - DNA, 799 bp, Unknown
  Bacterial polypeptide expressing nucleotide sequence isolated from the Sargasso Sea
gctgcagataaaacgagggaaaaaagtccaaaaagaatgggcccatttgttgttccacgaacaatgtctagtacagcttcagcaacactcgcagttccatttaaaattaaaggtgtaaattatactatcagttcagcttgtgctacgagtgggcattgcattggaaatgcaatggaattaattcaattaggaaaacaaaaaataatatttgctggtggtagcgacgaagttcattttgcaatgacagctatgtttgatgctatgactgcactttcatcaaaatacaatgatactccagaaaaagcttcgcgaccatatgataaaacaagagatggctttgtaatatcaggtggcggtggtgttttggttttggaggaatatgaacatgcaaaatctagaggagcaaaaatttatgcagaaattacaggatatggagcaacttctgatggatatgatatggttgcaccgtctggcgagggtgcagttagatgtatgaaaatggccttgagcacaagtaaaaataaaattgattatataaatacacacggaacatctactcctgttggagatataactgaacttaaagcagtgggtgaggtgtttaaagataatgttccaaaaatcagttcaactaaatcgttatctggacactctttaggggcaacttctgttcatgaagcagtttatagtttaatcatgatgaaaaataattttatatctgcatcaataaatattaatgatatggatgataaagctaaaaaatttcctattattacaaaagtagaaaaaaaatgttaat

SEQ ID NO: 235004 - DNA, 602 bp, Unknown
  Bacterial polypeptide expressing nucleotide sequence isolated from the Sargasso Sea
ttcaaaatataatgacaaacctgctacttcaagtagagcttacgataaggatagagacggctttgtaattgccggtggagcaggagttcttgttcttgaagaaatggaaaaagccaaagcaagaggagcaaaaatttatgctgaaattgttggctatggagcaacatctgatgggcatgatatggttcaaccttctggagagggagctgtcagatgcatgaaaatgtcaatggaaaatattggctgtgaaattgattatattaatccacatgcaacatcaacgcctattggagatgaaaaagaggttgaagccataagagagacatttagaggaaaaattccaaatataagcgctacaaagtctttaactggtcatagtcttggtgcagctggtgttcaagaagctatctattctatattaatgatgcaaaatgattttattgcgaagtctgccaacattgaaaatattgatcctaagtttgaggacttacctattaataaagagagaattgataatgcaaatataggatgtttattatccaacagttttggatttgggggaactaatgcttcattagtcttcaagaatccaaatttataaa

SEQ ID NO: 235005 - DNA, 426 bp, Unknown
  Bacterial polypeptide expressing nucleotide sequence isolated from the Sargasso Sea
caaatggcgaatacgcagaactccttcatgtcccctatggaacatcaagaaagccagagagacccaaaaaggatgactacaccctgaaaatgagtggaaatgaagtatttaaagttgctgtaaaaacactcgaagaaattgctattgatgcacttaaaaaatcaaatcttgagagtaaggatatcgattggttcatcccgcatcaggcaaatatgagaatcattcaagcggtggcaaaaagattggaattacccgaggaaaaagtaattctcagcatggacattcatgggaatacttctgcggcatccatacccttggcgtttgatcgcgctgttcaagatggaaggataaaaaaaggagacactattttaatgcaaagcttcggcgcaggctttacatggggtagtgttattttagatttataaa

SEQ ID NO: 235006 - DNA, 519 bp, Unknown
  Bacterial polypeptide expressing nucleotide sequence isolated from the Sargasso Sea
aagaatatgaacatgctattgcaagaggagcaaaaatctatgcagagattattgggtttggaatgagtgcagatgctcaccacattacttcaccaccaaatgaaggagaaggggctgcactatcaatgcaaaacgcaatttctgatgccgatattgaagtttccatgattgactacgtaaacgctcatgggacatccactcctgctggagacatcgcagaaactaaagcaattaagtcaatttttaaatatgaaatagacgacctgattgttagttcgactaaatctatgacaggacatcttctaggagcggctggagctattgaagctattttctcaatattaagtattcaagataatatctgtccacctactataaatttagataatccagatccagaatgtgatcttaattactctgcacataccgcaactaaaaagataataacccattctctttcgaattcatttggatttggaggaacaaatgctactctaatttttaaagaattagactaag

SEQ ID NO: 235007 - DNA, 593 bp, Unknown
  Bacterial polypeptide expressing nucleotide sequence isolated from the Sargasso Sea
aaaatataatgatacaccagagactgcatcaagagcatatgataaaactagagatggtttcgtaattgctggtggtggtggagtgttggtgctagaagaatacgaacatgctaaagcaagaggagctaaaatatacgcagaattaactggttacggggcaacttcagatggatacgatatggtggctccatcaggagaaggcgctgtaagatgtatgaagatggctatggcaacatcaaaaaataaaattgattatatcaatactcatggaacatctactccagttggagacattacagaattaaatgctgtaaaagaagcttttggaagtgaaattccaaaaattagttcaacaaaatctttgtcaggtcatcctttaggagcagcatccgttcatgaagcgatctattgtttaattatgatgaaaaataattttatagcaggatctgctaatattaatgaaatggatgacgaggctaaaaaatttccaataattgctaaaactgagacaggcgcaaccttaaatacagtaatgtcaaatagttttggttttggtggaaccaatgctgctttaatttttgagaagatataat

SEQ ID NO: 235008 - DNA, 854 bp, Unknown
  Bacterial polypeptide expressing nucleotide sequence isolated from the Sargasso Sea
tcctttctttgtaccgcgaaacattatcaatatggtcgcaggccatctttcaataaaatatggaattacaggcgtcaactacgctatcgtctccgcttgctcaacaggggctcactgcataggtcaagctgctagaacaatagaacgaggagaacaggatgtaatcatcgccggcggtgcggaattctctacctgccctatgggtataggcggttttgcatctgcaaaagctctatccaccagaaatgatgaccccaaggcggcaagtcggccgtgggacgctgatcgcgatggatttgtattaagcgatggagcaggagtacttcttttagaagaaatggaaatagccaagaaaagaggtgcaaaaatttacgctgaaatcacgggtttcggaatgaacagcgatgcctaccatatgactgcaccatcaccttcaggaaagggggctgctgcttgtatgaaaatggccttagaagacgccaaggtcaacaaggaagacgtgcagtacatcaatgcgcacggtacttctactccggctggcgacaaagctgaaactgatgcagttaaagcactttttggagaccattctaaaaagcttgctatgagctcgacaaaatctatggtggggcatatgttaggtgcggcagggggagcagaggctgtttacacagttatggctgtaagagatcaaatagcaccacccactataaactacaccacacctgatgctgagtgcgacttagattatgttcccaatatagcccgtgatttaaaaattgacgtcgggatcaccaattcttttggatttggcggcaccaatggaacactcgtttttagtcgattcaaggactaag

SEQ ID NO: 235009 - DNA, 499 bp, Unknown
  Bacterial polypeptide expressing nucleotide sequence isolated from the Sargasso Sea
atgaaatcaaaaattatatcgataggaagttacacaccgaataatatagttacgaatcaagatctagagaaacgggttgatacaaccgatgaatggatcgtgtctcgaacaggaatcaaagaaagacccattgccgatgactcacaagcgacgtctgacctggcctatgaagcagcgaagattgcaatagaaagagccaaaatcgataaaaatgagatcgatcttataattgtcggcacatgcacgccagatgttgccacaccaaacgttgggacgctcattcaaaaaagactggatctaaaaaactttccagcattcagtattgaggcggcatgcagtggttttatttatgctttgaatatcgcagataagttcataaagtcgggggattcaaaatgtgctttggttgtcggtgcagagacgctctcaaggattacaaattgggatgaccgaaatacttgcgttctttttgctgatggagccaggtgctgccatctta

SEQ ID NO: 235010 - DNA, 699 bp, Unknown
  Bacterial polypeptide expressing nucleotide sequence isolated from the Sargasso Sea
aagtctacagaaaaagttttaaaaaaaactaatacaagtattgaagaaatagattttgttatttttgcaacctcctcaccagattattacgtaccaggttctggctctgtttttcaaaataaaatgggattaaataatattggggttttggatatacgccaaggatgtgcaggctttgtatatgctctatctgttgctgatcaatatattaaatctggtacatataaaaatattttagttataggtgcagaagttcaaaccacacagttagattatgatactgagggcagaggtacagcaatcatttttggtgatggtgctgcttctgctttagtaaatccaactagtgttaaaggaaaaggaattttatcttcccaccttcattctgatggtaagtatattgatgaacttggtactatagctccaagccctaaaatcaaaggtctaataaataaaaaaaatattgatgatagagaacaccatatttttatgaatggcagggaggtatttaagcatgcagttaaacgtttcccagaagttattttagaaggattatctcataataatttaaatatagatgatgttagtttagtgattcctcatcaggctaattatagaattactaaagctgttcaacaaaatttaaaaattgaagaagaaaaagttttttcaaatattcataaatatggtaataccact

SEQ ID NO: 235011 - DNA, 808 bp, Unknown
  Bacterial polypeptide expressing nucleotide sequence isolated from the Sargasso Sea
taccaattccgcaaatatgtcgacggctttcggcatgcgcgggcttagctattctatttcgtccgcctgtgcgaccagcgcgcattgtataggtaacggtgccgagctaattcaatggggcaagcaggacgtcgtatttgccggtggtggcgaggaggttgattggacactaagcgctttgtttgacgctatgggcgctctgtcctccaagtacaacgacatgccagagaaatcttctcggccgtttgacgtgaatcgagatggattcgtcatcgccggtggcgccggggttttagtgctcgaggaactcgaacgggctaaggcgcgcggcgctaagatctatgctgagttggttgggtacggtgcgacgtccgatggtgtcgacatggtggccccctccggcgaaggcggtcaacgctgtatgcgtatggcaacgacgggccttggcaacacgaccgtggattatataaatgcgcacggaacgtcgactcctgtgggagatatgatagagctgaattccatccaggaggtttttggggcccatcgcccgaagatctcgtcgacaaaatctttgacgggtcattctcagggggcgacgggtgttcatgaagcggtctattcgctgatcatgcttgataacgattttattgccgcttcggcgaacatagaggaaatggaccctggagtgggtgacgccaatgtcgtgactgagcgggtcgatgatgctgggctgaattgtgttttgtccaatagcttcggctttggcggcaccaatgcgtcgttagcctttagccgctacgatcaatag

SEQ ID NO: 235012 - DNA, 676 bp, Unknown
  Bacterial polypeptide expressing nucleotide sequence isolated from the Sargasso Sea
caaaacattatttttgcaggaggaagtgatgaagttcactttgcgatgacagcaatgtttgatgcaatgacagcactttcttcaaagtataatgatactcctgagaaagcatcgaggccatatgataaaacaagagatggttttgtaatttcaggtggtggtggagttcttgtattagaagagtacgaacatgcaaaagccagaggcgcaaaaatttatgctgaattaactggttatggagcaacatcagatggttttgacatggtagctccatctggtgaaggagcggtaagatgtatgaaaatggcattaagtacgtctaaaaataaaattgactatataaacacccatggaacttcaacacctgttggagatataactgagttaaaggcagtaggagaagtttttgtcgattataaaccaaaaataagttctacaaaatctctcgctggccattcactaggcgctacatcagtccatgaggctatttatagtttaatcatgatgaaaaataactttattgctgcttctgctaatatagtagatatggatgaggaagcaaaaaaatacccaatcgtaactaaagttgaaaaaggggtaaaattaaattctattatgtctaatagttttggtttcggtggcactaatgcaaccttagtatttgaaaaggtataaa

SEQ ID NO: 235013 - DNA, 748 bp, Unknown
  Bacterial polypeptide expressing nucleotide sequence isolated from the Sargasso Sea
acaatgagttctgcttgtgcaacaagtggccactgtattggaaactcaatggaattaattcaaatgggaaagcaagatgttgtttttgcaggcggtagtgaagagatacattgggcgatgactgcaatgtttgatgccatgacagctttatcttcaaaatataatgatacaccagagacggcatcaagagcatatgataaaactagagatggatttgtaattgctggtggtggtggagtgttagtgctagaagaatacgaacatgctaaagtaagaggggctaaaatatacgcggaattaactggttatggggcaacttcagatggatacgatatggtggctccttcaggagaaggtgccgtacgatgtatgaagatggctatggcaacatcaaaaaataaaattgattatatcaatactcatggaacatctactccagttggagacattacagaattaaatgccgtaaaagaagcttttggaaatgaaattccaaaaattagttcaacaaaatctttgtcaggtcatcctttaggagccgcatcagttcatgaagcgatctattgtttaattatgatgaaaaataattttatagcaggatctgctaatattaatgaaatggatgacgaagctaaaaaatttcctatagttgcaaaaacagaaaccggagcaactttaaatgcagtaatgtctaatagttttggttttggtggaaccaatgctgctttaattttcgagaagatataat

SEQ ID NO: 235014 - DNA, 848 bp, Unknown
  Bacterial polypeptide expressing nucleotide sequence isolated from the Sargasso Sea
aatgaaaagggttgttgtaactggaattggtattgtatcttgtttaggtaataatcaagaagaggtatatcaatcattaaaaaattcaaaatctggaattacttttgcagaagaatacaaagagtataatttaaaaagccatgttcatggaaaaccagatattaaattagaagatcatgtagatagaaagtttattagatttatgggacctggatctgcatacaattatgtttctatgatggaggcagtaaaagattctggattggaagaaaaagaagtgagtaatatttcaactggcatgataatgggatctggaggaccatcaattgaaaatgttattttagcagcagataaaacgagagagaaaatgccaaaaagaatgggtccatttgttgttccaaggactatgtcaagtactgcatcagctacacttgctgtgccatttaaaattaaaggtgttaattatacaattagctcagcatgtgcaacaagtggacattgtattggtaatgctatggaattaattcaattaggaaaacaaaaagttatatttgcaggtggaagtgatgaagtacattttgctatgacagcaatgtttgatgctatgaccgcgctatcatcaaaatataatgatacaccagaaaaagcttcacgaccttatgataaaactagagatggatttgtaatatcaggtggtggtggagtattagttttagaggaatatgaacatgcaaaagctagaggtgcaaaaatttatgcagagataactggttatggagctacttctgatggctttgacatgggtgctccatcaggagagggtgctgttagatgtatgaatatggcac

SEQ ID NO: 235015 - DNA, 549 bp, Unknown
  Bacterial polypeptide expressing nucleotide sequence isolated from the Sargasso Sea
catgaaatcaaaaattatatcgataggaagttacacaccgaataatatagttacgaatcaagatctagagaaaaaggttgatacaaccgatgaatggattgtatctcgaacaggaatcaaagaaagacccattgccgatgactcacaagcgacgtctgacctggcctatgaagcagccaagattgcaatagaaagagccaaaatcgataaaaatgagatcgatcttataattgtcggcacatgcacgccggatgttgccacaccaaacgttgggacgctcattcaaaaaagactggatctaaaaaactttccagcattcagtattgaggcggcatgcagtggttttatctatgctttaaatatcgcagataagttcataaagtcgggggattcaaaatgtgctttggttgtcggtgcagagacgctctcaaggattacaaattgggatgaccgaaatacttgcgttctttttgctgatggagcgggtgctgccatcttaaaaccatcggatgacacaggaaatatattttctgagcttggagcaaatgg

SEQ ID NO: 235016 - DNA, 898 bp, Unknown
  Bacterial polypeptide expressing nucleotide sequence isolated from the Sargasso Sea
agcttcttcagaagatcaaattgaatcggctgatattcttagagaaaaaggtttaaagagaataggcccctatagagttacaaaagcgatgggtagtacagtctcagcatgcctatcaacagctctaaaaataaagggaataaatttctctatttcttctgcttgctctacaagtgctcattgcataggtgttggcatggaacagatacaactaaataaacaagatgtattaattgttggaggagctgaagcagagcactggggtataactagcctattcgatgccatgggagctctttcaacaaaatataatgaagatcctcataaagcttctagagcttttgataaagatagagatggttttgtcatagctggtggaggtggagctctagtaattgaagagctggagcatgcaaagaaaagaggagccaaaatatatgcagaacttactggttatgctgccacttcagatggccatgatatggtcagcccttctggagaaggtgctttaagatgcatggaaacagcattaactatgtccggaggagaaaaccctgattatatcaacgctcatggaacaagcactccagttggcgatattgctgagattgaagctatacataatctttttggtaaaaatagtcccttaattagttcaactaaatctttaacaggtcactctcttggtgcagcaggagtacaagaatcaatctatagtctactaatgttaaatgaaggatttctctgtgcttcagctaatatagatcacattgatgaaaaaatttctaaagccaatattctgagaaaaaatcaaacaggaacttttaaaaaagttatgtcaaacagttttggttttggtggcacaaatgcctgtcttgtttttgaaaccctaaactaa

SEQ ID NO: 235017 - DNA, 823 bp, Unknown
  Bacterial polypeptide expressing nucleotide sequence isolated from the Sargasso Sea
aatgaaaagagtggtgattacaggaattggtatagtttcttgtttaggaaacaataaaaaagaagtttatgaatctttaataaattcgaaatctggaattacattttgcgaagaatataaagaatttaacctaaagagtaacattcatggcaaaccaaatattaagcttgaagatcacgttgatagaaaagtaattagatttatgggcgaaggctcagcttataattatgtagcaatgagcgaagcggttaaagactctggtttagatgaaaaagatataagcaatatttctagcggaatgattatgggttcaggcggaccttctattaaaaatgttatcttagctgctgacaaaacacgcgaaaaaaatccaaaaaaaatgggaccatttgttgttccaagaacaatggctagcacagcatctgcaacattggcagttccatttaaaataaaaggagtaaactatacaattagttcggcttgtgctaccagcgcacactgtataggaaacgcaatggaactaatacaactaggaaaacaaaaaatagtttttgctggaggaagcgacgaagttcattttgcattaacggctatgtttgatgcaatgacagcgttatcatcaaaatataacgatactcctaagaaagcttcaagaccttacgataaaactagagatggatttgtaatttctggtggaggtggtgttttagtaatggaagaatacgagcatgcaaaagcaagaggtgcaaaaatttatgcagaaattactgggtacggcgctacttctgatggttacgatatggttgccccttcaggagaggga

SEQ ID NO: 235018 - DNA, 752 bp, Unknown
  Bacterial polypeptide expressing nucleotide sequence isolated from the Sargasso Sea
acttgaagaccatgtagatagaaagtttattagatttatgggtccaggttcagcttataattatatttctatggttgaagcagttaaggattctggattagaagataaagatgtcagtaatatctcaactggtatgattatggggtcgggtggaccatcaatacaaaatgttattttagctgccgacaaaacaagagaaaaaaatccaaaaaaaatgggaccatttgtagttccaagaactatgtctagtacagcctctgctacattagcggttccatttaaaattaaaggagtcaattatacaattagttcagcatgcgcaactagtggacattgtattggaaacgctatggaattaatccaacttggaaaacaaaatgttgtctttgctggaggaagtgatgaagttcactatgcaatgactgctatgtttgatgcaatgaccgctctatcttcaaaatacaacgataccccagaaaaagcttctagaccttatgataaaactagagatggatttgttatttcaggtggaggtggagttttagttttagaagaatatgaacatgcaaaagcaagaggtgcaaaaatttatgctgagttaactggttatggagcaacttctgatggatatgatatggtagctccatctggagaaggagctgtaagatgtatgcaaatggctttaaacacaagtaaaaataaaattgattatataaatacacacggcacttcaaccccagtggagatataac

SEQ ID NO: 235019 - DNA, 898 bp, Unknown
  Bacterial polypeptide expressing nucleotide sequence isolated from the Sargasso Sea
ttacattgatagaaaagttattcgttttatgggtgctggatcagcatataattatattgctatgagtgaagcagttaaagactctggattagaagaaaatgaagttagtaatatttcaactgggatggtaatgggatcaggaggaccatcaattgaaaatgtgatattagcatcagataagactagagagaaaaatccaaaaaagatgggtccatttatagttccaagaacaatggcaagtactgcttctgccactttagcagttccatttaaaataaaaggaactaattacacaataagttctgcgtgtgcaacgagcggtcattgtattggtaacgcaatggaacttattcaattaggaaaacaaaatattatttttgcaggtggcagtgatgaggttcactttgcaatgactgcaatgtttgatgccatgactgcactatcgtcgaaatataacgatacacctgaaaaagcctcaagaccgtatgataaaacaagggatggttttgtaattgctggtggaggtggagttctagttttagaggaatatgagcatgctaaagcaagaggtgctaaaatatacgcagaattaacaggttatggagcaacctcagatggctatgatatggttgcaccatctggcgagggagcggtgagatgtatgaaaatggctcttgcaacctcaaaaaataaaattgactatattaatactcacgggacatcaacacctgtgggagatattacagaattaaaagcagttggtgaggcttttccagaatataaacctaagataagttcaacaaaatctttgtcgggccattcattaggtgcaacttcagttcacgaagcaatttacagtttgataatgaagaaaaacaattttatttcagcatcagca

SEQ ID NO: 235020 - DNA, 769 bp, Unknown
  Bacterial polypeptide expressing nucleotide sequence isolated from the Sargasso Sea
tttggaaggaataaattttaatcagattggagtgtcattcaagggaagtggaagttatgtacctgatcaaatcctaaccaatcaaaaaattagtcaaaaagttgatacaagcaatgaatggatacaatctagaactggtatttctgagagaagaatctctagcgtagaagataatgttactgagatgggttataaggctgctctaaaggctatagaaatggctaattgggatattaaaacgattgatttgattgttttagctacttctactccgcatgatttatttggatcagccccatccattcaagctaaattaggggcagcaaatgctgtagctttcgatttaactgcagcttgtagtggctttttatttgccttaataacagcctcacaatttttaaaagggggtagttttaaaagggctattgttattggagcagatcaattatcaagttttgttgattggaatgatagaagaagttgtatcctctttggagatggtgccggtgcattagcaattgaagccacaaatgaatttgataattttataggttttgatatgaaaactgatggggggaggggttcttttcttaatcttccatcaaaaaataataaggattcaattgttgatgaaattgactttttaagtggaggtttttctccaattcagatgaatggtcaggaagtttataaattcgcagttaaagaagtccccctaattcttcgaaagttgttgaaaaaaatgaaatataattctgatcaagttgat

SEQ ID NO: 235021 - DNA, 373 bp, Unknown
  Bacterial polypeptide expressing nucleotide sequence isolated from the Sargasso Sea
agtgcactgggttggtcacgttcgtatggaaggcaaagaggtgtttcgtcacgctgttgaaaagcttgcggcggtgatggacgaagcccttgatgccgcccaaatggacgccacacaaattgactggcttgtcccgcatcaggccaatattcggatcattgatgccatgcaaaaaaagatgggaatggcatcggaccgagttgtacgtacagtagaacagcatgcgaatacatcagccgcatcaataccgttggcattagcggtagcagttgatgatggccgaatcaaaaatggtgatgtcttagcgatggaagcaataggtggcgggcttgtttggggcgctgcattggtcaagtttggcaaaccttgctaa

SEQ ID NO: 235022 - DNA, 331 bp, Unknown
  Bacterial polypeptide expressing nucleotide sequence isolated from the Sargasso Sea
ttggtcgagccgctcagcacaaccagcggtgtgttgttccgagggtctggcagcgcgacgcccagccgctcgatcagcaacgctgagcttggccagcgggttgagacgagtgacgaatggatccgcagtcgcaccggtattgccgcgcggcgggtggttaacagtgacgaatcccttgcggaactgagcggagtggcggcggaacgcgctttggagatggccggttgggcgcccgacagcctcgatctgatcctgttggccacctccacaccagacgacctgttcggttcagcgccacggctgcaggctcgcctcggcgccaccaatgccg

SEQ ID NO: 235023 - DNA, 619 bp, Unknown
  Bacterial polypeptide expressing nucleotide sequence isolated from the Sargasso Sea
gtttgatgcgatgactgccttatcatcaaaatataatgatgctcctgaaacagcatcaagagcatatgacaaaacaagagatggttttgtaattgcaggtggtgcaggtgtgctagtgcttgaggaatacgaacacgctaaagcgagaggggctaaaatatacgcagaattaactggttatggagcaacttcagatggatacgatatggtagctccatctggtgaaggaggtgtaagatgtatgcaaatggcaatgtctacagctaaaaataaaattgattatatcaatactcatggaacttctactccagttggagatatcacggagttaaatgcagttaaaaatacttttggagacaatatcccaaagattagttcgacaaaatctttatcaggacatccacttggcgcagcttcagttcatgaagcaatttactgtttgataatgatgaagaataatttcatagctggctctgcaaacataagtgagatggacgaagaagctaaaaaatttcctatagtttcaaaaactgaaacggaagcaactttaaatacagtaatgtcaaatagttttggctttggtggaactaacgcagctttaatttttgaaaaggtttaa

SEQ ID NO: 235024 - DNA, 588 bp, Unknown
  Bacterial polypeptide expressing nucleotide sequence isolated from the Sargasso Sea
ataacgatacgcctgagcaagcatctagaccttatgataaaacgagagatggttttgttatagctggtggtggtggtgtattagttttagaggagtatgagcatgcaaaagctagaggagcaaaaatttacgcagagcttacaggctatggtgcaacttctgatggatttgacatggtagccccatctggtgaaggtgctgtaaggtgtatgagaatggctttgaaaacttctaaaaataaaattgattatattaatacccatggaacatcaactccagttggagatattactgaattgagagcagtaggtgaagtttttactgaatacaaaccgaaaattagttctacaaagtccctagcaggtcactccttaggggcaacttccgttcatgaagcaatttacagtttaattatgatgaaaaataattttattgcagcatcagctaatattactgacatggatgatgaggcaaaaaaatatcccataattaccaaagttgaaaaagatgttagtttaaattcaataatgtcgaatagttttggatttggtggaactaatgctactttagtctttgagaaggtataaa

SEQ ID NO: 235025 - DNA, 898 bp, Unknown
  Bacterial polypeptide expressing nucleotide sequence isolated from the Sargasso Sea
ttttttgatatcacttcacaccttgaagctaaagatataaaaagaaatgatagatttattcaatatggtattgttgccgctaatatggctgtgcatgactcgggtatacaagacttgggtgacgaagataaacttaaaacaggtgtaattgttggttcaggcataggtggattagaaactatttataatggttcattgactataaaaaataacggccccaggaggttatcacctttttttataccatcatcacttattaacctgttatctgggcaaatttccattaaatttggtcttaaaggacctaatcattctgtagttacagcatgcgccacaggagcacattctattggtgatgctggtgaaatcattaagcgtggagcagcagatataatgatagcaggcggagctgaggcagcagtttgtgaacttggtttagcgggtttttgcgcagctagaagtttaagcacatcttataatgatactcctgaaattgcatcaaggccatgggataaaaatagagacggttttgttatgggtgagggcgccggcattgttgttttagaagaacttgaccatgcaaagaaaagaggtgctaaaatttatgcagaattgattggttatggcatgtcaggtgatgcttaccatattactgcaccatcagaagatggagatggcggctttagggcaatgagacaagcattaaatatggctcaaactatgcctgaagatattaactatgtaaatgcacatggcacttctactcttaaaggtgatgagattgaattaaatgcaataatgaaactatttaacaatcatgaaaatttattcgttagttctaccaagtcatctataggtcatttactaggagcagcaggaagtgttgagtctatttttc

SEQ ID NO: 235026 - DNA, 766 bp, Unknown
  Bacterial polypeptide expressing nucleotide sequence isolated from the Sargasso Sea
attaaaggagtaaattatactataagttctgcttgtgctacaagtggacactgcattggaaatgcaatggaattaattcagttaggaaaacaaaaaataatttttgcaggtggaagtgatgaagttcactttgctttaactgcaatgtttgatgctatgactgctttatcatcaaaatataatgatacacctgagaaagcttccagaccttacgataaaacaagagatggtttcgtaatatctggtggtggtggagtattagttatggaagaatacgaacatgcaaaatcaagaggtgcaaaaatatatgctgaaataactggatatggagcgacatctgatggttatgatatggtcgcgccttccggtgaaggtgcagtaagatgtatgagaatggcactaagtacaagtaaaaataaaattgactatattaatactcacggtacttcaacccctgtaggagatattacagaacttaatgctgtaggagaagtttttaaagataaaattcctaaaataagttcaacaaaatcattatcgggtcattctttaggagcaacttcagtccatgaagctatttacagcataattatgatgaaaaataattttatttcagcttcagtaaatataactgatatggatgaaggagctaaaaagttcccaatagtaactaatgttcaaaaaaatttaagtttaaacgcaataatgtctaatagttttggttttggtggaaccaatgcaacattagtatttgagaaagtttaat

SEQ ID NO: 235027 - DNA, 817 bp, Unknown
  Bacterial polypeptide expressing nucleotide sequence isolated from the Sargasso Sea
gaatttattgttagcatttgatacggctcgccactcaagtgcaaaaaaagttggcccgtttatggttccacgcacaatgtcgagtacaaactcggctgttttagcgaccgcttttaaaatcaaaggcgtgaattattctataagctctgcctgtgcaacaagcgcacactgcattggtaacgccgctgagctaattcagcttggaaaacaagatgtagttttcgctggtggcggtgaggagctcgactggacaatgacggtcctattcgatgcaatgcccgcgctttcaggcagatataatgatgctccggaaagggcgtctcgcccctttgattctaatcgggatggctttgtgatcgctggcggtggaggcgtggttgtgttggaagaactccaacacgctaaagcacgcggagcaaaaatatatgcagaatttgccggctacggcgcaacttcagatggatatgatatggtgcagccttctggtgaaggtgcggtccggtgcatgaacatggcactccagggggtagaggctgtcgattatgtcaacactcacgggacttcaacgccggtcggagatgttaaagaattggccgccttaaggaccgttttcggcgagaaaaatcgaatccccgcttttaattcgacgaaatccctcgctggacactcgttgggcgcgactggcgtacatgaagcaatctatacattattaatgatggaaaaccatttcatttctgcctctgcaaatgttgaaaacgtagatccagaagttggcgatatgcctctggttacaaagcgtcgcgacaatattgaaatt

SEQ ID NO: 235028 - DNA, 648 bp, Unknown
  Bacterial polypeptide expressing nucleotide sequence isolated from the Sargasso Sea
agataccaacgatgaatggattacaactcgtacaggaattaaagaaagaagaatagtaagtaatggagaaaccctatctgatttgggagcggaagttgttaaagttatttgtgaaaagagaggtatatctcctttggagattgatctaattattgttggaactgttacttctgaccacagatttccaagttcatctaatttaatatgtcataaaagtggggcaactaatgcatggggttatgacgtaagtgctgcttgttctggatttttatattctctagttactgggcaacaatttgtagagtctggtaaatacaaaaaagttattgttattggaggtgatatcatgtcttccattataaattatgaagacaggaacacttgtatcatttttggcgatggctgtggaggtgttctacttgaagctaatgaagaaggcaatggaattattgactctgtattaaaagccgatggttctggaaaagaatatttaaatcaaaagctaggaggatctgcatatccaataactaaagaaaatgttggtcatcctgatatgtatgtttaccaagaaggtcgttcagtttttaaatttgctgttactagtatggctgatgtttctgctgaaattatggaaagaaacaatttaac

SEQ ID NO: 235029 - DNA, 406 bp, Unknown
  Bacterial polypeptide expressing nucleotide sequence isolated from the Sargasso Sea
catgacctatgcacgaattgtcggaactgggtcctatcttccagagaaagtgcttagaaataaagagcttgaaaggaaagtcaacaccacagattcctggattcaggaacgaactggtattcgtgaacggcgcattgtggccgaaaatgaatctacggtcgatttggccgaaagagcggcacttaatgctctccaagctgccgatctaagccctgaggatatcgatctgattatagttggaacgaccacgcccgatcgtatttaccctgcaacagcttgccggctacaagctcgactggaagcacccgggtgcccggcatttgacgttcaggcagtatgcaccggtttcatttacgccttgggtattgcagaaaaatttatcaagtccggtacatctgtaagggca

SEQ ID NO: 235030 - DNA, 652 bp, Unknown
  Bacterial polypeptide expressing nucleotide sequence isolated from the Sargasso Sea
gaacttggtctagcaggtttttgtgcagctagaagtctaagtacatcttataatgaaactcctgaattagcatcaaggccatgggataaaaaaagggatggttttgtaatgggagagggcgcaggtattataattttagaagaacttgagcatgcaataaaaaggggagctaaaatatacgctgagcttattggttatggaatgtctggtgatgctcatcatattactgcaccatctgaagatggtgatggtggatttagagcaatgaaacaatctataaatatggctaatattgctttagaggacataaattatataaatgcacacggaacatctactattaaaggtgatgaaattgaattaaatgctataatgagattatttaaaaatcataaaaatttgttcgtaagctctactaaatcatcaattggtcatttattaggagcagctggtagtgttgagtctatttttgcaattcttgctataaataattcaattcttcctggaacactaaatttagaagatcctatagactctcaaaatataaaactagtagcaaaagagccaattgaaactaaaattaatattgccttaagtaattcatttggttttggaggaactaatactgctttattatttaagaattattagt

SEQ ID NO: 235031 - DNA, 595 bp, Unknown
  Bacterial polypeptide expressing nucleotide sequence isolated from the Sargasso Sea
tctaaatataataacgaaccaaaaaaagcttcaagagcttatgataagacacgagatggatttgttattgcaggaggtggtggggtactagttttagaagaatatgaacatgcaaaagcgagaggagcaaaaatttatgctgagataactggatatggggctacatctgacggttatgacatggtggcgccttccggggaaggggcagtaagatgtatgaagttagctctaagtacctctagaaataaaatagattatataaatacacatggaacgtctactccagttggagatattactgaattaaaagcaataggggaaacctttaaggaaaatatacctaaaattagttctactaaatcattgtcaggacaccctttaggagcagcttctgttcatgaagctatttattgtctaataatgatgaaaaataattttattactgcttctgctaatatttctgaaatggatgatgaagcaaaaaaattccctattattacaaaaacagagaaagaccttaatcttagatctataatgtctaatagttttggttttggtggtacaaatgcaacattaatttttgaaaaggtataat

SEQ ID NO: 235032 - DNA, 742 bp, Unknown
  Bacterial polypeptide expressing nucleotide sequence isolated from the Sargasso Sea
gagttctgcttgtgcaacgagtggtcactgtattggaaattctatggagctaattcaaatgggtaaacaggatattgtttttgcaggtggtagtgaagaaattcattgggcaatgactgcaatgtttgatgccatgacagcattatcttcaaaatacaacgataaaccagaaagtgcttcaagagcatacgataaaactagagatggttttgttattgctggtggagctggtgttttggttcttgaggaatatgaacatgcaaaagctagaggtgcaaagatatacgctgaacttactggatatggtgcaacgtctgatggttatgacatggtagcaccttctggtgagggagccgttagatgcatgaaaatggccatggctacatctaaaaacaaaattgattatataaatactcatggtacttcaacacctgtaggagatatcacagaattaaatgctgttaaaagtaccttcggagaaaatattcctaaaattagttcgactaaatctttatctggacatccattaggtgcagcatccgtacacgaagctatttattgtttaattatgatgaagaataatttcattgctggttcagcaaatattaatgaaatggacgatgaagctaaaaattttcctataattacaaaaactgagaaaggaactgcaataaatacggttatgtcaaatagttttggttttggaggtactaacgctgcgctaatttttgaaaaggtataa

SEQ ID NO: 235033 - DNA, 424 bp, Unknown
  Bacterial polypeptide expressing nucleotide sequence isolated from the Sargasso Sea
gcaccagacggagaaggtgccttaagagctatgaagaaagcgctagatgatgcaaaagtaaatccaacagacatcgattatataaatgcacacggaacatcgacatatcttaacgataaaaatgaaacagcagcgattaaaaatgtttttaaagatcatgcttataacgttgctataagctctaccaaatcaatgacaggccatttattaggtgcagctggtgctattgaactaattgcaggattaaatgctataaacagaaatatagtacctcctacaattaatctaaataatccagacccagaatgtgatttaaattacactccaaacaaagcgatagaaagaaatgtaaataaagtaatgtcaaactcgtttgggtttggtggtcataacgcagttttgatttttcaaggtgtatcttaag

SEQ ID NO: 235034 - DNA, 714 bp, Unknown
  Bacterial polypeptide expressing nucleotide sequence isolated from the Sargasso Sea
taggttattctgatataattgtttcagggggttctgaagctggaataataaaatcaggaataggcggatttaatgccgtacaagctttatcaaaaagaaatgatgacccaaaaacagcatcaagaccatttgatttagatagagatggttttgttcttggcgaaggtggtggctgcataatccttgaagaactagaacacgctaagtcaagaggtgctaaaatttatgctgaggtaagtggtgctggcctttcagctgatgcgtatcacatgaccgctcctcaccctgagggagaaggggctataaatgtgatgaacaattgtcttgctgattctggattaagctataaggatgttgacttgattaacatgcatggtacatcaactcctttaggtgataaagcagaagcaaaagcagtcaaggctgtatttaaagatcatgcatataatcttaacattaactccaccaagtcaatgactggacatcttttgggggcagctggtgcagtagaagcaatttcatgtattctggcaattaataacaatatagttcctcctaccataaatcactttaatgatgatccagagattgataatcaactaaattttacttttaatagctctcaaaaaagagaggttaaggttgctatgagcaacacttttggttttggcggacataatgcgtgtgttctcctaaaagaatttgtagattagt

SEQ ID NO: 235035 - DNA, 358 bp, Unknown
  Bacterial polypeptide expressing nucleotide sequence isolated from the Sargasso Sea
aatggatggccccgccgtttttaaaaagggcattgagattgttactaaatccattatggccctactcaaaaaacatgccattgatccccatgccattacctactttattgcgcatcaggccaatattcgcattttggaatccgtggctaaaaaactaggcattccttttgatcgatttctcatcaatattgattctgttggcaatacatctgccgcatcaatccccctaattctctctgaacattttgatcaaaatacatttaaaaaaggtgacaccttgtgccttttgggatttggcgctggatttacatggtccagtattctgttagaatggagtgagtcatatgaacacagttaa

SEQ ID NO: 235036 - DNA, 637 bp, Unknown
  Bacterial polypeptide expressing nucleotide sequence isolated from the Sargasso Sea
catgcatgcactgtctacaagaaatgacgatccaagtacagcttctagaccatttgatagagacagggatggattcgtacttggggaaggagctggtgcattaatattagaagaatatgaacatgctattaatagaggggctaaaatctatgcagagcttgctggaggtggattatcttgtgatgcctatcacatgacagcaccacatccagatggaagaggcgcaattaaagttatgaaaaactgtttggatgatgctgatcttgatcatgatgagattgatcttataaatatgcatggcacctctacttcacttggggatgttgctgaatctaaggcagttatgaatgtttttcaagaccatacatacaacttgaatataaattctacgaaatcaatgacgggtcacttattaggagctgcaggtgcaattgaatctatctcgtgtatactagcaatgaagcatagtattgtccctccgacaattaatcattttaatgatgatgataatattgattcgaaattaaactttacattttcttctccacaaaaaagagaagtaaatattgcaatgtctaatacatttggatttggtggtcataatgcttgtattatatttaaaaagatcgatcagtaa

SEQ ID NO: 235037 - DNA, 827 bp, Unknown
  Bacterial polypeptide expressing nucleotide sequence isolated from the Sargasso Sea
accttttgttgttccaagaacaatggcaagcacagcatcagcaactttggctgttccttttaaaattaaaggagttaactatacaattagctcagcttgtgcaactagcggtcattgcattggaaatgctatggaattaattcaacttggaaaacaaaatataatttttgcaggaggaagtgatgaagttcactttgctttaactgcaatgtttgatgctatgacagctctatcatcaaaatataatgataaacctgaaacagcttctagaccttatgacaaaacaagagatggatttgtaatttcaggaggtggaggagttttagttatggaagaatatgaacatgctaaggctagaggtgctaaaatatacgcagaaattactggttatggagcaacatctgatggatatgacatggtagcaccctcgggagaaggtgctgtaagatgtatgaatatggctttaagcacagcaaaaaataaaattgattatataaatacacatggaacttcaactccagtaggtgatattacagaacttaaagcagtaggtgaggctttcccagaatacaaacctaaaattagttcaacaaaatctttatctggacattctcttggtgctacttcagttcacgaagccatctatagtttaataatgatgaaaaataactttatatctgcatcagtaaatatccataatatggatgatgaggctaaaaattttcctattgtaacccaagttgaaaaagatgtgcagcttgatgccatcatgtctaatagttttggctttggtggaacaaatgcaacattagtattcgagaaagtat

SEQ ID NO: 235038 - DNA, 685 bp, Unknown
  Bacterial polypeptide expressing nucleotide sequence isolated from the Sargasso Sea
tatgactaaaagagcagtaattacgggtgttggccattacctccccaaaagaatagttctcaattcagaatttgaggaaactcttaacaccagcgatgattggattatcacacgaagcggaataagacaaaggcatttctcaaatggagatgaaaccacatcaaaaatggctgtcttagccggaaaacaagcgatagaagatgcaaacatagcagtttctgacttagatgccataattttagctacttctaccgctgatctgactttcccatcagcagctacaatggttcaagccggtctaggtatgagacatgggtttgcttatgatgttcaagcagtttgtgcaggttttatctatgcattatcaacagcgaatgctcagatagtttccggtcaagcaaatagaatactggtaattggttccgaaactttttctaatttaatggactggagcgatcgatcaacttgtgtgctatttggtgatggggctggtgccgtcgtcttagagggccataacgcaaatgggactaaggaagaccgcggtattttgtcagtagatcttaattcggatggtagctttagggatatattatacgttgacggaggagtttctcaaaaaacaactggttacttaaaaatggaaggtaaagaggtctttaagcacgctgtggagaaattagcaaaa

SEQ ID NO: 235039 - DNA, 697 bp, Unknown
  Bacterial polypeptide expressing nucleotide sequence isolated from the Sargasso Sea
actgggtggttcagaagcgactatttgcaaaataggaatagaggggtttacatcatgtaaagcattgagcactaaatttaatgaaaatccatcagaatcatctaggcctttcgacaaagatcgagatggttttgtaatgggagagggtggatgtatattaatattggaagaaatggaacacgcaataaaaagaggtgcaaaaatttacactgaagtaaaaggttatggaatgtcatcagatgcttaccattatacattaccggaaccaactggtgatggcgcttttagagcaatgaaaaatgcaattttagatgcaaatttaattccttcaaacattgaatatataaatgcacatggaacttcaacaccttctggagataaggtagaggtaaatgctattgatagattgtatgaggataatagctttaatgtagctgtttcttcaacaaaatcgcaaattggccatttactgggtgccgctggagcagtagaagcagcttattcaataatgtccttagaaaaaaatactgttccatttaatttaaatttaaaaaatgagattgagtcaaataaaattagttttgttagggacaaacctcgtgaaatagaattaagtaatattctatctaattcatttggatttggaggtactaatgtatcacttatttttagcaaaataaaagatgacaaaaagtga

SEQ ID NO: 235040 - DNA, 888 bp, Unknown
  Bacterial polypeptide expressing nucleotide sequence isolated from the Sargasso Sea
agggttagaggaaaaagatgttagtaacgtgactaccggaatgataatgggatctggtgggccttccattgaaaacgtaatactagctgcagataaaactagagaaaaaagtccaaaaagaatgggtccttttgttgtgccaagaactatgtctagtactgcatcagcaactcttgcagtgccatttaaaataaaaggagttaactacacaatcagttcagcttgcgcaaccagtggtcattgtattggtaatgcaatggaattaatccaattaggaaaacaaaaaattatttttgcaggtggaagtgatgaggtgcattttgcaatgactgcaatgtttgatgctatgacagccctttcctctaaatataatgatactcctgaaaaagcttctagaccttacgataaaacacgagacggttttgttatctcagggggaggaggagttttagttttagaggagtacgagcacgcaaaatcaagaggtgcaaaaatatatgcagagcttacaggatacggtgccacatctgatggttatgacatggtagctccttctggtgaaggagcagttagatgcatgaagatggcattgagcaccgcaaaaaataaaattgattatataaatactcatggtacatcaacacctgttggagatataacagagttgaaagctgtgggagaagtgttcaatgattataaaccaaaaattagctcaaccaaatctcttgcgggtcattctctaggagcgacatcagttcatgaggctgtttatagtttaattatgatgaaaaataattttatagctgcatcagccaatattagcgatatggatgatgaagcgaaaaaatatccaattgttacaaaagtagaaaaaaatgtgaattttaa

SEQ ID NO: 235041 - DNA, 877 bp, Unknown
  Bacterial polypeptide expressing nucleotide sequence isolated from the Sargasso Sea
agagactctgagggtataaaccagacccggcacgccgctatcactggctggggctcgtgcatgccccccgctgtgttgtcgaacaacgacctgtccaccttcctagatacgtcagacgagtggatcatcacgagaacgggcatgaaggaacgtcgtatctctcatgtgtcggcaactgagatggcaaccctcgccgctaagcgggccctagcgtgtgcgggcctcgatccaactgacctagacctcataatctacgggggggtgagtaacgaggagctctgcccaaacagtgcctctggcgtccaattctcactcggggcatcaaacgccgcctccatagatctcaacacggcatgcacaagcttctgctatgggctagcagctgcaaccgcgatgatccaagcaggtcaagttcgaaatgctgtggtgatcggggtggaactgatcagccgatacatggattggactaatcgaaacgttgcggtgctcttcggagatggggccgcggcagtcgtactagaagcaacagatcaagcagaaggcttattagcgagtgtgctcggttgtgacgctgaagctcgtcacacgctacgtgttcgagggttcggctgcagctactccggttacgggatcacactcggagatacattttgggacttcgatggccaacaaatcttcaaacgagccgtcctaggaatgtctcgagcttcaagcgaagtactcaaacgttcagcgctaacagccgacgacatctcgctcgtcattcctcaccaagccaatctccgaatcatcgaatcggtggctaagcacaccggtattccgatggaacgtgtgatgttgaccgtagagaaatacggaaacatgagtgctgcgactg

SEQ ID NO: 235042 - DNA, 796 bp, Unknown
  Bacterial polypeptide expressing nucleotide sequence isolated from the Sargasso Sea
tccatcaatagaaaatgttattttggcagctgataaaactagagaaaaaagtcctaaaagaatgggaccttttgtagtccctagaacaatgtctagcacagcatctgctacactagctgtaccttttaagataaaaggaattaattatacaattagttcagcatgtgcgactagtgggcattgtataggaaatgcaatggaattgatacagttaggcaaacaaaatattatttttgcaggtggaagcgatgaagttcattttgctatgacagcaatgtttgatgctatgaccgctttgtcatcaaagtacaatgatataccagaaaaagcatcgagaccttatgataaaacaagagatggttttgtaatatctggaggaggtggtgttttagttttagaggaatatgaacatgcaaaagcaagaggggctaaaatctatgctgaattaactggttatggagcgacttctgatggttatgacatggtagctccatctggtgaaggtgcagtgagatgtatgaaaatggcactcagtagcgcaaaaaataaaattgattacattaacacacatggaacttccactcctgttggcgatataactgagttaaaagctgtaggagaagtttttaaagaatataaaccaaaaataagttctactaaatctttagctggtcactcattaggagctacctcagttcatgaggccatttatagtttaataatgatgaaaaataattttatagctgcttcagcaaatattattgatatggacgaagaagctaaaaaatatcctatt

SEQ ID NO: 235043 - DNA, 866 bp, Unknown
  Bacterial polypeptide expressing nucleotide sequence isolated from the Sargasso Sea
aaaaggttcaccaaaaagaatgggaccttttatggtaacgcgcggaatgtcttcaactaactcagcatgcttagcaacaccttttaaaatcaaaggtgttaattattcaattacttctgcatgctcaacttcagctcattgtataggaaacgcatcagaattaattcagtatggaaaacaagatataatttttgctggcggtggagaagagttggattggactctttcctgcttgtttgatgctatgaatgcaatgtctagtaaatacaatgataatccagaagtagcttctcgagcctttgactctgatagagatggttttgttatagctggaggtggaggagttgtggtacttgaggaattagagcatgctaagtctaggggtgcaaaaatttatgccgaagtagtgggttatggagcaacatcagatgggttcgatatggtggctccatcgggagaaggagcagagcgggctatgaggttagctatttcatcctgtaataatagaacggttgattatattaatgctcatgggacatctacgccagctggagatgtgacggaagtagaggccgttagaaaagtattttcagagactaaatttcccctaataagctctacaaaatcacttacaggccatagtcttggagcagctggagtacacgaggcaatttattcaatactaatgattgagaataattttattgcgggtagtgcaaatgttgccaaccttgatcctgagctcaggagtgatgaaatagctacaaaattagttgaaaatatagaattggatacagtattatcaaatagctttgggtttggaggaacaaacgcatctttagcaattggtagatatttgggataga

SEQ ID NO: 235044 - DNA, 661 bp, Unknown
  Bacterial polypeptide expressing nucleotide sequence isolated from the Sargasso Sea
aatgtataattcaaaaatatctggattaggtaaatatctccctgataatgttgttaccaatgatgatctttcaaaaattatggatacatcaaacgagtggattattgagagaacaggcataaaagagagaagacatataaagaaaggtgacggggatacaactgccacaatgggagttaaggctgcaaaaattgcaattgaaagagccggaattgataaaaatgatattgatctaatcctttttgctactcttagtccagactattattttcctggaagtggagttcttgttcaagaattactagagattccaacttgtccagcaatggatattcggaatcagtgctctggttttatttatgcaatttcaaccgcagatcaatttgtgaaatcgggtatgtataaaaatattttagtcattggctccgagaatcattctggaggtttggacatgactaccagaggtaggggtgtttcagtaatttttggtgatggggctggtgctgcagttatatctcgtgaagatgatcttacaacaggtatcttatcctctcatttacattctgagggtaaacatgcagaggaattatctttgattggacctagtaccaacagatgggtcccagaaattattgatgcaaatgatccagaggatattcta

SEQ ID NO: 235045 - DNA, 517 bp, Unknown
  Bacterial polypeptide expressing nucleotide sequence isolated from the Sargasso Sea
ggtggcgttttagttcttgaagagtacgaacatgcaaaagcaagaggtgcaaaaatatatgcagaattaacaggctatggtgcaacatcagatggttatgatatggttgctccatctggggaaggagctgcaagatgtatgcagatggctctaaaaacctcaaagaataaaattgattatattaatactcatggaacctctactcctgttggggatattactgaacttaaggcagttggtgaagtatttaaagattacaaacccaagataagctcaactaaatcattatcaggacattcattgggtgcaacttcagttcatgaagctgtttacagtcttataatgatgaaaaataacttcatatctgcatcagcaaacattactgagatggatgatgaggctaaaaaatatccgatagtaacagaagtcgaaaaagatgtttcactaaactctgtcatgtctaatagctttggatttggcggaacaaatgcaaccttagtttttgagaaagtttaaa

SEQ ID NO: 235046 - DNA, 520 bp, Unknown
  Bacterial polypeptide expressing nucleotide sequence isolated from the Sargasso Sea
ggaggtggagttttagtactagaagaatacgaacacgcaaaagcaagaggtgcaaaaatttatgctgaattaactggttatggcgctacctccgatggttacgatatggttgctccatcaggggaaggagcagttagatgtatgcagatggcattaagcacgacaaaaaataaaattgattacataaatactcacggaacatctactccagttggagatataacagaattaaaagcagttggagaggcttttaaagattacaaaccaaaaataagttcaactaaatctttagctggtcactctttaggtgcaacctcagtgcatgaagctgtttatagtttaataatgatgaaaaataaatttattgctgcatctgcaaatattcaggatatggacgatgaagcaaaaaattacccaatagtaactaaagttgaaaaagatgttaatttaaattctgtaatgtcaaacagttttggttttggtggaactaatgccactttggtatttgaaaaggtttaac

SEQ ID NO: 235047 - DNA, 829 bp, Unknown
  Bacterial polypeptide expressing nucleotide sequence isolated from the Sargasso Sea
atggcagttgatgatgctggattaaatgatttaaatcaagaagataaactgagaataggtgtatcagttggttcagggataggaggtctagaaactatttatgagggctctcttactataaataataaagattcaagaaaattatctcctttctttattccttcttcattagtaaatcttttatcaggtcagatttcaataaaatatggttttaagggaccaaatcattccgttgtaactgcatgtgcaacaggtgctcattcaattggtgattctggtgaaatgattaaaagaggagcagcagatgttatgattgctggtggctcagaggcagctgtttgcaaattaggtatagctggtttttgtgctgccagaagtttaagcacatcttataatagtacacctcatcaagcatctagaccatgggacaaagatagggatggttttgtaatgggtgaaggagcaggaataatcgttcttgaagaaatggaacatgcaaaaaaaaggggagcaaaaatttatgccgaattagtaggatatggtatgtccggagatgcacaccacataactgctccagctgaagatggtgatggaggatttagagctatgaatgaagctttaagaatggctaaaatatcaacagatgatgtaggttatatcaatgcacatggtacatcaacaattaaaggtgatgagattgagcttaatgcaattgcaagattgtttaataataaaatcttcgttagttcaacaaaatcatctattggtcatctactaggcgctgcaggtagtgtagagtctatattttcaattatgtctagaataataa

SEQ ID NO: 235048 - DNA, 886 bp, Unknown
  Bacterial polypeptide expressing nucleotide sequence isolated from the Sargasso Sea
aataatcttctaaatggaaaatcaggaataaaaaaaattgatcattttaatacagatgaattcccttgcaaaatagctggttatatttctaataatgaaaaaaatgataactattttgatattacttcacatctagattctagagaaattaaaagaaatgatcgattcatacaatatggcattgttgctgctaaaatggcagttgaagatgcaggtatcgaaaatttaagtgaaaaagataaacttaatattggggttatagctgggtcaggaataggtggactggaaacaatttataatggcgcattgactattaataatagtggtccaagaaaactatctcctttttttataccatcatcacttataaatttattatcaggtcaaatttctataaaatatggttttaaaggtccaaatcattctgtggtaacagcatgtgctacaggagctcactcaattggtgatgctggtgaaattattaaacgaggggccgctgatattatgatagcaggaggtgcagaggctgctgtctgtgagcttggtctagcaggtttctgtgcagctagaagtttaagtacatcttttaatgaaacccctgaattagcatcaaggccatgggataaaaatagagatggttttgtaatgggtgaaggggcaggtattataattttagaagaacttgagcacgcaaaaaaaagaggagctaaaatatatgccgagttgattggttatggaatgtctggtgatgctcatcatattactgcaccatctgaggatggtgatggaggatttcgagcaatgaagcaatctattaatatggctaatatttctttagaggatataaactatgttaacgcaccatggaacatcaaccttaaaagga

SEQ ID NO: 235049 - DNA, 802 bp, Unknown
  Bacterial polypeptide expressing nucleotide sequence isolated from the Sargasso Sea
ttaaattcgaaatctggaatttctttttcagaagaatacaaagaatacaatttaaaaagccatattcatggtaaaccaaatattaatcttgaggatcatgtagatagaaaatttataagatttatgggaccaggatctgcttataactacatttctatggcagaagcagttaaagattctggcctagatgaaaaagatgtaagtaatacttcaactggtatgatcatggggtcaggtggtccatctattgaaaatgttattcttgcagcagataagacgagagcaaaaagtcctaaacgaatgggtccttttattgttccaaggacaatgtcaagtacagcttcagctactttagctgttccattcaaaatcaaaggtgttaattacacaattagttctgcatgtgcaacaagtggccattgcattggcaatgcgatggagataattcaactaggaaaacaaaaaataatttttgctggtggaagtgatgaggtgcattttgcaatgacagctatgtttgatgcgatgactgccttatcttctaaatataatgatactccagaaaaagcctcaagaccttatgataaaacaagggatggttttgtcatatctggtggaggtggagttttagttttagaagagtatgaacacgctaaagcaagaggagctaagatctatgcagagttaactggttatggtgcaacatcagatggttatgacatggttgctccatcaggagagggtgctgtaagatgtatgcagatggcattaggcactacaaaaaataaaattgactatataa

SEQ ID NO: 235050 - DNA, 655 bp, Unknown
  Bacterial polypeptide expressing nucleotide sequence isolated from the Sargasso Sea
aagcgaagagttgcattgggctatgacagctatgtttgacgcaatgacagcattatcttctaagtataatgacactcctgaaaaagcatcaagagcttacgataaaacaagagatggatttgttattgcaggtggtggtggagttttagtactagaagagtatgagcatgcaaaagcaagaggtgctaaaatttatgcagaaataactggttatggagcaacctctgatggatatgatatggttgcaccttcaggagaaggagcaattagatgtatgaatatggctctagctacaatgaaaaataaaaaaattgactacttaaatactcatggaacatcaacaccagttggagatatcactgaattaaaagcaattagggaagcatttggagaaaatgttcccaaaataagttctactaaatcattatcaggacatccactaggagcagcatctgttcatgaagcaatttacagcttaataatgatgaaaaataatttcataacagcttcagcaaatataggtgatatggatgatgaggctaaaaaatttccaattgtaaccaaaactgaaaaggatgttaacttaaattcagttatgtctaatagctttggttttggtggaacaaatgcaactctagtatttgaaaaggtataa

SEQ ID NO: 235051 - DNA, 863 bp, Unknown
  Bacterial polypeptide expressing nucleotide sequence isolated from the Sargasso Sea
aatgaaaagagtagttgtaacaggacttggtgtattttcgtgtttgggaaataaccaagaggaagtttataaatcgttaattaacacgaaatcaggaataacattttctgaggaatataaagaacataatttaaagagccatgttcatggcaaacctaatatcaaattagaggattacattgatagaaaagttattaggtttatgggtgctggctcagcatataattatgttgcaatgagtgaagcagttaaagattctggattagaggagaatgaagttagcaacatttcaactgggatggttatgggatccggaggaccatcaattgaaaatgtaatattagcatccgacaaaactagagaaaaaaatccaaaaaaaatgggtccatttatagttccaagaacaatggcaagtactgcttctgccactcttgcagttccatttaaaattaaagggaccaattacacaataagttctgcatgcgcgacgagtggtcattgtattggtaatgcaatggagcttattcaattaggaaaacaaaatattatttttgcaggtggtagtgatgaggttcactttgcaatgactgcaatgtttgatgcaatgactgcgctatcatcaaaatataatgatacccctgaaaaagcttcaagaccatatgataaaacaagagatggttttgtgattgctggtggaggtggagttcttgttttagaagaatacaatcatgccatggcaagaggtgctaaaatatacgcggaattaactggttatggagcaacatcagatggctacgatatggttgcaccatctggtgagggagcggtgagatgtatgaaaatggctctagcaacttctaaaa

SEQ ID NO: 235052 - DNA, 1213 bp, Unknown
  Bacterial polypeptide expressing nucleotide sequence isolated from the Sargasso Sea
atgaaaagagtagtaattacaggtttaggtattgtatcttgtataggtaataatcaagaagaagttcatcaatcattattaaattcaaaatcaggaatatcatttagtgaagaatataaaaatcataatttaaaaagtcatgttcatggtaagccaaatataaaaattgaagatcatattgatagaaaaacaattagattcatgggatctggttcagcatataactacatagctatgaaggaagctattgaagactcaggtcttgaagaaaaagatgtaagtaactttaaaactggaattattatgggttcaggtggaccttctatagaaaatgtaatcttagctgcagataaaacaagagctaaaactccaaaactaatggggccatttattgttccaagaactatggcaagcacagcatcagcaaccctagctgttccttttaaaattaaaggaactaactatactatgagttcggcttgtgcaactagcggacattgtattggaaatgctatggaattaatccaaatgggtaaacaagatattatttttgcaggaggtagtgaagaaattcattgggcgatgacagcaatgtttgatgctatgactgcattatcatcgaaatataatgatacgcctgaatcagcatcaagagcttatgataaaactagagatggctttgtaattgcgggtggtggtggagtacttgtgcttgaagaatacgatcacgctaaagctagaggagctaaaatatacgcagaattaactggttatggagcaacttcagatggatacgacatggtagctccatcaggtgaaggagctgttagatgtatgaaaatggcaatggcaactaccaaaaataaaattaattatataaatactcatggaacatctactcctgttggagatattacagaattaaatgctgttagagaaacttttggatcagaaattccaaaaattagttcaacaaaatctttatcaggacatcccttgggagcagcatcagttcatgaagctatttattgtttaataatgatgaaaaataatttcattgctggatctgcgaatattagtgatatggatgaggaagctaaaaaatttccgatagtttgtaaaacagaaaaagatgttaatttaaatactgttatgtctaatagttttggttttggtggaaccaatgccaccttaatctttgaaaaggtctaat

SEQ ID NO: 235053 - DNA, 1213 bp, Unknown
  Bacterial polypeptide expressing nucleotide sequence isolated from the Sargasso Sea
atgagaaaagttgtagttactggcttaggaataatttccccaattgggaataatgctattgaggttacagactcacttagagaagcaaagtctgggatatctttcgatcaatctcataaagatatgaattttcgcagtcatgtaagtggacaaattaagataaatcttcaagagtcgattgatagaaaatttttaagattcatgggtgatggtgccagttacaattatttagcaatgcttgaggcccttaaggactctggattagatgaaaatcttatttctaatcccatgacaggccttattatgggatcgggtggaccgtcaactaaaaatttgttgagagcttttgatattacaagagatactggtccaaaaaaaattggtcctacaagtgtaccaagggtaatgtgtagtacaaactctgcaacattatctacattctttaaaattaagggaatgaactattctataagctcagcttgtgcaacaagcgctcattgcataggtcatggagccgagcttattcaaatgggaaaacaggatattgtctttgctggtggtggagaagaattagactggtcattgtctgccttgtttgatgctatgactgctctatcttcaaaatataatgatactccagagactgcatcaagagcatttgactcttctagagatgggtttgtaattgctggaggtggaggtgtgctggttttagaagaacttgaacacgcaaaatcaagaggtgcaaaaatttatgctgagttagttggatatggagcaacttcagatggttatgatatggtacagccttcaggtgaaggtgctgagagatgtatgaaaatggcgatcaaaaatttagatgaaaaagttgattatataaatgcacacggcacttcaactcctgtaggtgataacgcagagcttggcgctgtcaaaaaagtatttggagaagaaactccttttatcagctcaacaaaatctctaacaggtcattcacttggtgcagcaggtgtacaagaagctatatattctctattaatgcttaataatgattttatgagtgagtctgcacatattaagaatattgacgaagctgctagggatttaaacattttaacatctatcaaagagggggcttttgatacggtaatgagtaatagctttgggtttggtggaacgaatgcgtcattagtatttaggaaatacatttaat

SEQ ID NO: 235054 - DNA, 1213 bp, Unknown
  Bacterial polypeptide expressing nucleotide sequence isolated from the Sargasso Sea
atgaagagagttgtaataactggaattggcgttgtttcatgtttgggaaataatcaagaagaagtctatcagtctttgctaaattctaaatcgggaattacgttttccgaagaatacaaagagtataatttaaaaagcaatgtgcatggtaaaccaaacattaaattagaggattatgtagacaggaagtttattagatttatgggtccaggatctgcatataattatatttcaatgtctgaagcggtaaaagattcagggttagaggaaaaagatgtaagtaatatttcaacaggaatgataatgggttctggaggtccatcaattgaaaatgttattttggcagctgataaaacaagacaaaagagtccaaaaagaatggggccttttgtagtcccaagaactatgtccagtacggcttcggcaactttggcagtcccttttaaaattaaaggagttaattacacaataagctctgcctgcgcaacaagtggtcattgtataggaaatgcgatggaattaattcaattaggtaaacaaaaaattatatttgcaggtggaagtgatgaagttcactttgcaatgactgcaatgtttgatgctatgactgctttatcctcaaaatataatgatactcctgaaaaagcatcaagaccttacgataaaactagggatggctttgtaatttcaggtggtggtggagttttagtcctagaagaatacgaacatgctaaagcaagaggtgcaaaaatttacgctgagattacaggatatggtgcaacatcagatggctatgatatggtagcaccgtcgggagagggggctgtaagatgtatgaatatggctattggaactgcaaaaaataagatcgattatataaatactcatggaacctcaacaccagttggtgatatcactgagcttaatgctgttggtaaagtatttactgactataaaccaaaaataagctccacaaaatctcttgcaggacattctttgggagcaacttctgttcatgaggctgtttatagtctaattatgatgaaaaatagttttatagcagcatctgcaaatattactgacatggatgatgaggcaaaaaaatatccaattgtcacgaaagttgaaaaagatgttactttaaattctgtaatgtcgaatagctttgggtttggtggaactaatgcaacattagtatttgagaaagtttaat

SEQ ID NO: 235055 - DNA, 1213 bp, Unknown
  Bacterial polypeptide expressing nucleotide sequence isolated from the Sargasso Sea
atgaaaagagttgttgtaactgggattggggtagtttcttgtttaggaaacaatcaagatgaagtctatcagtctctattaaattctaaatcaggaatttctttttctgatgaatacaaagagtataatcttaaaagtaacatacatggaaaaccaaaaattaatcttgaagaccatgttgatagaaaatttataaggtttatgggacctggctcagcttacaattatatatcaatggcagaggcagttaaagactctggtttagaagataaagatgtaagcaatatatcaacgggaatgataatgggttcaggaggaccatctattgaaaatgtaattttagcagctgataaaactagagcaaaaagtccaaagagaatgggtccctttgtagtgccaagaactatgtcaagcactgcttctgcaacattagcagttccatttaaaattaaaggtgttaattatactatcagttcagcatgcgcaactagtggacactgtattggtaatgctatggaactaattcaattaggtaaacaaaaaattatttttgctgggggaagtgacgaagttcattttgctatgactgctatgtttgatgcaatgactgcattatcttcaaaatacaatgacacaccagaaaaggcttcgagaccttatgacaaaactagggatggattcgttatagctggtggtggaggagttttagttttagaggaatatgaacatgcaaaagcaagaggagcaaaaatttacgcagaattgactggttatggcgctacctctgatggttacgatatggttgcaccatcaggtgaaggagcagtaagatgtatgcaaatggctttaagcactgcaaaaaataaaattgattacataaatacacatggaacatccacgcctgttggtgatattacagaactaaaagcagttggtgaaacttttaaagattataaaccaaaaataagttcaacaaaatcattagctggtcactcattaggagctacttcagttcatgaggcaatttatagtttaataatgatgaaaaaaagttttatagcagcatccgcaaatattactgacatggatgacgaggctaaaaaatatccgatagttaccaaagttgaaaaaggtgttaatttaaactccgtaatgtctaatagttttggttttggcggaactaacgcaacgctagtttttgaaaaggtttaat

SEQ ID NO: 235056 - DNA, 535 bp, Unknown
  Bacterial polypeptide expressing nucleotide sequence isolated from the Sargasso Sea
gtttgtaattgctggtggtgcaggcgtattagtacttgaagaatacgaacatgccaaagcacgaggtgctaaaatatacgcagaattaactggttatggagcaacttcagatggatatgatatggtagctccatcaggagagggtgctgtcagatgtatgaaaatggcgatggcaactgctaaaaataaaattgattacattaatactcacggaacatcaacaccagtaggagatattactgaacttaatgctattaaagaaacttttggagaggatattccaaaaataagttcaacaaaatctttatcaggtcatcctttgggagcggcttctgttcatgaggcaatttattgtttaattatgatgaaaaataatttcattacagggtctgcaaatatcactgagatggatgaagatgctaaaaaatttccaattgttgaaaaaactgaaacagatgcaactttaaatacagtaatgtcaaatagtttcggttttggtggaactaacgcagctttaatttttgaaaaggtttaa

SEQ ID NO: 235057 - DNA, 1213 bp, Unknown
  Bacterial polypeptide expressing nucleotide sequence isolated from the Sargasso Sea
catgagaagagtagtaattacaggtcttggtatagtgtcttgtctcggtaataatcaggaagaagttcaccaatctcttttgaatgcaaagtcaggcatttcttttgctgaggaatatgaagagcataatcttaaaagtcatgtgcacggaaaacctaatataaagctttcagattttgtagatagaaaaacaatcagatttatggggtctggatcagcttataactatattgccatgaaagaagcaatttcggactccggtttaaaagaaaatgatgtaagtaacttcaagactggtattattatgggttcaggtggaccgtcgatagaaaatgtgattcttgcagcagacaaaactagggctaaaacaccaaagttaatgggaccatttattgtacctagaactatgggcagcacagcttcagcaacacttgccgtgcctttcaaaattaaaggaacgaactatacgatgagttcagcttgtgcaactagtgggcactgtattgggaatgcaatggaattaattcaaatgggaaagcaagatattatttttgcgggtggaagtgaggaagttcattgggcaatgactgcaatgtttgatgcaatgactgcgttatcttcaaaatataatgataaacctgaaactgcttcaagagcttatgataaaacaagagatggatttgtgattgctggtggggctggcgtgttagtacttgaagaatatgaacgcgcaaaagcgagaggagcaaaaatttatgctgaattaacaggatatggtgcaacatctgatgggtacgacatggttgctccatctggagaaggcgctatcaggtgtatgcaaatggctttggctacttctaaaaataaaattgattatattaatactcatggaacatctactcctgtaggagatataaccgaattaaatgctgttcaaaaaacttttggagaaaatatcccaaaaataagttctacaaaatctttatctggacacccattaggtgctgcttctgtgcatgaagctatttattgtttaataatgatgaaaaataattttatagctggttctgcaaatatcacggaaatggatgaagaagctaaaaaattcccaataattactaaaactgaaaaagtagcttcacttaacgctgtaatgtctaatagttttggttttggtggaacaaatgctgctttgatttttgagaaagtttaa

SEQ ID NO: 235058 - DNA, 1216 bp, Unknown
  Bacterial polypeptide expressing nucleotide sequence isolated from the Sargasso Sea
catgaaaagagcagtgatcacagggttaggcatagtatccagcattggtaacgataaacagcaggtgctgaactcgttaaaggctggacgctcaggcattaaagcgtcgcaggaatttgccgacatgggtctgagatcacaggtttggggccagattgacattgatactgccgctttaatagaccgtaaagctttacgttttatgggggatgcagcagcttatgcctacatctctatgcaacaggctattgaagatgccggcttaacaccggagcaagtatcaaatttccgcactggcttagtggtcggctctggtggtgcttcgtctaaaactcagattgaagctgctgatactttgcgtgaaaaaggcgtgaaacgtgtcggtccttatgctgtgccaaaaaccatgtcgagtacctgttcagcttgtttagctactccttttgaaatcaaaggcgtgaactactccatcagctcagcctgtgcaaccagtgcgcactgtattggtcatgcggtcgagcttattcagcttggcaaacaggacattatttttgccggtggtggagaagaagtgcactggactttagccatggagttcgacgccatgggcgctttatcgactaaatacaacgaaacgcctgaattggcgtcacgtacttatgatgctgaccgtgatggttttgtcatcagcggcggtggcggtattttagtagtggaagagctggaacacgcattagcccgtggcgctaaaatttatgctgaaatcgtcggttacggcgcaacttcagatggttacgacatggtcgcgccaagtggtgaaggtgcagtgcgttgtatggaaatggcgatgaaagacgtcaaaggtccaatcgactatgtgaatacccacggtaccagcacgccggtcggtgatgtcaaagaattaggtgctatccagcaagtctttggcggcaaatcgccagccattagtgcaactaaagctatgactggtcatgctttaggggctgctggtgtgcacgaagccatttattcgctgttgatgatggagcataactttattgctccttctattaatatcagcaacctggatgaagcagctgcaggtttaaatatcgtgactaaagcgacagaagccaaattaaccactgtgatgtccaatagctttggttttggtggtactaatgccactttagtgatgcaaaaatatcagggctaa

SEQ ID NO: 235059 - DNA, 832 bp, Unknown
  Bacterial polypeptide expressing nucleotide sequence isolated from the Sargasso Sea
atggccacatctcgtagagttgtagttacaggcatgggtatcatttctccgctgggaaatgaattagaggcatcttggcaaaatattttagccggtagaagcggcgctaagactgttactgctttcgatgtaacagattacccaaccaaatttgctgctccagtagaaaactttgatgatgtaaatcatctggatgtaaaaactaagcgaagagttgatgaattcgttcagtatggactggttgcttccaaacacgcaattgaaaattctggtttggagttaaattcaattgattcttcaagaataggagtttcgataggatccggcatcggtggtttagataccattgaaaaaaatgctctgactttagataagaaaggtccaagaaagatttcaccattttttgttccaggagcaatcgtaaacatggtttctggcttagtctccattgaatacggattgcacggccctaatttgtcgattgttactgcctgttccagcggaaatcacagcataggattttctgctaggtcgatttcacatggtgattgcgatgtcatgattaccggtggatcagagatggctatcactcctctaggtttaggagggttttctgcagtaacagctttatctactaacaatgaaaatcccaccaaagctagcagaccgtgggataaagatagagatggttttgttttaggcgatggagcaggtgttttagtattggaagaatacgagcatgctaaagcaagatctgcaaatatctttgcagaagtaataggatttggaatgagttctgatgcttttcatatgacagcgcctgctgaagacg

SEQ ID NO: 235060 - DNA, 1213 bp, Unknown
  Bacterial polypeptide expressing nucleotide sequence isolated from the Sargasso Sea
atgaaaagagtggttattacaggaattggaattgtatcttgtctaggaaacaaccaagaagaagtatatcaatctttattaaattctaaatctggaattaccttctcagaagaatataaagagtataacttaaaaagtcatgtacatggaaaaccaaacataaaattagaggatcatgtagatagaaaatttattagatttatggggccaggatctgcttataattatatttcaatgatggaagcagtgaaagatgctggtttagaagaaaaagatgtaagtaatatttcatctggtatgattatgggctcaggaggaccgtcaattgagaatgttattttagctgcagataaaactagagaaaaaaatccaaaaagaatgggaccatttgttgttccaagaactatgtctagtactgcatcagctacacttgcagtgccatttaaaattaaaggagtaaattatacgatttcttcagcatgtgcaactagtggacattgtattggaaatggaatggaattaattcaattagggaaacaaaaaataatatttgctggtggaagtgacgaagttcattttgctatgaccgcaatgtttgatgcgatgactgcattgtcatcaaaatataatgatactccagaaaaagcttctagaccttatgataaaactagagacggatttgtaatatctggtggtggaggcgtactagttttagaagaatatgaacatgcaaaagccagaggagcaaaaatttatgctgagttaactggatatggagctacttcagacggatatgatatggttgctccatctggagaaggtgctgaaagatgtatgaaaatggcattaagtaatgctaaaaataaaattgactacataaatactcatggaacatcaacaccagtaggagatattacagagcttaacgcagttggaaaagtatttactgattataaacctaaaataagttcaacaaaatcgttagcaggacattctctaggcgcaacatcggtgcatgaggcagtttatagtttaataatgatgaaaaataattttatatctgcatctgtcaatattacagatatggatgatgaagcaaaaaaatacccaatagtgactaaagtggaaaaaaatgttgagttaacttcagttatgtcaaatagttttggatttggcggtacaaacgcaactctagtatttgagaaaatataat

SEQ ID NO: 235061 - DNA, 1213 bp, Unknown
  Bacterial polypeptide expressing nucleotide sequence isolated from the Sargasso Sea
aatgaaaagagtagttgttactggtattggagtagtatcttgtttaggaaataatcaagaagaagtttatcagtctttattaaattcaaaatctggaattacattttcagaagagtataaagaatataacttaaaaagtaatgtccacggcaagccaaatattaaacttgaagaccatgtagatagaaaattcataagatttatgggtccaggctcagcgtataattatatttctatgactgaagcagttaaggattctggattagaagataaagatgtcagcaatgtttcaactggaatgatcatggggtctggtggaccatcaatacaaaatgttattctagctgctgataaaacaagagaaaaaaatccaaaaaaaatgggaccatttgtagttccaagaactatgtctagtacagcttctgctacattggcagttccttttaaaattaaaggagttaattatacaattagttcagcatgcgcaactagcggccattgtattgggaacgcaatggaattaattcaacttggaaaacaaaatgttgtttttgctggaggaagtgatgaagttcactatgcaatgactgctatgtttgatgctatgactgctctttcttcaaaatataatgacaccccggaaaaagcatctagaccttacgacaaaacaagagatggatttgttatttcaggaggtggtggagttttagttttggaagaatacgaacacgctaaagcaagaggcgcaaaaatctatgctgaattaactggttatggggcaacttcagatggatatgatatggtcgctccatcaggagaaggagctgtaagatgtatgcaaatggctttaaacacaagtaaaaataaaattgattatataaatactcatggtacttcaactccagttggagatataacagaattaaaagctgttggagaagtttttaaagataacgttcctaaaataagttctacaaaatctctttcaggtcattcattaggagctacatcagtacacgaagctgtttatagtttaatcatgatgaaaaataactttatatcagcatctataaatataaccgacatggatgaagaagcaaaaaaatatcctatagttacaaaagttgaaaaagatgtaactctgaatgctattatgtctaatagttttggatttggtggaactaatgcaactttagtttttgaaaaggtttaa

SEQ ID NO: 235062 - DNA, 1216 bp, Unknown
  Bacterial polypeptide expressing nucleotide sequence isolated from the Sargasso Sea
atgaaaagagttgtagttactggaataggcgtagtttcttgtttaggaaataatcaggatgaagtttataagtcattactaaacgcaaaatcaggaattacattttctgaagaatacaaggaatacaatttgaaaagtcatgttcacggaaaaccaaatattaaactagaagatcatgtggacagaaagtttataaggtttatgggaccagggtcggcttacaattatgtttcaatgaatgaagctgtaaaagactctggacttgaagaaaaagatgtaagcaatataacaactggaatgattatgggatcaggtggtccttcaatagaaaacgttatattagcagcagataagacaagagaaaaaagtccaaaaagaatgggaccttttgtagttccacgaaccatgtcgagtacagcttcagcaactcttgcagtaccttttaaaataaaaggagttaactacactattagttcagcatgtgcaactagcggacattgcattggtaacgctatggaattaattcaactaggaaaacaaaaaattatttttgcgggtggtagtgatgaagttcattttgcaatgactgcgatgtttgatgcgatgacagccttatcttcaaaatataatgatactcctgaaaaagcatcaaggccttatgataaaactcgagatggatttgttatcgctggcggtggtggtgttttagttttagaggaatatgaacatgctaaatcaagaggtgcaaaaatttatgcagaattaacaggctatggtgcaacatcagatggttatgatatggttgctccatcaggagagggagcagtccgatgtatgaaaatggcgttaagcacaacaaaaaataaaattgattacattaatactcatgggacatcaacgcctgttggagacattactgaattaaaagcagtaggagaagtatttaatgaatacaaaccaaaaataagctcaactaaatctcttgcgggacactcacttggagctacttcagttcatgaggctatttacagtttaataatgatgaaaaataattttatagctgcttctgctaatataaatgatatggacgatgaagcaaaaaaatatccaatcgtaactaaagttgaaaaaggagtgaatttaaattctgtaatgtcaaatagttttggttttggaggaactaatgctactttggtttttgaaaaggttaaataat

SEQ ID NO: 235063 - DNA, 813 bp, Unknown
  Bacterial polypeptide expressing nucleotide sequence isolated from the Sargasso Sea
gatgagaagagttgttgttactggaatagggttgctatcttcaatcggaagtgaaaaagaaaaagtctggaataaccttttaaatggaaagtccgggataaaaaaaattaaacattttgatactgaagaattttcttgtaaaattgctggatatatttctaatgatgaaagtgactctaattattttgatataaattcacatttagatactaaagaaatcaaaagaaatgatagatttattcaatatggcattgttgcagctaaaatggctgtcgaagactcaggaataaataatttaacagatgaagataagctaaatactggagttattgtaggatcaggcataggaggtttggaaacaatttataatggctcactaacagtaaagaatagtggtccaagaaaattatctcctttttttataccttcttcacttatcaatcttttatcaggtcaaatttcaattaaatatggttttaaaggaccaaaccattctgttgtgacagcttgtgctactggtgcgcattcaatcggtgatgctggtgaaattatcaaaagaggagcagcaaatattatgttagcaggtggggctgaagcagctgtttgtgaacttggtcttgcaggattctgtgcagctagaagtttaagcacatcatataatgatactcctgatcttgcatcaagaccttgggataaagatagagatggatttgtaatgggagaaggagctggcatagttgtattagaggaacttgagcatgcaaaaaaaagaggtgccaaaatatatgctgaactaattggatatggaatgtc

SEQ ID NO: 235064 - DNA, 937 bp, Unknown
  Bacterial polypeptide expressing nucleotide sequence isolated from the Sargasso Sea
agggattgtatttggaacaggtattggaggaataggagctacagaggatgctgttagaacttttgatgaaagaggtccatcaagagtcaatccgttagccattacacaattaatgccaaactcgagtactggtcaggttgctattaaatttggaatagaaggtccttcagtaacaattactactgcatgtgcagcttctgcaaatgcagtgggagaagcaaaaaatatgattgagaatggaatagtagatattgttgttactggtggaactgaatcaggtacaacgccaatgactatcgctgcatttgctcaaataagagctctttcaactcaaaatgataaccctaaaggagcttgtaaaccatttgataaaaatcgcgacggatttgtaatgggagagggatctacagttcttatattagaaagtgaagaatctgccaaaagtagagatgcagtaatttatgcttatattgatgggtatggttcaacaacagatgcatatcatattacagctccagctgaaggaggcgcaggggcggtaaaagcaatggaaaaagctataaaagatgctggtattactccttcagatattgactatataaacgctcatggaacttctacaccagctaatgataaaaatgagactgaagcaattaaaacagttctcggtgaaaaagcttctgaagtagtgatttcatcaaccaagtctatgactggacacttgcttggaggaggcggtgcctttgaatcaatggcttcaatattgtcaataaagcataataaagttcctccaacaattaacttaaatgatcctgatgaggaatgtgatttaaactatacaccaaatgatgctgttgacttagaaatcaatactgcgatgtctaactcttttgggtttggtggacataatgcagttttggttttcaaaaaacaataa

SEQ ID NO: 235065 - DNA, 816 bp, Unknown
  Bacterial polypeptide expressing nucleotide sequence isolated from the Sargasso Sea
caagaactatgtctagtacagcctcagctactcttgcagtcccctttaaaattaaaggtgttaattatacgataagctcagcctgtgcaacgagtggtcactgcattggcaatgctatggaattgatacaattaggtaaacaaaatatcatttttgcaggaggaagcgatgaagttcattttgcaatgactgcaatgtttgatgcaatgacagcgttatcatctaaatataacgatacacctgaaaaagcatcaagaccttatgataaaactagagatggatttgttatttctggcggtggaggcgttttagttcttgaggagtatgatcatgctaaagcaagaggtgctaaaatttatgcagaaataactggctatggcgctacctcagatggttatgatatggttgctccatctggcgaaggagcagtaaggtgtatgcaaatggctttgaatactgcaaaaaataaaattgattatattaatactcacggaacatcaacgcctgttggagacctaaccgaattaaaagcagttggagaagtgtttaaagattataaaccaaaaattagctctactaaatcactggctggtcattcacttggagcaacttcagttcatgaggctgtttacagtttaattatgatgaaaaataattttatcgcagcatctgccaatattacagatatggatgacgaggcaaaaaaatatcccattgtcactaaggttgagaatgatgctaaagtaaattctgttatgtctaatagcttcggatttggtggaacaaacgcaacattggtattcgagaaagtataaa

SEQ ID NO: 235066 - DNA, 589 bp, Unknown
  Bacterial polypeptide expressing nucleotide sequence isolated from the Sargasso Sea
atataatgatacgcctgaaaaagcctcaagagcttacgataaaactagagatggttttgtaattgcaggaggtgcaggggtgcttgttctcgaagagtacgaacatgcaaaagcgagaggagctaaaatatatgcagaattaactggttatggagcaacttcagatggatatgatatggtagcgccttctggtgaaggtgcagtaagatgtatgcaaatggcaatggcaacttcaaaaaataaagtagattatataaatactcatggaacttctactccagttggagatattactgaattgaatgctgttaaagaagcttttggaaatgaaattccaaagattagctcaaccaaatctttgtcgggtcatccattaggagcggcttccgttcacgaagctatatattgtttaattatgatgaaaaacaattttattactggatcagccaacatcagtgaaatggatgaagaggctcaaaagtttccaatcgttgctaaaacagaaacagaagcaactttaaatacggttatgtctaatagttttggttttggtggaacaaatgcaacattaatttttgagaaagtttaa

SEQ ID NO: 235067 - DNA, 936 bp, Unknown
  Bacterial polypeptide expressing nucleotide sequence isolated from the Sargasso Sea
atcatgatattgaaaagatggttcaaacctccgatgaatggattcaaaataggactggcataaaacagaggcatatagtttccgaaggagaagcttcctcagacctttctactcatgtagctaacaagcttttagttacaagaggtatcgacgcaagtgaaattgatgtaattattgttggcacagtaacaccagatcatctaacgccatcaactgccgcaatagtgcaaaataatataaacgccgtaaatgcatgggcatttgatttaagtgcagcatgcagtggattcctatttggcttagagacaggttcaaaactcattgaatcaggagattacgaaaaggtgatggtaatcggcgtagataccatgacatcaattctagattttgatgatagggaaacctgtgtaatatttggtgatggtgcgggtggagtaattcttgaacccacaaaacaagataacggaattattagctcaattctaaaaacagatggttctggagcatctagcctaaacgtagaagctggaggcagtagaaaaccagcctcagaagaaacaatagctaacagagagcattttatcagacaagatggcaaaaaggttttcaaatttgcagtgaaaagaatggcggatgtttcagagaaaattctaaaggaaaatggcctgagtggaaacgatataaaactttttattccacaccaagcaaataaacgtattattgatgcaaccggggaacgctgtggtatcccaaaggagcgcacacttattaatatagatagatttggtaatactactgctgggacaattcccattgcattagatgaggcagtcaaaaatcaattaatcaaaaacggagattatgttctcttagcggcttttggttctgggtttacctgggggagtattttaatgaagtggaattcaaaaacatgaa

SEQ ID NO: 235068 - DNA, 1213 bp, Unknown
  Bacterial polypeptide expressing nucleotide sequence isolated from the Sargasso Sea
atgagaagagtagttattaccggtttaggagtagtttcttgcttaggcaataatcaagaagaggttcatcaatctttattaaattcaaaatcgggaatttcttttgcagaagaatacaaagagcataatttaaaaagccatgttcatggtaagccaaatattaaattagaagatcatattgatagaaaaacaattagatttatgggttcaggatcagcttataattatattgcaatgaaagaggcaatagaggattctggattagaagaaagtgaagtaagtaattttaaaactggtattgtaatgggatccggtggtccttcaattgaaaatgtaatacttgcagcagacaaaacaagagctaaaactccaaaactaatggggccctttattgttccaagaacaatggccagtactgcctcagcaacacttgccgtaccatttaaaattaaaggaactaactacacaatgagttctgcatgtgcaactagtggacactgcataggaaattctatggaattaattcaaatgggcaaacaggatgttgtttttgcaggtggaagtgaagaaattcattgggcgatgacagcaatgtttgatgctatgacagctttatcatcaaaatataatgatattcctcaatctgcgtctagagcttatgataaaactagagatgggtttgtaattgcaggtggtgcaggcgtattagtacttgaagaatacgaacatgctaaagcaagaggagctaaaatatacgcagaattaactggttatggagcaacttcagatggatacgacatggtagcgccatcgggtgaaggcgctgttagatgtatgaaaatggcaatggcaactgctaaaaataaaattgattatattaatactcatggaacatctactccagttggagatataactgagcttaatgctattaaggaaacttttggagaagatattccaaaaataagttcaacaaaatctttatcgggtcatcctttaggggctgcttcagtgcatgaagcaatctattgtttgataatgatgaaaaataatttcataacaggatcagcaaatattacagatatggatgatgatgctaaaaaatttccaattgttgcgaaaactgaaacaggagcaaccttaaatacagtaatgtcaaatagctttggctttggtggaactaatgcagctttaatttttgaaaaggtttagt

SEQ ID NO: 235069 - DNA, 1213 bp, Unknown
  Bacterial polypeptide expressing nucleotide sequence isolated from the Sargasso Sea
atgaaaagagttgttgtaacagggataggggttgtttcttgtttaggaaacaatcaagaggaagtttataaatcactattaaattcaaaatcaggaatttctttttcggaagaatacaaagaatacaatttaaagagccatgtgcatggtaagccaaatattaatcttgaggatcatgttgatagaaagtttattagatttatgggaccaggatcagcttataattatatttctatggtagaagcagttaaagactctggtctagaggaaaaagacgtaagcaatacttcaactggtatgattatgggatctggtggcccttctattgaaaatgttattttagcagcagacaaaactagagcaaagagccctaaacgtatgggtccatttattgttcctagaacaatgtctagtacagcatcggcaaccttagctgtaccatttaagattaaagggattaattatacaatcagttcagcatgtgcaacaagtggccattgtattggtaatgcaatggaaataattcaattaggaaaacaaaaaataatttttgctggtggaagtgatgaagtgcattttgcaatgacagctatgtttgatgcaatgactgctctttcttctaaatacaacgatactcctgaaaaagcatcaagaccttatgataaaacaagagatggttttgttatatctggtggaggtggagttttggtactagaagaatacgaacatgcaaaagctagaggtgcaaaaatttatgctgaattaactggttatggtgctacctccgatggttacgatatggttgctccgtcaggtgagggagccgtaagatgtatgcaaatggcattaagcacgacaaaaaataaaatcgattatataaatactcatggaacatctactccagttggagatataacggaattaaaagcagttggagaggcctttaaagattacaaaccaaaaataagttcaacaaaatcattagctggtcattctttaggtgcaacctcggttcatgaagcagtttacagtttaataatgatgaaaaataagtttattgctgcatccgcaaatattcaggatatggacgatgaagcaaaaaattacccaatagtaactaaagttgaaaaagatgttaatttaaatgctgtaatgtctaacagttttggttttggtggaactaatgccactttagtatttgaaaaggtttaat

SEQ ID NO: 235070 - DNA, 1213 bp, Unknown
  Bacterial polypeptide expressing nucleotide sequence isolated from the Sargasso Sea
atgagaagagtagtaattacaggtttgggaattgtttcatgtcttgggaataatcaggaagaagttcatcaatctttattaaatactaaatcaggaatttctttttctgaagaatataaagaacacaatcttaaaagtcatattcatggaaagcctaatataaaacttgaggatcatatagatagaaaaacaattagatttatgggttcaggatctgcttacaattatattgcaatgaaagaggcgattgaagactctggtttggaagaaagtgaagtaagtaatttcaaaacaggaattgttatgggttcaggtggaccttcaattgaaaatgtcattttagcagctgataaaactagagccaaaactccaaaattgatgggaccttttattgtaccaagaaccatggcgagtacagcatcagctacacttgctgttccgtttaaaattaaaggaacaaactacacaatgagttcagcctgtgcaacaagcggacattgtattggaaattctatggaacttattcagatgggaaaacaagatgttgtttttgcaggtggtagtgaagagatacactgggcgatgactgcaatgtttgatgcaatgactgcattatcttctaaatataatgatactcctgaaaaagcttcaagggcttatgacaaaactagagatggttttgtaattgctgggggtgcaggagttttagttcttgaggaatatgaacacgctaaagctcgaggagctaaaatatacgcagaattaacaggttatggagcaacttcagatggatatgatatggtagctccatctggtgaaggtgcagtaagatgtatgcaaatggctatggcaacttcaaagaataaagtagattatataaatactcatggaacttctactccagttggtgatattactgaattgaatgctgttaaagaagcttttggaaatgaaattccaaagattagctcaactaaatctttatcaggtcatcctctaggagctgcatcagtgcatgaagcaatatattgtttaattatgatgaaaaataatttcattacaggctctgctaacataagtgagatggatgaagaggctaaaaaatttccaatagtcgctaaaacagaaacagaagcaacattaaatactgtaatgtctaatagttttggctttggtggaacaaatgcaactctagtatttgagaaagtttaat

SEQ ID NO: 235071 - DNA, 953 bp, Unknown
  Bacterial polypeptide expressing nucleotide sequence isolated from the Sargasso Sea
tttagaagaaaaagatgtaagtaatatttcaactggaattgttatggtttcaggtggtccttcaatagaaaatgtgattctagctgcagataaaactagagcaaaaactccaaaattaatgggaccatttatagttccaagaactatggctagtacagcttcagcaactttagctgttccatttaagataaaaggagtaaattatacaatgagctcagcttgtgctaccagcgggcattgcataggaaattctgttgaattaattcaatcaggtaaacaaaagattatgtttgcaggaggaagcgaggaattacattgggctatgactgcgatgtttgatgctatgacagctttatcttcaaaatataatgacactccagaaaaagcttcaagagcatatgataaaacaagagatggatttgttattgctggaggaggtggagttttagttcttgaggaatatgagcatgcgaaagcaagaggagctaaaatttatgcagaaataacaggatatggagctacgtctgatggatatgatatggtggctccctctggagaaggggcggtaaggtgtatgcagatggcattacaaacatctaaaaataaaatagattatattaacactcatggcacttctaccccggttggagatatcacagaattaaaagccataggtgagacatttaaagaaaaaattccaaaaataagttcaactaaatctttatctggacatcctttaggtgctgcatctgttcatgaagctatctatagtttgattatgatgaaaaataattttataaccggatcagctaatattaatgaaatggacgaagaagcaaaaaaatttccaataataaataaaactgaaaaagaagtaagtttaaattctgttatgtcaaatagctttggatttggtggaacaaatgcaacattaatttttgaaaaggtataaa

SEQ ID NO: 235072 - DNA, 1240 bp, Unknown
  Bacterial polypeptide expressing nucleotide sequence isolated from the Sargasso Sea
atgactaaacaacgtgtagttgtaacaggtttaggaacaataaatccactcggaaataatgtaataactacatggaaaaatctaataaatggagtttccggcgttgattatattactttatttgatgcatcagatttgcctgtgacgtttgcaggagaagtaaaagattttgatccaaataattacatgggaaaacaaaatgcaagaaagttagatcgatctggtcaattatctatttttgcagcagaagaagctttaagagatgctggatttgacattgaccaaccattaggagaagaatttggaatagtatttggaaccgggataggaggaattggagctactgaagatgcagtccgaatatatgatgaaagaggttcaaatagaataagtccacttgcaattacacaattaatgcctaattcaagtacaggtcaagttgcaatcaagtatggaatacaaggcccatcgttaacaattacaactgcttgcgcagcatcggcgaatgcaattggtgaagcaaaaagaatgattgagcaaaatatagttgataaagtccttgttggaggtactgaatcaggaacgacctcaatgacaattggagcctttgcacaaataaaagcactatccaaacaaaatgaagagcctcaaagagcctgtaagccttttgataaaaatagagatggattcgtgatggctgaaggctctacagtattgatacttgaaagtgaaaagtctgctaatgaaagaaatggaaaaatttatggttttgttgaaggttatggatcttccacagatgcttatcatattaccgcaccatcagaaggtggagttggtgctttacgagcgatggatcaagcaattactaatgcagatataaatgcagaagagattgactatattaatgctcatggaacctcaactatagctaatgatgttaatgaaacattagcaattaagtctcttatgaaagaatatgcatataaagttaatatttcttctactaaatctatgactggacatttgcttggtggaggtggagctttcgaggctatggcatcactgttatctctaaagaataatcaaataccgccaacaattaatttaaatgatcccgatgaagagtgtgatttaaactatacagcaaacaattcaatagaaaaaaacattgagtatgtaatgtctaattcatttgggtttggtggacacaatgctgtgttagtgtttagcaagcaataat

SEQ ID NO: 235073 - DNA, 910 bp, Unknown
  Bacterial polypeptide expressing nucleotide sequence isolated from the Sargasso Sea
atgggatctggtggcccttcaattgaaaatgttattttggctgcagataaaacaagagaaaaaaatccaaaaagaatgggaccatttgttgtaccaagaacaatgtcaagtacagcatctgcaacacttgcggtaccatttaaaattaaaggtgtaaactatacaataagctcggcttgtgcaactagcggacattgtattggaaatgcaatggagttaattcaattaggaaaacaaaaaattatttttgctggaggtagcgatgaagttcatttttctatgacagcaatgtttgatgctatgactgctctttcttcaaaatacaatgacactccagaaaaagcttctagaccttatgataaaactagagatggatttgtaatatctggtggtggtggtgttttagttttagaagaatatgaacacgcaaaagcaagaggagcaaaaatttatgcagaattaactgggtatggagcaacttcagatggttacgacatggtagcaccgtcaggcgaaggagctgtaagatgcatgaaaatggctctaaatactgcaaaaaataaaattgactacataaatacgcatggaacatcaactcccgtgggagatattacagaactaaaagctgtaggagaagtatttaaagataatgtgcctaaaataagctctacaaaatctctttcaggacactctctaggtgcaacttccgtgcatgaagcagtttatagtttaattatgatgaaaaataactttatttcagcatcaataaacataacagacatggatgatgaagcaaaaaaatttcctatagtcacaaaagttgaaaaagatgtaactttaaattcaattatgtctaatagttttggatttggaggaactaacgcaactttagtttttgaaaaggtttaat

SEQ ID NO: 235074 - DNA, 1174 bp, Unknown
  Bacterial polypeptide expressing nucleotide sequence isolated from the Sargasso Sea
cttgtttagaaataatcaagaagaagttcatcaatctttattaaattcaaaatcaggaatttcttatgctgaagattataaagaacataacttaaaaagccatgttcatgggaagccaaatataaaacttgaagatcacatagatagaaaaacaattagatttatgggttcaggctcagcttacaattatattgcaatgaaagaggcaattgaagactctggattagaagaaagtgaagtgagcaattttaaaactgggattgtaatgggttcaggtggcccatcaattgaaaatgtaatacttgcagcagacaaaacaagagctaaaactccaaaactaatgggaccatttattgttccaagaacaatggccagtactgcttctgcaacacttgcagtaccgtttaaaattaaaggaactaactacacaatgagttctgcatgtgcaactagtggacactgcataggaaattctatggaattaattcaaatgggtaaacaggatgttgtttttgcaggtggaagtgaagaaattcattgggcgatgacagcaatgtttgatgctatgacagctttatcatcaaaatataatgacactccacaatctgcatctagagcttatgacaaaaccagagatggatttgtaatcgctggaggtgcaggcgtattagtgcttgaagaatacgaacatgctaaagcaagaggggctaaaatatacgcagaattaactggttatggagcaacttcagatggatacgacatggtagcaccatcgggtgaaggtgctgttagatgtatgaaaatggcaatggcaacagctaaaaataatattgattacattaatactcatggaacatctacaccagttggagatataactgagcttaatgctattaaagaaacttttggtgaggacattccaaaaataagttcaactaaatctttatcaggtcatccattaggagctgcttcagtacatgaagcaatttattgtttaataatgatgaagaataatttcattacaggttcagcaaatattactgatatggatgatgatgctaaaaaatttcctatagtttcaaaaactgaaatgggagcaactttaaatacagtaatgtcaaatagctttggttttggtggaactaatgcagctttaatttttgaaaaggtttag

SEQ ID NO: 235075 - DNA, 840 bp, Unknown
  Bacterial polypeptide expressing nucleotide sequence isolated from the Sargasso Sea
aaaaaatgggaccatttattgtgccaagaactatgtccagtactgcttcggctactttagcagttccttttaaaataaaaggagttaactacaccataagttcagcttgtgctactagtggccactgtattggtaatgcaatggaacttattcagtttggaaaacaaaaaattatttttgcagggggaagtgatgaaattcattttgcgatgacagctatgttcgatgcaatgactgcactttcttcaaaatataatgataacccacagaaggcgtctagaccatacgacaaaacaagggacggttttgtgatagctggaggagcgggagttttagttttagaggaacttgagcatgccaaagcacgaggagcaaaaatttatgcagaattgacaggctatggagcaacttctgatggttttgatatggttgcaccttcgggagaaggggcgactagatgtatgaacttagcattaaagacaactagaaaccaaattgattatattaacacccatggtacatcaactccggttggagatataacagaattaaaagctataaaggatgcattcaaagataaaataccaaaaattagttcaacaaaatctctatctggtcacccactaggcgctgcttcagttcatgaggctatttattctttaataatgatgaaaaataattttattgcagcatcttgtaatgttaatgaaatggatgagtcagcacaaaagttcccaattgttacgaaagttgaaaaggacgtaaaattaaattctgttatgtctaatagcttcggtttcggtggaacaaacgcaacattaattttcgaaaaggtttaat

SEQ ID NO: 235076 - DNA, 689 bp, Unknown
  Bacterial polypeptide expressing nucleotide sequence isolated from the Sargasso Sea
agcaatggatattagaaatcaatgttctggttttatatatgctatttctactgcagatcaatttataaaatctggcatgtataaaaatatattagttattggttccgagaaccactctggtggattagacatgacaacaagaggtagaggagtttcggtaatttttggagatggtgctggtgctgcaatcatttctcgtgaggatgaccttacaaagggtattttatcctctcatcttcattcagaaggtaaacatgcagaggaattatctttaattggccctagtactaataggtgggttccggaaatcttagatgctaatgatccagacgatatttcttattatccatatatgaatggtcaattagtctttaaaaatgctgtagttagattctcagaggttatcatggaaggtttaagtcataataatttgactccagaaaaaattgatatgctgatacctcaccaagctaatctgagaatatctcagtttgttcaaaagaaatttggtctttcagagggtcaggtttataacaatattcaaaaatatggaaatactactgcaggttcaattccaatagctcttactgaagcttgggaagattcaaaaataaatgaaggagatattgtagtgttggcagcatttggttctggatttacttggggtagtactattattaggtggtaat

SEQ ID NO: 235077 - DNA, 1201 bp, Unknown
  Bacterial polypeptide expressing nucleotide sequence isolated from the Sargasso Sea
atgagaagagttgtaattaccggaatcggaattgtaagttctattggcaacaataaagacgaagttttggactcactaaagaaaggcacttcgggaattgattatcgggaagactttgaggaaatgggattaaagagtcgagttgctggatcaatcaaacttgacttaacagagcatattgatagaaaactaaaacgctttatgagcgatggaattggttttaattatcttgctatgaaagaagcagtggaagatagtggtctttctgaagatgaggttagcgacattagaaccggattgattatgggcaatggcggaggctctcctgaaaccattgtctctggcgctgactccttaagagagaaaggaaaagtaagtccttttcttgtgacgcgttccatggccagcggtaattctggtgttataggtaccgcatttaaaattaaaggcattaattattcaatcagctctgcctgtgcaaccagtgcacattgtattggaaatgcagcagaactcattcagtttgataaacaggacgttgtttttgctggtgcgggggatgaagttcactgggttcttgcatcattttttgatgggatgaaagcattatcagcatcttataatgacaaccctacgattgcttcaagaccatttgactccaacagagatggctttgttatctctggcggtggtggagttgttgtattggaagaatatgaacacgcgattgccaggggagctaatatctatggagagcttattggatatggtgcaacatcagatgggtttgatatggttcaaccatctggagaaggtgcgatgagatgcatgcaacaagcaatgcagaataatgacaaaattgattatctgaatgcgcatggaacgagcacgcccgtgggtgatatgagagagctggaagcggttagagaagtgttcggtgccaacactccgaggattacctcaaccaaatcgttgacagggcattctcttggtgttgcaggagtccatgaagcaatctatacgatactcatgcttcaaaatgattttatttctccatctattaacattgagaatcttgacgagaatgcagcaggtttcaatatagttacggatctaattgagggagcagggcttgagattgtaatgtctaatagcttcggttttggaggcacaaatgcctctctcgtatttaaaaaataat

SEQ ID NO: 235078 - DNA, 1081 bp, Unknown
  Bacterial polypeptide expressing nucleotide sequence isolated from the Sargasso Sea
tatgcgacgtgtagctgtaacaggtatgggaattgtttcatgtattggaaataatactcaggaagtactctcaaaccttagagagggaaagtcaggaatatctaaatctgaagaacatgtgaatttaggtttcagaagccaaatttatggtaaaccagatcttgatcctgaagattatttggataaaaaagtcagaagatttatgggtatgggagctgcatggaattatatttctatgcaacaggcgatagaggattctggtttagaggaaaatgatgttattaatgagaagacaggtataataatgggttcaggtggcccttcaacaaaaacgcttgttgaatcagcagatataaccagagaaaagggtccaaaaagagtaggtccttttgctgttccaaaagcaatgtcatcaacaaactcagcaactttagctacaccttttggtataaaaggtatcaattattctatttcttccgcttgcgcaacctcttcccattgtattggcaatgcttatgaacttattcaatttggtaaacaagacacaatgtttgcaggtggtggtgaagagcttaattgggctctatcagttttgtttgatgctatgggagcaatgtcttcaaaatataatgacaaacctgctacttcaagtagagcttacgataaggatagagacggctttgtaattgctggtggagcaggagttcttgttcttgaagaaatggagaaagccaaagcaaggggagcaaaaatttatgctgaaattgttggctatggagcaacatctgatgggcatgatatggttcaaccttctggagagggggctgtaagatgtatgaaaatgtcaatggaaaatattggttgtgaaattgattatattaatccacatgcaacatcaacacctattggagatgaaaaagaggttgaagccataagagagacatttggaagcaaaattccaaatataagcgccacaaaatctttaactggtcatagtcttggtgcagctggtgttcaagaagctatctattatatactaatgatgcaaaatgattttattgcaaaatctgccaacatgaaa

SEQ ID NO: 235079 - DNA, 650 bp, Unknown
  Bacterial polypeptide expressing nucleotide sequence isolated from the Sargasso Sea
aatgccgcaatttaaaaaaccaacaaacgggattaatgcttcaattactgcaataggaggttatgtgcctgatgaaatactaagtaataaaaaacttgaatcaatggtagataccaatgatgcttggattcagagtaaaactggtataaaggaaagaagaattttaaatgacccgaataaggccacttcatacttagctgtaatggctgcaaaaaaacttatttcaaaaaatctcatagatcctaaacaaatagatatggttattgttgcaacagcaacacctgatatgcaaatagctgctacatctgcatatgttgcaacaaaaataggagctacaaatgctttcggttatgatttgcaagcagcatgctccggatttctctatgcaatgtctatggcagttggaaaaatagagtcgggacgttataaaaaaatcttagttataggtgcggataaaatgtcatcacttattaattatcaagatagaagtacatgtataatatttggagatggagcaggtgcagttttatttgaaccgaataaagagaaacttgggtggcaagatgaattttttaaaagtgacggaggggatagagattctctaaaagttaaagctggaggatcactttttcctgccagtaaaacatctg

SEQ ID NO: 235080 - DNA, 1210 bp, Unknown
  Bacterial polypeptide expressing nucleotide sequence isolated from the Sargasso Sea
atgaaaaacgttgttattacaggtgtaggaattaagtcttgtataggaaatacttataaggatgttctttcaaatcttcaaaatggtaaatctggaattgcctttaatgatacatattctgaaatgggatttaggagttgtgtctctggatcaatagatgtgaatctatctgattttattgacagaaaattattaagatttatgggtgagtcagctggatacgcttatcttgctacagcagatgctcttgaaatggcaggcatttatgaagaagatttagattctccaagaattgggattgttgctggctcaggaggagcttcaacaagaattatggtagacagtggcgatattgctagagaaagagggccaaagagaattgggccgtatggcgtcaccaaaagcatgtctagttcaatatcagctattattgcaactgctctgaaattaaaaggtattaattactctatatcctcagcatgtgcaactagtgctcattgtataggccacgcagcagatttaattaaaaatggtcagcaagatatggtgattgctggtggaagtgatgatgaacactggagttcttcgtgcttgtttgatgcaatgggtgccctatcatcaaactttaattcaaatccaaccgtagcatcaagaccgtatgactcaaacagagacggctttgttatctcaggaggagccggaatggtaattctcgaagacgaggaacatgcaaagaaaagaggagcaaaaatcttagcaaaattatcaggatattatgctaattcagatggttatgatatggttgcgccgtctggtgaaggagctattagatgtatggagggtgcaattgatcaatccaaagtacaaattgaatacataaatactcatggtacgagcacacctgttggggatgtagctgaattaaatgcaattaaagaattatttggtgataacgcacccatgattagctcaactaaatcaatgactggtcattcacttggagcaacaggtgctcatgaggcaatatattcaattatgatgataaatgaagattttatagcgccttcgattaatattgaatcactatgtgatgaagctaaggggcttagtattgttacttctacaaaagaaactagtgtgaataatattctaagcaactcttttggttttggaggaactaacgcaagccttgtgattagtagatattaat

SEQ ID NO: 235081 - DNA, 1090 bp, Unknown
  Bacterial polypeptide expressing nucleotide sequence isolated from the Sargasso Sea
atttaaaaagtcatgggttcatggaaaaccaaatataaaacttgaggactttgtagatagaaaatttataagattcatggggcctggatcagcttataattatatttctatgaatgaagctgtaaaagactcaggcttagaggaaaaagatgttagtaacataactactggaatgataatgggatctggcggaccgtctattgaaaacgtaatattagctgcagataaaactagagaaaaaagccctaaaaggatgggtccttttgttgtgccaagaactatgtctagtactgcatctgcaactcttgcagtaccatttaaaataaaaggagttaactatacaatcagttcagcttgcgcaaccagcggtcattgtattggtaatgcaatggagttaatccaattaggaaaacaaaaaattatttttgcaggtggaagcgatgaagtacatttcgcaatgactgcaatgtttgatgctatgacagccctttcctcaaaatataatgatactccagaaaaagcttctaggccctatgataaaacacgagatggctttgttatctcaggtggaggaggggtgttagttttggaggagtacgagcacgcaaagtcaagaggtgcgaagatatatgcagagcttactggatacggtgccacatctgatggttatgacatggtggctccttctggagagggcgcagtcagatgtatgaaaatggcattgagtactacaaaaaacaaaattgattatataaatactcacggtacatcaacacctgtcggagatataacagaattgaaagctgtaggagaagttttcagtgactataaaccaaaaattagctcaaccaaatctcttgcaggtcattctctaggagctacatcagttcatgaggctgtttatagtttaattatgatgaaaaataattttatagctgcgtctgcaaatattaacgatatggatgaggaagcaaaaaaatatccaattgttacaaaagtagaaaaagatgtgaatttaaattctgtaatgtcgaatagtttcggctttggcggaactaatgctactttagtttttgaaaaggtaaaataa

SEQ ID NO: 235082 - DNA, 1213 bp, Unknown
  Bacterial polypeptide expressing nucleotide sequence isolated from the Sargasso Sea
aatgagaagagtagtagttacaggtttaggaattgtttcttgtttaggtaataatcaagaagaagttcatcaatctttattaaattctaagtctggtatttctttttccgaagaatataaagaacacaatttaaaaagtcatatccatggaaagccaaatataaaacttgaagatcacattgatagaaaaacaattagatttatgggctcaggatcagcttataactacattgcaatgaaagaagcaattgaagattctggactagaagaaagtgaagtaagtaattttaaaactggaattgttatgggttcgggtggaccttcaatagaaaatgttattttagcagctgataaaacaagagctaaaactccaaaattgatgggaccttttatagttccaagaacaatggcaagtactgcgtccgcaacactcgctgtaccttttaaaattaaaggtacaaactatacgatgagttctgcttgtgcaacaagtggtcactgtattggaaattcaatggaattaattcaaatgggtaaacaagatattgtatttgcaggtggtagtgaggaaattcattgggcaatgacagctatgtttgatgcaatgactgcactatcttcgaaatataatgatacacctgaaaaagcctcaagagcttacgataaaactagagatggttttgtaattgcaggaggtgcaggtgtgcttgttctcgaagagtacgaacatgctaaagctagaggagctaaaatttacgcagaattaactggttatggagcaacttcagacggatacgatatggtagctccatctggtgagggagcagtaagatgtatgcaaatggcgatgacaacgtcaaaaaacaaaattgattatataaatacccatgggacatctacaccagttggagatattactgaactgaatgcagtgaaagatacttttgggaatgaaattccaaaaataagttcaactaaatctttatcaggtcatccattaggtgctgcttctgttcatgaagctatttattgtcttattatgatgaaaaataattttattgctgggtcagctaatataagtgaaatggatgaagatgctaaaaaatttccaatcgttgctaaaacagagatagatgcaaacttaaatacagttatgtcaaatagttttgggtttggcggaaccaatgcaactctaatttttcagaaagtttaa

SEQ ID NO: 235083 - DNA, 952 bp, Unknown
  Bacterial polypeptide expressing nucleotide sequence isolated from the Sargasso Sea
attaaaagaaaatgaagttagtaatattaataccggaatggtaatggggtctggaggtccgtcaattgaaaatgttattctagctgctgataagacccgagaaaaaaatccaaaaaaaatggggccgtttattgtgcctagaacaatggcaagtacagcatcagctactttggctgttccttttaaaataaaaggagtaaattatactataagttctgcctgcgcgactagtggtcactgtattggaaatgcgatggaactcattcagtttggcaaacaaaaaataatttttgccggtggaagcgatgaattgcactttgcgatgacggctatgttcgatgctatgacagcactttcttcaaaatataatgatagtccagataaagcatcaagaccttatgacaaaacaagagatggatttgtaattgcaggaggcgcaggtgttttagttttagaagaaatggaacatgctaaagctagaggtgcaaaaatttatgctgagttgacaggttacggagctacatctgatggttttgacatggtggcaccatctggagaaggagcaacaagatgtatgaatttagcattaaaaactactagaaataaagttgattacataaatgcacacggtacatctactcctgttggagatataaccgagttgagagctattggaaatgcatttaaagataaaattccaaaaataagttcaacaaaatccctatctggtcaccctcttggtgctgcatctgtgcatgaagctatctattctttagttatgatgaaaaataattttatagcagcttcagcaaatgttaatgaaatggacgatgaagcaaaaaaatttccaatagttacaaaagttgaaaaaaatgtaaccttaaactctgtaatgtccaatagttttggttttggaggaacaaacgcaactttaattttcgaaaaggtataa

SEQ ID NO: 235084 - DNA, 1213 bp, Unknown
  Bacterial polypeptide expressing nucleotide sequence isolated from the Sargasso Sea
catgaaaagagttgttataactggattgggaatagtttcatgtttaggaaacaatcaagatgaagtttataaatctcttcttgattctaaatctgggataagtttttgtgaagaatataaggaacacaacttaaaaagtcatattcatggaaaaccaaatataaaactccaagatcacgtagatagaaaaactattagattcatggggtctggttcagcttataattatatagctatgaaagaagctatcaaagactccggattagagaacaaagaagttagtaattttacgacagggattgtcatgggttctgggggtccctctattgaaaatgtaatattagcagcagacaaaacaagagcaaaaactccgaagttaatgggaccctttattgttccaagaactatggcgagcacagcttccgctacacttgcagttccatttaaaattaaaggtgtaaattatacaatgagttcggcttgtgctaccagtggacattgtataggaaattcaatggagttaatccaatcaggaaaacaaaagataatgtttgctggtggaagtgaagaaattcactgggccatgacagcaatgtttgatgctatgactgctttatcatcaaaatataatgatactccagaaactgcttcaagagcatatgacaaaacaagagatggttttgtaatagcaggtggtggtggagttttagtgcttgaagaatatgaacacgcaaaagctaggggtgcaaaaatatatgcagaattaacaggttatggagctacatcagatggatatgatatggttgcaccttcaggggaaggtgcagttagatgtatgaaaatggccatggcaacatctaaaaataaaattgattatattaatactcacggaacgtctactccagtcggagatattacagaattaaacgctgtcaaagacacttttggaaataatattccaaaaattagttcaacaaaatctttatcaggacatccattgggtgcagcttctgtccatgaggctatctattgtttaattatgatgaagaataatttcattgctggatcagctaatatttctgaaatggatgaagaggctaaaaaatttcctatagtggctaagacggaaactgggacaactttaaatacagttatgtccaatagttttggttttggtggaactaatgctgcattaatttttgaaaaggtttaa

SEQ ID NO: 235085 - DNA, 1210 bp, Unknown
  Bacterial polypeptide expressing nucleotide sequence isolated from the Sargasso Sea
gatgagaaacgtagtcataacaggagtaggtattaaatcttgtataggtaatgactatgcagaagtacttgctaatcttcagaatgctaaatcaggaattatatttaatgagaaatattcagaaatgggatttagaagttgtgtctcaggatctgtcaatattgatctttcagaacatattgatagaaaattattaagattcatgggtgaatctgcaggatatgcttacttggctactaaggatgcccttaaaatggctggaattgatgaaagtcatctagactcgccaaaaattggtattgttgcaggatctggaggtgcttctacaagagtgatgttagagagtggtgatattgcaagagaaaaaggccctaaaagaattggaccttatggtgttacaaaaagcatgtctagttctatatctgcaatcatagcaaccgcactcaaattaaagggaataaattattcaatttcttcagcatgtgcaaccagtgctcattgcattggtcatgctgcagatttaattaaaagcggtcaacaagatgtcgtcatagctggtggaagtgatgacgaacattggagctcatcttgcttatttgatgctatgggagcactttcatctaacttcaattcaactccaacgattgcatcaagaccatacgattcaaatagagatggatttgttatttcaggtggagctggaatgataattttagaaaatgaggagcatgcaaagaaaagaggggcaaatattctagctaagctttctggatattttgcaaattctgatggctatgacatggtagctccttccggtgaaggtgcatcacgatgtatgcaaggagcaattgataattcaaaaataaaaatcgattatattaatacacacggtacaagtactcccgttggagatatagcagaaataaatgcaatcaagactctttttacctctgaacaaccaatgataagctcaactaaatcaatgacaggacactcacttggagctacaggtgctcatgaggcaatatattcaattatgatgattaacgaaaactttattgcgccatctataaatattgaatcattatgtgatgatgctgaaggccttgatatagttaccgaaacaaggaatatatcaattaataatgttcttagtaattcgtttggctttggtggaaccaatgcaagtctagtaattactagatactaa

SEQ ID NO: 235086 - DNA, 1210 bp, Unknown
  Bacterial polypeptide expressing nucleotide sequence isolated from the Sargasso Sea
gatgaaaaatgtagtaataacaggtttgggaattaaatcttgtattggaaacgaatacaattctgttctcaaaaaccttcaagagggtaaatctggaatcatattcaatgaaacatatgatgagatgaattttagaagttgtgtttcaggttctattaaaattgatttatctgagtatatcgataggaaattgctaagatttatgggcgaatctgcaggatatgcttatctagcaacacttgatgcattaaaaatggcaggagtcgataataattatcttgataatccaagaattggaatagttgcaggatcaggaggagcatcaacaagaataatggttgaaagtggtgatattgcaagaaacagagggccaaaaagaattgggccttatggcgttaccaagagtatgtcgagttcaatttcagcaataattgcgactgctctaaaattaaaaggcatcaattattcgatatcttcagcttgcgcaaccagcgctcactgtatagggcacgcagccgatataatcaaaaatggtcaacaggacattgtcattgctggtggaagtgatgatgagcattggagttcctcatgcttatttgatgcaatgggggcattgtcgtcgaattttaacgcagatccaacaatagcatcgagaccttatgattctaatagagatggttttgttatatctggtggagcaggaatgataatcttagaagaagaagagcatgcaaaaaaaagaggagcaaatattcttgcaaagctttcaggatattttgcaaattcagatggttatgacatggtagcaccatcaggtgaaggagcaacaagatgcatgaatggtgcaattaagggaataaagtcagaaattgactacatcaatacccatggcacaagtactcctgttggagacgttgctgagcttaatgcaattaaagaattatttggttcaaatgctccaatgataagttcaaccaaatcaatgacaggacattcgcttggagcaacgggtgctcatgaagcaatatattcagttatgatgattaatgaaaatttcattgcgccctcgattaatattgataatttgtgtgatgaagctcaaggtttggatatcgttagagaaacaagagaggcaaacattaaaaatattttaagtaattcttttgggtttggtggaacaaacgcaagtcttgttataagtaagtactag

SEQ ID NO: 235087 - DNA, 1240 bp, Unknown
  Bacterial polypeptide expressing nucleotide sequence isolated from the Sargasso Sea
atgacacgaaaaagagtagtagttactggtcttggtatgttgtcgccagtcggtaacaacgtcacttcttcatggaagaaaataattgaaggttacagtggtgttaaagtaatagacagatttgatacttctgattttgagactaaatttgctgctaccgtagatattaattccgaagattatctagacaaaaaagaagtaagaagaacagatccatttattcaatatggtttgatcgcatctaatgaatgcttggatgattcagaaatagatctggaaaatatagatctaaatagatttggtgtttctataggttcaggtattggtggtcttgggaccattgaagaaaataaaactttactttttgaaagaggtccaaaaaagatttctcctttttttgtgccaggagctatatccaatatggtatccggatatgcttctttgaaatttgggttaaaaggtccaaatatatccattgccagtgcttgctctagtgcaagtcattcaatcggttactcgtttcgtagtattgttcatggagatgcagacctcatgcttacaggtggttctgaaatggctactacacccctcggaatagcgggttttaatgcagccaaagctttatctactaataatgaaaatccaacagaagctagtcgtccatgggatcaagacagagatggatttgttttgggagaaggtgcaggttgcttacttcttgaagaatatgagcatgctattgcaagaggagcaaaaatctatgctgagattattggatttggcatgagtgcagatgctcaccacattacctctccgccgaatgaaggagaaggagctgcgctatcaatgcaaaacgcaatttctgatgccggcattgaagtatccgagattgactatgttaacgctcatggaacatccactcctgcgggagatattgcagaaactaaagcaattaaggcaattttcaaaaacgaaatagatgatctgattgtaagttcaactaaatctatgacaggacatcttctgggagcggctggagcaattgaagctattttttcaatattaagtattcaagataatatctgtccgcctactataaatttagataatcctgatccagaatgtgatcttaattactctgcacactccgcgacaaaaaaaataataacccattctctttccaattcatttggatttggaggaacaaatgctactctaatttttaaagaattagactaag

SEQ ID NO: 235088 - DNA, 1213 bp, Unknown
  Bacterial polypeptide expressing nucleotide sequence isolated from the Sargasso Sea
aatgcgaagagtagtaattacaggtttgggaattgtttcatgtcttgggaataatcaggaggaagttcatcaatctttattaaatactaaatcaggaatttctttttctgaagaatataaagaacacaatcttaaaagtcatattcatggaaagcctaacatcaaacttgaggatcatatagatagaaaaacaattagatttatgggttcaggatctgcttacaattatattgcaatgaaagaggcgattgaagactctggcttagaagaaagtgaagtaagtaatttcaaaacaggaattgttatgggttcaggtggaccttcaattgaaaatgtcattttggcggctgataaaactagagctaagactccaaaattgatggggccttttatagttccaagaaccatggcaagtaccgcctcagcaacacttgctgttccatttaaaataaaaggtacaaactatacaatgagttcagcctgtgcaactagcggacactgtatcggaaattctatggaacttattcaaatgggtaaacaagatattgtttttgctggtggaagtgaggagatacactgggcgatgactgcaatgtttgatgcaatgactgcgttgtcttctaaatataatgatactcctgaaaaagcttcaagagcttatgacaaaactagagatggttttgtaattgctggaggtgcaggggttttagttcttgaggaatatgaacatgctaaagcacgaggagctaaaatatacgcagaattaactggttatggagcaacatcagatggatatgatatggtagcgccttctggtgaaggtgcagtaagatgtatgcaaatggcaatggcaacttcaaaaaataaagtagattatataaatactcatggaacttctactccagttggagatattactgaattgaatgctgttaaagaagcttttggaaatgaaattccaaagattagctcaactaaatctttatcaggtcatccgttaggagctgcatcagtacatgaagcaatatattgtttaattatgatgaaaaataacttcattaccgggtcagctaacataagcgaaatggatgaagaggctaaaaaatttccaatagtcgctaaaacagaaacagaagcaacattaaatactgtcatgtctaatagttttggttttggtggaacaaatgcaactctagtatttgagaaagtctaa

SEQ ID NO: 235089 - DNA, 1213 bp, Unknown
  Bacterial polypeptide expressing nucleotide sequence isolated from the Sargasso Sea
aatgcgaagagtagtaattacaggtttgggaattgtttcatgtcttgggaataatcaggaagaagttcatcaatctttattaaatactaaatcaggaatttctttttctgaagaatataaagaacataatctaaaaagtcatattcatggaaagcctaatataaaacttgaggatcatatagatagaaaaacaattagatttatgggttcaggatctgcttacaattatattgcaatgaaagaggcgattgaagactctgggttggaagaaagtgaggtaagtaatttcaaaacaggaattgttatgggttcaggtggaccttcaattgaaaatgttattttagcagcagataaaactagagccaaaactccaaaattaatgggaccatttatagttccaagaacaatggcaagtaccgcctcagcaacacttgctgttccatttaaaattaagggaacaaactatacaatgagctcagcctgcgcaacgagtgggcactgtataggaaactctatggaacttatacaaatggggaaacaagatgttgtatttgcaggcggtagcgaagagatacactgggcgatgactgcaatgtttgatgcaatgactgcattatcttcaaaatataatgatactcctgaaaaagcttcaagagcttatgacaaaactagagatggttttgtaattgctggaggtgcaggagttttagttcttgaggaatatgaacacgctaaagctagaggagcaaaaatatacgcagaaataacaggttatggagcaacttcagatggatatgatatggtagcgccatctggtgaaggtgcagtaagatgtatgcaaatggctatggcaacttcaaagaataaagtagactatataaatactcatggaacttctactccagttggagatattactgaattgaatgccgttaaagaagcttttggaaatgaaattccaaagattagttcaactaaatctttatcaggtcatcctctaggagctgcatcggtgcatgaggcaatatattgtttaattatgatgaaaaataacttcattactgggtcagctaacataagcgaaatggatgatgaagctaaaaaatttccaatagttgctaaaacagaaaccgaagcaacattaaattctgtcatgtctaatagttttggatttggtggaacaaacgcaactctagtatttgagaaagtttaa

SEQ ID NO: 235090 - DNA, 385 bp, Unknown
  Bacterial polypeptide expressing nucleotide sequence isolated from the Sargasso Sea
catgaaatcaaaaattatatcgataggaagttacacaccgaataatatagttacgaatcaagatctagagaaaaaggttgatacaaccgatgaatggattgtatctcgaacaggaatcaaagaaagacccattgccgatgatacacaagcgacgtctgacctggcctatgaagcagccaagattgcagtagaaagatccaaaatcgataaaaatgatatcgatcttataattgtcggcacatgcacgccggatgttgccacaccaaatgttggcaccctcattcaaaaaagactggatctaaagaacttttcagcattcagtattgaggcggcatgcagtggttttatttatgctttgaatatcgcagataagttcataaagtcg

SEQ ID NO: 235091 - DNA, 1213 bp, Unknown
  Bacterial polypeptide expressing nucleotide sequence isolated from the Sargasso Sea
aatgaaaagagttgttgtaactggaattggagtagtctcttgtttaggaaacaatcaagatgaagtctatcagtctctattaaattctaaatcaggaatttctttttctgatgaatacaaagagtacaatctaaaaagtaacatacatggaaaaccaaaaattaatcttgaagaccatgttgatagaaaatttataaggtttatgggacctggctcagcttacaattacatatcaatggcagaggcagttaaagactctggtttagaagacaaagatgtaagcaatatatcaactgggatgattatgggttctggaggaccatccattgaaaatgtaattttagcagctgataaaactagagccaaaagtccgaagagaatgggtccatttgtagttccaagaactatgtctagtactgcttctgcaacgctagcagttccattcaaaatcaaaggagttaattatacaataagttctgcatgtgcaactagcggacactgtatcggtaatgcgatggaattaattcagctaggaaaacaaaaaattatttttgctgggggaagtgatgaagttcattttgcaatgactgctatgtttgatgcaatgactgcattatcttcaaaatataatgatacgccagaaaaagcttctagaccatatgacaaaacaagggatggatttgttatagcaggtggtggtggagttttggtcttagaggaatatgagcatgcaaaagcacgaggtgcaaaaatttatgcggaattgactggttatggagctacctctgatggttacgatatggttgcaccatctggtgaaggagctgtcaggtgcatgaaaatggctttaagcactgcaaaaaataaaattgattatataaacacgcatggaacatcaacacctgttggtgatattactgaattgaaggcagttggagaaacttttacagattataaaccaaaaataagttcaacaaaatcattagctggtcactccttaggggctacttcagttcatgaagcaatttatagtttaataatgatgaaaaatagttttatagcagcatccgcaaatattactgacatggacgacgaagctaaaaaatatccgatagttaccaaagttgaaaaagatgttaatttaaactctgtaatgtctaacagttttggttttggcggaactaacgcaacactagtttttgaaaaggtttaa

SEQ ID NO: 235092 - DNA, 1213 bp, Unknown
  Bacterial polypeptide expressing nucleotide sequence isolated from the Sargasso Sea
aatgagaagagttgtaattacaggtttgggagtagtgtcttgtttaggtaataatcaagaagaagtttatcaatctttattaaattctaaatctgggatatcatttagtgaagaatataaagaacacaatctaaaaagccatgtccatggtaaaccaaaaataaaacttgaagaccatatagatagaaaaactattagatttatgggatctggttcagcttataattatattgcaatgaaagaagcaattcaagattctggattagaagaaaaagaaataagtaattttaaaacagggatcgttatgggttctggtggtccatcgattgaaaatgttattttagcagctgataaaactagagctaaaactccaaaattaatggggccttttattgttccaagaactatggctagtactgcttctgcaactcttgctgtaccgtttaagattaaaggaaccaactatactatgagttctgcttgtgcaacaagtggacactgcattggtaattctatggaattaattcaaatgggtaaacaagatattgtttttgcaggaggtagtgaagaaatacattgggcaatgacagcaatgttcgatgctatgactgcattgtcatcaaaatataatgatacacctgaatcagcatcaagagcttatgataaaactagagacgggtttgtaatagctggtggtggtggagtgctggtacttgaggagtatgagcatgctaaagctagaggggctaaaatatacgcagaattaaccggttatggagcaacctcagatggctatgatatggttgcaccatcaggagaaggagctgtaagatgtatgcaaatggcaatggccactgctaaaaataaaattgattatattaatactcatggaacatctacccctgttggagatattactgaattaaacgctgttaaaaatacttttggagataatattcctaaaattagttcaactaaatctctatcaggtcatcctttaggggccgcatcagtccacgaagccatatactgcttaattatgatgaaaaataattttatagctggttcagcaaatataaatgaaatggatgaagaggctaaaaaatttccaattattgcaaaaacagaaactggagtaactttaaatactgttatgtctaatagttttggttttggtggaacaaaatgctgctttagttttgagaaagtataa

SEQ ID NO: 235093 - DNA, 934 bp, Unknown
  Bacterial polypeptide expressing nucleotide sequence isolated from the Sargasso Sea
agtaattttaaaacaggaattgtaatgggttcaggtggcccctcaattgaaaatgttattttagctgctgataaaacacgagctaaaacaccaaaacttatgggaccttttattgtgccacgaacaatggcaagcacagcttctgctactcttgctgtgccatttaaaattaaaggcactaactacactatgagttcagcttgtgcaacaagtggacattgtattggaaattctatggaattaattcaattgggtaaacaagatattgtttttgctggtggaagtgaagaaatacattgggcaatgactgcaatgtttgatgctatgactgctttatcatcaaaatacaatgatacgcctgagactgcatcaagagcctatgataaaacaagggatggttttgtaattgccggaggcggaggggtattagtgcttgaagaatatgaacacgctaaggctagaggagcaaaaatttatgcagaattaactggctatggagcaacctcagatggatatgatatggtagcaccatcaggtgagggagctgttagatgtatgaaaatggctatggcgacagcaaaaaataaaattgattacataaacacacatggaacatctactccagttggagatattacagagttaaatgctgtaaaagagacttttggatcggaaattccaaaaattagttcaactaaatctctttccggacatccgttaggagcagcatctgttcatgaggcaatatattgtttaattatgatgaaaaataattttattactggctctgcaaatattaatgaaatggataatgaggcaaaaaaattcccgatagtcgctaagactgaaacaggagtagctttaaatacagtaatgtcaaacagttttgggtttggtggaactaatgcagctctaatttttgaaaaggtttagt

SEQ ID NO: 235094 - DNA, 1024 bp, Unknown
  Bacterial polypeptide expressing nucleotide sequence isolated from the Sargasso Sea
cttacgttttatgggcgatgcagcagcttatgcttatatctctatgcaacaagccattgacgacgcgggattaacccctgagcaggtgtcgaatttccgcactggcctagtggtaggttctggcggtgcttcctctaaaactcagattgaagcagcagatactttacgtgaaaaaggcgtaaaacgtgttggcccttatgcagtgccaaaaactatgtcgagcacctgttcagcatgtttagctactccttttgaaatcaaaggtgtgaactactccattagttctgcctgtgcgaccagcgcccattgtattggtcatgctgttgagctgattcagttaggtaaacaggatattatttttgccggtggcggtgaagaagtgcactggactttagcgatggaattcgacgctatgggcgctttgtctactaaatacaacgaaactcctgaactggcgtcccgtacttatgacgctgaccgtgatggttttgtcatcagcggtggtggtggtattttagtggttgaagagctggaacacgcactggcacgtggcgctaaaatttacgctgaaatcgtaggctacggcgcaacttcagatgggtacgacatggtagcgccaagtggtgaaggcgcagtgcgttgcatggaaatggcgatgaaagacgtgaaaggtccaatagactacgtcaatactcacggtaccagtactccggttggcgatgtcaaagaattaggtgctatccagcaggtgtttggtggcaaatctccagccatcagcgcaaccaaagccatgacaggccatgccttaggcgcggctggtgtgcatgaagccatttattcgctgttgatgatggaacataactttattgcaccttctatcaacgtcaatacgctggacgaagctgctgcaggtttaaatatcgtgactaaagcgacagaagctcaactgacaacagtgatgtcaaacagcttcggttttggtggtaccaacgccaccttagtgatgcaaaaataccagggctaa

SEQ ID NO: 235095 - DNA, 766 bp, Unknown
  Bacterial polypeptide expressing nucleotide sequence isolated from the Sargasso Sea
aatcaaaggcactaattacacaataagttctgcatgcgcaacgagtggtcattgtattggtaacgcaatggaacttattcaattaggaaaacaaaatattatttttgcaggtggcagtgatgaggttcactttgcaatgactgcaatgtttgatgctatgactgcactatcctcgaaatataacgatacccctgaaaaagcttcaagaccgtatgataaaacaagagatggttttgtgattgctggtggaggtggtgttcttgttttagaagaatacgaacatgccaaagcaagaggtgctaaaatatacgcagaattaaccggatatggagcaacatcagatggctatgatatggttgcaccatctggtgagggagcggtgagatgtatgaaaatggctctagcaacctcaaaaaataaaattgactatattaatacccacgggacatcaacacctgtgggagatattacagaattaaaagcagttggagaggctttcccagaatataaacctaagataagttcaacaaaatctttgtcgggccattcattaggcgcaacttcagttcacgaagcaatttatagtttgataatgatgaaaaacaattttatttcagcttcagcaaatatttcagaaatggatgatgaagcaaaaaactatccgattgttacacaagttgaaaaagacgtaaatttaaacgcaattatgtctaacagctttggttttggtggaactaatgcaacattagtgtttgagaaagtttag

SEQ ID NO: 235096 - DNA, 1110 bp, Unknown
  Bacterial polypeptide expressing nucleotide sequence isolated from the Sargasso Sea
tctctgaggaatataaagaatataatttaaaaagtaatgttcatggtaaaccaaatataaaacttgaagatcatgtagatagaaaatttataaggtttatgggtcctggttctgcatataattttatttctatggctgaagcagttaaagattctggattagaagaaaatgaggttagcaatatatctactggcatgattatgggatctggtggtccatctattgagaatgtaattttagcagcagataaaactagagatagaacgccaaaaaaaatgggaccatttgttgttccacgaactatgtctagtacagcatctgcaacacttgcagtgcctttcaaaattaaaggtgtcaactatacaattagttcagcttgtgccactagtggtcattgcattggtaatgcaatggaattaattcaacttggaaaacaaaatattatttttgctggtggaagtgacgaagtacattttgcaatgacagcgatgtttgatgcaatgactgctctatcttcaaaatacaatgatactccagaaaaagcatcaagaccgtatgataaaactagagacggatttgtaatagcaggtggtggtggtgtattagtgttagaagaatatgagcatgcaaaagcaagaggtgcaaaaatatatgcagaaataaccggttatggagctacatctgatggtcatgatatggtagctccctcaggagaaggagctgtaagatgcatgaaaatggctcttagtacaagcaaaaataaaattgattatataaatactcatggaacttctactccagtaggtgatataactgaactcaaagctgttggtgaagtatttaaagataatatacctaaaataagttctactaaatctctttcaggtcactcacttggggcaacttcggttcatgaagcaatttatagtttaattatgatgaaaaataattttatttcagcttcaataaacattaatgatattgatgacgaggccaaaaaatatccaatagtaacaaaagtcgagaaggataaaaatttggattcgataatgtctaatagctttgggtttgggggaactaatgcaactttggtttttgagaaagtttaat

SEQ ID NO: 235097 - DNA, 1213 bp, Unknown
  Bacterial polypeptide expressing nucleotide sequence isolated from the Sargasso Sea
aatgaaaagggttgtaattactggaattggagtcgtatcttgtttaggaaacaatcaagatgaggtttatcaatctctggtgaactccaagtctggaataacattttcagaagaatataaagaatacaatttaaagagtaatatacacggaaaaccaaatattaaacttgaagatcatgttgatagaaaatttataagatttatggggcctggatcagcttataattttatatctatggctgaggctgtgaaagattctggtttagaggaaaaagaagtgagtaatatttcaactggtatgataatgggttcaggtggtccatctattgaaaatgttattcttgcagcagataaaacaagggaaaaaagtccgaaaagaatgggcccttttgttgttccgagaacaatgtctagtacagcatcagcaactttagcagtgccatttaaaattaaaggagttaattacacaattagctcagcatgtgcaacaagtggtcattgtattgggaatgcaatggaattaattcagttaggtaaacaaaatataatatttgctggaggtagtgatgaggtccattttgcgatgactgcgatgtttgatgctatgaccgcattatcctcaaagtataatgatactccagaaaaagcctcaagaccttacgataaaacaagagatggttttgtaatttccggaggtggaggtgtattagttttagaggaatatgaacatgcaaaagcaagaggtgccaaaatttatgcagagattactggatatggtgcaacttcagatggttttgatatggtagctccttcaggagaaggtgcggtaaggtgtatgcaaatggctctaagcactgcaaaaaataaaattgattatattaatacgcacggaacatctacacctgttggagatattacagagttaaaagcagtaggagaggtatttaaagattataaaccaaaaattagttcgactaaatcactcgctggtcattctcttggtgctacctcagttcatgaggcggtttatagtttaattatgatgaaaaataattttatagcagcatcagcgaacatcattgatatggatgatgaagcaaaaaaatatccaattgttactaaagttgagagtaatgttaatttaaattctgttatgtccaatagcttcggatttggtggaacgaacgcaactttggtatttgagaaagtataa

SEQ ID NO: 235098 - DNA, 1216 bp, Unknown
  Bacterial polypeptide expressing nucleotide sequence isolated from the Sargasso Sea
aatgcgtgaagtagtaataacaggaataggtattatatctagcttaggaaataatatttctgaagtaacaaattctttgagaaatttaaaatcaggtatctcaaaaaatataatcaataaggagcttggtctaagaagccatgtgtcaggctctattcaaaacttagaaccaaaagaacttatagataggaaattgtatagattcatgggggatgctgcggcatatgcatacttgagcacagaagaagccataaaggatgcatctttaaatgattctgaattatctaatcaaaagactggtttaattatgggctctggaggagcttctacagaggatcaaatagattcagctgatatcctgagaacaaaaggtttaaaaagaataggtccatacagagttaccaaagctatgggtagtactgtttcagcttgtcttgcaacctccttcggtatcaagggcataaattattctatttcatctgcttgtgctaccagcgctcactgcattggctcaggaatggagcaaattcaattaggcaagcaagatattgtaattgctggaggtggcgaagcagaacattggggtatgacaagtttatttgatgcaatgggagcattatctactaagtacaatgaggaacctgaaaaggcctccagagcttacgataaagatagagatggatttgtaattgctggaggagcaggatcgatgatcttagaagaaaagcaacatgcaattgaaagaggagcaaaaatatatgctcaactaactggttatgctgcaacatcggatggggcagatatggttagtccttctggagagggtggagaaagatgtatgcaaattgcctgggaaatgagtggaggtaaaaatatagactatatcaatgctcatggtacaagcactcctgcaggagatattacagaattaaatgcaattaaaaatgtttttggagataggattccttggataagttctacgaagtccctttcaggtcactcattaggtgctgcaggtgttcaagaagcaatttacggtttaattatgatggatgaaggttttatcgctgcttctgcaaatattgaaaaccttgacgaaggtgctgaaccttttccgatagtaagagagaatgtatctacagaattacaaagttttttgagcaatagctttggttttggtggaactaatgcaagtctaatattcgaaaaaatttag

SEQ ID NO: 235099 - DNA, 1054 bp, Unknown
  Bacterial polypeptide expressing nucleotide sequence isolated from the Sargasso Sea
ttaaagagtaacgttcatggaaaaccaaatatcaaacttgaggattacgtggatagaaaatttattcggttcatgggacctggctctgcctataattatgttgcaatgaatgaagcggtaaaagattctggtttagaggaaaaagatgtaagcaatatttctactggtatgattatgggttccggtggaccatcaatagaaaatgtaattttagctgcagataaaacaagagaaaaaagtccaaaaaggatggggccattcgtggttccacgaacaatgtcgagtacagcttctgctacattagctgtcccatttaaaataaaaggagttaattatactataagttccgcatgtgcaacaagtggtcattgtattggaaacgctatggaactaatccaactaggaaaacaaaaaattatatttgcaggaggaagcgatgaagttcattttgctatgactgcaatgtttgatgctatgaccgctttatcttctaaatataattcgacacctgaaaaagcttcaagaccttatgacaaaactagagatgggtttgtcatatcaggtggtggaggcgttcttgtattagaagaatatgagcacgcgaaagccagaggggcaaaaatttatgctgagctgacaggttacggagctacctccgatggctatgatatggtggctccatcaggtgagggggcaattagatgtatgaaaatggcattaaacacatctaaaaataagattgattacataaatacgcatggaacctcaactccagtcggagatattacagaattaaaagctgttggtgaagtttttaaagattataaacctaagattagttcaacaaaatctttagcaggtcattctttaggtgcaacatctgttcatgaagcagtttattgtcttataatgatgaaaaatagatttattgcagcttctgctaatatcagcgatatggatgacgaagcaaaaaaatttcccatcgtgacaaaagtcgaaaaaaatattgatgtaaactctgtaatgtctaatagctttggttttggtggtacca

SEQ ID NO: 235100 - DNA, 1213 bp, Unknown
  Bacterial polypeptide expressing nucleotide sequence isolated from the Sargasso Sea
aatgaaaagagtcgtgatcaccggaatgggtgttgtttcaagtatcggtaataacaagcaagaagtgactgagtcacttaaagcgggccgtagtggtattacacattccgctcagtttgaagaaatgcaactacgcagtcatgtatggggcaatatcaaattagatccttcagagctgattgaccgtaaagcgctgcgttttatgggcgatgctgcggcatatgcttacattgcaatgcaagaagccattaaggatgctcagttaactgaagagcaatattcagatcctcgcgtagggttgattgtgggtacaggcggcgcttcgtcttctaaccaagtgcaagcggctgatattctacgcgaaaaaggcgtaaaacgcgtgggtccttatatcgtgccacgcattatgtcgagcacggccagcgcttgtttagcgacacccttcaaaattaaaggtatgaactactcaatcagttcagcctgtgcgaccagtgctcactgtatcggtcacgccgttgaacttatccaaatgggtaagcaagatatggtgtttgcgggcggttcggaagaagtggattggactctgaccatgggcttcgatgcgatgggcgcgctatcgactaaatacaatgccactccagaaaaagcctctcgcacctatgatgctgaccgtgatggtttcgttatctctggtggtggcggtatcttaatcgttgaagagttagagcacgctctggctcgtggcgcgaagatttatgctgaagtgattggttatggtgcatcatcagacggttacgatatggtggctccgtctggcgaaggtgcggtgcgttgcatgcaaatggcactggccgatgtggacacaccaattgactatatcaacacccacggtacttctactccagtaggtgacgtgcgtgaattagaagcactacgtgaagtctttaaagacaagtgtccaccgattgcatcgactaagtctatgacgggtcatgcattaggcgccgcaggcgtacatgaagcgatttacagcttgatcatgatggaaaacagctttattgccccaagcatcaacatcgataacttagatgaagctgcgaaggacatgccaatcgtgcgtgaataccgcgatgcagagctaaacactgtcatgagcaacagctttggttttggtggcactaacgcaacgttagtgatgcgcaaatataagtaa

SEQ ID NO: 235101 - DNA, 874 bp, Unknown
  Bacterial polypeptide expressing nucleotide sequence isolated from the Sargasso Sea
ttgaaagctactattacagctactagtagatatctacccaagcaaatcatgacaaattatgagcttgagaaaatggttgatacttcagatgaatggatacaatctaggactggcatcgttgaacgtagagtagttagtgaaggtgaaactacttcagatatgtgtacaattattgctgaagagttacttaaacgttctaatacagatccaaatgaagtagatgtaattattatagcaactgttactcctgatatgccaactccagcaacagcctctttagttcagaatagaattggtgcaaataatgcttgggggtttgatctatctggcgcttgtacaggatttatatatgcattagatactggatctagattaatagaatcaggaaaatataataaagtaatagttattggctccgatactatgagctctatattagattatacggaccgcaatacctgcgtgttatttggagatggtggaggaggcgtaatgcttgagcgtgcaaaagatagtgatagtggtgttattgattctattcttcgtactgatggatcaggaagcgactatttaaaaattcctggaggaggaagcctccaccctgcttcatatgaaactgtagatcaacacttacattatattagacaagatgggcaagtcgttttcaagtatgcgataaaaggtatggctgatattagtgaagaaatacttaaaaaaaataatatagacagcaattctatcagcctatatgtccctcaccaggcaaataaacgtatcattgatggcgctgctcaacggtgcggtttcaaagatgatcaagtttatataaatattaataaatatggtaataccactgcaggtacaattccaattt

SEQ ID NO: 235102 - DNA, 1159 bp, Unknown
  Bacterial polypeptide expressing nucleotide sequence isolated from the Sargasso Sea
aaaaaagaagtttacgaagctttaataaatacaaaatcaggaataactttctgtgaagaatatagagagtataatttaaaaagtaacatccatggtaagccaaatattaaacttgatgattatgttgatagaaaaataataagatttatgggagctggttcagcatataattatattgctatggatgaggctgttaaagattctggattagaagaaaaagatgtaagcaacatttcaactggtatgattatgggatctggtggaccatcaattgaaaatgttattcttgctgcagacaaaacaagagaaaaaaatccaaaaaaaatgggaccatttgttgtgccaagaacaatggcaagtactgcttctgcaacactggctgttccatttaaaataaaaggagtcaattatactattagttctgcttgtgcaacaagtggacattgtattggaaatgcaatggaattaattcagttaggaaagcagaaaataattttttccggtggaagtgatgaagttcattttgctttaactgccatgtttgatgctatgacggctttatcgtcaaaatataatgatatgcctgaaaaagcatcaagaccttatgacaaaacaagagatggatttgtaatatctggtggtggtggagtattagttatggaagaatatgaacatgcaaaagcaaggggcgctaaaatatacgcagaaataaccggctatggagctacctctgatggttatgatatggttgcaccatctggagagggagctgcaagatgtatgaagatggctttaagcacaagtaaaaataaaattgactatataaatactcatggaacttctacgcctgttggagatattacagaacttaatgctgttggtgaagtttttaaagataaagttccaaaaataagctcaactaaatcactttctggtcactcgttaggagcaacttcagtacatgaagctatttatagcttaataatgatgaaaaataactttatatcagcatcagcaaacataaatgatatggatgatggtgctaaaaaatttccaattgtaactagtgttgaaaaagatgttagtttaaattctataatgtctaatagctttggatttgggggaactaacgcaacattaatatttgaaaaggtttaat

SEQ ID NO: 235103 - DNA, 1213 bp, Unknown
  Bacterial polypeptide expressing nucleotide sequence isolated from the Sargasso Sea
atgagaagagtagttattacaggtttaggagttgtttcgtgtttaggcaataatcaagaagaagtacatcaatctttagtaaattcgaaatcaggaatttcttatgcagaggaatataaagaacataatcttaaatgccatgttcatggaaaaccaaatataaaacttgaggatcatattgatcgaaaaacaattaggtttatgggttcaggctcagcttataactatatagcaatgaaagaagcaatagaagactctggattggaagaaagtgaaataagtaattttaaaactgggatagtaatgggttcaggtggaccctcaattgaaaacgttatcttagcagccgataaaactagggccaaaactccaaaattaatgggaccgtttattgttccaagaacaatggccagtacagcttcagctactcttgccgttccgtttaaaattaaaggtactaactacacaatgagttcagcttgttcaacaagtggacactgtattggaaactcgatggaactaattcaaatgggtaagcaagatattgtttttgcaggcggtagtgaagaagttcactgggcaatgactgcaatgtttgacgccatgactgctttaacatcgaagtataatgataccccagagaccgcatcaagagcttatgacaaaactagagatggttttgtaattgcaggtggaggtggggtgttagtgcttgaagaatacgaacatgctaaagcaagaggagctaaaatatacgcggaattaactggttatggagcaacttcagatggatacgatatggtagctccatcaggagaaggggcagtcagatgtatgaagatggctatggcaacttctaaaaataaaattgattatataaatactcatggaacttctactccggttggagatatcacggagctaaatgcaattaaaaatacctttggggatgatattccaaagattagttcaactaaatcactatcaggacatcctttaggagctgcatcagttcatgaagcgatctattgtttgattatgatgaaaaataatttcatagcaggttctgctaacattagtgaaatggatgaagaggctaaaaagtttcctatagttgctaaaaccgagacaggagcaactttaaatacagtgatgtctaatagttttggtttcggtggaactaatgctgctctaatttttgagaaagtataat

SEQ ID NO: 235104 - DNA, 1065 bp, Unknown
  Bacterial polypeptide expressing nucleotide sequence isolated from the Sargasso Sea
taaccatacataaaactttgaagattatatttgatagaaaaactattagattcatgggttctggatctgcttataattatatagccatgaaagaagctattcaagactctgggctcgaagagaaagaagtaagtaactttaaaactggaattgttatgggttctgggggaccttcaattgaaaatgtgattttagcagctgataaaactagagctaaaactccaaaattgatgggaccgtttatagttccaagaactatggctagtactgcgtcagctacacttgctgttcccttcaagattaaaggtacgaactacactatgagttcggcatgtgcaacaagtggtcactgtattggaaattctatggaattaattcaaatgggtaaacaagatatagtttttgctggaggtagtgaagaaattcattgggctatgactgcgatgtttgatgctatgacagctttatcatctaaatacaatgatacaccagaaaccgcctctagagcttatgataaatcaagagacggttttgtaattgctggaggtgggggagtattagtgcttgaagaatatgaacacgctaaagcaagaggagctaaaatatatgcagaattaaccggttatggagcgacttcagatggttacgacatggtagcaccatcaggtgaaggagctataagatgtatgaaaatggcgatgtcaacgactaaaaataaaattgattatattaatacccacggaacatctacaccagttggggatatcacagaattaaatgctgtgaaaaaaacgtttgaaagtgaaattccaaaaataagttcaacaaaatctttatcaggtcaccctttgggagctgcatcagttcatgaagcaatatattgtttaattatgatgaaaaataattttatagcaggttctgcaaacataattgagatggatgaagacgctaaaaaattcccaatagtttctaaaacagaaaaaggagtaactttaaacactgtaatgtctaatagttttggttttggtggtactaacgcagctttaatctttgaaaaggtttgat

SEQ ID NO: 235105 - DNA, 735 bp, Unknown
  Bacterial polypeptide expressing nucleotide sequence isolated from the Sargasso Sea
tatgcaacctaacaaaaaaacaaatataaaagccgccattactgctgttggaggttatgttccagatgactttatttcaaataaagatttagaaaagatggttgacaccaatgatgagtggattacagccagaacaggaataaaaaaaagaaggattcttaaggaaagaggtaagggtacctcatttttagctatcagtgctgcaaaggatcttatagctaaaaaagaaataaatcctgaaactatagacttagtaattgtttcaactattacgcctgattttcatggcgctccaacggctccttctgtagcttcagtaattaaagcaaaaaatgcctatgcttttgacttaagtgctgcatgttctggatttctatttggcatgtcttcagcttctagttatattgaatcgggaagatataaaaagattcttttgataggtgctgatatgatgtcttcaattgtagattatactgataggtcaactagtattctttttggagatggagcaggtgcagtattagttgaaccgagtataaatggatatggctgggaagatgaatatcttagatctgatggcgttggtgcagagtggttaaatattaaatctggagggtctctttatccaatatcagaggagacaattgcaaataaatggcactatatatctcaagatggaaaaactgtctttaaatcagctgtatctgagatggcaaatgctacagagcaaaatat

SEQ ID NO: 235106 - DNA, 1210 bp, Unknown
  Bacterial polypeptide expressing nucleotide sequence isolated from the Sargasso Sea
aatgaaaaaagtagttgtaactggtcttggaattaaatcttgtattggaaatacatatgatgaagttctattaagcctaaagaatggatcgtcaggaatttcattcaatgatgtgtattcagagatgggatttagaagctgtgtatctggttcaattaacattaatttagcagattatattgacagaaaattactaagatttatgggtgaatctgctgggtattcatatctagctacaaaagatgctcttgatatggcaggcataaatgaagaggatttagattctcctagaattggtatagttgctgggtcaggaggatcatcaacaaggataatggttgaaaatggagatattgcaagagataggggaccaaagaggattggtccatatggtgttactagaagtatgtctagctcaatttcagcaattatttcaactgcttttaaattgaaaggaataaattattcaatctcatcagcatgtgccaccagcgcacattgtataggccacgctgctgatcttataaagagtggtcagcaagatattgtaattgcaggaggaagtgacgacgaacattggagttcttcttgtctttttgacgcaatgggtgctctatcgtcaaactttaattcatctccagaaactgcttcaagaccatatgatgtaaatagagatgggtttgttattgctggtggagcaggaatggttattttagaagatgaggaacatgcaaaaaaacgaggtgcaaatatactagctaagatatcaggttattatgcaaactctgacggttatgacatggttgctccatctggtgaaggtgctgcacgttgcatgaaaggcgcaatgaaggatgctggattagaaatagattacatcaatactcacggtacaagtactccggtgggagatgttgctgagttaaaggctattaatgaagtattctcttctaattcgccagcaattagctctacaaaatcaatgaccgggcattctttgggggccacaggggctcatgaggcaatttattcaataatgatgataaataatggttttattgctccaacaataaatgtagatgaattgtgtgatgaggcaaaagatttagatattgttactgaaacaagagattgtgagataagtaatgtacttagcaactcatttggatttggcggtacaaatgctagtcttgttctaagcaaattttag

SEQ ID NO: 235107 - DNA, 1213 bp, Unknown
  Bacterial polypeptide expressing nucleotide sequence isolated from the Sargasso Sea
atgagaagagtagttattacaggtttaggagttgtttcttgtttaggaaataatcaagaagaagttcatcaatctttattaaattcaaaatcaggaatttcttatgctgaagattataaagagcataacctgaaaagccatgttcacggtaaaccaaatattaaacttgaggatcatatagatagaaaaacaattagatttatgggatcaggctcagcttacaattatattgcaatgaaagaagctattgaagactctggattagaagaaagtgaagtaagtaattttaaaactggaattgtgatgggctcaggtggaccttctatagaaaatgtaattttagctgcagataaaactagagcgaagacaccaaaattaatgggaccttttattgttccaagaactatggccagtactgcttctgcaacacttgccgtaccatttaaaattaaaggaactaactacacaatgagttctgcatgtgcaactagtggacattgcataggaaattctatggaattaattcaaatgggtaaacaggatgttgtttttgcaggtggtagtgaagaaattcattgggcaatgacagcaatgtttgatgctatgacagctttatcatcaaaatataatgacactccacaatctgcgtctagagcttatgataaaactagagatgggtttgtaattgcaggtggtgcaggcgtattagtacttgaagaatacgaacatgctaaagcaagaggggctaaaatatacgcagaattaactggttatggagcaacctcagatggatacgatatggtagcgccatcaggtgaaggtgctgttagatgtatgaaaatggcaatggcaactgctaaaaataaaattgattacattaatactcacggaacatccactcctgttggagatataactgaacttaatgctataaaagaaacttttggagaggacattccaaaaataagttcaacaaaatctttatcaggtcatcctttaggggcagcttcagtgcatgaagcaatttattgtttaataatgatgaagaataatttcattacaggttctgcaaatattactgatatggatgatgatgctaaaaaatttcctatagtttcaaaaactgaaacaggagcaactttaaatacagtaatgtcaaatagctttggttttggtggaactaatgcagctttaatttttgaaaaggtttagt

SEQ ID NO: 235108 - DNA, 1202 bp, Unknown
  Bacterial polypeptide expressing nucleotide sequence isolated from the Sargasso Sea
ggtgatatcaggcattggaatagtttcttgtattggtaataatcaagacgaagtatataaatcgctattgaattcaaagtctggaatttcattttcagaagaatataaagaatataatttaaaaagtaatgtacatggaaaaccaaatattaaacttgaagaccatgttgatagaaagtttataagatttatgggcccaggttcagcttacaactacgtatcaatgaatgaggcggtaaaagactctgggttagaagaaaaagatgtaagcaatattaatactggaatgataatgggttctggaggcccttcaatagaaaatgtaattttagctgctgataaaaccagagcgaaaagtccaaagaggatggggccttttgttgttcctagaacaatgtcgagtactgcttcagcaacgttagctgttccatttaaaattaaaggagttaactacacaattagttctgcatgtgcaactagcggacattgtataggtaatgcaatggaattaattcagcttggaaaacaaaaaattgtttttgcaggcggaagtgatgaagttcatttcgcaatgaccgctatgtttgatgctatgacagcgttatcttcaaaatataatgacactccagaaaaagcctctagaccatatgacaaaacaagagatggttttgtaatatcaggtggtggaggtgtagtggttttagaagaatatgaacatgcaaaagcaaggggtgcaaaaatttatgcagagctcactggttatggagcaacatcagatggttttgatatggttgcgccttctggtgaaggagctgtaagatgcatgaaaatggcactggaaacagcgaaaaataaaatcgattacataaatacacatggtacttcaacacctgttggagatattactgaattaaaagctgttggagaagtatttaatgaatacaagcctaaaattagctcaacaaaatcattagcaggtcattcacttggggcaacttctgtacatgaggctatttatagtttaattatgatgaaaaataatttcattgctgcttctgcaaatatcaccgatatggatgaggaagcaaaaaaatatccaatagtaacaaaagttgaaaaagatgtaactttaaactctataatgtctaatagttttggtttcggtggaacaaatgcaactttagtttttgaaaaggtataat

SEQ ID NO: 235109 - DNA, 604 bp, Unknown
  Bacterial polypeptide expressing nucleotide sequence isolated from the Sargasso Sea
agctttatcatcaaaatataataatacgccagagacagcatcaagagcatatgataagactagagatggttttgtaattgcaggtggcggtggtgtgttagtgcttgaggaatacgaacatgcaaaagcaagaggagctaaaatatacgcagaattaactggttatggagcaacttcagatggatacgatatggtagctccatcaggagaaggagcggttaggtgtatgaaaatggctatggcaacaactaaaaataaagttgattatattaatactcacggaacatccacaccagttggagatattactgaattaaatgctgttaaagaaacgtttggagatgacattccaaaaattagttcaaccaaatctttatctggacaccctttgggagctgcatctgttcatgaagcgatctattgtttaattatgatgaaaaataattttattgcaggatcagcaaatattaatgagatggatgatgaagctaaaaaatttcctataattgttaaaacagaaaaaaataaaactttaaatacagttatgtccaatagttttggttttggtggaactaatgcagctttaatttttgaaaaagtttaa

SEQ ID NO: 235110 - DNA, 862 bp, Unknown
  Bacterial polypeptide expressing nucleotide sequence isolated from the Sargasso Sea
taatccttttttcatacctaaaatgatacctgatattgcaccaggggtcatttctataagacatgggtttaaaggtcctaattttgccactgtttctgcatgtgcatcatcagctaatgcgcttatagacgctttaaattatatccgactaggttattctgatataattgtttcagggggatctgaagctggaataataaaatcaggaataggcggatttaatgctgtacaagctttatctaaaagaaatgatgacccaaaaacagcatcaagaccatttgatttagatagagatggttttgttcttggcgaaggtggtggctgcataatccttgaagaactagagcacgctaagtcaagaggtgctaaaatttatgctgaggtaagtggtgctggcctttcagctgatgcgtatcacatgaccgctcctcaccctgaaggagaaggggctataaatgtgatgaacaattgtcttgctgattctggattaagttataaggatgttgacttgattaacatgcatggtacatcaactcctttaggtgataaagcagaagcaaaagcagtcaaggctgtatttaaagatcatgcatataatcttaacattaactccaccaagtcaatgactggacatcttttaggggcagctggtgcagtagaagcaatttcatgtattttggcaattaataacaacatagttcctccaaccataaatcactttaacgatgaccctgagattgataataaactgaattttacatttaacacttctcaaaaaagagaggttaaggttgctatgagcaacacttttggttttggcgggcataatgcgtgtgttctcctgaaagaatttgtagattag

SEQ ID NO: 235111 - DNA, 826 bp, Unknown
  Bacterial polypeptide expressing nucleotide sequence isolated from the Sargasso Sea
aatgcaacttcctcgaagagttgtagttactggaatgggattaatttctcccctaggaaactctgttattgagtcatggtctaactgcataaaaggatgctcaggcatctctgagaatattgttgatctcgaagatatgccaatcaaggttggtggaagaatttatgatttcgatccaaccaggtacatagattctaaagatataagacgtttagatacatttgttcaatatggtgtatctgctggtattcaagctatagaagatgctggtttagataataatgtagataaagatagagttggtttaaacataggttcaggcatcgggggcttggatagcatagagaaaaataaagatattcttaacaaaaaatcattcaagagagtatctccattttttgttcctggttcgataattaacatgacacctggatacttgagtattatcaaaggatatacaggtccaaatttatctatcgtaactgcgtgtgcatcaagtaatcatgcgattggaactagcgcaagattgattgcctatggagatgcagatgttatggtcacaggaggttctgaaatggcaactacaccgttaggggtttcaggttttcttgcatcaagagctttaagtaaatccgatgatccaaaaacagcaagtagaccatgggacaaggatcgtgatggttttgtgttgtcagatggagcagcaattctagtattagaagaatatgaacatgccaaaaaaagatcagcgaatatttatgcagaagtaattggttttggcatgagttctgatgcttatcatatgaccgcaccatcagaggacgga

SEQ ID NO: 235112 - DNA, 700 bp, Unknown
  Bacterial polypeptide expressing nucleotide sequence isolated from the Sargasso Sea
atggaattgatacaacttggaaaacaaaatattatttttgcaggaggtagtgatgaagtgcattttgcaatgacagctatgtttgatgctatgacagctttatcttcaaaatataatgatacgccagaaaaagcttcgagaccatatgataaaactagagatggttttgtaatatcaggtgggggaggcgttttagttttagaggaatatgaacatgcaaaagcaagaggtgcaaagatttatgctgagttaactggttatggtgcaacttctgacggttacgatatggtagcaccatcaggagagggagctataagatgtatgaaaatggctttgagcacaagcaaaaacaaaattgactatataaatactcatggaacctcaactcctgttggagatattacagaactaaaagccgtaggagaagtattcaaagataatacaccaaaaataagttccacaaaatcactttcaggtcactctttaggagcaacctcagtgcatgaagcgatttatagtttaattatgatggaaaataattttatctcggcttctataaacataacagacatagatgatgaagcaaaaaaatatcctataattactaaagttgaaaaagacgtaaaattaaattctattatgtctaatagttttggatttggaggaactaacgcaacattagtttttgaaaaaatttaat

SEQ ID NO: 235113 - DNA, 1213 bp, Unknown
  Bacterial polypeptide expressing nucleotide sequence isolated from the Sargasso Sea
aatgaaaagagtcgtgatcaccggaatgggtgttgtttcaagtatcggtaataacaagcaagaagtgactgagtcacttaaagcgggccgtagtggtattacacattccgctcagtttgaagaaatgcaactacgtagtcatgtatggggcaatatcaaattagatccttctgagctgattgaccgtaaagcgctgcgttttatgggcgatgctgcggcatatgcttacattgcaatgcaagaagccattaaggatgctcagttaactgaagagcagtattcaaatcctcgcgtaggtttgattgtgggcacaggcggcgcttcgtcttctaaccaagtccaagcggcggatattctgcgcgaaaaaggcgtaaaacgcgtcggtccttatatcgtgccacgcattatgtcgagcacagccagcgcgtgtttggcgacccccttcaaaatcaaaggcatgaactactcaatcagttctgcctgtgcgaccagtgctcactgtatcggtcacgccgttgaacttatccaaatgggtaagcaagatatggtgtttgcgggcggttcggaagaagtggattggaccctgaccatgggcttcgatgcgatgggcgcactgtcgactaaatataacgacactccagaaaaagcctctcgtacctatgatgcagaccgtgatggtttcgtgatctctggcggcggcggcatcttaatcgttgaagagttagagcacgctctggctcgtggcgcgaagatttacgccgaagtgattggttatggcgcatcatcagacggttacgacatggttgctccatctggtgaaggtgcggtgcgttgtatgcaaatggctctggccgatgtggacacgccaattgactacatcaacacccacggtacatctactccagttggtgacgtacgtgagttagaagccctgcgcgaagtctttaaagacaagtgcccaccagttgcatcgactaagtctatgactggccatgccctaggcgcggcgggtgtacacgaagccatctacagcttgatcatgatggaaaacagctttattgcgcctagcatcaacatcgataacttagatgaagctgcgaaggacatgccaatcgtgcgtgaataccgcgatgcagagttaaacactgtcatgagcaacagctttggttttggtggcactaacgcaacattagtgatgcgtaaatataagtaa

SEQ ID NO: 235114 - DNA, 1213 bp, Unknown
  Bacterial polypeptide expressing nucleotide sequence isolated from the Sargasso Sea
cgccagtggtgttgaggaaacatggtctcgtattatcaatggagactctggtgcgggtttaataacacgttttaacgctgatcgggtcgcaacaaagtatgcttgcgaagtgcctcacggagacggcttgaatggaacattcaatgccgatgattggatggagccaaaggaaagaagaaaagtagacgactttattttgtatggtattgctgcgtctgaaatggcggtaagggatgctgattggatgcccactgacgaggccagtttacttcgcaccggtgttatgattgggtcgggtattggcggtttaaattctatagcagaaactgcggtaatgataaatgagcgtggacctagaagaatttcaccattttttatcccgggtgcactgataaatttgatatctggacaggttagtattagatttggctttaaggggcctaatcattcagttgtaacagcctgttcaactggagcacacgcaattggtgatgcggccaggcttattggtactaatgatgctgatgtaatgatagcaggtggagctgaagctgccatctccgaaatagggattggtgggtttaacgcctgtaaagcgctatcaactaaaagagctgatgatccaacgagggcgtctcgcccatatgatgtagatcgtgatggatttgtaatgggtgagggggctggaattgttgttttggaagagtatgaacatgcaaaaagccgaggagctaaaatatacgctgaagttgttggatatgggttgtccggtgatgcttatcatataactgcgccttctgaaaatggcgagggtggagaaagatctatgttggctgcattaaaaaaagccggtatcgaacctgatcaattaggttacataaacgcgcatggtacttcaaccatggcagacgttatcgaattagcagcagttgagcgaatgatgggagataacgctgggcaattaactatgtcgtctactaagtcatcaactggtcacttactgggtgcagctggagcaatcgaggctatttttactattttggcaattcgtgatcaggttgctccaccaacaattaatttagataatcttgcaattgaaacacaaattgatttggctccaaatcaaaaagtatcaagagaaataaattacgctatttctaactcctttggttttgggggaacgaacgccagtttacttttggcgaaagtttaa

SEQ ID NO: 235115 - DNA, 700 bp, Unknown
  Bacterial polypeptide expressing nucleotide sequence isolated from the Sargasso Sea
tatggaacttattcagatgggaaaacaagatgttgtttttgcatgtggtagcgaagaaatacactgggcaatgacagccatgtttgatgcgatgacagcattatcttcaaaatataatgatacacctgagaaagcatcaagagcttacgacaaaactagagatggctttgtaattgctggaggtgcaggggttttagttcttgaggaatatgaacacgctaaagctcgaggagctaaaatatacgcagaattaacaggttatggagcaacttcagatggatatgatatggtagcgccttctggtgaaggtgcagtaagatgtatgcaaatggcaatggcaacttcaaaaaataaagttgattatataaatactcatggaacttctactacagttggagatattactgaattgaatgctgttaaagaagcttttggaaatgaaattccaaagattagctcaactaaatctttatcaggtcatccgttaggagctgcatcagtgcatgaagcaatatattgtttaattatgatgaaaaataacttcattaccgggtcagctaacataagtgaaatggatgaagaggctaaaaaatttccaatagtcgataaaacagaaacagaagcaacattaaatactgtcatgtctaatagttttggttttggtggaacaaatgcaactctagtatttgagaaagtctaa

SEQ ID NO: 235116 - DNA, 550 bp, Unknown
  Bacterial polypeptide expressing nucleotide sequence isolated from the Sargasso Sea
tttgggagaaggttcaggatgtcttctattagaagagtatgagcatgcaaaagctagaggtgcaaagatttatgctgagattgtcggttttgggatgagtgctgatgcttatcatattacatctccaccagatggaggtagtggagctgccttatctatgcagaatgcaatcaatgatgctcaattaactccttcagatattgattacataaatgcacatggcacttctactcctgcaggtgatattgcagaaactcaagcaattaaaactgtctttaatgaatcaactaaagatctcatagtcagctctactaaatcaatgactggacatttattgggggcagcaggagcaatagaggcaatcttttcagttcttagtatcaaaaataatctttgcccacctacaattaatctagataaccctgatgttggttgtgatttaaattattcagctcaccaagcaagcgaaaagagtgttagttattctttatcaaattcttttggatttggaggcacaaatgctactctaatttttaaagaattagattaa

SEQ ID NO: 235117 - DNA, 1219 bp, Unknown
  Bacterial polypeptide expressing nucleotide sequence isolated from the Sargasso Sea
tatgcgacgtgtggctgtaacaggtatgggaattgtatcttgtattggaaacaatactcaggaagttctctcaaaccttagagaaggtaagtcaggaatatcaaaatctgaggagcatgtggatttaggtttcagaagtcaaatttatggtaaaccagatcttgatcctgaagaatatttagataaaaaaactagaagatttatgggtatgggagcagcatggaattacatatctatgcagcaagcaatagaagatgctggacttgaagaaaaagatattattaatgaaaagaccggtatcattatgggttcaggcggaccttcaacaaaaacacttgttgagtcagcagatataactcgggaaaaaggaccaaaaagagttggtccatttgcagtccctaaagcaatgtcatcaacaaactcagcaaccttagctacaccgtttggtataaaagggataaattattcaatttcctcagcttgtgcaacttcctctcattgcataggcaatgcatatgaacttattcaatttggaaagcaagacacaatgtttgcaggtggtggtgaagaacttaactgggctctatcagttctatttgatgctatgggtgcaatgtcttccaaatataatgataatccagccacatcaagcagagcatatgataaagacagagatggctttgtaattgctggtggtgcaggagttcttgttcttgaagaaatggaaaaggctaaagccagaggagcaaaaatttatgcagaaattataggttatggcgctacatcagatggacatgatatggtccaaccttctggcgaaggagctgtgcgatgtatgagaatgtcaatggaaaatataggttgtgaaattgattatatcaatccacatgcaacatctacgcctattggagatgaaaaagaagttgaagcaattagagagacatttggaaataagattcccaacataagcgcaactaaatctttaactggccatagccttggagcagctggagttcaagaagctatttattcaatactaatgatgcaaaatgattttattgcaaaatctgctaacattgaaaatattgatccaaaatttgaggacttaccaatcaatagagaaagaattgataatgctaatattggttgtctattatcaaatagttttggatttggtggaactaatgcttcattagtctttaaaaatcctaatttataa

SEQ ID NO: 235118 - DNA, 1055 bp, Unknown
  Bacterial polypeptide expressing nucleotide sequence isolated from the Sargasso Sea
tattaaaattgaagattatgttgatagaaaatttataagatttatgggtcctggatcagcatataattatatttctatggccgaagctgttaaagactctgggcttgaagaaaaagatgtaagtaatgcgtcgactggtatgattatgggatctggcggaccttcaattcaaaatgttattttagcagctgacaagacacgtgaaaaaaatccaaaaaaaatgggaccatttgttgttccaagaactatgtcaagtaccgcttctgctacactggcagtaccatttaaaattaaaggtgttaactatacaattagttctgcttgcgcaaccagtggacattgtattggaaatgcaatggagctaatccagcttggaaaacaaaaaattatttttgctggtggaagtgatgaagttcactttgcaatgtcagcaatgtttgatgcgatgactgctttatcctcaaaatacaatgacactccagaaaaagcctctagaccatatgacaaaaccagagatggattcgtaatttcaggtggtggcggtgttttagtgcttgaagaatatgagcatgcaaaagcaagaggggcaaaaatttatgctgaattaactggttatggtgctacgtccgatggttacgacatggtagctccatcaggagaaggtgcagtaaggtgtatgaaaatggctttaagtacaagtaaaaataaaattgattatttaaatacgcacggaacttcaactccagtaggtgatataactgaactaaaagcagtaggagaagtttttaaagataatgttcctaaaataagttctacaaaatctctttctggtcactcgttaggagcaacttcggtacatgaagcagtttatagtttaattatgatgaaaaataaatttatttcagcttctataaacataactgatatggatgatgaagcaaaaaaatatcctatagttacaaaggttgaaaaagatgtaaccttaaatgctattatgtctaatagttttggatttggaggaactaatgcaactttggtttttgaaaaggtttaat

SEQ ID NO: 235119 - DNA, 1075 bp, Unknown
  Bacterial polypeptide expressing nucleotide sequence isolated from the Sargasso Sea
atggtacatggaaaacctgagattgatttagcagaaaatatagatcgtaaaattttaagatttatgggagatggtgctgcctataattatatatcaatgaaagaagcaattaatgactcaggtttaagtgaaaatgatatatcaaatgaaaatactggaatcatagttggctcaggagggccttcaactcaaaattttttaaatgcttatgaaattgcaaaatctaaaggatctaaaaaagtaggtccatatatggtgactagaactatgtccagtaccaatactgcaactttagcaactccgtttaaaatcaagggtgtaaactattcaatttcatcagcttgctcaacaagcagtcactgcataggtaatgcttatgaattaattcaatttggaaaacaaaaaatagtttttgcggggggtggagaagaagttcactggacaatgtcagttttatttgatgcaatgggagcactatcttctaaatataatgataatcctcaagttgcttcaagggcttatgatgctgatagagatggtttcgttattgctggaggtggaggaacattagttcttgaagaatatgaacatgccaaagctagaggagcaaaaatttatggtgaaattacaggatatggagcaacttctgatggattcgatatggttcagccttcaggtgagggagctacaagatgtatggcacaggctcttaaaacagttaatggtaaaattgattatttaaatactcatggaacaagcactcctattggagatataaaagaaatagaatcaataaaaaatgtttttaaaaatgatataccttatttaagttcaactaaatcattaacgggtcattcattaggggcaactggtgtacatgaagctatatactgtcttcttatgatggaaaacaattttttagcaggctctgctaatattaaaaatttagatgaaaatgcaaaaaattctaatattcttcttgaaacaattgataatcgaaatattaaaaatgtaatgtctaatagttttggttttggtggaaccaatgcaacactagttttctcaaaaatttaaa

SEQ ID NO: 235120 - DNA, 595 bp, Unknown
  Bacterial polypeptide expressing nucleotide sequence isolated from the Sargasso Sea
tcaaaatataacgataccccctgaaaaagcctcaagaccgtatgataaaacaagggatggttttgtaattgctggtggaggtggagttcttgttttagaagaatacgaacatgccaaagcaagaggtgctaaaatatacgcagaattaactggatatggagcaacatcagatggctatgatatggttgcaccatctggcgagggagcggtgagatgtatgaaaatggctttagcaacttcaaaaaataaaattgactatattaatactcacgggacatcaacacctgtaggagatattacagaattaaaagcagttggagaggctttcccagactataaacctaagataagttctacaaaatctttgtcaggtcattcattaggtgcaacttcagttcacgaagcaatttatagtttgataatgatgaaaaataattttatttcagcgtcagcaaatatttcagaaatggatgatgaagctaagaactatccaattgttacacaggttgaaaaagacgtaaatctaaatgcaattatgtctaacagttttggttttggtggaactaatgcaacattagtgtttgagaaagtttag

SEQ ID NO: 235121 - DNA, 923 bp, Unknown
  Bacterial polypeptide expressing nucleotide sequence isolated from the Sargasso Sea
aatgaaaagagtagttataacaggtattggagtcgtttcttgtctaggtaataaccaagatgaagtctatcaatctttactaaattcaaaatcgggtattacattttctgaagaatataaagaatataacttaaaaagtaatattcatggaaagcctaatattaaactggaagatcatgttgatagaaaatttataagatttatgggtccaggttctgcatataattatgtctctatgaaagaagctgttaaagattcaggtttaaaagaaaaagatgtaagtaacatttcaacaggaatgattatgggttctggtggaccttcaattgaaaatgttattttagctgcagataaaacaagagaaaaaaatccaaaaagaatgggaccatttgttgttccaagaactatgtctagcacagcatctgctacacttgctgtaccatttaaaattaaaggtgttaactatacaattagttctgcgtgtgcaacaagcgggcattgcattggtaatgccatggaattaatccaattaggaaaacaaaaaattgtgtttgctggtggaagcgatgaagtacattttgcaatgacagctatgtttgatgctatgactgctctttcttcaaaatataatgatactcctgaaaaagcttctagaccatatgataaaactagagatggatttgtaatatcaggaggaggcggagtgttagtattagaagaatatgagcatgcaaaagcaaggggagcaaaaatttatgctgagttaacaggatatggtgctacatctgatggctacgatatggttgcaccatctggcgaaggagctgttagatgtatgaaaatggctttaagtaccagtaaaaataagattgattatataaatactcatggaacatcaactccagtaggagatattactgaaa

SEQ ID NO: 235122 - DNA, 681 bp, Unknown
  Bacterial polypeptide expressing nucleotide sequence isolated from the Sargasso Sea
atgcatatagttttgatatgtcagccgcatgttctggttttttatattcacttgtaactggctctcaattcatagaatcaggaactcataaaaaggtagttgttgttggagctgataagatgtcttcaattgttgattttgaggatagaaataattgtgttttatttggagatggtggtggtgcggttctacttgaaccatcattagatgaaaatggtattattgatcatatattaaaaagtgatggctctggaggttcttatctttgtataaaaggaggaggaagtaaatacccagcttctttagaaacaattaataataaagatcactttatttatcaagaaggtaaaagagtatttaaatttgctgtaacaaatatggcaaatgtatcagaggaaattatgttaaaaaataatttaaaatcaaatgatatatcctatcttgttcctcatcaagcaaataaaagaataattgatgctactgcaaaaaaaatgggaataggagacaaaaaagttctaatgaatattgaaaaatatggtaatacaactgctggaactattccattatgtttatgggattttgaaaaaaaacttaaaaaaggagataatttaattttatctgcttttggaggaggatttacgtggggttctgtttacttaaaatggtcttataattcttaat

SEQ ID NO: 235123 - DNA, 945 bp, Unknown
  Bacterial polypeptide expressing nucleotide sequence isolated from the Sargasso Sea
aaaaagaaataagcaactttagtactggtatagtcatgggatctggagggccttcaattgaaaatgtaattttagcagcggacaaaacaagagcaaaaacaccaaaattaatgggtccttttatagttccaagaaccatggcaagtactgcgtctgctactttggcagttccatttaaaatcaaagggactaattatacaatgagttctgcatgtgcaactagtggtcactgcattggaaattcaatggaattaattcaaatgggcaaacaggatattgtttttgctggtggaagtgaagaaatacattgggcaatgacagctatgtttgatgccatgactgctctatcgtcgaaatataatgatacacctcaatcagcatcaagagcgtatgacaaaactagagatggttttgtaatagctggtggagcgggtgtgttagttttagaagaatatgagcatgcaaaagctagaggtgctaaaatttatgcggaattgacaggttatggtgccacctcagatggatatgacatggtagctccatctggagaaggagctgtcagatgtatgaaaatggcaatggcaaccactaaaaacaaaattgattatattaatactcatggaacttctacaccagtaggtgacataactgaactaaaagctatcaaggaaacctttggggaagaaattccaaaaataagttcaacaaagtctttatccggtcaccctttaggtgctgcatcagttcatgaggctatatattgtttaattatgatgaaaaataattttattgctggatcagcaaatatttctgaaatagacgaagatgcaaaaaaatttccaatagtttcaaaaactgaaactaattccactttaaatacagtaatgtctaatagttttggttttggtggaactaacgctgctttaatttttgagaaaatataat

SEQ ID NO: 235124 - DNA, 901 bp, Unknown
  Bacterial polypeptide expressing nucleotide sequence isolated from the Sargasso Sea
aatgaagagagtagttgtaacaggaataggcgtagtatcatgcttaggcaataaccaaaaagaggtttttgactcattaataaactcaaaatcaggaatttctttttctgaggaatataaagaatataatttaaaaagccatgtacatggaaaaccaaaaattaaattagaagatcacgttgatagaaaatttatcagatttatgggtccaggctcagcttacaattatatatcgatggctgaagcggttaaggactcgggacttgaagaaaaatatgtaagtaatgtttcaacaggtatgattatgggctcaggcggaccatcaattgaaaatgttattctcgctgcagacaaaactagagcaaaaagtccaaaacgaatgggtccttttgttgtgccaaggacaatgtctagcactgcatctgcaactttagcagttccatttaaaattaaaggagttaattatacaataagctctgcttgtgcaactagtggccattgtattggaaatgcaatggaattaattcagctgggtaaacaaaaaattatttttgcagggggtagtgacgaagttcattttgcgatgactgcgatgtttgatgcaatgactgctttatcatcaaagtataatgatactcctgaaaaagcctctagaccttacgacaaaactagagatggatttgtaattgctggaggtggtggagttttagtactagaagaatatgaacatgctaaagcaagaggtgcaaaaatatatgcagaattaactggatatggtgctacatctgatggttatgacatggtagctccatctggagaaggtgctgttagatgtatgaaaatggcgttgaacacgtctaaaaataaaattgattatataaatactcatggaacttcaact

SEQ ID NO: 235125 - DNA, 1237 bp, Unknown
  Bacterial polypeptide expressing nucleotide sequence isolated from the Sargasso Sea
gttgaaagtggggtatttaaataatgagaagagttgttattacaggtattggcattgtatctgtttagaaaataatcaaaatgaagtttataattctcttttaaattcaaaatctggaatatcttttgcagatgaatataaagagcacaatttaaaaagccatgttcatggtaaaccaaatattaaacttgaagaccatgttgatagaaaaacaataagatttatgggctcaggttctgcatacaattatatagctatgaaggaagctgtagtagattcaggattagaagaaaaagaaattagtaattttaaaacaggcatagtgatgggttcaggaggcccttcaatagaaaatgttattcttgcagctgataagactagagcaaaaactcctaaactcatggggccatttattgttccaagaactatggctagtacagcttcggcaacgcttgcggttccgtttaagattaaaggagtaaattatacaatgagttctgcttgtgctacaagtggacactgtataggaaactcaatggaactaatacaatctggaaaacaggatattatgttttcaggtggaagcgaagagttgcattgggctatgacagctatgtttgacgcaatgacagcattatcttctaagtataatgaaactcctgaaaaagcatcaagagcttacgataaaacaagagatggatttgttattgcaggtggtggtggagttttagtactagaagagtatgagcatgcaaaagcaagaggtgctaaaatttatgcagaaataactggttatggagcaacctctgatggatatgatatggttgcaccttcaggagaaggagcagttagatgtatgaatatggctctagctacaatgaaaaataaaaaaattgactacttaaatactcatggaacatcaactccagttggagatatcactgaattaaaagcaattggggaagcatttggagaaaatgttcccaaaataagttctactaaatcattatcaggacatccactaggagcagcatctgttcatgaagcaatttacagcttaataatgatgaaaaataatttcataacagcttcagcaaatataggtgatatggatgatgaggctaaaaaatttccaattgtaaccaaaactgaaaaggatgttaatttaaattcagttatgtctaatagttttggttttggtggaacaaatgcaactctagtatttgaaaaggtataa

SEQ ID NO: 235126 - DNA, 1213 bp, Unknown
  Bacterial polypeptide expressing nucleotide sequence isolated from the Sargasso Sea
atgaagagagttgttgtaacaggtattgggattgtttcttgtcttggtaataaccaaaaagaggtttacgactctcttataaataataaatcagggatttcttttgcagaagaatataaagaacataatttaaaaagccacgtccatggaaaaccaaatattaaacttgctgattatgttgatagaaaagctttaaggtttatgggaaatggatcggcatataactatgtagcgatgaaagaggctattagtgactcaggtttggaggacaaagatgtaagtaatgttaattctggtatggtaatgggatcaggaggtccctctatagaaaatgtaattttagctgcagacaaaacaagagaaaaaaacccaaaaaaaatgggtccatttattgtaccaagaacaatggcgagtactgcgtctgcaaccctggctgttccttttaaaataaaaggtgttaactatacaattagctctgcttgcgcgactagtgggcattgtatcggaaatgcaatggaacttattcagtttggaaaacaaaaagttatatttgctggtggtagtgacgaaatacattttgcgatgacagcaatgttcgatgcgatgactgcattatcttctaaatataatgactctccgcaaaaagcatctagaccttatgacaaaactagagatggttttgtaatagctgggggagcaggagttttagttttagaagaactagagcatgcaaaagcaagaggggcaaaaatctatgcagagctcactggttatggagctacctctgatggttacgatatggttgcgccatcaggtgaaggagcaactaggtgtatgaatttagcattaaagacaactcgtaataaagttgattatataaatgctcatggaacctcaacacctgtgggagatataacagagttaaaagctataaaaggtgctttcaaagataacgttccaaaaataagttcaaccaaatctctttctggacacccgctgggtgcagcctcagttcatgaagcaatttactcaataataatgatgaaaaataattttatcgctgcttcagcaaatgtaaatgagatggatgatgaagctaagagttttccaattgttacaaaggtcgagaaagatgtgaaattgaattctgtaatgtcgaatagctttggttttggcggtacgaacgcaactttgatttttgaaaaggtttaag

SEQ ID NO: 235127 - DNA, 852 bp, Unknown
  Bacterial polypeptide expressing nucleotide sequence isolated from the Sargasso Sea
agaaaaatccaaaaaagatgggtctttttatagttccaagaacaatggcaagtactgcttctgccactttagcagttccatttaaaataaaaggaactaattacacaataagttctgcgtgtgcaacgagcggtcattgtattggtaacgcaatggaacttattcaattaggaaaacaaaatattatttttgcaggtggcagtgatgaggttcactttgcaatgactgcaatgtttgatgccatgactgcactatcgtcgaaatataacgatacacctgaaaaagcctcaagaccgtatgataaaacaagggatggttttgtaattgctggtggaggtggagttctagttttagaggaatatgagcatgctaaagcaagaggtgctaaaatatacgcagaattaacaggttatggagcaacctcagatggctatgatatggttgcaccatctggcgagggagcggtgagatgtatgaaaatggctcttgcaacctcaaaaaataaaattgactatattaatactcacgggacatcaacacctgtgggagatattacagaattaaaagcagttggtgaggcttttccagaatataaacctaagataagttcaacaaaatctttgtcgggccattcattaggtgcaacttcagttcacgaagcaatttacagtttgataatgatgaaaaacaattttatttcagcatcagcaaatatttcagaaatggatgacgaagcaaaaaactatccaattgtcacacaagttgaaaaagacgtaaatctaaattcaattatgtctaacagctttggttttggtggaactaatgcaacattagtttttgagaaagtataga

SEQ ID NO: 235128 - DNA, 1201 bp, Unknown
  Bacterial polypeptide expressing nucleotide sequence isolated from the Sargasso Sea
tatgagaagagttgtagttaccggaatcggagttgttagttctattggcaatagcaaagatcaagttttagattccctaaaaaaaggtgcatctggaattgattatcgagaagacttcgaggaaatgggccttaagagccgcattgctggttcaatcaagcttgatttaaatgagcatgtcgacaggaagctcaaacgcttcatgagcgatggaattgcttttaattatctcgctatgaaggaagcagtagaagatagtggactttctgaagaacaggtcagcgatatcagaacaggattgattatgggcaatggaggaggatcaccagaaaccattgtgtctggtgctgactcattgagagagaaaggaaaagtaagcccatttctcgtgactcgatcaatggcaagtggcaattcgggagttctcggcactgcatttaaaatcaaaggcattaattattctatcagctcagcttgtgcgacgagtgctcactgcattgggaatgcagcagagctgatccagtttgataaacaagatgtcgtttttgctggtgcaggcgatgaggttcattgggttctggcatcattctttgatggaatgaaagcactatcgacaaatcataatgacaatcctcaacttgcttcaagaccatttgatgccaatagagatggctttgtgatctctggtggtggaggtgttgttgtattagaagaatatgaacatgccattgctaggggagctaatatttatggcgagcttgttgggtatggtgcaacctcagatggctttgatatggtgcaaccttctggagagggcgcaatgagatgcatgcaacaagcaatgcagggcaacaataaaattgattatttgaatgcccatggaacaagcacccctgtgggtgatatgcgagaacttgaggcagtcaggcaagtttttggcgaggatacacctaagattacttcaaccaaatccttaaccggacattctcttggagttgcgggagtacatgaagctatctacaccatactcatgttgcatcatgattttatttctccatcaattaatattgagaacatcgatgagaatgcagaaggttttaatatagtcacagaccttattgaggaagcagggcttgagacagtgatgtcaaatagctttggttttggaggcaccaatgcctcgctcgtatttaaaaaataa

SEQ ID NO: 235129 - DNA, 1213 bp, Unknown
  Bacterial polypeptide expressing nucleotide sequence isolated from the Sargasso Sea
atgaagagagttgttgtaacaggtattggggttgtttcttgtcttggtaataatcaaaaagaggtttacgattctcttgtaaataataaatcaggaatttcttttgctgaagaatataaagaacacaatttaaaaagccacgtacatggaaaaccaaatatcaaacttgctgattatgttgacagaaaagctttaaggtttatgggaaatggatcagcatataactatatagcgatgaaagaggccattagtgactcgggtttggaggacaaagatgtaagtaatgttaattctggtatggtcatgggatcagggggtccctctatagaaaatgtaattttagccgcagacaaaacaagagaaaaaaatccaaaaaaaatggggccatttattgtaccaagaacaatggcgagtaccgcttccgcaaccttagcagttccttttaaaataaaaggcgttaactatacaattagttctgcttgtgcgactagtggacattgcatcgggaatgcaatggaattgattcagtttggaaaacaaaaagttatatttgctggtggtagtgatgaaatacatttcgcgatgacagcaatgttcgatgcgatgactgcgttgtccactaaatataatgactctccgcaaaaagcatctagaccttatgacaaagctagagacggttttgtaatagctggaggagcaggagttttagttttagaagaattagagcatgcaaaagcaagaggagcaaagatttatgcagaactcactggttatggagctacttctgatggttatgatatggttgcgccatcaggtgagggagcgactcggtgtatgaatttagcattaaagacaacgcgtaataaagttgattatataaatgctcatggaacttcaacgcctgtgggagatataaccgagttaaaagcgataaaaggtgctttcaaagataatgttccaaaaataagttcaaccaaatctctttctggacacccactaggtgctgcttcagttcacgaggcaatctactcattaataatgatgaaaaataattttattgcagcgtcagcaaatgttaatgaaatggatgaagaggctaaaagttttccaattgttaccaaggttgagaaagatgtaaaattgaattcagtaatgtcgaatagctttggttttggtggaacaaacgcaactttgatttttgagaaggtttaag

SEQ ID NO: 235130 - DNA, 628 bp, Unknown
  Bacterial polypeptide expressing nucleotide sequence isolated from the Sargasso Sea
catgaaatcaaaaatcacatcaattggaagctatacaccgaacaatatagttaccaataaagatcttgaaaaaagggttgatacaactgatgaatggattgtatctagaacaggaatcaaagaaaggccaatagccgatgattcacaagcgacatctgatttggcatttgaagctgccaagattgcaatagagagagccaatatcgacaagaatgagattgatcttattattgtcggtacatgcacgcctgatgttgcaacaccaaatgttggtacgattgttcaaaaaagactagaactcaaaaactttcctgccttcagtattgaggccgcttgcagtggttttatttatgctctgaatattgcagataagttcataaaatcaggtgagtcaaaatgtgcattggtcattggtgctgagacactatctaggattaccaactgggatgacagaaatacatgtgtcctttttgcagatggagcaggggctgccatcttaagccatcagatgacagagggattgtattttccgagcttggtgccaatggtgaatacgctgagcttctccacgtaccctatggaacgtctagaaagccggagacacccaatgcagatgattacaaattga

SEQ ID NO: 235131 - DNA, 337 bp, Unknown
  Bacterial polypeptide expressing nucleotide sequence isolated from the Sargasso Sea
gatgagcggaaacgaagtatttaaggttgctgtaaaaacgctagaagaaattgcgattgatgcacttaaaaaatcgaatcttcagagcaaggatatcgattggttcatcccgcatcaggccaacatgagaattattcaagcggtggcaaaaagattggaattacccgaggaaaaagtaattctcagtatggacattcatggcaatacatctgcggcatccatacctttggcgtttgatcgcgctgttcaagatggcaggataaaaaaaggagacactatcttaatgcaaagcttcggtgctggctttacatggggaagtgttattttggatttataa

SEQ ID NO: 235132 - DNA, 1119 bp, Unknown
  Bacterial polypeptide expressing nucleotide sequence isolated from the Sargasso Sea
gaataactttttcagaagaatataaagaatataatttaaaaagtaatgttcacggtaaacctaatattaaacttgaggatcatgttgatagaaaattcataaggtttatgggacctggttcagcttataattatatttctatggcagaagcagtgaaagattctggtttagaggagaatgaggtaagcaatatatctactggaatgattatggggtcaggcggtccatcaattgaaaatgttatacttgcagcagacaaaactagagaaaaaagcccaaaaagaatgggtccttttgttgttccaagaactatgtcaagtacagcatcagcaacattagctgtaccttttaaaataaagggagttaattacacaattagttcagcctgcgcaacaagtggacattgtattggaaatgcaatggaattaatccaacttggaaaacaaaatataattttcgctggaggaagtgatgaggttcattttgcaatgactgctatgttcgatgctatgacagctctctcatctaaatataatgatacacctgaaaaagcttctagaccatacgataaaacaagagatggttttgtaatatctggtggtggtggagttttagttctagaggaatatgaacatgcgaaagcaagaggcgccaaaatctacgcagaaataactgggtatggagctacatcagatgggtatgatatggttgcaccttcaggagaaggagctgtgagatgtatgcaaatggctttgagtacttctaaaaataaaattgattatataaacactcatggcacatcgactcctgttggagatattacagaattgaaagctgtaggggaagtttttaaagactataaaccaaaaataagctctactaaatctctcgcaggccactcccttggggcaacttcagtgcatgaggcagtttatagtttaattatgatgaaaaataattttattgctgcttcagtaaatattactgatatggatgaagaggcaaaaaattatccaattgtaacaaaagtagaaaaagatactaacttaaattccgttatgtcaaatagtttcggttttggtggaacaaatgcaactttagtattcgagaaagtttgat

SEQ ID NO: 235133 - DNA, 1234 bp, Unknown
  Bacterial polypeptide expressing nucleotide sequence isolated from the Sargasso Sea
catgaagcaactacacagaagagttgtagttacaggcttgggtatattatctccaattggtaatacattgtctgaagcctgggattcttgtataaatggagtatcaggtatctcaaaaatagagatagatttaaaaaataatcctgtaaaagttggcggtcgtttaaaaaattttaatcctgaagattttcttgattctaaagaaattagaagaattgatcccttcattcaatacggaataattgctgctaatcaatctataaatcactcaggaattcttgattcaaagatagacttgtcaaaagttggtattaattttggagctggtattggaggtatagatacaatagaaaaaaataaatctttattggaaaagagaggttataagaaagtctctcccttctttgtgccaggatcaattgttaatatgatttctggtttaatttctataaagcatggttttatgggcccaaacacttcagttgttacagcatgctcaactggcaatcattgtattggaactgctgcaagatctattgcatacggtgaagctgatgtaatgattgctggaggtgctgaaatggcttcaacacctttatcaatagcaggatttactgcggctagagcactttctatgaattccgatcctgaaactgcaagcaggccatggcataaagatagggatggattcgtgttatccgatggagctggttcactggtacttgaagattttgatcatgcaaaagcaagaggtgcaaaaatacatgcagaggtcataggattcggaactagttccgatgctcatcatatgacagctcctcctgaagatggaagaggagcagctctatcaatgactaatgcaataaatgatgctgagattcgcccatctgaaattgattatatcaatgcacatggaacttctacacccttgggtgatattgcagaaacaactgcccttaaaaaagtttttggtgataacgttccacaaattagttcaacaaagtcaatgaccggacatactcttggcgcagcgggcgcaatagaatcaatattctgtattcaagccataaatcacggaattattcctccgacaatcaatttagataaaccagatccattgtgcgatttaaattatactcctttggtatctgttgaaaaaaacattagagttgctatgaataactcatttggattcggaggaactaactctacacttgtcttcaaacaaatctaa

SEQ ID NO: 235134 - DNA, 445 bp, Unknown
  Bacterial polypeptide expressing nucleotide sequence isolated from the Sargasso Sea
atgagttctgatgcataccacatgactgctccacctgaaacaggagctggtgctagacttgctatgcaaaatgcacttaatgactctaatattgatcaaagtgaaattagttatataaatgctcacggaacttcaacacctctaggtgatattgcagaatcaaaagcaattgaagaaatttttaatgaaccaccaatagtatcatccactaaatctatgactggacatactcttggtgcagctggagcaattgagtcagtatttaccataatgagcatttacaaagatgttatacccccaacaatcaatcttaaaaaccaagatgatcagtgcactcttgactataattgtggagatgcaagagagactaaaattcaatatgcaatgaataactcttttggttttggaggaactaactcaagtcttgtttttaaaaagatctaac

SEQ ID NO: 235135 - DNA, 263 bp, Unknown
  Bacterial polypeptide expressing nucleotide sequence isolated from the Sargasso Sea
tcagcttgaagcctctcaaatagactggcttgtcccacaccaagctaataagcgaattatagatagcaccgcacggaaactggggatgggcactgatagaattgtacttaccatttctgaacacgccaatacctctgctgcatcaatacctttggcattagattcagcaataagagacggcagaattaagaaaggtcatttgctacttatggaggctatgggtggcggattaacttggggggcggcgttagtgaggtggtagc

SEQ ID NO: 235136 - DNA, 781 bp, Unknown
  Bacterial polypeptide expressing nucleotide sequence isolated from the Sargasso Sea
gctgttccttttcaaaattaagggtgtcaattatacaattagctcagcatgtgcaacaagtggacactgtataggaaacgctatggaattaattcaacttggtaaacaaaaaattatatttgctggagggagcgatgaagttcattttgctatgacagcaatgtttgatgcaatgacagcactgtcatctaaatataatagcacaccagataaagcttcaagaccatatgataaaactagagatggattcgtcatttctggaggaggtggtgtattagttttagaagaatatgaacacgcaaaagctaggggcgcaaaaatttacgctgaacttacaggttatggagcaacctcagatggttatgatatggtagctccatcaggtgaaggtgcagttagatgtatgaaaatggctttaggaactacaaataaaaaaattgattatattaatactcatggaacatcaactcctgtgggagacattacagaactaaaagcagtaggagaagtatttagtgattacaaacctaaaattagctcaaccaaatctttagcaggtcattctttgggagctacttcagttcatgaagctatttatagtttaataatgatgaaaaataattttattgcagcttcagcaaatattactgatatggacgaagaagcaaaaaaatatccaattgtaactaaagttgaaaaaaatgtgaatctaaatgcaattatgtctaacagttttggttttggaggaaccaatgcaactttggtttttgaaaagatataa

SEQ ID NO: 235137 - DNA, 710 bp, Unknown
  Bacterial polypeptide expressing nucleotide sequence isolated from the Sargasso Sea
gattgagaatggaatagtggatattgttgttactggtggaactgaatcaggtacaacaccaatgacaattgctgcatttgctcaaataagagctctctcaactcaaaatgataatcctaaagaagcttgtaaaccatttgataaaaatcgtgatggttttgttatgggcgaaggttctacagttcttatattagaaagtgaagaatctgcaaaaagtagagatgcagaaatatatgcatatatagatggatatggctcaacaacagatgcatatcatattactgctccagctgaaggaggggcaggtgcagtaaaagcaatggaaaaagctatagaagatgctggaattactccttcagatattgactatataaatgctcatgggacctctacaccagctaatgataaaaatgaaacagaagcaattaaaacagttctcggtgaagaagcttctgaagtagtaatttcatcaactaagtctatgacaggacacttacttggaggtggcggggcttttgaatctatggcatcaatattgtcaataaaacacagtaaagttcctccaacaattaacttaaatgatcctgatgaggaatgtgatttaaactataccccaaataatgctgttgaccttagcattaaaactgcaatgtctaattcttttggatttggtgggcataatgctgttttggtttttaaaaaaagttaaa

SEQ ID NO: 235138 - DNA, 868 bp, Unknown
  Bacterial polypeptide expressing nucleotide sequence isolated from the Sargasso Sea
gcagatatactcaggtccaaaggattaaagagaataggcccttacagagtaactaaagcaatgggcagtactgtatctgcatgcttagccacctcatttggtataaagggtataaatttttctatatcgtcagcctgcgctaccagtgcccactgcataggctcaggcatggagcagattcaacttggtaaacaagatattgttatagcaggcggtggcgaagcagaacactggggcatgacaagcctcttcgatgcaatgggagctttatcgaccaaatataatgataatcctcaatctgcttctagagcttacgacaaagacagagatggttttgtcatagctggtggggctggaacggtaatacttgaagaaaaacaacatgcgataaatagaggtgcagaaataatcgcccaactgacagggtacgcagctacctcggatggtgaagacatggtgagcccatctggagaaggtggtgagagatgtatgcaaattgctttagagatgagtggcaataaaacagttgactatattaatgcccatggaacgagcactccagcgggtgatattaccgaattgaatgctataaagtcagtttttggagatagtattccttggataagttctactaagtctctttcgggacattctctcggtgctgcaggcgtacaagaggctatatatggattaataatgatgaaagaagggtttattgtaggatcagcaaatattgaaaatatagacgaaggggctgagtcatttcctatagttagggaaaatttttctactgaattaaaaagttttttgagtaatagttttggatttggtggaactaacgcaactctaatttttgaaaagccttgat

SEQ ID NO: 235139 - DNA, 1207 bp, Unknown
  Bacterial polypeptide expressing nucleotide sequence isolated from the Sargasso Sea
gttgtagttactggactaggagtagtttcttgtttaggaaataatcaagatgaagtttataagtcattactaaatgcaaaatcaggtattacatttgctgaagaatacaaagaatacaatctaaaaagtcatgttcacggaaaaccaaatattaaactagaagatcatgtagatagaaaatttataaggtttatggggccaggatctgcatataattatgtttcaatgaatgaagctgtgaaagactctggacttgaagaaaaagatgtaagcaatgtaacaaccggaatgatcatgggatcaggaggtccttcaatagaaaacgttatattagcagcagacaagacgagagaaaaaagcccaaaaagaatggggccttttgtagttccacgaacaatgtcgagcacagcttcagcaactcttgcagtaccttttaaaattaaaggagttaactatactattagttcagcgtgtgcaactagcggacattgtattggtaacgctatggaattaattcaactaggaaaacaaaaaattatttttgcaggtggtagtgatgaagttcattttgcaatgactgcaatgtttgatgcgatgacagctttatcttcaaaatataacgatacccctgaaaaggcgtcaaggccttatgataaaactcgagatggatttgttattgctggtggtggtggtgttttagttttagaggaatatgaacatgctaaatcaagaggtgcaaaaatttatgcagaattaacaggctacggtgcaacgtcagatggttatgacatggttgctccgtcaggcgaaggtgcaattagatgcatgaaaatggctttaagtactgcaaaaaataaaattgattatattaatactcacggcacatcaacgcctgttggagacattactgagttaaaagcagttggagaagtatttaatgaacacaaaccaaaaattagctcaactaaatctcttgcgggtcactcactgggagctacttcagttcatgaagctatttacagtttaataatgatgaaaaataattttatagctgcttctgctaatataaatgatatggacgaagaagcaaaaaaatatccaatcgttactgcagttgaaaaagaagtaaatttaaattctgtaatgtcaaatagttttggttttggaggaactaatgctactttggtttttgaaaaggtaaaataat

SEQ ID NO: 235140 - DNA, 412 bp, Unknown
  Bacterial polypeptide expressing nucleotide sequence isolated from the Sargasso Sea
atgcatagcaaaattttgggtactggcagttatctgccgaactcggtacgtaccaatgccgatctcgaacagatggtggaaaccagcgacgagtggattgtggagcgtaccgggatccgtgaacgtcgcattgccggtgccgatgaaaccgtcgccaccctgtctcaccaggccgctctgcgcgccctggacgcggcgggcctgaccgctgccgatctcgacatgatagtgctggccaccaccagtgccgagaacgccttcccggccgccgcctgtgaattgcagggcctgctcggggtgcaagggatcccggcctttgatgtggccgccgcctgtgccggctttacctatgcgctctccatcgccgatcagttcgtcaaatccggtgccgcccgccacgtactggtgtcgg

SEQ ID NO: 235141 - DNA, 1117 bp, Unknown
  Bacterial polypeptide expressing nucleotide sequence isolated from the Sargasso Sea
atgagaagagttgtagtaactggtataggtctgttatctactcttggtaatgatctaaatacttcatggaataatcttatcagttgtaaatcgggaataaaaagaatttctcattttgatgtttctgatctcacctcaaaaatagcgggctacattgaaaatgatccaaataattctgattattttaataaattaaaatatttagaaacaagagatttaaagcgcaacgacagatttattcaatatggtttagttgctgcaaaaatggcaattgaagatgctggattaaataaccttaatgaagaagataaattaaaagttggcgtttcagtaggctctggtattggaggtttagagacaatatatgatggttcaattacaattaatgaaagaggttcaaaaaaattatcacccttttttataccatcatctttagtaaatttattatcaggacaaatttctattaaatacgggtataaggggcctaatcactcagttgtaacagcgtgtgcaacaggagcacattcaattggcgactccagtgagattattaaaaggggagctgctaatgtaatggttgctggtggatcagaagcagctgtttgtaaattaggaattgcaggtttttgtgcagcaagaagtttaagtacatcttttaatgaaactcctcatcttgcttcaagaccttgggataaagatagagatggctttgtgatgggagagggctcaggtattattgtacttgaagagttggaatttgcaaaaaagaggggtgcgaaaatttacgcagaattaattggatatggaatgtcgggagatgcgtttcatattacagcaccttcagaagatggggatggaggttttagagctatgaaagcatcacttgatatggctaaaattacacctgaagatgttgattatataaatgctcatggaacttcaactgtaaaaggggatgaaattgaattaaacgcaatatctagattatttaaaaataaaatatatgtaagttctactaagtcttccatcggacatctattgggtgctgccggaagtgtggaagctattttttctataatggcctttaaacaaaaatattatgcctgctacactaaat

SEQ ID NO: 235142 - DNA, 901 bp, Unknown
  Bacterial polypeptide expressing nucleotide sequence isolated from the Sargasso Sea
atcaggtggaccctctacaaggataatggttcaaaatggtgatatagctcgcgaaaaaggtcctaaaagaattggtccgtatggagtgacaaagagtatgtctagctctatatcagcaattctagcaacggctcttaaattaaaaggcattaattattccatttcttctgcatgtgcgactagcgcacattgtattggtcatgctgctgaattaattaaaagtgggcaacaagatatagttatagctggaggtagtgatgatgaacactggacctcttctgctttgtttgatgctatgggagctttatcttcaaactttaactcatctccatcagaagcttctagaccatatgattctgatagagatggttttgttatatctggaggttctggaattgttattttagaagatgaagaacatgcaaaaaaaagaaatgcaaatattttggccaaactttcaggttattttgctaactctgatggatacgatatggtcgcaccttcaggtgaaggggctgtaagatgtatgcaaggagctatagataactctaaatgtaaaattgattacataaacactcatggtacaagcactcctgttggtgatatagctgaattaaatgcaattaaggaagtatttggtgatgattcacctttaattagttctactaaatctatgacaggtcactctttaggggcaactggtgcacatgaagtaatatattcaaccatgatgataaatgaagattttgttgcgccatctattaatattaataatttatgcgaagaagctaaaggcttgaatattgttactgaaactcaagaaaaaaaattaaatagtattttaagcaattcctttggttttggtggaactaatgcaagcctagtaataagtaaatattaa

SEQ ID NO: 235143 - DNA, 1066 bp, Unknown
  Bacterial polypeptide expressing nucleotide sequence isolated from the Sargasso Sea
gatgagagaggtagttgttactggttatggaatcatttcatgtttaggaaatgatgtaatagatgtaactaaatcactaaaaaattcatcttctggaatttctctaaataaagtgaataaagatcttggactaagaagccatatttctggttcaatagagaatctagatgtcaaagaaaaaattgatagaaaactttacaggtttatgggagatgcagcagcttatgcttatctcagtgctaaggaagcaattgataatgctaatctgacagacgaatttttaacaagtctaagaacaggcataataatgggctctggaggagcctcttcagaagatcaaatagaatcagcagatattcttaggaataagggtttgaagcgaattggtccttatagggttacaaaagcaatgggtagtacggtttctgcgtgtctagctacctcttttggaataaaaggtattaattattcaatatcttctgcttgcgcaactagcgcgcattgtattggagctggcatggaacaaatccagttaaacaaacaagatgtaattattgcaggcggaggagaagctgagcattggggtatgacaagtttatttgatgctatgggagcgctatctactaaatacaacgatacaccaaaaaaagcatctagagcttttgataaagatagagacggttttgttattgccggtggaggtggggctgtaatactagaagaaaaacaacatgcattatctagaggggctaagatatatgcagaattaactggttacgcagcaacttcagatggacaagatatggtaagtccttctggagaaggcggacaaagatgtatggaattagcttggaatatgtgcggcaacaaaaaaatagactatataaatgctcacggaacaagcacacctgcaggagatataacggagcttaatgctattaagaaagtatttaatgacgaaatacctgcaattagctctactaaatctttatcaggtcactctcttggcgctgctggcgtacaagaagccatttacagtcttatcatgttagaaaatggttttatt

SEQ ID NO: 235144 - DNA, 934 bp, Unknown
  Bacterial polypeptide expressing nucleotide sequence isolated from the Sargasso Sea
tagtaatattttaacaggaatggtgatgggttctggtggcccatctatcgagaatgtcattttagcgtcagataaaactagagaaaaaaatccaaaaaaaatgggtccatttatagtaccaaggacaatggcaagcactgcttctgccactcttgcagttccatttaaaataaaaggtaccaattatacaataagttctgcatgtgcaacgagtgggcattgtattggtaatgcaatggaacttatacagttaggcaagcaaaatattatttttgctggtgggagtgacgaagttcactttgctatgacagctatgtttgatgcaatgacagcattatcctcaaaatataacaatactcctgaaaaagcttcaagaccttatgataaaacaagagacggtttcgttattgctgggggtggaggagttcttgttttagaagagtacgaacatgcaaaagcaagaggcgctaaaatatatgcagagctaactggttatggcgcaacatcagatgggtatgatatggttgcaccatctggtgaaggggcagtaagatgtatgaaaatggctctttcaacttcaaaaaataagattgactatataaatactcatggaacatcgactcctgtcggtgatattacagaattaaaagcagtaggtgaagcttttacagattacaaacctaagataagttcaaccaaatctttatctggtcactcattaggagcaacctctgttcacgaagcaatttacagtttgataatgatgaaaaataattttatttcagcttcagcaaatattttagaaatggatgacgaggcaaaaaattatccaattattacacaagtagaaaaagatgcaaatttaaacgctattatgtcaaatagttttggatttggcggaactaatgcaacattagttttcgagaaagtttga

SEQ ID NO: 235145 - DNA, 1213 bp, Unknown
  Bacterial polypeptide expressing nucleotide sequence isolated from the Sargasso Sea
atgaaaagagtagttgttactggtattggagttgtgtcttgtttgggcaataatcaagaagaagtttatcaatctttattaaattcaaaatctggaattacattttctgaagaatataaagaatataatttaaaaagtaacgttcatggcaaaccaaatattaaacttgaagactatgttgatagaaaatttataagatttatggggcccggctcagcatataattatatttctatggctgaagcagttaaagactctgggctggaagaaaaagatgtaagtaatattttaactggaatgattatgggatctggtggaccatcaatcgaaaatgttattcttgctgctgacaaaactagagaaaaaaatccaaaaaaaatggggccatttgttgtaccaagaactatgtctagtaccgcttctgctacattggcagtgccatttaaaattaaaggtgttaactatacaattagttcagcatgcgcaacaagtggccattgtattggaaatgcaatggaactaatccagcttggaaaacaaaaaattgtatttgctggtggtagtgatgaagttcactttgcaatgacagcaatgtttgatgctatgacagctctttcttcaaaatataatgatactcctgataaagcatctagaccatatgataaaactagggatggatttgtaatatcaggtggtggtggagttttggttctagaagagtatgaacatgcaaaagcaagaggtgcaaaaatttatgctgaattaactggctatggagcaacttctgatggatatgatatggtagctccatctggagaaggggccgtaagatgtatgcaaatggctttaaatacaagtaaaaacaaaattgattatataaatacacacggaacttcgacaccagttggtgatataactgaattaaaagctgtgggagaagtctttaaagaaaatattcctaaaataagttctacaaagtctctttcaggtcactcgttaggcgctacttcagtgcatgaggctgtttatagtttaattatgatgaaaaataactttatttcagcttctataaacataactgatatggatgacgaggcaaaaaaatatccaatagttacaaaagttgaaagagatacaactttgaattccattatgtctaatagttttggatttggaggaactaacgcaactttagtttttgaaaaggtttaat

SEQ ID NO: 235146 - DNA, 404 bp, Unknown
  Bacterial polypeptide expressing nucleotide sequence isolated from the Sargasso Sea
tttggtcgagcagttccacaggaccggcggtgtggtgttccgaggcagtggcagcgccacccctcagcgctccatcagcaacaacgagctggggcaacgggtggaaaccagcgatgactggatccgcagtcgcacaggaatcgcagcccgacgggtcatcggggcggacgaaagtctgagcgaactcaacgcacgagcggcggaacgcgctctggccatggcgggatggtcggcggagaccctggatctgatcctgctggccacctccacacccgacgatctgttcggctctgcaccgcggctgcaggcccgcatcggggccgtcaacgcagcagccttcgatctcaccgccgcctgcagcggttttctgttcgctgtcgtcaccgcagcccagtacctgcgca

SEQ ID NO: 235147 - DNA, 996 bp, Unknown
  Bacterial polypeptide expressing nucleotide sequence isolated from the Sargasso Sea
taaagatgctgatctggataatagttccgttgacaaaatcgtgttggtgtttatggggttcgggtattggtggtttagaaacttttcaaatagaagcaacaaattttgcagagggtgatggtactcccagatataatccttttttcatccctaaaatgattcctgatattgctccgggtgttatttcaatcagacacggtttcaaggggcctaattttgctactgtttctgcatgtgcatcatcagcgaatgctcttattgatgctttaaactatataagactaggttattcagatataatagtttctggtggctctgaagcgggaattataaaatcaggaataggtgggtttaatgcagtgcaggctctatcaaaaagaaatgatgatccaaaaacagcatcaagaccatttgatctagacagagatggttttgttcttggtgaaggaggtgggtgtataattcttgaagagcttgagcatgctaagtcaagaggcgctaaaatatatgctgaggtttctggtgctggcctatcggctgatgcatatcatatgacggctcctcacccagagggcgagggcgcaataaatgttatgaataattgtattgctgattctggattaagctataaagatgttgatttgattaacatgcatggtacatcaactcctttaggtgacaaagcagaagcaaaagcagtcaaggctgtttttaaggatcatgcttataaccttaatattaactccaccaaatcaatgactggacaccttttgggggcggctggtgcggttgaagcaatttcatgtattcttgcaattaataacaacatagtacctcctaccataaatcactttaatgatgatccagaaattgataatcaactaaatttcactttcaatagttctcaaaaaagagaggttacggttgccatgagcaacacttttggtttcgggggccataacgcatgtgttctcttaaaagaatttgtagattagc

SEQ ID NO: 235148 - DNA, 1210 bp, Unknown
  Bacterial polypeptide expressing nucleotide sequence isolated from the Sargasso Sea
aatgaaaaatgtagttataacaggagttggtattaagtcgtgtataggtaatgactataatgacgttcttgtgaatcttaaagaaggtaaatcaggcattagatttaatgaaacatattctaagatgggttttagaagctgcatctccggatcgattaatattaatctttctgattatattgatagaaaattattaagatttatgggtgaatcatctggttatgcttatcttgctacaaaagatgcgctcaatatggctggtattgaagaaaaagatttggattcaccaagaattggtattgttgctggctcaggaggagcttcaactagagtgatggtcgaaagtggtgatattgctagagaaaaaggaccaaagagaattggcccttatggtgtaacaaaaagtatgtcgagctcaatatcagctattatttccacagcgcttaagttaaaaggagttaattattctatctcttccgcatgtgcaacaagtgctcattgtataggtcatgcggctgatctcatcaaaaatggccaacaagatattgtgattgctgggggtagtgatgatgagcattggagttcatcatgtttgtttgatgcaatgggagcgttatcctcaaactttaactcaaacccatcatcagcatctagaccatatgatactaatagagatggtttcgttatttcaggcggagcaggaatgataatacttgaagaagaagagcatgcaaaaaaaagaggagcaaagattctggcaaaactatcaggttattttgcaaattcagatggttacgatatggttgcgccatcaggtgaaggtgccatgagatgcatggaaggtgcaatgaaacagtctaaggtcaaaattgattatataaatactcatggaactagcactcctgttggagatatagctgagttaaatgcaattaaggaactgtttaatgctgacaaacctatgattagttctactaaatcgatgacaggtcattcccttggagcaacaggtgcacatgaggcaatatattccattatgatgattaatgagaattttgtagctccttcaattaacattgaatctgtttgtgatgaggcaaaagggattgatatagttactaatacaagggaagttcaattagaaaatattcttactaattcctttggctttggtggaactaatgcaagtcttataattagcaaatattaa

SEQ ID NO: 235149 - DNA, 1216 bp, Unknown
  Bacterial polypeptide expressing nucleotide sequence isolated from the Sargasso Sea
atgcgtgaagtagtaataacaggaataggcattatatctagtttaggaaataatatttctgaagtaacaaattctctgagaaatttaaaatcaggtatctcaaaaaatctaatcaataaagagcttggtctaagaagccacgtgtcaggctctattcaaaacttagaaccaaaagaacttatagataggaaactatatagattcatgggggacgctgcagcatatgcatatttgagcacagaagaagccataaaggatgcatctttaagtgattcagagttatctaatcatacgactggtttaattatgggctctggaggagcttctacagaagatcaaatagattcagctgatatcctgagaacaaaaggtttaaaaagaataggtccatacagagttaccaaagctatgggcagtactgtttcagcttgtcttgctacctccttcggtatcaaaggcataaattattctatttcatctgcttgtgctaccagtgctcactgtattggatcaggaatggagcaaattcaattaggcaagcaagatattgtgattgctggaggtggcgaagcagaacattggggtatgacaagtttattcgatgcgatgggagcattatctaccaagtacaatgaggaacctgaaaaggcctccagagcttatgataaagatagagatggatttgtgattgctggaggagcaggatcgatgatcttggaagaaaagcaacatgcaattgaaagaggggcaaaaatatatgctcaactaactggttatgctgcaacatcagatggactagatatggttagtccctctggagagggcggagagagatgtatgcaaattgcctgggaaatgagtggcaacaaaaatatagactatatcaatgctcatggcacaagtactccagccggagatatcacagagttaaatgcaattaaaaatgtttttggagataagattccttggataagttctacaaagtctctttcaggtcactcattaggtgctgcaggtgttcaagaagccatatatggcttaattatgatggatgaaggttttatagctggttcagcaaatattgaaaaccttgacgagggcgctgaaacttttccaatagtaagtgagaatgtctcgacagaattacaaagttttttgagcaatagttttggatttggtggaactaatgcaagtctaatattcgaaaaaatttaga

SEQ ID NO: 235150 - DNA, 1210 bp, Unknown
  Bacterial polypeptide expressing nucleotide sequence isolated from the Sargasso Sea
gatgaaaaatgtagtaataacaggtttgggaattaaatcttgtatcggaaacgaatacaattctgttctcaaaaaccttcaagagggtaaatctggaatcatattcaatgaaacatatgatgagatgaattttagaagttgtgtttcaggttctattaaaattgatttatctgagtatatcgataggaaattactaagatttatgggtgaatctgcaggatatgcttatctagcaacgcttgatgcattaaaaatggcaggagtcgataataattatcttgataatccaaggattggaatagtcgcaggatcaggaggagcatcaacaagaataatggttgaaagtagtgacattgcaagaaatagagggccaaaaagaattggtccttatggtgttaccaaaagcatgtcgagttcaatttcagcaatagttgcgactgctctaaaattaaaaggcatcaattattcgatatcttcagcttgcgcaaccagcgctcactgtataggtcacgcagccgatttaatcaaaaatggtcaacaggacatagtcattgctggtggaagtgatgatgagcactggagttcttcatgtttatttgatgcaatgggagcattgtcgtctaattttaacgcaaatccaacaatagcatcgagaccttatgattctaatagagatggttttgttatatctggtggagcaggaatgttaatcttggaagaagaggagcatgcaaaaaaaagaggagcaaatattcttgcaaagctttcaggatactttgcaaattcagatggctatgacatggtagcaccatctggcgaaggagcaataagatgcatggatggcgcaattaaggaaatcaaatcagaaatcgactatatcaatacccatggcacaagcactcctgttggagatgttgctgagcttaatgcaatcaaagaattatttggttcaaatgctccaatgataagttcaaccaaatcaatgacaggacattcactcggagcaacaggtgctcatgaagcaatatattcagttatgatgatcaatgaaaatttcattgcgccctcgattaatattgataatttgtgtgatgaagctcaaggtttggatattgttagagaaacaagacagtcagatattaaaaatatattaagtaattcttttgggtttggtggaacaaacgcaagtcttgttataagtaagtactag

SEQ ID NO: 235151 - DNA, 800 bp, Unknown
  Bacterial polypeptide expressing nucleotide sequence isolated from the Sargasso Sea
tagtactgcatctgctactcttgcaacgccatttaagataaaaggtgtgaattatactattagctctgcatgtgccaccagtggccactgcataggtaatgcaatggaaatgatacaatcaggtaaacaaaaaataatgtttgcaggtggtagtgacgaagttcattttgcaatgacagcaatgtttgatgctatgacggctttgtcatcaaaatataatgatacacctgaaacagcatcaagaccttacgacaaaagtcgagatggtttcgtaatatctggaggtggcggtgtacttgttttagaagagttagaatatgcaaaagctagaggggcgaaaatttatgctgaattaaccggatatggagcgacgtcagatggttatgatatggtagcaccatcgggagaaggtgcaataagatgtatgaaaatggccttaaaaacctcaagaaataaaattgattatttaaatacgcatggtacttcgacacctgttggtgacataactgaattaaaagccgtaggtgaagtattcaaaaacaatattcctaaaataagctctaccaaatctttgtcgggtcactcattaggtgccacatctgttcatgaggctgtctattgtttaattatgatgaaaaacaattttatatccgcctcagctaatattaatgatttagatgatgaggctaggaactttccaattgtaagaaaggtagaaaaagaaacattacaagctgtaatgtcaaatagttttggttttggtggaaccaatgcaactttagtttttgagaaaatataat

SEQ ID NO: 235152 - DNA, 989 bp, Unknown
  Bacterial polypeptide expressing nucleotide sequence isolated from the Sargasso Sea
tattaaagattcagatatagataactcatcatatgacccgaatagaataggtgtttccgttggttctggaataggtggattaaaaactatagaagaaaactctaatctacttaaagagaagggaccaaaacgaatttctccattttttgttcccggatctatcataaatatggtttctggttacatatccattaaaactggatttatgggaccaaatatatctattgccagtgcctgttcaagtgcaagccattctattggatatagttttagaaatattcaacatggtgatgcggatatgatgctaactggaggagcagaaatggcaacaactccattaggcttatctggtttcaactctgctaaggcattatcaacaagaaatgatgatcccacagcagctagtagaccctgggataaagatagagatggctttgtactaggtgagggtgctgcatgtttaatgctagaagagctgaatcatgcaaaaagtagaggtgcaaagatatatggagaaataattggatttggaatgagttcagatgcatttcatatgacagcaccacctgaagatggaaaaggagcatctttgtctatgtctagtgctctacttgatgcaaaacttgatgcaaaagatattgattatataaatgcgcatggaacatcaacaccagcaggagatctagcagagactatggccattaagaatgtttttaaagaatcttcgaatactttaatagtcagctcaacaaaatctatgacaggtcatctcttgggtgcagcaggagccatcgaagcaattttttctcttttggctataagagataatatttctccacctacaattaatcttgataatcctgataaactttgtgatctaaattactctgctaataatccttctgaaaaacgaatatctaaaagcatgtccaattcttttggttttggaggaactaatgctactttggtcttttctgacatagaataga

SEQ ID NO: 235153 - DNA, 766 bp, Unknown
  Bacterial polypeptide expressing nucleotide sequence isolated from the Sargasso Sea
aaattaaagggaataaactattcaatttcttcagcatgtgcaaccagtgctcattgcattggtcatgctgcagatttaattaaaagcggtcaacaagatgtcgttatagctggtggaagtgatgacgagcattggagctcatcttgcttatttgatgctatgggagcactttcatctaacttcaattcaactccaacgattgcatcaagaccatacgattcaaatagagatggatttgttatttcaggtggagctggaatgataattttagaagatgaggagcatgcaaagaaaagaggagcaaatattctagctaagctttctggatattttgcaaattctgatggctatgacatggtagctccctctggtgaaggtgcatctcgatgtatgcaaggagcgattgataattcaaaaataaaaatcgattacattaatactcatggtaccagtactcccgttggggatgtggcagaaataaatgcaataaagactctttttaattctgaaacaccaatgataagttcaactaaatcaatgacaggacactcacttggagctacaggtgctcatgaggccatatactcaattatgatgattaatgaaaactttattgcgccatctataaacattgaatcattatgtgatgaagctgtaggccttgatatagttaccgaaacaaggaatatatcaattaataatgttctcagtaattcatttggctttggtggaaccaatgcaagtctagtaattagtaggtattaat

SEQ ID NO: 235154 - DNA, 760 bp, Unknown
  Bacterial polypeptide expressing nucleotide sequence isolated from the Sargasso Sea
ggaataaattattcaatttcttcagcatgtgcaaccagtgctcattgcattggtcatgctgcagatttaataaaaagcggccaacaagatgtcgtcatagctggtggaagtgatgacgagcattggagctcatcttgcttatttgatgccatgggagcactttcatctaacttcaattcaactccaacgattgcgtcaagaccatatgattcaaatagagatggatttgttatttcaggtggagctggaatgataattttagaagatgaagagcatgcaaagaaaagaggcgcaaatattctagctaagctttctggatattttgcaaattctgatggatatgacatggtagctccttctggtgaaggtgcatctcgatgtatgcaaggagcaattgataattcaaaaataaaaatcgattacattaatactcacggtacaagtactcccgttggagatgtagcagaaataaatgcaatcaagactcttttcacctctgaacaaccaatgataagttcaactaaatcaatgacaggacactcacttggagctacaggtgctcatgaggcaatatattcaattatgatgattaacgaaaactttattgcgccatctataaacattgagtcattatgtgatgatgctgaaggccttgatattgttaccgaaacaaggaatatatcaatcaataatgttcttagtaattcgtttggctttggtggaaccaatgcaagtctagtaatcagtaggtatcaataaa

SEQ ID NO: 235155 - DNA, 829 bp, Unknown
  Bacterial polypeptide expressing nucleotide sequence isolated from the Sargasso Sea
accttttattgttccaagaacaatggcaagtaccgcttcagcaacacttgctgttccatttaaaattaaaggaacaaattatacaatgagctctgcatgcgcaacaagtggacactgtataggaaactctatggaacttatccaaatgggaaaacaagatatagtttttgcaggtggaagtgaggaaatacattgggcgatgacagccatgtttgatgcaatgacagcattatcttcaaaatataatgatactcctgaaaaagcatcaagggcttatgataaaactagagatggttttgtaattgctggaggtgcaggggttttagttcttgaggaatatgaacatgctaaagctcgaggagctaaaatatacgcagaattaactggttatggagcaacctcagatggatatgatatggtagcaccttctggtgaaggtgcagtaagatgtatgcaaatggctatagcaacttcaaaaaataaagtagattatataaatactcatggaacttctactccagttggagatattactgaattgaatgctgttaaagaagtttttggaaatgaaattccaaagattagctcaactaaatctttatcaggtcatccgctaggagctgcatcagtgcatgaagcaatatattgtttaattatgatgaaaaataattttataactgggtcagctaacataagtgaaatggatgaagaagctaaaagatttccaatagttgctaaaacagaaacagaggtaacattaaatactgtcatgtctaatagttttggttttggtggaacaaatgcaactctagtatttgagaaagtttaa

SEQ ID NO: 235156 - DNA, 1160 bp, Unknown
  Bacterial polypeptide expressing nucleotide sequence isolated from the Sargasso Sea
tcaagaagaagtacatcaatctttagtaaattcgaaatcaggaatttcttatgcaaaagaatataaagaacataatcttaaatgccatgttcacggaaaaccaaatataaaacttgaagatcatattgatcgaaaaacaattaggtttatgggttcaggctcagcttataattatatagcaatgaaagaggcaataaaagactctggattggaagaaagtgaagtaagtaattttaaaactgggatagtgatgggttctggtggaccctcaattgaaaacgttatcttagcagctgataaaactagagccaaaactccaaaattaatgggaccgtttattgttccaagaacaatggccagtacagcttcagctactcttgccgttccgtttaaaattaaaggtactaattacacaatgagttcggcttgttcaacaagtggacactgtattggaaactcgatggaactaattcaaatgggtaagcaagatattgtttttgcaggtggtagtgaagaggttcactgggcaatgactgcaatgtttgatgccatgactgctttaacatcgaaatataatgataccccagagaccgcatcaagagcttatgacaaaactagagatggttttgtaattgcaggtggtggtggggtgttagtgcttgaagaatacgaacatgctaaagcaagaggggctaaaatatacgcggaattaagtggttatggagcaacttcagatggatacgatatggtagctccatcaggagaaggggcggtcagatgtatgaagatggctatggcaacttctaaaaataaaattgattatattaatactcatggaacttctactccagttggagatatcacagagctaaatgcaattaaaaatacttttggagatgatattccaaaaattagttcaactaaatcactatcaggacatcctttaggagctgcatcagttcatgaagcgatctattgtttgattatgatgaaaaataatttcatagcaggttctgctaacattagtgaaatggatgaagaggctaaaaagtttcctatagttgctaaaaatgagacaggagcaactttaaatacagtgatgtctaatagttttggtttcggtggaactaatgctgctctaatttttgagaaagtataat

SEQ ID NO: 235157 - DNA, 868 bp, Unknown
  Bacterial polypeptide expressing nucleotide sequence isolated from the Sargasso Sea
atggattactgaaagaacaggcataaaggaaagaagaattgcagatgattctgaaacaacttcatcacttggaatcgaagcagcaaaaaaagcaattcaaaatgccggaatctcatctaaagatattgatttaatagttgttgctaccacaacacctgataacacatttcctgctacagcaacatcaatacaatcaggtttaggtattaaaaaaggctatgcttatgatgtgcaggccgtatgctcgggatttgtatatgcgcttgaattagcagataatgcaataagattaggtaaagctgattatgcgcttgtaataggatcagaaacattcagtagaattattgattggaatgacagatcaacttgcgtactttttggagatggctctggtgctgttattttaaaatcaacagatgaaggttcttcaagctcaattttaagcaatcacctttattctgatggtgattataaggaaatgctctttgttgatggcggaccttctacctcaaataatgttggtctcctaagaatggatggtggaggtgtttttaagcatgctgttaaaaatatctcatcagcaataattgatgcattagaggctaatgaaatgacaatcgaagatgttgattggttcgtacctcatcaagccaattcaagaattttggaagctgtagcaaaaaagataaatatcaataaagaaaaaataattgttacagttgataaacatgcaaatacatctgctgcttcaattcctttggctttaaatgaagccaacaagaacaataaaattaagaaaggtgatatagttttgttggcggcaatgggtggtggttttacatggggtgcaagtttaattagatggtag

SEQ ID NO: 235158 - DNA, 550 bp, Unknown
  Bacterial polypeptide expressing nucleotide sequence isolated from the Sargasso Sea
aatgtcaggcgaaaaattttttcgatcaaaagttataggggtaggcggttatttaccagataaggttgtaactaatgatgagctttctaagattgtagaaacaagtgatgaatggattaaggaaagaactggaatacaagagagaagagttgctgatgaatctgaaactacttcatccctaggaatagaagcagctaaaaatgctataaaaaatgcaggaatttcttcgcaagacatagatttgataattttagctactgctactcccgataacacctttccagcaacagcaacatcaattcaatctggattgggaataaaaaaaggatatgcttatgatgtgcaagcagtatgttcaggatttgtatatgcccttgaacttgcagataatgcaataaggcttggaaagtctaattacgcattagtaattggatcagagacatttagtagaattctcgactggaatgatagatcaacatgcgttctatttggagatggttcaggagctgtagttttaaagtctactaatgataattcttctagccaaatt

SEQ ID NO: 235159 - DNA, 930 bp, Unknown
  Bacterial polypeptide expressing nucleotide sequence isolated from the Sargasso Sea
atcaaaaaattagtcaaaagggtgatacaagcaatgaatggatacaatctagaactggtatttctgagagaagaatctcgagcgtagaagataatgttaccgagatgggttataaggctgctctaactgctatagaaatggctaattgggatattaaaacgattgatttgattgttttagctacttctactccgcatgatttatttggatcagccccctctattcaagctaaattaggtgcagctaatgctgtagctttcgatttaactgcagcttgtagtggctttttatttgccttaataacagcttcacaatttttaaaagggggtagttttaaaagggctattgttattggagcagatcaattatcaagttttgttgattggaatgatagaagaagttgtattctctttggagatggtgccggtgcattagcaattgaagccacaaatgaatttgataattttataggttttgatatgagaactgatggggggaggggttcttttcttaatcttccatcaaaaaataataaggattcaatagtcgatgaaattgactttttaagtggaggtttttctccaattcagatgaatggtcaggaagtttataaattcgcagttaaagaagtccccctaattcttcaaaagttgttgaaaaaaatgaattacaattctaatcaagttgattggctcttgttgcatcaagctaatcaaagaatattggattctgtaggagaaaggttaaaaattcccagagaaaagattcttagcaatttagaaaaatatggcaatacgtcagcagcaacaattccactaatgatggatgaggctgtaagagattatagaattaaacaaaatgatattattgctacaagtggtttcggtgctgggctaagttggggtgcagccctaattaaatggggttaaa

SEQ ID NO: 235160 - DNA, 625 bp, Unknown
  Bacterial polypeptide expressing nucleotide sequence isolated from the Sargasso Sea
tatgaataatattttaattactggtgtgggctcatatttacctaaaaaaatcattcttaatgatagccttccttctaatctcaatacaagtgatgagtggattagaaaaagaactggaataacacaacggcatattgtttctgaaaatgaattaacatctactatggcaatagaagcttcgaaaaaagctttgattaatgctaatttaaacagtaaggaaatagatttagttgtacttgctactacaactccagataatacatttcctgcaacagccgttaaggtgcagtcagaattaaatttgaaaataggtcctgcatttgatattcaagcggtttgtgctgggtttatttatgctttaaaagtggcatcttcgatattacaaactactaacttaaataaggcgattgttattggatctgaatctttttctaaaattttggattggggtgatagatctacttctgttctttttggtgatggggctggagctgttattttggaaaagtataaagattataataattgggggttattggcttcaaatttttatagtgatggaaatgttagtgatattttatatacagataatggtccaggcacagatcaaaagttgaaagtagaa

SEQ ID NO: 235161 - DNA, 757 bp, Unknown
  Bacterial polypeptide expressing nucleotide sequence isolated from the Sargasso Sea
catgaaatcaaaaatcaaatcaattggaagttatacaccgaacaatatagtgaccaataaagatcttgaaaaaaaggttgatacaactgatgaatggatcgtatctagaacaggaatcaaagaaagaccaatagccgatgattcacaagcgacatctgatttagcatttgaagctgccaagattgcaatagagagagccgatatcgacaagaatgagattgatcttattattgtcggtacatgcacgcctgatgttgcaacaccaaatgttggtacgattgttcaaaaacgactagaactcaaaaattttcctgccttcagcattgaggcggcttgtagtggtttcatttatgctctgaatattgcagataagttcataaaatcaggtgagtcaaaatgtgcattggtcattggtgctgagacactatctaggattaccaactgggacgacagaaatacatgtgtcctttttgcagatggagcaggggccgccatcttaaagccatcagatgacagagggattgtattttccgagcttggtgccaacggtgaatacgctgagcttctccacgtaccctatggaacgtctagaaagccggagacacccaatgcagatgattacaaattgaagatgagcggaaacgaagtatttaaggttgctgtaaaaacgctagaagaaattgctattgatgcactggttaaagcaaatctgaaagcaaagatatcgattggttcataccacatcaggccaacatga

SEQ ID NO: 235162 - DNA, 867 bp, Unknown
  Bacterial polypeptide expressing nucleotide sequence isolated from the Sargasso Sea
tttggaaggaatagattttaatcagattggagtatcattcaaggggagcggaagttatgtacctgatcaaatactaaccaatcaaaaaattagtcaaaaggttgatacaagtaatgaatggataaaatctagaactggcatttctgagagaagaatatctagcttaggagataatgtgaatgagatgggttataaagcggctctagctgctttagaaatggctaactgggatattaaaacgattgatttgattgttttagctacttctactccgcatgatttatttggatcagcgccgtccattcaagctaaattaggggcagctaatgctgtagctttcgatttaactgcagcatgtagtggtttcttatttgccttaattacagcctcacaatttttaaaaggtggtagttttaaaagggccattgttataggagcagatcaactatcaagctttgtcgattggaatgatagaagaagttgtattctctttggagatggtgcaggtgcattagcaattgaagccactaatcaatttgataatttaattggttttgatatgagaactgacggagaaagaggttcttttcttaatcttccatcaaaaaataataaagatttaataattgataacattgattttttaaatggaactttttctccaattcagatgaatggtcaggaagtgtataaatttgcagttagagaagttccgataattcttgaaaagttgtttaataaaacacactatacttccgatgaagttgattggcttgtactgcatcaagctaatcaaaggatattggactctgtaggagataggttgaaaatcccaagagaaaaaattcttagcaatttagaaaaata

SEQ ID NO: 235163 - DNA, 684 bp, Unknown
  Bacterial polypeptide expressing nucleotide sequence isolated from the Sargasso Sea
tttgaaatcagcaataacaggttggggtaaatgcacgcccgataacattatgactaacgatgatttatcaaaatttgttgatacttctgatgagtggattcaacaaagaacaggtgtaaaagaacgaagatttagccatgtaaacacatcagatatggctgaaattgctggtaaacatgcaatagcctgtgcaggtttaaatccagaagatattgatgtcgtaatcttggctacatgtactccagatagcattgttccctctgcagcagctcatgttcaaaaaaaacttggtgctgtaaatgcttctgtttatgacgtaaatgctgcttgtgcaggttttctgtatgcacttgagcaaggaaaagcattcgttgaaagtaatctttataaaagagctttggtaataggggcagagcatattacttggttgcttgattggtctgatagaaataccgcagtgctttttggtgatggtgcaggtgcagtagttattgaagaaagtaaaaatgaatcagatggtgaaatatattctttctcaaatggcttaagttctgacaatttagaaatcttagaaattcctaattttggttcagcaatggataggtttaatcctgacgaagcagctagagtacgttggacttttgatggacaggaaatatttaaatctggtgttagagcaatggc

SEQ ID NO: 235164 - DNA, 742 bp, Unknown
  Bacterial polypeptide expressing nucleotide sequence isolated from the Sargasso Sea
gtgcataacatcggtcatgctgcacgtatcattgcatacggcgatgcggacgcgatggttgcgggtggtgcagaaaaagccagtacgccgctgggcgttggtggttttggcgcggcacgtgcgctgtctacgcgtaatgataacccgcaagcggcaagccgtccgtgggacaaagaacgtgatggctttgtgctgggcgacggcgcaggcatggttgtactggaagagtacgaacatgcgaaagcgcgcggtgcaaaaatctatgctgaagtcgttggcttcggtatgagcagtgatgcttaccacatgacgtcaccaccggaaaacggtgcaggcgctgcgctggcaatggtcaacgcgctgcgtgatgcggctatcgaagcgggtcagattggctatgtcaacgcgcatggtacgtctacgcctgcaggcgataaagcagaaacccaggcagtgaaatctgtctttggtgatgcggcaagccgtgtaatggtaagctccacgaaatccatgaccggacacctgttgggtgcggcgggcgcggtagagtctattttctctatcctggcgctgcgcgatcaggctattccgccaaccatcaacctggataacccggatgaaggttgtgatctggacttcgtacctcacgaagcgcgtcaggttagtggtctggagtatgcactgtgtaactcctttggcttcggtggtaccaacggctctttgatctttaaaaagatttaag

SEQ ID NO: 235165 - DNA, 963 bp, Unknown
  Bacterial polypeptide expressing nucleotide sequence isolated from the Sargasso Sea
ttcacaagtataatgcgcatcgtgtaggtgtagctattggttcaggtattggtggtttagaacaaattgaacaaaaccatttgaaactgacaaatagcggtcctaagcgcgtatcgccattttttgtaccttcaaccattaccaacatgatctcaggctttttgtctatcatggaagggttgaaaggaccgaatttaaacgttgtgactgcttgtacaacaggcgttcataacattggtattgccgcaagaacaattgcttatggcgatgctgatgccatgttggccggaggcgcagaagcgtctattactccgctaggcatggctggttttgccgcagcacgtgcgttgtcatctcgcaacgacaacccacaagcagcaagccgcccatgggataaagaccgcgatggttttgtcatgggtgagggcgctggcgtggtaatgctagaagaatacgaagctgcaaaagcgcgtggcgcgaccatttatgcagaactggttggttttggcatgagcggcgacgcataccacatgacttctccacctgaagatggagaaggtgcggcagcgtctatgcaaaacgcgataaatgatgcgaagttggatgcaagcgaaatcggctatgttaacgcacatggtacgtctacgcctgcaggtgacattgcggaagtggcagcagtaaaacgcgtgttcaatgaccatgctcacaagctacttgttagctctaccaagtcaatgacaggccatttgctaggggccgccggttcagttgaggcaattttcactattttggcactgcgtgacaaaatggcgccgccaaccattaacttggatgaaccaggtgaaggctgcgacttagactttgttgcacacaaagcgaaggcattcagtgaagactacgcactgtgtaactcatttgggtttggcggtacgaacggctcattgattttcaagcgtatctaat

SEQ ID NO: 235166 - DNA, 823 bp, Unknown
  Bacterial polypeptide expressing nucleotide sequence isolated from the Sargasso Sea
atagagggcagtggtcgtcatcttcctgaaaaaatattaacaaatcatgatctagaaaagctcgttgatacaagtgatgaatggatcaaaacaaggactggtgtagaaagaaggcatatagcatctcaagagcaagccacatctgatctcggtattgaggcagcaaaaaaagcaatcatagacgctgatatatcaaaagaggatattgatcttattgttttaggaaccacaacacctgactatgtttttccaaacacagcaacattaatacaagaaggtttaggtatacacgggtgtcctgctttcagtctagaggcggcatgctcgggttttgtttacgcactctcaactgctgataaattcataagatcaggaagctccaagtgcgcattggttataggggcggaagtcatgaccaaactaattgattgggaagacagatctacttgtgttttatttggtgatggagcgggcgcactgatattaaagccatccgaagagcaaggtataattgattgtaagttgggtgctgatggaaaatataaagatttactctggtatcctgccggcgtatccaaaaacttcgataaacttggtggaaatcaaactaatcttgagatgagtggaaatgatgtttttaaagttgccgtaaaaacacttggaaatgtagctgtagatactctgaataaaaacaatatagataaagatgagcttgattggttggtccctcatcaagcaaatctcagaattattcaagcaacagcaaaaaggcttgaattacccatggataaagtcattctcacagtccaagatcacggaaaca

SEQ ID NO: 235167 - DNA, 892 bp, Unknown
  Bacterial polypeptide expressing nucleotide sequence isolated from the Sargasso Sea
aatcacaaatggatacaatcaagaagtggaatcaatactcgccacataaaaaatcaagttgaaaaaacaagtgacttagccgtaaacgctacaataaatgcactaaaatcaagcaaaataaacaaagatcaaattgattttattattgttgcaacagtcacagccgatcatactgggtttccatcaacggcttgtattgtacaaaaaaaactaaatttaaaacgttccattccatgctttgatattagcgccgcatgcagtggatttgtatatgcactatccattggctactgtaagattcttgcagatcaaggtcaatacggccttattattggcgcagaatcattaagtgatattctggattggtcggatagaaaaacctgcattttatttggtgatggcgctggagctgccattataggccctgtagaatctggtggattcaatacatttattgaaggcgccaatggcgcccaaagcgaaattctaaaagttgaaaaaaaatcaaattcaaaaaacattaacaatgaaaatcaagcatttcctaaagacatcctaacaatggacggcaaatccgtttttaaacaaggaatacaatcaatagaagactgcattaacgaattaatatcaacaaaaaaaatagatatcaatgacataagatactttgttcttcaccaagcaaatatacgcataatagagtccattgccaataaattcaaactcccaatggaacgatttctaacaaatattgaaaatgtaggaaacacatccgccgcgtcaattcccatcgtcctttcagagaatattaaggccaatacatttaaaaaaggagacaacattttattaattggatttggtgcaggctttacatggtccagcattctattacaat

SEQ ID NO: 235168 - DNA, 967 bp, Unknown
  Bacterial polypeptide expressing nucleotide sequence isolated from the Sargasso Sea
agtctatctggataccgatgacgagtggattaccactaggaccggtgttaaacagagaagaatagcagaagcaccgctaagtgaaattggaaccatagccgcaaaacatgctcttgccgcagctgataaggatcccaatgaaattgatgcagtaatgatggccacttgtacgccagaatttttaatccccagtactgcatctagagtgcaaatgaatattggtaacaacaccgctgccgcttttgattttaattcagcatgttcaggttttgtttatggcctaacaactgcttactcaatgattcactcaggaatatttaacaatgttctacttgttggcggagagaaggttagctatttcctcgattggactgctcgcgatactgctgttctctttggcgatggagcaggggcagtattaatagaaaaaacgaatacagattctaagctgcattcttctaaaatgacttgtgatccattcttaggagaagcattgatgctgaaaaactttggaacaagtatggagatcaaggatccaaaggaaggttatttctttggcataagttttgaaggacaagagatctttaaaaatgcagtcaaaaccatggcaagactagcagaagaagccttggaggaatctggtcttagtgttgatgacattgatctttgtattcctcaccaagcaaatcgaaggattcttgaagcaacggccaaaagatgtaattttccaatggaaaaaatgatcattaatttagatcagtatggaaatacatcagctggttcaataccgatcgctctcacagaagctctcgatgaaggtaaagttaagcctaactccaaaatactctttcttgcatttggtggtgggctcactggtgccgcagcagtcattgattggggagggcgttcacatgccctaaagacatcaaatgagcaactgccagatagcggtaaaaccgctttggaa

SEQ ID NO: 235169 - DNA, 727 bp, Unknown
  Bacterial polypeptide expressing nucleotide sequence isolated from the Sargasso Sea
atttggatcagcgccgtccattcaagctaaattaggggcagctaatgctgttgctttcgatttaactgcagcctgtagtgggttcttatttgccctaattacagcctcacaatttttaaaaggggggagctttaaaagggctattgttattggggcagatcaactatcaagctttgttgattggaatgatagaagtagttgtattctttttggagatggtgcaggtgcattagcaattgaagccaataatgaatttaataatttgattggttttgatatgagaactgacggagaaaggggttgttttctaaatctgccatcaaaaaataataaggattcaataattgataatattgattttttaagtggagatttttctccaattcagatgaatggccaggaagtgtataaatttgcagtaagagaagttccgctaatacttgaaaagttgtttaaaaaaatgaattacacttccgatgaagttgattggcttgtattgcatcaagctaatcaaaggatattggattctgtaggagataggttaaaaattcctggagaaaaaattcttagcaatttagaaaaatatggtaatacttctgcagcaacaattccactcgtgatggatgaggctattagaaataatataattaaacaaaatgatattattgctacgagtggttttggtgctgggttaagttggggtgcagccctcattaaatggggttaa

SEQ ID NO: 235170 - DNA, 796 bp, Unknown
  Bacterial polypeptide expressing nucleotide sequence isolated from the Sargasso Sea
catgggaattgaaatcacaggctgggggaaatgcactccatctgctgttctaacaaatagtgatcttgagtctattctggatacagatgatgagtggattactactaggacaggcgtcaaacaaagaagaatagcagaagccccgctaagtgaaattggaactgtggctgcaaaacatgctctagcagcagctgataaggatcccaatgaaattgatgcggtcatgatggcgacatgtacaccggaatttcttattcctagcactgcctctagagtgcaaatgaatattggaaataacactgctgcggctttcgattttaattcagcttgtacaggttttgtttatggcctaacgactgcttactcaatgattcatactggaatatttaataatgtcctacttgtaggtggagaaaaagtcagttatttccttgattggactgcgagagatactgctgtactttttggagatggcgcaggagctgtattgattgagagaacggattcagaatcaaaacttcattcttcaaaaatgacctgtgatccatttctgggtgatgccttgatgcttaaaaactttggtaccagcatggaacttaaagatccaaaggaaggatatttctttgggataagctttgaagggcaagagatcttcaaaaatgctgttaaaaccatggcaaggcttgcagaagaagcattggaggaagccggtctcagtgttgatgatattgatctgtgcattcctcatcaggctaatctaagaattctagaagccactgctaagagatgtagtttt

SEQ ID NO: 235171 - DNA, 793 bp, Unknown
  Bacterial polypeptide expressing nucleotide sequence isolated from the Sargasso Sea
atgggaattgaaataacaggctggggaaaatgcacgccatctgctgtgctcacaaatagtgatcttgagactattctggataccgatgatgagtggattacaactaggacaggtgtcaaacagagaagaatagcagaagccccgctaagtgcaattggaactgtggctgcaaagcatgcccttgcctcagctgataaggatccaaaagaaattgatgcggtcatgatggcgacatgtacaccggaatttcttatacctagcactgcctctagagtacaaatgaatattggaaataacactgctgcggctttcgactttaattcagcttgtacaggttttgtttatggcctaacgactgcttactcaatgattgatactggaatatttaataatgttctgcttgtaggtggagaaaaagtcagttatttccttgattggactgcgagagatactgctgtactttttggagatggtgcaggagctgtattgattgagagaacggattcagaatcaaaacttcattcttcaaaaatgacctgtgatccatttctgggtgatgccttgatgcttaaaaactttggtaccagcatggaacttaaagatccaaaggaaggatatttctttgggataagctttgaagggcaagagatcttcaaaaatgctgttaaaaccatggcaaggcttgcagaagaagcattggaggaagccggtctcagcgttgatgatattgatctgtgcattcctcatcaggctaatctaagaattctagaagccactgctaagagatgtagtt

SEQ ID NO: 235172 - DNA, 694 bp, Unknown
  Bacterial polypeptide expressing nucleotide sequence isolated from the Sargasso Sea
gatgaggcaggtgggcgcttttgatttagcggctgcgtgctcggggtttaattatggtttaacgaccgctgttcaatatataaaaagtggtttagccaaacatattttagtggttgcgaccgattgtttgtcacgttatgttgatcaagatgatcgctcgattgctgtgttatttggagatggggcgggcgctgctgtgcttggtcaggttgatgaggggtatgggattatttcctctcagctatgtgcggatgggtcgcatgcagatattttaaaaattgagggtggtggatcgcgaaacagattttctgaagatgtattatcgtcacaatcacatttaattcatatggatgggaaatctgtttttaaggtggcggttaattgcatcatgacacaaattcaaaatgatttagaacagaatcagctcaataaagatgatattgattggtatatttttcatcaagctaattttcgtattattcattctgtttgtgagaagtttggtattccagaagaaaaaacaatcaataccttacataaatatggaaatacatctgcagcgtcaatccctatagttttgacagaagcgcagacagagaaaaaatttaaaaaaggacagctcatttataccattggttttggggccgggtttacgtgggcatctaatattatgaaatggagtaaagactcatga

SEQ ID NO: 235173 - DNA, 568 bp, Unknown
  Bacterial polypeptide expressing nucleotide sequence isolated from the Sargasso Sea
acaaaatatgcactggttatcggcgccgaaaaactttctagtatcattaattggaaggataggtccacctgtgtcttattcggagatggtgcaggatctgtaattatttctagggctgacgcaccaggaatacttgattttaaattgtctgcggaaggcagcttcacggaaatgcttaatgcgcctggctatattcatcagggctcaataataggagatccttttataaaaatggacggaaaaggggtttttaaaaaagctgttgacgttctttattatgatgctctgagtgttttgaatgaattaaacctaagtatatctgatatagattggtacgttccccatcaggcaaatatcagaattattcgcatggttggaaaaaaacttgggtttagtccaaatcaaattatcgaaacagttaacaaacatgcaaatacgtcagcggcgtcagttcctctcgcacttgattctgcaatttctgatgggagaatcaagtctggggacagggttttgcttcaaggagttggtggcgggttcacctggggttcactggtcttgattgtttaaa

SEQ ID NO: 235174 - DNA, 621 bp, Unknown
  Bacterial polypeptide expressing nucleotide sequence isolated from the Sargasso Sea
tgcgtactcacttgtaacggcgggtcaattttttgcgacggggtcaagcaatcttgcgatggttatcggagtcgatacgaattcacgtgttgttgacccgaatgacataaaaacctggcctctctttggcgatggtgctggtgcggttcttttagaaagagtagaagaaaatcaacaaaatgccggtttgctagcgtggtcacttggttcggatggccgtggatctaatttgcttgtctgtcccatgagtgggactcggcagccagtgactgtagaaggtgtcacggctggcgaacagtacatgaaaatggatggacgggcggtatttaaatgggcaattcgtcttgttgaagagaacgtccagcaagtagttcatcactctggggtgccgatggagtcaattgacctctttattctgcatcaggcaaacctgcggattattgatggcatccggtcatcactcggcttggatgaagaaaagtttctcgtcaatctcgaccgttatggaaatacatcaagcggatctattccccttgctcttgatgaagcctggcgtgctggacgaataggccctggcagtacggtgctgatttgtggttttggtggtggtctggcttgggg

SEQ ID NO: 235175 - DNA, 616 bp, Unknown
  Bacterial polypeptide expressing nucleotide sequence isolated from the Sargasso Sea
atttttaaaagggggtagtttcaaaagggctattgttattggagcagatcaattatcaagttttgttgattggaatgatagaagaagttgtatcctctttggagatggtgccggtgcgttagcaattgaagccacaaatgaatttgataattttataggttttgatatgcgaactgatggggaaaggggttcttttcttaatcttccattaaaaaagaataaggattcaatagttgatgaaattgactttttaagtggaggtttttctccaattcagatgaatggtcaggaagtttataaattcgcagttaaagaagttcccctaattcttgaaaagttgttgaaaaaaatgagatataagtctgatcaagttgattggctcttactgcatcaagctaatcaaagaatattggattctgtaggagaaaggttaaaaattcccagagaaaagattcttagtaatttagaaaaatatggcaatacgtcagccgcaacaattccactaatgatggatgaggctgtaagagattatagaattaaacaaaatgatattattgctacaagtggtttcggtgctgggttaagttggggagcagccctaattaaatggggttaa

SEQ ID NO: 235176 - DNA, 511 bp, Unknown
  Bacterial polypeptide expressing nucleotide sequence isolated from the Sargasso Sea
cgcagcatggtgattttatttggtgatgccgctggagctgttattttagaagcgtctgagcaaccaggtattttatccactcatattcatgctgacggtaaacactccgaattattgtatgtcgacaatcctatacggggtgttgaagcttctgtgcatacgtcctggggctcgatgaaaggcaacgaagtctttaaggttgcggtcactcgtttatctgaagtggtcgagcaaactctggcggctaatcagatggataaatcgcaaattgactggttagtgccacatcaggccaatctgcgtattatctcggcagtagcccgtaaactggagatgtcgatggatcaggtagtcattaacctcgaccgttatggcaacacctcagctgcaacagtacctacagctttagatgaagctgtgcgtgatggccgtatccagcgaggacaaactatattgcttgaagcctttggcagtggttttgcctgggcttcggctttaatacgttattaac

SEQ ID NO: 235177 - DNA, 659 bp, Unknown
  Bacterial polypeptide expressing nucleotide sequence isolated from the Sargasso Sea
tctggaagcagcctgttccgggtttctttacgcgttggacgttgccgatggaatgctcagctcgggacgttacgaatgcgccttggttgtgggtgcggagaaactttcaagcattatggattgggaagaccgtacgacttgcgtcctctttggcgacggagcaggggcggcggttctgacaaaagaaggcgagggggctgaaatgattggcttccagtgcggagctgatggctccaatccctctcttttgcatcaaccggccggaggctcaatgcagcccgcatctcaagagaccgtagatagcagggggcatttcctcaagatgaacgggcgggagatcttcaagtcagccgtgcgggttatggaacgcgctgcgattgagttgcttgagaaacacggattcgacaagaacgaagtcgaccatgttattcctcatcaagcaaatgctagaattgtcgagagtttgtcccagagacttgaaatccctttggataaattttactgcaatctgtacaagttcggaaacacctccgccgcatccattccgcttgccttggatgaggcatacaaatccgaaacctttaagaaaggggatcttggcttacttgtcgccttcggtgcaggcttgacttggtcagcgacccttgttcgattctagt

SEQ ID NO: 235178 - DNA, 832 bp, Unknown
  Bacterial polypeptide expressing nucleotide sequence isolated from the Sargasso Sea
ggatttagcgacggaggctgctaaaagagcattggataatacaaaattaaaatctaaagatattgatttaatcatagttggaactactactccagataacacctttcctgctacagctgcaaaagtccaaaaaaatttagattcagatgctatttcatttgatattcaagctgtttgtgctggttttgtttatgctttatctgttggtgtttcaatgttaaaggatggctatggtagtaagtgtttaataataggtgctgacagtatgtcaaggatcttggattggcaagatagaagtacttctgtattgtttggtgatggagctggagctataattttagaaaaatttcaaatcaaggaaaacaatcctcttgattggggtgttttgtctaatgttatttatacagaaggtaaacattatgatttgctttttacagatggtggagtgtcactcaacaagtcaactggttacataagaatgcatggaaaagaagtttttaagcatgcagttgaaaaactatctaattcctttattgatgctctaaagaaaactaattataagatagaagatgttgattggcttattccgcatcaagcgaatcaaagaattataaatgcagttgctgaaaagttaggttttagtaaaactaaagtagtttcaacagtttcaaagcatggcaacacttcagcggcttcgatacccatagctttagattacgctttaaagaaaaatatgattaaaaatggtgaaatattgggttttcaagctattggaggtggtttaagttggggatcgagtataattaaattcgggaaacctaaaaatttatta

SEQ ID NO: 235179 - DNA, 547 bp, Unknown
  Bacterial polypeptide expressing nucleotide sequence isolated from the Sargasso Sea
tatgaccaggcagtctgttgtcattggatgcgggagttatttgcctgatcgaattgtcacaaatgaagagttggctttcggggttgatacttcggatgaatggataagaaagcgcaccggaatccgtgaacggcgtatcgcagcagataaacaaaaaacttccgatttagcaattaacgcagcccaagaggcgctaaaagcggctgggattgaatctaacgatattgatttaattgtcctggcaaccacaactccggatgagacatttcctgcaacagcaacgcgtgttcaggctgctttagggatgactagaggagcagcatttgacgtgcaagctgtttgtactggctttatttacgctttaaatgtagcggataattttattaggttaggccaagctgacacggttttggtgattggcgcagaaaccttttcacgcatacttgactgggaagataggacaacttgtgttttgtttggtgacggagccggcgcggtcgtcttgcagtccttggaacaagataacgaacgagagatgcgcgggatt

SEQ ID NO: 235180 - DNA, 700 bp, Unknown
  Bacterial polypeptide expressing nucleotide sequence isolated from the Sargasso Sea
atcgattgatcttctaataattgcaactacaactcccgatgaccaggttccagctacatcaagcaaggttcagcatgagctaggattgtcatgcggggccatggacataaatgcggcctgcagtgggtttgtatattccttgattaccggatgtggcttccttcaagcaggatgcaatagaattctagtcatcgggtcagagactcttagcggtattaccgattgggaagaccgctctacggctattctctttggcgacggggctggagcaatagtcctagaatcttcgagtggcggaggcaagctactcggatgggacctaagctcctctggagaactacgcgatatccttcatgctcctattggagggaagatatacatggagggtcgagaggtgttccgtaaagccgtcacagctatgactgaatcaggaaaaaaagctatagccaattccggaatttcaccggatgaaatatctctagtgattccccatcaagcgaatatcagaatcatcgaaacctcaatgaagaaacttggtatcccttttgaaagagccgtgtgggtaggtgataaaactgcgaacacgtcatcagcatctatccccatcgcactcggacacgcattagataataatcaaattgcagaaaacgatttgatcctcctagtaggatttggagcgggaatgactgcagctggtgct

SEQ ID NO: 235181 - DNA, 809 bp, Unknown
  Bacterial polypeptide expressing nucleotide sequence isolated from the Sargasso Sea
tctgaaatcgacaataaccggttggggtaaatgtactcctgacaacatcatgacaaatgaagaactatctaaattcgtcgatacttcagatgaatggatccagcaacgtacaggcataaaggaaagaagatttagccatgtaaacacttcggatatggccgctgttgctggaaaacatgccattgcctgtgcaggattaaatcctgaagacattgatgtagttattttagctacatgcactccggacagtatcgtgccgtccgcaggtgctcatgtacaaaaaaaaattggcgcagtaaatgcatctgtttatgatgttaacgctgcatgcgcaggatttgtctatgcattagaacaaggtaaagcttttgtcgaaagtggactccacaaaaaagcattaataattggtgcagagcatattacatggttgcttgattggtcagatagaaatactgcagtactttttggagatggggctggtgcagttgtactcgaaagaagtaatgattattcagatggagagatctattcatttgagaatggtttaagctcagaaaatttagaaatacttgaaattccaaatatgggctctgcgatggataggtttgaaccagatgaagcagcaaaagtaagatggacttttgatggccaagaaatttttaaatctggtgttagagctatggcaaaagcctctgctgcagctatagaaaaatctggacttaaaaaagaagatattgatatttttatacctcatcaagcaaatttgagaattgttgaagctttagaaaaaaaacttggtcttccaaatg

SEQ ID NO: 235182 - DNA, 855 bp, Unknown
  Bacterial polypeptide expressing nucleotide sequence isolated from the Sargasso Sea
cagatagcattgttccctctgcagctgctcatgttcaaaaaaaacttggtgctgtaaatgcttctgtctatgacgtaaatgctgcttgtgcaggttttctctacgcacttgagcaaggaaaagcattcgttgaaagtaatctatataaaagagctttggtaataggggcagagcatattacttggttgcttgattggtctgatagaaataccgcagtgctttttggtgatggtgcaggtgcagtggttattgaagaaagtaaaaatgaatcagatggagaaatatattctttctcaaatggcttaagttcggacaatttagaaatcttagaaattcctaattttggttcagcaatggataggtttaatcctgacgaagcagctaaagtacgttggacttttgatggacaggaaatatttaaatctggtgttagagcaatggcacaagcatcagcagaagctatagaaaaatcagggttgtcaaaagaagatgtagacatttttattccacatcaagcaaatattaggatagttgaagcactcgaaaaaaaacttggacttcctaatgcaactactattaaaaaagttcatcgatacggaaatacttctgcagcgtctataccaacagcatttgtagatgctcttgaagaaggtgagataaaaggtggggaaattgcagtctttacagctgtgggagctggtcttgcatggggagcttgtgcggttcgattaggagatcgtgtaactccaataaacaaatcagatgcaaaacttccagattttgatggaactgcaaccgacacaattaaaagagcaattgagtatcaagttccaaacaaattagacaaaatatgaa

SEQ ID NO: 235183 - DNA, 786 bp, Unknown
  Bacterial polypeptide expressing nucleotide sequence isolated from the Sargasso Sea
cctctgtagatttggcttataacgcagctatagatgccattaaaaaatcaggtataaataaaaatgatattggtgcaatttttttagctacatgtactccagagagaaaatttccaagtacagccgtattattgcaaaataagctagatattaaaggtgccttttcttttgatattaatgctgcatgtacaggctttgtgtatgcattagatgttgcaaaaaaatatattgaaactggacaagtaaagtatgcccttgttgtgggaacagaaaaaattacttcactactagattggaccgatagaaatacttgtgtactttttggcgacggctctggagcaatgatagtaggagcatcagaaaaacctggtattatttcaagcactattgggtcagatggctcttataaggatctattaacagttaatacagatctagaatatattgaaatgaaggggagcgatgtgtttaaaaccgctgttaatactttagggaagcttgcaaaacatactcttgaaaaaaacaatgtaggcaaagatgaattagattggcttgtgcctcatcaggctaatgaaagaataattttagctattgctaaaaaaattaatctacccagagaaaagataatcataactgtaagtaaacatggtaatacttctgctgcatctatacccttagctttcgatgaagctaactccaagggaatatttaaaaatggcgatatgattatgttagaggcttttggagccggtttcacatgggaatctgttctatttagatattgaa

SEQ ID NO: 235184 - DNA, 674 bp, Unknown
  Bacterial polypeptide expressing nucleotide sequence isolated from the Sargasso Sea
catgaaatcaaaaatcacatcaattggaagttatacaccaaacaatatagtgaccaataaagatcttgaaaaaaaggttgatacaactgatgaatggattgtatctagaacaggaatcaaagaaaggccaatagccgatgattcacaagcgacatctgatttagcatttgaagctgccaagattgcaatagagagagccgatatcgacaagaatgagattgatcttattattgtaggtacatgcacgcctgatgttgcaacaccaaatgttggtacgattgttcaaaaaagactagaactcaaaaattttcctgccttcagtatcgaggcggcttgtagcggtttcatttatgctcttaatattgcagataagttcataaaatcaggtgagtcaaaatgtgcattggttattggtgctgagacactatctaggattacaaactgggatgacagaaatacatgtgtcctttttgcagatggagcgggggccgccatcttaaagccatcagatgacagagggattgtattttctgagcttggtgccaatggtgaatacgcagagcttctccacgtaccctatggaacatctagaaagccggagacacccaatgcagatgactacaaattgaagatgagcggaaatgaagtatttaaggttgccgtaaaaacgctag

SEQ ID NO: 235185 - DNA, 705 bp, Unknown
  Bacterial polypeptide expressing nucleotide sequence isolated from the Sargasso Sea
aagataaaattggcgctagtaatgcgtggggatatgatatagttgcagcatgtactggttttgtttatgccatggaaacaggggctaaattagttgagtcaggtcaatataaaaacgtgatggttattggggctgatacgatgagttccattgttgattatactgatcgtaatacatgtgtaatatttggtgatggtggtggtggtgttcttctagaaccctcaaaggatcaaactggcattattgattctattttacatgctgatggaagtggaagtaaatatttaactgttccggcaggtggaagtcttcaccctgcctctaaagatactgtggataaaagaatgcattatgtttatcaagatggaaaaacagtttttaaatttgctgtaaagaatatggccgaagtcagcaagagaatcttagatagaaatcaattaactggagatgatattaaattatttatccctcatcaagctaatcaacgtattattgatgcagccgctaagcgttgtggcttagatgatgaaaaagtttttataaatattaataaatatggaaatacaacagcaggtacaataccaatagcgcttgatgaagcagttgagagtaacagattaacaaaaaacgatatgttattatttgcagcttttggaggtggatttacttggggatcaatgctaattaagtggagcaataaatagt

SEQ ID NO: 235186 - DNA, 661 bp, Unknown
  Bacterial polypeptide expressing nucleotide sequence isolated from the Sargasso Sea
cgcctgctcagcttttatatacagtctatcaattgccgatcaatatattaaaacgggagcggctgaaaccgtacttgtcattggcgcagaaacccaaactaaattaattgaaaaatctacggaaggtcgtgacgttgcagttctttttggtgatggagcaggcgctgctatagttcagcgcagtgatgattcaagccaaatactatcaacacatcttcattcacaaggaaaagatttaaaaaatctatggatggaagcacccggaaccagtaagggaagttggtttatagaaaataaatttgatcagaaaaaatttactccaaagatgaatggtagagaagtatttaaaaatgctgtgagacgatttcctgaggtaatccatgaggctcttgataataataatttagatattaatgatattaaattaatcattccacatcaggcaaattaccgtattagcaaagcggtagcaaagaagctcgaagtaggaatggataaagtttatagcaatattcacaagtatggaaatacaacagcagcatctattcctatcgcccttaccgaagctatctattctaagaaaataaataaaggggaccttattattttagctgcatttggagcaggttatacctgggcatcagcagctatcaagtggtaa

SEQ ID NO: 235187 - DNA, 508 bp, Unknown
  Bacterial polypeptide expressing nucleotide sequence isolated from the Sargasso Sea
aatgacggttcgtgctgtaatacagggatgtggacactacttacctaaacgagtagttgataattctgaattcgagagaaccttagatacatccgacgattggatttctagtcgttctgggattaaacgcagacattttgcaaacaaggatgagaccacctctgtcatggctacactggcagccaaagaagcgttagcagatgccaacttacgggctgatgatatagacgcaatcattctagcaacttcaacttcagatcttacatttccatcttctgccacaatggtacaggcaaatttaggaatagcaaaaggttttgcctatgacgttcaggcagtttgtgctggttttgtctttgctctagcaaatgcgaatgcactaataatttcgggacaagcaaaaaaaatcttggtgatcggttctgagacgttttcaaaattaatggactgggaagatagatccacgtgcgtacttttcggcgatggtgccggtgcggtcattttgtct

SEQ ID NO: 235188 - DNA, 868 bp, Unknown
  Bacterial polypeptide expressing nucleotide sequence isolated from the Sargasso Sea
gatgaatggatatttccaagaactggggataaaacaaagacatatagcactgaaaaaagaacttacttctgacctagcaattaatgccgctaaagaagcatttgaaaattcgactatttctcctggcgatattgattgcgtaatagttgctaccaccacaccagatgatacatttccatcaacggcaaccaaagtacaacatttttttaagatgaaagatactcctgcgtttgatattcaggctgtatgctcaggttttatctactcccttcaagtagcagatactttcctaaaatgtggtaatgcaaaaaatattcttgtgataggagcagaaacactctcaaaaatcgttgattgggaggatagaagaacatgtgttttatttggcgatggtgctggtgcagttattattagtgcttccaaagaatcaaggggtattttagctacaaaactttattcagatggttcctggcatgatagtttattcagtgatgggggaccttcatttaatcaaaaagtcggtaaaattaggatgaatggtcaagatatttttaaacaagcagtaaataaattatctgaatcaacttctaaagctttagatgaatgtaatttatcagttaaagatattgactggtttatacctcatcaagctaatcagagaattatttctagtacagcaaaaaaattaggaataagcgaagataaaacaataagtacagttaaatttcatgctaacacctctgcagcatctatcccattagcattatcctcagctattaaagatggaaaaattaaagaaaatcatttaattgcaatgtgtgcaataggagggggattgacatggggaagctgtatattaaaattctag

SEQ ID NO: 235189 - DNA, 853 bp, Unknown
  Bacterial polypeptide expressing nucleotide sequence isolated from the Sargasso Sea
ccagaaaaggtcttaactaatgaggaccttgcggagatggtcgacacgaacagtgaatggatcgtcgaacgaaccggcattcatgagcggcgcgtcggaggatccacatccgatcttgctgccgaagccggcaagatcgctatcgagcgagccggcattgatccagcaacaatcgacttgttgattctggcaaccacgagtccggatcgaagagtccctgcctcagcctcaacagtccaagagcttctaggtttgcagtgcggtgcgatggacctcaacgcagcctgctcaggcttcgtttactcgttggtggccgctcacggctttatcgaaatggggcaccaacgcgtcttagttatcggcgctgaaactctttcacggatgaccgactatacggaccgaaccacgtgcatcttgtttgccgatggtgccggagcagctgtagtggaaaaagcggacggccctggagatctccacggctggcacgtcgatagcaatggggctctggaggaagctctcttctgcgagtttgacggcaaaattgaaatggctgggcaagccatcttcaagaatgctgttctcgccatggaaaacgctgcgctgaagtccttagctatggctggcatctcagcagacgacatcgatcttgtcgtaccgcatcaggccaatgttcgaatcgtggaagcctcatgcaaacgcctaggaattccatacgaaaagacatcgatggtgattcaccgaaccggcaacacctcttccgcgtctatccctttggcgcttgaagatgcttgggcaggcgggcgggtgaaccaaggagacaacatccttcttgttggattcggggcaggtatga

SEQ ID NO: 235190 - DNA, 583 bp, Unknown
  Bacterial polypeptide expressing nucleotide sequence isolated from the Sargasso Sea
tgttatggagcagatcaattatcgagttttgttgattggaatgatagaagaagttgtatcctctttggagatggtgccggtgcattagcaatggaagccacaaatgaatttgataattttataggttttgatatgagaactgatgggggaaggggttcttttcttaatcttccatcaaaaaaggataagaattcaatagttgatgaaattgactttttaagtggaggcttttctccaattcagatgaatggtcaggaagtttataaattcgcagttaaagaagtccccctaattcttgaaaagttgttgaaaaaaatgagatataagtctgatcaagttgattggctcttactgcatcaagctaatcaaagaatattggattctgtaggagaaaggttaaaaattcccagagaaaagattcttagtaatttagaaaaatatggcaatacgtcagcagcaacaattccactaatgatggatgaagctgtaagagattatagaattaaacaaaatgatattattgctacaagtggtttcggtgctgggttaagttggggtgcagccctaattaaatggggttaaa

SEQ ID NO: 235191 - DNA, 928 bp, Unknown
  Bacterial polypeptide expressing nucleotide sequence isolated from the Sargasso Sea
gatttagaaaaaatggttgacactacaaatgagtggattatttctagaactggaattgagaatagacatattgttgatgatggtgaagccacttcagatatggctacccaaatagctaaacaattattagagaaatcaggaaaatcaccacaagatattgatcttattcttgttgctactagcacacctgactttccagttatttcaacagctgcattagttcaagacaaaattggtgcaataaatgcctggggatatgatattgtagcagcttgtacaggatttatatatgcgatggaaacgggcgcaaagttaatcgaatctggacgatataaaaatgtcattgttattggatctgatacaatgagctcaataatagattatacagatagaaatacttgtgtgatatttggagatggtggtggaggtgtaattttagaaccgacacaaagagatattggtattttagattctattttgcatactgatggtagcgggaacaagtacctaactgtacctggagggggaagtttcaatcccacctcgagagaaacaatagataatagaatgcactatttatatcaagatggtaaaacagtatacaaatttgcagtaaaaaatatggctgatgttagtaaaaaaatcctcgataataataacttaaatggaactgacattaaattatttataccacatcaagcaaatatacgtataattgatgctgcagctaaaagatgtgggctaaaagatgaacaagtgttaataaatataaataaatatggcaatacaacagctggaactatacctatagcgcttgatgaagcagtagaaactaatcgtttggatgaaggtgacttattattactatctacttttggggcaggatttacatggggaagtatgctaatacgttggggaaatacttaat

SEQ ID NO: 235192 - DNA, 845 bp, Unknown
  Bacterial polypeptide expressing nucleotide sequence isolated from the Sargasso Sea
tttggaaggaatagattttaatcagattggagtatcattcaagggaagcggaagttatgtacctgatcaaatacttaccaatcaaaaaattagtcaaaaggttgatacaagcaatgaatggataaaatctagaacaggcatttctgagagaagaatctctagctttggagataatgttaatgagatgggttataaggcggctctaactgctatagaaatggctaattgggatattaaaacaattgatttgattgttttagctacttcgactccgcatgatttatttggatcagcgccatccattcaagctaaattaggggcagctaatgctgtagctttcgatttaactgcagcatgtagtggtttcttatttgccttaattacagcctcacaatttttaaaaggtggtagttttcaaagggctattgttataggagcagatcaactatcaagctttgtcgattggaatgatagaagaagttgtattctctttggagatggtgcgggcgcattagcaattgaagccactaatcaatttgataatttaattggttttgacatgataactgacggagaaaggggttcttttcttaatcttccatcaaaaaataataaggatttaataattgataacattgattttttaagtggagctttttctccaattcagatgaatggtcaggaagtgtataaatttgcagttagagaagttccgataattcttgaaaagttgtttaataaaacacactatacttccgatgaagttgattggcttgtactgcatcaagctaatcaaaggatattggactcggtaggagataggttaaaaatccctagaagaaaaa

SEQ ID NO: 235193 - DNA, 797 bp, Unknown
  Bacterial polypeptide expressing nucleotide sequence isolated from the Sargasso Sea
agctgccaagattgcaatagagagagccaatatcgacaagaatgagattgatcttattattgtcggtacatgcacacctgatgttgcaacaccaaatgttggtacgattgttcaaaacagactagaactcaaaaattttcctgccttcagtattgaggccgcttgcagcggcttcatttatgctctgaatattgcagataagttcataaaatcaggtgagtcaaaatgtgcattggtcattggtgctgagacactatctagaattacaaactgggatgacagaaatacatgcgtcctttttgcagatggagcaggggctgccattttaaagccatcagatgacagagggattgtattttccgagcttggtgccaatggtgaatatgcagatcttctccacgtaccctatggaacatctagaaagcctgagacacccaatgcagataactacaccttaaagatgagcggaaacgaagtgtttaaagttgctgtaaaaacactagaagaaattgctattgatgcactggtcaaagcaaatcttgaaagtgaggatatcgactggttcatcccacatcaggccaacatgagaatcattcaagcggtggctaagaggttggagttacctgaggaaaaagtaattctcagcatggacattcatggtaatacatctgcagcatctatacccttagcttttgatagagccattcaagacggcagaataaaagaaggggacactattttaatgcaaagttttggtgcaggctttacttggggtagtgttattttagatttataac

SEQ ID NO: 235194 - DNA, 884 bp, Unknown
  Bacterial polypeptide expressing nucleotide sequence isolated from the Sargasso Sea
atttcataaattttgttgatacatcagatgaatggatctatacaagaacgggtatcaagcaaagacatattgcactagaaaatgaattaacgtcagatttagcagttaaagcatcccagagggccttagattctgcaaacttaaaaagtgatgatattgattgcattattttagctacaacaactcctgatgaaacatttccatcaacagcaactaaagttcaaactcaactaaagatgagaaacattccatcttttgatgttcaggccgtttgctctggatttatttattcccttcaaattgcagactctttaattaaatgtcaaaaagcaaaaaatattctagtaattggagcagaaacattatcaaaaattgtagattggaaagatagaaggacatgtgttttatttggcgatggagctggagctgtcattttgggtcaatccaaaagtttttgtggtattctgtcaacaaaattatattctgatggatcatggcatgacagtctttttagtgacggtggtccttcaaaaaatcaggaagtaggaaaaattaggatgaacggtaaagatatttttaaacaagctgttaataaactgaccgaggcaacgaatgaggctttaaatgaatgtaatttagatgtaaaggatattaattggtttgttccgcaccaagctaatcaaagaataatatctagcacagcaaaaaaaataggtttaggtgaagataaaacaataagtacagtaagatatcacgcaaacacttcggctgcttccataccgttagcactttcgagttcaatagaaaatggtaaaataaaatcaaatgatattttagctttatgtgccataggtggggggttaacttggggtagttgtatttaa

SEQ ID NO: 235195 - DNA, 625 bp, Unknown
  Bacterial polypeptide expressing nucleotide sequence isolated from the Sargasso Sea
aggttttcttgcttcaagagctttaagtaaatcagatgatccgaagacagcaagtagaccatgggacaaagatcgcgatggttttgtgttgtcagatggagcagcaatcctgatattagaagaatatgagcatgcaaaaaatcgatcagcgaatatatatgcagaaattattggttttggtatgagttctgatgcatatcatatgactgcaccatcagaagatggaactggagcttcattgtcaatttctcgagcaatatcagatgcaggcatttcaacaaatgatattgattatataaatgctcatgcaacatcaactcctttgggagatctcgcagagtgtaatgcggttaagtctatttttgattcacctccaccaattagctcaactaaatcaatgactggtcacactttgggtgcggcaggagcgatagaatcaatattttcaattttatctattgttaataatatttccccaccaacaattaatttaaataaccctgatgaaggctgtgatttagattttattccaaatgaagctagagatatgaaaatagatatttcattaaataattcatttggctttggtgggactaattcaactcttatttttaagtctgtttaa

SEQ ID NO: 235196 - DNA, 457 bp, Unknown
  Bacterial polypeptide expressing nucleotide sequence isolated from the Sargasso Sea
tcaccaggaattctctccagccatattcatgcagatggcgcttttaaagacttactctgcgtacctgtgggtgtatcgaccgcctatcaagaggtgctgggtggacgcgcctataccgagatgcagggtaaagaggtattccggtgggcagtctcaacgcttggggatgcagtaatagaaattctcgaagcaaacggaatagagaaaggggagattgactggctggtgccacaccaggccaatatccgaattattaaagccatcgccaaacgactggacctcagcatggaccaggtggtggttacgatcgaccagcatggaaatacctctgctgcctctgtccctctggcctttgattccgcggtgaaggatggacggattcgatccggtgacaaagtggtcttcgaagccttcggtgggggattcacctggggtagtatgttggtagaaatatagg

SEQ ID NO: 235197 - DNA, 583 bp, Unknown
  Bacterial polypeptide expressing nucleotide sequence isolated from the Sargasso Sea
gtaattggcgcggatcaactcagccgctgggtggattgggatgaccggcgcagctgcgtgctgtttggtgatggcgctggtgctgtggccatcgaagcctgccccgcagagaacgatggtttgctgggttttcgcctcaacagcgatggcgcccgcggcgactgcctgaccctggcgcaaaccagcgagcgcgctgaactgctgcctggcatgagccaccaacgcggcggctacgcgccaatcggcatgaatggccaagaggtttacaaattcgccgtgcgcgaagtgccagcgatcctcaaacagctgctcgccgacaccaacaccgaggccgccagcatcgattggctactgctgcaccaggccaaccagcgcatcctcgatgccgccgctgaacggctgggcatcgccgccgacaaggtgctcagcaatctggccaattacggcaacacctcagccgccacgattccgctgatgctgcatgaggccgttagtgatgggcgcatccaatgcggccagctgattgccagcagtggctttggcgccggattgagctggggtgctgccctgctgcgctgggatg

SEQ ID NO: 235198 - DNA, 795 bp, Unknown
  Bacterial polypeptide expressing nucleotide sequence isolated from the Sargasso Sea
cttgaaaaaaaggttgatacaactgatgaatggattgtatctagaacaggaatcaaagaaaggccaatagccgatgattcacaagcgacatctgatttagcatttgaagctgccaagattgcaatagagagagccgatatcgacaagaatgagattgatcttattattgtaggtacatgcacgcctgatgttgcaacaccaaatgttggtacgattgttcaaaaaagactagaactcaaaaattttcctgccttcagtatcgaggcggcttgtagcggtttcatttatgctcttaatattgcagataagttcataaaatcaggtgagtcaaaatgtgcattggttattggtgctgagacactatctaggattacaaactgggatgacagaaatacatgtgtcctttttgcagatggagcgggggccgccatcttaaagccatcagatgacagagggattgtattttctgagcttggtgccaatggtgaatacgcagagcttctccacgtaccctatggaacatctagaaagccggagacacccaatgcagatgactacaaattgaagatgagcggaaatgaagtatttaaggttgccgtaaaaacgctagaagaaattgctattgatgcactggttaaagcaaatcttgaaagcaaagatatcgattggttcataccacatcaggcaaacatgagaattattcaagcggtggctaagagattggagttacctgaggaaaaagtaattctcagtatggacattcatggcaatacatctgcagcatctataccctta

SEQ ID NO: 235199 - DNA, 774 bp, Unknown
  Bacterial polypeptide expressing nucleotide sequence isolated from the Sargasso Sea
attctgactaatcaaaaaattagtcaaaaggttgatacaagcaatgaatggataaagtctagaacgggcatttctgagagaagaatctctagcttagaagataatgttactgagatgggctataaggcggctctaactgctatagaaatggctaattgggatattaaaacgattgatttgattgttttagctacttctactccgcatgatttatttggatcagcgccatccattcaagctaaattaggtgcagctaatgctgtggctttcgatttaactgcagcatgtagtggtttcttatttgccttaattacagcctcacaatttttaaaagggggtagttttaaaagggctattgttataggagcagatcaactatcaagctttgttgactggaacgatagaagaagttgtattctctttggagatggtgcaggtgcattagcaattgaagccactaatgaatgtgataatttaatcggttttgaaatgagaactgacggagaaaggggttcttttcttaatcttccatcaaaaaataacaaggattcaataattgataatattgattttttaagtggagctttttctccaattcagatgaatggtcaggaagtgtataaatttgcagttagagaagttccaataattattgaaaagttatttaaaaaaatgaattatacttccgatgaagttgattggcttgtattgcatcaagctaatcaaaggatattggattctgtaggagacaggttaaaaattcctagagaaaaa

SEQ ID NO: 235200 - DNA, 733 bp, Unknown
  Bacterial polypeptide expressing nucleotide sequence isolated from the Sargasso Sea
tttcccaggagtaagtgcccagctacaagaaaaattaaatttaaatttggttggggcttttgatattaaagctgcctgctcagcttttatttacagtctatcaattgctgatcaatacattaaaactggagcggctgaaaccgtacttgtcattggcgcagaaactcaaactaaattaattgaaaagtcttcggaaggacgtgacgttgcagttctttttggcgatggagcaggtgccgctatagttcagcgcagtgatgatgaaagccagatattatcaacacatcttcattcacaaggaaaagatttaaaaaatctatggatggaagcgcctggcactagcaaaggtagttggtttaaagaaaataaatttgatcagaaaaaatttactccaaagatgaacggtagagaagtatttaagaatgctgtgaaacgatttcctgaggtaattcatgaggctcttgaatataataatttaaattttaatgatattaaattgattattccacatcaggcaaattatcgtattagccaagcggttgcaaagaagctcggagtaggaatggataaagtttatagcaatattcataagtatggaaatacaacagccgcatctattcctatcgcccttactgaagctgtcaacgcaaagaaaataaataaagaagaccttattattttagctgcatttggagcaggttatacttgggcatctgcagctatcaagtggtaa

SEQ ID NO: 235201 - DNA, 798 bp, Unknown
  Bacterial polypeptide expressing nucleotide sequence isolated from the Sargasso Sea
aatgagtaatatactaataacaggtgtaggttcatatttaccaaaaaaagtaatttctaataacgaacttcctgtaaacctagacacaaatgatgaatggataaaaaaacgaactggcataagacaaagacattttgttacagaaggtgaattgacatcgaccatggctatagctgctgcaaaaaaagctcttcaaaatgctaatattgataataaagatatagatttaattattgttgctacaacaacacctgataaaacatttccagcaactgccgtcatggttcaatcagaattaaatattggtattggcccagcatttgacattcaggctgtttgtgctggttttatatatgcgctgaatgtgggttcttctttattaaagacatctaattttagtaaagcattaataattggttcagagtcattttcaaaaattcttgattggtctgatagatcaacatcagtattatttggagatggagcaggtgctttcgtattagagaaaagtaatgaaaattctgaatggggaattttatcttcaaatttttactctaatggtaattttagtaatattttgcatactgatggggggcctagtataaatttacaggttggaaaggtcagaatgaatggtaaggaagtatttaaacatgctgttgaaaagctttcttcttgtttaattgaagctataaattcgggcaacttaaaaattcaggatattgatttcttagtacctcatcaggccaacattagaattattgaggctttatcaaaaaaattggatattccaactaa

SEQ ID NO: 235202 - DNA, 867 bp, Unknown
  Bacterial polypeptide expressing nucleotide sequence isolated from the Sargasso Sea
gctgtttgatcattttgatccagaggcttacaccaccaaatttgctggtttagtcaaaaattttgacgtcgaacagtttttcccggccaaagaagccaaaaaaatggatttatttatccagtacggagtggctgccggtgtgcaggcttttaaagattccggactggaaattaacgaagaaaatgctgaacgtattggtgttgctgtaggttcaggtattggtggtttaggtttaatcgaagaaaaccacaccaaattactgaacagcggtccacgtcgtttatcgccgttttttgtaccttctaccattatcaatatgatttctggccatttatccatcatgttaggtctgcaaggtccaaatatcagtattgtcaccgcttgtaccacaggtgtgcataacataggtcaggccgctcgtatgattgcttacggtgatgcggacgctatgattgcaggtggtgcagaaaaagcctctactcctttgggtatgggtggctttggtgcggctcgtgctttatctacccgtaacgacgcgccacaacaggccagtcgtccatgggataaagaccgtgatggttttgtgttaggcgatggcgctggtgttgtggtactggaagagtacgaacatgccaaagcccgtggcgcaaaaatctatgctgaactggttggttttggtatgagtggcgacgcctaccatatgacgtcaccaccagaaaatggtcgtggtgcagctttggcaatgaaaaacgccttgcgtgatgccggtgttaatgcggatcaagtgcaatatattaatgcgcacggcacctccacgcctgcaggtgacattgctgaaactatggcgattaaatctatttttggtgc

SEQ ID NO: 235203 - DNA, 722 bp, Unknown
  Bacterial polypeptide expressing nucleotide sequence isolated from the Sargasso Sea
catgtttaaaagtaaaatttttggaatgggatattctgtcccagaaaatattattacaaatcatgatttatcaaaaatcatggatacatctgatgattggattcaatctcgatctggtatcaaagaacgtagatgggcaacggataatgtaacaacttcagatctagcatatgaggcatgtaagcagacaattgaaaattcaaagattaacccgattgacatcgatatgataattgtaggaactctttcttcagattattttttcccaggggtaagcgcgcaacttcaagaaaaactaaatttaaaaaacgtgggtgcatttgatataaaagctgcctgttcagcatttatatacagtatatctatagcggatcaatttataagaacaggagctgcaaaaactattcttgtagttggggcagaaacccaaacaaagttaatagaaaaatcaacagagggtcgtgatgttgctgttttatttggtgacggtgctggagccgctatattgacaagaagcgattcaaaaagcgaaatactatctacgcatcttcattcggatggcaaacacctaaaagatttatggatggaagctcctggtacaaataaagatagctggattgatgatcctattaatctttcaaaatttaccccgaagatgaacgggagagaggtttttcgaaatgcagtaaccagatttcctgaggttattaatgaagccctat

SEQ ID NO: 235204 - DNA, 838 bp, Unknown
  Bacterial polypeptide expressing nucleotide sequence isolated from the Sargasso Sea
attttaactaataaagagcttgagagtattgtagatactactgatgagtggataacagaaagaactggcattaaagagcgaagggtatcatctgatgacgagacgtctgtagatatggcttatcaggcatcgatagatgcaattaataagtctggattaaaaaaagatgagataggcgcaatatttttagctacttgtacacctgaaagaaaatttcctagtactgcagttctcctccaaaacagacttaatatcaaaaatgcgttttcggttgatttgaatgcagcatgtactggttttgtttatgccttagacattgcaaagaaatacattgagtctaaacaagtaaaatatgcgttagtggtaggtactgagaagatcacctcgttattagattggacagataggaacacgtgtgtattatttggtgatggggcaggtgccatgatagttggcagttctgatattgcaggaattttatcaagcactataggttctgatggatcgtataaggatttattaacagttaatacagatttagaatacattgaaatgaaaggcagcgacgttttcaaaacagcagtaaatacacttggtaaattagcaaaacatacacttgaattaaataatcttgagcagggacaacttgactggcttgtaccgcatcaggccaatgaaagaataatcttagctattgctaagaaaataagtttgtcacatgataaaattattattaccgtaaataagcatggaaatacttcagctgcatcaatccctttagcatttgatgatgctaacactaaaaatacattcaaatcaggtgactatatcatgatgg

SEQ ID NO: 235205 - DNA, 712 bp, Unknown
  Bacterial polypeptide expressing nucleotide sequence isolated from the Sargasso Sea
attgaaaaataaaaatatattatatgctaacataactgctgtcggcaaatatgttcctgaaaaaattatcactaactatgatctcgaacaaaaaatggacactactaatgaatggataacttctagaacgggtattgagcaacgccgaaaagcttcaaatgaagaaactagtgtttctatgtcggtaaatgctataaaagaaattataaaaaataaaaatataaatcctaaggatatcgatgctattatagttgccacaatcactccagatatgttttttccatcatgtgcatgcctaatacaacagcaaattaaagcaacaaatgcatggggttttgatctgtctgctgcatgctctggttttgtatttgctcttgaaacagcttcaaatatgatacaatcaaaaaaatataaaaaaattattgttgttggtgtcgatactatgagttctattattgattataatgataggaatactgcagtcttgtttggagatggagctggagctgttttaatagaaccttctgaaacaaatggaattattgattcaaagatgaaaatagatggtgatggaggaaagtttttatatatgcctgcaggaggaagtctaaaccctgcaactgaaaagactgtaaaaaataatatgcactttgtcaaacaggatggagcaagtgtatttaagaatgctgtaaaaggaatgacggatataaca

SEQ ID NO: 235206 - DNA, 825 bp, Unknown
  Bacterial polypeptide expressing nucleotide sequence isolated from the Sargasso Sea
tgggccaaaacggttatcgccgttttttgtgccgtctaccatcattaatatgatatccggtcagctgtctattatgctcggtttacaagggccaaatatcagtattgtgactgcctgtaccacaggcgtgcataatatcggccatgctgctcgcatgatcagttacggtgatgcggatgtgatgattgccggtggtgcagaaaaggcatctactccgcttggtatgggcggtttcggcgctgcgcgggcgttgtctacccgtaacgacgcgccgcaacaagccagccggccatgggataaagatcgcgacggttttgtgctgggcgatggtgccggtgttatggtgttggaagagtatgaacacgccaaagcccgtggtgcaaaaatttatgccgagctggttggttttggtatgagcggtgatgcttatcacatgacttcgccaccagaaaatggcgccggtgcagcagcatcaatgcgtaatgcattgaatgatgccaaggttaatgcggagcaggttgcttacattaacgcgcacggcacatcaacgcctgccggtgatattgcagagacgaaagctattaagtctgtgtttggtgaccatgcatcgaaagtgatggtgagttcgtccaaatcaatgattgggcatctgcttggcgcagctgggtcagttgagtcgatcattactgtgctgtcattgcaggaaaatatcgtcacgccgaccattaatctggataacccggatgacggttgtgatctggactatgtaccgcatgaagcccggcaggtatcgatggagtatgcactttgcaactctttcggttt

SEQ ID NO: 235207 - DNA, 655 bp, Unknown
  Bacterial polypeptide expressing nucleotide sequence isolated from the Sargasso Sea
atgtattcgcgaataattagcacaggaagttatcttccggaaaaaaggttaacaaattttgattttgagcagatgcttgacacctctaattcttggatagttgaacgtagcggtatcgaatcaagacgtgttgcaggggccgatgaattggctagcgatttgggttacaaggcagcatacagagctttaaagagagctaatttagaacccaatgacctagatttaattatcgtcgccacaacgacaccagatatgatttttccaagtacagcgtgtattgtacagtcaaaacttggggttaaagattgtatcgccttcgatgttcaggccgtctgttctggttttgtatatgggttaaatattgctgatttatttataaaatcagggcaagctaagacagctttagttatcggcagtgaggtgtattctcgaatcctagattataacgatcgtggaacttgcgtgctttttggtgatggcgcaggggctgcgatagtagcaaattcaaaaaaagcaggactcatggcagcgaaacttcatgctaacggggactacaaagacaaactatctgttccagggtcgatttatcaaggaaaagtttcgggaaaaccgtttgttcaaatggatggacctgcagtatttaaatttgctgtaa

SEQ ID NO: 235208 - DNA, 706 bp, Unknown
  Bacterial polypeptide expressing nucleotide sequence isolated from the Sargasso Sea
taaagttcaagcggatcttggtataatcaatggagctgcatttgatattcaagctgtctgtgctggcttcgtttacgccatgactgttgcggataattttctgcgttcagggcagtcaagtagagctcttgtaataggcgctgagacgttcacaaggcttctggattggactgataggggaacttgtgttctttttggtgatggagctggcgccgttgttttggattctcacaaaattgatccagaaactttgcaatatggagttttatcaactcatcttcactcggatggccgcaacagggatatattatatgtagacggtggtccgtcaatgacctctgaaactggcttcgtaagaatgtcgggaaaggaagtatttaggcacgcggtatcaaaattgggctcagtaataaaggagaccttagttgcaaatgatttatctagtgacgatatagattggctcgtacctcatcaggcaaatagaagaattattgaaagtatggcaaaaaaacttgatatgccaatggataaagtcatttgttgtatagaccggcatgcaaatacctccgcagcctcggttcctttggcgctctcggagggagtatcagatggtagaatagtagatggaaacttggtactatttgaagccattggaggcggtttagcatggggcgcggggcttgttcgaatgggatatcccaagtga

SEQ ID NO: 235209 - DNA, 746 bp, Unknown
  Bacterial polypeptide expressing nucleotide sequence isolated from the Sargasso Sea
ataaaagaggcaaaaatagaagcttctgatttagacgctataattttagctacttccacagccgatctaacttttccatcagcagctacaatggttcaagctggtctaggaataaggcatgggtttgcttatgatattcaagcggtttgtgcaggctttatctttgcattatcaacggccaatgctcagatagtttccggacaagcaaataggatactggtaattggttctgaaactttttctaatttgatggactggagcgatcgatccacatgtgtactattcggtgatggggctggtgccgtagtgttagaagctcagaattcgactggaaccaaagaggaccgaggtattttgtcagtagatcttaattcggatggtagctataaggatatcttatacgttgacggcggggtttctcaaaaaacaactggttatttaagaatggaaggaaaagaggtctttaagcacgcagtggataaattagcaaagacatcagcaaatgcgatggcaaaagcaggtatagaatttagtgaagttgattgggttgtacctcatcaagctaatgtcagaatcatacaaggtacggcacgtaagatgggtatatccgatgaaaaagttattaaaactgttcaagaccatggtaatacatctgccgcatcaattcctttggcactatcagtagcttccaagtccggacaaataagacaaaatgatttaatcgtaactgaggctatagggggagg

SEQ ID NO: 235210 - DNA, 688 bp, Unknown
  Bacterial polypeptide expressing nucleotide sequence isolated from the Sargasso Sea
tttgaaatcagcaataacaggatggggtaaatgcacgcccgataacattatgactaacgatgatttatcaaaatttgttgatacttctgatgagtggattcaacaaagaacaggtgtaaaggaacgaagatttagccatgtaaacacatcagatatggctgaaattgctggtaaacatgcaatagcctgtgcaggtttaaatccaaaagacattgatgttgtaatcttagctacatgtactccagatagcattgttccctctgcagcagctcacgttcaaaaaaaacttggtgctgtaaatgcttctgtctatgacgtaaatgctgcttgtgcaggttttctgtatgcacttgagcaaggaaaagcattcgttgaaagtaatctttataaaagagctttggtaataggggcagagcatattacttggttgcttgattggtctgatagaaacaccgctgtgctttttggtgatggtgcaggtgcagtggttattgaagaaagtaaaaatgaatcagatggtgaaatatattctttttcaaatggcttaagttcggacaatttagaaatcttagaaattcctaattttggttcagcaatggataggtttaatcctgacgaagcagctagagtgcgttggacttttgatggacaggaaatatttaaatctggtgttagagcaatggcacaa

SEQ ID NO: 235211 - DNA, 711 bp, Unknown
  Bacterial polypeptide expressing nucleotide sequence isolated from the Sargasso Sea
aatgaatttaaatcagaataaacctgttggaattcttggtttagggcacttccttccagatcaaatcattaataatcaatattttgttgatcgagggctagatacatccgatgaatggattactactcgcagtggtatacaatcccggcatattgccactgactctaaaactagtgacttagcttatcaggctgcaaaaaaagccatttcaaatagtcctgtttcacctgatgatatcgattttattattgttgcaacagcaaccccagatcattctgggtttccatcaactgcatgcattgtacaaaaaaaacttaatttatctagaaatatcccagcatttgatattactgttgcttgcagcggatttacttacgcattgggtattgctaatagctatatacaaactggcatgggtacacatgggttaattattggtgctgaaacgctaagttcagtcgtcaattgggcggatcgcagtacatgtgttttatttggtgatggtgcaggtgccgcaatcgttggccctgtttctggacagggaatcatagcaattgatcaaggtgctgatggtaattatagtgatattttaacaatatccaatcaaccaaatcgcgaagatttcaatatgaatacaaccgatgatgaatcaagcactatttttatggatggcccagctgttttcaaacaaggcattcaatgtgttcaaca

SEQ ID NO: 235212 - DNA, 769 bp, Unknown
  Bacterial polypeptide expressing nucleotide sequence isolated from the Sargasso Sea
aaaatagaagtttctgatttagatgctataattttagctacctctactgccgacctaacttttccatcagcagctacaatggttcaagccggtcttggtataaggcatgggtttgcttatgatgttcaagcggtttgtgcgggttttatctatgcactatcaacagccaatgctcagatagtttccggtcaagcaaatagaatattggtaattggctctgaaactttttctaatttgatggactggagcgatcgatcaacttgtgtgctattcggtgatggagctggtgccgtagtcttagaggcccagaattcgaatggaaccaaagaagaccgaggtattttgtcagtagatcttaattcggatggcagctacaaggatattttatacgttgacggcggggtttctcaaaaaacaaccggttatttaagaatggaaggaaaagaggtctttaagcatgcagtggataaattagcaaagacatcagaaaatgcgatggcaaaagcagggatagattctagcgaagttgattgggttgtacctcatcaagctaatgtcaggatcatacaagctaccgcacgtaagatgggcatacccgatgaaaaagttattaaaactattcaagatcatggtaatacatctgcagcatcaattcctttggcactatcagtagcttcaaaatcaggacaaataaaacaaaatgatttagttgtaactgaagctatagggggaggtctggcctggggagcaatagtactgagatggtgaa

SEQ ID NO: 235213 - DNA, 886 bp, Unknown
  Bacterial polypeptide expressing nucleotide sequence isolated from the Sargasso Sea
aatggtggaaaccagtgaccaatggattgttgaacgcactggtatttcagagcgccgcattgcagcgcaagacgaaactgtctcaacgatgggctatcaggcggcattaaatgcgttagagatggccggtattgaggcatcagatttagatatgatcatttgcggtacaaccagtgcggcaaatgcattccctgccgcggcctgcgaaatccaagccatgctcggtgtgcacaccattccagccttcgatatcgcggcggcttgttcaggctttgtgtatgccttatcggttgcggaccaattcgttaaaaacggtaccgcgaaaaaagtcctcgtgattggcgctgatgtattatcccgtctgtgtgagccggaagatcgtaccaccattattctgtttggggatggtgcgggggcggcggttatcggtgcttccgatgagcccgggattatttcaacccatatttatgccgatggtcgtcaaggcgatttgcttaagtgcgctttcccaccacgtcagggggaaacctctgaagcggttggttttatgacgatgaaaggcaatgacgtctttaaagtggcggtgactcagttatcccatgtcgtgactgaaaccttgcgcctgaataatatcgataagtcggaaatcgactggttggtgccgcatcaggctaacttccgcattattaatgccacggcgaaaaagctagacatgagcttagataaagtggtgttaacccttgctaagcatggtaatacctcggcggcttcggtacctattgctctggatgaagctgtgcgtgatggtcggatccaacgtggtcagctcttgctgctcgaagcctttggcgctggttttgcgtggggcagtgcgctcgtccgtttt

SEQ ID NO: 235214 - DNA, 912 bp, Unknown
  Bacterial polypeptide expressing nucleotide sequence isolated from the Sargasso Sea
ttcgattgtagtaactattcaacccgtttcgcaggtcaaattaatgattttgatccgcaggaatacattgaaaagaaagaaaccaagaaaatggaccgctttatccagctgggtatagcagcaggcaagcaagccttggtcgattctggtttaactatttcacaaaataatgcgcatcgtgtaggtgtagctattggttcaggtattggtggtttagaacaaattgaacaaaaccatttgaaactgacaaatagcggtcctaagcgcgtatcgccattttttgtaccttcaaccattaccaacatgatctcaggctttttgtctatcatggaagggttgaaaggaccgaatttaaacgttgtgactgcttgtacaacaggcgttcataacattggtattgccgcaagaacaattgcttatggcgatgctgatgccatgttggccggaggcgcagaagcgtctattactccgctaggcatggctggttttgccgcagcacgtgcgttgtcatctcgcaacgacaacccacaagcagcaagccgcccatgggataaagaccgcgatggttttgtcatgggtgagggcgctggcgtggtaatgctagaagaatacgaagctgcaaaagcgcgtggcgcgaccatttatgcagaactggttggttttggcatgagcggcgacgcataccacatgacttctccacccgaagatggcgaaggtgcagctgcatctatgcaaaacgcgataaacgatgcccaaatggatgcaagtgaaattggctatgttaacgcacatggtacgtctacgcctgcaggtgacattgcggaagtagcggcagtgaaacgcgtgttcaatgaccatgctcacaagctttctgttagctctactaagtcaatgacaggccatttgctaggg

SEQ ID NO: 235215 - DNA, 922 bp, Unknown
  Bacterial polypeptide expressing nucleotide sequence isolated from the Sargasso Sea
ttgcaaatttgttgacacttctgatgaatggatatccaaaagatcaggtataaagtatcgtcattttatttcagataatgaaactacatctgaaatgtcatataatgcagcaaaaaaagcaataaagaatgcaaagatttctaaaaataatattgatttaataattgtagctacaacatcaccagataatacttttccatcgacagcaacattagttcagaagaaattacgtatcaacgcagtttcttttgatattcaggctgtttgtgcaggatttgtttttgctttatcagttgctaaatcaatgatgtcaaatggttactacaaaaattgtttagtaataggtgctgattcaatgtctaaattgttagattggaaagatagatctacatcagttttatttggagatggtgctggggctgtaatacttcaaagagttgaaaatataaatgatgcatataaagattggggaattttatctagtgtaatccattctgatggtcaattttatgatttattaaagacaaatggaggggtatcaacaaatcagaaaacaggttttattgaaatggttggcaaagaagtttttaaacatgctgttgataaattatcatcctcgcttgaagaagctttgttatcttctaataaaaaaattgaagatgtagattggttagtgcctcatcaagccaatcagagaataatttcagcagtagcagacagaatgaattttgatataaataaagtaatttctactgtaaagtatcatggaaatacttcagccgcgtcaattccattagctttggataaagcaatgtcttcaaaaactattataaacggtaatctaattggtgttcatgctatcggtggtggtttaagttggggggcatcaattattagaattggaaaaccaaaaattttgtaa

SEQ ID NO: 235216 - DNA, 821 bp, Unknown
  Bacterial polypeptide expressing nucleotide sequence isolated from the Sargasso Sea
tcaaaaaaaacttggtgctgtaaatgcttctgtctatgacgtaaatgcagcctgtgcaggttttctgtatgctcttgagcaaggaaaagcattcgttgaaagtagtctttataaaagagctttggtaataggggcagagcatattacatggttacttgattggtctgatagaaataccgcagtcctatttggtgatggtgcaggtgcagtagttatcgaagaaagtaaaaatgaatcagatggagaaatatattctttctcaaatgggctaagttcagacaatctagaaatcctagaaattcctaattttggctcagcaatggataggtttaatcctgatgaagcagctagagtgcgttggacttttgatggacaggaaatattcaaatctggtgttagagcaatggcacaagcatcagcagaagctatagaaaaatcaggattgtcaaaagaagatgtagacatttttattccacatcaagcaaatattagaatcgtcgaagcgctcgaaaaaaaacttgggcttcctaatgcaactactatcaaaaaagttcatagatacggaaatacttctgcagcgtctataccaacagcatttgttgatgctcttgaagaaggtgagataaaaggtggggaaattgcagtctttacagctgtcggagctggtcttgcatggggagcttgtgcggttcgattaggagatcgtgtaacgccaataaacaaatcagatgcaaaacttccagattttgatggaaccgcaacagacacaattaaaagagcaattgagtatcaagttccagataaattagacaagatatgaa

SEQ ID NO: 235217 - DNA, 1009 bp, Unknown
  Bacterial polypeptide expressing nucleotide sequence isolated from the Sargasso Sea
tttggaaggaataaagtttaatcaaattggagtctcatttaaaggaagtggaagttatgtacctgatcaaatactaaccaatcaagaaattagtcaaaaggtagatactagcgatgaatggataaaatctagaactggtatttctgagaggagaatttccagtttaggagataatgtaactgagatgggttatgaggcggcaatggctgcgattgaaatggcgaattgggatattaaaaccattgatttgattgtcttagctacttcgactccgcatgatttatttggttcggcgccatctattcaagctaaattgggtgcctataatgctgtagcttttgatttaactgcagcatgtagtggttttttattcgccttaataacagcctcgcaatttttaaaagggggtagttttaaaagggctattgttataggagcagatcaattatcaagctttgttgattggaacgatagaagaagttgtattctctttggagatggtgcgggtgcattggcaattgaagccacaaatgaatttgataatttaattggttttgatatgagaactgatggggaaaggggttcttttcttaatcttccatcaacaaataataaggattcaataattgaaaacattgattttttaaatggagggttttctccaattcagatgaatggtcaggaagtttacaaatttgctgttagagaagttccgataattcttgaaaagttgtttagaaaaacgaattatagttctgatgaagttgattggcttgtattacatcaagctaatcaaagaatattggattctgtaggagacaggttgaaaattcctagagaaaaaattcttagtaatctagaaaaatatggcaatacctcagcagcaacaattccactaatgatggatgaggctattagaaataatagaattaaacaaaatgatattattgctacaagtggttttggtgctgggctaagttggggtgcagccctcattaaatggggttaa

SEQ ID NO: 235218 - DNA, 539 bp, Unknown
  Bacterial polypeptide expressing nucleotide sequence isolated from the Sargasso Sea
tttgaaatcagcaataacaggttggggtaaatgcacgcccgataacattatgactaacgatgatttatcaaaatttgttgatacttctgatgagtggattcaacaaagaacaggtgtaaaagaacgaagatttagccatgtaaacacatcagatatggctgaaattgctggtaaacatgcaatagcctgtgcaggtttaaatccagaagatattgatgtcgtaatcttggctacatgtactccagatagcattgttccctctgcagcagctcatgttcaaaaaaaacttggtgctgtaaatgcttctgtctatgacgtaaatgcagcctgtgcaggttttctgtatgctcttgagcaaggaaaagcattcgttgaaagtagtctttataaaagagctttggtaataggggcagagcatattacatggttacttgattggtctgatagaaataccgcagtcctatttggtgatggtgcaggtgcagtagttatcgaagaaagtaaaaatgaatcagatggagaaatatattcttctcaaa

SEQ ID NO: 235219 - DNA, 988 bp, Unknown
  Bacterial polypeptide expressing nucleotide sequence isolated from the Sargasso Sea
aatggctactaggtccattttggcaggctgtggagcttatctacctgatcgtgttattgataacaatgagttagccaaacttgttgatacatcagatgattggatcaagcaaaggaccggtatagaaaagcgacacgtggttgcagatggtgaactaacatctgatcttgcagttaaagccgcggatcgggcgcttactcgagcaaatataccagctaatgacatcgacctaataattgtcgccaccacaacaccggaccgaacctttcctgcaacagccacaaaagtgcaggcggacctcgggataacgagcggggctgcttttgatattcaagccgtttgcgccggttttgtgtatgcgttgtctattgcagataatctgttgcgggcagggcagtcacgtagagctatagttataggcgctgagacttttacgaggctactggattggactgatagaggaacttgtgtcctgtttggtgacggggctggtgctattattctagattcttacgaaattgaaccagccgcgaagcagttcggtgtactgtcaacacaccttcactccgatggccgtcacagggatatactttacgtagatggtggtccatcaatgaattcgaaaactggacacgtgaggatgtcagggaaggaagtttttaggcacgctgtatcgaaattaggttccgtcataaacgaagccttagtagcaaataatctatcgagtaatgacatcgattggctggtgcctcatcaagccaataaaaggattattgaaagcatggctaaaaaactcaatatgcccatggataaagttatttgttctattgaccgtcatgccaatacgtcggcggcatcagttcctctagcgctcacggaaggggtctcagatggtcgaatagtagacggagacttggtgctttttgaagccataggaggtgggttagcctggggggctggacttgtaagaatgggttatccaaaataa

SEQ ID NO: 235220 - DNA, 925 bp, Unknown
  Bacterial polypeptide expressing nucleotide sequence isolated from the Sargasso Sea
atgttttctaaaattaacggcacaggctcatacttgccagaaaaaaagctcacaaataaagaccttgaatccatggttgatactaccgatgaatggatctttgaaagaacaggtattaagcagagacacatttcaagtgagaaagaaacttcgtcttttatgggttttaaagccgccgaagacgctattaaatcatcaaatatatcaaaaagtgatattgatttaattatagttgcaacaacaacgcctgaccacgtgtttcctagtaatgcttgcttaattcagcaaaaattaggtattcaaaccccagcatttgatattgcagctgcttgcaccggttatatttatgctttaagtgttgcagattcttttattaagtctggtgtttacgaaaatattttagtaattggaactgagcaatattcaaaaattatagattgggacgatagaacgacttgtgttttattcggcgatggagcaggcgcgacaataatttcaagatcaaagacaaaaggaataatttcaactaatattgatgctgatggtaaatttagtaacttactttgtgttccagacaagtatataactatgaaaggaaatgaagtgtttaaagttgctgttaatacgatggggaaacttgtagatgacactttaaaccaatctggtttgaaaaaagaagaaatcaactggcttgttccccatcaagcaaattatagaattatttctgctactgcgaaaaaactaaatatgccaatggaaaatgttgtagttacagttgataagcatggaaatacatcagcagcttcaatacctttggctctagattatgctataaaaaaaggtgatataaagcaaaatgaattacttcttcttgaagcatttggaagtggttttacttggggatctgctttaattaggtattaaa

SEQ ID NO: 235221 - DNA, 1066 bp, Unknown
  Bacterial polypeptide expressing nucleotide sequence isolated from the Sargasso Sea
catgcagtacgccactatcactggctggggaaaatgtgttcctcccgccactttgactaacgatgatcttgctacttttatcgaaacttccgatgaatggattaaaagccgtaccgggatcagccagcgtcatatcagccatgtgaatacctctgagttagcatcggttgccgctaaacgcgcccttgctgcggcgggcattgacggcagcgaaattgatatgatcattttagccagcgccagcccagataccttgatcccgaatattgcctccacagtccaggccaatatcggtgcaagttgcgcagccttcgatatcaacgcggcctgcagtggctttttgtatggcttaggcttagccagctcacagatcaagagtggccaatgcaaaaaagtactagtcgtcggtgccgagcgtttatctttctatctcgattggtcacgccgtgaaaccgcagtactgtttggtgatggcgctggcgcggttgtcgtggaagcgacggatgtgccaggcggtgtgttaggctatgagctgaataacgaccctgacggtcgcgatatcctaaaagccggttttggtactgctatggatagattctctgccgaatccttagacttttatattcaattcgatggccaagaaatctttaaacgtgccattaacggtatgaataagttaagcactcaagtgctggaaaaatgtggcgtcgataaagatgaagtcgacttggtgatcccacaccaagcgaacgagcgcattatcgataccctcgttagccgcatgaagatccctaaagaaaaagccttcgtgaacatcgctaactatggcaatacctctgcggccactatccccatcgccatctgcgatgctttggaaaaaggtttaattaagccaaatcaaaccattctgtcatgtgccttcggtgcggggttaacttctgcagcgctgctattgcaatggggcgagcgcgtaacgccggttcaagtgagtgatgctcagctgccaccttgcgagttgagtggcattgagctggttaaacgtgcagtggattatttctgtaagtaa

SEQ ID NO: 235222 - DNA, 1009 bp, Unknown
  Bacterial polypeptide expressing nucleotide sequence isolated from the Sargasso Sea
aatgtataactcaagaatttcggggcttggaatgtatgttccagaaaatattgttaccaatgatgatctttctaaaattatggatacctccaatgaatggataattgaaagaacaggaataaaagaaagaagacatattaaaaaaggtgatggtaattcaactgtcgttatgggggttaaagctgctaaaattgcaatagaaagagcaggcattgataaagatgatattgacttaatactatttgctactttaagtccagactattattttcctggaagcggagttcttgctcaagaagagcttgatatccctacttgtcctgccatggatataagaaatcagtgttcaggattcatatatgccatttcaactgctgatcaatttatcaaatctggtatgtataaaaacatccttgtaattggttcagaaaatcattcaggaggactagattttacaacaagaggaagaggtgtaagtgtgatttttggtgatggggcaggtgctgctgttgttacaagggaagaagatctttcaaaagggattctttcatctcaccttcattcagaaggaaagcatgcagaagaactgtcattaataggtcctagtacaaataggtgggttccagaaattttagaagcaaatgatcctgacgatatatcttactacccatatatgaatggccagttagtttttaaaaatgcagtggttagattttcagaggtcataatggagggattaaatcataatgatattaagcctaatcaaatagacatgctaatccctcatcaggcaaacctaagaatatctcaatttgttcaaaaaaagtttggtttatcagatgatcaagtttataataatattcaaaaatatggtaacactactgctggatcaatacctattgcattaacagaggcatggcaggaaggaaaaataaaatcaggagatataattgttcttgcagcttttggaagtggttttacatggggtagtacaattattaaatggtaa

SEQ ID NO: 235223 - DNA, 799 bp, Unknown
  Bacterial polypeptide expressing nucleotide sequence isolated from the Sargasso Sea
tatgctgagggaaaaagcgatagaagatgcaaatatacaggtctctgatttaaatgctataattttagctacttcaacagccgatctgactttcccatcagcagcaacaatggttcaagccggtctaggaataaggcatgggtttgcttatgatattcaagcggtttgtgcaggttttatctatgcattatcaacggccaatgctcagatagtttcggggcaagcgaataagatattggtaattggttctgaaactttttctaatttgatggattggagcgatcgatcaacttgtgtgctattcggtgatggtgctggcgccgtcgtattagaggctcagaattcaaatggaaacaaggaagaccggggtattttgtcagtagatcttcattctgatggtagctatagggacatcctatacgtggatggcggggtttctcaaaaaacaactggttatttgagaatggaaggaaaagaggtctttaagcacgcagtggataaattagcaaaaacatcggaaaaagctatggccaaagcaggggtaaaatctggtgaagttgattggattgtacctcatcaagctaatgttaggataatacaaggtacggcccgtaagatgggcatacccgatgaaaaagttattaaaactgttcaagatcatggtaatacatctgcagcttcaatacctttggcactatcagttgcgtcaaaatccggacaaataaaacaaaatgacttaatcgtaactgaagcaatagggggaggtttggcctggggggcaatagttttaagatggtga

SEQ ID NO: 235224 - DNA, 624 bp, Unknown
  Bacterial polypeptide expressing nucleotide sequence isolated from the Sargasso Sea
gatgaatcatgcgggctcaagtattctcagaggcgtagggtcgtacgcgcccgcccgaaaactggacaacctggagctgagccaaagggtggaaacgagcgatgaatggattacgacccggaccggaattaaggagcggcgcattgccggtgattccgaaagcaccagtgacttggccgtggaggcctctcgtcgggccattgccgatgccggcctccgcgtcgaggacgttgatttggtcatagtggctaccattacgcccgacatggctttcccctccacggcctgcctactgcagcacaaactcggtatccccaaggttgcctgctttgacttggaggcagcctgctccgggtttctctacgctcttgacgtagctgatggaatgctcagctcaggccgctaccaatgcgccttggtcgtaggggctgagaaactgtcgaccatcatggactgggaggatcgcacgacctgcgtgctctttggggatggagctggggccgctgttcttgccagagagggggagggcgccgaaatgcttggcttccagtgtggcgccgatggctcgaacccttcccttctgcagcaacccgccggtggctctcttttgccggcatccaacga

SEQ ID NO: 235225 - DNA, 1096 bp, Unknown
  Bacterial polypeptide expressing nucleotide sequence isolated from the Sargasso Sea
ttgaaatcagcaataacaggttggggtaaatgtacgcccgataacattatgactaatgatgatttgtcaaaatttgttgatacttctgatgagtggattcaacaaagaacaggggtaaaagaacgaagatttagccatgtaaacacatcagatatggcagaaattgccggtaaacatgcaatagcctgtgctggtttaaatccagaagatattgatgttgtaatcttggctacatgtactcctgacagtattgttccctctgcagcagctcacgttcaaaaaaaacttggtgctgtaaatgcctcagtttatgacgtaaatgcggcttgtgcaggttttctatatgcacttgaacaaggaaaagcattcgttgaaagtaatctttataaaagagctttggtaataggggcagagcatattacttggttacttgattggtctgatagaaataccgcggtgctttttggtgatggtgcaggtgcagtagttattgaagaaagtaaaagtgaatcagatggtgaaatttattcgttctcaaatggcctaagttcagacaatttagaaatcttagaaattcctaattttggttcagcaatggatcgatttaaaactgatgaagcagctagagtacggtggacttttgatggacaggaaatatttaaatctggtgttagagctatggcacaagcgtctgcagaagctattgaaaaatcaggattatcaaaagacgatgtagacatttttattccacatcaagcaaatatcaggatcgttgaagcacttgaaaaaaaacttggacttcctaatgcaactacaatcaaaaaagttcatcgatacggaaatacctcggcggcatctataccaacagcatttgtagatgctcttgaagaaggtgagataaaaggtggagaaattgcagtatttacggccgtcggcgctggtcttgcttggggagcttgtgcggttcgactaggagatcgtgtaactccaataaataaatcagatgcaaaacttccagattttgatggaactgcaaccgacacaattaaaaaagcaatcgagtatcaagttccagacaaattagacaaaatatgaa

SEQ ID NO: 235226 - DNA, 1069 bp, Unknown
  Bacterial polypeptide expressing nucleotide sequence isolated from the Sargasso Sea
atgggaattgaaatcacaggctggggtaaatgcactccatctgccgttctaacaaacagtgatcttgagtctattctggataccgatgacgagtggattaccactaggaccggtgttaaacagagaagaatagcagaagcaccgctaagtgaaattggaaccatagccgcaaaacatgctcttgccgcagctgataaggatcccaatgaaattgatgcagtaatgatggccacttgtacgccagaatttttaatccccagtactgcatctagagtgcaaatgaatattggtaacaacaccgctgccgcttttgattttaattcagcatgctcaggttttgtttatggcctaacaactgcttactcaatgattcactcgggaatatttaacaatgttctacttgttggcggagagaaggttagctatttcctcgattggactgctcgcgatactgctgttctctttggcgatggagcaggggcagtattgatagaaaaaacgaatacagattctaagctgcattcttctaaaatgacttgtgatccattcttaggagaagcattgatgctgaaaaactttggaacaagtatggagatcaaggatccaaaggaaggttacttctttggcataagttttgaaggacaagagatctttaaaaatgcagtcaaaaccatggcaagactagcagaagaagccttggaggaatctggacttagtgttgatgacattgatctttgtattcctcaccaagcaaatcgaaggattcttgaagcaacggccaaaagatgtaattttccaatggaaaaaatgatcattaatttggatcggtatggaaatacatcagctggttcaataccgatcgctctcacagaagctctcgatgaaggtaaagttaagcctaactctaaaatactctttcttgcatttggtggtggactcactggtgctgcagcagtcattgattggggagggcgttcacatgccctaaagacatcaaatgagcaactgccagatagcggtaaaaccgctttggaactcgtccaagatatactcaatatgtatcaataga

SEQ ID NO: 235227 - DNA, 898 bp, Unknown
  Bacterial polypeptide expressing nucleotide sequence isolated from the Sargasso Sea
tttggaaaaaatggtggaaaccagtgaccaatggattgttgaacgtacaggtatttcagagcgtcgcatcgcggcgcaagacgaaactgtctcaactatgggctatcaggcggcattaaaggcgctcgagatggctggcatagaagcatcagagttagatatgatcatttgtggcaccaccagtgcggcaaatgccttccctgcggcggcctgcgaaattcaagccatgctcggcgtacacaccattccagcctttgatattgcggcggcttgttcaggttttgtgtatgccttatccgtggcggaccaattcgttaaaaatggtaccgcgaaaaaagtcctcgtgattggcgccgacgtattatcccgtctgtgtgagccagaagatcgcactactattatcctatttggtgatggtgcaggggcggcggttatcggtgcttccgatgagcccgggattatttcaacccatatttatgccgatggtcgtcaaggtgacttgcttaagtgcgccttccctcctcgtcagggggaaacctctgaagcggttggctttatgaccatgaaaggcaatgacgtctttaaagtggcggtgactcagttatcccatgtagtcactgaaacattgcgcctgaataatatcgacaagtcggaaatcgactggttggttcctcatcaggctaacttccgcattattaatgccacggcgaaaaagctagacatgagcttagataaagtggtgttaacccttgccaaacacggtaatacctcggcggcgtcggtaccgattgccttagacgaagccgtgcgtgatggccggatccaacgtggccagctattgctgctcgaagccttcggtgccggttttgcgtggggcagtgcgctcgtccgtttttaa

SEQ ID NO: 235228 - DNA, 979 bp, Unknown
  Bacterial polypeptide expressing nucleotide sequence isolated from the Sargasso Sea
aatgtcaggcgaaaaattttttcgatcaaaagttataggggtaggcggctatttaccagataaggttgtaactaatgatgagctttctaagactgtagaaacaagtgatgaatggattaaggaaagaactggaatacaagagagaagaattgctgatgaatctgaaactacttcatcgttaggaattcaagctgcaaaaaatgctataaaaaatgcaggaatttcttcgcaagacatagatttgataattttagctacggctactcccgataacacctttccagcaacagcaacatcaattcaatctggattgggaataaaaaaaggatatgcttatgatgtgcaagcagtatgttcaggatttgtatatgcccttgaacttgcagacaatgcaataaggcttggaaagtctaattacgcattagtcattggttcagagacattcagcagaattcttgattggaatgatagatcaacatgcgttctatttggagatggttcaggggctgtagttttaaaatctactgattatagctcttctagccaaattttaagtaatcacctttattctgacggtgattacaaagatatgctttatgttgatggaggtccatccacttcaaataatgttggttttcttagaatggatggaggtggtgtctttaagcatgctgtaaagaatatttcttcatcaataattgaggctcttaataccaataatatgacaattgaagatattgattggtttgtaccccatcaagccaactcaagaattttagatgctgttgctaaaaaaataggtatagaaaaagacaagattattgtaactgtagacaagcacgcaaatacatctgcagcatctataccgctagctttaaatgaagctgtttataataataatattagcaaaggtgatattgttttattagcagcaatgggcggaggttttacatggggttcaagcttaattagatggtag

SEQ ID NO: 235229 - DNA, 1096 bp, Unknown
  Bacterial polypeptide expressing nucleotide sequence isolated from the Sargasso Sea
ttgaaatctacgattaccggttggggtaaatgtgtgcctgataatgttgttacaaatgatgatcttgctacctttgtggacacttctgatgagtggattcaacaaagaactggcgtaaaagaaagaagattttgccatgtaaataactctgatatggcaactgttgcagggcttagagctgttgcatgtgcaggattaaaacctcaagatattgatgttgtaattcttgcaacatgtacaccagatagtattgttccatcagctgcagcccacgttcaacaaaaaatggagtgtgtaaatgctacagcttacgatgtaaacgctgcttgtgctggttttctttatgcattggaacaagcaaaagcatttgtcgaaagtggattatataaaaatgcggtagtaattggatcagaacatattacatggctgcttaattggtctgatcgaaatactgcagttttatttggagatgctgcaggagcagttgttgtcgaagaaagtaaaaatgaagaagatggtgaaatctattctttttcaaatggtatgagttcagataaattagatattttagaaatacctaattttggttcagctatgaacagattcactccaaatgctgcggcagatgtagtttggacttttgaaggacaagaaatttttaaaagtggtataagagcgatggcaaaatcttctgaagaagcaatagaaaaatctggattaaaaaaagaagatatcgatatccttattccccatcaagcaaatgtaagaataatagaaggattggaaagaactttaaagcttccaaatgctactactttaaaatatggatataagtatggaaatacttccgctgcttctattccaactgcatttgttgatgcaattgaagatggaacaattaaaggaaatgagacccttgttataacagcagtaggagcaggattaacttggggtggggcagctctaaaattaggaaatagaattactccattggatgaaactgatgttgatcttccaccatatgaaggaactggaatagatgttattagggaatcaattaactattttgttcctgaaaaagcagaagaaaaatgaa

SEQ ID NO: 235230 - DNA, 391 bp, Unknown
  Bacterial polypeptide expressing nucleotide sequence isolated from the Sargasso Sea
tatgctttatgttgatggaggtccatccacttcaaataatgttggttttcttagaatggatggaggtggtgtctttaagcatgctgtaaagaatatttcttcatcaataattgaggcccttaataccaatgatatgacaattgaagatgttgattggtttgtgcctcatcaagccaactcaagaattttagatgctgttgctaaaaaaataggtatagaaaaagacaagattattgtaactgtagacaagcacgcaaatacatctgcagcatctataccgctagctttaaatgaagctgtttataataataatattagcaaaggtgatattgttttattagcagcaatgggcggaggttttacatggggttcaagcttaattagatggtag

SEQ ID NO: 235231 - DNA, 982 bp, Unknown
  Bacterial polypeptide expressing nucleotide sequence isolated from the Sargasso Sea
atgaaagctaaaattaccgctactgctaaatacctccccgaaagaacgctaactaattcagatttagaaaaaatggttgaaacaactgatgaatggataaagtcacgcactggaatagaaaaaaggcatctggttggagaaggcgaggctacttcagatatgggcaaagaggtagcattaaaacttttgaaaaaatctggtaagtcagcagatgaaatagatttaatacttgtagcaacaagtactcctgattttcccgttgtatcaaccgctgcgcttgttcaagataaaattggtgctaaaaatgcttggggatatgatatagttgcagcatgcacagggtttgtctatgcaatggagacaggtgcaaaacttgttgagtcaggaaaatataaaaatgtgattgttattggtgcagatactatgagttcgatcattgactataccgataggaatacatgtgtaatttttggagatggtggaggtggggttctactagaaccttccaaaaatgattgcggaattttagattcaatattatttgccgatggaagtgggcataaatatttaacagtgccagcaggtggaagtcttcatccggcatccaaggatacagttaataagggattgcactacgtctatcaagatggtaaaacagtttttaaatttgcggttaaaaatatggcggatgtaagcaaacaaatccttgataacaataatctttcaggaaaagatctaaaactttttatcccgcatcaagcaaataaaagaattatagatgccgctgccaagcgttgtcagctcactgatgaccaggtattaattaatgtaaataaatatggaaataccacagctgggacaattccaatagcgctcgatgacgcagtagaggctaatattctagaaaaaaatgatttactattgtttgcagcatttggcggaggcttcacatggggaagcatgttaatcaaatgggcataaa

SEQ ID NO: 235232 - DNA, 994 bp, Unknown
  Bacterial polypeptide expressing nucleotide sequence isolated from the Sargasso Sea
tatgtataaaagcaaaattataggaatgggttttaaggtaccagataatatcatttcaaatgatgacctctcaaaaataatggacacatcagatgaatggattcaatccagatctggaataaaagagcgaagatgggcaacggaagaagtaacaacctcagatctagccttttcagctgcaaataatgcgattaaaaatgcagaaataaataataaagagattgatttggtaattgttgggactctttcttcagattattttttcccaggagtaagtgcacagctacaagaaaaattaaatttaaacctggttggggcttttgatattaaagctgcctgctcagcttttatttatagtctatcaattgccgatcaatatattaaaacgggagcagctgaaaccatacttgttgttggggctgaaactcaaactaaattaattgaaaaatcttcggaaggtcgtgacgttgcagttctttttggtgatggagcaggtgctgctatagttcagcgcagtgatgatgaaagccagatattatcaacacatcttcactcacaaggaaaagatttaaaaaatctatggatggaagcacccggaactagcaaggggagctggtttaaagaaaataaatttgatcagaaaaaatttactccaaagatgaatggtagagaagtatttaagaatgctgtgaaacgatttcctgaggtaattcatgaggctcttgatcacaataatttagattttaatgatattaaattaatcattcctcatcaggcaaattatcgcattagcgaagcagtagctaagaagctcgaagtaggaatggataaagtttatagcaatattcacaaatatggaaatacaacatcagcatctattcctatcgcccttaccgaagctatctattctaagaaaataaataaaggggaccttattattttagctgcatttggagcaggttatacttgggcatcagcagctatcaagtggtaa

SEQ ID NO: 235233 - DNA, 979 bp, Unknown
  Bacterial polypeptide expressing nucleotide sequence isolated from the Sargasso Sea
aatgtctgaaaatttatataaaagatctaaaattattggggtaggtggttatcttccgagtaaagttttaaccaacaatgatctttctaaggatgttgatacaagtgacgaatggattactgaaagaacaggcataaaggaaagaagaattgcagatgaatctgaaacaacttcatcacttggaatcgaagcagcaaaaaaagcaattcaaaatgccggaatctcatctaaagatattgatttaatagttgttgctaccacaacacctgataacacatttcctgctacagcaacatcaatacaatcaggtttaggtattaagaaaggctatgcttatgatgtgcaggccgtttgctcgggatttgtatatgctcttgaattagcagataatgcaataagattaggtaaagctgattatgcgcttgtaataggatcagaaacattcagtagaattattgattggaatgacaggtcaacttgcgtactttttggagatggctctggtgctgttattttaaaatcaacagatgaagattcttcaagctcaattttaagcaatcacctttattctgatggcgattataaggaaatgctctttgttgatggcggaccttctacttcaaataatgttggtctcctaagaatggatggtggaggtgtttttaagcatgctgttaaaaatatatcatcagcaataattgatgcattagaggctaatgaaatgacaatcgaagatgttgattggttcgtgcctcatcaagccaactcaagaattttagaatctgtcgcaaaaaagataaatattaataaagaaaaaataattgttacagttgataaacatgcaaatacatctgctgcttcaattcctttagctttaaatgaagccaataagaacaatcaaatcaagaaaggtgatatagttttgttggcggcaatgggtggtggttttacatggggttcaagtttaattagatggtag

SEQ ID NO: 235234 - DNA, 1090 bp, Unknown
  Bacterial polypeptide expressing nucleotide sequence isolated from the Sargasso Sea
atgaaatacgccaatatcacaggctggggcaaatgcctgcctccctccgtactgaccaacgacgacctcagcaccatcatggatacgtcggatgagtggatctacccgcgcaccggcatcaaggctcgccgcatctcccacgtcagcacctccgatctggccaccctggccggccgtcgtgcactggcctgcgccgggctggaagccagcgacctcgacggcatcatcctggccaccgccacgccggacaacctgctgccgagcgcagcctccgcggtgcaaaagaagctgggcgccgtcaatgctgccgtgttcgacctcaacgccgcctgcaccggtttcgtctattccctctcggttgccacctcgctggtacagaccggcatgatgaagaaggtgctggtgatcggcgccgagcgactcacctatctgctggactgggcccgtcgcgataccgccgtgctgtttggcgacggtgccggcgccgtggtgatcgaagcgagcgagcaggagagcggcctgatcgccaacaagctgggttgtgacagcgaagcgcgcgagatcctgcacgtgccgaacttcggtaccgaccgggtgcgctttgccgacatcgacggcctcttcaccttcaacttcgaaggccaggagatcttcaagcgggccgtacgcggcatgggcgaagccaccaacacggtactggcgcaggccggtatcgctccggagcagatcgacctgatcgtgccgcaccaggccaacatccgcatcatcgagacccttgccaagcgcatgaacgcgccgatggagaaggtgatggtcaacatcgagcactacggcaacacctccgccgccaccgtgcccatcgccctgtgcgaggcactggagcagggccgcgtccagccgaacagctatctgctgaccgccgccttcggtgccggcctgacctggggcgccgccatcatcaagtggggcgatcgcgtgacgcccatcaaggcgtgcgaggccgaactgccgccgtgcgacaagagcgcgctcgagcttatcgcccatgccgtggaagggtgccagaaagcccacgccgacgaagcgtaaa

SEQ ID NO: 235235 - DNA, 1096 bp, Unknown
  Bacterial polypeptide expressing nucleotide sequence isolated from the Sargasso Sea
ttgaaatcagcaataacaggttggggtaaatgcacgcccgataacattatgactaacgatgatttatcaaaatttgttgatacttctgatgagtggattcaacaaagaacgggtgtaaaagaacgaagatttagccatgtaaatacatcagatatggctgaaattgctggtaaacatgcaatagcctgtgcaggtttaaatccagaagatattgatgtcgtaatcttggctacatgtactccagatagcattgttccctctgcagcagctcatgttcaaaaaaaaattggtgctataaatgcttctgtttatgacgtaaatgctgcttgtgcaggttttctgtatgcacttgagcaaggaaaagcattcgttgaaagcaatctttataaaagagctttggtaataggggcagagcacattacttggttgcttgattggtctgatagaaataccgcagtgctttttggtgatggtgcaggtgcagtggttattgaggaaagtaaaaatgaatcagatggtgaaatatattctttctcaaatggtttaagttctgacaatttagaaatcttagaaattcctaattttggttcagcaatggataggtttaatcctgacgaagcagctagagtgcgttggacttttgatggacaggaaatatttaaatctggtgttagagcaatggcacaagcatcagcagaagctatagaaaaatcagggttgtcaaaagaagatgtagacatttttattccacatcaagcaaatattaggatagttgaagcactcgaaaaaaaacttgggcttcctaatgcaactactattaaaaaagttcatcgatacggaaatacttctgcagcatctattccaacagcatttgtagatgctcttgaagagggtgagataaaaggtggagaaattgcagtctttacggccgtcggagctggtcttgcctggggagcttgtgcggttcgattaggagatcgtgtaactccaataaacaaatcagatgcaaaacttccagattttgatggaactgcaaccgacacaattaaaagagcaattgagtatcaagttccagataaattagacaaaatatgaa

SEQ ID NO: 235236 - DNA, 1009 bp, Unknown
  Bacterial polypeptide expressing nucleotide sequence isolated from the Sargasso Sea
tatgacctctaacaataaaaaacatataaaggcctctataactgcagttggaggttatttgccagaggactctctttcaaataaagatttagaaacgatggttgacactagtgatgaatggatcaaagcacgaaccgggattaaaaaaaggagagttttaaaagaaaaagggaaaggcacttcatatttagcagtcaacgcagctaataatctcttagctagaaaagaaatagaccctacaacgattgatttagtgattgttgcaacaattacacctgattttcattgtgcttctacagcacctacagttgcttctgcaataaatgcaataaatgcatacgcatatgatataagtgctgcatgttcaggatttctttttggaatgtctacagcatcttcttttattgaatcaggtagatataagaaaattctcttaattggtgcagatatgatgtcctctattgtagattatacagatagatcaactagtatattatttggtgatggagcaggtgctgttttggttgaaccaagtacaaatggatatggttgggaagatgaatatctgagatctgacggaattggtgcagagtggcttaaagtaaaatctggaggatctctttttccagtatcatcagaaactttaaataataaatggcatttcataactcaagatggaaaaactgtatttaagtatgctgtatctgaaatggcaaacgccacagagcagattatgattagaaataaactaaaatctgatgatataaaatatcttcttcctcatcaagcaaacaaaagaattattgatgctaccgcagaaaagattaatttagataaaaaaaaggttcttatgaatattgaacaatatggaaacaccactgctgctaccatacctttattaatgtatgattatgaggataactttaaagaaggagataaattaataattgctgcatttggtgcaggtcttacttggggagccgcatatttaacttgggcatacaattaa

SEQ ID NO: 235237 - DNA, 1066 bp, Unknown
  Bacterial polypeptide expressing nucleotide sequence isolated from the Sargasso Sea
atgcagtacgccacaatcactggctggggaaaatgtgttccacccgccactttgactaacgatgatcttgccacttttatcgaaacatccgatgaatggattaaatcacgcacagggatcagtcaacgtcatatcagccatgtgaacacctcggaattagcctcagttgccgccaagcgtgcgcttgcagcggctgggattgagggcagcgaaattgatatgatcattttagccagcgctagcccagatactttgatccccaatatagcctcaacagtgcaggccaatattggtgcaagctgcgcagcctttgatatcaacgccgcctgcagtggttttttgtacggcttaggtttagcgagctcacagatcaagagtggtcaatgcaagaaagtcctcgttgtgggcgccgaacgcttatctttctacctcgattggtctcgccgtgaaaccgccgtattgtttggtgatggcgcgggcgcagttgtcgtggaagcgaccgatatccctggtggcgtattaggctatgagctgaataatgatcccgatggccgagacatcctcaaagcgggtttcggtaccgcgatggatcgattctccgccgaatcattagacttttacatccaatttgatggccaagaaatttttaaacgcgccattaatggtatgaataagctaagcactcaagtgcttgaaaaatgcggcgtcgataaggatgaagttgatttagtgatcccacatcaagcgaacgagcgcattattgataccctcgttagccgcatgaagatccctaaagaaaaagcctttgtgaatattgctaactatggcaatacatcggcggcaacgattccaatcgcgatttgtgatgcactcgaaaaagggttaattaaaccgaaccaaaccattctttcttgcgcctttggtgcgggattaacctctgctgcattgctattgcaatggggtgaacgtgtcacgccagtgcaaatcagtgatgcccaattaccgccttgcgatcaaagtggaatcgagttggtaaaacgcgctgtagactatttctgtaagtaag

SEQ ID NO: 235238 - DNA, 574 bp, Unknown
  Bacterial polypeptide expressing nucleotide sequence isolated from the Sargasso Sea
gcagatcaattatcaagttttgttgattggaatgatagaagaagttgtattctctttggagatggtgccggtgcattagcaattgaagccacaaatgaatttgataattttataggttttgatatgagaactgatggggggaggggttcttttcttaatcttccatcaaaaaataataaggattcaatagtcgatgaaattgactttttaagtggaggtttttctccaattcagatgaatggtcaggaagtttataaattcgcagttaaagaagtccccctaattcttcaaaagttgttgaaaaaaatgaattacaattctaatcaagttgattggctcttgttgcatcaagctaatcaaagaatattggattctgtaggagaaaggttaaaaattcccagagaaaagattcttagcaatttagaaaaatatggcaatacgtcagcagcaacaattccactaatgatggatgaggctgtaagagattatagaattaaacaaaatgatattattgctacaagtggtttcggtgctgggctaagttggggtgcagccctaattaaatggggttaaa

SEQ ID NO: 235239 - DNA, 735 bp, Unknown
  Bacterial polypeptide expressing nucleotide sequence isolated from the Sargasso Sea
catcaagtaatcatgcgattggaactagcgcaagattgatagcttatggagatgcagatgttatggttacaggaggttctgaaatggcaactacaccgttaggggtttcaggttttcttgcatcaagagctttaagtaaatccgatgatccaaaaacagcaagtagaccatgggacaaagatcgtgatggttttgtattgtcagatggagccgcaattctagtattagaagaatatgaacatgccaaaaaaagatcagcgaatatttatgcagaagttattggttttggcatgagttctgatgcttatcatatgaccgcaccatcagaggacggaactggtgcctcattatcaatttctagagcaatatcagatgcaggcatttcaacaaatgatattgattatataaatgctcatgcaacatcaacacctctgggtgatcttgcagaatgtaatgcggttaaatctatttttgattcacctccaccaattagctcaactaaatctatgacaggtcatactttgggtgcggctggagcggtagaatcaatattttcaattttatctattgttaataatatttctccaccaacaattaatttaaataatcctgatgaaggatgtgatttagatttcattccaaaagaagctagagatatgaaaatagatgtttcgttaaataattcatttggttttggtggaactaactcaactcttatttttaaatctgtctaat

SEQ ID NO: 235240 - DNA, 988 bp, Unknown
  Bacterial polypeptide expressing nucleotide sequence isolated from the Sargasso Sea
ttgagagctactattacagcgacagcaaaatatttaccaaaaaaaacattatcaaactatgatctagaaaaaatggttgatactacagatgattggattatttcacgaacgggaattgagaatagacatattgttgatgataatgaagctacatcagatatgggtgctcaaatagctaatcaattattagaaaaatcaggaaaatcccctgaggatattgatcttattcttgttgctactagcacacctgactttccagtagtctcaactgcagctttagttcaagataaaattggcgcaagaaatgcatggggatacgacattgtagcagcttgcacagggtttgtatatgcaatggaaaccggtgccaggttaatcgagtctggtcgttacaagaatattatcgttattggatccgatacaatgagttctataattgattatacagatagaaatacttgcgtgatttttggagatggtggtggaggtgttattttagaaccaactcagaaagaagttggtattttagatgctattttacatatagatggtagtggccacaaattcttaactgttcctgctggaggaagctccaatccagcttcaaaagaaacgatagataacaaaatgcattatgtttatcaagatggtaaaacagtatataaatttgctgttaaaaatatggctgatgtaagtaaaaagattcttgataataataatttacaaggaagtgacatcaaattatttattccacaccaagcaaatagacgaataattgatgctgcagcgaaaaggtgtggattagaagataaacaggtatttgttaatattaataaatatggtaacactactgctggtacaatccccatagcgcttgatgaagcagttgaaactaatcgtctagaagaaaaagatttattgctgctttctgcttttggaggaggattcacatggggaagtatgttaatacgctggggacggccttaat

SEQ ID NO: 235241 - DNA, 937 bp, Unknown
  Bacterial polypeptide expressing nucleotide sequence isolated from the Sargasso Sea
atggcatttgggcgaattacaggatgggctatagatcttcctgaaagaatccttacaaatgatgaactatcgcaaatggttgacacttcagatgaatggatcaaagaacgaagtggaatttcctctcgacatattgatgggaaagtaagcgaaatgtctactaatgctgggaaagccgctttagaaaaagctggagtcaaacctgatgagatagacctatttatccttgcgaccacaactgctgacaaggtcgtgcctgctacttcttctattgtgcaaaataatcttggtttatcctgcggagctttcgatctaaatgccgcatgctccggttttgtttatggacttgttaccgcaatgcaatttgccgatagtggaatggaaaagattctgctaattggaagtgattccctaagtacatttacagattgggaagatagaacaacctgtgttctattcggtgacggtgcaggggcagttgttatagaaagaacttcagatcaaccatgttttctcggctgggatctcatggctgatggttctgctgctgaccttctctattgtgaacatggtggaaaaatcgtaatgcatggacaagaggtttttcgtcgtgctgtcattgctatggaaaatgccgccaatacggcaatggaaaaagccggagtgacaagtgatgatatttcacttgttgttccccaccaagcaaatgttcgcatcatcgacgctgctatgaaacgcctcgggatcgcgaatgaaaaagcagccttagtaatggataaaacagggaatacctctgctgcttctattcctttagctcttatagattcaatcgactcaggtcgagttaagcaagatgacttattgcttctcgtcggatttggtgcgggaatgacttcagccgctgcagttgtcaggtggaattctgagggtaattaac

SEQ ID NO: 235242 - DNA, 1009 bp, Unknown
  Bacterial polypeptide expressing nucleotide sequence isolated from the Sargasso Sea
tttggaaggaataaattttaatcagattggattatcattcaagggaagcggaagttatgtacctgatcaaatcctaaccaatcaaaaaattagtcaaaaggttgatacaagcaatgaatggataaaatctagaacgggcatttctgagagaagaatctctaccttaggagataatgttactgagatgggttataaggcggctttaacagctatagaaatggctaattgggatattaaaacgattgatttgattgttttagctacttctactccgcatgatttatttggatcagcgccatccattcaggctaaattaggggcggctaatgcagtcgcttttgatttaactgccgcatgtagtggtttcttatttgccttaattacagcttcacaatttttaaaagggggtagttttaaaagggctattgttataggagcagatcaactatcaagctttgttgattggaatgatagaagaagttgtattctctttggagatggtgcaggtgcattagcaattgaagctactaatgaatttgataatttaattggttttgatatgagaactgacggagaaaggggttcttttcttaatcttccatcaaaaaataataaggattcaataattgataacattgattttttaagtggatctttttctccaattcagatgaatggtcaggaagtgtataaatttgcagttagagaagttccgataattcttgaaaagttgtttaaaaaaatgaattatacttccgatgaagttgattggcttgtattacatcaagctaatcaaaggatattggattctgtaggagacaggttaaaaattcctggagaaaaaattcttagtaatttagaaaaatatggtaatacttcagcagcaacaattccactagtgatggatgaggctattagaaataatagaattaaacaaaatgatattattgccacaagtggttttggtgctgggttaagttggggtgcagccctaattaaatggggttaa

SEQ ID NO: 235243 - DNA, 1009 bp, Unknown
  Bacterial polypeptide expressing nucleotide sequence isolated from the Sargasso Sea
tttggaaggaataaattttaatcagattggagtgtcattcaagggaagtggaagttatgtacctgatcaaatcctaaccaatcaaaaaattagtcaaaaggttgatacaagcaatgaatggatacaatctagaactggtatttctgagagaagaatctctagcgtagaagataatgttactgagatgggttataaggctgctctaactgctatagaaatggctaattgggatattaaaacgattgatttgattgttttagctacttctactccgcatgatttatttggatcagcgccatccattcaagctaaattaggggcagctaatgctgtagctttcgatttaactgcagcttgtagtggatttttatttgccttaataacagcctcacaatttttaaaagggggtagttttaaaagggctattgttattggagcagatcaattatcaagttttgttgattggaatgatagaagaagttgtattctctttggagatggtgccggtgcattagcaattgaagccacaaatgattttgataattttataggttttgatatgcgaactgatggggggaggggttcttttcttaatcttccatcaaaaaataataaggattcaatagttgaagaaattgactttttaagtggaggtttttctccaattcagatgaatggtcaggaagtttataaattcgcagttaaagaagttcccctaattcttcaaaagttgttgaaaaaaatgagatataattctgatcaagttgattggctcttactgcatcaagctaatcaaagaatattggattctgtaggagaaaggttaaaaattcctagagaaaagattcttagtaatttagaaaaatatggcaatacttcagcagcaacaattccactaatgatggatgaggctgtaagagattatagaattaaacaaaatgatattattgctacaagtggtttcggtgctgggttaagttggggtgcagccctcattaagtggggttaa

SEQ ID NO: 235244 - DNA, 1006 bp, Unknown
  Bacterial polypeptide expressing nucleotide sequence isolated from the Sargasso Sea
gatgaaacctaacaaaacaaatattaaagctgcaattactgcagtaggaggatatgttcccaaagactttatttcaaataaagatttagaaaaacttgttgataccaacgatgattggattacagcaagaacaggcataaaaaaaagaagaattcttaaagataaaggtaaaggaacctcatttttggctattaatgctgctaaggatcttatagcaaagaaaaaaatagaccctgaaacgatagacttagtaattgtttcaactataacacctgattttcatgttgcatcaactgctcctactgtcgcttcagcaattaaagcaaagaatgcctatgcttatgacttaagtgctgcatgttcaggatttctatacggtatgtctacagccacaagtttcattgaatcaggaagatataaaaaggtccttataataggtgcagatatgatgtcctcaattgtggactatacagataggtcaacaagtattctttttggagatggagcaggggctgttttagttgagccaagcattaatggatatggttgggaagatgagtaccttagatcagacggtattggtgcagagtggttaaatattaaatccggagggtctcttcatcctatatcaagtgagacaattgaaaataaatggcattatatagctcaggatggaaaaacagtttttaaatcagctgtatcagagatggcaaacgctacagagcaaattattctgagaaatagacttaaatctcaggagataaaatacttaatcccacatcaagcaaataaaagaattattgatgctaccgcagaaaagattaatttagataaaaataaggttcttatgaacattgagaattatggaaatactactgctgctacaatacccttattaatgtatgattatgaaaaaaacttaaataaaggtgacaaactaattctagctgcctttggtgctggtttaacatggggtgcagcatatttaacatgggcatataactaa

SEQ ID NO: 235245 - DNA, 1069 bp, Unknown
  Bacterial polypeptide expressing nucleotide sequence isolated from the Sargasso Sea
catgggaattgaaatcacaggctgggggaaatgcactccatctgctgttctaacaaatagtgatcttgagtctattctggataccgatgatcagtggattactactaggacaggtgtcaaaaaaagaagaatagcagaagccccgctaagtgaaattggaaccatagcggcaaaacatgctctagccgcagctgataaggatcccaatgaaattgatgcggtaatgatggccacctgtacgccagaatttttaatccccagtactgcatctagagtgcaaatgaatattggtaataacaccgctgccgctttcgattttaattcagcttgtacaggttttgtttatggcctaacgactgcatactcaatgattcaaacaggaatattcaaaaatgtcctacttgtaggtggagagaaggttagctatttcctcgattggactgctcgcgacaccgctgttctctttggcgatggagcaggggcagtattaatagaaaaaacggattcagaatcaaaactgcatgcctcaaaaatgacctgtgacccatttctaggtgatgccttaatgctcaaaaactttggtaccagcatggaacttaaagacccaaaggaaggatatttctttgggattagttttgaggggcaagagatattcaaaaatgcagtcaaaaccatggcaagacttgcagaagaagcattagaggaatctggacttagcgttgacgatattgatctttgtattccgcaccaagcaaatctaaggattcttgaagcaacagcaaaaagatgtaattttccaatggaaaaaatgatcattaacttagatcaatatggaaatacatcagctggttcaatacccatcgctctcacagaggctctcgatgaaggtaaagttaagcctaactccaaaatactctttcttgcatttggtggtggactcaccggtgctgcagcagtcattgattggggagggcgttcacatgccctaaaaacatcaaatgaaaaactgccagatagtaataaaaccgctttagaactggtccaagatattctcaacatgtatcaatag

SEQ ID NO: 235246 - DNA, 997 bp, Unknown
  Bacterial polypeptide expressing nucleotide sequence isolated from the Sargasso Sea
gatgaaaacaatttttaaagcggttgtggagggaacgggtttttatgttccggaaaaaactctcaccaacaaggaccttgagctatctcttaatacaacggatgagtggataactacacgcacaggaataaaagagcgtaggattgcttcaaaagacgaatctgcatctacaatggctgctagggcaggaaagcaggctctcgaatttgccgctttaaatgcggatcaggtagatatgataattgtatgtacctctagtccggatattctttttccttctaccgcttgttttgttcaaaaggaattggaagcatttaactctgctgcgtacgatatttctgctgtatgctcgggttttgtttttggtctatcaattgctgaacaatatattaaagccggacgctatgaacacattttagttattggtagtgaagtaaactccaggattgtagattggtcagataggtcaacgtgtattcttttcggagatggagcaggtgctgtattactaaaaagaattgaacaatctgagtcgattggaatattatccacgcatatttattccgatgggtcattatctgatctgatttctgttcctggcggtgttggcaaaacgggtatcaataaacaggatatagatgataagaaatattttataaaaatggctggtaatgcgacttttaaagtggctgtaaaaagaatgacaaatgtcattcttgaggcattggaatataacaatataaaaattgaggatatcaatctatttattccacatcaggctaaccagaggattataagtgcggtcgcagaaaaattaaacttgcctgaggataaaatacatatgactattcaaaaatttggcaacacatcggctgcatctattcccattggaatagaaaatgcgaggctggaaggaaaaataaaaccaggagatgtttccgttttaggtgttgtcggtgcaggcttaacctggggggctggagtcataaaatggtga

SEQ ID NO: 235247 - DNA, 418 bp, Unknown
  Bacterial polypeptide expressing nucleotide sequence isolated from the Sargasso Sea
aatggcacaagcatcagcagaagctatagaaaaatcagggttgtcaaaagaagatgtagacatttttattccacatcaagcaaatattaggatagttgaagcactcgaaaaaaaacttggacttcctaatgcaactactattaaaaaagttcatcgatacggaaatacttctgcagcgtctataccaacagcatttgtagatgctcttgaagaaggtgagataaaaggtggggaaattgcagtctttacagctgtgggagctggtcttgcatggggagcttgtgcggttcgattaggagatcgtgtaactccaataaacaaatcagatgcaaaacttccagattttgatggaactgcaaccgacacaattaaaagagcaattgagtatcaagttccaaacaaattagacaaaatatga

SEQ ID NO: 235248 - DNA, 820 bp, Unknown
  Bacterial polypeptide expressing nucleotide sequence isolated from the Sargasso Sea
catggtctctggcttagtctccatcgaatatggattgcatggtcctaatttatcgattgttacagcttgttccagtggaaatcacagcataggattctcagctagatccatttcacacggtgattgcgatgttatgatcaccggcggatcagagatggctatcacccctctaggtttaggagggttttctgcagtaacagctttatctactaacaatgaaaatcctaccaaagccagcagaccatgggataaagatagagatggttttgttttaggcgatggagcaggtgttttagtattggaagaatatgagcatgctaaagctagatctgcaaatatctatgcagaagtatcaggatttgggatgagttccgatgcttttcatatgacagcacctgctgaagacgggaagggcgccaaacaggcaatgatctccgcattaaaggatgcagatctagatagctcaaaaattgactatataaatgctcatggaacatctactcctttaggagatatcatcgaagcaaacgcgatagctgatattttttctacttctcaagaacaaattgctgtttcatctacaaagtccatgactggtcatcttttaggagcagcgggtgcaatagaatcaattttttctattctaagtcttagagataatcatctccctccaaccataaatcttgataatcttgacgcagatgctccaaaacttaactacgttgctaatgaatctcaagaaaaagaaattaactacgttctaaataattcatttggttttggcggaacgaacgcatctttggtgttctcaaaaatctag

SEQ ID NO: 235249 - DNA, 1072 bp, Unknown
  Bacterial polypeptide expressing nucleotide sequence isolated from the Sargasso Sea
atgcaacttcctcgaagagttgtagttactggaatgggattaatttctcccctaggtaactctgttaatgaatcatggtctaactgcataaaaggatgctcaggcatctctgagaatgttgttgatcttgaagatatgccaattaaggttggtggaagaattcatgatttcgatccaacccagtatatagattctaaagatataagacgtttagatacatttgttcaatatggtgtatctgctggtattcaggctatagaagatgctggtttagataataatgtagataaagatagagttggtttaaatataggttcaggcatcgggggcttggatagcatagagaaaaataaagatattcttaacaaaaaatcattcaagagagtatctccattttttgttcctggatcgataattaatatgacacctggatacttaagtattattaaaggatatacaggtccaaatttatctatcgtgactgcgtgcgcatcaagtaatcatgcgattggaactagcgcaagattgatagcctatggagatgcagatgttatggttacaggaggttctgaaatggcaactacaccgttaggggtttcaggttttcttgcatcaagagctttaagtaaatccgatgatccaaaaacagcaagtagaccatgggacaaagatcgtgatggttttgtattgtcagatggagccgcaattctagtattagaagaatatgaacatgctaaaaaaagatcagcgaatatttatgcagaagttattggttttggcatgagttcggatgcttatcatatgacagcaccatcagaggacggaactggtgcctcattatcaatttctagagcaatatcagatgcaggtatttcaacaaatgatattgattatataaatgctcatgcaacctcaacacctctcggtgatcttgcagaatgtaatgcggttaaatctatttttgattcacctccaccaattagctcaactaaatctatgacaggtcatactttgggtgcggctggagcggtagaatcaatattttcaattttatctattgttaataatattc

SEQ ID NO: 235250 - DNA, 1003 bp, Unknown
  Bacterial polypeptide expressing nucleotide sequence isolated from the Sargasso Sea
tatgcacaaatcgattattaaaggtttgggatattatgtccctgaaaacgtggtaacaaacaatgacttgacaaaaatgatggatacatctgatgaatggattagagaaaggacaggaattgaagaaagaagatgggtaaatgataataagttgtctacttctttaatgggaacattcgctgctgaaaaggcgattaagaatgctaatattgacaaaaatgatatagatttcataatttttgccactttaagtcctgactattattttcccggatcaggtgtgttattacaaagaaacttagaaattaaggaggtaggagcactagatgttagaaatcagtgttcaggatttgtttatgccttatcaattgcagatcaatacataaaatctggtatgtataaaaatattttggttgttggaagtgaaattcattctggagcattagataaaacgtcaagaggtcgttcagtgtcagttatatttggagatggcgcaggagcagcagtaatttctgcaagtaatgatgatagtggaatattatcaacccatcttcactcggagggtaaatttgccgaggaattagcagtaataaagccggctacaacattctggattgataaaataaaaaatgatgataatgaagatggatctggttactctccttacatgaatggtaattttgtttttaaaaatgcagtagtcagatttgagcaagtaatttttgaagcattaaatcactcaaatctaaaaaaagaggatatatcattactaattactcatcaagcaaaccttcgaatcagtcaatatattcaaaaaagattaaatctttcagactcccaggtatttaataatatcatgaaatatggtaatactactgctgcttcaattccaatagctttgtctgaggcgtatgaatctaatctaataaaaaaaggagatataatagttcttgcagcttttggaagtggttttacatggggaagtgcattaattaagtggtag

SEQ ID NO: 235251 - DNA, 802 bp, Unknown
  Bacterial polypeptide expressing nucleotide sequence isolated from the Sargasso Sea
gaaaatgcatcagtagctgcaattgaaatggcaggtaaaagtgtaaatgatatagacttaatcatagttgctactacaacaccagatgttattttccctagtaccgcatgcttgttacagcaaagattagatattcatggttgcccggcatttgatttgcaggctgtttgtaccggctttgtttatgctttacatgttgccgatctttttataaaaaatggtaattcaaaatgtgcgttggtcgtaggctcagaaacaatgagccgtattatcgattggaatgatagaaatacatgtgttttatttggcgatggtgctggcgcagttattcttgagaaaagtaatgaccccggtattttgtcaactcatattcatgcagatggcgcttatcaggaacttttatcagttcctgctggtatttcctctaactatgaattagtaaaatcaaataaggcatttatcaaaatgcaaggaaatgaggtttttaaagttgcagttaacacattaggcgatatcgttgatgaaaccttaaaagctaattcaatgaaaaatacagagattgattggttggtgccacatcaagcaaacacaagaatcatatcagctatggcaaaaaaattggatatgccaatagaaaatgttgtagtcactgttggccaacatggtaatacctcagctgcatcaattccattggcacttgatgttgggattaatgatggaagaattaaagataatgatattttattacttcctgcgtttggtggtgggtttacttggggatctgtgcttttacaatattaaa

SEQ ID NO: 235252 - DNA, 1225 bp, Unknown
  Bacterial polypeptide expressing nucleotide sequence isolated from the Sargasso Sea
aatgcaacttcctcgaagagttgtagttactgggatgggattaatttctccgttaggtaactctgttaatgaatcatggtctaagtgcataaagggatcctcaggcatctctaagaatattgttgatcttgaagatatgcctattaaggtaggtggaagaattcacagttttgatccaactcaatatatagactccaaagatataagacgcttagatacatttgttcaatatggcgtatctgctggtattcaggctatagaagatgctggtttggataataatgttgataaagatagagttggtttaaatatagggtcaggcatcgggggcttggatagcatagagaaaaataaagatattcttaacaaaaaatcattcaagagagtatctccattttttgttcctggatcgataattaacatgacacctggatacttaagtattatcaaaggatatacaggcccaaatttatctattgttactgcgtgtgcatcaagtaatcatgctattggaactagcgcaagattgatagcctatggagatgcagatgttatggttacaggaggatctgaaatggcaactacaccattaggggtttcaggttttcttgcatcaagagctttaagtaaatcagatgatcctaagacagcaagtagaccatgggacaaagatcgcgatggttttgtattgtcagatggagctgcaattttagtattagaagaatatgagcatgctaaaaatcgatcagcaaatatatatgcagaagttattggttttggtatgagttctgatgcatatcatatgactgcaccctcagaagatggaactggtgcctcattatcaatttcaagagcaatatcagatgcaggcatttcaacaaatgatattgattatataaatgctcatgcaacatcaacacctttgggcgatcttgcagaatgtaatgcgattaaatctatttttgattcacctccacctattagctcaactaaatctatgacgggccacactctgggtgctgctggagcggtagaatcaatattttcaattttatcaattgttaacaatatatctccaccaacaattaatttaaataatcctgatgaaggttgtgatttagatttcattccaaaagaagccagagatatgaaaatagatgtttctttaaataattcatttggttttggtggcactaactcaactcttatttttaagtccgtctaa

SEQ ID NO: 235253 - DNA, 1009 bp, Unknown
  Bacterial polypeptide expressing nucleotide sequence isolated from the Sargasso Sea
gatgaaaggtaactcttcaaaaaacataaaagctgcgattacagctgttggaggttttgttccaaacgattttatttccaatcaagatttagaaaaagtcctcgatactacagacgaatggataacgactagaacaggaattaaaaaaagaagaatactaaaaggtcaagggaaaggcacttcttatttggcaattaaggctgcagaggatgtaataacaaaaagaaacattgaccctgacacgatagacttggtaattgtagcaacaattacaccagattataaaggcgctgctacagcaccatcagtagcttcagcgataaaagctaacaatgcttatgcatttgatttaagcgctgcttgctcagggtttttatatggtatgtctacagctacaagttatatagagtcaggaagatataagaaggtgttattaataggagcagataaaatgtcatctgtagttgattacactagaagagaaacaagtattttatttggagatggcgctggtgccgttttggttgaacctagtaagaatgaatttgggtgggaagatgaatatttaagatcagatggaataggtgctgaatggttgatggttaaaggtggggggtccatgtacccaatgactcaagaagctttagacagtggctggcactatataactcaagatggaaaaacggtttttaaggcagctgtatcagagatggcaagcgctactgaagagatagtaaatagaaataacttaaaccctgaagacattaaatttttgatgcctcaccaagcaaataaaagaattattgatgctgccgcagaaaagattaacttagataaaaataaagtacttatgaatatcagtgaatatggaaatacaactgctgcaacaattcccttgctgatgtttgattatgaatcaaagctatccaaaggggacaaactaatcctaactgcctttggtgctggattaacatggggggcagcatatttaacttgggcatacgattaa

SEQ ID NO: 235254 - DNA, 1048 bp, Unknown
  Bacterial polypeptide expressing nucleotide sequence isolated from the Sargasso Sea
aatgacaaatgatgatttggctgttttcgttgacacctctgatgagtggatacaacagcgaactggaattcaggaaagaagattttgtcacgttaacaattcagatatggctgctgttgcaggacaacatgcgattgcctgtgcaggtttaacaccagaagatattgacgtagttattcttgctacatgtactcctgacagtattgtcccttctgctgcagctcatgttcaaagaaaacttggtgcagtcaatgcttcagtctatgacataaatgctgcatgcgcaggttttgtatatgcattagaacaaggaaaagcttttgtagaaagtggactttataagagagctttagttataggctcagaacacatcacatggttacttgattggtcagatagaaatactgcagtcctatttggagatggagctggagcagttgttgttgaagaaagtaaatctccagaagatggtgaaatattttctttcgttaatggtttaagttcagataagttagacattttagaggttccaaactttggatcagcaatggatagatttaataaagatgaagcagcaagagttagatggacatttgatggacaagagatttttaaaggtggaattagagcaatggctacagcatctgatgaagtcattactaaatctgggttaacaaaagaagatatagatcttttgattcctcaccaagctaatttaagaatagtagaagggttggaaaaaatgttaggccttccaaacgctaccacaataaaaaaagttcataaatatggcaacacctctgcagcctcgattccaactgccttagtcgatgctttagaagaaggtgaaataaaaggtggagaagttgctatttttactgctgtaggtgcaggcctttcatggggtgcatgcgccttacgtttaggagaaagaacaactcctataaacacttccgatgcaaaacttcctgattttgatggaaaggctgttgatacgataagaagagctattgagtatcaaatacctgaaaaattagatcttatatga

SEQ ID NO: 235255 - DNA, 1108 bp, Unknown
  Bacterial polypeptide expressing nucleotide sequence isolated from the Sargasso Sea
tttgcgacccgtttcgcaggccaggtcaaggatttcgatcccgagcagtacggtatcaaccgcaaagaagctcgcaagatggatctcttcatcccagtacggtatcgccgcaggcatacaggcgctgaatgatgccggtctcgtcatcaacgaggcaaatgccgagcgcatcggtgtggcgatcggttccggtatcggcggcctgggtctgattgaacagaaccacagcagcctggtcaacggcggcccccgcaagctgagccccttcttcgtaccatccaccatcatcaatatggtgtccggtcatctctccatcatgaagggtctgcaagggccgaacatcgccgtaaccaccgcctgcaccacaggtacccatgccatcggcatggccggccggatgatcgcctacggcgatgcggacgtgatggtggccggcggcgccgagaaagcctccaccccgatggggatgggcggttttgcggcggccaaggcgctctccaaccgcaacgacgagcccaccaaggccagccgtccgtgggataaagatcgcgacggtttcgtgctgggtgatggcgccggggtgctggtgctggaagagtacgaacacgccaaggcccgcggcgccaagatctacgccgaactggttggttttggcatgagtggcgatgcctaccacatgacggcgcctcccgctgacggcaacggtggcgcccgcgccatgcaaaatgccatcaaggatgccggcatcgcccccgagcaggtgggttacatcaacgcccacggcacttccacccccctgggtgacgtggccgaactgcgcggcatgaaagcggtgtttggcgagcatgccaaatccctgatgatcagctccaccaagtcgatgaccggtcacctgctaggtgccgccggtgccatcgaggcgatcatcacggtactggcgctgcgcgatcagatggcgccgcccaccatcaacctggacaacccggatgatgagtgcgatctggacctggtgcctcatgttgccaaggctggcaacttcgaatacgccctctccaattccttcggttttggtggcaccaatggctcactgatcttcaaacgcgtataa

SEQ ID NO: 235256 - DNA, 1069 bp, Unknown
  Bacterial polypeptide expressing nucleotide sequence isolated from the Sargasso Sea
catgggaattgaaataacaggctgggggaaatgcacgccatctgctgtgctcacaaatactgatcttgagactattctggataccgatgatgagtggattactactaggacaggcgtcaaacaaagaagaatagcagaagccccgctaagtgaaattggaactgtggctgcaaaacatgctctagcagcagctgataaggatcccaatgaaattgatgcggtcatgatggcgacatgtacaccggaatttcttattcccagcactgcctctagagtgcaaatgaatattggaaataacactgctgcggctttcgattttaattcagcttgtacaggttttgtttatggcctaacgactgcttactcaatgattcatactggaatatttaataatgtcctacttgtaggtggagaaaaagtcagttattttctcgattggactgcgagagatactgctgtactttttggagatggcgcaggagctgtattgattgagagaacggattcagaatcaaaacttcattcttcaaaaatgacctgtgatccatttctgggtgatgccttgatgcttaaaaactttggtaccagcatggaacttaaagatccaaaggaaggatatttctttgggataagctttgaagggcaagagatcttcaaaaatgctgttaaaaccatggcaaggcttgcagaagaagcattggaggaagccggtctcagcgttgatgatattgatctgtgcattcctcatcaggctaatctaagaattctagaggcgactgctaagagatgtagttttccaatggaaaaaatggttattaatctggatcaatatggaaatacttctgctgggtctataccaattgcacttacagaagcacttgatgagaaaaaagttaagccgaactcaaaaatactctttcttgcttttggagggggactcactggtgcagcagcagttatcgattggggtggacgttcacatgccttgaaaacctctgatgaaaaactgcctgatagtggtaaaactgcaatagagctgatcaaagatatactcgatatgtataaataa

SEQ ID NO: 235257 - DNA, 1264 bp, Unknown
  Bacterial polypeptide expressing nucleotide sequence isolated from the Sargasso Sea
ttgtcatccaataatggaaaagaggttaccgtgagccgccgtcgtgttgttgttacaggcctggggctgatttcgcctgttggcaataatgttgccgacggctgggccaatctcgtcgccggcaagtccggtattgccaccgtcacgaagttcgatgcgtcgaacctcgcctgccatttcgcgggtgaagtgaagggtttcagcgccgaggagtacatcccggcgaaggaagcccggaacatggatacgttcatccattacggcatcgccgccggcgtccaggccatcaaggacagcgggctggaagtgaacgaggccaatgcggaacgcatcggcgtgctggtcggttccggcatcggcggcctgccgatgatcgaagatacccaccagacctacgtcgatcgcggcgcacgccggatttcgccgttcttcgtgccgggttcgatcatcaacatgatctcgggtcacctgagcatcatgttcgggctgaaaggcccgaacctcgcggctgtcacggcttgcacgaccggcctgcacagcatcggcctcgcagcgcgcctgatccaggccggcgacgccgacgtgatggtcgcgggcggcgccgaatcgaccgtgtcgccgctcggcatcggcggtttcgcggccgcgcgcgcgctgtcgactcgcaacgacgatccggccaccgcgtcgcgtccgtgggacaaggaccgcgacggcttcgtgctgggcgagggtgccggcgtgatggtgctcgaggagtacgaagcggcgaaggcacgcggtgcgaagatctacgcggaagtctcgggcttcggcatgacgggcgacgcgtaccacatgaccgcgccgaacatggacggcccgcgccgctgcatggtcgcggcactgcgcgacgccggcgtgaacccggacgaggtccagtacctgaacgcgcacggcacgtcgacgccgctgggcgacaagaacgagtccgacgcggtgaaggcggccttcggcgagcatgcgtacaagatcgtcgtgaactcgacgaagtcgatgacgggccacctgctgggcggcgcgggcggcctcgaatcggtgttcacggtgctggcgctgcacaacaacgtgtcgccgccgaccatcaacatcttcaaccaggacccggagtgcgatctcgactactgcgcgaataccgcgcgtgacatgaagatcgacgttgccgtgaagaacaacttcggcttcggcggtaccaacggcacgctggtgttcaagcgcgtctgac

SEQ ID NO: 235258 - DNA, 979 bp, Unknown
  Bacterial polypeptide expressing nucleotide sequence isolated from the Sargasso Sea
aatgtcagctgaaaaagtttttcgatcaaaagttataggtataggtggttatttgccagataagattttaactaatgatgagctttctaagattgttgaaactagcgacgaatggattaaagaaagaactggaatacatgaaagaagaattgctgatgaatctgagaccacctcatccctaggaattcaagcagcaaaaaatgctataaaaaatgcaggaatttctgcgcaagatatagatttaataattttagctacggctacccccgacaacacctttccagcaacagcaacatcaattcaatctggattgggaataaaaaaaggatatgcttatgatgtacaagcagtatgttcaggctttgtatatgctcttgaactagcagacaatgcaataaggcttgggaaatctaattacgcattagtaattggctcagaaacattcagtagaatacttgattggagcgatagatcaacatgcgttctatttggtgatggttctggagctgtagttttgaaatctactgatgatagctcttcaagccaaattttaagtagtcatctttactctaatggcgattacaaagatatgctttatgttgatggaggtccatctacttcaaataatgttggttttcttagaatggatggagggggcgtttttaaacatgctgtaaagaacatttcttcatcaataatagaggctcttaatagcaataagataacaattgaagatattgattggtttgtgcctcatcaagccaactcaaggattttagaagctgttgctaaaaaaataggtatagaaaaagataagattattgtgactgtagataagcacgcaaatacatctgcagcatctataccgttagctttaaatgaagctgttcaaaataataatattagaaaaggtgatattgtattattagcagcaatgggaggtggttttacttggggttcaagcttaataagatggtag

SEQ ID NO: 235259 - DNA, 958 bp, Unknown
  Bacterial polypeptide expressing nucleotide sequence isolated from the Sargasso Sea
aatgggttttgcaaagattacaggtactggtgtctacattccagaaaaaatactttctaataaagatttagagtcgcttgttgatacatctgacgaatggataaaagcaagaaccggtatttccgaaagaagaattttagatgaagataaagccacctcagatatgtgttatgaggcatgtctacaagcgttagaaaactcttctacgaacccagatgaaattgatggaattatagttgcaacaatttcacctgactatatgacaccttctgttgcatgtttacttcaagaaagacttaatacaagaaagatttttgcatttgacgtctcagcaggatgctcaggatttatttactgtctaaatatcgcaaaagcaatgattgaaaatggccaaacaaagaaactacttattgctggagctgaaaatttatctaagattgttgattatactgataggggtacttgtattctctttggtgatggtgctggtgctgttgtgatagaagagagtgattcacctggaattatgtccgtatgtttgggttccagcggcaaagaagctgagctactttatacaccagggggtggatcgaaagaccctaatggttcaagatttcttgtaatgcatggaaaagaggtttttaaggaagcggtaaaagtaattcaatctaactccctggaagcaatagaagctgcaaatatcaaaccaagtgatatagatttatttataccacaccaagcaaatatgagaattattgaagcagctagagaaagattagatctaccaattgaaaaatgttttgttaatattgaaaaatatgggaatacttcttcggcgtctgtactgcttgcattgcatgaagcgttagaggaatcaagaattaaaaaaggcgacaatattttattttctgtattcggtgctggctttgcttggggttcagcggttttaaaatggtaa

SEQ ID NO: 235260 - DNA, 844 bp, Unknown
  Bacterial polypeptide expressing nucleotide sequence isolated from the Sargasso Sea
tgatggtgaagcaacttcggatatgtgcaaagaggttgctctggagctcatgaaaaaatctgacaaaaacccagatgaaatagatttaatactagttgcaacaagtacgcctgacgttcctgttgtttcaactgcagcccttgtgcaagataaaattggagctaaaaatgcatggggctatgatatcgttgctgcttgcactggatttgtttatgctatggaaactggagcaaaacttgttgaatctggaaaatataaaaatgtgattgtaattggtgcagatactatgagctcaattatcgattatactgatagaaacacgtgtgtaatttttggtgatggagctggaggtgttcttttagagccatctgatgatgattgcggtgtattagattcaattttgcttgcggatggaagtgggcacaaatatttaacagtacccgctggaggaagtttaagaccagccagcaaagaaacgattgataaaaaaatgcactatgtttatcaagatggaaagacagtttttaagtttgcagttaaaaatatggctgatgtaagtaaagaaatcctagataataataacatacaaggcaaagatcttaagctatttattccgcatcaggccaacaagcgtattatagacgctgctgcaaaacgctgcggcctttcagaagaacaagttcttgtaaatataaataagtatggaaatactactgccggaactatccctattgcattagatgatgcggtggaagcaaaaatgttagaaaaaaatgacctggtattgtttgctgcttttggaggtggttttacatggggaagcatgttgattaaatggtcataa

SEQ ID NO: 235261 - DNA, 1009 bp, Unknown
  Bacterial polypeptide expressing nucleotide sequence isolated from the Sargasso Sea
tttggaagaaataaagtttaatcagattggaatctcatttaaaggaagtggaagttatgtgcccgatcaaatactaactaatcaagaaataagtaaaaaggtagatacgagtgatgaatggataaaatctagaactggcatttctgagagaagaatatctagctttggagataacgtgactgaaatgggttatgaagctgcacgcagtgcgattgaaatggctaattgggatattaaaacagttgatttaattgtcttagctacttctactccgaatgatttatttggatcggctccatctattcaagccaaattaggagcgtctaatgcggtagctttcgatttaactgcggcctgtagtggttttttattcgctttaataacagcctcacaatttttaaaagggggaagttttaaaagagctattattatcggagctgatcaactatcaagctttgttgattggagtgatagaaggagttgtattctctttggagacggagctggtgcattagcgattgaagctacaaatgaatttgataatattattggttttgatatgagaactgatgggcatagaggttcttttcttaatcttccatcaaaaaattataaggattcaataattaataatatcaactttttaagtggaggtttttcttcgattcagatgaatggtcaggaagtttataaatttgcggtcaaagaagttccgaatattcttgaaaagttgtttttaaaaacaaattatagttctgaccaagttgattggcttgtattgcaccaagctaatcaaagaatattagattctgtaggagataggttaaaaattcctagagaaaaaatactcagtaatttagaaaaatatggtaatacttcggcagcaactattccactaatgattgatgagtcaattaaaaataatagaatcaaacaaaatgatattattgctacgagtggttttggcgctgggttaagttggggggcagcccttattaaatgggcttaa

SEQ ID NO: 235262 - DNA, 670 bp, Unknown
  Bacterial polypeptide expressing nucleotide sequence isolated from the Sargasso Sea
tctaaaaaactttccagcattcagtattgaggcggcatgcagtggttttatttatgctttgaatatcgcagataagttcataaagtcgggggattcaaaatgtgctttggttgtcggtgcagagacactctcaagaataacaaactgggatgaccgaaatacatgcgttctttttgccgatggagcaggtgctgccatcttaaaaccatcggatgacacaggaattatattttctgagcttggagcaaatggcgaatatgcagaactccttcatgttccctatggaacatcaagaaagccagagagacccaaagaggatgactacaccctaaaaatgagtgggaatgaagtatttaaagttgctgtaaaaacactcgaagaaattgccattgatgcacttgtcaaatcgaatcttcagagtaaggatatcgattggtttatcccgcatcaggcaaatatgagaatcattcaagcggtggcaaaaagattggaattacccgaggaaaaagtaattctcagtatggacattcatggcaatacttctgcagcatccatacctttggcttttgatcgcgccattcaagatggaaggataaaaaaaggagacactattttaatgcaaagcttcggcgcaggctttacatggggtagtgttattttagatttataa

SEQ ID NO: 235263 - DNA, 737 bp, Unknown
  Bacterial polypeptide expressing nucleotide sequence isolated from the Sargasso Sea
gtgcatcaagtatcatgcgattggaactagcgcaagattgattgcctatggagatgcagatgttatggtcacaggaggttctgaaatggcaactacaccgttaggggtttcaggttttcttgcatcaagagctttaagtaaatccgatgatccaaaaacagcaagtagaccatgggacaaggatcgtgatggttttgtgttgtcagatggagcagcaattctagtattagaagaatatgaacatgccaaaaaaagatcagcgaatatttatgcagaagttattggttttggcatgagttctgatgcttatcatatgaccgcaccatcagaggacggaactggagcctcattatcaatttctagagcaatatcagatgcaggcatttcaacaattgatattgattatataaatgctcatgcaacatcaacacctctaggtgatcttgcagaatgtaatgcggttaaatctatttttgattcacctccaccaattagctcaacaaaatccatgacaggtcatactttgggtgcggctggagcggtagaatcaattttttcaattttatctattgttaataatatttctccaccaacgattaatttaaataatcctgatgaaggatgtgatttagatttcattccaaaagaagctagagatatgaaaatagatgtttcgttaaataattcatttggttttggtggaactaactcaactcttatttttaagtctgtctaat

SEQ ID NO: 235264 - DNA, 904 bp, Unknown
  Bacterial polypeptide expressing nucleotide sequence isolated from the Sargasso Sea
gactagtgatgaatggataaaatctagaacaggtatttctcagagaagaatttctggattatcagaaaatgttagcgaaatgggttataaggcagcattgggagcaattgagatggctagatgggatattgaaacaattgatctaataatattagctacatcaactccaaatgatctatttggttctgctcctgaaattcagtcaaaactaggcgcaattaatgctgttgcttttgatttgacagctgcttgcagtggtttcttatttgctgcaataacagctactcaatttttaaaagcaggtagttataaaagagctgtagtaataggctcagatcaactttcaagttatgtagattggaatgatagaagaagttgcatcttattcggggatggagcgggtgcattagcaatcgaaggaacaaataaattagataatttaattggctttagtatgaggacagatggtcaaagaggttctttcttaaatcttccatctcaaaataatcaagatctaattattgatgatattaatttttcaagtggggggttttcctcaattaagatgaatggacaagaagtatataaatttgcggttagagaggtaccattaattattgaaaatttatttaaaaaaacaaatttcaattctgagaaaattaattggcttttattacatcaagcaaatcaaagaatattagattctgttggagaaaggctaaatgtttcatcagaaaagattctcagtaatttaagtaactatggaaacacttcagcggcaacaattcctttaatgctagatgaggctataagaaataagaaaattaaagaaaatgatattattgccacaagtggttttggtgctgggttaagttggggtgcagcccttattcgatggggttaa

SEQ ID NO: 235265 - DNA, 958 bp, Unknown
  Bacterial polypeptide expressing nucleotide sequence isolated from the Sargasso Sea
atgagtaatatattaataacgggtgtaggttcatatttaccaaaaaaagtaatttctaacaatgaactgcctgtaaacctagatacaaatgatgaatggataaaaaaacgaactggcataagacaaagacatttagttacagaaggtgaattgacatcgaccatggcaattgctgctgcaaaaaaagctcttcaaaatgctaatattgataataaagatatagatttaattattgttgctacaacaacacctgataaaacatttccagcaactgcggtcatggttcagtcagaattaaatattggtatttgcccagcatttgacattcaggctgtttgtgctggttttatatatgcactgaatgtaggttcttctttattaaagacatctaattttagtaaagcattagtaattggttcagaatctttttcaaaaattcttgattggtctgatagatcaacatcagtattatttggagatggagcaggtgctttcgtattagaaaaaagtaatgaaaattctgaatggggaattttatcttcaaatttttactctaatggtaattttagtgatattttgcatactgatgggggtcctagcataaatttacaagttggaaaggtcagaatgaatggtaaggaagtatttaaacatgctgttgaaaaactttcttcttgtttaattgaagctataaactctgcaaacctaaaaattcaggatattgatttcttagtacctcatcaggccaatcttcgaatcattgaggctttatcaaaaaaattggatattccaattaacaagattattaacactgttgatgttcatgctaatacttcagccgcttcaatacccttagcatttgatagcgcacttgaaaaacgtataattaaaaatggtgatattattgcctttaatgctataggtgggtggtttaaggctggggtgctttcatcataaa

SEQ ID NO: 235266 - DNA, 943 bp, Unknown
  Bacterial polypeptide expressing nucleotide sequence isolated from the Sargasso Sea
aatgactgatttatattctaagatagtatctactggaagttatcttcctcaaaaaatctatacaaatcatgatattgaaaaacttgtggatacatctcatgattggatagttgaaagaacaggaataattagtagacatattgccgatgaaaatgaatccagcgttgatatggcatacgaggcatcttgtaaagctctagagaggtctaatcttaaaaataacgatattgatttaatattggttgcaacaaccactccggaaagaaaatttccaagtactgctgttcttctacaaagcttgttaaacaataataaagcctctgcatttgatgtgaacgcagcttgtacaggatttatatatgcattagatatagcagataaatatataaagggtggttttgctaaaaatgttttagtagtaggaacagaaaaaataacatcattaatagactggagcgatcgtaatacttgtgtgctttttggagatggtgccggagctgttgtactaacagcctctcaaactcctggattaatatctaatactattgggtcagacggctcctacaaggatttattaacagtaaacactgacactgaggtaattgaaatgagaggtaatgatgtttttaaaattgcagttaatactatgggtaaattagcaaaaaaaacattggaaaatagcgattatagtgtgaataatatcgattggcttataccgcaccaagcaaatagcagaatcattaaggcagtcgctaaaaaaattaatctctctgaagataaaataatcatgacagtcgataaacatggtaatacatcagctgcttcaattcctttggctttagattatggagtcaataccggcatggttaaaaaagatcatttgattatttttgaagcttttggagctggattcacttggggttcaacattattaaagttttga

SEQ ID NO: 235267 - DNA, 907 bp, Unknown
  Bacterial polypeptide expressing nucleotide sequence isolated from the Sargasso Sea
gacactaacgatgagtggataactgcgagaactggaatcaaaaaaagaagaatacttaaagaaaagggtaaagctacctcatatttggctataaatgcagctaataatttaattaagaaaaaaaaattagacccaaaaaccattgacttagttattctctccacaataactccagatttccatggagcatccacagctccaacagttgcatctgaaataaatgcttcaaatgcatatgcatttgatattaatgctgcatgttctggatttttatttggaatgtctacagctacaagttatattgaatcaggtagatataaaaaaattcttttaataggagctgataagatgtcttcaatagttgattatacagatagatcaacaagcattttgtttggagatggagctggtgctgttttgatagaaccaagtgaaaatgattttggttgggaggatgaatttctaagatcagacggagttggtgcagagtggttaaaaattaaagctggaggttcactatacccaataacaaaagagacatttgaaaaaaaatggcattttattacgcaggacggaaagactgtttttaaatctgctgttttagagatggcaaatgcaacagagcagattataataagaaataaattggatcctgatgatataaaatatctgttgcctcaccaagctaataaaagaattattgatgctaccgcagaaaagattaatttagataaaaataaagttttaatgaatatagaacaatatgggaacactactgcagctactataccactgctaatgtatgactatgagaataactttaaaaaaggagataaaattattcttgctgcttttggagcaggtctaacttggggtgcagcatatttaacatgggcctataattaaa

SEQ ID NO: 235268 - DNA, 889 bp, Unknown
  Bacterial polypeptide expressing nucleotide sequence isolated from the Sargasso Sea
agtattgagaaaaataaagatattcttaacaaaaagtcattcaagagagtatctccattttttgttcctggatcaataattaatatgacacctggatacttaagtattctgaaaggatatacaggtccaaatttatctatcgttactgcttgtgcatcaagtaatcatgccattggaactagcgcaagattgatagcctatggagatgcagatgttatggttacaggaggctctgaaatggcaactacaccattaggggtttcaggttttcttgcatcaagagctttaagtaaatctaatgatccaaaaacagcaagtagaccatgggacaaagatcgtgacggttttgtattgtcagatggggccgcaattctaatattagaagaatatgagcatgcaaaaaatcgatcagcaaatatatatgcagaagttattggtttcggaatgagttctgatgcatatcatatgactgcaccatcagaagacggaactggtgcttcattatcaatttctcgagcaatatcagatgcaggcatttcaacaaatgatattgattatataaatgctcatgcaacatcgacgcccctgggtgatcttgcagagtgtaatgcggttaaatctatttttgattcacctccacctattagctcaaccaaatctatgactggtcacactttaggtgcagcaggagcggttgaatcaatattctcaattttatctatagttaataatatttcgccaccaacaattaatttaaataaccctgatgaaggctgtgatttagatttcgttccaaatcaagctagagatatgaaaatagatatttcattaaataattcatttggttttggtggaactaactcaactcttatttttaagtccgtctaat

SEQ ID NO: 235269 - DNA, 850 bp, Unknown
  Bacterial polypeptide expressing nucleotide sequence isolated from the Sargasso Sea
aaaaggtgaagggaagggcacttcttatttggcaattaaggctgcagaggatataataacaaaaagaaacattgatcctaacacaatagacttggtaattgtagcaacaattacaccagattataaaggagctgctacagcaccatcagtagcttcagcaataaaagctaacaatgcttatgcatttgatttaagcgctgcttgctcagggtttttatatggtatgtctacagctacaagttatatagagtcaggaagatataagaaggtgttactaataggagcagataaaatgtcatctgtagttgattatactaaaagagaaacaagtattttatttggagatggtgctggtgctgttttggttgaacctagtaagaatgagtttgggtgggaagatgaatatttaagatcagatggaattggtgctgaatggttgatggttaaaggtggggggtccatgtacccaatgactcaagcagctttagacagtggctggcattatataactcaagatggaaaaacggtttttaaggcagctgtatcagaaatggcaagtgctactgaagagatagtaaatagaaataacttaaaccctgaagacattaaatttttgatgccccaccaagcaaataaaagaattattgatgctgccgcagaaaagattaacttagataaaaataaagtacttatgaatatcagtgaatatggaaatacaactgctgcaacaattcctttgctgatgtttgattatgaatcaaaactatccaaaggtgataaattaattcttaccgcttttggtgctggattaacatggggggcagcatatttaacttgggcatacgattaa

SEQ ID NO: 235270 - DNA, 991 bp, Unknown
  Bacterial polypeptide expressing nucleotide sequence isolated from the Sargasso Sea
atggctcaatcaacaatttactcccgcgtgctggggaccggcagctacctgccgcccggacgcgtcaccaaccaggatctggccgaacgtctcgccagagagggcgttgaaaccagcgacgaatggatcgttgcccgcacgggcatccacgcgcgccatttcgctgaacccaatgtcaccaccagcgatcttgcgctgatcgcctcgcagcgtgcgatcgaagcggctgatatcgatccgcaatccatcgatctgatcatcgttgcaacctccacgcccgactttgtgtttccgagcacggcgtgtctgttgcagaacaagctcggtatcaagaatcacggcgcggcattcgacgtgcaggccgtctgttccggctttgcttatgcggttgcgacggcggacagctttattcgcagcggtcagcatcgcacggcgctcgtgatcggcgcggaaaccttctcgcgcattctcgatttcaaggaccgcaccacctgcgtgctgttcggcgacggcgccggcgcggtgatcctgcaggcgtccgaagagccgggtgtgttggcgagcgctttgcacgccgacggcagccactcgaacattctgtgcacgccgggcaatgtgaacggcggtgtgatcgagggcagcgcgttcctgcatatggatgggcaggcggtgttcaagctcgcggtcaatgtgctcgaaaaggtcgcggtcgaagcactcgcaaaagcgaatctgtcggccgaacagatcgactggctgattccgcatcaggccaatatccgcatcatgcaaagcacctgtcgcaagctcggcttgccgcaggaacgcatggtcgtcacggtgggcgaacacggcaatacgtcggctgcgtccattccgctcgcattcgacgtcgcagtgcgcgacggccgcatcaagcgcggccagaacgtgctgatcgaaggcgtcggcggcggcttcacgtggggcgcgtcggttatccgctactgat

SEQ ID NO: 235271 - DNA, 991 bp, Unknown
  Bacterial polypeptide expressing nucleotide sequence isolated from the Sargasso Sea
atggcccaatcgactctctattcccgcgtgctcggcacgggcagctacctgccgcctgaccgcgtcacgaaccagcagttgaccgatcgtcttgcgaaggaaggcatcgagacgagcgatgaatggatcgttgcgcgcacgggtatccatgcgcgccatttcgccgcaccggacgtcacgaccagcgacctcgcgctcgaggcgtcgcgtcgcgcgatcgaagccgccggcatcgatccgcagtcgatcgacctgatcatcgtcgcgacttcgacccccgatttcgtgttcccgagcaccgcgtgcctgttgcagaacaagctcggcatcaagaacggcggcgcggcattcgacgtgcaggccgtgtgttcgggcttcgcgtacgcggtggcgacggccgacagcttcatccgcagcggtcagcaccgcacggcgctcgtcgtcggtgctgagacgttctcgcgcattctcgatttcaaggaccgcacgacctgcgtgctgttcggtgacggcgcgggtgccgtgatcctgtccgcatcggaagagccgggcgtgctcggcagcgcgctgcatgcggacggcagctattcgaacatcctctgcacgccgggcaacgtcaatcgcggcgtgatcgagggcagcgcgttcctgcacatggacgggcaggccgtgttcaagctcgcggtcaacgtgctcgaaaaggttgcgatcgaggcgctcgcgaaggcgaatctcgcgcccgagcagatcgactggctgattccgcaccaggccaacattcgcatcatgaccagcacctgccgcaagctcggcctgccgcaggagcgcatggtcgtgacggtcgaccagcacggcaacacgtcggctgcgtcgatcccgctggcgctcgacgccgcggtgcgcgacggtcgtatccagcgcggccagcacgtgctgatcgaaggcgtcggcggcggcttcacctggggcgcgtcggtcttccgctactgat

SEQ ID NO: 235272 - DNA, 868 bp, Unknown
  Bacterial polypeptide expressing nucleotide sequence isolated from the Sargasso Sea
cgtgtctcgaacaggaatcaaagaaagacccattgccgatgactcacaagcgacgtctgacctggcctatgaagcagccaagattgcaatagagagagccgatatcgacaagaatgagattgatcttattattgtcggtacatgcacgccggatgttgcaacaccaaatgttggtacgattgttcaaaaacgactagaactcaaaaattttcctgccttcagtattgaggccgcttgcagtggttttatttatgctctgaatattgcagataagttcataaaatcaggtgagtcaaaatgtgcattggtcattggtgctgagacgctctcaaggattacaaattgggatgaccgaaatacttgcgttctttttgcagatggagcaggtgctgccatcttaaaaccatcggatgacacaggaattatattttctgagcttggtgccaatggcgaatacgaagaactccttcatgttccctatggaacatcaagaaagccagagagacccaaagaggatgactacaccctaaaaatgagtgggaatgaagtatttaaagttgctgtaaaaacactcgaagaaattgctattgatgcactggttaaagcaaatcttgaaagcaaagatattgattggttcatcccacatcaggcaaatatgagaatcattcaagcggtggctaagaggttggagttacctgaggaaaaagtaattctcagtatggacattcatggcaatacatctgcagcatctattcccttggcttttgatcgcgccattcaagatgggaggataaaagaaggagacactattttgatgcaaagttttggtgcaggattcacttggggcagtgttattttggatttataa

SEQ ID NO: 235273 - DNA, 931 bp, Unknown
  Bacterial polypeptide expressing nucleotide sequence isolated from the Sargasso Sea
accgaacaatatagtgaccaataaagatcttgaaaaaaaggttgatacaactgatgaatggattgtatctagaacaggaatcaaagaaagaccaatagccgatgattcacaagcgacatctgatttagcatttgaagctgccaagattgcaatagagagagccgatatcgacaagaatgagattgatcttattattgtcggtacatgcacgcctgatgttgcaacaccaaatgttggtacgattgttcaaaaaagactagaactcaaaaattttcctgccttcagtatcgaggcggcttgtagtggtttcatttatgctcttaatattgcagataagttcataaaatcaggtgagtcaaaatgtgcattggttattggtgctgagacactatctaggattacaaactgggatgacagaaatacatgtgtccttttcgcagatggagcaggggccgccatcttaaagccatcagatgacagagggattgtattttctgagcttggtgccaatggtgaattcgcagagcttctccacgtaccctatggaacatctagaaagccggagacacccaatgcagatgactacaaattgaagatgagcggaaatgaagtatttaaggttgccgtaaaaacgctagaagaaattgctattgatgcactggttaaagcaaatcttgaaagcaaagatatcgattggttcatcccacatcaggcaaacatgagaattattcaagcggtggctaagaggttggagttacctgaggaaaaagtaattctcagtatggacattcatggcaatacatctgcagcatctatacccttagcttttgatagagccattcaagacggcaggataaaagaaggggacactattttaatgcaaagttttggtgcaggctttacttggggtagtgttattttagatttataa

SEQ ID NO: 235274 - DNA, 1093 bp, Unknown
  Bacterial polypeptide expressing nucleotide sequence isolated from the Sargasso Sea
tcttatatacttactcttaatttcaatattaggcggctttattttgaatcttatgccatgtgtttttccggtattatcgttaaaattattatctgtaattaatactgaggataaaaatattaaaagtagtttttttataaccgtattgggtattatctcttcttttctaatacttggtgcattttttgctatcctgaaacaaattaatatttcaatatcttggggtatgcaatttcaagaaccctactttttaatgttcattttgataattatatcaatgttcttcttgaacactcttggtcttttccaaataaatttaccaagttttttatcttcatcaaaaattttaaattcaggaaacaatttttatacaaagaatttttttaatggtttttttgctacactacttgctacaccatgttctgcaccttatttaggaacagctgtaacggctgcttttactcaatcaacaacatatttatttttaatattctgttttatgggtataggaatgagtttaccttatttgattatagctttttttccaggtctgatttccttcttacctcgatctggaaaatggatgatttattttaaatattttttatctattttattattcataacaattgtttggcttttaagtatattaaataattatttcaattatttttttatagttacatttactgttttattgatcttaatatcagcaattttaaaatttagaatttatcaaattcccttaattatttctttaataattattttctttttaactccatatttaaattcttttcaaaaaattaatgaagaaaattataaaagtaataattggttagattttaattccaaaagtattcctgaaataatagctaataatgaaattgtttttttagatataactgctgactggtgcattacctgtaagtttaataaaattaatgttttaaattcaaaaacagtttcagatttttttgattcagaagaagtgatattgataaaagctgattggacacaaccaaatgaaaaaataaataaatttttaaaaaaatataataaatttggcataccttttaatgcattttattct

SEQ ID NO: 235275 - DNA, 577 bp, Unknown
  Bacterial polypeptide expressing nucleotide sequence isolated from the Sargasso Sea
atggcactgatcctcccccgtaactaccacaagatcggtgccgttgagcgcaaccggatctcctggatcgaacccgctcaggcggaactccaggacatccggcccctgcggatcggcattctcaacatcatgcccctgggcaagcagtacgaattcaacctgctgcaccccctgggtctgtccgtcctccagatcgaaccggtgtggatccggctcgcctcccatgcctacaaaagctgggaccaggagcacctcaaggatctgtatgtcagttgggatgaagcccttgaccagggaccactggacggattgatcatcactggcgcaccggtggaacacctgcccttcgagcaggtcaactactggaaggaactggttgacctcatagaggaggcccgccacaactgcgccagcaccctggggctgtgctgggctggctttgcactcgcttatctcgctggtgtggacaagattccgttcgaacggaagttgttcggcatctacccgttgcgcagcctgattccagaacatcccctgatgggaacccaggacgaccgattctcttccgcagagccgc

SEQ ID NO: 235276 - DNA, 876 bp, Unknown
  Bacterial polypeptide expressing nucleotide sequence isolated from the Sargasso Sea
catggttatggacgattttaaagcaaataggcaagacatacgacctctcaaaataggtctattaaatctgatgccgaaaaaaatacaaactgaaaatcagttcgcacgagttattggggccacccctctgcagatagagctttcacttataaaaatgtccacccatgaaacgaaaaatacagcagctgagcatatgcaaacattttatcgctcatttaaagatgtaaaatcgagtggggaaaaatttgatggcttaattataactggagccccaatagagcatttggattatgaatcagtgtcttactggagagaattaatagaaatatttgaatggaccaaaactaatgttcacgccgtatttggtgtttgctggggcggaatggcaatgctgtatcatttctataagataaaaaaatatgaccttttagaaaaagcgtttggctgttttagacatgagaatatagaaccatcctcaccatatttgagaggtttctcggatgatttcattatccccgttagccgttggacggagctgcgtcaaaaggaggtagaccaatttaaaaacctaaaaaccctgctagcgagtacagaagttggaccatgcttgattgaggataaaaaacataatgctctctatattttaaatcattttgaatacgatagtgataccttgaaacaggaatatgatagagatgtagaggaaggaaaaaaaatcgttcttccccaaaattattatcctaatgatgacccccaaagtaatccgaaaaatagatggagaagccatgctcacttactctacggcaactggataaacgaaatctaccaaacaactccatatgatttaaatcaaatttggcgcttgaaaccaataat

SEQ ID NO: 235277 - DNA, 885 bp, Unknown
  Bacterial polypeptide expressing nucleotide sequence isolated from the Sargasso Sea
tctgccgaaaaactatcacaaagtggcggcgattgagcgcaacgggatctcatggattgagcctgaattggctgagcggcaagacatcaggccgctgcgcatcggcatcatcaacatcatgccgttaggcatgcaatacgagttcaatttgttgcatcccctcggcctttcgccgctgcaaattgaacccgtctggattcgccttcaatcccacgactacaagacctgggatcacaaccatctcgatcagcaatattgctcttgggagcaagccaatgcatcagcgcccctcgatggcctgatcattaccggcgctcctgtcgagcatctggcctacgagcaggtcacctattggcaggaaatggtcgagttgattggtattgcccgcacccagtgcgccagcacgctgggcctgtgctgggctggatttgccttggcctacctggccggggtcgacaagacggcttttcagcagaagttgtttggggtgttccccatgcgcagcctcaagccggggcacgccctgatgggaacgcaagacgacagctttgtttgcccgcaaagccgccatgctggtttggatgatgccgccatggaagaggcccagcggcaagggcgcttgcgcttactcgcccacggtgagcaagtgggctacagcatttttgaaacccctgatcaacgtcagctgatgcatctggggcatccggaatacagctcaggtcgcttgctggcggagatggagcgggaccgagctcgcggtgatgtgcctccgccacaaaactttaatgccgaactgccgcaaacgctttggcgttcccaccgcaacctgttttttcagcagtggctgtggttctgctaccagcgcatcagcctggcctccccttc

SEQ ID NO: 235278 - DNA, 829 bp, Unknown
  Bacterial polypeptide expressing nucleotide sequence isolated from the Sargasso Sea
aatgccaataaagctcccatcttctctacctgcctttgaagttctctcaaaagagggcgtcatggtgatgtcagaagaccaagcaacccgccaagatataaggcctttgcaaattgggcttcttaatttgatgcctaaaaaaattcaaactgaaaatcaatttgcaagattaataggtgccaccccacttcaaattgagctttcattgataagtatcagtaatcatgaaacaaaaaatacagccgccgaacatatgaaaagtttttacaaacctttctcagaggtctttgacagtggtaaaaagttcgatggactaataattacaggggcgccaattgaacatcttgattatgaggaagtaacctactggaaggaaatagtaaaaatatttaattggactcaaacgcacgttcattcaacttttggtgtatgttggggtggcatggctatgttgaaacatttttatgatatagaaaaacaaattttaaaagaaaaagcgtttggatgctttcgccataaaaatttaaaccctaactcaaaatatcttcggggtttttcagatgacttcattgtaccagtaagtcgttggaccgaaattaataaggacgatatagtttctattcctcaacttaagatacttcttggcagtgacgaagttgggccttgcctgattgaggacccgaaacatagttcactttatatttttaatcattttgaatatgacagtgaaactttaaagcaagagtacgacagagataccgagacaggaaagaaaatagaagttcctaaaaatattatccaggagatgacccagcagcaaaacagataa

SEQ ID NO: 235279 - DNA, 671 bp, Unknown
  Bacterial polypeptide expressing nucleotide sequence isolated from the Sargasso Sea
cctgcccaagaactatcacaagcttgcggcggttgagcgcaacggaatctcttggattgagcctgaactagctgaacgccaggacatcagaccactgcgtatcggcattgtcaatatcatgccattaggcatgcagtacgagttcaacttgttgcatcctttgggtctttcgccgctgcaaattgagcctgtttggattcgccttaaaactcacgactacaaaacttgggatcatgagcatctcaatcatcaatattgttcttgggatcaagccaatgcagcatcttctctcgatggtttgatcattacaggtgctcctgtcgagcatttggcttacgagcaggtcacctattggcaggagatggtggagttggttgagattgcccgcagccaatgcgccagcacgcttggtttgtgttgggctggatttgctttggcctatctcgctggcgtggacaagtcagcgttcaagcagaagctctttggagtgttccccatgcgcagcctcaagccaggtcatgccctgatgggtacccaggacgacagctttgtttgcccccagagccgtcatgccggtctggatgatgcaggtatggaggaagcacaacggcagggacgcctgcgtctgctggcccacggcgagcaggtcggctacagcatcttcgaaaccc

SEQ ID NO: 235280 - DNA, 886 bp, Unknown
  Bacterial polypeptide expressing nucleotide sequence isolated from the Sargasso Sea
atggcactgatccttccccgcgactaccacaagatcggtgccgtcgaacgcaaccggatctcctggatcgaacccgcccaggcggagcgtcaggacatccggcccctgcggatcggcattctgaacatcatgcccctgggcaagcagtacgaattcaacctgctccaccccctcgggctgtcggttctgcagatcgaaccggtgtggatccggctcgcttcccatgcctacaaaagctgggatcaggagcacctcaaggatctctacgtgagctgggaggaagcgctggcccagggaccactggacgggctgatcatcactggcgcaccggtggaacacctgcccttcgagcaggtcacctactggacggaactggtggaactgatcgacgaggcacgccacagctgtgccagcacgctggggctgtgctgggccggctttgctctcgcctatctggcaggggtggacaaggtgccgttcgatcgcaagctgttcggcatctacccgttgcggagcctgattccagggcatcccctgatggggacccaggacgatcggtttctttgtcctcagagccgccacgccggcttgcccgacagcgccatggagtcagctcagcgccagggccgactgaggctgctggcctacggacagaacgtcggctacaccattttcgaaacaccggaccagcgccagctgatgcacctcggtcatccggagtacaacgtggggcgaattctgggagaaatggaacgggatcgggcccggggagatgtgccgccgccggagaacttcgatgccgaccacccccagacctcctggcgatcccatcgcaacctgctgtttcagcagtggctgtggttctgctatcagcggggagctgagc

SEQ ID NO: 235281 - DNA, 805 bp, Unknown
  Bacterial polypeptide expressing nucleotide sequence isolated from the Sargasso Sea
caggacatccggccgctccgcattggcatcatcaacatcatgccgttggggatgcagtacgagttcaacctgctgcaccccctcggcctttcgccgctgcagatcgagccgatctggatccgtctggccagccatgactacaagacctgggaccatgagcatctcgatgagctctacgtctcatgggagcaggccaatgccacagcgcccctcgatggcttgatcatcactggggctccggtggagcatctgccctacgagcaggtgcattactgggccgaactcagcgaactggtggccgtggccagaagcgcctgtgccagcacgctgggtttgtgttgggccggttttgccctggcgtacctcgccggcgtcgacaagacggcctttgagcagaagctttttggggtgttccccatgcgcagcctggtgcctggccatgccttgatgggcacccaggatgatgtctttttctgcccccagagccgccatgccggtctgaacgatggcgccatggaagcggcccagcgccagggccgtttgcgcttgctcgcccatggcgaggatgttggttacacgatctttgagaccaccgaccagcgccagctgatgcacctgggccatccggaatacaactccggccgtctgctggcggagatggagcgagaccgagcccgtggtgatgtgccgccaccgctgaattttgatgccgatgcgccccagaccctgtggcgttcgcatcgcaatctttttttccagcagtggctctggttctgctatcaacgcgtcagcttgtgccactgaa

SEQ ID NO: 235282 - DNA, 705 bp, Unknown
  Bacterial polypeptide expressing nucleotide sequence isolated from the Sargasso Sea
tatgccaattcgtattcctgagcagttacccgcacagaatgtactactaggtgaaaacatttttaccatggacatggacagggcggctaaccaggatattcgtcctcttgaagtgggtattttaaatttaatgccgaataaaattgagacagaagtgcaactgctgcgtctgctctcaaacacgccactacagataaatgtggatttgatccgcatagacaaccaagcgcccaagaatacgccccagtcgcacatggacgctttctaccatgacttttcgtcggtggcgaacaaaaagtatgatggccttattgttaccggcgccccattagcgcttatcgattacgaagaagtgaaatactgggaaaccatgaccactattttggagtgggcgcagcgccacgtaaattcgacgctttatctgtgttgggcggcccatgcagccatgtatcacttttacggcattacccgcgaactgcgagatgaaaagttttcaggggtgtttaagcacaaagttaacgatccaaataatgagttattaagaggctttgatccgtcattctatgccccccattcacgctacgggcatatcgatacttcgttgtacaacagtgttgacgggcttaacgtggtcgcagagtctgatgaggtaggcgcctatattgtcgcctctgaagacaagcgcatggtatttgttaccggcca

SEQ ID NO: 235283 - DNA, 652 bp, Unknown
  Bacterial polypeptide expressing nucleotide sequence isolated from the Sargasso Sea
atgcccataaaaattccgtccgatttaccggccttcaatgtattaagggatgaaggcgtcatggttatggacgattttaaagcaaataggcaagacatacgacctctcaaaataggtctattaaatctgatgccgaaaaaaatacaaactgaaaatcagttcgcgcgagttattggggccaccccgttgcaaatagaactgtcacttataaaaatgtctactcatgaaacaaaaaatacagccgcagagcatatgcaaacattttatcgctcatttaaagatgtaaaatcgagtcatgaaaaatttgatggcttaattataactggagccccaatagagcatttggattatgaatcagtgacttactgggaagaattaatagaaatatttgaatggacccaaacaaatgttcacgccgtatttggcgtttgctggggcggaatggcaatgctgtatcatttctataagattaaaaaatatgaccttacggcaaaagcatttggctgtttcagacatgagaatatagaaccatcctcgccatatttgagaggtttctcggatgattttattatccccgtcagccgttggacggagcttcgtcaaaatgaagtagacaaatttaaaaacctaaaaaccctgctagcgagtacag

SEQ ID NO: 235284 - DNA, 376 bp, Unknown
  Bacterial polypeptide expressing nucleotide sequence isolated from the Sargasso Sea
tatgcctattaaagtcattgatcagttgcctgctgtggaagctctttccgcagagaatgtgtttgtcatgacagaaagccgggctttgtcgcaggatatccggccgctgaaaattgccattttgaatttaatgccaaacaaagtggcgacagagatccagttattgcgcttattggccaatagtccgctgcaggttgatgtggagctgattcggctggacaatcatgtcagcaaacacacgccacaaaaccatctggactgtttttaccgctatttttctgacgtgcagcagaaaaactacgatggtctgattatcactggtgcgcctttgggcctggttaactacgaggatgtcagttactggccacagctgtca

SEQ ID NO: 235285 - DNA, 472 bp, Unknown
  Bacterial polypeptide expressing nucleotide sequence isolated from the Sargasso Sea
catcccaggcattcccatcataggatccatcattcccatcattggatctggtcccatcataggccccattccaggcatacccatcatagggtccatacccatcatcattggatctggtcccatcataggccccattccaggcattcccatcataggatccatcattcccatcattggatctggtcccatcataggccccattccaggcatacccatcatagggtccatacccatcatcattggatctggtcccatcataggccccattccaggcattcccatcataggatccatcattcccatcatcatcggatctggtcccatcataggtcccatgcccatatccataccaggaagcatgcccatatccatgtccatcattccaccaaagtctgctggacccatcatgtctgcagtcatcattggccccataaacatgtcaccagcctgcattgcattttgcatcattgat

SEQ ID NO: 235286 - DNA, 598 bp, Unknown
  Bacterial polypeptide expressing nucleotide sequence isolated from the Sargasso Sea
tatgccaattcgtattcctgagcagttacccgcacagaatgtactactaggtgaaaacatttttaccatggacatggacagggccgccaatcaggatattcgtccccttgaagtcggcatacttaacttgatgccaaataaaatagagacggaagtgcaattacttcgtctactgtcaaataccccactacaaatcaatgtggacctgatccgtatcgacaatcaagcgcctaaaaataccccgcagtcacacatggatgctttttatcacgatttctcagcggtagcggataagaaatacgatggccttatcgttaccggcgcgccccttgcgcttattgattatgaagaagtgaagtactgggacaccatgaccaccatattggaatgggcgcagcgtcatgtaaactcgaccctttatttatgctgggctgctcacgccgctatgtatcatttttacggcatcacacgtgaattaagagatgaaaaattctcaggcgtgtttaaacacaaagtaaacgacccgcacaatgagttactacgaggttttgatccgacattaaacgcacctcactctcgatatggccatattaaaacg

SEQ ID NO: 235287 - DNA, 895 bp, Unknown
  Bacterial polypeptide expressing nucleotide sequence isolated from the Sargasso Sea
atggcactgatcctcccccgcgactaccacaagatcggtgccgttgagcgcaaccggatctcctggatcgagcccgctcaggcggaactccaggacatccggcccctgcggatcggcattctcaacatcatgcccctgggcaagcagtacgaattcaacctgctgcaccccctgggtctgtccgtcctccagatcgaaccggtgtggatccggctcgcctcccatgcctacaaaagctgggaccaggagcacctcaaggatctgtacgtcagttgggaggaagcccttcaccaaggaccactggacggattgatcatcacgggcgcaccggtggaacacctgcccttcgagcaggtcaactactggaaggaactggtggaactgatcgaggaggcccggcacagctgtgccagcaccctgggactgtgctgggccggctttgcactcgcttatctggccggtgtggacaagattccgttcgaacgaaagttgttcggcatctacccgttgcgcagccttattcctggacatccattgatggggacccaggacgacagatttctctgtccgcagagccgccacgccgggttggccgacagcgccatggagtcagcccagcgccagggccgactgagactgctggcctacggagaagacgtcggatacacgatctttgaaacaccggatcagcgccagctgatgcacctcggccatccggaatacaacgtgggacggatcctcggtgaaatggaacgggatcgggcccgcggtgatgtgccgccgccggagaacttcgatgccgaccaaccccagacctcctggcggtcccatcgcaacctgctgttccagcagtggctgtggttctgctatcagcgggtgagcttgaccgcctgag

SEQ ID NO: 235288 - DNA, 1504 bp, Unknown
  Bacterial polypeptide expressing nucleotide sequence isolated from the Sargasso Sea
ttatggccagaccaaatagaatttgaaatactaggtttaaaatcaattggatataaagataaagttatattccctttgattgtagatattaaagataatcaaaaacaaacaaatttaaatttaaatattaattatttagtttgtaaagatgtttgtattccaggtaatgcggatatatttttaaacttaccatcaggagatggtgaatacacagattatttttttgaaattgaaaaagttttatctactacattaaataataatattgattttacacctatttctaatttctcatttaatgctattcaaaataataatgatattatttttgatatagaaatatcaactaattctttttttgatgatccaaaaatttttattcacacaccatttggattgccagttgtagaaacaataaataattattcccttgatttccaaaaattgaatacctctttatattataatgctgatcaatttaatgaaaaaaaatttccaatagaaatatttttttatgacaacaatcacagttttaaaattgaaaaaaatgtagaaattgaaaatgtagataaaaatattcctataaacaccagtcttatatacttactcttaatttcactattaggcgggtttattttgaatcttatgccatgtgtttttccagtattatcgttaaaattattatctgtaattaatactgaagataaaaagataaaaagtagtttttttataaccgtattaggtattatcacttcttttctaatacttggcgcattttttgccatcctaaaacaaatcaatatttcaatatcctggggtatgcaatttcaagaaccctactttttaatgttcattttgataattatatcaatgttcttcttgaacacacttggtcttttccaaataaatttaccaagttttttatcttcatcaaaaattttaaattcaggaaataatttttatacaaagaatttttttaatggtttttttgctacactacttgctacaccatgttctgcaccttatttaggaacagctgtaacggctgcttttactcaatcaacaacatatttatttttaatattctgttttatgggtataggaatgagtttgccttatttgattatagctttttttccaggtctgatttccttcttacctcgatctggaaaatggatgatttattttaaatattttttatctttactattattagtaacaataatttggcttttaagtatattaaataattatttcaattatttttttataattacattttttgttttactgatcttaatatcagcaattttaaaatttagaatttttcaaattcccttaattatttctcttataattattttctttttaactccatatttaaattcttttcaaaaaattaatgaggaaaattataaaagtaataattggttagatttcaattccaaaaatatccctgaaataatagctaataatgaaattgtttttttagatataactgccg

SEQ ID NO: 235289 - DNA, 864 bp, Unknown
  Bacterial polypeptide expressing nucleotide sequence isolated from the Sargasso Sea
aatggtagagattacagttaaagctgctgatagtgcatccgcaatggaagaaatcgaaaagcgtttaggcgctgatgcgatgatcgtatcaactaatcgaatagacgggcagattgaaattgttgccactaatgacgacccttctaaatataaaaaagcgccagagcccttggtgctagatcaaaactacaaaatcaaggggttttcagacctattaaattcaaaattatctgctgatgataaacctttgaaaagtgaaggctatgaacagcacgtccaaattgcagaaaccgcagaaaatattaaggcggagattgataaacttgttgaattctcgagtcgttcgaaagtagtagaacctaataatacaagtgctcatgagtattttaaaatgtctgggatcaaggggtctctattggataattctgaacatttgggtagtaatccttcaataaaagatgtgtccaaaatactggcaaaatcatttattaatggaaaatgtgataattttgaaagttcctcaatatatataattactggaaatgcaggtgcgggtaagacgttattttctaaaaaattacagactttatttgaaactcaaattgatgcaaaatcatgcactgtctttgaagaattcaaggttaaaaaatctcttacagagatcaaaaactggttttcgaaaaataaatccaagattgttgataaaaagcaagtcggcattattgtgttatcaaatttagaaaatattgatgatttcatgctaaatttatcaaagttagatagcgctataaaaattagtattttgaaccttatgccggttggaaatagctatgagtatttaataaagaatatgccgcacaggcg

SEQ ID NO: 235290 - DNA, 703 bp, Unknown
  Bacterial polypeptide expressing nucleotide sequence isolated from the Sargasso Sea
acgccgcgaaacacgtcagccgaccaccttctcgcgttctaccggtcttgggaatcagttcgccaccgaaacttcgacggcctcattatcactggcgcgccggtcgagacgatgcccttcgagcatgtccaatattggcaggaactgacccaaatcctcgattggtcgcagacccatgtccaggagacgctgaacctctgctggggcgcgcaagcttcgctctatcacttccacaagatcccaaagcacgaccttccacagaagatgttcggcgtttttcagcatcaaatcgtcacacacaacacgactttcttgcggggttttaatgatgtgttcccggtccccgtcagccgccattcggagacacgccaggaagacatcgacaaggtatctgacttgtatgtgctggcaacctcccaggaggctggcctttgcatagtccgcgatcctgtgcaccggcagctggatatgctcaaccacctcgagtatgagcacgacacgctggcgactgaatatcgacgcgatgttgctaacggcgcggaaatccagttaccagcacattacttcccgaacgacgacccaaatcaaaagcctgtaaacttttggcggccgttagctcatctattgtttgcgaactggattaactatctataccagacatcgcccttcgaagttgcacaaattcccaatatcgagaattaga

SEQ ID NO: 235291 - DNA, 453 bp, Unknown
  Bacterial polypeptide expressing nucleotide sequence isolated from the Sargasso Sea
gttctggggtgtttgtgcatcgccgcacttgccaacatttcccgctgctgcgtggattcgatgatgagttctttgcgccgcattcccgctttgccgagatggatatcgaggagcttaaacagcaccctgagctgctggtgctggcggaatccgatgaggcaggggcctacttagtcctcagtcgtaacaatcgcaacctgtttgtcatgggtcatcctgaatatcaaaaatctaccttaaacgatgaatatcatcgggatttggcgcagggattaaatcccaatgtgccgcaaaactattatcgtaatgacgatcctgagggcgatgccattgcccgttggcacagtcatggcagcttgctagtcagcaactggctcaactattacgtttaccaattaacgccctacgacttaagcgatatgtcggccgtcacgccatgggaatcgcaataat

SEQ ID NO: 235292 - DNA, 261 bp, Unknown
  Bacterial polypeptide expressing nucleotide sequence isolated from the Sargasso Sea
catgccgatcaagatcccggaccagttgcccgccgccgaagtgctggggcaggagaacatcttcgtgatgacggaatcccgggccgtcacccagaacatccgcccgctgcgggtgctcatcctcaatctgatgcccaagaagatagaaaccgagatccagctgatgcggatgctctccaactcgcccttgcaggtggacgtggatctgttgcgcatcgacgatcgggagtcgaaaaacacgccccaggcgcacctggagaa

SEQ ID NO: 235293 - DNA, 412 bp, Unknown
  Bacterial polypeptide expressing nucleotide sequence isolated from the Sargasso Sea
atgccgatcaagatcccggatcagttacccgccgccgaagtgttggggcaggagaacatcttcgtgatgacggaatccagggccgtcacccagaacatccgcccgctgcgggtgttgatcctcaacctgatgcccaagaagattgaaaccgagatccagctgatgcggatgctctccaactcgccgttgcaggtggacgtggatctgctgcgcatcgacgatcgggagtcgaagaacacgccccaggcgcacctggagaacttctatcatgacttcgaacaggtgcgcggcaacaactacgatggcatgatcatcacgggggcgccgctcgggctggtagagttcgaggaggtggtctactggccgcgcatcgtcgagatcatcgagtggtcccatcagcatgtgacctcca

SEQ ID NO: 235294 - DNA, 265 bp, Unknown
  Bacterial polypeptide expressing nucleotide sequence isolated from the Sargasso Sea
tgttcgtcccggtccccggaatacgatgcgctgaccctggatggcgaataccagcgggatctggcggccgggcttgagccggtcatcccggtcaactattacccggacaacgacccgacccggaccccgcgcgccagctggcgcagccacggtcacctgctgttttccaactggctcaactactacgtctatcagctcaccagctatcgcgtcgaggatatcggcaaggtgtttacctatcagcagaactcgccgtcgaggtagg

SEQ ID NO: 235295 - DNA, 427 bp, Unknown
  Bacterial polypeptide expressing nucleotide sequence isolated from the Sargasso Sea
gtcaacgatccgaacaacgaattactgcgtggatttgactcaccttttgcggcaccacactctcgttacggtcacatagacacatcactttataatagtgttgaaggtcttaatgtagtggctgagtcagaggaagtgggcgcttacattgtagcttcagaagacaaacggatggtatttgttaccgggcaccccgagtacgaaccggacacgctaaaagacgaatatctgcgtgacgtgcaggctggtcaacatcctgcggtgccaaataattatttcactgacaatgacccaactaaaccgcctttagttcaatggcgctcccatggaagtctattgtttacaaattggcttaactattacgtttatcaaacaacgccgtatgatttaagccagttagctgaaaaaccacagccaaagaggtaac

SEQ ID NO: 235296 - DNA, 326 bp, Unknown
  Bacterial polypeptide expressing nucleotide sequence isolated from the Sargasso Sea
ataccagcaacatgatgacttacatattctggctgaggccgatgtaacaggtgcctacctgttgcaaaacagcagtggtagccgggtatttgttaccggtcacccggaatatgatttaactacgctggacgatgaatatcagcgtgacctggcagctggcgttacagctaagctgccagaaaattactatcgcaataatgaccctatgcaagggccacagaaactgtggcaaagccacgcctttttactgttcagcaactggctgaactactatgtgtatcaggccacaccatttgagttaagccagattggtcacggtgcctaag

SEQ ID NO: 235297 - DNA, 320 bp, Unknown
  Bacterial polypeptide expressing nucleotide sequence isolated from the Sargasso Sea
ctataccgatttagagatcctggcagaaacggaagagggtgatgcctacctgtttgccagcaaagataagcgaatcgcctttgtgaccggccacccggaatacgacgcccacaccctggccagcgaatttttccgcgatgtggaagccggcctgagtccggacattccgtataattattttccgcaaaacgatccgcagaacaaaccgcgagccacctggcgcagccatggaaatctgctgtttgcaaactggcttaactattacgtctaccagatcactccatacgatctgcggaatatgaatccgactttggattaat

SEQ ID NO: 235298 - DNA, 940 bp, Unknown
  Bacterial polypeptide expressing nucleotide sequence isolated from the Sargasso Sea
tatgccaattcgtattcctgagcagttacccgcgcagaatgtactactaggtgaaaatatttttaccatggacatggacagggctgccaatcaggatattcgtcctcttgaagtcggcatacttaacttgatgccaaataaaatagagacggaagtgcaattacttcgtctactgtcaaataccccactacaaatcaatgtggacctgatccgtatcgacaatcaagcgcctaaaaataccccgcaatcgcacatggatgctttctatcacgacttttcagcggtagcgaataagaaatacgatggcctcattgtcaccggtgcgcctctcgcgcttatcgattacgaggaagtaaagtactgggaaaccatgaccaccatattggagtgggcgcagcgtcacgtgaactcaaccctttacttatgttgggctgctcacgccgccatgtatcacttttacggcattacacgagagcttagagacgaaaagttttcaggtgtctttaaacataaagtgaatgacccgaacaatgagctattaagaggctttgatccttctttttacgcaccacattcccgttatgggcatattaacacctcgttgtataacagcgtcgatggacttagtgttgttgcagagtctgacgatgtaggcgcttatattgtggcgtcagaagataagcgcatggtatttgtaacgggtcacccggaatacgatccagatacacttaaagacgagtattttcgagatattgccgcgggacaaacgccagtaattccaaaaaactattttgaaggggatgatccagccaagtctcctattgtacagtggcgctcacacggcagcctattgtttacaaactggctgaattattatgtctatcagaccacgccttacgatttaagtcagcttgctgaaaagtcacagccaaagaggtag

SEQ ID NO: 235299 - DNA, 943 bp, Unknown
  Bacterial polypeptide expressing nucleotide sequence isolated from the Sargasso Sea
atgccagttaaaattccagatcatctgcctgcagcagggattttagaatctgaaaatattttcgtaatgtccgaaactcgggctgccaatcaggatatcagaccgatgaaggtgctgatcctgaatctgatgcccaataaaatcgagacagaaacccagcttctacgcctattaggtaacacgcctttgcaggtggatgtggatttactgcgtattcacgataaagagtcgaagcacacctcaatcgatcatatgaacaccttctaccgtgactttgaggatgtgcgtcataaaaactacgacggcctgatcatcacgggcgcgccccttggacaaatcgatttcgaagaagtcacttactgggatcatatccgcgagattatcgattggtcacagcagcatgttacctcagtgctcttcctctgctgggcggctcatgcggggctttaccatctctatggtttaaatcggaaaatcctgcagcaaaagcgttctggggtgtttgtgcatcgccgcacttgtcaacatttcccgttgctgcgcggattcgatgatgagttctttgcgccacattcccgctttgccgagatggatatcgaggaacttaaacaacatcctgagctgcaggtgttggcggaatctgatgaggctggggcctacttagttctcagtcgtaacaatcgcaacctgtttgtcatgggtcatcccgaataccaaaaatctaccttaaacgatgaatatcatcgggatttggcgcagggattaaatcctaatgtgccgcaaaactattatcgtaatgacgatcctaaggccgatgccattgcccgttggcacagtcatggcagcctgctcgtcagcaactggctcaactattacgtttaccaattaacgccctatgacttaagcgatatgtcggccgtcacgccgtgggaatcgcaataat

SEQ ID NO: 235300 - DNA, 922 bp, Unknown
  Bacterial polypeptide expressing nucleotide sequence isolated from the Sargasso Sea
atgcctattaaagtcattgatcagttacctgctgtagaagcgctttctgcggagaatgtatttgtcatgacagaaagccgggctttatcgcaggatatccggccgctgaaaattgccattttgaatttaatgccaaacaaagtcgccacagaaatccagttattacgcttgttggccaatagcccattgcaggtcgatgtagagctgatccgactggataaccatgtcagcaaacatactccacaaaaccatctggactgcttttaccgctatttttctgacgtgcagcagcagaattatgacggccttattatcacgggtgcgcctttaggtttagttaattacgaagatgtcagttattggccgcagttggcagaaattctgacctgggctgaccgtcacgtcacttcgaccttgtttttatgctgggctgctcatgcggctttgtaccattactatggtttgcagcgtgaaattcgcggtgagaaattatcaggtgtgtattggcaaaatgtgtctcagcctttaagtcctttagtacgcggttttgacgatgaatttttagtgccgcattcgcgttatgctcaggtgccaaaacagaagtaccagcatcatccggatttacatgtattggctgaagccgatgcaactggcgcttacttgctgcaaaacagcagcggcagccgggtttttgtcactggccatccagagtatgatttaacgacgttaaacgatgaataccagcgtgatctggccgcaggtcttgagccaaaagttccagagaactactataaacaaaacgatccggccaaaggtccacataagttatggcaaagccacgcctttttattattcagcaactggctgaattattatgtgtatcaggccacaccttttgatattcagcagatagggcagtagt

SEQ ID NO: 235301 - DNA, 931 bp, Unknown
  Bacterial polypeptide expressing nucleotide sequence isolated from the Sargasso Sea
tatgccaattcgcgtgcaggacgagctacccgccgtcaatttcttgcgtgaggaaaacgtctttgtgatgacgacatcccgcgcttccggtcaggaaattcgaccactgaaggtgctcatcctcaacctgatgcccaagaagattgaaacggaaaaccagttcctgcgcttactgtctaactcaccgctacaggtagatgttcagctattgcgcatcgatgcccgcgagtcacgtaacacccctacggagcatctgaataacttttactgtaatttcgaggatatctgcgatcagaactttgacggactgatcgtgaccggcgcgccgttgggtctggttgaatttaatgacgtggcttactggccgcagattcaacaagtgcttgaatgggcgaaagatcacgttacctcaacgctatttgtttgttgggcggtgcaggccgcgctgaatatcctgtacggaattcctaagcaaacccgtacggacaaactctcaggcgtctatgagcaccatattctgcatcctcatgcgctgctgacgcgtggattcgatgatgcgttcctggctccgcattcgcgctatgccgattttcctgctgcgattattcgcgactacaccgatctcgagatttttgctgaaacagaagagggagatgcctacctctttgccagcaaagataaacgaattgcctttgtgacgggccatccggaatatgatgcccatacgctcggcagtgagtattttcgtgacgtcgaagcgggcctaacgccggaagtgccctataactacttcccgaaagatgacccgcaaaacaaaccgcgggcaacctggcgtagccacggtaatctgttgtttaccaactggctcaactattacgtctaccagatcacgccatatgatctgcgtcacatgaatccaacgctggattaa

SEQ ID NO: 235302 - DNA, 925 bp, Unknown
  Bacterial polypeptide expressing nucleotide sequence isolated from the Sargasso Sea
atgcctattaaagtcattgatcagttacctgctgtagaagctctttctgcggagaatgtgtttgtcatgactgaaagccgggctttgtcgcaggatatccggccgctgaaaattgccattctgaatttaatgccgaacaaagtcgcgactgaaatccagttattacgcctgttagccaatagcccgctgcaggtggatgtggagctgatacgactcgataaccatgtcagcaaacatacgccacaaaaccatctggactgtttttaccgctatttttctgatgtgcagcagcaaaattatgacggcctgattatcacgggtgcgcctttaggtttagttaattacgaagatgttagttactggcctcagctggcagaaattctgacctgggctgaccgtcatgtgacttcaaccttgtttttatgctgggctgctcatgctgctttgtatcattattatggcttgcagcgcgaaattcgtggtgagaagttatccggtgtctactggcaaaatgtttctcagcctttaagcccgttggtacggggttttgatgatgagtttttagtgccacattcgcgttatgctcaggtgcccaaacaaaagtatcaacatcacccggatttgcatgtgttggcagaagccgatgcaacaggcgcctacttactgcaaaacagcacgggtagccgggtttttgttactggtcatccagaatacgatttaaccactttaaatgatgaataccagcgtgatctggccgcaggtcttgagccaaaagttcccgagaactactataaacaaaacgatccggccaaaggtccacataagctatggcaaagccatgcctttttattgttcagcaactggctgaattattatgtgtatcaggccacaccttttgatattcagcagatagggcagcagtaat

SEQ ID NO: 235303 - DNA, 928 bp, Unknown
  Bacterial polypeptide expressing nucleotide sequence isolated from the Sargasso Sea
atgcctattaaagtcattgatcagttacctgctgtggaagctctttctgcagagaatgtgtttgtcatgaccgagagccgggctttgtcgcaggatatccggccgctgaaaattgccattttgaatttaatgccaaacaaagtcgcgactgaaatccagttattgcgcttgttagccaatagtccgctgcaggtggatgtagagcttattcgtcttgataaccatgtcagcaaacataccccgcagaaccatctggactgtttttaccgttatttttctgatgtagagcagcaaaactatgatggcctgattatcacaggcgcgcctttaggtttagtgaattacgaagatgtcagttattggccacagctctcagaaattctgacctgggctgatcgtcatgtcacctcaactttgtttttatgttgggctgcccatgcggctttgtatcattattatggtttacagcgcgaaattcgtggcgagaagttatccggggtctactggcaaaacgtctgtcagcctttaagcccattggtacggggtttcgacgatgagtttttagtaccacattcacgttatgcgcaggtacctaaacaaaaatatcagcatcatccggatttgcatgtgttagcagaagccgatgtgacaggcgcctatttgctgcaaaacagcacgggtagccgggtctttgtcactggtcatcctgagtatgatttaaccacgttaaatgatgaatatcagcgtgatctggccgcaggtctagagccaaaaatcccagagaactactataaacaaaacgatccggccaaaggtccacataagttatggcaaagtcatgcctttttattgttcagcaactggctgaactattatgtataccaggccacaccttttgatattcagcagatagggcagcagttatgac

SEQ ID NO: 235304 - DNA, 943 bp, Unknown
  Bacterial polypeptide expressing nucleotide sequence isolated from the Sargasso Sea
tatgccagttaaaattccagatcatctgccagcagcagggattttagaatctgaaaatattttcgtaatgtccgaaactcgggccgccaatcaggatatcagaccgatgaaggtactgatcctgaacttgatgcccaataaaattgagaccgaaacccagcttctacgccttttaggcaacacgcccttgcaggtggatgtggatttactgcgtattcacgataaagagtcgaagcacacttctatcgatcatatgaacaccttctaccgtgattttgaggatgtgcgccataaaaactacgacggcctaatcatcactggcgcgccgttagggcaaattgattttgaagatgtgacttattgggaccatatccgtgaaattatcgattggtcacagcagcatgttacctcggtgctcttcctctgctgggcggcgcacgctgggctttaccatctctatggattaaatcgtaaaatccttgagcaaaagcgctcaggggtgtttgtccatcgccgcacctgcctgcatttcccgctgctgcgcggatttgatgatgagttctttgcaccgcattcccgctttgccgagatggatattgaggagcttaagcgacatcctgaactacaagtgctggcagagtccgaggaagcaggagcctatttggtcctcagtcgcaataatcgcaacctgtttgtcatgggtcaccctgagtatcaaaaatccaccctaaacgatgaatatcatcgggatttggcgcagggcttaaacccaaatgtgccacaaaactattaccgtaacgatgatcctaaggccgatgccattgcccgttggcacagccatggtagcctgctagttagcaactggcttaactattacgtttaccaattaacgccttacgacctgagtgatatgacagcgatgacaccatgggaatcgcagtag

SEQ ID NO: 235305 - DNA, 906 bp, Unknown
  Bacterial polypeptide expressing nucleotide sequence isolated from the Sargasso Sea
caatacataaattattagaaacagaacttgccaattggcttgatcaagagaaagtattacttttcccaagcggatttcaagcaaatatagccgctatccaggctttagcaaacagaaatagtatcgtaatagcagataaattgatccataactctttattggttggagtcaaagctgctcaagcaaaactggttcgattttcacacaataatttaaaagatttaaaagataaaattattaaatctaaccccacaaaaaattccattttagttgttgttgaatctctttatagcatggagggatcaattgctccgctcagagaaataacggaaatttgcaaaaaaaatagtgttcaattattagttgacgaagctcatgcaattgggatcttgggccctgaaggcaggggtttaagttttaattttcgttcagatataactatgattactggaacttttggaaaagcatttggaagcggtggagctttcatagcttccaattcagaaattggagaatatcttatccaaacaagtggtgcatttaggtatacaaccgcacttgcgccatctttagctgctggggcgctagaaggtttaaaaaaaattttagaaaataaagaatggggtaatgatttgttatcttctgcgaatgtatggaaagatgaaattattaaaaattttagttttccagttcagggagattctcacattttatcaattattgttggccaagaagagaaggcaatttatctacaaaaatatcttgaagaaaatgggtttttagcaattgcgataagacctccaactgttccagtggggcaatcaagaatcagaataacaatacgaagaaacttagattttaatctgctaaaaaatttcattgcagtattaaaagagtttaaatgaa

SEQ ID NO: 235306 - DNA, 898 bp, Unknown
  Bacterial polypeptide expressing nucleotide sequence isolated from the Sargasso Sea
ttcaagaccaatacatgaattattagagacagaacttgccgagtggcttgatcaacagaaagtattacttttcccaagcggatttcaagcaaatatagcagctattcaggctttagcaaacagaaatagcatcataatagcagataaatttattcataactctttattagtgggagtcaaagctgctcaagcaaaactggttcgattttcacacaataatttaaaagatttagaagataaaattattaaatttaaccctacaaaaaattccattttagttgttgttgaatctctttatagcatggagggatcaattgctccgctcagagaaatcacagaaatttgcaaaaaaaatagtgttcaattattagttgacgaagctcatgcaattgggatcttgggccctgaaggtaggggtttaagttttaatattcgtaaggatataactatgattactggaacttttggaaaagcatttggaagcggcggagctttcatagcctccaattcagaaaatggtgaatatcttatccaaacaagtggtgcctttaggtatacaactgcacttgctccacctttagctgctggggcactagaaggtttgaaaaaaattttagaaaataaagaatggggtaatgatttgttatcctctgcgaaggtatggaaagatgaaattattagaaattttagttttccagtgcaaggagattctcacattttatcaattattgttggccaagaagagagggcaattgatctacaaaaatatctcgaaaaaaatgggtttttagcaattgcaataagacctccaactgttccagttgggcaatcaagaatcagaataacaataagaagaaacttagatttaaatctgctaaaacatttcattgcagtatta

SEQ ID NO: 235307 - DNA, 124 bp, Unknown
  Bacterial polypeptide expressing nucleotide sequence isolated from the Sargasso Sea
aaaagcggctaataaactcaagcaacaaggaatttggctaaccgctattcggccacctacggttgcgtacaatactgcacgcttaagagtgacgttaacggcagcgcacaccctaatacaatag

SEQ ID NO: 235308 - DNA, 283 bp, Unknown
  Bacterial polypeptide expressing nucleotide sequence isolated from the Sargasso Sea
ttgtttcggaaggcggcgaagaatgcttgtataccgataacccagagcacatccccgatccagcccattttaattggtgatgctagggcggcccttgcggtagagagagagctaaaaaagtttaagatttatgctagagctattaggcctcctacagtgccgaaaggcacgtctaggttacgtattacgctaagttcacaacacacagaagctcaaattttggacctgattaacgctttgaaggaagttctaccaaatggaaataaggcaaaatccgagtagt

SEQ ID NO: 235309 - DNA, 452 bp, Unknown
  Bacterial polypeptide expressing nucleotide sequence isolated from the Sargasso Sea
cgtggccggcagtgaggacttgatcgagagcctgatccaattcgcacgcccgtatatctacaccaccagccaaccaccggcactggcctgcgccaccctcaaaagcctggaactgctgcgcagcgaacattggcgacgcgagcacctcaacgcgttgatccgccagttccgtcgcggcgccgagcagataggcctggcgttgatggacagctttacgccgatccaaccgatcctgattggcgacagcgcccgggcactgcgcctctcgcagatgctgcgcgagcgcggcctgatggtgactgccattcgcccaccgaccgtgcccgccggcagtgcccgtctacgggtgacattgacggcggcccacagcgaagcgcaggtgcagctattgttagacgggttgcaagcgtgttttcgcttgttagacgcctcggagcccggctatgcgtaat

SEQ ID NO: 235310 - DNA, 460 bp, Unknown
  Bacterial polypeptide expressing nucleotide sequence isolated from the Sargasso Sea
cttggaactttttggaaaagcatttggaagcgggggagctttcatcgcttccaactcagaaattggagaatatcttatccaaacaagtggtgcatttaggtatacaaccgcacttgcgccatctttggctgctggggcactagaaggtttaaaaaaaattttagaaaataaagaatggggtaatgatttgttatcttatgcgaatgtatggaaagatgaaattattaaaaattttagttttccagttcagggagattctcacattttatcaattattattggccaagaagagaaagcaatttatctacaaaaatatctcgaagaaaatgggtttttagcaattgcgataagacctccaactgttccagtggggcaatcaagaatcagaataacaatacgaagaaacttagattttaatctgctaaataatttcattacagtattaaaagagtttaaatga

SEQ ID NO: 235311 - DNA, 405 bp, Unknown
  Bacterial polypeptide expressing nucleotide sequence isolated from the Sargasso Sea
gctatatttactctacatccctgcctgttaatgctgtagaagctacaagaaagtccttaaaaattatttcaaaagaaaattggagacgagaaaagcttatttcattgataagctattataaaaaaaatataaaagaatcaggatttaaatcatttaaaagtaattcacagattcaagcaatattaataggaagcagtaaagatgctttatatgttagtgatcagcttttcaaaagtggaatttatattcctgccattagacctccaacagtagaagaaggaaaatctcgtctaagaatatctttgactgttgatcatcaattatctgatattgattatttaataaatatattgcaaaagatatctagaaatcttgtacaatctcaagaatgtgccaaaaaataaa

SEQ ID NO: 235312 - DNA, 177 bp, Unknown
  Bacterial polypeptide expressing nucleotide sequence isolated from the Sargasso Sea
aagagaaaaaggcaatttatcttcaaaaatatctcgaaaaaaatgggtttttagcaattgcgataagacctccaactgtcccagttggacaatcaagaataagaataactataaggagaaacttagattttaatctgctaaagaatttcattgctgtattaaaagattttaaatgaa

SEQ ID NO: 235313 - DNA, 141 bp, Unknown
  Bacterial polypeptide expressing nucleotide sequence isolated from the Sargasso Sea
ttgaggcacaaggcctgctaactgttgcgatccgtccaccaactgtccccgaaggtaaatcgagactcagattagtgatcaggcgaaatacaccagatcaggctttcgaaagacttatcgaaattcttaaaaacaaatgaa

SEQ ID NO: 235314 - DNA, 451 bp, Unknown
  Bacterial polypeptide expressing nucleotide sequence isolated from the Sargasso Sea
tttggaaaagcatttggaagcggtggagctttcataggttccaattcagaaattggagaatatctgatccaaacaagtggtgcatttaggtatacgaccgcacttgcgccatctttagctgctggagcactagaaggtttaaaaaaaattttagaaaataaagaatggggtaaagatttgttaacttctgcgaatgtatggaaagatgaaattattaaaaattttagttttccagttcagggagattctcacattttatcaattattgttggccaagaagagaaggcaatttatctacaaaaatatctcgaagaaaatgggtttttagcaattgcaataaggcctccaactgttccagtggggcaatcaagaatcagaataacaatacgaagaaacttagattttaatctgctaaagaatttcattgcagtattaaaagagtttaaatgaa

SEQ ID NO: 235315 - DNA, 337 bp, Unknown
  Bacterial polypeptide expressing nucleotide sequence isolated from the Sargasso Sea
acccctggtagccggagcccaggcggcgctgaacctgatccgatcccatccgcactggagccgacaactgcagcagcgggcgagccgctggagggatgccctggaaagcgaaggctggacacggcctgcggggcagggacctgtgctgccactgctgttgggcgacgatgccgcggcccttgccggtcaggcaggtctggaggacaacggattgctctgtgtcgcgatccggccgcccaccgttccggaagggaccgcacggctgcggctggtgctgcgacgcgacctgccggatgagacggtggagcagctgctgaaggccctcccctgcccatga

SEQ ID NO: 235316 - DNA, 595 bp, Unknown
  Bacterial polypeptide expressing nucleotide sequence isolated from the Sargasso Sea
tccgctcagagaaataacggaaatttgcaaacgaaattgtgttcaagtattttttgacgaagctcatgcaattggtatcttgggccctgaaggcaggggtttaagttttaattaccgttcggatataactatgattactggaacttttggaaaagcatttggaagcggtggagctttcatagcttccaattcagaaattggggaatatcttatccaaacaagtggcgcatttaggtacacaaccgcacttgctccatctttggctgctggagcactagaaggattaaaaaaaattttggaaaataaagaatggggtaatgatttgttatcttctgcgaaggtatggaaagatgcaattaataaaaattttagttttccagttcaaggagattctcacattttatcaattattattggtcaagaagaaaaggcaatttatctacaaaaatatctcgaaaacaatggatttttagcaattgcgataagacctccaactgttccagttgggcaatcaagaatcagaataacaataaggagagacttagattttaatctattaaagaatttcattgatgtaataaaagaatttaaatga

SEQ ID NO: 235317 - DNA, 1141 bp, Unknown
  Bacterial polypeptide expressing nucleotide sequence isolated from the Sargasso Sea
atgaaaaaaataaaaattccaaaaaatagaatccgtaaattaaaaacattttctttaggtaaaaaatcattcgaacttctaagtttaaattcgcaaaataaaaaacttatagacttatgcagtaatgattattttggattaagtagggacaaggatttaataaaagctgcttacgaaataagcatgttagaaggtattggttcaggaagctctaggtttattacaggttcaagaccaatacataaattattagaaacagaacttgccaagtggcttgatcaagagaaagtattacttttcccaagcggatttcaagcaaatatagccgctatccaggctttagcaaacagaaatagtatcgtaatagcagataaattgatccataactctttattggttggagttaaagctgctcaagcaaaactagttcgtttttcgcataataatttaaaagatttagaagataaaattattaagtctaaccccacaaaaaattccattttagttgttgtcgaatctctttatagcatggagggatcaattgctccgctcagagaaataacggaaatttgcaaaaaaaatagtgttcaattattagttgacgaagcccatgcaattgggatcttgggccctgaaggcaggggtttaagttttaatttccgttcagatataactataattactggaacttttggaaaagcatttggaagcggtggagctttcgtagcatccaatttagaaattggtgagtatcttatccaaacaagtagtgcatttaggtacacaaccgctcttgcgccacccttagctgctggagcactagaaggtttaaaaaaaattttagaaaataaagaatggggttatgagttgttatcttctgcgaagatatggaaagatgaaattattaaaaattttagttttccaattcagggagattctcacattttatcaattattgttggccaagaagagaaggcaatttatctacaaaaatatcttgagaaaaatgggtttttagcaattgcgataagaccccctactgttccagttgggcaatcaagaatcagaataacaatacgaagaaacttagatttgaatctgctaaaaaatttcattgcagtattaaaagagtttaaatgaa

SEQ ID NO: 235318 - DNA, 1060 bp, Unknown
  Bacterial polypeptide expressing nucleotide sequence isolated from the Sargasso Sea
aatgaaaaaagtaaaaattccaaaaaatagaatccgtaaattaaaaacattttctttaggtaaaaaatccttcgaacttctaagtctaaattcgcaaaataaaaaacttatagacttatgcagtaatgattattttggattaagcagggacaaggatttaataaaagctgcttacgaaataagcttgttagaaggcattggttcaggaagctctaggtttattacaggttcaagaccaatacataaattattagaaacagaacttgccaagtggcttgatcaagagaaagtattacttttcccaagcggatttcaagcaaatatagccgctatccaagctttagcaaacagaaatagtatcgtagtagcagataaattaatccataactctttattggttggagtcaaagctgctcaggcaaaactagttcgattctcacacaatgatttaaaagatttaaaagataaaattattaaatctaaccccacaaaaaatcccattttagttgttgttgagtctctttatagcatggagggatcaattgctccgctcagagaaataacggaaatttgcaaaaaaaatagtgttcaattattagttgacgaagctcatgcaattgggatcttggggcctgaaggcaggggtttaagttttaattatcgttcagatataacaatgattactggaacttttggaaaagcatttggaagcggtggagctttcatagcttccaattcagaaattggagaatatcttatccaaacaagtggtgcatttagatatacaaccgcacttgcgccatctttagctgcgggggcactagagggtttaaaaaaaattttagaaaataaagaatggggtaatgatttgttatcttctgcgaatttatggaaagatgaaattattaaaaattttaattttccagttcagggagattctcacattttatcaattattgttggccaagaagagaaagcaatttatttacaaaaatatctcgaagaaaatggttttttagcaattgcgataagacctccaactgttccagtggggcaatca

SEQ ID NO: 235319 - DNA, 400 bp, Unknown
  Bacterial polypeptide expressing nucleotide sequence isolated from the Sargasso Sea
gatctcggcgacgccttgctgcagaccagtggcgcctttcgttacacaactgccttggccccacccctggtggccggtgcacagacggcactggacctgatccgatcccatccgcactggagccaacagctgcaacagcgggcgagccactggcgggatgccctggagggcgaaggctggacacgacctgcgggggtggggcccgtgctgcccttactgctgggcagcgatgccgcggccctcgccgctcaggcggtcctggaaggacacggattgctgagtgtggcgatccgtccgcccaccgttccggaggggaccgctcggctgcggctggtgctgcgccgggacctgccggatgagacggtgggacagctgctcaaggccctcccctgcccatgaa

SEQ ID NO: 235320 - DNA, 942 bp, Unknown
  Bacterial polypeptide expressing nucleotide sequence isolated from the Sargasso Sea
gttcaggaagctctaggtttattacaggttctagaccaatacatgaattattagaaacagaacttgccaagtggcttaatcaagagagagtattacttttcccaagcggatttcaagcaaatatagccgctatccaggctttagcaaacagaaatagtatcgtaatagcagataaactgatccataactctttattggttggagtcaaagctgctcaagcaaaactagttcgattctcacacaataatttaaaagatttagaagataaaattattaaatctaaccctacaaaaaattctattttagttgttgttgaatctctttatagcatggaaggatcaattgctccgctcagagaaataatggaaatttgcaaagaaaatagtgttcaattattagttgacgaagctcatgcaattgggatcttgggcccagaaggtaggggtttaagttttaattatcgttcagatataactatgattactggaacttttggaaaagcatttggaagcggtggagctttcatagcttccaattcagaaattggagaatatcttatccaaacaagtggtgcatttaggtatacaaccgcacttgcgccatctttggctgctggggcactagaaggtttaaaaaaaattatagaaaataaagaatggggcaatgatttgttatcttctgcgaatgtatggaaagatgaaattattaaaaattttagttttccagttcatggagattctcacattttatcaattattgttggccaagaagagaaagcaatttatctacaaaaatatctcgaagaaaatgggtttttagcaattgcgataagaccccccactgttccagtagggcaatcaagaatcagaataacaattcgaagaaacttagattttaatctgctaaataattttattacagtattaaaagagtttaaatgaa

SEQ ID NO: 235321 - DNA, 646 bp, Unknown
  Bacterial polypeptide expressing nucleotide sequence isolated from the Sargasso Sea
gtggtaactgaaggcgtatttagtatggatggtgatagtccggatctaagcgctgtatctgcgctttgtaaaacaaataaagcggatatgctgctggacgatgcccatggactgggagtgcttggcaacgaaggaaaaggcagctgggatgcgcaagggcttgaatccagcgacatgctctgcctgatggcgaactttggtaaagctttagcaggtcagggcgcttttttggcaggttcagccacagtgattgattatttacgccagtttgccaggcattatatatacagcactgcgttatcgcctgctttgtgctgggcaatgaagacctccgttgaattaagccgcagccaagagtggcgcagagacaaactgaatgacaatattcaattgtttaaaactctggctgttggtgctggtttgactttattgccatcgagcacagccatacagccgctgattattggcgattcagacaaagccatgttgataagcgcctcgctgaagaaacaaggcatttggctcagcgcaatacggccaccgacagtgccgcagggtagcgccaggttacgcattaccttatctgcgttacatcagagtgacgatattcactttttagtacaaaagctggagcaattgatatgaa

SEQ ID NO: 235322 - DNA, 705 bp, Unknown
  Bacterial polypeptide expressing nucleotide sequence isolated from the Sargasso Sea
ggcaggcgctggctagccaattggcccgcagtgaggcgcgccggaaattggtggtggtcgacggggtgttcagtatggatggcgacgaggcgccactggtggactatgccgaggcctgcgaaggccatgatgcctggttgatggtggatgatgcccacggcatcggcgtgctggacgctcagggccgtggcagtgtcttcactcagggcgtcaacgaacgggtgccggtgctgatgggaaccctaggtaaaggattgggtacggcgggtgcctttgtggccggtagcgatgaattaatcgaaacattgatccagttcgcccgcacttttatctataccacggccatgcctgccgccgtggccagcgccaccctggttagcctgagaaaatcccgagaggagaattggcgtcgggatacgttagcagagttgatcgcccgtttccgcgagggtgcccgtgcgttgggctacaccctgatgccatcgcaaacgcctatccagcctttgctgattggcagtgatgtggatgccacggcgctcagtgaggcacttcgcgaaaaagggtttctcattaccgcgatccgcccgcccacggtgccggaaggcgaagcgcgcttgcgagtgacgttatctgcggcccatgaggttgaggatgtggatgcgttgctggcggcgctggcgcaatgccaaccccaagacgtttaaa

SEQ ID NO: 235323 - DNA, 367 bp, Unknown
  Bacterial polypeptide expressing nucleotide sequence isolated from the Sargasso Sea
ccagccgccggctgtggcgcatgccacgcttaccagtttgcgtttactgcgtgacgagcgctggcgccgcgagcaccttgctgccctgatacgccgctttcgcgcaggcgttgaggcgctggggctggagctgatggacagcccgacgccgattcagccgattctggtcggcagcagtgaacgtgccctggcgctctcggcggcgctgcggcaacgcggcatactggtcaccgcgattcgcccgcccacggtgcccaaggggaccgcgcgcttgcgggtaacgctgagtgccatccataccgaacaacaggttgatcgtctgcttgagacactggcgcaggcgcaacaggagctgattcatgagtaa

SEQ ID NO: 235324 - DNA, 1153 bp, Unknown
  Bacterial polypeptide expressing nucleotide sequence isolated from the Sargasso Sea
atggacaggttacagcgctttgcgcagcagatcgccgatcgcaaagcagctggcttgtatcgacagcatccggctattgattcctatcagggccgtttgctgcaaaataagcagggcgcgtatctaaatttttctggtaatgactatctgggtttagctactgagccaaagcttataaatgctttggcggaaggcgctgaacgatttggcgtcggcagctcaggttcacctttggtgaccgggtttcattatgcgcaccgcgctttgtctgatgcactttgtgactggctgggtgtggacgatgtattgttgttttcctctggttttgccgccaatcaggtgatgctacagcatttggccgataaaactgaacatctgctgttggataaactctgtcatgcctctttgattgatgctgcactcactagcgatgcctcttacaaaagatttccacatcaggatttagctgcgcttgagatgttattacaacgttacccctcagctttagtggtgactgaaggcgtatttagtatggatggtgatagtccggatctcagcgctgtatctgcgctttgcactataaataaagcggatttgctgctggacgatgctcatgctttgggtgtgcttggcaaagagggcaaaggcagctgggatgcgcaggggcttcaacccaatgatatgctctgcttgatggcgaactttggtaaagccttagcgggtcagggcgcgtttttggcaggttcagccacagtcattgattatttacgccagtttgcacggcattatatttacagcactgcgttatcgcctgctttgtgctgggcgatgaaaacttctgtggagttaagccgcagccaagagtggcgcagagataaactgaatgacaatattcagctatttaaaactctggccgctggcgctggtttgactttattgccatcgaacaccgccatacaaccgcttattattggtgattcagacaaagccatgctgataagcgcctcactgaaaaaacaaggtatttggctcagcgcaatacggccaccgacagtgccacagggcagcgccaggttacgtattactttatctgctatgcatcagagtgacgatattcactttttagtacaaaagctggagcaattgatatgaa

SEQ ID NO: 235325 - DNA, 1165 bp, Unknown
  Bacterial polypeptide expressing nucleotide sequence isolated from the Sargasso Sea
ttgagcgcggcgctctccgagcgcgagcaggcaagcctgctgcgcagccgcatcgcgaccgacggggcgagtggcgggcggctcagggtggcggggcgcgattacctcaacttttccgccaacgactatctggggcttgccggtcaccccgccatcaagactgccttccaggaggggattgaccgctatggtgcaggcgccggcgcctcgccgctggtgaccggttacagccgggcccaccaacagctggaagagacccttgctgactggttggggctggaggcggtgctgctgttcaactgcggtttctcggccaatcaggcggtgctcaaggcgctgcttggcaaggatcacctgttgtggcaggacaaactcaaccacgcctccctgcaggagatgggcagccagctgccctgcaagatgaagcgcttcggtcacaacgacatggcggctcttgagcgacagcttgagccaaatcgcggactgattgtttcggagggggtgtttagcatggacggggatcagggcccctggcgcgaacttgcagccctggccgcccaaagcggcaactggctgatgatcgacgatgcccacggcctcggcgtactggggccacaagggcgcggcaccctggcggcgcagggggttgctcctgccagcgtgcacatccagatgggcacctttggcaaggcgctcggcgtcgccggcgcctttgtcggtggcagtcgcgagctggtggcgtatctggtcaacttcgcccgacactacgtctacagcacccatatgccggctgcccaggcctgcgcggtgcgccagagcatcgcgctggtgcgcgccgccgacgaggcccgcgcccaccttggccagctgatcacccgttttcggcaaggggcagaggcgctgggctggcaactcggggccagcgctacccccatccagccgctgctggtgggggagagcggtgcagccctgcaactggccgagcggctgcgcgaatgcggtgtctgggctggcgccatccgcccgcccacggtgccggtcggcacggcgcgcctgcgcatcaccttgagcgcggcccacagtgaacaggatgtggatcggctgctcgatgccctcggcccctgcccggcggacgaagagagagggggcacccatgctgcatgag

SEQ ID NO: 235326 - DNA, 814 bp, Unknown
  Bacterial polypeptide expressing nucleotide sequence isolated from the Sargasso Sea
tcaggataaagcagcagcgcagaacagcgctatttttcaagataagttaaaccacgcaagcttaatagatggggcacttcattcaaatgcggctttaatacggtttaaccacaacgatttaaatcatttacgatctcggctcgaaaagtcaaaagcacaaaataagttaataattagcgaaggtgttttttcgatggatggtgatacggcccctatcaaagacctactgctccttgcaaaacaacacaatgcatggctgatgatagacgacgcacatggctttggcgtgttaggtaatacagggctgggtagttgcgaaacatttattggcgatattttacccgatatactcgtcatcacatttggtaaagctgttgctagtagtggcgcgtgtgtgttgggttcacgcgcatttatagactacatgctgcaatataaccgcgattacacatactcaacggctatgtcgccattattggcagataatacattagttcgcttaaagcacattaaaaaagctaacacgcaacgagtaatgttaaataaaaacattgctacttttaaacaccttgcacaacagcacaacatagcggtaatggagtccgatacggctattcaacctattgtattagggtgtgcagagcaaacattaaaagcggctaataaactcaagcaacaaggaatttggctaaccgctattcgcccacctacggttgcttacaatactgcacggttaagagtgacgttaacggcagcgcacacccttgatgatattacttatctagttaaacatttagctgaggcactattatga

SEQ ID NO: 235327 - DNA, 1222 bp, Unknown
  Bacterial polypeptide expressing nucleotide sequence isolated from the Sargasso Sea
aatgagttcaccagtcatctcaaaactgggttcaaaaattctcgcccgtcagcaggcgttagccgagcaaggtttgcttaggcagcgtcaggcattgtcgagcgcggcaacactcagtgaggatggccctcagtttggcttagcggagcagcactatcttaacttcagcagcaatgattacttaggtctatcccgtgcccccgcattggtcgaagcgctgcaccttggcgctaagcaatatggcgtgggtagcggcgcatcaccgctggtgacgggttacagcgaggcgcatttggcgctagaaactaagctgtgccagattactggatttgaggcggcgctactttttagctcagggttcagtgccaatactaccttgtgtaagaccttgttcgataagcaggatgtggtgctggccgataagctggttcatgcatcgattatcgatggattgcgcgacagcggcgcggattttaagcgctttttgcataattccaccgaaagtgccgagcgactattaactaagaacgctgtatctgccctgatcactgagagtgtgttcagcatggatggtgatattgcgccgattttggcgttatccgcactttgccgagcacataatgcttggctaattgtcgatgatgcccatggttttggcgttgttgatgctgtgagtgttcaagctgagtctactccagcttcaaaccttatcgatatccagatagtgacctttggtaaggcgttaggctgtcagggcgcggcgatcctcgggagtcggcagttgattgaatttctggtcagcaacgcacgggaatatatctattctacggcactgtcgcccgccaatgcagcccttgccttggccgctgttgaatacactgaggcccatcctgagcttaagcaaaaattgcagcgcaatatcttattgttcaagcagttgtgccaagatgctgacattccactcctaggtagcgacaccgcgattcaacctttgattattggtgatgcgacgcaaaccatgcgggtggcggaaaagctaaaggcattaggcatttgggtcggcgctattcgtccacccacagtgccggtcggctcggcaagattgcgcattaccttaagcgcatcccatagcgaggcggtaataaggtgctgtgtcagtagtattgccactgtgctgaaggaatgcgcactgcccagggtttctgagcggcctgaacggtaa

SEQ ID NO: 235328 - DNA, 1134 bp, Unknown
  Bacterial polypeptide expressing nucleotide sequence isolated from the Sargasso Sea
accacgcttctcccatccccccagcccgccgccgacgcctgcggagcttgaactccggccaggagccctggcagctgcaggatcccgccggagccggtcagctggttgatctggcgagcaacgactacctcgggctcagccgtcatcccgatgtgctcgcagcggcatcggaggccatggcctccgatggcgttggtgccggtggatctcgcctgatcaccggaacccgaccccgccatctggagctggaagcagctctcgccacctggctgaaccgtgaccgggtgctgctgttccccagcggatttcaagccaacatcgccgccctaacggccctgagtgacaggcacaccatcgtgttggtggaccggctgatccaccactcgctgctggccggcgtccgcaccagtggggctcggctgcaacgctttgcccacaacgatcttgaggatctcgaccagcggctgcagcggctcaagccgacaacacaaccaccactggttgtgactgaaagcctgttcagcatggaaggcaccagccctgatctgcaaggcatcgccgacctttgtgcccaccacggtgcacagctgctggtggacgaagcccatggcctgggggtgttggggcccggcggccgtgggcttagccatggactccaacggcctgtggccttgatgtgcggcaccttcggcaaggccttcggcagcggaggtgcatttttggctggagaccacaccacgatggagctgctgctgcaaaccagtggggccttccgctacaccacggccctggccccaccgctggtggcgggagcccaggctgccctgcgcctgatccaagcccacccccactggggaagggagctaagccagcgctcggaacgctggaggagagcgctggcggaccagggctgggcgaaaccagcaggacacggccccgttctcccgctgttggtcggggacgaccaggacgcgctcgacctccagcaactgctggagcaggctgggctgctgtcggtggcgatcaggccgcccaccgtgccggaggggacctcccgtttgcgcctggtgctgcggcgggacctgccggagggcacattggagcaactgctcgcagccctcggctctcgatgat

SEQ ID NO: 235329 - DNA, 1207 bp, Unknown
  Bacterial polypeptide expressing nucleotide sequence isolated from the Sargasso Sea
atgagttcaccactcgcgtcaaaactggcttcaaaaatccgcgctcgtcagcaagccttagcagggcaaggtttgctaaggcagcgtcaagcattatcaaccgatgccgagctaagtgacgctgagccgcagttttgctttgaggggcaaacttatcttaatttcagcagtaacgactacttagggctttgccgtgcgcccgaattaattgcggcgctacaccgcggcgcacagcaatatggtgtcggcagcggggcatcgccactggtgacgggctacaatgaggcgcatttagcgctggaaaccaagctgtgccagataaccggatttgagtcagcgttactctttagctcagggtttagcgctaatagtacgctctgtaaaaccctgttcgataagcaagatgttgtgctggcggataagctggttcacgcgtctattatcgatggtttgcgcgatagtggcgcagattttaaacgctttttgcacaactcaactgagagtgccgagcggctgttagccaaaaacacggtttcagcgctgatcactgaaagtgtatttagcatggatggcgatattgcgccgattgcggcgttatctgcactttgccgcgcgcataatgcgtggttgattgtcgatgatgctcatggttttggcgtgtctgatatttttaatcagccagctgccaaccttatcgatatccagatagtgacttttggcaaggcattaggctgtcaaggctcagcaattctgggtagtcgtgagttgattgcgtttttagtgagtaatgcgcgggaatatatttattcaactgcactgtcaccggccaatgctgcgctagctttggccgcagttgaacactgtgaagctcatcctgaacttaggcaaaatttgcagcgtaatatctcgatttttaaacagttatgccaagatgccgatattccgcttcttggtagtgagaccgcgattcaacctctgatcattggcgatgccgagcaaaccttactggtttcgcaaaagctaaaagccatggggatttgggttggggcaattcgtccaccaaccgtgcccataggctcagcaagattacgtattactttgagtgcatgccatagcgaggcggcaattcggcgctgcgttaacgggattgcccaagtgctgaccgaagttgcactacctagggtatctgagcgtcctgcgcgataag

SEQ ID NO: 235330 - DNA, 1129 bp, Unknown
  Bacterial polypeptide expressing nucleotide sequence isolated from the Sargasso Sea
gatgacacaagccgagccggccagacgtcgtcgcctgcgcacctggtgtcccggggcggaaagctggcagctgcgccacgcggccgaggggggtgaaccgctgctcgatctggcgagcaacgactacctcggcctcagccgtcatccggatctgatccaagcggccgccgccgccctgcggacggaaggggtgggaagcggaggctcacgactggtcaccggcagccgacccggccatgacgaccttgagcaggccctggccgactggctcggccgcgatcgggtgctgctgttcccaagcggcttccaggccaacatcgccgctgtcggcgccctggcgaaccgacgcagcaccgtccttgcggatcggctgattcaccactccctgctggtgggagttcaggcctccggagcacgactgcagcgcttcgctcacaacgacctggctgatctcgaacgccgtctggtcaagctcagcggcgatgaagcaccgctggtgatcagcgagagcctgttcagcatggaaggaacaagccccgatgtggaggcgttggcccgactctgctcccagcacggagcccggctgctgatcgatgaagcccatgccctcggcgtgctcgggatcggcgggcgtggcctctgccacgccatggggcaaccggttgatctgatcagcggcaccttcggcaaggccttcggcagcggcggtgcctttctggccggtgatgccgccatgggcgaacgcctgctgcagaccagtggagctttccgctacaccacggccctggcgccgccgctggtggccggagcccgcgcagccctggatctgctgcagaggcatccgaactggggacaggagctgctgcaacgctcccggcgctggcgggatgccctgcaacaagccggctggtgccgcccccgtggagacggcccggtgctgccgctgctcatcggtgatgacgccttaaccctgcagcatcaggagcagctggaggcacagggactgctgagtatcgcgatccgtccccccacggttccggagggaaccgcacggctgcggcttgtgctgcgccgggatctgccgcagggaagcctggagcgactgctggcggcccttcccagcccatga

SEQ ID NO: 235331 - DNA, 942 bp, Unknown
  Bacterial polypeptide expressing nucleotide sequence isolated from the Sargasso Sea
gcagcacatctattaagtggtcatagttatcatcaccaagctttggaagaagcgttagccgcatttactggccaacagcgagtgttattgttttcatcaggttatcaggccaatttaggcgtcattgatggtttgatgggccgagatgatgtggtgattcaagataaattgaatcatgcatcgttattggatggtagtcgtttatcagaagcaacattacagcgttatcgtcatggcgatattgcgggtttagcaagacgacttcgcgccgccgaacaggttcaacataagctgattgtcactgatggtgtgtttagtatggatggagatatcgcaccattagctgagattatggctttagcggatagtgaagcatgtgcggtattggttgacgatgcacacggttttggtgtgttaggcgaaactggccgtggcaccttgtctcacttgggtttacaaaaccaaatgccgatagaagttgggacttttggtaaggcatttggtacggctggcgcatttgttgccgctgatgaggttgttatagagatgttaattcagcaatctagaacgtttgtttataccacagcacaaccagcggcattagcagcagcgacattggcgagtttacagttggtgcaacaagaacaatggcgtcgagataaattagccatgttgattaagcagtttcgacagggtgtggcggcattaggcttgcagttaatgtcgtctgagacacctattcaacctattgtgttgggtgatgtcgagcgagtcatgcaatacagtgatgcgcttgaggaaaggggaatattggttggggctattcgaccacctacagtgtcagaaggggctgggcggttgcgtgttacgttatctgcagcacacgaggaagctgatgtgtttgagttggtagcggcgcttgaggcagtgacatgcacattg

SEQ ID NO: 235332 - DNA, 787 bp, Unknown
  Bacterial polypeptide expressing nucleotide sequence isolated from the Sargasso Sea
atcagcattaataaataaaaatacaattgtttttcaagataaactcaaccacgcatctcttgttgatgcagcattgctatcaaaaggaaagcttgtccgctaccgacataaagacgtttcacatttagaaaccttactaaagaaatataaaaataataatttaatcattatgactgacggcgtatttagtatggacggagactgtgcgccattagtagaaatctcaatgctttccaaaaagtataatgctctattaattgtggatgatgcacatggaataggggttcttgggaaaagaggtgcggggttggccgaggaattaaatcttgaaaaagaaatagatttgttaatcggaacatttggcaaatcttttggcgctgcaggcgcgtttctagtggggagcgaaaccttaattgaatcgtttatacaaaaagctcgaacctacatttatacaacggcgctaatgcctgctctcgccgcgaccattacacacacactagacaggataaaaaaaagcaataaactgcgcttgcacataagagagctaatcgcagaatataaaaccttgttaacacaagcaggcataaacgctagcgaatccaataaccacattcaacctttaattattggcgatccaaaagaaacgatagaaataagcgatcagctttatcaaaaaaatattttagtctcagcaatccgtccacccactgttccaaaagggacctccagattaagaataagcataacagccgcacatacaacaaatgatattaatttgtttgttcaa

SEQ ID NO: 235333 - DNA, 1891 bp, Unknown
  Bacterial polypeptide expressing nucleotide sequence isolated from the Sargasso Sea
catgcgagcaggccggcgtctggcccgatttcctgtgcctgtcgaagggcatcagcggcggctacctgccgctgtcgctcgtgctcacgcgcgacgacgtgttcgccgcgttctacgacgacgacacgacgcgcggcttcctgcactcgcattcgtacaccggcaacccgctcgcgtgccgcgcggcggtcgcgacgctcgacctgttcgagcgcgacgacgtgctcgcggccaatgcccgcaagtcggcgacgctgcgcgcagcgctcgcgccgctcgacgcccacccgcaggtacgccacctgcgcgagcgcggcacgctgttcgcgttcgacgtcgcgctcgacggcgacgcggcgcgcggcttctcgcgacgcttcttcgaacgcgcgctggaacgcgagctgctgctgcgcccgatcggcacgaccgtgtatctgatgccaccgtacgtgatgagcgacgacgacatcgcgtggctcgcgcaaagcacgcgcgacacgctcgatgcgacgctggagggtctcgtccgatgagcctgctcgataccctgcaacgcggcctcgccgagctcgacgcgcaagggctgcgccgcgtgcgccgcaccgccgacaccgcgtgcgatgcgcgcatgaccgtcgacggccgtgagatcgtcggcttcgcgagcaacgactatctcggcctcgccgcgcatccggcgctcgtcgccgcgttcgccgaaggcgcgcagcgctacggctccggcagcggcggctcgcacctgctcggcggccattcgcgtgcgcatgcgacgctcgaagacgaactcgccgccttctcgggcggcttctccgacgcgccgcgcgcgctgtacttcagcaccggctacatggcgaacctcgccgcgatgacagcgctgacggccaagggcgcgacgatcttctccgacgcgctgaaccacgcgtcgctgatcgacggcatgcggctgtcgcgcgcgaacgtgcaggtctatccgcatgccgacacggccgcgctcgccgcgttgctcgacgcatcggatgccgaaacgaagctgatcgtcagcgacacggtgttcagcatggacggtgacatcgcgccgctcgccgagctcgtcgcgctggccgaacgccacggcgcgtggctcgtcgtcgacgatgcgcacggcttcggcgtgctcggcccgcagggccgcggcgcgctcgcggccgccgcgctgcgctcgccgcatctcgtgtacgtcggcacgctcggcaaggccgccggcgtcgcgggcgcgttcgtgatcgcgcacgagaccgtgatcgaatggatgatccagcgcgcgcgcagctacatcttcacgacggccgcgccgccgtccgtcgcgcacgcggtatcggccagcctgaaggtgatcgcgggcgacgaaggcgacgcgcgacgcgcgcatctcgccgcgctgatcgagcgcacgcgcgcgctgctgcgcaacacgcgctggcagccggtcgattcgcacacggccgtgcagccgctcgtgatcggcagcaacgacgcaacgctcacggcgatgcgcgcgctcgacgcgcatggcctgtgggtgcccgcgatccggccgccgacggtgcccgtcggcacgtcgcggctgcgcgtgtcgctgtcggccgcgcattcgttcgacgatctcgcgcggctggaagccgcgctgatcgaagccagcgaggcgcaggccgtgcaggagacggaacagcccccacgctcacttcgttcgctgccccccgagggggctgcagcctcccttggggcggcccggcgggaggcagaacagcccccacgctcacttcgttcgctgccccccgagggggccgcagcctcccttggggcggcccggcgggagactgcggcatga

SEQ ID NO: 235334 - DNA, 1186 bp, Unknown
  Bacterial polypeptide expressing nucleotide sequence isolated from the Sargasso Sea
aatgcatctgctcgacaccctcaccgaaggcctcaaggagatcgacgcgcgcggtctgcgtcgtcgtcgccgcacggccgacacaccgtgcgccgcgcacatgacggtcgacggccgcgcaatcatcggcttcgccagtaacgactatctaggcctcgccgcacatccgcaactgatcgcggccatcgccgaaggtgcacaacgctacggcgcaggcagcggcggttcgcatctgctaggcggccactcgcgcgcccatgcgcaactggaagacgatctggcagagttcgccggcggcttcgtcgacaacgcacgcgcgctctacttcagcaccggctacatggcgaatctcgcgacgctcaccgcgctcgcggggcgcggcacgacactcttctcggatgcgctgaatcacgcgtcgctgatcgacggcgcgcgcctgtcacgcgccgacgtgcagatctatccgcactgcgacacggatgctctgagcgcgatgctcgacgcgtcggatgcggacgtcaaagtcatcgtctccgataccgtgttcagcatggacggcgatatcgccccgctcgcccgtttgctcgaactcgcggaacagcacggcgcatggctgatcgtcgacgatgcgcacggtttcggcgtgctcggcccgcaaggtcgcggcgcgatcgcccaggccgcgttgcgctcgccgaatctgatttcgatcggcacgctcggcaaggcggcgggcgtgtccggcgcattcgtcgccgcgcatgagaccgtgatcgaatggctcgtgcagcgcgcgcgtccgtatatcttcacgaccgcgtcggtgcctgctgcggcgcatgcggtgtcggcgagtctgcggatcatcggtggcgaagaaggtgacgcgcggcgcgcccatctccagcaactgatcgagcgcacacgcgcgatgctgaaggccacgccgtggctgccggtcgattcgcataccgccgtgcagccgctgatcatcggcgcgaacgacgcgacgctcgatatcgcggccacgctcgatcgcgcgggtctctgggtgccggcgatccgtccgccgaccgtgcccgtaggtacgtcgcggctacgcatttcgctttccgccgcgcactcccaagcagatctggaccgcctcgaagcgggcttgcaacaactcgaagcgaaggcggcatga

SEQ ID NO: 235335 - DNA, 1099 bp, Unknown
  Bacterial polypeptide expressing nucleotide sequence isolated from the Sargasso Sea
aagaatagttacatcgccacaaggcgcacaaattgatattaaaggtaaaagctttctaaattttagtagcaatgattatttgggcttagccaataataacaaattaaagttacacatggtcgagtcgatcaaaaagtatggagttggctctggctcgtcccagttaatgactggacacatgaggccccaccagttattagaaaaaagactatctatattttttaagaaagaagcatcgttaattttttcttctggttatcatgcaaacttagccatagcgtctacactaataaacaagaatacagttattattcaagataagctgaaccatgcttctttaattgactcggctctgctctcagagggaaagcttgtgcgttaccggcataaagatttttttcatttacaaaaaattttagaaaaatataaaaaacaagatttgatagtgatgacggatggcgtttttagtatggatggagaccgtgcaccgttacgcgaaatatcaaaaatatgccacaagtataacgcgctattaattgttgatgatgctcatggagtcggagttcttggaaaaagaggagccggcttaatggaagagctcaatctcgaaggagaaatagatttattaattggaacctttggaaaatcaatcggtgcatcaggcgcttttattgcaggcaatgagaatcttatcgaagcattcatacaaaaagctaggacatacatttatacgacagcaatgttgccagcgcttgcgaacacaatagtgcatgcaatcgatctaatagaaaatagcaataatttacgaacacatatatgtgatttagtggagcattataaaaaattatcaaaaaaattagaactttatttatccgattcaaataatcatatccagcctataataattgggggcgctaatgagacggtaagagtaagtgaggcgctttatgaaaaaaatattctggtttcagcaatacgccccccaactgttccaaaagatacatctaggttgcgaattagtattactgcgtcgcacacaaaaaaagatatcactctgcttttaaacacaataaaaaatattcaaagcggagattattaa

SEQ ID NO: 235336 - DNA, 880 bp, Unknown
  Bacterial polypeptide expressing nucleotide sequence isolated from the Sargasso Sea
tatagtattatgtttaatgttcgcggacgatacggtgctgtttgcatgtaactgggcagactgcaaaaatgcatttgataattatgtgcaatatacacgagaaaacggcctctgcattaatgtttcaaaaactataggcatggttttcaggaagaacaacagacgggcaagggtgagaaatggtagattagaggtacggggcgcgcgttcccagtttacgggttgcgagctcaaagtggatgacacaccggtccaattccagagcagctttaagtacctaggcctcgtttttgaagaaggcggaggcctatgcgcggcgagggagcatgcccttgcggcgggtggtcgagcattgtacgcggttctaggagcgctcatggctttcgaatatatatcgtatgagtatataaaaatattatatgaatctttagttatatctattgtgacatacggatgcgagctgtggtcaattgtgacaactaagttaaaaacaacaactcaacatgatacattttataaagatctaattcgtaaagagttaggtgtctccaaattgtgtcctaatcaattattatttgaaataagtggaaaacatccgttatcataccaaatgtggaggcgccgactggcattttttatacagggcctgaattcgtcagccgacagtattataatgaaaggcatagtagagctatatgatctggaacagcagtatggaattagaacgtggctggcagacacaatgaaaatcgttgcatatacggatccgagtgccagactaaagaaaaacaaaacagaaaccggagactgggtgatgaagatggagggagagggcctggcgcgcgagtttcattgtggtggtctagaaaaggaggtcagt

SEQ ID NO: 235337 - DNA, 648 bp, Unknown
  Bacterial polypeptide expressing nucleotide sequence isolated from the Sargasso Sea
cgacgtcgtgcggcggcacgcggacggggcgtcggcacgacacccccctacacagaaaattagaagcgaaagtggccaaattcgtgggcaaggaggacgcggtcgtgttcaacatgggctacggtacgaactctacgaccgtaccggcgttggtgggaagaggtgatttgatcgttagtgatgagctgaaccactcgtcgatcgtcgccggttgtcgagcttcgggtgccctcatcaggtccttcaagcacaacgacgcgaaagcgctcgaagaggtgctgcgcgaggccatcgcgtacgggcggcctcgcacgcggcggccgtggcgcaagatcctcgtcatggtcgagggcatttatagcatggagggcgagatctgcgacctgaagaatatatcgaaagtggcgaagaagtacaaggcgtatttgtatttggacgaggcgcactctattggcgctctcggcgacaccggcagaggcctgtgtggaatcaaatttcgggcgccccacgccatcgacgcgacgtcgtcctcgcaatggcatctgctcgatggcgtggagattctacgccatcgacgcgacgttgtccccgtgatcgcgtctgctcgatggcgtggaggttcacgaaggtctccgcaatactgctgag

SEQ ID NO: 235338 - DNA, 745 bp, Unknown
  Bacterial polypeptide expressing nucleotide sequence isolated from the Sargasso Sea
catgatccgactgctcggggtgttgatctggattggcccggccacgatctggtacggtggtcgtatgatttgggctgttttcactggttcatcggataagacatgcatctgtcagaaaaatccaaagcgctgggctagacagttgttatggatctccggagtgaagatctgttttgagaatatcgacttgatcaatccgagtaagccccagatcctcgtggcgaaccattcctcttggtatgacgtccttgcactcgttttgattccaggaacattcgtgttcgtggccaagagagaactggcaagcattccaatttttggccgagcgattggctcatgtggacatatttttgttgaccgaaaggaccgaagcgctgcagtccggtctttgggtgttgctaaagacctgttggagaatgagagccctaccatcatcatgttccctgaaggcacacgcacgaaaactggtgagcttcagaagtttaagaagggtgcgtttgttttggcgatacagacgggggtcgatgtcttgccggcggcggtcatcggatcacgcgaagtaatgaagaagggctctctcagaataaagcccggaactataaccgttagggttgggatgccgatcgaggttaatggactcgacctggaagaccgaaatgaactaacagagggagccagaaacgctgtgatgcagttgcaggtgcagggggctcagaaagccatagaaccgataggaggaggataa

SEQ ID NO: 235339 - DNA, 631 bp, Unknown
  Bacterial polypeptide expressing nucleotide sequence isolated from the Sargasso Sea
ttatcttatacttccagtaagttcttaaaatatcccacaaaaatatggattaaagtaatttttatttttttagaaaaaatttgtaatataaagcataagattaaaggtattgaaaatattcctaatgaaacagtactaattacatccaagcatcaatcagcttttgaaacgtttgctctatattattatctaaaagattgtttttttgtacataaaaaagaactttttttaataccaatatttggtcaatatttatttaaatcaaatatggttgcaattgatagagcaggaggaacaaaaacaatgagaagcatgttggagaaagtcagaataaaactagagtctggtagttcaattatcatatttccagaaggcacaagaaaagctccaggaagtaaacctgcatataaaacaggatttataggaatctataatcatacaaaaaagaaaattctccctgtagcggtaaactcaggtctatgttggccaaagcactcatggattttaaaaaatggaactattacaattgaaattttacctattatttatgaaaactatgataaaaaaactgtccttaacaaagtgcaagaaagtatagaagttgcctctaataaacttctaacttattagt

SEQ ID NO: 235340 - DNA, 820 bp, Unknown
  Bacterial polypeptide expressing nucleotide sequence isolated from the Sargasso Sea
aagcaatacgttgccgcgctgaacatcatccactacatgcacgacaagtacagctacgaagcctctctgatggcgctgcacgaccgtgacgtatatcgcaccatggcgtgtggtatcgcgggtctgtccgtagccgctgactccctgtctgccatcaagtttgccaaggtcaagccggttcgtgacgaagatggcgttgccatcgacttcgaaatcgaaggcgagtacccgcagttcggtaacaacgacgctcgcgtcgatgacatcgcctgcgacctggttgagcgcttcatgaagaaaattcagaagctgaacacctaccgtggtgccgtggctacccagtccgtgctgaccatcacctccaacgtggtgtacggcaagaagaccggtaacaccccggatggtcgtcgcgctggtgcgccgttcggcccgggtgccaacccgatgcacggtcgtgaccagaagggtgccgttgcttccctgacttccgttgccaagctgccgttcgcttacgccaaagatggtatctcctataccttctccatcgtgccgaacgcgctgggtaaagacatggaagcccagaaagccaacctggccggtctgatggatggttacttccaccatgagtccaacctggaaggcggtcagcacctgaacgtcaacgtgatgaaccgtgaaatgctgctggatgccatggaaaacccggaaaaatatccgcagttgaccatccgcgtatccggttatgccgttcgcttcaactctttgaccaaagagcaacagcaagacgtcatcactcgtaccttcaccgcttctctgtaat

SEQ ID NO: 235341 - DNA, 922 bp, Unknown
  Bacterial polypeptide expressing nucleotide sequence isolated from the Sargasso Sea
aatgaaagtccctagtccgggtgaatcaatatcagaggttgaaatagcgtcttggcttgttgaagatggagagtatgtacataaagaccaaacaattgccgaagttgattctgataaagcaacacttgagttgcccgccgaagaaagtggcattataacattgaaggctgaagatggagacacagttgcggtaggacaagttgtgtgcttaattgatacttctgcaaaggcaccagaaggatctgaaaagcctgtagagaatagctcagattcaacagatgatattcaagtcccaagtgcacccttaaaagaagagacaaactatgctactggaacaccttctcctgcggcgtcaaaaattattgctgaaaatcaattggattctaataaaattgaaggtactggaaaggctggaagaattacaaaagatgatgcaataagcgctttaaattcatcaagctctaagcctaaagaaaagcctttaaagccaggtcaatctaagcaaaaaatgagtcttttgcgaagaaaaattgctgagagattggtttcggtaaaaaatgagatggcaatgttgacaacatttaatgaggttgatatgaagccaataatggatatcagaaaacaatataaggaggagtttaaagaaaaacatggagttggactgggctttatgtcattttttacaaaagctgtaactcaatcattggaattattcccggctgtaaatgctcaaattgatggaaaaagcatgttaatgcatgaatatgccgacattggaatagctgtttcttctccaaaaggtttaatggttccaattgttagaaatgctgatgaaatgacacttaatcaaattgaagcagaaattaaaaggcttgccataaaagcgagagacggtaagattactccagatgaaatgtcggga

SEQ ID NO: 235342 - DNA, 681 bp, Unknown
  Bacterial polypeptide expressing nucleotide sequence isolated from the Sargasso Sea
aatgagtgaagaaataaaatcaccaaccttcccagagtctgtcgctgacggaacaattgctaactgggttaaaaaagagggtgaagctgtatcacaagatgaggtgattgctgaaatagaaactgacaaggttgttttagaggtgttagctccttcagatggaaaaatttcaaaaattcataaaaatgaaggagatacagttttaagtgctgaattaattggtgaatttatttcaggtgatagcgaagaactaaaaactcaaactgttgaggaagaaaaacctaaagaaattaccacagatcttgaatcctcacaagacttggtagataaaaaatcaggaccagctgcaaaaaggataattgaagaaaaagagctaaatccatctgaaatacaaggtagtgggaaagacggaaggatcacaaaagctgatgtaattagccacgttgagaaagatccagttattgaagaatcagtcaagaaaactaatgttgaccttgatagagaaacaaaaagagtcccaatgacaagattgagatcaacaattgcaaaacgtttagttgaggttcagcaagaaacagcgatgttaacaaccttcaatgaggttgatatgaagcctataaaagatattagatcaaagtatggagatgattttctaaaagagcatggagttaagcttggctt

SEQ ID NO: 235343 - DNA, 960 bp, Unknown
  Bacterial polypeptide expressing nucleotide sequence isolated from the Sargasso Sea
gttgaactggaaactgataaagtaaatttagaagttccgtcccctattagtgggacattatcagaaattagttttaaagatggggatacagttgaagttggagctgtattaggctcaatttctgaagggaatgttgatattaaaaatgtaccaaaaagcaaaaaacaatttgaggataatgaagagaaagaatttaaagatcagaaaagcaatgtaattaatttagatatagaaaaaaaacctcaaactaagttagaagaaccattagtattaactgaagataattcaatggagctattagaagaagagcctttacttttaactgaggaagtagaaacagaggaaacctcacaacaaccaattattctttcacctgcagttagaaaaatggttgcagaaaaaaatatcaacttagataatgtaaagggaacaggcaaagcaggaagaattttaaaaggtgatctaattacaatgatgggagccaacccacaacctaaccagagaagaattcaatacggtgaagaagaaagaattaaaatgactcgtttaagacaaacgattgcaaaaagattaaaacaagctcaagacaatgcagcaatgttaactacttttaacgaggtagatatgtctgggattatggcaatgagaaaagataaccaagaagatttcaaaagcagatacggaataaagctaggtctaatgtcattttttgttaaagcttgtgtcgttggactaaaattatttccagcaattaacgctgaggttgaagatcaagacataatttataagaattattataatattagtttcgctgttggaactgaaaaaggtttagtagttccagtgcttagaaatgcagatgagatgtcatttgctgaaatagaaaaagaaataaaaaaattatctgaaaaagcaaacacaggtagtttaacaattgaggacttacaaggaggcacgttt

SEQ ID NO: 235344 - DNA, 931 bp, Unknown
  Bacterial polypeptide expressing nucleotide sequence isolated from the Sargasso Sea
gtaaaaaaagagggcgataatgtcagtcaagacgatgttattgctgaaatagaaactgataaagtggtccttgaagttattgcgcagtctgatggaacgatttctaaaataattaaagatgaaggtgaaattgttcaaagcgctgaagttattggtgaatttgatgaatctggagaatcttcaaaagctaaagaaaaaacaaatgacaatgttgaagataaaaaagaaccagaaaaaaagatagaaacaaagccagttaagaacaaacaatctacaaataaaattggtccagccgctaaaaaaataattgctgaagagaatatagattcagatgatataaaaccatctggtaaagggaatagaatcactaaagccgacgtaatcaatcatttagatactgaaaatcaagaagaaaacatttttactagcacctctatcaatgaagatagaccagaaaagcgtgtgccaatgtcaagactaagatcaaccattgctaaaagattggtttcagttaaacaagaaacagctatgcttactacttttaatgaggttgatatgatgcccattaaagaattaaggtcaaaatatggatcagaatttgagaaagaacatggggtaaaacttggttttatgggattttttgttatcgctgccgttcaagccttaaaaaaatttccagttgtaaatgcatccattgatgatgatgatattgtttatcatggttttcaagatatcggtgtggcagtctctactgaaagaggtcttgtcgttccagtaattaaggacgcagatacaaaatcacttcctgagattgaaaaatcgatacttgaatattccgacaaggcaagaaatggaaaattatcaattgatgaaatgcaaggaggtacctttaccatttcaaatggaggtatatttggttcattgctttcaa

SEQ ID NO: 235345 - DNA, 565 bp, Unknown
  Bacterial polypeptide expressing nucleotide sequence isolated from the Sargasso Sea
ttgaggggtcagtacaaagattcttttgaaaagaagcacggtgtccgtcttggattcatggggttttttgttaaagcctgctcacaagcactgggagaatttcctgcagtaaattcacagatcgaaggtgatgaaatcgtcacttatgattatgtggacatggggatcgcggtgagtgcacctaaaggtttgatggtgcctgtgatccgaaatgctgaaactagaaatatcgctgaattggaaacggaaattcgaagattggctgcgagggctagagataatcaattgagtcttgaggaaatggaaggcggaaccttctccattacgaatggcggcgttttcggctctatgctttcaacacccatccttaatcctccacaggcagccattttgggaatgcacaacattgtcgagagacctatggccgtcaatggagaagtcaaaattcgaccggtgatgtatttagccctatcgtatgaccatcgtttgatcgatggacagcaatcggtcagttttttagttcgagtcaaagaactcctggaaacacctgccagaatgatgttgg

SEQ ID NO: 235346 - DNA, 136 bp, Unknown
  Bacterial polypeptide expressing nucleotide sequence isolated from the Sargasso Sea
ggaaaacgagaggttaaacgacaaagaatgtcacgattgcgcaggaaactatcggaacgcctggttgctgtcaaaaatgaaacggccatgctgaccaccttcaatgaagtcgacatgcagcagattttgacttgag

SEQ ID NO: 235347 - DNA, 841 bp, Unknown
  Bacterial polypeptide expressing nucleotide sequence isolated from the Sargasso Sea
gtaaaagatggagatgttgtgagaaaagaccagactattgctgagttggactctgataaagctacacttgatcttccagcggaagcatctggaaaaattaccctaaaagcacatgagggagactcaatgtctgtaggtgatgtggtttgtttaattgatacatcagagtctataacagaaatagaaactgatgaaactgaatcaaatatagagtctattaaagaagagaagactcaaataactcaaagtgaaaatataagtgttactccacttgcgagaaatattgcctctgagaagggtatagatcttaatgagattaaaactgagggtcaaaaaattacaaaagatgatgttctaaaggcagtgcctgcaatgggtgcatccagtgatgattcaagaagtgaaacaaaagaaaaactttctatgcttaggagaaaggtttcggagagattggtttcagtaaaaaatgaaactgcaatgttaaccacatttaatgaagcagacctttctaatatatttgaaatcagaaaaaaatataaagaagcttttttacagagacatggagttagtcttggatttatgagctttttcactctttctgttacaagagcactggagctttaccctgatgttaattcaatgatagatggtgacgagaaaatatcgtataattatagtgatataagtattgcagtctcaggaccaaagggactaatgacacctgtacttaggaatgcacaaaaattatcattttcgtctgtagaacaggaaataaaaagattggctgacagcgttagaaataaaactataacagttgatgatctaacaggcggaacattac

SEQ ID NO: 235348 - DNA, 320 bp, Unknown
  Bacterial polypeptide expressing nucleotide sequence isolated from the Sargasso Sea
caaattaggtgaaaaagctcgtgaaggaaaaataactattgatgatttacagggaggaacttttacaataacaaacggaggtatatatggatcaatgctttccacccccattttaaatccacctcaatcagcagtacttggaatgcacaacattatacaaagaccagttgttgtagacggaaacattgaagtgagaccagtaatgtatttggctttatcatacgatcatagaataattgatggaaaagaagcagtttctttcttaaaaattgttaaagagtcattggaacaaccaaaaagattgtttttaaatatctaat

SEQ ID NO: 235349 - DNA, 361 bp, Unknown
  Bacterial polypeptide expressing nucleotide sequence isolated from the Sargasso Sea
atgaaaatcgaaattaaagcacccactctacccgaatctgtgcctgacggaacaattgctacgtggcataaaaatattggagactccgtcaagcgggatgagcttttagtagatatagaaactgacaaggtagtcattgaggttgtttcacctacagatggaattttagaaaagatcatgaaaacttctggcgatacaatcgttagtgatgagttaataggatcagtaactgaaggtgaagttccaagcggagagaaaacagaggaggtagagacgcagtcagccacggaaagctctcaatctgaacctattcttagtccggcagcgaaaaagttagcaaaggagaatcagttggatgccg

SEQ ID NO: 235350 - DNA, 304 bp, Unknown
  Bacterial polypeptide expressing nucleotide sequence isolated from the Sargasso Sea
ctagagacggcaagattacccattgaagatcttcaaggaggaactttcacaattactaacggaggtatttatggatcaatgttatctaccccaattttaaaccctccacagtcagctgtattaggcatgcataacattgttcaaaggcctgtggttgtaaatggtaatgtcgaggtaagaccagtgatgtatttagctttatcgtatgaccacagaattgttgatggaaaagaagctgtctcctttttaaaaattgtgaaagagtgtttagaacaaccaaaaagattgtttttgaatatataac

SEQ ID NO: 235351 - DNA, 616 bp, Unknown
  Bacterial polypeptide expressing nucleotide sequence isolated from the Sargasso Sea
atgtcacctgcagttagaaaaatagtaaatgagaataatataaatatagaagaaattaaaggatcaggcaaagacgggatgattcttaaaggagacttactaagtttaatgggtgttaaacctgcttcatcggaaagaaaattaaaatttggagaggaagaaaaaattaaaatgtctaggctaagaatgacaattgcaaaaagattaaaacaatcccaagaaaatgcagcgatgcttactacttttaacgaagtagatatgacaaatatcatgaacatgcgaaaagaaaatcaggtggattttcagcaaaaattcaaaattaaactggggatcatgtcgttttttgttaaagcttgcgtagttgggcttaagttatatccagcaatcaatgcagaagtagagagtgagaacataatttacaaaaattattacaatatcagctttgcggttggaacagataaaggattggtagtgccagttttaaagaatgcagatgaaatgtcatttgcagacatagagatgaatataaaaactctatctgataaggctagagatggaaaaattacaattgaagacctacaaggtggaacattcacaattagtaacgggggcgtat

SEQ ID NO: 235352 - DNA, 573 bp, Unknown
  Bacterial polypeptide expressing nucleotide sequence isolated from the Sargasso Sea
ttaaagataagcacgatgttggactaggatttatgagttttttcacaaaagcggttgtctatgctttaaaacaatacccagatgtcaattcaatgatagatcgagaatttcaaattaaatatgattattgtgatataagtgttgctgtatctggccctaaaggcttaatggtacctgttttgagaggtgctgagaatttgacattcaaagaaattgaattggaaattaaaaggttagctttaagggcaagagatggtgaaataactgttgatgaaatgactgggggtacatttacaatctccaacggaggtgtatttggttcaatgctttcaacaccaataataaatcctcctcaatcagggattttaggaatgcataatataattgaacgccctgtagcattaaaaggtaaggttttaattcagccgatgatgtatttagccttttcttacgatcatagaataattgacggtagagagtcagttggttttttagttgcaataaaagaagcaattgaaaaccctatcgaaaaattgatggataataatccaaaaaaatcattagaattataga

SEQ ID NO: 235353 - DNA, 706 bp, Unknown
  Bacterial polypeptide expressing nucleotide sequence isolated from the Sargasso Sea
gataaagttacaattgaggttaatgcaccaactggtggtgttattattgaaataatggcaaatgctggagatgaagttgaggtaggggctatccttggtaaaatcagtaatgtggttgggatggagattcctgttcaagagaacttaacttctaagtctatcgaggagatgtcaggccgtgacattcagatgtctccatcagtgagaaaaattattgaagatcatggttatgatgctactaagattcccgcaacaggcaaggatggtcgtttgacaaaaggtgatgtgctggcatttcagaaaaaaaataatcaggcggtaaaatcgaaatcagtctcaagagaaaagctttctgctcccactacgaatttagtggatgccccgaggacccagattccttcaattccagcaggcccccgtgaagaacgagttaaaatgacacgtcttagaaaagtaattgcagggcgtttgaaagaagcacaaaatacggctgcgatgctgacgacatttaatgaagttgacatgtccgctgttataaaaacacgttctgagtttcaagaacagtttgaaaaaactcacggagttaggcttgggtttatgagctattttgttaaagcggctattgtagcgttaaaggaatttccagcagtaaatgccgaaatccagggtgatgagatagtgtataaaaactattataatattggtg

SEQ ID NO: 235354 - DNA, 811 bp, Unknown
  Bacterial polypeptide expressing nucleotide sequence isolated from the Sargasso Sea
ccccgacctgcctgagtccgtagcggacgcgactgttgccacctggcacaaaaaaccgggtgatgcggtggttcgtgacgaagtgctggtagaaatcgaaactgacaaagtggtactggaagtaccggcatcagcggacggcattctggatgcggttctggaagacgaaggcacgaccgtgacctcgcgccagatcctcggtcgcctgcgtgaaggcaatagcgcgggtaaagaaaccagcgcgaagtctgaagaaaaagcgtctaccccggcgcagcgtcagcaggcttctctggaagagcagaataacgatgccctgagcccggcgatccgtcgcctgttggctgagcacagcctcgaggccagtgcaatcaaaggcaccggtgtgggcggtcgtatcacccgtgaagatgtggataagcatctggcgaaagcccctgcgaaggccgaggctaaagcaccggcaacagcccctgctgcacagccggccctgggtgcgcgcagcgaaaaacgtgtaccgatgacccgtctgcgcaaacgcgtggccgagcgtctgctggaagcaaaaaactccactgccatgctgacgaccttcaacgaagtcaacatgaagccgatcatggagctgcgtaagcagtacggtgaagcgtttgaaaaacgccacggtatccgtctgggcttcatgtccttctacgtgaaggcggtggtggaagcgctgaaacgttatccggaagtgaacgcgtctatcgatggcgacgacgtggtgtatcacaaaaacttcgacgtaagcatggcggtgtccacgccgcgc

SEQ ID NO: 235355 - DNA, 721 bp, Unknown
  Bacterial polypeptide expressing nucleotide sequence isolated from the Sargasso Sea
atatcctcatgaagcttttggtttagttgaagttaaagatcttccaagagtaaaaaaattatctggaccgcaacttgttaagtcttggacagaaatccctcatgtaactcaacatgatgaaattgatataacagagttggaacatttccgaacatcattaatagaccattacacaggtgaaaaaattaaaattagtcctctagcttttgtaactagagcggtagttaatgcactaaaaaagtatcctaactttaatgcgtctcttgatagccgaaataacaaaataatttttaaaaagtatttccatattggttttgctgtagatacacctcatggtttaatggttccaaaactaagaaatgttgatcaattgaatcttaaagaaatttttgaggaattaaaaaaagtaagtaaattatgtagagaactgaaaatagaaaaaaaagaattttttggtggatcaatgacaatttcaagcttaggaggtatcggaggaaattttttcaccccgattatcaacccgcctgaagtttcaattcttggaataggaaaaacctttgaaaaagtaaaaagagttaatggtaaaatcgttataagaaaaatacttccaatatcgttgtcatatgatcatagattaattgatggtgctgagggtgctagattttgcgttcatcttggtgaaagtttgggtaaagactttgctttcaaattagcagtttaa

SEQ ID NO: 235356 - DNA, 772 bp, Unknown
  Bacterial polypeptide expressing nucleotide sequence isolated from the Sargasso Sea
aatgtctgaaaaaatattagttccagttttaggagagtcagttacagaagcgaccgtctcaagatggcttaaaagtcctggtgaaaacgttacttcagaggaacccttagttgaacttgaaacagataaagtaaatatagaagtaccctccccatccagcggaaccttagagtcaatttcagtaaaagaaggccaaacagttaatgttggagctttgttaggtactgtgggtgaaagcaaaaataaaaaaaaaacagagacaaaaaaagaagaaagatataatccgcctgttaaaaaaaataagcctcagaaaatagagaaaaaaattgaacctctaattctagataatttaaatgagcaggatacaagtcaacaagaagaagaacctttaatactagatcaggttcacagcaaagttggtttagaaactaacaaacctaaagttctttcgccgtcagcaagaaaactagcagttgagtcaaatattaatacagaaaatataaaaggctcaggaaaaaatggagttgtgcttaaagaagacgttatgaccctgatgggatctaaaccaaaaccctctgaaagaaaagtagctcacggccctgaggaaagaataaaaatgactagattacgattaacaattgcaaaaagattaaaagaggcacaagagaatgctgcaatgttaacaactttcaatgaggttgatatgtacgaagttataaaaatgaaaaatacttataaggatgaatttcaaaaaaaatattcaacaaaatta

SEQ ID NO: 235357 - DNA, 379 bp, Unknown
  Bacterial polypeptide expressing nucleotide sequence isolated from the Sargasso Sea
agttcctgttttgagggagacagacgaaatgtcttttgctgatgtagaaaaaaatattggagaactcggtcaaaaagcgagagatggaaaaattactatagaggatctacaaggtggaacatttaccattactaatggaggaatctatggatcaatgttgtccaccccaattttaaaccctccccaatcagctgtgcttgggatgcataatattgttcacaggcctgttgtagcagacggaaatatagaagccagaccaataatgtatttagctttatcttatgatcacagaataatagatggaaaagaagcagtttcttttttaaaaatagtgaaagagtctttggagcaaccaaaaagactttttttaaatatttaa

SEQ ID NO: 235358 - DNA, 364 bp, Unknown
  Bacterial polypeptide expressing nucleotide sequence isolated from the Sargasso Sea
agagacggacgaaatgtcatttgctgatattgaaaaaaatattggactgttgggacaaaaagcccgagatggtaaaattacaatcgaagatttgcaaggaggtacttttacaatcaccaatggaggaatatatggatcaatgctttcaactccaatattaaaccctcctcaatccgcagtgcttggaatgcacaatattattcaaagaccagtagtagttgatggtaaagtagaaataagatcaattatgtatcttgctttatcttatgatcatagaataatagacggtaaagaagcggtatcttttttaaaaatagttaaagagtctttagaacaaccaaaaagacttttcttaaatatttaa

SEQ ID NO: 235359 - DNA, 481 bp, Unknown
  Bacterial polypeptide expressing nucleotide sequence isolated from the Sargasso Sea
caagaatatccggctgtaaatgcagaaattaaagatgaaaatataatttataaaaaccattttgatataggtatagctgttggaactgaaaaaggattagtcgtaccaatacttaaagacgccgatcaattgagttttggagaaatagaaactaaaattattgatcttagtacaaaagccaaagatggaacgctgaccatggacgatttgactggtggaacttttacaatttcaaatggtggcgtttacggatcaatgctcagcaccccaataatcaatagacctcaatctggaattttagggatgcataatattcaaaaaagatcagtagttgtaaatgatgaaatagtaatcaggccaatgatgtatgttgcattaagttatgatcatagaattattgatggaaaagaaagtgttggatttttagtgaaggtgaaagaacttctagaagatccatccgaattagtattaggaatataga

SEQ ID NO: 235360 - DNA, 707 bp, Unknown
  Bacterial polypeptide expressing nucleotide sequence isolated from the Sargasso Sea
cggagaatccatatcagaagttgaaatcgctgagtggatggtagaagatggtgattatgttgaaaaggatcaaacaatagcagaagtagactctgataaagctacacttgaacttcctgcagaacaagcaggaataattactttaaaagcggaagttggagatgtcgttgctgtaggtcaggttgtttgcttaattgacacctcagcattaaaacccgaaggaagtagtagtgataataaaaaagtcccttcagaatctcagtcttcaaaatcattagaaagtagttcatctagtcccaaagctaaaacatatgcaacaggtcatccaagtgtagctgcaaataaaattatgaatgaaaataatattcatgttgaacaaattgaaggaacaggtaagggaggaagaattacaaaacaagatattcttcaattattagccagtcttccggaattgggaaatagaaaaagtgaagttagaaaattgagtatgttaagaagaaaaattgcttctcgattagttaatgtaaagaatgaaacggctatgttaacaacttttaatgaagttgacatgaaaccaataatggatttaagagcaaaatataaagaagcttttaaagaaaaatataaagttggcttaggctttatgtctttttttactcacgcatgcacactagctctaaaagaatatccaactgttaattctatga

SEQ ID NO: 235361 - DNA, 730 bp, Unknown
  Bacterial polypeptide expressing nucleotide sequence isolated from the Sargasso Sea
tgtagaggaatatcctcatgaagcttttggtttagtggaagttaaagatcttccaagagtaaaaaaattatctggaccgcagcttgttaaatcttggacagaaattcctcatgtaactcaacatgatgaaattgatataacagaattggaacacttccgaacatcattaatagaccattacacaggtgaaaaaattaaaattagtcctctagcttttgtaactagagcggtagttaatgcactaaaaaagtatcctaactttaatgcgtctcttgataaccgaaataacaaaataatttttaaaaagtatttccatattggttttgctgttgatacacctcatggcttaatggtcccaaaactaagaaatgttgatcaattgaatcttagagaaatttttgaagaattaaaaaaagtaagtaaattatgtagagaactgaaaatagaaaaaaaagaattttttggtggatcaatgacaatttcaagcttagggggtatcgggggaaatttttttaccccaattatcaacccgcctgaagtttcaattcttggaataggaaaaacttttgaaaaagtaaaaagagttaatggtaaaatcgttataagaaagatacttccaatatcgttatcatatgatcatagattaattgatggtgctgagggtgctagattttgtgttcatctaagcgaaagcttgggtaaagactttgctttcaaattagcgttttaa

SEQ ID NO: 235362 - DNA, 373 bp, Unknown
  Bacterial polypeptide expressing nucleotide sequence isolated from the Sargasso Sea
gcaaaaagattaaaacaagctcaagaaaatgcagcaatgttaactacttttaacgaggtagatatgtctgggattatgtcaatgagaaaagataaccaagaagatttcaaaagcagatatggaataaaattaggtctaatgtcattttttgttaaagcttgtattgttggactaaaattatttccagcaattaatgctgagattgaagatcaagacataatttataagaattattataatattagtttcgctgttggaacagaaaaaggtttagtagttccagtgcttagaaatgcagatgagatgtcatttgctgaaatagaaaaagaaataaaaaaattatctgaaaaagcaaacacaggtagtttaacaa

SEQ ID NO: 235363 - DNA, 805 bp, Unknown
  Bacterial polypeptide expressing nucleotide sequence isolated from the Sargasso Sea
atgtcagaaaaaattacagttcctactttaggtgagtcggtcacagaagccactgtatcaaaatggcttaaatctcaaggagataaagttatagcggacgagccgattgttgaactagaaactgataaagttaatgtggaggtgccagcaccgactaatggggttttaggaaacattgctgttaaggagggagaaacagtaaatgtcggatctttgctaggtacaatcagcaatattaatcaagcctcaagcagtttaaaagagataaaaaattacagtcctccaaagaaaacagcaccaactgaaccaaagctgtttgagactgaagaagaaattctgtctaaaaaaattaaaaaaacaaaaaaagctgaaccgattttaaagttagaagaggagagtaaagaatttgatgaagaaccattaatactagatgaaacttttaaagaacagactaaaattaaaattaaaagtccagtcaaaaaggaaactaaaatttcaccagctgctagaaaaatggcaacagagtcgaatattaatattaacgaattgcaaggatcagggaaaaatggggtaattctaaaagaagatattttgagtttgatgggaacaaaaccttcaccttcagagagaataataaagtacggtcctgaagaaagagtaaggatgactagacttagactaaccatagctaaaagacttaaagaagctcaggaaaatgctgctatgctcacaacttttaatgaagtagatatgagcgaagtaattaacatgcgaaatcaatataaagatgaatttcaaaaataat

SEQ ID NO: 235364 - DNA, 295 bp, Unknown
  Bacterial polypeptide expressing nucleotide sequence isolated from the Sargasso Sea
tggaacgctgaccatggacgatttgactggtggaacttttacaatttcaaatggtggtgtttacggatcaatgctcagcaccccaataatcaatagacctcaatctggaattttagggatgcataatattcaaaaaagagcagtagttgtaaatgatgaaatagtaattaggccaatgatgtatgttgcattaagttatgatcatagaattattgatggaaaagaaagtgttggatttttagtgaaagtgaaagaacttctagaagatccatccgaattagtattaggaatataa

SEQ ID NO: 235365 - DNA, 472 bp, Unknown
  Bacterial polypeptide expressing nucleotide sequence isolated from the Sargasso Sea
cctgccattaactcagaaatacaaggagaagagatagtatacaaaaattactataatattagtattgctgtaggtacagatagaggtttagtagtgccagtcttaagagaaactgacgaaatgtcttttgctgatattgaaaaaaatatttctgaacttggttcaaaagcaagagatggtaagataactattgaagatcttcaaggaggaacatttacaattacaaatgggggaatttatggatcgatgttgtctacaccaattttaaatcctccacaatctgctgtattaggtatgcacaacattgtacaaagacctgtagttataaatggaaatgtagaagcaaggccgattatgtatttagccttgtcctatgatcatagaattgtggatggtaaagaagcggtttcttttttaaaaattgtaaaagaatgtttagaacagccaaaaagattgtttttaaatatatagt

SEQ ID NO: 235366 - DNA, 769 bp, Unknown
  Bacterial polypeptide expressing nucleotide sequence isolated from the Sargasso Sea
atgagtgaaaaaatattagttcctgtattaggagaaagtttaaacgaggcaacagtttctaagtggctaaagaataagggagatattgttaatgctgacgaggcaattgtagaacttgaaactgataaagttaatttggaagttccagcatctgtaagtggagttttatcagaaattaattcaaacgaaggagatactgttaaagttggagcagtgctaggaataatttcagattcaaaagtaaatattgaaaaaataaagccaaagaatattgaagtccaagaagaagtattaaatattgatagtatagataaaaatcaagtagacaataatgaagatttgaatattcagactgaacctttgatgttaaatgaagaagaagagcctttaatattagacgaagaagtaaaaatagaagaaaaacaatccaaacctgtggaaagaaatataaatttatctcctgcagtaagaaaaattattactgaaaaaaatatagatattaataaaattaaaggaactggaagagatgggagaattttaaaaggtgacttaatcgcattgatgggagaaaacccacaacctaatcaaagaaaaattaaatatggtgaagaagagagaattaaaatgacaagacttcgtcaaacgatagcaaaaaggcttaaggaggcacaagaaaatgcagccatgctaaccacatttaatgaggttgatatgtcgggaataatttcaatgagaaaagaaaatcaggaagatttaaaaatagatacaa

SEQ ID NO: 235367 - DNA, 688 bp, Unknown
  Bacterial polypeptide expressing nucleotide sequence isolated from the Sargasso Sea
agtgggacattatcagaaattagttttagagatggagatacagttgaagttggagctgttttgggctcaatttctgaggggaatgttgatattaaaaaaacacctgaaagcaaaaaacaacttgaggataatgaagataaagaatttaaagatcagaaaagtaatgtaattaatttagatatagaaaaaaaacctcaaactaagttagaagaaccattagttttaactgaagataattcaatggagctattagaagaagagcctttgcttttaactgaggaagtaaaaacagaggaaacctcacatcagccaattattctctctcctgctgtaagaaaaatcgttacagaaaaaaatatcaacgtagataatgtaaaaggaacaggtaaagcaggaagaattttaaaaggtgatctcattaccatgatgggagccaacccacaacccaaccaaagaagaattcaatacggtgaagaagaaagaattaaaatgactcgtttaagacaaacgattgcaaaaagattaaaacaagctcaagaaaatgcagcaatgttaactacttttaacgaggtagatatgtctgggattatggcaatgagaaaagacaaccaagaagatttcaaaagcagatacggaataaagctcggtctaatgtctttttttgttaaagcttgtgtcgttggactaa

SEQ ID NO: 235368 - DNA, 936 bp, Unknown
  Bacterial polypeptide expressing nucleotide sequence isolated from the Sargasso Sea
ggaggtcaatcagcttctaaaaacgataaaatgaaaaagataaaagctacagctcaaccaactgaaaatattaatgaaaacataattaaatgggatgaaggaagagatacgaagctctttgataataataacggagaagaaaacttgaaaaatcaaactaaacaagtgataaatcaggaacccgaagaagaggctcttgttttaactaacgaagtaaaaagtgatgaaaaagttaaatcagggaaagaaaaaattatgtcacctgctgttagaaaaatagtaaatgagaataatataaatatagaagacattgagggatcaggaaaaggagggatgattcttaaaggagatttactaagtttaatgggtattaagcccgctccatcagaaagaaaattaaaatttggagaggaagaaaaaatcaaaatgtctaggttaagaatgacaattgcaaaaagattaaaacaagcccaagaaaatgcagcgatgctaactacttttaatgaagtagatatgactaatataatgaatatgagaaaagaaaatcaggaggattttcagcaaaaattcaaaattaaactgggcattatgtcattttttgttaaagcttgcgtggtcgggcttaagttatatccagcaatcaatgcagaagtagaaggtgagaacataatttataaaaactattacaatatcagctttgctgttggaacagagaaaggattggtggtgccagttctaaagaacgcagatgaaatgtcatttgcagatatagagatgaatataaaaactctatccgataaggctagagatggaaaaattacaattgaagacttacaaggtggaacattcacaataagtaatgggggtgtgtatggttctatgttatctactccaattttaaatttaccacaatctggtgttttgggtatgcataat

SEQ ID NO: 235369 - DNA, 865 bp, Unknown
  Bacterial polypeptide expressing nucleotide sequence isolated from the Sargasso Sea
gaagctacagtgcaaaaatggcttaaaagcagaggcgacaatgttgaggcagatgaacctattgttgaattagaaactgacaaagtaaatttagaagtaccttcaccatctgggggaattttagatgaaataaattttgaagcaggatccacggttgaagttggcgcaacactaggttctattctggaaggtaaaacagcaactcaaagtgtcaaaattgaaaaaataaaagctataactaaaccatcagaaaatattaatgacaacataattgaattagacgaagaaagagacaccaaactctttgatggcaataacagagaagaaaatttaaaaaatcaaactaaaaaagcaataaacaaggaagctgaagaagatgcacttgttttaactgatgaagtaaaaagtgctgaaaaagtaaaatcaggcaaagaaaaagttatgtcacctgctgttagaaaaatagtaaatgagaacaatataaatatagaagatgtaaagggatcaggcaaagatgggatgattcttaaaggggacttactaagtttaatggctgttaaacccgctccatcagaaaggaaattaaaatttggagaagaagaaaagattaaaatgtctaggttaagaatgacaattgcaaaaagattaaaacaatcacaagaaaatgcagcgatgcttactacttttaatgaagtagatatgacaaatataatgaatatgagaaaagaaaatcagaatgattttcaacagaaatttaaaataaaactaggcattatgtcattttttgttaaagcttgcgtagttgggcttaagttatatccagcaatcaatgcagaagtagaaggtgagaacataatttataaaa

SEQ ID NO: 235370 - DNA, 181 bp, Unknown
  Bacterial polypeptide expressing nucleotide sequence isolated from the Sargasso Sea
ggtatgcataatatcattgaaagaccagtagtttttgatggagaaattaaaataaaacccatgatgtatttagctttatcttatgatcatagaataatcgatggaaaagactcagtttcatttttaaaatgtgttaaggaaaatttagaagatccacgtagactttttttagatctttaaa

SEQ ID NO: 235371 - DNA, 682 bp, Unknown
  Bacterial polypeptide expressing nucleotide sequence isolated from the Sargasso Sea
aatgaaaataatagtcccctcattaggagaatcagttacagaagctactgtagctaagtggttaaagaaagaaggagagcctgttgaaaaagacgatgtgcttgtagaattagaaacagataaggcaaccttagaagtatatgcgcaaacaaatggtatattaactaaaatttatttccaagatggacaggatgttcagataggagaagagttagccgagttagaagaaaaaactaatataaatactgataaaaagtcaaaacaaaaatcatctgatgacacaaacatcaacgaaaaagaaaataaaaataataatgaattttttgatttaacaaataaaaaagatactaatgataaaagcgttataagtccttcagaggctataagatcaggagcagggcaaaaaataacatctgacgatttaaaagcgtttttaaaacaacaaaacttgtctccaagtgaaagaagaaaactatctgaggataatgctgataaatttgatacgtcaaatgaattgagttctaaaagtaattatatagaaaagtcagaacgtgtgcaaatgagtagattgcaacgcaccatggcaaaaagattgaaaagtgctcaaaatacttcagcaatgctgacaactttcaatgaagtagatatgactgaagtcatacatatacgaaaattgcacaaa

SEQ ID NO: 235372 - DNA, 786 bp, Unknown
  Bacterial polypeptide expressing nucleotide sequence isolated from the Sargasso Sea
aatgggagaagaaaatttaaaaaatcaaactaaaaaagttataaatgaggaactcgaggaagaggtacttgttttaactgaagaggtaaaaagtgataaaaaagttagaccagggaaagaaaaagttatgtcacctgctgttagaaaaatagtaaatgaaaataatataaacatagaagatgttaagggatcaggcaaagatgggatgattcttaaaggagacttactaaatttaatgggcattaaacctgctccatcagaaagaaaattaaaatttggagaggaagaaaaaattaaaatgtctaggttaagaatgacaattgcaaaaagattaaaacaagctcaagaaaattcagcgatgcttaccacttttaatgaagtagatatgacaaatattatgaatatgagaaaagaaaatcaggatgattttcagcaaaaatttaaaataaaattgggcattatgtcattttttgttaaagctagcgtagttggacttaagctttatccagctatcaacgcagaagtagagggagagaacataatttataaaaattattacaatatcagctttgcggttggaacagagaaaggattggtggtaccagttctaaagaacgcagatgaaatgtcatttgcagatatagagatcaatataaaaattctatctgataaggctagagatggaaaaattacaattgaagacctacaaggtggaacattcacaattagtaatgggggtgtgtatggttctatgttatctactccaattttaaatttgccacaatc

SEQ ID NO: 235373 - DNA, 670 bp, Unknown
  Bacterial polypeptide expressing nucleotide sequence isolated from the Sargasso Sea
atgagtattgaaattaaatcacctacctttccagaatctgttgccgagggaacagttgctaattggttaaagcatgaaggtgaaaatgtttctcaagatgaagttcttgctgaaattgaaactgataaggttgtattagaggttttggcccctgaaaatggtattttatcgaaaatcattaagaaagaaggagaggttgttctaagtgctgaaaaaattgctgattttgaagaaacatcagaattatcagaagttcatgaagaagaaaaggtcagcaaagttgaagaaaaatcggtagaaagtaaatctaaaatttctgaagttaagattaataaaacaggacctgcagcaaaaaaattaattagtgaaaacaatattattgaagaagaaattatagcaactggtaaacacaatagaattactaaatctgatgtcgtcaatcatttagaaagtcaatcaagctcaataaatacatcagaaaaaaaacattcatcagatattaccagtggtagaacagagaaacgagttgaaatgtcgagattaagggaaacaatcgcaaaaagactagttcaagtaaaacaggatacagcaatgctaacaacttttaatgaagttgatatgcaacctattaaagatctacgaaaaaaatatggagacgaatttcaatctc

SEQ ID NO: 235374 - DNA, 910 bp, Unknown
  Bacterial polypeptide expressing nucleotide sequence isolated from the Sargasso Sea
gaattagatgagccaatagttgaaatagaaacagataaaatcacgttagaagttccatctccaagtgcagggacattatcggaaataaaagtttctgaaggaaaagatgtaagtgtcggaggagttcttggcattataggagataaaaaagaacaaaaagatttaaaaaattctaaaaaagaaaatataacaacagaaaataatcaaccttccaaaaaagaagataaaaaaattaaagacacaactaaatctaatgttcaaatttcgccatcagtaaaaaaaatgattgaagaaaataatttgaatttagatcatattagttcttccagaaacgatggccgtatcacaaaagcagatattataaattatttagataaatctaatgaaacaaaaaaaataaaaaaatcttctaaaatagaagagattgtccctatgtcaaaaattaggaaaaccattgcaaaaagattaaaagaagctcaaaatacagctgctatacttactacttttaatgaagtagatatgtcgcaaattattaaaattagagaattaaaaaaagaagattttcaacaacgttattctataaaattaggttttatgtcattttttattaaggcaactatattggctctaaaagaatttccagctgtaaattcagaaataagagatgatcaaattatttataaaaatcattatgatattggaattgctgtaggctctgaacgaggcttagtagttccagttcttaaaaatgctgatgatatgacatttggagatattgaaaaaaaaataattgagtttagctcaaaggccaaagaaggctctttgactgttgaggatttatcaggcggaacttttacaatttctaatggaggagtttatggatcaatgcttagcactcctattatcaata

SEQ ID NO: 235375 - DNA, 384 bp, Unknown
  Bacterial polypeptide expressing nucleotide sequence isolated from the Sargasso Sea
tcgtggtccccgttttaaaagatgctgatacaatgaattttgggcaaattgaaaagagtattattgacttaagtactaaagcaaaagacggaacattatcgatggatgatttatctggaggcacatttacaatttcaaacggtggagtttatggctctatgctaagcacacccattattaataggccgcaatcaggtattcttggaatgcataatatccaaaaaagagcagtcgtagttgacgatgaaattgtaattagaccaatgatgtatgtagcattaagttatgatcatagaattattgatggtaaagagagtgttggatttttagtaagtgttaaaaaattgttagaaaatccttcacagttagtgctaggaatttagt

SEQ ID NO: 235376 - DNA, 828 bp, Unknown
  Bacterial polypeptide expressing nucleotide sequence isolated from the Sargasso Sea
gaaagaagaaatagtttcgactttaaataatggggaaagtagcaaactatcaccagcagtaaaaaaactaattaatgaaaatgatttagattcagataaaattatatcatcaagatcagatggtcgtttaactaaaagcgatgtgtttgattttatgaataacccatcgacgactgacaaaacttcaaaagaaagagaagaagtggtgaagatgtctaagatcaggaaaacaattgcaactagattaaaggaatctcaaaatacagcagcaattctaacgacttttaatgaagttgatatgtcagagataatgaaagttcgtgaaacaaaaaaagaagactttatggaacgctataatgtaaagcttggcctgatgtctttttttgtcaaagctgttgttacaagccttcaagaatttcctgcagttaatgctgaaattcgtgaagaaaatattatttataaaaatcactttgatataggtattgctgttggaacagaaaaaggtttagttgtacctgttttaaaagatgctgacacaatgacttttggagatattgagcaacaaatagttgatcttagctcaaaagcaaaagaaggcactttaacaatggatgatttaacaggtggtacctttactatttcaaacggcggcgtatatggttcaatgttaagtacaccaataattaatagacctcaatcaggaattttaggtatgcataatattcagaaaagagccgtggtttttgaagatgaaattgttattcgaccaatgatgtatattgcgtttagttatgatcaccgaattattgatggaaaagagagtgttgg

SEQ ID NO: 235377 - DNA, 973 bp, Unknown
  Bacterial polypeptide expressing nucleotide sequence isolated from the Sargasso Sea
aaagtaaatttagaagtaccctcgccatctggagggattttaggagatataaatttcgaagcaggatctacagttgaagttggagcaacattagggtctatcatgggaggtcaatctgcctctaaaaatgataaaattgaaaaaataaaagctacgaccaaaccaccagaaaatattaatgacaacataattaaattagatgaagatagagacaccaaactctttgacaataataacgaagaagaaaatttaaaaattcaacctaaacaagtgacaaatcaagaacctgaagaagaggcacttgttttaactgaagaagtaaaaagtgatgaaaaagttaaatcagggaaagaaaaagttatgtcacctgcagttagaaaaatagtaaatgagaataatataaatatagaagaaattaagggatcaggtaaagacgggatgattcttaagggagacttactaagtttaatgggtgttaaacctgctccatcagaaagaaaattaaaatttggagaggaagaaaaaattaaaatgtctaggctaagaatgacaattgcaaaaagattaaaacaatcccaagaaaatgcagcgatgcttactacttttaacgaagtagatatgacaaatatcatgaacatgcgaaaagaaaatcaggtggattttcagcaaaaattcaaaattaaactggggatcatgtcgttttttgttaaagcttgcgtagttgggcttaagttatatccagcaatcaatgcagaagtagaaagcgagaacataatttacaaaaattattacaatatcagctttgcagttggaacagagaaaggactggtggtgccagttctaaagaacgcagatgaaatgtcatttgcagatatagagatgaatataaaaactctatctgataaggctagagatggaaaaattacaattgaagacctacaaggtggaacatcacaattagtaacgggggcgt

SEQ ID NO: 235378 - DNA, 298 bp, Unknown
  Bacterial polypeptide expressing nucleotide sequence isolated from the Sargasso Sea
gataatcaactgagtcttgaggaaatggaaggcggaaccttctccattaccaatggcggcgttttcggctccatgctttccacacccatccttaatcctccccaggcagcaattttgggaatgcataacattgtcgagagacctatggccgtcaatggagaagtcaagatccgaccggtgatgtatttagccctatcgtatgaccatcgtttgatcgatggacagcaatcggtcagttttttagttcgagttaaagaactccttgaaacacctgccagaatgatgttgggagtttaat

SEQ ID NO: 235379 - DNA, 414 bp, Unknown
  Bacterial polypeptide expressing nucleotide sequence isolated from the Sargasso Sea
tcggtgttgccgtcggcacaccgcaggggctggtcgttcccgtattgcggaacgccgatacgatgggttttgctgatatcgaacggacgattgccgattttggacggcgtgcccgggacggcaaactgacggtagcggagatgaccggcgggacattcaccatttcgaatggtggcgtttatggttcgttgatgtccatgccgatcctcaatccgccacagtccggtattcttgggatgcacaaaattcaaaaacggccgatggtcgttggcgatgaaattaaggtccgtaacatgatgtatctggctctgagctatgaccatcgcattgtcgacgggcgggaagcggtcaccttcctcgtgcgcctgaaggaatgcatcgaggacccgcaacgcttgctgatcgacgtctaag

SEQ ID NO: 235380 - DNA, 379 bp, Unknown
  Bacterial polypeptide expressing nucleotide sequence isolated from the Sargasso Sea
agtaccaatacttaaagacgccgatcaattgagttttggagaaatagaaactaaaattattgatcttagtacaaaagccaaagatggaacgctgactatggacgatttgactggtggaacttttacaatttcaaatggtggcgtttacggatcaatgctcagcaccccaataatcaatagacctcaatctggaattttagggatgcataatattcaaaaaagagctgtagttgtaaatgatgaaatagtaattaggccaatgatgtatgttgcattaagttatgatcatagaattattgatggaaaagaaagtgttggatttttagtgaaagtgaaagaacttctagaagatccatccgaattagtattaggaatataa

SEQ ID NO: 235381 - DNA, 600 bp, Unknown
  Bacterial polypeptide expressing nucleotide sequence isolated from the Sargasso Sea
agagttgatattgatagtatctcaaaagatagaaaagttgatacatcaaaaatgtcattacttccacgtaaactttctcaaagacttgttgctgttaaaaatcaaacagctatgctaactacatttaatgaagttaacatgacgcccatttttgaaattagaaaaaagtataaagaaacgttcattgcaaaacatgatgttagtttaggttttatgagttttttcactaaagctgttgtatcagctcttaaggaatttcctgacgtacactctatgatagatgaagatcaacaaattaaatttgatttctatgatattagtattgcagtttctggaccaaaaggattgatggtcccagttgttcgtaatgctcaagatttaacattttctggaattgagaaagaaattaagagacttgcaattcgtgctcgcgatggattaattacagttgaagatatgtcaggtggaacatttactatttcaaatggtggagtttttggatcaatgctttcaactccaattttaaaccctccacaatctgctattttgggtatgcataatataattgaaagacctattgctgtaaatggtaaggttgaa

SEQ ID NO: 235382 - DNA, 579 bp, Unknown
  Bacterial polypeptide expressing nucleotide sequence isolated from the Sargasso Sea
tgaggtaaatgaaacaatagatgaaatacaagaagatgagcccttagttttaaatgaggaaattaatgatcacaaaagtaataaaaacgaaaatttatctccagctgttagaaaattagtttctgaaaaaaaaattaatattcaagaagtcaaaggaactggtaaaaatggagcagttctcaagggagacattataaagctaatgggaacaactcctaagctaaatcaaagaaagattaaatttggtcatgaagaaagaattaaaatgactagattaaggcagactattgctaaaaggttaaaagaggcacaggataatgctgcgatgttaactacttttaatgaagtagacatgacaaatgtattatcttcaagaaaaattcatcaagaaagttttcaaaacaagtttggagttaagcttggcattatgtcattttttgtaaaggcgtgtataattggacttaaaaattttccatccataaatgctgaagtggaaggtcaagaaataatttataaaaattactataatattagttttgcagttggaacagataaaggacttgtggttcccgttctaaa

SEQ ID NO: 235383 - DNA, 416 bp, Unknown
  Bacterial polypeptide expressing nucleotide sequence isolated from the Sargasso Sea
tataagtatagctgttggcactgataaaggattggttgtcccagttgttaaaaattcagatgagttatcttttgcagaaatagaaaaaaatattgctgcgcttggtcaaaaagcaagagatggaaaaattactattgaggaccttcaaggaggaacttttacaataacgaatggcggtatatatggatctatgttatctactccaattttaaatcctccacaatcagcagttttaggaatgcacaatataattgaaagaccagttgtagaggatggagaagttaagataagaccaattatgtatttggcattatcctatgatcatagaataatagatggaaaggaagcggtttcttttttaaaagtagttaaggactcattggagcaacctaaaagactatttttaaatctttaag

SEQ ID NO: 235384 - DNA, 581 bp, Unknown
  Bacterial polypeptide expressing nucleotide sequence isolated from the Sargasso Sea
aatgaaaattccttccccaggagagtcaattactgaagtagagatttcccaatggcttgtaaaagacggagatgttgtgagaaaagatcagactattgctgagttggattctgataaagctacacttgatcttcctgcagaagcatcaggaaaaattactctaaaagcacaggagggagagtcaatgtctgtaggtgatgtggtttgcttaattgatacatcagagtctgtaacacaaatagaaaccgatgaaattgaatcaaatatagagcctattaaagaagataagactcaaataactcaaagtgaaaatataagtgttactccacttgctagaaatattgcctctgagaagggaatagatcttaatgagattaaagctgagggtcaaaaaattactaaagatgatgttctaaaggccgtgcctgcaatgggtgcatttagtgatgattcaagaactgaaacaagagaaaaactttctatgctcaggagaaaggtttctgaaagactggtttcagtaaaaaacgaaactgctatgttaactacatttaatgaagcagacctttcaaatatatttgaaa

SEQ ID NO: 235385 - DNA, 896 bp, Unknown
  Bacterial polypeptide expressing nucleotide sequence isolated from the Sargasso Sea
cagaaggcagcacaataaaaagctcagacataataggtagatataaaaaaggagaaagaatttcaattgtaccagccaaagatgagaagcaagaaactaaagcaaaagagccagagaaaaaagtagagaaaaaagttaaagccccaatagaaaagagtgagtctaccggaacaaaaaaagaaaaaggttttcgaatgggcccagcagcaaaaaaactattaaatgaagaagatgtcgatttgactgatataaaagcaagctctaagaaaggtgtggtaacaaagcaagatatacttgaagccgcagaaaagaaaccagaaaaagtagagaaagaatcttcccatacctacgaaaatgaagatatagaaaataccaaaagagttccaatgacaagattaagatctgttgttgcaaaaagacttttagaatcccaattttcaacagcctcacttacaacattcaatgaagttgatttatatgaagtaaaaaaacttagagagaaatatcgtgatagttttgaacaaaagtttggagtaaagcttggttttatggggatgtttcttaaagcatctagtatagccttgcaagatatgccaattgttaatgcatcgatagatggtaatgatattgtttatcatggatctcaagacattggtgttgctgtttcaactgaaaaaggtctagtagttccagttgtaagaaatgtacaagaactttccatggctgaaatagagatggctattagggattattcaatcaaagctagagatggaaaaattgaaatggctgatataataggtggaacatttacagtctcaaatggtggtgtttttgggtctcttctttcaacacctatattaaatcctccaccaatctgccattcttggtatgcataa

SEQ ID NO: 235386 - DNA, 802 bp, Unknown
  Bacterial polypeptide expressing nucleotide sequence isolated from the Sargasso Sea
atgtctttagtagatattaaaattccaagtcctggagagtctatcaccgaagttgaaattggtagttggcttaagtctgatggtgactacgttcaagttgatgaaactatttgtgagattgagtctgacaaagctactttgcctttgattgcagaaaattcaggaaaactaaagatcatccttaatgaaggagctattgccggtgtaggagacgtggcttgtacaattgatacctcaggaacaattaccggggacataaaaacatctaatttgaatgcggaaaagtcaaagcacgatgaaaaatcattgaaaaacgaaaaatccatcgatctcactttatctggtgaatccagtattagcaaacatgcgactccatattcagaagggcacccatctcccgctgcgaaaaaaatgatggtagaatcagatttatctaatttgtccggaagtggcccgggtgggagagtgaccaaatatgatgttcagaagcatttatcaaatgtttctgaatctttgggttcaactgcagaaaaagaaaagcataatgattctcatttattttcaggtgaaaggaaaattaaacgggaacgaatgtcccgcttacgacgtaaactggctgaaaggcttgtcagtgttaaaaacgagactgcaatgcttacgacatttaatgaagtagatatgagtgcagttgttgaattacgttcccaaaacaaggattcatttttgaaaaaacataatgtaaaactgggtttaatgagtatttttaccaaagcccctgtaccgaagccttttggaattgttt

SEQ ID NO: 235387 - DNA, 889 bp, Unknown
  Bacterial polypeptide expressing nucleotide sequence isolated from the Sargasso Sea
gaatctataacagaagtggaaatagctcagtggcttgtttcagatggagattttgttgagaaagaccaagctattgctgaagtagattctgataaagctacattagaattaccagccgaaaattctgggataataactttaaaagccgaagaaggtgattctgtagctgtcggtcaagtagtttgtttaatcaatactgatggagaacaaaaaatagatacagataagaaaaataatgttgagttatcctctgaatcagtaaaagagaacgttaatgaaactaaagaaaattatgcttctggctcaccttctcctgcagctaagaaaatattagatgaaaaaggtattttaccagaaagtataattggtactggtagaaacgcaagaatcaccaaagaagatgcaatactggctaagccttcaatgggctcacaaacagaaaatcaggctcgagaaaattcaagaaaaaaactctcattattaagaagaaaattagctcaaagactagtaactgttaagaatgaaacggctatgttgactacttttaatgaagtggatatgaattctattttttcaataagaagtgaatttaaagaacagtttaagcaaaagcacgaagtcggtcttggttttatgagtttttttactaaagctgttgtaagagctctaaaacttttccctgatgtcaattctatgattgacggagattatcaaataattaatgatttttatgacataagtgttgcagtttctggtccaaagggattaatggtaccagttttaagaaatgttgaaaaaatgactttcaaagatattgaaagtgaaattaaaagattagcaataagagctagagatggtgaaataactgttgatgaaatgactggcggga

SEQ ID NO: 235388 - DNA, 707 bp, Unknown
  Bacterial polypeptide expressing nucleotide sequence isolated from the Sargasso Sea
acttgagactgataaagtaaatgtagaggtgccagccccaacaaatggagtattgggatctattgaagttaaagaaggagagacagttaacgttggatctttattagggactattagtattaatacaagccaaactgcaaatagtccaaaagaaataaaaaattataatccaccaaaaaaagaaattagaaataatccaaaattatttgaggatgataaagaaacaaaagctcaaaaaaaaataaataaagcaaaaaatgaagaaggaatattaaagttagatcaagaaagtccacaagttgatgaggagccactaatattagaagaaattcatgaagagaaaaaagaaaaagtggctgctaaaaaaacccaacaacaaaaaaaagaaactaaagtctcccctgcagccagaaaaatggcaagcgaagcaaatatagatttagaaaaaattgaaggaactggtaaaaatggtgtaattttaaaagaggatataatgagtttaatgggctctaaaccatctccctcagaaagaaaaattaagcatggtcctgaagaaagattaaagatgacaagactaagattaactatagctaaaagactgaaagaagcacaagaaaatgctgctatgttaacaacgttcaacgaagttgatatgagtgaagtaatttcaatgagaaatcaatacaaagatgaatttcaaaactaat

SEQ ID NO: 235389 - DNA, 763 bp, Unknown
  Bacterial polypeptide expressing nucleotide sequence isolated from the Sargasso Sea
catgtcgaatcaaattttagttccatctttaggagagtcagttacagaagcaactgtttctaagtggttaaagcaagttggagaaaaagttgactctgatgagcccttagtagaattggaaacagacaaggttaatattgaagttccatctcctttaagtggaactttgtcttcaattaaggttaaagaaggtgataccgtatcagtaggtgctttgctaggtcttgtaaatgaaagtaaatctcaaacggttagcaatgaaaaaaacaaacaagaacaaacttcttacatacctcctaaaacaaataaaaagaaaaaaaaaaatattgatagagaaagaacactaactttaattgaagatgcagaaagcaaaagttctaacggaaccttagttttagatactttagcaaatgatgataataaaaaattggaaaaaaaaaaatacattcccccaaaatcaaaaaaacatttatctccttcggtaagaaaaattgtagaagaaggaaatattaatatttcaaatatagaaggtaccgggaaaggaggaagaatttctaagggtgatctaattgaattaatgggaaatatgccacaaccatcaaagagaaaaattactcatgggcaagaagaacgtgtaaaaatgagtagattacgtgtcacaattgcgaaaagattaaaagaggcacaagacagtgcagcaatgttaacgacttttaatgaagttgatatgcaaaatattattcaaatgaagaaaagactatca

SEQ ID NO: 235390 - DNA, 760 bp, Unknown
  Bacterial polypeptide expressing nucleotide sequence isolated from the Sargasso Sea
aatgaaggaaaaaattttatcaccaacatatcctgaatctgttgaagaaggcgtgatagctaattggaaaaaattagaaggtgaaatgattattcaagatgaagttttagcagaaattgaaactgacaaagtagttattgaggtggtagcagctaatgatggcgttatgactaaaatttttaaaactgagggtgaggtagttaacagtggagaagttattggtgaatatgaagttggtgaaagtgaattaattaaagaaaaaaaatctggaaaagataaaacgcctaaaatagaaagcaaggaaccgataattagtaattcagtaaataaatttgctcaagagaatgagatagatctaagtcttataaaaggtactggtaaatcaggtagaattatcaagcaagatttattgaactatatttctaataaagaagagataacaaaaaaagaagcagttagagagaccaaaagggtccccatgagtagattaagaaaaacagttgctgaacgtttggtaaatgttcaaagggaaacagccatgcttacaacttttaatgaagttgatatgactgcaataatgaaaataagagaacagaaaggtgaaaacttctataaaaaaaatcaaataaaattagggtatatgggcttttttgtatctgctgcagttagcgctttaaatgaatatcctcaagttaatgcaagtattgatggtgatgaaatcgttttccacggttttaaagatgttggggtggctgtttct

SEQ ID NO: 235391 - DNA, 847 bp, Unknown
  Bacterial polypeptide expressing nucleotide sequence isolated from the Sargasso Sea
atgaaaattgatatccaaattccctcgtttggtgaatctgtaacagaggcaacagtgggccagatccttgtaaaaaatggggatgtagtagcagaggatgatgctttatttgaaatggagtcagacaaggctagcgtggaacttccaagcccagccagtggtgctgttactctgactatacaagaggatcaagtcctagaggtggggcaagttgtgggctatattgataccgatgttgcagctggtgcaaaaacagaacaacctacaatacaaagtgagtcagcgcaaaaagtagcagagcctgtaatgacggcaaaacctgcatctgagatggtaaccggtgccactgagctaagagttgatcgcaatgaataccttcaagaaagaccaattgaaataccaagggcatctgtgagccaaccacaaaaaacgcaagctcacacagaagtaaggggtaggggagagcaccgtgaaaaaatgagtaaaatgcgccgggtaatcgcaaaaagacttgtcgaagtaaagcaagaaaccgcaatgcttacaacctttaatgaagtagacctttctcgtatcattgaaatccgcaagcaccataaagagtcttttgaaaagaaggtgggagccaagcttagctttatgcccttttttgtaaaggccgcgtgccaggctctcgatgagtttgtcgatgttaacgctatgatcgatggtgaggaaattgtctataatgataatgtcaatatgagtttagcggtaagcacacccaagggacttcttgtcccagtgattcaaggctgtaaccacttaagatttgcccaaattgctcttgccattcaagatcttgcaa

SEQ ID NO: 235392 - DNA, 178 bp, Unknown
  Bacterial polypeptide expressing nucleotide sequence isolated from the Sargasso Sea
aatgcacaacattgtggagagacctatggccgtcaatggagaagtcaaaatccgaccggtgatgtatttagccctttcgtatgaccatcgtttgatcgacggacagcaatctgtcagttttttggttcgagtcaaagaactcctggaaacacccgccagaatgatgttgggagtttaa

SEQ ID NO: 235393 - DNA, 663 bp, Unknown
  Bacterial polypeptide expressing nucleotide sequence isolated from the Sargasso Sea
aatgagtattgaaataaaagctccaacttttccagaatctgtagctgatggaacaattgccaattggttaaaaaaagaaggtgaaaatgttaaccaagatgaagtcattgcagaaattgaaactgataaagttgttctagaagttttagctcaatcagatggaataatatctaagattgtaaaaaatgaaggtgaaactgtaataagttctgaaattattggtgaatttgaagagactaatggcactatttcagaagtggttgaggagacaataaaagaaaaaaaagaagaaaaaatgcctgtaaaggcaaaaaaaactaatcatggtaaaaagattggcccagctgcaaaaaaaataattgcagaaaatgatataaatcctgatgatataagtcctacaggaaaagataaaagaataacaaaagctgatcttgtaaatcatctgagctcagatcaagaaattgatccgcaaaagcctagtttatcttcaagagagggtaggcctgaaaaacgtgtagcaatgtccagactgagatcaacaattgctaaaagactggtatcagttaaacaagaaacagcaatgctcaccacttttaatgaagtggatatgttaccaatcaaagatttaagatctaaatatggtgaagaatttgaaaaccaaca

SEQ ID NO: 235394 - DNA, 793 bp, Unknown
  Bacterial polypeptide expressing nucleotide sequence isolated from the Sargasso Sea
catgtctcaaaaaatattagttccaactttaggtgagtcggtaacagaagctacagtatcaaagtggttaaaaaaccaaggagatcaagtagcttccgatgagcctcttgttgaattagagacagacaaagtaaatgttgaagttccatctccatctgatggtactttacaaaatataacagttaaagaaggtcaaacagttaatgtgggtgctgtgttgggaactattggttccaaaatcaattcaaccgaaaaagaagtaaaagaagtaaaaaaatatactcctccaataaaaaaacaggaaaaagtagcaaaagttacaaaactaaaaaatgaaaaaaaacaaacagttcctgagcctcttactttagaaaaagaagataaatcaaatatagaggaaacaccgctaatcttggaggagcaaaatcttgataagacagaggagccattaatacttaataatttatcagaaaaggaaaaaataaaagaaactaaaaaagttgaaaaaacattctctccagcagcaagaaaattagctgcagaaactaagttaaatttagatgatatcgaagggtcaggaagaaatggaattattttaaaagaggatttgctaggacttatgggtgctaaaccagagccttctaaaagaagattagctcatggacccgaagagagaataaaaatgacaagattgagactaactattgctaaaagactaaaagatgctcaagagagtgctgctatgctaacaactttcaatgaggttaatatgcaagaagttattcaaagaaaa

SEQ ID NO: 235395 - DNA, 786 bp, Unknown
  Bacterial polypeptide expressing nucleotide sequence isolated from the Sargasso Sea
aatgccgaatcaaattttagtaccatctttaggcgagtcagtaacagaggcaaccgtatcaaagtggttaaaacaggttggtgaagaggtagattcagacgaacctttagttgaattagaaactgacaaagtaaatgtagaagttccgtctcctatggcaggaacactgtcctcaattaaggtaaaagaaggagacacagttgaagtaggtgccttattaggcgaagttaatgagggaagatcttctttcaatgtaaaaaagcctattgaaaaaaaagaaaaagaatatacacccccaaaaaaatctaaaaaaattatttctcaagaaaatatagaaaaaagtagagagacaatacctgtagaagaagaagcgctaaccttatctaatgaagttgttgaagaagaaagctccaacggaactttagttttagatactttagtagatgaaaatcctattccaccgactgaagaaaaatatattccaccaaagagtaaaaaaaatttatctcccgcagtaaggaaaattgtagaagaaaataatatcgatctctcaaaagtacatggaactggtagatctggaagaatttcaaaaggagatttaattaatttaatggggaatataccagaaccttcaaaaagaaaaacaacacatggacctgaagagaaagtaaaaatgtctagattaagagtaactatagcaaaaaggttaaaggaagctcaagatagtgctgctatgttaactacttttaatgaagtagatatgtacaacataattcaaatgagaca

SEQ ID NO: 235396 - DNA, 1171 bp, Unknown
  Bacterial polypeptide expressing nucleotide sequence isolated from the Sargasso Sea
atgacaaaagaactgatagtcccaactctaggagagtctataactgaagccactgtctcaaaatggcttaaaaaaataggagaaaactttgatattgatgagcctttagttgaaattgaaactgataaaattacagtagaagttccagcaccaagagcaggtgtattatctgaaataaaagttcaagaaggcagtgatgttaatattggaggtgttttagcaataattggagaacttcaaaaatctaattcttctgaatcaaatattaatagtaaaaataatcaaagaaaagaagatgtatctagtgaagaaaaaaaagaacaaaaactatctccagctgtaaaaaaaatagtagaagaaaaaaatttggatagcaaaaaaataagctctacaagaaatgatggaagaattacaaaagctgatgttataaatcatttagaagaaccatctatctcaaaagattcattaaagaaaaaagaagaagttgttccaatgactaagatacgacaaactatagcaaaccgactaaaggaagctcaaaatactgcagctattctttcaacttttaacgaagttgatatgtctgaaattattaaaataagagagtcaaaaaaagaaaattttataaaaaattatggtgttaaattaggattcatgtctttttttgttagagcttgtgtaatggcgcttaaagaataccccgcagtaaatgctgaaattagagaagagaatattatttataaaaatcactatgatattggtatagcagttggaactgaaaaaggacttgttgtaccagtattaaaaaatgctgatcaaatgacttttggcgatattgaaaaaaaaatttttgacttaagtttaaaagctaaagatggaaaattaacaatgcaagatttaacaggcggcactttcacaatttcaaatggcggagtttatggatcaatgttaagtactccgattattaatcgtcctcaatctggaattttaggaatgcataatattattaaaagaccagttgttatagatgatgagattgctataagacctatgatgtatttagcttttagttacgaccatcgaattgttgacggaaaagaaagtgtaggatttttaataaaaataaaagatttgctggaaaatccgtcatctttaatattaggtgaataaa

SEQ ID NO: 235397 - DNA, 1135 bp, Unknown
  Bacterial polypeptide expressing nucleotide sequence isolated from the Sargasso Sea
atgaaaagaatttttttaattttatttttatttttttttacaagtcaaaaaatagaggcatcaaatgaaatttctatttatgaaaaaatagacttatttggtgaagtctttgataaaataaataaagaatatgtggaggaaataaaccaatcagatgcaatggatgcagcaataaacggggttcttcaatcacttgacccacattctgcttatatgtctcccgaaatctttgaaaatatgcaaacagaaaccagtggtgaatttggaggtctaggtattgaagtgggaatggagtcaggagtagtaaaagttatatctccactggacaactcgccagcaacaaaattaggtgtcaaagctggagattatattattaaaattaatggagaacaagttcaaggaaaaacattaaatgaagctgttgaacttatgagaggacctgttggatcagaaatagaaattactgtaagaagaataggtgtcaaaaaatccttaacatttaaaataattagagaaataattaaaattaagtctgtcaaatcagaaataaaaaataacaatgtgggttatataaggcttactacatttaacgaaaatagtagtgatcagattgaaaaaagcataaaaaaatttaagaaggaaaataaaataaagagttatattttagatttaagaaataatccaggaggtctattatctcaagcaataaaaataactgacttttttttaaataatggtgaaatagtatcaacaaaaagtaggaaagcttttgaaaatagaaaatggtttgctaaagaaggagatattataaatggaactactttaattgttctaataaattatggttctgcttctgcatccgaaatcgttgccggagctttgaaagaccataaaagagcaatcttaattggtgaaaatacttatggtaaaggctctgtacaatctattttacctttaaaaaataaaggagcaattaggttgacagtttcgaaatactatttaccttctgggaaatctatttctgaaattggagtagttcctgacattgaaataatagaggaaagtgaagattttagaattaatactgatacagacaaccaacttgattatgctctcagacttttaaagagttaac

SEQ ID NO: 235398 - DNA, 622 bp, Unknown
  Bacterial polypeptide expressing nucleotide sequence isolated from the Sargasso Sea
gtaactcctgcaactcctgatagtgaattgcagtcttcaggtgaagaagagcgtattcctatgagtcgtttgagatccaccatagctcaaaggcttgttaaagttaagcaagagactgccatgcttactacttttaatgaagtggatatgcagccaattaaagatctaagagcaaagtatggtgaagagttttttgcagagcatggaaccaaacttggtttcatgggattctttgtttctgctgcagttcaggcacttagaaaatttcccattgttaatgcgtcaatcgataacgaagacattgtttaccatggtttccaagatattggtgtcgctgtttctactgatagaggccttgttgttcctgtggttagagatgctggcaatctctcaattgctgatattgaattaaaaattactgagtattctgaaaaagctagggaaggcaaattatcaattgaagaaatgcagggaggaacctttaccatttcaaacggagggatatttggttctttattatctacaccaattttaaacgcgcctcagacagcaattttaggtatgcataagattcaagaccgcccaattgccttaaatgagaggttgttattaggcccatgat

SEQ ID NO: 235399 - DNA, 835 bp, Unknown
  Bacterial polypeptide expressing nucleotide sequence isolated from the Sargasso Sea
aatgaaaatcccatctcctggggaatctataacggaagtcgagatctcccaatggttggtttctgatggagatattgtttctaaagatcaaacaattgctgagcttgattctgataaagctactttagatttacctgctgaaactgctggaaagatttctttaaaagcagaagaaggcgatactatttctgtaggtgaggttgtttgtgttattgatacttcttttgctttagaagaaaatttagataaagtaaataaaaaagaatcaccatcgaatgttgttaaggaagatataattaaatcaagttcagaagaagttacagcaacgcctttagcaaaaaaaattgctgaagaaacaggggttaatttaaatcaaataagtacaaagggagaaaagatcactaaggaagatgttttaaaagctgttccggcaatgggttcagtaaatgatgataatagaggagaaactagagaaaagttatctgttttaaggagaaaagtatcagaaagactagtttctgttaagaatgaaactgctatgttaacaacatttaatgaagctgatttgtctcagatttttgatttaagaaaaaaatataaagacatcttctctactaaacatggtgtaagccttggctttatgagtttttttacaaaagcagttacaagagcacttcaaatgtatcctgatgtaaactctatgattgatggtgatcataaagtttcatataattattcagatataagtattgctgtttcaggaccaaagggtcttatgactccagttcttcgaaatgctcagaatatgtcttttgcatctatgagcaagaaataa

SEQ ID NO: 235400 - DNA, 779 bp, Unknown
  Bacterial polypeptide expressing nucleotide sequence isolated from the Sargasso Sea
aatgaaagtaccttctcctggagaatcaattactgaggtagaaatcgcccagtggttagttaaagatggggattacgttgaaaaagatcaagcagtagctgaagttgattcagacaaagcaactcttgaacttccagcggaagtaagcgggacaataattctaaaagctgaagaaggagacgcagtcaatgttggagaagtagtctgcaccattgatactgaaggtaaaccagcaaaaggcattattgaacctaaaactgaaatcaaaaatcttgatcctattcaaaaggaagaatcgcaaactaaaaattatgcaacaggtacgccttctcctgctgcaaaaaaaattatttctgaaaaaaatattgatatatcctctgttgtaggatctggaagagatggaagaataactaaatcagacgttgaaaaagctaaaccttcaatgggtacaatacctattggtggagaaagaaaatcagaaagtaaaaaaatgtcattattgagaagaaaagtagctgaaagattagtatctgcaaaaaatcaaacagcaatgttgacaactttcaatgaggctgatttatctaatatatttcacatcagaaaagaacataaagaagctttcatttccaaacatgatgttaatcttggatttatgagtttttttactaaagcagttgtcagagcactaaaaatgtatccggatgttaactccatgattgatggtgatcatcaaataacatatgattattgtgatatatctgtggccgtatctggcccta

SEQ ID NO: 235401 - DNA, 925 bp, Unknown
  Bacterial polypeptide expressing nucleotide sequence isolated from the Sargasso Sea
atgagtgagcaaattattgtacccgcacttggagagagtataacagaggcaactgttgctaagtggcttaagaatgttggtgacacggttgaagcagatgaaccagttgtagaacttgagacagataaggtaaatttagaggttccatcgcctataagtggtactgtaggagatataaaatttaaagatggagatactgttgaagtaggagctattttaggttcaattcaaaataatggagaagctactgaaaaaaaacctgttgaaaaacatgagcagccaaaagaagagaaaaaaaataatgttgttgaacttgagcctgaaaagaaagaggtaaaagtttatgaacaaaaaatagccgaagagactgttgttaacgaaaatattatttctgaggaaaatgaggaagagcctttggttcttaccaatgaggtagaaaagaaagtctcaaaaaatataaaaaaaagagagaataacctttctccatctgtaagaaaaattgttgctgaaaaaaagatagacttagacaaagtaaaaggaacaggaagagatggaagaatattaaaaggagatctaattgatttaatgtctataaaaccttctccatcagagagaaaaattaaatttggagaagaagaaaaaatcaaaatgacaagattgagacaaacaatcgcaaaaagattgaaacaagctcaagataatgcagcactcttaacaacttttaatgaggttgatatgtccggaattattgaaatgagaaaagaaaatcaagatgattttcaaaaaagatatggagttaaattaggttttatgtctttttttatcaagtcatgtatcttagcattaaaagcattcccaatagtaaacgcggaaatttcaggtgatgaaataatttataaaaattattacaatataagttttgctg

SEQ ID NO: 235402 - DNA, 865 bp, Unknown
  Bacterial polypeptide expressing nucleotide sequence isolated from the Sargasso Sea
aatgagtattaaaattaaagcacctacttttccagagtctgttgctgacggaacaattgctaattgggtaaaaaaagagggcgataatgtcagtcaagacgatgttattgctgaaatagaaactgataaagtggtccttgaagttattgcgcagtctgatggaacgatttctaaaataattaaagatgaaggtgaaattgttcaaagtgcagaaattattggtgaatttgatgaatctggagaatcttcaaaagctaaagaaaaaactaatgacaatgttgaagataaaaaagaaccagaaaaaaagacaaaaacaaagcctgttaagaacaaacaatctacaaataaaattggtccagccgctaaaaaaataattgctgaagaaaatatagattcagatgatataaaaccatctggtaaagggaatagaatcactaaagccgacgtaatcaaccatttagatactgaaaatcaagaagaaaacatttttacaagctcctctatcagtgaagatagaccagaaaagcgtgtgccaatgtcaagactaagatcaactattgctaaaagattggtttcagttaaacaagaaacagctatgcttactacttttaatgaggttgatatgatgcccattaaagaattaaggtcaaaatatggatcagaatttgagaaagaacatggggtaaaacttggttttatgggattttttgttatcgctgcagttcaagccttgaaaaaattcccagttgtaaatgcatccattgacggtgatgatattgtttatcatggttttcaagatattggtgtggcagtctctactgaaagaggtcttgtggttccaataattaaggacgcagatacaaaa

SEQ ID NO: 235403 - DNA, 673 bp, Unknown
  Bacterial polypeptide expressing nucleotide sequence isolated from the Sargasso Sea
atgacagttgagttattagtacctactttaggagaatcggttgtagaagcaactgttgctaaatggatgaaatctcctggagaaagtatagattctgatgagccacttgtagaattagaaactgaaaaagtaacattagaagtaccatcaccaatttctggagtgttaaaagaaatctcagcaaaagaaggtgaaagtgttgaagttggagctcttttaggaattatatccgagagtaataatgaaagcccaacaaaaaatacctctttacaaaaaaataaagaagaaacagctttagctaacacagaaaaaataaataagggtaaaaatgaacatctgtcacctgcggttcaaagaattgttactgaaaataatttaaatccttcagaaataacaccttcaggtaaagacgggttaattacaaaaggtgatgctttaaataaattaagcgatcaagatagctccaagttggttaataaaactgttagcaacaatgaactagaagaaagagttccaatgtcacgacttagaaaagttgttgctaaacgacttaaagaggctcaaaatactgccgccatgctaactacttttaatgaagtagatatgacttctattatgtcacttagatctgagtataaagaccatttgaaaaggagcataaggtcagactagg

SEQ ID NO: 235404 - DNA, 646 bp, Unknown
  Bacterial polypeptide expressing nucleotide sequence isolated from the Sargasso Sea
aatgaaggaaaatattttatcaccaacatatcctgaatctgttgaagaaggcgtgatagctaattggaaaaaattagaaggcgaaatgattattcaagatgaagttttagcagaaattgaaactgataaagttgttattgaggtggtagcagctaatgatggcgttatgactaaaatttttaaagctgagggtgaggtagttaacagtggagaagttattggcgaatatgaagttggtgaaagagaattaattaaagaaaaaaaatctaaaaaagatgaaacacctaaaatagaaaataacgaaccgttaattagtaattcagtaaataaatttgctaaagataatgagatagacttaagccttataaaaggcactggtaaatcaggccggattattaaacaggatttaataaattatatttctaataatgagcggataacaaaagaagaagtagtcagagagaccaaaagggtccccatgagcagattaagaaaaacagttgccgaacgtttggtaaatgttcaaagagaaactgccatgcttacaactttcaatgaagttgatatgactgaaataatgaaaataagagaacagaatggcgaagatttttttaaaaaaaatcaaataaaattaggatatatgggc

SEQ ID NO: 235405 - DNA, 988 bp, Unknown
  Bacterial polypeptide expressing nucleotide sequence isolated from the Sargasso Sea
aatgagtaaaaaaatattagttcctacattaggtgaaagcattacagaagcaactgtttcaaaatggctaaaaaaagttggagatccagttgaaatagatgaagctattgttgaacttgagactgataaagtaaatttagaagttccttcaccaataagtggggttttatcagaaatgaattcaaaagatggagatactgttgaagttggtgcagtgctaggttctatttctgaaggaaaatcaaatgtagaaaaaaaaacacccttaaagcaagaaaaagaagttgaaactgttgatgatgataaaataaaagagaaaaatactaacgtcataaatttagatatagaaaaaaaacttactccaaaatttgataaaatttctgcaactagtaaagatgaaccaatggaacttttagatgaggtaaataaagaacctcttctattaactgacgaagttcaaataactcaaactacaaaagttaatcctattattctttcaccagcggtgagaaaaattgcagctgaaaataatattgatgttgaaaacgttaaaggtacaggaagagatggtagagtattaaaaggcgaccttttaagcttgatgggtacaaatccacaacctaatcaaagaagaattcaatatggtgaggaagagagaattaaaatgacaaggttaagacagactatagcaaaaagactcaaacaagcacaagaaaatgcagcaatgttaacaacttttaatgaagttgatatgtctggaataatttcgatgagaaaggacaatcaagaggatttcaaaaatagatatggcataaagttgggactgatgtctttctttgtaaaagcgtgtgttgttgggctaaaattatttccagcaataaatgctgaaattgagggtaatgatattatttataagaattattataacataagttttgcagtcggtaccgataaaggtctggttgtgccagttttgagaaatgcagat

SEQ ID NO: 235406 - DNA, 730 bp, Unknown
  Bacterial polypeptide expressing nucleotide sequence isolated from the Sargasso Sea
atgagtgaaaaaatattagttccaactttaggtgaaagtataaatgaggcaacagtcgctaaatggttaaaaaatgaaggagaggtggtagctgcagatgagccaattgtagaattagaaacagataaagttaatttagaagttccatcacccgttaatggaaaactttcaaaaataaattcaattgatggcacaactgttgaagttggagcagttttaggaattatttctgaaactagtgaagaaactaaaactatagaaaaaattaaagtatcaaaacctttaactgaaaaaaaagatgacaatattgtaaaattaaaagttgaaaaaagacctgagcctagaatatttgaagatcaagagtctgagccacaacctttaatacttactaatgaagtgagtaataaaaaaaaagagaatttaaacaaaaatttatctccttcagttagaaaaatggtttcagaaaaaaaaattaacatcgataaagtaaaaggaactggcaaaggtggaagagtactaaaagaagatctactaaatctaatgggtgaagttcctaagccaaatgaaagaaaaattcagtatggccaagaggaaaaaattaaaatgagtaaattaagacaaacaattgcaagaagattaaaacaagcgcaggaaaatgcagcaatgctaaccacatttaatgaggtagatatgtcttcaataatatctatgaggaacgagaatcaagaag

SEQ ID NO: 235407 - DNA, 978 bp, Unknown
  Bacterial polypeptide expressing nucleotide sequence isolated from the Sargasso Sea
aatgaatacaccagtaattgttccaacattaggcgagtcagttgcagaggcaacagttgctaaatggttaaaaaaagtaggcgacccagtttccactgatgaggtaatagtcgaattggaaactgataaagttagcgtagaagttacatctcctaattcaggatatatatctgagattaagacaaaagtaggagagacagttgaggttggaagtcagctaggatcaataagtcagtctcaatcaaaaaacacaacgaatattgaaaaagaagtaattacaagaaaagctaagaaatcagaggaaattaaaccaaaaaaatcagagccagtaaacaataatgtagtgaaattaaaaaccgaagtaaaaaaagatgaactatcaccggctgttaaacgaattgtagaggaaagaaaaatagatttatcacaagttcaaggttcaggaaaagatggtcgaattttaaaaagtgatcttataagtttaatgggtgaaaaaccagttccaactcaaagggctgaaacccatggccttgaggagaaagttaaaatgactagactcagggcaacaatagcaaaaagacttaaggaagctcaaaacaacgctgcaatattaaccacttttaatgaagtagatatgtcaatgatcattcaattgagaaaagataataaagaagagtttttaaaaacatatggtgttaaattgggttttatgtcattttttataaaagcatgtgttaatgcgttgaagaccttcccattagtaaatgccgaagttcagaatgatgaaataatttataaaaattattataatattggtgttgcggtaggtacagacaaaggattagttgttcccgttgttaataatgctgatcaaatgtcatttgcagatattgaaaaaaatgttttagaattgggaactaaagcaagagatggtcagcttactattgatgaattacaaggaggaacatttaccattac

SEQ ID NO: 235408 - DNA, 760 bp, Unknown
  Bacterial polypeptide expressing nucleotide sequence isolated from the Sargasso Sea
atgagtgaagaaattcttgttccggttttaggtgaaagtattacagaggctactgtttcaaaatggttggtgaaatcagggcaaaatgtaaaagctgatgagccaattgtagaacttgagactgataaggttaaccttgaagttccatcaccagtaagtggagttttgtcaaatataaaaacaaaagagggagaaacagtaaaagttggagcattattaggaatagttattgagggagataacaaagaatctcaagagatccaaaaaattgaacctgtagaaaaagtcgaaaaagaaaataaaaaaactcaagaagaaaagtcaaatattgttaattttgaaaaaactaaatctgcagagcctaaaattttcgatgacaaaaaacttgaggaaccactaattttgacaaatgaagtaaaaaaatcagatacgcgcaaatcaaatgtaaattcgaatttatcacctgcagttagaaaaattgttgaagatcagaaaatcgatatctctaaagttcatggttcgggaaaagaaggtagaattttaaagggtgatttaataaatttaatgtcttcaaaaccttcacctaatcaaagaaaattagaaaaaggtcaagaagagcgtgttaaaatgacaagacttagacaaactattgctaaaagattaaaagaagctcaaaattctgctgctatgctcacaacttttaatgaagttgatatgagcgcaatcatacaaatgagaaaaaataatcaagaggatttca

SEQ ID NO: 235409 - DNA, 340 bp, Unknown
  Bacterial polypeptide expressing nucleotide sequence isolated from the Sargasso Sea
agaaatagaaactaaaattattgaccttagcacaaaagccaaagatggaacgttgaccatggacgatttgactggtggaacttttacaatttcaaatggtggtgtttacggctcaatgcttagcacaccaataatcaatagacctcaatctggaattttaggaatgcataatattcaaaaaagagcagtagttgtaaatgatgaaatagtaattaggccaatgatgtatgttgcattaagttatgatcacagaattattgatggaaaagaaagtgttggatttttagtgaaggttaaagaacttctagaagatccatccgaattagtattaggaatataa

SEQ ID NO: 235410 - DNA, 890 bp, Unknown
  Bacterial polypeptide expressing nucleotide sequence isolated from the Sargasso Sea
tttgaaaaaaaacaaaactatagagcctaaaatttttgatgaaaaaaaacctgaagaagcattaatattaactgaagaaccactaaaattaacagaagaaattcatagagaagaagttccaaaaaaaaataataatataaatttatctccagcagttaggaagatagtagaagaaaaaaaaatagacacttctaaagttcaaggaaccggaaaaggaggaagaattttaaaaggtgatttaattaatttgatgtcatctaagccaataccaaatcaaagaaaattagaaaaaggtcaagaagaaagagtaaaaatgacaaggctaaggcaaacaattgctaaaaggttaaaagaatcgcaaaatacagctgcaatgctcactactttcaatgaagtagatatgagtgcaataattgagattagaaaagataatcaagaagattttcagaaaaaatttggaataaaactaggttttatgtctttttttgttaaagcttgtgttttaggactaaagctatttccaagtataaacgcagaagtagataatgaccatataatttataaaaattattataatattagttttgcagttggaactaatagaggactagtcgtaccagttttaagaaatgcagatgaactatcttttgctgatattgaaaaaaatattaaaataatttcagaaaaagctagagatggaaaattaaacattgaagatctccaaggaggaacttttactataagtaatggtggagtttatggttcaatgttatcaacaccaattttaaatcctccacaatccggagttctaggtatgcataatatagtagaaagacctattgctgttaatgctaaagttgaagtaagacccagttatgtatcttgcttta

SEQ ID NO: 235411 - DNA, 994 bp, Unknown
  Bacterial polypeptide expressing nucleotide sequence isolated from the Sargasso Sea
atggttgaaaacacaggagaaactgtttctaaggatgaagttttagttgaattagaaacagataaggcaacacttgaagtatatgctcaatctaacggtgtattatctgaaatatatattgatgcgggtcaagatgttgaaattggtgctgagttagcagaatttttagagaatgaaactatagattcaaataaagttattgaagaggtagagttaaaatcgaatgctaaaaatgaaactaagaaaaatattgatatcggtttagaaaacgagaaaaataaaaaagaagatattatagattcagagttaatttcttcaagagatataaaacggtctggtattggaaataaaattactaaaagtgatattgaagaatttataattggtgaaagtttatctccaagtcagagaagacaagataaattaaaacagtcagtaaattatgatttagaaaataagactgaattaactattaaaaactcttcgcgagtagctatgacgagagtgcaaaaaactatggcagaaaggctaaaattagcgcaaaataatgcagcaatgttaactacatttaatgaagttgatatgtctgaggttattaaaataagaaaaaacaataaagagaattttgaaaataaatttggagttaaattagggtttatgtcttttttttgtaatgcagccgtattagctttaaaagaaattaagattataaactcagagatagatggaaatgatattatatatcatgaccatattaacttaggtattgctttagctgcaccgcaaggccttttagtgcctgtaattaagcaagttgattcaaaatcatttgcagagattgaaaaagaaatatttaattttggaataaaagcaagagaaggtaatataactgccgatcaaatgaacggcgcaactttcactattactaatggaggaatttatggctctatgatgtctactcctatcttaaatcctcctccatcaggaatactag

SEQ ID NO: 235412 - DNA, 790 bp, Unknown
  Bacterial polypeptide expressing nucleotide sequence isolated from the Sargasso Sea
aaaagaatttgttcgatctcaagtaactgtcaacaaaggagcggtcgagaaaaaagaatataaagaagagttttctcacgaggaatttggtcagattgaaataaaggaaattcctagagtaaaaagattgtctggtccacacttagtaaggtcttggactgagattccacatgttactcaacatgatgaggtagacgtaactgagatggagcaatttagatcatcattatatgactattactccggtgatgttattaaagtaactcctttagcatttatagctaaggctttagtaagtgctttaaaagagttccctaattttaatgcttctattgattcaaatcaaaagaagattgtatataaaaaatattttcacataggttttgcggttgatactcctcatggattaatggtgcctaaaatcagggatgtggatcaaatgagtattaaagaaattggagaagctttaaaaaaaactagtaagctttgtagagaattgaagattgataaaaaagagttttttggtggttcaatgacaatctcaagtttgggagggataggtggaacattctttactccaataattaatccgccggaagtggctattcttggagtaggaaaaactttcgatagactagttaaaataaaagggaaaatagtttcaagaaaaatacttcctttatctttatcttacgatcatagattgattgacggagctgagggtgcaagattttgtgtttatttaggaaagtgccttggtaaagattttgcttttaaacttgccgtttaa

SEQ ID NO: 235413 - DNA, 532 bp, Unknown
  Bacterial polypeptide expressing nucleotide sequence isolated from the Sargasso Sea
ggttaaactagggtttatgtcattttttgtaaaagcttgctgtaaagccctagaagaagtacccgaggtcaatgcccaaatagatggggactacataatatacaagaaatacgtcaacatgggagtagcagtgggaacagataacggtttggttgtaccggttttaaaaaatgctgatgcaatgagcttctctgatatagaaaaggaaattaataagatgggcttactagcaagagatggcaagctatctatggcagatatgactggtggaactttcactatatctaacggcggtatatatggatctctaatgtcctcgcctattctaaattcacctgagtcaggtatacttggaatgcataaaattcaagaaagaccgatggctattgatggaaaaattgagatactgcctatgatgtatcttgccctgagttatgaccatcgtattgtagatggaaagggtgctgttacatttctagtcagggtaaaagaaaacttggaagatccccgtcgattgttgattgatctataa

SEQ ID NO: 235414 - DNA, 818 bp, Unknown
  Bacterial polypeptide expressing nucleotide sequence isolated from the Sargasso Sea
tttgggatccatatcagaaaatggaactggcacagtaaaaaaaaaacaaattaataaaactgaaagttcaccaaatgagaataatgttgtaaatcttgatattggtcagaaagaaataaaaatttttgataaaaaaattgaagatgaaatatcttctgatacgccattagttttgactaatgagattaaagaagaaaagaatttaaatgacaacaattatgctcataatttatctccagctgtgagaaaaatggttgttgataagaacatagatataaaaaatgtaaagggaactggaaaaaatggtagaatcttaaaaggtgacttaataaaccttatgggagaacagccacaaccatctgaaagaaaaattcaatatggtcaagaagaaagaattaaaatgaccagactaagacaaacaatcgcaaaaagattaaaacaggctcaagacaacgcagctttattaacaacatttaatgaagtcgatatgtcaggggtcatggaaatgaaaaaacaaaatcaagaggattttcaggacagatacggaataaaattgggatttatgtcatttttcgttaaagcttgtattgtagctttaaaatcatttccatccataaacgcagaaattgatggagaagatattatatataaaaattattataatataagttttgctgttggcacagataagggtttagtagttccagttttaaaaaatgctgacgagttatcttttgcaaatatagaaaaaaaaattaaagagatttcagaaaaagctagagagggaaaactaataattgaagatcttcaaggtggaa

SEQ ID NO: 235415 - DNA, 901 bp, Unknown
  Bacterial polypeptide expressing nucleotide sequence isolated from the Sargasso Sea
ttggttttaactgaggaagtaaaaccagatgttgctccaaaaagaaatgttaatccaaccttgtctccagcagtgagaaaaatagtaactgaaaataatatcgatattaattcaattcaaggttcaggaaaagatgggagagttttaaaaggagatttaataagtttgatgggtgcaaatccaaaaccatctgaaagaaaaattcaatatggtgaagaagaacgaattaagatgactaggttgagacaaactattgcaaaaagattaaagcaagctcaagagaatgccgctcttttaacaacatttaacgaggttgatatgagcagtgtgatggaaatgaggaaagaaaatcaagaggatttccaatctcgttatggaataaaattaggatttatgtctttctttgtaaaagcatgtgtagttgctttaaaaaatttccctgcggtgaatgctgaaatagaaggagatgagattatctataaaaactattacaatattagctttgctgttggaacagataagggtttggttgttccagttttgagaaatgcagatgaattatcctttgctgatattgaaaaacatattaaagaaatttcagaaaaagctcgagatggaaagctaacgattgaagatcttcagggaggaacatttacaataagtaatggaggcgtgtatgggtctatgctttcaactccaatactaaatttacctcaatctggagtgttgggcatgcataatatagtggaaagacctgttgttgtagacggtgaaatcaaaataagaccaattatgtatttagcattatcatatgatcacagaattattgatggaaaagaatctgtgtctttccttaaaatgattaaagaaaacttagaagaccctagaaggtttttttaga

SEQ ID NO: 235416 - DNA, 844 bp, Unknown
  Bacterial polypeptide expressing nucleotide sequence isolated from the Sargasso Sea
gaaccaatagtagaattagagactgataaagtaaatgttgaagtccctgcaccatcaaatggagttttaggaagcatagatgtgcaagagggtgaaacagttaatgtaggatctctattaggcactataagcaaaaatttagccaaagatactagtggctcaaatgaaatcaaaaattatagtccacccaaaaaaaaagataatgagaaaaatattaaactatttgataatgatcaaaaaacctctgaagctaaaaaaattaacaaaactaaaattgaaaaatcaattttaaaattagaggaagaaagcaaagaaactgaagaagagccattaattttagaaaaaattcatactgaaaaatcacaattaaaaaaaactaatcaaatacaaaaagaaacaataatttctccggctgcaagaaaaatggcaagtgaggccaatgtagatattaataaaatcacaggaacaggaaaaaatggaactattttgaaagaggatattttaaaattgatgggttctaaaccgcagccttcagagagaaaaattaaacatggtcccgaagagagagttaggatgacaaggttaaggcttaccattgcaaagagactaaaagaagctcaagaaaaagctgctatgttgactacttttaatgaagtagatatgagtgaagtaattttgatgagaaatcaatataaagacgaatttcaaaaaaattatggagttaaacttggcttcatgtccttttttgtaaaggcttgcgtaattggattaaagaactatcctgcaataaacgcagagattcaaggagaagaaatagtttataaaaattattataatattagta

SEQ ID NO: 235417 - DNA, 898 bp, Unknown
  Bacterial polypeptide expressing nucleotide sequence isolated from the Sargasso Sea
atgagcactgaattattagttccaacacttggagagtcaattacggaagcaactgtttcaaaatggcttaaggatataggcgataattttgaagcagatgaacctttagttgaaattgagacagacaaaattacagttgaagtaccagcacctcatgcaggctctctaaaagaaataaaagtttctgaaggcactgatgttgaaattggtggtattttaggaatcttagatgaatcaaaaggcaaaacaacaagtcctaaaaaaactgaaaataaagaagaaaaaataaaagaagaagtaaaagcagttaaggttgaaacaaaatcttcccctgccaaatcttcaccatctgcaagaaaaattgctgaagaaaataatattaaacttgaaaatgttatatcatcccgttctgatggaagaattaataaagaagatgtagtttctcatctttcttcttcaaataaaacaagcactaacaaaggtgaaagagaagaagttgttaaaatgtctaaaatcagacagacaatatctaaacgcttaaaggaggctcaaaatacagcagccctacttacgactttcaatgaaattgacatgtccaaagttatggaaattagaaaatcaaaaaaccaagaatttcaaagtcgttatgaagtcaaattaggtttcatgtcattttttgtaaaggcggtagtaaaaagtttgcaagagtatccagctgtgaatgctgaaattaaagatgaaaatataatttataaaaatcattttgatataggtatagctgttggaactgaaaaaggattagttgtaccaatacttaaagatgccgataaattgagttttggagaaaaagaaactaaaattattgatcttagtacaaaagccaaagatgaacgctgac

SEQ ID NO: 235418 - DNA, 948 bp, Unknown
  Bacterial polypeptide expressing nucleotide sequence isolated from the Sargasso Sea
agtttcaaatgggttaaaatctcaaggtgaaaaagtagtcgctgacgaacctattgttgaactagaaaccgataaagtaaatgtagaggtaccgtctccttctaatggagtcctcagatcaatagaggttaaagaaggtgagaccgttaatgtaggatcaatactagggacaattaacaataataataaaagtgaagttacagagcaaaaagaaataaagtcatatagtccaccaaaaaaacaaccaaaattatttgaggagaaaaaaaatcaagttgaaaagaaaaaagtcactaaaccgaaaattgaggatcaagttttgaaattagagaacgaggaaataaatgatgaacctttgatacttgaaaatgttcacgaagataagattgaaaacaaagagacatataaatcaaaacaagaagctaaagtttcaccagcagcaagaaaaattgcaagtgaacaaaaaattgatttagctgaagttaaaggtacaggtaaaaatggaattatcttgaaagaggatattatgaatttgatgggttctaaaccaactccctctgaaagaaaggttaagtatggacctgaagaaagagtaaaaatgaccagattaagattgacgattgctaagagactaaaagaagctcaggagaatgctgcgatgcttacaacttttaacgaggtagatatgagtgaagtaatttcaatgagaaatacttataaagaagaatttttgaataactatggagttaaactaggatttatgtctttttttgttaaagcttgtgtaattggtttaaaaaattttcctgcaattaattctgaaattcaaggagaggaaataatatataagaattattacaatattagtatcgctgttggcacagatagaggtctagttgtacctgtgctaagagagacagacgaaatgtcttttgcagaaattgagaa

SEQ ID NO: 235419 - DNA, 679 bp, Unknown
  Bacterial polypeptide expressing nucleotide sequence isolated from the Sargasso Sea
atgtcaaagatcagaaaaacaatcgctacacgtttaaaagaatcacaaaatactgccgcgatcctcacaacatttaatgaagtagacatgtcagaaataatgaaagtacgcgaaactaaaaaagaagactttatggagcgctatggagttaagcttggttttatgtctttctttgtaaaagcagttgtatcaagtcttcaagaatttcctgcagtaaatgctgagatacgcgatgaaaatattatttataaaaatcattttgatattggtattgctgttggaacagaaaaaggattagttgttccggtcctaaaagatgctgatgcaatgacttttggtgatatcgaacagaacattgttgagcttagttcaaaagcgaaagaaggtagcttaacgatggatgatttaagagggggcacctttacaatctctaacggtggtgtgtatggttctatgttaagtacccctattattaacagacctcaatcgggaattttggggatgcataatattcaaaaaagagccgttgttgttgatgacgaaatagttattcgcccaataatgtatttagcatttagttacgatcaccgtatcatcgatggaaaagagagtgttggatttttagtgagcattaaaagcctgcttgaaaacccatcaaaattaattttaggagtgtaga

SEQ ID NO: 235420 - DNA, 564 bp, Unknown
  Bacterial polypeptide expressing nucleotide sequence isolated from the Sargasso Sea
gagagcgacaacggccaagcgactggtagaagcgcagcataatgctgcgatgcttacgactttcaacgaggtcgatatgtccccggtgatggctttgcgtaagcaatatcaagaagagtttcaggcggctcataatggaactcgcctgggttttatgtccttttttgtgagggcggcaacggaatcgctgaaacgatttcctgcagttaatgcatcaatagacggaaatgacattgtttatcacggctatttcgatataggggttgcggtctctacagacagagggcttgttgtgccggtggtcagagaagctgatgcattaagtctggctcagatagaagatcagattaatgaatacggacaaaaggctcgggctggaaaactttctcttgaagaactctcaggaggcacatttacgatatctaatgggggtatttttggctcactaatgtcgactcctattttgaatgcgcctcaaaccggagttctgggtatgcataaaattcaggaacgaccagtggtagttgatggagagataatagttagaccgatgatgtatcttgc

SEQ ID NO: 235421 - DNA, 838 bp, Unknown
  Bacterial polypeptide expressing nucleotide sequence isolated from the Sargasso Sea
tttggttttaactgaggaagtagtgccaagcccagcaccagttagggagaatagaaatgatactttgtctcctgcggtcagaaaaattgtaaccgaaaataatattgatattggtttagttcaaggttcaggaaaaaatggtcaggttttaaaaggagatcttataagtttaatgggagcaaatccaaaaccgtcagagagaaaaattcaatatggtcaagaagaacgaattaaaatgaccagactaagacagacaattgctaagagattaaaacaagctcaagaaaatgctgcattgcttacaacttttaatgaagttgacatgacaaatatcattgaaatgagaaaagaaaatcaacaagactttcaaagcagatatggaattaaattaggcttcatgtcattctttgttaaagcatgtgtggtagccttaaagcatttccctgctgtaaatgctgaaattgatggtgatgaaatcatatacaaaaactattacaatataagttttgctgtaggcacagacaaaggtttagtcgttccagttttaagaaatgcagacgagctttcgtttgctgatatagaaaaaaatattaaagatatttcggaaaaagctaaagatggaaaattgacaattgaagatctacaaggaggaacatttactatcagtaatggtggagtgtatggctcaatgttatcaactccaattttaaacttacctcaatctggtgttctagggatgcataacattgtagagcgaccagtggttgtagatgctgaaataaaaataagacctattatgtatttagctctttcatatgatcacagaatcattgatggc

SEQ ID NO: 235422 - DNA, 592 bp, Unknown
  Bacterial polypeptide expressing nucleotide sequence isolated from the Sargasso Sea
tatgagcgaagttatttctatgagaaatgaatataaagaagaatttcaaagtaagtatcaagtaaaacttggctttatgtcattttttgttaaagcttgtgttataggattaaaaaattttccagctgtaaacgctgaaatacaaggggacgaaatagtttataaaaattattataatataagtatagctgttggaactgatagaggtttagtagtgcctgttctaagggaaacagatgaaatgtcatttgcagatattgaaaaaaatattggagaattaggagaaaaggcacgtaatggaaaaattactatagatgatctacagggaggaacttttactatcactaacggagggatatatggttctatgttatcaactccaatactaaatcctccgcagtcagctgttttaggaatgcataatataattcaaagaccagttgttgttaacggaaatgtagaagtaagatccgttatgtatttagctttatcttatgatcacagaataatagatgggaaagaggcagtttcttttttaaagatcgttaaagagtctttagaacaaccaaaaagactctttttaaatatataa

SEQ ID NO: 235423 - DNA, 865 bp, Unknown
  Bacterial polypeptide expressing nucleotide sequence isolated from the Sargasso Sea
cgcaagggaattaggagcgaacgtattagagatccctggttctcaaagatcagggagagtctcagaagaggatgtaaaagaatttgttcgatcacaagtaactgtcaataaaggatcagttgagaaaaaagaatataaagaagagtacgctcacgaagaatttggtcagattgaagtaaaagagatacctagagtaaaaagattatctggtcctcatttagttagatcttggactgaaatccctcatgttactcaacacgatgaagtagacgtaactgagatggaacaatttagatcatcattgtatgactattactctggtgatgttattaaagtaactccgttagcatttatagctaaggctttagtaagtgctttaaaagagttccctaattttaatgcttctattgatccaaatcaaaataagattgtatataaaaaatattttcacattggttttgcggttgatactcctcatggattaatggtgcctaaaatcagggacgttgatcaaatgagtattaaagaaattggagaagctttaaaaaaaactagtaagctttgtagagaattgaagattgataaaaaagagttttttggtggttcaatgacaatctcaagtttaggagggataggtggaacgttctttactccaataattaatccaccggaagtggctattcttggagtaggaaaaactttcgatagactagttaaaataaaagggaaaatagtttcaagaaaaatacttcctttatctttatcttacgatcatagattgattgacggagctgagggtgcaagattttgcgtttatttaggaaagtgccttggtaaagattttgcttttaaacttgccgtttaa

SEQ ID NO: 235424 - DNA, 862 bp, Unknown
  Bacterial polypeptide expressing nucleotide sequence isolated from the Sargasso Sea
agttaaagaaggtactgatataaatattggcggcattttaggtatattgaatgaaaacaaaggtgaaaaacaaggttcagctaaaatcaaggaacaaaacaacgaagtaaaatctaatattgataaagaaaaaaaagaaaatcttcaagtaggtgcaaattctaataaatcttctccatcagcaagaaaaatggcagaagaaaataatattagtattcagaatattaaatcatctagatctgatggaagaataaataaagaagatatagttaagcatattaattcttcattgaaagattcaaaagtatctagtgaaagagaagaaatagttaaaatgtctaaaattagacaaactatttcaaaaagacttaaagaagctcaaaacaccgctgcaatattaacaacttttaatgaagttgatatgtctcaaattatggaaataagaaattctaaaaataaagaatttcaagaacgatatgatgtcaaattgggttttatgtctttctttgttaaagctgtaacagaaactttaaaagaatttcctgcagttaatgcagaaattaaagatgaaaatattatttataaaaatcattttgatattggtattgcagttggaactgaaaaaggacttgtagttccagttttaaaagatgccgataaaatgaattttggagaaattgaaaagagtattattgacttgagcactaaagcaaaagatggaacattatctattgatgatttatctggaggtacatttacaatttctaacggtggagtttatggttccatgttgagcacccctattattaatagagcccaatctggtatacttggaatgcataatatacaaaaaagagctatt

SEQ ID NO: 235425 - DNA, 927 bp, Unknown
  Bacterial polypeptide expressing nucleotide sequence isolated from the Sargasso Sea
tttagttgacgagccacttgttgaattagaaaccgataaagtaaatgttgaagttccctctccgattagtggaatacttggcagtatttctgtgaaagagggtgaaacagtaaatgtaggctctttattaggaacagtagacagttcatccgttggcaagaaaaatattgccaaggaagtgaaagattataatccacctaaaaaagaaaaaaaagaaaccaaattaaaaatatttgaaaatgataaatcaacaaagcaagtcaaatttgaagaaccaactcttaagctggaagaggaggaaccattgatactagaggaaattcacgatgaaaaaactcaggcaacaaatgaaaaacaagtttcaccagctgccagaaaaatagctaacgaggctaaggttgatcttaataaaattcagggaacaggaaaaaatggggtgattttaaaagaagatgtcatgagtttaatgggctcaaaacctgctccatctgaaagaaaagtaaaatacggaccagaagaaagagttaagatgactagactaagattgactattgcaaaaagactaaaagaggcacaagaaaatgcagcaatgcttacaacatttaatgaagttgatatgagtgagattatagctatgaggaaccaacacaaagatgagtttcaattaaaatacggagtaaaacttggattcatgtccttttttgtaaaagcctgtgtaattggtctaaaaaattatcctgcgatcaacgcagaaattcaaggtgaagaaattgtttataaaaattattataatatcagtattgctgtaggtacagacagaggattggtggtccctgttcttagagaaactgacgaaatgtcatttgctgatattgaaaaaaatattggtgatttagggacaaaagccaaagatggtaaaattactat

SEQ ID NO: 235426 - DNA, 922 bp, Unknown
  Bacterial polypeptide expressing nucleotide sequence isolated from the Sargasso Sea
gctaaaagaagaagagcctttacttttaactgaggaagtagaaattgatgaaacatcacaacagccaattattctttcacctgctgtaagaaaaattgttacagaaaaaaatatcaacgtagataatgtaaaaggtacaggtaaagcgggaagaattttaaaaggtgatctaattaccatgatgggagccaacccacaacccaaccaaagaagaattcaatatggtgaagaagaaagaattaaaatgacacgtttaagacaaacaattgcaaaaagattaaaacaggctcaagacaatgcagcaatgttaactacttttaacgaagtagatatgtctgggattatggcaatgagaaaagataatcaagaagatttcaaaagcagatatgggataaagctgggtctaatgtcattttttgttaaagcttgtgtcgtaggattaaaattatttccagcaattaacgctgagattgaagatcaagacataatttataaaaattattataatattagtttcgctgttggaactgaaaaaggtttggtagttccagtgcttagaaatgcagatgagatgtcatttgctgaaatagaaaaagaaataaaaaaattatctgaaaaagcaaactcaggtagtttaacaattgaggacttacaaggaggtacatttacaattagtaatggaggtgtatatggttccatgctttcaacaccaatattaaaccctcctcaatcaggtgtattaggtatgcataatattgttgaaagaccagtaaatgataatggtgagataaagataaaaccaataatgtacttggccttgtcatatgatcatagaattatcgatggaaaggagtccgtgtcgttcttaaaaactgttaaagaaaatttagaggaccctagaagattattttttaatatttaa

SEQ ID NO: 235427 - DNA, 460 bp, Unknown
  Bacterial polypeptide expressing nucleotide sequence isolated from the Sargasso Sea
gcatcactagatgaagatgaagttatttaccatggatttcaggatattggtgttgctgtttcaacagaacgtggtcttgttgtaccagttgttagaggtgtgcaaaataaaaatatagctgaaatagaacaaagtattttggagctatcaaataaggcaagagagggaaatctttctatcgaagagatgactggcgggacatttacagtttctaatggtggtgtttttggatctctaatatctactccaattttaaatcctccccaatcagctattttaggtatgcataaaattcaagacagacctgtagcaataaatggtaccgtggtaattaggccaatgatgtatcttgcgttaacatacgatcatcgtttgctagatggcaaagatgctgtaacatttctagtaaaaatgaaagagtctttagaatcaccagagtcaatgattttaggagtataga

SEQ ID NO: 235428 - DNA, 332 bp, Unknown
  Bacterial polypeptide expressing nucleotide sequence isolated from the Sargasso Sea
aaaaaacatttctcttcttggtgaaaaagctaaagatggaaaaattacaattgaagatttgcaagggggtacttttacgattacaaacggaggtatttacggttcaatgctatcaaccccaatattaaaccctccgcaatcaggagtacttggtatgcacaatataattgaaagaccagttgctaaagacggcaatatagttgttcgacctatgatgtatttagctttgtcgtacgatcataggattattgatggcaaagaagcagtctcatttctaaagtctataaaagatttattagaagatcccaaaagactttttttaaatatttaaa

SEQ ID NO: 235429 - DNA, 895 bp, Unknown
  Bacterial polypeptide expressing nucleotide sequence isolated from the Sargasso Sea
agaaactgataaggtaaacgttgaagtaccctctccatcaaatgggatattagatagtatctctgcgaaagaaggagaaacagtaaatgttggagcattacttgggtcaattactcaaacaaaatcaactcctattagttctgaaaatgatcaagacgaaaaaaaatacactccaccgaaattagaaaagaataaaaaagaagaagctaacaacaaaactgaaaagtctgaaataaagaaaaaaaaacagattaaaccattagtccttaatgaagagacaaatcaaaaaatttttgatgcagatccacttattctagaagaagaaccattagtgttagatgagacatacaatgaaaataaaaaaacagaaaatattgagctgagaatttctccagctgctagaaaaattgcatcagagcaaaaaattgatattcattctattaaaggaagcggtaaaaatgggttagtcttaaaagaagacataatgagtctaatgggtgtaaaacctgcgccgtcagataggaagatcgctcatggcccagaagaaagaataaaaatgacgagactaagacttactattgcaaaaagattaaaagaggcgcaagaaaatgcagcaatgctcacgacctttaatgaagttaatatgcatgaagtaattcaaatgagaaataactataaagaagaattccaaaaaaaatactctgtcaaattaggttttatgtctttttttgttaaagcttgtataatcggtttaaaaaactatcctgcaattaatgcagaaatccaaggtgatgaaattgtttataaaaattactacaatattagtatagctgtaggtaccgataaaggcttagtagttccagttatcagaaattcagatgagctatcttttgct

SEQ ID NO: 235430 - DNA, 268 bp, Unknown
  Bacterial polypeptide expressing nucleotide sequence isolated from the Sargasso Sea
aggaggcacatttacgatatctaatgggggtatttttggctcactaatgtccactcctattttaaatgcgcctcaaaccggagtcctgggtatgcataaaattcaggaacgaccggtggtagttgatggagagatagtggttagaccgatgatgtatcttgcactttcctatgatcatcggctgatcgatggtcgtgaagcggtccaatttttagtagctatcaagggaatgatagaagatcccgcgagaatactgttggagttatga

SEQ ID NO: 235431 - DNA, 919 bp, Unknown
  Bacterial polypeptide expressing nucleotide sequence isolated from the Sargasso Sea
atgacagaaaaaattttagtacctgtactaggagaaagtataactgaagcaacagtttccaaatggttaaagcgcaagggtgatagcataaatgccgatgaacctgttgttgagttggaaaccgacaaagttaatttagaagtgccctctcctattaatggaacaatcactgcaattaattttaaagatggagatacagtagaagttggagctgtattaggtgaaattgaattaggacctgtagaagaaaaaaaggaagatagtaaaattgttaaaaaaacttcagaaaaaataaatgataatgtaataaattttgataaagaaaaaaatcaaccaaaaatttttgaagaacaaaaaaaagatgaaaaaccattaattcttaatgaagaaaaacctctagttttaaaaaaagaattatctagtaatcaaaaagttataacaaagaaaacattatctcccgcagtaagaaaaattgttgaagaaaataatattgatataaattctgttaaagggactggtaaatcaggtcaaattcttaagggtgatttaataaatttaatgggatctaccccacagccttcagaaagaaaactaaaatatggcgaagaagaaagaattaaaatgagtagacttagattaacaattgctaaaagattaaaagaagcccaagaaaatgcagctatgttaacaacttttaacgaagttaacatgtcaaatataattgaaatgagaaaaaataatcaagaagattttaaaaataaatttgggataaaactaggttttatgtcattctttgttaaagcatctattttgggattgaaagcatttcccgctattaatgcagagattgaagatcaagaaattatttataaaaattattataatataagttttgccgttggaactgaaaaaaggttta

SEQ ID NO: 235432 - DNA, 742 bp, Unknown
  Bacterial polypeptide expressing nucleotide sequence isolated from the Sargasso Sea
gatgggtgcaaatccaaaaccatctgaaagaaaaattcaatatggtgaagaagaacgaattaagatgaccaggttgagacagacaattgcaaaaagattaaagcaagctcaagagaatgccgctcttttaacaacatttaacgaggttgatatgagcagtgtgatggaaatgaggaaagaaaatcaagaggatttccaatctcgttatgggataaaattaggatttatgtctttctttgtaaaagcatgtgtagttgctttaaaaaattttcctgcggtgaatgctgaaatagacggagatgagattatctataaaaactattacaatattagctttgctgttggaacagataagggtttggttgttccagttttgagaaatgcagatgaattatcctttgcagatattgaaaaaaatattagagaaatttcagaaaaagcgcgagatggaaagctaacgattgaagatctccagggaggaacatttacaataagtaatggaggtgtgtatgggtccatgctttcaactccaatactaaatttacctcaatccggagtgctaggtatgcataatatagttgaaagacctgttgttatagacggtgaaattaaaataagaccaattatgtatttagcattatcctatgatcatagaattattgatggaaaagaatctgtatcttttcttaaaatgataaaagaaaacttagaagaccctagaaggttgtttttagatatttaa

SEQ ID NO: 235433 - DNA, 736 bp, Unknown
  Bacterial polypeptide expressing nucleotide sequence isolated from the Sargasso Sea
gaagttacacctcaaatttttgaaaaaccgatagagcaaaaatctaaaaaagtagaaaaaaaattaatattagaagaagttaaagaagagcctccactaattctttctgaagaggttaaaagtgataattatgtcgaagaaaaaattgtttctccttcagcaagaaaaattgcaaatgaaaagaatattgatctaagcaaaatcgcaggcacaggaaaaaatggagttattcttaaagaagatttgctaaacttaatgggatctaaacctgcgcctaataaacgaaaaataacccatggacctgaagaaaaaattaaaatgacaagattaagaatgacgatagcaaaaagattaaaagaggcacaaaataatgcagcaatgcttacaacttttaatgaagtggatatgtctaaagtaatacaaatgaaaaatgattataaaaacgagtttattaaaaaattttcaaccaaacttggttttatgtctttttttgtgaaagcttgcgttgcagcattaaaaaattttccagcaataaatgctgaaatacaaggagatacaatagtttacaaaaattattataatatcagttttgcggtaggtacagatagaggtttagtagtgcctgttcttagaagtccagacgaaatgtcttttgcagaaattgagaaaaatattttatctttaggtgaaaaggctagagatggtaaaataacaattgaagacttacagggaggga

SEQ ID NO: 235434 - DNA, 212 bp, Unknown
  Bacterial polypeptide expressing nucleotide sequence isolated from the Sargasso Sea
gatcctgaatgcgccgcagtcgggcatcctgggcatgcacaacatcgtccagcgcccgatggccatcaatggcgaggtcaagatccgcccgatgatgtacttggccctcagctacgatcaccgcatcgtcgacggcaaggaagccgtgaccttcctggtccgggtcaaggaactgctggaagatccggcgcgggccctgctggacctctgat

SEQ ID NO: 235435 - DNA, 787 bp, Unknown
  Bacterial polypeptide expressing nucleotide sequence isolated from the Sargasso Sea
tgaattaatagttccaacactcggagagtcaattacggaagcaactgtttcaaaatggcttaagaatataggcgataattttgaagcagatgaacctttagttgaaattgagactgacaaaattacagttgaagttccagcccctcatgcaggatctctaaaagaaataaaagtttctgaaggcactgatgttgaaattggtggtattttaggaatcttagttgaatcaaaaggcaaaacaccaagtcctaaaaaaactgaaaataaagaagaaaaaataaaagaagaagtaaaagaagttaaggttgaaacaaaatcttcgcccgccaaatcttcaccatctgcaagaaaaattgctgaagaaaataatattaaacttgaagatgtcacctcatcccgttctgatggaagaattaataaagaagatgtagtttctcatctttcttcttcaaataaaacaaccactaacaaaggtgaaagagaagaagttgttaaaatgtctaaaatcagacagacaatatctaaacgtttaaaagaggctcaaaatacagcagccatacttacgactttcaatgaaattgacatgtccaaagttatggaaattagaaaatcaaaaaaccaagaatttcaaagtcggtacgaggtcaaattaggtttcatgtctttttttgtaaaagcggttgtgaaaagtttgcaagagtacccagctgtgaatgctgaaattaaagatgaaaatataatttataaaaatcattttgatataggtatagctgttggaacggaaaaa

SEQ ID NO: 235436 - DNA, 715 bp, Unknown
  Bacterial polypeptide expressing nucleotide sequence isolated from the Sargasso Sea
atttcaagctctgaaagactttgagaaaagagtaccaatgtcacgcttaagatcgaccattgcaaaaaggcttgtttccgtgaaacaaaatacagcgatgttaacaacttttaatgaagtagatatgcatccaattaaagagcttagatcaaaatatggtgctgaatttgaagaagagcacgaagttaaattaggttttatgggtttttttgttatcgcagctgtccaagcattaaaaaaatatccggttgttaatgcttcaattgatggagatgatattgtctatcacggctttcaagatattggtgttgctgtttctactgatagaggcttggtcgttccaataattaaggatgctgatacaaagtcattaccagaaattgaaaagtctattttaacctactctgaaaaagctaggatgggaaaattatcaattgaagaaatgcaaggtggaacttttacaatttctaatggtggtgtttttggatctttgttatcgacgcctattttaaatgcgcctcaaaccgcaattttaggcatgcatgctatacaagatagaccagttgcaattaatggagaaatagctattagaccaatgatgtatcttgccatgagttatgatcatagattgttggatggcaaggaagcagttacttttttagtttctattaaggagcagcttgaatcaccagaaagactgttgctaaatttataa

SEQ ID NO: 235437 - DNA, 142 bp, Unknown
  Bacterial polypeptide expressing nucleotide sequence isolated from the Sargasso Sea
ggtgacatcgtgataaggccaatgatgtaccttgcgttgtcttacgatcatcgtattgtggacggtaaaggtgcagttacttttttggtaagggtcaaagaaagtttagaagatccgaatcgaatcttactaggggtataga

SEQ ID NO: 235438 - DNA, 829 bp, Unknown
  Bacterial polypeptide expressing nucleotide sequence isolated from the Sargasso Sea
tttagtagaattagaaacagataaagtaaatgtagaagttccctcaccaactagtggtgttctaggtagcatagctgttaaagaaggagaaactgtaaatgtaggttctttattaggaacagttgatagttctatatcaaataaagaaaataaagttaaagagttaaagaattatgacccacccaaaaaaaaggaagtgacagagccaagagtttttgaagaagaaaaaattgttaaaacaagaaaaaccaaatcaaaaaaatttgatgaacctgttctcaaattagaagaggaagagccattaattttagaagaagttcatcaagaaaaaaaaccctcaacacaaagaaaacaaatttctccagccgcgaggaaaatggctaacgaggcaaaagttgatattagcaaaatcgaaggatcaggaaaaaatggcgtaatcttaaaagaagatataatgagcttgatgggttctaaaccagcaccatctgaaagaaaaataaaatacggtccagaggaaagagttaggatgactaggctcagattaacaatcgcaaaaagattgaaagaagcacaagagaacgctgcaatgcttactacttttaatgaagttgatatgagcgaagtaatctcaatgagaagtcaatataaagatgaatttttaaataaatatggggttaaacttggatttatgtctttctttgtaaaagcatgtgtaattggattaaaaaattatccaacaatcaatgctgaaattcaaggtgaggaaatagtttataagaattattacaatatcagtatagctgttggtactgataggggtttggttgtt

SEQ ID NO: 235439 - DNA, 763 bp, Unknown
  Bacterial polypeptide expressing nucleotide sequence isolated from the Sargasso Sea
aaccatttagatactgaaaatcaagaagaaaacatttttacaagctcctctatcagtgaagatagaccagaaaagcgtgtgccaatgtcaagactaagatcaactattgctaaaagattggtttcagttaaacaagaaacagctatgcttactacttttaatgaggttgatatgatgcccattaaagaattaaggtcaaaatatggatcagaatttgagaaagaacatggggtaaaacttggttttatgggattttttgttatcgctgcagttcaagccttgaaaaaattcccagttgtaaatgcatccattgacggtgatgatattgtttatcatggttttcaagatattggtgtggcagtctctactgaaagaggtcttgtggttccaataattaaggacgcagatacaaaatcacttcctgagattgaaaaatcgatacttgaatattccgataaggcaagaaatggaaaattatcaatcgatgaaatgcaaggaggtacctttaccatttcaaatggaggtatatttggttcattgctttcaacgcctatcttaaatgcacctcagactgcaatattgggaatgcacgcaattcaagacagacctgttgcgataaatggcgaggttgtaataagaccaatgatgtatcttgctatgagttatgatcataggttacttgatggtaaagaagctgttacttttttggtatctattaaagaacagctcgaatctcctgagagattgttattaaatttataat

SEQ ID NO: 235440 - DNA, 829 bp, Unknown
  Bacterial polypeptide expressing nucleotide sequence isolated from the Sargasso Sea
aatgacagaaaaaattttagtacctgttctaggagaaagtattactgaagcaaccatttctaaatggttgaaaaataaaggtgataatattagcgctgatgagcctatagtggaactagaaacagacaaagttaatcttgaggttccatctccgattgatggtactcttacagaaattaactttaaagacggcgatactgtagaagttggagctgttttgggagaaatatcagaaggagctgttgatcaaaaaaaagaagatactaaaaatgttgagaagcctgaaaagaaaacatctgataatgtaattaattttgataaagaaaaaaaacaaaatccaaaaatttttgaaaatgaagaaaatgaaaataaggaagaaccattagttttaactgaagaaaaaccattaacgccaagtaaggaagaaccattagttttaacaaaagagatacctggtaaacaaaaaatagttagtgaaaaagtattatctcctgctgtaagaaaaattgtagaggaaaataagatcgatatacaatcaattaaaggaacgggaaagtctggtcaaattttaaaaggtgacttaattagtctaatgggatcaactcctcagccatctgaaagaaaattaaaatatggtgaagaggaaagaattaaaatgagcagattaagacaaaccatagcaaaaagattaaaagaggctcaagaaaatgcagctatgttaactacatttaacgaagttgatatgacaagtattattgaaatgagaaaaaataatcaagatgactttcagaaaagatttggaataaagcttggttttatgtcttttttt

SEQ ID NO: 235441 - DNA, 625 bp, Unknown
  Bacterial polypeptide expressing nucleotide sequence isolated from the Sargasso Sea
aaaaataaaatatggtcaagaagagcgtattaaaatgactaggttaagacaaactatagcaaaaagactgaaacaagcccaggagaatgcagctttacttactacttttaatgaagtggacatgacaaatataattaacatgagaaaacacaaccaggaagatttccaaagtcgatatggtatcaagcttggctttatgtcattttttgttaaggcttgtatagtagccttaaaaaattttccagctattaatgctgaaatagatggagatacaattgtttacaaaaattattataatataagttttgcagttggaacagataaaggtcttgtagttccagttttaaagaacgctgacgaactatcttttgcagatattgaaaaaaatattaaagaaatttctgaaaaagcaaaagacggaaaacttgtaattgaagatcttcaaggaggtacttttactattagcaatggtggagtttatgggtcaatgctttcaactccaattctaaacttgcctcaatctggagtattaggaatgcataatattgttgatagacctattgtagtggatggtgaaatcaagataagaccagtaatgtatttagctttatcttatgatcataga

SEQ ID NO: 235442 - DNA, 760 bp, Unknown
  Bacterial polypeptide expressing nucleotide sequence isolated from the Sargasso Sea
attaatagttcctactttaggtgaatccattacagaggccactgtttctaaatggttaaaaaaggttggcgagccttttaatgtagatgagcccttggttgaaattgagacagataaaattacagtagaagttccagcaccgcaggcaggatctttgtcagaaattaaagccaaagaaggtactgatattcaaattggtggtattttaggaattattggagattctaatagttcaaaaaaaattcaaactaatgaaataaaaaatattgaaccgaaaaaagaaaaaatagttgagcaaaatattagggaagataaaaaaataaatcaaaaaaataataaattatctccatcagtaaaaaaaatgcttgaagaaaataatcttgatgcaagttctgtgaaaacacaaagagatgatggccgaattacaaaagaggatattttaaatcatttagaaggaaaaaatacattaaaaaaacaaaaacctactgacagagaagaaatagttcctatgtctaaaattagacaaaccatagcaacacgactaaaagaatcacaaaatactgcagccatcttaactacctttaatgaagttgatatgtcagctatcatcgaaatacgagagagaaaaaatgatgattttaaagagcgttatggagtcaaattaggatttatgtctttttttgtaaaagctgtagtgatgagtcttcaagaatttcctgctgttaatgctgaaatacgcgaaaacaatattgtttacaaa

SEQ ID NO: 235443 - DNA, 838 bp, Unknown
  Bacterial polypeptide expressing nucleotide sequence isolated from the Sargasso Sea
aatgagcactgagttaatagttccaacacttggagagtcgattacggaagcaactgtttcaaaatggcttaagaatataggcgataattttgaagcagatgaacctttagttgaaattgaaactgacaaaattacagttgaagtacctgcccctcatgcagggtctctaaaagaaataaaagtttccgaaggaactgatgttgaaattggaggtattttaggaatcttagatgaatctaaaggtaaaaaaccaactactaaaaaaaatgaaactaaagaaaaaaaagtaaaagaagaagtaaaagaagttaaggttgaaacaaaatcttcacctgccaaatcttcaccatctgcaagaaaaattgctgaggaaaataatattaaactagaagatgtcacctcatcacgttctgatggaagaattaataaagaagatgtagtttctcatctttcttcttcaaataaaacaagcactaacaaaggtgaaagagaagaagtaattaaaatgtctaaaattagacagacaatatctaaacgcttaaaggaggctcaaaatacagcagccatacttacaaccttcaatgaaattgatatgtccaaagttatggaaattagaaaatcaaaaaaccaagaatttcaaagtcggtatgaagtcaaattaggtttcatgtcattttttgttaaagctgttgtaaaaagtttgcaagagtatccagctgtgaatgctgaaattaaagatgaaaatataatttataaaaaccattttgatataggtatagctgttggaactgaaaaaggattagtcgtaccaatacttaaagatgccaatcaatttgag

SEQ ID NO: 235444 - DNA, 918 bp, Unknown
  Bacterial polypeptide expressing nucleotide sequence isolated from the Sargasso Sea
tatgaatgaaaaaattttagttccagttctaggagaaagtataacagaagcaacagttgccaaatggttaaaaaatgtaggcgatacagttgaagctgatgaggctgttgtggaattagaaactgataaagttaacctagaagttccatcaccaataagtggaacagttggcgatattaagtttaaagatggagatgtagttaaagttggaacaattttaggatcaattcaaggtaatggaaaaaatactcaaacagaaattaaaaaaatagaaccagatataataattaacgactctgtaaatttagaaaaagagaaaaaagatgaggaaccattagttccagcttcagacgaggaaccattagttttatctacagatgatcagcctttagttttaaccgaggaaattgaagataaaaaagatacaaaaaaaccggtaaaatcttcaactctttcaccatctgtaagaaaaatagttgcggaaaagaatatcgatgtgaagtcagttgaaggcacgggtaaagatggaagaatatcaaaaggagatttattaaatttgatgtctgctacgccaaaaccaaatgagagaaaaattaaatttggcgaagaggaaagaattaaaatgagcagactaaggcaaacaatagcaaagagattaaaacaagcccagcaaaatgctgcaatactaacaacttttaatgaagttgatatgaccagtattaatgaaatgagaaaagaaaatcaggaagattttaaaaaaagatatggaaccaaattaggttttatgtccttctttgtaaaagcttgtattgtagctttgagatcttttccagcagtaaatgcagaaataagcggtgatgagatagtatataaaaattattataatattagctttgcagttggaacagataaaggttt

SEQ ID NO: 235445 - DNA, 385 bp, Unknown
  Bacterial polypeptide expressing nucleotide sequence isolated from the Sargasso Sea
ctggtagttcctgttttagaaaatcctgacgaaatgtcttttgctgatattgaaaaaaatattgtttctctgggtgagaaagcaagaaatggaaatattactatagaagatttacagggtggtaccttcactataactaatggaggaatatatggatcaatgctttctactccgatattaaatcctccacaatcaggagttctcggcatgcacaacataattgaacgaccagtagctattaatggatctgttgttattaggccaatgatgtacttagcattatcttatgatcatcgaataatagatgggaaggaagctgtttcattccttaaaaatgttaaagacctacttgaggaaccagaaaggctttttctaaacgtttaaa

SEQ ID NO: 235446 - DNA, 658 bp, Unknown
  Bacterial polypeptide expressing nucleotide sequence isolated from the Sargasso Sea
atagctaaaaacctaaaaaatgcccaaaacactgctgcaatgcttactacatttaatgaagtagatatgacaaatgttataaatttgagaaaaaagtataaagaaacttttttaaataaatataatgtaaaattaggatttatgtctttttttactaaagcatgtatagttgcgttgaaagaaataccggaggtaaactcagaaattcaagataataatattgtttacaagaataggtatgatatttcgattgcagtgggtactgataaaggtttgtatgtccctgtgttgaaaaatgcagataaattaacgtttgcggggattgaaaagaaaatattagaatatggaaaacttgcaaaagaaaataaaattactgcagaacacatgaaaggtggtacttttactatatctaacggcggtgtgtacgggtctatgttatcaactcctatattaaacccacctcagtcaggtattttaggtttgcataatatagttaagagacccattgtaattagtgaagagatagtaatacgacctgttatgtttattgctttaacctatgatcatagaattatagacggtagacaagctgtaacttttttagttagagtaaaagaaattatcgaaaatccagaggagttattatttagtatatgat

SEQ ID NO: 235447 - DNA, 919 bp, Unknown
  Bacterial polypeptide expressing nucleotide sequence isolated from the Sargasso Sea
atgtcagaaaaaattacagtccctaccttaggcgaatcggtaacagaagctacagtatctaaatggcttaaatcacaaggagataaagttatagctgatgaaccaatagttgagttagaaacagataaagtaaatgtagaggtcccagcgccatcaaatggagttctaggcagtatagcagttaaagagggagaaacagtgaatgttgggtctttgttaggtactataagtgaaagcttaaataaagaaactagtaaatctcaggatataaaaaaatataatcctccaaaaaaagaagttaataaagaatttaaattatttgacgaggatcaaacaaaatcaacaaccaaaatcaagaagcaagtaattgaggaacctgtattgaaactggaagaagaaagtattgatatagatgaggaaccattaatattagacgaggttcataaagaaaaaaaattagagaaaaaaataaatcaagttaaatcagaaactaaaatatctccagcagcgagaaaaatggcaaatgaagcaaaagtaaatattaatgaaattcaaggaactggcaaaaatggaataattttgaaagaagacataatgagtcttatgggatctaaaccttccccatcagaaagaaaaataaagcatggcccagaagaaagagtccgaatgacaaggttaaggcaaactattgctaaaagacttaaagaagcccaggaaaacgcagcaatgcttacaacatttaatgaagtggacatgagtgagattatctcaatgagaaaccagtataaagatgaatttcagaagaagtatggagttaaacttggttttatgtctttctttgtaaaagccatgtgtaattggtttaaaaaattatcctgcaataaatgcagaaattcaaggagacgaaatagtatataaa

SEQ ID NO: 235448 - DNA, 831 bp, Unknown
  Bacterial polypeptide expressing nucleotide sequence isolated from the Sargasso Sea
gatgagtgaaaaaatattagttcctgtattaggagaaagtttaaatgaagcaactgtttctaaatggttaaagagcaaaggagacattgtaaatgctgatgaagcagtagtggaacttgaaaccgataaagttaatttagaagttccagcttctgtgagtggagttttatcagaaattaattcaaatgaaggagatatagttcaagtaggaacagtgttaggcgtcatatcagacttaacaaataaaattgaaaaaataaaacctaaaaatattgaagcccaggaagataacaaaatatttagcacagatggaatagttaaagatcaaccagataataacaaagaaaaaaatattcaatcagaaccaacgatgctgaatgacgaggaaaagccattaattttaaacgaagaagaagcgccattaattttaagtgaagaagtagaaatagatgaaaaaaaaatagatgctccagcaaaagaaattaatttatctcctgcggttagaaaaattgtaactgaaaaaaatattgatattaatacaattcagggatcaggaaaagatggcagaatattaaaaggtgatataatttctttaatgggggaaaatccccaaccaaatcaaagaaaaattaaatttggacaagaagagagaattaaaatgacgagacttcgtcaaactatagcaaaaagattaaaggaagctcaagaaaatgcagccatgttaactacttttaatgaagttgatatgtcaggaataatatctatgagaaaagaaaatcagaaagattttcaaaataggtataacattaaattaggttttatgtctttttt

SEQ ID NO: 235449 - DNA, 762 bp, Unknown
  Bacterial polypeptide expressing nucleotide sequence isolated from the Sargasso Sea
ttgaagaggtaccaccagttattaataacattcagaaccaaacattatcacctgctgttcgaaaaattgttgctgaaaaaaatatagacttagctactgttcaaggctctggaaaagatggacgaattctaaaaggtgacttaataagtatgatgggaataaacccaaaaccttcagagagaaaaattcaatatggtcaagaagaaagaattaagatgaccagacttagacaaactattgctaagagattaaagcaagctcaagaaaatgcagctttactaacaacattcaatgaagttgatatgacaaatattatagaaatgagaaaagaaaatcaggaagattttcaatctaggtataatattaaacttggctttatgtcgttttttgtgaaagcatgtgtagttgccctaaagaattttccagcagtgaatgcagaaattgatggggatgaaatagtttacaaaaattattataatattagttttgcagttggaactgacaaaggtttagttgtgccagttttaagaaatgcagatgagttatcttttgctgatatcgaaaaaaatattaaagaaatttctgaaaaagctaaagatggaaagttagtaattgaagatcttcaaggaggaacatttacaataagtaatggtggagtttatgggtctatgctttcaactcctatattaaatcttccacaatcaggggttcttggtatgcataatattgtagataggccagtagtgtcgatgagaaattaaa

SEQ ID NO: 235450 - DNA, 854 bp, Unknown
  Bacterial polypeptide expressing nucleotide sequence isolated from the Sargasso Sea
agcaccagcatcagaaggtaaagaagtggaaatcaaagtacctgtactcccagaatcagttgcagacgcaacaattgctacatggcatgttcaaccaggagacgcagtaacgcgcgatcaaaacctggtagatatcgaaacagataaagttgttcttgaagtagtagctcaagaagacggtatcatgggcgacatcattaacgctgaaggcgatactgttcttggtgagcaagtaatcggctcagtaaaagcaggtggtgcacctgcagctcctgctgctaaagaagaggcggctcctgctgcagattcaactgatagctcagatgtattaactccatctgttcgtcgtttaattgctgaaaaaggactagatgcttctaaaatcaaaggaactggcaaaaatggtcgtgtaactaaagaagacgttgatacgttcttgaaagcaccggcaccatcagcgaagaaagcagaagctgctgctccagttgcgccaatgggtgatcgtactcaaaagcgtgttcctatgacacgtttacgtaaaacgattgctaaccgtcttctagaagctaaaaactctactgcaatgttaactacgtttaacgaagttaacatgaagccaatcatggaccttcgcaagcagtaccaagaagtattcgaaaaacgtcacggtattcgcttaggctttatgtctttctacgtgaaggcagttactgaagcacttaaacgcttccctgatgtaaatgcgtcaattgatggggacgacattgtctaccacaattactttgatatcagcattgctgtttctacacctcgtggtctagtaacaccagttcttaaagactgtgataagtaat

SEQ ID NO: 235451 - DNA, 829 bp, Unknown
  Bacterial polypeptide expressing nucleotide sequence isolated from the Sargasso Sea
attgttactgagaacaagatagatatcagttcagtcaaaggttcaggaaaagatggcagagttttaaaaggtgatttaattaatttgatggctgtcaatcctcctccatctgaaagaaaaataaaatatggtcaagaggagagaattaaaatgaccagattgagacaaactattgctaagagattaaagcaagcacaggataatgcagccttactgacaacatttaatgaagttgatatgtcaaatgtgatggcaatgaggaaagaaaatcaagatgattttcaaaatcgctatggtgtaaaattgggattcatgtcctttttcgttaaagcaagtatagtagcattgaaaaattttcctgcgataaacgctgaaattgaaggtgatacaattgtttataaaaactattataatataagttttgcagttggcactgaaaaaggattagtcgttccagttctaaaaaatgcagatgaattatcttttgctgatattgagaaaaatattagagaaatttctgaaaaagcaaaaaatgggaaattgacaattgaagatcttcaagggggaacttttaccatcagtaatggaggtgtttatggttcaatgctttcaacccctattcttaatcttccacaatcaggtgtcttaggtatgcacaatatagttgatagacccatcgtagtcgatggagaaattaagatcagacctataatgtacttagcattatcatacgaccatagaattgttgatggtaaagagtctgtttctttcttaaaaatgataaaagaaaatttagaggaaccaagaaggctatttttggatatttaaa

SEQ ID NO: 235452 - DNA, 559 bp, Unknown
  Bacterial polypeptide expressing nucleotide sequence isolated from the Sargasso Sea
taaagaatcattcaaggaaaaatatgaagtgaatttaggctttatgtcattttttactaaagcttgttgtattgctttaagtgactggccagctgttaatgctttattagatgaaaatgaaattgtttataatgactactgtgatatatctattgctgtttctactccaaaaggattagttgttcctgtaattagaaatgctgaaagtttaagtttcgatcaaatagaaaaagaaattattaggttagctacaaaagctagagatggaaaattatcaattgaagaaatgcaaggaggaacttttacaattactaatggtggtatttttggatctatgatgtctacaccaataattaattctcctcaatcagctattttgggcatgcacaatattgtgaaaagacctatggtagtaaatgatgaaataaaaattaagccaatgatgtatctagctctttcatatgatcatagaataatcgatggaagagaatcggttagttttttagtcagagtaaaggaattattagaagatccctctagattaatgttaaaaatttaa

SEQ ID NO: 235453 - DNA, 832 bp, Unknown
  Bacterial polypeptide expressing nucleotide sequence isolated from the Sargasso Sea
aaaattgaaaaagataatgaagtaaatacggatgataaagatgaagatattgaagtttttgatgaaattgttaaagaagaaaagccattagttctaactcaagaggtaaaagataaacctgctgaaattaagacaaaaattgatcaaacattatctccagcagtaagaaaaattgtaactgaaaataaaattgatattagctcagttaaaggatctggaaaagatggaagagtattaaaaggtgatttaattaacttaatgggagtaagcccacctccttctgaaagaaaaattaaatatggtcaagaagaaagaattaaaatgactagattaagacaaaccattgcaaaaagattaaaacaagcacaagataatgcagcgttactcacaacttttaatgaagttgatatgtccagtgttattgaaatgagaaaagaaaatcaagatgattttcaaaatcgttatggagttaaattaggttttatgtctttttttgtaaaagcatccatagtagcattaaaaaactttccagcaattaatgctgaaattgaaaacgatacaattgtttataaaaattattataatataagttttgcagttggtactgaaaaagggttagtcgtgcctgtactgaaaaatgctgatgaattatcatttgcagatattgaaaaaaatattaaagacatttcagataaagcaaaaaatggaaagcttacaattgaagatcttcaaggaggaacttttactataagtaatggtggtgtgtatggttcaatgctttcaactcctattcttaatttaccacaatcaggtgttctaggaatgcacaaca

SEQ ID NO: 235454 - DNA, 819 bp, Unknown
  Bacterial polypeptide expressing nucleotide sequence isolated from the Sargasso Sea
gttgatagttaatccatcagcaaaaaaaatgttagctgaaaatgatatgcaatcagaagagataattggcaccggtaaaggtggaagaataactaaggaagatgttcaacttgctgtagataatcgtaactcttcgactgatcaacaattagagccgcaaaattcttcaaatgaattatcttcacttacaaatttagatgatcacagactagaacgacgagttccaatgacaaggttaagagcaagggttgctgaaagattattaaatgctactcaaactactgctatgttaaccaccttcaatgaagtgaacatgcaacctattatagatattcgtacacaatataaagagcagtttgaaaaatcacataatggaacgcgtttaggttttatgtcattttttgttcgagcagcatcagaggcccttaagaggtttccagctgttaatgcatcaattgacggaactgatattgtctatcacggttattatgatattggagttgcagtatcaagtgatagaggtttagttgtgcctgtattgcgtgatgctgacgctatgagtatggctactatagagagtaaaattagagaattcggtgctaaagctgcagacggcaaactcagtattgaagatatgacgggagggacttttactattacaaatggtgggatatttggttctttaatgtcaacaccaatcttgaatcctccacaaacaggaattttaggaatgcataagattcaagatagaccaatggcggttgaaggtaatataaagatattacctatgatgaaccttgctctttcttacgaccatcg

SEQ ID NO: 235455 - DNA, 715 bp, Unknown
  Bacterial polypeptide expressing nucleotide sequence isolated from the Sargasso Sea
agaaaaattcaatattggtgaagaagaacgaattaagatgactaggttgagacaaactattgcaaaaagattaaaacaagcccaagagaatgctgctcttttaacaacatttaacgaagttgatatgagcagcgtgatggaaatgaggaaagaaaatcaagaggatttccagtctcgttatggaataaaattaggatttatgtctttctttgtaaaagcttgtgtggttgctttaaaaaatttccctgcggtgaatgctgaaatagaagaagatgagattgtctataaaaactattacaatattagctttgctgttggaacagataagggtttagttgttccagttttgagaaatgcagatgaattatcctttgctgatatagaaaaaaatattaaagaaatttcagaaaaagctcgagatggaaagctaacgattgaagatctccagggaggaacatttacaataagtaatggaggcgtgtatgggtctatgctttcaactccaatactaaatttacctcaatctggagtgttgggtatgcataatatagtggaaagacctgttgttgtagatggtgaaatcaaaataagaccaattatgtatttagcattatcatatgatcacagaattattgacggaaaagaatctgtatctttccttaaaatgattaaagaaaacttagaagaccctagaaggttgtttttagatatttaa

SEQ ID NO: 235456 - DNA, 887 bp, Unknown
  Bacterial polypeptide expressing nucleotide sequence isolated from the Sargasso Sea
aggatctgcagatcaaaaacaagaagatcataaaaatattgagaaacctaaaaagaaaacatctggcaatgtaattaattttgataaagaaaaaaaacaaagcccaaaaatttttgaaaatgaagagaaggaagaaccattagttttaactgaagaaaaaccattaacttcaaataaggaagaaccattagttttaacaaaagaaatatctaataaacaaaaaataatcagtgaaaaagtattatctcctgcagtaagaaaaattgtagaagaaaacaagattgatattcaatcgattaaaggaacaggtaagtctggtcaaattttaaaaggtgatttaattagtttaatgggatcagccccgcagccatccgaaagaaaattaaaatatggtgaagaggaaagaattcaaatgagcagactaagacaaactatagcaaaaagattaaaagaagcacaagaaaatgcagcaatgttaactacatttaatgaagtagatatgacaagtatcattgaaatgagaaaaaataatcaagaagattttcaaaaaagatttggaataaaacttggttttatgtccttttttgttaaagcttgtgtacttggattaaaatcgtttccagcaattaatgctgagatagaaggtcaagaaattatatataaaaattattataatattagttttgctgttggaactgaaaaaggtttagttgttccagtaataagaaatgcagatgaactatcatttgcagaaatagaaaaaaatataaaaataatttctgaaaaagctagagaaggaaaattaactattgatgatttacaaggtggaacatttacgataagtaatgggggcgtatatggctctatgctttcaacaccaattctta

SEQ ID NO: 235457 - DNA, 529 bp, Unknown
  Bacterial polypeptide expressing nucleotide sequence isolated from the Sargasso Sea
aaactggggttcatgtccttttttgtgaaatcgtgctgtcatgcgttgctagaaatccctgaagtaaatgcagaaattgatgagtcagaaataatttacaaaaaatacgttaatatgtcagtggcggttggtacacccactggattagttgcaccagtaattcgaaacgcagggtcaatgagctttgcacaaatagaaagagagcttgctaaacttagtgccaaagcccgagatggaaaattatccatcgaggagatgaaaggtggaacctttacgatctcaaacggaggtgtttatggatccctaatgtcatcgcctatcctaaaccctcctcaatcaggaatattagggatgcacaaaatccaggatagacccgtggttttaaatggagaaatagtaattaggcccatgatgtatttggctttaagttacgatcaccggatagtagatggaaaaggtgccgttacatttctagttcgagttaaggaaacgcttgaggacccacataggctgttaatggatctttagt

SEQ ID NO: 235458 - DNA, 913 bp, Unknown
  Bacterial polypeptide expressing nucleotide sequence isolated from the Sargasso Sea
taattttaaagatggtgacactgtagaagttggtgctgttctaggtgaaatatcagaaggacctggagaccaaaaacaagaggacaataaaaattttgaaaaacctaaaaataagacatctgataatgtaattaattttgaaaaagaaaaaaaacaaaatccaaaaatttttgaaaatgaagagaatgaagaaccgttagttctaactgaagaaaaaccattaacttcaaataaggatgaaccattagttttaacaaaagagatacctggtaaacaaaaaataattagtgaaaaagtattatctcctgcagtgagaaaaattgtagaagaaaacaagattgatatacaatcgattaaaggaacaggtaagtctggtcaaattttaaaaggtgatttaattagtttaatgggatcatccccgcaaccatctgaaagaaaattaaaatatggtgaagaggaaagaattaaaatgagcagactaagacaaaccatagcaaaaagattgaaagaagctcaagaaaatgcagccatgttaaccacattcaatgaggtcgatatgacaaatattattgaaatgagaaaaaataaccaagaagattttcaaaaaagatttggaataaaacttggttttatgtctttttttgttaaagcttgtgtacttggattaaaatcgtttccagcaattaatgcggagatagaaggtcaagaaattatatataaaaattattataatataagttttgctgttggaactgaaaaaggtttagtagttccagtaataagaaatgcagacgaactatcatttgcagaaatagaaaaaaatataaaagcaatttctgaaaaagctagagaaggaaaattaactattgatgacttacaaggtggaacattcacaataagtaatgggggtgta

SEQ ID NO: 235459 - DNA, 742 bp, Unknown
  Bacterial polypeptide expressing nucleotide sequence isolated from the Sargasso Sea
aatgggtgttaaaccgtctccatcagaaagaaaattaaaatttggagaggaagaaaagattaaaatgtctaggttaagaatgacaattgcaaaaagattaaaacaagcccaagaaaatgcagcaatgctaactacttttaatgaagtagacatgacaaacattatgaatatgagaaaagaaaatcaggatgattttcagcaaaaatttaaaataaaattgggtataatgtcattttttgttaaagcttgcgtagttggacttaagttatatccagcaatcaatgcagaaatagaaagtgagaacataatttataaaaattattacaatatcagttttgcggttggaacagagaaaggattggtggtgccagttttaaaaaacgcagatgaaatgtcttttgcagacattgagatgaatataaaaactctatctgataaggctagagatggaaaaattacaattgaagacctacaagggggaacattcacaattagtaatggaggcgtatatggttctatgttatctaccccaattttaaacttaccacaatcaggtgttttgggcatgcataatattgtaagtagaccatatgtaattaataatgaaattaaaattagaccaattatgtatttagcattatcttatgatcatcgtataattgatggaaaagaagcggtctcatttttaaaaactgtcaaagaaaacttggaggatcctagaagattatttttaaatttataa

SEQ ID NO: 235460 - DNA, 470 bp, Unknown
  Bacterial polypeptide expressing nucleotide sequence isolated from the Sargasso Sea
agcggtgaacgccgaaatcgacggcaccgacatcatctacaagaactactataatattggggttgccgtcggcacgccacagggactcgtcgttccagtggtgcgggacgccggcggcctcggcctcgccgagatcgagacccgcatcgctgacttcggcgaccgcgcccgcaacggcaagatcacgccggatgacatggccggcggttccttcaccatctccaatggtggcgtctacggctcgctgatgtcgacgccgatcctgaacccgccacagagcggcattctcggcatgcacaagattgagaaacgccctgtcgtgatcgatgacgcaatcgtgattcggccgatgatgtatctggcgctttcctatgaccaccggatcatcgacggacgagaggcggtctccttccttgcccgcatcaaggaacttgtcgaggacccgcggcggatcgttcttggcgtctgat

SEQ ID NO: 235461 - DNA, 679 bp, Unknown
  Bacterial polypeptide expressing nucleotide sequence isolated from the Sargasso Sea
aatgaccagattaagacaaactattgctaagagattaaaacaagcacaggataatgcagccttactcacaacatttaatgaagttgatatgtcaaatgtaatggcaatgaggaaagaaaatcaagatgattttcaaaatcgctatggtgtaaaattggggtttatgtcctttttcgttaaagcaagtatagtagcactaaaaaatttcccagcgataaacgctgaaattgaaggtgatacaattgtttataagaattattataatataagttttgcagttggcactgaaaaaggattggtagttccagttctaaaaaatgcagatgaattatcttttgctgatattgaaaaaaatatcaaagatatttctgaaaaagcaaaaaatggaaaactcacaattgaagatcttcaagggggaactttcaccatcagtaatggaggtgtttatggttcaatgctttcaacccctattcttaatcttccacaatcaggtgtcctaggtatgcacaatatagttgatagacctattgtagttgatagagaaattaagatcagacctataatgtacttagcgttatcatacgaccatagaattgttgatggtaaagagtctgtttcctttttaaaaatgatcaaagaaaatttagaggaaccaagaaggctatttttggatatttaa

SEQ ID NO: 235462 - DNA, 931 bp, Unknown
  Bacterial polypeptide expressing nucleotide sequence isolated from the Sargasso Sea
tttgttgaaccctcaaaaccagtcactgataatcaatttgtagataaagatttagatcgtaattcaaatactgagaaaatcatctctgacaaagccaataattctactccttctcctgctgcatcaaaaattcttagtgaaaagggtataaatccactagatttaattggttctggaagaggtggaagaattattaaagaagatgctcttaaggcgttgccaaaaattgatgaaagtttgatttctaaggggagaaaaacagagcgcaagaaattatcaatgcttaggagaaagctttcacaaaggttagttgcagttaagaatcagacagccatgctaacaacctttaatgaggttaatatgactccaatttttcaaataaaaaaagaatacaaggaaatctttaaagaaaaacatggtgtcagtttgggttttatgagtttttttacaaaagctgttgttaatgcactcagggaatttccagatgttcactcaatgattgatgaagaccacaaactcagctttgatttttatgatattagtattgcagtctcgggtccaaagggtttactagttcctgtagttaaaaatgctgataagcttgcttttagtggcattgaaaaagaaataaagcgtttggcattaaaggcacgagatggtgaaatgtccatagaagatatggagggtggaacttttactatatcaaatggaggtgtgtttggctcaatgttgtcaactccaattcttaatccacctcaatcctctattttaggaatgcacaatattattgaaagaccaattgcagttaatggtaaagttgaaatacatccaatgatgtacttggcattgagttatgatcacaggataattgacggaaaagaatcagttggatttttacttaaaataaaagaagcttttagaaaatccaatt

SEQ ID NO: 235463 - DNA, 916 bp, Unknown
  Bacterial polypeptide expressing nucleotide sequence isolated from the Sargasso Sea
actgaagaaaaagtaaccaagacacctgagaaagtaaaaaatcttactgaaaatagtactctaaaagtagaagaaaaaaaaaacgtaaacaaaaataatgaaatcaaaatttttgatgaagaaaaaaaagcagaaaagcctttggttttaactaatgctattaatgaagaaaaagaggagagccaaactctttctcccgcagtgagaaaaattgtatctgaaaaaaaaattgatatttcatcaattaagggctcaggaaaggatggaagaattttaaagggagatcttataaatttaatgggagtatctccacaacctaatgaaagaaaaataaagtttggtcaagaagagagaattaaaatgacaaggttgagacaaactatagcaaaaagattaaaagaagcacaagaaacagctgctatgttaactactttcaatgaagtagatatgactaatataatcaacattagaaaggataaccaagaagattttcaatctagatataatattaaactaggatttatgtctttttttgttaaagcatgtgtggttggtcttaagctttttccagcaataaacgctgaaattgagggagacgacatagtttacaaaaattattacaatatcagttttgcagtaggtacagataaaggtttagttgttccagtgctaagaaatgcagatgaaatgtcgtttgcggatattgaaaaagaaattaaaagactttcagataaagcaaaaaatgggactttagcaattaatgatcttcaaggaggcactttcactataagtaacggaggagtttatggctcaatgctttcaacgccaattttaaatcctccacaatcaggtgtattgggtatgcataatattgtggaaagaccagtggttcaaaataatgaagttagtataaagc

SEQ ID NO: 235464 - DNA, 841 bp, Unknown
  Bacterial polypeptide expressing nucleotide sequence isolated from the Sargasso Sea
aatggagctattaaaagaagagcctttacttttaactgaggaagtagaaacagaagaaaccccacaacagccaattattctttctcctgctgtaagaaaaatcgttacagaaaaaaatatcaacttagataacgtaaaaggaacaggtaaagcaggaagaattttaaaaggtgatcttattagtatgatgggtactaacccacaacctaatcagagaagaattaaatatggtgaagaagagagaattaaaatgacacgtttaagacaaacgattgctaaaagattaaaacaagcacaagaaaatgcagcaatgttaactacttttaatgaggtagatatgtctgggattatgacaatgagaaaagacaaccaagaagatttcaaaagtagatatggaattaaattaggcttaatgtcattttttgttaaagcttgtgtcgtaggactaaaattgtttccagcaataaacgctgaaattgaagatcaagatataatttacaaaaattattataatataagctttgctgttggaaccgaaaaagggttagtagttccagtactaagaaatgcagatgagatgtcgtttgctgatatagaaaaagaaattaaaaaattatctgagaaagcaaacgaaggtaacctaacaattgaggacttacagggaggtacctttactataagtaatggaggtgtgtatggttctatgctttcaacaccaatattaaatccacctcaatcaggcgtattaggaatgcataatattgttgaaagaccagtaaatgacaatggtgaaataaaaattaagcctataatgtatttggctttgtcatatgatcataga

SEQ ID NO: 235465 - DNA, 795 bp, Unknown
  Bacterial polypeptide expressing nucleotide sequence isolated from the Sargasso Sea
gttgaaaaacgcaggtgatacagtcgaagcagatgaaccaattgtagaacttgagacagacaaagtaaacttagaagtaccatctccaatttctggtgtgttaacagagataaattcacaagatggatcagtcgttgaagtaggagcattattaggttctgtatcagccgaaggtggaacagtggttaaatctgcgccgaaaatcagtgaagaaattaagaaagaggaaatttttcctgcagagagcaatgtaataaaattagatgcaaataaaaaagaaccaaaagtatttgaagaaaaacccaaagagaaacctttggttttaactgaggaagttaaaccagatgttgctccacaaagaagtgttaatacaaccttgtctccagcagtgagaaaaatagtaattgaaaataatattgatattaattcaattcaaggttcagggaaagatgggagagttttaaaaggagatttaataagtttgatgggtgcaaatccaaaaccatctgaaagaaaaattcaatatggtgaagaagaacgaataaaaatgactaggttgagacagactattgcaaaaagattaaagcaagctcaagagaatgctgctcttttaacaacatttaacgaagttgatatgagtagtgtaatggaaatgaggaaagaaaatcaagaggatttccaatttcgttatggaataaaattaggatttatgtctttctttgtaaaagcatgtgtagttgctttaaaaaatttccctgcagttaatgctgaaattgatggtgacgagataatata

SEQ ID NO: 235466 - DNA, 772 bp, Unknown
  Bacterial polypeptide expressing nucleotide sequence isolated from the Sargasso Sea
gaaaagggtataaatccactagatttaattggttctggaagagatggtagaattactaaagaagatgcccttaaggctttgccaaaaattgatgaaagtttgattgctaaggggagaaaaacagagcgcaagaaattatcaatgcttagaagaaagctttcacaaaggttagtcgcagttaagaatcagacagccatgctaacaacctttaatgaggttaatatgactccaatttttcaaataagaaaagaatacaaggaaatctttaaagaaaaacatggtgtcagtttgggttttatgagtttttttacaaaagctgttgttaatgcactcagagaatttccagatgttcactcaatgattgatgaggatcacaaactctgctttgatttttatgatattagtattgctgtctcgggtccaaagggtttattagttccggtagttaaaaatgctgataagcttacttttagtggcattgaaaaagaaataaagcgtttggcaataaaggcgcgagatggtgaaatgtcaattgaagacatggagggtggaacttttactatatcaaatggaggtgtgtttggctcaatgttatcaactccaattctcaatccacctcaatcatctattttaggaatgcataatataattgaaagaccaattgcagtcaatggtaaagttgaaatacatccaatgatgtacttggcattgagctatgaccacaggataattgacggaaaagaatcagttggatttttactaaaaataaaag

SEQ ID NO: 235467 - DNA, 590 bp, Unknown
  Bacterial polypeptide expressing nucleotide sequence isolated from the Sargasso Sea
gtctcaaattatggaaataagaaattctaaaaataaagaatttcaagagcgatatgatgttaaattaggttttatgtctttctttgttaaagctgttactgaaagtttaaatgaatttcctgcagttaatgcagaaataaaagatgaaaatattatttataaaaatcattttgatattggtattgcagttggaactgaaaaaggacttgtggttcctgttttaaaagatgccgataaaatgaattttggagaaattgaaaagagtattattgacttaagtactaaagcaaaagatggaacattatcaatggatgatctatctggaggcacatttacaatttctaacggtggagtttatggctctatgcttagcactcctattattaatagaccacaatctggtattcttggaatgcataatattcaaaaaagagcggttgtagttgatgatgaaattgtaattagaccaatgatgtatgtagcattaagttatgaccatagaattattgatggaaaagaaagtgttggttttttaataagtgtgaaaaaattattagaaaatccatctcagttagttttaggaatttaac

SEQ ID NO: 235468 - DNA, 503 bp, Unknown
  Bacterial polypeptide expressing nucleotide sequence isolated from the Sargasso Sea
caccaaagcctgtactgaagctttggaattgttccctgccgtgaatgcacgaattgaaggtaatgagatagtttttcatgattatgttgacatgggtattgcggtcagtgcaccaaaaggtttgatggtccctgtggtgcgcaatgcggaatccctttctcttgcgcagatcgaggttgaaatagcaagacttgcgaaacgtgccagagaaaacatactgagcattgacgaaatggaaggtggaaccttttcaatcacaaacggaggagtttttggatcaatgctttctacaccaattataaatccacctcaaagtgccatcctaggtatgcacaatattgttgagagaccaatggcagttgatggaaaaattgagataaggccagtaatgtttgttgctttgtcatacgatcaccgtgttatcgatggacaacagtcagtaagttttcttgttaaagttaaagaaaatctggaaaatcctgcaagaatgcttctgagttgaa

SEQ ID NO: 235469 - DNA, 754 bp, Unknown
  Bacterial polypeptide expressing nucleotide sequence isolated from the Sargasso Sea
agatgttttagaacatttagataattcatcaaaaaataataataaacaaagtgtgggaaaagaagaagttgttcccttgtctaaaattagacgcacaattgcaattagattaaaagaagcgcagaatactgcagctattctgacaacatttaatgaagttgatatgtctgaaataattaatgtacgagaagcaaaaaaagaagattttataaaacgctacgatgtcaaacttggttttatgtcattttttgtcaaagctagtgtaatggcactacaggagttttctgctgtgaatgcagaaattcgagatgacaacattatttacaaaaatcattatgatatcgggatagctgttggcactgaaaaaggtcttgtcgtacctgttttaaaaaatgcagataaaatgactttcggagatattgaaaaacaaattaatgaattaagttcgagagcaaaaaaaggaacattaacgatggatgatttatcgggcggaaccttcactatttcaaatggaggtgtttatggttcaatgttaagcacacccattattaatcgtcctcaatcaggcatattaggtatgcacaatattttaaaaagagctgtagttgtggaggatgaaattgtcataagacctatgatgtatttagcttttagttacgatcaccgaattattgatggcaaagagagcgttggttttcttgtaaaaattaaagaagtgttagaaaatccatcttcaattattcttggagattaa

SEQ ID NO: 235470 - DNA, 788 bp, Unknown
  Bacterial polypeptide expressing nucleotide sequence isolated from the Sargasso Sea
aatgagcactgaattaatagttccaacacttggagagtcaattactgaagcaactgtttcaaaatggcttaagaatataggcgataattttgaagctgatgaacctttagttgaaattgaaactgacaaaattacagttgaagtaccagcccctcatgcaggatctctaaaagaaataaaagtttctgaaggcactgacgttgaaattggaggtatcttaggaatcttagttgaatcaaaaggcaaaacatcaagtcttaaaaaaactgaaactaaagaggaaaaagtaaaagaagaagtaaaagaagtaaaagaagttaaggttgaaacaaaatcttcgcctgccaaatcttcaccatctgcaagaaaaatagctgaagagaacaatattaaacttgaagatgttacctcatcccgttctgatggaagaattaataaagaagatgtagtttctcatctctcttcttcaaataaaacaaccactaacaaaggtgaaagagaagaagttgttaaaatgtcaaaaatcagacagacaatatctaaacgcttaaaggaggctcaaaatacagcagccatacttacaactttcaatgaaattgatatgtcaaaagttatggaaattagaaaatcaaaaaaccaagaatttcaaagtcggtatgaggtcaaattaggtttcatgtcattttttgtaaaagctgtagtaaaaagtttgcaagagtatcccgctgttaatgctgaaattaaagatgaaaatataatttataaaaaccattttgatataggtatag

SEQ ID NO: 235471 - DNA, 700 bp, Unknown
  Bacterial polypeptide expressing nucleotide sequence isolated from the Sargasso Sea
ttggaagaagagaatagtagcaaagagttaaaagaggaaccactagttttaacaaacgaaatagaaaacagtcataaagacgaaaattttactaaggaaagtcaaacattatctccagcagtaagaaaaatggtagatgaaaacaatattgacgttaagtcagtaaaaggatctgggaaagatggtcgaatactaaaaggtgatttaataagtttaatgggagttaatcctccaccttcagaaagaaaaattaaatatggtcaagaagagcgtattaaaatgactaggttaaggcaaaccatagcaaaaagactcaaacaagcccaggagaatgcagctttacttactacttttaatgaagtggacatgacaaatataattaacatgagaaaagaaaaccaagaggatttcaaaagccgatatggtaccaagcttggcttcatgtcattttttgttaaggcttgtatagtggccttaaaaaattttccagctgttaatgctgaaatagatggagacacaattgtttacaaaaattattataatataagttttgcagttggaacagataaaggtcttgtagttccagttttaaagaacgcggatgagctatcttttgcagatattgaaaaaaatattaaagaaatttctgaaaaagcaaaagacggaaaacttgtaattgaagatctccaaggaggcactt

SEQ ID NO: 235472 - DNA, 619 bp, Unknown
  Bacterial polypeptide expressing nucleotide sequence isolated from the Sargasso Sea
catgctgaccaccttcaatgaagtcgatatgcagcagatttttgacttgaggggagagtacaaggattcttttgaaaagaagcacggagtccgtcttggattcatggggttttttgttaaagcctgctcacaagcacttggagaattttctgcagtgaactcacagatcgaaggtgatgaaatcgtcacttatgattatgtggacatggggattgcagtgagtgctccaaaaggcttgatggtgcctgtgatccgaaatgctgaaactagaagtatcgctgaattggaaacggaaattcgaagattggctgctagggccagagataatcaactgagtctcgaagagatggaaggcggaaccttctccattaccaatggcggcgttttcggctccatgctttcgacacccatccttaatcctccccaggcagcgattttgggaatgcacaacattgtcgagagacctatggccgtcaatggagaagtcaaaatccgaccggtgatgtatttagccctttcctatgaccatcgtttgatcgatggacagcaatcggtcagttttttagttcgagttaaagaactcctggaaacacctgccagaatgatgttgggagtttaa

SEQ ID NO: 235473 - DNA, 265 bp, Unknown
  Bacterial polypeptide expressing nucleotide sequence isolated from the Sargasso Sea
accgtcaccttttcaaagaaaaattcagcatggacctgaagaaagaattaaaatgacaagattgcgattaactatcgccaagagattaaaagaagcccaagaaaatgccgcaatgcttactacttttaatgaagtagacatgagtgaagtaattgcaatgagaaatcaatataaagaggaatttcaaaataaatattctgtcaagttaggatttatgtctttttttgtaaaagcttgtgtaattggattaaaaaatttccctagc

SEQ ID NO: 235474 - DNA, 813 bp, Unknown
  Bacterial polypeptide expressing nucleotide sequence isolated from the Sargasso Sea
aaaaaaattatatctgaaaaaaatattgatccagaaaatataaacgcatctggtaaaaataatactattacgaaggcagatgtaattaatcatttagaaactaaaggcattgataaggaaaatcataatattttttctgaaagtataacttcaggtgaggataggcctgaaaaaagagttccaatgtccagactcagatctactattgccaaaaggttagtatcagttaaacaagaaactgcgatgttaacaacatttaatgaagttgatatgctacctattaaagaacttagagcaaaatatggtgctgaatttcaggaggagcatgatgttaagcttggttttatgggattctttgtaattgcagcagtacaagctctaaaaaaattcccagtagtcaacgcatctattgatggaaatgatgttgtatatcatggttttcaagacataggagtagctgtatctacagaaagaggcttagtagttccagtgataaaagatgcagatactaaatctttgcctgaaattgaaaaagcaatattaagttactctgataaagcaagaaatggaaagttgtctattgatgaaatgcagggaggtacatttactatttcaaatggtggaatttttggctctttgctctcaacgccaattcttaatgctccgcaaacagcgatattaggaatgcatgcgattcaagatagaccagttgcaattaatggagaagttgttataagacccatgatgtatttagcaatgagttatgatcatagacttttagatggcaaagaagccgtaactttcttagtgtct

SEQ ID NO: 235475 - DNA, 754 bp, Unknown
  Bacterial polypeptide expressing nucleotide sequence isolated from the Sargasso Sea
catgcagacagaaattattgttcccacgctgggcgaatccgtcaccgaggcgacggtcgcaaagtggtttaaggccaagggcgatatcgttgcccaggacgaaccgatcgttgaattggaaactgacaaggtcacgctggaagtaaatgccagcgcggctggaacgttgagcgagatcgccgcttacgaaggtgacaacgtcgaagtcggtgccctcctgggcatgatcggcgatggcgctgccgcgccggccaataaggaagagccagcgcccaagaaagaaaatgccgccccgaagaaagagaagaaggccaaggaagcgcctgcgggcgacgatgacagcggcaagctgtcccccgccgttcgcaagctgttgggtgaaaacgagctcgatccgtctcaaatcaccggcaccggtaaagacggccgtcttacgaagggcgatgttttgctgttcatgaaggaaaacgacagcgccggggccgtaaaagcggactcggcgcccaccgccgctgcacccgctccgtccgaaccccgtccggaagatccgcgggaagagcgggtgaagatgacccgcttgcgccagcgaatctcagaaaggctaaaagaagcccagaacacggctgccatgctgactacattcaacgaaatagacatgacgaacgtgatggcgacacgtaagaaatttcaggacgatttcgaaaaacgccatggctgccgtctcggcttcatgtcgttcttcgtcaaggcctgc

SEQ ID NO: 235476 - DNA, 606 bp, Unknown
  Bacterial polypeptide expressing nucleotide sequence isolated from the Sargasso Sea
taaacgaagttgatatgagtagcgtaatggaaatgaggaaagaaaatcaagaggatttccaatctcgttatggaataaaattaggatttatgtctttctttgtaaaagcatgtgtagttgccttaaaaaatttccctgccgtgaatgctgaaatagatggtgatgagattatctacaaaaattattataatattagttttgctgttggaacagacaaaggtttggttgttccagttttaagaaatgcagatgaattatcctttgctgatatagaaaaaaatattaaagaaatttcagaaaaagcacgagatggaaagttaactattgaagatcttcagggaggaacatttacaataagtaatggaggtgtgtatgggtctatgctttcaacaccgatactaaatttacctcaatctggtgtgttaggtatgcataatatagtggaaagacctgtcgttatagatggtgaaattaaaataagaccaattatgtatttagcattatcttatgatcatagaattattgatggaaaagagtctgtatctttccttaaaatgattaaagaaaacttagaagaccctagaaggttgtttttagatatttaaa

SEQ ID NO: 235477 - DNA, 755 bp, Unknown
  Bacterial polypeptide expressing nucleotide sequence isolated from the Sargasso Sea
ccctaaaaaagaaaaagagaaaattcaaccaaaagtttttgaagaggaaaaaattacaaagccaagaaaaataaaagcgaaaaaaacagaagaaccaattctaaaattaaaagaagaagaaccattaattttagaacaagttcatgaagaaaaagaagcacaaaaaattgaaaaacaagtttctccagcagcaagaaaattggcaaatgaaaataaggtaaatttaagcaacgtagaaggaacaggcaaaaatggtgtgattttaaaagaggatataatgagcttaatgggatctaaacctgccccatctgaaagaaaaattaaatatggcccagaagagagagttaaaatgacaaggttaagattgactattgctaaaagattaaaagaggcgcaggagaacgcagcaatgcttacaacttttaacgaaattgatatgagcgaagtaatgtctatgagaagccagtataaagaggagtttaagagtaaatatcaggtgaagctcggttttatgtccttttttgtaaaagcttgcgtgatcggactaaaaaattacccatcaataaatgcagaaattcaaggagaagagattgtttttaaaaattattataatattagcatagcggttggaacagatagaggtttagtagtgccagttctaagagaaactgacgagatgtcatttgctgacatcgaaaaaaacattagtgatctcggccaaaaagcacgtgacggaagaattactattgaagatt

SEQ ID NO: 235478 - DNA, 846 bp, Unknown
  Bacterial polypeptide expressing nucleotide sequence isolated from the Sargasso Sea
attgatacttaccaatgaagttaaaaatggcaaatcaaacttacatttatcacctgcagtaagaaaaatcattaaagagaaaaaaattaatcctgaagaaattaaaggatctggaaaaaatggaattattttgaaaagtgatctcctgaatttaatgaacaaaataccaaaacctaatcaaagaaagattaaatatggacctgaggagcgtattcaaatgtctagattaaggcaaacaatagcaaaaagattaaaatctgctcaagaaaacgctgctatgcttaccacatttaatgaagttgatatgactaatgttatgaatttaagaaatgaaaaacaagaggaattcaaaaataaatttggaatcaaattagggtttatgtctttttttattaaagcctcaattaaaagcctcaaattgtatccagcaattaatgctgaaatagaaggtagtgatattatttataaaaactattttaatattagttttgctgtaggaacggaaaagggactagttgtacctgtaataagaaacgctgatgaattatcttttgcacaaatagaaatggaaattaaaaatttgtcagataaagcaaataatacaactttaacaatcgaagatttacaaggcggaacatttacaattagcaacggtggaatatatggatcaatgctttcaacccctatacttaatcctccacagtcaggagttttgggtatgcataatattgttgaaagagctgttgtgattaatggtgaaattaaagtcagaccagtaatgtatttggctttatcgtacgatcatagaattatagatggtaaagaggctgtatcatttttaaaaga

SEQ ID NO: 235479 - DNA, 849 bp, Unknown
  Bacterial polypeptide expressing nucleotide sequence isolated from the Sargasso Sea
ctaaaaaatccaggtgatacagttgaagcagatgagccaatcgtagaacttgaaacagataaagtaaatttagaggtaccatcaccaatctctggagtgttaactgaaataaattctaaagatggttcagtagttgaagttggtgcattgttaggttctgtatctaaacaaggtatagcggtaaaaaattctccaaaaaaggaagaagaaaataagaaagatgaggttgttccaaaggaaaacaatgtaattaaattagatgctaacaagaaagatccaaaaatatttgaagagaaagaagttaaaaaatctaggaaaaaaccattagttttaacagaggaagttcaaccagatgtttcaactaaaagagaaaataatcaaacattgtccccagcagtaagaaagatcgttgttgaaaacaatatagacattaattctattcaaggctcaggaaaagacggtagagttttaaaaggagatttaattagtatgatgggagcaaatccaaaaccatcagaaagaaaaattcaatatggtcaagaggaacgaattaaaatgactagattgagacaaactattgcaaaaagattaaagcaagctcaagagaatgccgctcttttaacaacatttaacgaggttgatatgagtagtgtaatggaaatgaggaaagaaaatcaagaggatttccaatctcgttatggaataaaattaggatttatgtctttctttgtaaaagcatgtgtagtttctttaaaaaatttccctgcagtgaatgctgaaatagatggtgatgaggtaatctacaaaaattattataatattagttttgccgtcggaacagacaaaggt

SEQ ID NO: 235480 - DNA, 916 bp, Unknown
  Bacterial polypeptide expressing nucleotide sequence isolated from the Sargasso Sea
ggagaatcagttactgaagcaacagtagcaaaatggttaaagaataaaggagataaagtttcttctgatgagccaatagttgaattagaaaccgataaggtaaatgttgaagttccgtcaccatcaaatggaatacttgaaaatatttcagctaaagaaggagaaacagttaatgtaggtgctctgcttggattaatttctcaatcaaaatcagtaacagcaagtcctaaaagcaaaacaaatgaaaaaaaatattcgccaccaaaattagaaaaaatcgaacccgagactgtaaaaaaatctgaacaagtcaaaatgaataaaaaaaaatcatctagtccacttattcttgaggaagattcgggccctaaagtttttgatgaaagtcccttagttttagaggaagaacctcttgttttagatacggcacatactgaaaataaagaaaaaacaaatgatgatttaagaattacaccttccgcaagaaaaatgatttctgaaaaaaaaattgacattcaatcaataaaaggaagcggaaaaaatggtttagttttaaaagaagatgtgatgagtttaatgggagtcaaacccgctccatctgaaagaaaaattgctcatggccctgaagaaagaattaaaatgacaagactaaggcttacaatagcaaaaaggttaaaagaggcacaagaaaacgccgcaatgctaactacatttaacgaagtaaatatgcatgaagtaattaaaatgagacaagattataaagaagattttcaaaaaaaatattctgtaaaactcggttttatgtctttttttgttaaagcatgtattattggattaaagaactatccagcaataaatgctgaaatacagggagatgaaattgtttataaaaattattataatattagtatagctg

SEQ ID NO: 235481 - DNA, 916 bp, Unknown
  Bacterial polypeptide expressing nucleotide sequence isolated from the Sargasso Sea
atagtagaattagaaaccgataaagtaaatgtagaagttcctgctccatctaatggtgttttagaaagtatatcagttagagaaggcgaaactgtaaatgtcggttctttacttggaatgataaatgggtctggtaagaaaatatctgaagatattaaagagttaaaagattattctccgccgaagaaaaaaacatctatcttaaaaaaacctaaagaagaagctgaaccattaaaacttgagcaagaagaacttgaaccattaaaacttgagcaagaagaacttgaaccattaaaacttgagcaagaagaacctgaactatcaaaaatccgtcaagaagagacattagtattagataatttctatgaaaagcaagaagtaaaagaaaaacaaaaagtaaaaagctctaagccatccatttctcctgcagcaagaaaaatggcaacagaggctaaagtagacttagataaaattcagggttcaggaaaacatggtgttattttaaaagaagatataatgagtctaatgggatcaaaaccatctccttcagagagaaaaattaagcatggtccagaagaaagaattaaaatgacaagattgagactaacaatcgcgaaaagattaaaagaagctcaagagaatgcagctatgttaacaacctttaatgaagtagatatgagcgaggtgatatctatgagaaatcaatacaaggaagaatttcaaaaaaaatattcagtaaaacttggttttatgtcattttttgtgaaagcttgtgttataggattaaaaaattttccagtagtgaatgcagaaattcaaggcgatgaaatagtttataaaaattattataatataagtatagccgttggaacagacagaggcttagtagtgcccgttcttagagaaagcagatgaa

SEQ ID NO: 235482 - DNA, 862 bp, Unknown
  Bacterial polypeptide expressing nucleotide sequence isolated from the Sargasso Sea
atgtcagaaaaaattttagtacctactttaggcgaatcagtaacagaggctacggtttcaaaatggcttaaaaatcaaggtgaagaagtttctgcagacgagcctattgttgagcttgaaactgacaaggtaaacgttgaagttccatctccatcgaatggtgttttagaaaaaatttctgtaaaagaaggagaaactgtaaatgtaggagctctacttggaatgattaatggctctgcaataaaaattgaaaaagatatacaggaggtaaaaaaatattcaccaccaccaaagaaaaataaggtcgaaaaaccaaaaacttctaaacaaataattcaaaaaaaagaagaaccacttaaattagaggaagaaccacttaaattagaagaaactcttaacttagaggaacaagaaccacttgtattaaatgaaaccgtggagaaaaatgaaattaaagaagagctagaaattaaaaatctatccccccgaatttctccagctgctagaaaaatggcaacagaaaccaaagtaaatttacaaaatatacaaggatctggaaaagatggcattattctaaaagaagatattctaagcttaatgaactacaaaccagcaccttctgaaagaaaaattaaacatggacctgaagaaagaatcaaaatgactagattaagagcaacaatagccaaaagattaaaagaagctcaagagaatgctgcaatgttaaccacttttaatgaggttgatatgagcgaagtaatatctatgagaactcaatataaagaggaatttcaaaaaaattatggtgttaaactaggctttatgtcattttttgtaaaggccatgtgtgataggtcttaaa

SEQ ID NO: 235483 - DNA, 370 bp, Unknown
  Bacterial polypeptide expressing nucleotide sequence isolated from the Sargasso Sea
ataagagatgcaggtaatttacgaatatctgatgttgaaaaatcgattttagactactcagataaagcaaggcatggaaaactgtcaatctcagaaatgcaaggaggcacatttacaatttctaacggaggagtttttggctcgctgttatctactcctatcctaaatgctccgcaaactgcgatattaggaatgcatgcgatccaagatcgtccagtagcaatcgatggagaaatagttattcgtccgatgatgtatctagctttgagttatgatcatcgattattagatgggaaagaggctgtctcttttcttatagctattaaagaccaattagaatctccggaaaaacttttattaaacttataag

SEQ ID NO: 235484 - DNA, 658 bp, Unknown
  Bacterial polypeptide expressing nucleotide sequence isolated from the Sargasso Sea
tattgcaaaagattaaaacaagctcaagagaatgctgctcttttaacaacatttaacgaagttgatatgagcagtgtgatggaaatgaggaaagaaaatcaagaggatttccaaactcgttatggaataaaattaggatttatgtctttctttgtaaaagcatgtgtggttgctttaaaaaatttccctgcggtgaatgctgaaatagaaggagatgagattgtctataaaaactattacaatattagctttgctgttggaacagataagggtttggttgttccagttttgagaaatgcagatgaattatcctttgctgatattgaaaaaaatattaaagaaatttcagaaaaagctcgagatggaaagctaacgattgaagatctccagggaggaacatttactataagtaatggaggcgtgtatgggtctatgctttcaactccaatactaaatttacctcaatctggagtgttgggcatgcataatatagtggaaagacctgttgttgtagacggtgaaatcaaaataagaccaattatgtatttagcattatcatatgatcacagaattattgatggaaaagaatctgtatctttccttaaaatgattaaagaaaacttagaagaccctagaaggttgtttttagatatttaaa

SEQ ID NO: 235485 - DNA, 570 bp, Unknown
  Bacterial polypeptide expressing nucleotide sequence isolated from the Sargasso Sea
gaaaagaaaatcaaagtgattttcaagataggtttggcataaaactaggttttatgtccttttttgttaaagcttgcattgaaagtctaaaactttttccagcaattaatgctgaaattgagggagagaacataatttataagaactactataatataagttttgcagtaggcaccgaaaaaggtcttgtggttccagttttaaaaaatgcagatgaaatgtctttcgcagacatagaaaagaaaattaaagaattgtctgataaagcaagagatggaaagattacaattgacgatcttcaaggcgggacatttactatcagcaacggtggtgtctatgggtcaatgttatcaacacctattttaaatttacctcaatccggagttttaggaatgcataatattgtagaaaggccgcatgtggtaaatggtgaaattaaaataagaccaataatgtatatagctttatcatatgatcatagaataattgatgggaaagaagcggtttcttttttaaaaaatacaaaagataacttagaagatccaagaagattatttttaaatttatagt

SEQ ID NO: 235486 - DNA, 835 bp, Unknown
  Bacterial polypeptide expressing nucleotide sequence isolated from the Sargasso Sea
cggtatcttaggaatcttagttgaatcaaaaggcaaaacaccaagtcttaaaaaaactgaaactaaagaggaaaaagtaaaagaagaagtaaaagaagttaaagaagttaaagaagttaaagttgaaacaaaatcttcgcctgccaaatcttcaccatctgcaagaaaaatagctgaagaaaataatattaaacttgaagacgttatctcatcccgatctgatggaagaattaataaagaagatgtagtttctcatctctcttcttcaaataaaacaaccactaacaaaggtgaaagagaagaagttgttaaaatgtcaaaaatcagacagacaatatctaaacgcttaaaggatgctcaaaatacagcagccatacttacgactttcaatgaaattgatatgtccaaagttatggaaattagaaaatcaaaaaaccaagaatttcaaagtcgatatgaggtcaaattaggtttcatgtcattttttgtaaaagcggtagtaaaaagtttgcaagagtatccagctgttaatgctgaaattaaagatgaaaatataatttataaaaatcattttgatataggtatagctgttggaactgaaaaaggactagtcgtaccaatacttaaagacgccgatcaattgagttttggagaaattgaaactaaaattattgatcttagtacaaaagccaaagatggaacgctgacaatggacgatttgactggtggaacttttacaatttcaaacggcggcgtttacggatcaatgctcagcaccccaataatcaatagacctcaatctggaattttagggatgcataatattcaaaaaaga

SEQ ID NO: 235487 - DNA, 628 bp, Unknown
  Bacterial polypeptide expressing nucleotide sequence isolated from the Sargasso Sea
attgatattagacacttttcataaagatgaaaaaatagaaaagagtaaaactatagaaaagcaaactacaaaaaatcaagatttatctttctctccagcagcaagaaaaatggcggcagaaggaaatgtagatttgaataaaattaaaggctcaggaaaacatggggtaattttaaaggaggatgtaatgagtttaatgggattcaaaccgtctccgtcagagagaaaattaaaacatggtccagaagaaagaattaaaatgactagattaagattaactatagctaaaagattaaaagaggctcaagaaaacgcagctatgcttactacttttaatgaagttgatatgagtgaggtaattgcaatgagaaatcagtataaagaagaatttcaaaataaatattctattaaactgggttttatgtctttttttgtaaaagcctgcgtaattggattgaaaaatttcccagcaattaatgcagagattcaaggtgaagaaatagtttataaaaattattataatattagtatagcagtcggaactgatagaggtttagtggtgccagttttaaaagaaactgatgaaatgtcctttgcagatatagaaaaaaatattagtgagttgggc

SEQ ID NO: 235488 - DNA, 574 bp, Unknown
  Bacterial polypeptide expressing nucleotide sequence isolated from the Sargasso Sea
aatgagaggtcaatataaagatgaatttcaaactaactatggtgttaaacttggatttatgtctttctttgtaaaagcatgcgtaattggattaaaaaattatcctgcgataaatgctgaaatccaaggtgaggaaatagtttataaaaattattataatataagtatagcagttggtacggatagaggtttagttgttccagttttaagagagacggacgagatgtcttttgcagacatcgaaaagaacataggagagcttggtcaaaaagctagagacggaaaaatcactatagaggatttacaagggggaacatttacaattacaaacggaggcatttatgggtctatgctatcaacacctattttaaatccacctcaatctgctgttcttgggatgcacaatatagtccaaagacctatggtgttagaaggtaacatagagtctagacctgttatgtatttagctctatcttatgatcatagaattatagatggcaaagaagctgtatcttttttaaaaattgtaaaagagtctcttgaacagccaaagagactcttcttaaatatttaa

SEQ ID NO: 235489 - DNA, 856 bp, Unknown
  Bacterial polypeptide expressing nucleotide sequence isolated from the Sargasso Sea
aatgatagaaaaaatattagttccagctttaggtgaaagtatcacagaggcaacagtttcaaaatggttgaagaatgagggagactcagtggaggctgatgaaccaattgtagagctagagacggataaagtaaatttagaagtaccttcacctgtatcaggccaattgtctaaaattgattctaaagatggctcagttgtcaaagttggagaaaccttggggtcagtttctgaaaatgtgaatgaaataaaaagacctgacgaaattaagaaaattcaaccatcaaatttgaaaaaaaatgaacagccaagtgagaaagataatgtaatagagttagatgtaaaaaaagagcaaaaagaactagatatttttgagtcaaaaaacagtatggaaaacattgaggaagaaccacttgttctgactgaggaagtaaaaactaataaaaaagaggttgaattgcccaaagataatctgaccctatctccagctgtaagaaaaatggttaatgaaaaaaatattgatattagatcagttaaaggatctggaaaagatggaagaatattaaaaggggatttaattgatttgatggggataaatccacagccctcagaaagaaaaattaaatatggtcaagaagagagaatcaaaatgacaaggttaagacaaaccatagccaaaagattaaaacaagcccaagaaaatgcagctttactaactacttttaatgaagtggacatgacaaatattatggaaatgagaaaagaaaatcaggaagattttcaaaatagatatggcataaaacttggatttatgtccttttttgtaaaggcatgtgtggtcgctttaaaaaattat

SEQ ID NO: 235490 - DNA, 853 bp, Unknown
  Bacterial polypeptide expressing nucleotide sequence isolated from the Sargasso Sea
agcctaaaaagaaaactttctgataatataattaattttgacaaagaaaaaaaacaaaatctaaaaatttttgaaaatgaagaaaaagaagagaaaacagaaccattagttttaactgaagaaaaaccattaacttcaaataaagaagaaccattaattttaacaaaagagatacctagtaaacaaaaaataattagtgaaaaagtattatctcctgcagtaagaaaaattgtagacgaaaacaagattgatatacaatcaattaagggaacaggtaagtctggtcaaattttaaaaggtgatttaattagtttaatgggatcagccccaaagccatccgaaagaaaattaaaatatggtgaagaggaaagaattaaaatgagtagactaagacaaactatagcaaaaagattaaaagaagctcaagaaaatgcagctatgttaaccacatttaatgaagtggatatgacaagtattattgaaatgagaaaaaataaccaagaagattttcaaaaaagatttggaataaaacttggttttatgtccttttttgttaaagcttgtgtacttggattaaaatcgtttccggcaattaatgctgagatagaaggtcaagaaattatatataaaaattattataatattagttttgctgttggaactgaaaaaggtttagtagttccagtaataagaaatgcagacgaactatcatttgcagaaatagaaaaaaatataaaatcaatttctgaaaaagctagggacggaaaattaactattgatgatttacaaggcggaacatttacgataagtaacgggggcgtatatggctctatgctttcaactccaattctta

SEQ ID NO: 235491 - DNA, 751 bp, Unknown
  Bacterial polypeptide expressing nucleotide sequence isolated from the Sargasso Sea
ttgaaaaagaggaacccgaaattttttgatgaaaaagaggaggaggaaaaacctttagttttaaatcaggtggctcaagaagaaaaatcagaagttcaatcaaaaactgaggaaaccttgtctccagctgttagaaaaattgttactgaaaataaaattgatattaaatcggtaaaaggatcaggaaaagaaggtagaattttaaaaggtgatctcattaatttaatgggcgtaaatccacctccatcagaaagaaaaattaaatatggtcacgaagaacgaattaaaatgaccaggttaagacaaacgatagcaaagagattaaaacaagcccaggaaaatgctgctttacttacaacttttaatgaagttgatatgaaaaatgtcattgagatgagaaaagaaaatcaagaagattttcaaaatcgatacagtattaaattaggttttatgtcattttttgtgaaagcatgtgtggtagctttaaaaaattttcctgctttaaatgcagaaattgaaggcaatgatattatttataaaaactattataatataagttttgctgttagcactgatagaggacttgtagttccagtattaaaaaatgctgatgaactatcatttgcagatatagaaaaaaatattaaggaaatttctgaaaaagccagagaaggtaaacttactattgaagatcttcaaggtggaactttcacaataagcaatggtggtgtatatggctcaatgctttcaa

SEQ ID NO: 235492 - DNA, 445 bp, Unknown
  Bacterial polypeptide expressing nucleotide sequence isolated from the Sargasso Sea
gtctttttttgttaaagcatcggttgttgctttaaagtcatttcctgcaattaatgctgagattgacggtcaagatatagtttataaaaattactataatataagctttgcagtaggaactgaaaaaggtttagtagtccctgtgttaagaaatgttgatgagctctcatttgcagaaatcgaaaagggtattaaagatctatctgataaggccaattcaagcaaaattggaattaatgatctccaaggtggaacttttactataagtaatggaggtgtttatgggtcgatgttatcaacaccaataatcaatcctcctcagtcagcaattttagggatgcataacattgttgagagaccaattgtagttgacggtgatgtaaaagttagaccaattatgtatttggcattatcttatgatcatagaattatcgatggaaaagat

SEQ ID NO: 235493 - DNA, 825 bp, Unknown
  Bacterial polypeptide expressing nucleotide sequence isolated from the Sargasso Sea
ggtgagagtataaccgaagcgacagtggctaaatggttaaaaaatgcaggagattctgttgatgcagacgaaccaatagttgaacttgaaacagataaagtaaatttagaagtcccctctccaataacaggtgtattaactgaaataaattctaaagacgggtcagtagtggaagtgggagctttactgggttctgtttctgaaaatggcagtggtgtcaaacccagtactacaaagaatgaagaagttaaaaaacaagagatcgagtctaatgaaaataacgttattaaattagacccaattaaaaaagagcctaaagtttttgaggagacgctgaaagtagatgagcaaagtgaaaaacctttagtattatctgatgaaattgttgatcaagaaccaacaattaacaatattcagagccaaacactatcaccagctgttcgtaaaattgttactgaaaacaaaatagacttatctactgttcaaggttccggaaaagatgggcgagttcttaaaggtgacctgataagtatgatgggagcaaatccaaaaccttcagagagaaaaattcaatatggtcaagaagaaagaatcaagatgaccagacttagacaaactatcgctaaaagattaaagcaagcccaagaaaatgcagcgttactgacaacattcaacgaagtcgacatgacaaatattatgcaaatgagaaaagaaaatcaggaagattttcaatctagatataatattaaacttggctttatgtcattttttgtaaaagccatgtgtagttgcactaaagaattttccagcaggaatgcagaaatt

SEQ ID NO: 235494 - DNA, 901 bp, Unknown
  Bacterial polypeptide expressing nucleotide sequence isolated from the Sargasso Sea
cccgaggaagaggaaaaaatatccagaacagatggaacagttaaagatcaactagataataacaaagaaacaaatattcaatcagaaccaacgatgctgaatgacgaggtaaagccattaattttaaacgaagaagaagagccactaattttaagtgaagaagtagaaatagatgaaaaaaaaatagatgctccagaaaaagaaattaatttatctcctgcggtaagaaaaattgtaactgaaaaaaatattgatattaatacaattcaaggatcaggaaaagatggcagaatattaaaaggtgatctaatttctttaatgggagaaaatcctcaaccaaatcaaagaaaaattaaatttggacaagaagagagaattaaaatgacgagacttcgtcaaactatagcaaaaagattaaaggaagctcaagaaaatgcagccatgttaactacttttaatgaagttgatatgtcaggaataatatctatgagaaaagaaaatcaggaagattttcaaaataggtataacattaaattaggttttatgtctttttttgtgaaggcttgtgttgttggcttaaaattgtttccagcaataaatgctgagattgagggggaagatattatttataaaaattattataatataagttttgctgtaggaacagaaaaaggtttagttgtccctgtactaaaaaatgcagatgaaatgtcttttgcagatatagaaaatgaaataaaaaaattatctgaaaaagcaaaaaatggaagcttaacaattgaagatttgcaaggcgggacatttaccataagtaacggtggtgtttatggatctatgctttcaacaccaatacttaatccaccccaatcaggagtattgggtatgcataatatagttgaaa

SEQ ID NO: 235495 - DNA, 930 bp, Unknown
  Bacterial polypeptide expressing nucleotide sequence isolated from the Sargasso Sea
gtaccagttctaggagagagcattacggaagcaacagtttctaaatggttgaaaaataaaggtgataatattaatgctgatgaagccatagtagagctagagacagataaagttaatttagaagttccgtctcctattgatggaacattatcagttattaattttaaagatggggatactgtagaagttggtgctgttttgggagaaatatcaaaaggatctggagatcaaaaacaagaagataataaaaaaattgagaaacctaaaaagaaaacatctagtaacgtaattaattttgataaagaaaaaaaacaaagtccagaaatttttgaaaatgaagagaatgaagaaccattagttttaactgaagaaaaaacattaacttcaaataaggaagatccattagttttaacaaaagagatacctggtaaacaaaaaatagttagtgaaaaagtattgtctcctgctgtaagaaaaattgtagaagaaaacaagattgatatacaatctattaaaggaacaggcaagtctggtcaaattttaaaaggtgatttaattagtttaatgggatcagtcccacagccatccgaaagaaagttaaaatatggtgaagaggaaagaattcaaatgagcagactaagacaaaccatagcaaaaagattaaaagaagctcaagaaaatgcagctatgctaactacatttaatgaagtcgatatgacaagtattattgaaatgagaaaaaataaccaagaagattttcaaaaaagatttggaataaaacttggttttatgtccttttttgttaaagcatgtgtacttggattaaaatcgtttccagcaattaatgctgagatagaaggtcaagaaattatatataaaaattattataatattagttttgctgttggaactgaaaaagggtttagtagt

SEQ ID NO: 235496 - DNA, 316 bp, Unknown
  Bacterial polypeptide expressing nucleotide sequence isolated from the Sargasso Sea
acaagtcaactttgcagagaacttaagattgataaaaaagaattttttggtggatcgatgactatctcgagtttaggaggtattggtgggacacattttacacctatcattaatccgccagaggttgcaattttaggtgttggaagaacttttgatcgacttgttaaagaaaaaaatcaaattgtttctaaaaagatacttccaatatcactatcttatgatcacagattaatagatggagcagaaggcgctcgattttgtgtctatcttggaaaatgtcttggcaaagattttgcctttaagcttgctgtttaga

SEQ ID NO: 235497 - DNA, 148 bp, Unknown
  Bacterial polypeptide expressing nucleotide sequence isolated from the Sargasso Sea
gatcaatggtcaagtggtgatccgcccgatgatgtacctggcgctgtcttacgaccaccgcctgatcgatggtaaagaagccgtgaccttcctggtgaccatcaagaacttgcttgaagacccggctcgcctgctgctggaaatctaa

SEQ ID NO: 235498 - DNA, 863 bp, Unknown
  Bacterial polypeptide expressing nucleotide sequence isolated from the Sargasso Sea
agaattagaaacagacaaagttaacctagaagttccctcacctattgacggaatattctcagaaaaaaaagctaatgaaggagaatcagtacaagtaggagctgtccttggaacaataaaatctagtgatgctaaacccgagtttacagctgaaaaaaaaataacaaaaaatataaataaagttgaagaatcaaatgatttagaaaaagaaaaatcaaatttaaaaatttttgatgaaaataagagtgaaaaaaaagaacccgtagaatctaaacctctaacactagaagatgagcctttagttcttacaaacgaaatagaagaaaaaaaagcagaagcacctaaggcagaagaaaaaaaatcaaaagagccgaaaatcttatcaccagcagtaagaaaaatggtttctgaaaaaaatataaatactgaggatatttccggttcaggcaaagatggaagaatagttaaaggtgatttaatgcatctaatgggctcaactcctaaaccttcagaaagaaaaattaaatatggaccagaagaacgatttaagatgacgagactaagacaaacaatagcgaaaagattaaaagaagcacaagaaaatgcagcgatgctaacaacttttaatgaagttgatatgacaaacataatttcaatgagaaaagataatcaagaggattttcagtcaagatatggtgttaaattgggttttatgtcattttttgttaaagcatgtatattaggactaaaatcctttccaccaattaatgctgaagtagagggtcaagaaattatttataaaaattactacaatattagttttgcagtaggtacagaaagaggtttagttgtaccggtttaaa

SEQ ID NO: 235499 - DNA, 672 bp, Unknown
  Bacterial polypeptide expressing nucleotide sequence isolated from the Sargasso Sea
aacaaaaataaatccaatattatcacctgctgttagaaaaatggttgcagaaaaaaaaattgatttagagcaaataaaacctacaggaaaagatggcagaatattaaaaggcgacttaattagcttgatgggttccaatcctcaaccgaaccaacgaaaaattcaatttggtgaagaggaaagaattaaaatgtctaggttaagacagactattgcaaaaagactaaaggaagcccaggaaaatgcagcaatgttaaccacttttaatgaggttgatatgtcaggtataatgtcgatgcgaaaagaaaatcaagaagattttcaggcaagatatggaattaaacttggatttatgtccttttttgtaaaagcttgcgtagttgggttaaaattattcccagcaataaatgcagaaatcgagggacaggaaataatatataaaaattactataatattagctttgctgttggaactgaaaaaggtttaatattaccagttttaaaaaatgctgacaaaatgtcttttgctgatatagagaaagaaattaaaaatctctcggaaaaagcaaaaaataattctttagttattgaggatttgcaaggtggtacatttacaatcagcaatgggggagtgtatggttcgatgctgtctaccccgattttaaatcctcc

SEQ ID NO: 235500 - DNA, 571 bp, Unknown
  Bacterial polypeptide expressing nucleotide sequence isolated from the Sargasso Sea
tgagaaaagttatcaggaagatttccaaaaaaaatattctgttaaattaggctttatgtctttttttgttaaggcatcagttgttgccttaaaaaatttcccagctgtaaatgcagaaattgaaaacgatcatataatttacaaaaattactacaacatctctattgcgattggaacagatcgaggtttagtggttccagttctaaagaaaacagatgagttatcttttgcagatatagaaaggaatatatttcttctttctgaaaaagcaaaaaaaggaaaaattactattaatgatttacaaggtggaacttttaccattagtaatggcggaatttatggttctatgctttcaactccgatattaaatccacctcaaactggtattttaggtatgcacaatattgtggatagaccagtggtaaaagagggaaaaattgttgttagacctattatgtatttagctttatcatacgatcatagaataattgatgggaaagaagctgtttcctttttaaaaactattaaagactgtcttgaagaaccccgtagattatttttagatctttaa

SEQ ID NO: 235501 - DNA, 265 bp, Unknown
  Bacterial polypeptide expressing nucleotide sequence isolated from the Sargasso Sea
ggaacatttaccattactaatggaggtatatatggttcaatgttatcgacaccaattatcaatccaccgcagtcagctgttttagggatgcataatattatcgaaagagcagttgttattgatggggaaatcctggtaaggcctattatgtatttagccttatcatatgatcacagaattatagatggtaaagaggcagtttcatttttagtaagagtaaaagaaattttggaggatcctagaagattatttctaaacttataaa

SEQ ID NO: 235502 - DNA, 907 bp, Unknown
  Bacterial polypeptide expressing nucleotide sequence isolated from the Sargasso Sea
atgagtgaaaaaattctagttccagtacttggtgaaagtattaccgaagcaacagttgctaaatggttaaaaaatattggagaccctgtagatgctgatgaaccaattgtggaacttgaaactgataaagttaatttagaagtaccatcaccaatagcaggtgtcttaaaagaaatagcttcaaaagatggatcagtagttaaggttggtgcttttttgggttctatttccgataataaagccaatgtttcagttaaagaggataaagttaaagaagttaaaaatactcgaaatgaaaataatgtaattaaattagacgcatctaaaaaagaaccaaaaatttttgaggaaaaatctaatagagaaaaaccactaattttaactgatgaggaagaaaaacctctaattttaagagatcaaattttagaggaaaacttaactgatcagaaaaaagataatcaagctttatctcctgctgtaagaaaaatagttacagaaaataaaattgatattgattcagtaaaaggatctggaaaagatggtagaattttaaaaggtgatcttattagtttaatgggagttaatccaaatccttcagaaagaaaagtacaatatggtcaagaagaaagaattaaaatgaccagattaagacaaacaattgctaaaagattaaaacaagctcaagaaaatgctgcactattaacaacatttaatgaagttgatatgtctaacatcatagaaatgagaaaagaaaatcaacaagattttcaaagtcgttatggaataaagttaggcttcatgtctttttttgttaaggcatgtgtagttgcattaaaacattatccagaagtaaacgctgaaatagacggtgatgatatagtttataaaaattattacaatataagct

SEQ ID NO: 235503 - DNA, 840 bp, Unknown
  Bacterial polypeptide expressing nucleotide sequence isolated from the Sargasso Sea
tgaggcacagtatctaagttggttaaagaaacagggtgacagtgtcatcgctgatgaagctgtagttgaacttgaaactgataaagttaatttagaagttcctgcattaacgcatggtgttattgcagagattaatgcaaacgaaggagacacggttgaagtaggagcagttttaggtgtgatttcagagactgcaaataaaacagataataaaccttcaaaccaagttatagaagatcaaaaaaaccaagtagaggagaaccccaaagtatttgagactaaagtagaaccagctttaaaaactgaagaaaaggataatgtaattagcttggatttagaaaaaaaacaaaaagtattagaaacttcttatgaagaacaaccatttgttttaacagatgaagtattagagccaaatgtagaagaaacaaaaataaatccaatattatcccctgctgtaagaaaaataattgcagaaaaaaaaattgatttagaacaagtaaaacctacaggaaaagatggcagaatattaaaaggcgacttaattagtatgatgggcgccaatcctcaaccgaaccaaagaaaaattcaatttggtgaagaggaaagaattaaaatgtctaggttaagacagactattgcaaaaagacttaaggaagcccaagaaaatgcagcaatgttaaccacatttaatgaggttgatatgtcaggtataatgtcgatgcgaaaagaaaatcaggatgattttcagacaagatatgggataaaacttggatttatgtccttctttgtaaaagcttgtgtagttgggttaaaattattcccagcaataaatgcagaaat

SEQ ID NO: 235504 - DNA, 850 bp, Unknown
  Bacterial polypeptide expressing nucleotide sequence isolated from the Sargasso Sea
ttgtctccagcagttagaaaaattgtagaagaaaatgacattgatgttaataccgtgaaaggatctggaaagtcaggtcaaattttaaaaggtgatttaattagtttgatgggctcatctccaaaaccatctcaaagaaaattaaagtatggcgaagaagaaagaattaaaatgagtagattaaggcaaactattgctaagagattaaaagaggcacaggaaaatgcagcaatgttaactacatttaacgaagtagatatgacaaatattattgaaattagaaaaaataaccaagacgattttcaaaaaagatttgggataaaacttggccttatgtctttttttgttaaagcatgtgttatcggtttaaaagcatttccagcaattaatgcggagattgatggagatgaaattatttataaaaattattacaatataagtttcgctgttggaactgaaaaaggattagtagttccagttttaagaaatacagatgaactatcatttgcagagattgaaaaaaatattaaaaatatttcagaaaaagcaaggggaggaaaattaactattgaagatttacagggtggaacatttactataagcaacggcggagtatatggttcaatgctttcaactccaattcttaatccaccacaatcaggagtccttggaatgcacaacatagttgaaagaccaattgctgtaaatggcgaggtaatcattagaccagtaatgtacttggctttatcttatgatcacagaataatagacggaaaagattcagtgtcttttttaaaattattaaaggaaaatctggaagatccaagaaaattatttttagatatttaaa

SEQ ID NO: 235505 - DNA, 767 bp, Unknown
  Bacterial polypeptide expressing nucleotide sequence isolated from the Sargasso Sea
aatgtctccagcagtaagaaaaattataactgaaaataaaattgatattaattctgtaaaaggaactggaaaagatggaagagtcttaaaaggagatttaattaatttaatgggttcaaatccacctccttcagagagaaaaattaaatatggtcaggaagaaagaataaaaatgaccaggttaagacaaacaatagctaagagattaaaacaagctcaagagaatgcagcactactaaccacttttaatgaagtagacatgacaaatgtcatggatatgagaaaagaaaatcaagaggattttcaaagtagatatggagtaaaattgggcttcatgtcttttttcgtaaaagcttgtgtggtagctttaaaaaattatcctgctgtcaatgcagaaatcgagggcgatgagattatttataagaattattataatataagttttgcagttggcactgataaggggcttgtagtcccagttataaaaaatgcagatgaactttcatttgcaaatatagaaaaaaatataaaagaaatttcagaaaaagctaaagatggaaaacttacgattgaggatctgcaaggaggtacatttactatcagtaatggtggtgtatatggatcaatgctatcaacaccaatattgaatttacctcaatcgggtgtgttaggtatgcataatattgtagacagaccaatggtggttgatggagaaataaagataagacctgttatgtatttagcattatcttatgatcatagaatta

SEQ ID NO: 235506 - DNA, 503 bp, Unknown
  Bacterial polypeptide expressing nucleotide sequence isolated from the Sargasso Sea
gatggcctcgatcaaggcgcttcaggaatttccggcggtgaatgccgaaatcgacggcaccgacatcatctacaagaattactacaatatcggggttgccgtcggcacgccgcaggggcttgtcgtgccggtggtccgtgatgccggcggtctcggccttgccgagatcgagacccgcatcgccgatttcggcgatcgcgcccgcaatggcaagatcacgcctgatgacatggccggcggctcgttcaccatctcgaatggcggtgtctacggctcgctgatgtcgacgccgatcctgaatccgccgcagagcggtattctcggcatgcacaagatcgaaaagcggcccgtggtggtggatgacgccatcgtcatccgcccgatgatgtatctcgcgctgtcctatgaccaccggatcatcgacggccgcgaggcggtgtccttcctggcccgcatcaaggagcttgtcgaggatccgcggcggctcgtccttggcgtctgaa

SEQ ID NO: 235507 - DNA, 607 bp, Unknown
  Bacterial polypeptide expressing nucleotide sequence isolated from the Sargasso Sea
cttttatgaagttgatatgagcggtataattgacatgagaaaagaaaatcaaagtgattttcaagaaaggtttggcataaaactaggttttatgtccttttttgtaaaagcttgtattgaaagtctaaaactttttcctgcaattaatgctgaaatcgagggagagaacataatttataaaaattactataatataagttttgcagtaggcaccgaaaaaggtcttgtggttccagtcttaaaaaatgcagatgaaatgtctttcgcagacatagaaaagaaaattaaagaattgtctgataaagcaagagatggaaagattacaattgacgatcttcaaggtgggacatttactatcagtaacgggggtgtctatggatcaatgttatcaacaccaattttaaatttacctcaatccggagttttaggaatgcataatattgtagaaaggccgcatgtggtaaatggtgaaattaaaattagaccaataatgtatatagctttatcatatgatcatagaataattgatgggaaagaggcagtatcttttttaaaaaatacaaaagataacttagaggatccaagaagattatttttaaatttatag

SEQ ID NO: 235508 - DNA, 325 bp, Unknown
  Bacterial polypeptide expressing nucleotide sequence isolated from the Sargasso Sea
gattttagactactcggataaagcaaggcatggaaaactatcaatatcagaaatgcaaggaggcacatttacaatttctaacggaggagtttttgggtcgctgttatctactcctatcctgaatgctccgcaaactgcgatattaggaatgcatgcgatccaagatcgtccagtagcaatcgatggagaaatagttattcgtccgatgatgtacctagctttaagttatgatcatcgtttactagatgggaaagaagctgtctcttttcttatagctattaaagatcaattagaatctcctgaaaaacttttattaaacttataa

SEQ ID NO: 235509 - DNA, 805 bp, Unknown
  Bacterial polypeptide expressing nucleotide sequence isolated from the Sargasso Sea
aatgtcagaaaaaatagttgttccagctttaggagaatcagtgacagaggcaacagtttctaaatggcttaaaagcgttggagaaaaagtcgactccgatgagcccattgttgaacttgagacagataaagtaaatgtggaggttccctcacctactgatggtgttttagaaaatatttctgtaaaggaaggggatacagtagaagttggtgctttacttggaagtataggtgcaaaaaaagcacaaaaggttgagaaagaggaaaaaaaatatacacctccacctaaaaaagaggaagttatacctaaactttttgaaaaatcggtagagcaaaaacctaaaaaagtagaaaaaaaattaattctagaagaaattaaagaagagcctccactaattttatcggaagaggttaaaagcgataattatgttcaagaaaaaattgtttctccttcagcaagaaaaattgcaaacgaaaagaatatcgatttaagtaagatcgcaggcacaggaaaaaatggagttatacttaaagaagatttattaaacttaatgggatctaaacctgctcctaataaacgaaaaatgactcatggtcctgaagaaaaaattaaaatgacaagattaagaatgaccatagctaaaagattaaaagaggcgcaaaataatgcagcgatgcttacaactttcaatgaagtggatatgtctaaagtaatacaaatgaaaaatgattataaaaacgagttcattaaaaaattttcaatcaaacttggttttatgtctttttttgtgaaagcttgcgtcgca

SEQ ID NO: 235510 - DNA, 971 bp, Unknown
  Bacterial polypeptide expressing nucleotide sequence isolated from the Sargasso Sea
aatggttaaaaataagggagatcctgttgatgtggatgaaccaattgttgaacttgagacagataaagtaaatttagaggtcccctctccaattacaggagtattaactgaaataaattctcaagacgggtcagtagtagaagtgggggctttattgggttctgtttctgaaagtggtagtggcgttaaaactagtcctaacaatattgaagatattaaaaaagaagacactaaatcttctgaaaataatgtgattaaattggacccgattaaaaaagagcctaaagtttttgaggagacctttaaagcagatatgcaaagtgaaaagcctttagtattaacagatgaagttgaggagacagcaactgtttttgataatactcaaaaccaatctttgtcaccagctgttagaaaaattgttgctgaaaataaaatagacctatccacaattcaaggttctggaaaagatggacgagttttaaaaggagacttgataagcttgatgggagcaaacccaaaaccttcagagagaaaaattcaatatggtcaagaagaaagaatcaagatgaccagacttagacaaactattgctaaaagattaaagcaagctcaagaaaatgcagccttacttacaacattcaatgaagttgacatgacaaatattatggaaatgagaaaagaaaatcaggaagattttcaatctagatacaatattaaacttggttttatgtcattttttgtaaaagcatgcgttgtcgctctaaagaattttccagcagtaaatgcagaaattgatggtgatgaaatagtttataaaaattattataatattagttttgcagttggaactgacaaaggtttagttgtgccagttttaagaaatgcagatgagttgtcttttgctgatatcgaaaaaagtattaaagaaatttctgaaaaagcaaaagatggaaagttagtaattgaggatc

SEQ ID NO: 235511 - DNA, 793 bp, Unknown
  Bacterial polypeptide expressing nucleotide sequence isolated from the Sargasso Sea
aaaggatctgggaaagatggacgaatacttaagggtgatttaataagcttaatgggagttaatcctccaccttcagagagaaaaattaaatatggtcaagaagagcgtattaaaatgaccaggttaaggcaaactatagcaaaaagactaaaacaagcccaggagaatgcagctttacttactacttttaatgaagtggacatgacaaatataattaacatgagaaaagaaaaccaggaggatttccaaagccgatatggtatcaaacttggtttcatgtcattttttgtgaaggcttgtatagtagctttaaaaaattttccagctgttaatgctgaaatagatggagacacaattgtttacaaaaattattataatataagttttgcagttggaacagataaaggtcttgtagttccagttttaaagaacgcagacgaactatcttttgcagatattgaaaaaaatattaaagaaatttctgaaaaagcaaaagacggaaaacttgtgattgaagatcttcaaggaggtacttttactattagcaatggtggagtttatgggtcaatgctttcaaccccaattctaaatttacctcaatctggagtactaggaatgcataatattgttgatagacctattgtagtagatggtgaaatcaagataagaccagtaatgtatttagctttatcttatgatcatagaattattgatggtaaagagtctgtatcatttcttaaaatgatcaaagaaagtcttgaggaccctagaaggttatttttggatatttagg

SEQ ID NO: 235512 - DNA, 283 bp, Unknown
  Bacterial polypeptide expressing nucleotide sequence isolated from the Sargasso Sea
aataaacgatttacaaggtggaacttttacaattactaatggcggtatttatggctccatgttatctacaccaatattaaatccacctcaatctggcgttttgggaatgcataatattatccaacgtccagtagctatcaatggagaagttataattcgtccaatgatgtatttagctttatcttatgatcatagaattgttgatggaaaagaagcagtttctttcttaaaaaatataaaagattctctagaggagccaagaaggctttttcttaacatttaa

SEQ ID NO: 235513 - DNA, 606 bp, Unknown
  Bacterial polypeptide expressing nucleotide sequence isolated from the Sargasso Sea
ttaatgaagttgacatgaaagaagtcattgaaatgaaaaataattataaagatgagtttaaggaaaaatactctgttaaattaggttttatgtccttttttgtaaaagcatgtgttattggtctaaaaaattatccagctattaatgcagagattcaaggtgatgaaattgtttataaaaactattataatatcagtattgccgtaggtactgaccgaggattagtagttcctgttttaagaaatactgatgaaatgtcttttgctgacatagaaaaaaatatttctcttttaggacaaaaagctagagatggaaaaattaaaatagaggatttacaaggaggaacttttacaattacaaatggtggaatttatggttctatgttatcaactccgattttaaatcctcctcaatctgctgttcttggtatgcacaatataatagaaagaccagttattattgagggcagtgtaactattagacctataatgtatttagcactatcatatgatcacaggattatcgacggcaaagaagctgtttcgtttttaaaaacagttaaagaaagtttggaacaaccaaaaagattattcctaaatttataaa

SEQ ID NO: 235514 - DNA, 853 bp, Unknown
  Bacterial polypeptide expressing nucleotide sequence isolated from the Sargasso Sea
cctttaactggaactttattatcaataaaagttaaagaaggagataccgttgaagttggagcactattaggtgaaattaaagaaggtcaatctatatcaaaaaaaattacagaaacaaaagtagttaaagaaactgaaaaaatttatacaccacctaaattatctagtaaaaaaaatatagaatctcatgacggcagtgaagttttaaatttacaagaggatattaaagaagacaagaaacaagaaactttggttttagatacaccggtagatgaaaaattagatacacctgtagaagaaaaatatatacctcctaaaacaaagaaaaatttatcaccagcggtaagaaagatagtagaagaaaataaaattgatatttcaaatttagaaggtacaggaaaatcaggtagaatttcaaaaggtgatcttattaatttaatgggaaatactcctcagccatctaaaagaaaaattacccacggtcctgaggagcgggtaaagatgacaagattaagatctactatcgctaaacgtttaaaagaagcacaacataatgctgctatgttaacaacatttaatgaggtagatatgcaaaatattttacaaatgagagaagattatcaagaagattttaaaaaaaaatattcggtaaaacttggcttcatgtctttttttgttaaggcttctgttgtagctttaaaaaattttcctgcagtgaatgccgaaatagaaaataattatattacttataaaaattattataatatttcaatagcgataggtacagatcgagggttggtggttcctgtacttaaaaaagctgatgaactttcttttgcagacatagaaagaa

SEQ ID NO: 235515 - DNA, 874 bp, Unknown
  Bacterial polypeptide expressing nucleotide sequence isolated from the Sargasso Sea
ggcgctgccgccgctcccgctgctgcaccggccgctgccgctgcgccggcccaggctgctgctccggctgctgttgctggtgacgacgccatcctctcgcccgccgcgcgcaagctggccgaagagaacggcatcgacccgaacagcattgccggcaccggtaaaggtggccgtgtgaccaaggaagacgtggtcgctgccgtcgaagccaagaagaacgtcccggctgccgctaccaagcctgccgctgcctcggctgctgccgctgctgtcgtcgccactggcgaccgcaccgagaagcgtgtgccgatgacccgtctgcgcgccaagatcgccgagcgtctggtcgaagcccagtccactatggcgatgctgaccaccttcaacgaagtggacatgaccgaagttatggccctgcgttcgaagtacaaggacctgttcgagaagtcccacaacggcgtgcgtctgggcttcatgtcgttcttcgtcaaggcagctaccgaagcgctgaagcgtttcccggcagtcaacgcctcgatcgacggcaacgacatcgtttatcacggctacgccgacatcggtgttgctgtgtccagcgaccgtggcctggtggtgccggtattgcgtaacgccgagcaaatgagcctggctgaaatcgagagcggcatcgccaccttcggcaagaaagccaaagacggcaagctgtcgatcgaagaaatgactggcggcaccttcaccatcaccaacggtggtaccttcggttcgatgatgtcgaccccgatcgtcaacccgccgcaggctgcgatcctgggtatgcacaacatcgttcagcgcccgatggcgatcaacggccaggtggtgatccgtccgatga

SEQ ID NO: 235516 - DNA, 908 bp, Unknown
  Bacterial polypeptide expressing nucleotide sequence isolated from the Sargasso Sea
atagtagaattagaaactgataaagtaaatgtcgaggtgccagctccatcaaatggagttctgggtaatattaaggtaaaagagggtgaaaccgttaatgttgggtcattgttgggaacaattaacgatagtgtgagcgatgatagtgtacagactaaagaagttaagtcgtataatcctccaaaaaaacaatccaaaactcctgaagataaaaagaataatataaaaaagaaaaaaacacctaaaccattaatagatgaacccgttttaaaattggaagatgaaaaaatagaggataaaccattaattttagagcaagttcatgaagagaagaaaatttcaagaaaacctttattaacaaaagaagaggcccaagtttctccagctgcaagaaagatggctagcgaagcaaaaatcaatttagaccaagttaaaggcactggaaaaaatggaataattttaaaagaggatataatggctcttatgggctcaaaacctgccccatcagaaagaaaaattaaacacggtccggaagaaagagtaaaaatgactaggcttagactaactatagctaaaaggcttaaagaggcccaagagaacgcggcgatgcttacaacatttaacgaggtagacatgagcgaggtaatagctatgagaaatcaatataaagacgagtttcaaaataattatggagtaaaattaggttttatgtctttttttgtaaaagcatgcgtgattggtttgaaaaacttcccagctattaattcagaaattcaagcagaggagatagtttataaaaattattataatattagtattgctgttggaacagatagaggcttagtggtaccagtttttagaggaacagacgaaatgtcttttgctgatattgagaaaaatattgctag

SEQ ID NO: 235517 - DNA, 574 bp, Unknown
  Bacterial polypeptide expressing nucleotide sequence isolated from the Sargasso Sea
gttgattacgttccaaaataaggattcgtttttgaaaaaacataatgtaagactaggttacatgagccttttcaccaaagcctgtaccgaagctttggaattgttccctgccgtgaatgcacgaattgaaggtaatgagatagtttttcatgattatgttgacatgggtattgcggtcagtgcaccaaaaggtttgatggtccctgtggtgcgtaatgcggaatccctttctcttgcacagatcgagattgaaatagtaagacttgcacaacgtgccagagaaaacatactgagtattgacgaaatggaaggtggaaccttttcaatcacaaacggaggagtttttggatcaatgctttccacaccaatcataaatccacctcaaagtgccatcctaggtatgcacaatattgttgagagaccaatggcagttgatggaaaaattgagataaggccagtaatgtttgttgctttgtcttacgatcaccgtgttatcgatggacaacagtcagttagttttctagttaaagttaaagaaaatctggagaatcccgcaagaatgcttctgagttga

SEQ ID NO: 235518 - DNA, 891 bp, Unknown
  Bacterial polypeptide expressing nucleotide sequence isolated from the Sargasso Sea
aaaataaactcgaaagatggagaaaatgttgaagttggatcaattctaggagttgtttcaaaaaatctatctcaagaacaaaaaaaaattaaattacaggataaaatacctccatctacagaaaaaataattgaagaagcagaagacgtaatcgaagtagaaaggactgataataaaatttatgatttaaaaaaagagcaaaagagtcaaacaaaatttactgaagatcaaaacttagaggataaaccattaatacttactaatgagattaaaaatggtaaatcaaacctacacttatcacccgcagttagaaaaataataaaagagaaaaatattaatcctgaagaggtaaaaggatctggaaagaacggcattattttaaaaagtgatcttctggatttgatgagtaaaattccggaacccaaccgtagaaaaattaaatatggaccagaagaacgcattcaaatgtctagattgagacaaacaattgcaaaaagattaaaatctgcacaagaaaatgcagctatgcttaccacgttcaatgaagttgatatgaccaatgttattaatttaagaaatgaaaaacaagatagtttcaaaagtaaatttggaaccaaattgggatttatgtcattttttattaaagcctctgtaaaaagtctaaaattatatccagctataaatgctgaaattgagggtaacgatataatctataaaaactattttaacattagttttgctgttggaacagaaaagggactagttgtacctgtaattaaaaatgctgatgaattatccttttctcaaattgaaatagaagttaaaaatttgtcacaaaaggcaaataatgcaactttatctattgaagatttacaaggaggaactttcaca

SEQ ID NO: 235519 - DNA, 679 bp, Unknown
  Bacterial polypeptide expressing nucleotide sequence isolated from the Sargasso Sea
aatgagtagattaagacagacaattgcaaaaagactcaagcaagcacaagagaatgctgctcttttaacgacatttaatgaagttgatatggcaaacgttattaaaatgagaaaagattatcaggatgattttgtaaaaaagtatggtgttaagcttggatttatgtctttttttgtaaaagcaagtattgaagctcttaaattatttccagctgttaatgctgaaatagatggtgaagaaatagtctataaaaattattataatataagttttgctgtcgctaccgataaaggattagtagttcctgttttaaaaaatgcggatgaaatgtcttttgcgcaaattgagagtgaaattaaaacaatctccgaaaaagctagagacggtaagcttagtatagaggatcttcaagggggtacatttactattagtaatggtggtgtttatggctcaatgctttctactccaattttaaatttgcctcagtcaggagtactaggcatgcataatattgttgatagacctgttgtggttgatggtggaattaaagttagacctgttatgtatttagctctttcatacgatcatagaataatcgatggtaaagactctgtatcatttttaaaattaataaaagaaaaattagagagtccagaaaaattatttttaaaaatttaa

SEQ ID NO: 235520 - DNA, 889 bp, Unknown
  Bacterial polypeptide expressing nucleotide sequence isolated from the Sargasso Sea
aaatggctaaaaaacaaaggcgacataattaatgctgacgaagctattgtagaattagagacagataaagttaatttagaagtcccatctcctattagtggaatattatctgctgttaatttcaaagatggcgatacagtagaagttggtgctattctaggagaaatatcagaagggcctgtagatcaaaaacaagaagataataaaaatgttgataagcttaaaaataaaacatctgataatataattgattttggaaaagaaaaaaaacaaaatctaaaaatttttgaaaatgaaaaaaaggaagaaccattagttttaactgaagaaaaaccattaactctaaataaagaagaaccattagttttaacaaaagagttacctaaaaaacaaaaaacaaatagtgaaaaagtattatctcctgcagtaagaaaaattgtagaagaaaacaagatagatattcaatcaatcaaaggatcaggtaagtccggtcaaattttaaaaggtgatttaattagtttaatggggtcagctccacagccatccgaaagaaaattaaaatatggtgaagaagaaagaattaaaatgagcagactaagacaaaccatagcaaaaagattaaaagaagcccaagaaaatgcagctatgttaaccacatttaatgaggttgatatgacaaatattattgaaatgagaaaaaataaccaggaagattttcaaaaaagatttggaataaaacttggttttatgtcttttttcgttaaagcttgtgtacttggattaaaatcgtttccagcaattaatgcagagatagaaggtcaagaaattatatataaaaattattacaatataagttttgctgttggaactgaaaaaaggtttagtagtc

SEQ ID NO: 235521 - DNA, 709 bp, Unknown
  Bacterial polypeptide expressing nucleotide sequence isolated from the Sargasso Sea
atgtctccagcggtaagaaaaattatagctgaaaacaaaattgatattaaatctgtaaaagggactggaaaagatggaagagtcttaaaaggagatttgattaatttaatgggttcaaatccacctccttcagagagaaaaattaaatatggtcaggaagaaagaataaaaatgaccaggttgagacaaacaatagccaagagattaaaacaagctcaagagaatgcagcactactaactacttttaatgaagtagacatgacaaatgtcatggatatgagaaaagaaaatcaagaggattttcaaagtagatatggagtaaaattgggcttcatgtcatttttcgtgaaagcttgtgtcgtagctttaaaaaattatcctgcagtcaatgcagaaatcgagggtgatgagattatttataagaattattataatataagttttgcagttggcactgataaggggcttgtagtcccagttcttaaaaatgcagatgaactttcatttgcaaatatagaaaaaaatataaaagaaatttcagaaaaagctaaagatggaaaacttacgattgaggatctgcaaggaggtacatttactatcagtaatggtggtgtatatggatcaatgctctcaacaccaatattgaatttacctcaatcaggtgtattaggcatgcataacattatagatagacccaatggtggttgat

SEQ ID NO: 235522 - DNA, 829 bp, Unknown
  Bacterial polypeptide expressing nucleotide sequence isolated from the Sargasso Sea
tggttctcaagatcaggggagagtatcagaggaagatgttaaagaattcattcgatcacaagtaactgtcaacaaaggagcggtcgagaaaaaagaatataaagaagagttctctcacgaggaatttggtcagatagaaataaaggaaattcctagagtaaaaagattgtctggtccacacttagtaaggtcttggactgaaattccacatgttactcaacatgatgaggtagacgtaactgagatggagcaatttagatcatcattgtatgactattattctggtgatgttattaaagtaactccattagcgtttatagccaaggctttagttagtgctttaaaagagttccctaattttaatgcctctattgatccaaataaaaataagattgtatataaaaaatattttcacataggttttgcggttgatactcctcatggattgatggtgccaaaaatcagggatgtggatcaaatgagtattaaagaaattggagaagctttgaagaaaactagtaagctttgtagagaattgaaaattgataaaaaagagttttttggtggttcaatgacaatttcaagtttgggagggataggtggaacgttctttactccaataattaatccgccggaagtggctattcttggagtaggaaaaacttttgatagactagttaaaataaaagggaaaatagtttcaagaaaaatactaccattatctttatcttacgatcatagattgattgatggagctgagggtgcaagattttgtgtttatttaggaaagtgccttggcaaagattttgcttttaaacttgccgtttaa

SEQ ID NO: 235523 - DNA, 880 bp, Unknown
  Bacterial polypeptide expressing nucleotide sequence isolated from the Sargasso Sea
aatgagtgaaaaagttttagtacctgctttaggtgaaagtattacagaagcaacagtatcaaaatggatgaaaaataaaggtgatactgttaatgctgatgagggtattgttgagcttgaaacagataaagttaatttagaagtgccagctccagtaagcggtgttttaactgaagtaaattcaaaagatggagatacagtagaagttggtgcgattttgggagtaatttcagaggaagtaaaaaaaatagatacaacaaatttaactaaaaaaaaagaagatgaaaacaaagtagttccaaaaagtcagagcaatgtaattagtcttgaaatagaaaaaaaagaaaaacaaaaaattaatgaacctttaatattaaatgaggaaaaacctctcattttaacagaggaagtaagggaagataaagaaacagaaaaaaacaaaattttatctccagcagtgagaaagattattactgaaaaaaaattaaatattgatgaaataaaaggtactggcaaggatgggagagttttaaagggggatttaataaatctcatgggaattaatcctaatcctaatgaaagaaagataaaatttggtgaagaagagagaattaaaatgacaaggctaagacaaacaattgctaaaagacttaaggaagcacaagaaaatgctgcaatgctaacaacttttaatgaagtagatatgtcaggaataatctcaatgagaaaggacaatcaggatgattttcagagtagatatggtgttaagcttggatttatgtctttttttgtaaaggcttgtgtggtgggtcttaaattattcccctcaatcaatgctgaagttgagggtgaagaaattatttataaaaattattataat

SEQ ID NO: 235524 - DNA, 833 bp, Unknown
  Bacterial polypeptide expressing nucleotide sequence isolated from the Sargasso Sea
aaaaatagttgctgaaaataaaattgaagttgaatcagttaaaggaacaggaaaaaatggaagaattttgaagggcgatcttatcaatctaatgtcaaatcatccaaagccgtcagaaagaaagttaaaatttggtgaagaggaaagaattaaaatgagtagactaagacaaacaattgcaaaaagattaaaacaagctcaagaaaatgctgcattgcttacaacttttaacgaagtggatatgtccggtataattgaaatgagaaaagaaaatcagaaagattttcaagatagatatggggtaaaactaggttttatgtcattttttattaaatcatgtatattagcgttaaaaacattcccagtggtaaatgctgaaatagatggggatgaaatagtctacaaaaattactataatataagttttgctgttgggacagaaaaaggattagttgtgccagttttaagaaatgcagatgaactttcatttgcagatatagaaaaaaatgtaaaaattatttcagaaaaagcaaaggatggaaaattaaatatagaagatcttcagggaggtacatttacaattagtaatggaggagtttatggctcaatgctttctacgcctattttaaatttaccccaatcagcagttcttggaatgcataatattgttgaaagaccagtcgttatagatggcgaggttaaaataagacctattatgtatcttgcactatcatatgaccatagaattattgacggcaaagagtctgtttcttttttaaaaacagttaaggaaaatctagaagatccaagaaggttatttttagaaatttaat

SEQ ID NO: 235525 - DNA, 635 bp, Unknown
  Bacterial polypeptide expressing nucleotide sequence isolated from the Sargasso Sea
tcaagagaatgccgctcttttaacaacatttaatgaggttgatatgagcagtgtgatggaaatgaggaaagaaaatcaagaggatttccaatctcgttatgggataaaattaggatttatgtctttctttgtaaaagcatgtgtagttgcattaaaaaatttccctgcggtgaatgctgaaatagacggagatgagattatctataaaaactattacaatattagctttgctgtcggaacagataagggtttggttgttccagttttgagaaatgcagatgaattatcctttgctgatattgaaaaaaatattaaagaaatttcagaaaaagcgcgagatggaaagataacgattgaagatcttcagggaggaacatttacaataagtaatggaggtgtgtatgggtctatgctttcaaccccaatactaaatttgcctcaatctggagtgttgggcatgcataatatagtggaaagacctgttattgtagacggtgaaatcaaaataagaccaattatgtatttagcattatcttatgatcacagaattattgatggaaaagaatctgtatctttccttaaaatgattaaagaaaacttagaagaccctagaaggttgtttttagatatttaaa

SEQ ID NO: 235526 - DNA, 889 bp, Unknown
  Bacterial polypeptide expressing nucleotide sequence isolated from the Sargasso Sea
ccttctcctattagtggaacacttactgcagttaattttaaagatggtgacactgtagaagttggtgctgttttgggtgaaatatcagaaggatttgtagatcaaaaacaagaagatagtaaaaaaattgagagtcctacaaagaaaacgtcagataatgtaattaattttgaaaaagaaaaaaaacagagtccggaaatttttgaaaaagaagagaaggaaaaaccgttagttttaactaaagaaaaaaaattaacctcaaataaggaagaaccattagttttaacaaaagagatgcctgttaaacaaaaaataattagtgaaaaagtattatctcctgcagtaagaaaaattgtagaagaaaacaagattgatatacgatcaattaaaggaacaggtaagtctggtcaaattttaaaaggtgatttaattagcttaatgggatcaaccccacaaccatctgaaagaaaattaaaatatggagaagaagaaagaattaaaatgagcagactaagacaaactatagcaaaaagattaaaagaagcccaagagaatgcagctatgttaaccacatttaatgaggttgatatgacaaatattatagaaatgagaaaaaataaccaagaagattttcaaaaaagatttggaataaaacttggttttatgtctttttttgttaaagcttgtgtacttggattaaaatcgtttccagcaatcaatgccgagatagaaggtgatgaaattatatataaaaattattacaatataagttttgctgttggaactgaaaagggtttagtagttccagttataagaaatgcagatgaattatcatttgcagaaatagaacaaaatattaaaacaacttctgaaaaagctaaagaaggga

SEQ ID NO: 235527 - DNA, 983 bp, Unknown
  Bacterial polypeptide expressing nucleotide sequence isolated from the Sargasso Sea
ataacagaagctacagtttctaggtggctaaagagtgagggtgatagagttgaagcagacgaacctttggttgaacttgaaactgataaggtcaatcttgaggtgccgtcgcctgtgactggaatattaaataagatttcatcaaaagatggttctgttgtagaagttggagcacttctaggttcagtcatagaaaaaaattcaagtttaaataatactaaagaaaatgaaatttcagaaaatcctgaaggaaaagacaatgttgtaaaactagaaactcaagttgaaaaaaaagagcctaaagtctttaatgaagaaaaatcaatagatgatgactataaagaagagccattaattttagataatgaagttactgatgccaaagagggagcgaatgaagagtccgatcaaatattatcgcccgcagtaagaaaaattgcgactgaaaataatattgatataaaatctgtaaaaggttcaggaaaacagggaagagtcttgaaaagtgacttaatagagttgatggggataaacccacctccatcagagagaaagattaagtatggtcatgaagaaaaaataaaaatgactaggttaagacagactattgcaaaaagattaaaacaagctcaagaaaatgcagcgttgcttacaacttttaatgaagtcgatatgtcaaatattattcagatgagaaaagataatcaagatgattttcaaaatagatatggagtcaagctaggttttatgtctttttttgttaaagcttgtgtagtcgccctaaaaaatttccctgcagttaatgcggaaatagagggggatgagataatttataaaaattattacaatataagttttgctgtaggtacggaaaagggcctagttgttcctgttcttaaaaatgcagatgaactttcatttgcggatattgaaaaaaatattaaagaaatctcagaaaaagcgagagatggaaaacttataat

SEQ ID NO: 235528 - DNA, 895 bp, Unknown
  Bacterial polypeptide expressing nucleotide sequence isolated from the Sargasso Sea
aatggtgtccttggaagtatagaagttaaagaaggcgaaactgtaaatgtgggatcattattaggtataataaataaaaatacgaacgatttaggtgaagctaaagaaacaaagacatatagcccgccaaaaaaagaacctaaaatatttgaggagaaaaaaaatattcaacaaaagaaaaaaatcaataagccattggtggatcaacaagttttaaaattagataatgagcatgttgaagatgagccattaattttggaagaaatacacgaagataaaaaagtttcaaaacaaatctttaataaaacaaaggaaacaaaagtttcaccagcagcaaggaaaatggccaatgaagcaaaaattgatttagataaagttaaaggctcaggcaaaaatggaataattttaaaagaagatattatggatctaatgggatctaagcctgcaccatccgagagaaagattaaatatggtccagaagaaagagtaaaaatgactagattaaggttaactatagcgaaaagattaaaagaggctcaagaaaatgctgccatgttgacaacctttaatgaggtagacatgagcgaggtaatcgctatgagaaatgagtacaaaggtgaattctacgataattatggagtgaaattaggtttcatgtctttttttgttaaagcttgtgttatcggtttaaaaaactttccggctattaactcagaaatacaaggagaagaaatagtttataaaaattattataatattagcattgcagttggcacagatagagggttagtagtgccagtcttaagggaaactgacgagatgtcttttgctgatatagaaaaaaatataagtagtcttggaaaaaaagctagagacggaaagattaccatagaag

SEQ ID NO: 235529 - DNA, 849 bp, Unknown
  Bacterial polypeptide expressing nucleotide sequence isolated from the Sargasso Sea
tcctactttaggcgaatcatcactgaggctactgtttctaaatggttaaaaaatgttggagagccttttgatgtagatgaaccgttggttgaaatcgagacagataaaattacagttgaagttccagcacctcaagcaggatctttatcagaaataaaagctaaagaaggttctgatattcatattggtggagttttaggtattattggagattctaatggttcaaaaaaaactcaagttaataaaacaaaaaatattgaacctaaaaaagaaaaaatatttgagaaaaatataaaggaaaataaaaaagcaaatcaaaataataataaattatctccatcagtaaaaaaaatgcttgaagaaaataatcttgatgcaagtttagttaaaacacaacgagatgatggtcgtattactaaagaggatattttaaatcatttagaaggaaaaaatacattaaaaaaacaaaaacctactgatagagaagaaatagttcctatgtctaaaatcagacaaactatagcaacacgactaaaagaatcacagaatactgcagccatcttaactacttttaatgaagtagatatgtcagctatcatagaaatacgagagaaaaaaaatgatgattttaaagaacgttatggaattaaattaggattcatgtctttttttgtaaaagctgtagtgatgagtcttcaagaatttcctgctgttaatgctgaaatacgagaaaacaatattgtttacaaaaatcattttgatattggtatagctgttggtactgaaaaaggcttagttgttccagtattaactaatgctgatgaaatgacttttggagatatagaaaaa

SEQ ID NO: 235530 - DNA, 851 bp, Unknown
  Bacterial polypeptide expressing nucleotide sequence isolated from the Sargasso Sea
aatgtcagaaaaaattacagttccaagtcttggtgagtcagttactgaggcaacagtctctaaatggcttaaatctcaaggagataaagtagttgcagacgaacctatagtagaattagagacagataaagtgaatgtcgaggtacctgcaccaacaaacgggattttaggtagtattgaagttaaggagggacaaacagtaaatgtgggatctcttctaggaataataaataatatttctaaccaaaaaattgaaagtccaaaagagattaaaagttacaatcctccagcaaaagagcctaaattatttaatactgaaaaaaataaatctttacaaaagaaaaataataaacctaaaattaaagagactattttaaaattagatgatgaaaatgtagatgaggaacctttaattttaaaagaagcacataatgaaaaagttatttcaaaaaaaaacccatctttaaataaacaaaaacagatttcccctgctgcgagaaaaatggcaaacgaagcgaatgtcgatatcgataaaattgaaggtacaggtaaaaatggtttaattttaaagggtgatataatggcattaatgggctcaaaaccagccccgtccgatagaaagataaaatttggcccagaagaaagagttaagatgactaggttgagacttacaattgcaaaaagacttaaggaagctcaagaaaacgcagcaatgcttactacatttaatgaagtagatatgagcgaggtaattgcaatgagaaaccaatataaagatgaatttcaaaaaaattacgatgtgaaacttggattcatgtcattctttgttaaagcatgtgttataggtttga

SEQ ID NO: 235531 - DNA, 289 bp, Unknown
  Bacterial polypeptide expressing nucleotide sequence isolated from the Sargasso Sea
aataagtattgaagatcttcagggaggaacatttactattactaatggtggaatttatggttctatgctttcaactccaatactaaatcctccacagtccggagttctcggtatgcataatataattgaaagagcagttgttaaagatggacagatcataattagaccgatgatgtatctcgctttatcctatgatcatagaattgtagatggaaaagaagcagtttcatttttaaaaaatattaaagattctttagaagagccacaaaggcttttcttaaatgtataa

SEQ ID NO: 235532 - DNA, 862 bp, Unknown
  Bacterial polypeptide expressing nucleotide sequence isolated from the Sargasso Sea
gttttagagagcatatcagttaaagaaggtgagaccgttaatgttggagccttacttggtatgataaatggatcagcaaaaaaagtttcaaaaaggattgaagaagttaaggattattctccaccaaagaaaaaaaatgaagttttaaaaaaacctaaagaagaatctattaaactttttgaaaagaatgaagaaaaacctttaaaacttgtagaggaagagacaaaacctttaaaatttaaggaagaagaagaagctttagtattagataattttcatgaagaaaataaaacaataaaagttaaggagcctactatttctccagccgctaggaaaatggctactgaagctaaagtagatttaagcaaaattgaagggtcaggaaaacatggtgttattttaaaagaagatattatgagtttaatgggttctaaaccatctccttcggagagaaaaataaaacatggtcccgaagaaagaataaagatgactagactacgattaacaattgctaaaagattaaaagaagctcaagaaaatgctgcaatgctaactacttttaatgaagttgatatgagcgaagtaattgccatgcgaaatcagtataaagatgagttccaaaaaaattatgatgtgaaacttggtttcatgtcattttttgttaaagcttgcgttataggactaaagaattttccagctataaatgctgagattcaaggcgatgagatagtttataaaaattactataatataagcattgctgttggaactgatagaggtttagtagtgcctgttctaagagaaacagatgaaatgtcatttgcagatattgaaaagaatattggaaagttaggagaaaagg

SEQ ID NO: 235533 - DNA, 559 bp, Unknown
  Bacterial polypeptide expressing nucleotide sequence isolated from the Sargasso Sea
caagatgattttcaaaatcgctatggtgttaaattgggattcatgtcctttttcgttaaagcaagtatagtagcattaaaaaatttcccagcgataaatgctgaaattgaaggtgatacaattgtttataaaaattattataatataagttttgcagttggcactgaaaaaggattggttgttcctgttttaaaaaatgcagatgaattatcttttgctgatattgagaaaaatatcaaagatatctctgaaaaagcaaaaaatggaaaacttactattgaagatcttcaagggggaactttcactatcagtaatggtggtgtttatggttcaatgctttcaactcctattcttaatcttccacaatcaggtgtcttgggtatgcacaatatagttgatagacctatcgtagttgacggagaaattaagatcagacctataatgtacttggcattatcatacgatcatagaattgttgacggtaaagagtctgtttcctttttaaaaatgatcaaagaaaatttagaggaaccaagaaggctatttttggatatttaaa

SEQ ID NO: 235534 - DNA, 933 bp, Unknown
  Bacterial polypeptide expressing nucleotide sequence isolated from the Sargasso Sea
gaaagcattactgaagcaaccttagcaaaatggctcaaaaagaagggagagagtattaatgcagatgaagcattagttgagttagagactgataaagtaaatcttgaggttccgtctcctgttagtggagtagtttcagaaattaattttaaagatggagatactgtcaaagtaggcgaagtattaggtttagtttccgaaaataatatcggtgataaaaaagttgaaaagttaaaaacaaaccaaaaaccaaaaacaactgaatctgaaaacgttgtaaaattaaacaagaataaagaaagtgaaatagaaatttttgaagaaaaattacaagatgagaatcaaattgataacgaagaaccattagtcttgactgaagaaattttagataaaaataaaaaagaggaaaaaattttatctccagcagttagaaaaattgtagcagaaaaaaaaatcaaaatagaggaaataaaaggaactggtaaagatgggagaattttaaaaggtgatttgcttaatttaatggggactaagccagctccaaatcaaagaaaagtgcaatatggggaagaagaaagaattaaaatgtcaagattaagacagactattgctaaaagattaaaggaagcacaagaaaacgctgctttacttacgacatttaatgaagttgatatgtcaaatataatatcaatgagaaaagaaaaccaagatgattttcaaaatagatatggaataaaactaggctttatgtcgttttttgttaaagcttcaattgttggacttaaattgtttccagctataaatgcagaagttgaaggtcaagaaattatatataaaaattattataacataagtattgccgttggaactgagaaaggtttagtttgttcagtgattaaagatgcagacgagttatcttttgcagatatagaa

SEQ ID NO: 235535 - DNA, 593 bp, Unknown
  Bacterial polypeptide expressing nucleotide sequence isolated from the Sargasso Sea
tatgagcgaggtgatcgcaatgaaaaaacaatataaagaggagtttcaaagcaagtattcagtaaaattaggttttatgtcattttttgttaaagcttgcgtaattggactaaaaaattttccagctatcaatgctgaaattcaaggcgatgaaatagtttataaaaattattataatataagtatagcggtaggaactgatagaggtttagtagtaccagtcataagagaaacagatgagatgtcttttgcagatatagaaaaaaatattgttgaactaggagaaaaagcacgagatggcaaaataacaatagatgatttacaaggtggaacttttactattacgaacggcggtatatatggttcaatgctatctacaccgatattaaatcccccgcaatccgcggttctaggcatgcataacatagtagaaagacctgtagttgttgaaggcaacgtagaagtaagaccagtgatgtatttagctttgtcgtatgatcacagaataattgatggaaaagaagcagtttcttttttaaaaattgttaaagagtcattagagcaaccaaaaagactttttttaaatatttagc

SEQ ID NO: 235536 - DNA, 730 bp, Unknown
  Bacterial polypeptide expressing nucleotide sequence isolated from the Sargasso Sea
aatgaaagatttaaaggaggtaaagacatataaccctccaaaaaaacaatctaacaaacatcctaaactatttgatgacaaaaaagatgacatcaaaagtatcaaaaaaattgaagaacaagttttaaaacttgataatgaaaaaacagatgatagtgaaccacttatattagatgaattacatgaagaaaagaattttaccaaacagcctttagaagtcttaaaagaaaataaagtctcaccgtcagctagaaaattggcaagtgaagcaaaaatagatttagaaaatgtaaaaggatcaggaaagaatggaataattttgaaagaagatgttatggctcttatgggttcaaagccagctccttcagaaagaaagattaaacatggccccgaagaaagagtaaaaatgacaagactcagacttacaatagccaagagattaaaagaggcgcaagagaacgcagcaatgttaacaacatttaatgaagtggatatgagcgaagtaatttcgatgagaaatgaatataaagaagagtttcaaagaaattatggagcaaaattaggttttatgtctttttttgtaaaagcatgtgtaattggcttaaaaaattttccagctttaaattcagaaatccaaggagaggaaattatttataaaaattattataatataagtattgctgttggtacagatagaggtttagtagttccagttttaagagaaacagac

SEQ ID NO: 235537 - DNA, 841 bp, Unknown
  Bacterial polypeptide expressing nucleotide sequence isolated from the Sargasso Sea
ttgtctccagcagttagaaaaatagtaactgaaaataatatagatattaattcaattcaaggttcaggaaaagatgggagagtcttaaaaggagatttaataagtttgatgggtgcaaatccaaaaccatctgaaagaaaaattcaatatggtgaagaagaacgaattaagatgactaggttgagacaaactattgcaaaaagattaaagcaagctcaagagaatgctgctcttttaacaacatttaacgaggttgatatgagcagtgtgatggaaatgaggaaagaaaatcaagaggatttccaatctcgttatgggataaaattaggatttatgtctttctttgtaaaagcatgtgtagttgctttaaaaaatttccctgtcgtgaatgctgaaatagagggtgatgagataatatataaaaattattacaatattagttttgcagttggaacagataaaggcttggttgttccagttttaagaaatgcagatgaattatcttttgctgaaatagaaaaaaatattaaagaaatttcagaaaaagcacgagatggaaagttaacgattgaagatcttcagggaggaacatttacaataagcaatggaggtgtgtatgggtctatgctttcaacgccaatactaaatttacctcaatctggcgtgttgggtatgcataatatagtagaaagacctgttgttgtagatggtgaaatcaaaataagaccaattatgtatttagcattatcatacgatcatagaattattgatggaaaagaatctgtgtctttccttaaaataattaaagaaaacttagaagaccctagaaggttgtttttag

SEQ ID NO: 235538 - DNA, 881 bp, Unknown
  Bacterial polypeptide expressing nucleotide sequence isolated from the Sargasso Sea
aaagctgacgaaccagttgtagagttagaaaccgacaaagtgaatttagaagttccatcacctctaactggagtcatagaagaaattaacgccaaaaatggagaaatagttgaagttggagctttactcgggtctataagcagcaatgtgtcgagcaaaaaagttaaagtagaaaaaaacgaggtatcaaaatcagtatcagaaaataatattgtaaattttaataatgagagaaaaaaagatgtaccgaaaatttttgatgaagaaaaaaatgatcttaaagaaaaaccgttagttttaataaatgaaattcatgaaaaaaaacctttaattttaaaagacagaaatgagagcctttcacctgctgttagaaaaattgtttcagaaaataatatagatataaaaaaaatcagtggttcaggaaaagatggcagaattcttaagagtgacttaattaatataatgggtgaaatcccaaaagtttctgagagaaaaataaaatatggacaagaagaaagaataaagatgtcacgtttaagacaaacaatagctaaaagattaaagcaagcacaagaaaatgcagcactactaacaacttttaatgaagtagatatgacaaatattataggtatgcgaaatgaaaaccaaaaagattttcttaatcgttatgggattaaacttggtttcatgtctttttttgtaaaggcttgtataaatgctttaaaaatttttccagcagtcaacgctgaaatagatgatgatgaaataatctataaaaattattataatattagttttgcagttggtactgaaaagggacttgtagttcctgtaattaagaatgctgatgaactttcatttgcagatattgaaaaaaaaat

SEQ ID NO: 235539 - DNA, 655 bp, Unknown
  Bacterial polypeptide expressing nucleotide sequence isolated from the Sargasso Sea
caagtaggttcagtattaggagtcatttcagattcaaaagaaaatggtgaaaatgtaaaacctgaaaatatcaaaattcaagaagaagaagaaaaatctaattcagatgaaatagccaaaaatgctgcagctaataaagaagactcaaatattcaagatggacccttaattctaaatgaagaggaacaacctttaatactaagtgaagaactagaaataaacgaaaaacctcaagaaaatttagagaaaaataaaaatttatctcctgctgtaagaaaaatagttacagaaaacaatatagatataaacaaaattagaggcactgggagagaaggtagaattttaaaaggtgacctaataagtttaatgggagaaaatccacaaccaaatcaaagaaaagttaaatatggagaagaagagagaattaagatgacaagacttcgtcaaacaatagcgagaagacttaaagaggctcaagaaaacgcagctatgctaactacctttaatgaagttgatatgtcaggaataatctccatgagaaaagaaaatcaggaagattttcaaaatagatataatataaaattaggttttatgtcatttttttgtaaaagcttgtgtcgtaagattaaagttatttccagaaataaatgctgag

SEQ ID NO: 235540 - DNA, 757 bp, Unknown
  Bacterial polypeptide expressing nucleotide sequence isolated from the Sargasso Sea
tttagagaaaaatactaaatcaataattgaggatgacaatgttattaaattggaaaactcaacagaaattgaggagccagaaatatttgaagagaaagatgacgttagtgtgttagatgaaaaaccactagtactgacggaagaagtggatgaaaaaaaatctgaaatagagtcaaaacatgaacaaaccttatctccagcggtaagaaaaattgtaaatgataacaatatagatattagttcaattcaaggctcaggaaaggacggaagagtattaaaaggtgatcttataaatttaatgggtatcaatccgcctccttcagaaagaaaaattaaatatggtcaagaggaaagaattaaaatgaccagattgagacaaactattgcaaaaagattaaaacaggcacaagataatgctgcattacttacaacctttaatgaagttaatatgtccaatgtgatggagatgagaaaagaaaaccaagaagatttccaaaatcgctatggagtgaaattaggttttatgtctttttttgtaaaagcatccgttgtagcattaaaaaattttccagcaataaatgctgagattgagggtgatacaattatttataaaaattattacaacattagttttgctgtaggtactgaaaaaggacttgtcgttccagttctaaagaatgctgatgaattatctttcgcagatatagaaaaaaacattaaagaaatttctgaaaaagcaaaaaatggaaagcttaca

SEQ ID NO: 235541 - DNA, 646 bp, Unknown
  Bacterial polypeptide expressing nucleotide sequence isolated from the Sargasso Sea
ttaaaacaagcccaagagaatgccgctcttttaacaacatttaatgaagttgatatgagtagtgtaatggaaatgaggaaagaaaatcaagaggatttccaatctcgttatggaataaaattaggatttatgtctttctttgtaaaagcatgtgtagttgctttaaaaaatttccctgctgtgaatgctgaaatagacggagatgagattatctataaaaactattacaatattagctttgctgtcggaacagataagggtttggttgttccagttttaagaaatgcagatgaattatcctttgctgatattgaaaaaaatattaaagaaatttcagaaaaagctcgagatggaaagctaacgatcgaagatcttcagggaggaacgtttacaataagtaatggaggtgtatatgggtctatgctttcaaccccaatactaaatttacctcaatctggagtgttgggcatgcataatatagtggaaagaccggttgttgtagatggtgaaatcaaaataagacctattatgtatttagcattatcatatgatcacagaattattgatggaaaagaatctgtatctttccttaaaatgattaaagaaaacttagaagaccctagaaggttgtttttagatatttaaa

SEQ ID NO: 235542 - DNA, 551 bp, Unknown
  Bacterial polypeptide expressing nucleotide sequence isolated from the Sargasso Sea
tttggaggaaataccaaaaattaaaacttcttcaaaaaaaatagtcaaaaatcaaaaagagagacaaatttcaccatcagccagaaaaatggccaacgaggcaaacgtagatataaatcaagttcaaggatctggaaaaaatggagttattttgaaagaggatattatgagcttgatgggctcaaaaccctctccttcagagagaaaaataaaacatggaccggaagaaagagtgaaaatgactagattgagattaaccatagccaaacgtcttaaagaggcacaagaaaatgcagcgatgctaacaacatttaatgaagtagatatgagcgaagtaatttcaatgagaaatcaatacaaagatgaatttcaaagtaattatggagttaaactaggtttcatgtctttctttgttaaagcatgtgttattggattaaaaagttatccagctgttaacgctgaaattcaaggtgaagaaatagtttataaaaattattataatattagtattgcagtaggaactgatagaggtttagttgtaccggttttaa

SEQ ID NO: 235543 - DNA, 1132 bp, Unknown
  Bacterial polypeptide expressing nucleotide sequence isolated from the Sargasso Sea
tatgagtgaacaaatattagtaccagttttaggcgaaagcattacagaggcaacagttgccaaatggttgaaaagcgttggagacactgttgaggttgacgagccaattgttgaattagaaacagataaagtaaatttagaagttccatctccagtaagtggtactattggagatattaaatttaaaaatggtgacgttgttgaagttggagcagttttgggttcaatagaaaataatggcaaagctaaagttaaagaaactagtaaaataaaaatagacaaatctaaaaaactcgaagttaaagttgataatattgtaagattagaggatcaaaaaacacctaatatttttgaaaataatgaagaagttgaaaatgaaaacaacaaaactaaaaaaaaggaggatgatacactaattttaacggatgaaataaaagaaaataattcctcatcaaaactatctccttcggtaagaaaaatagtggctgaaaaaaatatagatatagaaaaaattgaaggaacaggaaaagacggaagaatttctaaaggtgatttaattaaattaatgtcgttaaaacccaagccttcagaaagaaaaattaaatttggccaagaggaaagaattaaaatgagtagactaaggcaaacaattgcaaaaagattaaaacaagcccaagaaaatgctgcacttttaactacgtttaatgaagttgatatgaccaaaataattgaaatgaaagaaaaaaacaaaaaagagtttcaaaaaaaatatggaactaaactaggttttatgtctttttttgttaaagcatgcgtcctaggactgaaatcatttccagctgtaaatgcagaaatagacggtgatgaaatagtttacaaaaactattacaatattagttttgctgttggaacagataaaggtttagtagttcccgtcataaaaaatgcagatgaaatttcttttgctgagatagaaaaaaaaataaaaaacttatctgataaagcaagagaaggaaaacttactatcgaagatttacaaggtggaacttttacaataagtaacggtggagtatatggatcaatgtttatcactcaaattttaaattttacacaatcaggtgttcttggaatg

SEQ ID NO: 235544 - DNA, 894 bp, Unknown
  Bacterial polypeptide expressing nucleotide sequence isolated from the Sargasso Sea
ccccagctgcaaaaaaaataatggctgaacataatatagatgagagagacgtcacaggatctggaaaagaaggcagaattctcaaagaagatgtaaaaaactttattgcagataataaatttccaaaaaataaagaaccagaaaaacccaatacttctgaatttaaggggcaagaatttagagattctcaaggacaattagaggaagtcaaaagaatgtctcgtttaagacagacaattgcagaaagattaaaatctgctcaaaataccgctgcaattcttacgacctacaatgaaattgacatgactgaagttatggcaattagacaaactttcaaagatgagtttgagttaaaacactcggttaaacttggctttatgtcattttttattaaagcttgctgtcatgccctaaaagaaattcccgaagtcaacgctgagattcgcaaaacagatattgtctacaaaaactttgttaatatgggagttgccgttggaacggaagatggtttagtagttcccgttataagaaacgccgatgagcttagcttcgctagtttggaaattaaactaaatgagcttggtaataaagctagaaacggcgaacttacaatgtctgaaatggcaggcggcacattcacaatttcgaacgggggagtatatggttcactaatgtcttcacctatacttaaccctcctcaatcaggtattttaggaatgcacaaaattcaagaaagacctatcgctttatcaggagagattgtaatcagacctatgatgtatctggcactcagttatgatcacagaatagtagacggaaaaggcgccgtgacctttcttgttagagttaaggaagctctcgaagaccctaggcgactcttaatggatctttagt

SEQ ID NO: 235545 - DNA, 898 bp, Unknown
  Bacterial polypeptide expressing nucleotide sequence isolated from the Sargasso Sea
caaaataccgatatcgaaaacgctccctcagcgaaaaagctcatggcagaaaataaaatttcatccgataaaatcgctggaacgggaaaagatggtcgaataatgaaaaacgacgtgctcaaagctgtacagtctgttgtggttgaggaaacagaaatgagttcaacccttcgcgctcctagttcagtagaagatgcagatcgggaagaacgggtaaaaatgacccgattacgacaaacaatcgcgaaacgcctcaaagacagtcaaaatacagccgcaatgctaacaacttacaatgaagtagatatgactgaggttatatcgcttagatctgaatttaaggaattatttgaaaaaaaacacggtaccaagcttggttttatgtcgttctttacaaaggcttgctgccacgctctcaaagaagttccagaagttaatgcagaaatagacgcaaccgatattgtttataaaaattatgtgcacatgggaatagctgcaggaacccctaccggattagtcgttccagttattcgaaatgccgatagcatgtcttttgcagatatcgaaaagtctatcgctgaaaaaggaaagcgagcaagagatggtaaactcagtatggatgaaatgcagggcggaaccttcactatttcaaatgggggagtttacggatctctcatgtcttcaccaattttaaatccaccacagtctggaattctgggcatgcataaaatccaagaccggcctatggcgttaaacggcgaagtagtaatccggccaatgatgtatctagccttgagttacgaccatagaattgtagacggaaaaggcgcagtaacatttttagtaagggtaaaagaagctctagaagacccgaggcggcttcttatggatctttgat

SEQ ID NO: 235546 - DNA, 1093 bp, Unknown
  Bacterial polypeptide expressing nucleotide sequence isolated from the Sargasso Sea
acccttagtcgaaatagaaactgataagataacagttgaagtttctgctccaaaagcaggagccctatctgaaattaaagttcaagttggtgaagatgtaaagattggaggtgttttgggaattattaatgagaatcaaaatgaaataacgaaatcaaattctccaaaagaagagaaacaaaagccttctttaaacaatcaacaaagtaatgacattaatattgaaaattctattgaagaaaaaaaattatctccagctgttagaaaaatggttgaagaaaataaattagattcttctaatattaaatcttcaagagcagatggaagaattacaaaagaggatttaattaatcaccttaataatgattcaattaataaaaatatttcgaccaaagatagagaagaaattgtcaaaatgtcaaagataagaaaaacaattgcaaatcgtttaaaagattcacaaaatacagctgcaatattaacaacatttaatgaagtagatatgaattctattattgaaattagagaatcaaagaaaaatgattttaatcaaaaatatggtgtaaaacttggttttatgtcattttttgtaaaagcagttgttgcttcattacaagaatttccagcagtaaatgctgaaattagagatgataatatagtttataaaaatcattttgatataggcatagcagttggtactgaaaaaggattagtcgttcctgttttaaaaaatgccgatcaaatgacatttggagatattgaaaaaaatatttttactttaagttcaaaagcaaaagatggaaccttaactattgatgatttaacagggggcactttcacaatttcaaatggtggtgtttacggatcaatgttaagtacaccaataattaatacacctcaatcaggtatattgggaatgcataatatcaaaaaaagagctgtagtgattaacgatgaagtcgttgttcgtccaatcatgtatgttgctttaagttatgatcatcgtataattgatggaaaagaaagtgtaagttttttagtatcagttaaagatttattagaaaatccatcaaaattaatactaggtttttaa

SEQ ID NO: 235547 - DNA, 1321 bp, Unknown
  Bacterial polypeptide expressing nucleotide sequence isolated from the Sargasso Sea
atgagtgaaaaaattgtagttcctgctcttggagaaagtattactgaggcaacagtagcaaaatggcttaaaaatactggtgatactgttgaagcagatgagccgatagtagagcttgaaacagataaagttaatcttgaagtgccatctccagttaaaggagtattaacagaaataaattcaaaagatggttcagtggtggaagtcggagcattgcttggcttggtgtctgaaaatggatcggcgggttcggttaaaaaagaggaaattaaaaaaatagaacccaatcaaacagaagacaacgtaataaaattagatccatctaaaaaagagccaaaaatttttgaggaaaaaaagacagaaaatacacaggatgaacctttaatcttaactgaagaaattacagaggaagaagttccaaagcctaaaatagaaaaatcagaacctaaaactaatacggaaagccaaacactttcaccagcagttagaaagattgttatagaaaacaaaatagatattaattcggttaaaggctcaggaaaagatggaagagttttaaagggtgatcttataagtttaatgggagctaatccgcagcctgcagaaagaaaagttaagtatggccaagaagaaagaattaagatgaccagactaagacaaacaatagctaaaagattaaaacaagctcaagaaaatgcagcattattaacaacttttaatgaagttgatatgaccaatatcatggaaatgagaaaagaaaaccaacaagattttcaaagtcgatatggaataaagttaggatttatgtcattttttgcaaaagcatgtgttgtagcattaaaaaacttcccagcagttaatgctgaaatagacggtgatgaaataatttataaaaattattacaaccttagttttgcagttggaacagaaaaaggtttagttgtacctgtcttaaggaatgctgatgaattatcatttgctgaaattgaaaaaaatattaaagatatttcagaaaaagcaagagatggtaaattaacaatcgaagatcttcaaggtggaacatttactattagtaatggtggagtttacggatcgatgttatcaactccaatattaaaccttcctcaatcaggtgtacttggaatgcataatattgtcgacagacctatagttgttgatggtgaaattaaaattagaccaataatgtatttggctttgtcatatgatcatagaataattgatggtaaagaatcagtttcatttttaaaaatggtaaaagaaaatttagaggaccctagaaggttatttttggatatttaaa

SEQ ID NO: 235548 - DNA, 1039 bp, Unknown
  Bacterial polypeptide expressing nucleotide sequence isolated from the Sargasso Sea
tatgagcgaaaatatattagtcccagttcttggagaaagtgtaaccgaggctacagttgcacgttggttaaaaaaagaaggagaaaaagtatctgcagacgagccagttgtagagttagagaccgataaagtaaatttggaggttccgtctcctgttagcggagtaatctcaaaaataaattccaaagatggagataatgtagaagttggatcaatcttgggtatcgtttcaagtggttccaatgatcagcccgaaaaattgcaaataaacgaaaaaatcccaccagttacagagaaaataattactgaggcagaaagttttgtagaggaaaaatctaaaaaagaagatgctataaaatctaatgaacaaaatgacagacagatagaaactaaaatttttgatatagaggataaggatgaaccattagttctaacaaatgagattaaaaatggaaaatctgagattttgaataataatctttcaccagcagtcagaaaaatagttacggaaaaaaatttgaaacttgagggaattagaggatctggaaagcgtggagcaattttaaaaggtgatcttttaaatttaatgaataagacaccagaaccaaatcaaagaaaaataaagtatggtccggaagaaagaatacaaatgtctagattgagacaaacaattgcaaaaagattaaaatctgcgcaagaaaccgcagcaatgctaactacttttaacgaagtagatatgtccaaggtaataaattttagaaaagaaaatcaagacgagtttaaaaataaatttggtacaaaattaggctttatgtcattttttgtgaaggcttcaataaaaagtttaaagttatatcctgtagtgaatgcagagatagaaaacaatgacataatttataaaaattattataatattagttttgcagttggaactgaaaaaggattagttgtacctgttttaaaaaatgcagatgaaatgtcatttgcagatattgaaagcaatataaaaactttatcggataaagcaaatagtggttct

SEQ ID NO: 235549 - DNA, 832 bp, Unknown
  Bacterial polypeptide expressing nucleotide sequence isolated from the Sargasso Sea
aatgagtgaaaaaatagtagtcccagttcttggtgaaagtataacagaagcgactgttgcaaaatggttaaaaaatgcaggtgatacagtcgaagcagatgagccaattgtagaacttgagacagacaaagtaaacttagaagtgccatctccaatttctggtgtgttaacagagataaattcacaagatggatcagtcgttgaagtaggagcattattaggttctgtatcagcagaaggtggagcagttaaatctgcgccaaaaacccaaaaagaaatcaagcaagaggaaatagttcctgcagagagcaatgtaataaaattagatgcaaataaaaaagaaccaaaagtatttgaagaaaaagatatagaaaaacccaaagagaaaccattggttttaactgaggaagttaaaccagatgttgctccaaaaagaaatgttaatccaaccttgtctccagcagtgagaaaaatagtaactgaaaataatatcgatattaattcaattcaaggttcaggaaaagatgggagagttttaaaaggagatttaataagtttgatgggtgcaaatccaaaaccatctgaaagaaaaattaaatatggtgaagaagaacgaattaagatgactaggttgagacaaactattgcaaaaagattgaagcaagctcaagagaatgccgctcttttaacaacatttaacgaggttgatatgagcagtgtgatggaaatgaggaaagaaaatcaagaggatttccaatctcgttatgggataaaattaggatttatgtcattctttgtaaaagcatgtgtagttgctttaaaaatttccctg

SEQ ID NO: 235550 - DNA, 584 bp, Unknown
  Bacterial polypeptide expressing nucleotide sequence isolated from the Sargasso Sea
actaatggagatgcgtaagaattatcaagaaagttttgaaaagaagaacggtgtaagactaggttatatgagtttttttgttaaagcatcgatagacgctttgagtgaatttccggctgtaaatgcggaaatagatggtaatgatattatttataagaattattataatataggtgttgctgttggtacatctcaaggtttggttgttcctgttctaaaaaatgcagacaaaatgtcttttggcgaaactgaagcaacaattgctgaatttggtaaaagagcaaaagaaggtaatttagcaatgtctgacatggcaggtggaacttttactatctcaaatggtggtgtctatggatcattgatgtcttcaccaattttaaatccacctcaatctggtattttagggatgcacaaaattcaaaaaagaccagttgcaataggtgataatattgagattagaccaatgatgtatctcgcgctttcatatgatcatagaataattgatggccgtgaagcagtctcttttttagttaggatcaaagaaataatagaagatcctagacgtcttgtagtaggcgcatagt

SEQ ID NO: 235551 - DNA, 556 bp, Unknown
  Bacterial polypeptide expressing nucleotide sequence isolated from the Sargasso Sea
atgattttcaaaaaactttatggaattaaactaggatttatgtcgttttttgtaaaggcatgtgttctagggttaaaactttacccaagtattaatgctgaggtagataatgatcatataatatataaaaattattataatataagttttgctgttggaactgaaagaggtttagttgttcctgttttaagaaactccgatgaattatctttttctgatattgaaaaaaatattaaatcaatttctgaaaaggctaaagatgggaatttaactattgatgatctgcaaggaggtacctttactataagtaatggtggagtttacggatctatgctttcaacgcctattttaaatcctccgcaatccggagtactcggcatgcataatataattgaaagaccaatagtagttgagggtcaaatacaaatacgaccagtaatgtatcttgctttatcttatgatcatagaataattgatgggaaagactcagtttcttttttaaaaacagttaaagaaaatttagaggatccaagaagattatttttaaatatttaat

SEQ ID NO: 235552 - DNA, 1242 bp, Unknown
  Bacterial polypeptide expressing nucleotide sequence isolated from the Sargasso Sea
tatgagtgaaaaaattttagttccagaattaggagaaagtataactgaagcgactgtttccaaatggcttaaaagtgcaggagatagcgttgaagcagacgaaccgattgttgaattagaaacagataaagttaatcttgaagttccctcaccagttaatggcgttttaggaaaaattaatgctagtgaaggagatgtagtagaggtggggtctactttaggtcatattaattcaggatcaaatattcaaacttctgatatttcaaaaaatgaagatgttaaaaaaaaagagaacaacgttatcaaaattgaagttgaaaaaaaaactgaaccaaaagaaataaaaattctaagcgaagaagaagacaaagatgaatttgaacattcgcaggagcaagactctccatctatcgatgatgatacattggttttgacaaatgaggttgaggaaaaaatagaagttgagcataatctctcaccagcagttagaaaaatagtttctgaaaaaaaaattgatatccaaaaagttaaaggaacaggaaaagatggaagagtattaaaaggagatttaattaatctaatgggagttaatcctggaccatcagagagaaaaatcaaatatggccaagaagaaagaataaaaatgacaaggttaaggcaaacaatagccaaaagattaaaacaagcacaggagaatgctgctttacttacaacatttaacgaagtggatatgacaaacattgttgaaatgagaaaagaaaatcaggacgattttctggaaagatatggaattaaattaggatttatgtcattttttgtaaaggcttctgttgttgcacttaagagtttccccgcagttaatgctgaaatcgaaggagacgaaatagtatataaaaattattacaatataagttttgctgtaggtacagaaaaagggcttgtagttccagttttaagaaatgcagatgaattatcgtttgctgatattgaaaaaaatataaaagatctatctgataaagctaaagatggaaaacttaccattgaagatcttcaaggaggaacttttacaattagcaatggtggcgtttatggatcaatgttatcaactcctatacttaatttaccacagtctggagtgctaggtatgcacaatattgtagataggcctttagttgttgatggggaaattaaaatcagaccagttatgtatttagcattgtcttatgatcatagaattataga

SEQ ID NO: 235553 - DNA, 1339 bp, Unknown
  Bacterial polypeptide expressing nucleotide sequence isolated from the Sargasso Sea
atggaagaaaaaattttggtaccagctcttggagaaagtataacagaagcaactgttgctaaatggttaaaaggtgttggagacacagttaaagcagacgagccaatagtagaattagaaacagataaagtaaatttagaagttccatcacctattaatggcagattggaagaggttaaagcaaatgatggagaagtagttaaagttgggtctctgcttggttcaataaaaaaaatggatattaaaagtgaagaaactgaaataaaaaaaataactccaactactgttaaaaaagaatcgagcaaattaccagtagatactgaaaaaataataatagaagctgaaaaaactcttgaggttgatgcggagccaaaaatttttgagcaatctgcaaaagaatctttgaacaaagaagtaccattaactttacaagatgaggaacctttaattttaagcaatgagatagataaaaaaaatctaagagaagaactttctccagctgttagaaaaatagtttctgaaaataaaattgatttaaaaaaagtaaagggatcaggaaaaggcggaagaataataaaaggtgatttaatttcaattatgggaaaaaatcctgctccatcagaaagaaaaattaaatatggcccagaggaaagaattaaaatgactagattaagacaaacaatagcaaaaagattaaaacaagctcaagaaaatgctgctatgcttacaacatttaatgaagttgatatgagcggtgttattgaaacaagaaaccagaatcaagaaaatttcacaaaaagatatggagttaagctaggctttatgtctttttttattaaatcatgcattattggacttaaaaatttcccagcaatcaatgcagaaatagaaggggagaatattgtttataaaaattattacaatattagttttgcagttggaacagaaaagggtttagtagtaccggtcataaaaaatgcagatgaactttcatttgcagatattgaaaaaactataaaagctttatctgaaaaggccagagatgggaaattgtctattgaagatctccagggtggaactttcactattagcaatggtggagtatatgggtcgatgttatcaactccaatattaaatccaccacaatcaggtgttttaggaatgcataatatagttgatagaccaatagttagtaatggagagataaaaattaaaccagttatgtatcttgctctatcatatgatcaccgaataattgatggaaaagattcagtgtcatttctaaaacttattaaagaaaatttagaagaaccaaaaaaattatttttaactatttaaa

SEQ ID NO: 235554 - DNA, 812 bp, Unknown
  Bacterial polypeptide expressing nucleotide sequence isolated from the Sargasso Sea
tatgtccgtagatattaaagtaccatctcttggtgagagtgttgtagaagcaactgttgctaagtggtataaaaatgagggagacagcgttacgctagatgaaccactgcttgagttagaaaccgataaagtgactcttgaagttccttcccctacatcaggattgatcgaaaaaatttcatcgcctgaaggttcaacggtcgaggtaggcgcattactgggagtcattaatgatactgcagaagtaaaaatagctcctgaaaattcagagaaaatagttaccacaaaagaagaaaagcctaaagaagagccagcgatggaaaagccagttctacaagaactaagtgtaccattggacaatactccaaaagaaattcttgagagtaaagtctcaaaactatcacccgcagtaagaaaaattgcagcagaaaaaaatattgatatttctcaagtagctactgctcgttcagatggaagaattacaaagggtgatattttagcttcaaataacaatattcaagaactttcaacgaagccgccaataagtaaggatcatgacagtaaagaagagagagttccaatgtctcgactaagacaaactatagctaaacgactcaaagatgcacaaaataatgcagctatgctcacaacatttaatgaagttgatatgggcgaattgattagaactcgtaatgagcataaagatgcttttgagtcaaaatacggaataaaattaggatttatgtctttcttcgtaaaagcttgtatcacagctctcaaagatattcctgaggttaatgcagaagttgaaa

SEQ ID NO: 235555 - DNA, 1237 bp, Unknown
  Bacterial polypeptide expressing nucleotide sequence isolated from the Sargasso Sea
atgactgaagatataaaatctccccaatttcctgaatcaatttttgagggcacattatcaagttggctcaagaaggaaggtgatgaaataaaacaagatgaagttttagcagaaattgaaaccgataaagttgttatagaggtaactgctccatctgatggggtgatggaaaaaatattggtggcagaaggcagcacaataaaaagctcagacataataggcagatataagaaaggagaaagtgctcctagcactccgtctaaaactgaagaaccagaaaagaaagtagagaaaaaacctaaaaaagaaaaagcttcagtagaaaagagtgagcctgccaagactaaaaaagaaagaggttttcgaatggggccggcagccaagaaattgctaaatgaagaagatgttgatctatctgatgtaaaaacaagttctaaaaaaggtgtagtgacaaagaaagatatacttgaagctgcagaaaagaaaccagagaaagtggagagcaaatcttcagaagtctctgtaagtgaagatggcaaaaatataaaaagagtcccaatgacaagattaagatctgttgttgcaaaaagacttttagaatcccaattttcaacagcctcgcttacaacattcaatgaagttgatttatatgaagtgaaaaaacttcgagagaagtatcgtgatagttttgaacaaaagtttggagtaaagcttggttttatggggatgtttcttaaagcatctagtatagccttgcaagatatgccaattgttaatgcatcaatagatggtaatgatattgtttatcatggatctcaagatattggtgttgctgtttcaactgaaaaaggtctagtagttccagttgtaagaaatgtacaagaactttctttggctgaaatagaaatggctattagagattattcaatcaaagctagagatggaaaaattgaaatggctgatataacaggtggaacatttacagtttcaaatggtggtgtttttggatctcttctttcaacacctatattaaaccctccacaatctgccattcttggtatgcataagatacaagaaagaccaatggtagttgacggaaatatagaagttagaccaatgatgtatctagcattaacatacgatcatagactattagatggtaaagatgctgtatcttttctggtgaagataaaggaaacgcttgaatcaccggaatcaatgattctaggagtataaa

SEQ ID NO: 235556 - DNA, 1192 bp, Unknown
  Bacterial polypeptide expressing nucleotide sequence isolated from the Sargasso Sea
atgagcataaaaatcaaatcacccacttttcctgagtctgttgcagacggaacagttgcaaattggttaaaaaaggagggagagaatgtaaaccaagatgaagtcattgcagaaattgaaacagataaagtggttctggaagttctagctcaagctgatggagtaataacaaagattattaaatctgaaggtgacactgtttcaagtgctgaagtaattggagaattttcagaatctgataattcatctaaaacctcttcagatattaaagaaaaacagataaaaactgaaaagaaaattagcaaacctgctgttaagaaaataggtcctgcggctaagaaaataatttctgaagaaaacataaacccaaaggatatcatggcatcgggtaaggatgatcgtataacaaaagctgatgttatcaatcatttagaatctgatcaaaaagaatctaaaaacatccctttggagcaagtttcgtcagcttctgataggcttgaaaaaagggttccaatgtctcgtttgaggtcaactattgcaaaaagacttgtttctgtaaaacaaaatacggcaatgcttacaacttttaatgaggttgatatgttgcctattaaagatcttagatcaaaatatggcgctgaatttgaaaaagaacatgaagttaaattaggctttatggggttctttgtaatcgcagccgtacaggctttaaaaaaatttccagttgttaatgcttctatcgatggtgatgacattgtttatcatggcttccaggatattggtgtcgctgtatcaactgatagggggctagttgtcccaataatcaaggatgctgatacaaaatcattacctgaaatagaaaaatctatattaagttactctgagaaagccagaaatggaaaattatcaatcgaagaaatgcaaggtggaacttttacaatttctaatggaggtatttttgggtccttgttatcgacgccgatcttgaatgcacctcaaacggcgattttaggaatgcatgctattcaagataggcctgttgcgattaatggtgaggttgttattagaccaatgatgtatcttgcaatgagttatgaccatagattgttagatggtaaagaggcagtcacctttttagtatccattaaggagcagcttgaatcaccagaaagacttttattaaatttataat

SEQ ID NO: 235557 - DNA, 1351 bp, Unknown
  Bacterial polypeptide expressing nucleotide sequence isolated from the Sargasso Sea
aatgagtgaaaagattgtagtaccagcactaggagaaagtataactgaagcaacagtagctaaatggttaaaaaatactggagacagtatagaggctgacgaaccaattgttgaacttgaaacagataaagttaatcttgaagttccatctccaattaatggagttttagggaaaattagcgcaagtgaaggtgatgtagtccaagttggctcaacattgggattaataaattcaaattcaaaaggtcatagcggaaataatttaaaagataagtcagaagataaagaagaaaataacatagtaagtattgatattgaaaaaaaaaaggaacaaaaagaaattaaaatttttcaggaagctcaagaaacagtaactgagccagagagttcaattgaagaaaaacctttagtattagaagctcaagaacaagaaagtcctatagaggaaaaacctttagttttaacaaacgaggttgaagaaaaaaccgaagccaatgaaaatttatctccagctgtaagaaaaatagttgctgaaaataaaattgatgtaaaaaaaattcaagggtcaggaaaagaaggaagaatattaaaagaagatttgattggactaatgggagttaaccctggtccatccgagagaaaaattaaatatggtcatgaagaaagaattaagatgactagactaagacagactatagcaaaaagactaaaacaagcccaagaaaatgcagctctgcttactacattcaatgaagtggatatgacaaatattgttgaaatgagaaaagaaaatcaggatgattttcaaaaaagatatggggttaaattaggatttatgtctttttttataaaagcttctgtagttgctttaaaaaattttccagctgttaatgctgaaatagaagaaaatgaaatagtttataaaaattattacaatataagttttgcagttggtacagaaaaaggtcttgttgttccagttttaagaaaagcagatgaactatcttttgctgatatagaaaaaaatataaaaaaactttcagataaagctaaagacggaaaactaaccattgaagatttgcaggggggaacttttacaattagcaatggaggagtttatggatctatgctctctactcctattctaaatttacctcagtcaggagtattaggtatgcataatattgttgataggccgattgtagttgatggtgaaattaaaattagacccgtgatgtatttggctttatcttatgatcaccgaataatagacggcaaagactcggtatcatttttaaaaactataaaagagaatttagaagatcctcgaaggttatttttaaatatttaa

SEQ ID NO: 235558 - DNA, 1216 bp, Unknown
  Bacterial polypeptide expressing nucleotide sequence isolated from the Sargasso Sea
aatgagtattaagataaaagcacctacatttccagaatcggtcgctgacgggactattgcaaattggataaaaaaagaaggcgaagacataaatcaggatgaagtaatagccgaaatcgaaactgacaaagttgttcttgaggttttagctcagtcagatggagtaatttctaaaattcataaaacagaaggcgagactgttgcaagttctgaaattataggtgaatttgaagaatctaatgaaccttctgaaattaaaaatacagatactcaaaaaaaatcaaaatcaaagaaagaagaaaaaatatcagaagagcctcaaagcaaaaaagcaaatattgataacaaaaagatagcaccagctgctaaaaaaatgatactagaagagaatttagatagtaacgacataaatccttctgggaaagataacagaattacaaaagccgatgttataaaccatttaagtcctgacgaagaagaaaatagctttacagaaagctcagtttctaatggtggtagacctgaaaaacgcgtcccaatgtctagacttagatctacaattgctaaaagacttgtatctgtaaaacaagaaacagcaatgttaacaactttcaatgaagtggatatgttgcctattaaagatttaagaaaaaagtatggagctgaatttgaaaatgaacatgaagtaaaacttggttttatgggattttttgtaatggctgcagttcaagctcttaagaaattcccagttgttaatgcatctatcgacggaaatgatgttgtatatcatggtttccaagatattggtgttgcggtatcgactgaaagaggactggttgtcccagtaatcaaagatgctgatacaaaatcattacctgaaattgagaaatctattctagaatattctgagaaagcaagaaatggaaaattatctatcgaagaaatgcagggaggaacttttacaatatcaaatggtggtatttttggatctttactctctactcccatactaaatgcacctcaaactgcaatattgggtatgcatgcaattcaagacaggcctgttgctattaatggagatattactattaggcctatgatgtatcttgccatgagttatgatcatagattacttgacggtaaggaggctgttacttttttagtatcaattaaagaacaacttgaatcacctgagagattattactaaatttataa

SEQ ID NO: 235559 - DNA, 175 bp, Unknown
  Bacterial polypeptide expressing nucleotide sequence isolated from the Sargasso Sea
tgtagatggtaagttgaaaatccgaccaatgatgtatttagcattatcatatgatcatagaattatggatggtaatcaatctgttggttttttaattgctgtaaaagaaggcgtggaagatcctgaaaatattataatgggaggtaaaataaaaaaatcactaggacttacataa

SEQ ID NO: 235560 - DNA, 1219 bp, Unknown
  Bacterial polypeptide expressing nucleotide sequence isolated from the Sargasso Sea
aattgtagaactagaaacagataaagttaatttggaggttcctgctcctgctagcgggacactaacttcagttaattttaaagaaggtgactcagtagaagttggcgcagttttgggagaaatatcagaaggatctgaagatcaaaaacaagtaggtaacaaaaatactgagaatcccaaaaagaaaacatctgataatgtaattaattttgataaagaaaaaaaacaaaatccaaaaatttttgataacgaagagaaagaaaaaccattagttttaaatacagaaaaaccattaacttcaaataaggaagagccattagttttaacaaaagagatgcccggtaaacaaaaaataattagtgaaaaagtattatctcctgcagtaagaaaaattgtagaagaaaacaagattgatatacaatcaattaaaggaacaggtaagtctggtcaaattttaaaaggtgatttaattagtttaatgggatcagtcccacagccatctgaaagaaaattgaaatatggtgaagaggaaagaattaaaatgagcagactaagacaaaccatagcaaaaagattaaaagaagctcaagaaaatgcagctatgttaaccacatttaatgaggttgatatgacaaatattattgaaatgagaaaaaataaccaagaagattttcaaaaaagatttggaataaaacttggttatatgtctttttttgtcaaagcttgtgtacttggattaaaatcgtttccagcaattaatgctgaggtagaagggcaagaaattatatataaaaattattataatataagttttgctgttggaactgaaaaaggtttagtagttccagtaattagaaatacagatgaactatcatttgcagaaatagaaaaaaatataaaaacaatttctgaaaaagctagagatggaaaattaactattgatgacttgcaaggtggaacatttacaataagtaatggaggtgtgtatggttcaatgctttcgactccaatccttaatccaccacaatcaggagttttaggaatgcacaatattgttgaaagaccgattgctataaatggagaagttgaaatcagaccagttatgtatttggctttatcttatgaccacagaataatagatggaaaagactcagtttcttttttaaagttattaaaagaaaatcttgaggatccaagaaaattatttttagacctttaa

SEQ ID NO: 235561 - DNA, 774 bp, Unknown
  Bacterial polypeptide expressing nucleotide sequence isolated from the Sargasso Sea
gctgtacagtctgctgggatgaggaaacagaaaagagttcaccccctcgcgctcctagttcaatagaagatgcagatcgagaagaacgggtaaaaatgacccgattaaggcaaacaatagcgaaacgccttaaagacagtcaaaatacagccgcgatgctaacaacttacaatgaagtagatatgacggaggttatgtctcttagaactgaatttaaggaattatttgaaaaaaaacacggtaccaagctcggttttatgtctttttttacgaaggcttgctgccatgctctcaaagaagttcccgaagttaatgcagaaatagacgcaacagacatcgtttataaaaattatgtgcacatgggaatagctgcggggaccccaaccggattagtcgttccagttattcgaaatgccgacagcatgtcttttgcagatattgaaaagtctatcgctgaaaaagggaaacgagcaagggacggcaaacttagtatggatgaaatgcaaggtggaaccttcaccatttcaaatgggggagtttacggatctcttatgtcttccccaattttaaatccaccacagtcaggtattttgggtatgcataaaatccaagatcgtcctatggtagtaaacggcgaaatagtagttcggcccatgatgtatttagccttaagttatgaccataggattgtagatggaaaaggcgcagtgacatttttagtaagggtaaaagaagctctagaggacccgagaaggcttcttatggatctctgat

SEQ ID NO: 235562 - DNA, 315 bp, Unknown
  Bacterial polypeptide expressing nucleotide sequence isolated from the Sargasso Sea
tgggacagaaagctcgttctggccaattaagtattgaagatatgcagggtggtacatttacaatatccaatggtggtgtttatggatctttaatgtcaactccaatattaaatccacctcaatcaggaatattgggaatgcataaaatagaagaaagacccatagctattgatggtgaaataataattagacccatgatgtatcttgccctttcatacgatcatagaatagtagacggtaaaggagccgtaacttttttagtgagagttaaagagggtctagaggatccaagtagattattgttaggagtttaat

SEQ ID NO: 235563 - DNA, 1027 bp, Unknown
  Bacterial polypeptide expressing nucleotide sequence isolated from the Sargasso Sea
tttgatgatgaaagagataccaaactttttgataacattattgaatctgctccccaaaaaaaacaactaaatgaaactaaagatcaagtatccgaaaataatatagaagaagatgtgcttattttaactgaagaaataaaacaagagaaaaaagttagtactggcaaggaaaaagttatgtctcccgcagttagaaagatagttagtgagaataatctcaatataaatgatgttaaaggatctggtaaagacggaatggttcttaaaggagatttgttaagtttaatgggtaccaaaccagcaccttcagaacggaaattaaaatttggtgaagaagaaaaaattaaaatgtctagactaagaatgacaattgcaaaaagattaaaacaatctcaagaaaatgctgcaatgcttactacttttaatgaagtagatatgacaaatataatggatatgagaaaaaataatcaagatgattttcaaaaaaaatttaaaataaaacttggtatgatgtcattctttgttaaagcttgcgttgttggtcttaagttatatccagcaatcaatgcagaagtagagggtgagagcataatttataaaaactattataatattagctttgcagttggaacagataaaggattggtagttcctgttctcaagaacgcagatgagatgtcgttcgcagatatagaaatgaatataaaggctttatctgataaagctaaagatggtaaaattacgatcgaagacttacaaggtggaacatttacgattagtaatggtggtgtttatggttcaatgctatctactccaattttaaatttaccacaatcgggtgttttaggtatgcataatattgtgagcagaccaattgtagttaataatgaaattaaaattagaccaattatgtatttagcattatcttatgatcatcgtataatagatggtaaagaagcagtttcatttttaaaaactgttaaagaaaacttagaggatcctagaagattatttttaaatttataaa

SEQ ID NO: 235564 - DNA, 1087 bp, Unknown
  Bacterial polypeptide expressing nucleotide sequence isolated from the Sargasso Sea
gttggagctcttttggatcagtaaacagaagggcccaggttcacaaaaaaatgaagagataaaaaaaattcaaccaacagtcaacaatgataatttagttaaattagacgcaaaaaaagaaccagatgtttttgatgaaaagataactgaagagaaacaaccagaggaagcacctttagttcttaccaatgaaattaaagaagatagtcaagagattaattcagatattcacgagaacttatctccagctgtaagaaaaattgttacagaaaataaaattgatattaagtcggtgaagggatcaggaaaggatggtagagttcttaaaggagatttaattaatttaatgggggttaatccacctccatcagagagaaaaattaaatttggtcaagaggagagaattaaaatgaccagattaagacaaactattgctaaaagattaaaacaagctcaggaaaacgcagctttattaactacttttaatgaagttgatatgacaagtattatggagatgagaaaagaaaatcaagaagatttccaaaaccgatatggtgtaaaattaggttttatgtcattttttgttaaggcttgtgtggtagctcttaaaaattttcctgcagttaatgcagagatagaaggtgatgaaattatttataaaaatttttataacgtaagttttgcagtagggactgagaaagggcttgtagttcctgttcttaaaaatgcagatgaattatcttttgcagatatagagaaaaatattaaacaaatttcagaaaaagcaaaagatggaaaacttacaattgaagatttgcaaggtgggacttttactattagtaatggtggtatttatggctcaatgctttcaactcctatattaaatttacctcaatcaggtgttttaggtatgcataatattgtagatagaccagttgtgactaatggagaaattaaaataagaccaataatgtatttagctttgtcatatgatcacagaattattgatggaaaagagtcagtttcatttttaaaaatgataaaagaaaatttagaggatccaagaaggttatttttagatatttag

SEQ ID NO: 235565 - DNA, 1261 bp, Unknown
  Bacterial polypeptide expressing nucleotide sequence isolated from the Sargasso Sea
atgacaattcaaaaaattttagttccagatatgggtgactttaaagatgtcgaggttatcgaagttctggttaaaaaaggtcaagtcattaaaaaaaacgactctttaattactttagaaagtgacaaatcaagtgttgaggtaccctcaactcacgaaggtaagatagaaaaaattaatgtttctgtaggtgataaaattaataaaggggatttaattcttactttagagtcaaaacaagaaacaaatgaacctgtaaaagaaaaatctaaaaaagaaccagtaaaacaaaaaatacaagaagtagtccaggtacaaaaacaacaacctgcacctagtgttcctgcttcaggaaaaagttctgcaagtccaaaaataagaaaatttgcaagagagctgggagcagatatttctaaaatttctggcacacaacgagctggaagagtgtcagaagaagatgtaaaaaattttataagatctcaagttacagtttctcaaggtgaggtgcaaaaaaaagaaataacaaaatatgtagaagaatattctcatgaagaatttggagaaataacaacacaagatctaccacgtgttaagaaactttcaggaccacatttagtcagatcgtggacagaaattccacacgtcactcaacatgatgaaatagatgttactgacatggaacagtttaggaattctttgtatgattattacactggtgaaaaaattaaagtaactcctctcgcatttattgcaaaagctttggtaagtgctttaaaagaatttcctaattttaatgcatcattaaatcctgagaataataaaattatttataaaaaatattttcatattggttttgctgttgatactccgcatggcctaatggttccaaaattgagaaacgttgatcaaatgagtattcaaaaaattggagaggagcttaaaaatacaagccaactttgtagagaacttaaaattgataaaaaagaattttttggtggatcgatgactatctcaagtttaggaggaataggcggaacacattttacaccaatcattaatccgccagaggtagcaattttaggagttggaagaacttttgatcgacttgttaaagaaaaaaatcaaatagtttctaaaaagatacttccaatatcattatcttatgatcacagattaatagatggtgcggaaggagctagattttgtgtctaccttggggaatgtcttggaaaagattttgcctttaagcttgctgtttaga

SEQ ID NO: 235566 - DNA, 1300 bp, Unknown
  Bacterial polypeptide expressing nucleotide sequence isolated from the Sargasso Sea
aatgagtgaaaaaattgtagttccagttcttggtgaaagtataacagaagccactgttgcaaaatggctaaaaaacccaggtgacgcagttgaagcagatgaaccaattgtagaactagagacagataaagtaaatttagaagtgccatctccaatttctggagtgttaactgagataaattcgcaagatggatctgttgttgaagtaggagcattattgggttctgtatcagcaaatggtagagcagttaaatctgtaccaataaaaagagaacaaataaagaaagaggaaactgtcccttcagagagcaatgtaataaagttagatgctaataaaaaagaaccaaaaatatttgaagaaaaagaaaccaataaatttaaagtaaaacctttggttttaacagaggaagttaaatcagaagttgctccaaaaagagatataaatccaactatgtctccagcagtgagaaaaatcgttgttgaaaacaatattgatattaattcaattcaaggctcaggaaaagatggaagagttttaaaaggagatttaataagtttgatgggagcaaatccaaaaccatctgaaagaaaaattcaatatggagaagaagaacgaattaaaatgactaggctaagacaaaccattgcgaaaagattaaagcaagctcaagagaatgcagctcttttaacaacatttaacgaagttgatatgagcagtgtaatggaaatgaggaaagaaaatcaagaggattttcaatctcgttatggaataaaattaggatttatgtctttcttcgtaaaagcatgtgtagtcgctctaaaaaatttccctgcagtgaatgctgaaatagatggtgacgaaattatctacaaaaactattataatattagttttgctgttggaacagacaaaggtttagttgttccagttttaaaaaatgcagatgaattatcttttgctgatatagaaaaaaatattaaagaaatttcagaaaaagcgcgagatggaaagctaaccattgaagatcttcagggaggaacatttacaataagtaatggaggtgtgtatgggtctatgctttcaactccaatactaaatttacctcaatctggtgttttaggaatgcataatatagtagaaagacctgttgttatcgaaggtgaaattaaaataagaccaattatgtatttagcattatcatatgatcacagaattattgatgggaaagaatctgtatctttccttaaaatgattaaagaaaacttagaagaccctagaaggttgtttttagatatttaa

SEQ ID NO: 235567 - DNA, 250 bp, Unknown
  Bacterial polypeptide expressing nucleotide sequence isolated from the Sargasso Sea
tttcaatggcggtgtttacggttcaatgctaagcacccctataattaatagccctcaatctggaattttaggtatgcataatattattaaaagagcagttgttattaatgatgaaattgttattcgaccaatgatgtatttagctttaagttatgatcaccgaattatcgatggaaaagaaagtgttggatttctagtaaatgtgaaaaaattactagaggatccatctaaaattgttttaggcaattaa

SEQ ID NO: 235568 - DNA, 1324 bp, Unknown
  Bacterial polypeptide expressing nucleotide sequence isolated from the Sargasso Sea
aatgagtgaaaaaattttagtacctactttaggtgaaagtattacagaagcaacagtttctaaatggttgaaaaaagaaggtgaaacagttcaggtggatgaagcaatagttgaactagaaactgataaagtaaatttagaagttccttcccctattagtgggacattatcagagattagttttagagatggagatacagttgaagttggagctgttttgggctcaatttctgaggggaatgttgatattaaaaatgaaaccgaaagcaaaaaacaacttgaggataatgaggagaaagaattaaaagatcagaaaagcaatgtaattaatttagatatagaaaaaaaacctcaaactaagttagaagaaccattagtattaactgaagataaatcaatggagctattagaagaagagcctttacttttaactgaagaagtagaaatagaggaaacctcacaacaaccaattattctttcacctgctgttagaaaaatggttgcagaaaaaaacatcaacctagataatgtaaagggaacaggtaaagcaggaagaattttaaaaggtgatctaattactatgatgggagccaatccacaacccaaccagagaagaattcaatacggtgaagaagaaagaattaaaatgacccgtttaagacaaacaattgcaaaaagattaaaacaagctcaagaaaatgcagcaatgttaactacttttaacgaggtagatatgtctgggattatggcaatgagaaaagataaccaagaagatttcaaaagcagatacggaataaagctcggtctaatgtcattttttgttaaagcttgtgtcgtagggctaaaattatttccagcaattaacgctgagatcgaagatcaagacataatttataagaattattataatattagtttcgctgttggaactgaaaggggtttagtagttccagtgcttagaaatgcagatgagatgtcatttgctgaaatagaaaaagaaataaaaaaattatctgaaaaagcaaatacaggtagtttaacaattgaggacttacaaggaggtacgtttacaattagcaatggaggtgtatatggttccatgctttcaacaccaatattgaaccctcctcaatcaggtgtattaggtatgcataacattgttgaaagaccagtaaatgataatggtgatataaaaataaaaccaataatgtacttggccttgtcatatgatcatagaattattgatggaaaggaatccgtgtcgttcttaaaaactgttaaagaaaatttagaagaccctagaagattatttttaaatatttaa

SEQ ID NO: 235569 - DNA, 354 bp, Unknown
  Bacterial polypeptide expressing nucleotide sequence isolated from the Sargasso Sea
accttactatcgcagaaatagagcttgcaattagagatctttctcttaaagcacgtgacggcaaattggatattgaggatatgacgggtggtacttttacggtttctaacgggggtgtttttggatcattgctttcaacgcctattttaaatccgcctcagtccgcaattctaggaatgcataaaatacaagaaaggccaatggcagtgaatggaaatgttgaaataagaccaatgatgtatcttgctttgacatacgatcatagattattagatggaaaggatgcagtttcatttcttgtgaaaataaaagaaatattagaatcaccagaatcaatgatactaggagtttaga

SEQ ID NO: 235570 - DNA, 259 bp, Unknown
  Bacterial polypeptide expressing nucleotide sequence isolated from the Sargasso Sea
gtaccttttcatcacaaatggaggagtttttggatcaatgctctccacacccataataaatccacctcaaagtgccatcctaggtatgcacaatattattgagagaccaatggcagttgatggaaaaattgagattaggccagtaatgtttgttgctttgtcttacgatcaccgtgttatcgatggacaacagtcagtaagttttcttgttaaagttaaagaaaatctggagaatcccgcgagaatgcttctaagttga

SEQ ID NO: 235571 - DNA, 1132 bp, Unknown
  Bacterial polypeptide expressing nucleotide sequence isolated from the Sargasso Sea
atgagcgaaaaaattgtagttccagttcttggtgaaagcattaccgaagcaactgttgctaaatggttaaaaaatgttggtgaaactatagaggcagatgaacctattgtagagcttgaaactgataaagtaaatctagaagtgccttcgccaatatcaggtgttttatcagaaattaattcaaaagatggctcagtggtagaagttggagctttgctaggttcggtttcgagtaatggaaaatctcaagcagttaaaaaagacgaaattaaaaaaacagaaactgcacctaaagaaaataatgtaattaaattagataaatctaataaagaaccaaaaatttttgatgataaatctaaagaagaaaaaccattagttttaacagaagaagaaaaaccattagttttaacagatgaaattgttgaagaagaaaaaactatacaaaaaaaagaaaatcaaactctttcgccagctgttagaaaaatagctgtagaaaataaaatagatattaattcagtgcaaggttctggaaaagacggaagagttttaaaaggagatttattgagtttaatgggggttaacccaaaaccttccaagagaaaagttcaatatggtcaggaagaaagaattaaaatgaccagactcagacaaactattgcaaaaagattaaaacaagcccaagagaatgcagctcttttaactacatttaatgaagttgatatgagtagtgtaatggaaatgagaaaagaaaatcaagaggattttcaatctcgttatggaattaagttgggttttatgtctttcttcgtaaaagcttgtgtagttgctttaaaaaatttccctgcagtcaatgctgaaatagatggagatgagataatttacaaaaattattataatattagttttgctgttggaaccgataaaggtttagttgttccagttttaaggaatgctgatgaattatcttttgcggatatagaaaaaaatattaaaaaaatttctgaaaaagcacgtgacggaaatttgacaattgaagatcttcaaggaggaacatttacaattagcaatggaggagtttatgggtctatgctttcaactcctatactaaaccttcctcaatcaggtgtactag

SEQ ID NO: 235572 - DNA, 918 bp, Unknown
  Bacterial polypeptide expressing nucleotide sequence isolated from the Sargasso Sea
aatgacagaaaaaattttagtacccgtattaggagagagtattacagaagcaactatttctaaatggttaaaaaataaaggtgatagtattaacgttgacgaagccttagtagaattagagacagataaagtgaatttagaagttccatctcctgtagatggcatattaacagctataaatttcaaagaaggagatactgtagaagtaggtgccgtactaggagaaatttcaagtggatcggcagaaaataaaaaagttgatgttaaaagcaatgacaaggaacctaaaaaagaatctgaaaatgtaattaattttgaaaaagaaaaaaaacaaaaaccaaaaatctttgaagttgaaaaaaaagaggaaccattagttttaactaaagaagagccattagttttaactaaagaggaaccattagttttaaccaaagaagagccaagtaaccaaaaaacgattagtcaaaaagtattgtctccagcagtaagaaaaattgtagaagaaaacaacatcgatactagttctgttaagggaacaggtagatctggtcaaattttaaaaggtgatttaatcagtttaatgggttcagctccacaaccatctgaaagaaaaataaaatatggtcaagaagagagaattaaaatgagtagactaagacagaccatagcaaaaagactaaaagaagcacaagaaaatgcagctatgttaactacatttaacgaagttgatatgaccaatattattgaaatgagaaaaaataaccaagaagattttcagaaaagatttggaataaagcttggttttatgtctttttttgttaaagcttgtgtgcttggactaaaagcatttccggcaatcaatgctgagatagaaggtcaagaaattatatataaaaattattataatataagttt

SEQ ID NO: 235573 - DNA, 1306 bp, Unknown
  Bacterial polypeptide expressing nucleotide sequence isolated from the Sargasso Sea
atgagtgaaaaaatagtagttcctgcacttggtgaaagtataactgaagcaacggtagctaaatggttaaagaatacaggagattctgttgatgcggacgaaccaattgttgaacttgaaacagacaaagtaaatctggaagttccttcgccaatcactggagtattaagtgaaataaattcaaaggatgggtcagtagtggaagtgggtgcattattgggatctgtttcagaaaatggcagtagtgcaaaacctagccctacaaagaatgaagaagtaaaaaaagaagagatcaaacctagtgaaaataacgtcatcaaattagacccaataaaaaaagaacctaaagtttttgaggagacccctaaagaagaggagccaacagaaaaaccattagtattgacagaagaggttgttgaagagacaccaaaatttaataacacccaaagccaaacattgtcacctgcagttcgaaaaattgttgctgaaaacaaaatagacttagctaccgtccaaggatctggaaaagatggacgtgttttaaaaggtgacttaataagcatgatgggtgcaaatccaaaaccttcagagagaaaaattcaatatggtcatgaagaaagaattaaaatgaccagactaagacaaactattgctaaaagattaaagcaagctcaagaaaatgcagctttattaactacattcaatgaagtcgacatgaccaatattatggaaatgagaaaagaaaatcaggaagattttcaatcgagatataatattaaactgggcttcatgtcattttttgtaaaagcatgtgttgtcgctcttaagaattttccagctgtaaatgcagaaattgatggggatgaaatagtttataaaaattattacaatattagttttgcagttggaactgataaaggtttagttgtgccagttttaagaaatgcagatgaattatcttttgctgatattgaaaaaaatattaaagaaatttctgaaaaagcgagggatggaaaattgacaattgaggatcttcaaggaggaacattcacaataagcaatggcggagtttacgggtcgatgctttcaacacctatattaaaccttccacagtctggagttttgggtatgcataatattgttgaaagaccagtagtcgttgacggagaaattaaaataagaccaataatgtatttagcattatcatatgatcatagaattattgatggcaaagagtcggtgtcatttcttaaaatgataaaggaaaatttagaagacccaagaaggttgtttttggatatttaga

SEQ ID NO: 235574 - DNA, 862 bp, Unknown
  Bacterial polypeptide expressing nucleotide sequence isolated from the Sargasso Sea
tttgtcaaatacactttctccgtcagtaagaaaaattgttgctgaaaacaagatagatttaaaatcaatacaaggatcgggaaaagatggccaagttctaaaaggcgatttaataaatttaatgtcaaaatctccgaaaccctcagaaagaaaaattaagtttggacaagaagaaagaattaaaatgagcagattgagacagacaattgcaaaaagactaaaacaagcacaagaaaatgctgcccttttaactacattcaatgaagttgatatgtctaatgttattaaaatgagaaaagattatcaggatgattttttaaaaaaatacggagttaagcttggatttatgtctttttttgtaaaagcaagcattgaggctctgaaattatttccagctgttaacgctgaaatagacggagaagaaatagtctataaaaattactataatataagtttcgctgttgctacagataaaggattagtggttcctgttttaaaaaatgcagatgaaatgtcttttgctcaaattgagaatgaaattaaaacaatctctgaaaaagctagagatggtaagctaactatagaggatcttcaaggtggtacatttactataagcaatggtggtgtttacggctcaatgctttctacaccaattttaaacttacctcaatcaggagttctaggcatgcacaatattgttgatagacctgttgtagttgatggcggaattaaagttagacctgtcatgtatttagcgctatcatatgatcatagaataatcgatggtaaagactctgtatcatttttaaaattgataaaagaaaaattagagaatccagaaaaattatttttagaaatttaa

SEQ ID NO: 235575 - DNA, 1300 bp, Unknown
  Bacterial polypeptide expressing nucleotide sequence isolated from the Sargasso Sea
atgagtgaaaaaatagtagtcccagtccttggtgaaagtataacagaagcgactgttgcaaaatggttaaaaaacgcaggtgatacagtcgaagcagatgagcctattgtagaacttgaaacagacaaagtaaacttagaggtgccatctccaatttctggtgtgttaactgagataaattcacaagatggatcagtcgttgaggtaggagcattattaggttctgtatcagcagaaggtggagatgttaaatctgcaccaaaaactcaaaaagaaatcaagcaagagaaaatagttcctgcagagagcaatgtaataaaattagatgcaaataaaaaagaaccaaaagtatttgaagaaaaagagatagaaaaactcaaagagaaacctttggttttaactgaggaagttaaaccagatgttgccccaaaaagagatattaatccaaccttgtctccagcagtgagaaaaatagtaactgaaaataatattgatattaattcaattcaaggttcaggaaaagatgggagagttttaaaaggagatttaataagtttgatgggtgcaaatccaaaaccatctgagagaaaaattcaatatggtgaagaagaacgaattaaaatgactaggcttagacaaactattgcaaaaagattaaagcaagctcaagagaatgccgctcttttaactacatttaacgaggttgatatgagcagtgtaatggaaatgaggaaagaaaatcaagaggatttccaatctcgttatgggataaaattaggatttatgtcattctttgttaaagcatgtgtagttgctttaaaaaatttccctgccgtgaatgctgaaatagatggtgatgagattatctataaaaactattataatattagttttgctgttggaacagataaaggtttggttgttccagttttaaggaatgcagatgaattatcttttgctgatatagaaaaaaatattaaagaaatttcagaaaaagctcgagatggaaagctaacaattgaagatcttcaaggaggaacatttacaataagtaatggaggtgtgtatgggtctatgctttcaaccccaatactaaatttacctcaatctggtgtgttgggtatgcataatatagtagaaagacctattgttgtagatggtgaaatcaaaataagaccaattatgtatttagcattatcatatgatcatagaattattgatggaaaagaatctgtatctttccttaaattgattaaagaaaacttagaagaccctagaaggttgtttttggatatttaaa

SEQ ID NO: 235576 - DNA, 1291 bp, Unknown
  Bacterial polypeptide expressing nucleotide sequence isolated from the Sargasso Sea
atgagtgaaaaaattttagttccaactttaggtgaaagtataacagaagcaacagtttctaaatggttgaaaagagaaggtgaaacagttgaggcggatgaagcaatagttgaactggaaactgataaagtaaatttagaagttccttcgcctattagtgggacattatcagagattagttttagagatggagatacagttgaagttggagctgttttgggctcaatttctgaggggaatgctgatattaaaaaagcacctgaaagcaaaaaacaacttgaggataatgaagagaaagaatttaaagatcagaaaagcaatgtaattaatttagatatagaaaaaaaacctcaaactaagttagaagaaccattagtattaactgaagataaatcaatggagctattagaagaagagcctttacttttaactgaagaagtagaaacagaggaaacttcgcaacaaccaattattctttcacctgcagttagaaaaatggttgcagaaaaaaatatcaacctagataatgtaaagggaacaggtaaagcaggaagaattttaaaaggtgatctaatttccatgatgggagcaaatccacaacccaaccagagaagaattcaatacggtgaagaagaaagaattaaaatgacccgtttaagacaaacaattgcaaaaagattaaaacaagcccaagaaaatgcagcaatgttaactacttttaacgaggtagatatgtctagaattatggcaatgagaaaagataaccaagaagatttcaaaagcagatacggaataaagctcggtctaatgtcattttttgttaaagcttgtgtcgttggactaaaattatttccagcaattaacgctgagattgaagatcaagacataatttataagaattattataatattagtttcgctgttggaactgaaaggggtttagtagttccagtgcttagaaatgcagatgagatgtcatttgctgaaatagaaaaagaaattaaaaaattatctgaaaaagcaaacgagggcagcctaactattgaggacttacaaggtggaacctttactattagcaatggaggtgtatatggttctatgctttcaacacccatattaaatccacctcaatcaggcgtattaggaatgcataatattgtagaaagaccagtgaatgataatggtgagataaaaataaaacctataatgtacttggctttgtcttatgatcatagaattattgatggaaaggaatctgtgtcgttcttaaaaactgttaaagaaatttaga

SEQ ID NO: 235577 - DNA, 973 bp, Unknown
  Bacterial polypeptide expressing nucleotide sequence isolated from the Sargasso Sea
attatatccgagagcaataatgaaagaccaacaaaaaatactactttacaaaaaaataaagaagaaacagctttagctgaaacagaaaaaacaaataaaagtaaaaatgaacatctctcacctgcggttcaaagaattgttactgaaaataatttaaatccttcagaaattataccttcaggtaaagacgggttaattactaaaagtgatgctttaaataaattaagcgagcaagatagccctaaaccggtcaataaaactgttagtaacaatgaactcgaagaaagagttccaatgtcacgacttagaaaagttgttgctaaacgacttaaagaggctcaaaacactgccgccatgctaactacttttaatgaagtagatatgacttctgttatgtcacttagatctgagtataaagaccattttgaaaaggagcataaggtcagacttggatttatgggaatatttgttaaagcatcaatctcagcattaaactcctatcctgcagtcaatgcagaaattaatggagatgatattatttataaaaaatataataatattggagttgctgttggaacgcctcaagggcttgtagttccagttataaaagatgctcaaaataaaagtcttgctgaaatagagaaagccataagtgatatgggtttaagagctcgagagggcaaaattgggatggatgagttaagcggtggaacatttacaatatcaaatggcggagtttatggatccctaatgtcaaccccgattttaaacccacctcaatctggaattttaggaatgcataaaattcagaaacgtccaattgcagttggtgatgatattaaaatccggccaatgatgtatttagcctttagttatgaccatagaattattgatggcagagaagctgtttcatttttggttaaaattaaagaaattattgaagatcctagaagattgatattaggtatttaat

SEQ ID NO: 235578 - DNA, 397 bp, Unknown
  Bacterial polypeptide expressing nucleotide sequence isolated from the Sargasso Sea
cttagaaatgcccaagaattgtcttttgctgctcttgagcaagagataaaaagacttgcagataatgtaaggaataaatcaataacggtggatgatttaactggtggtacttttacaatatcaaatggaggagtttttgggtcaatgctttctacaccaattattaaccctccacaatcaggtattcttggaatgcataatattattcaaagaccaattgctgttgatggaaaagttgagataagacccatgatgtatatagctttatcatatgatcacagaattattgatggtaatcaatctgttggatttctaattgctgtcaaagaaggagtagaggatccagaaaatattttaatgaatggaaaagttaaaaaatccctaggacttaattaat

SEQ ID NO: 235579 - DNA, 1327 bp, Unknown
  Bacterial polypeptide expressing nucleotide sequence isolated from the Sargasso Sea
atgagtgaaaaaatattagttccagttttaggtgagagcattacagaggctacagtatctaaatggttaaaaaataaaggtgaaactgttgatgcagatgaaccaattgttgaattagagactgacaaagttaatttggaagtaccgtctcctgttgcaggaaaattaattgaaattaacactaaagatgggtcgactgttaaagtgggtgaaattttaggtttagttactgaaattgaaggtgaagttaaaaaatcagataaaatagagaaaatccagccatcaaatttacaaagaaatggggagattgaagaaaaagacaatgtaatcaaattagatccaattaaagaacaagcggagttaggtatatttgaagaagagaataatagtaacgatataaaagaggaaccactggttttaacagaggaaataaaaaacagtcaaatagaggaaaattctaatgaggaaagtcaaacattatctccagctgtaagaaaaatggtaaatgaaaacaatattgacgttaagtcagtaaaaggatccgggaaagatggacgaatactaaaaggcgatttgataagtctgatgggagttaatcctccaccttcagagagaaagattaaatatggtcaagaagagcgtattaaaatgactaggttaaggcaaactatagcaaaaagattgaagcaagctcaggataatgcagcattacttactacttttaatgaagtggacatgacaaatataattaacatgagaaaagaaaaccaggaggatttccaaagtcgatatggtatcaagcttggcttcatgtcgttttttgttaaagcttgtatagtggctttaaaaaattttccagcagttaatgctgaaatagatggagacacaattgtttacaaaaattattataatataagttttgcagttggaacagataaaggtcttgtagttccagttttaaaaaatgcagacgaactatcttttgcagatattgaaaaaaatattaaagaaatttctgaaaaagcgaaagatgggaaacttgtaattgaagatctccaaggaggtacttttactattagcaatggtggagtttatgggtcaatgctttcaactccaattttaaacttacctcaatctggagtattagggatgcataatattgttgatagacctattgtagtggatggtgaaatcaagataagaccagtaatgtatttagctttatcttatgatcatagaattattgacggtaaagagtctgtatcatttcttaaaatgattaaagaaagtcttgaggaccctagaaggttatttttggatatttaga

SEQ ID NO: 235580 - DNA, 1204 bp, Unknown
  Bacterial polypeptide expressing nucleotide sequence isolated from the Sargasso Sea
atgagtattgaaattaaatctccaacatttccagagtctgttgctgacggaactattgctaattggctaaaaaaagaaggcgaaactgtaaatcaggatgaggttattgtagaaatagagactgacaaagttgtgcttgaagttttagcgcaatcagatggagtaataacaaaaattataaaatctgaaggagatacagtatctagttcagaggttattggagaatttaaagaatcagaaggtgctgcagaacctgttaaagaaaaagtgattgataaacctgctacaaaaaaaacaaaaaataaaaaagatgagattgttaatgataaaactaagaattcaggaccggctgctaaaaaaattatttctgaaaaaggaatagatgctagcaacataaaatcttcagggaaaggtaatagaattacaaaagctgatgttataaatcatttagaatctaaagagagcgctagtgttttatcagaaaatactacctcaagagatgacaggccagagaaaagagtgcctatgtctcgattaagatctactattgctaaaagattagtatctgttaaacaagaaacagcaatgttaactacatttaatgaggtagatatgttgcctattaaagaattaaggtctaaatatggcgcagaatttgaaaaagaacatggagttaaacttggctttatgggtttctttgtaatagctgttgttcaagcacttaagaaatttccagttgttaatgcttcaattgatggtaatgacgttgtttaccatggattccaagatataggcgtagcagtatctactgaaagaggcttggtagtacctatcatcaaagatgcagatacaaaatccttaccagaaattgagaaatctattttaagttattctgaaaaagctagaaatggaaaactatcgattgaagaaatgcaaggaggtacttttactatttcaaatggaggtatttttggttcattgctttctacaccaatcctgaatgctcctcagacggcaattcttggaatgcatgctattcaagaaagaccagtagcaatagatggagagattgttattagaccaatgatgtatttagcaatgagttatgatcatagattactagatggaaaagaagcggttacttttttagtttccataaaagaacagcttgaatcacctgagagactattactaaacttataat

SEQ ID NO: 235581 - DNA, 634 bp, Unknown
  Bacterial polypeptide expressing nucleotide sequence isolated from the Sargasso Sea
acaaaatactgctgcgattttgacgacatttaatgaagtagacatgtcagagataatgaaagtccgtgaatctaaaaaagaagactttatggagcgctatggtgttaaacttggttttatgtctttctttgtaaaaggagttgtatcaagtcttcaagaattccctgcagtaaatgctgagatacgcgatgaaaatattatttataaaaatcattttgatatcggcattgctgttggaacagaaaaaggattggttgtacctgttctaaaagatgctgatgcaatgacttttggtgatatcgaacagaacattgttgagcttagtacaaaagcaagagagggtagcttaactatggatgatttaacagggggcacctttacgatctctaacggcggtgtttatggttctatgttaagcacgcctattattaatagacctcaatctggaattttgggtatgcataatattcaaaaaagagccgttgtggttgatgatgaaatagttattcgcccaatgatgtatctagcatttagttacgatcaccgtatcattgatgggaaagagagtgttggatttttagttactataaaaaacctgcttgaaaatccatcaaaattaattttaggagtgtag

SEQ ID NO: 235582 - DNA, 1243 bp, Unknown
  Bacterial polypeptide expressing nucleotide sequence isolated from the Sargasso Sea
atgactgaagatataaaatctccccaatttcctgaatcaatttttgagggtacattatcaagctggctcaaaaaagagggcgatgagataaaacaagatgaagttttagcagaaattgaaaccgataaagttgttatagaagtaacagcaccatctgatggtgtgatggaaaaaatattggtagaagaaggaagcacaataaagagttcagacataataggcagatatgtaaaaggggatgcacctattgctccagaaaaaactgaaagtacaaaaaaggaacctaaaaaaacagcagagagagtagagaaaaaacctataaaagaaataactaaaactgaaaaatctgaaactcaaaaaagcgcaaaagagaaaggctttagaatgggtccagcggcaaagaagcttttgaatgaaaaagatgtagatctagctgacgtagaaacaagctctaaaaaaaatgtagtaacaaaaaaagacttactcgatgcagcaagcaagaaacccaaacaaaaagaaaatatagatccgattgtggatgataacaatataaaaagagttccaatgacaagactacgatcagtagtagcaaaaaggcttttagaatcacaattttctacggcctcgcttactacatttaatgaagttgatttatatgaagtaaaaaagcttagagaaaaataccgtgatagttttgaagaaaaatttggagtaaagcttggctttatgggtatgttccttaaggcttcaagtttagccttgcaagatatgccaattgttaatgcatcaatagatggtaatgatattgtttaccatggatctcaagatattggtgttgcagtttcaactgaaaaaggccttgttgtcccggttgtaagaaatgtacaagcactctctttggctgaaatagaaactgctataagagattactctatcaaagctagagatggaaaaatcgaaatgtcagatataactggtggaacatttactgtttcgaatggcggtgtttttggctccctgctttcaacacctattcttaaccctccacaatctgcaattcttggtatgcataaaattcaagataggccaatggtagttgatggaaatatagaggttagacctatgatgtatctagcattaacttatgaccatagattattagatggcaaagacgctgtaacctttttagtaaaaataaaggagacactcgaatcaccagaatcaatgatcctaggagtttaaa

SEQ ID NO: 235583 - DNA, 1222 bp, Unknown
  Bacterial polypeptide expressing nucleotide sequence isolated from the Sargasso Sea
aatgattatagaaatgcccgtcccatcacctggagaatcaatttcagaggtagaaattgcacaatggttggttaaggacggtgattatgttgaaaaagatcaaactatagcagaagttgattccgataaggctaccctagatttacctgctcaggaaagcggtacggtaacccttaaagctcaacaaggtgatactgtattagttggtgacatagtttgtttaattgatacaagtggaaaaaaagtatcaaagaaaaataatgatttagaccccccatctgaaattcaaaaagagaatccaaaagttgttgaaaacaaatctgaaatgaaggaaaacacttcgcattctggtatcccatcacctgcagctagaaaaatattggatgataaaggagttgattacggaaatgttaaaggaactggaagaggtggtagaatttctaaagaagatgctttaaaaacattaccaagggttgatgttaatagtatttcaaaagatagaaaagttgatacatcaaaaatgtcattacttagacgtaagctttctcaaaggcttgttgctgtaaaaaatcaaacggccatgctaactacatttaatgaagttaacatgacacccatttttgaaattagaaaaaagtataaagaagctttcaaaacaaaacatgaggttggtttaggttttatgagttttttcactaaagctgtagtatcagctcttaaagaatttcctgatgtacactctatgattgatgaagatcaacaaattaaatttgatttctatgatattagtattgcagtttctggaccaaagggattgatggttcctgttgttcgtgatgctcaagatttaacattttctggaattgaaaaagaaattaagagacttgcaattcgtgctcgtgacggtttaattactgttgaagatatgtcaggtgggacatttactatttctaatggtggagtttttggttcgatgctttctactccaattttaaatcctccacaatctgctattttgggtatgcataatataattgaaagaccaatagctgttgatggtaaggttgagattcaccctatgatgtttgttgctttgagctatgatcatagaataattgatggaaaagaatcagttggtttcctcttaaaagttaaagaattattagaaaatcctgtggaaggattgatgaataataatattaaaaaatctcttgaaatttaa

SEQ ID NO: 235584 - DNA, 703 bp, Unknown
  Bacterial polypeptide expressing nucleotide sequence isolated from the Sargasso Sea
atacggtgaagaagaacgaattaaaatgactaggttaagacaaactattgcaaaaagattaaaacaagcccaagagaatgcagctcttttaactacatttaacgaggttgatatgagcagtgtaatggaaatgagaaaggaaaatcaagaggattttcaatctcggtatggtgtaaaattaggttttatgtccttctttgtaaaagcatgtgtagttgctttaaaaaattttcctgcagtgaatgctgaaatagacggagatgaaattatctataaaaattattacaatattagttttgcagtaggaacagaaaaaggtttagttgttccagttttaagaaatgtagatgagttatcttttgctgatatagaaaaaaacattaaagaaatctctgaaaaagcaagagatggaaaattaactatcgaagatcttcaaggtgggacattcacaattagtaacggaggtgtttatgggtctatgctttcaactccaatactaaatttacctcaatctggtgtgttaggtatgcataacatagtagaaagaccagtcgttatagatggtgaaattaaaataagaccaattatgtatttagcactatcatatgatcacagaatcattgatggaaaagaatctgtgtcttttcttaaaatgattaaagaaaatttagaagaccctagaaggttatttttggatatttaa

SEQ ID NO: 235585 - DNA, 1216 bp, Unknown
  Bacterial polypeptide expressing nucleotide sequence isolated from the Sargasso Sea
aatgactgaaatacgtgtacctaccctaggagaaagtgtaactgaagcaactgttgcaacatggtttaaaaagcccggtgattcagtagctatcgatgaaatgttatgcgaattagaaactgataaagtcacagttgaagtaccttcaactgtttcgggaatactttcagaaatagttgcccatgaaggtgaaactgtcggacttgatgcattactaggaataatttcgaaaggtgacattcaaccaactgaaaataacaataatgatcaaaaaatatcttctatatccaatgacaaaatacaaataagtaatgatactaaagattttgagaatgctccttccgcaaaaaaacttatgaatgaaaataaaattaatgagaataatgttgtgggtacaggaagagatggaagagttatgaaagaagacgtattagctgttttaaactctgaaagtagtacaaataggtcagaaaaccaattaactgatcaaatacaagaagatgaggttgatacgtctaagcaccaagaacgaattaaaatgtctagattacgtatgacaatagctaaacgtttgaaagaagctcaaaatactgctgcaatgctaacgacctataatgaagttgatatgtcaagtgtaatgaaaattagaagtaaatttaaagaagtttttgaaaaaaaacataatgtaaagttaggttttatgtctttctttgttaaagcatgttgccatgcactaaatgaagttccagaagttaatgctcaaatagatgaggatcacttagtttttaatcgatttgtaaatatgggcgttgcagttggaacacccactggtctagtagttccagttataaaaaatgctgataaaatgagttttgcagaggtagagaaatcaattagtaatttagggaaaaaagcaagagatggaaaactttcaatggatgacatgaaaggtggtacttttactatatctaacggaggtgtatatggatccctaatgtcttcaccaattttaaactatccacaatctggaattcttggaatgcataaaattcaagaaagaccaattgcagtagatggtgatgttgttattaaacccatgatgtatttagcacttagttatgatcatagaatagttgatgggaagggagcggttacttttttagtaagagttaaagaaatgctcgaagacccacatcgtttacttatggatgtttag

SEQ ID NO: 235586 - DNA, 1342 bp, Unknown
  Bacterial polypeptide expressing nucleotide sequence isolated from the Sargasso Sea
atgagcgaaaaaatattagttcctatattaggtgaaagtattactgaggcaactgtttcaaaatggcttaaaaaagtaggcgatcaggttgaagtagatgaggccattattgagctagagactgataaagtaaacttagaggttccttcaccaataagtggcacattatcagaaataaactctaaagatggagatactgttgaagtaggggcagttctaggttcagtttcaggtggaaaattaaaaattgaaaaaaatgaatccccaaaacaagaaattagtgctggcactatttcagaagagtcagagaaagaggaaaataccaatgtaataaatcttgatgttgacaaaaaatctaagaaaaaattagatgatattcctgtaatgagagaagaggaaccaatggaacttttagatgaggtcaatgaagaaccccttcttttaactgatgaggtacaaataactaaaacttcaaaaattaatcctgttattctttcaccagcagtaaggaaaattgctgttgaaaataatataaatgttgaaaaagttaaaggaactggcagagatggtagaatattaaaaggtgaccttttaagtttgatgggtgcaaaacctcaaactaatcaaagaaaaattcaatatggtgaagaagagagaattaaaatgactaggttaagacaaactatagctaaaagactaaaacaagctcaagaaaacgctgctatgttaacaacttttaatgaagttgatatgtctgggataatgacgatgagaaaagataatcaagacgattttaaaagcagatatggaataaagcttggattaatgtcattttttgtaaaagcatgtgttgttggactaaaattatttccagcaataaatgcagaaattgaaggtgaggatatcatctacaagaattattataatataagttttgcagttggtactgataaagggttagttgtacccgttttaagaaatgcagatgaaatgtcatttgctgatatagaaaaagaaattaaaagactatcagaaaaagccaatagtggaaatttgtcaattgaagatcttcaaggtggaacatttacaatcagtaacggtggagtttacggctcaatgttatcaactcctattttgaatccacctcaatctggagtattgggaatgcacaatattgtagaaagaccagttaatgttaatggtgaaataaaaattaaacctataatgtatttagcattatcatacgatcatagaataatagatggaaaagagtctgtcacttttctaaaaactgttaaggagaatcttgaggatccaagaagattatttttaaatatataat

SEQ ID NO: 235587 - DNA, 439 bp, Unknown
  Bacterial polypeptide expressing nucleotide sequence isolated from the Sargasso Sea
agaaattgttttccatggttttaaagatattggagtggctgtttccactgatagaggattaactgttccaattatcaaagatgcagatttgttgaagattagtgatatagaaaaattaacattaaaatactctgaaaaagctcggaaaggtaaactcactattgaggagatgcagggtggtacattcactatttccaacggaggggtttttggatcgcttctatcaacaccgatattgaatgccccccaaaccgctattctcggaatgcataagatccaagataggcctatcgctgtggagggtaaaattgaaataagaccaatgatgtatcttgctctaagttatgatcatagaattattgatggaaaagaggctgtttcatttcttgtccacataaaaaatgagatagaaaatccggccaatctttataaagaataa

SEQ ID NO: 235588 - DNA, 782 bp, Unknown
  Bacterial polypeptide expressing nucleotide sequence isolated from the Sargasso Sea
aattactaaggccgatgttataaatcatattagtacagatatcgaagaaagttctgtgttatctgaattctctgaagatgataggcctcaaaaacgagtacctatgtctaggcttagatcaactattgccaaaaggcttgtttctgtaaagcaagatactgcaatgttaactacttttaacgaagtggatatgctgcctattaaagatttgagatcaaaatatggtgaggagtttgaaaaagagcatggtgtaaaattaggttttatgggtttctttgtagtagcagcagttcaagctcttaaaaagttcccaatggtaaatgcatctattgataaaaatgatattgtatatcatggttttcaagatattggtgttgcagtatcaacagagcgaggtttagttgtacctataataaaagatgcagataccaaatctctttctgaaatagaaaaatcaattcttgagtactcaaaaaaggcaaaagaaggaaaattatctattgatgaaatgcaaggcggaacatttacaatatctaatggtggtgtttttggctctttgctgtcaacaccaatattgaatgcgccacaaactgcaatacttggaatgcatgctattcaggaaagaccaattgcaattgctggcgagatagttataagacctatgatgtatctagctatgagttatgatcatagactacttgatggcaaagaagctgtaacttttcttgtttctatcaaagagcagcttgaatcaccagaaaggttactattaaatttataat

SEQ ID NO: 235589 - DNA, 145 bp, Unknown
  Bacterial polypeptide expressing nucleotide sequence isolated from the Sargasso Sea
aatggcgctgtagaaatacgtcctatgatgtatcttgcgctctcctatgatcaccgaattgtggacggtagagaggctgttacatttttagtaaaaattaaagaaattatagaggatccaagacggttaattctcgatctgtaaa

SEQ ID NO: 235590 - DNA, 1024 bp, Unknown
  Bacterial polypeptide expressing nucleotide sequence isolated from the Sargasso Sea
atgacaactgaaatcaaatcaccaacatttccagaatcagtagcagatggaacaattgctaactgggtaaaaaaagaaggcgatcatgtaaagcaagatgaagtaattgctgaaattgaaactgataaggttgtactagaggttgttgctccatttgatggcgttgtttcaaaagttcttaagcctgcgggagaaactgttctaagcgctgaattaatagcagaattcacaaaagaagacattaatcaggcatcagatactccaaagaatgagattatcgctgagcctgaaaaagaaaatgcaattgaaattaacaatgaagttaaagattcaagcacaaagaatggaccagcagtcaaaaagctattaaaagaaaatgatttaaatgaaagtgacatagaaggctctggaaaaaatggaaggatcactaaatcagatatcgtgaatcatttggatttacctgaaagtaaaaataaagagaaatctataagtccacctgtaaaagttgcatcatcttctaatgagagacttgaagaaagagtacctatgtctaggcttcgctcaacaatagctaatagattgctaactgtaaagcaagaaacagcaatgctgacaacttttaatgaggttgatctaaagccggttaaagatctgcgagcaaagtatggaaacgaatttgaagaagagcatggggtgaaattaggttttatgggtttctttgtcctggcagcagtgcaagcgttaaagaaatttcctgttgtaaatgcctccattgacggtagtgatattgtctatcacgggtatcaggacattggagttgcagtttcaaccgatagaggtttagttgttccagttattagagatgcaggtaatttacgaattgctgatgttgaaaaatcgattttagactactcggataaagcaaggcatggaaaactgtctattgcagaaatgcaaggaggtacatttacaatttataatggaggagtttttggctcgcttgttatctactcctatccttaat

SEQ ID NO: 235591 - DNA, 742 bp, Unknown
  Bacterial polypeptide expressing nucleotide sequence isolated from the Sargasso Sea
gatgggagccaacccacaacccaaccaaagaagaattcaatacggtgaagaagaaagaattaaaatgactcgtttaagacaaacgattgcaaaaagattaaaacaagctcaagaaaatgcagcaatgttaactacttttaacgaggtagatatgtctgggattatggcaatgagaaaagacaaccaagaagatttcaaaagcagatacggaataaagctcggtctaatgtctttttttgttaaagcttgtgtcgttggactaaaattatttccagcaattaacgctgagatagaagatcaagacataatttataagaattattataatattagttttgctgttggaactgaaaaaggcttagtagttccagtgcttagaaatgcagatgagatgtcatttgctgaaatagaaaaagaaataaaaaaattatctgaaaaagcaaacataggtagtttaacaatcgaggacttacaaggaggcacatttacaattagcaatggaggtgtatatggttctatgctttcaacaccaatattaaaccctcctcaatcaggtgtattaggtatgcataatattgttgaaagaccagcaaatgataatggtgagataaaaataaaaccaataatgtacttggccttgtcatatgatcatagaattattgatggaaaggaatccgtgtcgttcttaaaaactgttaaagaaaatttagaagaccctagaagattgtttttaaatatctaa

SEQ ID NO: 235592 - DNA, 370 bp, Unknown
  Bacterial polypeptide expressing nucleotide sequence isolated from the Sargasso Sea
aatcagggatgttgatcgaatgagtattaaagaaattggagaagcgttaaaaaaaactagtaagctttgtagagaattgaaaattgataaaaaagagttttttggtggttcaatgacaatttcaagtttaggtggaataggtggaaccttctttactccaataattaatccaccggaagtagctattttgggagtaggaaaaacttttgatagactggtaaaaataaaagggaaaataatttctagaaaaatacttcctttatctttgtcttatgatcatagattgattgatggcgccgaaggtgcaagattttgtgtttatttaagcgagtgtttaggtaaagacttcgcattcaagcttgctgtttaa

SEQ ID NO: 235593 - DNA, 616 bp, Unknown
  Bacterial polypeptide expressing nucleotide sequence isolated from the Sargasso Sea
ttgacaacttttaatgaggtggatttatttgaaataaagaaacttagagaaaaatatagggaaagttttgagagtaagtatggcgtaaagcttgggttcatgggtatgtttattaaagcatcaagcattgcattgcaggatatgcctattgtaaacgcgtctattgatggcgaagatgttgtatatcatggatttcaagatataggtgttgcagtctcgtctgaaaggggattggttgtgcctgtaataaaaaatgttcaagaattgtcaattgccgaaatagaaaaggaagtaagagattattcaataaaagcaagagaaggaaaactagaaatggatgatattacaggaggcacgttcacaatctcaaatggtggtgtgtttggctctcttctttcaacaccaatattaaatccacctcagtctgcaattttagggatgcataaaattcaagatagaccaatggttatagaaggaaaagttgaaattaggcctatgatgtatcttgctttaacatatgaccacagactattagatggtaaggatgcagtatcattcttagtaaaaataaaagagttattagagtcaccagaatcaatgatattaggagtataaa

SEQ ID NO: 235594 - DNA, 1201 bp, Unknown
  Bacterial polypeptide expressing nucleotide sequence isolated from the Sargasso Sea
aatgagtgaagaaataaagtctccaaccttcccagagtctgtcgccgatggaactattgctaactgggttaaaaaagagggtgaagctgtatcacaagatgaggtgattgctgaaatagaaactgacaaggttgttctagaggtattagctccttcggatggaaaaatttcaaaaattcataaaaatgaaggagaaacagttttaagtgctgaattaattggtgaatttatttcaggtgatattgaagaactaaaaactcaaactgttgaggaagaaaaacctaaagaaacagccccagatctcgaatcctcacaagaccgtcaagtagataaaaaatcaggaccagctgcaaaaaggataattgaagaaaaagagctaaatccatctgaaatccaaggtagtggaaaagatggaaggatcacaaaagctgatgtaataagccacgttgagaaagattcggttattgaagaatcagttaagaaaactaatgttgaccttgatagagaaacaaaaagagtccccatgacaagactaagatcaacaattgcaaagcgcttagttgaggttcagcaagaaacagcgatgttaacaaccttcaacgaggttgacatgaagcccataaaagatattcgatcaaagtatggagatgattttctaaatgagcatggagttaagcttgggtttatgggattctttgttgctgcctctgttaatgcccttgaaaagtttcctcaagttaatgcaagcattgacggaactgatattgtttatcatggctataaagatattggtgtagctgtttcaactgatagagggctagtagttcctgtaattaaagatgctgacataaaatcaatttcagaaattgaaaaatcaatctcagagtatgccgaaaaggccagagatggaaaattatcaattgaggagatgcaaggaggaacttttacagtgtccaatggcgggatctttggatcattgttgtcaacaccaattcttaatgcaccccagactgctattttgggcatgcataaaattgaagataggccagttgtggtagatggagaaattgttgttagaccaatgatgtatttagcaatgagctatgatcacagaatgctcgatggaaaagaggcagtatcatttctagtctcaataaaagagcaattagagaatcctgaaaaacttttactaaacctatag

SEQ ID NO: 235595 - DNA, 970 bp, Unknown
  Bacterial polypeptide expressing nucleotide sequence isolated from the Sargasso Sea
gagtttatatgctgaaagtagtggagttttaaaagaaattttatttaatgagcaagaagaagtcaaaataggagagacaattggagtaatagatttaatagaacatgaaaatgaagattctattgcaagcgacctagttaataccaatgaacttataaaaggtatcaaagaagaaaaggagaatgaaaaaaatttagatcctacaaaaattaaaagaactagtcttaataacaagataggggttaatgatttaagggagtttatagagggtgtgtcactttcaccatctgctagaaaattcattaatgaaagtaaaaatgaaatcaataatttaaatacaatagccactaatggcagaataacaaaagagagttttagtaatcttaaacctgactcaggactaaatgctttttctgaaaatgagaatattttaagtaatagtacagatgttagtaaacctctaagtaaaatgagacaaagtatagcacatagactcaaagaagctcagaatacggcagcaatgcttactacattcaatgaaatagatatgggaaacgttatttctttgagagcaaaatataaagaatattttttaaaaaaatatgataccaaacttggctttatgtcattttttacaaaagcatgtatttccgtattaaaggaaattccagaagttaatgctgaaataaaaaataataatataatttataaaaacagatatgatattggaatagctgtgggaacagataaaggtttagttgttcctgtattaagaaatgctgataagatgaattttgcagaaatagaaagttctattgtagaatatggtaatttagcaaaaaacaataaaattactatagaacatatgaaagatggcacttttactatttctaatggtggtgtttatggttctatgttatctacctcctattttaaatcctcctcaatcaggtatattgggtttgcataa

SEQ ID NO: 235596 - DNA, 1201 bp, Unknown
  Bacterial polypeptide expressing nucleotide sequence isolated from the Sargasso Sea
atgagtgaagaaataaagtctccaaccttcccagagtctgtcgctgatggaactattgctaactgggtcaaaaaagaaggtgaagctgtatcacaagatgaggtgattgctgaaatagaaactgacaaggttgttctagaggtgttagctccttcagatggaaaaatttcaaaaattcataaaaatgaaggagatacagttttaagtgctgaattaattggtgaatttatttcaggtgatagcgaagaactaaaaactcaagttgttaaggaagaaaaacctatagaaacagccccagatctcgaatcctcacaagaccatttagtagataaaaaatcaggaccagctgcaaaaaggataattgaagaaaaagagctaaatccatctgaaatcaaaggtagtggaaaagatggaaggatcacaaaagctgatgtaattagccacgttgagaaagatccagttattgaagaatcagtcaagaaaactaatgttgaccttgatagagaaacaaaaagagtcccaatgtcaagacttagatcaacaattgcaaaacgtttagttgaggttcagcaagaaacagcgatgttaacaaccttcaatgaggttgatatgaagcctataaaagatattaggtcaaagtatggagatgattttctaaaagagcacggagttaagcttggctttatgggattctttgtagctgcctctgttaatgcccttgaaaagtttcctcaagttaatgccagcattgacggaactgatattgtttatcatggctataaggatattggtgtagctgtttctactgatagagggcttgtagttcctgtaattaaagatgctgacataaaatcaatttcagaaattgaaaaatcaatctcagagtatgctgagaaggccagagatgggaaattatcaattgaggagatgcaaggaggaacttttacagtttctaatggcgggatctttggatcattgttatcaacaccaattcttaatgcgccacagactgctattttaggcatgcataaaattgaagataggccagttgtggtagatggagaaattgttgttagaccaatgatgtatttagcaatgagctatgatcatagaatgctcgatggaaaagaggcagtgtcatttctagtctcaataaaagagcaattagagaaccctgaaaaacttttactaaacctatagg

SEQ ID NO: 235597 - DNA, 1198 bp, Unknown
  Bacterial polypeptide expressing nucleotide sequence isolated from the Sargasso Sea
aatgactgttgaattaatagttcctactttaggtgaatccatcactgaggctactgtttctaaatggttaaaaaaggttggcgagccttttgatatcgatgagcctttggttgaaatagagactgataaaattacagttgaagttccagcacctcaggcaggatctttatcagaaattaaagccaaagaaggttctgatattcatattggtggtgtgttaggaattattggagattctaatggttcaaaaaaaactcaaactaatgaaacaaaaaatatcgaaccaaaaaaagaaaaaatcgttgaacaaaatataaaggataataaaaaaataaataaaaataataataaattatctccatcagtaaaaaaaatgcttgtagaaaataatcttgatgcaagttctattaaaacacaacgagatgatggtcgaattacaaaagaggatattttaaatcatttagaaggaaaaaattcattaaaaaaacaaaaatctactgatagagaagaaatagttcctatgtctaaaatcagacaaaccatagcaacacgattaaaagaatcacaaaatactgcagctatcttaactacctttaatgaagttgatatgtcagctatcatagaaatacgcgagaaaaaaaatgatgattttaaagagcgttatggggtcaaattaggattcatgtctttttttgtaaaagctgcagtgatgagtcttcaagaatttcctgctgttaatgctgaaatacgtgaaaacaatattgtttacaaaaatcattttgatattggtattgctgttggtactgaaaaaggattagttgttccagttttaactaatgctgatgaaatgacttttggagatattgaaaagaaaatagttgaactaagtgacaaggctaaagagggaagtttaactatggatgatttaagtggaggcacttttactatatcaaatggaggcgtctatggttctatgttaagcacacctattattaatagaccacaatcaggtattttaggtatgcataatattcaaaaaagagctgttgttgtagatgataaaattgttgctcgtcccatgatgtatttggcatttagttatgatcatcgtattattgacggcaaagaaagtgttggttttcttgtaaaaattaaatctttgctagaaaatccctcaaagattatattaggtatttag

SEQ ID NO: 235598 - DNA, 1216 bp, Unknown
  Bacterial polypeptide expressing nucleotide sequence isolated from the Sargasso Sea
atgagtatagaaattaaatcaccgacattccctgaatctgttgcagatggaacaattgctaaatggcttaaaaaagagggagaccatgttaatcaagatgaggtaattgttgagatagaaactgataaagttgttcttgaggttcttgcacaatcagatggggtagtctcaaaaattattaaacctgaaggcgagattgttgctagttctgaattaattggtgaatttgaggaatcagatggaagttcgataacacaaaaagttcaaaaagaagaaaagagtgaacctaacgaagaaaccaaacttgataaaagtaatgatttagataactcaaaaaaaatgggccctgctgcaaaaaaaattatatctgaaaaaaatattgatccagaaaatataaaagcatctggtaaaaataatactattacaaaggcagatgtaattaatcatatagaaaataaagctattgataaggatgatcataatattttttctgaaagtataacttcaggcgaggatagacctgaaaaaagagttccaatgtctagactcagatctactattgccaaaagattagtatcagtcaaacaagaaacagcaatgttaaccacatttaatgaagttgatatgcttcctattaaagaacttagagcaaaatatggtgctgaatttcaagaggagcatgatgttaagcttggttttatgggattctttgtaattgcagcagtacaagctttaaaaaaattccctgtagtcaacgcatctattgatggaaatgatgttgtgtatcatggttttcaagatataggagtggctgtctctacagaaagaggcttagtagttccagtgataaaagatgcagatacaaaatctttgcctgaaattgaaaaagcaatattaagttactctgataaagcaagaaatggtaagttgtctattgatgaaatgcaaggaggtacatttactatctcaaatggtggaatttttggttctttgctctcaaccccaattcttaacgctccacaaacagcgatattaggaatgcatgcgattcaagatagaccagttgcaattaatggagaggttgtaataagacctatgatgtatttagcaatgagttatgatcatagacttttagatggcaaagaggccgtaactttcctagtgtctattaaagaacaacttgaatcacctgagaggttattacttaacttataaa

SEQ ID NO: 235599 - DNA, 904 bp, Unknown
  Bacterial polypeptide expressing nucleotide sequence isolated from the Sargasso Sea
ctgctaactgacgaagttcaaacaaaccaaactacaaaagttaatcctattgttctttcaccagcggtgagaaaaattgctgctgaaaataatattgatgtgcaaaaggttaaaggtacaggaagagatggtagagtattaaaaggtgaccttttaagcttgatgggaacaaatccacaacctaatcaaagaagaattcaatatggtgaagaagagagaattaaaatgacaaggttaagacaaactatagctaaaagacttaaacaagcgcaagaaaatgcagcaatgttaacaacttttaatgaagttgatatgtctagtataatgtcgatgaggaaggacaaccaagaagattttaaaagtagatatggaataaagctaggattaatgtcattctttgtaaaagcctgtgtcgttggcttaaaattatttccagcaataaatgctgaaattgaaggtgaagacattatttacaaaaattattataatataagttttgcagttggcactgataaaggattggttgtaccagttttgagaaatgcggacgaaatgtcatttgctgatatagaaaaagaaattaaaagactttcagaaaaagccaatagcggaaatttgtcaattgaggatcttcagggaggaacattcacaattagtaatggtggagtttatggttcaatgttatcaactcctattttgaacccacctcaatctggtgttttgggaatgcataatattgtagaaagaccagttaatgttaatggtgaaataaaaattaaaccaataatgtatttggcattatcatatgatcatagaataatagatggaaaagagtccgttacttttctaaaaaccgtaaaggagaatcttgaggaccctagaagattatttttaaatatataat

SEQ ID NO: 235600 - DNA, 1080 bp, Unknown
  Bacterial polypeptide expressing nucleotide sequence isolated from the Sargasso Sea
gtgctgatttaggatctgtttccgagagtgagactaaatctagagaaaatcaggaaattaaaaagatacaacccactgtgaaagttgataaggaaaatttgatagatgaagatgataaagatgaggagatggaagtttttcaagataatgttgaagaagaaaaaccactaattcttacgaaagaggtcgaaccaacaaaagcagaagttgagacaaaaatcgatcaaactttatctccagctgtaagaaaaattgtaactgagaataaaatagacatcagttcagtcaaaggttcaggaaaagacggcagagttttaaaaggtgatttaattaatttaatgggcgtcaatcctcctccatctgaaagaaaaataaaatatggtcaagaagaaagaattaaaatgaccaggttaagacaaaccattgctaaaagattaaaacaagcacaggataatgcagctctactgacaacatttaatgaagttgatatgtcaaatgtaatgatgatgagaaaagaaaatcaagatgattttcaaaatcgctatggtgtaaaattaggttttatgtctttttttgttaaagcaagcatagtagcattaaaaaatttcccagcgataaacgctgaaattgaaggcgatacaattgtttataaaaattattataatataagttttgcagttggtactgaaaaaggattggtcgtaccagtcctcaaaaacgcagatgaattgtcttttgcagatattgaaaaaaatattaaagaaatttctgaaaaagcaaaaaatgggaaattgacaattgaagatcttcaaggtggaacttttaccatcagtaatggaggtgtttatggttcaatgctttcaactcctattcttaatcttccgcaatcaggtgtcttgggtatgcacaatatagttgatagaccaatcgtagttgatggagaaatcaagatcagacccataatgtacttagcattgtcatacgatcatagaattgttgatggcaaagagtctgtttcttttttaaaaatgatcaaagaaaatttagaggaaccaagaaggctatttttagatatttaaa

SEQ ID NO: 235601 - DNA, 702 bp, Unknown
  Bacterial polypeptide expressing nucleotide sequence isolated from the Sargasso Sea
cgccaggaattcgtcgtgcgccgatgagccgattgcgcaaaacgatcgccgtgcgtcttatcgaagctcagcacaatgctgcgattctgaccacgttcaacgaagtagacctgtatgaggtcaaatccctgcgcgcccgttaccgggacgcattcgaaaaaacccacggcgtacgcctgggtttcatgtccttctttgtcaaagcctgcgtcgaggcgctgaagcgttttcccatcatcaatgcagcggtcgacggatccgacatcctgtatcacgactattacgatgtcgggattgccgtgtcttcgccgagaggtctgatcgtgccggtgctgcgaggcgcagaacacctcgggcttgcggacattgaatcgtctattgccgcctttggcgagcgcgcgaaaaccggcacgctcagtcttgaggatttgaccggcggcacctttacgatcaccaatggtggcgtattcgggtcaatgctttcaacgcccatcctgaatccaccacaaagcgccatcttgggaatgcataagatacaggatcgacccgtggcgctgaatggcgatgttgtcatacgccccatgatgtacctggcgctgtcgtacgaccatagaatcatcgatggctccgacgcggtttccttcctggtcgcgatcaaggatgcgcttgaggatcctgcccgtctgctgctggaagtttagg

SEQ ID NO: 235602 - DNA, 775 bp, Unknown
  Bacterial polypeptide expressing nucleotide sequence isolated from the Sargasso Sea
tctgatggaagaataaataaagaagatgtagtttcccatctttcttcttcaaataaaacaaccactaacaaaggtgaaagagaagaagttgttaaaatgtctaaaatcagacagacaatatctaaacgtttaaaggaggctcaaaatacagcagccatacttacgactttcaatgaaattgacatgtctaaagttatggaaattagaaaatcaaaaaaccaagaatttcaaagtcggtatgaggtcaaattaggtttcatgtcattttttgtaaaagcggtagtaaaaagtttgcaagagtatccagcggtgaatgctgaaattaaagatgaaaatataatttataaaaatcattttgatataggtatagctgttggaactgaaaaaggattagtcgtaccaatacttaaagacgccgatcaattgagttttggagaaatagaaactaaaattcttgatcttagtacaaaagccaaagatggaacgctgaccatggatgatttgactggtggaacttttacaatttcaaatggtggtgtttacggatcaatgctcagtaccccaataatcaatagacctcaatctggaattttagggatgcataatattcaaaaaagagcagtagttgtaactgatgaaatagtaattaggccaatgatgtatgttgcattaagttatgatcatagaattattgatggaaaagaaagtgttggatttttagtgaaagtgaaagaacttctagaagatccatccgaattagtattaggaatataaa

SEQ ID NO: 235603 - DNA, 876 bp, Unknown
  Bacterial polypeptide expressing nucleotide sequence isolated from the Sargasso Sea
aaaagattgaacagaataagattgatgagataagtattactcctctagctagaaatattgcttcagataaaggtattgatattaatgaaattcattctaaaggagataaaataacaaaagatgatgtcttaaaagtatttccagcaatgggttcttcaaatcatgaaggtagaatcgaaaaaagagaaaaactttcaatgttaagaagaaaagtttcagagagactagtttctgttaaaaatgaaacagctatgctgactacttttaatgaagcggatttatctaatatttttaatcttagaaaaaagtataaagaagccttctctcaaaaacatggagtaagtctaggtttcatgagtttctttactaaagctgttacaagagctctcgaactttatccagatgtaaattctatgatcgatggtaatgaaaagatttcttataattactctgatataagtattgcagtctctggtcctaaaggactaatgactccagttttgagaaatgctcaagatttatcttttgccgctgttgaacaagaaataaaaagacttgctgataatgtaagagacaagtcaataacagttgatgatttaactggtggtacttttacaatttcaaatgggggtgtttttggttcaatgctttctactccaattattaacccacctcaatcaggtattttaggaatgcataatattattcaaagaccaattgctgttgaaggaaaagttgaaatacggccaatgatgtatctagctttgtcttatgatcacagaattattgatggtaatcaatcagttggttttttaatagctgttaaagagggagtagaaaatccagaaaacatttttaatggatggaaaaattgaa

SEQ ID NO: 235604 - DNA, 710 bp, Unknown
  Bacterial polypeptide expressing nucleotide sequence isolated from the Sargasso Sea
atttggacctgcagaaagaatcaaaatgactaagttgagacaaactattgcaaaaagacttaaagaagctcaacaaactacagctatgttaacaacatttaatgaagtggatatgtcaaatataattaatatgagaaaagaaaaccaagaagattttcaaaataagtttggagttaaattgggatttatgtctttttttgtaaaagcatccattgtagcattaaaacttttccccgcaataaatgctgagattgaagaccaagatattatttacaaaaactactacaatattagcatagctgtgggaacagaaaaaggtttagtagttccagtaatcaaaaatgcagatgaactttcatttgctgatattgaaaaaagtataaaatctctgtcagacaaagctcagcaaggaaaaattacaattgaagatttacaaggtggaacttttacaattagtaacggcggagtttatggatcaatgctatctacaccaatactgaacttgccccagtctggtgtacttggaatgcataatattactgaaagaccaattgtagttgatggcgaggtaaaaataagaccagtaatgtatcttgcattatcatatgaccacagaattatagatggaaaagattcagtttcttttttaaaaacaataaaagaaaatttagaaaatcctggaaggttactaaaatatttaaatgtttgat

SEQ ID NO: 235605 - DNA, 771 bp, Unknown
  Bacterial polypeptide expressing nucleotide sequence isolated from the Sargasso Sea
tggtgtcggcggacgcctgacgaaggccgatgttctagcagcaatcaagacaccgcaaccagcgcttcccgcaaatacgactagtggtggactcgtggccgcaaacacgccgcgatcaacaccccgtgatgtggatgctgcgcgcgaagaacgggtgccgatgtcaaaattgcggcaagtcattgcgagcaggttgaaagcagcacaaaataacgccgccatgctgaccacttttaatgaggtggacatgtcggcagttatgaagttgcgcgctgactacaaagatgcgtttgcggcaacacatgaagttcgtcttggattcatgggtgtttttgttcaggccgcgactctggcgcttcgcgaatttccagcggtaaatgccgaaattgatggcaccgatataatttataaaaattattataatattggcgttgctgttgggacgccacaagggcttgtggtgccggttattaaagatgctggagagatgagtcttgccgataccgaaagggtaatatcagactttggcttccgtgcacgcgatggcaaaattaccccggacgagatggctggtggcacatttactatttctaatggtggggtatacggatcaatgatgtcgacaccgattttgaatccgccgcaaagtggtattttgggcatgcacaagattcaaaagcgggcggtggtgattgacgaccagattgtggccaggccaatgatgtatctggcattgtcatatgatcatcgtatcattgacggtcgtgaggc

SEQ ID NO: 235606 - DNA, 921 bp, Unknown
  Bacterial polypeptide expressing nucleotide sequence isolated from the Sargasso Sea
aaattgagcctttaatcctcactgatgagattgagacagaaaaaaaaaataaaacacagatcaattcaaatctatctcctgcagttagaaaactagtcgaagaaaaaagtattgatgtttcgaaaattcaagggactggaagagatggaagaatattaaaaggcgatctaataaatttaatgtcatcaaaaccctctcccaatcaaaaaaaattagaaagaggtcaagaggaacgagtaaaaatgactagattaagacaaacaatcgcaaagagactaaaagaggcgcaaaattctgcagcaatgttaactacttttaatgaagtagatatgagcgcgattattcaaatgaggaaagaaaaccaagacgattttcaaaaaaattttggaattaaattaggttttatgtctttttttgtgaaagcatgcgttttgggattaaagctttatccaagcattaatgctgaggtagacaatgatcatataatttataaaaattattataatataagttttgcggttggaaccgaaagaggtttggtagttccagttttaaaagatgcagatgatttatcttttgctgaaattgaaaaaaatattaaagagatttctgaaaaagctagggatggaaatttaactatcgaggatcttcaaggaggcacttttaccataagtaatggaggtgtttatggatctatgctctcaactccaattttaaatccaccacaatcaggtgttttaggcatgcataatattattgaaagaccaatagtagtagatggtcaaatacaaataagacctgttatgtacttggcattatcttatgatcatagaattatagatgggaaagactcagtttcttttttaaaaacagtaaaagaaaatttggaagatcccagaagactatttttaaatatttaac

SEQ ID NO: 235607 - DNA, 773 bp, Unknown
  Bacterial polypeptide expressing nucleotide sequence isolated from the Sargasso Sea
tgtcttaaaagtagtcccagccatgggctcctcaaatcatgagggtaggattgaaaacagagaaaaactttcaatgttaagaagaaaggtttcccaaagactagtttctgttaaaaatgaaacagctatgttaactacttttaatgaagcggatttatcaaagatatttgatcttagaaaaaagtataaagaagctttttctcaaaaacatggagttagtcttggtttcatgagtttcttcactaaagctgtgacaagagcacttaaactttatccagatgtaaattctatgattgacggtaatgaaaagatttcttataattattctgatataagtattgctgtctctggaccaaaaggtttaatgacaccagtgctcagaaatgctcaggaactttcttttgctgctgttgaacaggagataaaaagactagcagataatgtaagaaataagtcaacaactgtagatgacttaactggtggtacttttacaatttcaaatggaggggtttttgggtcaatgctttctacgccaattattaaccctcctcaatcaggtattctcggaatgcataatattatacaaagaccaattgctgttgatggaaaagttgagattagaccaatgatgtatctagctttatcgtatgatcacagaattattgatggtaatcagtctgttggatttttaattgctgttaaagagggagtagaagatccagaaaatattttgatggatggaaaagtaaaaaaatatttaggccttaattaat

SEQ ID NO: 235608 - DNA, 815 bp, Unknown
  Bacterial polypeptide expressing nucleotide sequence isolated from the Sargasso Sea
aaaaattgatattgagtcaatacaaggaagtggaaaacatggtttagttttaaaggaagatgtgatgagtttaatgggagttaagccacagccttcagaaagaaaaattgcacatggcccagaagaaagaattaagatgactagacttagacttactattgcaaaacgactaaaagaagctcaagaaaatgcagcaatgctgacgacatttaatgaggtagatatgtctgaagtaatcaaaatgcggaatgattacaaagaggattttcaaaaaaaatattctgctaaattaggttttatgtctttttttgtaaaagcatgtataattggtttaaaaaattatcctgcaattaatgctgaaattcaaggagatgagatcgtatataaaaattattataacataagtatagctgttggtactgataaaggtttagtcgtaccagttgtaaagaattcagatgaattatcttttgctgatatagaaaaaaatattagtaaacttggtcaaaaagcgaaagatggaaaaattactatcgaggacctacaaggaggtacttttacaattacaaatggtgggatttacggatcaatgttatctaccccaattttaaatcctccacaatccgcagtacttgggatgcataatatagtagagcggccattggtagtagatggtgaagtgaaaataagaccaataatgtatctagcattgtcgtatgatcatagaataatagatggaaaggaagctgtttcatttttaaaaatagtgaaagactctttagagcaaccaaagagactatttataaatctttaag

SEQ ID NO: 235609 - DNA, 721 bp, Unknown
  Bacterial polypeptide expressing nucleotide sequence isolated from the Sargasso Sea
tcggcaaatgcagccagcaatcgggaggagcgatatcagttaatcacgccgattcgacagcgaatagctgagcgtctggttgaggcccagcatgatgctgctcttctaacaacattcaacgaagttgatatgtctgctgtgaaggctcttcggggtaagtttaaagatcaatttcttgatcggtacggtgtgaagcttgggttcatgtcgttctttgttcgtgcagttgttgaggcattgcgtgctgtgcctcaagttaatgcagaatttcgagaaccccatattgtctatcgtgattactacgatattggcattgcagttggtggcgggaaagggctggtggttccagtcatccgaaatgcagaaatgctgtcattcgctcaaattgaaacaacgatcggtgattttgcacagagggcaggagcaaacaaattgaagttggaggaacttcaaggtggcacgttcaccatttcaaatggaggcgtctatggatccatgctatcgactccgatcatcaatcctcctcaaagtggtattttggggcttcacgcaattcaggatcgacccgttgcagtgaatggtcaggtcgttgttcgaccaatgatgtatttggctcttacgtacgatcatcgattggttgatggtcgagaggccgtgacttttctgaagcggatcaaagataccatcgaagacccaagccgattgatgctggaagtgtagt

SEQ ID NO: 235610 - DNA, 822 bp, Unknown
  Bacterial polypeptide expressing nucleotide sequence isolated from the Sargasso Sea
ttgaaaataaaattaatttagacgaagtaaaagggacaggtaaagatggaagaattttaaaaggtgatttaataagtttaatgggaactaatcctcaacctaacgaaagaaaaatccaatacggtgaagaagaacgaattaaaatgtcaagactaagacaaacgattgctaaacgtttaaaagaggctcaaaataatgctgctatgctcaccacgtttaacgaagttgatatgtcaaatataatttcaatgagaaaagataaccaggaagatttccaaaatagttatggaattaaacttggcttcatgtccttttttgtgaaagcttgtatagttggattaaaattatttcctgcaataaatgctgaagttgaaaatgacgaaatggtttataaaaactattataatgtgagctttgcagttggaactgagaaaggattagtagttcctgtattaaaaaatgctgatgaaatgtcttttgcggacattgaaaaaaacataaaagatctgtcagacaaagcaaaaaatggtagtcttactatagaggatcttcaagggggaacatttacaattagtaacggaggtgtttatggatcaatgttatctactcctattttaaaccctccacagtcagcagttcttggaatgcataatattgttgaaagacccgttgttgttgatggtgagataaaggcaagacctgtaatgtttttagcattgtcttatgatcatagaataattgatggaaaagaatctgtaagttttttaaaaactgttaaagaaaacttagaagacccaagaaggttatttttaaatttataat

SEQ ID NO: 235611 - DNA, 679 bp, Unknown
  Bacterial polypeptide expressing nucleotide sequence isolated from the Sargasso Sea
aatgactaggttaagagcggtagtggcagataggcttttagaatctcaagcccaaactgcttcattaacaaccttcaatgaggttgacctatttgaggtaaaaaaattaagagaaaaatataaagaggacttcgaaaaaaaatatggagtaaagctaggttttatgggcttatttttaaaagcttcctcaatcgctttacaggaaatgcctattgtaaacgcttctattgaaggtactgacatcatatatcatggctttcaggatattggggtagctgtttctactgaaagaggccttgttgttccagtaataagaaatgttagcaatatgtcaattgctgaaatcgaaagttccataaaagattattcaataaaagctagagatggcaagctttcaattgacgatatgatgggtggaacttttactgtttcaaatggaggagtttttggatctttgctctcaacacctattttaaatccacctcaatcagcaatccttgggatgcataagatacaagatagaccaatggtagttgatggaaatatcgagattagaccaatgatgtatcttgcacttacttatgatcataggttgcttgatggcaaggatgcagtatcatttcttgtgaaaataaaggaatctctggaatcaccagagtcaatgatgttaggaatataa

SEQ ID NO: 235612 - DNA, 436 bp, Unknown
  Bacterial polypeptide expressing nucleotide sequence isolated from the Sargasso Sea
gctgtaagttctccaaaaggacttatggttcctgttgttcgtaatgcagagttgttagattttgctggaatagaatctgaaattaagcgtttggcaataaaagctagagatggtaaaattagtatggatgatatgcttggtggaacatttacaattacgaatggaggtgtgtttggctcaatgttatctaccccgattattaaccctcctcaatcggcaattttaggaatgcataatattgtagagcgtcctgtagtagttgaaggacaagtggttatccgaccaattatgtatgttgcattatcttatgaccatcgtattattgatggtagggaatctgtaagcttcttgtgtgctgttaaggaggctcttgaaaatccagttgacatcctacttgacggtgaagaccagattgtaaagagtttaaatttataat

SEQ ID NO: 235613 - DNA, 757 bp, Unknown
  Bacterial polypeptide expressing nucleotide sequence isolated from the Sargasso Sea
tgatactagcgatttaaaaggtactggcagaggagggcgaattactaaaaatgacgctgtaaatgcaattccttcaatgggttcaaagcctgagtggggagatcgtgaacaaaaacgctcaaaactttcaatgctgagaagacgtgtagcggaacgcttagtggatgctaaaaatgaaacagcaatgttaactacttttaatgaagtagatatggatgctgtttttaaagtacgtaacaaacacaaggatgactttttaaaaaagcacggcgttaagctcggctttatgagtttctttacaaaagctgtagttcgagcactaaaactttatcctgatgtaaactcaatgatggatggagattataaaatttcttacgattattgtgacattagtgtagctgtttctggaccaaaaggactaatggttcctgtggttcgtaatgcggaattattaagcttttcaggaattgaacaagaaattggccatttggctattaaagcacgtgaaggaaaaattactgttgatgatatgactggaggaactttcacaatttctaatggtggagtgtttgggtcaatgctatctacccctattatcaatcctcctcaatcaggaattttaggaatgcataacatagttcagcgtccgattgcaattgagggagaagtggttatccgaccgatgatgtatttagcactttcatatgatcatcgaattattgatggacgagaatctgtaggtttttttggtggccat

SEQ ID NO: 235614 - DNA, 931 bp, Unknown
  Bacterial polypeptide expressing nucleotide sequence isolated from the Sargasso Sea
aataatgattctcaagagttattagttaatagtgaactctctcccgcagttcgaagattagttgaagagcataagttggatccaaattctatttcagggtctggaaaagatgggagacttactaaaggtgatattcttaggaatctagtttctaaagataattctcagaaaaataactaccctagcgcggatagtatttcaaataataatatacctaattcaaaagaacatgagcgggaaaaaagagtccccatgtctaagataagaaaaattattgctcatagattgaaagaagctcaaaacactgctgctatgttaacaacatttaatgaagttgatatgtccgctgttataaatattagaaatgaatttaaagatgattttgtaaaaaatcataatataaaacttgggtttatgagtttttttgttaaagcatctataatttctttggaggaattcccagctgttaatgctgaaatagttaatgatgaaattgtttacaaaaattattataatataggagtagcagttgggacaccgcagggattggttgttccagtattaaaaaatgctcaagaaaaaaatatagctcaaatagagtctgaaatagcaaattttgcaaataaagctagacaaggaaaattattaccatctgatttaaatgcaggaacgtttactatttccaatggtggtatttatgggtctctaatgtctacaccaatattaaataggccacaaagtggaatcttaggaatgcataaaatacaaaagcggcctgtggctataaatgataaaattgaaataaggccaatgatgtatttagctctttcatatgatcatagaattattgatggcagagaagcagtttcttttctgatacgtattaaagagtcaatagaagatccaagaagaatacttttaaatatctaaa

SEQ ID NO: 235615 - DNA, 871 bp, Unknown
  Bacterial polypeptide expressing nucleotide sequence isolated from the Sargasso Sea
agaaatataaatttatctcctgcagtaagaaaaattgttactgaaaaaaatatagatattaataaaattaaaggaactgggagagatgggagaattttaaaaggtgacctaatcgcattgatgggagaaaacccacaacctaataaaagaaaaattcaatatggcgaagaggagagaattaagatgactagacttcgtcaaactatagcaaaaagacttaaggaagcgcaagaaaatgcagcaatgttaactacatttaatgaagttgatatgtcaggaataatttcaatgagaaaagaaaatcaagaagattttcaaaataggtataacattaaattaggttttatgtctttttttgtaaaagcttgtgttgtaggattaaaattatttcctgcaataaatgctgaaattgaagaacaagatataatatataaaaactattataatataagttttgccgtaggaaccgaaaaaggtcttgtagttccagtattaaaaaatgctgatgagatgtcattttcagatatcgaaaaagaaataaaaaaactatctgacaaagcaaagaatggaagtttaacaatagaagatctgcaaggaggtacgtttactataagtaatggcggtgtttatggttctatgctatcaactccaatacttaatccacctcaatcaggcgtgcttggtatgcataatatagttgagagaccagtttcagaaaatggagaattaaaaattaaacctattatgtatttagctttatcttatgaccatagaattattgatggaaaagattcagtatcttttcttaaaacatttaaagaaaacttagaggatcccaagaagattatttttaaatatttaaaatgttaga

SEQ ID NO: 235616 - DNA, 780 bp, Unknown
  Bacterial polypeptide expressing nucleotide sequence isolated from the Sargasso Sea
aacatggaatggtcatgaaaggggatcttttagatcttatgggatctaaacctagtccaaatcttaaaaaaataaaagatgggccagaggaaagaataaaaatgacaaggctcaggttgactatagccaagagacttaaggaagcacaaaataatgcagcaatgttaacaacttttaatgaagttgatatgtttaatataaaagaaataagaaaaaattatcaagaagaatttcaaaaaaaatactctgtaaaattaggcttcatgtcattttttgtaaaggcatgtatttctgcactaaaaaactatcctgcaattaatgctgaaatccaagatgaagaaatagtttacaaaaattactataatattagttttgcagttggtacagatagagggttggttgttcctgttttaagaaatccagacgaaatgtcatttgctgatatcgaaaaaaatattttagctcttggagaaaaagcaagagaaggtaaaattactattaatgatttacagggtggaacttttactattactaatggaggtatttatggctcaatgctttcaactccaattttaaacccacctcaatctggagttctaggcatgcataatattatagaacgtgcagtggttgttgacgggtcaattacaattcgtcccatgatgtatttggcattatcttatgatcatagaattgtagatggtaaagaagctgtttcttttttaaaaaatataaaagactctctcgaagagccgaagaggctttttttaaacgtttaaa

SEQ ID NO: 235617 - DNA, 529 bp, Unknown
  Bacterial polypeptide expressing nucleotide sequence isolated from the Sargasso Sea
aaacttggttttatgtccttttttgtaaaagcttgcgttgcatcattgaaaaattttccagctataaatgctgaaatacaaggagacacaatagtatataaaaattattataatattagttttgctgtaggaacggatcgaggtttagttgtgcctgttctaagaagtcctgatgaaatgtctttcgcagaaatcgagaaaaatattttatctttaggtgaaaaggctagagatggaaaaataacaatcgaagatttacagggaggtactttcacaattacaaatggaggtatttatggttctatgctttcaactccaatattaaatcctccacagtcaggagttttaggtatgcacaacatagtagaaagagcagttgttaaagatggagaaataataattaggccgatgatgtatttagctctatcttatgatcacagaattgttgacggtaaagaagcagtttcatttttaaaaaatgtaaaagattcgttagaggagccacagaggcttttcttaaatgtataaa

SEQ ID NO: 235618 - DNA, 794 bp, Unknown
  Bacterial polypeptide expressing nucleotide sequence isolated from the Sargasso Sea
aaaaggagcaggcaaagatggaagaatactaaaaggagatttgattaatttaatgggtacatcgcccaaaccttcggagagaaaaattaagtatgggcaagaagaaagaatcaaaatgacgcgtttaagaatgacaatcgctaaaagattaaaagaagcgcaggaaactgctgcaatgttaacgacttttaatgaagtaaatatgagtagtattaatcaaattagaaatgatcaccaagaagattttcaaaatagatatggaattaaattaggttttatgtctttttttgttaaagcgtgtgtagttggattaaaaaactttccagcaattaatgctgaaatagatagtggtgatattgtttataaaaactattataatataagttttgcagtagcaactgataaaggcctagtcgtacctgttttgaagaatgcggatgaattatcttttgctgatatagaaaaaaatattaaaagtatggcagaaaaagcaagaaatggaaaattaacgattgaagacctccaaggtggaacttttacaatcagtaatggtggcgtatatggatctatgttatcaacaccaattttaaatgcacctcaatcaggagtattgggtatgcataatattatagaaagaccaatttcagttgatggagaaattaaagtatgtccaatgatgtatttggctttatcatatgatcacagaataattgatggaaaagactcagtgtcttttttaaaaagtattaaagaaaatttagaagatccaagaaaactttttttagatctttaat

SEQ ID NO: 235619 - DNA, 748 bp, Unknown
  Bacterial polypeptide expressing nucleotide sequence isolated from the Sargasso Sea
aatgggtgtaaaacctgcgccgtcagatagaaaaattgctcatggtccagaagaaagaataaaaatgacaagactaagacttactatcgcaaaaagattaaaagaggctcaagaaaatgcggcgatgcttacgacttttaatgaggttaatatgcatgaagtaattcaaatgagaaataactataaagaagaatttcaaaaaaaatattttgtcaaattaggctttatgtctttttttgttaaagcatgtataattggtttaaaaaattatcccgcgataaatgcagaaatccaaggtgatgaaattgtttataaaaactattacaatattagtatagctgttggtactgataaaggcttggtagtgccagttatcagaaattcagatgagctatcttttgctgatatcgaaaagaatattggtatgttaggccagaaagcaagagatggaaaaattactattgaagaccttcaaggaggtacttttactatcaccaacggaggtatttatggatctatgttatctactccaattttaaatcctccgcaatcagcagttcttggaatgcataatataatcgaaaggccagttgtagaagacggagaggtaaaaataaagccaataatgtatttggcattatcatatgatcacagaataatcgatggaaaggaagcagtttcatttttgaaaatagttaaggattctttagagcaaccaagagattattttttaatctttaattcatga

SEQ ID NO: 235620 - DNA, 874 bp, Unknown
  Bacterial polypeptide expressing nucleotide sequence isolated from the Sargasso Sea
gcaaaatatataccacctaaaactaaaaaacatttatcacctgccgtaaggaaaattgttgaagaaaataatattaatctttcaaaagtggagggaactgggaaatctggaagaatttccaaaggtgatttaattaatttaatgggaaatattcccgaaccttcaaaaagaaaaattagtcatgggccagaagaacgtgtgaaaatgacaagattaagagcaaccatagccaaacgattgaaagaagcacaagaaaatgctgcgatgttaacaacttttaatgaagtagacatgcaaagtattatggaaatgagaaaagattaccaagaagatttccagaaaaaatattcggtaaaactaggattcatgtctttttttgtcaaagcaactgttgttgctttgaagaattttccagcagtaaatgcagaaatagaaggagatcatattacttataaaaactattataatatttcaattgctattggtactgacaagggattagtagttcctgttcttaaaaatgcagatgaactttcttttgctgatatagaaagaaatatttttttactttctgaaaaagccagatcaggaaaaattacaattaatgatctacaaggtggaacttttacaataagcaatggaggaatttatgggagtttattatcgactccgattttaaatccccctcaaacaggtatattaggaatgcacaatattgttgaaagacccgtagctataaatggaagtgttgtaataagaccaatgcaatatttagctttatcttatgatcatagaataattgatggaaaagaggcggtttcttttttaaaaccatcaaagaatgtcttgaggaaccacgtagattatttctaga

SEQ ID NO: 235621 - DNA, 895 bp, Unknown
  Bacterial polypeptide expressing nucleotide sequence isolated from the Sargasso Sea
tgagataaaaaaagtagataccaccaaaaaaaaagttaatttaaatttatcaccagccgtaagaaaaattgttgaagataaaaaaattgatgtttcgaaaattcacgggactggcagagagggtagaattttaaagggagatttaatcaatttaatgtcttcaagaccgtctccaaaccaaaggaaattagaaaaaggtttagaagaacgagtaaaaatgacaaggcttagacaaacaattgctacaagattaaaggaagctcaaaattccgctgcaatgcttacaacttttaatgaagttgatatgagtgctataatacaaatgagaaaagataatcaggaagatttccaaaatatttatggaattaaattaggtttcatgtcattttttgtaaaagcttgtgttttggggttaaaactctatccaagtataaatgctgaggtagataacgatcatataatttataaaaattattataatataagctttgctgtaggaactgaaaaaggtttagtggttcctgttttaagagatgcagatgaattatcttttgctgatattgaaaaaaatataaaagcaatttccgaaaaggctagagatggaaatttaactattgaagatcttcaaggagggacttttacaataagtaatggaggagtatatggatctatgctttcaacacctatactaaatcctccacaatctggggtgcttggtatgcacaatattatcgaaagaccaatagctgtaaatggcaaaatagaaattaggccagtgatgtatcttgcattatcttatgatcatagaattattgatggaaaagactcagtttcatttttaaaaactattaaagaaaatttggaggatccaagaagattatttctaaatatataa

SEQ ID NO: 235622 - DNA, 749 bp, Unknown
  Bacterial polypeptide expressing nucleotide sequence isolated from the Sargasso Sea
gagtttgatgggttccaaaccatctccttcggaaagaaaaattaagtatggcccagaagagagagttaaaatgactaggctaagattaacgatagctaaaagattaaaagaagctcaagagaatgcagcaatgcttacaacttttaatgaggttgatatgagcgaagtgatgaaaatgagaagtcaatacaaagaggaatttcagaccaaatatggagttaaactagggttcatgtcattttttgtaaaagcttgtgttataggtttaaaaaattatcctgcagttaatgcagaaattcaaggtgaagaaattgtgtataaaaattattataatataagtatagctgtaggaacagatagaggactcgttgtgccggttctaagagaaacagatgaaatgtcttttgctgatattgaaaaaaatataggtgaacttggtcaaaaggctagagatggaaaaattaccatcgaagacttacaaggtggaacatttacaattactaacggtggaatttatggctcaatgctttcaacgccaattttaaatccgccacaatctgcagtgttaggaatgcataatataattcaaagaccagtcattgtagaggggaacgtggaggcaaggcctataatgtatttggcactttcttacgaccatagaataattgatggaaaggaagcagtatcgtttttgaaaatagtaaaagagtctttagaacaacctaaaagactttttttaaatatttaat

SEQ ID NO: 235623 - DNA, 897 bp, Unknown
  Bacterial polypeptide expressing nucleotide sequence isolated from the Sargasso Sea
ttaaaaattatctctccaccaaagaaaaaaaataaagtaataaaagaagctaaagaagatgttcttaaccttgtggaagaaaaaaaagaaactgagtccatagaaactcaggaggaagaagcgttagtattagataactttcatgaggaaagaaaaataaaagaaagcccaaaagctaagattcaaaagccatctgtttcaccagctgcaagaaagatagctgaggaaaataaagtagacttaaataaggtcgaaggatcaggcaagcacggagttattttaaaagaagatattatgagtttgatggggtctaaaccatctccttcagaaagaaaaattaaacacggacccgaagaaagaattaaaatgacaaggttacgattaactattgctaaaagattaaaagaggcccaagaaaacgctgcgatgcttactacttttaacgaagttgatatgagcgaagtaattgcaatgcgaaatcaatataaagaagaatttcaaaacaagtatgctgtaaaacttggatttatgtctttctttgtaaaagcttgtgttattggattaaaaaattttccagctataaatgcagaaatacaaaatgatgagatagtttataaaaattattacaatataagcatagctgtgggaactgacagaggtttagtagttccagttttgagagaaaccgacgagatgtcttttgcagacatagaaaaaaatataggtcaattaggagaaaaggcaaggaatgggaaaattacaattgatgatttacaaggaggaacttttacaatcactaacgggggaatatatggctcaatgctatcaacaccaatattaaatccacctcaatcagctgttttagggatgcacaacattgttcaaagagcagtagta

SEQ ID NO: 235624 - DNA, 784 bp, Unknown
  Bacterial polypeptide expressing nucleotide sequence isolated from the Sargasso Sea
ttggctttagatgaggaacctcttattttagatacagctcataacgaaaatctaagagaaaaaaaaagagagacaattgataaagacctaagagtttctccagctgcaagaaaaattgcatctgaaaaaaatattgatctcaaatcaattaaaggtagtgggaaaaatggcatagtattaaaagaagatgtgatcagtttgatgggagtaaagcctgctccatcggagagaaaaactgtccatggccctgaagaaagaattaaaatgacaagattaagacttactatcgcaaaaagactcaaggaggctcaagaaaacgctgcaatgctcacgacgtttaacgaagtgaacatgcatgaaataattaaaatgagacatgattataaagaagattttcaaaataaatattctgtaaaattgggttttatgtctttttttgttaaggcctgtattattggtcttaaaaattatcctgcaattaatgctgaaattcaaggcgatgaaattgtctataaaaattattataatataagtatagctgtgggcactgataaaggtctagtggtccctgtcgtgaaaaattcagatgagctttcttttgctgaaatagaaaaaaatattaatgcccttggtcaaaaagcaagagatggtaaaattatgatagaagatcttcaaggtggtacttttacgataactaacggcggaatttacgggtcaatgttatctaccctcaattttaaacccaccacaatctgcagttctaggaatgcacaatatagtgaga

SEQ ID NO: 235625 - DNA, 669 bp, Unknown
  Bacterial polypeptide expressing nucleotide sequence isolated from the Sargasso Sea
gtgcgcggatcgctgagcgactcttgggggctactcagcaaacggccatgctgaccacatttaatgaggtcaatatggcgccgctcatgaagctgcgccggcagtatcgcgatgagtttgaatcagtccacaacggtacccgtctcggtttcatggggttctttgttaaagccgcctgcgaggccttaaagcgttttcctgaagtgaatgcgtcgatcgacgggaacgacgtggtgtatcacgggtatcaagatatcggcgtcgcggtatccgtggaggagggtctcgtggtacccgtcttgcgtgacgctgattttatgagtatcgcggacgtcgaagcggcgatcgctaattttggtgcgaaggcgcgcgacaaaaagctgaccattgaggatatgaccggcggaacctttaccgtgtcaaacggcggggtatttggctccctgttatccacccctattcttaacccgccccagactgggattttgggtatgcacacgattcaggagcgtccaattgcgatggatggggaagtggtcatccagcccatgatgtacctcgctctatcctacgaccatcgtttggtcgacggcaggacggcggtgcagtttttggtcaacattaagggtctgattgaagatcctgccaggattcttttgcagctctgat

SEQ ID NO: 235626 - DNA, 787 bp, Unknown
  Bacterial polypeptide expressing nucleotide sequence isolated from the Sargasso Sea
tctgggaaaaaatggtgtgattttaaaagaggatataatgaatttaatgggcttaaaaccatctccatcagagagaaaaatcaatcatggtccagaagaaagagttaagatgacaagattaagattaacaatcgcaaaaagattaaaagaagcccaagaaaatgctgcaatgcttacaacatttaacgaagttgatatgagtgaagttattaatatgaaaaatttgtacaaagaggaatttcaaaataattatggagtaaaactcggttttatgtcgttttttgttaaagcatgtgtaataggtttaaaaaattttcctgctgttaacgcagaaattcagggagatgatattgtttacaaaaactattacaacataagtattgctgtaggaactgatagaggattagtagttccggttttaagggaaacggatgagatgtcatttgcagatattgaaaaaaatattggtaatttaggccaaaaagctagagatggtaaaattaccattgaagatttgcaaggaggcactttcactataactaatggaggaatttatggatcaatgctttcaacgccaattttaaatcctccacaatcagcagttcttgggatgcataatattatagagaggccagtagttgtaaacgggaatgtagaagtaagaccagtgatgtatttagcgctatcttatgaccataggataattgatggtaaagaagcggtatcatttttaaaaattgttaaagagtcattggaacaaccaaaaagactttttttaaatatttaa

SEQ ID NO: 235627 - DNA, 529 bp, Unknown
  Bacterial polypeptide expressing nucleotide sequence isolated from the Sargasso Sea
caagctcgggttcatgtccttcttcgtaaaggccgtggttcacgccctcaaggccgtcccgggactgaacgtgaggatcgaggggtccgacctgatcgagaaccactacttcgacgtgggggtggctgtgggcacggaaaagggccttgtggtccccgtcctccgcgactgcgatgctctttcctttgcccagatcgagcagggcatcgtggaatacgcggaaaaggcccgttcgggagggattaccctcgaggacatgcagggcggctgcttcaccattaccaatggcggaatctacggatccatgctatccacccccatcctcaatcccccccagagcggcatcctcggcatgcacgcgatccaggaaagagccgtggttcggaacggcgaggtggtggcccgcccgatgatgtacctggctctctcctatgaccaccgcgtggtcgacggcaaggaggcggtcaccttcctggtgcgcatcaaggaggcgatcgaggacccggcccgcctagccttggggatttaa

SEQ ID NO: 235628 - DNA, 854 bp, Unknown
  Bacterial polypeptide expressing nucleotide sequence isolated from the Sargasso Sea
aattacaatagagaagagagtttcgccttcagcaagaaaaattgcaaaagaaaaaaatataaatttagaagatattcaaggatcgggcaaacatggaataattttaaaaggtgatctaatagggcttatgggatcaaaacccgcaccaaatattaaaaaaatacaacaaggacccgaagaaagaattaagatgacaaggctaagacttactattgccaaaagacttaaagaagctcaaaacaatgcagctatgttaacgacatttaatgaagtaaatatgtccagcataatggagataagaaaaaattatcaagaagaattccaaaaaaaatatttagttaaattaggctttatgtctttcttcgtaaaagcatgtatcgcaggactaaaaaactatccggctataaatgctgaaattcaaaatgaggacatagtatacaaaaattattataatataagttttgctgtaggtacagatagaggcttagttgttccagttttaaggagtccagacgaaatgtcttttgcagatatagaaaagaatattttagcacttggtgaaaaagcaagaaatggcaaaattactattaatgatttacaaggtggaacttttacaatcactaatggcggtatatatgggtcgatgctttctacgcctatacttaatccgccacaatcaggtgttttaggaatgcataatattgtagagagacctgtagtaattgatggcgaaattaaaattcaaccaattatgtatttagctttatcttatgatcataggattgttgatggtaaagaagctgtttcttttcttaaaaatgtaaaagattcacttgaagagccaaaaagacttt

SEQ ID NO: 235629 - DNA, 658 bp, Unknown
  Bacterial polypeptide expressing nucleotide sequence isolated from the Sargasso Sea
atagcaaaaaggctaaaagaggcacaagaaaatgcagcgatgctgactacttttaatgaagtcaatatgtcaggaataatatctatgagaaaagaaaatcaagatgacttccaaagcagatatggaattaagctgggtttcatgtcattttttgttaaagcatgtgttgtaggattaaaactatttccggagattaatgcagaaattgaaggacaagatattgtttataaaaattactataatataagttttgcagttggtacagaaaaaggactcgtagttccagttttaagaaatgcagatgaaatgtcttttgccgatattgaaaaagaaattaagaaattttcagataaagcaaagaatggaactttaacgattgaagatcttcaaggcggaacatttaccataagcaatggtggtgtttatggttcaatgttatcaactccaattttaaatccaccacaatcaggtgtattaggaatgcataacattgtagaaagacccatagtacaagatggcgaagtaaaaataaaaccaatcatgtacttagctttatcttatgatcatagaataatagatggaaaagattctgtttcttttctaaaaacagtaaaagaaaacttagaggatcctagaagattatttttaaatatttaaa

SEQ ID NO: 235630 - DNA, 697 bp, Unknown
  Bacterial polypeptide expressing nucleotide sequence isolated from the Sargasso Sea
cctggaggaaagagttaaaatgacacgtttaagattgactatagcaaaaagattaaaggaagcacaagaaaatgctgcgatgctaacaactttcaatgaagttgatatgagtgaggttatggcaatgagaagtcaatataagaatgaattccaaaataaatatggtgtaaaacttggctttatgtcgttttttgttaaagcttgtgtaattggtttaaaaaactacccagcaattaatgcagaaattcaaggtgaagaaattgtgtataaaaattattataatattagtattgcagtaggaacagatagaggtcttgtcgttcctgttttaagagaaacagatgaaatgtcattcgcagatattgaaaaaaatattggtgagcttggtcaaaaagctagagatggcaaaattacaattgaggatttacaaggaggaactttcacaattaccaacggaggtatctacggatcaatgctatcaacaccaatattaaatccacctcaatccgcagttttaggtatgcataatattattcaaagaccagttgcagttgagggcaatgtagaaataagacccgttatgtacatagcattatcatatgatcatagaataatagatggtaaagaggcagtttcttttttaaagatagtgaaagagtctttggaacaaccaaaaagactttttttaaatatataa

SEQ ID NO: 235631 - DNA, 712 bp, Unknown
  Bacterial polypeptide expressing nucleotide sequence isolated from the Sargasso Sea
ttgaagatttccaaacaagaagagcgtgttccaatgtcaaggctgagaaaagctatagccaaaaggttaaaggaagcacaaaataatgctgccatgttaacaacatataatgaagttgatatgactgaagttatgaaaatcagatctaattttcaacctgattttgagaaaaaacattctgtaaaacttggatttatgagtttttttgtaaaagcctcaatacaggctcttaaagagtttccagcagttaatgcagaaattaacaatgaagaaataatttataaaaactattacaacataggggtggcagtaggcacctctgaaggcttggtagtccctgttttaaaaaatgccgaacatatgtcttttcctgaaatagagaaaaatattgttagttttggaactaaagcgagggaagggagtataacaatttcagacatgtccgatggtacatttacaatctcaaatggtggaatttatggatcgttgatgtcttcgcctattttaaacccacctcaatctggcattttaggcatgcataaaatacaaaaaagaccaatagctattaatgataaaattgaaataagaccgatgatgtatttagctctttcttatgatcatagaataatagatggtcgagaggctgtttcatttttagtcaaggtaaaagaaaatattgaagacccacaaagaattttgattggagtttaat

SEQ ID NO: 235632 - DNA, 725 bp, Unknown
  Bacterial polypeptide expressing nucleotide sequence isolated from the Sargasso Sea
tcctaccaaacgaaaaataacacacggacctgaagaaaaaattaaaatgactagattaagaatgacaatagccaaaagattaaaagaagcacaaaataatgctgcaatgcttactacttttaatgaagtggatatgtcaaaagtaatacaaatgaaaaatgattataaaaatgaatttattaaaaaatactcaactaaacttggctttatgtctttttttgtaaaagcttgtgtaacagcgctgaaaaattacccagctattaacgcagaaattcaaggagactcaatagtttataaaaattattacaatattagttttgctgttggaactgaaaaaggacttgtggttccagtactaagaagtccagacgagatgtccttcgccgaaattgaaaaaaatattttatctttaggtgaaaaagcaagagatggaaaaataagcattgaagatcttcagggaggaacatttactattactaatggtggaatttatggctctatgctttcaactccaatattaaatcctccacagtctggagttcttggtatgcacaatataattgaaagagcagttgttaaagatggacagatcataattagaccgatgatgtatctcgctttatcctatgatcatagaatcgtagatggaaaagaagcagtttcatttttaaaaaacataaaagattatttagaagagccacaaaggcttttcttaaatgtataaa

SEQ ID NO: 235633 - DNA, 768 bp, Unknown
  Bacterial polypeptide expressing nucleotide sequence isolated from the Sargasso Sea
tgttgaaaataaaattaatttagatgaagtaaaagggacaggtaaagatggtagaattttaaaaggtgatttaataagtttaatgggagccaaccctcaacctaacgaaagaaaaattcaatacggtgaagaagagcgaattaaaatgtcaagactaagacaaacgattgctaaacgtttaaaagaggctcaaaataatgcagctatgctcacaacgtttaatgaggttgatatgtcaaatataatatcgatgagaaaagataaccaggaagatttccaaaacagttatggaattaaacttggcttcatgtctttttttgtgaaagcttgtatagtaggattaaaattatttcctgcaataaatgccgaagttgaaaatgatgaaatggtttacaaaaattattataatgtgagcttcgcagtaggaactgaaaaaggattagtagttccagtattaaaaaatgctgatgaaatgtcttttgctgacattgaaaaaaacataaaagatctgtcagacaaagcaaaaaatggtagtcttaccatagaggatcttcaagggggaacgtttacaattagtaatggaggtgtgtatggatcaatgttatctacccctattttaaaccctccacaatcagcagttcttggaatgcataatattgttgaaagacctgttgttgttgatggtgagataaaagctagacctgtaatgtttttagcattgtcttacgatcatagaataattgatggaaaagaatctgtgagtttttt

SEQ ID NO: 235634 - DNA, 742 bp, Unknown
  Bacterial polypeptide expressing nucleotide sequence isolated from the Sargasso Sea
tatgggagaaaacccagaaccaaatcaaagaaaaattcaatttggtgaagaagagagaataaagatgacaagacttcgtcaaactatagcaaaaagacttaaggaagctcaggaaaatgcagcaatgttaactacattcaatgaggttgatatgtcaggaataatttcaatgagaaaagaaaatcaagaagattttcaaaataggtataatattaaattaggttttatgtccttttttgtaaaagcttgtgtagtaggattaaaattatttcctgcaataaatgctgaaatagaaggacaagaaattatttataaaaattattataatattagtttcgcagtaggaactgaaagaggacttgtagtaccagtattaaaaaacgcagatgagatgtcatttgcagatatagaaaatgaaataaaaaaattgtctgataaagcaaaaaatggaagtttgacaattgaagatttacaaggtggcacatttacaataagcaatggtggtgtttatgggtcaatgctctcaactccaatacttaatccacctcaatcaggagtattgggtatgcataatatcgttgagagaccagtttcagtaaaaggagaaataaaaatcaaaccagttatgtatttagctttatcttatgaccatagaattattgatggaaaagattctgtatcttttcttaaaacagttaaagaaaacttggaagatccaagaagattatttttaaatatttaa

SEQ ID NO: 235635 - DNA, 916 bp, Unknown
  Bacterial polypeptide expressing nucleotide sequence isolated from the Sargasso Sea
atgggccccgccgtcagggcattgctggatgagcatggtctctcgccggagaatatcgtcgcgacgggcaagggcggccgactgctcaaagaggacgtgctttcccatctgaggcaggcgcccgtgcaacctgcgcctgagtcgtctgcgccagcttctccggccgcaactccaggagctgttgttctgaacgtcgatgggccgaccagtgaacggatcgagaaacgagtcccgatgacccgcatgcgcgcgcgtattgcagagcgactgttgggtgccacccagcaaactgccatgctgactactttcaacgaggtcaacatggcgccgttgatgaagctacgtcggcagtaccgtgatgagtttgagtcggtgcacaatggcacccgacttggcttcatgggtttcttcgtcaaggcggcctgcgaggcgttgaagcgtttccccgaggttaatgcatccatcgatggcaatgacgtggtctaccatggctatcaggatatcggcgtagcggtctcggttgacgaggggctggtagtgccggtgctgcgggatgcggattttatgagtattgctgatgtcgaagcggctattgccagctttggcagcaaagcccgggacaaaaaactgaccatcgaggagatgaccggtggtaccttcacggtatccaacgggggcgtcttcggctcgctactgtctacgccgattcttaacccaccgcaaacgggcattctcggcatgcatacgattcaggagaggcccatcgcgatggatggcgaggtcgtgatacagccaatgatgtatctggcgctctcctatgatcatcgcttggtcgatggcaaaacagccgttcaatttttggtcacgattaagggcctgatagaagatcccgcgcggattcttctgcaaatttgat

SEQ ID NO: 235636 - DNA, 985 bp, Unknown
  Bacterial polypeptide expressing nucleotide sequence isolated from the Sargasso Sea
gctgaggccactgtactcgagtggcgcatcggcatcgatcaccccatccatcgtgatgacatcatcgttgaactggaaactgacaaggtcgtgcttgaggttcccgccccggccgatggcaaactaatcgaaattcgttgtccaagcggggccgtcgtcaccagcgaagacattctgggtttgtttgaagctggacagatcgcagttgaaaacgcagcaccggaatcagcgaccgagataacgtcgctcccgacagcgccggaccccgagccagcggaaagcttggatttacctccgccaacggttcagcccgcggcacccacgacccaagagacctcgagcgtggccaccccatctcttggcgaacggggtatccgacgtgaacccatgagtcgactgcggcaaaccattgccaatcgcttgctagatgcgcagcatagcgccgccatcctgtcaacgtttaatgaagtggatctgtccggggtaatagacttgcggagacgctatggagaggcctttgagacccgttacaacgtccgtctcggttatatgtcgttttttgtccgtgcctgtgtagaagctctacaagctttcccattggtcaacgcccagatcgatggtgccgatgtggtctattacgactactttgacattggaattgcggtatcctctccccgcggcctggtcgtgccagtgttacggaatgccagtgataagcgtttttctgagatagaacaggaaattgccgatttcggaaataaagctaatagcggtagtcttgcgatggaggaactaacgggtgggacatttacgattaccaacggtggtgtatttggttcacttttatccacacccattctcaatccaccacaaagcggcatccttggcatgcacaaaatacaacaacgccccatagccatgggtgatgaagtcgtcattcgaccgatgatgtatctagcgctgtcctatgaccatcgtctggttg

SEQ ID NO: 235637 - DNA, 819 bp, Unknown
  Bacterial polypeptide expressing nucleotide sequence isolated from the Sargasso Sea
agacaaaaataaatttagaaactgtacatggatccggaaaagatggtcgaatattaaagggtgatcttatgagcttaatgagtactactccacaaccatcagaaagaaaaattaaatatggccaagaagaaagaattaaaatgactcggctgaggttaacgattgcaaaaagactgaaacaagctcaagaaaatgctgcaatgttaacaacatttaatgaagttgatatgacaaacattatttcaatgagaaaagaaaaccaggatgattttcaaagtagatttggaattaaacttggttttatgtctttttttgttaaagcatgtattttaggtctaaaatctttcccagcaataaatgcagaaattgatggtgaagatatagtatataaaaattattataatatcagttttgcagttggaacaaataagggtttagttgttcctgttttaaaaaatgctgacgaaatgtcttttgcggaaattgaaaaaaatataaaagctgtttctgataaagctcgagatggaaacctaacaatagaagatctacaaggaggaacatttacaattagtaatggcggagtttatggttcaatgctatctacccctattttaaatcctcctcaatcgggtgttttaggcatgcataatattgttgaaagagcttcggtagtaaatggagaaattaaaattagaccaataatgtttttggctttgtcttatgatcacagaataattgatggaaaagaagctgtttcatttttaaaattagttaaagagcttcttgaagatccaagaagactatttttaaatatttaaa

SEQ ID NO: 235638 - DNA, 940 bp, Unknown
  Bacterial polypeptide expressing nucleotide sequence isolated from the Sargasso Sea
agaacccatacagaaagatataaatttgtctcctgctgtcagaaagattgttgacgaaaaaaaaatagatattagtagaataaaaggcactggtagggatggaagaattttaaaaggtgatctagtcacattaatgggagaaaacccacaatccaatcagagaaaaattcaatttggcgaagaagagagaattaaaatgacaagacttcgacaaactatagcaaaaagacttaaagaagcacaagaaaatgctgcaatgttaacaacattcaatgaggttgatatgtcgggaattatctcgatgagaaaagaaaatcaagaagattttcaaaatagatataatattaaattaggcttcatgtctttttttgtaaaagcttgtgttgtaggattaaaattatttccagcaataaatgctgagatagaaggacaagacattatatataagaattattataatattagttttgctgtaggtaccgaaagaggtcttgtagtaccagtattaaaaaatgcagatgagatgtcatttgcagatatagaaaaagaaataaaaatattgtctgataaagcaaaaaatggaagcttaacaatagaagatttacagggcggtacatttacaataagcaatggtggtgtttatggttctatgctctcaaccccaatacttaacccacctcaatcaggagtattaggtatgcataatatagttgaaagaccaattatagaaaatggggaaataaaaattaaaccaattatgtatttagccttatcttatgatcatagaattattgacggaaaagattcagtatcttttcttaaaacagttaaagaaaacttggaagatccaagaaggctatttttaaatattttaatgtcagaaaaatttgatgtaactataattgggtggtggtcccggtggatatgtttgtgccattag

SEQ ID NO: 235639 - DNA, 691 bp, Unknown
  Bacterial polypeptide expressing nucleotide sequence isolated from the Sargasso Sea
agaaagaattaaaatgagcagattaagacaaactatagcaaaaagattaaaagaagctcaagaaaacgctgccatgttaactacatttaatgaagtagatatgacaaatataattgagatgagaaaaaataaccaagaagatttcaaaaaaagatttggaataaaacttggttttatgtctttttttgttaaagcttgtgtacttggattaaaagcttttccggcaataaatgccgaaatagaaggtcaagaaattatatataaaaattattataatataagttttgctgttggaactgaaaaaggtttggtagttcccgtaataagaaatgcagatgagctatcatttgctgaaatagaaaaaaatataaaaataatttctgaaaaagctagggagggaaaattaactattgaagacttacaaggaggaacatttacgataagtaatggtggcgtatatggctctatgctttcaactccaattcttaatccaccacaatcaggggttcttggaatgcataatattgttgaaagaccaattgccatagatggagaaattgaaattagaccagttatgtatttggccttatcatatgatcatagaataattgatggaaaagactcagtttcttttttaaagttaataaaagaaaatcttgaggatccaagaaagttatttttagacctttaa

SEQ ID NO: 235640 - DNA, 607 bp, Unknown
  Bacterial polypeptide expressing nucleotide sequence isolated from the Sargasso Sea
tttaatgaagttgatatgggtgaattgattagaactcgcaatgagcataaagatgcttttgagtcaaaatacggaataaaattaggatttatgtctttcttcgtaaaagcttgtatcacagctctcaaagatattcctgaggttaatgcagaagttgaaaataatgatgttgtatataaaaatttttacaatattggtgttgcagtaggaactgatcaaggattggttgtgcccgttatcagagatgctgatcaaaaatcaattgtagaaatagagcaagagatttttaatttaggacaaaaagctcgaactggtaaattaagtatcgatgacatgcaaggaggtacatttacaatttcgaacggtggtgtttatggatctcttatgtctacacctattttaaaccctcctcaatcagggatacttggcatgcacaagattgaggaaaggccaattgctgtagatggtgacatcgtgataaggccaatgatgtaccttgctttgtcttacgatcatcgtattgtggacggtaaaggcgcagttacttttttggtaagggtcaaagaaagtttagaagatccaaatcgaatcttactaggggtataga

SEQ ID NO: 235641 - DNA, 883 bp, Unknown
  Bacterial polypeptide expressing nucleotide sequence isolated from the Sargasso Sea
ttggaagatgaaaaaaaagaggacgaaccattaattttagagcaagttcatgaagagaagaaaaaatccagtaaacctatatttaaaaaagaagaggcacaagtttctcctgctgcaagaaagatggctagtgaagccaaaattgatttagaacaagttaaaggcactggaaaaaacggaataattttaaaagaggatgtaatggctcttatgggctctaaacctgccccatcggaaagaaagataaaatacggtccagaagaaagagtaaaaatgactaggcttagacttactatagctaaaagacttaaagaggcccaagagaacgcggcgatgcttacaacatttaatgaggtagacatgagtgaagtaatgtctatgaggaatcaatataaagaggagttccataaaaactatggagttaaattaggtttcatgtctttttttgtaaaagcatgcgtgattggtttgaaaaactttccagctattaattcagaaatccaagcagaagagatagtttataaaaattattataatattagtattgctgttggaacagatagaggtttagtagtcccagttttaagagaaacagacgaaatgtcttttgctgatattgagaaaaatattgctagtttaggtcaaaaagctagagatggaaaaattaccatagaagatcttcagggaggaacatttacaataactaatggtggaatttatggatccatgctatctacaccaattttaaatccaccacaatctgcagtactaggaatgcacaatattgtggagagaccagttgttataaatggaaatgtagaagtgagaccagtaatgtatttagctctatcttatgatcacaggatagtagatggaaaagaag

SEQ ID NO: 235642 - DNA, 742 bp, Unknown
  Bacterial polypeptide expressing nucleotide sequence isolated from the Sargasso Sea
atgggttctaaaccgtctccatctgaaagaaaaatcaaacatggtccagaggaaagagtgagaatgactagactaagacttacaattgcaaaaagacttaaggaggctcaagagaacgctgcaatgcttacgacttttaatgaagttgatatgagcgaaataatgaaaatgagaagtcattataaggaagattttcaaaataaatatggtgtgaagcttggttttatgtctttttttgtaaaagcatgtgtaataggtttaaaaaattatccagcaataaatgctgaaattcaagatgaggaagttgtttataaaaattattacaatataagcatagcagtcggaacagatagaggtcttgtagtgccagttctgagagagactgatgaaatgtcatttgcagatattgaaaaaaatattggagaacttggccagaaagctagggatggaaaaattaccattgaagacttacaaggcggaacattcacaattactaacggaggaatctacggttcgatgctttctacaccaattttaaatccaccacagtctgcagttttaggaatgcataatattattcaaaggccagttgttattaatggtaatgtagaggtgagacctgtaatgtatttagctttatcttatgatcacagaataattgacggaaaagaagctgtatcttttttaaaaatagtgaaagagtctttagagcaaccaaaaagacttttcttaaatatttaaa

SEQ ID NO: 235643 - DNA, 278 bp, Unknown
  Bacterial polypeptide expressing nucleotide sequence isolated from the Sargasso Sea
aatttccaatggaggagtgtttgggtctatgttatctactccaattattaatcctcctcaatctggaattctaggaatgcacaatataattaatagacctgtagctattggtgagaatattgaaataagaccgatgatgtatctagccttatcatatgaccataggataattgatgggaatcaatcagtgggattcttaattgctgttaaagaaggtgtagaagatccaataaatgttcttatggatggtaacattgaaaaatctttagcaatctaaa

SEQ ID NO: 235644 - DNA, 817 bp, Unknown
  Bacterial polypeptide expressing nucleotide sequence isolated from the Sargasso Sea
catgtcgcaacccgaaaagaaagaaagtcctgatcaaatagtttcgcttgaaaaggaaatggctcatacagaaccttcgtctagtgatgcttctgttagtttgaattctgatgagcgggtggagcgcagagtcgcgatgacccgaatgagagcgacaacggccaagcgactggtagaagcgcagcataatgctgcgatgcttacgactttcaacgaggtcgatatgtccccggtgatggcgttgcgtaagcaatatcaagaagagtttcaggcggctcataatggaactcgcctaggttttatgtccttttttgtgagggcggcaacggaatcgctgaaacgatttcctgcggttaatgcttcaatagatggaaatgacattgtttatcatggctattttgatataggggttgcggtctctacagacagaggacttgttgtacctgtggtcagagaagctgatgcattaagtctggcccagatagaagatcagattaatgaatacggagaaaaggctcgagctggaaaactttctcttgaagaactctcaggaggcacgtttacgatatctaatggaggtatttttggctcgctaatgtcgactcctattttaaatgcgcctcaaaccggagtcttgggtatgcataaaattcaggaacgaccggtggtagttgatggcgagatagtagttagaccgatgatgtatcttgcgctttcctatgatcatcggctgatcgatggtcgtgaagcggtccaatttctagtagctatcaagggaatgatagaagatcccgcgagaatactgttggagttataa

SEQ ID NO: 235645 - DNA, 626 bp, Unknown
  Bacterial polypeptide expressing nucleotide sequence isolated from the Sargasso Sea
cgatactgcaatgctgactacatttaatgaaattgatatgagtgcagttgtaaaacttcgttcacaaaacaaggattcatttcttaaaaagcataaagtaaaacttggttacatgagtttgttcaccaaagcctgtaccgaagcattggagttgtttcctgctttgaacgcaagaattgattcaaatgagatagtttttcatgattatgttgacatgggtattgcagtcagtgcaccaaaaggtttgatggtaccagtggtaaggaatgcagaatccctctctctttctcagattgaggttgaaatagctaggcttgctgaaagtgccagagaaaataaacttagcattaatgaaatggaaggaggaaccttttcaattacaaatggaggtgtatttggatcaatgctttctacaccaatcataaatccacctcaaagtgctattcttggaatgcacaatatagtagagaggccagttgctactaatggaaaaatagagatcagaccaatgatgtatgttgctttatcttacgaccacagaattattgatggacagcagtcagtcagttttcttgttaaagttaaagaaaatctagagaatccagcaagaatgcttctaagttgaa

SEQ ID NO: 235646 - DNA, 376 bp, Unknown
  Bacterial polypeptide expressing nucleotide sequence isolated from the Sargasso Sea
gttctgtggtcagaatgcagatgaactaacagtagcagatattgaaaaggaaatttctagtcttggtaaaaaagctcgagatggcaaactaagtataagtgatatgcaggatggaacattcactatatctaatggaggagtttatggatcacttatgtcaacgccaatcattaacccaccacaatctggagtgctaggtatgcataagattcaagaaagaccaattgctattgatggagagataaagattaggcccatgatgtatttagctttatcatatgaccatagactaattgatggtaaagccgctgttacatatttagtgagagtgaaggaaagtttagaagacccaaggagaattttattgagtgtttaa

SEQ ID NO: 235647 - DNA, 937 bp, Unknown
  Bacterial polypeptide expressing nucleotide sequence isolated from the Sargasso Sea
taaatttgtagaaggtgcagcaagcggcgcttctgctccagcagcgtcaagcgaaagcgatgacagtgacgagagcagtgatgcgcttagtccttctgttcgtcgtttacttgcagaaaaaggtgttgacgcagctaaagtgaaaggcactggcaaaaatggccgtatcactaaagaagacgtagagaaataccttaaaggcggcgacagctcagcgaaggcagcgcctgctgcgtctgaatctgtttcagctgacttaccaacgggtaatcgtaccgagaagcgtgttccaatgacgcgtcttcgcaagacaattgctaaccgtcttcttgaagcgaagaactctacagcaatgctaacaacgtttaacgaagtaaacatgaagccaatcatggaccttcgtaagcagtatcaagacagctttgagaagcgtcacggtattcgccttggtttcatgtctttctacgtgaaagcggtaaccgaagcccttaagcgtttccctgaagttaacgcgtctatcgacggtgatgacattgtttatcacaactacttcgatgtatcgattgctgtttctacaccacgtggccttgtaacaccagtacttaaagatactgacacactaggcatggcaggtgttgaaaaaggaattaaggaactagcacttaaaggccgtgacggtaagctgtcattggctgaactacaaggtggtaatttcacaatcaccaacggtggtgtgtttggttcactaatgtctacaccaatcattaacccgccacagagcgctatcttgggtatgcataaaatccaagatcgtccaatggctgttaatggcaaagtagaaattctaccaatgatgtacctagcgctttcttatgaccaccgtattatcgatggtaaagaatcagtaggtttcttggtaaccgtaaagagatgctag

SEQ ID NO: 235648 - DNA, 716 bp, Unknown
  Bacterial polypeptide expressing nucleotide sequence isolated from the Sargasso Sea
agaaaaaataaaatacgcccctgaagagagaattaaaatgacaaggttgagacaaacaattgcaaaaagattaaaggaggctcaagaaaatgcagcaatgttaactacatttaatgaagttgatatgagcgaagttatttcgatgagaaaccaatataaagatgaatttttaaataaatacggagtaaaactaggtttcatgtcttttttcgtaaaagcatgcgtaattggtttaaaaaattttcctgcaatcaatgctgaaatacaaggtgatgaaatagtttataaaaattattataacataagtatagctgtgggaactgatagagggttagtggttcctgttttaagagagactgatgaaatgtcttttgcagatattgaaaaaaatattggtgatcttggtcaaaaagcaagagatggaaaaattactatagaagatttacaaggtggaacttttacaataactaatgggggaatttacggttcaatgttatctactccaattttaaatccacctcaatcagcagttcttggaatgcataacatcgtacaaaggccagttgtagtagatggaagtgttgaacctaggccagtaatgtatttagctttatcttatgatcatagaattattgatggcaaagaagcagtttcatttttgaaaatagtaaaagactctttagaaaaacctcaaaggctttttcttaacatataat

SEQ ID NO: 235649 - DNA, 750 bp, Unknown
  Bacterial polypeptide expressing nucleotide sequence isolated from the Sargasso Sea
catattatgaagaaagactttcccttaatgaaaactctctagttattactgagagagaacaaaaaattcctatgactaaagtacgtaaaattatagcacagcggcttaaagaggctcaaaatactgctgcaatgctaacaacatttaatgaagttgatatgtctgcagtcataaaattaaggaatgattataaggaagacttctttaaaaattataatgtaaagcttggttttatgagtttctttgttaaggcctcaataatcgcattacaggagtttccagctgtaaatgctgagatagttcaagaggatattttatacaaaaattattataatataggtgttgcagtaggtacaccaaaaggtttagttgtgcctgtattaaaagaagctcaggatatgaatattgctaaaatagaaaatgaaatttctaattttgctataaagtctagagaaggaaaactctctccatctgacttatcaggaggaacatttacaatatcaaacgggggtgtttatggctcccttatgtctactcctatcttaaataaaccacaaagtggtatcttaggtatgcataaaatccagaaaagaccaatagcaattgatgataaaatagaaataagaccaatgatgtatttagcactttcttatgatcatagaataattgatggaagagaagctgtttcattcttagtacgtatcaaagagtcaattgaagacccaagaagaatattattggatatttaaa

SEQ ID NO: 235650 - DNA, 1108 bp, Unknown
  Bacterial polypeptide expressing nucleotide sequence isolated from the Sargasso Sea
gagttagagactgataaagtaacacttgaagttccctctccttctgcaggaataatatcaaacgtttttttttctgaaggcgactctgtagaggttgaaaatgttttagcagttcttgatgatttggcaataccaactagggtagatgagcccaaaaatttaaacaacaatttaccacaagaaaataaatttaccgactcaacaaataatacagatttttctcctgcagttagaagattgattgaagagcataaattaaatccaagttcaattaagggaactgggaaaggtggtagattaactaaaggagatatactagcaaatattgtctctaaagataatattgaattgaaaaaagaaacacaacctcaaagcatttcaaataataacgaccctatttcaagacatgaacgcgaagagagagttcctatgtccaaggttcgaaaaataattgcacaccgcttgaaagaagcacaaaatactgccgctatgttaactacttttaatgaagttgacatgtctgctgttattaaccttcgaaagcaatttaaagaggattttataaaaaatcataacataaaacttggattcatgagcttctttgtaaaagcttctataatttcactagaagagttcccagcagtaaatgctgagattgtgaacgaagaaattgtttacaaaaattattataatataggagttgcagttggaacccctcaagggctagttgtgccagtattaaaggaagctcaagataaaaacatagctcaaattgaaactgaaattgcgaattttgcgacgaaatcaagagaaggaaagcttttaccatctgacttaactggtggaacattcacaatatcaaatggcggtatatatggttccttaatgtcaacaccgatattaaatagacctcaaagtggtatattaggaatgcataaaattcaaaaccgacctatagctattggcgataaaattgaaataagaccaatgatgtacttagcgctttcatatgatcatagaataattgatggtagagaggccgtctcatttttgatacgtataaaggaatctatagaagacccaagaagaatacttcttaatatataaa

SEQ ID NO: 235651 - DNA, 1057 bp, Unknown
  Bacterial polypeptide expressing nucleotide sequence isolated from the Sargasso Sea
ctcagtaaaagaaggaacgactgttgaagtaggcacccttttaggaagtgtgggagctaatgacacaaaaccagttacagagaaaaaagaaaaaaaatatacaccacctccaaaaaaagaaaaaagtattcctatttataatgaagaaccaaaaaaaaatgaggaagttgtcgaaataaataaaccaatctctaatggcaaggaaacacttattttaaacgaggcagaagaagaggaaactccattaattttagatcaagaacataaaactgaaaaaataaaaaaaacagaaataaaaacagcctcaccatctgccagaaaaatagctcaagacaaaaatattagcttagaccaaatcgaaggatctggaagaagaggtatggttttaaaagaagatttaattaatctaatgggcacaaagcctactccaaatttaaaaaaaacaaaagatggtccagaggaaagaattaaaatgacaagattaagattaacaatagcaaaaagattaaaagaagcccaaaataatgctgcaatgcttacaacttttaatgaagttgatatgcataatataatggaaataagaaaaaattatcaagaagagtttaagaaaaaatattcagtaaaattaggtttcatgtcattttttgttaaagctagtattgcagccttaaaaaattacccagctataaatgctgaaattcaggatgaggaaattgtttataaaaattattataatataagttttgcagttggtactgaaaaaggtctagttgttccagttttaagaaatcctgatgaaatgtcttttgctgatattgaaaaaaatattgctaatattggtgagaaagctagaaatggcaaattaacaataaatgatttacaaggaggcacttttacaataacgaacggaggtatttacgggtcaatgctttctactccaatactcaatccacctcagtcaggagtattaggtatgcacaatataattgatcgagcagtcgtgataaatggtgaaataaaaattcgcccaatgaatgtatttagcgctatcctatga

SEQ ID NO: 235652 - DNA, 1087 bp, Unknown
  Bacterial polypeptide expressing nucleotide sequence isolated from the Sargasso Sea
atgaaaaacataacagtacctgagcttggagagtcgatcattgaaggcacgcttacatcttggttgatcaaagagggagatagctttgagtctggcgataatttagctgaaattgaaacagagaaaatcacaattgaaattcctgctcaaacctctggaaaattaacaaagataataaccccagagggatctactgtgaatgttggtcaatctattgctgaaatatcagaaaatacgactactgaacaaaagcccaaaccagaaacaagtcaaatcgaagaaataaatgaagaaaaacaaacaattgacccatctaatgtctctaaagttagcgaaaatctaacaaaaactccagctaaggtagttgatcttccaaacttcgacaaagatgactctacattagatgaaaaaactatcccaatgtcaaaattaagacaaacaattgccagaaggttaaaagaagctcaaaatacagctgccattctcacaacatttaacgaagttgatatgtcagcaattatgtctcttagaaaaaaagaacaaacaagttttcaaaaaaaacatggtgtgaaacttggcattatgtctttttttgttaaagcctgcacagaagttttaaaagaaataccagagattaattcagaaattcacgaagataaaataatttataaaaactactttgatataggtattgcaattggatctgaaaagggacttgttgttccaataattagaaatgctggagatttatcaaatgcagaaattgaaaagtatattattgaattatctgagaaagcaaattcaaataaacttgccatgagtgatttatcaggaggaacattctcaattacaaatggaggaatatatggttctatgatgagcaccccaattatcaacccacctcaaagtgctatattaggtatgcactcaataattgatagacctatcgctgtaaaaaagaagattgttataaaaccaatgatgtatattgcattaagttatgaccacagattaatagatggtaagcaagcagtaacttttttagttagactgaaagaactgttagaaaatccaaaaattatttaat

SEQ ID NO: 235653 - DNA, 1039 bp, Unknown
  Bacterial polypeptide expressing nucleotide sequence isolated from the Sargasso Sea
agaaaataaaatatcagttgatataaataaaaaaaaagaaactcaaaaaataaaaaatattattaagccagatattgaaaaaaaattagaacaaaaaaataatgtggaacctttaatattaaataatgaggaacctttagtcttaactaatgaagttgtagaaaaaaaaatatctatatcaaataaagttttatctcctgcagtaagaaaaatggttgctgaaaaaaaaataaacatagatcaagtaaaaggaactggtaaagatgggagaattttaaaaggagatttgattagtcaaatgggatttaatccacaacctaaccaaagaaaaattcaatatggtgaagaagaaagaattaaaatgactaggttaaggcaaacaattgctaagagacttaaagaggcacaagaaaatgcagcaatgttaacaacttttaatgaggttgatatgtcaggaataatttctatgagacaagaaaatcaagaagattttcaaaatagatacggaataaagttaggatttatgtcattttttgtaaaagcgtgtgtagtaggattaaagttatttccagcaatcaatgcagaagtggaaagtcaggatattgtttataaaaattactataatattagttttgcagttggaactgaaaaaggacttgtggtaccagttttaagaaatgcagacgaaatgtcttttgcagatattgagaaagaaattaagagactttctgacaaagcaaaaaatggaactttggcgattgaagaccttcaaggcggaacatttacaataagcaatggaggagtatatggctctatgttgtcaactccaattttaaacccgcctcaatcaggagttttaggaatgcataatattgtagaaagacctatagcttataatggtgaagtaaaaattaagccgataatgtatttagctctatcttatgatcacagaattatagatggcaaagactctgtatcttttttaaaaacagttaaagaaaatttagaagatcctagaagattatttttaaatatataa

SEQ ID NO: 235654 - DNA, 1273 bp, Unknown
  Bacterial polypeptide expressing nucleotide sequence isolated from the Sargasso Sea
atgtctactgaaataaaagttccctctctaggcgaaagcgttgtagaagcaacagtagccaagtggtataaaaatcaaggagatcatgttgccatagatgagcctttagttgaacttgaaacagataaggttacccttgaagttccttcaccatgtgggggacaattaaaaattatttcagctaaagaaggtgaaaccgtggaggttggagctttattgggtcaaatcactgaaggagaagtagataataaggtaggcgaaaaagttattgtaggtgaaaataaaattcctgaaaataaacctcaagaaatacaacaatctgagacacaagataataactcagaaactgataaagtagatgtagataataaaaaagttgttactaatattgagaaactttctccagctgttagaaaaattgttgatgaacagaaaattgatctttcgaatatagaaccaaaaagaagtgatggtagaattacaaagggtgatctaattaataatgttaatacttcagaatcgcaaactgaaaacaatgagccaatcttaagtaatactgacttgagtaatactgagcttcgaaaagaagtgccaatgtctcgtttaagacaaactatagcaaagagattaaaggatgcacaaaataatgcggctattttaaccacatttaacgaagttgatatgtttcaattgattgaaacaaggaatgaatacaaagaaagttttgaattaaaatatggtgtaaaacttggttttatgtctttttttgttaaagcatgtattactgcattaaaagaaataccagatgtaaatgctgaaattcaagataataaaattatatacaaaaatttttataatattggagttgccgttggaactgatcaaggattagtggtgcctgtgttaagagatgctgataaaaagtctataattgaaattgaaaaagaaatctttgagcttggtaataaagccaggtcaggaaaattaagtataactgatatgcaagaaggtacttttactgtgtctaatggaggagtatatggttcacttatgtccaccccaattttaaatccacctcaatcaggcgtacttggtatgcataagattgaaaaaagaccaatagtgattgatgatgaaatttcaatcagaccgatgatgtatttagctttatcatatgatcatcgaattattgatggtaaggccgcagttacttttcttgttagagtaaaagaaggtctagaagatccaagaagattattattaggtgtttaac

SEQ ID NO: 235655 - DNA, 1342 bp, Unknown
  Bacterial polypeptide expressing nucleotide sequence isolated from the Sargasso Sea
aatgtcagaaaaaattacagttccatcattaggtgagtcagtcactgaagcaacagtttctaagtggttaaaatcacagggtgataaagttatcgcagacgaaccagtggttgaactagaaacagataaagtaaatgttgaggttccagctccaataaacggatttttaggaagtatcaccgttaaagaaggagaaactgtaaacgtgggttcgttattaggtacaattagtaataataccaagcaagaaaatactccaaaagaaattaaaacttatagtccacccaaaaaagataaaagtaaaaatataaaactatttgaagaaaaaaaagaaaaaaaaatatcaaaaaaaatcaataagccacaaattgatgaacctattttaaaattagataacgaaagtgtagaacctgatgaagaactattaatattagaggaagcacatcaagaagcaaaagtaaaaaaaatcattccagtaaaaaaagaaacccagatttctccagctgctcgtaaaatggcaaacgaagcaaatgtagatatagataaaatcgaagggactggaaaaaatggattgattttaaaagaggacattatgagtttaatgggttctaaaccttctccagctgaaagaaaaataaaacatggtccagaggaaagagttagaatgacaaggttgaggttaacgattgctaaaagacttaaggaggcccaagaaaatgctgcaatgctaacgacattcaatgaagtggatatgagcgaagtgataacaatgagaaatcaatacaaagatgaatttttaaaaaattatggggtaaaacttgggtttatgtcttttttcgtaaaagcatgtgtaataggattaaaaaattttccttcaattaatgcagagattcaaggcgaggaaatagtttacaaaaattattataatataagtattgctgttggaactgatagaggtttggtagttccagttttaagacaaacagatgaaatgtcttttgctgatattgaaaaaaatataagtgaactaggacaaaaagcaagagatggtaagattactatagaagatctacaaggtggtacattcacaattactaatggtggaatttatggatctatgttatctacacctattttaaatccacctcaatctgcagtacttggaatgcataatattgttcaaagaccaatggctgtaaacggtaatgttgaaataagacctgttatgtttttagctttatcttatgatcacagaataattgatggtaaagaggcagtttcttttttaaaaattattaaagagtctttagaacatcctaaaagattgtttttagatatttaa

SEQ ID NO: 235656 - DNA, 1210 bp, Unknown
  Bacterial polypeptide expressing nucleotide sequence isolated from the Sargasso Sea
aatggcaactgaaataaaatccccaacgttccctgagtcagtcattgatggaactgttgcaaattggattaaaaaagagggtgatagtgtttcacaagatgaagtaattgctgagattgaaacagacaaagtcgttttagaagtggttgccccatttgatgggcaaattcttaaaatttataagaatgaaggtgaggttgttaactcttcagaaaaaattgcagactttgataaggttgagctagacaaagagcatggagagaagactgctgaaaaagtcaaagatgataaagtaactcaatcatcagatatatcagagcaacaagaaaaagatattagtaaaaaagttaacccagctgcaaaaaagttaataaaggaaaattctttagattctggacaaattaacccaacaggcaaaaaagatagagttaccaaaagtgatgtcataaatcacatgaattcagatgaagaaaacaaaacaattaaaactccgccatcaatatctccaagagatgatgaagaaagagttcctatgtccagacttaggactacaattgcaaataggctggtaacagttcagcaggaaacggcgatgttaacaacctttaatgaggttgatatgcagccaatcaaagacttgagacaaaaatatggtactgaatttgaagcagagcatggaactaaactaggttttatgggcttttttgtatccgcatcagtgcaggcgttattaaaattcccacttgttaatgcttcaattgatggggctgatattgtatatcacggatatcaggatattggtgtggcagtttcaacagatagaggtttagttgtgccagtcataaggggtgcacaaaatttatcaatcgcacaaattgaaaaggaaatattaagcaaatctgaaaaagcacgagatggaagtttatcaattgaagaaatgcagggaggaacatttaccatctcaaatggcggtatatttggttcattattatcaacaccaattttgaattctcctcaaacaggcatattgggcatgcataaaattcaagatcgaccaattgcagtggatggagaagttgttatccggccaatgatgtatttagctttaagttatgatcatagacttttggatggtaaggaggcggtaacctttttactaacaatcaaagaattattagaaactcctgaaaggttacttttaaatctatag

SEQ ID NO: 235657 - DNA, 805 bp, Unknown
  Bacterial polypeptide expressing nucleotide sequence isolated from the Sargasso Sea
gtttcaaaattcatgggcactgggaaaagatggaagaattttaaaaggcgatataataaatttaatggcaacaaaaccattaccaaaccaaaaaaaattagaaaaaggtgaggaagaacgattcaagatgacaaggttaagacaaacaatagcaaaaagattaaaagaagctcaaaattctgcagcaatgttaactacattcaatgaagtagatatgaatgctataatacaattaagaaaagataatcaagaagattttcaaaaaagatttggaattaagttaggttttatgtctttttttgttaaggcatgtgttttaagtttaaaacttttcccaagcataaatgcagaggttgataatgaccatataatttttaaaaattattataatattagttttgcggttggaactgatagaggactggttgtaccagttttaagaaatgctgatgaattgtcatttgcagaaattgaaaaaaatattaaatcaatttcagaaaaagctagagaaggaaatttaactattgaagatctacaaggaggaacttttactattagtaatggcggagtttatggatcaatgttatcaacaccaattttaaatccaccacaatcaggtgttcttggtatgcacaatatagttgagagacctatagtagttgatggtcaagtaaaagtgagacctgtcatgtatcttgctttatcttatgatcatagaattatagatggaaaagactcagtttcttttttaaaaactcttaaagaaaatttagaagatccaagaagattatttttagatatataa

SEQ ID NO: 235658 - DNA, 1105 bp, Unknown
  Bacterial polypeptide expressing nucleotide sequence isolated from the Sargasso Sea
tgtgagaaaagaccagactattgctgagttggactctgataaagccacacttgatcttccagcggaagcatctggaaaaattaccctaaaagcacaggagggagactcaatgtctgtaggtgatgtagtttgtttaattgatacatctgagtctgttacagaaatagaaaccgatgaaactgaatcaaatatagatcctattaaagaagagaagactcaaataactctaagtgaaaatataattgttactccacttgctagaaatattgcctctgagaagggtatagatcttaatgagattaagactgagggtcaaaaaattacaaaagatgatgttctaaaggcagtacctgcaatgggtgtatctaatgatgattcaagaattgaaacaagggaaaaactctccatgctcagaagaaaggtttcggagagactcgtttcagtaaaaaacgaaactgctatgttaactacatttaatgaagcagacctatctaatatatttgaaatcagaaaaaaatataaagaagctttttcacaaagatatggagtcagtcttggttttatgagctttttcactctttctgttacaagagcattggagctttaccctgatgttaattcaatgattgatggtgacgagaaaatatcatacaattatagtgatataagtattgcagtctcaggaccaaagggactaatgacccctgtgcttagaaatgcacaaaaattatcattttcatctgtagaacaggaaataaaaagattagctgatagtgttagaaataaaaccataagtgttgatgatttaacaggtgggacatttacaatttcaaatggaggtgtttttggttcaatgctttcaacacctattataaaccctcctcaatcaggaatccttggtatgcataatattatacaaagaccagttgctgtagatggtaaagttgaaatcagaccaatgatgtatttagctttatcctatgatcatagaattattgacggtaatcaatctgttggttttttaattgctgtcaaggaaggtgttgaagaccctgaaaatatcttaatgggtggtaaaatagagaaatcattaggacttacataa

SEQ ID NO: 235659 - DNA, 1180 bp, Unknown
  Bacterial polypeptide expressing nucleotide sequence isolated from the Sargasso Sea
aatgaaaattccttctccaggtgagtcaattactgaagttgagatttcccaatggttggtttctgatggagatattgtttctaaagatcaaacaattgctgaactcgattcagataaagctactttagacttacccgctgaaactactggaaagatttctttgaaagctgaagaaggtgatactatatctgtaggtgaggttgtttgtgtcattgatacttcttttgcctcagaggaaaatttagataaaacaagtgaaaaagaacaaacatctagtattttaaaggaagaaaaattaaaatcaacttctgaagaagtcacagctacacctttagccaaaaaaattgctgaagaaacaggggttaatttaaatcaaataagtacaaagggagaaaagatcactaaggaagatgttttaaaagctgttccagcaatgggttcagttaatgatgataatagaggagaaactagagaaaagttatctgttttaaggagaaaagtgtcagaaagactagtttctgttaagaatgaaactgcaatgttaacaacatttaatgaagctgatttgtctcagatttttgatttaagaaaaaattataaagacatcttctctactaaacatggtgtaagccttggctttatgagcttttttacaaaagcagttacaagagcacttcaaatgtatcctgatgtaaactctatgattgatggtgatcataaagtttcatataattattcagatataagtattgctgtttcaggaccaaagggtcttatgactccagttcttcgaaatgctcagaatatgtcttttgcatctattgagcaagaaattaaaagacttgcagacttagtaagagataaatcaatcacggttgatgatttaacagggggaacatttacaatttccaatggaggagtatttggatcgatgttatctactccaattattaaccctcctcaatctggaattctgggaatgcataatataattaatagacctgtagctattggtgataatattgaaataagaccaatgatgtatcttgctttatcttatgaccataggataattgatggaaatcaatcggtgggcttcttaattgcggttaaagaaggtgtagaggatccagtaaatgtgcttatggatggaaatattgaaaaatctttagctatctag

SEQ ID NO: 235660 - DNA, 712 bp, Unknown
  Bacterial polypeptide expressing nucleotide sequence isolated from the Sargasso Sea
atgattaaatatggacctgaggaaaaaattaaaatgtcaaaattacgtcaaacaatagcaaaaagattaaaagaagctcaaaataatgcagcaatgctaacaacttttaatgagattgatatgacaaaaataattgaaatgagaaaagaaaatcaagaaaaatttcaagaggaatatggcattaaactaggatttatgtctttcttcgttaaagcttgcattgatggtcttaaagattacccagttttaaatgcagaaactgaaaataacgaaattatttataaaaattattataatataagttttgcagttggaactgataagggactagtagtgcctgtattaaaaaaagcagatgagctatcgtttgctgatattgaaaagaatattaaaaaaatgtctgataaagcaaaagatggaaaacttaatatagaagatcttcaaggcggtacttttacaattagtaatggtggggtttatggatctatgatgtcaacaccaatcctaaatccaccacaatcagctgttttaggaatgcataatatcacagaaagaccagttattattgatggtgaaatcaaagcaagaccaatgatgtatttggctttgtcatatgatcatagaataattgatggtagggaggctgtatctttcttaaaaagcattaaggttaacttagaagatccaaaaaaattatttcaaaaaaattaaa

SEQ ID NO: 235661 - DNA, 1240 bp, Unknown
  Bacterial polypeptide expressing nucleotide sequence isolated from the Sargasso Sea
tatgtctgttgaaatcaaagttccttctctcggagaaagcgttgtagaggcaacggtagcaaaatggtataagaatgaaggtgactctgtatccgtcgatgaaccactgcttgagcttgaaacagataaagtaactcttgaagttccttctccatcaaatggctgtatacaaaaaatcaacgcagaagaaggttcaactgttgaagttggtgcaatcttagggtctattgatgaaaatgcttctatagaccaaaaagttaaacagtcagaaccagtaaatgaaaaatcagttacgactccagaaaaaattattcctgaggaagtaaagtctccaccaaaagaagagatgcccattcaaattgataatttaaataatcaaaaattatcccctgctgtaagaaaaattgctgctgaaaagaatataaatattaatactgtaacctcttcaagagaggatggtagaattactaaatctgacgtcataaattatcaaaatatagaaaaacaagaaaatactcctcaaacaattagacaaaccgataaaagagaagaacgagtgcccatgtcgcgtttaaggcaaaccatagcgaaacgtctaaaggatgctcagaataatgctgctatgctcacaacatttaatgaggttgatatgagtgagcttataaagacacgtaatgatcataaatcagaatttgaaaaaaagtatggcgtgaaattaggcttcatgtcttttttcgtgaaagcatgtataactgcgctgagagatattcctgaagtaaacgcagaaattgaaaacaacgacgtcatttataaaaatttttacaatattggtgttgctgttggaactgatcaaggccttgtcgtacccgttgttaaagacgccgataaaaaatctcttgttgaagtagaaaaagaaatctatcaactgggacagaaagctcgttctggccaattaagtattgaagatatgcagggtggtacatttacaatatccaatggtggtgtttatggatctttaatgtcaactccaatattaaatccacctcaatcaggaatattgggaatgcataaaatagaagaaagacctatagctattgatggtgaaataaaaattagacccatgatgtatcttgccctttcttacgatcatagaatagtagacggtaaaggagccgtaacttttttagtcagagttaaagagggtctagaggatccaagtagactattgttaggagtttaa

SEQ ID NO: 235662 - DNA, 1153 bp, Unknown
  Bacterial polypeptide expressing nucleotide sequence isolated from the Sargasso Sea
aatgaaggaaaaaattttatcaccaacatatcctgaatctgttgaagaaggtgtgatagctaattggaaaaaattagaaggtgaaataattattcaagatgaagttttagctgaaattgaaactgacaaagtagttattgaggtggtagcagctaatgatggcgttatgactaaaatttttaaaactgagggtgaggtagttaacagtggagaagttattggtgaatatgaagttggtgaaagtgaattaattaaagaaaaaaaatctggaaaagataaaacgcctaaaatagaaagcaaggaaccgataattagtaattcagtaaataaatttgctcaagagaatgagatagatctaagtcttataaaaggtactggtaaatcaggtagaattatcaagcaagatttattgaactatatttctaataaagaagagctaacaaaaaaagaagcagttagagagaccaaaagggtccccatgagtagattaagaaaaacagttgctgaacgtttggtaaatgttcaaagggaaacagccatgcttacaacttttaatgaagttgatatgactgcaataatgaaaataagggaacagaaaggtgaagacttctataaaaaaaatcaaataaaattagggtatatgggcttttttgtaactgctgcagttagtgctttaaatgaatatcctcaagttaatgcaagtattgatggtgatgaaatcgttttccacggttttaaagatattggggtggctgtttctactgatagaggcttaactgttccaattatcaaagacgcagatttattgagtattagtgatatagaaaaattaattctggaatattctgataaagctcggaatggtaaactcactattgaggagatgcaaggtggcacattcactatttccaacggaggagtttttggatcacttctatcaacaccgatattaaatgctcctcaaaccgccattcttggaatgcataagatacaagatagacctatagcttttgagggtaaaattgaaataagacctatgatgtatcttgctctaagttacgatcatagaattattgatggaaaggaggctgtttcatttcttgtccacttaaaaaatgaaatagaaaatccagctgatctctataaagaataa

SEQ ID NO: 235663 - DNA, 640 bp, Unknown
  Bacterial polypeptide expressing nucleotide sequence isolated from the Sargasso Sea
ttaaccacatttaatgaagctgatatgagttcaatatttgatttgagaaagaaatacaaagaaaaatttgaaaaaaaacatggagtaggccttggttttatgagcttctttaccaaagcagtagttcgagctttgaatctttttcctgacgtaaattcaatgattgatggagatcataaaatatcatatgaatattgtgatatcagtgttgctgtatctggcccaaaaggcttgatggttccagttgttagaaacgctgagctactttcttttagtgaaatagaatcagaaataaagcgtttagctattcgtgcccgggatggagaaataactgtagacgacatgacaggaggaacttttacaatttctaatggtggggtttttggatctatgttatctactccaataataaatccacctcaatctggaattttaggcatgcataatattattcaacgcccagttgcagttgatgggaaagtagagattagaccaatgatgtatttggccctatcctatgaccatagaataattgatggaaaagaatctgttggatttttagttgcagtaaaggaagctttagaagaccctgctgaacatttgatgtctaataaaattgaaaaggaattaggcttctaaa

SEQ ID NO: 235664 - DNA, 1189 bp, Unknown
  Bacterial polypeptide expressing nucleotide sequence isolated from the Sargasso Sea
atgactatcgagatcaaagtaccggacctgccggaatcagtggcggatgccaccatcgccacctggcacaagaaaccgggtgatctggttgcccgtgatgaagtgctggtcgacatcgagaccgacaaggtcgtgctggaagtgccggcgccggaagccggcgtgctgggcgacatcctgcaaagcgaaggggccactgtgctctcccgccagctgatcgccatgctcaagcctgccccggtggccggcgaagagaccaaggagaagccggtcgaagcggcggccgatgacgctgccgatggcctgagcccctccgtgcgccgcctggtggccgagcatgacatcgacgtcgccaagctgaccggtaccggcaagggcggtcgcgtcaccaaggaagacgtggaagccttcatcaagggtggcaacaagcctgccgccgccccggttgccgctgcagccccggctgcaccggtcgccccgctggccggtcgcactgaaaaacgcgtgcccatgacccgtctgcgcaagcgcatcgccgagcgtctgctggaggccaagaacaccaccgccatgctgaccaccttcaacgagatcaacatggcgcccatcatgaagctgcgcaagcagtacggcgagatcttcgagaagaagcacagcatcaagctcggcttcatgtccttctacgtgaaggcggtggtggaatccctcaagcgctacccggaagtgaacgcggcgctggacggtgacgacatcgtctaccacaactacttcgacgtcagcatcgccgtctccaccccccgtggtctggtgaccccggtgctgcgtgactgcgacaacatgagcctggccgacatcgagaaggccatcaaagatctggccggcaagggccgtgacggcaagctgaccgtggatgaactgaccggcggcaacttcaccatcaccaacggtggcgtgttcggctccctgatgtccaccccgatcatcaacccgccccagagcgccattctgggcatgcacaagatccaggaccgccccatggccgtcgacggcaaggtcgagatcctgccgatgatgtacctggcgctctcctacgatcaccgcatcatcgacggccgcgagtcggtgggcttcctggtctccatcaaggagctcttggaagatccgacccgtctgctgctggacgtctaaa

SEQ ID NO: 235665 - DNA, 1324 bp, Unknown
  Bacterial polypeptide expressing nucleotide sequence isolated from the Sargasso Sea
atgatagaaaaaattttagttcctgtgcttggagaaagtattactgaagcaactatttctaaatggttgaaaaacaaaggtgaaaatattgatgctgacgaacccatagttgaattagagacagacaaggttaatctagaggttccatccccagttagtggtacacttaccaaaattaatttcaaagatggtgatacagtagaagttggagccattctaggagaaatttcaagtgaatctgtagataaaaaaaaagaagattttaaagataatgaaaagccacaaaaaaaagcgcctgataatataattaattttggcaaagaaaaaaaacaaaatccaaaaatttttgaagatgaagaaaaagaagaaccattagttttaacaaaagaagaaccattaaaatcaaataaagaggaaccattaattttaacaaaagagttacctagcaaacaaaaaacaataagcaaaaaagtattatctcctgcagtaagaaaaattgtagaagaaaacaagattgatattcaatcaattaaaggaacgggtaagtccggtcaaattttaaaaggtgatttgattggtttaatgggatcaacaccaaaaccatcagaaagaaaattaaaatacggacatgaagaaagaattaaaatgagcagactaagacaaacaatagcaaaaagattaaaagaagcccaagaaaatgcagccatgttaactacatttaatgaaattgatatgacaaatattattgaaatgagaaaaaataaccaagaagattttcaaaaaagatttggaataaaacttggttttatgtctttttttgttaaagcctgtgtgcttggactaaaatcatttccagcaattaatgctgagatagaaggtcaagaaattatatataaaaattattataacataagctttgctgtagggactgaaaaaggattagtagttccagtattaagaaatgcagatgaattatcatttgcagagatagaaaaaaatataaaaacaatttctgaaaaagcgaaagaagggaaattaactatagatgacttacaaggtggaacatttacaataagcaatggaggtgtatatggctctatgctttcaactccaattcttaatcctccacaatcaggagttcttggaatgcataatatagttgaaagaccaacggctataaatgaacaagttgaaattagaccagttatgtatttagcattatcgtacgatcacagaataatagatggaaaagactcagtttcttttttaaagttgttaaaagaaaatcttgaggatccaagaaaattatttttagacctttaaa

SEQ ID NO: 235666 - DNA, 1324 bp, Unknown
  Bacterial polypeptide expressing nucleotide sequence isolated from the Sargasso Sea
aatgacagaaaaaattttagtacccgtattaggagagagtattacagaagcaactatttctaaatggttaaaaaacaaaggtgatagtattaacgttgatgaagccttagtagaattagagacagataaggtgaatttagaagttccatctcctgttgatggcatattaacagctataaatttcaaagaaggagatactgtagaggtaggtgctgtactaggagaaatttcaagtggatcgacagaaaataaaaaaattgatgttaaaagtaatgataaggaacctaaagaagaagctgaaaatgtaattaattttgaaaaagaaaaaaaacaaaaaccaaaaatctttgaagttgaaaaaaaagaggaaccattagttttaaccaaagaagagccattagttttaaccaaagaagagccattagttttaaccaaagaagagccaagtaaccaaaaaacgattagtcaaaaagtattgtctccagcagtaagaaaaattgtagaagaaaacaacatcgatactagttctgttaagggaacaggtagatctggtcaaattttaaaaggtgatttaatcagtttaatgggttcagctccacaaccatctgaaagaaaaataaaatatggtcaagaagagagaattaaaatgagtagactaagacagaccatagcaaaaagactaaaagaagcacaagaaaatgcagccatgttaactacatttaacgaagttgatatgaccaatattattgaaatgagaaaaaataaccaagaagattttcagaaaagatttggaataaagcttggttttatgtctttttttgtcaaagcttgcgtgcttggactaaaagcatttccagcaatcaatgctgagatagaaggtcaagaaattatatataaaaattattataatataagttttgcagttggaactgaaaaaggtttagtagttcctgtgctaagaaatgcagatgaattatcatttgcagaaatagaaaaaaatataaaaataatttctgaaaaagctagagatggaaaattaattattgaagatttacaaggtggaacatttacaataagcaatggaggagtatatggttcaatgctttcaaccccaattcttaatccaccacaatcaggagttcttggaatgcataatatagttgaaagaccaattgctaaagacggagaagttgaaattagacctgtgatgtatttagctttatcttacgaccatagaataatagatggaaaagattcggtatcttttttaaaattaataaaagacaatcttgaggatccaagaaaattatttttagacctataa

SEQ ID NO: 235667 - DNA, 1291 bp, Unknown
  Bacterial polypeptide expressing nucleotide sequence isolated from the Sargasso Sea
atgtcagaaaaaatagttgttccagctttaggcgagtcagtaacagaggcaacagtctctagatggcttaaaagtgttggtgaaaaagttgattctgatgagcctattgttgagcttgagacagataaagtaaatgtagaggttccttcaccatcagacggtgttttggaaaatatttctgttaaagagggtgatacagtagaagtaggggctttacttggaagtataggtgcaaaaaaagtacaaaaagttgagaaagaggaaaaaaaatatactcctccacctaaaaaagaggaagttacacctaaaatttttgaaagacctaaagaacaaaaacctaaaaaagtagaaaaaaaattaattctaaaagaaactaatgaagaacctccactaattttgtcagaagaggtcaaaagtgataattatgttcaagaaaaaattgtttctccttcagcaagaaaaattgctaacgaaaagaatattgatttaagtaaaatcgcagggacaggaaaaaatggagtaatacttaaagaagatttattaaatttaatgggatcaaaacctgctcctaataaacgaaaaattactcatggcccagaagaaaaaattaaaatgacaagattaagaatgacaatagcaaaaagattaaaagaagcgcaaaataatgcagcgatgcttacaacttttaatgaagtggatatgtctaaagtaatacaaatgaaaaatgattataaaaatgagtttattaaaaaattttcaaccaaacttggttttatgtctttttttgtgaaagcttgcgttgcggcattgaaaaattttccggctataaatgctgaaatacaaggagacacaatagtttataaaaattattataatatcagttttgcagtaggtacagatagaggtttagttgtacctgttcttagaagtccagacgaaatgtcttttgcagaaattgagaaaaatattttatctttaggtgaaaaggctagagatgggaaaataacaattgaagacttacagggtggcacttttacaattacaaatggaggaatttatggttcgatgctctcaacaccgatattaaatcctccacagtcaggagttttaggtatgcataatattattgaaagagcagttgttaaagatggggaaataataattaggcccatgatgtacctagctttatcttatgatcatagaatcgttgatggtaaagaggcagtttcgtttttaaaaaacgtaaaagattcattagaagagccacaaaggcttttcttaaatgtataaa

SEQ ID NO: 235668 - DNA, 1092 bp, Unknown
  Bacterial polypeptide expressing nucleotide sequence isolated from the Sargasso Sea
aagatggtgaaacagttgaagttggaactgtattaggaatgatttcagaaggcagtgttcttaaagaagaaaaggaagttgagccggacaaaggaaacgttgaaaaaaataatgtaataaatttagaaatcgaaaagaaaaaagatacaaaaaaaactcaagaacctttattgcttgatgaagaaccattggtattaactgatgaagttgaagaaaccaagcctattaaacaaaataaaacactttctcctgctgtaagaaaaatggttgttgaaaataaaattaatttagatgaagtaaaagggacaggcaaagatggaagaattttaaaaggtgatttaataagtttaatgggagctaaccctcaacctaatgaaagaaaaattcaatatggtgaagaagaacgaatcaaaatgtcaagactaagacaaacgattgctaaacgtttaaaagaggctcaaaacaatgctgctatgctcacaacatttaatgaggttgatatgtcaaatataatatcaatgagaaaagataaccaggaagatttccaaaatagttatggaattaaacttggcttcatgtctttttttgtgaaagcttgtatagtaggattaaaattatttcctgcaataaatgctgaagttgaaaatgatgaaatggtttacaaaaattattataatgtgagctttgcagtcggaactgaaaaaggattagtagttccagtattaaaaaatgccgatgaaatgtcttttgcggacattgaaaaaaacataaaagatctgtcagacaaagcaaaaaatggtagtcttactatagaggatcttcaaggtggaacatttacaattagcaatggaggtgtgtatggatcaatgttatctactcctattttaaaccttccacaatcagcagttcttggaatgcataatatcgttgaaagacctgttgttgttgatggtgagataaaggctagacctgtaatgtttttagcattgtcttatgatcatagaataattgatggaaaagaatctgtaagttttttaaaaactgttaaagaaaacttagaagatccaagaaggttatttttaaatttataat

SEQ ID NO: 235669 - DNA, 1192 bp, Unknown
  Bacterial polypeptide expressing nucleotide sequence isolated from the Sargasso Sea
tatgagtacagaattagtagttccgacactaggtgagtcaattacagaagcaaccgtttctaaatggttgaaaaatattggcgatagttttgaagtagatgagcctttagtagaaattgaaaccgataaaataactgtagaagtaccagctcctcatgctggttctttaaaagaaattagagctaaagagggtactgatataaatattggcggcattttaggtatattagatgaaagcaaaggtgaaaaactaggttcaactaaaattaaggaacaaaacaacgaagtaaaacctaatattgaaaaagaaaaaaaagaaaatcttcaagtagatgcaaattctaataaatcttctccatcagcaagaaaaatggcagaagaaaataatattagtattcagaatattaaatcatctagatctgatggaagaataaataaagaagatatagttaagcatattaattcttcaggaaaagattcaagagtatctagtgaaagagaagaaatagttaaaatgtctaaaattagacaaactatttcaaaaagacttaaagaagctcaaaacactgctgcaatattaacaacttttaatgaagttgatatgtctcaaattatggaaataagaaattctaaaaataaagaatttcaagaacgatatgatgttaaattaggttttatgtctttttttgttaaagctgtaacagaaactttaaaagaatttcctgcagttaattcagaaattaaagatgaaaatattatttataaaaatcattttgatattggtattgcagttggaactgaaaaaggacttgtggttcctgttttaaaagatgtcgataaaatgaattttggagaaattgaaaacagtattattgacttaagtactaaagcaaaagatggaacattgtctatggatgatttatctggaggaacatttacaatttctaatggtggagtttatggttccatgttgagcacccctattattaataggccacaatctggtatacttggaatgcataatatacaaaaaagagctgttgtggttgataatgaaattgtaattaggccaatgatgtatttggcattaagttatgatcatagaattattgatggtaaagaaagtgttggttttttagttggtgttaaaaaattattagaaaatccatcgcatttagttttaggaatttag

SEQ ID NO: 235670 - DNA, 742 bp, Unknown
  Bacterial polypeptide expressing nucleotide sequence isolated from the Sargasso Sea
aatgtcatctaagccttcccctaaccaaaggaaagcagaaaaaggtcaagaagaacgagtaaaaatgaccaggttaagacaaacaatcgctaaaagattaaaagaggcacaaaattctgcggcaatgcttaccacttttaacgaggttgatatgagcgcaataatacaaatgagaaaagataatcaagacgactttcaaaaaacttttggaattaagttaggctttatgtctttttttgtaaaagcatgtgtattaggattaaagctttatcctagcataaatgcggaagtggatgatgatcatatagtatataaaaattattataatattagttttgcagttggaactgacaggggcttagttgtgccagttttaagagatgcagacgaattatcttttgcggatattgaaaaaaatattaaaacaatttcagaaaaggctagagatgggaatctaactattgaagatcttcaaggtggaacatttactataagtaatggaggtgtttatggatctatgctatcaacaccaattttgaacccaccacagtcaggtgttttaggtatgcacaacattattgaaagaccaatcgtggttaatggtcaaattgaaatcaaaccagtaatgtatcttgctctatcttatgatcatagaattattgatggaaaagattcagtttcatttttgaaaactgttaaagaaaatttagaagatccaagaaggttatttttaaatatttaa

SEQ ID NO: 235671 - DNA, 844 bp, Unknown
  Bacterial polypeptide expressing nucleotide sequence isolated from the Sargasso Sea
accagctgttagaaaaatcgtaaacgaacaaaatattaaacttgagggcattaaaggttctggaaagaatgggactattttaaaaggtgatttattaaaactcatgagtaaaaagcctgagcctaatcagagaaaagttaaatatgggcctgaggaaagaattaaaatgacacgactaagacaaaccatagcgaaaagattaaaatcggctcaggaaaatgcagcaatgttgaccaccttcaacgaggtagatatgtctgaaattatttcattcagaaaaaataaccaggatgaatttcaaaaaaaatttggagttaaattaggatttatgtctttttttgtaaaagcatctgtaaaaagtttaaaatcttatccagctataaatgcagaaatagaaaatgatgatataatttacaaaaattattttaatattagttttgctgttggaacagacaaaggtttggttgttccagttcttaaaaatgcagatgagatgtctttttctgacattgagtcagagataaaaactctatccgaaaaggcaaataatggaaatctttcaattgaagatcttcagggtggaacttttactataagtaacggaggtgtgtatggttctatgctgtcaacaccaatactaaatccacctcagtcaggagtattaggaatgcataatattgtagaaagaccagtagtagtaaacaatgaaataaagataagaccaataatgtatcttgcattgtcttacgatcacagaataattgatggaaaagaagcagtttcatttttaaaagagataaaacaatatttagaggatcctgaaaagttatttttagaaaattaa

SEQ ID NO: 235672 - DNA, 892 bp, Unknown
  Bacterial polypeptide expressing nucleotide sequence isolated from the Sargasso Sea
aatatataaagctcctgagaaaaaagaaaaaagtaaaaaaatggcctctccatctgctagaaagatcgcaaatgaaaaaaatattaatctcaacgagataagaggtagtggaaaaaatggcgttatattaaaagaagacctacttagcttgatgggatcaaaaccatctttgaataaaagaaaagcaactcatggtcccgaagaaagaattaaaatgaccagattaagaatgacaattgctaaaaggttaaaagaggctcaaaataatgcagctatgctaacaacttttaatgaagttgatatgcatgaagtaatacaaatgaaaaataattataaagatgagtttaaaaagaaatatttaactaaattgggattcatgtctttttttgttaaggcatgtatagcttcactaaaaaattatccagcaataaatgctgaaattcaaaatgaaacaatagtatataaaaattattataatatcagttttgcagtaggaacagataggggactagtagttcctgtattaagaaatccagacgagatgtcttttgcagaaattgaaaaaaatattgctgacttgggtcaaaaagctagagatggtaaaattagtatagaagatttacagggaggcacttttacaatcactaatggaggtatatacggatcaatgctttcaacaccaattttaaatccgccgcaatctggagtattaggaatgcacaatataattgaaagaccaatagttaaaaacggtgaaataattattcgtccaatgatgtatttggccttatcttatgatcatagaattgttgatggtaaagaagcagtttcctttttaaaaaatattaaagatactcttgaagagcctaaaaggctctttctgaacttatag

SEQ ID NO: 235673 - DNA, 1300 bp, Unknown
  Bacterial polypeptide expressing nucleotide sequence isolated from the Sargasso Sea
atgactgaaaaaattttagtaccggttttaggagagagcataactgaagcaaccatttctaaatggttgaaacgcaaaggtgatactataaacgctgacgagcccgttgtagaattggaaactgacaaggttaaccttgaagtaccttctcctataaatggtacactttctgaaattaactacaaagatggagatacagttgaagtcggagctgtattaggtgaaattgaattaggacctgttgatgaaaaaaaagaggatatcaatatcgttaaaaaacctgataaaaaaataaatgataacgtaataaattttgataaagaaaaaaatcaaccaaaaatttttgaagaacaaaaaaaagatgaaaaacctctgattttaaatgaggaaaaacctttaattttaactaaagaattttctggaaatcaaaaagttgtaacaaagaaaacattatctccagcagtaagaaaaattgttgaagaaaataatattgatgtaaatttagttaaaggaactggtaaatcaggtcaaattcttaagggcgatttaataaatttaatgggatctactccacagccttcagaaagaaaactaaaatatggtcaagaagaaagaattaaaatgagtagacttagattaactatagctaaaagattaaaagaagcacaagaaaatgcagcaatgttaacaacgtttaatgaagttaatatgtcaaatattattgaaatgagaaaaaataaccaagaagattttcaaaataaatttggtataaaactaggtttcatgtcattctttgttaaagcatctattttgggacttaaagcatttcctgcaattaatgcagagattgaagatcaagaaattatttataaaaattattataatataagttttgccgttggaactgagaaaggattagttgttccagtattaagaaatgctgatgaaatgtcatttgctgaaattgaaaagaatataaaaagtatttcagagaaagcaaacagtggtaaattaaatattgatgatctgcaaggtggaacttttactattagtaatggaggagtgtatggatcaatgctgtctacaccaattcttaatcctccacaatcaggtgtcctaggaatgcacaatatagtagaaagaccaatagctatagatggagacattaaaattaaaccagtaatgtatttagctttatcatatgaccatagaataatagatggaaaagactcagtttcgtttttaaaattattaaaagaaaatcttgaggatccaagaaagttatttttagatctttaaa

SEQ ID NO: 235674 - DNA, 1276 bp, Unknown
  Bacterial polypeptide expressing nucleotide sequence isolated from the Sargasso Sea
aatgagtgaaaaaatattagttccagttttgggagaaagtattacagaggctacggtcacgaaatggttaaagaaaaagggtgataacgtagttgctgatgaagctgtagtagaattagaaactgacaaagtaaacttagaagttcctgcacctgcgagtggtgttatatcagagatcaactcaaaagatggtgatacagttgaagttggaactgtattaggaatgatttcagaaggtggtgctcttaaagaagaaaaggaagctgagccggttaaaggaaacgttgaaaaaaataatgtaataaatttagaaatcgaaaagaaaaaagatacaaaaaaaactcaagaacctttattgcttgatgaagaaccattggtattaactgatgaagttgaagaaaccaagcctattaaacaaaataaaacactttctcctgctgtaagaaaaatggttgttgaaaataaaattaatttagatgaagtaaaagggacaggtaaagatggtagaattttaaaaggtgatttaataagtttaatgggagctaaccctcaacctaacgaaagaaaaattcaatacggtgaagaagaacgaattaaaatgtcaagactaagacaaacgattgctaaacgtttaaaagaggctcaaaataatgcagctatgctcacaacgtttaatgaggttgatatgtcaaatataatctcaatgagaaaagataaccaggaagatttccaaaatagttatggaattaaacttggcttcatgtccttttttgtgaaagcttgtatagtaggattaaaattatttcctgcaataaatgctgaagttgaaaatgatgaaatggtttacaaaaattattataatgtgagctttgcagtaggaacagaaaaaggattagtagttccagtattaaaaaatgctgatgaaatgtcttttgctgacattgaaaaaaacataaaagatctgtcagacaaagcaaaaaatggtagtcttaccatagaggatcttcaagggggaacgtttacaattagcaacggaggtgtgtatggatcaatgttatctactcctattttaaaccctccacaatcagcagttcttggaatgcataatattgttgaaagacctgttgttgttgatggtgagataaaagccagacctgtaatgtttttagcattgtcttacgatcatagaataattgatggaaaagaatctgttagttttttaaaaactgttaaagaaaacttagaagatccaagaaggttatttttaaatttataa

SEQ ID NO: 235675 - DNA, 754 bp, Unknown
  Bacterial polypeptide expressing nucleotide sequence isolated from the Sargasso Sea
aataataatgttcaagaactttcaacgaagccatcaataagcaaggatcatggcagtaaagaagaaagagttccaatgtctcgacttagacaaactatagctaaacgactcaaagatgcacaaaataatgcagctatgcttacaacatttaatgaagttgatatgggcgaattgattagaactcgtaatgagcataaagatgcttttgagacaaaatatggaataaaattaggatttatgtctttcttcgtaaaagcttgtatcacagctctcaaagatattcctgaggttaatgcagaagttgaaaataatgatgtcatatataaaaatttttataatatcggtgttgcagtaggaactgatcaaggattggttgtgcctgttatcagagatgctgatcaaaaatcaatagtagaaatagagcaagagatttttaatttaggacaaaaagctcgaactggaaaattaagtatcgatgacatgcaaggaggtacatttacagtttcgaatggcggcgtttatggatctcttatgtctacacctattttaaacccccctcaatcagggatacttggcatgcacaagattgaggaaaggccaattgcggtaaatggcgatatcgtaattaggccaatgatgtaccttgctctatcttacgatcatcgtattgtggacggcaaaggcgcagttacttttttggttagagttaaagaaagtttagaagatccaaatagaattctactaggggtataga

SEQ ID NO: 235676 - DNA, 1297 bp, Unknown
  Bacterial polypeptide expressing nucleotide sequence isolated from the Sargasso Sea
aatgtcagaaaaaattacagttcccacattaggcgagtcagtcacagaggcaactgtatcaaagtggctgaaatctcaaggagagaaagttatagcagatgaacctatagttgaattagaaacagataaagttaatgttgaagtaccagctccaattaacggggttcttggcacaattacagtcaaagaaggtgagactgtaaatgttggatcattactaggaacaattaataactctaatcaagactcatccaaatcaaatgaaatcaaagattatagtccaccaaaaaaatcagctaaagaagaaataaaattatctgagcaaaaaagtaaacccttagcaaaaaaaataaataaatcaaaaattttagaaccggtattaaagttagagaaagaaagcattgttgatgaggtagagccattaatcttggacgaagttcatgaggaaaagcagccacaaaagaaagtaaaacctaaaaatatagaaacgaaaatttctcctgctgctcgaaaaatggcaagtgaagcaaatgtagatataaataaaataaaaggaactggaaaaaatggaataattttaaaggaagatataatgactctgatgggatcaaaaccatctccttctgaaagaaaaatacaacatggccctgaagaacgtgtgaaaatgacaaggttaagattaacaatagctaaaagactaaaagaagctcaagaaaatgcagcaatgttaacgacctttaatgaggtggatatgagtgaagtaatctctatgagaaatcaatataaagaagaatttcaaaaaaactttggagtaaaacttggtttcatgtctttttttgtaaaggcttgcgtcattggacttaaaaattatccttcaatcaatgcagaaattcaaggtgatgaaatagtatataagaattattacaatattagcattgctgttggaactgatagaggcttagtggttcctgttttaagagaaactgatgaaatgtcattttccgatattgagaaaaatattggtgagttaggaaagaaagccagagatggaaaaattacaatagaagatttgcaaggaggaacgtttacaattactaacggaggaatctatggctcaatgttgtctacacctattttaaaccctcctcaatctgctgtacttggtatgcataatattattgaaagaccagtcgttataaatggaaatgtagaagttaggcccgttatgtatttagcattatcgtacgaccatcgaataattgatggaaaagaagcagtgtcatttaaagatgtaaag

SEQ ID NO: 235677 - DNA, 1192 bp, Unknown
  Bacterial polypeptide expressing nucleotide sequence isolated from the Sargasso Sea
atgagtatcgaaatcaaggtacccgtactgccagaatctgttgccgacgcaactatcgccacttggcacgtaaaagtgggtgaacaagtttctcgtgatcaaaatctggttgatattgaaactgacaaagtggtgctagaagtggttgcaccagaagatggtcatattggtgaatttctattccacgaaggcgacaccgttctgggcgagcaagtgattgctaagttcattgctggcgcggtttctggacaagaagtgactaaagcgcaagctgaagctgctgcacctgctgctgcgacagaagagtctaacgatgcgttaagcccatcagtacgccgtttactggctgaacacaatgttgatgctagcaaagtgaagggcactggtgtgggtggacgtatcactaaagaagacgttgaagcctttatcaagtctgcacctaaagcggcagtagcacctgcggctcctgcggtacaacctttagcggcgggtcgcagcgagaaacgtgtaccaatgacacgtttacgtaagactatcgctaaccgtttattagaagcgaaaaactctaccgcaatgctcacgaccttcaacgaagtgaacatgaagcccatcatggatatccgtaagcagtatcaagatatctttgaaaagcgccacggtatccgtttaggtttcatgtctttctacgttaaagcggtaactgaagccttgaaacgcttccctgaagtgaacgcgtcaatcgacggtgacgacatcgtttatcacaactattttgatgtgagcatcgcagtatctacaccacgtggtctggtaacaccagtgctgcgtgacaccgataccatgagcttggctgatatcgaaaaagcagtacgcgatctggcgattaaaggccgtgatggcaagctgactgtggcggatatgactggcggtaacttcactgtgactaacggtggtgtatttggctcgttaatgtctaccccaattttaaacctgccacaaagcgcgattttaggcatgcacgccattaaagatcgcccaatggcagtcaatggtcaggttgaaatcctgcccatgatgtacctagctctctcatatgaccatcgtattattgatggccgtgagtcagttggcttcttagtcgccattaaagacttcttggaagacccaactcgtctgctgcttgatctgtaat

SEQ ID NO: 235678 - DNA, 1291 bp, Unknown
  Bacterial polypeptide expressing nucleotide sequence isolated from the Sargasso Sea
aatgtcagaaaaaatagttgtaccagctttaggtgagtcagtaacagaagcaacagtttccaaatggcttaaaactgttggagaaaaggttgactcggatgagcctgttgttgagcttgagacagataaagtaaatgtcgaagttccttcaccatcagatggtgttttagaaaatatttcagttaaagagggggatacagtagaagtaggtgctttacttggaagtataggagcaaagaaagttcaaaagattgagaaagaagaaaaaaaatatacacctccaccaaaaaaagaagaagttgttcctaaaatttttgataagccagctgaaaaaaaacataaaaaagtggaacaaaaacttattttaaaggaaactccagaagaaccaccacttattttatcaaaagagattataagtgataagcaagttgaagaacaaactctttctccatccgcaagaaaaattgcaagtgaaaagaatatcgacttaagcaaaattgcagggtcaggaaaaaatggagttatacttaaagaagatttgttaaatttaatgggatctaaaccagctcctaacaaacgaaaaataactcatggacctgaagaaaaaattaaaatgactagattaagaatgacaatagctaaaagattaaaagaagcacaaaacaacgctgcaatgcttactacttttaatgaagtggatatgtcaaaagtaatacaaatgaaaaatgattataaaaacgaatttattaaaaaatactcaactaaacttggctttatgtctttttttgtaaaagcttgtgtagcagcactgaaaaattacccagctattaacgcagaaattcaaggagactcaatagtttataaaaattattacaatattagttttgctgttggaactgacaaaggacttgtagttccagtacttagaagtccagacgagatgtcctttgcagaaattgaaaaaaatattttatctttgggtgaaaaagcaagagatggaaaaataagtattgaagatcttcaaggaggaacatttactattactaatggtggaatttatggctctatgctttcaactccaatattaaatcctccacagtctggagttttgggtatgcataacataattgaaagagcagtcgttagagatggtcagatcataattagaccgatgatgtatcttgctttatcctatgatcatagaatcgtagatggaaaagaagcagtttcatttttaaaaaacataaaagattctttagaagagccacaaaggcttttcttaaatgtataa

SEQ ID NO: 235679 - DNA, 1330 bp, Unknown
  Bacterial polypeptide expressing nucleotide sequence isolated from the Sargasso Sea
aatgagtgaaaaaattttagtaccagtattaggagaaagcataagtgaagccactgtttccaaatggttaaaaaatgtgggagatgttgttaatgctgacgaagcaattgtagaacttgaaactgataaagttaatctagaagtaccagcatccataagcggagttttatcagagattaactccaatgaaggagaagcagtaaaagtaggttcagttttaggatttatttcagactcaaatataaaaattagtggaaaagaagatataaaaaatacaaaaatagaaatccaaaaaaaagatgaaaaaatatacaataagaatgaagataataagaaaaaactaactactcaaacagaaccggcaatattaaatgaagaagaagagccattaattttaaatgaagaagaagagccattaattttaaatgaagaagtggaaatagaaaaaaaacaagccaaacctttagagaaaaatataaatttgtctcctgctgttagaaagattgttagtgaaaaaaaaatagatattagtgagataaatggcacaggtagagaaggaagaattttaaaaggtgatctaatctcattaatgggtgaaaacccacaacctaatcaaagaaaaattcaatttggtgaagaagagagaataaagatgacaagacttcgtcaaactatagcaaaaagacttaaggaagctcaagaaaatgcagccatgctaaccacattcaatgaggttgatatgtcagggataatctcaatgagaaaagaaaatcaagaagattttcaaaatagatataatattaaattaggttttatgtccttttttgtaaaagcttgtgttgtgggattaaaattatttcctgcgataaatgctgaaatagaaggacaagatattatatataaaaattattataatattagttttgctgtaggaaccgaaagaggtcttgtagtgccagtattaaaaaatgcagatgagatgtcatttgcagatatagaaaatgaaataaaaaaattgtctgacaaagcaaaaaacggaagtttaacaattgaagatttacagggtgggacatttacaataagtaatggtggcgtttatggttctatgctttcaactccaatacttaatccacctcaatcaggagtactgggcatgcataatattgttgagagaccagtttcagaaaatggagaaataaaaattaaaccagttatgtatttagctttatcatacgatcatagaattattgatgggaaagattatgtatcttttcttaaaacagttaaagaaaacttggaagatccaagaagattatttttaaatatttaa

SEQ ID NO: 235680 - DNA, 1204 bp, Unknown
  Bacterial polypeptide expressing nucleotide sequence isolated from the Sargasso Sea
aatgagcactgaattaatagttccaacacttggagagtcaattacggaagcaactgtttcaaaatggcttaagaatataggcgataattttgaagcagatgaacctttagttgaaattgagacagacaaaattacagttgaagtaccagcacctcatgcaggctctctaaaagaaataaaagtttctgaaggcactgatgttgaaattggtggtattttaggaatcttagatgaatcaaaaggcaaaacaccaagtcctaaaaaaactgaaactaaagaagaaaaaataaaagaagaagtaaaagcagttaaggttgaaacaaaatcttcgcctgccaaatcttcaccatctgcaagaaaaattgctgaagaaaataatattaaacttgaagatgtcacctcatcccgttctgatggaagaattaataaagaagatgtagtttctcatctttcttcttcaaataaaacaaccactaacaaaggtgaaagagaagaagttgttaaaatgtctaaaatcagacagacaatatctaaacgtttaaaggaggctcaaaatacagcagccatacttacgactttcaatgaaattgacatgtccaaagttatggaaattagaaaatcaaaaaaccaagaatttcaaagtcggtacgaggtcaaattaggtttcatgtctttttttgtaaaagcggttgtgaaaagtttgcaagagtacccagctgtgaatgctgaaattaaagatgaaaatataatttataaaaatcattttgatataggtatagctgttggaactgaaaaaggattagtcgtaccaatacttaaagatgccgatcaattgagttttggagaaatagaaactaaaattatcgatcttagtacaaaagctaaagatggaacgttaaccatggatgatttgactggcggtacttttacaatttcaaatggtggcgtttatggatcaatgctcagcacacctattatcaatagacctcaatctggtattttagggatgcataatatccaaaaaagggcagtagttgtaaatgatgaaatagtaattaggccaatgatgtatgttgcattaagttatgatcatagaattattgatggaaaagaaagtgttggatttttagtgaaggtgaaagaacttctagaagatccatcagaaattagtattaggaatataaaatgggagattttgatttaa

SEQ ID NO: 235681 - DNA, 691 bp, Unknown
  Bacterial polypeptide expressing nucleotide sequence isolated from the Sargasso Sea
gaaaaaataaaaatgacaaggctaagacaaacgattgctaaaagacttaaacaagctcaagataatgcagcaatgcttacaacttttaatgaagttgatatgagcggtataattgacatgagaaaagaaaatcaaagtgattttcaagataggtttggcataaaactaggttttatgtccttttttgttaaagcttgtattgaaagtctaaaactgtttcctgcaattaatgctgaaatcgagggagagaacataatttataaaaactactataatataagttttgcagtaggcaccgaaaaaggtcttgtggttccagtcttaaaaaatgcagatgaaatgtctttcgcagacatagaaaagaaaattaaagaattgtctgataaagcaagagatggaaagattacaattgacgatcttcagggtggaacatttactatcagtaacgggggtgtctatggatcaatgttatcaacaccaattttaaatttacctcaatccggagttttaggaatgcacaatattgtagaaaggccacatgtggtaaatggtgaaattaaaattagaccaataatgtatatagctttatcatatgaccatagaataattgatgggaaagaggcagtatcttttttaaaaaatacaaaagataacttggaagatccaagaagattatttttaaatttatagt

SEQ ID NO: 235682 - DNA, 1195 bp, Unknown
  Bacterial polypeptide expressing nucleotide sequence isolated from the Sargasso Sea
atgagtatcgaaatcaaggtacccgtactgccagaatctgttgccgatgcaactatcgccacttggcacgtaaaagtgggtgagcaagtttctcgtgatcaaaatctggttgatattgaaactgacaaagtcgtactggaagtggttgcaccagaagatggtcacatcggtgagttcctgttccaagaaggcgataccgttctgggcgagcaagtgattgctaagttcatcgcgggtgcggtttctggtcaagaagtgactaaagccgaggccgaagctgctgcacctgttgctgctgcgactgaagagtctaacgatgcattaagcccatcagtacgtcgtttactggctgagcacaatgttgatgcgagcaaagtgaagggcactggtgttggtggccgtatcactaaagaagacgttgaagcctttatcaagtctgcgcctaaagcggctgcagctccagcggctcctgcggtacaaccactcgctgcgggtcgtagcgagaaacgtgttccaatgactcgtttacgtaagactatcgctaaccgtttattagaagcgaaaaactctactgcaatgctcacgacattcaacgaagtgaacatgaagccaatcatggatatccgtaagcaataccaagatatctttgaaaagcgccacggtatccgtttaggtttcatgtctttctacgtgaaagcggtaaccgaagcactgaaacgcttcccagaagtgaacgcgtcaatcgacggtgacgatatcgtttaccacaactacttcgacgtcagcatcgcggtatctactcctcgtggtctggtcaccccagtactgcgtgacaccgataccatgagcctagctgatatcgaaaaagcagtacgcgatctggcgatcaaaggccgtgatggcaagctgactgtggctgatatgactggcggtaacttcactgtgactaacggtggtgtattcggctcgttaatgtctaccccaattttaaacctgccacaaagcgcgattttaggcatgcacgccattaaagaccgcccaatggcagtcaatggtcaggttgaaatcctgcccatgatgtacctagctctctcatatgaccatcgtattgtcgatggccgtgagtcagttggcttcttagtcgccattaaagacttcttggaagacccaactcgtctgctacttgacctataat

SEQ ID NO: 235683 - DNA, 1282 bp, Unknown
  Bacterial polypeptide expressing nucleotide sequence isolated from the Sargasso Sea
aatgactgaaaaaattttagtacctgtattaggagaaagcattacggaagctaccatttctaagtggttaaaaaacaagggagaaagtattatagctgatgagccgattgttgaactagaaacagataaagttaatttagaggttccagcaccaacagatggaattttaagtgaagttaactttaaaaatggtgatacagttgaagttggagcaattcttggagaaatctccaattcagatcaagaaataaaaaaaccagttgaaaaaaaagttgaagaaaaaaaaattaataatgtaattaatttaaataaagaaaaaattaatcaacctaaaatttttgaagaaaaaaaagatattgaaaaagttaaagaaactcctcttattttaacgaaagaactaaaggtccaaaaagattatacatcaaataacaccttgtctcctgctgtaagaaaaattgttgaagaaaataatattgaaattgaagcagttaaaggtacaggaaagtcaggtcaaattttaaaaggtgacttattaagtttaatggaagcaaccccaatgccttcagaaagaaaaacaaaatttggtgaagaggaaagaattaaaatgagcaggttaagacaaacaattgcaaaaagattaaaacaagctcaagaaaatgctgcaatgctgactacatttaacgaagttgacatgagcaatataattgaaatgagaaaaaataatcaagaggatttccaaaatcgttttggaattaaacttggttttatgtctttttttgtgaaagcaagtgtattagcgctcaaatcttttcctccaattaacgcagaaatcgagggtgatgaaatagtttataagaactattacaatataagctttgcagtaggcacagaaaaaggtttggttgttccagtcttaaaaaatgcagatgaaaaatcatttgctgaaatagaaaaaaatattaaagagatgtctgataaagcaaaaaaaggaaatttaacaatagaagatttgcagggtggtacattcactatcagcaatggtggtgtgtatggttcaatgctatcaactccaattttaaatcccccacaatcgggagttttaggaatgcataatattattgaaagacctatagttattaacggagagataaaaattagaccaataatgtatttagctctttcttatgaccataggattattgatggaaaagactcagtatcttttttaaaaactttaaaagataatcttgaagacccaagaaaattatttttagatttataa

SEQ ID NO: 235684 - DNA, 835 bp, Unknown
  Bacterial polypeptide expressing nucleotide sequence isolated from the Sargasso Sea
agaaaaattgttcaagaaaaaaacattgatatttcaaaaattcatggaactggaaaagatggaagagtattaaaaggggaccttatccatttaatgtcttcaaggcctgaacctgaccaacgaaagctcgaaaaaggccaagaggaaagagttaaaatgacaagattaagacaaacaattgcaaaaagacttaaagatgcacaaaattctgcagcaatgctaacaacttttaatgaggtggatatgagcgcaataatccaaatgagaaaagagaatcaagaagatttccaaaaaaaatttggaattaaattaggttttatgtctttttttgtcaaagcatgtgttttaggattaaaactttatccaagtattaatgctgagatagataacgatcatgtgatatacaagaattattataatattagttttgctgtaggaactgacagaggattagtagtgcctgttttaagaaatgcagacgagatatcatttgcagaaatagaaaagaatattaaagaaatttcagaaaaagcaaggaaaggaaatttgacaattgaagatcttcaagggggcacttttaccataagcaatggaggagtttatggatcaatgctttcaactccaattttaaatccacctcaatcaggtgtacttgggatgcacaatatagttgaaagaccaattgttgtcgaaggagaggtgcaagtaagacctgttatgtatcttgctctatcttatgaccatagaattatagatggcaaagactcagtttcatttttaaaaacaataaaagaaaatctagaagatcctagaagactatttttaaatatttaaa

SEQ ID NO: 235685 - DNA, 1087 bp, Unknown
  Bacterial polypeptide expressing nucleotide sequence isolated from the Sargasso Sea
aatgaaaaatattacagtacctgagcttggcgagtctataattgagggaacactgacctcttggttaattaaagaaggtgacagttttaaatctggcgataatttagctgaaatagagacagaaaaaattacgattgaaatacctgctcaaacctctggaacattaacaaaaataattacacctgttggagccacagtgaacgtaggtcaatcaattgctgaaatatctgatcagatcacgcctgaagaaattaccgaaactaagataaatcgaactccagacactaaagaatttaaagagcaggctgcaccagttgataagcctaatattgttgaaaaatcaaaggaaattgctgataaagatgacaaccttccaaattttgacatagaacaaggatcagcaaatgaaaaaattattcctatgtctaaactcagacagactattgcaagaagattaaaagatgctcaaaacacagctgcaattcttactacattcaatgaagttgatatgtcggcaatcatggctctcagaaaaaaagagcaaacacactttcaaaaaaaatatggtgtgaaacttggtataatgtctttttttgttaaagcgtgtaccgaagtcttaaaggcaatacctgagattaattcagaaattcatgaaaataaaattatttataaaaattattttgatataggaatagccataggatcagaaaaagggttggttgttccaataataagaaatgctgaaaaattatccaatgcagaaattgaaaaagctatttttgatttatctaataaagcaaattcaaacaaactagcaatgagtgatttatcaggtggaactttttcaattaccaatggaggaatttatggctcaatgatgagtacacccataattaatcctccacaaagtgctatattaggtatgcactcaattatagaaagaccaattgcggtaaaaaagaaaattgttattaaaccgatgatgtatatagcattaagttatgaccatagacttatcgatggaaagcaagcagtaacttttttagtaaatttaaaagagttgttagaaaatccaaaaataatttaa

SEQ ID NO: 235686 - DNA, 505 bp, Unknown
  Bacterial polypeptide expressing nucleotide sequence isolated from the Sargasso Sea
atgtctttttttgttaaagcgtgtaccgaagtcttaaaagcaatacctgaaattaattcagaaattcatgaaaataaaattatttataaaaattattttgatataggaatagccataggatcagaaaaagggttggttgttccaataataagaaatgtagaaaatttatctaatgcagatattgaaaaagctatttttgatttatccaataaggcaaattcaaataaacttgcaatgagtgatttatcaggtggaactttttcaattacaaatggaggaatatacggttcaatgatgagtacacccataattaatcctccacaaagtgctatattaggtatgcactcaataatagaaagaccaattgcggtaaaaaagaaaattgttattaagccgatgatgtatatagcattaagttatgaccatagacttattgatggaaagcaagcagtaacttttttagtaaacttaaaagagttgttagaaaatccaaaaataatttaat

SEQ ID NO: 235687 - DNA, 1324 bp, Unknown
  Bacterial polypeptide expressing nucleotide sequence isolated from the Sargasso Sea
atgtcagacaaaattgtagttccagttttaggagaaagtataacagaagcaactgtagctaaatggttaaaaaataaaggagatagtgtcgaagccgatgaacctgttgttgaacttgaaactgataaagtaaatctagaggttccatctccctcagatggagtattaagcgaaataaatgctcaaaatggctcaacggttgaagtaggagctgttcttggatcaataatcggaggaagttcaaaaaaagatgaaactgaggatgaacctaaagaagagaaagtagtacacaacgaagataatattattagtttaaaaaaagaagttgagacaaaagaagttgaaacaaaattgttcgataaggaagaaaaaattttagaacctaatgaaaatacaagtaaggaagaaccattaatccttacagaagaagtatcctctaaaaaagagaaatctaaaaaaacaaaggatgtatctgtttctcctgctgtgagaaagattgctgcagataataaaattgacctaaaaaaaatccaaggaactggcagaggtggaagagtttcaaaaggtgatctactaagtttaatgaacattaaacctggaccttctgagcggaaaataaagtttggccaagaagaaaaaataaagatgacaaggctaaggctaacaattgctaaaagacttaaacaagcccaagataatgctgcaatgcttacaacttttaatgaagttgacatgagtggtataattgagatgagaaaagaaaatcaaaatgattttcaagataggtttgggattaaactaggattcatgtcattttttgtaaaagcttgcattgaaagtctaaaactctttccagctattaatgctgaaatcgaggaagagaacataatttataagaattattataatataagttttgctgtaggcactgaaaaaggtcttgtggttccggtcttaaaaaatgcagatgaaatgtcttttgcagacatagaaaagaaaataaaagatttgtctgacaaagcaagagatggaaagattacgattgacgatcttcaaggcggaacatttactatcagcaacggcggtgtctatgggtcaatgttatcaacacctattttaaatttacctcaatccggagttttaggaatgcataatattgtagaaaggccgcatgtggtaaatggtgaaattaaaataagaccaataatgtatatagctttatcgtatgatcatagaataattgatggtaaagaagcggtttcttttttaaaaaatacaaaagataacttagaagacccaagaagattatttttaaatttatagt

SEQ ID NO: 235688 - DNA, 1354 bp, Unknown
  Bacterial polypeptide expressing nucleotide sequence isolated from the Sargasso Sea
ttgcgcgccgcaccggccgaaggaatcgcacgaacctcgtcattacccagattaagcatccaggaaaatcacatggctatcgtagaagtcaaagtcccccagctttcggagtcggtttcggaagccaccatgctgcagtggaagaagaagccgggcgaagcagttgctcaagacgaaatcctgatcgaactcgagaccgacaaggtcgtgctcgaagtgccggcaccggccgcgggcgtgctcgcgcaagtgctgcagaacgacggtgacaccgtcgttgccgatcagctgatcgcaacgatcgacaccgaagcgaaggcaggtgcagccgaagccgcggcaggcgccgccgaagtcaagccggcagcagcgcctgctgcagccgcaccggcagcacagccggtcgctgcagccgcaactgcatcgtcgaccaccgcatcgccggccgcatcgaagctgctggccgagaagggcctgtcggcgggcgacgtcgcaggttcgggccgcgacggccgcgtcacgaagggcgacgcgctggcagcaggcagcgcaccgaaggccgctccggctgccgcaccggcgaagaccgccgctgcgaagccgtcgctgccggaagtgaaggtgccggcatcggccgcgacctggctgaacgaccgtccggaacagcgcgtgccgatgtcgcgcctgcgtgcgcgtatcgccgagcgtctgcttgagtcgcagcagaccaacgcgatcctgacgacgttcaacgaagtgaacatggctccggtcatggaactgcgcaacaagtacaaggacaagttcgagaaggaacatggcgtgaagctcggcttcatgtcgttcttcgtgaaggcggccgtgcacgcgctgaagaagttcccgctcgtgaacgcgtcgatcgacggtaacgacatcgtctaccacggctacttcgacatcggtatcgcggtcggttcgccgcgcggcctcgtcgtgccgatcctgcgcaacgcggatcagctgagcctcgccgagatcgaaaagaagatcgccgaattcggccagaaggcgaaggacggcaagctgtcgatcgaggaaatgacgggcggtacgttctcgatctcgaacggcggtgtgttcggttcgatgttgtcgaccccgatcatcaacccgccgcagtcggcaatcctcggcgtgcacgcgacgaaggagcgcccggtcgtcgaaaacggccagatcgtgatccgtccgatcaactacctcgcgctgtcttacgaccaccgcatcatcgacggccgcgaagccgtgctgtcgctcgtcgcgatgaaggatgcgctggaagatccggctcgcctgctgctcgacctgtaag

SEQ ID NO: 235689 - DNA, 976 bp, Unknown
  Bacterial polypeptide expressing nucleotide sequence isolated from the Sargasso Sea
ctgtctaattgatacttcagagtctcagttagaagaattaacccagccagctgttacgaaagtagatccaataaaagaagagaaaactcaaacaactcaaaaagaaaatataagtgttactccgcttgctagaagtattgcgtctgaaaagggtatagatctcaatgtaataaagactaagggagaaaagattactaaagatgatgttttaaaagtagtgcctgcaatgggttcatctattgatgacacaagagttgaatcaagagaaaaactatcaatgttaagaagaaaggtgtcagagagattagtatctgtaaaaaatgaaacagccatgttaacgactttcaacgaggcagatctaacaaaaatttttgaaattcgaaaaaaatataaagaagctttttcccaaaaacatggagtaagtttaggatttatgagcttttttactaagtctgtcactagagcactagagatgttcccagacgtgaattcaatgattgacggtgatgaaaaaatatctttcaattatagtgacattagtattgcagtttctggaccaaaaggacttatgactccagttctaagaaatgctcaaaaattatcattttcatctgtggaacaggagattaaaagattagctgatagtgttaggaataagtcaattacagtagacgacttaacaggcgggacgtttactatctcaaatggaggagtatttggttcaatgctatcaactccaattattaacccccctcaatcagggattcttggtatgcataatataattcaaagaccagttgctgttgatggtaaggttgagattcgaccgatgatgtatttagcgttatcatatgaccatagaattattgatggtaatcaatctgttggatttttaattgcagtcaaagagggtgttgaggaccctgaaaatcttctgatggatggaaaaattcaaaaatcattaggacttagttaa

SEQ ID NO: 235690 - DNA, 1327 bp, Unknown
  Bacterial polypeptide expressing nucleotide sequence isolated from the Sargasso Sea
atgtcagagaaaataatagttccagcgttaggagagtctgttactgaggctacagtttcaaaatggctaaaatcagtaggagaagaagtaagctccgatgaaccgctggtagaacttgaaactgacaaagtgaatgttgaagtaccatcaccctctgacggtatattagaaaaaatttcagtaaaagaggggacaacagtcgaggtcggaagccttttgggaagtgtgggcgcaagcaattcaaagcctgttgtcgaaaaaaaggagaagaaatacacaccacctccaaaaaaagagaaaagcattcctatttatgatgaagaaccaaaaaaaaatgaagaagttgtcgaactaagtaaaccaatttctaacggtaaggaaacactagtcttacatgaagaagaaaaaggcgaaactccattaattttagatcaagaacacaaacctataaaaataaaaaaaacccaaataaaaacagcctcaccgtctgcaagaaaaatggctcaggataaaaatattaatttagatcagatcgaaggttctggaaggagaggcatggttcttaaagaagatttgattaatcttatgggcactaagcctgctctaaatttaaaaaagacaaaagatggtccagaggaaagaattaaaatgacaagattaagattaacaatagccaaaagattaaaagaagcccaaaataatgctgcaatgctcacaactttcaatgaagttgatatgaataatataatcgaaatacgaaaaaattaccaagaagagttcaagaaaaaatatttagtaaaattaggttttatgtcattttttgtaaaagcaagtattgctgcactaaagaactatcctgccataaatgccgaaatacaagatgaggaaatagtctataaaaattattataatataagctttgcggtcggaacggataaaggtctagtagttccagttttaagaaatccagatgagatgtcatttgcagacattgaaaaaaatatttctaatattggtgagaaagctagaaatgggaaattaactataaatgacttacaaggaggaacttttacaataacaaatggtggtatttatggttcaatgctttctactccaatactcaatccaccgcagtccggggtattaggtatgcataatataattgaacgtgcggttgtaataaatggcgaaattaaaattcgaccaatgatgtacttagctttatcatacgatcatagaattgttgatggtaaagaagcggtatcatttttaaaaaatattaaggactttttagaggaaccaaaaagactttttttaaacgtataag

SEQ ID NO: 235691 - DNA, 742 bp, Unknown
  Bacterial polypeptide expressing nucleotide sequence isolated from the Sargasso Sea
atgggagcttctcctcaacccaatgaaagaaaaattcaatatggtcatgaagaaagaataaaaatgacaagactaagacagactattgctaaaagattaaaacaagctcaagaaaatgcggctatgcttacaacttttaatgagattgatatgtcaggtataatttcaatgagaaaagaaaatcaagaagatttccaaagtagatatgggataaaattaggttttatgtcattttttgtaaaggcatgcgtggttggactaaaactatttccatcaatcaatgcagaagttgaaggtgaagatattgtatataaaaattattacaatattagttttgcagttggaacagaaaaaggtcttgttgttccagttttgagaaatgccgatgaaatgtcttttgcagaaatagaaaaagaaattaaaagactttctgataaagctaaaaattcaactttaacaattgaagatctacaggggggtacatttactataagtaatggaggtgtttatggttcgatgttatcaacaccaattttaaatcctcctcaatcaggagtcctcggcatgcataatattgtagaaagaccagtagtagataatggtgaagttaagatcaaaccgataatgtatttagctttatcttatgatcatagaattatagatggtaaagattcagtttcttttttgaaaacagtaaaagagaatttagaagatccaagaaggttatttttaaatatttaaa

SEQ ID NO: 235692 - DNA, 1198 bp, Unknown
  Bacterial polypeptide expressing nucleotide sequence isolated from the Sargasso Sea
aatgagtatagaaattaaatcaccaacttttccagaatcagttgctgatggcacaattgcaaattggttaaaaaaagaaggtgaaagtgttgcacaagatgaagttattgccgaaatagaaaccgataaagttgttttagaagttttagctcaatcagacggtgttatatctaaaattctcaaatctgagggtgaaactgtaattagttcagaggtcattggtgaatatgaggaaggggatgttcctgttgatgaaaaacaagaagagccacaagaaaaagatacagtgaaatcagaatctattgtaagtcctaaagaagagaaaaagaaaagcggccctgcagttaagaaaatactagcagaaaaaaatcttgatccttcagaagtgaaaccgtcaggtaaaggtaatagattaacaaaggctgatgtcataaatcatattgctgcaaaagataatgaatcagtagttgaaaaagtttctgatcatcaactaggtgataggccacaaaaaagagttccaatgtctagattaagatctaccattgcagacagacttgtatctgttaaacaaaataccgcaatgcttactacttttaatgaagtagatatgctaccaattaaagaactaagatcaaaatatggagcagaatttgaaaaagagcatgaagtgaagcttggttttatgggcttttttgttatagctgcagttcaggctcttaagaaatttccagtcgttaacgcttcaattgatggaagtgatatcgtctatcatggttttcaggatatcggtgtagctgtttctacagaaagagggcttgtggttccagtcattaaagatgcagatacaaaatcgttacctgagattgaaaaatcaattttggagtattctgaaaaggcaagaaatggaaagctatcaattgatgaaatgcaaggtggtacatttactatatcaaatggaggagtatttggatctctactttcgactccaatattaaatgctcctcaaactgcaatattaggaatgcattcaatacaagatagacctgttgctattaatggtgaagtttgtgtgcgaccgatgatgtatctagcaatgagttatgatcacagactgctcgatggtagggaagcggtaacatttcttgtgtccataaaagaacaactagaatcaccagaaagacttttattaaatttataa

SEQ ID NO: 235693 - DNA, 1183 bp, Unknown
  Bacterial polypeptide expressing nucleotide sequence isolated from the Sargasso Sea
atgtccgtagatataaaagtaccatctcttggtgagagtgttgtagaagcaactgttgctaagtggtataaaaatgagggagacagcgttacattagatgaaccactgcttgagttagaaacggacaaagtgactcttgaagttccttcccctgcttctggattgattgaaaagatttcatcgcctgaaggatcaacagtcgaagtaggcgcattattgggagccatcaatgatactgcagaagtaaaaaaagcacctgaaaattctgaaaaaatagtcaccactaaagaagaaaagcctaaagaagaaccggtggtggaaaagccagttataaaagaatcaagtgtacctttagacaatactccaaaagaaattcttgagagtaaagtctcaaaactatcacctgcagttaggaaaattgcagcagaaaaaaatcttgatattgctcaagtagctactactcgttcagatggaaggattacaaagggtgatattttagcctcaagtaataatgttcaagaactttcaacgaagccatcaataagtaaggagcacggcagtaaagaagaaagagtgccaatgtctcgactaagacaaactatagctaaacgactcaaagatgcacaaaataatgcagccatgctcacaacatttaatgaagttgatatgggtgaattgattagaactcgtaatgagcataaagatgcttttgagacaaaatatggaataaaattaggatttatgtctttctttgtaaaagcttgtatcacagctctcaaagacattcctgaggttaatgcagaagttgaaaataatgatgtcatatataaaaatttttataatattggtgttgcagtaggaactgaccaaggattggttgtgcctgttatcagagatgctgatcaaaaatcaatagtagaaatagagcaagagatttttaatttaggacaaaaagctcgaactggaaaattaagtatcgatgacatgcaaggaggtacatttacagtttcgaatggcggcgtttatgggtctcttatgtctacacctattttaaacccccctcaatcagggatacttggcatgcacaagattgaggaaaggccaattgcggtaaatggtgatattgtaattaggccaatgatgtaccttgccctatcttacgatcatcgtattgtggacggca

SEQ ID NO: 235694 - DNA, 1103 bp, Unknown
  Bacterial polypeptide expressing nucleotide sequence isolated from the Sargasso Sea
cggttcggttttaggagttatttcagattcaaatataaaaattaatgaagctgaaaaaataattcctgaaaagattgaaaccctagaagaagaaaaactatctaataaagatgaaatagttgacgatcacgcagacaatcattcaacagttcaatcagaacccatgatattaaatgaagaagaacctttaatattaaatgaagaagtagatattgaaaaaaaaaaattaaaacctttagagaaaaatataaatttatctcctgctgtaagaaagattgttagtgaaaaaaaaatagatatcgatcaagttaaaggtaccggtaaagatgggagaattttaaagggtgatttgattactttaatgggagaaaatccgaaaccaaatcaaagaaaaattcaatttggtgaagaagagagaattaagatgacaaggcttcgtcaaactatagcaaaaagacttaaagaggctcaagaaaatgcagccatgttaaccacttttaatgaagttgatatgtcaggaattatttctatgagaaaagaaaatcaagaagattttcagagtagatataatattaaattaggctttatgtctttttttgtaaaagcttgcgtagtaggattaaaattatttccagcaataaatgctgagattgaagggcaagaaataatttataaaaattattataatattagttttgcagtaggaactgaaaaaggtctagtagtcccagtattaaaaaatgcagatgaaatgtcatttgcagatatagaaaatgaaataaaaaaactatctgacaaagcaaaaaatggaaatttaacaattgaagatttgcaaggtggtacatttactataagtaatggcggagtatatggttctatgctttcaactccgatactcaatccgccacaatctggtgtgctgggtatgcataatatagttgaaagaactgtagtagaaaatggagaaattaaaattaaaccagttatgtatttggctttatcatatgaccatagaattattgatggaaaagactcggtatcttttctaaaaacaatcaaagaaaatttggaagatcctagaagactatttttaaatatttaga

SEQ ID NO: 235695 - DNA, 1255 bp, Unknown
  Bacterial polypeptide expressing nucleotide sequence isolated from the Sargasso Sea
gctacagtttctaaatggcttaaaaataagggagaaactgttaaagtagatgaggcagttgttgagttagaaacagataaagtaaatttagaagtcccatctccaagtagtggtgtactttcagaaataaattctaaagatggagatacagtcgaagttggtgcaatactaggtttaatttcacaggggaatttaaatgtagaaaaaaatgaacaagccataaaaccagaagaaaaaaaaattgaaaaaattaaattacctaaagaaaaaagtaatattataaatttagagattgaaaaaaaatcagagaatacaaaagaagaacctttggtattaatggatgaagaacctctagttttaactgaagaagttaagtcaccagagacctcaaatgaaccaatagttttatcacctgcagtaagaaaaatggttgttgaaaaaaaaataaatataaatgaagtaaaaggaactggtaaagatggaagaattctaaaaggagatttaattagtcaaatgggtgttaatccacaaactaaccaaagaaaaattcaatacggtgaagaagaaagaattaaaatgactaggcttagacaaactattgctaaaagacttaaagaggcacaggaaaatgctgcgatgcttacaacttttaatgaagttgatatgtcaggaataattgcaatgagaaaagaaaatcaagaagattttaaagatagatatggcataaaattaggcttcatgtctttttttgtaaaagcgtgtgtagtaggattaaaactatttccagcaatcaatgctgaagttgaaggtcaagatattgtttataaaaattactataatattagtttcgcagttggaactgaaaaaggccttgtagttccagttttaaagaacgcagatgaaatgtcttttgcagatattgaaaaagaaattaaaagactttcagataaagcaaaaaatataactttatccattgaagaccttcaaggaggaacatttacaattagtaatggtggtgtttacggttcgatgttatcaacaccaattttaaatccaccacaatcaggtgtattgggaatgcataatattgttgaaagacctgtatcagataatggtgaaataaaaattaaaccgataatgtatttggctttatcttatgatcatagaattatagatggaaaagattcagtttcatttttaaaaactgtaaaagaaaatttagaagatcctagaaggttatttttaaatatataaa

SEQ ID NO: 235696 - DNA, 1184 bp, Unknown
  Bacterial polypeptide expressing nucleotide sequence isolated from the Sargasso Sea
agcagacggaacgattgcgaactgggttaaaaagaaaggcgatagtgttaagcaggatgaagtaattgctgaaattgaaactgataaagttgtactagaggttgttgctccattcgatggtgttgtttcaaaagttcttaaacctgctggagaaactgttcttagtgctgaattaatagcagaattcagaaaagaagatataaatcaggcatttgatacttcaaagaatgaaattattgctgagcctgaaaaagaaaaatctgttgaaatcagcaatgagattaaagattcatctattaaaaatggacccgcagtcaaaaagctcttaaaagaacatgagctaaatgaaagcgatattagtggatctggaaaaaatggaagaattactaaatcagatatcgtaaatcatttggatgaacctgttagtcaagatcaagagaaatctatgagtccatccgttaaggttgcatcatcttctgatgagaggcttgaagaaagagtgcctatgtcaaggcttcgctcaacaatagccaatagattgctaactgttaagcaggaaacagcaatgcttactacttttaatgaggttgacctaaagccaatcaaagacctgcgaacaaaatatggaaatgaatttgaagaagagcacggggtgaaattaggttttatgggtttctttgttttggcagcagtacaagcgttaaagaaatttcctgttgtaaatgcttctattgatggtaacgatattgtttatcatggatatcaggacataggagttgctgtttctactgacagaggtctggttgttccagttataagagatgcaggaaatttaaggatagctgatgttgaaaaatctattttagattattcagaaaaagcaaggcatggaaaattatcaatctcagaaatgcagggcggtacatttacaatttctaacggcggtgtatttgggtctttgttgtctactcctatactaaacgctccgcaaactgcaattttaggaatgcatacaatccaagatcgtccagtagcaatcgacggagaaatagtaattcgtccaatgatgtatctagctttaagttatgatcatcgcttactagatgggaaagaagctgtctcttttctaatagctattaaagatcaattagaatctcctgaaaaacttttattaaacttataag

SEQ ID NO: 235697 - DNA, 943 bp, Unknown
  Bacterial polypeptide expressing nucleotide sequence isolated from the Sargasso Sea
gtcgagaaattttttaagactagcgaaggatgccgatgttttaatcgaaaattatagaccaaatgttaagcataggctgggtattgattttgagactttacagaaactaaacaaaaaaattgtgtatggaagtatatctggctttggacaaaaaggaccttattcgaaaagggcaggtttggatcaaatagcacaagggttgggaggattaatgtccgtcacgggcatgcctggtgatggaccagtccgggtgggcattcctatagcggaccttactgccgggataaatttagcttatggaatattggttgctttactcgaaagagaagtatctggggaaggccagtgggtaaagacgtcactgctggaatcacagatcatgatgatggatcttcaagcggctcgatatactatttcaggggaaatacctcagcaggagggcaataatcaccctaccaatacgccaacgggagtttttccaacagcggatggtgtgataaatattcaagcatcggccgaacatctatttaaaagaatgtgtgatacgttgggagcaaaggaaatatatgaaaacggagactacagcagtaacgaaaaaaggactaacttgagagaccaaataaatgcagagatagctgaatatacaaagaaaaggactacagcgtactgggtgaaggcgtttgctgaatctggagtgccctgtggaccaattctcaatatgggggaggtatttaacgatcctcaagtaaaaactttaaacatgaatcctgctgttaatcacccaaggttaggtaccttaaatgttgttggacaagctgtgaaactagatcgaacaccacaaaaaatgcgcagtgctacgcccgacttaggtgagcatacaatggagattttaaatgaacttgggattgaaaaaagagagttcaatgagttgaggaaaaagggt

SEQ ID NO: 235698 - DNA, 1111 bp, Unknown
  Bacterial polypeptide expressing nucleotide sequence isolated from the Sargasso Sea
gtcagtgctttttccaatgctaaaacttttgctgattatcgagttcttttaagtgaaatgcaagatgaaattgatgcagttgtgatatcgactcctgatcatacacatgcacctgcatccattatggcaatgaacttaaataaagcggtatattgtcaaaaaccgctaacccatcatatttctgaagctcgtgaaatgaattctattgctaaagaaaaaaatttagtaacccagatgggaatccaagttcactctttctatgattataaattagctacattacttattaaatccggaataattggaaaggttagtactgtccatgcatggtctccaaaaaactggggatacgatgggctaaaaccctcaggatctgatccaatacctaaaagcctagattggaatttatggcttggtactgcgaaaaaacacggatataagaaagatttatatcatccatttaattggagaaaacttgttgattttggatgtggtacccttggagatatgggagtccatatttttgatactccttataacgctttgcaactagatgttccaaaaactgtgactaatgaatgcagagaacctaatgaattcggatatccagaaaaaaataaagtaacttatatttttccaggaacagagcagaccactgatgaacttaaatggatatggtacgatggaattggtgcacctgaaaaacatttagatcttgagttaccaaacaatgaggagctacatgatcaaggagcaatatttattggcgagaaaggaagattatatttacctcatttcatgattgaacctaagttaattgtagatggccaatatcaaaaaatggatatagaaaaattcaatttaggtaagcctgttagggattatgataaagaagagaagtttcattaccatgaatttgttgacgcatgtctgggaaatgatacttgttcggctccattttcttatgcttcaagattgaccgaaacaatcttgctaggagtaattgctggaagatttcccggagaaacattaaattgggataaagatttagctaggtttaaagaggagaaggctaataaatttatttctggaacttatcgtgacttttagt

SEQ ID NO: 235699 - DNA, 1426 bp, Unknown
  Bacterial polypeptide expressing nucleotide sequence isolated from the Sargasso Sea
catgactaaatacttaaccaaattcgctctactatgcacccttgcattggccatgctgagcacaccaagctgggccgaagaaacccataacccggaccaaacttggcattatgtgaacgcccaaggtgaactgaagatcaagctctacttcttttggtcgaaaacctgcccacactgcgccgaggcccatccctttatcgactcgctgccgcagaaatatccctggatagaactcgaatcccatatggtttcggctcctggcgtgcaggacatttggcaaggtatcgcggctaaaaccactaccgaagcccgttctgtgccttatatggcaagctgcgagaaggccattgtcggttattccagcgaggcggtgacaggtgagtttttagtgaatcgcttgaagaactgttacttatcccttggcggtcagctaagtgaagcggatatgccaaccacaggaacaacggctgcagcgccgaccaatagtgagccgctgtttggcacctgtggaaccgactcaggcgaaggcacctgtgatgccaccagccttgcgagtaacgatcaagccgaagtgcaacccgttgagttaccacttgtgggtgtagtcacacccgagagcatgtcacttcccctgctgaccttagtgctggcgggcgtcgatgcctttaacccctgcgccttcttcgtgctgctgtttttactgtcgattatggtcaacgctaagagccgcagccgtatgctgttggtcggcggtatcttcgtgttcttctcgggctttatttacttcctgtttatgacggcttggctaaacatcttccagctgttaggcgcaggcagtgatggcgggatgatcattctagccgcggggatcctagccttgatcgcaggcacgataaacgtgaaggattacttcttcacaaaaggtgatgtcaccctgtcgatgtcggctgaaaaccgcactagcctaatcaaacgcatgggcaaactgtcgaactccagcagcctaggcgcgctgattgtcggctcaaccgtgctggccattttagctaatgcctacgagctgctctgtactgcgggcttcccgatgatttataccagcgtgctatccatgcataatctgccggacattgagcgctatatgtatttggttttatacaatattgtctatgtaatcccactcgcgattattgtgattgtgtttagcgctaccttaggtaaacgcaagctgaccgaaaaagaaggtcaagcactcaagctgatgtccggtgtgatgatgtttggtatgggtgtcgcgctagtgttagatcccacggcgctgcagagtgttgggctggcactgggattaattctaggctcattgggcttgaccgccatcatagtactcagtcgcaagttgctcacggccaaagcgaataaaacggcgtaa

SEQ ID NO: 235700 - DNA, 1426 bp, Unknown
  Bacterial polypeptide expressing nucleotide sequence isolated from the Sargasso Sea
atgactaaatacttaacccaattcgctctgctatgctctctcgcattagcaatgctcagtgcacctagttgggccgacaccccaaatacttccgatcaaacgtggcattacgtcaacgcccaaggtgagcttaagattaaactctactttttttggtcgaaaacctgtccacactgcgcacaagctcacccttttattgattcactaccgcaaaaatatccgtggatagaacttgaatcccatatggtttctgcacctggcgtacaggatatttggcaaaatattgccgccaaaactgccacagaagcccgctcagttccttatatggcgagctgcgaaaaagccattatcggttattccagcgaggcggttactggcgagttcctcgttaatcgtttgaagaattgttacttatccttaggtggtcagctaagcgaagcggatatgccaacaaagggagctgcgtctgctgcaccgaccaatagtgaacctctgtttggcacttgcggaaccgactcaggtgaaggcacctgtgatgcaactagcctggcaagtaccgaccaagctgaagtacaacccgttgaattaccacttgtcggagtggtcactcccgagacgatgtcactcccgctgctaacgttagtacttgctggcgtcgatgcctttaacccttgcgccttcttcgtattgctgtttttactgtcgattatggttaatgcgaagagccgtagccgtatgctgttagtcggcggtatcttcgtgttcttctctggctttatttatttcctgtttatgacggcatggctgaatatcttcaaactgctaggagcaggtagtgatggtggaatgatcatcttagcggccggggtcttagccttgatcgcaggcaccattaacgtaaaagactacttctttactaaaggagaagtcaccctctcaatgtcagctgaaaaccgtacgagcctgatcaaacgcatggggaaactctctaattccagtagtttaggcgccttaattctggggtcgactgtactagcgattttagccaatgcctatgagctgctctgcaccgcaggcttcccaatgatttataccagcgtactatccatgcataacctgcctgagattgagcgctatatgtatctggttttatacaatattgtctatgtgatcccactggcaattattgtgattgtgtttagtgcgaccttaggcaaacgtaaactgaccgaaaaagaaggccaggcactcaagcttatgtcgggtgtgatgatgtttggtatgggggttgcgctagtgattgatcccactgcgctacagagtgttgggctggcactggggttaatcctaggctctttagggctcaccttcatcatagtactaagtcgcaagttactgacggcaaaagccaacaaggcagtataag

SEQ ID NO: 235701 - DNA, 323 bp, Unknown
  Bacterial polypeptide expressing nucleotide sequence isolated from the Sargasso Sea
gacccgtctggcccaggaaaaacgtcctgacctgatgatcgacggcccgctgcagtacgatgctgcggtgatggctgacgtggcgaagtccaaagcaccgaactcgccggttgccggccgtgcgaccgtgttcatcttcccggatctgaacaccggtaacaccacttacaaagccgtacagcgttctgccgacctgatctccatcgggccaatgctgcagggtatgcgtaagccggtcaacgacctgtctcgtggcgcgctggtagacgatatcgtctacaccatcgctctgaccgcgattcagtcttcccagcagcagtaat

SEQ ID NO: 235702 - DNA, 664 bp, Unknown
  Bacterial polypeptide expressing nucleotide sequence isolated from the Sargasso Sea
ttgaattttagcatgatgatggtcagtaatggagatgcagacggtctggtagcaggtgcagttactccaactggggatgttcttaaggcggcaatcaggatagtaggaattaaggccgaatcaaaatgggtttcgagcagttttttcatgatttcaccatccatagataaggcctatacatttgcagattgtgctgttatcccggagcctacaagtgatcaactagcatcaattgcaatagaatctgcagtgtcacatcgacttttgagtggcgaggaaccccgtgtggcatttctttctttttcaaccaaaggtagtgctagtcatcgcagggttactcacgtcagaaaggcagttaaggcattttcagaatctcatcctgacatattgcatgacggagaactgcaggttgattcggcgattgttccttccgtagcttctcacaaagtaaatgattctcctttacaggggaatgctaccgtactcatattcccaacactggatgcaggaaatattgcctacaagataactgagcgtctggcaggttataccgcgtggggaccgcttctgcagggattgaaaaaaccggtccatgatctttccagaggttgttcatcttcagatatatttaatgttgccacaattgcggcgatgcagaagtgaa

SEQ ID NO: 235703 - DNA, 536 bp, Unknown
  Bacterial polypeptide expressing nucleotide sequence isolated from the Sargasso Sea
catgatgactgtaaacgggcagctgttgttcatcggagatgctaccataaacatctatccagatgccagaactttggcagagatagcaatccagacggccaaggtagcaaagagatttggagtcaagccaaaagtcgcgatgctatctttctccaacttcggaacttcttccgaaatgagaacagacaggatagaagaggctatccagatggttcgggagatggatcctgatttggtaattgacggccctatgcaagcggacactgctcttgttttagaaatacaggaggattacccgtttatgtctttcaatggacccgcaaatgttctaatttgtcctaatttagcttctgctaacattgcctacaaactactgcaaagggtagctggggcggagatgactgggccgatactagaaggtctctccagacctgcccacgttcttcagcgtagggacagtgtaagagatgtggttcacatggctgctatttgcgcagtggacgcccaaagagcatcaagagagaggttaatcgatt

SEQ ID NO: 235704 - DNA, 376 bp, Unknown
  Bacterial polypeptide expressing nucleotide sequence isolated from the Sargasso Sea
cagctacagtacaggctcgtcaggtgcaggcagcgacgtagaaaaagtgcgtgaggcgactaaaattgcgcaagagctgcgccctgatttacttatcgacggcccgcttcaatacgatgctgcggccattgaaagtgtaggtaggagcaaggcaccaaacagcccggttgcgggtaaagcaaacgtattcgttttcccagatttaaatacgggtaacacgacttataaagcggtgcagcgtagcttcgacttagtgtgcattggcccaatgcttcagggaatgagaaaaccagtaaacgatttgagtcgtggtgcgctggttgatgatattgtctttaccatagcactaacagcaatacaggccgcgggtaattaa

SEQ ID NO: 235705 - DNA, 945 bp, Unknown
  Bacterial polypeptide expressing nucleotide sequence isolated from the Sargasso Sea
aagcaacagcgcatcgtgttaccagagggtgacgaaccacgcacattgcgcgcagcttgccaatgccaacaacaaggcattgcccacatcactttactgggcgaccccaaaaaaattcaagcacaagccaacagccttggcttgaccttacccgatgatattcgcgtcctcgacccacaaaaggtttaccgagactacatcgacgatttggtacaattgcgccaacacaaaggcatgaacaaacccatcgctgaagagcaactacaggatcgcatcgttttgggtaccatgatgttacaacgcaaagaggttgatggcttagtctctggtgcagtgcaccccaccgccagtgtcttaaggcctgcattgcagttgattaaaacggcgcctcatgcggtcaaggtatcctcggttttctttatgtgcttcccccaccaagtgatgattttcggtgattgcgcggtcaaccccaatccagacattgagactttagcagatattgcgatacaaagcgcgcatacagccaagatatttggtattgagcccaaagtagccatgatcagttatagcacaggcagctctgcaggcggcgaagaagtcacccgcgtacaagctgcgactgaactggttcgccaaaaatcgcctgacatcatcattgatggcccattacaatacgatgctgccattattccgcatgtggcacaacaaaaagcacccaacagcccagtggctggccaagcaactgtcttgatatttcctgatttaaatactggcaacaccacctacaaagcagtacaacgcagcgcgcacttgctgtgcattggcccgatgctgcaaggccttaaccaacccgtcaatgatctatcgcgcggcgccagtgtcgaggacattatatacaccattgccttgactgcgcgacaagcacaatcggaaaaaatcttaaat

SEQ ID NO: 235706 - DNA, 394 bp, Unknown
  Bacterial polypeptide expressing nucleotide sequence isolated from the Sargasso Sea
acgtattgccatgatcagctattccacaggcacgtctgggacaggtgcggatgttgaaaaagttgccgaagcaaccaaaattgcgcaacaacgtcgaccagatttattgatcgatggtcctttgcaatatgatgcggcttcagttgagagcgtaggtcgtcaaaaagcaccagattcaaaagttgctggtcgtgccaacgtctttatcttccctgatctcaatacaggcaatacgacctataaggcggtgcaacgtgctgccaatgtcgtgagtgtcggtcctatgctgcaaggcctaaacaagcctgtgaatgatttgtctcgcggtgcgttggttgatgatattgtatttaccattgcattaactgcgattcaggcaaaacaacaagactaa

SEQ ID NO: 235707 - DNA, 583 bp, Unknown
  Bacterial polypeptide expressing nucleotide sequence isolated from the Sargasso Sea
gtaatcggacctgatccgaattctcacagaatagttgggatgtacatgatgactgtgaatggtcagttgatgttcatcggagatgcaacgatcaatatttatcccgatgctagaacgttagcagagatagctgttcagacggctaaagttgcaaagaggttcggagtgaagccgaaggttgcaatgctttccttctccaatttcgggacatctgcggaaatgaggacagatcggatcgaagaggcaattgagatagtaagggagatcgagcctgatttggtaattgacgggcccatgcaagcagatactgccctgattcctgatatacaacaagactacccattcatgtcattcaacggtccggccaatgttctaatttgccccaatcttgcttccgcaaacattgcctacaagttactccagagagtagcaggggccgagatgaccggtcccattttggagggtctctccagacctgctcacgtccttcagcgtagagacagtacgagagacgtagtgcatatggcagctatttgtgcggtggatgctcagagagcggctagtcagagactaatcgattaga

SEQ ID NO: 235708 - DNA, 148 bp, Unknown
  Bacterial polypeptide expressing nucleotide sequence isolated from the Sargasso Sea
ggtacagcgctccgcggatctggtctccatcggcccgatgctgcaaggcatgcgcaagccggtcaacgacctgtcccgtggcgccctggtggacgacatcgtctacaccatcgccctgaccggtatccaggcagcccaggccgagtaa

SEQ ID NO: 235709 - DNA, 747 bp, Unknown
  Bacterial polypeptide expressing nucleotide sequence isolated from the Sargasso Sea
aatgtcactcaaagaagaaatctttcgaaaagctgcaaaaaatccgaagaggatccttttcccagaaggagaggatgaacgtattctgcaggctgcatcggaactggcgaagaaaggaatcggagaaccggtggttttagtggatgttaaaaaagttcggaatgatcttccgaaaacgaaagtcgagcacattgaatggctggatccagcttcgtatcctcatttgcaagatttggcggaaatatatgcttcccggcgaagcaatgtgaatgaaaagatggcgttacgactgctgaaacgccctctttatctcgcaggcatgttattggatcaggggaaagtggatgcggtggttgccggagccaccaaaaccaccgggcaggtgattactgcggcttccctgacagttgacatgcaagacggagtatcccagccctcgagctttttcctgatgatttttccaggaactcgcgaacggatcctggtttttgcggactgcgcactaatggtggatcctgatccgaaagaactggcgaatatcgccaaactcactgctcaaaacgcaagaactctgctgaatctggaaccccgtgtggccatgctttccttctcaacccatggaagcgccaaacacggacgggttgacaaagtgaaacaggctcttgagcgattgaaagagatggaacccgagttgatcgttgatggtgagttgcaactggatgctgctctttcctctgaagttgccct

SEQ ID NO: 235710 - DNA, 744 bp, Unknown
  Bacterial polypeptide expressing nucleotide sequence isolated from the Sargasso Sea
atcagcaaagaggcaggaggggactgacgagggaggatgcgattagacagttgaagtcaacaacattcttcgctccgatgatggtcagaatgggcgatgcagatggctatcttggtggtatttcccaccagtacccggacatagtgaagccttgcttgcaggtaatcggacctgatccgaattctcacagaatagtggggatgtacatgatgactgtgaatggtcagttgatgttcatcggggatgcaactatcaatatttatccagatgctagaactttagcagagatagctgttcagacagctaaagttgcgaagaggttcggagtgaagcctaaggttgcaatgctttccttctcgaatttcgggacatctgcagaaatgagaacagataggatcgaagaggcaattgagatagtaagggaaatcgagcctgatttggtaattgacgggcccatgcaggcagatactgctctggttcctgatatacaacaagactacccattcatgtcattcaacggcccggccaatgttctaatttgtcccaatcttgcttccgcaaacattgcctacaagttacttcagagagtagcaggggcagagatgaccggccccatattggagggtctctccaggcctgctcacgtccttcagcgtagagacagtacgagagacgtggtgcatatggcagcgatttgtgcagtagatgcccagagagcggccagtcagagactaatcgattaga

SEQ ID NO: 235711 - DNA, 1149 bp, Unknown
  Bacterial polypeptide expressing nucleotide sequence isolated from the Sargasso Sea
cctgtccgccatgaacggcgtcaagctgggtgccctgctgctgaccggcaactaccacccggaaccgcaggtgatggcattgtgccaacaggccatggccaccggcctgccgatcatgatcaccggcaccaacacctggcagactgcggtcagcctgcaaaacttcaacgtcgacattccggaagacgaccgcgagcggatcgagctggtacaggactatgtggccggccacatcgacaagcactggatcgaatctctctccgccaagtccacccgttcccgtcgcctgagcccgccggctttccgctaccagctgaccgaactggcccgtcaggccaacaagcgtgtcgtcctgccggaaggggaagagccgcggaccatcaaggctgccgccatctgtgccgaacgcggcatcgcccgtccggtgctgctgggcaacccggaagagatccgtcgcgttgccgaacagcagggcgtggtcctgaccgaccgcgtcgagatcatcgatccggttgccgtgcgcgagcgctatgtggcccgcctggtcgagctgcgcaagaacaagggcatgaccgaagtggttgcccgcgagcagctggaagacaacgtggtactgggtaccatgatgctggagcgcaatgaagttgacggcctggtatccggcgcggtgcacaccactgccaacaccatccgtccgccgatgcagatcatcaagaccgctcctggctcttccctgatctcctccatcttcttcatgctgctgccggaccaggtactggtctacggtgactgcgcgatcaacccggatcccactgccgagcagctggccgagatcgccatccagtccgccgactccgctgccgccttcggcatcgagccacgcgtcgccatgatctcctactccaccggcacctccggcgccggcgccgatgtagagaaagtgcgtgaagccaccgagctggccaaggccaagcgccccgacctcatcatcgatggcccgctgcagtacgatgcggccatcatggagaacgtggccaagtccaaggcaccgaactctccggtcgcaggtaaagccaccgtgttcgtgttcccggacctgaacaccggcaacaccacctacaaggcggtacagcgctccgcggatctggt

SEQ ID NO: 235712 - DNA, 817 bp, Unknown
  Bacterial polypeptide expressing nucleotide sequence isolated from the Sargasso Sea
tttggcaaaaagacagctcattgatttaggctacgagctgctagaaccgcaggattttcaaagcaagaaagatcaatataggaaaaatcttgaacaggaacacttcttcagaaaattgtctgatgagtcgaaaaaaaaattcatggaaaataccttgaacttcagcatgatgttggtcagtaatggagatgcagatggtattgtagcaggcgcagtgactccaactaaagatgttctgaaggctgcaataaggatagttggaattaaggctgaatcaaaatgggtttcaagcagttttttcatgatttcaccctccgctgataaggcctatacatttgctgattgtgctgttattcctgaacctacaagtgatcagctggcatcaatcgcaggagaatcagcagtttcccatcgccttttgagcggtgaggaacctcgtgtggcatttctttctttttccaccaaagggagtgcaagccatcgcagggtaacgcacgtcaggcaggcagttgaaacattttcagaaactcatcctgatatattgcatgacggagaacttcaggttgattcagcaattgttcctgctgtagcttcacataaagtaaatgattcccctttgcagggaaatgcttctgtgcttatttttccaaccctggatgcaggtaatattgcctacaagattactgagcgtctagcaggctttaccgcatggggaccgctgctgcagggattaaacaaacccgttcatgatctttccaggggctgttcatcttcagatatttttaatgtcgccacaattgcggcgatgcagaagtga

SEQ ID NO: 235713 - DNA, 418 bp, Unknown
  Bacterial polypeptide expressing nucleotide sequence isolated from the Sargasso Sea
atgctgtcgttttcaagtaatggcagtgctcgccatcctaacgtcgctaacgtgcagcaggcgaccgagatcgttcgtgagcgtgccccgcagcttaccgtggacggtgaactgcaatttgatgccgcctttgttccggatgtcgctgcgcaaaaagcgccagcaagtccgttaaagggcaatgccaatgtgatggtcttcccatcgctggaggcgggcaatattggctacaaaatcgctcagcgtctgggagggtatcgcgcagtagggccattgattcaggggcttgccgcaccgcttcatgatctctctcgtggctgtagcgtacaggaaattatcgaactggcgttggtggcagcagtgccgcgccagactgacatgagtcgtgaaaacgcctcgcacacactggttgtataag

SEQ ID NO: 235714 - DNA, 359 bp, Unknown
  Bacterial polypeptide expressing nucleotide sequence isolated from the Sargasso Sea
catttatcgtgtagataaagtaagaaatgctgtagagatatttgcgcataaatatccgaatatcaagcatgatggtgaaattcaatttgatgcagcaataatacctgaggtaggcagggttaagactccaaattctccattatcaggtaatgcaaatgtatttatattccctaatttagatgctggaaatattggatataaaatagctcagagattggggagctattctgcttggggacctttgcttcagggattgaataagcccgtacatgacttatctagaggctgttcagttgatgatattgtaaacgtagctgcaatagcagctttgcaaaggaatatgtatgccaacatatagc

SEQ ID NO: 235715 - DNA, 682 bp, Unknown
  Bacterial polypeptide expressing nucleotide sequence isolated from the Sargasso Sea
ctggtttacgccgcaatgcttgttcgcatgggccatgccaccggcactgtcggcggggccgtcgccaccacatcggacgtggtgcgcaccgccattcaggtcatcggcaaggcaccggatgccgccatgatctcaagcttcttcctgatgtacccgtcagagaacgcaacgccccatgcgcgcgcgatgctatattccgacagcggcctcgtgataaacccaagcgccgatgaactggccgagatcgccgccgcctcggcgcggtcctgccgcgcgctgatgcgcgaagagccaaggatcgccttcctgtccttttccaccaagggcagcgcacggcacgagaaggtgaccaaggtcaccgatgcactggccaaattgcatgacgatcaccccgacctgcacgccgacggcgaattgcaattcgatgccgcctttgtcccgtccgtgggtgcaagcaaggcccccgggtcagagatcgccgggcaggccaacgtgatgattttccccaatctggacgcgggcaacatcggatacaagatgacccagcgtttgggcgggtacgcggccattggcccgattttacaggggcttgcacagcccgccaatgacctgtcgcgcggctgtagcgccggggatgtcaccgaaatgatcgccgtcacggtgttgcaggcgatggattagc

SEQ ID NO: 235716 - DNA, 2155 bp, Unknown
  Bacterial polypeptide expressing nucleotide sequence isolated from the Sargasso Sea
tatgtctcgaaatattatgttaatccccataggcacaggagttggcctgacctccttaagcctaggtatggtgcgtgcattggagcgccacggggtaaaagtccaattctttaaacccatttcccagctgcgtcctaatgataatggcccagagcgctctaccacgattttaagcaaatcgcccactgtcaatccgttagagcccttcgacatggcccatgccgaagcactgatccgcgccgatcaaaccgatgtgctaatggagcaaatcattgcccgcgccgcagaatgcgccagcaataccgaaaccctaattgttgaaggcctagtgccaacccgtaaccatcccttcgccgatgatgtgaactacgctatcgccaaggcaatggacgcggacgtgatcttcattgccacccccggcagcgacacgcctactggcctgatgaaccgcctcgaaattgcctacaactcatggggcggcaaaaacaacaaacgccttattggtgccgtgatcaacaagattggcgcgccagtggacgatgaaggtcgcgcgcgcccagacttatcggaagtgttcgatcatcaaggcgtgcaacgctctgatgcgtccatcatgttccaactgccgggtaagagcccactgcggatcttaggtagcgtgccttacaacctcgatttagtcgcaccacgcgcatcggatctcgcgaaacatttacgtgcccgcattctcaatgccggcgagatgaacacccgccgcctacgtaaagtcaccttctgcgcccgcagcttgcctaatatggtcaaccacattaagacagattcactgctggtgacctctggcgatcgctccgatgtgattgtgtcagcgtgccttgccgccatgaacggcgtgaagattggggccctgctactgacgggtagctacgagccagagcctgaaattctgaaactgtgtgaacaggccttcgagacaggtttaccggtattcctcatcgataccaatacttggcagacttcattaaatatccaacgcttcgaccacgaagtgccagtggatgatgcggtacgtatcgatttagtccaggaatatgtcgccagccatatcgatcagagctggattgaaagcgtgaccaaaaactccccaagggaacatcgcttatcacctcccgcgttccgttataagctcaccgaacttgcgcgcgccgcccacaaaaccgtggtgctgccagagggtgatgagccacgtaccatcaaggccgccgcgatttgtgccgaacgaggtatcgcgcgttgcgtgctgttaggtaaaaaagatgaaattcaacgtattgcagcacagcaagacgttgttctgggcgaaggcgttgtgattgtcgaccccgatgaagtacgcgatcgctatgttgaaccaatgctcgatctgcgtcgcaacaaaggtttgactgaagtcgttgccaaagagcagttagaagacaacatggtgctaggcactatgatgctggcgcaaaacgaagtcgatggtatcgtctctggcgcggtaaacaccacggccaatacgattcgtccgccgctgcagctgatcaaaaccgcaccgggttctagcttggtttcttctatcttctttatgttgatgccagaccaagtgctggtttacggtgactgtgcgattaaccccgatccaaacgctgaacaactggccgatatcgccattcaatcggcagaatctgccaaggccttcggtatcgaaccaagagtggcgatgatcagctactcaacgggtaactcaggtactggttcggatgtggataaagtgcgtgaagcgacccgtattgcgaaagaaaaacgtcctgatctggttatcgacggtccactgcaatacgacgcggccgttatgccaaacgtggctcgctctaaggcgcctaacagccctgttgcaggtcaagcgactgtattcgtgttccctgatctcaacacgggtaacaccacctataaagcagtacagcgtagtgctgatctcatcagtattggccccatgctgcaaggcatgcgtaagcctgtgaacgacttatcccgcggcgccttagtggacgatattgtctacactatcgcactgacggcgattcaagcgtcacaaaacgatgccagcaaagcctaa

SEQ ID NO: 235717 - DNA, 691 bp, Unknown
  Bacterial polypeptide expressing nucleotide sequence isolated from the Sargasso Sea
gcccaagagttgttagaagataatgtgactctgggcacgatgatgcttcagcaagatgacgtggatggattagtgtcaggtgcagtaaatacaactgcgaacactattcgcccagcgctccagttaataaagaccgctgaaaacgcgtctttggtgtcgtcagtattttttatgctgttgcctgaccaagttttggtttacggcgactgtgcaattaacccagatcccaacgctcaacagctcgctgatattgctattcaatctgcggaatctgcacaaatgtttggcattgaaccgcgggttgcgatgattagctacagcactggttcgtcaggagcaggaagcgatgtagaaaaggtgagagaagcgaccaaaattgcgcaaagccttcgccctgatttacttattgatggtccacttcaatacgatgcagcggctatcgaaagtgtgggcaagagcaaggcaccaaatagccctgttgctggtaaggcaaacgtgtttgtttttcctgacctcaataccggaaataccacttacaaagcggtacagcgtagcttcgatctagtgtgtattggcccaatgctgcaaggcatgcgaaagcccgttaacgatttaagtcgcggtgcattggttgacgatattgtatttaccatagcacttactgctattcaggcggcaggtaacgtttaac

SEQ ID NO: 235718 - DNA, 1000 bp, Unknown
  Bacterial polypeptide expressing nucleotide sequence isolated from the Sargasso Sea
ctcgcctccggcattccgttatcagctatcggagagagcccgggctgcagccaagcggatcgtcttgccagaaggcagtgaacccagaaccattcaggcagccattatctgccatcaacgtaacctggctcattgcgcgctgatcggtgatccacacgaaattcgctcagtcgccgcctcccagggcgtggaactgccaaatgacctggaaatcatagacccgcaatcggtgcgcgagcgttacgtggcgcccatggtggagctgagaaaacataaaggcctgacaccggatatggccgaagccatgctggaggataacgtcgttctgggtaccatgatggtggccatggacgaagccgacggacttgtatccggcgctattcataccacggccaacaccgtgcgccctgccctccagctgatcaagacccatgacaacgccaaggtggtgtcatcggtattcttcatgttgttaccgcaacaggtgctggtatatggcgactgcgccatcaacccagacccgaatgccgaagaactggccgatattgccatacagagtgccgaatctgctgaagcctttggtattgaacctgtggttgcaatgatcagctacagtaccggcgagtccggcagcggtgaggatgtcgacaaggttcgcgaagccacccgcattgcccgggaacggcgcccggatctactcattgacggaccgctgcaatacgatgctgcggcgattgagagcgtggcaaaatccaaagccccgggcagcaaggtggccggcaaggctaccgtgtttgtgttcccggacctgaacacgggcaacaccacctacaaggcggtgcagcgcagtgccaatgtcgtcagcgtggggcccatgctccagggcttgcgaaaaccggtaaacgacctgtcccgcggggccctggtggaagacattgtcttcaccattgccctgacggcagtacaggcaaaacaggtcgcggatgcaggagccgcctga

SEQ ID NO: 235719 - DNA, 2155 bp, Unknown
  Bacterial polypeptide expressing nucleotide sequence isolated from the Sargasso Sea
atgtctcgaaatattatgttaatccccataggtacaggagtcggcctgacctccttaagccttggtatggtgcgcgcattagagcgccacggggtaaaagtccaattctttaagcctatttcacagcttcgtccgaatgataacggtccagaacgctcaaccacgattttaagcaaatcgccaacggttaatccgttagagcccttcgatatggcccatgctgaagcgttgatccgcgccgatcaaaccgatgtgctgatggagcaaatcattgcccgcgccgcagaatgcgccagcaacaccgaaaccctgattgttgaaggtctggtacctacccgcaaccatccctttgccgatgacgttaactacgctatcgctaaagccatggatgctgacgtgattttcattgccactcctggcagtgatactccaacagggttaatgaatcgcctcgaaattgcctacaactcttggggtggcaaaaacaacaaacgtctgattggtgccgtgatcaacaagattggtgcaccggtggacgatgaaggtcgtgcacgccctgacttatcagaagtgtttgatcatcaaggtgtacaacgctctgatgcctctatcatgttccaactgccgggtaagagcccactgcgcattttaggtagcgtgccttacaacctagacttagtcgcaccacgcgcctctgatttagctaaacacttacgcgcacggattcttaatgccggtgagatgaatattcgccgtctacgtaaagtcaccttctgtgctcgcagcttacctaatatggtcaaccatattaagacagactctttactggtgacttctggcgatcgctccgatgtgatcgtatctgcgtgtcttgcagccatgaacggcgtgaagattggtgccctgctgctgacaggtagctacgagcctgagccagagatccttaaactctgtgaacaagcttttgagacaggtttaccggttttcctgattgataccaatacttggcaaacctcattaaatatccaacgcttcgaccatgaagtgccagtggatgatgccgttcgtatcgacttagtgcaggaatatgtcgctagccatatcgaccaaacgtggattgagagcgtcacgaaaaactctccgcgggaacatcgcctgtcaccaccagcgttccgttacaagcttaccgagcttgcccgtgccgcccacaaaaccgtggtgctacctgaaggtgatgaacctcgtacgatcaaagccgcggccatttgtgctgaacgtggtatcgcgcgttgcgtgctattaggtaaaaaagatgaaattctgcgtatagcggctcagcaagatgtcgtgctgggtgaaggcgttgttattgtcgaccccgatgaagtacgtgatcgctatgtagagccaatgttggatctacgccgtagtaaaggcttaaccgaagtcgttgccaaagagcagttagaagacaacatggtgctcggcactatgatgctggcacaagacgaagtcgatggcattgtctctggcgcggttaacaccaccgccaacaccatccgtccaccgctacaattgataaaaacagccccaggctcgagccttgtttcttccatcttctttatgttgatgccagatcaagtgctggtttacggtgactgcgcgattaaccccgatcctaatgctgaacaactggccgatatcgcgattcaatcggcagaatctgctaaagccttcggtatcgagcctagagtagcgatgatcagctactcaacgggtaactcaggtactggttcagatgtggataaagtacgtgaagccactcgtatcgccaaagaaaaacgtcctgatctggttattgacggtccacttcaatatgacgcggccgttatgccaaacgtggctcgctctaaggcacctaacagccctgtagcaggtcaagccactgtgtttgtattccccgacctcaacacgggtaacaccacctacaaggctgtacaacgtagtgctgacctcatcagcattggcccaatgctacaaggtatgcgtaaacctgtgaacgacttatcccgcggtgcgttagtggatgacattgtctacactatcgccctcacggcaattcaagcgtcacaaaacgatgctaaaaaatcgtaaa

SEQ ID NO: 235720 - DNA, 1000 bp, Unknown
  Bacterial polypeptide expressing nucleotide sequence isolated from the Sargasso Sea
atgaaacataagctacctttagaaatcttagaagagctagctacaaatcaaaaaccgacaatagtaatgagcgaaggcagtgacccccgaataattactggggcagctgcagctttcgatacaggaatgtgccaaattgttctgcttggtaatgaaataattatcaaaacagaatgtaaaaaattgggtatggaattaccttctggtataaagatcattgatccagaaaattcagacttgcttgttgaatttgaaaaagagtatttaaatctccataagaaaacaggaatttcagctggggaagcacaacgtaaaattaaagaacccttaaattttgcagctttaatggtcagactaggacatgctgccggcacggttggcggtgcggtagaaactacttccaatgttgttcgcgctgcaatacaaattattggaaagtctgatgatgtacagattatttctagctgttttttaatgtaccctaaaagtaattacccgatggtttattctgattgcggactagtcatagatcccacggaagatgaactcgcttcaatagccgttatggccgcgggctcatgcaaaaatctactgcaagcagaaccgcgattggctatgttatctttttcaacaaaaggcagcgcaagtcatccaaaagtttctaaagtggtagcagcaacaaaaatcgtaaaaacaaaaaatcctgagattcaaattgacggcgaattgcagttcgatacagccatttctactgaaattgcaaaatcaaaagctgacggctctccaacagcaggcaaggcaaatgtaatgatatttccaaaccttgatgctggaaatattgggtataaaattacacaaagactgggaggcgcagaagccattgggccaattctacagggtttggccaaaccagcaaatgatctatcaagaggatgtagcgccactgacgtaacccaaatgatagctgtaacactattacaggctaatcactcaaagtaat

SEQ ID NO: 235721 - DNA, 742 bp, Unknown
  Bacterial polypeptide expressing nucleotide sequence isolated from the Sargasso Sea
ggcggaaatatatgcttcccggcgaagcaatgtgaatgaaaagatggcgttaagactgatgaaacgccctctttatcttgcaggcatgttattggatcaggggaaagtggatgcagtggttgccggagccaccaaaaccaccgggcaggtgattactgcggcctccctgaccgttggtatggaagacggagtatctcagccctcgagctttttcctgatgctctttccgggaactcccgaacggatcctggtttttgcggactgtgcactgatggtggatcctgatccggaggcactggcgaatatcgctaaactcactgctcaaaacgcaagaactttgctgaatctggaaccccgtgtggccatgctttccttctcaacccatggaagcgctaaacacggacgggttgataaagtgaaacaggcccttgagcgtttgaaagagatggaacctgagttgattgttgatggcgagttgcaactggatgcggctctttcctctgaagttgcccttcggaagagtcccgactccccattgaagggagatgccaacatcctgatctttcctgacctggatgcagggaatatcggctacaaactcgctcaatacctgggaggggcccaggccattggccccatcacccagggttttcaaaaaccgttcaatgacctctcccgcggatcatccgttgatgacatcctccttctcgctgcagtcagtagtattcagccagatttttga

SEQ ID NO: 235722 - DNA, 562 bp, Unknown
  Bacterial polypeptide expressing nucleotide sequence isolated from the Sargasso Sea
gctgatgatgcacagattatttctagctgttttttaatgtaccctaaaagtaattatccgatggtttactctgattgcgggctaatcatagacccaacggaagatgaactcgcttcaatagccgtaatggcagcaaactcatgtaaaaatctactgcaagcggaaccgcgagtagcaatgttatccttttcaacaaaaggtagcgcaaatcattccaaagtttctaaagtgttagcagcaacaaaaatcgtgcaatcaaaaaaccctgagattcaaattgacggcgaattacagttcgacacggccatttctcctgaaattgcaaaatcaaaaaccgacggctccccaacagcaggtaaggcaaatgtaatgatatttcctaatcttgatgctggaaatattggatataaaataactcaatggcttgcaggcgcagaagccatagggccaattcttcagggtttggccaaaccagcaaatgatctatcaagaggatgcagtgccactgacgtaacccaaatgatagctgtaacaatattacaggctaatcactcacggtaat

SEQ ID NO: 235723 - DNA, 548 bp, Unknown
  Bacterial polypeptide expressing nucleotide sequence isolated from the Sargasso Sea
tatgacaaaaaaatctgaagatatcgtttttacaactgctttacgtacagcaattggaaaatataaaggtatgtggaaagaccttcaagctcatgatttaggaacggcagttataaaaaaaatattattaaagtcaaaagttgatcccaattttgttgatgaagttgttatgggtcaagttttaactggagatgttggtcaaaatccagcacgacaagcagcgataaagggaggcataccaaaagaaaaaactagctatgtagtgaaccaggtatgtggctctggattaagatctatagttgctggataccagtcaattttattaaatgatacgaaaataattattgcaggaggccaagaaagcatgactaactcaaaagaagaaatgatgcttaaagatggcctaatagatgcattcaataattatcatatgggtgttacagctgaaaatgttgcagaaaaatggaatatttcaagaaaagaacaagatgattttgcatgttcttctcaattaaaagcccaagaagcaataaaaaataaaaaattta

SEQ ID NO: 235724 - DNA, 288 bp, Unknown
  Bacterial polypeptide expressing nucleotide sequence isolated from the Sargasso Sea
aagcattggaaattgccggctggtcttctaaagacttggacttaatagaagccaatgaagcttttgccgctcaaagttgtgctgttgtaaaagaactctcacttccaatggaaaaggtaaatgtaaacggtggttcaattgcccttggccatccaattggtgcttcgggcacgagaatttttgtcacactaattcatgaaatgttaaaaagagattccaaaaagggtctggctacgctatgtattgggggaggcatgggtgttgccatgtgtattgaacgaaaatgaa

SEQ ID NO: 235725 - DNA, 568 bp, Unknown
  Bacterial polypeptide expressing nucleotide sequence isolated from the Sargasso Sea
aatgacaaataagtttaatgaagtttttatagtagctgccgttcgaacaccaataggcacttacaagggttctttaaaaaatataagtgctgataaattaggctcaatagttattaaagaagttattgatcgatcccgaattgataaagaagagattaatgaagtaattatgggacaagtattaacagcaggagctggacaaaatccagctaggcaggcagcaataaatgcgggtttaccaaagtctataccagcacacttagtaaatcaagtttgcggctctggattaagatctgttgtttcaggatatcaatcaataagtttaagagaaaataaaatagtcattgcgggtggtcaagaaaatatgtccagagcaactcatgcaatttattatagagaagatcaaaaattttctgaaaacaaattagtagacacaatgataaaagatggtctgctagattcatttaatgattatcatatgggtgtcacagctgagaatgttgctcataaatataaaatttcaagagatgaacaagataatttttctttaaattctcagaaaaaaaca

SEQ ID NO: 235726 - DNA, 347 bp, Unknown
  Bacterial polypeptide expressing nucleotide sequence isolated from the Sargasso Sea
tatgactaataaatcaaatgaggtagtaattataggcgcagtaagaactccaataggcacatataaaggttcattaaaagacatcaaagcagatcaacttggttctatagttataaaagaagttttaaaaaaatctaaaattcacaaaaatgaaattgatgaagttattatgggacaagttttaacagccgcaggaggacaaaatccagcaagacaagcagcaattaatgcaggcatacagtcttctataccagcttatatggtaaaccaagtgtgtggatctggccttagagcagttatttctggctatcaatcaattaaattgggcgaaacaaaaaaaataattt

SEQ ID NO: 235727 - DNA, 396 bp, Unknown
  Bacterial polypeptide expressing nucleotide sequence isolated from the Sargasso Sea
ccactgccaaaaagctgggcgccaagcccctggcccgtatcgtgagccacgccacccacgcgcaagaacccgagtggtttgctactgccccgctgggcgccacgcaaaaggcgctggccaaggccggctggcaggtgggcgacgtgcagctgtgggaaatcaacgaagcctttgccgtggtgcccatggcgctgatgaaggagctggatctgccccacgacaaggtcaacgtgaacggcggcgcctgcgcgctgggccaccccattggcgccagcggcgcgcgcatcatggtcacgctgatccacgccctcaaggcgcgcggcctgaccaagggcctggccacgctgtgcatcggcggtggcgaggccacggccgtggcgctggaactcgtctgag

SEQ ID NO: 235728 - DNA, 282 bp, Unknown
  Bacterial polypeptide expressing nucleotide sequence isolated from the Sargasso Sea
aatgtcaaaaaattctaaagatatagttttaacatctgccctgagaacatcagtgggcaaatttggaggcattcataagaaacttcaagcccatgaattaggctcaatcgttataaaaggtattttaaaaaaaaccaacgtagatccgttagagatagatgaagtcatacttggccaagttttaacaagtttaggaggacaaaatcctgcaagacaagccttaataaaatctggaatccctaaagagaaaactgcttttaatattaatcaagtttgtggatc

SEQ ID NO: 235729 - DNA, 814 bp, Unknown
  Bacterial polypeptide expressing nucleotide sequence isolated from the Sargasso Sea
tatggcaaaaaattctaaagatatagttattacagcagctttaaggacagctattggaaaatacaaaggtatgtggaacaattttaaggctcacgaattaggaaaagttgtaattaaaaaaattttaaaaattacaaaaattgatgcaaaattgattgatgaagttattatgggtcaagtattaacaggtggaacaggtcaaaatcctgcgagacaggcagcgataggagctggcatacctaaagaaactacaggatacatagttaatcaagtttgtgggtcgggcctaaggtcaattgttgccggttatcaatcaatcttattaaatgactcaaaaatagttattgctggtggtcaagaaagtatgagtaattcaaaaagtgaagttatgttaaaagatggattaattgatgcatacaataactatcatatgggaataacagcagaaaatgtcgctgaaaaatggaatatttctagaaaggatcaagatatatttgcagttaattctcaggaaaaagcacaagaagctataaagaataaaaagtttgataacgaaataattgataataaaacagaagatgaacatccaagaaaagaagttactttagaaaatttgagtaaactaaaatctgcatttaaagaaaatggaactgtgactgctggaaattcatcaggtataaatgatggtgctgctgcagttttaattatgagcagagaagaaagtgataaaaaaggtttaaaacctcttgctaaaattgtttcatgggctacatgtggtgtagatccagctctaatgggatctggggccatacca

SEQ ID NO: 235730 - DNA, 868 bp, Unknown
  Bacterial polypeptide expressing nucleotide sequence isolated from the Sargasso Sea
gtcggaagttttagtgggtcgtttggcaatacacctgctcacgatctgggcacaactgtgctagaagctttagtctccagagcgcaggtagacaaatcagaggtttcggagacgattatggggcaagttttaactgcgggtcagggtcaaaatcctgctcgacaagcccacgtcaacgctggattacctgtggagtcggccgcttggtgcattaatcaagtatgtggttcaggcttaagagctgtagcactggctgctcaacatgttcaactgggagatgcatccattgtttgcgcggggggtcaagaaaacatgagcctgagtccccatgttgcccaccttcgctcaggatacaaaatgggtgatgttaaatacattgatagtatgatcagggatggcctctgggatgctttcaacggctatcatatgggacaaacggcggaaaatgttgcggagaagtggcagatctcgcgggatatgcaggatgagttcgctttatcatctcaaaacaaggcagaagccgcacaaatcgctggcaaatttgaagatgagattgtgccattcactgtaagtaaccgtaaaggtgatatcacagtagacaaggacgagtatatcagacacggcgctacgattgaaaatatgcataagctacggcccgcattcgctaaggacggcagtgttactgccgcgaatgcttctggtataaacgatggtgcagccggtgcgttagtaatgtcggccgaagaagccaataagagaggcattgaacctctagctagaattgcttcctacgcaacggcaggactagacccaaagattatgggagtagggccaatctatgcgagcaggaaggctctcgagaaggccg

SEQ ID NO: 235731 - DNA, 802 bp, Unknown
  Bacterial polypeptide expressing nucleotide sequence isolated from the Sargasso Sea
atgcaaaaaaattctaaagatgtggttattgtatcagctttaagaacagttattgagaaatataatggtatatgggctaaaattgaggctcataatttaggaagatctgtaattcaaaatattttattaaaatcaaaagtgaataaatcatcaatcgatgaagttataatgggtcaagttttaacaggaggagcaggacaaaatccagcgaggcaggcagctagaggcgcaggtatacaagatgaaaaaacagcatatgttattaatcaagtatgtggttcagggttaagagctattatttcaggatatcaatcaattttattgaatgactcaaaaattattatagccggcggtcaagaaaatatgtcattgtcaaatcaagaaaatatgcttcaagatggtttaatagatgcatttaacaagtatcacatgggagttacagctgagaacgttgcagataagtgtaacatttctagaaaagagcaagataattttgctttatcttcccaaaagaaaacacaagaagcaataaaaaataaaaaatttaaagatgaaatactagacgacaagtctaataaaaattttttggatgaacatcctagattagatgttacaattgaaagtctatcaaagcttaaacctgcatttaaagaaaatggaacagtaacagctggaaattcttcaggcataaatgatggagcagctgcagttttaattatgacgagagaggaagctgaaaaaagagaactgatccctttagcaaagatcgtttcatgggcatcttgtggagttaatccagcgc

SEQ ID NO: 235732 - DNA, 691 bp, Unknown
  Bacterial polypeptide expressing nucleotide sequence isolated from the Sargasso Sea
tatgattgataaatcgaaagaagtagtcattgtagctgcagtaagaacaccaattggcagctataaaggttcgttaaaaaatatgagggctgatcaacttggttcaatagttattaatgaagttttaaaaaaatcaaaatttaataaagaggaaattgatgaagtaattatgggccaagtattaactgctgggggtggtcaaaaccctgcaagacaagcagcaatcaatgccggtttacctatttcaaaacctgctcatatagtaaatcaagtttgtggatctggacttagagctgtcatatcaggttatcaatctataaaattgggagaagtaaagactgtgatctccggtggtcaagaaaatatgtctattgcacctcattcaattttttatagagatgaaaaaaaacttttagaacaaaaattagtagatacaatggttaatgatggtttaatagatgcttttaacaattatcatatgggtgtgacagctgaaaacgttgctcaaaaatttaatataacaaggcaacagcaggatgaatttgcactagactctcaaagaaaaacagaaattgcaataaataataatagatttagtgatgaattagtaaaaataagtgataatgaaaatgtttataataaagatgaacatccaagatttggacttaaattatctgatttggaaaattaa

SEQ ID NO: 235733 - DNA, 301 bp, Unknown
  Bacterial polypeptide expressing nucleotide sequence isolated from the Sargasso Sea
atgagtaaatctgtagttataacttcagctgcgagaaccgccgtaggttcattaggaaaagctcttaaaaatatacctagtgaagaattgggttctgtggttataaaagaggtaattaagagatcagacatcaaatcttctgatatcgatgaaacaataatgggtcaggttttgactggtggaagtggtcaaaatcctgcgagacaagcagcgatgaagtctggtattccaaaagaaaaaccagcttatattgtaaatcaagtatgtggttcagggttaaggtcgatagcatcaggattca

SEQ ID NO: 235734 - DNA, 370 bp, Unknown
  Bacterial polypeptide expressing nucleotide sequence isolated from the Sargasso Sea
atgacaaaaaaatcaaatgatgttgtttttaccactgctttacgtacttcaattggaaaatacaaaggttcatgggcaaaacaccaagctcatgatttaggtgccatggtcataaagaatattataacaaattcaaaaattgaacctcatctcgttgatgaagttattatgggtcaagttttaactggtggaactggtcaaaatcctgctagacaggctgctatcaagtcgggcattcctgaggataaaacaggatatttggtcaatcaagtttgtggttcaggtttaagatcaatagtaaatggatatcaatctatacttttaaatgatgcaaaaattattattgctggcggacaagaaagcatgtcta

SEQ ID NO: 235735 - DNA, 622 bp, Unknown
  Bacterial polypeptide expressing nucleotide sequence isolated from the Sargasso Sea
catgacaaaaaaaactgaagatattgtttttacagcagctctgcgtacggctataggaaaatacaaaggcatctggagcaaatatcaagctcatgatttaggtgagtctgttttaaaaaatattttaaagaagtcaaaagttgagcctaagcttattgatgaagttattatgggacaagttcttactggaggtactgggcaaaatccagcacgacaagcagcaattagagcaggaatacctaaagaaaaaactggatatgtaataaaccaagtatgtgggtcaggtttaagatctattgttgctggatatcaatcgattttgttaaatgatgcaaaaatagttattgctggcggtcaagaaagtatgaccaattcaaaagaggaaatgatgttaaaagatggtctaattgatgcatacaatgattatcatatgggaattacagcagaaaatgttgctgaaaaatggaacatttcaagacaagagcaagatgcatttgcagtctcttctcaattaaaaacacaagaagcaataaaaaataaaaaatttttagaagaaataattgatacttcatcagaagatgaacatccaaggaaagaggttacaattgaaaatttatcaaat

SEQ ID NO: 235736 - DNA, 924 bp, Unknown
  Bacterial polypeptide expressing nucleotide sequence isolated from the Sargasso Sea
gcaagacaagttgctcttggctctggattgccttattcaactccagcaacaacaatcaacaaagtatgtggaagttctcttgaagcagcaatgcttgcatcaaatagcatccgtgcaggacacagtaaggtgattattgctggaggaatggaaagtatgtctaattccccacaacttttgatggggcaaagacgcgggaaaaagatgggtgattcaaaattggttgattcaatgatccacgatggattatgggatgtttacaatgagattcacatgggcaatactggtgaaacagtagctaatgtaagcggtatttcgagaaatgattcagatgaattttctgtccaaagccatctaagagctgccaaggcatgggaatcaggatggtttgattgggaatcattttctgttgaggtgccccaaagaagaggcgaaccgataatcttctctaaagacgagggggtaaagcccaacacttctacagaaatactttctaaattacgaccagtattcaataaagaaggacaagtgaccgcaggaaatgcaagtactctaaacgatggagcgagcgcagttttacttgctgatgcagatttcgccaaagagcaaggttgggaaataattgctcatgttgaagattattgcacaagcggggttgctcctgaccaagttatgagcgctccaataccggcaattagaatgcttttagagcgaaattctctagatgttttagatgttgatatctatgaacacaatgaagcatttgcctcagcatcttgtgcagttgctaaggaagtaggaattcctaatgatagattcaacttacacgggggggcagtaagtctaggtcatcctcttgggagtagtggaacaagatgtctaattaccatgcttggagtgatgcgaagagtagaagcaaaatcc

SEQ ID NO: 235737 - DNA, 688 bp, Unknown
  Bacterial polypeptide expressing nucleotide sequence isolated from the Sargasso Sea
tatgagcaataaactaaaagaagtggttataatcagtggaattagaacaccaataggaacatataatggttcattaaaaaacttacgatctgaccaacttggatctatagttataaaagaagctctgaaaaaatctgaatttacaggagacgaaattgatgaggtaattatgggtcaagttttaactgcgggagccggtcaaaatccagcaagacaagctgctgtaaatgctggcataccaatttcaaaacctgcccatttagtaaatcaagtatgtggatctggtcttagagcagtgatttcaggttatcaatcaatcaaattgggagagtcaaataatataatttcaggaggtcaagaaagtatgtctttagctccacattcaattttttatagagatgaaaaaaaaatatcagaagacaaattattagatacaatgcttaatgatgggttaatagatgcattcaataattatcatatgggcgtaacagcagaaaatgttgcgaaaaagtttaatataacaagacaagaacaagatgaatttgctttaaaatctcaaaaaaaagcagaattagctatcgctaataaaaaatttaatgaagagttagtaaaaataaatcatgacggaaatattttagatacagatgaacatccgaggttaggattaaaaatatcggatttagaaaaa

SEQ ID NO: 235738 - DNA, 795 bp, Unknown
  Bacterial polypeptide expressing nucleotide sequence isolated from the Sargasso Sea
tatggaaaaaaattctaaagatatagtttttactacagcattaagaacagcaataggtaaatataaaggtctgtggaacaaatatcaggcccatgatttgggtacatcggttataaaaaatattttgaaaacttcagaaattgaaccaaatgatgtggatgaagttattatgggtcaggttttgacgggtggtacaggtcaaaatccagcaaggcaagctgcaattaaagcaggtatacccaatgacaaaacaggatatatagtaaatcaagtttgtggatcaggtttgagagccatagttcaaggttatcagtcaattttattaaatgatgcaaaaataattatagctggtggccaagagagtatgtccaattgtaaaaaagactatatgcttaaagatggtttagttgatgtttacaataactaccacatgggagttacagctgaaaatgttgcagaaaaatggaatatttctagaaaagaccaagatattttctctgtttcttctcaattaaaagcaatagaagcaataaagaatagaaaatttgaaaaagaaataatagaaaaaaattttaatgatgaacatcctagaaaaaatatatcccttgagagtttatcaactctcaaaacagtatttaaaaaaaatggaaccgtaacagcaggcaactcatcaggaatcaatgatggtgctgcagcagttttaattatgggaagagaagaagctaacaagcgaggtctaaagcccttagcaaagataatatcatgggcaacttgtggtgtagaccctgccttgat

SEQ ID NO: 235739 - DNA, 325 bp, Unknown
  Bacterial polypeptide expressing nucleotide sequence isolated from the Sargasso Sea
tggtttactacagcccctagtaaagctataggtaatgtattgaataaagctggcctaaaagcgaacgacattgatctttgggagataaatgaagcttttgcagttgtagcaatggctgcaatagaagactataatattcaatatgaaaatgtaaatatatatggtggtgctgttgcgctagggcatcctataggagcttcaggagcaagaatcctcacaacattgatcaatggaatgaatcaccaaaatgttgataggggtctagcgactctttgtattggcggaggtgaggcgtctgctctgatagttgaaaaatatgattgat

SEQ ID NO: 235740 - DNA, 423 bp, Unknown
  Bacterial polypeptide expressing nucleotide sequence isolated from the Sargasso Sea
tatgggaaaaaatttagatgatatagtaataaccaatgccttaagaacgccaataggcagatataaaggcaaattgagcctttatcaagctcacgatcttggttgtgaagttatcaaaaatttattggaacaatctaaactatcttcagaagatgtggatgaagtagttatgggtcaagtgctgactggaaatacaggtcaaaatcctgcaagacaagcatctttaaatgcaggtattccaaattcaaaaacagcttacctagttaatcaagtttgcggttcaggtttaagaagtattgcattagcctaccaatcaatattatctaaagattctaaggtagtaattgcaggtggacaagaaagcatgtcaaattgtgataaagatatgatgttaaaagatgggctgattgatgtatataataa

SEQ ID NO: 235741 - DNA, 463 bp, Unknown
  Bacterial polypeptide expressing nucleotide sequence isolated from the Sargasso Sea
atgacaaaaaaagaaattgtaataacatctgctgtaagaactgcggtaggatctttggggaaatctttaaaaaatgttccaagtgaagaacttgggtcttgcgcaatttcaagcgcaatagatcaatctaatattaaaaatactgatattgatgaagtaataatgggtcaagttttaactggaggtgctggacagaatcccgctcgccaatctgctatgaaatgtggtatcccaaaggaaaaacctgctttcgttgtcaatcaagtgtgtggatctggacttagatcggttgcttcaggtttccaaagtatcaaggcgggtgactcaaagataattgtcgccggtggacaagaaagtatgtcattagcaccacattcaattcatttgcgagatgggaaaaaattaggtgaaacaaaacttacggacactatgattaaagatgggctttgggatgcttttaata

SEQ ID NO: 235742 - DNA, 718 bp, Unknown
  Bacterial polypeptide expressing nucleotide sequence isolated from the Sargasso Sea
tatggacaataaagacatagtaataacatcagcttttaggacagctatttcttctctagatggtagcttatctgaatatagtgcatctgaattaggatcatttgtgataaaaaaatgtatggagcattctaatcttcaaaaagatgatgttgatacagtatatatgggacaggtgcttcaagcaggaacaggacaaaatcctgcaagacaatcagctatgaaagctggaattgacaaatcaacctctgcaacaactataaatcaagtatgtggatctgggttatctgcaattagtttgggatttaattcattaaagttaaaagataccaaaatagtaatagctggtggacaagaaagtatgactaactcgccacactatataaattttagaaaagataaaattttatcagaaaacaaacttaaagactcaatgatcgttgatggattaatagatttttataatcaatatcatatgggtgttaccgctgaaaatgttgcaaaaaaatttagtatttcaagaaatgatcaagacttatttgcttacaaatcacaaataaaaacaaaagaagctatagataatggaaaatttaatgatgaaattgtttcaataaaattaaaaactggaagtacatttaataaggatgaacaccctagaatggatgtcgatatagaaaaatatctaaacttaaacctgcatttaaggaaaacggaacagtaa

SEQ ID NO: 235743 - DNA, 444 bp, Unknown
  Bacterial polypeptide expressing nucleotide sequence isolated from the Sargasso Sea
tatgggaaaaaattctaaagatatagttttcacatcagttttgaggacagcaataggaaagttcaacggctctttaaaagaatttcaagcgcatgaacttggaaaattagtaattaaaaaaattttagagcaatcaaaaatgaaagctaatgacatagatgaagttattatgggtcaagttttaactggtggaacaggacaaaatccagcaagacaagccgctataggagcaggaataccagaaagcaaaaccggttttgtgatcaatcaagtttgcggctcaggtttaagatctatagttgccggatatcaatcaattttatcaggtgatgctaaaattgttatatcaggaggacaggaaagcatgagtaattcaaaagaagaactaatgctaaaggatggtttaattgatgcatataataattatcatatgggcataacggc

SEQ ID NO: 235744 - DNA, 667 bp, Unknown
  Bacterial polypeptide expressing nucleotide sequence isolated from the Sargasso Sea
cactagagagaaccaggatcaatatgcattagagtcgctcagccgtgctattgcagctgagaaaaacggtcacttagcaaatgaaatttcgcctgtaacgaggatctctaaaaatggagaagtattaattgagcgagatgaacagccacaaaatgcaagaccttcaaaaatactcactttgcggcccgcatttaaagaaaacggtactgttacagcagcaaattcatcgtcaatatctgatggtgctgctgctttagttttaatgagacaacagcaagcacttgatcgtggattagactttcaggctcgaattgttggatatgctgggcatgctaatgaaccggcttggttttctacagcacctatacctgccgtaaaaaaattattgaagaagataaaatgggatgtctcagatgttggcctgtgggagataaatgaagcatttgcagtagtacccatggccttcagtcgtgagtttggactttccatggataaaataaatatttctggtggagcttgtgcgttaggtcatccaataggtgcttcaggtgctcgaattattgtgactttgatcaacaatttaaagactcataaattaaagcgaggtgtggccgcaatctgtattggtggtggtgaggctacggcagtggctatcgagttagaatag

SEQ ID NO: 235745 - DNA, 205 bp, Unknown
  Bacterial polypeptide expressing nucleotide sequence isolated from the Sargasso Sea
gttataaaagaactaaaaattccagaagaaaaagttaacgtaaatggtggggcagttgctcttggccatccgataggagcctctggttgcagaatagttgttacattacttcatgagatgaaaagaagaaatgttaagagaggattggcaaccctatgtattggtggaggaatgggaatttcaatgtgtttagagaggatttaat

SEQ ID NO: 235746 - DNA, 760 bp, Unknown
  Bacterial polypeptide expressing nucleotide sequence isolated from the Sargasso Sea
ggatctatagtaataaaagaagttttaaaaagatctaaatttaaagaggacgaaatcgatgaagtaatcatgggtcaagtattaactgctggtgcaggacaaaaccctgctagacaagctgcaataaatgctggaataccaatttcaaaacctgcatatatggtaaatcaagtatgtggatctggactgagagcaattatttctgggtatcaatctattaaattaggagaaaataaaaatataatttgtggaggtcaagaaaatatgtcaatggcccctcattcaattttttatagggataaaaaagaaatatcttctgatgaattaaaagatacattgataaatgatggtttgctagatgcatttaataattgtcatatgggggttactgctgaaaatgttgcaaaaaaatataacataactagaaaagaacaagatcagtttgctttaaattctcaaaaaaaaacagaaagagcaattactaataataaattcgatgatgaaataattaaaataagtcacaacgggtctgtcatagctcaagatgaatatccaagattaggttgtaaaatagcagatttagaaaaattaaaaactgcttttcaagaaaatggcacagtcacggctggaaattcttcgggaataaatgatggagcatcagctatacttttaactagtttagaagagacaaaaaaaaaatctattaagcctttagcaaaattgtatcatgggcttcggtgggattggatccttcgctaat

SEQ ID NO: 235747 - DNA, 829 bp, Unknown
  Bacterial polypeptide expressing nucleotide sequence isolated from the Sargasso Sea
tatgaataattccgtagttataacctcagctttaagaactgcagttggatctttgggtaaatcattaaaaaatgttccagcttttgaattggggtctgctgtcatttcaaaaaatatagaaaaatcaaaaattaagaatagtgaagttgatgaaataataatgggacaagttcttactggtggtgctggtcaaaaccccgctcgtcaggctttaataaaatctggaattccaattgaaaagccagcctatttggtaaatcaagtttgtgggtcaggcataagatcagttgcgtcaggtttccaaagtatcagatcaggtgactctcaaataattatagctggaggtcaagaaaatatgtcattggcgccccatgcaattcacttaagagatggaaaaaaattaggagatattgaattaacagacacaatgattaaggacggcctatgggatgttttcaatggttaccatatgggtgttactgcagagaacgtagcaactaaatttcaagttaccagagaacagcaagatgaatttgctttaagctctcaagaaaaagctcttaaagctcaaaaagaaaataaatttaaagatgaaatcataaattataagataaaatcaaacaaagctgaaatagattttacaaaagatgagcacccgagggatggtatcaatttagatgctcttaaaagattaaaaccagtgtttcaaaaaaacggtactgttacagctggaaatgcttcaggaattaatgatggtgctgccgcagttaccttaatgtctgaaaaagaaagtaaaaaaagaggtttaaaaaaaattagttactattaa

SEQ ID NO: 235748 - DNA, 535 bp, Unknown
  Bacterial polypeptide expressing nucleotide sequence isolated from the Sargasso Sea
atgactgatatcgtaattgcgtctgctgctaggactgcggtgggttcgtttggtggatcatttgctaaaattccggcacacgatctaggctctactgtgctttcagcattagttgaacgcgccggcataaaaaaagaagaggtttcagaaactatcctagggcaagttctctccagtggacaaggccaaaatccagcaaggcaagctcatgtaaatgcaggattgccaattgaaagtgcggcgtggggtattaatcaagtttgtgggtcaggtctaagagctgtagccttagcagcgcagcacgtgatgcttggggatgcagatattgttgcagccggaggtcaggaaaacatgactttgtcaccacacctgtcacatctacgctccggccaaaaaatgggtgatgttaagtatatagatagtatgatcaaagatggtctctgggatgcttttaatggctatcacatgggccaaactgctgaaaatgttgcagaaaaatggcaaattagccgagaaatgcaagatgaatttgccg

SEQ ID NO: 235749 - DNA, 733 bp, Unknown
  Bacterial polypeptide expressing nucleotide sequence isolated from the Sargasso Sea
atgagcaaaaactctaacgatgtcgtaattacttcagcattaagaaccccaattggaagatacaatggttcgttaaaaaatcttagtgcatcaaaattaggatcaatagcaattaaagaggtaatttataaatcacagttagatgtagaggagatcgatgaagtgattatggggcatgttttaacttctggacttggtcaaaacccagctaggcaagcttcaattggtgcaggagtaccagtttcaaaacccgctcatattatcaatcaggtttgtgggtctggattaaggtccgttgtttctggttatcaatcaattagattgggagaaaatcaggtagttgttgcaggtggtcaagaaaatatgtctagagcaaatcatgcaatttattacagagaagacaaaaaatattctgaaaaaaaattagtagatacaatgataaaagatggtctattagactcatttaatgattatcatatgggtgttacagctgagaacgttgctgataaatataaaatttcaagagatgaacaggatatcttttctttgaattctcagaaaaaaacagaaaaagcttatagtgaaaataaatttaaaaatgagctgattaaattacaaattgaaagtggtgatgaaaaatttatttttgagaaagatgaacatcctagacaaaatttaagtttagacgatttaaaaaaattaaaaccagtattcaaagaaaatggcactgtaa

SEQ ID NO: 235750 - DNA, 483 bp, Unknown
  Bacterial polypeptide expressing nucleotide sequence isolated from the Sargasso Sea
aatgtctgacaaaaaaactgtagtaataacgtctgccgtaagaactgccataggatcattagggggtaccctgaaaaatatttcggctcacaaattgggttctgctgtaatttcagaagcaataaaaaaatcaagtttaaaatcctctgatataaatgaggtcatcatgggacaggtgcttacaggtggggccggacaaaacccagcacgtcaagcttctatggattctggaatacctaaagagaccccttcttatgttgtaaatcaagtttgtggatcaggtttaagatctattgcctcgggttttcattcaattctttcaaataattcaaatatagttgttgcgggaggacaggaaagtatgtctcaatccccgcatgtaattcatttaagagatggaaaaaaacttggagacaccaaattaattgactccatgattaaagatggactttgggatgcatttaacggttaccatatgggaat

SEQ ID NO: 235751 - DNA, 478 bp, Unknown
  Bacterial polypeptide expressing nucleotide sequence isolated from the Sargasso Sea
tatgagcagtaaatcaaaccaagttgttattataagcgcaattagaacaccaattggcacttacaaaggttcattaaaaaaaatgagatccgatcaacttggatctatagtaataaaagaaacattaaaacagtcaaaatttagtaaagaagagattgatgaagtaataatgggacaagtattaactgctggtgcagggcaaaacccagcaagacaagctgcaataaatgcaggtatacctatttcaaaaccagctcatatagtaaatcaagtatgcggttctggccttagagcagttatatcaggttttcaatcaataaaattaggagagtcaatgaccataatttctggaggtcaagagaatatgtcaatagctccacactcaatattttatagagatgagaaaaaaatttcagaggataaacttttagatacaatggttaatgatgggttaattgatgcattcaacaattaccat

SEQ ID NO: 235752 - DNA, 772 bp, Unknown
  Bacterial polypeptide expressing nucleotide sequence isolated from the Sargasso Sea
tatgaataattcaaataatgaagttgtaattgtagaggctattagaactccaattggtacttataaaggagctttaaaagatttaagagctgataaactaggtgcgatagttataagcgaaattttaaaaaggacaaaatttgataaaaacgagatagatgaagtgatcatgggccaggtacttacagctggagtaggacaaaatcctgctagacaagctgctattaatgctgggatagacatttcaaaaccggcacacattataaatcaagtatgtggttctggactaagagctgtgatttctggttatcaatcaattaaacttggggaagtaaaatgtgtgatttctggaggtcaggaaaatatgtcattagcccctcattcaattttttatagagatagtaaaaaagtttctgaagaacaattagtagatacaatgattaatgatggacttatagatgcttttaataattatcacatgggtgtaacagctgaaaatattgcaaagaaatttgatattttaagagatgaacaagatgattttgcgttaaattctcaagagaaaacagaagttgccataaggacaaatagatttgatgaagaattaataaagataaatcaaacaggaggtgttctttataaagatgagcatccaagaaaaggactcattaaatctgatttaaaaaaattaaaagctgtatttttagatcatggaactgtcacagcaggaaactcatcaggaataaatgatggcgccgctgccttattacta

SEQ ID NO: 235753 - DNA, 340 bp, Unknown
  Bacterial polypeptide expressing nucleotide sequence isolated from the Sargasso Sea
tatgaacgtaaaagaaaaaagtatcgtaataacttcagctttgcgtacggcaataggcacatttaatggctctttaaaaaatatggaggcacatgatcttggctcaattgttattaaagaaaatataaaaaaatcgaaattaaaatctaatgaagttgacgaagtaataatgggacaagttttaacaggtgcagcaggacaaaatccagcaagacaagcagctattaaagcgggggtgccgattgaaaaaactgcatatgtaataaatcaagtttgtggatccggactaagagcgattgttgctggctatcaatcaattatatctaatgatgcaaaaata

SEQ ID NO: 235754 - DNA, 507 bp, Unknown
  Bacterial polypeptide expressing nucleotide sequence isolated from the Sargasso Sea
tatgaacagcgataaagatattgtaataacgtcagcttttagaactgcaattggttcgtttcaagggagcttaaaagatcataaagcaacagaactaggaactgcagttgttaaaaaatgtatggaacactctaatcttaatggttcagaagtggatacagttattttagggcaagtgttgcaaactggatgtggtcaaaatccagctagacaagctgcaattaattcagggatagataaagataaaactgcaacaacgattaatcaagtatgcggctccggtttggccgcggttaccttaggttttaattctttaaaactaaatgacacaaatattgtaattgcaggaggtcaggaaagtatgactaattctccacactacttaaattacagaatggaaaaaaatttaagcgaggaaaaattaaaagattcaatgcttattgatggattaatagatgcatacgatgattatcacatgggagtaactgctgaaaatgttgcagaaaa

SEQ ID NO: 235755 - DNA, 486 bp, Unknown
  Bacterial polypeptide expressing nucleotide sequence isolated from the Sargasso Sea
tatgagagaagcagtaattgtatcagcagccagaacacctattggtaaagcctatagaggtgcttacaacaaaactgctgctccaactttagcttcctattcaattaaagaagctattgatagagctggaatagaccctaaagaggttgaagatgttgtaatggggtgtgctcaacaacagggtacacaagctataaatataggaaggctatcaggtatcgcggctggattgccggaaaatgttccaggtatgacaatagacagacaatgctcttcgggaatgatggcaattgcaactgcatctaaacaagtcataacagataacatggacatcgttgtagctggaggtgttgagtctatttcactagtacaaactgcagattttagagtagatattgatccaaatgttactgctcacgcgcaacatgcttatatgccaatgattgagactgctgatcatgtcgctgaaaaatataatgtaacaag

SEQ ID NO: 235756 - DNA, 745 bp, Unknown
  Bacterial polypeptide expressing nucleotide sequence isolated from the Sargasso Sea
gatgagcaaaaaattagatgatgttgtaataacatctgctttaagaacaccaattggaacatataaaggttctttaaaaagtttgagtgctgaaaaattaggtgcactggtgattaaagaagctgtatataagtcaaatcttaaggctgcgcaaattgatgaagttataatgggtcatgttctcacttcaggactaggtcaaaaccctgctagacaagcatccatacatgccggtatccctgtaactaaaccagcgtacgttgttaatcaggtttgtggatcaggcttaagatctatagtttcaggattccaatcgattaaattagatgcagaaatgattgttgtttcagggggtcaagaaaatatgtcgagagcaccacatgcattgttttatagagagaataaaaaattagatgactcaaaattaattgatacaatgctcaatgatggtttgattgactcatttaatcattatcatatgggtgtaacagcagaaaatgttgcagaaaaattcaaaatttcaagagatgaacaagataattttgcattaaattctcaaaaaaaaacacaagaagctttgagcaaaaataaatttaaagatgagataattaagttagaaattaaaactgataaaaaagttttggttttcgataaagatgaacatcctagaggtaatttaattttggatgacttaaaaaaattaaaaactgtttttaaagaaaaaggaactgttactcctggaaat

SEQ ID NO: 235757 - DNA, 683 bp, Unknown
  Bacterial polypeptide expressing nucleotide sequence isolated from the Sargasso Sea
aatgacaaaaaaatcagatgatattgtaattacatgcgccttaagaactcccataggtaaatacaatggtaatttaggatcatacaaatcttatgatttaggttctattgttatcaaaaatttattattgaaatccaaaattccagcaagcgatatcgacgaagttgtactaggacaagtattgactgggaatacaggacaaaatcctgcaagacaggcagcaataaatggaggtataccaataaataagacagcttatataataaaccaagtatgtggatcaggtcttaggagcatagcatctgcatatcaatctctaaaagctaaagatgcgaatataattattgcaggaggtcaagagagcatgacaaattgcgataaaaacgtaatgcttaaagatggtttaattgatgtttacaacaaatatcatatgggtgtaacagcagaaaatgttgccgataagtggaatataacgagagaagaacaagataaatttgccattaaatcacaaaataaagccgctgaagctatgaaacaaaataaatttaacgatgaaataatatcaggactaattgagaaagatgaacatcccaggtcagatgtaactatagaaaatttatcttcattaaaaacaatttttaaagaaaatggaactgtaacagctggaaattcatcaggaataa

SEQ ID NO: 235758 - DNA, 538 bp, Unknown
  Bacterial polypeptide expressing nucleotide sequence isolated from the Sargasso Sea
atgagtgagaaagaaaaaagcgttgtaataacttcagccttacgtaccgcaataggttcatttaatggatcactaaaaaatatgcaggcgcacgaactaggatcaattgttattaaagaagttataaaaaaatcaaacttaaaatttaatgatatagatgatttaattatggggcaggttttaactgctggcgcaggacaaaatccagcaagacaagctggaattaaagctggtttaccgattgaaaaaccagcttacattgtgaaccaagtttgtggatctggattaagatcaatcgcggctggttatcaatctattatttctagtgatacaaaaatagtagtagcaggcgggcaagaaagcatgaccaatgctccacatacaattaattttcgtaatgataaaaaattagaagagtcaaaacttattgacacaatgataaaagatggtctttgggatgcttttaacgggtatcatatgggaatgacggctgaaaatgttgcggaaaaatggcagattactaggagtgaccaagata

SEQ ID NO: 235759 - DNA, 496 bp, Unknown
  Bacterial polypeptide expressing nucleotide sequence isolated from the Sargasso Sea
aatggattcacttaaaccggtatttgaaaaagatggtacaattacagctgctaatgcttctaaaataaatgatggtgcagctgctttattattgatgactagagagaaagcaaatgagctagaattagaaattcatgccactgtagtagggcaatcttcttatgcaaatgacccagaatggtttaccaccgcaccaattggagcaattgataaggttttggaaaaatcatcattaaaagttgatgatattgacctttgggaaataaatgaagctttcgcagttgttcctatgtctgtaataaataattttgatttagaccaaagtaaagtgaatgtaaatggtggagggattgccctaggccaccctattggagctagtggtgcaagaattttaactacgcttatttatgcaatgaaaaaaagaggtgtcaaaagaggattggctactctttgcataggcggaggcgaagcttcagcattagtaattgaaagatag

SEQ ID NO: 235760 - DNA, 778 bp, Unknown
  Bacterial polypeptide expressing nucleotide sequence isolated from the Sargasso Sea
atgaatgataaggatatagttattacatcagcatttagaacgccaataggatcttacaaaggatctttatcagaagtatcggctgttgatcttggagctgaagttattaaaaagtgtttaaaaaattccaaattaaattctaaagatgtagatatgatttttatgggtcaagttttacaaacaggatcaggacaaaacccagctagacaagctgctatgaaagctggaattgataaagaaaaaagtgcaacaactataaatcaagtttgtggctctggactatcagcaatatctttgggttttaactcgttaaaacttaatgatgcaaatattgtaatagcaggaggtcaagaaagtatgtctaatgctcctttttatattaaaccaaaagaaatagataaagaaatagataaagataaattagaacactcaatgttaattgatggacttattgactcttataatcattaccacatgggtgtaactgcagaaaatgttgcacaaaaatatcaaataacaagaaaagatcaggatgaatttgctttaaattctcaaaataaagctgctaaagccttagaaaataaaaaatttaatgatgaaattgtgcctttaaaattaaaaaataatattgaatttaaagaagatgaacatcctagaaaagactcaaatatagaaaaactttcaaaattaaaaactgtttttaaaactaatggaacagttacagcaggaaattcatctggacttaatgatggtgctgccgcgaataacaatgcatgaa

SEQ ID NO: 235761 - DNA, 448 bp, Unknown
  Bacterial polypeptide expressing nucleotide sequence isolated from the Sargasso Sea
aatgatcaaaaattctaaagatgtagtaatcacaaacgctttaagaacaccaataggtaaatacaatggaaatttaagcaaatatcattcggatgatttagggtcaaatgttataaagaatttattaaaacagtcaaaaataatccctgatgaagtagacgaaattatattgggacaagttctgacaggtaacactggacagaatcctgcgagacaatctgctataaaagcgggtattcctaaggagaaaactgcatacattataaatcaagtttgtggatctggcttaagatccattgcatcagcatatcaatctataatggtcaaagattcaaaaatagtaattgctggtggccaagaaagtatgtctatttgtgataaagatctaatgctaaaggacggttggattgatgtttacaataaatatcatatggggagttactgctga

SEQ ID NO: 235762 - DNA, 550 bp, Unknown
  Bacterial polypeptide expressing nucleotide sequence isolated from the Sargasso Sea
tatgagtaaaaattctagcgatgttgttattacttcagcattaagaactccaattggaagatacaaaggatcgttaaaaaatcttagcgcatcaaaattaggatcaatagcaattaaagaggtaatttataaatcaaaattagatttagaggagattgacgaagtaattatggggcacgttttaacttctggacttggtcaaaatcctgctagacaagcttcaatcgttgcaggagtaccggtttctaaacctgctcatattgttaatcaggtttgtggatctggattaagatcagttgtttcaggatatcaatcaataagtttaggagaaaataaaatagtcattgcaggtggtcaagaaaatatgtctcgagcaactcatgcaatttattatagagaagataaaaaattttctgaaaacaaattagtagacacaatgataaaagatggtctacttgattcatttaatgattatcatatgggtgttacagctgagaatgttgccgaaaaatataaaatttctagaaatgaacaagataatttttcttta

SEQ ID NO: 235763 - DNA, 798 bp, Unknown
  Bacterial polypeptide expressing nucleotide sequence isolated from the Sargasso Sea
aatgagtaaaattcctaaagacgttgttattacctctgcattaagaacaccaataggtaaatacaaaggatccctcaagaacatcagtgcagataagcttggtgcgttggttattaaagaggcaattttcaaatcaagccttaaaggagaagatgtagatgaggttattatgggacatgttctcacagcaggtcttggtcaaaatccagcaagacaagcttcgattcacgcaggcgttcctgtttcaaaaccagctcatatagtaaatcaagtatgtggttctggtttgagatcaatcatatctgcctaccaatcaataaagttagagcaaaatgagattgttgttgcaggtggtcaagaaaatatgtctagagcaacacatgcgatattcttgagagatgataaaaaatttattgaggataatttgatagatacgatgattaaagatggacttacggactcttttaataattatcatatgggtgttacagcagaaaatattgcagaaaaatatcatataacccgacgagagcaggatattttttccataagttctcaaaaaaaagctaaaaaggcttatgaggaaaaaaagttcaatgacgaattaataaaattacaaatacaaagtaataatgaaaaatttatttttgaacatgatgaatatctaagaaataacataactttagatgatttagaaaaactaaacacggtgtttaaagaaaatggaactgtcactcctgggaattcatctggattaaatgatggcgctgctgcattagttttaatgacgagagaaaa

SEQ ID NO: 235764 - DNA, 388 bp, Unknown
  Bacterial polypeptide expressing nucleotide sequence isolated from the Sargasso Sea
atgttaaataattctctggtagtagcagcaaaaagaacaccaattggttcgtttcaaggaatactttctcctttttcagctcctgaactaggagcaaaagtttttgaaaatattatccaaaattttccaatgaggaactcttttattgatgaggtgataatgggtaatgttttgtctgctgggttaggacaagcccctgcacgtcaagcagctattttttctggaatttcaaataaagttcctagcttgacaatcaataaaatgtgtggttctggtttaaaagctataatgcttgctgatcgcgctataaagtgtcaggatgctcatgttgtacttgcaggtggaatggaaagtatgtcaaatgcacctttccttttatcagattata

SEQ ID NO: 235765 - DNA, 523 bp, Unknown
  Bacterial polypeptide expressing nucleotide sequence isolated from the Sargasso Sea
aatgtcaaaaaattctaaagatattgtttttgttgcagctcagagatcagccataggaagatataaaggtatttataaagatctgcaggctcacgatctaggttcgttagtaatcaaaagtttaattcaaaagaccaagctaatagaagacaaaattgatgaagtaatatttggacaagttttaacaggatcatgtggacaaaatccagcaaggcaagcagctataaatgctggaattccaaaagaaaagactgcaataattattaatcaagtttgcgggtctggactaagatctattgtaaatggatatcaatcattaataacaaattctgcaaactttataattgctggaggccaagaaagtatgaccaattcacttcatgatcaaatgatgaatgatggtttgactgatgctttttataattaccatatgggtgttacagccgaaaatgttgcaaagaaatataatatttcaagagaggaacaagataaatttgcatatgaatcccagcataaagcaaat

SEQ ID NO: 235766 - DNA, 871 bp, Unknown
  Bacterial polypeptide expressing nucleotide sequence isolated from the Sargasso Sea
atgagcaaaaattatagcgatgttgttattacttcagcactaagaactccaattggaagatataaagggtcgttaaaaaatcttagcgcatcaaaattaggatcaatagttattaaagaggtaatttataaatcaaaattagatttagaggagattgatgaagtaattatggggcacgttttaacttctggacttggtcaaaatcctgctagacaagcttcaattggtgccggagtaccggtttcaaaacctgctcatattgttaatcaagtttgtggatctggattaagatctgttgtttcaggatatcaatcaattagtttaggagaaaataaaattgtcattgcaggtggtcaagaaagcatgtctagagcaactcatgcaattttttatagagaagataaaaaattttctgaaaaaaaattggtagatacaatgataaatgatggtctcttagactcatttaatgattatcacatgggtgttaccgctgaaaatgttgcagaaaagtataaaatttcaagagatgaacaagataatttttcactaaattctcaaaaaaaaacagaaaaagcttacagcgaaaataaatttaaagatgagctgataaaattacaaattgaagatggtgataaaaaatttgtctttgaaaaagatgaacaccctagagaaaatttaagtatagacgatctaagaaaattaaaaacagtttttaaagaaaatggaactgtaacacctggtaattcttcaggaataaatgatggtgcagctgctttagttttaatgtctagagagcaatcagaaaaaaaatcattagagtcattggttaaaattgtatcttgggcaacttgtggggttgagccttcataat

SEQ ID NO: 235767 - DNA, 581 bp, Unknown
  Bacterial polypeptide expressing nucleotide sequence isolated from the Sargasso Sea
tatgagcaaaaactctaacgatgttgtaattacttcagcactaagaaccccaattggaagatataaaggttcgttaaaaaatctcagcgcatcaaaattaggttcaatagtaataaaagaagtaatttataaatcaaaattagatatagaggaggagatcgatgaagtgattatggggcacgttttaacttctggacttggtcaaaatcccgctagacaagcttcaattggtgctggagtaccagtttccaaacctgctcacattgttaatcaagtctgtggatctggattaagatctgttgtatcgggatatcaatcaattaagttaggagaaaaccaaattgtaattgcaggtggtcaagaaaatatgtctagagcaactcatgcaatttattatagagaagataaaaaattttctgaaaataaattagtagatacaatgataaaagatggtctgctagattcatttaatgattatcatatgggtgtcacagctgagaatgttgccgataaatataaaatttcaagagatgaacaagataatttttcttttaattctcagaaaaaaacagaaaaagcat

SEQ ID NO: 235768 - DNA, 433 bp, Unknown
  Bacterial polypeptide expressing nucleotide sequence isolated from the Sargasso Sea
attaatgatggtgccgcagcattgactcttatgagtgctgatgaaattaagaagagaaacatagatcctatggcaagaattgtttcatgggcaagtgcgggagtagatccctcaataatgggaactggaccagtgccatcaagcaaaagagctctagaaaaagctggctggacaattaatgacttggatctaattgagtcgaatgaagcttttgcagcgcagtcttgtgcggtcaataaagagcttggctgggatacttcaaaagtaaatgttaatggaggggcaattgcaattggtcatccaataggagcgtccggagcaagaattttggtaactttacttaatcaaatgaagcgtcaagatgcaaaaaaaggattagcaacattatgtattggcggtggtatgggtatcgctttatgtgttgaacgataaa

SEQ ID NO: 235769 - DNA, 706 bp, Unknown
  Bacterial polypeptide expressing nucleotide sequence isolated from the Sargasso Sea
atgagtaagaaagatattgtaattacatctgcatttagaacagctattggatcctttaaaggaagcttgggacagcttaaagctcatcaattaggctcaagtgtaatcaaaaaatgtttaagtcattcaaaattaaataattttgatgttgatgaaatttttatgggccaagttcttcaagcaggaggtggccaaaatcctgcacgacaggcagctatggatgcgggaattgataaatcaaaaacagcaacaactataaatcaagtttgtgggtcaggtttatcagctataagcttaggttataattcattaaaaataaatgataacaaaattgtaattgcaggaggtcaagaaagtatgaccaattctccgcattatattaattttagggaaaatgaaaatattaaaaaagaaaatctaaaagatacaatgttagttgacggattaattgatgcttacaaccattatcatatgggtgttactgcagaaaatgttgcgacaaaatttaatattagtagaaatgaacaagacgagtttgcctataactcacaaaaaaaagctatagaagcaattaaatctaaaaaatttgaacaagaaatcgtaccaattaaattatcagataaaacctttgagaaagatgagcacccaagagaaaatatagaattaaataaattagctgaactcaaaacagtttttagagaaaatg

SEQ ID NO: 235770 - DNA, 778 bp, Unknown
  Bacterial polypeptide expressing nucleotide sequence isolated from the Sargasso Sea
ttaatagctggttcaagttccgtaacagttgctggtggatttgaaagcatgacaaatgctccttacttattagacaaagctaggtcaggatacagaatggggaataatagtatttatgaccatatgttcttagatggtcttgaggattcaatagaaagcccaggaaagttaatgggttcttttgctgaagacactgctcaagagtatcagtttacaagagaacagcaggataattttgccattgagtctttacgaaaagcaaaaaaagctaatgaggatggcagttttagggaagagattgtaccaattaaaattaaatcaaaaaaaacagaaataacaattgataaagatgagcttccttttaaagctaaaatagataaaataccacagctaaaacctgcatttagagaaggtggttcggtaacagctgcaaattcctctgctatttctgacggagctgctgcgctagttttgatgatgagatccacagctgagaaaaaaggttataagcctctagcaaaagtgcttgggcatgctacacaaagtcaagaagcttcaaaatttacaactgcccctattggtgcaataaataaattatatgaaaaagtaagatggagtggtaaggatgttgatttatatgaaatcaatgaagcttttgcagttgttactatggctgcaattagagatctcaatctagatcaaagtattgtaaatattaatggtggtgcatgcgctttagggcaccctataggagcatcaggctcaagaattgttgtaa

SEQ ID NO: 235771 - DNA, 413 bp, Unknown
  Bacterial polypeptide expressing nucleotide sequence isolated from the Sargasso Sea
tatgtctaaagaaaaaacagtagtaattacatcggccgttagaactgccattggatcgttaggtggcacacttaaaaatgttcctgcttacaaattaggatcaacggtaatttcaaatgctattaaaaaatcaaatttaaaacctacagaaataaacgaaattataatgggtcaagttttaactggtggagcaggacaaaatccggcacgccaagcatcaatggactctggaataccaaaggaaactccatcctatgttgtaaatcaagtttgcggttcgggcttaagatctgtcgcttcaggatttcagtcaatcatgtctggtcattctgatattgttgttgcaggtggccaggaaagtatgtcacaagcacctcatgttgttcacctaagagatggaaaaaaattgggtg

SEQ ID NO: 235772 - DNA, 583 bp, Unknown
  Bacterial polypeptide expressing nucleotide sequence isolated from the Sargasso Sea
ccctatttctgttaagaataaaaaaaaagaggtattagtagagcaagatgaggaacccttctcagctccattagataaaatgccttctctgcgtccagctttttcaaaggacggtactgttactgctgcaaatgcttcaacgattaatgatggtgctgcccttctcttgcttatggaagaagagtatgcaaaggaaaagggctataaaatattggctaaaatcattgctgttgatgctttttctcaagaaccatgttggtttacaacagcgcctattcacagtattagaagagttctagaaaagtctaataaaagtatttcagatatatcacagtttgaaataaatgaagctttctcggtagtgcctcttgttgctataaaagagcttggtttaaatccagagttggttaatccttatgggggtgctgttgctttaggtcaccccattggtgctagcggtgcaagaattcttgttacgctaatacatggtcttttagcacagaagaacgctcgttttgggcttgccagtatttgtattggtggtggtgaggctaatagtattcttattgaaaaatgtgaatag

SEQ ID NO: 235773 - DNA, 421 bp, Unknown
  Bacterial polypeptide expressing nucleotide sequence isolated from the Sargasso Sea
atgaataatgattcgttcattgttaatgcattcagaacgcctataggttcttttgggggagagttatcatctttctctgctccgcaactaggttcaaaagtaattgagcatataattaaaaaaactaatatagatgtaaaaaactatgatgaagtcataatgggcaatgtcttatccgcaggtttagggcaagcaccagctcggcaagcagctattttaggaggccttccaaatagtacagagtgtttaacaataaataaaatgtgtggttctggtctaaaagcggtaatgataggggataatgaaattagatctaggggggcagacaccattattgcaggcgggatggaaagtatgtcaaatgctccacttcttatgaaaaaaaacccaaataaaataggtcaccataaaatgttagaca

SEQ ID NO: 235774 - DNA, 507 bp, Unknown
  Bacterial polypeptide expressing nucleotide sequence isolated from the Sargasso Sea
tatgtctaaagaaaatggagtcgtcataacatctgctgttagaacagcaattggagatttaggtgggtctttaaaaaatgtttctgctcataaactaggttcgacagctatttcaagcgctattgaaaaatcaaatattaaagcttcagatataaacgaaattattatgggccaagttttaacaggcggtgcgggacaaaaccctgcaagacaagctgctatggatgctggtattccaaaagaaacaccatcatatgttgttaatcaggtttgtggctcgggtctaagatctattgcatcaggatatcattcaattctctcaggaaattcaaatattgttttagctggaggtcaagaaagtatgtcccaatcacctcatgtagttcatttaagaaacggaaaaaaacttggggacactagtttggtagactctatgataaaggatggattatgggatgcattcaatggataccatatgggtataacagcagaaaacgttgcgcaaaa

SEQ ID NO: 235775 - DNA, 339 bp, Unknown
  Bacterial polypeptide expressing nucleotide sequence isolated from the Sargasso Sea
gatgactgaaatcgtaattgcttctgctgctaggactgccgtaggttccttcggtgggtcatttgcaaaaaccccagcgcacgatctaggctctactgtgctttccgcgctagtggagcgcgctggcatagaaaaagaagaggtttcagaaactatcctaggacaagttctgtccagcggacaaggccaaaaccccgcaaggcaagctcatgtaaatgcaggattgccaattgaaagtgcggcctggggtattaatcaagtttgtggatcaggcctaagagctgtagccttagcggcgcagcacattatgcttggagatgctgatattgttgctgccgg

SEQ ID NO: 235776 - DNA, 736 bp, Unknown
  Bacterial polypeptide expressing nucleotide sequence isolated from the Sargasso Sea
aatgacagataaatcaaaagaagtggtgattgttagcgctgttaggacacctataggatcttataaaggttcattaaaaaaaatgagatctgatcagcttggatctttagtgatcaaagaagctttaaaatttactaaatttagctcagatgaagtagatgaagtaataatgggccaagtattgaccgctggggctggacagaaccctgctagacaagctgcaataaatgctggaataccaatttcaaaaccagcccatataattaatcaagtttgtgggtctggattaagagcagtaatatctggatatcaatctatcaaattaggagagtcattaaatgttatttctggaggacaagagaatatgtcaatagcaccacattcaattttttttagagacgagagaaaaatttcagaagataaactgatagatacaatgattaatgatggattaacggacgcatttaataattatcacatgggagttacagcagaaaatattgcaaaaaaatttgacatatctaaaagggaacaagatgagtttgctctaaattctcaaaaaaagacagaggacgctatcaaaaataataaatttgacgatgaattaatcaagattaatcaaggtaataacatgctagatttagatgaacatccacgaaaaggtttaaaaatttcggatttagaaaaacttaaaacggtttttaaagaaaatggaacagtcacgcctggaaattct

SEQ ID NO: 235777 - DNA, 496 bp, Unknown
  Bacterial polypeptide expressing nucleotide sequence isolated from the Sargasso Sea
gatgcaaaaacttcggccagcttttaccaaagacggaactgtaactgcagcaaacgcatcaggtataaatgatggagcagcgggtgttcttgtcatgtcgaaagagcaatccgaaaataaaggcattgagccacttgctactataaaatcttatgccacagctgctttagaccctgcaataatgggagtaggacctgtaaatgcctcaacgaaagctttagataaagcaggctggagagttgaagatttggatcttgttgaggctaatgaggcatttgccgcccaagctcttgccgttaataaggacatgggatgggaccctgaaatagtaaacgtaaatggcggagcaattgctattgggcatccaattggtgcttcaggcgctagaattctaaacacattactattcgaaatgaaaagacgtgatgtaaaaagaggcctagcaacactctgtataggtggtggcatgggcgttgcaatgtgtcttgagcgttaa

SEQ ID NO: 235778 - DNA, 727 bp, Unknown
  Bacterial polypeptide expressing nucleotide sequence isolated from the Sargasso Sea
gttcgacaaggggcggctgatgggcaccttcgccgaagaatgcgccgacgcgttcggcttcagccgtgaagcccaggacgcttacgcgctcgagtccctgcgccgcgctcaggtggcaatcagcgaggggcgttttgccgaagagatcgttgcgctggaggtcacccagggcaaacagcagcggcatattcgcgacgacgagcagccaccaaagacgatgccggaaaagattcccagcctgaagccggcgttccgcgagggcggcacggtgaccgcggccaactccagctcgatttccgatggtgccgccgcgctgctgctgatgcgccgttccgaagccgagcgctggggcctgcagccacaggcggtgatccacggccacgcggcctacgctgatgcaccgaatctgttcaccacagcgccgatcggcgcgatccgcaagctgatggagcgcaccggctggtccaccgaagacgtggatctgttcgagatcaacgaagccttcgcggtggtcgccatggccagcatgcgcgagttgggcttggaccacgccaaggtcaacgtcaacggcggtgcctgcgcgctcggccatcccatcggtgcctcgggcgcgcggatcctggtgacgctgctttcggcccttcgtgcacgtggtctgcgccgtggcgtagcggcgatctgcattggtggcggcgaagccacggccatggccgtcgaactgatctga

SEQ ID NO: 235779 - DNA, 274 bp, Unknown
  Bacterial polypeptide expressing nucleotide sequence isolated from the Sargasso Sea
gccggatggtcggtaagtgaccttgacctggttgaagcgaatgaagcttttgctgctcaggcgtgtgccgtaaataaagatatgggatgggatcctagcatagtaaacgttaacggaggggcgatagcgatagggcaccctatcggagcatcaggagctcgcattttaaatactttactatttgaaatgaaacgccggtcagcaaaaaaagggctggcaacattatgtattggcggcggcatgggtgtcgcaatgtgcctagaacgagattaaa

SEQ ID NO: 235780 - DNA, 544 bp, Unknown
  Bacterial polypeptide expressing nucleotide sequence isolated from the Sargasso Sea
atgtcaaaaaattctaaagacattgttttcgttgcagctcaaagatcagccataggaagatataaaggtatttataagaatctgcaggctcataacttaggctcgttggtaataaaaagtttaattgaaaagaccaagttaaaggtagatgaaattgacgagataatattaggacaagttttgacaggatcatgtggacaaaatccagcaaggcaagcagctataaattctggaattccaaaagaaaagaccgcaataattataaaccaggtgtgtggatctggactacgatcaattgtaaatggatatcaatcaatactaacaagttctgcaaattttataattgcaggtggtcaagaaagtatgactaattcaattcatgatcaaatgatgaaagatggtttgacggatgctttttataattatcatatgggtgttacagctgaaaatgttgctgcgaaatataatatatcaagacaagaacaagataaatttgcacttcagtctcaacataaagcaaatttagcaataaacaaaaaaaaat

SEQ ID NO: 235781 - DNA, 556 bp, Unknown
  Bacterial polypeptide expressing nucleotide sequence isolated from the Sargasso Sea
tatgactaaaaattcaaatgatattgtaataaccaacgccctgagaacccccattggaaagtataaaggaaacttagcaagttatgaagcccatgatcttggttcaatcgtaataaaaaacttattaatccaatcaaaattaactccagagcagattgatgaagtaattatgggtcaagtattaacaggcaacactggtcaaaatccagctagacaagcagcaataaaggctggaatacccaatgaaaagacagcttatattataaatcaggtttgtggatcaggattaagaagcatagtttcaggttatcaaaatctaaaattgaatgatgcaaatgttataatagccggaggtcaagagagtatgacaaattgtgataaagatgtgatgcttaaagatggtttaatagatgtttataacagatatcatatgggtgtaactgctgaaaatgttgcagaaaagtggaatatatctcgaaaagagcaagacatatttgctttagactctcaatataaagcacaagtagcaattaaaaataataaatttaatgacgaa

SEQ ID NO: 235782 - DNA, 487 bp, Unknown
  Bacterial polypeptide expressing nucleotide sequence isolated from the Sargasso Sea
atgaccaaaaactataatgatgttgtaattacttcagcactaagaactccaattggaggatacaaaggctcattaaaaaatcttagtgcatcaaaattaggttcaatagtaattaaagaagtaatttacaaatcaaaattaaatacagatgagattgatgaagtgattatggggcacgttttaacttctggacttggtcaaaaccctgctagacaagcttcaatcggtgccggagtaccagtttctaaacctgctcatattattaatcaggtttgtggatctggattaagatctgttgtttcaggatatcaatcaataagtttaggagaaaataaaatagtcattgcaggtggtcaagaaaatatgtctagggcaactcatgcaatttattatagagaagataaaaaattttctgaaaaaaaattggtagatacaatgataaaagatggtttgttagattcatttaatgattatcatatgggcatca

SEQ ID NO: 235783 - DNA, 392 bp, Unknown
  Bacterial polypeptide expressing nucleotide sequence isolated from the Sargasso Sea
tatgaattcaaaaaaaaaaaatgttgttataacatcggctttacggactgctataggttcatttaatgggtctttaaagaacatgcaggcacacgatattgggtcaattgtgattaaagaagtcatagcaaaatcaaatttgaaatctaaagatattgatgatttaattatgggacaagttttaactgcaggaacaggacaaaaccctgcgagacaagcaggaattaaagctggtttagcagttgaaaaacctgcctatattataaaccaagtttgtggatctggtttaagatcaattgctgctggctaccaatctattatttctaacgatgcagttatagtagtttcaggtgggcaggaaagtatgagcaatgcacctcatgcaatcaatt

SEQ ID NO: 235784 - DNA, 622 bp, Unknown
  Bacterial polypeptide expressing nucleotide sequence isolated from the Sargasso Sea
taaaactatcaaagctatggatagtaaaaaatttatagacgaaattgttcctataaaattaaaaaatgatattttagttaaagaagatgaatatcccagaagagatactagtattgaaaaactttcaaaattaaaaactgtttttaaatctaacggtactgttaccgctggtaattcatctggacttaatgatggtgctgcagcaatagcaatgatgaattataaattgtctaaagagaaaaaattactcccacttgctaaaattgtttcatgggcacaatgtggagtagatccttcattaatgggaacaggtcctatacctgcaacaaagttagctcttaaaaaagcaaattggaaagtctcagatcttgaattagttgagtcaaatgaagcatttgcagcacaatcaattgcagtaattaaagaattaggcttaaattctgatatagtaaacgttaatggaggcgctatatctcttggacatccaataggtgcatctggatcaagaattgtagtgacattattacacgaaatgaaaaaaagaaaacttaaaaaaggtctagcaacactgtgtataggtggaggaatgggtatcgcaatgtgtgttgaaaattttatttaa

SEQ ID NO: 235785 - DNA, 730 bp, Unknown
  Bacterial polypeptide expressing nucleotide sequence isolated from the Sargasso Sea
atgcaaaaaaattctaaagatgtagttattgtatctgctttaagaacggttattggaaaatacaatggtatatgggctaaaattgaggctcataatttaggaaaatctgtgattcaaaatattttatctcaatcaaaagtaaatcaatcatcaatcgatgaagttattataggtcaagttttaacaggaggaacaggacaaaatccagcgagacaggcagctaagggtgcaggtataccagatgataaaactgcatatgttattaatcaagtgtgtggttcaggtttaagagctattatttcagggtatcaatcaattttattaaatgattcaaaaattgtcatagctggcgggcaagaaaatatgtcattgtcaaataaagataatatgcttcaagatggtttaatagacgcatttaacaattatcatatgggagttacagctgagaatgttgcagagaagtgtaacatttcaagaaaagaacaagatagtttcgctttatcttcacaaataaaaacacaggaagcaataaaaaataataaatttaaagacgaaatactagataataaatctaatcaaatttttttggatgaacatcctagatcagatgttacaattgaaagtttatcaaaacttaaaccttcatttaaagaaaatggaacagtaacagcaggaaattcttcaggtataaatgatggtgcagctgcagttttaattatgactagagagg

SEQ ID NO: 235786 - DNA, 358 bp, Unknown
  Bacterial polypeptide expressing nucleotide sequence isolated from the Sargasso Sea
atgtctaaagaaaaaacagttgtaattacatcggcggtaagaacggctattggctcattgagtggtgctcttaagaatattcccgcatacaagctgggatctacagtaatttcgggagctataaaaaaatcaaatttaaaattcgaggatattagtgaagttattatgggtcaggttttgacaggtggcgcaggacaaaacccagctcgacaagccgcaatagattctggaattccaaaagaaattccatcttatgttgtaaatcaagtttgtgggtctggtttaagatctattgcttcaggatttcaatcaattatgtcaaatgactcaagcattgttgtgcaggaggacaagaaaa

SEQ ID NO: 235787 - DNA, 562 bp, Unknown
  Bacterial polypeptide expressing nucleotide sequence isolated from the Sargasso Sea
ttagtaattaaaaaaattttagaggatacaaaattaaattcaaatttaattgatgaagttataatgggccaggtactcacaggaaatgcaggtcaaaaccctgcaaggcaagctgcgatacgagcaggaataccaaaagaaaaaactggatatattataaatcaagtttgtggatctggtttgagatctatagcagctggttatcaatctattttattaaatgaagcaaaaataataattgccggcgggcaagaaagtatgagtaattcaaatgaagatgaaatgctcaaagatggactaatagatgcttataacaattatcatatgggcattacggcagaaaatgtcgcagaaaagtggaacatttccagacaggagcaagattcttttgcagttagttctcaacaaaaaactcaagaggcaattaaatttaaaaaatttgatgaagagctaatagataaagctatatcagatcaacatccaagaagtgatgttactttagaaagtttgtcaactttaaagcctgcttttaaaaataatggaactgttacacctggtaatt

SEQ ID NO: 235788 - DNA, 731 bp, Unknown
  Bacterial polypeptide expressing nucleotide sequence isolated from the Sargasso Sea
actttgggacatatttaataactaccatatgggaatgacagcagaaaaccttgctgaaaaatataatatatccagagaagagcaagataagtttgctattgagagccaaggaaaggctaaaaaagcaatgagacaaggagtatttaaaccagagattgttcctgttgaacttgcaaaaggtgtatttgatactgatgagcatcctcgtgaggtttcaatggctgcactgagtaggcttaagccagtatttactactgaaggctcagttacagctgggaatgcttctggtattaatgatggtgctgctgcaatgatagtttcttcagaagaaaaagctaaagaattaggcttgaaacctgttggtgaggtcatatcttatgcagtttcaggtgttgaaccttctgttatgggaattggtccagtaccagctatgaataaagctttagcgaaagcggggttaacaattgacgatatagatttagtggaattgaatgaagcatttgcagtccaatctcttgcagttttaagtgatttccctatacctgcagagaaattaaatgtaaacggtggagctgttgcactaggtcatcctattggtgcttctggttcaattttaattgtaaaacttttacacgaaatgcaaagaagaaaagttaaaagaggcttggtttctttatgtgttggtggtggacaaggaattgcaatggtaattgaaaatcctaatgcataat

SEQ ID NO: 235789 - DNA, 517 bp, Unknown
  Bacterial polypeptide expressing nucleotide sequence isolated from the Sargasso Sea
tatgagcaaaaactctaatgatgttgttattacgtctgcacttagaactccaataggaagatataaaggttcattaaaaaatcttagtgcgtcaaaattaggatcaattgtaattaaagaggtaatttataattcaaaattagacgttgaggagattgatgaagtaataatggggcatgttttaacttctggacttggtcaaaatcctgctagacaagcctcgattggagctggattaccagtttcaaaacccgctcatattgtcaatcaggtttgtggatccggattaagatctgttgtttctgggtatcaatcaatcagtttaggagaaaatcaaatagttgttgcaggtggtcaagaaaatatgtctagagcaactcatgcaatttattatagagaagataaaaaattttctgaaaaaaatttagtagatacaatgataaaagatggtctatcagactactttaatgattatcatatgggtgttacagctgagaacgttgcagagaaatataaa

SEQ ID NO: 235790 - DNA, 567 bp, Unknown
  Bacterial polypeptide expressing nucleotide sequence isolated from the Sargasso Sea
tatgacagataaatcaaaagaagtagtgattgtaagtgcgataagaactccaataggaacttataaaggttcgttgaaaaatatgagatcagatcaacttggatctatagttattaaagaagttttaaaaaaatcagaatttgataaaaatgagattgatgaaataataatgggtcaagttttaaccgctggtgcaggacaaaaccctgccagacaagcagcaataaatgctggtatacctatttcaaaaccagcacatttaataaatcaggtatgtggatctggattaagggcagtaatatcaggctatcaatctattatgttaggagacgcaaataaagtgattgctggtggacaagaaaatatgtcaaaagctcctcattcaattttttatagagatcaaaaaaaaatttcacaagataaattactagatacaatgatcaatgatggattaattgatgcatttaataattatcatatgggtgtaacagcagaaaatgttgctaaaaaatttaatatttcaagacaggaacaagatgaatttgctctaaattctcaaaaaaaaac

SEQ ID NO: 235791 - DNA, 649 bp, Unknown
  Bacterial polypeptide expressing nucleotide sequence isolated from the Sargasso Sea
atgactgatattgtaattgcttctgccgctaggactgccgtaggtagttttggtggatcatttgctaatgttccggcacacgatttaggctctacagtactttcagccttagttgaacgagctggcataaaaaaagaagaagtttcagaaactattcttggacaggtgctatcaagtgggcaaggccaaaacccagcgaggcaagctcatgtaaatgcaggattaccaattgaaagcgcagcttggggtattaatcaagtttgtggatcaggccttagagcggtagccttagccgcgcagcacgttatgcttggagatgcggatattgttgcggctggaggtcaagaaaatatgactttgtcaccacacgtatcacacctacgctcagggcaaaaaatgggcgatgttaagtatatcgatagcatgattaaagatggcctttgggatgccttcaacggttatcatatgggacaaactgcagagaatgttgcagaaaaatggcaaatcagcagagaaatgcaagatgagtttgccgtagcttcgcagaacaaagcggaaaatgcgcaaaagctggataaatttaaagatgaaattataccttttgtagtcaaacatcgtaaaggtgaaattacagtagataaagatgagt

SEQ ID NO: 235792 - DNA, 354 bp, Unknown
  Bacterial polypeptide expressing nucleotide sequence isolated from the Sargasso Sea
aatgtcaaaatttctaaaagaagtagtttttgtttctgctttacgaacatcaatcggtagatataaaggtattcattcaaaactaaaagctcacgaattaggttctcaagttataaaaaaattaattaaaaatacaaatttaaaaacaaaagaaattaatgaagtaatttttggacaggttttaactggttcaacaggtcaaaatcctgcaagacaagctgctattagtgcaggtattccctttgaaaaaactgccttacttattaaccaagtttgtggttccggattaagatctattgtatccggatatcaatccattatgatgaatgatagcgagattgttattgctggtgg

SEQ ID NO: 235793 - DNA, 787 bp, Unknown
  Bacterial polypeptide expressing nucleotide sequence isolated from the Sargasso Sea
taaaggatctctcaagaacatcagtgcagataagcttggtgcgttggttattaaagaggcaattttcaaatcaagtcttaaaggagaagatgtagatgaggttattatgggacatgttctcacagcaggtcttggtcaaaatccagcaagacaagcttcgattcacgcaggcgttcctgtttcaaaaccagctcatatagtaaatcaagtatgtggttctggtttgagatcaatcatatctgcctaccaatcaataaagttagagcaaaatgagattgttgttgcaggtggtcaagaaaatatgtctagagcaacacatgcgatattcttgagagatgataaaaaatttattgaggataatttgatagatacgatgattaaagatggacttacggactcttttaataattatcatatgggtgttacagcagaaaatattgcagaaaaatatcatataacccgacgagagcaggatattttttccataagttctcaaaaaaaagctaaaaaggcttatgaggaaaaaaagttcaatgacgaattaataaaattacaaatacaaagtaataatgaaaaatttatttttgaacatgatgaatatctaagaaataacataactttagatgatttagaaaaactaaacacggtgtttaaagaaaatggaactgtcactcctggaaattcatctggattaaatgatggcgctgccgcattagttttaatgacgagagaaaaagccgagctaaaatctttagaaattcttgcaagcattgtgtcttggtcatca

SEQ ID NO: 235794 - DNA, 925 bp, Unknown
  Bacterial polypeptide expressing nucleotide sequence isolated from the Sargasso Sea
gacgttgttattacctctgcattaagaacaccaataggtaaatacaaaggatctctcaagaacatcagtgcagataagcttggtgcgctggttattaaagaggcaattttcaaatcaagccttaaaggagaagatgtagacgaggttattatgggacatgttctcactgcaggtcttggtcaaaatcctgcaagacaagcttcaattcacgcaggcgttcctgtttcaaaaccagctcatatagtaaatcaagtatgtgggtctggtctaagatcaatcgtatctgcctaccaatcaataaagttagagcaaaatgagattgttgttgcaggtggtcaagaaagcatgtctagggcaacacacgcgatattcttaagagatgataaaaaatttattgaggataatttgatagatacgatgattaaagatggactgacggactcttttaatgattatcatatgggtgttacagcagaaaatattgcagaaaaatatcatataacccgacgagagcaggatactttttccataagttctcaaaaaaaagccaaaaaggcttatgaggaaaaaaagttcaatgacgaattaataaaattacaaatacaaagtaataatgaaaaatttatttttgaacatgatgaatacctaagaaataacataactttagatgatttagaaaaattaaatacagtgtttaaagaaaatggaactgtcactcctggaaattcatctggattaaatgatggcgctgctgcattagttttaatgacgagagaaaaagccgagctaaaatctttagaaattcttgcaagcattgtgtcttggtcatcatcaggagtagaaccttctctgatggggcttggaccgataccttctattaaagaagctcttattaaagctcaatggcaagtagaggacatagatt

SEQ ID NO: 235795 - DNA, 323 bp, Unknown
  Bacterial polypeptide expressing nucleotide sequence isolated from the Sargasso Sea
gtttactacagcccctagtaaagctataggtaaggtattgaataaagctggcctaaaagcgaacgatattgatctttgggagatcaatgaagcttttgcagttgtagcaatggctgcaatagaagaccataatattcaatatgaaaatgtaaatatatatggtggcgctgttgcgctagggcatcctataggagcttcaggagcaagaatcctcacaacattgattcatggaatgaatcgccaaaatgttgataggggtctagcgactctttgtattggcggaggtgaggcgtctgctctgatcgttgaaaaatatgattgat

SEQ ID NO: 235796 - DNA, 385 bp, Unknown
  Bacterial polypeptide expressing nucleotide sequence isolated from the Sargasso Sea
aaaaaatagaaatatagagccaatggcaagaatagtttcatgggctagtgctggagtggatccatcaatcatgggaacaggtccaataccagcaagcagaagagcattagaaaaagctggatggtcaattaatgatctagacttaattgaatctaatgaagcttttgcagcacaatcttgcgctgtaaataaagagttaggatgggatacctctaaagttaatgtgaacggtggtgcaattgctatcggacatccaattggtgcatctggcacaagaatattggtaactttacttcatcaaatgaaaaaacaagatgctaaaaaaggcctcgctaccttgtgtattggcggcggcatgggaatagcactctgcgttgaaagataa

SEQ ID NO: 235797 - DNA, 370 bp, Unknown
  Bacterial polypeptide expressing nucleotide sequence isolated from the Sargasso Sea
aatgaacgaagttgtaattgtacaggccattagaactccaattggagcttataaagggtctctaaagaaattaagtgctgataagctaggatcaattgttataaaagaaattttaagaaaaacgaaatttaacaaagatgatattgatgaaataattatgggccaagttcttactgcaggaggaggccagaatcccgcaagacaagctgcgctaaatgcaggcatagatatttcaaaaccagctcatatagtaaatcaagtatgcggctctggacttagagctgtaatatcaggatatcaatctattagattaggagaagcaaaaagtgtaatatcaggtgggcaggaaaatatgtcattagctccacat

SEQ ID NO: 235798 - DNA, 733 bp, Unknown
  Bacterial polypeptide expressing nucleotide sequence isolated from the Sargasso Sea
atgaacaaaaaaccttatgatgttgtcattacttctgcgctaagaaccccaatcggaagatataaaggttcattaaaaaatcttagtgcatcaaaattaggatcgatagtaattaaagaagtaatttataaatcaaaattagacgtagaggagattgatgaagtgatcatggggcatgttttaacttctggactgggtcaaaatcctgctagacaagcctcgattggagctggagtgccagtttcaaaacctgcccatagtgtcaatcaggtttgtgggtctggattaaggtctgttgtttctgcgtatcaatcaatcagcttaggagaaaatcaaatagttgttgcaggtggtcaagaaaatatgtctagagcaactcatgcaatttattatagagaggataaaaaattctctgaaaaaaaattagtagatacaatgataaaagacggtctacttgattcatttaatgactatcatatgggtgtcacagctgagaatgttgctgagaaatataaaatttcaagagatgaacaagataatttttctttaaattcacagaaaaaaacagaaaaagcttatatcgaaaataaatttaaagatgagctgataaaattacaaattgaagatagtaataaaaaatttatttttgaaaaagatgagcatcccagacaaaatttaagtttagatgatttaaaaaatttaaaaactgtattcaagaaaaatgggactgtaa

SEQ ID NO: 235799 - DNA, 622 bp, Unknown
  Bacterial polypeptide expressing nucleotide sequence isolated from the Sargasso Sea
tatgataaaaaaagatatagttattacctcagctagtagaactgcagttggttctttgggtaaatcattaaaaaatattcctggggatgatatgggttctgcggtaattctagacacaattaaaaaaacaaatataaaaaccgaagaagttgatgaagttataatgggtcaagttctaagtgcttcaacaggacaaaatcctgcacgtcaagcagcaatgaaatctggtattccaaaggagaaaccagcttacgttgttaatcaagtttgtggatctggattaagatctattgcatcaggataccaaagcataatagcaggtgactcaaaaattgttattgctggaggtcaagagtctatgtctttagccccgcatgcagtacacttaagagatggaaaaaagctaggtaatactgagatgacggatactatgattaaagatggtttgtgggatgctttccatggatatcatatgggtatgacagcagaaaatgtttctacaaaatttcaagttaccagagaagatcaagataaatttgctttaaaatctcacgaaaaaactcttaaagctcaaaaggaaaataaatttaaggaagaaataattaattttaagattaaatca

SEQ ID NO: 235800 - DNA, 427 bp, Unknown
  Bacterial polypeptide expressing nucleotide sequence isolated from the Sargasso Sea
atggctaatgaagttttcatagtgtctggcgcaagaactcccatagggagttttatggggaatttaagctccttttcagctccagagcttgccgccgcggcgattcaaaagaccctagatacaagctctattgaagcagaccaaatagatgaagtgctcattggcaatgtagtaagcgccggattgaaacaagcgcctgctagacaagcgatgagactggctgggatacccgatcgatgtggagcaacaaccatcaataaggtttgtggctcgggaatgaaggccaccatgttagctttcgatctgattcgtagtggtagcgccgacacagtcttaacaggaggtatggagagtatgagcaacgcgccatatcttctcgcaaatgctcgatcaggcctacgaatgggacattcagacacactagact

SEQ ID NO: 235801 - DNA, 687 bp, Unknown
  Bacterial polypeptide expressing nucleotide sequence isolated from the Sargasso Sea
tatgaataattcattgaatgatgttgtgattatagaagctgttagaacaccgattggcgcttataaaggatctcttaaagagttaagtgctgataagttgggatcaattgttatcaaggaaattttaagaaaaagtaaattggacaaagatgatattgatgagataattatgggccaagtacttacagctggtggaggtcaaaatcctgcaagacaagcagcaataaatgcaggtataaatatctctaaaccagcttatatagttaatcaagtttgtggatctggacttagagctgtaatctcaggatatcaatcaattaaattaggagaagcaaaaaatgtaatttcgggtggtcaagaaaacatgtcattagctccacattcaattttttatcgcgataataaaaaaatttcagagaaacatttgatagatacaatgataaatgatggattgatagacgcatttaataattatcatatgggtgtgactgctgaaaatgttgcaaaaaaatttaatatttcaagagcagaacaggatgattttgctctaaattctcaaaaaaaaactgaaattgcaattaacacaaataaatttaaggaagaactaatcaaaataaatcaacctggtatcaatcttgataaagatgagcatccaagaaaagagctaaataaatcggatttagagaa

SEQ ID NO: 235802 - DNA, 637 bp, Unknown
  Bacterial polypeptide expressing nucleotide sequence isolated from the Sargasso Sea
atgactgatatagtaattgcctctgctgctaggactgccgtaggttcatttggtggatcatttgctaaaattccagcacacgatcttggctctaccgtgctttcagcgctagttgagcgcgctggcataaaaaaagaagaggtttcagaaactatcctaggacaagttctatccagtggacaaggtcaaaacccagcaaggcaggcccatgtaaatgcgggattaccaattgaaagtgcagcctggggtattaatcaagtttgtggctcaggcctaagggctgtggccttagcagcgcaacacattatgcttggagatgcggatattgttgcggctgggggtcaggaaaatatgactttgtcaccacacgtatcacatctgcgctctggccaaaaaatgggtgatgttaagtatatcgatagtatgatcaaagatggtctttgggatgcttttaatggttatcacatgggccaaactgctgaaaatgttgcagagaaatggcaaattagcagagaaatgcaagatgaatttgccgttgcttcacaaaataaagcagaaaatgctcaaaagctaaataagtttaaagatgaaattgttccttttgtagtcaaacatcgcaaaggtgatattacagtag

SEQ ID NO: 235803 - DNA, 493 bp, Unknown
  Bacterial polypeptide expressing nucleotide sequence isolated from the Sargasso Sea
ctaaagcctgcatttgataaagatggttccataaccgcagcaaatgcttcaaaattaaatgatggtgcagccgttatgcttataactagtgaggaaaatgctaaagatctgggattgaaacctttagtgagaattatagaacaagcctctgcttcacatcagccagaatggtttactacagcccctagtaaagctataggtaaggtattgaataaagctggcctaaaagcgaacgacattgatctttgggagatcaatgaagcttttgcagttgtagcaatggctgcaatagaagactataatattcaatatgaaaatgtaaatatatatggtggcgctgttgcgctagggcatcctataggagcttcaggagcaagaatcctcacaacattgatcaatgggatgaatcgtcaaaatgttgataggggtctagctaccctttgtattggtggaggtgaagcgtctgctctgatcgttgaaaaatatgattgat

SEQ ID NO: 235804 - DNA, 292 bp, Unknown
  Bacterial polypeptide expressing nucleotide sequence isolated from the Sargasso Sea
atgagtaatagcataaaagatgtagttattgttggtgcagttagaactccaattgggacctataaaggatcgttaaaaaatatgcgatctgatcaacttggatcaatcgttataaatgggcttatggaaaaatctaaattttctaaagaagaaattgatgaggtaataatggggcaagtgttgactgctggtgccggccaaaatcctgcaagacaagctgcaattaatgctggaataccaaactcaaaaactgctcatatagtaaatcaagtatgtgggtcaggcttaagat

SEQ ID NO: 235805 - DNA, 560 bp, Unknown
  Bacterial polypeptide expressing nucleotide sequence isolated from the Sargasso Sea
aatgtattctcattcagtaataatcaaagccaggcgaactcccattggttcatttcaaggtgaattatcttcattctctgctgttgatctagcttcttttgttattgaggatatttttaaagatagaagaataagtccagaaatggtcaatgaaataatccttggcaatgttttatcagctgcacagggtcaagcacccgcaaggcaagctgcgttgaaaggaggatgcataaatttgatagaagctttaactataaataaaatgtgtggctctggtttaaaagcaataatgttagctgatcaagctattaggtgtggtgatgcagaacttgtgtttgctggaggaatggaaagtatgtctaatgcaccccatttattaacaaatcttagaagtggagagagattaggccattcaacggttattgacagtttgatccatgatggtttatgggacgtgtatacacaacagcatatgggtagctgcgcagaactattggctgaagaacgtaaatatagtagagaagatcaggataattttgctattaaatcctattcaaagg

SEQ ID NO: 235806 - DNA, 601 bp, Unknown
  Bacterial polypeptide expressing nucleotide sequence isolated from the Sargasso Sea
caagttttaactactggtgggggacaaaatcctgccagacaagctgcaattaacgcaggtttatcaatttcaaaacctgctcacatagttaatcaagtttgtggatctggtttacgagctgttatatctggttttcattcaattaaattaggatatgcaaaaagtgttattgctggtggtcaagaaaatatgtcgatttctcctcattcaattttttatagagaagaaaaaaaaatagcagaagacaaactattggacacaatgattcatgatggtttattagatgcatttaataattatcacatgggtgtaacagcagaaaatgttgctaaaaaatttagtatatcaagacaagatcaagatgaatttgctttaaattctcaaagaaaaacagagcaagcttttaataatggtagatttgacaatgaaatggttaaagttaatcataatggtaattttttagatagagatgaatatcctagatttaatttgaaaatttctgacttagaaaagttaaattcagtttttcaaaatgacggaactgttacagcaggtaattcttcagggataaacgatggtgcagcagctttattattaacat

SEQ ID NO: 235807 - DNA, 475 bp, Unknown
  Bacterial polypeptide expressing nucleotide sequence isolated from the Sargasso Sea
catgagtggtaattcaaaagatgtagtgatagtagaggcagcaagaactcctataggtacttataatgggtccctaaaagacataaaagcacatcaacttggatcgatagtaattaatgaggttttaaagaggagcaatgtaaatcctaatgaagtagatgaaataattatgggtcaggttttaactgcgggaatgggacagaatcctgccagacaagctgcaatcaacgcaggaatacctgtttcaaaacctgcttatattgttaatcaagtttgtggttcaggattaagagctataatttcaggatttcaatcaattaaattgggagactcaaaaatagttatttccggcggacaagaaaacatgtcaatcgccgccaaaatagagataaaaaaaaatgaaaaaaaaaattcagaaaacaaatttttagatgtaatgatgaatgatggattgcttgatgcatttaaaaattat

SEQ ID NO: 235808 - DNA, 457 bp, Unknown
  Bacterial polypeptide expressing nucleotide sequence isolated from the Sargasso Sea
tatgaaaaatatagtcataacctcagcaacaagaacagctataggttcactaaatagaagtttaaaaaatgttcaaggatttgaattaggttcttgtgtaatcaaagattcaattttgaagtcaaaaattaataatgatgaagttgatgaagtaatacttggccaagtcttaactggaggtgctggccaaaatcctgcgagacaagcttccattcactctggtatacctaaagagaaacctgcttatattgtaaatcaagtctgcggttctggtataaggtctgtggcgtctggatttcaaagtataaaatctggtgactcaaatataattatagctggaggacaagaaagcatgtcattagctcctcatgctattcatttaagagatggacagaaacttggtgatactgaattaactgataccatgatccaagacggggtatgggatgcatttcat

SEQ ID NO: 235809 - DNA, 776 bp, Unknown
  Bacterial polypeptide expressing nucleotide sequence isolated from the Sargasso Sea
ggggcatggccaaacgctcgatcatatgatgttagatggattagagaatgcttatgacggaaaagcaatgggctgttttgcacaagatacagcggatagcgaaagtattactcgtgaacaaatggatgagtttgcccttggctcgctgagcaaagcaaataaagctatcgctgatggcacgtttgtcgatgaaattgcaccggtaaccgtaaagtctcgcaaaggtgaccttgtggtagacactgatgaaggtccaggtaatgcacgtcctgaaaaaattccagctctgcgtccagcattcaagaaagatggcactgttacagctgcaaactccagttccatttctgacggtgctgcagcattagttatcatgtctgaatccaaagccaatgcgctaggtttgaaaccattagcaaaaatcgtcgcgcatgctacgaacgcaataaaaccggaagactttacggttgctcccgttggcgctattgagaaagtatttgctcaaaccggttggacaaaagatgatgttgatttatttgaaatcaatgaagctttcgcaatggtcacgatgctgggtatgaataaactgggtttagatagcagtaaggttaacattaagggcggcgcatgcgcgttaggccatcctattggcgcctctggcgcacgtatcgttgtaacgctactacatgcattaaaacaacagggcttgaaaaaaggagttgctgcgttatgtatcggtggtggtgaaggcaccgcattagctgttgaaatgctttaat

SEQ ID NO: 235810 - DNA, 412 bp, Unknown
  Bacterial polypeptide expressing nucleotide sequence isolated from the Sargasso Sea
tatgaccaaaaactctaacgatgttgtaattacttcagcactaagaaccccaattggaggatacaaaggttcgttaaaaaatcttagtgcatcaaaattaggttcaatagtaattaaagaagtaatttacaaatcaaaattaaatatagaggagattgatgaagtgattatggggcatgttttaacttctggacttggtcaaaaccctgctcggcaagcttcaatagctgccggagtaccagtttcaaaacctgctcatattgttaatcaagtttgtggatctggattaagatctgttgtttcgggatatcaatcaattagtttaggagaaaataaaattgtcattgcaggtggtcaagaaagcatgtctagagcaactcatgcaattttttatagagaagataaaaaattt

SEQ ID NO: 235811 - DNA, 265 bp, Unknown
  Bacterial polypeptide expressing nucleotide sequence isolated from the Sargasso Sea
ttattttcaggtttagataagtctactcagtgcttaagtattaataagatgtgtggttcaggacttcaatgtattgtaatagctgatcaaataattaataataatccagatgagattattattgcaggtggtatggaaaatatgagtcagtcacctcattatctattaaactcacgtactgggaatagacttggagatggcaagttggttgatggaatgattatagatgggttgtgggatgtatataataataagcacatgggaa

SEQ ID NO: 235812 - DNA, 439 bp, Unknown
  Bacterial polypeptide expressing nucleotide sequence isolated from the Sargasso Sea
atgagttttgataaaaattctattgtaataacttctgcggttagaacagcaatagggacttttcgtggatctttaaaagaaatgcaagcaaaagatctgggagccttagtaaccaaggctgctatgaaaaaatctaatttaaatcctccggaagttgatgaattgataatgggtcaagtattgacaggtgccactggacaaaaccctgcaaggcaagcagctattcaatcaggtctacctaatgaaaaaactgcttatgtaataaatcaagtttgtggttcaggactaagatctattgcggctggctatcaagcaattgtatctaatgactcaaaaataataattgcaggcggacaagaaagtatgacaaacgcaccgcatgcaatcaattttcgtaatggagaaaaattagaggagtcaaaacttgtgacacaatgat

SEQ ID NO: 235813 - DNA, 265 bp, Unknown
  Bacterial polypeptide expressing nucleotide sequence isolated from the Sargasso Sea
acaacaactgatgtagacctttgggaaattaacgaagcttttgccatggtaacaatgcttgcaataaacgagcttaagcttgatgaaagcaaagtaaatgttaacggtggggcatgtgcacttggccacccaattggtgccagtggcgcacgtattttggttacgcttatacacgctcttaaaaaccgaggccttaaaaaaggcgttgcttctttatgtattggtggcggtgaagccgttgcaatggcagtagaagcttactaag

SEQ ID NO: 235814 - DNA, 577 bp, Unknown
  Bacterial polypeptide expressing nucleotide sequence isolated from the Sargasso Sea
aatgaatgaagttgtaattgtagaagctatcagaactccaattggagcttataaagggtctcttaaagaattaagtgctgataggttgggatcaattgttattagggaaattttaagaaaaagtaaattaggtaaaaatgatattgatgaggtaattatgggccaagtactcacagctggtggaggccaaaatcctgcaagacaagctgcgataaatgcaggtatagatatttctaaaccagcccacatagtaaatcaagtttgtggctctggacttagagctgtaatctcaggttatcaatcaataaaattaggagaggtaaaaattgtaatttctggtggacaagaaaacatgtcattagccccacattcaattttttacagagacagtaaaaaaattttagaggaacatttgatagatacaatgattaatgacggattgatagatgcatttaataattatcatatgggtgtaaccgctgaaaatgttgcaaagaaatttaatatttcacgagttgaacaagataactttgcattaaattctcaaaaaaaaacagaaattgcaattaatactaat

SEQ ID NO: 235815 - DNA, 820 bp, Unknown
  Bacterial polypeptide expressing nucleotide sequence isolated from the Sargasso Sea
catgaatgaagtatatataacatctgctttaagaacagcagtgggttcgttgggaaaatctcttaaaaatgtaaaagctgaggaacttggttcaaaagttattaaaaatgtgattaaagagtccaaactacaaagccaagatatagacgaagtaattatgggacaagtgcttactggaggaagcggtcaaaacccagcaagacaagcggcgatcaagtcaggagttccaaaagaaaagccagcttttgttgttaatcaagtctgtggatctggaataagatcaatcgcatctggttttcaaagcattaaagcaggtgactcaaaaatactagtagcaggtggccaagaaaatatgtctttagcacctcacatgattcatttaagagacggaaaaaaattaggtgacacagaattaattgacacaatgataagagatggattatgggatgcatttaatggataccatatgggagtaaccgcagaaaatgttgctgaaaaatttcaggtaactagaaaggaacaagataaatttgcacttaattcccaagaaaaggctttgaaagctcaaaaagagaataaattcaaaaatgaaatagtagatttaatggttgcttcaaaaaaaacagaaattaattttaaaaaagatgaacatccacgagaaggtataaatcttgatactttatctagattaaagcctgtttttaaaaaagatggtaccgtaactgcaggcaatgcatctgggataaatgatggcgctgcagctgttatgctaatgtccagcgaagaggctaaaaaaaaagatattaaaaaatttggtatc

SEQ ID NO: 235816 - DNA, 712 bp, Unknown
  Bacterial polypeptide expressing nucleotide sequence isolated from the Sargasso Sea
atgaaaaaaaattctaaagatgtagttattactgttgctcttcgtacagcaataggaagatataaaggggtctggagcaaatttaaagctcatgatttgggagaaatggtaataaaaaatattttaaataattcaaaaattgaaccaaaattaatagatgaagttgttatggggcaagttttaagtggagatactggacaaaatcctgcgagacaggcagcaattagagcaggcatacccaacgaaaaaactggatatttaattaatcaagtatgtggatctggtctgagagctatagttgcagggtatcaatctattttactaggagatgctaaaataattattgccggaggacaagagagcatgacaagttgtaaccaagaagttatgttaaaagatggtttaattgatgcgtttaataattatcatatgggcatcacagcagaaaatgtagctgagaagtggaacattacaagaaatgatcaagatatatttgcagcttcttctcaaactaaagcacaagaagcaataaaaaataataagtttaatgaagaaataattaatgatcaatcctcaacagatgaacatccaagatctggagtaacaattgaaactctttcaaagctcaaacctgcttttaaagaaaatggaacagtaaccgctggcaattcttctggaataaatgatggtgctgctgctgtactattaatga

SEQ ID NO: 235817 - DNA, 513 bp, Unknown
  Bacterial polypeptide expressing nucleotide sequence isolated from the Sargasso Sea
tatgcagcgaaaatcagtaatagttgcggcaaaacgtacaccaattggctcattccaaggccaactctcatcctattcagcttctgatttaggttcatttgttataaaacaaattttacaagaaaccaaattagataaaaacagtatagatgaggtaattctggggaatgttctttcggcaggacaaggccaggcacctgcaaggcaggccacaatcaaaagtggatgtccaaatacgattgaaacactaactattaataaaatgtgtggttcaggtttaaaagctgttatgttagctgatcaaattattaggtgcggtgacgctgatattatattagctggtggcatggagagtatgagcaatacaccctttatttctcaaaatatgagattgggacagagattagggcacgcgaggttcatagatagtatgattcatgatggtttgtgggatgcatatacaaaccaacatatgggtaattgcgctgaaatgttagcaaaagaccgaaattt

SEQ ID NO: 235818 - DNA, 646 bp, Unknown
  Bacterial polypeptide expressing nucleotide sequence isolated from the Sargasso Sea
ccaagatcaatattctgtccaatcttataatcgtgcgcagaatgctcaggagaaaggatatttttccgatgaaatagtgccaataaaaaatgctgatggaactttaatctgctccgatgaagaacctacgaaagcaaaatacgataaaatacctctgataaaaccagcatttgataaaaatggtactatcacagcagcaaatgcatcaaagttaaatgatggtgcagctgctgtgatgttaatgtcaaagaagaaggttgaagaatgcggtataaaaccaatggctcgaattctgtctcattgttcattcgctcatgacccaaaatggtttacaactgctccgggatacgcaataacaaaagttctaaaacaatctggactagataagaacgatattgatctttgggaaataaatgaagcttttgcggctgtagctatggctgcaattgatgattttcaattagatagcaccaaagtgaatattaacggaggatctatagctctagggcaccccattggcgcttctggagcaagaatattgacaacattgatttatgccctagaaaaaatgaataaaagtcttggattggcaacattatgtattggtggtggcgaagcatctgctatgatcattgaaaaattatga

SEQ ID NO: 235819 - DNA, 415 bp, Unknown
  Bacterial polypeptide expressing nucleotide sequence isolated from the Sargasso Sea
aatgagtaaaattcctaaagacgttgttattacctctgcattaagaacaccaataggtaaatacaaaggatctctcaagaacatcagtgcagataagcttggtgcgttggttattaaagaggcaattttcaaatcaagccttaaaggagaagatgtagatgaggttattatgggacatgttctcacagcaggtcttggtcaaaatccagcaagacaagcttcgattcacgcaggcgttcctgtttcaaaaccagctcatatagtaaatcaagtatgtggttctggtttgagatcaatcatatctgcctaccaatcaataaagttagagcaaaatgagattgttgttgcaggtggtcaagaaaatatgtctagagcaacacatgcgatattcttaagagatgataaaaaaaatttt

SEQ ID NO: 235820 - DNA, 581 bp, Unknown
  Bacterial polypeptide expressing nucleotide sequence isolated from the Sargasso Sea
aatgaatgaggttgtaattgtagaggctattagaactccaattggagcttataaagggtctcttaaagaattaagtgctgataaattgggatcaattgtcattagagaaattttaagaaaaagtaaattagataaagatgatattgatgaggtaattatgggccaagtgctcacagctggtagtggccaaaaccctgcaagacaagctgcaataaatgcaggtatacatttttctaaaccagcccatatagtaaatcaagtttgtggctctggacttagagctgtaatttcaggttatcaatcaattaaactaggagaagtaaaaaatgtaatttctggtggccaagagaatatgtcattatctccacattcaattctttatcgagataataaaaaaatttcagagaaacatttggtagacacaatgataaatgacggattgatagatgcattcaataattatcatatgggtgtaaccgctgaaaatgttgcaaagaagtttaatatctcaagagtccatcaagatgaatttgccttaaattctcagaaaaaaacagaaactgctatcaataataatagat

SEQ ID NO: 235821 - DNA, 673 bp, Unknown
  Bacterial polypeptide expressing nucleotide sequence isolated from the Sargasso Sea
atgaaagaaaaaagtatagtaattacctcagctttgcgtacagctataggctcatttaatggtgctttgaaaaatatgcaagcgcacgatctcggaaaattcgttattaaagaaagtataaaaaattcaaaattaaaactagatgaaatagacgaagtaataatgggacaagtattaacaagtgcttctgggcaaaatccagcccgacaagcagccattaacgcaggagtaccaatcaaaaaaacagcgtatgttataaaccaggtctgcggttctggattaaggtcagtagcatcaggctaccaatcaattatctccaacgattcaaaaatagtaattgctggagggcaagaaagcatgagcaatgccccacatgctgtccattttagaaatagaaaaaaattagaagaaaaagatctcattgatactatgattaaagatggactctgggacgcttttaacggataccacatgggagtaactgcagaaaatgttgcaaataaatgggggattacaagaaaagatcaagatcattttgctttttcttcacagaacaaaactgcaaacgcacaaaaagcaggaaagtttagaaatgaaattattccaatagttttaaaatcctcaggaaaaaatattacatttgaggttgatgaacatccaagaaatgaaataa

SEQ ID NO: 235822 - DNA, 388 bp, Unknown
  Bacterial polypeptide expressing nucleotide sequence isolated from the Sargasso Sea
caaagcacaaaacaaaactgtattggctcacgtagttggccatgccacgcattcgcaggaaccagagttattcactgtagcccctgttggcgctgtaactaagctgttagcaaaattaggctggacaacttctgatgtggacctgtgggaaattaacgaagcttttgccatggtgactatgctggcgattaaagagctgaagctggatgtaaacaaagttaacgtcaacggtggtgcttgtgctttaggtcatcctatcggcgcttcaggtgcccgtttattagtgacgttaattcatgcgttaaaagcacgtggtttaaaacgtggtattgctactttatgtataggtggtggcgaagctgtggctttagcggtagaactgccgtaa

SEQ ID NO: 235823 - DNA, 510 bp, Unknown
  Bacterial polypeptide expressing nucleotide sequence isolated from the Sargasso Sea
tatgtctaaagaaaatggagtagtcataacatctgctgttagaacagctattggagatttaggtgggtctttaaaaaatgtttctgctcacaaactaggttcgacagctatttcaagcgctattgaaaaatcaaatattaaagcttcagatataaacgaaattattatgggccaagttttaacaggtggtgcgggacaaaaccctgcgagacaagctgctatggatgcaggtattccaaaagaaacaccatcatatgttgttaatcaggtttgtggctcgggtctaagatctattgcatcaggatatcattcaattctctcaggaaattcaaatattgttttagctggaggtcaagaaagtatgtctcaatcacctcatgtagttcatttaagaaacggaaaaaaacttggagacactagtttggttgactccatgataaaggatggattatgggatgcattccatggataccatatgggtataacagcagaaaatgttgcacaaaaatt

SEQ ID NO: 235824 - DNA, 1192 bp, Unknown
  Bacterial polypeptide expressing nucleotide sequence isolated from the Sargasso Sea
catgacgactcaggatccgatcgtaatcgttggtatggcgcgtacgccgatgggtggttttcagggcgacctggcggccgccagcgcgagcgatctcggcgcggtagcgattcgcgcggcgctcgagcgcgcgaatgtgccggccgagcgcatcgatgaaatcgtgttcggctgcgtgctgccggcgggccagggccaggcgccggcgcggcaggccgcgctgaaggccgggctgccgctcgcggccggtgcgaccacggtcaacaagatgtgcggctcggggatgaaggctgcgatgttcgcgcacgacctgctgctggcgggctcggcaggcgtggccgtcgcgggcgggatggagagcatgacgaatgcgccgtacctgctgccgaaggcgcgcgcggggatgcgcatgggtcacgggcaggtgctcgatcacatgttcctcgacgggctcgaggacgcgtacgagaagggccgcctgatgggcacgttcgccgaggattgcgcacaggcgtaccagttcacgcgcgaggcgcaggatgcgttcgcgatcgcatcgctgacgcgcgcgcaacgagcgatcgccgacgggcatttcgtgtcggaaatcgcgccggtgacggtgaaggccggcaaggtcgaaacggtcgtgtcgatcgacgagcagccgggcaaggcgaagctcgacaagatcccgacgctgaagcctgcgttccgcgacggcggcacggtgacggccgcgaatgcgtcgtcgatctcggacggcgccgccgcgctcgtgatgatgcgccgctcggaagccgagcgcctgggcctcacgccgaaggccgtgatcgtcgggcattcgacctacgcggacaagccgggcctgttcgcgaccgcgccgatcggcgcgctgcgcaagctgtcggagaagaccggctggaacctgcgcgacgtcgacttgttcgagatcaacgaagcattcgctgtggtgccgatggccgcgatgcgcgatctcgacctgccgcacgagaaggtcaatgtgcacggcggcgcgtgtgcgctcgggcatccgatcggtgcatcgggtgcgcgcgtgatggtgacgctgctggccgcgctcgaaacgtacgggatgaagcgcggcgtggcgtcgctgtgcatcggcggcggcgaggcgacggcgatcgcgatcgagcgcgtcgcctga

SEQ ID NO: 235825 - DNA, 1192 bp, Unknown
  Bacterial polypeptide expressing nucleotide sequence isolated from the Sargasso Sea
catgagtgaaaaagaaaacatcgtcatcactgggatggcaagaaccccgatgggtgccttccaggggacacttaaggacgcaagttgcgccgagctcggggcagattcgatccgtgcggccctggaacgaagccgcgttggagccgacgaggtgagtgagacgatcatgggttgtgtccttcctgcaggacagggtcaggcaccggcaaggcaggctgcactgggtgcggagatgccgctttccgtctgctgtacgacggtgaataagatgtgtggatccgggatgaaatcggccatgcttgctcatgacctgcttctgggaggagaggaacggattctggtggctggcggaatggaaagcatgaccaacgcaccttacctgcttccccgtgcccggtccggcatgcggctcggccatggtgaagtcgtcgaccacatgttccttgacggccttgaagacgcctacgaccgcggaaaattgatgggaaccttcgccgaagctactgctggacggtacggtttctccagggaagcccaggacgagttcgccatccgctccctgacccgtgccaaaaaagccattgaggaaggaattttcaaagaggaaatcgttccggtcaccatcaaaggccgaaaaggggatgcggtggttgaaaccgatgaaaccccgctcaaagccaacctcgaaaaaattcccaccctgaagcccgcttttgccaaagacgggacggtgaccccggccaattcctcctcaatctccgacggggctgcggcattggtgatgatgcgggaatccaccgcggagaaacgcggaatccgccccatcgctagaattcttggacacacggagcatgcccatgaacccgcctggttcaccacggctccggtgactgccataaaaaaactccttgaaaaactggaatggaatgcgggagacgtggatctctatgaaatcaacgaagcctttgccgtggtgaccatggcggcgatcagcgaactggaactcgatcctgaaaaagtgaatgtccacggtggggcctgtgccctcgggcatcccatcggggcctccggtgcacgaatcattgttaccctgctggcagcactgaaacaccatggtcagcgccggggattggccagtctctgtatcggagggggagaagcgactgctctcgccgtcgagttgatcgaatga

SEQ ID NO: 235826 - DNA, 763 bp, Unknown
  Bacterial polypeptide expressing nucleotide sequence isolated from the Sargasso Sea
ttgaataataaatcatatatagtccagtctgctcgaactcctattggttcttttggaagccagcttttaaatttttctgcaccagaattaggtgcattagtgattgaggaaataattgaaagaacaggtttagataaagatacagttgaagaagttatttttgggaacgttttatctgctggtattggtcaggcgccagctaggcaagcagcactaatttctggtttaccagataaagttgagtgtcttacaataaataaaatgtgcggatcaggtttaaaagctgttatgttagcagaccaggccattcgtacaaacagtgcaggggtgattattgcaggaggaattgagagtatgtctaatgctccatatttgatttcaaaaagtttaagtcgctttggtcataagcggatgatagatagcatgattcacgatggtttatgggatgcgtataatgacatgcatatggggaattgcgcagaaatgctagcaacaaaaagaagctatacacgagaggaccaagataaatattctatccaatcttataaacgtgcgcagaatgctcaggaaaaaggatatttctccgatgaaatagtgccaataaaaaatgctgatggaactttaatttactccgatgaagaacctactaaagcaaaatacgataaaatacctttgataaaaccagcatttgataaaaatggtactatcacagcagcaaatgcatcaaaattaaatgatggtgcagctgctattatgttaatgt

SEQ ID NO: 235827 - DNA, 694 bp, Unknown
  Bacterial polypeptide expressing nucleotide sequence isolated from the Sargasso Sea
aatgttgcgaaccatatggcaaataacccgagacgcacaagacgcgtttgctatgtcatcacagtgtaaagcggagctagcccagaaagaaggtaagtttaaagatgaaattatagctgtaaacgttaaatcccgacgaggggatacgatagttgaggaagacgaatatccaaaacacggcacgaatctagaaacactcggaagcttgcgccctgctttcagtaaagagggaactgtaacggctgaaaatgcatctggtatcaatgatggtgcggcagctgttgttttaatgtcttcagaggatgcaagacgccgcggaattgaacctttagctcgaattaaatcatttgctacgcgcggtgtggatccttcgatcatggggactgggccgatacctgcaagtcgagcggctctagaaaaagctggctggactgttgacgacctggatttgatagaagctaacgaggcttttgcagcccaagcatgtgcggttaataaagatatggggtgggatacgcaaaaggtgaatgtgaatggtggttcgatagcactaggccatccaattggtgcatcgggtgcaagggttttaataactctcttgcacgaaatgaaaaaaagggatgcaaaaaagggattaacaaccttatgtattggcggcggcatgggagtggctatgtgtctagagcgggattga

SEQ ID NO: 235828 - DNA, 529 bp, Unknown
  Bacterial polypeptide expressing nucleotide sequence isolated from the Sargasso Sea
atgagtaataaatcaatagaagtagttattgtcagtgcgactagaacgccaataggtacatataaaggctcattaaaaaaattaagatgtcatgaacttggatctatagttataaaagacgttttaaaaaaatcaaaatatactgcagaagaaattaatgaagtaattatgggtcaagtattaactgcaggcgccggtcaaaatcccgcaagacaagctgcaatgaatgctggtataccaatttcaaaaccagcttatacaattaatcaagtatgcgggtctggacttagagcagttataacaggttatcaatcaattaaattaggagaatttaagaatgtaatttcaggaggtcaagaaaatatgtctttagctccgcattctattttttatagagatgaaaaaaaaatttcagaagataaattattagatactatgattaatgacggattaatagatgcatttaataactatcatatgggcgttacagcagaaaatgttgctaaaaaatttagtataacacgacaag

SEQ ID NO: 235829 - DNA, 1192 bp, Unknown
  Bacterial polypeptide expressing nucleotide sequence isolated from the Sargasso Sea
atgagtactgaacaatttaaccaagagatcgttattgttgccgctaaacgcaccccaatgggtggttttcaaggcagtttgtctggcgtaacgtctccgagcttagcggccaccgccatcaaagccctgttagccgatacccaagttgcgcctgataaggtcgatgaagtgttaatgggttgcgtattgccagcgggtcttggtcaagcgcctgcgcgtcaggcgactttaggtgcaggtttacctctgtctgtaggcgctacgaccgtaaacaaagtctgtggctctgggatgaaaaccgtaatgcttgcccacgatttacttaaagcgggcagtgctaagttggtggttgcgggcggtatggaaagtatgagccaagccccttacttgctggataaagcgcgcgctggcatgcgtatgggccatggcaaggtattagatcatatgttcctcgatggtttagaagatgcctacaccggcggcgccatgggcacattcgcccagaaaaccgccgatgaatacggtttaacccgcgagcaaatggacgcctttgccctaagctctctggaaaaagccaacgcggccattaattctggcgccttcaaggcggagattgtgcctgtcacggtaagcgatcgccgtggtgatgtaactatcgataccgatgagcagccaggtaacgcccgccctgaaaaaatccccgcactgcgcccagcctttgccaaagacggcactattactgcggcaaactcaagctcgatttccgatggtgcagctgcgctgatgttaaccacgcgcgccaatgccgagcagttaggcttaactgtgctcgccactattaagggccacacaacccatgctcaggagccatcactctttaccacggcgcccgttggcgctatggcaaaactgctaagcaatgtgggctggtctaaggatgaggttgacctgttcgaaatcaacgaagcctttgccatggtgactatgctggccgtttctgaattaggtttagatatggccaaagtgaacgtgaacggtggcgcctgcgccttaggtcatcctatcggttgctcgggtgcacgtttgctggtgaccttaatccatgcacttaaagcccgtgggcttaagcgcggcgtagcctcactctgtatcggtggcggtgaagcgaccgctatggctatcgaagtctaat

SEQ ID NO: 235830 - DNA, 1162 bp, Unknown
  Bacterial polypeptide expressing nucleotide sequence isolated from the Sargasso Sea
atgtccgtcccagtaatctgtgcttatgcacgaactccggttggaaagtttcgaggttcgctttcacagttcagtgctgttgaactgggcatcatggctgtaaaggaagtctgtgttagatcgggaatagatcctgccggaggagtggtggatcaagtgtacatgggccaagttctgcaagcaggatgcgggcaggcaccggctcgtcaagtggctataggagcggggttgccggtaactactccctgcactacaatcaacaaagtgtgcggctcaagcctgaaggctgcaatgattgctgcaacagagattagggcaggagtatcggaagttgtgattgtaggagggatggagtcaatgacgaatgcaccacacattgctcggaatgtagccaaaggacaagacgtcccctttggttctcttgagtctgtactaattggagacggactgaaggacgcattcactggagagtcaatgggcaatactggggagacggtagcagaggagcatggaattaccagagaagaatctgataaattcgcagtccgctcacactccatggccaacgaagcatgggagaagggatggattagcgaagaggtttttcctgtcggttctctatctattgacgaaggaattcgtccagagacgaatgaagagattctatcatcactcaggactgttttctcagaagacggtcaagtcaccgcaggaaatgccagtcaagtctcggatggagcctctgcagtattgattgcttcagaagagaaggcaaaaagagaaggttggccaatcttagcaagaattgtggattatgccacatccggagtggagtccaacagagtgatgtccgcgccaatacctactgtcgagaagttgttgaaaatcactggtatgagattggaagatgtggacattctggagcataacgaggctttcgcttcggcttcatgcgctattagggactcattaggaattcccgatggatcattcaacccgcatggaggggcaattgccatcggacacccactcggggctactggagctaggtgcctgatgactttggttaatgccatgagaaggagaggatctaggagggggattgtgacagtttgtcttggcggtggaaacgcagtagcgatgatggtagagtgcccttagc

SEQ ID NO: 235831 - DNA, 445 bp, Unknown
  Bacterial polypeptide expressing nucleotide sequence isolated from the Sargasso Sea
aatggtcaataaattaaaagaagtagttattgttagtgctgtaagaacaccaatcggtacttataaaggttcattgaaagaaataagatctaatcaacttggatctatagttattagagaagttttgaaaaaatctaagtttaataatgatgaagttgacgaggtaataatgggccaagtattgacagctggagagggacaaaatccagcaagacaagctgccgtaaatgcaggtataccaatttcaaaaccagcttatatagtcaatcaagtttgtggttctggacttagagctgtgatatcaggttttcaatcgataaaattaggtgagtctaaaaatgtgatttcaggaggacaagaaaatatgtctattgcacctcattcaattttttttagagaaaaaaaaaaaattactgaaaaagatttatcagatacaatgatcaat

SEQ ID NO: 235832 - DNA, 367 bp, Unknown
  Bacterial polypeptide expressing nucleotide sequence isolated from the Sargasso Sea
aatgaatgaagttgtaattgtagaagctatcagaactccaattggagcttataatgggtctcttaaggaattaagtgctgataagttgggatcaatagttattagggaaattttaagaaaaagtaaattaggtaaaaatgatattgatgaggtaattatgggccaagtactcacagctggtggaggccaaaatcctgcaagacaggctgcgataaatgcaggcatagatatttctaaaccagcccacatagttaatcaagtttgcggctctggacttagagctgtaatctcaggttatcaatcaattaaattaggagaggtaaaaaatgtaatttctggtgggcaagaaaacatgtcattagcccca

SEQ ID NO: 235833 - DNA, 298 bp, Unknown
  Bacterial polypeptide expressing nucleotide sequence isolated from the Sargasso Sea
tatgcctaaaaatttaaaagatatagtttttgtttctgctttaagaacatccatcggaaaattaaatggtatttattcaaagtataaaagtcatgaattaggtgcatcagtaattaaagaaactttaaatagaacaaatttggatccaaaaaaaattgatgaagttataatgggacaagttttaactggtttaacaggccaaaaccctgcaagacagtctgctatgagtgcaaatataccaaatgataagacagcctatgttataaaccaagtttgtggatcaggattaagatctgta

SEQ ID NO: 235834 - DNA, 598 bp, Unknown
  Bacterial polypeptide expressing nucleotide sequence isolated from the Sargasso Sea
tttggatgataaatcatatatagttcagtctgtacgaacgcctattggttcttttggaagtcggctttcacatttttcagctccagagcttggttcgttagtaattaaggaaatagttacaaagataggtttagataaagaaataattgaagaagttatttttgggaatgttttatctgctggtattggtcaagcaccagctaggcaagcagcacttctttctggtttgccagataaagttgaatgtctcacaataaataaaatgtgcggatctggtttaaaagctgttatgttagcagaccaggccattcgtacaaacagtgcaggggtagttattgctgggggaactgagagtatgtctaatgctccatatttgattccaaaaagcttaagccgttttggtcacaaacggatgatagatagcatgattcacgatggtttatgggatgcatataatgatatgcacatggggaactgtgcagaaatgctagcagcaaaaaggaactatacaagagataaccaagataaatattgtatccagtcttataatcgtgcgcagaatgctcagcaaaaaggatatttctctgatgaaatttgt

SEQ ID NO: 235835 - DNA, 286 bp, Unknown
  Bacterial polypeptide expressing nucleotide sequence isolated from the Sargasso Sea
ctggaaaaactggaatggaacgcgggagacgtggatctctatgaaatcaacgaagcctttgccgtggtgaccatggcggcgatcagcgaactggaacttgatgctgaaaaagtgaatgtccacggtggggcctgtgccctcgggcatcccatcggggcctccggtgcacgaatcatcgttaccctgctggcagcactgaaacaccatggtcagcgccggggattggccagtctctgtatcggagggggagaagcgactgctctcgccgtcgagttgattcaatgag

SEQ ID NO: 235836 - DNA, 667 bp, Unknown
  Bacterial polypeptide expressing nucleotide sequence isolated from the Sargasso Sea
agaagctcaagatgaatatgcaatagaatcatatagtcgagcgcaacaagcaaccactgatggaatattccgaacagaaatagtgccagttgtgattccgcagaggaaaggagagccattggtaatagatgaagatgaagagccagctaaagcgagatttgaaaaaattccagccctaaagcctgcatttgataaagatggcaccataaccgcagcaaattcttcaaaattaaatgatggtgcagccgttatgcttataactagtgaggaaaatgctaaagatctgggattgaaacctttggttagaattttagaacaagcttctgcttcacatcagccagaatggtttactacagcccctagtaaagctataggtaaggtattgaataaagctggcctaaaagcgaacgacattgatctttgggagatcaatgaagcttttgcagttgtagcaatggctgcaatagaagactataatattcaatatgaaaatgtaaatatatatggtggcgctgttgcactagggcatcctataggagcttcaggagcaagaatcctcacaacattgatcaatgggatgaatcgtcaaaatgttgataggggtctagctaccctttgtattggtggaggcgaagcatctgctctgatagttgaaaaatatgattga

SEQ ID NO: 235837 - DNA, 441 bp, Unknown
  Bacterial polypeptide expressing nucleotide sequence isolated from the Sargasso Sea
tatgtctaaagaaaatggagttgtaataacatctgctgtaagaacagcaattggagatttaggtgggtctttaaaaaatgtttctgctcataaactaggttcgacagctatttcaaacgctattaaaaaatcaaatattaaagcttcagatataaacgaaattataatgggccaagttttaacaggtggcgcgggacaaaaccctgcaagacaagccgccatggatgcaggtattccaaaagaaacaccatcatatgttgttaatcaagtttgtggttcaggtctaagatctattgcatcaggatatcattcaattctttcaggaagttcaaatattgttttagcgggaggtcaagaaagtatgtctcaatcgcctcacgtagttcatttaagaaacggaaaaaaacttggggacactagtttggttgactctatgataaa

SEQ ID NO: 235838 - DNA, 519 bp, Unknown
  Bacterial polypeptide expressing nucleotide sequence isolated from the Sargasso Sea
cgacatggggtaacatcgacggcatgcaaaagctgcggcccgcctttacgaaagacggaactgtaaccgctgcaaacgcatcaggaataaatgatggtgcggcgggcgttcttgtcatgtcaaaaaatcaatccgaaaaaaaaggtatagagccactcgcaactataaaatcttatgcaacagctgctttggatcctgcgataatgggcgtgggaccaatcaatgcttctcggaaagctctagacaaagcaggctggagtgttaaagatttggaccttgtcgaagccaacgaagcattcgcggcgcaagctctagcggtcaatcaagatatgggatgggaccccgaaatagtaaatgtgaatggtggggcaattgctattggtcatccaattggtgcttcaggtgctcgaattctaaacacattattattcgaaatgaaaagacgagatgtaaagcgaggtctggcaacactttgtataggtggcggtatgggcgttgcaatgtgtcttgagcgttaaa

SEQ ID NO: 235839 - DNA, 592 bp, Unknown
  Bacterial polypeptide expressing nucleotide sequence isolated from the Sargasso Sea
atgactgatattgtaattgcttctgccgctaggaccgccgtaggtagttttggtggatcatttgctaatgttccagcacacgagttaggtgctacagtactttccgctttagttgaacgagctggcataaaaaaagaagaagtttcagaaactattcttggacaggtactatcaagtgggcaaggccaaaacccagctaggcaagctcatgttaatgcaggattaccaattgaaagtgcggcttggggtattaatcaagtttgtggatcaggccttagagcagtagctttagcagctcagcacgttatgcttggagatgcagatattgttgcggctggaggtcaagagaatatgactttgtcaccacacgtatcacacctacgctcaggtcaaaaaatgggcgatgttaagtatattgatagcatgataaaagatggtctttgggacgccttcaacggttatcacatgggccaaactgcagaaaatgttgcagaaaaatggcaaatcagcagagaaatgcaagatgagtttgccgtagcttcgcagaacaaaaaggaaaatgcgcaaaagctggataagtttaaagatgaaa

SEQ ID NO: 235840 - DNA, 1192 bp, Unknown
  Bacterial polypeptide expressing nucleotide sequence isolated from the Sargasso Sea
catgagtactgaacaatttaaccaagagatcgttattgttgccgctaaacgcaccccaatgggtggctttcaaggcagtttgtctggcgtaacgtctccgagcttagcggccacagccatcaaagccctgttagctgatacccaagttgcgggtgataaggttgatgaagtgttaatgggctgcgtattgccagcgggtctgggtcaagcacctgcgcgtcaggcaaccttaggtgcaggtttaccgctgtctgttggcgctacgaccgtaaacaaagtctgtggctctgggatgaaaaccgtgatgcttgcccacgatttactcaaagcgggcagtgctaagttggtggttgcgggtggtatggaaagcatgagccaagcgccttacttgctagataaagcgcgcgctggcatgcgtatgggtcatggcaaggtattagaccatatgttcctcgatggtttagaagatgcctacactggtggtgctatgggcacatttgcccagaaaactgccgacgaatatggtttaacccgcgagcagatggatgcgtttgctttaagctcgctcgaaaaagccaacgcggccattcaatctcgcgccttcaaggcggagattgtgcccgtcacggtaagcgatcgccgtggtgatgtaattatcgataccgatgagcagccaggtaacgcccgtcctgaaaaaatccccgcactgcgccccgcctttgctaaagacggcactattacggcggcaaactcaagctcgatttccgatggtgcagcggcgctgatgttaaccacgcgcgccaatgccgagcagttaggcttaacagtgctggccaccatcaagggccacacaacccatgcccaggagccatcactctttaccacagcgcccgttggcgctatggcaaaacttttgagcaatgtgggttggtctaaggatgaggttgatctgttcgaaatcaacgaagcctttgccatggtgactatgctggccgtttctgaattaggtttagatatggccaaagtgaacgttaacggtggcgcctgtgccttaggtcatcctatcggttgctcgggtgcacgtttgctggtgaccttaattcatgcacttaaagcccgtgggcttaagcgcggcgtagcctcactctgtatcggtggcggtgaagccacagctatggctatcgaagtctaa

SEQ ID NO: 235841 - DNA, 658 bp, Unknown
  Bacterial polypeptide expressing nucleotide sequence isolated from the Sargasso Sea
gaccaagacaatttctcattaaactctcaaaagaaagcaattgaagcaattaaagaaaataaatttaaagaagagataattcctgttaaattaaacaatcaaaaaatatttgataaagatgaatttccaagactagattcaaatatacaaaaattatcaacattaaaaacagtttttaaacaaaatggaaccgtaactgcaggaaattcatctggattaaatgatggtgctgctgcattagttttaatgaattacaaaacttcaaaagatagagatttaaaaccaatagctaaaattgtttcgtgggcacaatgtggtgttgatccagcattaatgggaacagggccgatacctgcatcaaaattagcgttaaaaaaagctggatggaatattaatgatctcgatttgatagagtctaatgaagcattttctgcacaatctttagctgtaataaaagaacttggattaaagaatgaattagtaaatgttaatggtggcgcaatcgcgctcggacatcctataggagcatccggtgcaagaatacttgttactctagttcatgaaatgcaaaaaagaaaatctaaaaaaggattagcaacactttgtatcggtggtgggatgggaattgcgatgtgtattgaaggtatttttaattagc

SEQ ID NO: 235842 - DNA, 818 bp, Unknown
  Bacterial polypeptide expressing nucleotide sequence isolated from the Sargasso Sea
catgagcgcgtcgccgcacgtgctgccgggctcgcgcgacgggttccggatgggcgacgcgaagctggtcgacacgatgatcgtcgacggcctgtgggacgtgtacaaccagtaccacatgggcatcacggcggagaacgtcgcgaaggaatacgggatcacgcgcgaagagcaggacgcgtttgcggcgctgtcgcagaacaaggcggaagccgcgcagaaggccggccgcttcgacgatgaaatcgtgccggtcgcgattccgcaacgcaagggcgagccgctgcagttcgccaccgatgaattcgtgcgtcacggcgtgacggcggaatcgctggccgggctgaagccggcgttctccaaggacggctcggtgacggcggcgaacgcgtcggggctgaacgacggtgcggcggcggtgctggtgatgtcggcgcagaaggcggcggcactgggcctgacgccgctggcgcggatcaaggcgtacgcgaacgcgggcgtggatccgagcgtgatgggcatgggcccggtgccggcctcgcgccgtgcgctggagcgggcgggctggacgccgggcgacctggacctgatggagatcaacgaggcgttcgcggcgcaggcgctggcggtgcacaagcagatgggctgggacacgtcgaaggtgaacgtgaacggcggggcgatcgcgatcgggcacccgatcggcgcgtcgggctgccggatcctggtgacgctgctgcacgagatggccaagcgcgatgcgaagcgcgggctggcgtcgctgtgcatcggcggcgggatgggtgtcgcgctcgcgg

SEQ ID NO: 235843 - DNA, 856 bp, Unknown
  Bacterial polypeptide expressing nucleotide sequence isolated from the Sargasso Sea
aaatcaaatttaaaaactcatgatatcgatgacttaattatgggacaggtattaaccgctggttcgggacaaaatcctgccagacaagctggcattaaagctggtctgccagttgaaaaacctgcctgtgttataaatcaagtttgtggatctggactaagatcaattgctaatggctaccagtctataatttctaatgatgcaaaaataatagtggcaggcggacaagaaagcatgactaattcacctcatacaattaattatagaaaaaataaaaaactagatgaatcaaaactcgtagatagcatgataaaagatggcctatgggatgcttttaatggttatcacatgggagttactgcagaaaacgttgctaaaaaatggaagattactagaaaagatcaagatgagtttgctttttcgtctcaagttaaaacagaaaaagcgcaaaaaataggaaattttgaaaatgaaatcgttccaataaaaaattttaaaattgatgaacaccccaggaaaggaatgagcattgaaagattacaaaaacttaaaccttcatttaaaaaaaatggaaccgtaactccaggcaatgcctctggtattaacgatggagcggcagctgtcgttttaatggaggaaagtgaagctacaaaaagaggattagaacccctagctagaattgtttcatgggccacatttggagtagatccatctttaatgggttcgggaccaattcctgcatctaaaaaggctttagctaaagctggttggaaagtaagtgatttagatttaattgagtcaaacgaggctttcgccgctcagagcttagctgtaataaaagatttagattaccaaa

SEQ ID NO: 235844 - DNA, 459 bp, Unknown
  Bacterial polypeptide expressing nucleotide sequence isolated from the Sargasso Sea
ctgctggtaattcatctggattaaatgatggagctgcaggaattgtgttaatgcattcagaaacagcactgaaaaaaaaattacttccattagctcgaatagtttcatgggctcaatgtggtgttgatccctctataatgggtactggacccatacctgctgtaaagcttgctctcaaaaaggctggatggaataaaaatgatttagacttaatagagtctaatgaagcttttgcagcacaatcaattgctgtaattaaagagttaaatttaaatccagaaatagtcaacgtaaacggaggagcaatagccctaggtcatcctataggggcttctggtgctagaattttagtaactttaattcatgaaatgaacaaaaaaaaattaagaaaaggtatagcaacactttgtattggaggtggtatgggaattgcaatgtgtgttgaaacagaaaattaat

SEQ ID NO: 235845 - DNA, 640 bp, Unknown
  Bacterial polypeptide expressing nucleotide sequence isolated from the Sargasso Sea
atgaacagtaacgaagatattgtaataacgtctgcatttagaactccaataggttcgtttcaaggaagtttgaaagatcacaaagcaacagaacttggagcaactattgttaaaaaatgcatggaacactctaatttaagtagttcagaagtcgacacagttattttaggtcaagtgttacaagctggatgtggacaaaatccagcaagacaatcagcaattaatgctggcatagataaagataaaacagcaacaactataaatcaagtatgtggatcaggattggctgctataactttaggttttaattctttaagattaaatgacacaaaaatagttattgcgggaggacaggaaagtatgactaatgctcctcattacttaaattatagactggaaaaaaatataagtgatgagaaattaaaagatacaatgcttatagatggattaattgatgcttataatgattatcacatgggtgtaacagctgaaaatgttgcggaaaaatatcaaattactagaaatgatcaggataattttgcatttaactcacaaacaaaagcaataaaagctattagtgaaaataaatttaaagaagaaatagttccaattaaattaaaagatcaaaaagttttgatag

SEQ ID NO: 235846 - DNA, 261 bp, Unknown
  Bacterial polypeptide expressing nucleotide sequence isolated from the Sargasso Sea
aggccaacgaagcctttgccgcacaagcgctggcggttggcgaatccctgaactgggacaacgaccgggtgaacgtaaatggcggcgcgattgcgctgggccatcccatcggcgcatctggttgccgaatcctggtgacactgttgcacgaaatggcccgcagtaacgcgaccaaagggctggctacgctgtgcgtaggcggcggtcagggcgtagcgctggcggtagagcgtttgcaggaggtctctcatgcaaagtaag

SEQ ID NO: 235847 - DNA, 838 bp, Unknown
  Bacterial polypeptide expressing nucleotide sequence isolated from the Sargasso Sea
gctaagagctattatttcaggatatcaatcaattttattaaatgactcaaaaattattatagccggtggacaagaaaatatgtcattttcaaatcaagacaatatgcttcaagatggtttaatagatgcatttaacaactatcacatgggagttacagccgagaacgttgcagataagtgtaatatttctagaaaagagcaggataattttgctttatcttctcaaacaaaaacacaggaggcaataaaaaataaaaaatttaaagacgaaatactagacgataagtctaataaaatttttttagatgaacatcctaggtcagatgttacaattgaaagtttatcaaagcttaaaccagcatttaaagaaaatggaacagtaacagctggaaattcttcaggtataaatgatggagcagctgcagttttaattatgactagagaggaagctgaaaaaagagatttgatccctttggcaaaaattgtttcttgggcaacttctggggttgatcctgctttaatgggtttaggtccaatacctgcatcaaaaaaagctttagaaaaagcttgttgggagataaaagatttagatttaattgagtcaaatgaagcttttgctgctcaaagtttagccgtagtaaaagaactaaaaattccaaaagaaaaagttaatgtaaatggtggggcaattgctcttggtcatcctataggagcctctggttgcagaattgttgttacgttaattcatgaaatgaaaagaagaaatgttaaaagaggaatggccactctatgtattggtggaggaatgggaattttcatgtgtttagagagggtttaa

SEQ ID NO: 235848 - DNA, 925 bp, Unknown
  Bacterial polypeptide expressing nucleotide sequence isolated from the Sargasso Sea
tgcgataggtacttttatggttctctaaaaagtaagcaagcacacgatcttggatcaattgttattgaagaaaacataaaaaaatcacaattaaaatctaatgaaattgatgaagtaataatggggcaagttttaacaagcgctgcaggacaaaatccagctagacaagcggctattaaagcgggaatacctattgaaaaaactgcatatattataaatcaagtttgcggatcaggattaagagcagttgctgctggttatcaatcaattttatctaatgattcaaaaatagtaattgccggtggacaagaaagtatgtccaacgcacctcatgctattcattttagaaacaataaaaagttggaagagacaaatcttatagacacaatgattaaagatggtctttgggatgcattcaatggataccacatgggtgttaccgcagaaaatgttgctgaaaaatggggcattacaagaaaagaacaagataattttgccatgtcttcacaaactaaagcagaagcagctcagaaaaaaggaaatttttataacgaaattataccaacagttttaaaatttgatgaacatccacgaaatggaatgacaattgaacggctagaaaaattaaaaccttcatttaaaagcgatggtaccgtgacagcaggaaacgcttctggaattaatgatggagcagctgcagttgtcctcatgagtcaaaatgagtctgaaaaaagaaaattaaatcctttagctaaaattgtttcatgggctacttgtggagtggatccatctttaatgggatctggaccaattcctgcttcaaaaaaagccttagaaaaagccggatggaaagttaaagatttggatttaatcgaatcaaacgaggcattagccgctcaaagtttagctgtaataaaagaattaa

SEQ ID NO: 235849 - DNA, 469 bp, Unknown
  Bacterial polypeptide expressing nucleotide sequence isolated from the Sargasso Sea
aaatggtactataacagcagcaaatgcatcaaagttaaatgatggtgcagctgctattatgttaatgtcaaagaagaaggttgaagagtgcggtataaaaccaatggctcgcattctgtctcattgttcttttgctcatgacccaaaatggtttacaactgctccggggtatgcaataacaaaagttctaaaacaatctggactagataagaacgatattgatctttgggaaataaatgaagcttttgcggctgtagccatggctgcaattgatgattttcaactagatagctccaaagtgaacattaacggaggagctatagctctagggcatcccattggagcgtctggagcaagaatattgacaacattgatttatgccctagaaaaaatgaataaaaatcttggattggcaacattatgtattggtggtggcgaagcatctgctatgatcattgaaaaattatga

SEQ ID NO: 235850 - DNA, 216 bp, Unknown
  Bacterial polypeptide expressing nucleotide sequence isolated from the Sargasso Sea
aaagtttagcagtaattaaagaattaaaaatacctattgaaaaagttaatgttaatggtggtgcaatagctttaggccatccaattggtgcttctggctctagaatagtagtgacactaattcatgaaatgataaaaagaaatgtaacaaaaggtttagctactttatgcattggaggaggaatgggaatttcgatgtgtattgaaagggactaat

SEQ ID NO: 235851 - DNA, 773 bp, Unknown
  Bacterial polypeptide expressing nucleotide sequence isolated from the Sargasso Sea
tggacaaatattaacttccggagaaggtcaaaatccagcaagacaagcatctattaatgcgggaattccaaatacaacgcctgcacatattgttaatcaattatgtggctctggattacgggctataatttctggataccaattacttatgctagatgatgcaaatattgttattacaggaggtcaagaaaatatgtcaagatctcctcatacaattttatatagattagataaaaagttagataaaaataaattagtagactcaatgattaatgatggacttatggatgcatttaataactatcatatgggagtaactgccgagaatgtagctagaaaatttaatataacaagagaacaacaagatgaatttgctttagattcacaaaaaaaagcatcattagcaaattcacaaaaaagatttgatgacgaaattataaatattaatttgaacaataacaaaaaaatagttcttgataaagatgagtacccaaaaaaaaatatttcaattgaagacttaaaaaaattaaaagcaatatttgaagaaaatggaacagttacatcaggaaattcatctggactaaatgatgccgctgcaatagttgtcttaatgaaaagaggtacagctgaaaaaaaaaatcaaaaaatttttgctaaaataaaatcttgggctaatagtggtgttgatccgtctataatgggtattggaccaattccagcaacaaaacttgctttaaaaaaagctggttggaaaattgaagatattgatcttt

SEQ ID NO: 235852 - DNA, 472 bp, Unknown
  Bacterial polypeptide expressing nucleotide sequence isolated from the Sargasso Sea
aaaaaagatggaactgttacagcaggaaattcttctggaataaacgacggagcagcagcagtaactttaatggctgctgaagaagcatcaaaaagaaatttacaaaaactggttacaataaaatcttgggcaagcagtggagtagatcctgctttaatgggaactggacctatacccgcatctaaaaaggcattagatttagctggctggtccattaaagatgtcgatttatttgaagtcaatgaagcttttgctgctcaaagtatagcggttttaagaactctttcaattcctgaggaaaaacttaacgtgaatggaggggctatagcccttggtcatcctattggagcatcaggcacaagaatacttgtaactttaattcatgagatgataaaacgagacgcaaagagaggtttagccacattgtgtattggcggtggaatgggtattgctatgtgtgtagaacgataat

SEQ ID NO: 235853 - DNA, 301 bp, Unknown
  Bacterial polypeptide expressing nucleotide sequence isolated from the Sargasso Sea
atggacgacaaagatatagtaattacatcagcatttagaactccaataggttcttttttaggaagtttatctagctataaagctacagaacttggaactgaagtaattaaaaaatgtttgttagactcaaaccttaaaaatgacgatgtagatataatttatctaggtcaagtgttgcagactgggtcaggtcaaaatcctgcaagacaatcggcaatgaatgccggaataaataaagaaaaaacagcaactactattaatcaagtatgtggatcaggtcttgcagctattactttgggat

SEQ ID NO: 235854 - DNA, 651 bp, Unknown
  Bacterial polypeptide expressing nucleotide sequence isolated from the Sargasso Sea
tatggtaaaaaatttaaaagatgtagtaattgtatctgccgctaggacagctattggtaaactgagaggcatatggtcaaagtatcaggctcatgagttaggtgccaacgtaattttaaatattcttaagaaatcaaaaatttctaatgattcaatcgatgagataattatgggtcaagttttaactggtgatacgggacaaaaccctgccaggcaggctgcgatgaaagctggcttaccaactgataagactgcttatattattaatcaagtttgtggctcagggctgagagctgttgttgcaggttatcagtcaattttgtctaatgatgccaagatagtaattgctggtggacaagaaagcatgtcaaactcaaaagaggaatttatgttaaaagatggtttaattgacgcttacaataattatcatatgggaatcacagcagaaaatgtggcagaaaaatttggaatttcaagaaaagagcaagacaagttcgctgttgcttctcaattaaaagcacaagaagcaataaagcaaaaaaaatttaaagaggaaataatcgaaggagataatttattagatgagcatcctagagccaatgttacagaggaaagtctttctaagcttaatactgcttttaaagaaaatgg

SEQ ID NO: 235855 - DNA, 311 bp, Unknown
  Bacterial polypeptide expressing nucleotide sequence isolated from the Sargasso Sea
tggaccaataccatcttccaagaaagctctaaaaattgcaggttggagtgtaaatgatgttgatttaatagagtcgaatgaagcttttgctgcacaaagtttagcagtaataaaagatttaaaaataccaattgaaaagattaatgttaacggtggagcgattgcactaggacatccaattggagcatcaggtactagaattcttgttactttggttcatgagatgtctaaaagagatgtaaagaaaggtttggctactttatgtattggtggagggatgggaattgcaatgtgtattgaaaaagactagt

SEQ ID NO: 235856 - DNA, 427 bp, Unknown
  Bacterial polypeptide expressing nucleotide sequence isolated from the Sargasso Sea
atgtcaaaaaattcgaaagatatagttttaacatctgccttgagaacatcagtaggcaagtttggtggcattcataagaaacttcaagcccatgaattaggctcaattgttataaaaggtattttaaaaaaaaccaacatagatccactagagatagatgaggtcatactaggacaagttttaccaaatttaagtggacaaaatcctgccagacaggcattaataaaatcaggtatccctaaagagaaaactgctttcagcattaatcaagtttgtggatcaggactaagagctattgttttaggataccagtcaattgctatgggctcatcaaaatttgttattgctggtggtcaagaaagtatgtcaaattcaaacgagaaagaaatgttaacaaatggtttaatagatgcttttaacaattacc

SEQ ID NO: 235857 - DNA, 749 bp, Unknown
  Bacterial polypeptide expressing nucleotide sequence isolated from the Sargasso Sea
tgaagtatatatcacatccgcagttagaactgccgttggatccttttatggatcattagcaagtttaccagcacatgacttaggtaaagttgttattaaagaagctattagtcgatctaatctagagtcggcggatgttgaagaggttatccttggccaagttttaactgctgctactggtcaaaatcctgcaagacaggcatctattaatgctggcctcaacaaagaaacccctgcctggttggtaaatcaagtctgtggatctggattaagaagtgtagctcttgcttatcaatcaatcatgaatggtgatgcagatattattatagcgggtggccaagaaagtatgagccaatctcctcattgtacatacttacggagtggtacgaaaatgggtgatgataagttaattgactcgatgatcaaagacggattatgggatgcttttaatggttatcatatgggaaccacagctgaaaacgttgctgagcaatggcagattactcgtgatcaacaagatgaatttgcatttaattctcagcaaaaagcaagcaaagcaaaagctgaaggtatctttaaagatgaaatagttggagttgaagtaaaaaatagaaaagagacaataatatttgagaatgatgaatatattaaagatggtgttcaattagaaaagatttcttcacttagacctgcttttgcaaaagaaggaacagttacagcggcaaatgctagtggtattaatgatggcg

SEQ ID NO: 235858 - DNA, 268 bp, Unknown
  Bacterial polypeptide expressing nucleotide sequence isolated from the Sargasso Sea
tgggacattagagaaatagatttagttgagtcaaacgaagcatttgctgcacaaagcattgcagtaataaaagaattaaaactttcaccagatattgtaaatgttaacggcggagcaattgcactaggacatccaataggtgcctcaggaacaagaatagttgtaactttattacatgaaatgagaaaacgagatttaaaaaaaggtttagctaccctttgtattggaggaggaatgggtatagctatgtgtttacaaagatactagt

SEQ ID NO: 235859 - DNA, 847 bp, Unknown
  Bacterial polypeptide expressing nucleotide sequence isolated from the Sargasso Sea
tgttgccggtggtatggaaagtatgagtggtgcgccgtacctgttaccaaaagcgcgtggcggctatcgtatgggtcatggcaaagtgcttgatcacatgatgatggacggtctggaaaatgcctacgatggtcaggctatgggctgttttgcgcaggcaacggccgatgcagaaggtctgactcgtgaaatgatggatgaatttgcgataggttcattatcaaaagccaacgaagcaattaacagtggcacctttggtgatgaaattgtgccagtaaccatttctacccgtaaaggcgatgtagtggtagacaccgacgaaggtccggggtctgctcgtccggataaaattccgtctctgcgccccgcattcaagcgcgatggtacagttactgccgcgaactcaagttctatctctgatggtgctgccgcgctgttggtaatgagtgagtcaaaagcggctgagctgggcttaacgccactggcgaaagtggtagctcatgcaactaactctattgcaccggaagactttaccgttgcgccggttggcgccatggaaaaagtgctcgataaggcaggctggagcaaagacgacgttgatttatttgaaatcaacgaagcgtttgccatggtaaccatgctggcgattaaaaagctggggctggatgagagcaaggtgaatattaaaggcggtgcgtgcgcgctgggtcatccgattggtgcttctggtgcccgtatcctggttaccctgttacacggcctgaagcaaaaaggcctgagtaaagggattgcctcactgtgtattggtggtggtgaaggtgtggcactggcagtagaaatgctgtaa

SEQ ID NO: 235860 - DNA, 712 bp, Unknown
  Bacterial polypeptide expressing nucleotide sequence isolated from the Sargasso Sea
ggcctgatagatgtttacaataaatatcatatgggtattacagctgaaaatgttgcagaaaagtggaatatttcaagagaagaacaagatacttttgccgtgtcctcacaatcaaaagcacaggatgctattaaaaataaaaaatttaacgaagagataattcctggaaatcttgaggatgaacatcctcgtaataacgtaacacttgaaagtttatcaaacttaaaacctgccttcaaaaaaaatggtactgtaacagcaggaaattcatcaggtgttaacgatggagccgcagccgtaatgataatgaaaagagatttagcagaaaaaaaaaatttacctacattagctaaaatagtatcatgggcaacttgtggcgttgatcctgctttaatgggatcaggaccaatacccgcatcgaaagaagcaattaaaaaggcgggttggcatataaaagatttagatttgatagagtccaacgaagcctttgccgcacaaagtctagctgttattaaggagttaaaaatttctcctgaaaaagtaaacgttaatggaggagcgatagctctaggtcatcccatcggggcatcaggcacaagaattgtagtaacattaattcatgaaatgattagaagagatattaaaaaaggcttagcaacactttgtataggcggcggcatgggaatcgccatgtgtgtagaaagagattaaa

SEQ ID NO: 235861 - DNA, 921 bp, Unknown
  Bacterial polypeptide expressing nucleotide sequence isolated from the Sargasso Sea
atattaaatctcatgaacttggatcaataattattaaaggtattttagaacaatcaaaatttagcagcaatgaaattgatgaggtaataatgggtcaagtattaactacaggtgccggacaaaacccagcaagacaagctgcagtacacgctggtataccaatttcaaaaccagcacatattataaatcaagtatgtggatctggtcttagagctgtaatatctggttttcaatctatcaaattaggtgaggcaaaaaatataatatctggaggacaagaaaatatgtcgataacccctcactcaattttttataaagataaaatacatatttcaaaagacaatttgataaatacaatgattaatgatggattattagatgcttttaacgattatcatatgggagtaacagcagaaaatattgcaaaaaaatttaatatttccagaaaagagcaagatgagtttgcattcttgtcccaaaaaaaaacagaaaatgcaatcaatcaaaaaaaatttaatgatgaaattattaagattaatcaaaatggaacaattttgagtaaagatgaacatccgagaataggattaaatatttcagatttagaaaaattaaagacagtttttttaaaagatggaacagtcactcctggaaattcatctggaataaatgatggggctgctgctttattattaactacttcaaaggaagcaaaaaaaaaatcagtaaaaccgctggctaggatagtttcatggagttcagttggagtggaacctgctttaatgggtcttggaccaatagaggctgtgcgccaagcaactcataaagctaagtggaatatagaagatattgatttgtttgaaattaatgaggcttttgctgcacaaagtattgcagtaattaaagaattaggaattgagtaaa

SEQ ID NO: 235862 - DNA, 403 bp, Unknown
  Bacterial polypeptide expressing nucleotide sequence isolated from the Sargasso Sea
gatgtctgaagatgaagcaataaaaagaaaattacaaaaattagtttcaattaaatcttgggcaagttgtggggtggagccctctttgatgggaactggtcctattccatcatcaaaaaaagcattggatttagctggttggtctataaaagatgttgatcttttcgaaataaatgaagcatttgcagcacaaagtttagcagttttaaaaacgctttctattccagaggaaaaagttaatgttaatggcggagctatagctataggtcacccaataggcgcttcgggcacaagaatacttgttacattaattcatgagatgataaaaagggatgttaaaaagggtttagcaactctttgtattggcggtggaatgggtattgcaatgtgtatagagagatag

SEQ ID NO: 235863 - DNA, 778 bp, Unknown
  Bacterial polypeptide expressing nucleotide sequence isolated from the Sargasso Sea
tatgagtgataatagtaaagaaatagtaataacttctgccgttagaacacccattggaacttttcgaggatctttgaaagatataaaagccaaagatcttggagctttggcagttaaagaagtgatcaaaaaatcaaatttagataccaaagatattgatgagttaataatgggacaagtattaaccagtgctacaggacagaatcctgcacgacaggcagcaattaaagcaggaataccaattgataaaactgcgtatgtaattaatcaagtttgtggatcaggactaagatcagttgtggccggttatcaggcaataaaatcaaacgatgccaaaataatagttgctggtggacaagaaaacatgtcaaacgcaccgcaagcaatttattttagtaaaggaaaaaaattagataactctgatttaattgatacaatgatcaaagatggtctgtgggatgcatttcatggttatcatatgggagttacagcagaaaatgttgctgagaaatggcaaattactagaaatgaacaagataattttgctttattatctcagcttaaaactgagaaagcacaaaaagaggagaaatttaaagaagaaataattccagtaatgtttgacgacaaaagtaaattaaaaattgatgaacaccctagatcaggcatgactctagacacactttcaaaattaaaaccctcatttaaaaaagatgggacagttaccgcgggaaatgcttcaggaattaatgatggagccgcagctgtagttttatga

SEQ ID NO: 235864 - DNA, 724 bp, Unknown
  Bacterial polypeptide expressing nucleotide sequence isolated from the Sargasso Sea
agctcccgcacggcaggtcgcaatcggttcaggattgcctgttgaaacgccatgtacaacaataaacaaagtctgcggatctagtttgaaagcgacaatgatagctgctacagagattcgagttggggtttctaaagttataatctctggtggaatggaatcgatgagtaatgccccatttatcacaagaaatcctaagaagggagaagatgtatcctttgcatctctggagtcggtaatgatgagcgatggcctaattgatgcatacagcggggagtcaatgggtaacaccggagaaaccgtagcagaagagttcggtattagcagacaggtatcggatgagttctcggtaagatctcatttcctggcgaacagggcatgggatgaaggttggttggaaaatgaggtgtttccggtaggtgaattatcaagagacgaaggaattcgaccggataccaacatggaagctctttctgttctgaaggcggtcttcaaggaaaagggactagtgactgcaggaaatgcaagtcaagtttcagatggtgcatcggcagtcctaattgcgtctgaagaagcagcgaatgaaaatggcttgccaataattgctcgaataattgattacacaacttcaggagtagacccgggaagagttatgtctgcgccaattcctgcggtgaacatgcttttggaaaaaactagactgaaaatcgaagatatagacata

SEQ ID NO: 235865 - DNA, 718 bp, Unknown
  Bacterial polypeptide expressing nucleotide sequence isolated from the Sargasso Sea
caagaaaatatgtctttagcacctcatgctatacatttaagaaatggaaaaaaattaggtgatactcatgcagtagacacgatgattaaagatggtttatgggatgcgtttaacaactaccatatgggtgttactgctgaaaatgttgcaacaaaatttcaaataacaagagcagaacaggacaaatttgctttaaattctcaagaaaaagcttttaaggctattaaggataataaatttaaagatgaaatagttagtttaaaaattaagtcaaaaaaatctgaaattaattttgataaagatgagcatccaagagatggtgttaatatggaaatcttaggaaaacttaagccagtttttcaaaaagatggaacagttacagctggtaactcatcaggaattaatgatggagccgccgcagtaactttgatgaatgaaaaggaagctgaaaagagaggtttaaaaaaattagtcaagataaaatcttgggcaagttgtggggttgacccagctttaatgggaacaggtccaatacctgctagtaaaaaagcactagaacttgctggatggtcaattaaagatttagatttatttgaagttaatgaggcatttgcttctcaaagtatagcggttttaaaaactctatctgttccagaagaaaaaataaatgtaaatggtggagcaatagccttaggccaccctataggtgcatctggaa

SEQ ID NO: 235866 - DNA, 817 bp, Unknown
  Bacterial polypeptide expressing nucleotide sequence isolated from the Sargasso Sea
aaggtgtgcggctcgggcctgaaggccgtgatgctggcggcgaacgcgatcgtcgcgggcgatgccgagatcgtgatcgcgggcgggcaggagaacatgagcgcgtcgccgcacgtgctgccgggctcgcgcgacgggttccggatgggcgacgcgaagctggtcgacacgatgatcgtcgacggcctgtgggacgtgtacaaccagtaccacatgggcatcacggcggagaacgtcgcgaaggaatacgggatcacgcgcgaagagcaggacgcattcgcggcgctgtcgcagaacaaggcggaagccgcgcagaaggccggccgcttcgacgacgaaatcgtgccggtggcgattccgcaacgcaagggcgagccgctgcagttcgccaccgatgaattcgtgcgtcacggcgtgacggcggaatcgctggccgggctgaagccggcgttctccaaggacggctcggtgacggcggcgaacgcgtcggggctgaacgacggtgcggcggcggtgctggtgatgtcggcgcagaaggcggcggcattgggcctgacgccgctggcgcggatcaaggcgtacgcgaacgcgggcgtggatccgagcgtgatgggcgtgggcccggtgccggcctcgcgccgtgcgctggagcgggcgggctggacgccgggcgacctggacctgatggaaatcaacgaggcgttcgcggcgcaggcgctggcggtgcacaagcagatgggctgggacacgtcgaaggtgaacgtgaacggcggggcgatcgcgatcgggcacccgatcggcgcgtcgggctgccgga

SEQ ID NO: 235867 - DNA, 870 bp, Unknown
  Bacterial polypeptide expressing nucleotide sequence isolated from the Sargasso Sea
gccgttatatcaggatatcaatcaataaaattaggagagtcggttagtgtaatttcaggtggtcaagaaaatatgtcgatttctccacattctatcttttaccgtgatgaaaaaaaaattttagaaaataaattgatagatacaatgattaatgatggattaatggatgcatttaataattatcatatgggagttacagcagaaaatattgctaaaaaatttaaaatatcaagacaagagcaagatgaatttgctttaaattctcaaaaaaaaacacaagcagctctatctaaaaataaatttaatgatgagttagttaaaatagactatcagggtaacattttaaataaagatgaacatcctagaactgatttaaaaatagaagatttaaaaaaattaaaaacagtatttcaaaataatggaactgttacaccaggaaattcctcgggaataaatgatggagcagcagctttattattgacttcattagaagaggcaaaaaataagtctattaaaccactagcaaaaattgtttcatggtcttcagtaggagtagatccatctgtgatgggtttaggccctattggagctattcgtgaagcaagtaaaaaagcaaaatggactttagatgaaatcgatttattcgaaattaatgaagcttttgcatctcaaagcattgcagtaattcatgaattaggtattgatcaagcaaaagtaaatgttaatggtggagctatagctcttggtcacccgattggtgcttcaggagcaagaatacttgtaactttgatacatgaaatgaaaagacaaaaaaaagataagggttgtgctgcactctgtataggaggtggaatgggtatagccttgtgt

SEQ ID NO: 235868 - DNA, 301 bp, Unknown
  Bacterial polypeptide expressing nucleotide sequence isolated from the Sargasso Sea
aatgaatacaaaatttattgaagttgtaattgttgctgcagcaagaacaccaatcggtacgtacaggggttctttaaaaaatattaaagctgatcaattaggatcaatagttattaaggaactcataaatcgagcaaatattagtagtgaagaaattgatgaagtaattttaggacaagttctaactgctggaacaggtcagaatcctgcaagacaagcttctattaatgctggtctgccaaaatcaattcctgctcatttagttaatcaagtttgtggctcaggtttaaggtcagtaatt

SEQ ID NO: 235869 - DNA, 521 bp, Unknown
  Bacterial polypeptide expressing nucleotide sequence isolated from the Sargasso Sea
aatgtcaaaaaattctaaagatattgtttttgttgcagctcaaagatcagcaattggaagatataaaggtatttacaaagatctacaagctcataatttaggttcattagtaatcaaaagtttaattaaaaagacgaaactaaaagctgataaaattgatgaagtaatattaggccaggtgttgacaggatcatgtggacaaaatccagcaaggcaagcagctctaaattctggaattcctaaagaaaaaactgcaataattataaatcaagtttgtgggtctggactaagatctattgtaaatggatatcaatcattaataacaaattctgcaaactttataatcgctggcggtcaagaaagtatgactaactcatttcatgatcaaatgatgaaagatggtttgacagatgctttttacaactatcatatgggtgttacagctgaaaatgttgctgcaaaatataacatatcaagacaagaacaagatgaatttgcatatgagtcccaacagaaagcaa

SEQ ID NO: 235870 - DNA, 556 bp, Unknown
  Bacterial polypeptide expressing nucleotide sequence isolated from the Sargasso Sea
atgtcaaaaaattctaaagatattgttttcgttgcagctcaaagaacagccataggaagatataaaggtatttataaagatctgcaggctcataatctaggctcgttggtaattaaaagtttaattgaaaagaccaaattaaaggtagatgaaattgacgaggtaatattaggacaagttttgacaggatcatgtggacaaaacccagcaaggcaagcagctataaattctggaattccaaaagaaaagaccgcaataattataaatcaggtgtgtggatctggactacgatcaattgtaaatggatatcaatcaatactaacaagttctgcaaattttataattgcaggtggtcaagaaagtatgactaattcaattcatgatcaaatgatgaaagatggtttgacggatgctttttataattatcatatgggtgttacagctgaaaatgttgctgcaaaatataatatatcaagacaagaacaagataaatttgcactccagtctcaacataaagcaaatttagcaataaacaaaaaaaaatttgatgatgaaa

SEQ ID NO: 235871 - DNA, 239 bp, Unknown
  Bacterial polypeptide expressing nucleotide sequence isolated from the Sargasso Sea
aataaatgaagcctttgccgctcaaagcatagcagtaatccgtgagttaggaattgatcaaaataaagttaatgttaatggcggagcaattgctctcggtcatcccattggtgcatctggagcaagaataatagtaactttattgcatgaaatgaaaagacaaaaaaaaaataaaggttgtgctacactttgtataggtggaggaatgggtatagctttatgtgtggagagaatttagg

SEQ ID NO: 235872 - DNA, 478 bp, Unknown
  Bacterial polypeptide expressing nucleotide sequence isolated from the Sargasso Sea
cttcgacaaggaaggtacggtgaccgccggcaatgcgtcgggcatcaatgatggcgccgcggcgcttgtcatgatgacggaagaggaggccgaaaaacgcggcatcaccccgatggcccgcatcgtctcctgggcccaggtgggtgtcgacccagccattatgggttccggccccatcccggccagccgcaaggctttggaaaaagccggctggtctgcagacgacctggaccttgtagaagcaaacgaagcctttgccgcccaggcctgcgcggtcaacaaagacctgggcttggacacggacaaggtgaacgtaaacggcggcgcgatcgcaatcgggcatccgatcggcgcatccggcgcccgtattttgaccacgcttctctacgagatgcagaaacaggatgcgaaaaaaggcctggccacgctgtgcatcggcgggggcatgggcatcgcaatgtgcgtcgaacgcgactga

SEQ ID NO: 235873 - DNA, 590 bp, Unknown
  Bacterial polypeptide expressing nucleotide sequence isolated from the Sargasso Sea
aatgtcaaaaaattctaaagatatagttttaacatctgccttgagaacatcagtgggcaaatttggaggcattcataagaaacttaaagcccatgaattaggctctattgttataaaaggtattttaaaaaaaactaacgtagatccgatagagatagatgaagtcatacttggccaagttttaccaagtttaggtggacaaaatcctgcaagacaagcgttaataaaatctggaattccacaagaaaaaactgcttttaatattaatcaagtttgtggatcaggactaagagctattgttttaggatatcaatcaattggtatgggctcatcaaaatttattattgctggcgggcaagaaagtatgtcaaattcagatgagaaagaaatgttaactaatggtttgatagatgcttttaacaattaccatatgggtgttaccgcagaaaatgttgcagagaaatttaatatttcaagagatgaacaagatcattttgctctagactcacaatctaaaactgaaagttcaatcaaaagtaaaaaatttttaaatgaaataattgataataatcaagatgaacaccccaggt

SEQ ID NO: 235874 - DNA, 162 bp, Unknown
  Bacterial polypeptide expressing nucleotide sequence isolated from the Sargasso Sea
taaacggaggcgctatagctttaggacatccaataggggcttctggtacgaggatccttgtaacgctaattcatgagatgattagaagaaacgtaaagaaaggattagcgactctttgtatcggtggtggaatgggtattgcaatgtgtgttgaaagataaa

SEQ ID NO: 235875 - DNA, 418 bp, Unknown
  Bacterial polypeptide expressing nucleotide sequence isolated from the Sargasso Sea
atgtcaaaaaattctaaagacattgttttcgttgcggctcaaagatcagctattggaagatataaaggtatttataaagatttacaggcacatgatttaggttctttggtaattaaaagtttaattgaaaagattaggttgaatgtagatgaaattgacgaggtaatattgggacaagttttgacaggatcatgtggacaaaatccagcaaggcaagcagctataaattctggaattccaaaagaaaagactgcaataattataaaccaggtgtgtggatctggactacgatcaattgtaaatggttatcagtcattactaacaaattctgcaaactttataattgctggtggtcaagaaagtatgactaattcaattcatgatcaaatgatgaaagatggtttgacggatgcttttt

SEQ ID NO: 235876 - DNA, 337 bp, Unknown
  Bacterial polypeptide expressing nucleotide sequence isolated from the Sargasso Sea
atgtcaaaaaattctaaagatatagttttaacatctgccttgagaacatcagtgggcaaattcggtggcattcacaagaaacttcaagcccatgaattaggctcaattgttataaagggtattttaaaaaaaaccaacttagatccgctagagatagatgaagtcatacttggccaagttttaccaagtttaggtggacaaaatcctgcaagacaagcgttaataaaatctggaattccacaagaaaaaactgcttttaatattaatcaagtttgtggatcaggacttagagctattgttttaggatatcaatcaattggtatgggctcatcaaaat

SEQ ID NO: 235877 - DNA, 793 bp, Unknown
  Bacterial polypeptide expressing nucleotide sequence isolated from the Sargasso Sea
atagtttctgccaaaagaactccaattggttcgtttcagggtaatctatcatcaatttctgcatcggagttaggaagtatagttataaaagcaatactcaatgaaacaggaattgatccaaatataatagatgaagttataatgggaaatgttttgtcagcaggtcaggggcaagcaccggcaagacaagctgcaatcagtgcggggctccctagcaaagtagaatgttttacaataaataaaatgtgcggttctggactaaagtcagttatgttagcatcacatgctattcaagcaggtgatgcagaaataattatagctggtggaatggaaaatatgtctaaagctccatacctattgctaaataatagaaaaggattacgattagggcatgatcagattcttgactctatgatagttgatggtttatgggacgtatacaatgataaacatatgggagaatgtgcagaaacatgtgcttcggataaaaaatatactagagagtcacaggatttatttgctcaagagtcgtattcaagagctcaagccgcacaatcaaaaggcgcatttcaaaatgaaattgttcctttagtaattgatcagaaaaaaggcgattcaattactataataaaagatgaggatccagataaagccaatttcgaaaagatgaaattgttaaagcctgtatttaaggaaaatggaacaatcacagcagcaaacgcttcaaaaattaatgatggtgcagcagcattattattgatgactagagataaagcaaaagaaattgattaga

SEQ ID NO: 235878 - DNA, 660 bp, Unknown
  Bacterial polypeptide expressing nucleotide sequence isolated from the Sargasso Sea
atcaggataaatttgcttttgactcgcagtcaaaggcattaaaggcacaaaaggaaaataaatttgatgatgaaatagtgccttatgaaattgaacttaaaaaaggtaatactatttttaataaggatgagcacccaagagctactacatcgctggatactttaagtaggttaagaggagcatttaaaaaagatggaactgtaactgctgggaatgcatcaggtattaatgatggtgcagcagctgttattttaatgtcaaaggaggaagcagaaaaaagagggttaaaacctctggcagaaattaaatcatgggcatcatgtggagtagacccatcaatcatgggaacaggaccaataccatcttcaaaaaaagcattggaaattgccggatggtcttcaaaagacttggacttaatagaagccaatgaagcttttgctgcacaaagttgtgctgttgtaaaagaactctcacttccaatggaaaaggtaaatgtaaacggtggttcaattgctcttggccatccaattggtgcttcgggcacaagaatttttgtcacactaattcatgaaatgataaaaagagattccaaaaagggtctagctacgctatgtattgggggaggcatgggtgttgctatgtgtattgaacgaaaatgaa

SEQ ID NO: 235879 - DNA, 826 bp, Unknown
  Bacterial polypeptide expressing nucleotide sequence isolated from the Sargasso Sea
actaagatctattgttgcaggatatcaatccattttattaggagatgcaaaaatagttattgcaggtggtcaagaaagtatgactaactcaaaaaaagaaatgatattaaaggatggtctaatcgatgcatacaatgattatcatatgggtattacagcagagaatgttgctgacaaatggaaaatttcaagagaagagcaagattcttttgcagcttcttctcaactaaaagcacaagaagcaataaaaaataaaaaatttagggatgaaataattgacgagttaactgaggatgaacatccaagaaaagatgtaacgattgaaaaattatcaaaacttgaaccagcatttaagaaaaacggaactgttactgctggtaactcttcaggtataaatgatggctccgcagcaattcaattaatgagcagagaagaatcggataaaaaaggattggcccctcttgctaaaatagtatcatgggcaacatgtggagtagatcctgctcttatggggtcaggtcctattccagcatcaaaaaaagctttagaaaaagctggatgggatattaatagtttagatttagtagaatcaaacgaggcatttgctgctcaaagtttagcagtaattaaagaattaaaaattccaatagaaaaagttaatgttaatggtggggcaatagctttgggacatccaattggagcatctgggacaagaatagtggttactttaattcatgaaatgattaaaaggaatgcaaaaaaaggtttggccacactttgtattggtggaggcatgggaattgccatgtgtatagagcgagactaa

SEQ ID NO: 235880 - DNA, 574 bp, Unknown
  Bacterial polypeptide expressing nucleotide sequence isolated from the Sargasso Sea
acagtttagtgatgaattaattactaatttaatcgataaagatgaacatccaagatctgatgtgaccctagaaagcctatccacgttaaaaactgtttttaaagaagagggtacagtaactgctggaaattcctcaggaataaatgatggtgctgctggtataatactaatgtcaagaaaagaggcagaaaaaaggaatttgaaacctttagcaaaaattgtgtcatgggcaacatgcggagtagacccatcattaatgggatcaggtccaattccatctacaaaaaaagctcttgaaaaagcctcatggaatataaatcaattagatcttgttgagtccaacgaagcatttgcagctcaaagtttggcagttataaaagaattaaatattccaaaggaaatagttaatgtaaatggtggcgctatagctttaggtcatcctattggagcatctggctcaagaattatagttactttgatacatgaaatgaataaaagagaggtgaaaaaaggattaggcactttatgtataggcggtgggatgggaatagctatgtgtatagaaagagattag

SEQ ID NO: 235881 - DNA, 406 bp, Unknown
  Bacterial polypeptide expressing nucleotide sequence isolated from the Sargasso Sea
ttatgtcaagaagaaggttgaagagtgcggtataaaaccaatggctcgaattttgtctcattgctctttcgctcatgacccaaaatggtttacaactgcaccaggatatgcaataaaaaaagttctaaaacaatctggactagaaaagaacgatattgatctttgggaaataaatgaagcttttgcggctgtagccatggctgtaattgatgattttcaactagatactaccaaagtaaatattaatggaggagctatagctctaggccacccaattggagcatctggtgcaagaatattgacaacattgatctatgccctagaaagaatgaataaaagttttggattggcaacattatgtattggtggtggtgaagcatctgctatgattattgaaaaattgtga

SEQ ID NO: 235882 - DNA, 289 bp, Unknown
  Bacterial polypeptide expressing nucleotide sequence isolated from the Sargasso Sea
aaagcattaaaaaaagctggatggaatataaatgatctagatttagttgaatctaatgaagctttcgctgcacaatctattgcagtaataaaagaacttggacttaaagaaggtatagtaaatgttaatggtggtgcaattgctcttggacatccaattggagcatcgggtgcaagaatattagtaacgctagtacatgaaatgcaaaaaagaaaatataaaagaggattggcaacactttgtatcggtggaggtatgggtatttcaatgtgtgttgagagtatttaat

SEQ ID NO: 235883 - DNA, 634 bp, Unknown
  Bacterial polypeptide expressing nucleotide sequence isolated from the Sargasso Sea
atgcaagaagtggtgattgttggtgcggtcagaacgcccatcggcagctttcgcggcgtattttccacgctttccgccgttgacctcggcgccggggtcgtgcgcagtttgctggcccgctgctcgctgccggcaacggcagtcgacgagctgattttcggccaggttttaaccgccggctgcgggcagaatccggcgcgtcagacggccttgcgcgccggtttgccggtcagctgtccggcggtgacggtgaatctggtgtgcggttccggtctgaaagccgtgcagcaagcggtgcaggcgatccgcagcggcgactcccaggtggtcatcgccggtggtcaggagagcatgagcaatgccccctatctgattgacggcgcccgtgccgggctgcgcgtcggccatcgcagcatgcaagacagtatgattcaggacggcctgtgggacgccttcaatgactatcacatgggggtgacggcagagaatctcgccgaccgctatgccatcgatcgccaacggcaggacgcctttgccgccggttcacaacagaaagcggcggcagcgatcgaagcgggccgttttgagcaagagatcgtgccggtggtcgtcagacaggggaagcaaccgccgc

SEQ ID NO: 235884 - DNA, 187 bp, Unknown
  Bacterial polypeptide expressing nucleotide sequence isolated from the Sargasso Sea
taatactgagaaagtaaatgtaaatggtggagcaattgcgttaggtcacccaataggagcatctggagctagagtgttagttactctggtacatgaaatgcaaaaaagaaaatcaaaaaaaggacttgcaactctttgcattggtggtggcatgggtattgcaatgtgtgtggaaagtattttttaa

SEQ ID NO: 235885 - DNA, 898 bp, Unknown
  Bacterial polypeptide expressing nucleotide sequence isolated from the Sargasso Sea
agatctgttgttttgggatatcaatcattaatttcaaatgatgcaaaaattattattgctggtggacaagagagcatgtcaaacgctccacacgcaattcattttcgtaatggaaaaaaattagaagagtcaaaattgattgacactatgattaaagatggactttgggatgcttttaatggatatcatatgggagttacagcagaaaatgtagccactaaatggcaaattactagaaaagagcaagatgattttgctttattgtctcaaacaaagacagaaaaagctcaaaaagaaggaaaatttaaaaatgaaattattcctttaactttaaaagaaaaagaaaaaaaatttgaaattgacgagcatccaagagcaggtatgacactagatagattaaaaaaattaaaaccttcctttaaaaatgatggaactgtaacaccaggtaatgcttcaggaattaatgatggtgctgctgctgtagtattaatgagtttaaaagaagcaaaaaaaagaaatttaaaaccattagctaaaatcatttcatgggcgacatgtggagttgatccttccttgatgggctcaggacctataccggctgcaaaaaaagcattagaaaaagctggctgggaaattaatgaattagatttaatagagtctaatgaagcattcgcagcacaaagtctagcggtaataaaagatttaggaatttcaaaagaaaaagtcaacgttaatggaggagcaattgcacttggtcaccctatcggagcatctggaacgagaatacttgttacacttttgcatgaaatggaaaaaagaaattctaaaaaaggtttagctacactttgtataggagggggaatggggatagcaatgtgcgttgagcgcaattattaat

SEQ ID NO: 235886 - DNA, 583 bp, Unknown
  Bacterial polypeptide expressing nucleotide sequence isolated from the Sargasso Sea
atgaatagtgataaagatattgtaataacttcagcttttaggactccaattggctcatttcaaggaagtttaaaagatcacaaagcaacagaacttggaactgcagttattaaaaaatgtatggaacattctaatctaaatggtgcagaagtagatacagttattttagggcaagtattgcaaaccggatgtggtcaaaatccagctagacaaacagctattaatgctggaataaataaagataaaactgcaacaacaattaatcaagtatgcggttcaggattggctgcagtaacattaggttttaattccttaaaactcaatgacacaaatattgttattgcaggaggtcaagaaagtatgactaattctccacactacttaaattacagaatagaaaaaaatttaagcgaagaaaaattaaaagactcaatgcttattgatggattaatagatgcttacaatgattatcacatgggagtaactgctgaaaatgttgcagaaaaatatcaaataactagaaatgatcaggataattttgcattaaactcacaaaaaaaagcaataaaagcaattaacgaaa

SEQ ID NO: 235887 - DNA, 853 bp, Unknown
  Bacterial polypeptide expressing nucleotide sequence isolated from the Sargasso Sea
gtacaacagtgtaggggttgttattgccggaggaactgagagtatgtctaatgctccatatttgattccaaaaggtttgaaccgttttggtcacaaacggatgatagatagcatgattcacgatggtttatgggatgcatataatgatatgcatatggggaactgtgcagaaatcctagcagcaaaaaggaactatacaagagaaaaccaagataaatattgcatccaatcttataatcgtgcacagaatgctcaggaaaaaggatatttctccgatgaaatagtgccaataaaaaatgctgatggaactttaatttactccgatgaagaacctactaaagcaaaatacgataaaatacctatgataaaaccagcatttgaaaaaaatggtactatcacagcagcaaatgcatcaaagttaaatgatggtgcagctgctattatgttaatgtcaaagaagaaggttgaagagtacggtataaaaccaatggctcgaattctgtctcattgttcttttgctcatgacccaaaatggtttacaactgctccgggatatgcaataacaaaagttctaaaacaatctggactagataagaatgatattgatctttgggaaataaatgaagcttttgcggctgtagccatggctgcaattgatgattttcaactagatagctccaaagtgaacattaacggaggggctatagctctagggcatcctattggagcatctggagcaagaatattgacaacattgatttatgccctagaaaaaatgaataaaagtcttggattggcaacattatgtattggtggtggcgaagcatctgctatgatcattgaaaaattatga

SEQ ID NO: 235888 - DNA, 799 bp, Unknown
  Bacterial polypeptide expressing nucleotide sequence isolated from the Sargasso Sea
tatgagtgaagtttatatatcatcagcaacaagaacagctgtcgcatcatttaatggttcattagcaaacctgccagcacacgaccttggtaaagtagtaattcaggaatctttaaagagatctaatcttgatccaagtgaggttgatgaagttattttaggacaagtcttaacggctgcaacaggacagaatcctgctagacaagcatcaatgaatgcaggtattgctaaagaaactcctgcatgggttgtaaaccaagtctgtggttctggtttaagaagtgttgctttagcataccaatcaattatgaatggtgatgcaaatgtcattattgcaggaggccaagaaagcatgagtcagtcgccgcattgtatgcatctaagaaatggtactaaaatgggagatgacaagatgattgactcaatgattaaagatggtttatgggatgcttttaacggttatcacatggggaccacagcagagaatgttgctcagcagtggcaaataacaagagatcagcaagatgagtttgctttcaattctcaacaaaaggcaagcaaagctaaacaagctggagtatttaaagacgaaattgttggagtagaagttaaatcaagaaaagaaactgttgtatttgaagaagatgaatatatcaaggatggcgttcaactagaaaaaattgcatcactcagacctgccttcgctaaagaaggatctgtaacggcagcaaatgcaagtggaattaatgatggcgctgcagcattaactgttatgagtgctgatgaaattaagaagaaa

SEQ ID NO: 235889 - DNA, 751 bp, Unknown
  Bacterial polypeptide expressing nucleotide sequence isolated from the Sargasso Sea
atgagtaattcgaaagaagaactaatgttaaaagatggtttaattgatgcatataataattaccatatgggcataacagcagaaaatattgctgaaaaatggaacatatctaggaaagatcaagatgcttttgcagtttcttctcaatcaaaaacacaagatgcaataaaaaataaaaaattttctgaggaaataattgaaagttcattattagaggatgaacatccaagaaaagatgtcactttggaaggattatcgaaacttaaaccagcatttaaaaaaaatggaacagttactccaggtaattcatcaggaataaatgatggcgctgcagcagtaatgttaatggcgcgtgaagaagctgagaaaagaggtttatctccactagcaaaaattatgtcttgggccacatgtggtgtagatcctgcattaatgggatcaggtccaattccagcatcaaaaaaagcattagacaaagcaggatggagtgtgaaggatttagatatggtagaatccaacgaagcttttgcttcacaaagtattgccgtaattaaagaattaaatattcctcaagaaatagttaatgttaatggaggtgcaattgcgcttggtcaccccattggagcatcaggctccaggataattgttacattaatacatgaaatgattaaaagaaatgcaaaaaaaggtttggctactttatgtattggaggaggcatgggaatttctatgtgtgttgaaagagattaat

SEQ ID NO: 235890 - DNA, 197 bp, Unknown
  Bacterial polypeptide expressing nucleotide sequence isolated from the Sargasso Sea
gtgcctcggctgggacaccgagaaggtcaacattaatggtggcgcgatcgcgcttggccatccgatcggtgcgtccggcgcacgcgtactcacgacattgctatacgccatgcagaagggttacgtgaaaaaaggtctcgcgacgctttgcatcggcggtggcatgggcatcgccatatgcgtcgagcgcccttgac

SEQ ID NO: 235891 - DNA, 460 bp, Unknown
  Bacterial polypeptide expressing nucleotide sequence isolated from the Sargasso Sea
gttacagcaggaaactcctcaggaataaacgatggagctgcagtggtaataatgacaactcgtgatatagctgaaaaaaaaggtttacagcctttagctaaaatatgctcttgggcaacatgtggggttgatccatctttaatgggatctggaccaataccatcttccaagaaagctctaaaaattgcaggttggagtgtaaatgatgttgatttaatagagtcgaatgaagcttttgctgcacaaagtttagcagtaataaaagatttaaaaataccaattgaaaagattaatgttaacggtggagcgattgcactaggacatccaattggagcatcaggtactagaattcttgttactttggttcatgagatgtctaaaagagatgtaaagaaaggtttggctactttatgtattggtggagggatgggaattgcaatgtgtattgaaaaagactagt

SEQ ID NO: 235892 - DNA, 856 bp, Unknown
  Bacterial polypeptide expressing nucleotide sequence isolated from the Sargasso Sea
ggctcgggcctgaaggccgtgatgctggcggcgaacgcgatcgtcgcgggcgatgccgagatcgtgatcgcgggcgggcaggagaacatgagcgcgtcgccgcacgtgctgccgggctcgcgcgacgggttccggatgggcgacgcgaagctggtcgacacgatgatcgtcgacggcctgtgggacgtgtacaaccagtaccacatgggcatcacggcggagaacgtcgcgaaggaatacgggatcacgcgcgaagagcaggacgcattcgcggcgctgtcgcagaacaaggcggaagccgcgcagaaggccggccgcttcgacgacgaaatcgtgccggtggcgattccgcaacgcaagggcgagccgctgcagttcgccaccgatgaattcgtgcgtcacggcgtgacggcggaatcgctggccgggctgaagccggcgttctccaaggacggctcggtgacggcggcgaacgcgtcggggctgaacgacggtgcggcggcggtgctggtgatgtcggcgcagaaggcggcggcattgggcctgacgccgctggcgcggatcaaggcgtacgcgaacgcgggcgtggatccgagcgtgatgggcgtgggcccggtgccggcctcgcgccgtgcgctggagcgggcgggctggacgccgggcgacctggacctgatggaaatcaacgaggcgttcgcggcgcaggcgctggcggtgcacaagcagatgggctgggacacgtcgaaggtgaacgtgaacggcggggcgatcgcgatcgggcacccgatcggcgcgtcgggctgccggatcctggtgacgctgctgcacgagatggccaagcgagacgcgaagcgcg

SEQ ID NO: 235893 - DNA, 734 bp, Unknown
  Bacterial polypeptide expressing nucleotide sequence isolated from the Sargasso Sea
gatgaccgatgtcgtaatagccagcgccgcacgcaccccggtagggtcctttaacggggcccttagttccctcaccgcctccgatttgggcaaggttgcgatcgaagcggccctcgaaagggccggcatcgccgcggaagacgtttccgaagtcatcatgggacaaattctgacagccgcgcagggccagaacccggcccgtcaggccgccatccgcgcggggctgccggtcgaagttcccgcctatggcgtgaaccagttgtgcggttccggcctcaagtcggtcgcgatgggtcttcaggcaatccttaacggggattccggcatcgttgtcgccggcggtcaggaatccatgagcgcagcaccccacgccgccaatctgcgcaacggcacaaagatgggcaacaccgaattcgtggataccatgatcaaggacggtctgtgggatgcatttaacggttatcacatgggcaacaccgccgagaacgtagcggagaaatggcagatcacccgcgaacagcaggacgaatttgccgtcaattcccagcaaaaggcagaagccgctcagaaggctggcaaattcaaggatgaaatcgcgccggtcacctacagcacccgcaagggcgacgtgacggtcgaggaagacgaatatcccaaacacggcactaccatcgacaatctgaccaagctgcgtccggccttcgacaaggaaggcacggtaacggccggcaatg

SEQ ID NO: 235894 - DNA, 847 bp, Unknown
  Bacterial polypeptide expressing nucleotide sequence isolated from the Sargasso Sea
tatgaacaaagataaagatattgtaattacatccgcatttagaacgccaattggttcctttcaaggtagtttaaaagatcataaagcaacagaacttggaactgcagttgttaaaaaatgtatggaacattctaatctaagtggctcagaagtagatacggttattttaggacaagtattacaaactggatgtggtcaaaatccagctagacaaacagcaattaattcaggaattgacgaagataaaactgcaacaacaattaatcaagtttgtggctctggtttagccgcggtaactttaggttttaattctttaaaacttaatgacgcaaatattattattgcaggaggtcaagaaagtatgactaattctccacactacttaaattacagaatggaaaaaaatttaagcgaagaaaaattaaaagattcaatgcttattgatggattaatagatgcatacgatgattgccatatgggagtaactgctgaaaatgttgcagagaaatatcaaataaccagaaatgatcaggataattttgcattaaactcacaaaaaaaagcaataaaagctattaacgaaaatagatttaaagaagaaatagttccaataaaattaaaaaatcagaagatgtttgataaagatgaatatccaagatcagacacaaatttagaaaaactatcaaatttaaaaacggtttttaaagaaaatggtaccgtaactgcaggaaatgcatcaggattaaatgatggtgctgcagcagtaactttaatgaattataaaacttcacaagataagggtttaaaaccattgctaaattatctcatgggcacaaagtggagttga

SEQ ID NO: 235895 - DNA, 172 bp, Unknown
  Bacterial polypeptide expressing nucleotide sequence isolated from the Sargasso Sea
gttaacgttaatggaggcgccatagcattaggtcatccaattggagcatctggtacgagagtttttgtcacacttatacatgaaatgctaaaaagagattccaaaaaaggtctagctacgttatgtattggaggaggcatgggcgttgccatgtgtattgaaagaaaatgaa

SEQ ID NO: 235896 - DNA, 185 bp, Unknown
  Bacterial polypeptide expressing nucleotide sequence isolated from the Sargasso Sea
tattccagaagaaaaagtaaatgtaaatggtggagctattgctttaggtcaccccataggtgcgtcaggaacaagaattcttgtaactctaatacacgaaatgattaaaagagacgtaaaaaaaggtttagcgactctttgtatcggtggtggaatggggattgcaatgtgtattgaaagataaa

SEQ ID NO: 235897 - DNA, 781 bp, Unknown
  Bacterial polypeptide expressing nucleotide sequence isolated from the Sargasso Sea
tatgtctaaagaaaatggagtcgtcataacatctgctgttagaacagcaattggagatttgggtgggtctttaaaaaatgtttctgctcataaactaggttcgacagctatttcaagcgctattgaaaaatcaaatattaaagcttcagatataaacgaaattattatgggccaagttttaacaggtggtgcgggacaaaaccctgcaagacaagctgctatggatgcaggtattccaaaagaaacaccatcatatgttgttaatcaagtttgtggctcgggtctaagatctattgcatcagggtatcattcaattctttcaggaaattcaaatattgttttagctggaggtcaagaaagtatgtcccaatcacctcatgtagttcatttaagaaatggaaaaaaacttggggacacaagtttggttgactcaatgataaaggatggattatgggatgcattcaacggataccatatgggtataacagcagaaaacgttgcgcaaaaatttcaagttacaagaaaagatcaagacaaatttgcttttgactctcaaacaaaagctttaaaagcacaaaaagaaaataagtttgatgatgaaattattccttacacaattcaacttaaaaaaggtactgcagttttcaaaaaggatgagcatccaagagaagggatttcaatggaggcattacaaagacttaaaactgcttttcaaaaagaaggaacagttactgcaggaaatgcctctggtataaatgacggtgctgctgcagtagtttta

SEQ ID NO: 235898 - DNA, 205 bp, Unknown
  Bacterial polypeptide expressing nucleotide sequence isolated from the Sargasso Sea
tgtagtaaaagaattgtccttaccaatggaaaaagttaatgttaatggcggagcaatagcattagggcaccctataggtgcatcaggtacgagagtttttgtcacactagttcatgaaatgttaaaaagagattccaaaaaaggtcttgctacgttatgtattggtggaggaatgggtgtagcaatgtgtgttgaaagaaaatga

SEQ ID NO: 235899 - DNA, 904 bp, Unknown
  Bacterial polypeptide expressing nucleotide sequence isolated from the Sargasso Sea
ggttattaaaaaatgtattgaacattctaacttaaaaaccaatgaagttgatatggtttacatgggtcaagttcttcaaactggatcaggacaaaatccagcaaggcaatctttaattaactctggaattaataactcaaaaactgcaacaacaatcaatcaagtttgtggctctggattagctgcagttgccctgggttttaattctttaaaattaaatgatgcaaatattataattgctggcggacaggaaagtatgactaattcacctcattatcaaaatttaagaaaaggtgaaagaaatgatgagtcaaaaatgaaagactctatgattatagatggattagtagatgtttataataagtatcacatgggtgtaacagcagaaaatgttgctgagaaatatcaaattacaaggaaacaacaagatgaatttgcagcaaactctcaaaagaaagcagctgaagcaattaaaaataataaatttaaagatgaaattattccaattcaaattaaagatgggaaaatatttgatactgacgagtatccaaaaaaagatactacaactgaagttttggctacattaaaaacagtattcaaaaaagatggaactgttacagctggtaatgcgtcaggattgaatgatggcgccgctgctttaactttaatgtctgcaaaaactgcaaaagataaaaacttaaaaccattagctaagattatatcatgggctcaatgtggagttgatccatctataatgggaactggacctattccggcatccaagttagcattaaagaaggcaggctgggctgaagaagaactagatttgatcgaagcaacgaggcttttgctgcacaagcaatttctgttaataaagaacttggtttttatactgagaaagtaa

SEQ ID NO: 235900 - DNA, 847 bp, Unknown
  Bacterial polypeptide expressing nucleotide sequence isolated from the Sargasso Sea
gatcaaggccgggctgccgacggcagtgccgggaatgacgatcaacaaggtgtgcggctcgggcctgaaggccgtgatgctggcggcgaacgcgatcgtcgcgggcgatgcggagatcgtgatcgcgggcgggcaggagaacatgagcgcgtcgccgcacgtgctgccgggctcgcgcgacgggttccggatgggcgacgcgaagctggtcgacacgatgatcgtcgacggcctgtgggacgtgtacaaccagtaccacatgggcatcacggcggagaacgtcgcgaaggaatacgggatcacgcgcgaagagcaggacgcgtttgcggcgctgtcgcagaacaaggcggaagccgcgcagaaggccggccgcttcgacgatgaaatcgtgccggtcgcgattccgcaacgcaagggcgagccgctgcagttcgccaccgatgaattcgtgcgtcacggcgtgacggcggaatcgctggccgggctgaagccggcgttctccaaggacggctcggtgacggcggcgaacgcgtcggggctgaacgacggtgcggcggcggtgctggtgatgtcggcgcagaaggcggcggcactgggcctgacgccgctggcgcggatcaaggcgtacgcgaacgcgggcgtggatccgagcgtgatgggcatgggcccggtgccggcctcgcgccgtgcgctggagcgcgcgggctggacgccgggcgacctggacctgatggagatcaacgaggcgttcgcggcgcaggcgctggcggtgcacaagcagatgggctgggacacgtcgaaggtgaacgtgaacggcggggcgatcgcgatcgggcacccgatcggc

SEQ ID NO: 235901 - DNA, 872 bp, Unknown
  Bacterial polypeptide expressing nucleotide sequence isolated from the Sargasso Sea
agttgacgaagtaattatgggtcaagttttaactggcggaactggtcagaatccagcacgacaagccgctatacattctggtataccgaaagaaaaaccagcttttatagttaatcaagtttgtgggtcaggaataagatcggtagcctcggcttttcaaagtataaaatcgggagactctaaaattattattgctggtggacaagaaaatatgtcattggctcctcactcaattcatttaagagatggaaaaaaacttggcgatactgaaatgactgatacaatgattaaagatggtttgtgggatgcttttcacggatatcacatgggcataacggcagaaaatgttgctacaaaattccaagttactagagaagaacaagataaatttgcactgtactctcaagagaaagcattaaaagctcttaaagaaaaaaggtttgatgatgaaataataagctttaaaataaaatctaaaaaagctgaaataaattttaaaacagacgagcaccctagagatgggattaatctagaagcattgaaaagattaaaacctgtatttaaaaaagatggttctgttactgctggtaatgcttctggaattaatgatggggcagctgcagtaaccctgatgtcttccagtgatgcagaaaaaagaggattaaaaaaaatggtaactgtaaaatcttgggctagttgtggagttgacccagctttaatgggaacaggtccaattccatctgcaaaaaaggctttagagttggcaggttggtcgattaaagatttagatttgttagagataaacgaggcattcgctgctcaaagtattgcggtgataaaaactttaggaatatctgaagaaaaagttaatg

SEQ ID NO: 235902 - DNA, 810 bp, Unknown
  Bacterial polypeptide expressing nucleotide sequence isolated from the Sargasso Sea
tctgggggacaatcatattgtaattgctggagggcaagaaagtatgtctttggcgccacatactattcatctaagagacggaaaaaaactaggtgatactgaacttatagactcaatgataaaggatggactatgggatgcttttcatggatatcatatgggtatcacagcagaaaatgttgcagaaaaatttcaagttacaagggatgaacaagataaatttgctttgaaatctcaggaaaaggcaattaaggctcaaaaaggcgataaatttaaagacgagataataaaatttaaaataaaaactaaaaatactgaagtggattttttaaaggatgaacatccaagagaaggtataaatctagaagctttatcgagattaaaaccagtctttaaaaaagacggaactgtgactgcaggcaacgcctctggaataaatgatggggctgccgctgtaactttgatgtcagattctgaagcaaaaaaaagagatttaaaaaaattggtatcaattaaatcatgggcaagttgtggtgttgatccagcattaatgggcactggtccaataccctccacgaaaaaagctttagatatagctggttggtcagtaaaagatgtggatctatttgaaattaatgaagcatttgcggctcaaagtttagcagtgatgaaaactctttctattcctgaagaaaaagttaatgttaatggcggtgcgatagcaataggtcatcctatcggagcatctggaacaaggatacttgttacacttattcatgaaatgatcaaaagggatgtaaaaaaaggttt

SEQ ID NO: 235903 - DNA, 322 bp, Unknown
  Bacterial polypeptide expressing nucleotide sequence isolated from the Sargasso Sea
atgggaacaggacctattccagcttcaaaactagcaatcaaaaaggcaggctggactgaagatcaaatagatttagtcgaagccaatgaagcttttgctgcacaagcaatttctgtaaataaagaacttggttttaatacagagaaagtaaacgtaaatggtggagcaattgcattaggtcacccaataggagcatctggagctagagtgttagttactctagtacatgaaatgcaaaaaagaaaatcaaagaagggacttgcaacactttgcattggcggtggcatgggtattgcaatgtgtgtggaaagtattttttaat

SEQ ID NO: 235904 - DNA, 622 bp, Unknown
  Bacterial polypeptide expressing nucleotide sequence isolated from the Sargasso Sea
attttcaaagcacttaaagaaaataaatttaaagatgaaatagtaaattttaaaattaaatcaaaaaaagctgagatagactttaatattgacgagcatccaagagttggacttaatagcgatgcgctgaagagattaaagccagtttttaaaaaagatggaactgtcacagcaggaaatgcctcaggcataaatgatggtgctgctgcggttacattaatgtctgaagatgaggcacaaaaaagaaaattaaataaattagttacaattaaatcttgggcaagttgtggtgttgaaccttcattgatgggtactggacctataccatcatcaaaaaaagctttagatattgctgggtggtctataaaagaattggatttgttggagataaatgaagcttttgcagctcaaagcattgctgttattaaaactttaggtgttcctgaagaaaaggttaatgttaatggaggtgcgatagcaataggtcaccctattggagcatctgggacaagaatacttgtgacattaattcatgaaatgattaaaagagacgttaagaaaggacttgcaactttatgtattggcggtggaatgggaattgcaatgtgcattgaaagataat

SEQ ID NO: 235905 - DNA, 1051 bp, Unknown
  Bacterial polypeptide expressing nucleotide sequence isolated from the Sargasso Sea
ccggaccaaatagatgaggtaattatgggcaatgtcttatctgcgggtcaaggacaagcaccagcaagacaagccacaataaaaagtggctgtccaaataccactgagtcattaactattaataaaatgtgtggatctggattgaaagctattatgttggccgatcaagcgataaggactggagatgcagatgtaatagttgcaggtggcatggagagtatgaccaactccccttatctcatagagaatgcaagatcaggccagagattagggcacgggaaactagttgacagtatgattcatgatgggctttgggatgtttataatgataaacatatgggtaattgtgcagagatgcttgcggcagaacgaaactttacccgtcaattacaagacgaatacgctattgattcctataataaatcaatatcagcaataaaaaataaaatatttagtactgaaattgtccctgtagaggttaatcagcgaaaaggtaaatccatatttgcgatggatgatgaagagcctgggagagttaagtttgataagattacaaaattaaggccagcttttgcaattgatggtacaatcacagctgctaatgcatcaaaattaaatgatggagctgctgccttattggtaatgagcgagcaaaaagcaaatgaatgcggactaaaaccactaggctcaatactggggcatgcttcctcagcccatgaccctgagtggttcacaactgctccaagtaaggtaataaaaaaattattaaataaagtaagtttggaatctaatgatatagatctctgggaaatcaatgaagctttttctgttgtttcaatggcagcgattgaagatttcagtattgataaagataaagtgaatatctatgggggcgctgttgcattggggcacccaattggtgcttctggagcaagaattctaactacattattaaatggaatggaaagaacggattcccaattaggtctcgctacactttgtattggaggcggtgaagcctcggcattaataatagaaaaaaatgattgat

SEQ ID NO: 235906 - DNA, 385 bp, Unknown
  Bacterial polypeptide expressing nucleotide sequence isolated from the Sargasso Sea
aaaaaggggaataaaacctttggtagaaattaaatcctgggcatcatgcggtgttgatccttctgttatgggaactggtccaattccatcatcaaagaaagcattagagattgctggatggaaatctaaagacctagatttaatagaggcaaatgaagcttttgcggctcaaagctgtgctgtggtaaaagaattatctttacctatggaaaaagttaatgttaatggtggtgccatagcattgggccatccaattggagcttccggaacaagggtttttgttacacttattcatgagatgttaaaaagagattcaaaaaaaggcttggctaccttgtgtattgggggcggtatgggtgttgcgatgtgtgttgaaagaaaatga

SEQ ID NO: 235907 - DNA, 1012 bp, Unknown
  Bacterial polypeptide expressing nucleotide sequence isolated from the Sargasso Sea
tatgtcagaggttgtgatagttggagcagcacgcaccgcaattggctcattcggcggaagtttgagtagtttatcggcagctgaattagggcaaatagccatagaagaagccctgagccgtgccgcagtttctggcgaggaagtagatgaagtcatattagggcaagtactcacagcggcagcgggaatgaatcccgctcggcaagcgtcaatggcggcagggataccaaaagagaaaacagcgatgacaataaatcaagtttgtggatcaggattacgtgcggtggcattaggggcacaagctattagatcgggggatgccgatatcgttgtagctgggggacaagagagcatgagccagtctcctcacgctcaaaatcttcgctccggccagaagatgggcaatctagaattaatagataccatgattaaggatggcctctgggatcactttaatggataccatatgggaagtactgccgaaaacgtcgcgaatcaatggcaaatcacacgtgatgcacaggatgcttttgccctgtcttcacaaagtaaagccgaaactgcacagaaggaaggtaaatttaaagatgaaattgtcccagtaactattaagtcccggcgcggcgagacaatagttgaggaggacgaatatccaaaacatggtacaaatctggagacgcttggaagtctacgtcctgcgttcagtaaagagggaacagtaacagctggaaacgcctcgggtattaatgatggagcagcaactgtggttttaatgtcttcagagaatgcaagaactcgcggaattgagcctctagcgaggataacttcatttgctactcgtggtgtggacccatctatcatgggaacgggtccgataccggcaagtcgagcggcgttggagaaagttggatggaatgttgaagatcttgatttgatagaggctaacgaggcgtttgcagctcaagcatgtgctgtaaataaagatatgggatgggacacgaaaaaggttaac

SEQ ID NO: 235908 - DNA, 808 bp, Unknown
  Bacterial polypeptide expressing nucleotide sequence isolated from the Sargasso Sea
tatgtctaaagaaaatggagttgtaataacatctgctgtaagaacagcaattggagatttaggtgggtctttaaaaaatgtttctgctcataaactaggttcgacagctatttcaaacgctattaaaaaatcaaatattaaggcttcagatataaacgaaatcataatgggccaagttttaacaggtggtgcaggacaaaaccctgcaagacaagccgctatggatgcaggtattccaaaagaaacaccatcatatgttgttaatcaagtttgtggttcaggtctaagatctattgcatcaggatatcattcaattctttctggaagttcaaatattgttttagcgggaggtcaagaaagtatgtctcaatcgcctcacgtagttcatttaagaaacggaaaaaaacttggggacactagtttggttgactctatgataaaagatggattatgggatgcattcaatggataccatatgggtataacagcagaaaatgttgcacaaaaatttcaagttacaagaaaagatcaagacaaatttgctttcgactctcagacaaaagctttaaaagcacaaaaagaaaataagtttgacgatgaaattgttccttacacaattcaacttaaaaaaggtactgcagtttttaaaaaggatgagcatccaagagacgggatttcaatggaggcactacaaaggcttaaaactgcttttcaaaaagaagggacagttaccgcaggaaatgcctcaggtataaatgacggtgctgctgcagtagttttaatgtcaaaaaaagaagctgagaaaaaa

SEQ ID NO: 235909 - DNA, 956 bp, Unknown
  Bacterial polypeptide expressing nucleotide sequence isolated from the Sargasso Sea
tggtattccaaaagaaaaaccagcttatattgtaaatcaagtatgtggatcaggattgagatcgatagcatcaggatttcaaagtataaagtctggggactctaagatagttatcgctggtggtcaagagaacatgtctctagcgccacacgcaattcatttaagggatggaaaaaaaataggtgataccgaattaattgatactatgataaaagatggcttatgggatgcttttcatggatatcacatgggggtaaccgccgagaatgtagctacaaaatttcaagtaactagacaagaacaagataaatttgctcttaagtcgcaagaaaaagcattaatagcaatcaaagaaaataagtttaaagacgaaataactaattttaaaattaaatcaaaaaaagctgagatagatttcaataaagatgaacaccctagagatggtataaatttagagggcttaactagacttaaaccagtttttcaaaaggatggaactgtaactgctggaaatgcctctggaattaatgacggagcagctgcagtaactttgatgtcagaggaagaagcaaaaaaaagagatttaaataaattagttactatcaagtcttgggctagttgtggtgttgaaccagctctaatgggtactggacctattccagcaacaaaaaaagctttagatttagcaggatggaaaattgatgacgtagacctttttgaagttaatgaagcttttgcagctcaaagtattgctgttttaaaaacattgggaattccagatgaaaaagttaacgttaatggtggagcaattgcaataggtcatccaataggtgcgtcaggcactcgaattcttgtcactcttattcacgagatgattaaacgcgatgtgaagagaggtttggccacattgtgtattggtggtggaatgggtattgctatgagtattgaacgataat

SEQ ID NO: 235910 - DNA, 382 bp, Unknown
  Bacterial polypeptide expressing nucleotide sequence isolated from the Sargasso Sea
tttggtataaaaccaatggctcgaattctgtcccattgttctttcgctcatgacccaaaatggtttacaactgcaccgggatatgcaattacaaaagttctcaaacaatctggactagataagagcgatattgatctttgggaaataaatgaagcttttgcggctgttgcaatggctgcgattgatgattttcaactagatagttccaaagtgaacattaacggtggggcgatagctcttggccaccctattggagcatctggagcaagaatattgactacattgatttatgccctagatagaatgaataaaaatcttgggttggtgacattatgtattggcggtggtgaagcatctgttatgattattgaaaaattatgaa

SEQ ID NO: 235911 - DNA, 862 bp, Unknown
  Bacterial polypeptide expressing nucleotide sequence isolated from the Sargasso Sea
gacatagtggtggcaggtggaatggaaagtatgagtaatgcaccttatctctcgaaagaatctagaaacggtatcaggatgggacatagtggtttagttgatcatatgtttcttgatggtttagaagacgcctatgacaagggaaagttgatgggtgtttttgcagagaataccgctgaattattgcaattgacgaggaatatgcaggataattatgctattgactcacttgatagggctatgaaagcttcaaaggatggcgcttttgagaatgaagtccagccaattaaactgaaatttcgaggtgagcaaacaacagtattgtctgacgaacagcccagaaatgccaatatagaaaagattccttcacttaggccagcctttaaggaaggcgggaccgtcacagcagctaactctagctctatttctgatggagcggctgcaatggtgataacaaaattatctattgcggaacaactgggggtcaaacctttagcaactatagttgcacatgtaacccacgctcaggagcccgagtggttcactacagcccctataggcgctattaagaaagtgttagaaaagactgattggggtaaggatgaggtagacctttatgaaataaatgaggctttctcggtagtagttttggctgccttaaaggaattagatttagatagagaaaaagttaatatacatggtggtgcttgtgcaatcggtcatccaatcggtgcttctggtgctagaataatggttacacttttgaactcacttgaaaaatatagtctaaaaaagggcgtcgcatccttatgtattggtggtggcgaggcgaccgcggttgccattgaaaaatttcattaat

SEQ ID NO: 235912 - DNA, 676 bp, Unknown
  Bacterial polypeptide expressing nucleotide sequence isolated from the Sargasso Sea
tacagccgagaatgttgcagaaaaatggaatatttccagaaaagaacaagataaattcgcttttgaatctcaaactaaagcacaagaagcgataaaaaataataagtttgaggaagaaattttaaacgaatttggtgttttagatgagcatccaagatctgatgttacaactgacagcttggcaaaattaaaaacaatttttaaggagaatggaactgtaaccccaggaaactcctctggaattaatgacggagctgcaggggttatcatgatgcagagaagtgagtcagaaagaagaaaattaaaccctttagtaaaaatagtctcctgggcatcttgtggtgttgatcctgcattaatggggtcaggccctataccatcagcaaaaaaagcacttgaaaaagctaattgggaaataaaagatttggatttagtcgagtctaatgaggcttttgcagcccaaagtttagcagttattaaagatctaaaaataccaaaagaaattgtaaacgtaaatggaggagctattgctcttggccaccctataggagcttctggtacaagaataattgttaccttaattcatgaaatgatcagaagaaatgtaaaaaaaggtttaggaactctttgtattggtggaggaatgggtattgcgatgtgtatcgaaagagactaa

SEQ ID NO: 235913 - DNA, 319 bp, Unknown
  Bacterial polypeptide expressing nucleotide sequence isolated from the Sargasso Sea
taccactgctcctggaaaagctataaacaaagtactattgaaaactaatttaaaacctgatgatattgacctctgggagataaatgaagctttttctgttgtgacgatggctgcaatggatgattttaaaattaaacatgataaagtaaatatctacggtggtgctattgcacttggacatccgataggtgcttctggtgcaaggatccttacaactcttattaatgccatgactcgccaaaatgcaaaaaaagggttagcctcactatgcataggtggtggcgaagcttctgctataattattgaaagatatgattga

SEQ ID NO: 235914 - DNA, 406 bp, Unknown
  Bacterial polypeptide expressing nucleotide sequence isolated from the Sargasso Sea
aatgtcaaaaaaagaagctgaaaaaaaaggtatcaaacctttagcagaaattaaatcttgggcctcttgtggtgttgatccctctgtgatgggaacaggtcctataccatcttcaaaaaaagcattagagattgctggatggcaatcaaaggatttggatttgatagaggcgaacgaggcctttgctgcacaaagttgtgcagtagttaaggagctagctttgccaatggaaaaagtaaatgttaatggaggagcaattgcactaggccatcctattggtgcttctgggacaagaattttcgtgacacttattcatgaaatgctaaaaagagactcaaagaaaggattggctacgctttgtattggaggaggtatgggcgttgctatgtgtattgaaagaaaatga

SEQ ID NO: 235915 - DNA, 235 bp, Unknown
  Bacterial polypeptide expressing nucleotide sequence isolated from the Sargasso Sea
ggccaacgaagccttcgccgcccaggccatcgccgtcggccgcgagctgcattgggacagcgccaaggtcaacgtcaacggcggtgccatcgccctcggccaccccatcggcgcctccggttgccgcatcctggtcagcctgatccacgagatgcagcgacgcgacgcccgccgcggcctggcgaccctgtgcatcggtggcggccagggtgtggccctggccatcgaacgctga

SEQ ID NO: 235916 - DNA, 1114 bp, Unknown
  Bacterial polypeptide expressing nucleotide sequence isolated from the Sargasso Sea
atgcaagggagatcagtcattgtttcggcagtccgtactccaataggagcattccaaggttatctatcatctttgtccgcttccgatcttgcatctatctgtattaaagatatccttgatcaaacggggattcagaccaatcaaataaatgaagttatcttaggaaatgtcctatccgctggtcagggacaggcaccagcacgccaagcaacattaaaaagtggttgcccagattcagttgaagcattaaccattaataaaatgtgtggttcggggctaaaggctgtcatgctcgctgatcaagcaataagatgtggagatgctgatctaattcttgctggtggtatggagagtatgtcaaatgctccctacttattgaatgatgcaagagcgggaaagaaattaggccacagtaaggttattgatagtatgatccatgatggactatgggatgcatataatgataagcatatgggtaattgtgcagagatgctggcaaaggatagaaactattcaagagaagctcaagatgaatatgcaatagaatcatataatcgagcgcaacaagcaaccactgatggaatattccaaacagaaatagtgccagttgtgattccgcagaggaaaggagagccattggtaatagatgaagatgaagagccagctaaagcgagatttgaaaaaattccagccctaaagcctgcatttgataaagatggtaccataaccgcagcaaatgcttcaaaattaaatgatggtgcagccgttatgcttataactagtgaggaaaatgctaaagatctgggattgaaacctttagtgagaattttagaacaagcctctgcttcacatcagccagaatggtttactacagcccctagtaaagctataggtaaggtattgaataaagctggcctaaaagcgaacgacattgatctttgggaaatcaatgaagcttttgcagttgtagcaatggctgcaatagaagactataatattcaatatgaaaatgtaaatatatatggtggtgctgttgcgctagggcatcctataggagcttcaggagcaagaatcctcacaacattgatcaatggaatgagtcgccaaaatgttg

SEQ ID NO: 235917 - DNA, 808 bp, Unknown
  Bacterial polypeptide expressing nucleotide sequence isolated from the Sargasso Sea
aatgccaaaagctcgttacggttacagaatggctttagaagctcaagatactgtattggacggaatggtttatgacggattgtgggatatttttaataattaccatatgggaatgactgctgaaaatttagcagagaaatataatatatcccgtgaagagcaagataaatttgcaattgaaagtcaaggtaaagctaagaaggcacaaagagccggaacatttaagaaagagattgttcctgtgcaattaaaaaaagggatttttgatattgatgagcatccaagagaagtttcaatggctgctttaagcagactgaagccagtatttactcctgagggctctgttactgctggaaatgcttctggtattaatgatggagctgcttatatggtcgtttcttctgaagagaaagcaaaagaattaggattagatcctgtaggtgaagttatttcttatgctgttgccggagttgaaccatcaataatgggcattggtcccgtacctgccatgaataaggctctagcaaaagctggtctaacaatagatgatattgatttagttgaattaaatgaagcttttgctgtacagtcgctagcagttttaagtgattttccaattcctgctgaaaagttaaatgtgaatggaggtgcagtcgcacttggtcatccaattggggcttcaggaactatacttgtagttaaacttcttcatgaaatgcaaagacgtaaagcaaaaagaggattagtttcattatgtgttggtggtggaatgggtattgctatggttatagaaaaccctaaagcttaa

SEQ ID NO: 235918 - DNA, 854 bp, Unknown
  Bacterial polypeptide expressing nucleotide sequence isolated from the Sargasso Sea
aaaaatattgattgctgggggacaagaaaacatgtcgttagctcctcatgctattcatttaagagatggaaaaaaattaggagatacacaattaatagataccatgattaaagatggattatgggatgcatttcatggatatcatatgggtattactgcagagaacgtagcagaaaagtttcaagttactagagatgaacaagataaattttcattaaaatcgcaacaaaaggctttaaaggcacaaaaagaaaatagatttaaagatgaaattatcgatttaaaaatcaaacttaaaaaaacagagtctagttttaataaggatgaacatccgcgggagggcataagtttagaggcattatctagattaaaacctgtttttaaaaaagatggtacagtgactgctggtaacgcttcaggaataaatgatggagctgcagcagtgactttgatgacaaaagatgaggcagacaagcgaggagtcaaaaaattagtatcgattaaatcttgggctagttgtggggttgatcccgctttaatgggtacaggaccaataccatcttcaaaaaaagcacttgatttggcaggttggaaagtaaaagatgtagacctttttgaaattaatgaggcatttgctgctcaaagtttagcagttttaaaaacactttctattccagaggagaaagtgaatgttaatggtggtgcaatagctttgggtcatccaataggtgcttccggaaccagaatacttgttacattaatacatgaaatgattaaaagagatgtaagaaaaggattagcaactctttgcattggtggtggaatgggtatagcaatgtgtgtagaaagataat

SEQ ID NO: 235919 - DNA, 282 bp, Unknown
  Bacterial polypeptide expressing nucleotide sequence isolated from the Sargasso Sea
ttaaaaaagctaattggaaattaaaagatatagatttattcgaaattaatgaggcttttgccgctcaatgtattgctgtaaggcgtgaacttaaaattgatcaaagtaaagtaaatataaatggtggcgctatcgctttaggtcatccaataggagcttcaggtgcaaggatacttgtaacactccttcatgaaatgaaaagatccaacaaaaaaaagggttgtgcaacactttgtattggtggaggaatgggaatagctttatgcattgaaagaaactaag

SEQ ID NO: 235920 - DNA, 892 bp, Unknown
  Bacterial polypeptide expressing nucleotide sequence isolated from the Sargasso Sea
aacaggacaaaattcagcaagacaagcggcaattaaagcaggaatatctatttcaaaacctgcatttattgtaaatcaagtttgtggctcaggactcagagcagttatttctggttttcaatctattaaactaggagagtcaaaaaaagttatttcaggtgggcaagaaaatatgtctattgctcctaaattaattcttaataaagatctaaaaaaaaatcttcaaaatgaattaattgactcaatgatttacgatggtttattagatgcatttaacaattatcacatgggtatgacagccgaaaatgttgcaaaaaaatttgatatatctagagaagaacaagataaatttgcattgaattctcaaaaaaagactcaagaagctattaaatataataaatttaaaaaagaaatagtagaaataaaattaaatggtaacattttgaaaaaagatgaacatccaagagataatttaaatttaaaagatctacaaaaattgaaaacagtttttaaaaaaaatggaacagttacaccagggaactcatctggtataaatgatggagctgcagctttactactaacaaatttggaagaagttgaaaaaaagtcaatagaaccattaggaaaaattgtatcttgggcatcagttggtgttgatccttcactaatgggtttaggaccaataggagcagttaaaaaagcgattaaaaaagctaaatggaaaattgaagatatagatctatttgaaattaatgaagcttttgcagcacaaagcattgccgtgataaacgaattaaatattgataaaagtaaagtaaacgtaaatggaggtgcaatagctttaggtcatcctataggagcttctggcgcaagaatactcgttacactgtgc

SEQ ID NO: 235921 - DNA, 919 bp, Unknown
  Bacterial polypeptide expressing nucleotide sequence isolated from the Sargasso Sea
aatcaagtctgcgggtcgggactaagatcagttgttgcaggatatcaagcaataatatccaatgattcaaaaataataatagcaggagggcaagaaagtatgactaacgccccacatgcaattcattttgataaagataaaaaactaaacgagtcaaaacttattgacacgatgatcaaagatggactgtgggatgcattttttgattatcacatgggagttactgctgagaatgtagctacgaaatggcaaataactagaaaagatcaagatcattttgctttttcttcacaacttaaagctgatagagcaaaaaaagaaaaaaaatttaaaaacgaaattattccagcgatttttaaaggtaaaaataaattagagattgatgagcatccaagagaaggaatgactttggaaagacttgaaaaattaaaaccatcatttaaaaataatggaacggtgacaccaggtaatgcatctggaattaatgatggtgctgctgcagtagttttgatgagtagtaacgaagcaaaaaaaagaagtttaaaacctttggcaaaaattatttcatgggcaacttgtggtgtcgatccgtcactaatgggctctggaccaattcctgcttcaaaaaaagctttacaaaaagctggttggaaaataagtgacttagatttaattgaatctaacgaggcatttgctgctcaaagcttagcagtaataaaagagttgggaattcctgaagaaaaagtaaatgtcaatggaggagcaattgctcttggacatcctattggagcctcaggtactagaatattagtaacacttattcatgaaatgcaaaaaagaaaatcaaaaaaaggtttagctactttatgcattggtgggggaatgggaatcgcaatgtgcattgagagaaatgtataaa

SEQ ID NO: 235922 - DNA, 331 bp, Unknown
  Bacterial polypeptide expressing nucleotide sequence isolated from the Sargasso Sea
gatccagctctaatggggctaggacctatagaagctattcgaggtgcaatcaaaaaagcaaaatgggatttagatgaaattgatctatttgaaattaacgaagcatttgctgctcaaagtatagcagttattcgtgaactaggcattgatcaaagcaaggttaatgttaatggtggcgcaattgctcttggtcaccctataggagcttcgggagctagaatattagttactttgatacatgaaatgaaaaggcaaaacaaaaataaaggttgtgcaacactttgtataggtggtggaatgggtatagccttatgtgttgagaaaatttaga

SEQ ID NO: 235923 - DNA, 502 bp, Unknown
  Bacterial polypeptide expressing nucleotide sequence isolated from the Sargasso Sea
ggcactgcaaaggcttaaaactgcttttcaaaaagaaggaacagttactgcaggaaatgcctcaggtataaatgacggtgctgctgcagtagttttaatgtcaaaaaaagaagctgagaaaaaaggtattaaacctttagcagaaataaaatcttgggcctcttgtggtgttgatccctctgtgatgggaacaggtcctataccgtcttcaaaaaaagcattagagattgctggatggcaatcaaaggatttagatttaatagaggcgaacgaagcctttgctgcacaaagttgtgcagtagttaaggagctagctttaccaatggaaaaagtaaatgttaatggtggagcaattgcactaggacatcctattggtgcttctgggacaagaattttcgtgacacttattcatgaaatgctaaaaagagattcaaagaaaggattggctacgctttgtattggaggaggtatgggcgttgctatgtgtattgaaagaaaatga

SEQ ID NO: 235924 - DNA, 748 bp, Unknown
  Bacterial polypeptide expressing nucleotide sequence isolated from the Sargasso Sea
atgatggttgatgggttaatagactcttataatcactatcatatgggagtcacagcggagaatattgctgaaaaatatcaaataacaagagctgaccaagataaatttgcacttaattctcaaaaaaaagcaattaatgcaatcgatacaaataaatttaaagatgaagtaataccaataaagattaatggaaaattaattttagaaaaagatgaatatccgagaaaagatacaaatataaataaactttctagtttaaaaactgtatttaaagatggaggaactgttacagctggaaatgcatctggattaaatgatggtgcagctgcagttgtaattatgaataatcaaagcgcaaaaaaaagaaatttaaaacctttggcaaaaatagtttcatgggcacagtgtggtgttgatccatcattaatgggtactggtccaataccagcttcaaaacttgctttaaaaaaagctggatggaatgtaaaagatttagaattaattgaatcaaatgaagcattcgcagcacaagctatagcagttaataaagaactaggattaaattcagaaattgtaaatgtaaatggtggtgctattgcgttgggtcaccctattggtgcttctggtgcaagaatattagttacgttaatacacgaaatgaaaaagagaaaattacaaaaaggtctagcaacactttgtattggcggtggtatgggtattgctatgtgtatagagtcaattttgtaaa

SEQ ID NO: 235925 - DNA, 556 bp, Unknown
  Bacterial polypeptide expressing nucleotide sequence isolated from the Sargasso Sea
actgggaagtttcctctatagagatgaacatcctagaaaaggacttattaaatctgacttaaaaaaattaaaaactgtatttttaaataatgggactgtcacagcaggaaattcatcaggaataaatgatggtgcagctgcattactattaaccacagctgaagaggcaaaaaaaaaatcaatagaaccattggcaaaaataatttcgtgggcttcagttggcgttgatccagctttaatgggtcttggaccaataggagctattactgaagcaattaaaaaagcaaaatggagtataaatgatatagatctttttgagattaatgaagcttttgcggcccaaagtattgctgtaatacgtgaattaaatattgataaatttaaagtaaatgtaaatggtggagcaatcgctttaggtcatccaataggagcatcaggagctagaatattagtaacactcgtccacgaaatgaaaaaaaggaaaaaaaataaaggttgcgctacactttgtataggtggtggcatgggtatagctttgtgtattgagagaatttaa

SEQ ID NO: 235926 - DNA, 775 bp, Unknown
  Bacterial polypeptide expressing nucleotide sequence isolated from the Sargasso Sea
catgcaggatgttgtaattgtcgcggcaacgcgcaccccgattggcagttttcatggtgcgctggcaccactttccgccgtggagttaggtacagcggttgtccgttcgctgctggaaaaaacggctgtggcgcctgaacaaattgatgaagtgattttaggtcaggtgctcacgacaggctgtggccagaatccggccagacaaacggcgttacgcgcaggactgccgtcaaccacaccggcgttaactattaatctggtgtgcggttctggcctgaaggcggtgcatcaggcggtacaggcaattcgctgtggcgatgcgcaaatcgtgattgccggaggccaggagagcatgagcaatgcgccctattttctcgacggcgcgcgggccggcctgcgtttgggtcatgccagtatgaaagacagcgtggtgcatgacggcttgtgggatgcgttcaacgactatcacatgggtattactgccgaaaatctggcggataagttcgtaatcagtcgtgagcagcaggacgcttttgccctgcgctcccagcaaaaagccgccgctgccattgaagcgggtcgttttagcgcggaaatcacgccggttagcgtcccacaaggcaaaaagccaccacgtgtggtggaccgtgacgaacagcctcgcccggatactcaggccgacaagctggcgcaacttaaaccagcatttcggccaggaaacggcacggtgaccgccggaaatgcatcatccatcaatgatggtgccgccgcggtg

SEQ ID NO: 235927 - DNA, 870 bp, Unknown
  Bacterial polypeptide expressing nucleotide sequence isolated from the Sargasso Sea
taaatctaaacttagcaaacaagaagtagatgaaattattctaggtcaagttttaacagctggacttgggcaaaaccctgctagacaagcagctataaaagcagggataccaaaagaaaaacctgcttatgttgtaaaccaggtttgtggatctggtattaggtctgttgtatcaggttatcaaagtttgagttctgggaattcaaaagtagttattgctggaggacaagaaaacatgtctctagctccgcacgcaattcatttaagagatggaaaaaaattaggtgacgctaaattaatagatacaatgattaaagatggtttatgggatgcatttcacgggtatcatatgggtgttactgcagaaaatgttgcggaaaaatttcaaataacaagagaacaacaagacaaatttgctttaaggtctcaggaaaaagctttaaatgctcaaaaacaaaaaagatttcaagatgaaataatgaattttaaaattacggcaaataaagcagaaataaatttcaataaagatgagcatccaagagagggtataaatttagatgccttatcaagacttaagccggtatttaaaaaagatggtacggttactgctggaaatgcatctggtattaatgatggagctgctgctgtaattttaatgacagctgatgaagcggaaaaaaaaaataaacaaaaattagtttcaattaaatcgtgggctagttgtggtgttgatccagctttaatgggaactggtccaataccatcctcaaaaaaagctttggaattagctgggtgggatataaaagacgttgacctttttgaaattaatgaagcctttgcagctcaaagtcttgccgtattaaagacgct

SEQ ID NO: 235928 - DNA, 484 bp, Unknown
  Bacterial polypeptide expressing nucleotide sequence isolated from the Sargasso Sea
actggtctttcaaaaaaatggaactgttacaccaggaaattcctcaggtataaacgatggggctgcagctttattattaactacattagatgaagctaaaaaaaaatctattaagccattagcaaaaatagtttcttgggcatcagttggagtagatccagctttaatggggttaggaccaatagaggctgtacgtcaagcactcaaaaaagcaaaatggaaaatagatgaaattgacttatttgaaattaatgaagcttttgcagctcaaagtattgcagtaattcaggaattagacattgataaaaataaagtaaatgttaatggaggcgctatagccctaggccatcctattggagcttcgggagctcgaatattagttacattaatacatgagatgagaaggcaaaataaaagtaaaggctgtgtaacactttgtataggcggtggaatgggtatagccttgtgtgttgaaaaaatttag

SEQ ID NO: 235929 - DNA, 869 bp, Unknown
  Bacterial polypeptide expressing nucleotide sequence isolated from the Sargasso Sea
aaagcgggagacaataaaaattgttatatctggtgcccaagaaagtatgtcattagctcctcatgctatttttttacggaagggaaaaaagttaggtgatgcggaaataattgatactatgattaaagatggactttgggatgcttttcatgggtatcatatggggatcactgcagaaaatgttgctgaaaaatttcaagtcacaagagaagaacaagataaatttgctctaaagtctcaggaaaaagctataagagcccaaaaagaaaataaatttaaagatgagattattaatgtcaaaattaaatcaaaaaaagctgaaattgacttcaataaggatgagcatccaagagaaggtattaacttagaagccttatcgagattaaaaccagtatttaaaaaagatgggaccgtcacagctggaaatgcctctggaattaatgatggagccgctgcggttactttaatgtctagctctgaggcagaaaaaagaggtttaaagaaattagtatctatcaaatcttgggctagttgtggcgtagaaccagctttaatgggaacgggacctattccctctacaaagaaagctttagatattgcaggatggtcagtaaaagatgttgatctttttgaaataaatgaagcttttgcggcccaaagtcttgcggttttaaaaactctttcgataccagaggaaaaagtaaatgttaatggtggtgcgatagcgttaggccacccgatcggagcctctggaacaagaattctagtaacgctaatacacgaaatgattaagagagatgtaaaaaaaggtttagcgactctttgtatcggaggtggaatgggtattgcaatatgtattgaaagataaa

SEQ ID NO: 235930 - DNA, 497 bp, Unknown
  Bacterial polypeptide expressing nucleotide sequence isolated from the Sargasso Sea
aaaaaaattaaaaacagtctttaaaaaaaatggaacagttacaccaggaaattcctcaggaataaatgatggagctgcagctttattgttaaccactttagaagaagctgaaaaaaaatctattaaaccattagcaaaaatcctatcttgggcttgcgttggaatagaacccgctctaatgggattaggacctatagaagctgttcgtgaggcaacaaagaaggcaaaatggaatttagatgaaattgatttatttgaaataaatgaagcttttgctgctcaatctattgcagtaattcgtgagttaggtattgatcaaaacaaagtaaatgttaatggtggagcaattgcacttggccatcctattggagcttcaggagctaggatattagttacattattacatgaaatgaaaagacaaaataaaaaaaagggctgtgcaacactttgtataggtggtggtatgggtatagctatgtgtgttgaaaaaatttagg

SEQ ID NO: 235931 - DNA, 978 bp, Unknown
  Bacterial polypeptide expressing nucleotide sequence isolated from the Sargasso Sea
agttttaaaaaaaccaaatttgttaacgatgagattgatgaagtaataatgggtcaagtattaactgcaggtactggtcagaaccctgcaagacaagcggcaataaatgctggaataccaatttcaaaaccatctcatatgataaatcaagtgtgcggctctggacttagagcagtaatatcaggttatcaatcaatcaaattaggagaatcaaaaaatgttatatcaggaggtcaagaaaatatgtctttagctccacattcaattttttatagagataaaaaaaaaatattagaggataaacttttagatacaatggttaatgatggattaatagatgccttcaataattatcatatgggtgtaacagcagaaaatgttgctaaaaaatttaatataactagaaaagaacaagatgaatttgcattaaagtctcaaaaaaaaacagaattagctatcgcaaataataaatttaatgaagaattggtaaaaataaatcacaatgggagcattttaaatattgatgaacatccaagaataggtttaaaaatgacagatttagaaaagctgaaaaccgtttttcaagataacggaactgttacaccgggaaattcttcaggtataaacgatggagctgcagctttactattaacctcattggaagaagcagaaaaaaagtcgataaaaccattagtaaaaattgtatcttggtcctcggttggagtggatccatccgtaatgggtttggggcctattgaggctgttcgtgaagcaattaagacagcaaaatggaatttagatgaaattgatttatttgaaattaacgaagcttttgcatctcaaagtattgcagtaattcgtgaattaggtattgatcaaaataaagtaaatgttaatggtggagccatagctcttggtcatcctattggcgcctctggagcaagaatacttgtaactttgatacatgaaatgaaaaga

SEQ ID NO: 235932 - DNA, 319 bp, Unknown
  Bacterial polypeptide expressing nucleotide sequence isolated from the Sargasso Sea
tatgggtcttggacctatagaggctgtacgccaagcaactcataaagccaagtggaacatagaagatattgatttgtttgaaattaatgaggcttttgccgcacaaagtattgcagtaattaaggaattaggaattgagctaaaaaaagtaaatgtaaatggcggagctatagcgcttggacaccctattggagcttctggagcaagaatactagtaacattaatacatgaaatgattaaacaaaaaaaagataaaggttgtgcgtctctttgtattggaggggggatgggtatagctttgtgtatagagagaatttag

SEQ ID NO: 235933 - DNA, 835 bp, Unknown
  Bacterial polypeptide expressing nucleotide sequence isolated from the Sargasso Sea
tgcacatcacaccataaatgtcagaaatggattaaaaatgggagatggaaaacttaaagatagcatgatcatagacggtctttggtgtgcaatgaataattaccatatgggaacaaccgctgagaatattgccagaaagtataacatttcaaaggaagaacaagatgaatttgcaacattttctcaaaataaaacagaagaagctcaaaaaaatggatactttaaaaatgaaatcagcccaataaaaattaaaataaaaaaagagtcagtactatttgaacaagacgaatttccaagacacggaaccacattagaaaaaattaacgcgttaaagcctgtgtttgataaagaaggaaccgtaactgctggaaacgcctcaggattaaacgacggagcggctgcaactcttataatgagagaggaaaaagctaatgaattgggactaacaccacttgcaaggatcatatcctcagcatcagttggtgtagatccaaagattatgggtataggaccagttcctgcagtgaaaaaagcacttgaaatagcaaaatggaaaattgatgaagttgatctcatagaagctaatgaggcttttgctgcccaatctttagctgtaattaaggaacttgagcttgacaaaagcaaagtaaatgtgaacgggggagcaattgctcttggccaccctataggagcgtcgggggcaagagtaatagtgactcttattcatgaactaaaaagacaaaaaaaacaaaaaggaattgccacactctgtatagggggtggtcagggaatagccatgtgtattgaggcattaaaaatgagtaaagtagtatta

SEQ ID NO: 235934 - DNA, 912 bp, Unknown
  Bacterial polypeptide expressing nucleotide sequence isolated from the Sargasso Sea
tgagtattatgggtcggttttaactggtggttctggtcaaaatccagcaaggcaagcctcgatgaagtcaggcataccaaaagaaaaaccagcatttatagttaatcaagtttgtggttcaggtatcaggtccgttgcctcagcttttcaaagtatcagagctgatgattcaaagatagtaatagctggaggtcaagaaagtatgtctttggcgccacatgctattcacttaagagatggaaaaaaattgggagataccgagcttgtagacacaatgattaaagatggtttatgggacgccttcaacgggtatcatatgggtattacagcagaaaatgtagctgaaaagtttcaggtcactagagatcaacaagacaagtttgctttgaactctcaaaataaagctttaaaagcacaaaaagaaaataaatttcttgacgaaattatcaaatttaaaatcaaatcaaataaagctgaggtagatttttacaaagacgagcatcctagggaaggaataaatttatctgctttatctagattaaaacctgcttttaaaaaggatggtactgtcacagcaggaaatgcatcaggaataaatgacggtgctgctgctgttgtggtgatgtcaagtgaagaggcagacaaaagaggtattgaaaaattagtttctataaagtcatgggcaagttgtggagttgatccagctttaatgggaactgggcctattccttcttccaaaaaagctatggatttagcaggctggtctgttaaagatatagatctttttgaaataaatgaggcgtttgctgcacaaagcttagcggttctaaaaaccctttcaattccagaagagaaagtaaatgtgaatggtggagctatagctataggtcacccaattggcgcatcgggcac

SEQ ID NO: 235935 - DNA, 322 bp, Unknown
  Bacterial polypeptide expressing nucleotide sequence isolated from the Sargasso Sea
catgatgggattaggaccaatcccctcatcaaaaaaagctcttgaaatagctaaatggaatgtaaaagatttggacttagttgaaattaatgaagcgttcgccgcacaaagcattgctgtaataaaagagttaaaaattcctaaagaaaaagtaaatgtcaatggcggagcaattgcacttggtcatcctataggtgcctcaggagctagaattgttgttacgcttttaaatgaattaaaaaaaataagtggaaaaaaaggtttggcaacactatgcatcggaggaggtatgggaatttcgatgtgtatagaaaaagattaa

SEQ ID NO: 235936 - DNA, 655 bp, Unknown
  Bacterial polypeptide expressing nucleotide sequence isolated from the Sargasso Sea
agattcgatcaagatgactttgctttaaattctcaaaaaaaaacagaaaatgcaattaatacaaatagatttgaggaagaattaattaaaataaaccaacctggtattaatcttgatacagatgaacatccaagaaaaaagctaactaaatcagatttagaaaagttaaaagcagtatttaaaaaaaatggaactgtaacacccggaaattcatcaggaattaatgatggtgctgctggtctactattaacaacccttgaggaagctaaaaaaaaatttatccagccgttagtaaagataatttcatgggcttcagttggagttgatccaagtctgatgggtcttggaccaattgaggctgttcgtaaagcagtcaaaaaagcaaattgggatttaaatgacgtagatctttttgaaattaatgaagcttttgccgctcaaagtattgcggtaatacgtgaattaaatattgatgagtataaagttaatgttaatggaggagctatagctttaggtcaccctataggagcatcaggtgcaagaatattagtcacactaatacatgaaatgataaagcagaaaaagaataaaggctgcgctacactatgcataggtggtggaatgggcatagccatatgtgttgagagaatttaag

SEQ ID NO: 235937 - DNA, 246 bp, Unknown
  Bacterial polypeptide expressing nucleotide sequence isolated from the Sargasso Sea
aatgggattaggtcccatagaggctgtgcgagcagcgattaaaaaagctaaatggaatttaaatgagatagatttatttgaaattaatgaagctttcgcagctcaaagcatagcggtaatacgtgaattaggtattgatgaagataaagtaaatgttaacggtggagctattgctcttggtcatcctataggagcatcaggtgcaagaattttagtgacattggtacatgagctgaatagacaaaa

SEQ ID NO: 235938 - DNA, 727 bp, Unknown
  Bacterial polypeptide expressing nucleotide sequence isolated from the Sargasso Sea
gctttccacggatatcatatgggagtaaccgctgataacgtagcaacaaaatttcaagttactagagatgatcaagataaatttgcattaaattctcaagaaaaagctctgaaggctcaaaaggagaataaatttaaagaggaaataattaattttaagattaaatcaaaaaaaaatgaaataatctttaataaagatgaacatcctagagaagaaattaacttggaggctttgaagagacttaaacctgtttttaaaaaagatggtacagttacagctgggaatgcttctggtattaatgatggagcagctgcagtaactttaatgtcagaaaaagaagctgaaaaacgaaagcttaaaaaactagtttcaattaaatcttggacaagttgtggcgttgatccagctttaatgggaacaggcccaatacctgcttcaaaaagagctttagatttagcaggatggtctataaaagacgttgatttatttgaaatcaatgaagcctttgcggcacagagcattgcggttttaagaactctttctattcctgaagaaaaaataaatgttaatggtggagcaatagctttaggccatcccataggcgcttcaggcactagaattctagtaactcttattcatgaaatgattaaaagagatgtcaataaaggtttagcgactttatgtattggtggcggtatgggcattgctatgtgtgttgaaagataat

SEQ ID NO: 235939 - DNA, 445 bp, Unknown
  Bacterial polypeptide expressing nucleotide sequence isolated from the Sargasso Sea
gcatccggattgaatgatggagcagccgctgtgttagttatgaaaaaagaaaaagctaattatttaggacttgaaccgctagtaagtatagtatcatcttcaaccattggtgttgatccctcaattatgggtataggacctgtacctgcagtgaaaaaagcacttcagcaagctaagtggtctattgatgacctcgacttgattgaagcaaatgaagcatttgcagctcaatccttagctgtgtccaacgaattaagttgggatatgaataaagtaaatgtgagcggaggagcaattgctttaggtcacccaataggagcgtcaggaaccagaattttagtaactttaatccacgaacttgaaagacaaaataaaaaaaaaggaattgcaactttatgtatcggaggcggtcaaggagttgcaatgtgtgttgagagaatataat

SEQ ID NO: 235940 - DNA, 1012 bp, Unknown
  Bacterial polypeptide expressing nucleotide sequence isolated from the Sargasso Sea
atcagtgaagttttaaaaaaatcagcatttaaaaaggatgaaattgatgaaataattatgggccaagttttaactgcgggtggaggtcaaaatcctgcaagacaggctgcaataaatgctggcatacctatctcaaaaccagcatatatagtaaatcaggtatgtggttctggactcagagcaatagtgtcaggatatcaatcaataaaattaggagagtcaaaaaatgtgatctcaggtggtcaagaaaatatgtcaatggctccttactcaattttttatcaagatgaaaaaaaaatttcagagaaacaaatgttaagtacaatgatcaatgatgggttaacggacgcatttaataattatcacatgggtgtaacagcagaaaatgttgcaaaaaaatttaatatatcgagagaagcacaagatcaattcgctttagagtctcaaaaaaaaacagaagtagctattaataataataaatttgatgaagaaataattaaaataaatcaaaatggaaatatcttaaataaagatgagcatccaagaataggtttgaaattaatcgatttaaaaaaattaaaaacagtctttcaagaaaacggaaccgttactccagggaattcatcaggaataaacgatggtgcagcagctttattattaactactcttgaagaagcagaaaagaaatcaatcaaaccacttgtaaaaatagtgtcttgggcttcggttggagtagatcctgctctgatgggattagggccaatagaagctgttcgtaaagcagctgagaaagctaaatggagtttagaagaaattgatttatttgaaataaatgaagcattcgctgcacaaactcttgcagttattcgtgaattaggtatcgacagaaacaaagtaaatgtaaatggaggcgctattgctcttggtcaccctattggtgcttcaggagcaagaatacttgttactttgattcatgaaatgaaaaaacaaaaaaaaattaagggttgtgcaa

SEQ ID NO: 235941 - DNA, 610 bp, Unknown
  Bacterial polypeptide expressing nucleotide sequence isolated from the Sargasso Sea
ttaactaaaagatttaaagaagaaattattcctgtaatagttaaaaaaaagaaggaagagtatgaaataactgacgatgaatttccaaggcatggctcaacaatagaaaaaatgcaatctcttaaatctgtttttcaaaaaaatggaacagtaacagcgggaaatgcatccggtctaaatgatggttcagctgctgtatgtttaatgaaagaaagtaaggctaatgaacttaatataagtcctttggctagaattgtatcatgggcatctgttggagttgatccgtcaataatggggattgggccagttaatgctgtcagaactgccttatctagggccaagtggaatattgaggatttagatttaatagaagcaaatgaagctttcgctgctcaagctttagcggttagtaatgagcttggatggaatatgggaaaagtgaatgttaatggtggggcgattgccttaggacacccaattggagcatctggggcaagaatacttgttactctaattcatgaacttataaagcaaaaaaaagaaaagggtattgcaacactatgtattggtggtggacaaggaattgcaatgtgtattgaaagaatttaaa

SEQ ID NO: 235942 - DNA, 685 bp, Unknown
  Bacterial polypeptide expressing nucleotide sequence isolated from the Sargasso Sea
ggctacaaaatttcaagttaccagagatgatcaagataaattctcattacaatctcaagaaaaagctcttaaggctcaaaaagaaaataaatttaaggaagaaataattaattttaaagttaattcaaaaaaaactgaaatagattttaataatgatgagcatccaagaccagatattactctggaagctttaaaaagactcaagcctgtctttaaaaaagatggcactgttacagctggaaatgcctcaggaattaatgatggagctgctgctgtaacattaatgacagaagaagaatccaaaaaaagaaagctaaataaattagtttcgattaaatcttgggcgagttgtggagtagatccagctttaatgggaactggaccaatacctgcttcaaaaaaagctttggatttagctaagtggtctataaaagatgtcgatctttttgaagtcaatgaagcatttgcagcgcaaagtattgcagttattagaactctttctattcctgaagaaaaagtaaatgtaaatggtggagcaatagccttgggacatcctattggtgcttctggtacaagaatacttgtaacattaattcatgaaatgattaaaagagatgtaaataaaggcttagcaactttatgtataggtggaggcatgggtatagcgatgtgtgttgaaagataa

SEQ ID NO: 235943 - DNA, 925 bp, Unknown
  Bacterial polypeptide expressing nucleotide sequence isolated from the Sargasso Sea
gggcagaaccctgctagacaatcattaattaactcaggaatagaaaattcaaaatctgcaactacaataaatcaggtttgtgggtctggtttagctgcagtggcattgggttataactcattaaaattaaacgatgcaaatataattatagcaggtggacaagaaagcatgactaattctccacattatcaagttctaagaaaaggtgaaaaaaatgaagaaagtaaaatgaaagactctatgcttatagatggattaattgatgtttataatcaataccatatgggagtaacagcagaaaatgttgcagaaaaataccaaattactcgtatggaacaagatgaatttgcagttaattctcaaagcaaggcatcagcagcaatcaaactaaataaatttaaaaatgaaattgttccgataaagttaaaaaacggaaaaatgtttgatacagacgaatatcctaaaattggaactaatatagaaaaattatctactcttaaaacagtttttaaagaaaatggaactgttacagcaggtaatgcttcaggtttaaacgatggagctgcagctttaacattaatgactttaaaaacagcaaaagataagaatttaaaacctttagctaaaattgtgtcgtgggcccagtgcggagttgatccttcaataatgggaacaggacctattccagcttcaaaattagcaattaaaaaagcaggttggactaaagatcaaatagatttagtggaagctaacgaggcttttgctgcacaagcaatttcagttaataaagaacttggttttaatgatgagaaagtaaatgtaaatggcggggcaattgcattaggtcacccaataggagcatctggagctagagtgttagttacactgatacatgaaatgcaaaatagaaaatcaaaaaaaggac

SEQ ID NO: 235944 - DNA, 670 bp, Unknown
  Bacterial polypeptide expressing nucleotide sequence isolated from the Sargasso Sea
tacaagaaaagatcaagataaatttgcattcgaatcgcaatcaaaagctttgaaagctcaaaaagaaaataaatttgatgatgaaattatacctttcacaatccaatcaaaaaaaggtagtacaatctttaaaaaagatgaacatccacgagagggaatttctatggaagctttacaaagattaaagactgcttttcaaaaagacggaacagtaacagctggtaatgcttcaggaattaatgatggagcagcagcagtagtattaatgtcaaaagaagaagctgaaaaaagaggtataaaacctttggctgaaattaaatcttgggcctcatgtggtgttgatccatctgtaatgggaacaggaccaattccatcgtcaaaaaaagcactagaaattgcaggttggaaacccaaagatctagatttaatagaagcaaacgaggctttcgcagctcaaagttgtgctgtagtaaaagaattgtctctaccaatcgaaaaagttaacgttaatggaggtgctatcgcattaggtcatccaattggagcatctggtacgagagtttttgtcacacttatacatgaaatgttaaaaagagattccaaaaaaggtttagctacgttatgtattggtggaggaatgggtgttgcaatgtgtattgaaagaaaatga

SEQ ID NO: 235945 - DNA, 778 bp, Unknown
  Bacterial polypeptide expressing nucleotide sequence isolated from the Sargasso Sea
gaaaatatgtctttagctcctcatgcaatacatttaagagatggaaaaaaattaggtgataccgaactagttgatacgatgattaaagatggtttgtgggatgctttccatggttatcatatgggcgtaacagcagaaaatgtagctactaaatttcaagttactagagaagatcaagataagtttgctattaattctcaaaaaaaagctttaaaagcccaagcagaaaataaatttaaagaagagatcgtaaattgtaagatcaaatcaaaaaaaaatgaaaatgattttaatattgatgaacatcctagagacggagtaaatttagaaactttatcaagattaaagccagtattcaaaaaagatggaacggttaccgcaggtaatgcctcaggaataaatgatggcgctgctgccgttattttaatgtcaaataatgaagctgaaaaaaagaacattcaaaaattagtaacaattaaatcttgggctagttgtggagttgatccagcattgatgggcacgggaccaatacctgcttctaaaaaggctcttgatatagctgggtgggcaattaaagatgtggatctatttgaaataaatgaagcgttcgctgctcaaagcatagccgttgttaaaactctttcaattcctgaagaaaaagttaatgtaaacggaggagcaattgcattaggacatccaattggtgcttctggtacaagaatattagttactctaatacacgaaatgttgaagagagatgttaaaaagggtcttgcat

SEQ ID NO: 235946 - DNA, 911 bp, Unknown
  Bacterial polypeptide expressing nucleotide sequence isolated from the Sargasso Sea
tttcaaagtataaaatcaggtgatgcaaaaatacttgtcgctggtggtcaagaaaacatgtcattagcgcctcatgtgatccatttaagagatggcaaaaagttaggggatgcagaattaattgatacaatgataaaggacgggttatgggatgcatttaatggctatcacatgggaataactgcagagaatgttgcagaaaaatttcaagtgacaagagatgaacaagataaatttgctcttaactctcaagaaaaagctttaaaggcacaaaaagagggtaagtttaaagatgaaataataaactttaaaataaaatctaaaaacgctgaattaaattttgagaaagatgagcatccaagaaagggaattaatttagatacactttctagattaaaaccagtatttaaaaaggatggcactgtaacggcaggaaatgcatcaggtataaatgatggagcagctgccgttacacttatgacgaatgatgaagctgaaaaaagaaatatagaaaaattagtttcaataaaatcttgggctagttgtggagtggatccagctttaatgggaacaggtccaataccttcagcaaaaaaagctttagatttagctggatggactatcaaagatgtggatttatttgaaatcaacgaagcttttgcagcccagagtttagctgtgatcaaaacactttctattccaagtgaaaaagtaaatgtaaatggtggcgcaattgccttaggccatccaataggtgcatctggaacaagaattctcgttactctgattcacgaaatgatcaaaagagatgtcaaaaaaggtttagcaactctttgtataggtggtgggatgggtatagcgatgtgtgttgaagataataatttaaattatctttgcaatgattatcatta

SEQ ID NO: 235947 - DNA, 663 bp, Unknown
  Bacterial polypeptide expressing nucleotide sequence isolated from the Sargasso Sea
atgaacaagataatttttctttaaattctcagaaaaaaacagaaaaagcatataaagaaaataaatttcaggatgagctgattaaattacaaattgaagatggtgataaaaaatttatttttgaaaaagatgaacatcctagagaaaatttaagcatagatgatttaaaaaaattaaaaacagtattcaaagaaaatgggactgtaacacctggaaattcctcaggcataaacgatggtgctgcagccttagttttaatgtctagagaacaagcagaaaaaaaatcattagagccattagttaaaattgtatcttgggctacttgtggggttgagccttcattaatgggattgggacctataccctcaattcaagaagctttatctaaagcaaattggaaaatagatgaagtagacttatttgaaattaatgaagcctttgcagcacaaagtattgcggtaattgaagaattaaaaattcctgaacaaaacgttaatgttaatggaggagcaattgccttaggtcatccaattggagcttctggggcaagaattttggttacacttgtccatgaaatgattaagcaagataaaaaaaaaggttgtgcggcactctgtattggtggtggtatgggaatagctatgtgtattgagagaagctaaa

SEQ ID NO: 235948 - DNA, 661 bp, Unknown
  Bacterial polypeptide expressing nucleotide sequence isolated from the Sargasso Sea
ggatcaagatcaatttgcctataactcacaaattaaggctcttaatgctcaaaaagagaatagatttaaggatgaaattattccatatgaaattaaatcaaaaaaaggaagttctatttttaaaatagacgagcatccaagagagggtatatctcttaatgtattagaaaaacttaaaacagtttttcaaaaagatgggacagttactgcaggtaacgcttctggtataaatgatggcgcagcagctgtagttatgatgtctaagagtgaagctgaaaaaagggggataaaacccattgtagaaattaaatcctgggcatcttgtggtgtggatccctcaataatgggtacgggaccaataccatcctccaataaggcactaaaaattgcaggatggaattctaaagatttggatttagttgaggccaatgaagcatttgcggctcaaagttgcgctgtggtgaaagaactttctttacccatggaaaaagtaaatgtgaatggtggcgcaatagctttggggcatccaatcggagcatctggaacaagagtttttgtcacactccttcatgaaatgcagaaaagagactcaaaaaaaggtcttgccacattgtgtattggtggaggaatgggtatagctatgtgtgtagagaaaaaatga

SEQ ID NO: 235949 - DNA, 932 bp, Unknown
  Bacterial polypeptide expressing nucleotide sequence isolated from the Sargasso Sea
aagagatctaatataaagcctgctgaacttgatgaaataatatttggtcaagttctaactggaggctcaggtcaaaatccagctagacaagcagcaataaatgcaggtattccaaaggaggttcctgcatatgttgttaatcaagtttgtggttctggtataagatctgtagtttctggctttcaaagtattaaagctggaaactcaaaaaaattaattgctgggggacaagagaacatgtcattagctccccacgctattcatttaagagatggaaaaaaactaggtgatgctgagttaatagatacaatgattagagatggattgtgggatgcatttaatggttatcatatgggtgtaactgcagaaaatgttgctgaaaaatttcaagttactagggatgaacaagataaattttccttgaaatcacaagaaaaagctctgaatgctcagaaaaaaaataaatttaaagaggaaataatcaatttaaaaatcaggtcaaaaaaaacagaaatagattttaatatagatgaacatccaagagaagggataaacttggatacactatcaagattgaggccggtatttaaaaaaaatggtactgtgactgctggaaacgcttcgggtattaatgatggtgctgcagctgttactttaatgagtaaacaagaggcagaaaaaagaggtttggaaaaattagtaactgttaaatcttgggcaagctgcggtgttgatcctgctttaatgggaactggtccaattccatcgtcaaaaaaagctttagaactcgctgggtgggatattaaagatgttgatctttttgaaattaatgaagcctttgctgctcaaagtcttgctgttataagaactctctcgatacctgaggaaaaagtaaatgtaaacggcggcgctattgctttaggtcatcctat

SEQ ID NO: 235950 - DNA, 747 bp, Unknown
  Bacterial polypeptide expressing nucleotide sequence isolated from the Sargasso Sea
ttaaagatggtttatgggatgcatttcatggttatcatatgggcattactgctgagaacgttgctgaaaagtttcaagttactagagaagaacaagacaaatttgcgctaaaatctcaagaaaaagctataaaagcacaaaaagaaaataaatttaaaagcgaaatagtgaattttaaaattaaatcaaaaaaagcagaggtagattttgaaaaagatgagcatcctagagaaggtattaatttagaggctctgaagagacttaaaccagtatttaaaaaagatggcactgttacagccggaaatgcttcaggtataaatgatggagctgcagcagtaaccttaatgtctgaagatgaagcagagaaaagaaaacttcaaaaattagtatccatcaaatcttgggcaagttgtggagtggaaccttctttaatgggcacagggcctattccttcttcaaaaaaggcattagatatagctggttggtctgtaaaagatgttgacctcttcgaaataaatgaagcatttgcagctcaaagcttagcagttttaaaaactctttctattcctgaagaaaaagtaaatgttaatggtggagctattgctttaggtcaccctataggtgcttcaggaacaagaattcttgtaactctaatacacgaaatgattaaaagagacgtaaaaaaaggtttagcgactctttgtattggtggtggaatgggtattgcaatgtgtgtagaaagataat

SEQ ID NO: 235951 - DNA, 856 bp, Unknown
  Bacterial polypeptide expressing nucleotide sequence isolated from the Sargasso Sea
agttccggcttatgttgtaaatcaagtttgtggctctggtttaagatcaataacttctggttttcagagtattcagtccggcgattccaaaatagttgttgctggcggtcaagaaagtatgtctttagctccgcatgcaatttatttaagagatggaaaaaaattaggtgatacagaattaatagatacaatgataaaagatggattatgggatgcatttcatggttatcacatgggtataactgcagaaaatgttgcagaaaaatttcaagtaacgagagatcaacaagatgaatttgcgttaatgtctcaagaaaaagctctaaaagctcaaagacaaaataaattcattaatgaaatagtaaattttaaaataaaatcgaaaaaagctgaaaccaactttgacaatgatgaacatccaagagagggcctcaatttagatgctttaagcagattaaaacctgtttttaaaaaagatggaacagtcacagctggaaatgcgtcaggtataaatgatggggctgctgcagtgactttaatttctagtgaagaggcaaaaaaaagaaatatagaaaaactagtgactattaaatcatgggcaagctgcggggttgatcctgctttaatgggaactggtccaataccatctacgaaaaaagcattagacttagctggatggaaaattaatgatatagatctatttgaaataaatgaagcctttgcagcacaaagtatagctgttatcaaaactctctcgatccctgaagaaaaagttaatgttaatggcggtgcaattgctctaggtcatcctattggcgcttctggaacaagaatacttgtaactcttatacatgaa

SEQ ID NO: 235952 - DNA, 581 bp, Unknown
  Bacterial polypeptide expressing nucleotide sequence isolated from the Sargasso Sea
aataaataaaaaaaaatttgataacgaaatcattaacgatgatactgacgaacatccaagaactggaattacaataaatgatctttcaaaattaaaatctgcattcaaagaaaagggaaccgtcactcctggaaattcatctggtattaatgatggagccgctgcagttgttttaactacaagagagttagctgaaaaacataatttagaaatattaggaaagattatatcttgggcaacctgtggtgttgatccatccataatggggttagggccaatcccttcatcgaacaaagctcttgaaatagcgaaatggaatgtaaaagatttggacttagttgaaattaatgaagcgttcgccgctcaaagcattgctgtaataaaagagttaaaaattcctaaagaaaaagtaaatgtcaatggtggagcaatagcacttggtcatcccataggtgcctcaggagcaagaattgttgttacgcttttaaatgagctaaaaaaaataagtggaaaaaaaggtttggcaacactatgcatcggaggaggtatgggaatttcgatgtgtatagaaaaagattaat

SEQ ID NO: 235953 - DNA, 802 bp, Unknown
  Bacterial polypeptide expressing nucleotide sequence isolated from the Sargasso Sea
gagaatatgagccgtgccccgcatgtccttaccgatagccgcaccggtgcacagctggggaacagccaactggtcgacagcctggtacatgacggtctgtgggatgccttcaacgattatcacatgggcgttaccgcggaaaacctggcgcgagaatacggcattagccgcgaattgcaggatgcctacgcgctgcactcgcagcacaaagcgcggatggcaattgatgctggacgctttaaagatgaaatcgtgccggtggtaacacagcgtaatgggcaatcattggtggtggataccgacgagcagccgcgtaccgatgccagcgccgaagggctggcgcgtctggatcctacctttgacaggctcggttcggtaacggcaggtaacgcgtcatccatcaatgacggcgccgctgcggtgatgatgatgagcgaggccaaggcgcaagagttgaacttacctgtactggcccgtattcgcgcctttgccagcgtcggggtcgaccctgcgctcatggggattgcgccagtgtatgcgacgcgccgctgccttgagcgtgtgggctggcaactggcagatgttgatcttatcgaagctaatgaggccttcgccgcgcaggcattatccgttgggaaaatgctggagtgggatgaacggcgggtgaatgttaacggcggagccattgcgctcggtcacccgattggcgcatctggctgccgaattctggtttcgctggtgcatgaaatggtgaagcgtcgggcgcataagggcctggcaacgctgtgtatcggtggtggtc

SEQ ID NO: 235954 - DNA, 777 bp, Unknown
  Bacterial polypeptide expressing nucleotide sequence isolated from the Sargasso Sea
aattaggtgatacagaaattatagatactatgatcaaagatggtttatgggatgcttttaatggctatcatatgggtgtaactgcagaaaatgttgccacaaaatttcaagttactagagatgatcaagataaatttgcattaagatcccaagaaaaagctatacatgctcaaaaagaaaataaatttaaagaagaaatagttaattttaaaattaaatcaaaaaaaaatgaggtaaattttaacaaagacgagcatcctagagagattaatttagaaggattgactagattaaaacctgtgtttaaaaaagatggtactgtcacagctggaaatgcatctggcataaatgatggtgcagcagcagtagctataatgtcagctgatgaggcggaaagaagaggtctccaaaaattagtttcgattaaatcttgggcaagttgtggggttgaaccagctttaatgggtactggaccaatacctgcatcaaaaaaagccttagatttagcaggttggaaaattgaagatgttgatctttttgagattaatgaggcctttgctgcacaaagtatagcagttttaaaaactttaggcattccaggcgaaaaagtaaatgtgaatggtggagcaatagcgttaggtcatccaattggtgcgtctggtacaagaatacttgtcacacttatccacgaaatgattaaacgcgatgttaagagaggtttagccacattgtgtattggcggtggcatgggtattgctatggctattgaacgataat

SEQ ID NO: 235955 - DNA, 1000 bp, Unknown
  Bacterial polypeptide expressing nucleotide sequence isolated from the Sargasso Sea
agggaaattttaagaaaaagtaaatttgacaaagatgatattgatgaagtgattatgggtcaagtgcttacagctggtggaggccaaaatcctgcaagacaagctgcaataaatgcaggtatagatatttccaaaccagcccatatagtaaatcaagtttgtggctctggacttagagctgtaatctcaggttatcaatcaattaaattaggagaggtaaaaaatgttatttcaggtggtcaagaaaacatgtcattagctccacattcaatcttttatcgagataataaaaaaatttcagagaaacatttgatagatacaatgataaatgatggattgatagatgcatttaataattatcatatgggtgtaactgctgaaaatgttgcaaaagaatttgatatttcacgagttgaacaagatgactttgccttaaattctcaaaaaaaaacagaaactgcaattaatactaatagattcaaggaagaactaattaaaataaatcaatctggtatcaatcttgagaaagatgaacatccaagaaaagatcttaataaatcagatttaggaaggctaaaagcagtatttctaaaagatgggacagtgacacctggaaattcatcaggaattaatgatggtgctgctgctttattattaacaacctttgaagaggcaaaaaaaagatcaattcaacctttggtaaagataatctcatgggcctcagttggagttgatccaactctgatgggtcttggaccaattgaggctgtgcgtgaagcagtcaaaaaagcaaaatggaatttaaatgatgtagatctttttgaaattaatgaagcttttgctgctcaaagcattgcagtaatacgtgcgctaaatattgatgagaataaagttaatgttaatggaggagctatagctttaggtcatcctataggagcatcaggtgccagaatattagtcactctcattcatgaaatgataaaacagaaaaagaataaag

SEQ ID NO: 235956 - DNA, 316 bp, Unknown
  Bacterial polypeptide expressing nucleotide sequence isolated from the Sargasso Sea
ggatctggaccaattccttcctctaataaagcacttaaattagctaattggagaattaatgatttagatttagttgaaacgaatgaagcatttgcagctcaaagcttagcagttattaaagaactaaaaattccagaagaaattgtaaatgtaaatggtggagctattgcacttggacatcctattggtgcatctggctgtagaattgtagttactttgctacatgaaatgaaaagaagaaattcaaaaaaaggattggcaactttgtgtattggtggtggtatgggtattgctatgtgcatagaaagagactagt

SEQ ID NO: 235957 - DNA, 785 bp, Unknown
  Bacterial polypeptide expressing nucleotide sequence isolated from the Sargasso Sea
aaaattaggtgacacagaattagtagactcaatgattaaagatgggctctgggatgcattcaatggatatcatatgggtataactgctgagaatgttgctcagcaatttcaagtaacaagaaaagatcaagataaatttgcatttgagtctcaatcaaaagctttgaaagcgcaaaaagaaaataaatttgataatgaaattatttcttatgaaattaaatcaaaaaaaggtaatgcaatttttaaaagagacgaacatcctagatctactacttcattggaaactttaggacgtctcaaaagtgcctttcaaaaagacggaactgttactgcaggaaatgcatctggtattaatgatggagcggcagctgtggtgctaatgtcaaaagatgaagcagagaaaaggggcattaaatatttggctgaaatcaaatcttgggcctcatgtggtgttgatccatcagttatgggaacaggaccaataccttcatctaaaaaagctttgcagatagcaggatggaaatctaaggatcttgatttagttgaagcaaacgaagcttttgctgcacaaagttgcgcagttgtaaaagaattatccttaccaatggagaaagtaaatgttaatgggggcgctatagctttaggtcatcctattggtgcttctggaacaagaattttcgtgacacttattcatgaaatgctaaaaagagactcaaagaaaggattggcaacgctttgtattggaggaggtatgggtgttgctatgtgtgttgagagaaaatgaa

SEQ ID NO: 235958 - DNA, 801 bp, Unknown
  Bacterial polypeptide expressing nucleotide sequence isolated from the Sargasso Sea
actctttaaactaaatgacacaaatattgttattgcaggaggtcaagaaagtatgactaattctccacactatttaaattacagaatggaaaaaaacttaagcgaggaaaaattaaaagattcaatgcttattgatggattgatagatgcatacgatgattatcacatgggtgtaactgctgaaaatgttgcagaaaaatatcaaataactagaaatgatcaggataattttgcatttaactcgcaaaaaaaagcaataaaagctattagtgaaaataaatttaaagaagaaatagttccaataaaattaaaagatgaaaagatttttgataaagatgaatatccaagatcagacacaaatatagaaaaattatcaaatttaaaaactgtttttaaagaaaatggcactgtaactgcaggaaatgcgtctgggttaaacgatggtgctgcagcagtaaccttaatgaattacaaaacttcaaaagataaaggtttaaaaccaattgctaaaattgtttcatgggcacaaagtggagttgatccaaaattgatgggaactggcccaatacctgcttctaaattagcattaaaaaaagccggttggaatataaatgatttagatttagttgaatcaaatgaagccttcgctgcacagtctattgcggtaataaaagaacttggacttaaagaaagtatagtaaatgttaacggtggtgcaatcgctcttggacatccaattggagcatcaggtgcaagaatattagtaacgttagtacatgaaatgcaaaaaagaaaatataa

SEQ ID NO: 235959 - DNA, 786 bp, Unknown
  Bacterial polypeptide expressing nucleotide sequence isolated from the Sargasso Sea
gaaaaaagttaggagatgataaattaattgacacaatgataaaagatggattatgggatgcttttcatggttatcatatgggtgtgaccgctgaaaatgtagcggagaagtttcaaatcactagagaagctcaagataaatttgctttaaaatctcaagaaaaagcacttatggctcaaaaggaaaataaatttagagaagaaataataaatttaaaaataaagtcaaacaaatcagaagtgaactttaataaagatgaacaccctagagagggtataagtattgaaactttatcaaaattaaagcctgtttttaaaaaagacggaaccgttacagcgggaaacgcttctggaataaatgatggagcagccacagtaactttaatgtcaagtaaagaagctgaaaagagaaatatcaaaaagttagtctcgattaaatcttgggctagttgtggtgttgatccagctttaatgggtaccggaccaattccctctacaaaaaaggctttggatttggctggatggaatattaaagacgtagatctttttgagataaatgaagcattcgctgcacaaagtcttgctgttataaaaacgctttctataccagaggaaaaagtgaatgttaatggtggagctattgctttaggccatccaataggagcatctggtacaagaatacttgttacgttaatccatgaaatgatcaaaagagatgttaaaaaaggtttagcgactctttgtatcggtggtggtatgggaattgcaatgtctattgaaagataag

SEQ ID NO: 235960 - DNA, 499 bp, Unknown
  Bacterial polypeptide expressing nucleotide sequence isolated from the Sargasso Sea
tgctctatcaagattaaagcctgtttttaaaaaagatggtacagttactgctgggaacgcctcaggtataaatgacggagctgctgcagttataatgatgtcaagtgaagaatctgaaaaaagacaaattgaaaaattagtaacaattaaatcgtgggcaagctgtggggtagatcccgctttaatgggtacaggcccgataccatcctccaaaaaagctttagaattagcaggatggaatattaaagatgtagatttatttgaaataaatgaagcatttgccgctcaaagtcttgcggtattaaagacactttcaattccagaggaaaaagtaaatgttaatggtggagcaattgctctagggcaccctatcggcgcttcaggaacaagaatattggttacacttatacatgaaatgattaagcgtgatgtaaaaaaaggtttggctactctttgtatcggtggtggtatgggtattgcgatgtgtcttgaaagataa

SEQ ID NO: 235961 - DNA, 712 bp, Unknown
  Bacterial polypeptide expressing nucleotide sequence isolated from the Sargasso Sea
tatgggtataacagcagaaaatgttgcacaaaaatttcaagttacaagaaaagatcaagacaaatttgctttcgactctcaaacaaaagctttgaaagcacaaaaagaaaataagtttgacgatgaaattgttccttacacaattcaacttaaaaaaggtactgcagtttttaaaaatgatgaacatccaagagatgggatttcaatggaggcactacaaaggcttaaaaccgcttttcaaaaagaaggtacggttactgcaggaaatgcctcaggtataaatgacggtgctgctgcagtagttttaatgtctaaaaaagaagctgaaaaaaaaggtattaaacctttagcagaaattaaatcttgggcctcttgtggtgttgatccctctgtaatgggaacaggtcctataccgtcatcaaaaaaagcattagagattgctggatggcaatcaaaggatttagatttgatagaagcgaacgaagcctttgctgcacaaagttgcgcagtagttaaggagctagctttgccaatggaaaaagtaaatgttaatggtggagcaattgctttaggacaccctattggtgcttctgggacaagaattttcgtgacacttattcatgaaatgctaaaaagagactcaaagaaagggttggctacgctttgtattggaggaggtatgggcgttgctatgtgtattgagagaaaatga

SEQ ID NO: 235962 - DNA, 499 bp, Unknown
  Bacterial polypeptide expressing nucleotide sequence isolated from the Sargasso Sea
attgtcaaatttaaaaacagtttttaaagaaaatggtactgtaaccgcaggaaatgcatcaggattaaatgatggtgctgcagcagtaactttaatgaattataaaacttcaaaagataaaggtttaaagccatttgctaaaattgtttcatgggcacaaagtggggttgatcctaaattgatgggaactgggccaataccagcttcaaaattagccttaaataaagctggttggaatataaatgatttagatttagttgaatctaatgaagccttcgctgcacagtctattgcagtaataaaagaacttggacttaaagaagatatagtaaatgttaatggtggcgcaattgctcttggacatccaattggagcatcgggcgcaagaatactagtaacgttagtacacgaaatgcaaaaaagaaaatacaaaaaaggtttagctacactttgtataggtggtggtatgggtatttcaatgtgtgttgaaagtatttaa

SEQ ID NO: 235963 - DNA, 956 bp, Unknown
  Bacterial polypeptide expressing nucleotide sequence isolated from the Sargasso Sea
agttttgaccggtggcgcaggtcaaaatccagcaagacaagcagctataagagctggcattcccaaagaaaaaacaggctatataataaatcaagtttgtggatccggattaagagcaattgttgcagggtatcaatcaattttattaaatgatgtaaaaatagttatagcaggcggccaagaaagcatgactaactcaaatgaagaaatgatgttaaaagacggtttgattgatgcttataataattatcatatgggtattactgcagaaaatgttgctgagaaatggaatatttcacgaaaagaacaagatgcttttgcagtatcttcacagctaaaagcacaagaagctattaaaaataaaaagtttagtgaagaaataataaatggcaaattattacatgatgaacatccaagaaaagaagttacgttagaaattttatcaaaacttaattctgcatttaaaaaaaatggaacagtaactgctggtaattcttcgggtataaatgatggtgcggctgcagtgttactaatgacaagagaagaatctgacaaaagagggctaaaacctattgcaaaaatagtttcctgggcaacatgtggagttgatcctgctttgatgggatcaggtcctattccgtcatcaaaaaaagctttagaaaaagcaaagtggaaaataaacgagctagatctagttgagtcaaacgaagcgtttgccgctcaaagcatagcagtagtaaaagaattaaaaattcctatcgaaaaagttaacgttaatggtggagcaatagcattaggacacccaatcggcgcttcaggtgcaagaatagtagtaacattaattcatgaaatggttagaagaaatgcaaaaaaggggcttgcgactctatgcattggaggcggaatgggaattgcaatgtgtatagagagagaattaatacttaagagaatttaaa

SEQ ID NO: 235964 - DNA, 820 bp, Unknown
  Bacterial polypeptide expressing nucleotide sequence isolated from the Sargasso Sea
taataaaatttcctatattgtaaatcaggtttgtggatccggtctaagagcaatagtcttagcctaccaatccttattattagattcatcaaaagtaataatagctggtggccaagaaagcatgtctagatgtaacaaggaattaatgatgaaggatggtttaattgatgcatttaataattatcatatgggagttacagctgagaatgttgctgaaaaatggaatatcacaagggatgagcaagacaattttgcattaaattctcaatcaaaagtgcaagacgctattaaaaaaaaaaagtttgaagatgagattattaaaaatgaaagttataaatcttttaaagatgaacatcctagagcgaatataatttttcaagatttaactaagcttaaaccagtatttaagaaagatggaacagtaacccctggtaattcttcaggtgtaaatgatggagcggcaggagttttaattatgaaaagaaacgagtctgaaaaaagagatctagaaccacttggtaaaattgtttcatgggcatcctgtggtgtagatccagccctcatgggatctggtccaattcctgcatcaaaaaaggctcttgagattgcgaattggaaaatcaacgatttagatttagttgagtcaaacgaggcatttgcagcgcagagtttagccgtaattaaagaattaaaaatacctgaaaatattgttaacgtaaatggaggtgcaattgctttaggacatccaattggagcatctggctgtagaatagtagtaaccttgcttcatgagatgaaaagaagaagttcaaaaaaaggt

SEQ ID NO: 235965 - DNA, 975 bp, Unknown
  Bacterial polypeptide expressing nucleotide sequence isolated from the Sargasso Sea
aaagatatagttattacagcagctagtagaaccgcggttggttctttaggtagatcattaaaaaatatttcaggcgttgaccttgggtctgtggtaattttagagtcattaaaaagatcaaaaatcaaaggtgaagaaattgatgaagttataatgggtcaagttttaacggcttctacgggacaaaatcctgctcgacaggcagcgatgaaatctggaattccaaaagaaaagccagcctatgttgttaatcaagtttgtggatctggattaagatctattgcttcaggatttcaaagtattaaagcaggagactctaaaattgttattgctggtggtcaagaatgtatgtccttagcacctcacgctgtacacttaagagatggaaaaaaattaggagacacggaaatgactgacacaatgattaaagatggattatgggatgcttttcatggatatcacatgggtgtgacagctgaaaatgtatctacaaaatttcaagttacgagagaagatcaagataaattcgctttaaagtctcatgaaaaagcactcaaagctcaaaaagaaaataaatttaaggaagaaatagtaaattttaaaattaaatcaaagaaaaatgaaatagactttaataaagatgagcatccgagagaagaaattagttttgaagctctaacaagacttaaaccagtttttaaaaaagatggcacagttacagcaggtaatgcttctggcattaacgatggagctgccgctattactttaatgtctgcagaagaagctgaaaagagaaaactacaaaggttagtttcaattaaatcttgggcaagctgtggggtagaaccatctttaatgggcacagggccaataccggcttcaaaaaaagcattagatttagctggatggtctataaatgatgtggatctatttgaaattaatgaagcgtttgcagctcagagtattgccagttta

SEQ ID NO: 235966 - DNA, 766 bp, Unknown
  Bacterial polypeptide expressing nucleotide sequence isolated from the Sargasso Sea
ctggtggacaccatgatcgtggacggcctgtgggacgtgtacacccagtaccacatgggcatcacggcagaaaacgtgccaaagcagtacggcatcacccgcgacatgcaagacgcactggctttggccagccagcaaaaggccgctgcagcgcaggatgccggcaagttcgtcggtgaaatcgtcggtgtgagcctggcgcaaaagaagggcgacccgatcctattcaacaccgacgaatacctcaaccgcaagaccaatgccgaagccctggccggcctgcgccccgctttcgacaaggcgggcagcgtgacggcgggcaatgcctcgggcctgaacgatggcgccgccgccgtggtggtgatgagcgccaagaaggctgcggccctgggcctcaagcctctggcccgcatcgccgcgtttgggaccagcggcttggaccccgccaccatgggcatgggccctgtgccggcctcgcgcaaggccttgcagcgcgcaggctggaatgcggccgatgtggacctgttcgagctgaacgaggccttcgccgcccaggcttgtgccgtgaacaaggaattggcaatcgaccccgccaaggtcaatgtgaacggtggcgccatcgccattggccaccccattggcgcgtcgggttgccgcatcctggtgacgctgctgcacgaaatgcaacgccgtgacgccaaaaagggcctggccgcactgtgcatcggtggcggcatgggagtgtcgctggcggtggagcgctaag

SEQ ID NO: 235967 - DNA, 889 bp, Unknown
  Bacterial polypeptide expressing nucleotide sequence isolated from the Sargasso Sea
gggacaagtactaacaggggcaaccggacaaaatcctgcgagacaagcagcaatacattgtggactcccaatagaaaaaacagcatacgtaataaatcaagtgtgtggttcgggattaagatcagttgcagcaggatatcaagcaataatttcaaacgactcaaacataattattgcaggaggtcaggaaagtatgtcccaagcacctcatgcaatccattttaaaaatgggaaaaaattggaagaaaataatcttattgatacaatcattaaagatggactatgggatgcttttaatggttatcatatgggagtcacagccgagaacgtagcttccaaatggaagattagcagaaaagatcaagataattttgcactaacatctcaaaataaagctgagaaagcacagaaagaaggaaagtttaaagatgaaattgtttcagtagttttaaaggataaaaataccaaaaactcttttgaaattgatgagcatcctagatctggtatgaatattcaaaagcttgaaaaattaaatccatcttttaaaaaagatggaacagtaactcctggtaatgcttctggtattaatgacggagctgcagctttagttttaatgagtgaaaaagaagccaaaagcagaaacttaaaaccattagccgaaatagtttcatgggccacatgtggagtagacccatctttaatgggttcaggaccaattcctgcatctactaaggcattaaaaaaagctgggtggaaaataaaagatttagatttggttgaatctaacgaagcatttgcagctcaaagtttagcagtaataaaagacttaaaaatacctgaagaaatagtaaatgttaatggaggagctattgcgttgggtcatcccatc

SEQ ID NO: 235968 - DNA, 778 bp, Unknown
  Bacterial polypeptide expressing nucleotide sequence isolated from the Sargasso Sea
ttaggggatgcagaattaattgatacaatgattaaagacgggttatgggatgcatttaatggttatcacatgggaataacagcagagaatgttgcagaaaaatttcaagtaacaagggatgaacaagataagtttgctcttaactctcaagaaaaagctttagaggcacaaaaagagggtaagttcaaagatgaaataataaactttaaaattaaatctaaaaaagctgaattaaattttgaaaaagatgagcatccaagaaagggaattaatttagatgcactttctagattaaaaccagtatttaaaaaggatggcactgttacggcaggaaatgcatcaggtataaatgatggagcagctgctgttactctaatgacgagtgatgaggctgaaaaaagaaatatagaaaaattagtttcgataaaatcttgggcaagttgtggagtagatccagctttaatgggaacaggaccaataccatcaacaaaaaaagctttagatttggctggatggagcatcaaagatgtagatttatttgaaatcaacgaagcttttgcagcccagagcttagctgtaataaaaacactatctattccaaatgaaaaagttaatgtaaatggcggagcaattgccttaggccatccaattggtgcatctggtacaagaattctcgttactctaattcacgaaatgatcaaaagagatgtcaaaaaaggtttagcgactctttgtatcggtggtggaatgggtattgcaatgtgtgttgaaagataaa

SEQ ID NO: 235969 - DNA, 904 bp, Unknown
  Bacterial polypeptide expressing nucleotide sequence isolated from the Sargasso Sea
attgatgaggtggtaatgggccaagttcttactggtggagctggtcaaaacccagcaagacaagctgccattggagcaggaataccaaattcaaaaacagcctacgtaattaatcaagtatgtggatctggtttaagatcgattgttgctggctatcagtcaattttatctggtgatactaaaattgttatagcaggagggcaagaaagcatgactaattcgactgaaaaaatgatgctcaaagatggtttagttgatgcttacaacaaatatcatatgggaataacagctgaaaatgttgcagaaaaatggaatatttctaggaaagaccaagataattttgcgctttcttctcaattaaaagctcaacaagcaataaaaaataataaatttaaagatgaaatcatagatgattttattttacaagatgagcatcctagaaaagaagttacgattgaaggattatctaaacttagcccagcatttaaaaaaaatggaacagtaaccgctggcaactcatcaggaataaacgatggtgcttcagcagtattattaatggagcgagaagaagctgaaagaagaaatttaaatcctttagcaaaaattgtatcttgggctacttgcggagtagatcctgagttaatgggctcaggtccaatacctgcgtcaaaaaaagctttggataaatctggatggaatatacatgatctagatttagttgagtccaatgaagcttttgcagctcaaagtttggctgtaattaaagaattaaaaattccaaaagaaattgttaatgttaatggtggtgccattgccctgggccatccaattggagcttcaggatctagaataactgttacattaatacatgaaatgattaaaagagattcaaaaaaaggtttag

SEQ ID NO: 235970 - DNA, 931 bp, Unknown
  Bacterial polypeptide expressing nucleotide sequence isolated from the Sargasso Sea
gctggtattggacaggctcctgcaagacaagctgcgattggcgctggaatgcctgattctgtagaatgtctaacgataaataagatgtgtgggtcaggattaaaagcagtaatgttaggttcacaggcaattcaagttaatgatgctaatattattatagctggtggctttgaaagcatgagccaatctccatatttagtacctaaggctagagctggctatagacttggccatggaaatttaattgatagtgtgatatttgatggtttatgggatgtttataatgatattcatatgggaaattgtgcggaaatttgtgcaagagatagaggttattctattattgatcaaaatgattttgcaaaagaatcttatcaaagagctattaatgctcaggaaattggagcatttaataatgaaatagtatcgattgaggtaaaaaataaaaataatactattacatttgataatgatgaagaaccaaaaaaggtaaattttgaaaagatggatactctaaaaccagtttttgaaaaagatggaacgataacagctgccaatgcttcaacaattaatgatggagctgcttgtcttttaatgatgagtgaaaataaagcatctgagctgggtttcaagcctcttgcgcgtattatatctcaagcttcagcagctcaagatccaaagtggtttacgaccgcgccaattgaagcgatcaagaaagttctaacgaaagttgatttaactgttgatgatatagatttgtgggaaattaatgaagcatttgcaccagttgtaatggctgttgtagatgattataatttagattatggaaaaattaatataaatggaggcgctatagcgctagggcacccaattggagcgagtggagctcgtattttaactactttaatccattcattgaaccagaaagaaa

SEQ ID NO: 235971 - DNA, 879 bp, Unknown
  Bacterial polypeptide expressing nucleotide sequence isolated from the Sargasso Sea
tctctggttatcaatcaattaaattaggagatgtaaaaaatgttatttcaggtggtcaagaaaacatgtcattagctccacattcaatcttttatcgagataataaaaaaatttctgagaaacatttgatagatacaatgataaacgacgggttgatagatgcatttaataaatatcatatgggtgtaactgctgaaaatgttgcaaagaaattaaatatttcacgagttgaacaagatgactttgccttaaattctcaaaaaaaaacagaaactgcaattaatactaatagatttaaggaagaactaattaagataaatcaatctggtatcaatcttgaggaagatgaacatccaagaaaagatattaataaatcagatttaggcagactaaaagcagtatttctaaaagatgggaccgtgacacctggaaactcatcaggaattaatgatggtgctgccgctttattattaacaactttcgcagaggcaaaaaaaagatcaattcaacctttagtaaagataatctcatgggcctcagttggagttgatccaactctgatgggtcttggaccaattgaggctgtgcgtgaagcagttaaaaaagcaaaatggaatttaaatgatatagatctttttgaaattaatgaagcttttgccgctcaaagcattgcagtaatacgtgagttaaatattgatgagaataaagttaatgttaatggaggagctatagctttaggtcaccctataggagcatcaggtgctagaatattagtcactctcattcatgaaatgataaaacagaaaaaagataaaggttgcgctacactatgtataggtggtggaatgggcatagccatatgtgttgagagaatttaag

SEQ ID NO: 235972 - DNA, 808 bp, Unknown
  Bacterial polypeptide expressing nucleotide sequence isolated from the Sargasso Sea
aggagactcaaaaatagctgtagctggtggacaagaaaatatgtctctagccccgcatactattcacttaagaaatggaaaaaaattaggtgatgctgagatgattgatacaatgattaaagacggtctttgggatgcttttcatgattatcatatgggtgtaactgctgaaaatgtcgctgaaaaatttcaaattactagagaggagcaagataagtttgcgttaaaatctcaagaaaaagctctaaaagctcagaagcagaataaatttaaagaggaaataattaattttaaagttaaatcaaaaaaggctcaaattgatttcaacaaagatgaacatcctagggagggaataaatcttcatactttaaaaaaattaaaaccagtttttaaaaaagacgggacagtcacagccggaaatgcctcgggtatcaatgatggagctgcagcagtaactttaatgtcagatgatgaggctcggaaaagaggattaaataaattagtttcaataaaatcttgggcaagttgtggtgttgatccagctttaatgggtacgggacctattcccgcatcaaaaaaagcgctggacttagcaggatggtctgtaaaagacgtagatcttttcgaaattaatgaggcatttgccgctcagagtttagctgtgttgaaaacactttctattcctcatgagaaagtcaatgttaatggcggcgctattgcattagggcatcctattggagcatcaggaactcgaatattggtcactcttatacaagaaatgatcaagcgtgacgtaaaaaaggtttag

SEQ ID NO: 235973 - DNA, 403 bp, Unknown
  Bacterial polypeptide expressing nucleotide sequence isolated from the Sargasso Sea
aatgactgacttcgaggcagagaaaagagagatttcaaaattggtatctattaaatcatgggcaagttgcggtgtagatccagctttaatgggaacaggtccaattccatcttccaaaaaagctctagaaatagcaggatggtcagtaaaagatgttgatctttttgaaattaacgaggcgtttgctgctcaaagtttagcagttataaaaactttatcaattccagatgaaaaagttaatgttaacgggggagctattgctctaggtcatcctataggagcatccggaactagaattgttgtgactcttatacatgagatgatcaagagagatgttaagcgaggtttagccacattgtgcatcggtggaggcatgggtatagctatgtgtgttgagagataa

SEQ ID NO: 235974 - DNA, 544 bp, Unknown
  Bacterial polypeptide expressing nucleotide sequence isolated from the Sargasso Sea
ggattttaataaagatgagcatcctagggatggaattaatttagatactctttcgagactaaaaccagtttttaaaaaagagggttcagtcactgccggtaatgcttcaggaattaatgatggagctgcagctgttactctaatgagtaatgaagaggccgaaagaagaaatttgaacaaattagtctcaattaaatcatgggctagttgtggtgtagatccatctctaatgggaacgggtcctattccttcaactaaaaaagctttagacattgctggatggacaattaaagatgtagatttatttgaaataaacgaagcgtttgcagctcaaagtattgctgtgattaaaactctttctatacctgatgaaaaagtgaatgttaatggaggtgcgatagctttaggacatcccataggagcttcaggaactagaatacttgttacactaattcacgagatgattaaaagagatgttaaaaaaggtttagcgactctttgtatcggaggtggaatgggtattgcaatgtgtgttgaaagataa

SEQ ID NO: 235975 - DNA, 773 bp, Unknown
  Bacterial polypeptide expressing nucleotide sequence isolated from the Sargasso Sea
tatgtctagagcaactcacgcaattttttatagagaagataagaaattttctgaaaaaaaattagtagatacaatgataagtgatggtcttttagataaatttaatgattatcatatgggtgtaactgctgagaatgttgcagacaagtataaaatttcaagagacgaacaagataatttttctctcaattctcaaaaaaaaacagaaaaagcttataaagaaaataaatttaaggatgagttaattaaattacaaattcaagagggagataaaaaatttatctttgaaaaagatgagcatccaagggaaaatttaaatattcatgatttaaaaaaattaaaatcagtttttaaagaaaatggaactgtgacacctggaaattcttctggaataaatgatggcgcagctgcgttagtgttaatgtctagagaagaggctgaaaaaaaatctttagagccactagttaaaattaattcttgggccacttgtggtgttgagccttcattgatgggacttggacctataccttctatccagaaggctttatctaaggctaattggtcaatggatgaagttgacttgtttgaaatcaatgaggcttttgcagcacaaagcattgcggtaattaaagaattaaaaattcctgaagaaaaagttaacgttaatggaggggcaattgctttaggtcatccgataggagcttctggatcaagaattttagttactcttatacatgaaatgattaagcaagataaaagaaaaggttgtgcgg

SEQ ID NO: 235976 - DNA, 538 bp, Unknown
  Bacterial polypeptide expressing nucleotide sequence isolated from the Sargasso Sea
ctggatgaacatccaagaaatggaattacaataaacgacctatcgaaattaaattctgtttttaaagaaaaaggaactgttactcctggaaattcatctggtatcaatgacggagcagccgcagtagttttaactacaagagaattagctgaaaaacataatttagaaataatgggaaagattaaatcttgggcgacctgtggtgttgatccatcaatgatggggttagggccaatcccttcttcaaacaaagctattgaaaaagcaaaatggaatataaaagatttagacttaattgaaattaatgaagctttcgctgctcagagtattgctgtaattaaagagttaaaaattcctaaagaaaaagtaaatgtcaatggtggagcaatagcactcggtcatcccataggtgcctcaggtgcaagaattgttgttacactccttaatgaattaaaaaaagtaaatggaaaaaaaggtttggcaacattatgcatcggaggagggatgggaatttcgatgtgtatagaaaaagattaat

SEQ ID NO: 235977 - DNA, 862 bp, Unknown
  Bacterial polypeptide expressing nucleotide sequence isolated from the Sargasso Sea
gaaaataaaatagtcattgcaggtggtcaagaaaatatgtctcgggcaactcatgcaatttattatagagaagataaaaaattttctgaaaacaaattaatagacacaatgataaaagatggtctacttgattcatttaatgattatcatatgggcgttacagctgagaatgttgcagaaaaatataaaatttctagagatgaacaagataatttttctttaaattctcagaaaaaaacagaaaaagcttatagcgaaaatagatttaaagatgagctgattaaattacaaattgaagatggtgataaaaaatttatttttgaaaaagatgaacatcctagagaaaatttaagtatagatgatttaaaaaaattaaaaacagtattcaaagaaaatgggactgtaacacctggaaattcctcaggtataaatgatggtgctgcagctttagttttaatgtctagagaacaagcagaaaaaaaatcattagagccattggttaaaattgtatcttgggctacttgtggggttgagccttcattaatgggattgggacctataccctcaattcaagaagctttatctaaagcaaattggaaaatagatgaagtagacttatttgaaattaatgaagcctttgcagcacaaagtattgcagtaattgaagaattaaaaattcctgaacaaaaagttaatgttaatggaggagcaattgccttaggtcatccaattggagcttctggagcaagaattttggttacacttgtccatgaaatggttaagcaagataaaaaaaaaggttgtgcggcactctgtattggtggtggcatgggaatagctatgtgtattgagagaagctaaa

SEQ ID NO: 235978 - DNA, 887 bp, Unknown
  Bacterial polypeptide expressing nucleotide sequence isolated from the Sargasso Sea
gccgggcgaccagatcaatgaggttatcctcggccaggtactcaccgctggctgcggccagaacccggcccgacagtctgccatcaatgctggcctgccagcttccgtgcccgccatcaccatcaacaaggtctgcggctccggcctgaaagccgtgcacatggcggttcaggccatccagtgcggcgatgccgagatgatcctggccggcggtcaggaaagcatgagccaggcgccccacgtactgcccaacagccgcaacggtcaacgcatgggcaactggagcatgatcgacaccatgatcaccgacggcctgtgggatgccttcaacgattaccacatgggtatcaccgctgaaaacatcgtcgagaaatacggcatcacccgggacgagcaggatgcctttgccgccgcatcccagcagaaagccgtcgctgcgcaaaaggccggctactttgacggccagattgttcctgtcaccattccccagcgcaaaggcgacccactggtggtggacaaggatgagtgcccccgcgacggcgtcaccggcgacagcctgggcaaactgcgcccggccttcaagaaagacggctcggtaaccgccggcaacgcttcctccctgaacgacggcgctgccgtggtgatggtgtgcagcgcagacaaggcgaaagagctgggcctgaccccgctggcaaccatcaaagcccacgccaacgccggcgtggaccctgccatcatgggcaccggcccgattccggccagccagcgctgcctggagcgggcgggctggactgttgacgacctggatctgatcgaagccaacgaggccttcgccgcccaggcaatttccgttaatcgggacctgggctgggacaccgccaaggtaa

SEQ ID NO: 235979 - DNA, 850 bp, Unknown
  Bacterial polypeptide expressing nucleotide sequence isolated from the Sargasso Sea
aaagtagtaattgctggaggacaagaaagtatgtctaattctcctcattaccaaaatttaagaaaaggtgaaaagttggataatgaaaaaatacaagactcgatgattattgatggattgttagacgtttacaatcaatatcatatgggagtaacagctgaaaatgtagctgaaaaatatcaaatcacaagagctcaacaagatgaatttgcagcaaaatcccagagtaaagcggcggaagcaattaaaacaaacaagtttaaagatgaaattgttccaataaaaataaaagatgaaaaaatatttgatactgatgaatatccaaaaattggaacaaccatggaaaaattgtctacacttaaaacagtgtttaaaaaagatggaactgtaacagcggggaacgcttctggattaaatgatggagctgcagctctcactataatgaatggaaaaactgcaaaagagaaaaatttaaagcctctggctaaaattgtttcttgggcacaatgtggtgttgatccctctgtaatgggaacaggacctattccagctactaaattagcattaaaaaaagcaggatggaaagaagatcaattagatttagtagaagctaatgaagcttttgcagctcaagcaatttctgttaataaagaacttggtttcaattctgatattgtaaatgttaatggaggtgcaattgcattagggcatccaataggcgcatctggagcaagagtattggtaacattactacacgaaatgaaaaaaagaaaatctaataaaggacttgctactttgtgtattggtggtggtatgggaatagcaatgtgcgttgagagtcttagttaaa

SEQ ID NO: 235980 - DNA, 590 bp, Unknown
  Bacterial polypeptide expressing nucleotide sequence isolated from the Sargasso Sea
gatcacaccgatcctgattccccagcgcaaaggcgacccggtggccttcgccgtggacgaacaaccccgcgccggcaccaccgccgaatccctggccaagctcaagcctgcgttcaagaaagacggcagcgtcaccgccggcaacgcctccagcctgaacgacggcgctgcggccgtgctgctgatgagcgccgacaaagccaaggcactcggcctgcccgtactggcgcgtatcgccagctacgccaacgcgggcgtcgacccggccatcatgggcatcggcccggtctcggccacccgccgctgcctggacaaggccggctggcagcttgcggacctggacctgatcgaggccaacgaagccttcgccgcgcaatcactggcggtgggcaaagagctggagtgggacgcgcagaaggtcaacgtcaacggcggcgccatcgccatcggccacccgatcggtgcttcaggctgccgcgtactggtgaccctgctgcacgaaatgatcaagcgcgatgccaagaaaggtttggcaacgctgtgcatcggcggcggccaaggtgtcgccctggcgctcgaacgcaactgaa

SEQ ID NO: 235981 - DNA, 266 bp, Unknown
  Bacterial polypeptide expressing nucleotide sequence isolated from the Sargasso Sea
gaatattagtagtttagatttagtagagtcaaacgaggcatttgctgctcaaagtctagcagtaattaaagaattaaaaattccaattgaaaaagttaatgttaatggcggagcgattgctttggggcatccaattggtgcatctggggcaagaatagtggttactttaattcatgaaatgattaaaagagatgcaaaaaagggattggctacactttgtattggtggaggcatgggaattgccatgtgtatagagagagattaat

SEQ ID NO: 235982 - DNA, 248 bp, Unknown
  Bacterial polypeptide expressing nucleotide sequence isolated from the Sargasso Sea
tttgtttgaaattaatgaagcttttgctgctcaaactatagcagtaattaaagaactaaatattgatgagggaaaagtaaatgttaacggaggagctattgctttaggtcatcctattggtgcatctggaacaagaattttggtaacactaattcatgaaatgctaagacaaaataaatctaaaggctgtgctactctgtgcataggtggtggaatgggtatagcaatatgtgtagagaaaatttaaa

SEQ ID NO: 235983 - DNA, 744 bp, Unknown
  Bacterial polypeptide expressing nucleotide sequence isolated from the Sargasso Sea
aagatggattgtgggatgcttttcacggatatcatatgggagtaaccgctgaaaacgtagcaacaaaatttcaagttactagagatgatcaagataaatttgcattaaattctcaagaaaaagctctcaaggctcaaaaggagaataaatttaaagaggaaataattagttttaagattaaatcaaaaaaaaatgaaataaactttaataaagatgaacatccaagagaagaaattaacttagaagctttgaagagacttaaacctgtttttaaaaaagatggtacagttacagctgggaatgcttccggtattaatgatggagcagctgcagtgactttaatgtcagaaaaagaagctgaaaaacgaaagcttaaaaaactagtttcaattaaatcttggacaagttgtggtgttgatccagctttaatgggaacaggcccaatacctgcttcaaaaagagctttagatttagcaggatggtctataaaagacgtagatttatttgaaatcaatgaagcctttgcggcacagagcattgcggttttaagaactctttctattcctgaagaaaaaataaatgttaatggtggagcaatagctttaggccatcccataggcgcttcaggcactagaattctagtaacacttattcacgaaatgattaaaagagatgtcaataaaggtttagcaactttatgtattggtggcggtatgggcattgctatgtgtattgaaagataat

SEQ ID NO: 235984 - DNA, 923 bp, Unknown
  Bacterial polypeptide expressing nucleotide sequence isolated from the Sargasso Sea
atctttaaattcaaatgagatagatgaactaatctttggtcaagttttaactagtggcaatggccagaatcctgcaagacaagcggcaataaatggaggtataccatcagacaaaactgcatgcttaataaatcaagtgtgcgggtccggtcttagggctatagttttaggctatcaatctattgttacacttgcttcaaaaattgtaattgctgggggacaagaaagtatgtccaattcaaatgaaaaaattatgttaaaagatggtttaatagatgcgttcaataactatcatatgggtgtcacagctgaaaatgtagcacaaaaatggaatatatctagagaacaacaggatgatttttctttcctatcacaaaaaaaaacaaaagaggcaattatttctagaagatttaaaaaagagataatcttaaattctaaagatgaacatccaagacctgacataagtattgagaaactttcaaatttaaaaccatcttttaaagaaaatggaacagttactgctggtaattcttcaggaataaatgacggtgcagcagctgttttacttatgagtagagaattagctgaaaaaaaaggtttagaacctttagcaaaaatagtttcatgggcaaccgcaggtgttgaaccatcattgatgggatctggaccaattcctgcttctaagattgctttaaaaaaagctggatggactattagagacttagatttaatagaaataaatgaagctttcgcatctcaaattttagcagttattaaagaattaaaattacctgttgaaaatgtgaatgtgaatggaggagctattgctttaggacatccaattggagcatctggagctaggataattgtaactttattacatgaaatgaaaagaagaaacgttaaaaaaggtttagccacac

SEQ ID NO: 235985 - DNA, 908 bp, Unknown
  Bacterial polypeptide expressing nucleotide sequence isolated from the Sargasso Sea
tatgggttgtgttttacctgctggtttaggccaggctccggctcgtcaggcgatgttaaaagcaggtttacctttatctgccggtgcgaccactattaataaagtctgtggctcaggtttaaaatctgtgatgttagcaaccgatttactgcatgccggttctgctgatgtcgtagtggcaggtggcatggagtctatgtcaaacgctccttatattctgccaaaagcccgtgccggtatgcgtatgggccatgccgaagtcaaagatcatatgatgttggatggtctggaaaacgcttacgatggcaaagccatgggctgttttgcccagaaaacggctgacgagcatgatttcagccgcgctcagatggacgactacgctgtgttgtctttaacacgtgcgcagcaagcgataagctctggcgcttttgttgaagaaatcactcctgtgactttccagactcgtaaaggcgaagtgacctttgccacagatgagcaacctggcaatgccaaagtcgacaaaattcctacactaaaaccagctttcgctaaagatggtactatcaccgcggctaactccagttctatttctgatggcgctgcagctttagtcttgatgcgtgcagaggatgccaaagcgcaaaacaaaactgtattggcccatgtagttggccatgccacgcattcgcaggaaccagagcttttcactgttgcgccagtgggggctgtgactaagctgttagccaaattaggctggacaacttccgatgtggacctgtgggaaattaacgaagcttttgccatggtgactatgctggcgattaaagagctgaagctggatgtcaacaaagtcaacgtcaacggtggcgcttgtgctctgggtcatcctataggtgcttcaggtgccc

SEQ ID NO: 235986 - DNA, 622 bp, Unknown
  Bacterial polypeptide expressing nucleotide sequence isolated from the Sargasso Sea
aataaggcaattcaacaaaataaatttaaagatgaaattgttaagatacatatcgaagaaaatgataaaaaatttatttttgaaaaagatgaacatcctagagaaaatttaaaaatagaagatcttaaaaacttaaaaactgttttcaaaaaagatggtactgttacagctggaaattcttccgggttaaacgatggtgctgctgctttgatattaatgaaaagagaaaatgctgatattaaagaattaaaacctttagctaaaattgtttcttgggcaaattgtggcgttgatcctgctttgatgggccttggacctattcctgcaacaaaacttgctttgtcaaaatgtggatgggatataaatcaagtagatctttttgaaattaatgaagcttttgcagcacaaagtatagcagtaataaaagatttaaaaataccaattgaaaaagtaaatgtgaatggcggtgcaattgctctagggcacccaatcggtgcatctggctcaaggattgttgtaacattgattcatgaaatgattaaacaggacaaaaaaaaaggtgtagcgacactttgtgttggtggaggtatgggtatagcaatatgtatagaaaaagattaat

SEQ ID NO: 235987 - DNA, 839 bp, Unknown
  Bacterial polypeptide expressing nucleotide sequence isolated from the Sargasso Sea
ttatgtcgtaaatcaagtttgcggatctggtttaagatctatagcttcaggatttcactcaattctatcaaacaatgcaaatattgttttagctggaggacaagaaagcatgtctcaatcacctcatgtagttcatttaagaaatggaaaaaaattaggtgacacagaattaattgactctatgataaaggatggtctttgggacgcttttaacggttatcatatgggtataactgcagaaaatgttgcacaacaatttcaagttacaaggaaagatcaggataaatttgcatttgattcacaaacaaaagctttaaaggctcaaaaagaaaataaattcgatgacgaaattgtaccatttactattcagttaaagaaaggaagtacaatatttaaaaaggacgaacatcctagagatggaatttctatggaagcattgcaaagactcagaactgcttttcaaaaagacggtaccgtaaccgctggtaatgcttcaggtattaatgatggagctgcagctgttgttttgatgtcaaaaatggaagcagagaaaagagggattaaacctttggctgaaataaaatcttgggcgtcttgtggggtagatccatcagttatgggaacaggtccaatcccgtcctcaaaaaaagcgttagagattgcaggttggcaatctaaggatttagatttaattgaagctaacgaggcttttgcggctcaaagctgcgctgttgtaaaagaactttctttgccaatcgaaaaagtaaatgttaacggaggtgctatagcgcttggacatcctataggagcttcaggtacaagaattttgtcacactagt

SEQ ID NO: 235988 - DNA, 973 bp, Unknown
  Bacterial polypeptide expressing nucleotide sequence isolated from the Sargasso Sea
tgcagttgaaaaatcaaaactaaaaaaaagtgatgtagatgaagtaatctttggacaagttctaactgcaggaattggtcaaaacccagcgcgccaagctgctataaaatctggtatacctaaagaaataccagcccatattgtcaatcaggtatgtggatcaggattaagatctattgttgcaggttttcaaagtatcatctcaaattcatcaaaaataataattgctggtggtcaagaaagtatgtcactagctcaccactcgacttatttaagagaaggaaaaaagctaggcgatattgaattagtagacacaatgattaaagatggattatgggatgcatttaatggttatcacatgggtataaccgcagaaaatgttgctgagaaatttcaggttacaagagatgaacaggacaagttcgcgctaaaatctcaagaaaaagcgttaaaagcacaaaaagaaaaaaaatttaaagatgaaataattaattttaagattaaatcaaaaaaagctgaaattaattttgataaagacgaacaccctagagaaggaataaacttagatgcactttcaagattaaaaccggtattcaaaaaagacggaactgttacagctggaaattcctcggggataaatgacggagccgctgctgtaactttgatgactgatgaagaggccaaaaaaagaaacttaaaaaaattagttaaaataaaatcatgggcaagttgtggggtggatccagcgtttatgggcacaggaccaattccatcagctaaaaaggctttagacttggctggatggtccgtcaaggatgtagacctctttgaggttaatgaagccttcgctgcccaaagtatagcggttgtaaaaactctttctattcccgatgagaaagtaaatgtaaatggtggggcaatagcattgggccacccaattggagcgtctggaactagaatactcgtaacactt

SEQ ID NO: 235989 - DNA, 1114 bp, Unknown
  Bacterial polypeptide expressing nucleotide sequence isolated from the Sargasso Sea
tatgacaaaaaattctaaagatatagtttttaccagtgcccttcgcacggcaattgggcgatataaaggtatgtttagtaaatttcaagctcacgatctaggagaaaaagtaataaaaaatattttaaataaatcaaaaattgaaccacaattagtagatgaagttatttttggtcaagttttaactggtgatacgggacagaaccctgcacgacaagcagcgattaaagctggaatacctaaagataaaactagttatttaataaatcaagtatgtggttccggattaagagcaatagtttcaggatatcaatctatcctacttggcgattccaaagtaattattgctggtggccaggaaagcatgactaattgtaaaaaaaaagcaatgcttaaagatggtctaatagatgcattcaacaactatcacatgggtatcacagcagaaaatgttgcagagaaatgggatattactagaaaagaacaagatttattttcagtttcatcccaaacaaaagctctagaagcaataaaaaataaaaaatttaacgatgaaataattgatgacaattctttaactgacgaatatcccagatctggagtaacactagaatctctttcaaaacttaagtcagtttttaaaaaaaatggaacagtaactgctggtaattcatccggaataaatgatggtgctgcagctgtaatgttaatgagtcgagaagagtctgaaaaaagaggtcttaaaccactagctaaaattatatcatgggcaacatgcggagtagagccagctttaatgggttcaggaccaatacctgcatcaaaaaaggccttggaaaaggcaaaatggaatatagatgatttagatttagtcgagtcaaatgaagcattcgctgcacaaagtattgctgttattaaagaattaaaaattcctattgaaaaagttaatgtcaatggtggtgcaatagctttaggtcatcctataggcgcttcaggtagcagaattgtagttacattaattcatgaaatgattagaagaaatgcaaaaaaaagcctggcaaccttatgtattggcggtggaatgggaattgctatgtgtatagaaagagattaa

SEQ ID NO: 235990 - DNA, 1174 bp, Unknown
  Bacterial polypeptide expressing nucleotide sequence isolated from the Sargasso Sea
atgaatgaagtttttatcacatccgctgttagaacagctgtcggttctttcaatggatcattagcaaatatgcctgctcatgacttgggcaaaattgtaattaaagaagctatcggtaggtctaatgttgaggcttctgaagtagaggaagttatactaggtcaagtattaacggccgcgactggccagaatccagcaagacaagcggcaataaatgcaggtttaaataaagaaacaccagcatggcttgtaaatcaagtgtgtggatccggactaagaagcgtggcactagcgtatcaagcgatcatgaacaatgatgcaaatattattgttgctggcggccaggagtctatgagtcaatctcctcattgttctcatttaagaaatggaacaaaaatgggagataaccaaatggtggactcaatgattaaagacggcctctgggatgctttcaatggttatcatatgggtacaacagctgagaatgttgctcaacaatggcaaataactcgtgatcaacaagacgaatttgctgtcgagtctcaaaagagagcaagcaaggcaaaatctgaaggtatatttaaagatgaaattgttggcgttgaaataaaaacaagaaaagaaactgttgtctttgatagtgatgaatacattaaggataatgtacagttagaaaaacttgcgactctaagaccagctttttcaaaagaaggtactgtaacagcagccaatgcgagtggaattaacgatggtgctgcggcaatgactgttatgtctggagaagaagttaagaaaaaaaatatagaacctatcgctcgtattgtttcatgggcaagtgctggagttgatccttcaataatgggcactggtccaataccggccagtagaaaagccttagagaaagctggatggagtgttgctgacttagatttgattgagtcaaatgaagcttttgcagcccaatcatgtgcagtaaataaagaaatgggctgggatacatctaaagtaaatgtcaatggtggagctatagcaattggccatccaatcggtgcttctggagcaagaatcttagtgacattattaaatcaaatgaagagacaagatgcgaaaaaaggccttgcaacactatgcattggcggtggcatgggtgtcgctttatgtgttgaaagataaa

SEQ ID NO: 235991 - DNA, 1053 bp, Unknown
  Bacterial polypeptide expressing nucleotide sequence isolated from the Sargasso Sea
taaatagagcaaaaataaatcatgaagatattgacgaagtaattatggggcaagttttaactgctggcgcaggacaaaaccctgcaagacaggcatcaataaatgctggtatacctgtttcaaaacctgctcacatgattaaccaagtgtgtggttctggacttagagcagtgatttcaggttttcagtcaattaaaataggtgattcaattaatgtaatttctggaggtcaagaaaatatgtcactagcccctcattcaatcttttatcgagatgaaaaaaaaatttctcatgataaattattagatacaatgatgaaagatggactgattgatgcttttaataattatcatatgggtataacagcagaaaatattgcaaaaaaatttgatatatctagagaagaacaagatgaatttgctctaaactctcaaaaaaaaacatttgcagctatcactaataataagtttgatgatgaattaattaagataaatcaaaatggaattattttaaataaagatgaacacccaagagtagatttaaaattgcctgatttaaaaaaattaagaactatttttcaagaaaagggaactgtcacaccaggaaattcctctggaataaatgatggagctgcagcattattattgactactttaaatgaagcaaaaaaaagatctatcgagccattagcaaaaattgtttcttgggcttcaataggcgttgagccagctttaatggggttaggtcctatagaggctgttcgtgaagcaatcaaaaaggcaagatgggacttagatgaaattgatttatttgaaattaatgaagcctttgcagctcaaagtattgctgtaattcgagaactcggtattgatcaaaacaaagtaaatattaatggaggtgctattgctctaggtcatccaataggcgcttctggagctagaatattagttacattgatacatgagatgaaaaaacaaaataaaaaaaagggctgtgctacactttgtataggtggtggaatgggtatagctttatgtgttgagaaaatttagg

SEQ ID NO: 235992 - DNA, 1189 bp, Unknown
  Bacterial polypeptide expressing nucleotide sequence isolated from the Sargasso Sea
atgagcaaaaattctagcgatgttgttattacttcagcactaagaactccaattggaagatacaaagggtcgttaaaaaatattagcgcatcaaaattaggatcaatagcaattaaagaggtaatttataaatcaaaattagatttagaggagattgatgaagtaattatggggcacgttttaacttctggacttggtcaaaatcctgctagacaagcttcaatcggtgcaggagtaccggtttctaaacctgctcatattgttaatcaggtttgtgggtctggattaagatctgttgtttcaggatatcaatcaataagtttagaagaaaataaaatagttattgcaggcggtcaagaaaatatgtctcgagcaactcatgcaatttattatagagaagataaaaaattttctgaaaacaaattagtagatacaatgataaaagatggtctactcgattcatttaatgattatcatatgggtgttacagctgagaatgttgctgaaaaatataaaatttctagagatgaacaagataatttttctttaaattctcagaaaaaaacagaaaaagcttatagtcaaaatagatttaaagatgagctgataaaattacaaattgaagatggtgataaaaaattaatttttgaaaaagatgaacatcctagagaaaatttaagtatagatgatttaaaaaaattaaaaacagtattcaaagaaaatgggactgtaacacctggaaattcctcaggtataaatgatggtgctgcagccttagttttaatgtctagagaacaagcagaaaaaaaatcattagagccattggttaaaattgtatcttgggctacttgtggggttgagccttcattaatgggattgggacctataccctcaattcaagaagctttatctaaagcaaattggaaaatagatgaagtagacttatttgaaattaatgaagcctttgcagcacaaagtattgcggtaattgaagaattaaaaattcctgaacaaaaagttaatgttaatggaggagcaattgccttaggtcatccaattggagcttctggggcaagaattttggttacacttgtccatgaaatgattaagcaagataaaaaaaaaggttgtgcggcactctgtattggtggtggtatgggaatagctatgtgtattgagagaagctaaa

SEQ ID NO: 235993 - DNA, 979 bp, Unknown
  Bacterial polypeptide expressing nucleotide sequence isolated from the Sargasso Sea
aaagaccaagttaaaggtggatgaaattgacgaagtaatattaggacaagttttgacaggatcatgtggacaaaatccagcaaggcaagcagctataaattctggtattccaaaagaaaagactgcaataattataaaccaggtgtgtggatctggactaagatcaattgtaaatggatatcagtcattactaacaaattctgcaaactttataattgctggtggtcaagaaagtatgactaattcaattcatgatcaaatgatgaaagatggtttgacagatgctttttataattatcatatgggtgttacagctgaaaatgttgctgcaaaatataatatatcaagacaagaacaagatgaatttgcacttgcgtctcaacagaaagcaaatattgcaataagcaaaaaaaaatttaacaacgaaattattaacgatgatattgacgaacatccaagaactggaattacaattgacgacctatcaaaattaaattctgtttttaagaaaaaaggaactgtcacgcccggaaattcatcgggtataaatgatggagcagctgcagtggtattaacaacaagagagttggctgaaaaaaataatttagaaatatcaggaaagattatatcttgggctacctgtggtgttgatccatctatgatggggttagggccaatcccttcatcaaaaaaagctcttgaaatagcgaaatggaatgtaaaagatttggacttaattgaaataaatgaagcgttcgccgcacaaagtattgcagtaatcaaagaattaaaaattccaaaagaaaaagtaaatgtgaatggtggagcaatagcacttggtcatcctataggagcatctggagcaagaattgttgttacacttcttaatgaattaaaaaaaatgaatggaaaaaaaggtttggcaacactatgcatcggaggagggatgggaatttcgatgtgtatagaaaaagattaa

SEQ ID NO: 235994 - DNA, 1177 bp, Unknown
  Bacterial polypeptide expressing nucleotide sequence isolated from the Sargasso Sea
atgagtaaatctgtagttataacttctgcaactagaaccgccgttggttcattaggaaaagctctcaaaaatatacctggtgaagaattaggttctgtagttataaaagaggtgattaagagatcaaatatcaaatcttctgatatcgatgaaacaataatgggccaagttttaactgggggaactggtcagaatcctgcaagacaagcagcaatgaaatctggtattccgaaagaaaaaccagcttacattgtaaatcaagtatgtggatcaggattgagatcgatagcatcaggatttcaaagtataaaatcaggagactcaaagatagttatcgctggtggccaagagagcatgtctctagcgccacatgcgattcatttaagagatggaaaaaaaataggtgataccgaattagtagatacaatgataaaagatgggttgtgggatgcttttcatggatatcacatgggagtaaccgctgagaatgtggctactaaatttcaagtgactaggcaagaacaggataagttcgctcttaagtcgcaagaaaaagcattaaaagcaatcaaagaaaataagtttaaagacgaaataactaattttaaaattaaatctaaaaaagctgagatagattttaataaagatgaacaccctagagatggtataaacttagagggattagctagacttagaccagtttttcaaaaagatggaactgtaactgctggaaatgcctctggaattaacgatggagcagctgcagtaactttaatgtcagaggaagaagcaaaaaaaagagatttaaagaaattagttactatcaagtcttgggctagttgtggtgttgaacctgctctaatgggtactggacctattccagcaacaaaaaaagctttagatttagcaggatggaaaactgatgatgtagacctttttgaagttaatgaagcttttgcagctcaaagtattgctgttttaaaaacactgggaattccagatgaaaaagttaacgttaatggtggagcaattgcaataggtcatccaataggtgcgtcaggcactcgaattcttgtcactcttattcacgagatgatcaaacgcgatgtgaagagaggtttggccacattgtgtattggtggtggaatgggtatagcgatgagtatagaacgataat

SEQ ID NO: 235995 - DNA, 1177 bp, Unknown
  Bacterial polypeptide expressing nucleotide sequence isolated from the Sargasso Sea
atgaacaacaaacctgatgacgtggtcatttgtagtgcagttaggactcctataggcacttataaaggatcattaaaagatttgaaaggagatcaacttggtactatcgtgataaatgaggttttaaaaagaagcaaaatatctaataatcaaattgatgaagtaataatgggccaggttttaactgctgctggaggacagaaccctgcgagacaagcagcagtaaatgctgggatccctgtatccaaacctgcttatttagtaaaccaagtttgtggatcaggactaagggccattatttcaggttatcaacaaattaaattaggagatgcaaataatgtaatttgtgggggtcaagagaatatgtcgatgacaccttactcttatttttattcagagaaaaaagaaatttcaaaagatcaattaatcaatactatgattcacgatggtttaactgatgcttttaaaaattaccacatgggagttacagctgaaaatgttgcaaaaaagtttaatatttctagaaaacaacaagatgaatttgctcttaaatcccaaaaaaaaacagaaattgcaattgaaaataataaatttgatgatgaaatagtgcagataaatcacaaaggtattattttaaaaaaagatgaacacccaagaaaagatttaaaattatctgatttagaaaaattaaaaacagcttttaaagatggtgggactgtaacacctggaaactcatctggtataaatgatggagcagctgctttattattaactacatttaaggaagctcaacaaaattcacttaaaccattggccaaaattatttcctgggcatctgttggtttggaaccgtctttaatgggtcttggtcctatagaagctatccgccaagcatcaaaaaaagtaaattggaatttaaatgaaatcgatttatttgaaattaatgaggcttttgccgctcaagctatagcagttatcagtgaattgggtattgatgaaaacaaagttaatgtaaatggtggggctattgctttaggtcacccaataggtgcatctggagcaagaatacttgtgacacttatacatgaaatgaaaaaacagaataaagaaagaggttgtgccgcactttgtataggtggcggtatgggaattgcgctatgtgtagaaaaaatttagg

SEQ ID NO: 235996 - DNA, 1114 bp, Unknown
  Bacterial polypeptide expressing nucleotide sequence isolated from the Sargasso Sea
tatggtaaaaaatttaaaagatgtagtaattgtatctgccgcaaggacagctatcggtaaactaagaggtatatggtcaaattaccaagctcatgagttaggtgctaatgtcatattaagtattctaaagaaatcaaaaattcaaactgacgccattgatgaagtaataatgggtcaagttttaactggtgatacaggtcaaaaccctgcaaggcaggcagctataaaagctggcttaccaaatgataagactgcttacattattaaccaagtttgcggttcaggtttaagagctgttgtagcaggctatcaatcaattatttctaacgatgcaaagatagttattgctgggggacaagaaagtatgacaaattcaaaagaggaatttatgcttaaagatggtttaatagacgcttacaacaattatcatatgggaattacagcagaaaatgtagctgagaaatttggaatttcaagaaaagaacaagacaagtttgctgttgcttctcaattaaaagcgcaagaagcaataaagcaaaaaaaatttaaagaggaaataatcgaaggagataatttattagatgagcatcctagagctaatgttacagaggaaagtctttctaagcttaatactgcttttaaagaaaatggaactgttacagccggtaattcatcaggagtaaatgatggagcagcagcagttcttttaatgaatagagcagaggcagaaaaaaataatataaaacctttagctaaaattgtttcttgggcaacctgtggagttgagcctgctcttatgggaacaggaccaattcctgcaactaataaagctctaaaaaaagcaggatggtctataaatgatttagatttaattgagtcgaatgaagcatttgcagctcaaagcatagcagtaatcaaagaactcaaaattccaattgaaaaggttaatgtcaatggaggagctattgctttaggacatcctattggcgcatcaggcgcaagaatactagttacattagttcacgaaatgataagacgagatttaaaaaaaggtttaacgactttgtgtattgggggtggtatgggaatatcaatgtgcgttgaaagggattaa

SEQ ID NO: 235997 - DNA, 1177 bp, Unknown
  Bacterial polypeptide expressing nucleotide sequence isolated from the Sargasso Sea
atgagcgataaatcaaaagaagtagttattgttggtgctgtgagaacgccaataggcacttataaaggttcattaaaaaatatcaaatctgatcaacttggatcaatagttataaaagaagttttaaaaaaatctaaatttaataaagatgaaattgatgaagttattatgggtcaagtattaacagctggtggaggacaaaatccagcgagacaagctgcaataaatgcaggtattccaatttcaaaaccagtttatatagttaaccaagtatgtgggtctggacttagagctgtaatttcaggttatcaatcaattaaattaggagatgcaaaaaatgtaatttctggaggccaagaaaatatgtcaatagctccgcactcaattttttatagagataaaaaaaagatttcagaagataaattagtagatacaatgattaatgatggtttgatagatgcatttaacaattatcatatgggtgtaacagcagaaaatgttgcaaaaaaatttaatatatcaagacaggaacaagatgaatttgcattaaaatctcaaaaaaaaacacaaactgcaattattgataataaatttgatgaggaattaattaaaataaatcaagatgggaatattcttaacaaagatgagcatgcaagaagtggtttaaaattatctgacttagaaaaattaaaaactgtttttaaagataatggaactgttactccaggaaattcttcagggataaatgatggagctgcagccttattactaaccactttagaagaagcagaaaaaaaatcaattaagccattagccaaaattgtatcttgggcttcagttggggtagatccctcactaatgggtttgggacctatagatgctgttcgtaaagcagttaaaaaagcaaaatggaatttagaagaagttgatttgtttgaaattaatgaagcttttgccgctcaaagtattgcagtaattcgtgaactaggtattgatcatgataaagtaaatgttaatgggggagctatcgctcttggtcatcctattggggcttcaggagctagaattttagtaacattaatatatgaaatgaaaagacaaaataaaaataaaggctgcgcaacactctgtataggtggagggatgggtatagctttatgcgttgaaagagtttagg

SEQ ID NO: 235998 - DNA, 1177 bp, Unknown
  Bacterial polypeptide expressing nucleotide sequence isolated from the Sargasso Sea
atgaacagtgataaagatattgtaataacgtcagcttttagaactgcaattggttcgtttcaaggtagcttaaaagatcataaagcaacagaacttggaactgcagttgttaaaaaatgtatggaacactctaatcttaatggttcagaagtggatacagttattttagggcaagtgttacaaactggatgtggtcaaaatcctgctagacaagctgcaattaattcagggatagataaagataaaactgcaacaacaattaatcaagtatgtggctctggtttggctgcagtaaccttaggttttaattccttaaaactaaatgacacaaatattgttattgcgggaggtcatgaaagtatgactaattcaccgcattacttaaattacagaatggaaaaaaatttaagtgaggaaaaattaaaagattcaatgcttattgatggattaatagatgcatacgatgattaccacatgggagtaactgcagaaaatgttgcagaaaaatatcaaataactagaaatgatcaggataattttgcattaaactcacaaaaaaaagcaataaaagctattagtgaaaatagatttaaagaagaaataattccaataaaattaaaagatcaaaagatctttgataaagatgaatatccaagatcagatacaaatttagaaaaattatcaaatttaaaaacagtttttaaaaaaaatggaactgtaactgcgggaaatgcatctgggttaaatgatggtgctgcagcagtaactttaatgaattataaaacttcaaaagataaaggtttaaagccaattgctaaaatcgtttcatgggcacaaagtggtgttgatccaaaattaatgggaactggcccaatacctgcctctaaattagcattaaaaaaagctggatggaatattaatgatttagatttagttgaatctaatgaagcatttgcagctcagtctgttgcagtaataaaagaacttggacttaagaatgatatagtaaatgttaacggtggtgcaattgctcttggacatcctattggagcttcgggtgcaagaatattagtaacattgatacatgaaatgcaaaaaagaaaatgtaaaaaaggtttagctacactttgtattggtggtggaatgggtatttcaatgtgtattgaaaatatttaat

SEQ ID NO: 235999 - DNA, 1114 bp, Unknown
  Bacterial polypeptide expressing nucleotide sequence isolated from the Sargasso Sea
tatggcaaaaaatttaaaagatatagttattgtatctgctcttagaactccaattggaaaacttaagggaatatggtctaagcatggagctccagagttaggagcaaaagtaatattagaagtattaaatcaatcaaaagttccttcatcggatatcgatgagattataatgggccaggtcttaacaggaaatacaggtcaaaatcctgcaagacaagctgcgatgatggctggtataccaatagaaaaaactgcatatattattaatcaggtttgtggttcaggtttgagagctgttgttgctggctaccaatcaattttatctggtgactgtgaagcagttattgcaggtggacaagaaagcatgacaaattcaaaagaagaattaatgcttaaagatggtttaattgatgcatataaaaaatatcacatgggcatcacagctgagaatgttgctgaaaaatttcaaatttcaagaaaagatcaggataaatttgctgtttcatctcaactaaaagctcaagaggcaataaaaaataataagttcaaagaggaaatgattaatggagataaattattagacgagcacccaagatcaaacgttacagaggaaggtctttcaaaactaaaaactgcttttaaggaaaatggaacagttacagctggtaattcctctggtgtaaatgatggagcagcggcaattcttttaatgaatagaaaaaaagcagaaagttataatttaaaacccttggccaaaattgtctcctgggctactagtggtgttgatcctgccttaatgggaactggacctataccagcaacaaataaagctttaaaaaaaattggatggtcaattaaggatttagatttaatagaatcaaatgaagcatttgcagcccaaagtattgcagttattaaagagcttaaaattccaactgaaaaagttaatgtaaatggtggtgcaatcgcactaggccaccctattggagcctcaggaagtagaatattagtaactttaactcatgaaatgattaaaagggatttaaaaaaaggattagcaactttgtgtataggtggtggaatgggaatctcagtttgtattgaaagagactaa

SEQ ID NO: 236000 - DNA, 1183 bp, Unknown
  Bacterial polypeptide expressing nucleotide sequence isolated from the Sargasso Sea
catgacggacgtagtgatcgtatcggccgcgcggaccgcggtcggcaaattcggcggttcgcttgcgaagattgcggcgcccgagctgggcgcgacggtgattcgcgcggtgctggagcgtgcgggcgtgaagcccgagcaggtcagcgaagtgatcatgggccaggtgctgacggccggttccgggcagaacccggcacggcaggcgctgatcaaggccgggctgccgaatgccgtgccggggatgacgatcaacaaggtgtgcggctcgggcctgaaggccgtgatgctggcggcgaacgcgatcgtcgcgggcgatgccgagatcgtgatcgcgggcgggcaggagaacatgagcgcgtcgccgcacgtgctgccgggctcgcgcgacgggttccggatgggcgacgcgaagctggtcgacacgatgatcgtcgacggcctgtgggacgtgtacaaccagtaccacatgggcatcacggcggagaacgtcgcgaaggaatacgggatcacgcgcgaagagcaggacgcattcgcggcgctgtcgcagaacaaggcggaagccgcgcagaaggccggccgcttcgacgacgaaatcgtgccggtggcgattccgcaacgcaagggcgagccgctgcagttcgccaccgatgaattcgtgcgtcacggcgtgacggcggaatcgctggccgggctgaagccggcgttctccaaggacggctcggtgacggcggcgaacgcgtcggggctgaacgacggtgcggcggcggtgctggtgatgtcggcgcagaaggcggcggcattgggcctgacgccgctggcgcggatcaaggcgtacgcgaacgcgggcgtggatccgagcgtgatgggcgtgggcccggtgccggcctcgcgccgtgcgctggagcgggcgggctggacgccgggcgacctggacctgatggaaatcaacgaggcgttcgcggcgcaggcgctggcggtgcacaagcagatgggctgggacacgtcgaaggtgaacgtgaacggcggggcgatcgcgatcgggcacccgatcggcgcgtcgggctgccggatcctggtgacgctgctgcacgagatggccaagcgagacgcgaagcgcgggctggcgtcgctgtgcatcggcggcgggatgggtgtcgcgctcgcggtcgagcgcgcgtga

SEQ ID NO: 236001 - DNA, 1189 bp, Unknown
  Bacterial polypeptide expressing nucleotide sequence isolated from the Sargasso Sea
aatgagtaaaattcctaaagacgttgttattacctctgcattaagaacaccaataggtaaatacaaaggatctctcaagaacatcagtgcagataagcttggtgcgctggttattaaagaggcaattttcaaatcaagccttaaaggagaagatgtagatgaggttattatgggacatgttctcactgcaggtcttggtcaaaatcctgcaagacaagcttcgattcacgcaggcgtacctgtttcaaaaccagctcatatagtaaatcaagtatgtggttctggtttgagatcaatcatatctgcctaccaatcaataaagttagagcaaaatgagattgttgttgcaggtggtcaagaaaatatgtctagagcaacacatgcgatattcttaagagatgataaaaaatttattgaggataatttgatagatacgatgattaaagatggacttacggactcttttaatgattatcatatgggtgttacagcagaaaatattgcagaaaaatatcatataacccgacgagagcaggatattttttccataagttctcaaaaaaaagctaaaaaggcttatgaggaaaaaaagttcaatgacgaattaataaaattacaaatacaaagtaataatgaaaaatttatttttgaacatgatgaatatctaagaaataacataactttagatgatttagaaaaactaaacacggtgtttaaagaaaatggaactgtcactcctggaaattcatctggattaaatgatggcgctgctgcattagttttaatgacgagagaaaaagccgagctaaaatctttagaaattcttgcaagcattgtgtcttggtcatcatcaggagtagaaccttctctaatggggcttggaccaataccttctattaaagaagctcttattaaagctcaatggcaaatggaggacatagatttatttgaaataaatgaggcttttgcagcacaaactttagcagttataagagaactcaaaattccagaggaaaaggttaacgtaaatggtggagcaatagctctaggtcatccaataggtgcttcaggatcaagaatagttgcaacactaattcatgaacttaaaagacaaggaaaaaagaaaggttgtgcggcactctgcattggtggaggcatgggtatagctatgtgtgtggagagaaattaa

SEQ ID NO: 236002 - DNA, 1186 bp, Unknown
  Bacterial polypeptide expressing nucleotide sequence isolated from the Sargasso Sea
tatgtctaaagaaaaaacagtagtaattacctcggctgttagaacggctattggttcattaggaggaaccttaaaaaatgttccggcctataaactggggtcaacagttatttcaaatgcaattaaaaaatcaaatttaaaagcatcagatataaatgaagttattatgggtcaagtccttacaggcggtgcgggacaaaatccagctcgtcagtcagcaatggattctggcataccaaaagaaacgccgtcttatgtggttaatcaagtttgtggttctggtttgagatctattgcctctggcttccaatctataatgtcaaatgactctacgatagtcgttgctggtgggcaagaaagtatgtctcaagcacctcatgttgttcatcttagaaatggtaaaaaactgggggatacagaattagttgactcgatgatcaaagatggattgtgggatgcttttaatggttaccacatgggaaatactgcagaaaatgttgcgcaaaaatttcaaattactagaaaagaccaggataagttttcttttgagtctcaaattaaagctttaaaagcacaaaaggaaaataggtttaatgatgagattattccttttgaaataaaatcaaaaaagggcagttctatttttaaaaaagatgaacatcctagagaaggaatatctttaaatgtattagaaaaacttaaaacagtttttcaaaaggatggaacggttacagctggaaatgcttcaggtattaatgatggtgcagctgcagtagttttgatgtctaaaagtgaagctgaaaaaagaggaattaaaccacttgcagaaattaaatcgtgggcatcttgcggtgttgatccttcggttatggggactggtccaataccatcctcgaacaaagctttagacattgcaggttggaaagctaaagatttagatttgattgaagctaacgaggcttttgctgctcaaagttgtgctgtaattaaggagttaggtttgccaatggaaaaagtaaatgtaaatggtggggcaatagccttgggtcatccgattggcgcatctggtacgagagtttttgtcacactagtccatgaaatggctaaaagaaattctaaaaaaggtttagccacattgtgtattggcggaggaatgggtatagcaatgtgtatagagagaaaatga

SEQ ID NO: 236003 - DNA, 1180 bp, Unknown
  Bacterial polypeptide expressing nucleotide sequence isolated from the Sargasso Sea
atgagggtcgctataattgctgcgcagcgcagcgctattggtagctttggcggcgccttcgctcagctcactgcagtcgagcttggtagccaactgttgcgcaagatgctggagaaaatccctggtctcgtaagcgaaatcgacgaagtaattatcggccaggtacttacggctgggtgtggacaaaatccagccagacaaacagcattgcgcgctggcttgtcgcaacaggtaccggcgacgactgttaacaaagtctgtggttctggcttaaaagctgtgcaattgggcatgcaagccatagcaaatggagacgccgaactagttgtagctggtgggcaggaggtgatgagccaggctgcacatgtgttaccccaaagccgcaaaggcatcaaaatgggcaactggcagttggtcgactccatgcttagcgacggtttgaccgatgctctgggtggttatcacatggggatcactgccgaaaatattgctcagcagtggcagattagtcgcgagcaacaagatcagtacgcgttagtttcgcagcaaaaagccgcccgcgcacaacaacaaggggcattttcagcggaaattattccgcttgaagttcccttgtctaaaggaaaaagccagctgattgaaacggatgaacagatacggcctgacagcagcctggagaaactcagtactttgcgccctgtctttaaaacagagggaacagttaccgcaggaaatgcttcaagtataaatgacggtgctgcctttgttattctggccagtgaacaaaaagcaaagcagcttggcctgcctatattgggttatgtagtagcgactgccagcgctggcgtagctccagaattgatgggtagcggtcctatagccgcctgcaataaagtactggcaaaagctaattggcagatggctgacgtcgatttgatagaagccaatgaagcttttgcggctcaggcattatgcgttagtcaggatttgcaacttgaaccagccaaagtaaacattcatggtggagccattgctttgggacatcctattggagcctctggctgccgtattttagtgacgctattgcatgctatgcaccagcaacaagccgataaaggtttagccactttatgtataggtggcggtatgggaatagcaatgttggtcagccggacttaat

SEQ ID NO: 236004 - DNA, 1189 bp, Unknown
  Bacterial polypeptide expressing nucleotide sequence isolated from the Sargasso Sea
atgagtaaaattcctaaagacgttgttattacctctgcattaagaacaccaataggtaaatacaaaggatctctcaagaacatcagtgcagataagcttggtgcgttggttattaaagaggcaattttcaaatcaagccttaaaggagaagatgtagatgaggttattatgggacatgttctcacagcaggtcttggtcaaaatccagcaagacaagcttcgattcacgcaggcgtacctgtttcaaaaccagctcatatagtaaatcaagtatgtggttctggtttgagatcaatcatatctgcctaccaatcaataaagttagagcaaaatgagattgttgttgcaggcggtcaagaaagcatgtctagagcaacgcatgcgatattcttaagagacgataaaaaatttattgaggataatttgatagatacgatgattaaagatggacttacggactcttttaataattatcatatgggtgttacagcagaaaatattgcagaaaaatatcatataacccgacgagagcaggatactttttccataagttctcaaaaaaaagccaaaaaggcttatgaggaaaaaaagtttaatgacgaattaataaaattgcaaattcaaagtaataatgaaaaatttatttttgaatatgatgaatatctaagaaataacataactttagatgatttagaaaaattaaacacggtgtttaaagaaaatggaactgttactcctggaaattcatctggattaaatgatggtgctgctgcattagttttaatgacaagagaaaaagccgagctaaaatctttagaaattcttgcaagcattgtgtcttggtcatcaacaggagtagaaccttctttaatggggcttgggccaataccttccatcaaagaagctctaattaaagctcaatggcaaatagaggacatagatttatttgaaattaatgaggcttttgcagcacaaactttagcagttataagagaactcaaaattccagaggaaaaggttaacgtaaatggtggagcaatagctctaggtcatccaataggtgcttcaggatcaagaatagttgccacactaattcatgaacttaaaagacaaggaaaaaagaaaggttgtgcggcactctgcattggaggaggtatgggtatagctatgtgtgtggagagaaattaac

SEQ ID NO: 236005 - DNA, 1082 bp, Unknown
  Bacterial polypeptide expressing nucleotide sequence isolated from the Sargasso Sea
agcagttataagtgagtcattaaagatatcaaatttaaaaaaggatgaagtagatgaagtaattatgggtcaagttttaacgggcggagctggtcaaaatcctgctaggcaagcactcatacattcaggtataccaaaagaaaaaccagcatatatagtcaatcaagtttgtggctctggaattaggtcaattgcctctggttttcaaagtattttagctaacgattccaaaatcgtaatagctggaggccaagaaaatatgtcattagctccacattcgatacatttaagagacgggaagaagttaggtgacactgaacttactgatacaatgattaaggatggattatgggatgcttttcatggctaccatatgggtataacagcagaaaatgtagctgaaaaatttcaagtgacacgtgaagaacaagataaatttgcactacagtctcaagagaaagcaattaaagctattaaagacaacaaatttaaagatgaaattattaattttaaaataaaatcaaaaaaagcagaaatagattttgtaaaagatgaacatccaagagaaggtattaatttggatgctcttaaaagattaaagcctgtttttaaaaaagatggcactgtgacggcaggtaatgcttcaggtattaacgatggagcagcagcagtcactttaatgtcttctactgaagcagaaaaaagaaatttaaaaaaattagtagaaataaagtcttgggcaagttgtggtgtcgacccagctttaatgggaacaggtcctattccatcaacaaaaaaagcgcttgatcttgctggatggtcagttaaggacatagacttatttgaaattaatgaagcttttgccgctcaaagcttagcagtattaaaaactctctctattcctagtgaaaaagtaaatgttaatggaggagcgatcgctttaggtcatcctattggagcatcaggtacaagaattttagttacactcattcatgaaatgattaaaagagacgcaaaaaaaggattagcgactctttgtatcggaggaggaatgggcattgcaatgtgtgttgaaagataaa

SEQ ID NO: 236006 - DNA, 1174 bp, Unknown
  Bacterial polypeptide expressing nucleotide sequence isolated from the Sargasso Sea
tatgaatgaagtttttatcacatctgctgttagaacagctgtcggttcttttaatggatcattagcaaacatgcctgctcatgacttgggcaaaattgtaattaaggaagctattgctaggtctaacgtcgaggcttctgaagtggaggaagttatactaggtcaagtattaaccgctgcgactggtcagaatccagcaaggcaagcagcaataaatgcaggtttaaataaagaaacaccagcatggcttgtaaatcaagtttgtggatcaggactaagaagcgtagctttagcgtatcaagccatcatgaacaatgatgcaaatattattgttgctggtggccaggagtctatgagtcaatctcctcattgttctcacttaagaaatggaacaaaaatgggagataaccaaatggtggactcaatgattaaagacggtctttgggacgctttcaatggttatcatatgggtacaacagctgagaatgttgctcaacaatggcaaataactcgtgatcaacaagacgaatttgccgttgaatctcaaaagagagcaagcaaggcaaaatctgatggtatatttaaagatgaaattgttggagttgaaataaaatcaagaaaagaaactgttgtctttgataacgatgaatacataaaagataatgtacagttagagaaaattgcaactctaagaccagccttttcaaaagaaggtactgtaacagcggccaatgccagtggaattaacgatggcgctgcagcaatgactgttatgtctggagatgaagttaagaaaaaaaatatagaacctatcgctcgtattgtttcatgggcaagtgctggagttgatccttcaataatgggtactggtccaataccagcgagcagaaaagctctagaaaaagctggatggaatgttggcgacttagatttgattgagtcaaatgaagcttttgctgcccaatcatgtgcagtaaataaagaaatgggctgggatacttctaaagttaatgtcaatggtggagctattgcaattggtcatccaataggtgcctctggagctagaattctagtgacgttattaaatcaaatgaagagacaagatgcaaaaaaaggccttgcaacactgtgtattggcggcggcatgggtgtcgctttatgcgttgaaagataa

SEQ ID NO: 236007 - DNA, 1174 bp, Unknown
  Bacterial polypeptide expressing nucleotide sequence isolated from the Sargasso Sea
tatgagtgaagtatttattacatctgccgttagaacagccgttggttcttttaatggatctttatcgggtatgccagcacacgatttaggcacaatagttataaaagaaacgcttaatagatcaggcattgaaggtggtgatgtagatgaggtgatacttggacaagtactaactgcagcaaccggtcaaaaccctgctagacaagcatcaataaatgctggtttaaataaagaaaccccagcatggctagttaatcaagtttgtggatctggcttacgaagtgttgctttggcctaccaatctataatgaatggcgatgcaaatattattattgctggtggacaagaaagtatgagtcaatccccgcactgtatgcacctaagaaatggtaccaaaatgggcgatgataagatgatcgactcaatgatcaaagatggtttgtgggatgcttttaatggatatcacatgggaacaactgctgaaaatgttgcacaacaatggcaaattactagagatcaacaagatgaatttgcttttaactcacaacagaaagcaagtaaagctaaagcagatggagtatttaaggatgaaattgttccagttgaagtcccatcaagaaaagagacagtagtttttgatagtgatgaatatattaaagacaatgttcaattagaaaaaatctcatctttaagacctgcatttgcaaaagagggaacagttacagcagcaaatgcaagtggtataaacgatggcgcagctgctttggcagtaatgtcctcagatgaaatgaaaaaaagaaaccttgagcctatggcaagaattgtatcctggtcaagtgctggggttgatccatctgtgatgggtacaggacctatacctgcaagcagaaaagctcttgataaagcagggtgggatgtttctgatttagatttaattgagtcaaatgaagcatttgccgctcaatcttgtgcagtaaataaagaaatgggatgggatgtttcaaaagttaatgttaacgggggagcgattgctataggacatccaattggtgcgtcaggagctagaattcttgtaacattattaaatcaaatgaaaagacaggacgctaaaaaaggacttgccacattatgcattggtggcggcatgggtgtcgctttgtgcgtcgaacgatag

SEQ ID NO: 236008 - DNA, 1183 bp, Unknown
  Bacterial polypeptide expressing nucleotide sequence isolated from the Sargasso Sea
atgacggacgtagtgatcgtatcggccgcgcggaccgcggtcggcaaattcggcggttcgcttgcgaagattgcggcgcccgaactgggcgcgacggtgatccgcgcggtgctggagcgtgcgggcgtgaagcccgagcaggtcagcgaagtgatcatgggccaggtgttgacggccggttccgggcagaacccggcacggcagtcgctgatcaaggccgggctgccgacggcagtgccgggaatgacgatcaacaaggtgtgcggctcgggcctgaaggccgtgatgctggcggcgaacgcgatcgtcgcgggcgatgcggagatcgtgatcgcgggcgggcaggagaacatgagcgcgtcgccgcacgtgctgccgggctcgcgcgacgggttccggatgggcgacgcgaagctggtcgacacgatgatcgtcgacggcctgtgggacgtgtacaaccagtaccacatgggcatcacggcggagaacgtcgcgaaggaatacgggatcacgcgcgaagagcaggacgcgtttgcggcgctgtcgcagaacaaggcggaagccgcgcagaaggccggccgcttcgacgatgaaatcgtgccggtcgcgattccgcaacgcaagggcgagccgctgcagttcgccaccgatgaattcgtgcgtcacggcgtgacggcggaatcgctggccgggctgaagccggcgttctccaaggacggctcggtgacggcggcgaacgcgtcggggctgaacgacggtgcggcggcggtgctggtgatgtcggcgcagaaggcggcggcactgggcctgacgccgctggcgcggatcaaggcgtacgcgaacgcgggcgtggatccgagcgtgatgggcatgggcccggtgccggcctcgcgccgtgcgctggagcgcgcgggctggacgccgggcgacctggacctgatggagatcaacgaggcgttcgcggcgcaggcgctggcggtgcacaagcagatgggctgggacacgtcgaaggtgaacgtgaacggcggggcgatcgcgatcgggcacccgatcggcgcgtcgggctgccggatcctggtgacgctgctgcacgagatggccaagcgcgatgcgaagcgcgggctggcgtcgctgtgcatcggcggcgggatgggtgtcgcgctcgcggtcgagcgtccgtaac

SEQ ID NO: 236009 - DNA, 1072 bp, Unknown
  Bacterial polypeptide expressing nucleotide sequence isolated from the Sargasso Sea
atgtctgaaaaaaaatcagtagtaattacatcggcagtcagaacggccattggttctttagggggaacactgaagaatataccggcatataaattgggctcttctgtaatttctagtgcaattaaaaaatctaatttaaaaccctcggaaattgacgaagttataatggggcatgtattaactggtggagctggacagaatccagctcgacaagctgctatcgaatctaaattgccaaaagaaattccttcatatgttgtaaaccaagtttgtggttcaggtttaagatctatagcttctggttatcattctatactttctgataattcaaatattgtaattgcaggcggtcaggaaagtatgtcacaagctcctcacgtagttcatctaagaaatggaaaaaaattaggagatacagaactggtcgattctatgattaaggatggtctttgggatgcatttaatggttaccacatggggatcacagcagaaaatgtagctcagcaatttcaggtaacaagaaaagatcaggataaatttgcttttgactcgcagtcaaaggcattaaaggcacaaaaggaaaataaatttgatgatgaaatagtgccttatgaaattgaacttaaaaaaggtaatactacttttaataaagatgaacacccaagagctactacatcgttagatactttaagtaggttaagaggagcatttaaaaaagatggaactgtaactgctgggaatgcatcaggtattaatgatggtgcagcagctgttattttaatgtcaaaggaggaggcagaaaaaagaggattaaaacctctggcagaaattaaatcatgggcatcatgtggagtagacccatcaattatgggaacaggacctataccatcttcaaaaaaagctttggaaattgctggatggtcttcaaaagatttggacttaatagaagccaatgaagcttttgcggctcaaagctgtgctgttgtaaaagaactttcacttccaatggaaaaggtaaatgtaaacggtggttcaattgcccttggccatccaattgggcttcaggcacgag

SEQ ID NO: 236010 - DNA, 316 bp, Unknown
  Bacterial polypeptide expressing nucleotide sequence isolated from the Sargasso Sea
gggacttggacctatacctgcaattcaagaggctttatctaaagcgaattggacaatggatgaagtagacttatttgaaattaacgaggcttttgcagcacaaagtattgcggtaataaaagaattaaaaattcctgaacaaaaagttaatgttaatggaggagcgattgccttaggtcatccgattggagcttctgggtcaagaattttagttacacttattcatgaaatgatcaagcaagataaaaaaaaagcttgtgcggcactctgtattggcggtggtatggggatagctatgtgtattgagagaagctaa

SEQ ID NO: 236011 - DNA, 1045 bp, Unknown
  Bacterial polypeptide expressing nucleotide sequence isolated from the Sargasso Sea
tctaaatttggcaaagatgaaattgacgagataataatgggtcaagtattaactgcaggctcggggcaaaacccagcgagacaggccgctataaatgctggtataccaatttcaaaaccagcacatatagttaatcaagtatgtggttctggacttagagcagtgatatcaggttatcaatctatcaaattaggagagtcattaaatgtaatttccggaggtcaagaaaatatgtcaatagctccacatacaatattctttaggaatcaaaaaaaaatttcagaagataaattattagattcaatgattaatgatggattaacagatgcatttaaaaattatcatatgggcgtaacagcagaaaatgttgcaaaaaaatttgatatatcaagagaggaacaagataaatttgcattaaattctcaaaaaaaaacattatcagctatcaatgataataagtttgatgatgagttaattaagataaatcaagatggaaacatactggataaagatgaacatccacgagtaaacttaaaattatctgatttagaaaaattaaaaactattttcaaagaaaatggaactgttactccaggaaattcttcagggataaacgatggagctgcagcattattattgactactttagatgaagcgaaaaaaaaatctattgaaccattagcaaaaatagtttcttgggcttcagttggagtagatcctgctttgatggggttaggacctatagaggctgtacgagaagcaatcaaaaaggcaaaatggaatttagatgaaattgatttatttgaaataaatgaagcctttgcagctcaaagtattgcggtaattagtgaattaggtattgataaaaataaagttaatgtcaatggaggtgccattgctcttggtcatcctattggagcttcgggagctagaatattggttacattgatacatgaaatgaaaaagaaaaaaaaaaacaaaggttgtgcaacactatgtataggcggtggtatgggtatagctttatgtgtcgagaaaatttagg

SEQ ID NO: 236012 - DNA, 1177 bp, Unknown
  Bacterial polypeptide expressing nucleotide sequence isolated from the Sargasso Sea
atgtctaaagaaaatggagtcgtcataacatccgctgttagaacagcaattggagatttaggtgggtctttaaaaaatgtttctgctcataaactaggttcgacagctatttcaagcgctattgcaaaatcaaatattaaagcttcagatataaacgaaattattatgggccaagttttaacaggtggcgcggggcaaaaccctgcaagacaagctgctatggatgcaggtattccaaaagaaacaccatcatatgttgttaatcaggtttgtggctcgggtctaagatctattgcatcaggatatcattcaattctctcaggaaattcaaatattgttttagctggaggtcaagaaagtatgtctcaatcacctcatgtagttcatttaagaaatggaaaaaaacttggagacactagtttggttgactctatgataaaggatggattatgggatgcattcaatggatatcatatgggtataacagcagaaaatgttgcacaaaaatttcaagttacaagaaaagatcaagacaaatttgctttcgactctcaaacaaaagctttaaaagctcaaaaagaaaataaatttgatgatgaaattgttccttacacaattcaacttaaaaaaggtactgcagtttttaaaaaggatgagcatccaagagacgggatttcaatggaggcactacaaaggcttaaaactgcttttcaaaaagaagggacagttaccgcaggaaatgcctcaggtataaatgacggtgctgctgcagtagttttaatgtcaaaaaaagaagctgaaaaaaaaggtattaaacctttagcagaaattaaatcttgggcctcttgtggtgttgatccctctgtgatgggaacaggtcctataccgtcttcaaaaaaagcattggagattgctggatggcaatcaaaggatttagatttgatagaagcgaacgaagcctttgctgcacaaagttgcgcagtagtcaaggagctagctttgccaatggaaaaagtaaatgttaatggtggagcaatagcattaggacaccctattggcgcttctgggacaagaattttcgtgacacttattcatgaaatgctaaaaagagattcaaaaaaaggattggccacgctttgtattggaggaggtatgggcgttgctatgtgtattgaaa

SEQ ID NO: 236013 - DNA, 1189 bp, Unknown
  Bacterial polypeptide expressing nucleotide sequence isolated from the Sargasso Sea
aatgaataaaaaacataatgtagttatagtatcagcgagacgcacaccaataggatcattccaaggcggtctatctgtagtctctgctcctaaactagggtcattagtcatttcagaaatattaaatgatacaatgttagaccctttattaattgatgaagtaataatgggtaatgtattatctgctggtttaggacaagcgcctgcgcgacaggctactatcggagcaggattgcctgatagcatagaatgcctaacaattaataaaatgtgcgcctctggtttaaaagctgtaatgctggctgcacaggcaatccaagtaaatgatgctaatattattatagctggtggtttcgaaaatatgagtcaagctccatatatacttcctaaagctagagcaggatataggctaggaaatggaaggctaattgatagtatgatcaatgatggattatgggatgtatataatgatattcatatgggtaattgtgctgagatttgtgcaagagaaagaaattatagtattaatgatcaaaatgattttgcaaaagaatcttatcatagagcaattgatgctcaaaaatcaggagcgtttacaaatgaaatcatatctgtaaatgtagaaaatagaagtaacactattatatttaaagaagacgaagaacctaaaaatgtaaattttgataaaatggataaattatcacctgcttttgaagaagatggatctataacagctgcaaatgcttcaaaaattaatgatggggctgcttgtttattattaatgagtgaaaataaagcctcggaattaggtttaaatccacttgcacgtattctttatcaatcatctgctgcgcatgatccaaaatggtttactacagctccgattaaagcaattaaaaaaatcttaattaaagcgaatatggaagttaatgatatagatttatgggaaattaatgaagcatttgccccagtagtaatgtctgtaatggatgattataatttggatcatggtaaaattaatgtgaatggaggcgcaattgcgctagggcatccaataggagcaagtggcgctagaatattaactacactaatacatgctttgaatcataaagatttatctgtagggttggctactttatgtattggtggtggagaagcttctgccttaattatagaaagagtaaattga

SEQ ID NO: 236014 - DNA, 1180 bp, Unknown
  Bacterial polypeptide expressing nucleotide sequence isolated from the Sargasso Sea
gatgaaagatgtcgtgatcgttggtgcgttgcgcaccccgatagggtgttttcagggaacgttgtcgcgccactccgcggtagagttggggagtctcgtggtcaaggctctggtggaacgtaccggtatcgacccgcaaagtgttgatgaagtgatcctcgggcaggtgctgactgcggggaccgggcaaaacccggcccgtcaatcggcgatccgcggcggtctaccgaataccgtttctgccattacgattaacgacgtgtgtggttccggactgaaggcgctgcatctggcgacgcaggcaatccagtgcggtgaagccgacgtggtgattgccggcggtcaggaaaatatgagccgggcgccgcacgttctcaccgatagccgcaccggcgctcagctgggtaacagccagctgattgacagcctggttcacgatggtttgtgggatgctttcaacgactatcacatgggagtcacggcggaaaacctggcgcgtgaatatggtatcagccgcgagctgcaggatgcctgggcgctgagttcgcagcaaaaggcccggcgggcgattgattcagggcgctttcgtgatgagattgtgccggtgaccaccgagctgaacggggcgccgcgcaccgttgataccgatgagcagccgcgggtcgatgccagcgccgaagggctggccagtctgctacccaccttcgatcggctgggttcagtgaccgcaggcaacgcttccagcatcaatgacggcgcggcggcggtaatgatgatgagcgaatcgaaagcgcaggagctcggtctgccgatccttgcgcggatccgcgcttttgccagcgtcggcgtcgatccggccctgatggggatcgcgccggtacacgcgacgcgccgctgtctggaaagagcgggctggcggctggatgaggtcgatcttatcgaggccaatgaggcatttgccgcccaggcgatttctgtgggacgagtgttggaatgggatgagcggcgggtcaatgtcaacggcggggcgattgcgctgggccatcctattggggcatccggctgccgtattctggtttctctggtgcacgagatgattaaacgcgatgcccgcaaagggttggctacgctctgtatcggcggtggtcagggcgttgcgctggcggtagaacgcgcatag

SEQ ID NO: 236015 - DNA, 842 bp, Unknown
  Bacterial polypeptide expressing nucleotide sequence isolated from the Sargasso Sea
aggtggtcaagaaagcatgtctagagcaactcatgcaattttttatagagaagataaaaaattttctgaaaaaaaattggtagatacaatgatacatgatggtctcctagattcatttaatgattatcatatgggtgttacagctgaaaatgttgcagaaaagtataaaatttcaagagatgaacaagataatttttctctaaattctcaaaaaaaaacagaaaaagcttacagtgaaaataaatttaaagatgagctgataaaattacaaattgaagatggtgataaaaaatttgtctttgaaaaagatgaacaccctagaaataatttaagtattgatgatttaaaaaaattaaaaacagtttttaaagaaaatggaactgtaacacctggtaattcttcaggaataaatgatggtgcagctgctttagtgttaatgtccagagagcaagcagaaaaaaaatcgttagaatcattagttaaaattgtatcgtgggcgacttgtggggttgagccctcattaatgggacttggaccaataccttcaattcaagaggctttatctaaagccaaatggaaagttgatgaggttgatttatttgaaataaacgaagcatttgcagcacaaagtattgcagtaattaaagaattaaaattacctgagcagaaagttaacgtcaatggaggtgcaattgctttaggtcatccgataggagcttctggatcgagaattttggttactcttattcatgaaatgattaagcaagataaaagaaaaggttgtgcggcactctgcataggtggtggtatgggaatagctatgtgtattgagagaagctaaa

SEQ ID NO: 236016 - DNA, 1189 bp, Unknown
  Bacterial polypeptide expressing nucleotide sequence isolated from the Sargasso Sea
atgagcaaaaactctaacgatgtcgtaattacttcagcattaagaaccccaattggaagatacaatggttcgttaaaaaatcttagtgcatcaaaattaggatcaatagcaattaaagaggtaatttataaatcacagttagatgtagaggagatcgatgaagtgattatggggcatgttttaacttctggacttggtcaaaacccagctaggcaagcttcaattggtgcaggagtaccagtttcaaaacccgctcatattatcaatcaggtttgtgggtctggattaaggtccgttgtttctggttatcaatcaattagattgggagaaaatcaggtagttgttgcaggtggtcaagaaaatatgtctagagcaaatcatgcaatttattacagagaagacaaaaaatattctgaaaaaaaattagtagatacaatgataaaagatggtctattagactcatttaatgattatcatatgggtgttacagctgagaacgttgctgataaatataaaatttcaagagatgaacaggatatattttctttgaattctcagaaaaaaacagaaaaagcttatagtgaaaataaatttaaaaatgagctgattaaattacaaattgaaagtggtgatgaaaaatttatttttgagaaagatgaacatcctagacaaaatttaagtttagacgatttaaaaaaattaaaaccagtattcaaagaaaatggcactgtaacacctggaaattcctcaggcataaatgatggtgcagcagctttagttttgatgtcaagaaaacaagcagaaaaaaaatctttagagccattggtcaaaattgtatcttgggctacttgtggtgtagaaccttcattaatgggacttggacccataccttcaattcaagaagctttatctaaagcaagttggaaaatagatgaagttgaattatttgaaattaatgaagcatttgcagcacaaagtattgcagtaattaaagaattaaaaattcctgagaaaaaagttaatgtcaatggaggagcaattgccttaggtcatccgattggagcctctggttcaagaattttggttacacttattcatgaaatgataatgcaagataaaaaaaaaggttgtgcggcactctgtataggtggtggtatgggaatagcaatgtgtattgagaggaactaaa

SEQ ID NO: 236017 - DNA, 1073 bp, Unknown
  Bacterial polypeptide expressing nucleotide sequence isolated from the Sargasso Sea
tatgagtaacgaatcagtagttattgtcgcggctaagcgcacaccaatgggtggtttcaacggtaatttgtcttcgcttgctgcgaccaaacttggagaagttgcgattaaagcagcctgtgaagagatggatgtctctgtaattgatgaagtcatcatggggtgtgtattacctgctggtcttggtcaatcacccgcgcgacaagcgtcgctgggggcggggcttccgctaagtgcaggtgtgacaactatcaacaaagtatgcgggtcgggcttaaaagcggtaatgatggcccacgacttaattaaagcaggcagtgcgacagcagtcgtggcgggcggaatggaaagcatgagtaatgcgccatatatgttgcctaaagctagaacgggatatcgtatgggccatggtcaagtacttgatcatatgatgctagacggtctggaaaatgcctatgacggcaaagcaatgggctgcttcgcacaggatactgctgatgaagaaaatatttctcgcggtgaaatggatgagtttgcactaagctcgctttccaaggcacatgaagcaataaacagcggaactttcgtcgatgaaatagtacccgttacagtttcttctcgtaagggcgatactgttgttgataccgatgaaggcccaggttccgctcgcccagaaaaaattccaacactaagaccggctttcaaaaaagacggtacggtcacggctgctaactcaagctcaatctctgacggtgcagcggcactggttgtaatgagcgaaagcaaagcaaatgaacttggtctagcaccgcttgcgcgcgtggttgctcacgctacaaattctattgaacctgaaaacttcaccgttgcgcctgttggcgctatggaaaaagtgctggataaagcaggttggacgaaagaagaagtcgatcttttcgaaattaacgaagccttcgccatggtaaccatgttggctgtcaagaagctaggactagatgaaagtaaagtaaacgtaaaaggcggcgcttgtgcattgggtcacccaatcggagcctctggtgcacgcattttgg

SEQ ID NO: 236018 - DNA, 1177 bp, Unknown
  Bacterial polypeptide expressing nucleotide sequence isolated from the Sargasso Sea
tatgaacagagataaagatattgtaataacgtcagcttttagaactgcaattggttcgtttcaagggagcttaaaagatcataaagcaacagaacttggaactgcagttgttaaaaaatgtatggaacactcaaatcttaatggttcagaagttgatacagttattttagggcaagtgttgcaaaccggatgtggtcaaaatccagctagacaagctgcaattaattcagggatacataaagataaaactgcaacaacaattaatcaagtatgtggctccggtttggccgcgataactttaggttttaattctttaaaactaaatgacacaaatattgtgattgcaggaggtcaagaaagtatgactaattctccacactatttaaattacagaatagaaaaaaatttaagcgaggaaaaattaaaagattcaatgcttattgatggattaatagatgcatacgatgattatcacatgggggtaactgctgaaaatgttgcagaaaaatatcaaataactagaaatgatcaggataactttgcattaaactcacaaaaaaaagcaataaaagccataagtgaaaatagatttaaagaagaaataattccaataaaattaaaagatcaaaagatttttgataaagatgaatatccaagatcagacacaaatttagaaaaattatcaaatttaaaaaccgtttttaaagaaaatggaactgtaactgcgggaaatgcatcgggattaaatgatggagctgcagcagtaactttaatgaattataaaacttctaaagataaaggtttaaagccaattgctaaaattgtttcatggtcacaaagtggagttgatccaaaattgatgggaactggccctatacctgcttctaaattagcattaaaaaaagccggttggaatataaaggatttagatttagttgaatctaatgaagcctttgctgcacagtctattgcagtaataaaagaacttggacttaaagaagatatagtaaatgttaatggtggtgcaattgctcttggtcatccaattggggcatcgggcgcaagaatactggtaacgttagtacacgaaatgcaaaaaagaaaatataaaaaaggtttagctacactttgtataggtggaggtatgggtatttcaatgtgtgttgaaagtatttaa

SEQ ID NO: 236019 - DNA, 1177 bp, Unknown
  Bacterial polypeptide expressing nucleotide sequence isolated from the Sargasso Sea
catgagtgataattcaaaagatgtagttatagtagaggcagtaagaactcctataggtacttataatgggtcccttaaagacataagagcacatcaacttggatcgatagtaattaatgaggttttaaaaagaagcaatgtaaatcctgatgaagtagatgaaataattatgggtcaggttttaactgcaggaatgggacagaatcctgctagacaagctgcaatcaatgcaggaatacctgtttcaaaacctgcttatattgtaaatcaagtttgtggttcaggattaagagctataatttcaggatttcaatcaattaaattgggagactcaaaaatagttatttctggcggacaagaaaacatgtcaatcacgccccaaatagctcttaaagaaaatgaaaaaaaaaattcagaaaacaaatttttagatgtaatgatgaatgacggattacttgatgcatttaagaattatcacatgggtgtaacggctgaaaatgttgcaaagaaattcaatatatcgagagaagaacaggatgaatttgcattaaattctcaaaaaaaaactttagcagcaataaaaaataataacttcgaaaaagaaataattgaggtaaatcttaacggaaatactttaaaacttgatgaacatccaagaaatgatttaatcttaaaggatttacaaaaattaaaaacagtctttcaagaaaatggaacagtcactgcaggaaattcatcaggcatcaatgatggagcagccgctttaatgttattaagtttagaagagtctgaaaaaaaatcacttgaggcattagttagaatagtatcttgggcgtcagttggggtagatccttcacttatgggattaggacctattagagcaattaaagaagctgttaaaaaagctaaatggaaattagaggatgtagatttatttgagataaacgaagcttttgcatcgcaaactattgcagtaattagagaacttaatattgacaaaaacaaagtgaatattaatggtggagctatagctttaggtcatccaattggagcatcaggagcaagaatattaatttctctaatttatcaaatgaaaaaacttaataaaaaaaagggatgtgcttcactttgtattggcgggggtatgggcattgctttatgtgttgaaagaaattaa

SEQ ID NO: 236020 - DNA, 1192 bp, Unknown
  Bacterial polypeptide expressing nucleotide sequence isolated from the Sargasso Sea
atgagcaaaaattctaacgatgttgtaattacttcagcactaagaaccccaattggaagatataaaggttcgttaaaaaatcttagcgcatcaaaattaggttcaatagtaattaaagaagtaatttataaatcaaaattagatatagaggaggagatcgatgaagtgattatgggtcacgttttaacctctggactcggtcaaaaccccgctaggcaagcttcaattggtgccggagtaccagtttcaaaacctgctcacattgttaatcaagtctgtggatccggattaagatctgttgtatcgggatatcaatcaattaagttaggagaaaaccaaattgtaattgcaggtggtcaagaaaatatgtctagagcaactcatgcaatttattatagagaagataaaaaattttctgaaaataaattagtagatacaatgataaaagatggtctgctagattcatttaatgattatcatatgggtgtcacagctgagaatgttgccgataaatataaaatttcaagagatgaacaagataatttttctttaaattctcagaaaaaaacagaaaaagcatatagtgaaaataaatttcaggatgagctgattaaattacaaattgaagatggtgataaaaaatttatttttgaaaaagatgaacatcctagagaaaatttaagtatagatgatttaaaaaaattaaaaacagtattcaaagaaaatgggactgtaacacctggaaattcctcaggtataaatgatggtgctgcggccttagttttaatgtctagagaacaagcagaaaaaaaatcattagagccattggttaaaattgtatcttgggctacttgtggggttgagccttcattaatgggattgggacctataccctcaattcaagaagctttatctaaagcaaattggaaaatagatgaagtagacttatttgaaattaatgaagcctttgcagcacaaagtattgcggtaattgaagaattaaaaattcctgaacaaaaagttaatgttaatggaggagcaattgccttaggtcatccaattggagcttctggggcaagaattttggttacacttgtccatgaaatgattaagcaagataaaaaaaaaggttgtgcggcactctgtattggcggtggtatgggaatagctatgtgtattgagagaagctaaa

SEQ ID NO: 236021 - DNA, 1079 bp, Unknown
  Bacterial polypeptide expressing nucleotide sequence isolated from the Sargasso Sea
tgtaattaaaaaatgtatgaaacattctaatcttaatggttcagaagtagatacgattatattaggacaagttttgcaagcaggttgtggtcaaaatccagcgaggcaagcagcaataagtgcaggtatagatgaaaataaaactgcaacaacaattaaccaagtatgtgggtctggcctagctgcaataaccttaggttttaattctttaaaattaaaagatgcaaatattgttatagctggaggacaggaaagtatgacaaacgctccacattatctaaattatagaaatgaaaataattttagtgaggacaaattaaaagatacgatgcttattgatggattaatcgatgcttataacaattaccatatgggtgtcactgcagaaaatattgcagagaaatatcaaattacaagaaatgatcaggataattttgcatttaactcacaaaaaaaagcaataaaagcaatgagagaaaataaatttaaagaagaaatagttccaataaaattaaaagatcaaaatatttttgataaagacgaatatccaagatcagacacaaatttagaaaaattatcaaatttaaaaacagtttttaaaaaagatggaactgtaactgctggtaattcgtctggattaaatgacggcgctgcagcagtaacgctaatggattataaaacctcacaatataaaaacttacaaccaattgccaaaattatttcatgggcacaatgtggtgttgatccaaaactgatgggaacaggaccaatacctgcatctaaattagcattaaaaaaagctggttggaatattaatgatttagacttagttgaatcaaatgaagcttttgcagctcaatcagtagcagttattaaggagttaggtttaaatgaaaatattgttaatgttaatggaggagcaattgctcttggacatcctattggtgcatctggtgcaagaattttagttactttattgcatgaaatgaaaagaagaaaattacataaagggttggcaactctttgtattggtggtggtatgggaattgcaatgtgtattgaaaatatttttcaataaa

SEQ ID NO: 236022 - DNA, 1111 bp, Unknown
  Bacterial polypeptide expressing nucleotide sequence isolated from the Sargasso Sea
taaaagcgtgtctgcacatgagttaggtgccggagtaatatctgatgttattaaaaattcaaaactaaagaatgaagaagttgatgaagttataatgggtcaagtcttaacaggtggtgctggacaaaatccagctagacaggctgcaataaaatgtggtttaccaaaagaaaagccggcttacttggttaaccaggtctgtggttccgggttaagatcaatagcttcaggttttcaaagtattaggtcaaaagattctaaaatagttatagctggaggacaagaaagtatgtctacttctcctcatgcagtttttataagaaacggaaaaaaattaggaaattctgagcttgtagatactatgattaaggatggcctttgggatgcatttaatggttatcatatgggtattactgcagaaaatgttgcaacaaaatttcaaataactagagatgaacaagataaattcgcttttaattcacaaactaaagctttgaaagctcaagagaaaaataaattcaatgatgaaataactgcttttaaaattaaatcaaaagaatctgaaataaagttcgtaaaagacgaacatccaagagagagtacaaatttagagtctctaaaacgcttaaaatcagcattccaaaaagacggaacagttactgctggaaattcctcaggaataaatgatggtgccgccgctgtagttttaatggatgaagctgaagctaataaaagaggtttaaaaaaattagttaaaataaagtcttgggcaagttgtggtgttgatcctgcgttaatgggtactggtccaataccttcatcaaaaaaagcactagatttagctggatggtctataaaggatttagacttggttgaagcaaatgaggcttttgcagcacaaagtttagctgttttaaaaacactttcgattccagaagagaaggttaatgttaatggaggagcaatagctttaggacatcctataggtgcatcaggtacaagagttttagttactctaattcatgaaatgataaaaagagatgttaaaaaaggtttggccactttgtgtattggtggtggcatgggtattgctatgtgtgttgaaagataa

SEQ ID NO: 236023 - DNA, 1108 bp, Unknown
  Bacterial polypeptide expressing nucleotide sequence isolated from the Sargasso Sea
aatgtcaaaaaattctaaagacattgttttcgttgcagctcaaagatcagccataggaagatataaaggtatttataaagatctgcaggctcataacttaggctcgttggtaattaaaagtttaattgaaaagactaatttaaaggtggatgaaattgacgaggtaatattaggacaagttttgactggatcatgtggacaaaatccagcaaggcaagcagctataaattctggaattccaaaagaaaagactgcaataattataaaccaggtgtgtggatctggactacgatcaattgtaaatggatatcaatctttactaacaaattctgcaaactttataattgccggcggtcaagaaagtatgactaattcaattcaagatcaaatgatgaaagatggtttgacggatgctttttataattatcatatgggtgttacagctgaaaatgttgctgcaaaatataatatatcaagacaagaacaagatgaatttgcacttgtgtctcaacagaaagcaaatatagcaataaacaaaaaaaaatttgatgatgaaattattaatgacgatatcgatgaacatccaagaaatgggattacaataaatgatctttcgaagttaaattctgtttttaaagaaaagggaactgtcactccaggaaattcatctggcataaatgatggagcagctgcagtagttttaactaaaagagaattagctgaaaaacataatttagaaatattaggaaagattgcatcttgggcaacctgtggtgttgatccatcaataatggggttaggaccaatcccatcttcaaacaaagctcttgaaatagcaaaatggaacataaaagatttggacttaattgaaataaatgaagcgttcgctgcacaaagtattgcagtaattaaagaattaaaactcccaaaagaaaaagtaaatgtaaatggtggggcaatagcacttggtcatcctataggagcttctggagcaagaattgttgttacacttttaaatgaattaaaaaaaattaatggaaaaaaaagtttggcaacactatgtatcggaggggggatgggaatttcgatctgtatagaaaaagattaa

SEQ ID NO: 236024 - DNA, 670 bp, Unknown
  Bacterial polypeptide expressing nucleotide sequence isolated from the Sargasso Sea
gaaatttaatatttcacgagttgaacaagatgactttgcattaaattctcaaaaaaaaacagaaactgcacttaatactaatagatttaaggaagaactaattaaaataaatcaatctggtatcaatcttgagaaagatgaacatccaagaaaagatcttactaaatcagatttaggtaggctaaaagcagtatttctaaaagatgggactgtgacacctggaaactcatcaggaattaatgatggtgctgccgctttattattaacaacatttgaagaggcaaaaaaaagatcaattcaacctttagtaaagataacctcatgggcctcagttggagttgatccaactctgatgggtcttggaccaattgaggctgtgcgtgaagcagttaaaaaagcaaaatggaatttaaatgatatagatctttttgaaattaatgaagcttttgccgctcaaagcattgcagtaatacgtgagttagatattgatgagaataaagttaatgttaatggaggagctatagctttaggtcatcctataggagcatcaggtgccagaatattagtcactctcattcatgaaatgataaaacagaaaaagaataaaggttgcgctacactatgcataggtggtggaatgggcatagctatatgtgttgagagaatttaa

SEQ ID NO: 236025 - DNA, 967 bp, Unknown
  Bacterial polypeptide expressing nucleotide sequence isolated from the Sargasso Sea
aagacaagctgcaataaatgcaggtattccaatttcaaaaccagcttatatagttaatcaagtatgtgggtcaggacttagggcagtgatttcaggttatcaatcaattaagttaggagatgttaaaaatgtaattactggaggtcaagaaaatatgtctttagccccacactcaattttttatagagataaaaaaaaaattacagaagataaattagtagatacaatgatttatgatggtttaattgatgcatttaataattatcacatgggtgtaacagcagaaaatattgcacaaaaatttagtatatctagagaggagcaagataattttgcatttaattctcaaaaaaaaacacaagtagcaatcaacaataataaatttgaagaagaaataattgatataaatctagataaaaatacccttaaaaaagatgagcatccaagatttaatttaaaattatctgacttgaaaaaattaagaactgtttttaaagaaaatggaaccgttacaccaggaaattcttctggaataaatgatggagcagctgctttgatattaacaactttagaagaagcaaaaaaaaaatcgattgaaccgctagcaaaaatagtatcgtgggcatcaattggagttgaaccatcacttatgggattaggacctataggagcagttaaacaagctataaaaaacgctaattggaaattagaagatatagatctttttgaaattaatgaagcttttgcagcacaaagtattgctgttattcgggaattaaatattgatgaagataaagtaaatgtaaatggcggagctatagcattaggtcatcctataggggcatctggagcaagaatattagttaccctaatacatgagatgaaaaaacaagataaaaaaaaaggctgtgctacactctgtataggtggaggaatgggtatagcaatatgtattgagagaaattaa

SEQ ID NO: 236026 - DNA, 915 bp, Unknown
  Bacterial polypeptide expressing nucleotide sequence isolated from the Sargasso Sea
cgggttggcgcgcgacccgacggcgcgcgagatgtttttccgcggcggcgatcatcgcgcgccgaagcgcgagggcgagacgtgcgcgaaccctctgttggcgtcgacgttacggctcgtcgcgcgcgagggccccggcgtgctcgcccgcggccccctggcggagtcgctcgcggcggacgtcggcgaggcgggcgggattttgcgcgtctccgatttggcggcggcggaggcgagcgttcgcttcttcatgccgcttacgtctcgcgcgttcgggtacgagattcacggcatgccccccccctcgtccggcggcgcggccgtcgggcagattttacagtttttgtcccagtttccggagctctccctgggtcctccgttggcctccgcgggggcgttggggtggcacaggctcgcggaggcgtgtaagcacgcgttcgcgcttcgcatgaacctcggcgacccggggttccactggcccggggagaacctcacgggggcgattcgcgacatgctcgaccccgggttcaaccgcgcgctgatcgagtcgaggtacgacgacgatcgcacccagcccgacgcgagggcgtacggcgctcggtggaaccagctggacgattccgggacgacgcacgtcagcgtcgtggacggacgcggcgacgcggtggcgctgacgagcacgatcaacaccgcgttcgggagcaagttctactcgaaatccaccgggattttgctcaacaacgagatggacgacttcagctcgccgggggaggcgaacaactacggcctcgcgccgtcggaggcgaactacatcgaaccgcacaagaggccgctctcgagcatgtcgccgaccatcgtcacgaggaggggcgcgagatcgagcgcgaacagagacgcggaggaggaggaggcggg

SEQ ID NO: 236027 - DNA, 486 bp, Unknown
  Bacterial polypeptide expressing nucleotide sequence isolated from the Sargasso Sea
attgagtaaaataattgatttaaacagcttaatagaattttataaaaaagcttactttccgatggctgatagtaagtattctgaagaaataaaattttataaacccaaattaagatttattattccaatttcaaattttcattatcctaagaaactatttagtgaatttaaaaaaacaaaatatagttttaaaattgatcaaaattttgcaaaagttatagagttatgcaaggaaattaaaagaaaagatcaggatacttggattaatgaaattattctaaatacatatattgaattacataaaataggtaagtgtcacagtgtagaatgttatgaagatgataatctaattgggggtttatacggattacatataggatcatgtttttttggtgaaagcatgtttagtttaaagactaatacaagtaagttttgtctactttatttattggcaatattgaaaaaaaataatttttccattttaga

SEQ ID NO: 236028 - DNA, 376 bp, Unknown
  Bacterial polypeptide expressing nucleotide sequence isolated from the Sargasso Sea
aaatacttacattaaattatatgaattgggcaaatgtcatagtattgaatgctacgaaaatgacgaactaattggtggtttatatggattgcatattggatcatgtttttttggagaaagtatgtttagtttaaaaactaatacaagtaaatattgtttactttatttgctcgcaatacttaaaaaaaataatttttctcttctagactctcaattctataatcatcatcttttacaatttggagcacttgaaatagaaagttcattatatgaaaataaacttataaatagtttagaaaaagagagtttttttaaaaacatagataattttcaggaagttttatcattaatacaatctaatagccaaaggtcataa

SEQ ID NO: 236029 - DNA, 613 bp, Unknown
  Bacterial polypeptide expressing nucleotide sequence isolated from the Sargasso Sea
ttgagtaaaataattgatttaaacagcttaatagaattttataaaaaagcttactttccgatggctgatagtaagtattctaaagaaataaaattttataaacccaaattaagatttatcattccaatttcaaattttcattatccaaaaaaactttttagtgagtttaaaaaaacaaaatatagttttaaaattgatcaaaattttgcaaaagttatagagttatgcaaagagattaaaagaaaagatcaagatacttggattaatgaaattattttaaatacatatattgaattacataaaagagataaatgtcacagtgtagaatgttatgaagatgataatctaattggtggtttatacggtttacatataggatcatgtttttttggtgaaagcatgtttagtttaaagaccaatactagtaagttttgtctactttatttattggcaatattgaaaaaaaataatttttccgttttagattcacagtttttcaatcctcatttagttcagtttggagcgtatgagatagaaaatgaaatttatgaaaataaactaaaagaaagtttagaaattgaaagtttttttaaagaagttaataattttcaag

SEQ ID NO: 236030 - DNA, 457 bp, Unknown
  Bacterial polypeptide expressing nucleotide sequence isolated from the Sargasso Sea
attgagtaaaataattaatttaaacagcttaatagaattttataaaaaagcttactttccaatggctgataataagtattctgaagaaataaaattttataaacccaacttaagatttattattccaatttcaaattttcattatccaaaaaaactttttagtgaatttaaaaaaactaaatatatcttcagaatagatcaaaaattttcaaaagttattgagttatgtaaagaagttaaaagaaaagatcaagatacttggattaatgaaattatattggatacatacattgaattacataaaataggcaagtgtcacagtgtagaatgttatgaagatgataatctaattggtggtttatacggtttacatataggatcatgtttttttggtgaaagcatgtttagtttaaagaccaatacaagtaagttttgtctactttatttattggcaata

SEQ ID NO: 236031 - DNA, 364 bp, Unknown
  Bacterial polypeptide expressing nucleotide sequence isolated from the Sargasso Sea
tatgtatgagctaggaaatgattacaaattcccttccccaaaattggcaactaatgaaggtattgttgcaatcggtggagacctaaaccctttaagaatattagaagcctataaaaatggtattttcccatggtttaatgatgatgaaaatttaatttggtggagtccagatccaagaatggtactttttcctgaaaaaatcaagctttcaaaaagctttagatcctttttaaaaaaaaaagaataccgtgttagtttcaatgaaaattttgaaagtgttattgaatcatgttcaaatattaaaagagttggtcaaaaaaggtacttggattacaagtggactaaaaaaatcttttatcaaact

SEQ ID NO: 236032 - DNA, 604 bp, Unknown
  Bacterial polypeptide expressing nucleotide sequence isolated from the Sargasso Sea
tctgcttttaggctacaccctaggtatcttcccaatggcaaacagtgctgatgacgatagcgtcatgtgggtatctcctaaaagaagagggataattccactagaaaacttacatatctcaaaaagtttaagaagaaagcttagatcaaagaaataccatagcacttttaataaagatttttttaaggtcgttagtcactgcagaaatagaaaagaaacgtggataaataatatattggtggataaatatatagaacttcacaaaaataaatttgctcactctgtagaaatttggctagctgaggaattagttggaggcctatttggcgtaagcattggcgcatgtttttttggtgaaagtatgttttcccttaaaaatgacggctccaaacttgcactagtttctatcataaaccgattgaaaagttccggatacaaactatttgatactcagttttttactccacatttgggaagtatggggggaatagaaatttctaaaacaaaatatgaaaaaattcttaaggccaatataacaaagaatgtcaaatttcagcacgatgattatgacaaagaatttctatttgctcctaaaaagaattag

SEQ ID NO: 236033 - DNA, 388 bp, Unknown
  Bacterial polypeptide expressing nucleotide sequence isolated from the Sargasso Sea
gaaattattttggatacatatatttgaattacataaaataggcaaatgtcacagtgtagaatgttatgaagatgataatctaataggtggtttatacggtttacatataggatcatgtttttttggtgaaagcatgtttagttttaagaccaatacaagtaagttttgtctactttatttattggcaatattaaaaaaaaataatttttccattttagattcacagtttttcaatcctcatttagttcaatttggagcatatgagatagaaactgaagtttatgaaaataaattaaaagaaagtttagaaattgaaagtatttttaaggaaattaataattttcaagaagtcttatcattactacaatcaactaaccaaagatcataa

SEQ ID NO: 236034 - DNA, 679 bp, Unknown
  Bacterial polypeptide expressing nucleotide sequence isolated from the Sargasso Sea
atgaaatataatgaaactattaattttgaaccaataagtactaataatattattttggcatataaaaatggtatatttcctatggctgaaaatgaagacagcccagatatattttgggtagagccaaaaaaaagaggtattatagatataaaaggtattagtattaatagaaaactaaaaaaattaatcaaacaaaacatctatgatgtaagaataaatactaattttacaaaagttattgaaggttgtgcaaaaaaaagtcctaaaagaaaaactacatggattaacggtagtattatagatgcgtatatcaaattacaccaaaaaggttatgcacattctattgaatgttattcgaataatattttaattggaggattgtatggtgtatctattgggtcaattttttttggagaaagtatgtttagtaataaagatggtgctagtaaaatagctcttttgcatttattagaaagattaaaagtaggtaaatatattgttttggatacacaatttataactaatcatttgaaattttttggagctaaggaaatttcacaaaagaaatttttacaaattttaaaaattgccttagagagcaaaggaagtttttttgaaattgataaaaataatactgtagaaaataaaaaatacccaatattagaaaattttacttagg

SEQ ID NO: 236035 - DNA, 655 bp, Unknown
  Bacterial polypeptide expressing nucleotide sequence isolated from the Sargasso Sea
ttgagtaaaataattgatttaaacagcttaatagaattttataaaaaagcttacttcccgatggctgatagtaagtattccgaagaaataaaattttataaaccaaaattaagatttattattccaatttcaaattttcattatccaaagaaactttttagtgagtttaaaaaaacaaaatataattttaaaattgatcaaaattttgcaaaagttatagagttttgcaaagagattaaaagaaaagatcaagatacttggattaatgaaattattttggatacatatattgaattacataaaataggtaaatgtcacagtgtagaatgttatgaagaggataatctaattggtggtttatacggtttacatataggatcatgtttttttggtgaaagcatgtttagtttaaagaccaatacaagtaagttttgtttactttatttattagcaatattaaaaaaaaataatttttccattttagattcacagtttttcaatcctcatttagttcagtttggagcgtatgagatagaaaatgaaatttatgaaaataaattaaaagaaagtttagaaattgaaagtatttttaaggaaattaataattttcaagaagtcttatcattactacaatcaactaaccaaagatcataaa

SEQ ID NO: 236036 - DNA, 418 bp, Unknown
  Bacterial polypeptide expressing nucleotide sequence isolated from the Sargasso Sea
gatgatcgtacgattaaacaacgacgtcgtcgcgtttccaaatggtaggatttcttccgaaaaaccagaaggattactcgccgtaggcggcaaattaacccccgaatggttactcactgcctatcgccaaggcatattcccctggtttaatgatgatgaggccgaagcgctatggtggtgtcccgctcaaagagcggtcataaatcctggcgaaatgagaatcccgagaagcctgagaagaacaattaaaaaccacaattacgagatcaaggccgaccaacgatttaaagaagttatttggcagtgcgcgaatactcggggacaggcaaatggcacctggatcactgagcagatgatcagagcttactgcttgctccatgagctaggattcgcacactcaattgaggtttacgaggaa

SEQ ID NO: 236037 - DNA, 676 bp, Unknown
  Bacterial polypeptide expressing nucleotide sequence isolated from the Sargasso Sea
tttcccaatccagaatatgcattagtttctccagacggcctactagctgtgggtggtgacttgagcctagctcgcctttgcaatgcttatactaatgggatatttccttggtttagcgataacgaacctattatgtggtggtcaccaagtgaacgtggcattgtggagttaaatgagtttcatgttagtaaaagtttacgtaagcacctaaaaaaataccccgtaacagtgacagttaataacgcctttgttgaagtcattgaagcatgccgtgaccaacgcattgataccgacggtacttggatcactactgatatgcttagtgcttacataaatgctcatcatgcaggcgtagcgcatagcttagaggtgtggcgcaacggagagcttgcaggtggactgtatggaattatgcaaaatggtgtgttttgtggcgaatcgatgtttcatcatcaaactaattgttctaaattagctatgtgggcgcttgtgaattggttaaaataccatgacgctcattttattgattgccaactcgaaaacccatatttgatgagtttgggagcaaaagttattcctcgaactgattttttagctaaacttaacactgcacttacctataaagttaatcctactatgtgggaaccacaggaacttattgcaatctatgaatgaa

SEQ ID NO: 236038 - DNA, 445 bp, Unknown
  Bacterial polypeptide expressing nucleotide sequence isolated from the Sargasso Sea
attgagtaaaataattgatttaaacagcttaataaaattttataaaaaagcttactttccgatggctgatagtaagcattctgaagaaataaaattttataaacccaaactaagatttatcattccaatttcaaattttcattatccaaagaaactttatagtgagtttaaaaaaacaaaatatacttttaaaattgataaaaatttttcaaaagttatcgagttatgtaaagaaattaaaagaaaagataaagatacttggattaatgaaattattttagatacatatattgaattacataaaataggtaaatgtcacagtgtagaatgttatgaagatgataatctaattggtggtttatatggtttgcatataggatcatgtttttttggtgaaagcatgtttagtttaaagaccaatacaagtaaagttttgtttacttta

SEQ ID NO: 236039 - DNA, 536 bp, Unknown
  Bacterial polypeptide expressing nucleotide sequence isolated from the Sargasso Sea
attgagtaaaataattgatttaaacagcttaatagaattttataaaaaagcttactttccgatggctgatagtaagtattctgaagaaataaaattttataaacccaaattaagatttatcattccaatttcaaattttcattatccaaagaaactttttagtgagtttaaaaaaacaaaatatagttttaaaattaatcaaaattttgcaaaagttattgagttatgcaaagaaattaaaagaaaagatcaagatacttggattaatgaaattattttagatacatatattgaattacataaaataggtaaatgtcacagtgtagaatgttatgaagatgataatataattggaggtctatacggtttacatataggatcatgtttttttggtgaaagcatgtttagtttaaagaccaatacaagtaagttttgtctactttatttgttagcaatattaaaaaaaaataatttttccattttagattcacagttttttaatcctcatttagttcagtttggagcttatgagatag

SEQ ID NO: 236040 - DNA, 354 bp, Unknown
  Bacterial polypeptide expressing nucleotide sequence isolated from the Sargasso Sea
aaataggtaaatgtcacagtgtagaatgttatgaagaggataatctaattggtggtttatatggtttacatataggatcatgtttttttggtgaaagcatgtttagtttaaagaccaatacaagtaagttttgtttactttatttattagcaatattaaaaaaaaataatttttccattttagattcacagtttttcaatcctcatttagttcagtttggagcgtatgagatagaaactaaaatttatgaaaataaattaaaagaaagtttagagattgaaagtatttttaagcaaattaataattttcaagaagtcttatcattactacaatcaactaaccaaagatcataaa

SEQ ID NO: 236041 - DNA, 724 bp, Unknown
  Bacterial polypeptide expressing nucleotide sequence isolated from the Sargasso Sea
aatgaaagatgatgtcacagaaactgaaaatagattttattgcgtcagggaacaaatattcacaacgtctttcccacccaccaacagagcactcaacgaaccagacggactcctagcaataggcggacaagtcgatgttaacaacttactagaagcttacagaaaagggatctttccttggtattcaatgaagaatcccgtaatgtggtggagtcctaaactcaggccagttttaaggccaaacgcaattaagataagcaaaagtctcaaaaaaacaatcaaaaaaaatcgctttgacctatcttatgacaagtgtttcaagagaattatggaacactgtgcgaccaacggcgagagagctggcaactcttggattactgccaagatgattgaagcatacgttgatctacataggctaggacacgcgcattcggttgagtgctggcgaaatggagaactctgcggaggattatacggagtaagtatagggagggtgttctacggcgaatccatgttctccagccaacctgacgcttctaaggtcgctctagtggatttatgctccaagttaaatagttggggttatttagttattgactgccaaattccctctccacacttaagtcgcttaggagcagagctagttgaaaggacacaatttgaaaaaataatttctcaaaatattgatagacctccgtcagcaaacgcatggaaaggatcttag

SEQ ID NO: 236042 - DNA, 545 bp, Unknown
  Bacterial polypeptide expressing nucleotide sequence isolated from the Sargasso Sea
gtggagtcccgaccctcggttggtgcttattccggaagacctgaaggtttccagaagtctccggaaaaccttccgaaaagaaatcttcacttaccgtatcaactcggcctttgaccgagtgatcgatgcatgcgcagaaactcggctttcaaggggggatggaacatggatcacggaagacatgaaaaaagcttatggaaggcttcagcgtaaaggatacgcaatgtctttcgagagttgggctgacggtgaattggccggcggactctacggagtgaggattggaaagtgtttcttcggggaatcgatgttcagcaagcgcaatgatgcttcaaagtgcgctttggtcagcctcgtccgttatgcagaaaaaaacgggattcggctgatcgattgccagatgcgaaccgatcacctgatccgtatgggagcccatgagatcccaagacaagtttatcttcaacaactgaaaagactggtcccaagatacactcaaaaaagggaccgttacgaatacaactcgaggccggcactggcttcctgat

SEQ ID NO: 236043 - DNA, 523 bp, Unknown
  Bacterial polypeptide expressing nucleotide sequence isolated from the Sargasso Sea
cgcggattttcatgtaccacggcgtttacggcgaacggtgcgaaatggcaacttcgacgtcacctgcaacacggattttgccaaagtagtcgccatgtgcgccgagaccaccccagaccgcacggacacatggatcaatccttctattgaatgtgcagtcaacgaattgcaccgcatgggctttgcccactgcgtcgaatgccgacaaaacggggaattggttggcggcatatacggcatctccctcggggcggcattttttggcgagagcatgttctcccgagcccgggacgctagcaaggtcgcgttggtctatctcgtagcgcgccttaaatttagcggctatcgtctattagatacgcagttcatcactgaccatctggcgcagttcggtgccatcgaaattcccgcccgagactacttgtatgagctcgaagatgcattgaagtaccaggcagcgtttccggacgtcgtcaaaggtgatcgctggacggaatgccttcgccaaactctctttaattaa

SEQ ID NO: 236044 - DNA, 289 bp, Unknown
  Bacterial polypeptide expressing nucleotide sequence isolated from the Sargasso Sea
catggttccctggctcggacctgacgatccgtttccttccgtcgagcgcgcgctcggcgcggcaagcggcgcacccggcctgctcgccgcgagcggcgacctgctgccgtcgcggctgatcgacgcctatcggcgcggcatcttcccgtggtactcggacggccagccggtcttgtggtggagtcccgatccgcgcatgatcctgcgccccgccgaattcaaggtgtcgccgtcgctgcgcaagacgctcaaacgcgtgctgcgcgaagacacctgggaaatccgcgtc

SEQ ID NO: 236045 - DNA, 435 bp, Unknown
  Bacterial polypeptide expressing nucleotide sequence isolated from the Sargasso Sea
aggaagtgattaaaatgtgtgctgagagacccgaaacatggattaatcatgacatactgacaaattattgccttttacaccaaagcggccatgcccattgccttgaagtttggtccgacaaaaaactaattggaggtatctacggcgtatcgattggagcagtatttttcggtgaaagtatgttttcaaaaaaaaataatgcatctaagatagcacttgcctatttagtagatagattgaaagcaacaggctttaaactttttgatactcaatttttaacaccacatctggccagcctgggtgccgttgaaattccaaagacaaagtacaaagttttgttattccaagcagtggaaagaaccgcaaatttcaatgcaaaggactattcacccgatgtatcagccatagcacaacgaagagcccaaacatcataac

SEQ ID NO: 236046 - DNA, 601 bp, Unknown
  Bacterial polypeptide expressing nucleotide sequence isolated from the Sargasso Sea
tttccgatggctgatagtaagtattctgaagaaataaaattttataaacccaaattaagatttatcattccaatttcaaattttcgttatccaaaaaaactttttagtgaatttaaaaaaacaaaatatagttttaaaattgatcaaaatttttcaaaagttatagagttatgcaaagaaattaaaagaaaagatcaagatacttggattaatgaaattattttagatacatatattgaattacataaaataggtaaatgtcacagtgtagaatgttatgaagatgataatttaattggtggtttatacggtttacatataggatcatgtttttttggtgaaagcatgtttagtttaaaaaccaatacaagtaagttttgtctactttatttattggcaatcttgaaaaaaaataatttttctattttagattcacagttttttaatcctcatttagttcaatttggagcgtatgagatagaaactgaaatttatgaaaataaactaaaagaaagtttagagattgaaaattgttttaaggaagttaataattttcaagaagtcttatcattactacaatcaactaaccaaagatcataaa

SEQ ID NO: 236047 - DNA, 184 bp, Unknown
  Bacterial polypeptide expressing nucleotide sequence isolated from the Sargasso Sea
gatgatcgtacgattaaattacgacgtcgtcgcattccccgatggtagattttcttctaacgacccagacggattactcgccgtcggcggcaaattaacccctgaatggctactcactgcctatcgccaaggcatattcccctggtttaataatgatgagaccgaagcgctatggtggtgccct

SEQ ID NO: 236048 - DNA, 637 bp, Unknown
  Bacterial polypeptide expressing nucleotide sequence isolated from the Sargasso Sea
aatgccggaaatcacacctgacttgctgctcaaagcctattcaattggcgtgtttccgatggctgaagaccatgatgatccagaaattttttgggtcgatccgcgcatgcgaggcattcttccgcttgaccggtttcacgtaccgcgccgcttgagacgtactgtgcgatctagtatctacaaagtcaccgtgaatgccgacttcaatgcagtgatagagggatgtgccaaaacggtaaacgataggccacaaacctggatcaacaccaaaattatcgacctatatacgagccttcattatatggggtacgcacattcccttgaatgttggcgaaacggggaattagccggtggcctctatggcgtaatacttggcggtgtcttctttggtgaaagtatgttttcacgccagcgcgacgcgagcaaagtggcgttagtacatttaatttatcgcatgcacgctggtaattttgctttcgtagatactcaatttataaccaaacatcttagtcaattcggtgccatcgagattccacgccaagaatatatagatatgctcaaaaaaggattgaaactgccttccaatttcaaagcgcccatttctaagcaaataatcgaatcggtacttcagaactaa

SEQ ID NO: 236049 - DNA, 673 bp, Unknown
  Bacterial polypeptide expressing nucleotide sequence isolated from the Sargasso Sea
tatggaaaacaaaaataagaaactaaacacagaacttgttcttaatgcctatagagctggtcttttccctatggccgaaaatagcaataccagtgagatattctgggttgatccagaagttagaggtataattccactagataagttccatatttctagatccctaaaaaagttgctaagaaaaaaaccttatagcattaagtttaattataattttgagcaggtaatacaagcctgcgctgaacagtcagagcaaagaaatgaaacttggataaatcaaacgatcattgctgcttattctgagctctttaaacaaaaatgtgcccatacagttgaatgctgggtagatggagcacttgctggcggtttgtacggattaacaatagggggcgcattttttggagaaagcatgttttcaaaaagaccaaatgcgagcaaaattgcattggtctacctagtagataggttatttgagagagactttgttttgttggatactcagtttttaactcaacacctaaaaaactttggtgccatcgaagtaaaaagagaaaaatatattaaacttcttaacagcgcagtttcactagatagatcttttcatggccgagggacctttgatgaagactctggattaagccgcattttacaatctaacacccaaacatcataa

SEQ ID NO: 236050 - DNA, 266 bp, Unknown
  Bacterial polypeptide expressing nucleotide sequence isolated from the Sargasso Sea
gcaacggaaacttactggaggattatatgggattgctatgggaaaaatattttttggtgaatctatgtttagtagtgaatctgatgcatcaaagattgcgctagtttatctcgctagaaaacttgaagatatggaatttaaactaattgattgccaggtaaattcaccccatatacaaacccttggcgcaaaacttattgcgcgggaaaaatttacaaccattttggacaaacactgtaattacgataaaactctattcacttaaa

SEQ ID NO: 236051 - DNA, 379 bp, Unknown
  Bacterial polypeptide expressing nucleotide sequence isolated from the Sargasso Sea
tttaaattcatacataaatttatatcataacaaaatatgtcatagcatcgaatgctatgatgaaaacaatttaataggagggctatatggcgttcatattggtggatgtttttttggagagagcatgtttagtaaagtttctaatacaagtaaattttgcttactttatttaatagctattcttaaaaaaaatttattttcaattcttgactctcaattttataataaacatctcctccaatttggagcttttgaaatggataataaagattatttaaatagactgaaaataggacttgaacaaaaaagaaattttatttttattaatgattttcaagaagtattatcattaacacaacctattaaccacaaatcataa

SEQ ID NO: 236052 - DNA, 655 bp, Unknown
  Bacterial polypeptide expressing nucleotide sequence isolated from the Sargasso Sea
ttgagtaaaataattgatttaaatagcttaatagaattttataaaaaagcttactttccaatggctgatagtaagtactctgaagaaataaaattttataagccaaaacttagattcattattccaatttctaattttcaatatcctaaaaaactatttaatgagtttaaaaaaacaaaatatagttttaaaattgatcaagattttgcaaaagttatagagttatgcaaagaaattaaaagaaaagatcaagatacttggattaatgaaattattttagatacatatattgaattacataaaataggtaaatgtcacagtgtagaatgttatgaagatgataatctaattggtggtttatacggtttacatataggatcatgtttttttggtgaaagcatgtttagtttaaagaccaatacaagtaagttttgtctactttatttattggcaatattgaaaaaaaataatttttctattttagattcacagtttttcaatcctcatttagttcagtttggagcgtatgagatggaaactgaaatttatgaaaataaactaaaagaaagtttagagattgaaagtttttttaaggaagttaataattttcaagaagtcttatcgttactacaatcaactaaccaaagatcataaa

SEQ ID NO: 236053 - DNA, 655 bp, Unknown
  Bacterial polypeptide expressing nucleotide sequence isolated from the Sargasso Sea
ttgagtaaaataattgatttagacagcttaatagaattttataaaaaagcttactttccgatggctgatagtaagtattctgaagaaataaaattttataaacccagactaagatttatcattccaatttcaaattttcattatccaaaaaaactttttagtgagtttaaaaaaacaaaatatagttttaaaattgatcaaaattttgcaaaagttatagagttatgcaaagagatcaaaagaaaagatcaagatacttggattaatgaaattattttagatacatatattgaattacataaaattggtaaatgtcacagtgtagaatgttatgaagatgataatctaattggtggtttatatggtttacatataggatcatgtttttttggtgaaagtatgtttagtttaaaaaccaatacaagtaagttttgtctactttatttattagcaatattgaaaaaaaataatttttccattttagattcacagtttttcaatcctcatttagttcagtttggagcatatgagatagaaactgaaatttatgaaaataaactaaaagaaagtttagagattgaaagttattttaaggaagttaataattttcaagaagtcttatcgttactacaatcaactaaccaaagatcataaa

SEQ ID NO: 236054 - DNA, 535 bp, Unknown
  Bacterial polypeptide expressing nucleotide sequence isolated from the Sargasso Sea
ttgaataaaataattccacatcaaaacttaattaaattttataaaaaaggcctcttccctatggcagaaaaactatcaagtgaagttgttaatctttatcagccaaaaaaacgttttttaattccaataaataattttcatgtgccaaaaaaattatttaaattatttaaaaaaaataattatatatatagggtaaataataattttgaaaaagttatttctcaatgccaaattgtgaatagaaaagataatggaacttggataaatgatattattctgaatacttacattaatttatatcgctataatttctgtcatagtgttgaatgttatgatgaaaataaattagttggagggttatatggagtacatattggtagctgtttctttggagaaagtatgtttagtaatgtatctaatgcaagtaaattctgtttactttatttaattgctattcttaaaaagaacttattttcaattcttgactctcaattttacaataagcacttaattcaatttggagcttatgaaatta

SEQ ID NO: 236055 - DNA, 529 bp, Unknown
  Bacterial polypeptide expressing nucleotide sequence isolated from the Sargasso Sea
attgagtaagttaattgcacctcataatttaataaacttttataaaaagggtttatttccaatggcggaaagttcaacaagtgaaaatattaatattttacagcccaatagaagatttttaataccaattaatacttttcatgtaccaaaaaaattactaaaattatttaaaagaaataattatatttttaaaatggataatgattttaaaaatgtaatttctcagtgcaaattaatcaatagaaaagataatgatacttggatcaataatactattttaaattcatatattaatttatatcactataaaatatgtcacagcattgagtgttatgaaaataagcagttagttggcggattgtacggagttcacattggcggatgtttctttggagaaagtatgtttagtaaagtttctaatgcaagtaaattttgcttactttatttaattgctattcttaaaaaaaacttattctcaattttagactctcaattttataataatcatctagtccaatttggtgcatag

SEQ ID NO: 236056 - DNA, 337 bp, Unknown
  Bacterial polypeptide expressing nucleotide sequence isolated from the Sargasso Sea
agcctataatgaactacatctagaaggctatgcacattctgttgaaagctggcttaatggggaactggtaggcggtctgtatggaatttcattaggacaatgtttttttggtgagtcaatgttcagtaccgtaagcgattcttctaaagctgctttggtcgcacttgcagaattctcaatgcaagttggaataaaaattattgattgccaaatgactacaaaacatcttttaagtttaggagcaagagaaattaatcggcaatcatttttgaggaaacttaatcaatgctttgaaaaacctgatataaaaggatcatggaatggaagaggaaactaa

SEQ ID NO: 236057 - DNA, 664 bp, Unknown
  Bacterial polypeptide expressing nucleotide sequence isolated from the Sargasso Sea
gatggatgagatcaatccagagaccttactccgcgcctatgcgtatggtgtttttcccatgggggaggcccgcggctctgacacgctctattgggttgatccggaacttcgcggcatcctccccctcgacaccttccacgtcccacggcgccttgcacgcaccatcaaagctgaaccgtttaccattaaggtcgactcagcttttcgctctgtgatggaagcctgcgcagcagatatgccgggccgtggtggcacctggatcaatgcggcaatcctcaaagcctattcagagctccacgaacagggacacacgcattctgtggaatgctggcaaggtagtcagctcgttggcggtctatatggcgtttcgctcggacgtgcattttttggggaaagtatgttcagccacgtgcgggatgcaagcaaggtggcgcttgtgcatctggcggcgcggctgatccagggcggttacgtattgctggacacacaattcgttacgtcccacctctcgcaatttggcgcgatagaaattccgcgcgacgactataaatcccgtcttgcagatgctctcaccggcgaaccaggcgatttttactcaatcgaggcggggggtagagacgtttctgctgctgacattttgcagtcgatcaaccagacatcatag

SEQ ID NO: 236058 - DNA, 520 bp, Unknown
  Bacterial polypeptide expressing nucleotide sequence isolated from the Sargasso Sea
ctgaccgaccccgatttcagcgccagtgggcctttcggcggtttcggccccgaggacctgctggcctgttacgcccggggcgtgtttccgatggccgaggcgcgcgatgacccgcgcgtcttcatcatcgagccggaacagcggggcgtcataccgctggacgccttccacatccccagccgactgcgtcgcactgtgcggggcgagccattcgaggtgcgggtcgacaccgccttcgaagcggtgctggacggctgtgcggcggcgcaagggccggatcgcgaagacacctggatcaacggcccgatccggcggctgtacgccgctctgttcaccatgggcttcgtccattccatcgagtgctggcgtgaagagcggctggtcggcgggctttatggcgtgtcgctgggcggtgccttcttcggcgagagtatgttcagccgcgagcgggacgcctccaaggtcgctctggtgcatctggtcgcgcgcctgcgacagggcggctggaccctgtggacgc

SEQ ID NO: 236059 - DNA, 550 bp, Unknown
  Bacterial polypeptide expressing nucleotide sequence isolated from the Sargasso Sea
aaaaaaacgtttcataattcctatagaaaactttcatgtgccaaaaaaattattaaaattatttaaaaacaatccttatacttttaaaattaactatgattttaaaaatgttatttctaaatgtcaattggctgtcagaaaaaataatgggacttggataaataatataattttaaacacttacataaatttacactatcaaaaaatagcacatagcattgagtgttacgatcaaaatcaattagttggaggattgtatggtgttcatataggtggatgtttttttggtgaaagtatgtttagtgatttaacaaatgcaagcaaattttgcttactttatttaattgctattcttaaaaaaaacctattttcaatacttgactctcaattttataatgaacacttaatacaatttggtgcttttgaaataagcaataaaaattatttggaaaagttaaaagtaagtttaaattataatagacattttacttatatagaagattttcaagaagttttatcattactacaacctaataaccataaatcataa

SEQ ID NO: 236060 - DNA, 629 bp, Unknown
  Bacterial polypeptide expressing nucleotide sequence isolated from the Sargasso Sea
gagagtcaatgctctcttgagtgcctatcgttctggtttgttcccgatggggaaagcccgcgagagcaccgagattttttggatgaatccagacttacgaggaattattccactatcgcgggttgcccctgttcgttctcttcggcgggctttgcgtaatgctccatataccatcactgttgatataaattttaggcaagtgatagcaatgtgtgcggaagttaccccggaccggcccgagacctggataagcccagaaataattaagtggtatactgatttacacgttgaggggtatgcgcactcagtggaatgttggaaaaataatcgtttggtaggcggcctctatggtgtgtcaatcggtgcagcatttttcggggaaagtatgttcagtcgagaaactaatgctagtaaagtagcgttagctcatctcgtccaccgcttaaccaaagggggttacatgttgctagatgtacaatttgtgacagagcacttgagccggcttggggctatagaaattactcgagtacagtaccatgagtatttagcagacgcgcttcgtgaaacgggtgagtttcattcaattagttcgactggaggtaaggattcaatttgtacctctggttgaa

SEQ ID NO: 236061 - DNA, 607 bp, Unknown
  Bacterial polypeptide expressing nucleotide sequence isolated from the Sargasso Sea
tatgtttccaatggcagaaacgtgtttaagtaaagaaatatattggatagaaccaaaaaaaagagggattttctattttaataaaataagaattccaaaaaaatttaagaggtttttaaaaaaaaataactttaaaatagccatagacaacaattttgaacaagttattaataattgcgcaaaattaaatagtactagaaaagatacatggattaatagcactattaagaaaatctatatagatatgcacaataatggcttagcacattcagtagaatgttatttaaataaagagttagttgggggattatatggtataaaaataggtaaaattttttttggagaaagtatgtttagttttgtctcaaatgcatctaaagtaacactcattcatttattagagagactaaaaatagggggctttaaaattttagacacacagtttataaatgaacatttaaagcagtttggagcattagaggtgtctaataaagaatttaaaagtattattgaaaaaaatatcaataaaaaagcgaacttttacttttattcacaaaagggtttcttgccaaatcacttatatcctttaaaaaaaaatattatttag

SEQ ID NO: 236062 - DNA, 637 bp, Unknown
  Bacterial polypeptide expressing nucleotide sequence isolated from the Sargasso Sea
atgcccgacctcacgccggacatgttgttgcgcgcctacagtatcggcgtgtttccgatggcggaggaccgggacgacccggagttggtttgggtcgacccgcgaatgcgcggcattattccgatgagcaagttccacgtaccgcggcgtttacgccgaacggttcggaacgacactttcgaagtcactttcgacagagattttgccggcatcattgaaggttgcgcggaagccacggaaggacgtccccgcacgtggattaatagccgaatcgtcgacctctacacatccctgcacttcaaaggtcacggccatagtgtcgaatgttggcaggacggagatttggtcggcggtttgtacggtatttcgctgaaaggtgtcttttttggcgaaagcatgttcagccgcgcaacagatgcaagtaaggttgcactcgtccacctcgcggcgaaactgagtgcgggcggttacgcgttcatcgacacgcagttcatcaccaagcaccttagccgcttcggggccatcgaagtgccaagaaatgagtaccgcggcttgctcgcggcggcgctcaagatcgattcagagttcggcgtggactatgactcgggggacctcgaggcgatcctccagcaataag

SEQ ID NO: 236063 - DNA, 652 bp, Unknown
  Bacterial polypeptide expressing nucleotide sequence isolated from the Sargasso Sea
catgcctgtttatcagcttatacctgatattactttattccctcctacagaggaagctgaagctgatgggttattagcagttggaggtgatttaacaaaagaacgattgctttcagcataccggcagggtatttttccttggtatgaaattggacagcctatcttgtggtggtgtcctgaccctcgtctggtcttgtttccggatgagctaaaaatatcccgaagcttacgcaaagttctacgaaaaaaagagttcgaaattcgtttcgattcaacatttgaaaacgtaatcaaagcctgtgctgacgtcagaaccaaacaaggcaaaggaacatggataatccctgaaatgcaactagcctatactgaattacatcaggaaggctatgcacattctgttgaaagctggcttaatggggagctggtaggtggcctgtacggaatatcactaggacaatgtttttttggggagtcaatgttcagcactgttaacgattcttctaaagccgcattagtcgcacttgccgaattttccaaacaggtagggataaaaataattgattgtcaaatgaagacacaacatctcttaaatttaggcgcacgtgaaattgatcggcaatcatttttgagaaaaattaaatcaataccttga

SEQ ID NO: 236064 - DNA, 535 bp, Unknown
  Bacterial polypeptide expressing nucleotide sequence isolated from the Sargasso Sea
aatgattaataacctcaagcataattacatcaaaattgattataaaaatattttagatgcttatagtcacgggatatttcctatggcagaaagtattgacagtttagatgtattttgggttaaacctaaaaaaagaggagttattgacccttatagaataaatattagaaaaaaacttaaaagatttattaataaaaagccttttaacataaaagtagataatgattttattggagttatagaaggttgcgctgaaatcactaatgttagagaaaatacatggattaatcctagtataagagacgtttttattgagttacattataaaggttatgctcatagtatagaatgctattctaataataatttagtaggaggtttatatggagtagcaattggaggaatattttttggggagagtatgtttagtagaatgcaaaatgccagtaaagtagcattgctacatttaattgatagattaaaagttggaaatttcttgttgttagatacacaatttataactgatcatctaaaa

SEQ ID NO: 236065 - DNA, 529 bp, Unknown
  Bacterial polypeptide expressing nucleotide sequence isolated from the Sargasso Sea
gcggggcataatccccatacgccgatttcatgtacccaaacggttacgccgcaccgttcgcaacggcgtcttcaaagtcaccttcaacgaggacttcaccggcgtgatagagggctgcgccaaagaaaccattggtcgtccgagaacttggatcaacgaccgcatcgtcgatctgtatacatcgctgcacttcaagggacacggacatagtgtcgaatgtaggcgggacggcgaacttgtgggcggtctctacggcatttcgctgagaggggtcttctttggtgaaagtatgttcagccgcgagaccgacgccagcaaaattgccctcgtccatctggcaacgcgtctgagcgtgggcggattcgcattcatagacacccagttcatcacaaagcatctgagccgatttggcgccattgaggtgccgagaaacaaatatcgcgggatgctcgccgccgctctcaaaattgatgcggactttgacgtcgcgttcggtgacgaagaccttgaagccactttgcggcagtaa

SEQ ID NO: 236066 - DNA, 634 bp, Unknown
  Bacterial polypeptide expressing nucleotide sequence isolated from the Sargasso Sea
atggcgcaaagctatgtttatgcacccgaaacaatcataaaagcgtattcactgggccttttccctatggcagagagccgtaacagcgcagatattcgcttttatgatcctgatatacgcggcctgatcccgcttgataactcgctaggagacgggcttcatgttccgcgacgtctccaacgccgtgtccggcaacatccctatgacataacttttgatcaggattttgcggcggttattaccgcctgcgctgcgcgcagttcgaaacgccccaacacttggatcaacgcagatatacgtaagctttatattgccctgcataaaatgggatttgctcattcggtcgaagtctggcacgagggcgatttggttggtggtctttacggggtgcggttacgtgcggccttttttggcgagtcaatgttttcgcgccaaaccgatgcgtcaaaaattgcactggtgcatctaatggctcgcttatattgtggcggttttcagcttttggatgcgcaatttagcaacgaacatctaaaacaatttggtgtgatagacgtgccgcgtaatgaatttcaacgacgcctaggtgacgcattggcggcagaatcagacctccatcttgccgcgccaagcctgc

SEQ ID NO: 236067 - DNA, 583 bp, Unknown
  Bacterial polypeptide expressing nucleotide sequence isolated from the Sargasso Sea
catgcctgtttatcagcttatccctgatgtcactttatttccacctgtagaagaagctgatgctgatggtttattggctgttggaggtgatttaacaaaaaaacgattgctagcggcatatcgacaagggatttttccttggtacgaagttggacagcccatattatggtggtgcccagatcctcgtatggtcttgtttccggaagatcttagaatatccaggagtttaggcaaagttctgcgtaaagatgagttcgaaattcgtttcgattcatcgtttgaaaatgtaatcaaagcctgtgctgaagtgagaactggacaaggcaaaggtacctggattattcctgaaatacagcaagcctatactgaacttcaccaggaaggctatgcgcattctgttgaaagctggcttaatggtgaactagtagggggcttgtacggaatttcattaggacaatgtttttttggggaatcaatgttcagtactgttaacgattcatctaaggtcgctttggtggcacttgcagaattttctaagcaggtgggaataaaaattattgattgtcaaatgagcacacaacat

SEQ ID NO: 236068 - DNA, 751 bp, Unknown
  Bacterial polypeptide expressing nucleotide sequence isolated from the Sargasso Sea
aatgacgcactccctgccctggctgcagcccgaacaagaattccctcccatcgatcagacctggggcgagcgggatcccattcccgggctgctggccgccggcaacaccctggatgctgcccgccttcgtaccgcttacagccagggaatcttcccctggttcagcgagggccagcccgtgctctggtggtcccccaatccacgcatggctctgcatcccgaggagttccgcctgcaccgcagcctgcgcaagagactgcagaagtttcgcgacgatccaggctgcgaaatccgcatcgacagcgcttttgccacggtgatgcagcattgcgcccagaccccccgcgacggacagaacggcacctggatcgtgcagagcatcatcgatgcctataccgaactgcatcagcagggggctgcacacagcgtggaaacctggatcgacggccagctggtcggcgggctttactgcgtagcgctgggcagggcggtgtttggcgaatccatgttcgcactgcagaccgatgcctccaagattgcactgtcggcactggtggccctgtgcagggctcatcaggtgccgcagatcgactgccagcaggccacggcgcacctttccttcatgggcgcacgagagatcaccagggcacaatttgcccggactgttcaagcccagtcgcagctgcccgatatgcagtggcaattcagacccatatactgggagcagttgctgagccatactgaggcttga

SEQ ID NO: 236069 - DNA, 766 bp, Unknown
  Bacterial polypeptide expressing nucleotide sequence isolated from the Sargasso Sea
atggtcccctggctcggcccggacgatccgtttccgcccatcgagcgcgcgctcggtcccgcgaccggcgcgccggggctgctcgccgcgagtgccgacctgctgccatcgcgcctcatcgacgcatacctgcgcggcatcttcccgtggtattcggacggccagcccgtgctgtggtggagccccgacccgcgcatgatcctcgtgccggcggaattcaaggtatcgccttcgctgcgcaagacgctgaagcgcgtgctgcgcgagcccgaatgggaagtgcgcgtcgaccacgactttccgggtgtcatgcgcgcgtgcgcgcaggcgccgcggcgcgggcagcgcggcacgtggatcacggccgaaatcatcgacgcgtacacgtcgctctaccgctccggcaacgcgcacagcatcgagacttggcacgacgggcggcgcgtcggcggcctgtacggcgtgtcgttcgggcggatgtttttcggcgaatcgatgtatgcggacgcgaccgatgcgtcgaaaatcgcgctggccacgctcgtcgcccaccttcgcgagcaggggctggaaatgatagactgccagcagaatacgtcgcatctagcgtcgctcggcggccgcgagatcgcacgcaaggcctttgtcgctcacgtgcgcagcgcggtagccgaaccgccgattccgtggcagttcgacaagcgcgtgctcgccgcgctgacgagccgcgccggaacggcggccccctccggaatcgagcgctagc

SEQ ID NO: 236070 - DNA, 655 bp, Unknown
  Bacterial polypeptide expressing nucleotide sequence isolated from the Sargasso Sea
ttgaataaaataattccacatcaaaacttaattaaatattataaaaaaggcttcttccctatggcagaaaaattatcaagtgaagttgttaatctttatcagccaaaaaaacgttttttaattccaataaataattttcatgtgccaaaaaaattatttaaattatttaaaaaaaataattatatatttagggtaaataataattttgaaaaagttatttctcaatgccaaattgttaatagaaaagataatggaacttggataaatgatattattttgaatacttatattaatttatatcactataagttctgtcatagcgttgaatgttatgatgaaaataaattagttggagggttatatggagtccatattggtagttgtttctttggagaaagtatgtttagcaatgtatctaattcaagtaaattttgtttgctttatttaattgctattctgaaaaagaacttattttcaattcttgactctcaattttacaataagcacttaattcaatttggagcttatgaaatcaataataaaaattaccttgagaaactgaaaaatggagtttctcatgagagaagttttatttttattgaagattttcaggaagttttatcattactacatcctaatagccacaaatcataaa

SEQ ID NO: 236071 - DNA, 646 bp, Unknown
  Bacterial polypeptide expressing nucleotide sequence isolated from the Sargasso Sea
atgttaagccctgacatacttttacgtgcttacgccgttggattgtttcccatggctgagcatcatgacgaatcagctctttattggatcgacccggaaaaacgcggaatactgccaattgaacgtttccgcattcctaggcgtctcagaaaaactgtgcgccagaaccgttttcgaattcaatgtgatacagcttttgaggatgtaattcggctatgcgcaaaaccgacgaaagagagaaaagatacgtggataaatcaagaaattatacaactttatataaatctttttgaaattggccgtgcccacagcgtagaggcttggttaaatggtaaattagtcggtggtttgtatggggttgctttaggtggtgcttttttcggtgaaagcatgtttagtcgagctgacgatgctagtaaagtcgccctggttcacttggttgctcgcttaaaattgggtggctttactttgctagatacacagtttgttactaatcacctcaatcaatttggcgctgcagaaattcaccgtagcggctatagacacctactatcatcagctctcgacaaaagtgctttttttaaacaggaaattgatcatcgagaaattttagattttatacagtcaacaacccatatatcataaa

SEQ ID NO: 236072 - DNA, 631 bp, Unknown
  Bacterial polypeptide expressing nucleotide sequence isolated from the Sargasso Sea
ttggcgataggcggcgatctccgtcctgaacgtttattgaccgcctattatcacggcattttcccttggtttaacgccgacgatcccattttgtggtggtcaccggatccccgcgccatttttattccaggccaagtgactatcagcaccagtttacggaaatatttaaaaaagcagccctggcgtttcaccatcaaccatgcctttaccgatgtaatggcgggttgtgctcaacctcggcgtaaacaagccggcacttggataacccatgaaattcaaatggcttatcgcgagttacaccataatggccatgcccattccgtcgaggtctggcacggcgagcgtttaattggcggcctttatggcattgccatcggccaagtcttttgtggggagtccatgttccatcgcgaaactaatgcatccaaggcggccatggcggtgttgcaacagcatctcatcaaaatgaattttaaactgattgacgctcaggtgatgaatccccaccttgagagcttaggggccaaaccggtgaagcgcgctgattttattcaactcttaactcagtttagggataagtcagtcaatcctgcggcttggataccgagtgaggtcacacttgaactctaac

SEQ ID NO: 236073 - DNA, 655 bp, Unknown
  Bacterial polypeptide expressing nucleotide sequence isolated from the Sargasso Sea
attgagtaaaattattccatcagaagagttagttaatttttataaaaaaggttttttcccaatggctgaaagcgccacaagtaaattagtaaatttataccaaccaaagaaaagatttttaattcctataaataattttcatattccaaaaaaattatttaaattatttaaaaaaaatatttataattttaggataaatactgcttttgaaaatgttatttttcaatgtcaaagagcaaacagaaacaaagatggcacatggataaatgaaattattttacatacttatataaatttatataaaaataatttttgtcatagtgtcgaatgctataaagaaggcaaattagttggtggtttatatggagttcatataggaagttgtttctttggagaaagtatgtttagcagtttgcctaataccagtaagttttgtttaatttatttaattgcaattctaaaaaaaaatttattttcaattcttgactctcaattttacaatcatcatctaatccaatttggagcctttgagattagcaataaagattatttaagtattttaaaaaaaaaccttgataagcaaagaaaatttacttttattgatgattttcaagaagttttatcattattacaatccaataaccataaatcataa

SEQ ID NO: 236074 - DNA, 436 bp, Unknown
  Bacterial polypeptide expressing nucleotide sequence isolated from the Sargasso Sea
cttggcgaaaagctatgtgtatgcacccgaaacaatcataaaagcctatgcgctgggactgtttcccatggctgaaagccataacagcgcagagattcatttttatgatccagatatgcgcggcctgatcccgattgataactcgctagcaaatgggcttcacattccgcgccgtctaaaacgccgtgtccggcaaaacccttatgatatcaccattgatcaggattttgccgcggtcattgccgcctgcgccgcacgcagttcgacccgcaccgacacttggatcaacgcagatatacgtcagctctatattgccttgcataaaatgggatttgcccattcggttgaagtctggcacgagggcgatttggttggcggtctttatggggtgcgattaagagcggccttttttggcgagtcgatgttttcgcgccaa

SEQ ID NO: 236075 - DNA, 586 bp, Unknown
  Bacterial polypeptide expressing nucleotide sequence isolated from the Sargasso Sea
ctggttagacaagaactcaaaagaaaagctttagtggttaacacaactaacaattacatagatactcaagaaatgttaagggcatacagatcaggaatttttccgatggctattggtaaagaatccaattcaatttcgtggattaggccaattaagcgaggaattattccgattggctatcttcacatatcaagaagtacaaaaaaatttattagaaaaactgaagtaaaatcaagtattaacacatgttttaaggacattttaaagaattgtgctaaccgagaagatacttggattaataaaccaatatacgaatcttacatacgcttatatgaacttggatacgcccactcggttgaaatctgggagggaagtgcattagctggcggcctgtttggaataagtattggctcgtgtttttttggcgaaagcatgttttcgctaagacctaacgggtccaagcttgccttgatatttactatggcaagcctaatttatagtggatataagctctttgacgtacaattcctgacagatcacttaaaaaccatgggtgcgaaagaaattaataacgaagaatatcaaa

SEQ ID NO: 236076 - DNA, 683 bp, Unknown
  Bacterial polypeptide expressing nucleotide sequence isolated from the Sargasso Sea
tatgaacacaattagtctcttgcctaaaggaaaaccagttttccctgaatatgagtttgctctcaaagaaccagacggattaattgccgcaggagggttgctagatgttgaatggttaaaagaggcttacaccagaggaatattcccttggtttaattccgacgacgaggagatcctttggtggtgcccctctgaaagagccattctctatccaggagagatgcacgtaagtcgtagcttaagaaaagtgctcaaaagagatctatttcatatcgcctatgaccataattttaagggggtactggaaaattgtagccggagaaacgataggtacgaaggcacctggataacagagtctatgaagaatgcctacaacgaaatgcatatagcagggctagctcactctgttgaagtcactctagagggagaactcgtcggaggtgtatatggggtttcgctaggatctatgttttttggcgaatccatgttctctagagtcgacaatgcctcgaaagtcgcgttgtactatctacagaaaaagctctatgaatggagcttcacattgatagactgtcaaattatgaaccctcatttgcaatctcttggtgccgtaactattactagagcagaatttatagacttgcttaaatcaaacaataagaaacgcactagagctggcagct

SEQ ID NO: 236077 - DNA, 700 bp, Unknown
  Bacterial polypeptide expressing nucleotide sequence isolated from the Sargasso Sea
tcttttctgaatcacgaatttgaagcttttccttcgcccgaactcgccctaaccgatccaaacggtttattggcgataggcggtgaccttcgccctgaacgtttattgaccgcctattatcacggcattttcccttggtttaacgccgacgatcccattttgtggtggtcaccggatccccgcgccatttttattcctggccaagtgaatatcagcaccagtttacggaaatatttaaaaaaacagccctggcgtttcaccatcaaccatgcctttaccgatgtcatggcgggttgtgctcaacctcggcgtaaacaagccggcacttggataacccatgaaattcaaatggcttatcgcgagttgcaccataatagccatgcccattccgttgaggtctggcacggcgagcgtttaattggcggcctttatggcattgccatcggccaagtcttttgtggggaatccatgttccatcgcgaaactaacgcatccaaggcggccatggcggtgttgcaacagcatctcatcaaaatgcattttaaactgattgacgcgcaagtgatgaatccccaccttgagagcttaggggccaaaccggtgaagcgcgctgattttattcaactcttaactcagtttagggataagccagtcaatcctgcggcttggataccgagtgaggtcacacttgaactctaac

SEQ ID NO: 236078 - DNA, 730 bp, Unknown
  Bacterial polypeptide expressing nucleotide sequence isolated from the Sargasso Sea
gttgtcaattcattatcttaatcccaacgttatagctttccctgacgtcgacgatgcgcttgcgaatccaaatgggttgttagccgcgggtggaaacttatcgaagagttggttaattgccgcgtaccggcagggaatatttccgtggtatgaagatggccaaccaattctatggtggtcacctgatccaagaatgagtttgataccagataactttagaatgtctcgtagcctgcgaaaactggtaaaaaaaagaatatatagggtgtcttttgatcaggattttattggtgtgataaatgggtgtagaaataatgttagaaaatctcacggaacctggatcacaaacgaaatggttaacgcctacactgagttgtatgattcggggatagctcattcagttgaagtttggtcttcaagaaagctagtcggaggtctttacggcgtttcacttggtaagatattctttggtgagtctatgtttagtgcagttgataacgcttcaaaaattgccctactttacttaacggtacatttgaaagattgggcttacaagctcattgactgtcaagttgatagtgatcatttagaaagtctgggagcatctaaaatttctaggtccgagtttctggatattataaataaatatactactaaggaagagaacgaagaaaactggtatgttgaggaacgcttgatacaggaaaaaataaacgatcatggtcaatga

SEQ ID NO: 236079 - DNA, 713 bp, Unknown
  Bacterial polypeptide expressing nucleotide sequence isolated from the Sargasso Sea
tatgatagcgttacattacatcgaagaaggcgcgcccttccctccagtcgacactgcattagacgaacctaacggcctgctagcatttggtggcgacctcagtcctgcacgtttattttctgcctactcacagggcattttcccttggttcagtgatgacgaaccgctgttgtggtggtcacccgaccccagagccattattgaactcgataattttgccgcatcgaaaagccttaagaagcttgctcgaaaacaaaaatacacggtaacgttgaattacgcgttcgaccgtgtaattgaagcctgttcatcaacccctcgtaaaaacccaaacacaggtgaactcaatagcgaaacatggattaccgatgacatgattggggcttaccggcagctcaatggtctgggtttagcgcactctgtggaagtttgggacggcgaaacacttgtgggtggactatatggcgttggaattggcaaggtatattgcggtgaatcgatgtttcaccgggaaagtaatacatcaaaacttgctatgatggcgttggttgagcacatgaagtctcacgatatggcctttattgattgccagcttcctaccgatcatttgacatcccttggtgcgaatgtgttatcccgtgaaaactttattgaaaaactggaaaacaacaaccacactttaactgaagacggtaggctgtcagaagactacc

SEQ ID NO: 236080 - DNA, 697 bp, Unknown
  Bacterial polypeptide expressing nucleotide sequence isolated from the Sargasso Sea
ctggagccggaggaactctggttccctccggccgacgaagcactggacgatccggacggtcttctcgccgtgggtggcgacctgtcccggagccggctcctgctggcttaccggaacggcatcttcccctggttcagtgacgaccagcccattctctggtggtctcctaacccccgttgcgtcctgtttccggacgaagtccacgtgtcccgcagcctgcgccgcaccctgaaccagcaccggttcgaggttaccgcagaccgatgcttcagccgcatcatccggttgtgtgccaccacccgcgccgaaggcacctggattaccgacgacatgatccaggcctataccgacctgcaccggcacggcaccgcacactccatcgaagtctggaaccgcaacggcgaactggccgggggcatgtacggccttgccctggggcgttgcttcttcggtgaatccatgttttccctggaaaccaatgcttccaaggttttgatggtgcacctggcccgtcagctggcacaatggggctacagactgatggattgccaggtcgagagcgaccatctgctcagcatgggagcgcgaactattcccagggacgagtttttatctatactcgggaagtacgtggatcaaaaaccggaaaaggaagactgggccttcaactggcgctggcccgggccggaggaatgaa

SEQ ID NO: 236081 - DNA, 608 bp, Unknown
  Bacterial polypeptide expressing nucleotide sequence isolated from the Sargasso Sea
gatggatttccaaaagttatccgaaaaagtttactggcctgctaccggaaactggcaagattttttccctgcctctaatctgtcacttgaagagccgaacggtctcttagcaataggagggaacctttctccagagacattggtcgcggcgtactcgagagggatattcccttggttttccgttgggcagccaataatgtggtggtctccaaaccctcgaactatcttatatccagaaagtctatacgtttcgaaacgtctggcacgttacattaggaaaaaaatcttcacggtcacgttcgacaccgcctgtgctcgagtaatcgaaggttgccgccagctaagaaaaggacaggatgggacgtggataactaaacaaatgtatcaagcgtactcggaccttcattcgctgggttacgtacactccgtagaatgctgggacggtaaacttttggtcggaggcttatatggcgttgctctaggccgtgtatttttcgcagagtctatgtttcaccgggctaacaacgcctctcaaattgcgctggccaaattgtgtgaggccttaatccaatggaattattttattctggattgccaatttctcactc

SEQ ID NO: 236082 - DNA, 682 bp, Unknown
  Bacterial polypeptide expressing nucleotide sequence isolated from the Sargasso Sea
atgctcacctggctgcaacgtgactcactgcagttcccgccattggctaaagccatgcgcgagcctaatggcctgctggccgctggcggcgatctgagcgccgaccgcctgatcagtgcctatcgacatggctgctttccctggtttcaggatggccagccaattctctggtggtcgcccgatccgcgcaacgttctgctccctgatgagctgcatgtttcccgcagcctggccaaactgctgcgccagcagcgttatcgcgtcaccttcgaccaggacttcgccgccgtcatacaggcctgcgccgagccacgcgcctacgccgatgggacctggattacccgcggcatgcagcaggcttacctgcagctgcatcagcgcggtatcgcccactccgtggaggtctggagcggggacgaactggtcggcgggctttacggcctggccatcggccagctgtttttcggtgaatccatgttcagtcgtgccgacaatgcatccaaggtcggtttcgccaccttggtcggcaagctgcgagactggggcttcgtcctcatcgactgccagatgcctacacagcacctgcacagcttcggcgccagggctataccgcgcgccagcttcgccgaataccttaagtgtcacctcgatctgcccaccggagcagattggctcgcctagt

SEQ ID NO: 236083 - DNA, 703 bp, Unknown
  Bacterial polypeptide expressing nucleotide sequence isolated from the Sargasso Sea
ctgtcttttctgaatcacgaatttgaagcttttccttcacccgaactcgccctcaccgatccaaacggcttattggcgataggtggtgacctacgcccagagcgtttgttgaccgcctattatcacggcattttcccttggtttaacgccgaggatcctattttatggtggtcacccgatccccgcgccatttttattccaggccaagtgaatatcagcaccagtttacgtaaatatttaaaaaaacagccttggcgctataccatcaatcatgcctttaccgatgtgatggcaggttgtgctcaacctcggcgtaaacaaactggcacttggataacccatgaaatccaaatggcctaccgtgagctacaccataatggccatgcccactcaatcgaagtttggcacggtgagcgattaatcggtgggctttatggtctcgccattggccaagtgttttgtggtgaatccatgttccaccgcgaaaccaatgcgtcaaaggcggccatggcggtgttgcaacaacatttaatcaaaatgaattttaaacttattgatgcacaggtaatgaatccccaccttgagagcttaggggcaaaacccgttaaacgcgcgaactttatacaactcttaacccagtttagggataacacggttaatcctgcagcttggataccaagtgaggtcacacttgaactctaac

SEQ ID NO: 236084 - DNA, 703 bp, Unknown
  Bacterial polypeptide expressing nucleotide sequence isolated from the Sargasso Sea
actgtcttttctgaatcacgaatttgaagcttttccttcgcccgaactcgccctaaccgatccaaacggtttattggcgataggcggtgaccttcgccctgaacgtttattgaccgcctattatcacggcattttcccttggtttaacgccgacgatcccattttgtggtggtcaccggatccccgcgccatttttattcctggccaagtgaatatcagcaccagtttacggaaatatttaaaaaaacagccctggcgtttcaccatcaaccatgcctttaccgatgtcatggcgggttgtgctcaacctcggcgtaaacaagccggcacttggataacccatgaaattcaaatggcttatcgcgagttgcaccataatagccatgcccattccgttgaggtctggcacggcgagcgtttaattggcggcctttatggcattgccatcggccaagtcttttgtggggaatccatgttccatcgcgaaactaacgcatccaaggcggccatggcggtgttgcaacagcatctcatcaaaatgcattttaaactgattgacgcgcaagtgatgaatccccaccttgagagcttaggggccaaaccggtgaagcgcgctgattttattcaactcttaactcagtttagggataagccagtcaatcctgcggcttggataccgagtgaggtcacacttgaactctaa

SEQ ID NO: 236085 - DNA, 685 bp, Unknown
  Bacterial polypeptide expressing nucleotide sequence isolated from the Sargasso Sea
tctgccgatttttccctcagtttcacatgccagagaagatggtttgctggcagtcgggggagacctctcggaaatccgactcgtcgaagcatacagaaatgggatctttccatggtatgaagaaggtcagccgatactctggtggagtcccgacccccggttggtgctttatccggaaaacctgaagatttccagaagtctccggaaaacactacgaaaagaaatcttcacttcccgtatcgactcggcctttgaccgattgatcgatgcctgtgcagaaacacggctttcaaggggggatgggacatggatcacggaagacatgaaaaaagcttatggaaggcttcagcgtaaaggatacgcaatgtctttcgagagttgggctgacggtgaattggccggcggactctacggtgtgaagattggaaagtgtttcttcggggaatcgatgttcagcaagcgcaacgatgcttcaaagtgcgctttggtcagcctcgtccgttatgcagaaaaaaacgggattcggctgatcgattgccagatgcgaaccgaacacctgatccgtatgggagcccatgagatcccacgaaaagtttatcttcaacaactgaaaagactggtccctagatatactcaaaaaagggaccgttacgaatacaactcgaggccggcactggcttcctga

SEQ ID NO: 236086 - DNA, 703 bp, Unknown
  Bacterial polypeptide expressing nucleotide sequence isolated from the Sargasso Sea
cggcttgctggccgtcggcggagacctcgagcccaagaccctgctgtgcgcctatgcccaaggcatctttccctggttcgaatctgaccaggagattctgtggtggtcccccaatcctcggctgacgctgcgatccaacgcaatacacgtcagccgatcactgaaaaaagcgatccgccagtgcggctggcgactgcaatatgacaccgccttcgcgggcgtcgtgagtcactgcgcccatgccgatcgaaatcagcccgaggccggcacgtggatcacaccagacatgcacgctgcctattgcgcgcttcatgatctcggtgtcgcacactcggtagaggtctatgaaggggatacgctcatcggtggcttgtacggcattctgctcggcaacatgttttttggagagtccatgttctctctgcagtccaatgcctcgaagatggcctttgtggcgttagccaagctttgccgagatcacagcatcgaggtcatagactgtcaggtccacaatgagcacctcgtgtcgctcggtgcacaaacaatgccgcgtcaagactttgaaaatcacctgcgggacgctataaagacccccatgacagatgttttcgccaacccgctttgccttgcctccaatgagccgctgccgctggaacaaaggctcggtagcccactcgctgtcaccgtggctgaactgctatga

SEQ ID NO: 236087 - DNA, 739 bp, Unknown
  Bacterial polypeptide expressing nucleotide sequence isolated from the Sargasso Sea
aatggccttcatctatgaacctcgttaccttatgtctcgctatcttacccaattggatgatgagctgtgctggtttcccgaccccgagcatgccctggaggaacccaacggcctgctggcgatcggaggggatctctcccctgcccgcttgctggcagcttaccacaaggggatcttcccgtggaatgaaccccaccagccgctgctatggtggtcaccggatcccagaggcgtcatccggccggaacagctgcacatcggtcgcaccctgcgcaaatttatccgtagtacctcattcgatatttccatcgatcgcgcctttaatgaggttatagcggcctgcgccgcgccccgtcgcagtgccagtggaacctggattagcacacccatgatcgacgcctatcgacaattgcaccgccttggccatgcccactccatcgagatctggcaagagggccagttacaagccggcctctatggcctctccctcggccaggtgttctgcggcgagtccatgttcagtcgtatcgacaacggtgccaaactggccatggtggccctctgccgacacttcgcccgccatgatggcgccttgatcgattgccagatgcagaacgattttttggccaccctgggcatagaagagtggccgagacgccaatttttgacgacgctggcacaactgagccaacaaccgctggcggccaattgctggcaaacggggagcatccacttatga

SEQ ID NO: 236088 - DNA, 793 bp, Unknown
  Bacterial polypeptide expressing nucleotide sequence isolated from the Sargasso Sea
atgacagaagatattaaaaaaggtttattaggaattgttgttgacgaaacagaagtttctaaagtaatgccagaaattaattctcttacttaccgaggttacgctgcacaagatttatgtgcaaaatgtaaatttgaggaagttgcatatttaattctaaatggtgaactaccagataataaacagctaaaaagctttgaaaaaattgagagaaaagaaagaaaattatctaaatcgcttctggatagtattaaaaattttccaaaaaaatctcatcctatggatgtggcaagaacagcagtaagcattatgggtctcgaggataaagaaactaaagataattcacctaaagccaatatgagaaaagtcatgagaatttttgcaaaaacaccaactgctttagcggcattttatagactgagaaaaggtaaaaaaattataagccccaaaagcaatctatcattttcagaaaatttcttttacatgtgttttggagaagtcccgaacaaagagatagtaaaagcatttgacgtatcattaattttatatgctgagcatagtttcaacgtgtcaacttttacagctagaactattacaagtagtttatcagatattcatggtgcaattaccggtgccatagctagtttaaaagggccattacatggcggtgctaacgaagaagtgatgcacatgatgaataaaatcaagaaaccagaaaacgcacttaaatggattaataacgctttagacaaaaaatcagtagtaatgggttttggccacagaagtttataaa

SEQ ID NO: 236089 - DNA, 869 bp, Unknown
  Bacterial polypeptide expressing nucleotide sequence isolated from the Sargasso Sea
catgactaaaaaactagagggcgcaggtttaagaggacaggttgctggagaaacttcgctgtcaactgttggtcaaattgaggggcttgcctataggggtcataaaatcgaattgcttgcagaaaagtcttcttttgaagaagtcgcttatcttttgctttacgataaacttccgaatcaagcagaactagatgattataagaaactacttaagagtcaaagagaccttcctgattcactaaaacaagttcttcaaaaaattccttcgtcagctcatccaatggacgtaatgcgaacaggtacatcgatgttaggtaatttagaacctgaaggagagttttctaatcagttaaattctataaataggatgattgcaacaatgccatcgattgttacttattggtataaatactctcatgagggtctagatattgatcttgtgaatgatgaagatagtatggccggtcattttttacatattcttcatggaaaaacaccttcagatttgcatagaaaagtaatggatgtttctctaatcttgtatgccgaacatgaatttaatgcctctacttttacagcaagggtttgcgcatcaactatgtcagatattcattcatgcgttgtagctgctattggttctttaagaggacctcttcatggcggagcaaatgaaaaagcaatggagttaattgaaaactggacctcaaaagaagaagcaaaagcaaaaattatcgagatgcttgggaacaaagaaaaaataatgggatttggtcatgctgtttattcaataagagatcctagaaacgctgtaataaaggaatatgcaaaagaattatctgagttggctgaaaatgatactttatataaag

SEQ ID NO: 236090 - DNA, 784 bp, Unknown
  Bacterial polypeptide expressing nucleotide sequence isolated from the Sargasso Sea
tcgccaaaagcaaatatggaaaaggctatgagaatttttgcacaaacaccaacagcagttgcggcgtactctagagcacgtaaaggcaaaaaatttattcaaccaaataaaaaattatcatattcagaaaatttttttaatatgatgtttggaaaggtacttaataaagaaatagtaaaagcctttgacgtttctatgatattatatgctgagcatagctttaatgtttcaacttttacggcaagaacgattacaagtagtttatgtgatattcatggagcaataacaggtgatatagcaagtttaaagggtccattacatggaggggctaatgagggtgttatgtatatgtttaaacaaattagaaaacctgagaaagcagaaaaatggataaataatgctttagataaaaagaaagttgttatgggatttggtcatagagtttatagaagtggagattcaagagtgccgacaatgaaaaaatattttttaagagttgctgaattgaaaaaaaacactgcttatcctaaaatgtataatattttggaaaaaattatgctacaaagaaaaaatatacatccaaatgtagactatccttgtggtccaacttatcatttaatgggtattgatacagactttttcacaccaatatttgttatggctagaattactggttggtcagcccatattattgaacagcacgctgcaaacaaacttataaggcctttatctaaatataaaggaagtgaacatagagaagtactgtctcttaatattagataga

SEQ ID NO: 236091 - DNA, 874 bp, Unknown
  Bacterial polypeptide expressing nucleotide sequence isolated from the Sargasso Sea
aatgtcagacaaaatatacatttttgatactactttacgtgatggtgcacagacacaaggggttgatttttccttggatgataaagaaaaaatttcattagcattagataatctaggtgttgactatatcgaaggtgggtggccaggagcaaatccaacagatacagaattttttaataaaaaacattcttttaaaaattcaatattaactgcttttggaatgactaagaagtctgatcatagtgctgaaaatgatccaatgatttcagcattaataaattctaaagcaaattcaatttgtttgtttggaaaatcttgggatttccatgttgatgttgctttaggcatttcaaaagaacaaaatttaaaaaatattagtgaaagcgcaaaacacattattaaatctagaaaagaatttatgtttgatgccgaacatttttttgatggatataaatcaaataaagaatatgctttaagttgtataaagtctgcatacgaccaaggagccagatggattatactttgcgatactaacggtggaacactacctcatgaaatatctaaaattgttgcagatgtagaaaaacatatcccaggtaaaaatttaggtattcacgcacataacgatacagaaaatgcagtagctaattcattagttgcaattcaagctggtgttagacaagtgcagggaactattaatggtttaggagaaagatgtggtaatgccaatttaatgtcactaatcccgtctttatatttaaaacatgaattttctaataattatgaaataaatataaatgagaagaatattaaacatttaacacaatgctctagactaatagatgaaattttaaatagaaaaccaaataaacat

SEQ ID NO: 236092 - DNA, 697 bp, Unknown
  Bacterial polypeptide expressing nucleotide sequence isolated from the Sargasso Sea
aatgagtgaagaaattaaaaaaggtttacttggtatagttgttgatgaaactgaagtttcgaaagtaatgcctgaaataaattctctaacttatagaggatatgcagctcaagatttgtgtgaatattgtagatttgaagaagttgcttatctaattttgaataaagatttacctaactcaattgaattaaaaaaatttgaaagggaagagagggataatcgtgagttatctaaaaatctttatgaaatagttaaaaatatgccaaaaaaatcacatccaatggatgttgcaagaactgcggtaagtgcaatgggattagaagataaggaaactcaagattcttctccagaggctaacatgagaaaggcgttaagaatttttgcaaaaactcctactgcattagctgctttctatagaataagaaaaggcaaaaaagttattaaaccaaagagagatttaacttttgccgaaaactttttttatatgtgttttggaaaagtccctcaaaaagaaatagttaaagcttttgatgtatctttaattttgtatgctgagcatagttttaatgtctcaccgtttactgccagaactattactagtagcttatcagatattcatggtgcaattactggagctatagctagcttgaaaggtccattgcatgggggagcgaacgaagaagttatgcatatgatg

SEQ ID NO: 236093 - DNA, 776 bp, Unknown
  Bacterial polypeptide expressing nucleotide sequence isolated from the Sargasso Sea
aatgaacaaagaaaagatatttatttttgacaccacacttagagatggagctcaaacagaaggggttaatttttcgcttgatgataaaaataaaatagccaaagctttatcaagccttggtgttgattatttagaaggtggttggcctggagctaatactttggatacaactttttttaataaaccaccaaaattagaaaatacaattcttaccgcttttggtatgactaaaaaaactggaagaagtgcagaaaatgatcctggactttctgctcttcttaatacaaatgctcccgcaatttgtttggtaggtaaatcttgggattttcatgttgatgtagctttaggtattaccaaagaggaaaacttagaaaatatcaaagaatcagcaaaattatttgtaaaaaataagaaggaattcatgtttgatgctgaacatttttttgatggatttaaaaaaaatccagagtatgcgttatcttgcattaagacagcttttgacgagggagctcgatggattgtgctttgcgatacaaatggaggtactttacctaatgaaattggtgaaatagtttccaaagtaagcaaacaaatcccaggaaaaaatcttggaatacatgctcataacgatacagaaaatgcagttgcaaattctttaacagccattttagctggagctcgtcaggttcaaggcactattaatggacttggtgagagatgtggaaatgcaaatttaatatctttaataccatctttagttttaaaaaaatctttct

SEQ ID NO: 236094 - DNA, 796 bp, Unknown
  Bacterial polypeptide expressing nucleotide sequence isolated from the Sargasso Sea
aatgattaaagaaaaattatatatatttgatacaacattaagagatggagctcaaacacaaggtgttgatttttctattgatgataagctcaaaattgctcaagcattagataatcttggcgttgattatatcgaaggaggttggcctggggccaatcccactgatacagaattttttcaaaaaaaaattaattgcaaaaattctacaataactgcttttggtatgacaaaaaaaactggcagaagcgctgataacgatccaggtttatcagcattaattaatagcaatacaaaagcagtatgcgtagttggtaaatcatgggattttcatgttgatgttgctttaggtatttcaaacgaagaaaatctagaaaatattagcgaaagtacaaaactttttgttaaagaaaaaaaagaattcatgtttgatgcagaacatttttttgacggttataaagcaaatcccaaatatacactatcatgtctcaaggctgcttatgacaatggagctagatggatagttttgtgtgatacaaacggtggaacactaccacatgaagttacaaaaatagttaatgaagttgttaaagcaattccaggaaaaaatataggaattcacgcacataatgatactggaaatgcagtgtcaaatacattagctgcagtgctagctggtgttagacaagttcaaggaaccatcaatggattaggtgagagatgtggaaatgcaaatcttatgtcgttaataccaacattttatttaaaaaaagatttttcagataagtttgaaataaat

SEQ ID NO: 236095 - DNA, 772 bp, Unknown
  Bacterial polypeptide expressing nucleotide sequence isolated from the Sargasso Sea
aatgagtgatgatataaaaaaaggtctacttggaattgtagttgatgaaactgaagtttcaaaagtcatgcctgaaattaattctctcacttatagaggatacgctgctcaagatttgtgtgctaaatgtaaatttgaagaagtagcatatctaattctaaatggagagcttccaaataaaaaacaattaaaaaattttgaaaagcaagaaagaaaggagaggaaattatcaaaaactttgcttgaagatatcaaaaaatttccaaaaaaagctcatcccatggatgttgcaagaacagctgtaagtattatggggcttgaggataaggatactaaagacaactcaccaaaagctaatatgcgaaaggtaatgagaattttcgcaaaaacacctgttgctttagcggcgttttatagatctagaaaaggcaaaaaaattatatctcctaagaataatttatctttctcagaaaatttttttcatatgtgctttggcaaagttcccaacaaagatattgtaaaagcttttgatgtatctttaattctttatgccgaacatagttttaatgtctcaacttttacagcaagaacaattaccagtagtttatcagatatacatggtgcaattactggcgcaattgcaagtctaaaaggtcctttgcacggaggtgcaaatgaagaagtgatgcatatgatgaataaaattaaaaaacctgaaaatgcacttaaatggattaataaagcacttgataataaagatgttgttatggga

SEQ ID NO: 236096 - DNA, 822 bp, Unknown
  Bacterial polypeptide expressing nucleotide sequence isolated from the Sargasso Sea
tatgcttaattatctatcgtcaccttttagatggttttttaaattagaagcagcaagtggtctagtattgttattaagtgcaataattgcacttatagtaagtaattcttatttatcttcattatactttgaaactttagataaatatatttttgtaggattaaataatattggacttaaattatcagttttacactggattaatgatgtccttatggcaatattttttttctttgttactctagaaataaaaagagaattcttacaaggtgagctttctaatttaaagcaagcattactcccaataattgcggctgtaggtggcatgttggtaccagcattaatgtatgtttttataaattttggaaatatcgaaactttaaacggttgggcaataccatcagctactgatattgctttttcgcttggagttctatcattattaggctcaagagttcctatatcacttaaagtttttttaacagctctagctataattgatgatctcggagcaatagtaattatagctgttttttactcaggagatttaagtatatttaatttaggaatgatgtttttatcatttttaggactattaattctaaataaatttggaataaaaaagtttttaccttacttaatcatcggatttttcctttggcattttactcatgaatctggaatacatgcaacaatagctggtgttttgttagcttgtactatccctcatagaagaaaagaaaaggatttttcattattgataaaaattgagcactcaataagcccatatgtagcatttggaataatgcctctatttgcttt

SEQ ID NO: 236097 - DNA, 865 bp, Unknown
  Bacterial polypeptide expressing nucleotide sequence isolated from the Sargasso Sea
atgagtaaagaaaagatatttatttttgatactactcttagagatggcgcccaaacagaaggggtcaatttttctattgatgacaaaaataaaatagcaaaagctttatcaagtcttggggtagattatttagaaggtggttggcctggtgctaatactttagatacaactttttttagcaagccaccaaaactagaaaatacaattctaacagcatttggtatgacaaaaaaaactggaagaagtgcggaaaatgatcccggactttctgcattactcaatacaaatgctcctgcaatttgcctagtcggcaaatcatgggattttcatgttgatgtagccttaggtattaccaaggaagaaaatttaggaaatattaaagaatcagcaaaattatttattaaaaaaaaaagagaatttatgtttgacgctgaacatttttttgatggatataaaaaaaatccagagtatgccttatcttgtattaagacagctttcgacgagggagctcgatggattgttctttgcgatacaaatggaggaacattacctaatgaagtaggtgaaattgtttctgaagtaagcaaacatattccaggaaaaaatctcggtattcacgctcataatgacactgaaaatgctgtagcgaattcgttaacagctgtattggcaggcgttcgtcaagttcaaggtaccattaatggacttggtgaaagatgcggaaatgcaaatttaatatcattaattccatctctagtattaaaaaaatctttttctgataattttgaaattaaaataaataaagataaaattaaaaccttaactgagtgttcaagactattagatgaaatattaaataaaaaat

SEQ ID NO: 236098 - DNA, 574 bp, Unknown
  Bacterial polypeptide expressing nucleotide sequence isolated from the Sargasso Sea
aaatagattatcaataaagaaattctttccttatttaattttaggaatatttctttggttttttactcatgagtcaggtatacacgcaacgattgcgggtgtgttgcttgcatctttaatacctcatagaaaaaaagagcatgatttttcattattaataaaattagagcatgcaattagtccttatgtcgcttatttcataatgcctttgtttgcatttgcaaacgctggtgtctcgcttgagggtttgactttttcatctttattgctgccagttccattaggaatattactaggtttatttgtaggcaaacaagttggggtctttttgttctcatacgtgtctattaaatctggtcttgcatcacttccaaataattcaaattggttaagtttttatgctgttggtattcttactggaataggttttactatgagtttgtttgtaggtaacttggcatttgctcaaaacatggaatatatagatggtgttaaaataggtgttttaagtgggtcacttttatcaactgtattcggatattttttgttgttaatatcaacaaaaaataaatga

SEQ ID NO: 236099 - DNA, 694 bp, Unknown
  Bacterial polypeptide expressing nucleotide sequence isolated from the Sargasso Sea
aatgagtgaagaagtaaaaaaaggtttattaggaattgttgttgatgaaacagaagtttctaaagttatgcctgaaattaactcattaacctataggggttatgctgttcaagatctgtgtgaattttgtagatttgaagaagctgcatatcttattttaaagggtgatttaccaaacagtatagagttaagacaatttgaaaaaattgaacgaggacatagggatttatcgaaaaatctttacgaaataattaaacacatgccaaagaaatctcatcctatggatgtcgctagaacagcagtaagtgttatgggattagaagataaagaaactacagataattctcaggaagcaaacacaagaaaagctttaagaattttagctaaaactccaactgctttagcggctttttatagaattcgaaaaggtaaaaaaattattaaaccaaaaaaagagctaacttttgcagaaaactttttctatatgtgttttggaaaagtacctcaaaaggaaattgtaaaagcgtttgatgtatctttaattttatacgcagagcacagttttaatgtatcaacttttacagctagaactattacaagtagtttatctgatattcatggtgctataacaggcgcaattgctagttttaaaggaccattacatggtggagctaatgaagaagttatgcatatg

SEQ ID NO: 236100 - DNA, 922 bp, Unknown
  Bacterial polypeptide expressing nucleotide sequence isolated from the Sargasso Sea
tttgcgtacaaaaacaggccatattacactagacccaggatttgtaaatacaggtacatgtgaaagcgcaataacttaccttaatggagagaaagggattttacattatcggggttatccaattgatgaacttgctgaaaattccacatttatagaagtggcttatttgctgatacacggagaattacctaaccagaaacagcacaaagcttatgttgatcgcataagtaagcaggcgatgattcatgaagatatgaagcttttcttcgaaggatttgccaaaactgcacatcccatggtgattttgtcatctatggtatcttctctttcagcatattatactgaagcatcaggcaaagcttcaatagaaaatattgagattaattctgccagacttatagctaaaataagcacaattgcagcattttcttacaaaaaaagcgtaggccaaccatttgtctatccaaaagaagacctatcctattgtgaaaattttctaaatatgatgttttcagtgcctgctgaatcatatgaaatcgatcctgatgttttgaaatcctttgaattaatgctcatcttgcatgctgaccatgaacaaaactgtagtgcttcaactgtaagagttgttggtagcagcatggctaatgtatacgcctcagttgcatctggaattttagctttatggggtcctctgcatggaggtgcaaatcagcaggctgtacaaatgcttcaacaaatccatgaagatggatcaaatatttcaaaatacattgaatttgcaaaaaataagaataataagtttcgtttgatgggttttggccacagagtttataaaaattttgacccacgtgctaagataatgaaaaaagtttgccacaaattgcttaaaaaactagaagttaaagatccactacttcaaatt

SEQ ID NO: 236101 - DNA, 919 bp, Unknown
  Bacterial polypeptide expressing nucleotide sequence isolated from the Sargasso Sea
tctgtatcgtggattacgcgaagtttatattgaccgaaccacatcaagttttataaatggaaaagaaggtaaactttattatagaggttactctatagatgatttagctcagaattgtggttttgaagaaattagttatttagttatgatgggtgaattgcctacttcttctcaacttgaatctttttccaaagaattaaaatccaatatggaattacctaatgaaatactagatttaattagattggttaaagatgctcatcctatggatgtgttgcgaactgcaatttctgcgctttctggttttgattccgaagttgatgataattcatctgaagctaccctcagaaagggaactaagcttactgcccaagcacctactatagttgctgctcatgcgcgaataaggcaagatttagatcctattaatcctgaccctaatttaggtattgcggctaactttttatatatgttgtttggtactgttcctgatccagaagatgcaaaattaatagataaagattttgtattacatgccgaacatggattaaacgcttctgcttttggagctagagttgctgcctctactcaagctgatttacattgtgcagttactacaggtattgcagtacttaaaggtccatctcatggtggtgctgccgagtcagtaatgaccatgtctttggagatcggagatgaaagtaatgcagaaaaatacattaaagatactctcgcaggtggtgggagaattatgggttttgggcatagagtttacaaagctgtagaccctagatcattgcatttacaagatgatttaaaagctttaggagaacggaaaggtgagcctaaatggtattctattcttcaaaaagttcttgaagtaatgcaaccttactcaagaaaagggattgccaaaatg

SEQ ID NO: 236102 - DNA, 152 bp, Unknown
  Bacterial polypeptide expressing nucleotide sequence isolated from the Sargasso Sea
aatgcctgataaaaatagagtttatattttcgatacaacaatgcgagatggtgagcaatcaccaggagcatcaatgagtttggaagaaaaaattcaaatcgcaagagtgtttgatgagcttggtattgatattattgaagctggatttccaa

SEQ ID NO: 236103 - DNA, 724 bp, Unknown
  Bacterial polypeptide expressing nucleotide sequence isolated from the Sargasso Sea
atgagtgatgaagtaaaaaaaggtttattgggaatagttgtagacgaaactactatatctcaagttatgcctgatataaattcactcacttatagaggttacgctgtgcaagatctttgtgaaaaatgtagttttgaggaagttgcatatcttgtattaaatggagatcttccaaaaaaaaaagatcttaaagtttttaaaaaacaattagaagaaaacagaaatatatctattaatctaagagaaattgtcaaacatatgccaaaaaaagctcatccaatggatgtagcaagaacgatagttagcgtgttgggattagaagataaagaaacatcaaaaaacactcctagtgctaacatgagaaaaacaattagaatatttgctaaaacacctactgctatagctgctttttttcgagcaagaaaaggaaaaaaaattatttcacctaaaaaaaaattatctttctcagaaaattttttttatatgtgttttggcaaggtgccgagcaaagatattgtcaaagcctttgatgtttcattaattctttacgctgaacatagttttaatgtttcaacatttactgcaagaacaattactagcagcttatctgatattcatggggccattactggagcaattgctagtctaaaaggacctttgcatggtggagccaatgaagaggtaatgcatatgatgaataaaataaaaaaaccagcaaatgctt

SEQ ID NO: 236104 - DNA, 881 bp, Unknown
  Bacterial polypeptide expressing nucleotide sequence isolated from the Sargasso Sea
attaacaactttgcgcgcgagcacaaaagccattactttagacaatggctttatgaatacgggttcctgtcagtctgcaattacttttttgaatggtgagaaaggaattttgagatataggggttatcctatagagcaattagctgataattccaattttttagaagtttcttatcttcttaattatggcgaactacctagtaatgatcagctcaataagtttacaaatagtgttaaagaaaaagccgtattgccggacggagtaaagaatatcattgatcagtttccaaaagatgctcaccctatgggtgttatggccggagcaatggccgctttaagtggtttttatcctgagtcattgggcgaatgcaatgatgaaatgaaagaccaccttttcagccagcttttgggtcaagctaaggccatggcaagtcatttctttagaaggtctgtagggaaggatccagttgaccctgattcttcagtcgattactcctctgactttttacagatgatgttttctggagatggttttaaagttgatgaggatgtagcaagggccattgatgttttactcatcttacacgctgatcacgaacaaaattgctctgcttcgacagtaagagttgttggttcctctcaagcaaatgtttttgcatccataagtgcaggcataagtgctctttggggaccgcttcatggaggggccaatcaagcagttttagaaatgcttgaggcaattcaaaatgacggcggagaccataagaggtatttggaaaaagcgaaggataaaaacgatccttttagattgatggggtttggtcaccgggtctacaaaaattttgatcctagggccactataattaaaaaagcttgcgata

SEQ ID NO: 236105 - DNA, 917 bp, Unknown
  Bacterial polypeptide expressing nucleotide sequence isolated from the Sargasso Sea
acatgcaggagcgctttcatgggctgacttcgattttcatccgcacaatgattatggccttggagtggcaaatgcgatgtatgcggtcaaagccggaatccgctgcatccattgcacgatgaactgtcttggtgagagagcaggaaatgcatctctggctgaaatagcggtggtgcttaaagatcagcttgggtcagagctttctattgatgagactcacctttcaccggtctctgagatggtggagaacttttccgggaagaggttggcgcggaattcccccattgtcggtgaggatgtgtttacccagaccagtggaatccatgcggacggggatcgaaaaggagggttgtaccacaacccaatctatcccgaacgatttggtcgaaaccggagttatgctctcgggaaaatgagtggtaaagcctccctggtgaaaaatctggaattactggggattcaactggtggaggaaaatctgcagaaagttctccgaagaatcgttgaacttggagattcgaagaaaaccatcaccctcgcagaccttcctttcatcattactgatgtgctggaaactcatgaagagcagcggatcgaattactgaattgttccatatccagtgggctgaatcttaagtctgttgccagcatcaggatgatgttcgataaaaaggaacacaatgaaagtggaagcggaaatggaggttacgatgccttcatgagtgcgatcaaaaaaattcttaagaaacatcatctccagtgcccccaattgctggattaccagattcgaattccgcgtggtggacagaccgatgcactgacggaatcgatcattacctgggacatgaacggcaaacgggtacagactgtgggcatcgacccggatcaagttatggcggcagtgaacgcaaccttga

SEQ ID NO: 236106 - DNA, 940 bp, Unknown
  Bacterial polypeptide expressing nucleotide sequence isolated from the Sargasso Sea
gaaaagtcttcttttgaagaagttgcttatcttttgctttacgataaacttccaaatcaatcagaactagatgattataagaaactactgaagagtcaaagagaccttcctgattcactaaaacaagttcttcaaaaaattccttcgtcagctcatccaatggacgtaatgcgaacaggtacatctatgttaggtaatttagaacctgaaggagatttttctaatcagttaaattctataaacaggatgattgcaacaatgccttcaattgttacttattggtacaaatactctcatgaaggtttagatattgatcttgtaaatgatgaagatagtatggcaggtcattttttacatattcttcatggaaaaacaccttcagatttgcatagaaaagtaatggatgtttctctaattttgtatgctgaacatgaatttaatgcctctacttttacagcaagggtttgcgcatcaactatgtcagatattcattcatgcgttgtagctgctattggttctttaagaggacctcttcatggcggagcaaatgaaaaagcaatggagttaattgaaaactggacttcaaaagaagaagcaaaagcaaaaattatcgagatgcttgggaacaaagaaaaaataatgggatttggccatgctgtttattcaataagagatcctagaaatgctgtaattaaggaatatgcaaaagaattatctgagttggctgaaaatgatactttatataaagtagctgaagaggttgaaaaagttatggctgatgaaaagaaaatgtttgccaacgcagacttttttcatgcacctgcatatttctatatgggcatcccaacaaaactatttactccaatatttgtaatgtcaagagtatctggttggactgcgcattgcatggagcaaagagcaaacaatcgaatcatcagac

SEQ ID NO: 236107 - DNA, 696 bp, Unknown
  Bacterial polypeptide expressing nucleotide sequence isolated from the Sargasso Sea
aatgagtgatgatataaaaaaaggcttacttggaattgtagtggatgaaactgaagtttctaaagtaatgccagaaataaattctcttacttatagaggatatgctgctcaagatttatgtgaatattgtaggtttgaagaagttgcatacttaatattaaataaagatctacctaattctatagaactcaaacactttgaaaaagaggagagaaacaatagagaattaacgaaaaatttatatgaaattataaaacatatgccaaaaagatctcatccaatggatgtggctagaactgcagtcagtgtaatgggattagaggataaagaaactacagactcctctcctgaagcaaatatgagaaaagcattaagaatttttgctaaaactcctactgcattggcagctttttatagaattagaaaaggaaaaaaaattattaaaccaaagaaaaatttgacatttgcagaaaattttttctatatgtgctttggtaaagtaccacaaaaagaaattgttaaagcttttgatgtatctttaattttatatgctgaacatagctttaatgtttcaacttttacagcacgtacaattacgagtagcttatctgatatacatggagcaataaccggtgcaattgctagcttgaaaggtccacttcatggtggagccaatgaagaagtaatgcatatgat

SEQ ID NO: 236108 - DNA, 930 bp, Unknown
  Bacterial polypeptide expressing nucleotide sequence isolated from the Sargasso Sea
gaagcagccagtggtttaatattattgatcagtgcaataattgctctaattataagtaattcttcatattcaaacatttactttgaaactctaaaccaatatttatttattggtataaataattttggattaaaattaagcgttctccattggataaatgatgctttaatggcaatttttttcttttttgttaccttggaaattaaaagagaatttattcaaggcgagttatcgactataaaacaagcaattcttcctatagttggagcaattggtggaatgttaataccagcacttatatatatttacataaactttaatacacctggtactttaaatggctgggctataccttcggccacagacattgcattttcaattggtattctgtcattattgggttccagagttcctttgtccttaaaagtatttttaactgcactagctattattgatgatcttggtgccattataataattgcattcttttatactggtgatttaagcattcaatatttgggattaataatcattacttttataattctaattattttaaatagatttggcgtaaaaaattttttcccatatttgattgttggaatctttttgtggttttttactcacgagtccggaattcatgcaactatagcaggagttttacttgcttgttctatcccgcacagaaaaaaagaacatgatttttctttacttgttaaaattgaacattcaattagctcatatgtagcttttggcataatgcctctatttgcttttgcgaatgcaggtgtttctttaagtggattaacctttttatcattgttacaacctgttcctctaggaattttattaggtttatttataggtaaacaattaggagtttttgttttttcttatatttctatcaaactaggtttgcacaaatgccaa

SEQ ID NO: 236109 - DNA, 807 bp, Unknown
  Bacterial polypeptide expressing nucleotide sequence isolated from the Sargasso Sea
cctgtctgataaatcgagctttctagaggtctcttaccttgtggtaaatggaaaacttccttctgagtctgaattgagcagctttaagtcacagattaaagaaggctcggcaataccggaaggaattaaaagcattatcaagtcttttccaaaagatgcgcacccgatgggaataacttctgctgcaatggttgctctttctggattttatccagagtttctagatcaggatttaactgatgatcaaaagaaaaaaattgttccgatgcttatggggcagcttaaaacaattagtgctgcagtctatagacatgggcaaggtaaagacttagttgattctgattctagtcttgattatacatctgattttctttatatgatgactggtgagaaaccgaaccctgaagttgctaaggccttagatgttcttcttatccttcatgctgatcacgagcaaaattgtagtgcttcaactgtaagggttgttggttctagtaaagcaaatctttttgcatcactctctgctggtattgatgccctttggggacctttgcatggcggtgcaaaccaagctgttcttgaaatgcttgaagcgattcaaaatgacggtggaggctatgaaaaatttatctctaaggccaaagataaagaagatccttttagattgatgggctttggacatagagtatataaaaactttgatcctagagcgaaagttattaaaaagtattgtgatgaagttttagaaaagctaaatacgcaagatccacttttagcgattgccaaaggtcttgagacgacagctct

SEQ ID NO: 236110 - DNA, 962 bp, Unknown
  Bacterial polypeptide expressing nucleotide sequence isolated from the Sargasso Sea
aatagcaaagcactctcagaatcttggggtcgattatttagaagggggggctggcctgtgtgcgaacactttagatacagctttttttaacaaaccacctaagctaggaaaaacagtattgactgcttttggtatgacaaaaaaatctggaagaagcgcacaaaatgaccctggattatctgcaattttgaattctaatacaccagcagtttgtttagtaggtaagtcttgggactttcatgtgaataaagctttaggaataagcaacaaagaaaacttagagaatattaaagaatcagcaaaattatttattacaaagaaaaaagaatttctgtttgatgcagaacatttcttcgatggttacaaaagcaacccagaatatgctttgagttgtattaaaagtgcttacgacgaaggtgctagatggattgttctctgtgatacaaatggcggtacacttccacacgaagttggagatattatttcaaaagttataaaaattattcctggtaaaaatcttggaattcatgcacacaatgatactgaaaatgcagtagctaattctttaacggccgtattatctggagttcgacaggttcaaggaacaattaatggacttggagaaagatgtggtaacgcaaacctaatgtctgtaataccatcgttagttttgaaggaaagtttctctaaaaattttgaaataaatatttctaaagataaaatgaaaacattaaccgaatgttctagattattagatgaaatattaaatagaaaatcaaatagacattcagcatatgttggagcctcagcctttgctcacaagggcggtcttcatgtttcggctgtaacaaaagacccaaaaacttacgaacatatcaatccaaacttagttggaaattttagaaacattgttgtttcggaccagtcaggaaaatctaatattatgtcaagattagaaaagt

SEQ ID NO: 236111 - DNA, 719 bp, Unknown
  Bacterial polypeptide expressing nucleotide sequence isolated from the Sargasso Sea
aatgagcgatgagattaaaaaaggtttaatgggtgtaacagttgacgaaactgctgtttcaaaggtcatgccagaaataaactctttaacttatagaggttatgcagcacaagatctgtgtgaaaaatgtaaatttgaagaggttgcttttttgattttaaatggtgaattgccaaataaaaaacagttaaaagattttgaaaaacaagagagaaaagagagaaagctttccaaaactttgctagatgatattaaaaaatttccatcaaaagcccatcctatggatgcagcaagaactgcagtaagtattatgggtcttgaagataaagaaactaaagacaactctccaaaagcgaatatgcgaaaagtaatgagaattttcgctaagactccagtttctttggctgctttttacagatctagaaaaggaaaaaaaattatacctccaaaaaataatttgtctttttctgaaaattttttttatatgtgtttcggtaaagttccaaacaaagatatagttaaagctttcgatgtatctcttattttatatgctgagcatagttttaatgtttctacttttaccgcaagaaccataacaagtagtttgtcagatattcacggcgcaataaccggggctatcgcaagtttgaaaggacctctgcatggtggtgctaatgaagaagtaatgcacatgatgaacaaaattaaaaagccagaaa

SEQ ID NO: 236112 - DNA, 852 bp, Unknown
  Bacterial polypeptide expressing nucleotide sequence isolated from the Sargasso Sea
ccacctaagctagaaaaaacagtattgactgcttttggaatgacaaaaaaatctggaagaagcgcacaaaatgaccctggattatctgcaattttgaattctaatacaccagcagtttgtttagtaggtaagtcttgggactttcatgtgaataaagctttaggaataagcaacaaagaaaacttagagaatattaaagaatcagcaaaattatttattacaaagaaaaaagaatttctgtttgatgctgaacatttcttcgatggttacaaaagcaacccagaatatgctttgagttgtattaaaagtgcttatgacgaaggtgctagatggattgttctctgtgatacaaatggaggtacacttccacacgaagttggagatattatttcaaaagttataaaaattattcctggtaaaaatcttggaattcatgcacacaatgatactgaaaatgcagtagctaattctttaacggctgtattatctggagttcgacaggttcaaggaacaattaatggacttggagaaagatgtggtaacgcaaaccttatgtctgtaataccatcgttagttttgaaggaaagtttctctaaaaattttgaaataaatatttctaaagataaaatgaaaacattaaccgaatgttctagattattagatgaaatattaaatagaaaatcaaatagacattcagcatatgttggagcctcagcctttgctcacaagggcggtcttcatgtttcggctgtaacaaaagacccaaaaacttacgaacatatcaatccgaacttagttgggaattttagaaacattgttgtttcggaccagtcaggaaaatctaatattatg

SEQ ID NO: 236113 - DNA, 911 bp, Unknown
  Bacterial polypeptide expressing nucleotide sequence isolated from the Sargasso Sea
ctcttttaaacaacttagggttgaccgtattgaaattgcttcggcaagggtctccgagggagaaatggatggagtgatgaggacaacctcctgggcagcagataaaggctttttggaacagatcgaggttttgggatttgttgatcacaaccggagtgtcgactggattttagaagccggtgggagggtgatgaatctgcttaccaaaggcagtgaaaatcattgcaccaaccaactgaggaaaactcttgatgaacacctgaaagatatccggaaaaccctaaagtatgcccaccagaacaaggttagggtgaatgtctacctggaggactggtccaacggttacagggacatgccggattatgtttatgacctggttgccggtttgaaggatgagggagtcgcaaggattatgcttcctgacaccctgggggtgatgtcaccggatcaggtatatcaaagtatgatggatatgcaggaacgctttccatgggctgccttcgattttcatccgcacaatgactacggtcttggagtggcgaatgcgatgtatgcggtcaaagccggaatccgctgcatccattgcacgatgaactgtcttggtgagagagcaggaaatgcatcactggctgaaatagcggtggtgcttaaagatcagcttagggcagaactatccattgatgagactcacctttcaccggtctccgaaatggtggagaacttttctgggaagaggctggctcggaattcccccattgtcggtgaggatgtgtttacccagaccagtggaatccatgcggacggggatcgaaaaggagggttataccacaatccaatctatcccgaacgatttggtcgaaaccggagttatgctctaggaaaaatgagtggtaaagccctcctggtgaaaa

SEQ ID NO: 236114 - DNA, 862 bp, Unknown
  Bacterial polypeptide expressing nucleotide sequence isolated from the Sargasso Sea
gatgaacaaagaaaaaatatacatttttgatacaactttaagggatggcgcacagactgagggagtcgatttttcagttgaagataagaataagattgcaaaaattctatctaatattggagtagattacatagagggtggctggccaggtgcaaatcctatagataacgaattttttgataaatcccctaatcttggaaactcaaaatttacagcttttgggatgacgaagaagaatggagttagcgcagataatgatccaaatttatctcctttaatgaacgctgattgtaaaacagtttgtgttgttggaaaaacttgggactttcacgtcaaaactgctttaggtataaaaaatgaagataatttaaaaaacataaaagagacagctaaacatttcgtaaaaaataataaagaatttctttttgatgctgaacatttctttgacggatataaaaataatcctaattatgcccttgattgtctaaaacaagcttatgatgagggggctagatgggtagttttatgtgatactaatggcggaactttaccaaatgaggttggggaaataataaatagcgttaccaaagtaattccaggcaaaaatttaggtattcatgctcataacgatactgaaaatgctgtaagtaactctttaacggctgtactagctggagctagacaaatacaaggaactataaatggtctaggagaaagatgtggaaatgcaaacttaatgtctattataccaacactttttttaaaaaaaacttttagtgacaaatttgatttaaatataaacaaaaagaaactttcatcattaactgaatgctctagatttttgggacgaagttttaaataa

SEQ ID NO: 236115 - DNA, 739 bp, Unknown
  Bacterial polypeptide expressing nucleotide sequence isolated from the Sargasso Sea
aaagatatccggaaaaccctaaagtatgcccatcaaaacaaggttagggtgaatgtctacctggaggattggtccaacggttacagggacttgccggattatgtttattacatggttgccggtttgaaggatgagggagtcgcaaggattatgcttcctgacactctgggggtgatgtcaccggatcaggtatatcagagtatgatggacatgcaggaacgttttccatgggctgccttcgattttcatccgcacaatgactatggtcttggagtggcgaatgcgatgtatgcggtcaaagccggaatccgctgcatccattgcacgatgaactgtcttggtgagagagcaggaaatgcatcactggctgaaatagcggtggtgcttaaagatcagcttggggcagagctatccattgatgagactcacctttcaccgatctccgaaatggtggagaacttttccgggaagaggctggcgcggaattcccccattgtcggtgaggatgtgtttacccagaccagtggaatccatgcggacggggatcgaaaaggagggttgtaccacaacccaatctatcccgaacgatttggtcgaaaccggagttatgctctcggaaaaatgagtggtaaagcctccctggtgaaaaatctggaattgctggggattcaacttgtggaggaaaatctgcagaaagttctccgaagaatcgttgagcttggagattcgaagaaaacca

SEQ ID NO: 236116 - DNA, 937 bp, Unknown
  Bacterial polypeptide expressing nucleotide sequence isolated from the Sargasso Sea
gaatctgcaaattccatcgacaagggcatggcagccgtggtggccgcggagaccaacctgagcgatgtccgcggtgagatcggtgaactgatctattgcggctacaatatcaacgacctcgccgagaaggcgacctttgaggaagtggtgcacctgctgcatcgcggtcatttgcccgactccgacgaactttccgcgctcaaggcagaattctgtaccagccgcaacctgcccggaggcgtgattgatgtgctcaaggccctgccgaaagacacctccccgatgcacgccctccgcaccggcgtcagtgctctgggttgctttgattccgaagccgagacacaggatgaccttgaggcggtccggaaaaaatccattcagatcattgctcaagtgccggtgatcgttgccgccttccatcgcctgcgccagggcaaggagattttagagtcggacaacagcctcggcgaagccgccaatttcatttggctcatcaccggtaataaacccagtgaagacatggaacgcacgatggatatctgctacatcctccatgccgaccacgggttcaacgcctccaccttcagcggccgtgtcaccatcgccaccttgagcgatgtgtacagcgcggttactagcgccatcggcacgctcaagggccccttacatggcggcgccaatgaaggtgtcatcaaaatgcttcaggagatcggcgatctcgagaaggtcgatgcttacgtggatgattgccttgccaacaagcggcgtatcatgggcattgggcaccgcgtgtatcgcgttctggatccccgcgcgccgcacctcaagcgaatggcccagaagcttactaaggaactcggtgagccgaaatggattcagatgagcgaacgcatagccgagttgatgctagaaaagaagaatctcaacgccaatgtcg

SEQ ID NO: 236117 - DNA, 844 bp, Unknown
  Bacterial polypeptide expressing nucleotide sequence isolated from the Sargasso Sea
ggaatgttagtccctgctttaatttacatatatataaattttgataatcctcaaacgctcaatggttgggcaattccatctgccaccgatatagctttttctttaggtgttttatctttactaggttcaagagttccattatctttaaaagtattcttaactgctttggcaatcatcgatgatttaggtgcgattataattattgcttttttttattctggagatctaagtattaaatacctattactgatgctaataatttttatttctttaatggttttaaataaatttaatattaagaaatttttaccttatttaatattaggattttttttatggttatttacacatgaatcgggaattcatgctacaatatctggcgtacttttagcatcagtaataccacatagaaaaaataaaaaagatttttccttgttaatcaaaattgaacatgcaattagcccatatgttgcttttggaattatgcctttgtttgcattagctaatgctggggtttcattaaatggattaactctaaattcgttaatgctacctgtcccacttggtatcgttcttggcttatttgttggaaagcaaattggagtatttttattttcaataatttcgattaaattaaaaattgctcaaatgcctactggttctaattggataagtctttatggagttggcatactcactggtattggattcactatgagtttatttgttggaaatttagcttttgttgaaaatacagaatacattgggggtgttaaaataggcgtattaacaggatctcttttatcaactctatttggatattttttattattgatacagcaaa

SEQ ID NO: 236118 - DNA, 898 bp, Unknown
  Bacterial polypeptide expressing nucleotide sequence isolated from the Sargasso Sea
gctggtattgtgttggtgtctatgacagtaattgcgctaatcgtaagcaattcagttctttcagatacttatttttcaattttaaaaacttatatccccctagggtttggtgaatttaaattaaaactttctgtatttcactggattaatgatgcattaatggcaatattttttttagtagtaggtctcgaaatcaagagagaatttgttgaaggtgaattgtctagaccaaagcaagctgccttacctattttgggtgcggttggcggaatgctcgtacctgcgcttgtttatgtcgcatttaactacgaaacaccagaaactctaagaggttgggcaataccatcggctacggatatcgctttttcgattggtattttgtctttattaggatccagagttccattatcattgaaagtatttttagtagcccttgctattatagatgatatgggcgccgttataattatagctatattttattctacaaaattaaatattttttatttaactttagtcctgtttagctttttaattctgatgggattaaacaaatttaaggttaaaaatttttttccctttgcgatagtaggagcctttatgtggttttttactcatgaatctggaattcatgcaacaatagctggagttctattggccgttacaattccacatgaaaaagaaattcatggtcacacacattcaatgttaaaaaaagtggaacactctcttgctccatatgtattgtttataattatgccagtttttgcattggcaaatgcaggagttaatttagaaggtgtgtcatttattgaccttctaagtcctgttcctttaggtatatgtttaggattatttataggtaaacaagtgggtgtatttgtattttcaatagctg

SEQ ID NO: 236119 - DNA, 142 bp, Unknown
  Bacterial polypeptide expressing nucleotide sequence isolated from the Sargasso Sea
atgagcaataaagataaggtatttatatttgatacgacaatgagagatggtgaacaatcacctggagcatcaatgagcgttgaggaaaaaattcaaatttctagagtttttgatgaaatgggaattgatattattgaagcag

SEQ ID NO: 236120 - DNA, 703 bp, Unknown
  Bacterial polypeptide expressing nucleotide sequence isolated from the Sargasso Sea
aatgagtgaagaaataaaaaaaggattacttggaatagttgttgatgaaacagaagtttctaaagttatgcctgaaatcaactctttgacttacagagggtatgctgctcaggatctatgtgcaaaatgtaaatttgaggaagtagcctatctaattttaaatggtgaacttccaagtaaaaaacaactaaaaaaatttgaaaaagaagagagaaaagaaagaaaattatctaaaacattattagatgatataaaaaaatttccaaaaaaagctcaccctatggatgttgctagaacagcagtaagtatcatgggactagaggataaagaaacaaaagataattcccctaaagcaaatatgagaaaagtaatgagaattttcgctaaaatgcctgttgcacttgctgcattttatagagctagaaaaggaaaaaaaattattgtacctaaaaaaaacctttcattttcggaaaacttttttcatatgtgttttggcaaagtaccaaacaaagatatagttaaagcttttgatgtatctttaatcttatatgcagaacatagttttaatgtttctacttttacagcaaggactataacaagtagtttatctgatattcatggtgcaattactggtgctatagcaagcttgaaaggccctcttcacggaggagcgaatgaagaagtcatgcatatgatgaataaa

SEQ ID NO: 236121 - DNA, 784 bp, Unknown
  Bacterial polypeptide expressing nucleotide sequence isolated from the Sargasso Sea
atgagtaaagaaaaattatatatatttgacacaacattaagagatggcgctcaaacacaaggtgttgatttttctattgatgataagctcaaaattgctcatgcattggataatcttggcgttgattatatcgaaggtggttggcctggtgctaatcccactgatactgaattttttcaaaaaaaaattaattgcaaaaattctacaataactgcttttggtatgacaaaaaaaactggcagaagcgcggataacgatccaggtttatcagcattaattaatagcaatacaaaagcagtatgcatagttggtaaatcatgggattttcatgttgatgttgctttgggtatttcaaacgaagaaaatctagaaaatattagcgaaagtacaaaactttttgttaaagaaaaaaaagaattcatgtttgatgcagaacattttttcgacggatataaagcaaatcccaaatatacactatcatgtctcaaggctgcttatgacaatggtgctagatggatagttttgtgtgatacaaacggtggaacactaccgcatgaagttacaaaaatagttaatgaagttgttaaagtaattccaggaaaaaatataggaattcacgcacataatgatactggaaatgcagtgtcaaatacattagccgcagtactagctggtgctagacaagttcaaggaacgatcaatggattaggtgagagatgtggaaatgcaaatctaatgtcattaataccaacattttatttaaaaaaagaatttttccaataag

SEQ ID NO: 236122 - DNA, 742 bp, Unknown
  Bacterial polypeptide expressing nucleotide sequence isolated from the Sargasso Sea
tggcaagatccccaccatcattacttatttttatcgtcgttcacaagggctgcctgacgtggcgcctcatgcatcattggggcatgcggccaattatttgtacatgctccatggtacggagccttctgaggcccatgcccgtgctttggaaacgtatttggctttgtccgtggatcatgggatgaatgcgtctaccttcactgcccgggtggtgacctctaccgaggaaaacctggtgggtgccttgacggcagcggtcagtgcgctggatggtccgctccatggtggtgcgccgtccaaagtggatgatatgctcgatgccattggtagcatcgacaatgcagagccatggttgcgagagcaaatggaggctggtaagcgtttgatgggatttggacaccgcgtctataagaccttggatcctcgtgcggcagcgctcaaaacggtgaccagtcagtttgcctcggatgaaacccccttgttcactttggcgttgcatgtcgaggaagttgccattcgcttgttggctgagtataagccgggccgtcagttgtatccgaatttggagttttggacggcatcggtgttgcgtaccattgcattgccccgttcgttgtacacgccgactttttgtttgagtcgtgtggcaggttggtctgcgcacatcattgaacaatcgagcaacaaccgcttgattcgtcccagtgcgatttatactggaccaacagcagatttttcttaa

SEQ ID NO: 236123 - DNA, 142 bp, Unknown
  Bacterial polypeptide expressing nucleotide sequence isolated from the Sargasso Sea
atggaagataagaatagaatcataatttttgatacgaccatgcgagatggagaacagtctcctggtgcatcaatgagtcttgaagaaaaaatgcaaatctcaagagtttttgatgaattaggaattgatattatcgaggcca

SEQ ID NO: 236124 - DNA, 856 bp, Unknown
  Bacterial polypeptide expressing nucleotide sequence isolated from the Sargasso Sea
ataaaaatgagtaaagaaaaaatctatatatttgatacaacacttagagatggagcacaaactcaaggagttgacttttcgttaaatgaaaaagaaaaaattgctaagtctttagacaacttaggaattgattatatagaaggtggttggccaggagcaaatccaactgatacagaattttttaacaaggatcagaaccttaaaaatgcaaaccttacagcttttggtatgactaaaaaatcagaacatagtgcaaaaaatgaccctatgttgtcatctttgattaattcaaagagttcatctgtttgtttatttggtaaaagttgggattttcatgtggatgttgccttaggaatttcaaacgatcaaaatttagaaaatataagagagagtgcaaagcatatagttaattcaggtaaagaatttatgtttgatgctgaacatttttttgatggttacaaatcaaatcctgaatatgcaatatcatgtttgaaagcagcatatgataatggtgcaagatggattgttttatgtgataccaatggaggaacattgcctcacgaagtttctaaaattgttgaggaagtaacaaagcatatacctggtaaaaaccttggaattcatgctcacaacgatactgaaaatgcagttgctaatagtctagttgctgtgcaagctggagttagacaggttcaaggcacaataaatggacttggtgagagatgtggtaatgcaaacctaatgtcattgataccaactttttatttaaaaaaagacttttcagacaagtatgaaattaatatcagaccagaaaacattaaaaatttaacgcaatgttcaagattattagatgaaa

SEQ ID NO: 236125 - DNA, 173 bp, Unknown
  Bacterial polypeptide expressing nucleotide sequence isolated from the Sargasso Sea
aatgactgataaaaatagagtttatatttttgatactactatgcgagatggagaacaatctcctggtgcatcaatgagtttagaagagaaaattcaaatagcacgagtttttgatgaacttggaattgatattattgaagctggatttccaatagcatccccaggggattttg

SEQ ID NO: 236126 - DNA, 742 bp, Unknown
  Bacterial polypeptide expressing nucleotide sequence isolated from the Sargasso Sea
aatgagtgatgagataaaaaaaggtttacttggaatagttgttgatgaaacaacaatatctcaagtaatgcctgatattaattctttaacttacagaggttacgctgtgcaagatctttgtgaaaaatgtatttttgaagaagttgcttacctagttttaaatggtgatttaccaaataagaaagaattaaaaaaatttaaaaaagaattagaagaacaaagaaaaataactgttaaccttagagaaattgttagacatatgcctaaaaaagcacatccaatggatgtggctagaactattgttagtgttttaggtttagaagacaaagaaacatcaaataattctccaaaagcaaatatgaaaaaagcaattaaaatattcgctaaaactcccacagcaattgcagcattctttagggcaagaaaaggggaaaaaattattcccccaaaaaaagatttaacattttctgaaaactttttttatatgtgttttggaaaagttccaaataaagatattgttaaagcttttgatgtatctttaattctttatgcggaacatagctttaatgtttcaacttttaccgctagaactataacaagcagtttatctgatatccatggagcaataactggagcaatagcaagtctaaaaggtcctttgcacggtggtgcaaatgaagaggttatgcatatgatgaataaaatcaaaaaacctgaaaatgcattaaaatggattaacaaa

SEQ ID NO: 236127 - DNA, 763 bp, Unknown
  Bacterial polypeptide expressing nucleotide sequence isolated from the Sargasso Sea
aatgagtgaagatattaaaaaaggtttacttggcattgttgtggatgaaacagaagtttcaaaagtaatgccagaaataaattctcttacttataggggttatgctgctcaagatttatgtgagtattgtaggtttgaagaggttgcttatctaattttaaataaagacttaccaaatactattcaactaagacaatttgaaaaagaggaaaaaaataatcgagagcttactaaaaatttatatgaaataatcaaacatatgcctaaacgatctcatcctatggatgttgcaagaactgctgttagtgttatggggttagaggataaagaaacaacagattcttcacctgacgcaaatatgagaaaagcattaaggatttttgcgaaaactcctactgcgctggctgctttttatagaataagaaaaggaaaaaaaattattaaacctaaaaaatcattaacttttgctgagaattttttctatatgtgttttgggaaagtgccacaaaaagaaatagttaaagcttttgatgtgtctctaattttatatgccgagcatagttttaatgtttcaactttcactgctagaacaattactagtagtctttctgatatacatggtgcaattacgggggcgattgctagtttaaaaggtcctcttcatggtggtgctaacgaagaggtgatgcatatgatgaataaaataaaaaaaacagaaaatgcactaaaatggattaacaacgcacttaaaacaaagaagtag

SEQ ID NO: 236128 - DNA, 142 bp, Unknown
  Bacterial polypeptide expressing nucleotide sequence isolated from the Sargasso Sea
atgaccgataaaaacagagtttatatttttgataccacgatgagagatggtgagcaatcaccaggcgcatctatgagcttggaggaaaaaatccaaattgcaagagtgtttgatgagttaggaattgacataatagaagcag

SEQ ID NO: 236129 - DNA, 707 bp, Unknown
  Bacterial polypeptide expressing nucleotide sequence isolated from the Sargasso Sea
aatgagtgatgaaataaaaaaaggcttacttggcatagttgttgatgaaactgaggtttcaaaagtaatgcccgaaataaattcacttacttatagagggtatgcagcacaagatttatgttcaaaatgtaaatttgaagaagttgcatatttaattttaaatggggaactccctaataaaaaacaattaaaaaatttcgaaacacaggaaagaaaagaaagaaaattatcaaatactctgcttgctgacataaaaaaaatcccaaagaaagcacatccaatggatgtcgcgagaacagcagttagtattatgggtctagaagataaagaaactagagataattctcctaaagctaacttaagaaaagcaatgagaatttttgcaaaaactcctgttgcactagctgcattttacagagcaagaaaaggaaaaaaaataattcctccaaaaaagaaatattcaatgtcagagaatttttttcatatgtgttttggaaaggttcctaataaagaaatcgttaaagcttttgatgtttctttaattttatatgcggaacatagttttaatgtttcaacgtttaccgctagaaccattacaagtagtttgtctgatattcatggagcgattactggtgctattgctagtttaaaaggaccgttgcacggaggcgctaatgaagaagtaatgcatatgatgaaaaagataa

SEQ ID NO: 236130 - DNA, 748 bp, Unknown
  Bacterial polypeptide expressing nucleotide sequence isolated from the Sargasso Sea
ctatgccctcaaattgttacatattggtataaattttctcatgagggattagatattgatttagttaatgatgaggacagcatggcgggacattttcttcatatacttcacgataaagaaccttctgatcttcataagaaagtcatggatgtatccctgattttgtatgctgaacacgaatttaatgcatctacttttacagcaagagtatgcgcatcaacaatgtcagatattcattcatgtgttgttgcagcaattggatctttaagaggtcctcttcacggaggagccaatgagaaagcaatggaattaattgaaaactggacatcaaaagaagaagccaaatctaatattattgaaatgttaaataagaaagaaaaaataatgggatttggtcatgcagtttattctataaaagatccaagaaatgctgtcataaaagaatatgcaaaacaactatccgaaatttcagataacgattctctttatcaagttgcagaagaagttgaaaaagttatggccgatgagaagaatatgttcgctaatgctgattttttccatgctccagcctatttctatatgggcataccaacaaaattattcactccaatatttgtaatgtcgagagtatcaggatggactgctcattgtatggagcaaagaggaaataatagaattattagaccaagtgctgaatatactggagttgtatcatcagattgggttgatatttctgataggtcttaaa

SEQ ID NO: 236131 - DNA, 718 bp, Unknown
  Bacterial polypeptide expressing nucleotide sequence isolated from the Sargasso Sea
atgagtgatgaagtaaaaaaaggtttgttaggtattgttgttgatgaaactacagtatctcaagtaatgcctgatattaattctcttacttatagaggttatgcggttcaagatttatgcaaaaaatgtacttttgaagaagttgcttatcttgttttaaatggagaacttcctaatcagaggcaattaaaaaagtttattaaagaagaaagagtaaatagatctctatctaaacaaatattaaatgacattaaaaaaatgcctaaaaaagctcatccaatggatgttgtgagaactgctgtcagcttgatggctcttgaagataaagaaactagagataattcgcctaaatcaaacatgagaaaagctattagaatatttgctaaaacacccactgctttagctgctttttttagatcgagaaaaggaaaaaaaatattaacaccaaagaaaaatttatctttttcagaaaattttttccacatgtgttttggcaaagttcctagtgaagaaattgttaaagctttcgacgtatcgttaattctttatgcagagcataattttaacgtatcaacttttacagccagaacaataacaagcagtctatcagatatacatggcgctataactggagcaatagcaagtttaaaaggtcctttacatggtggtgcaaatgaagaggttatgcacatgatgaacaaaattaaaaaacctgaaa

SEQ ID NO: 236132 - DNA, 877 bp, Unknown
  Bacterial polypeptide expressing nucleotide sequence isolated from the Sargasso Sea
aatgagcaaagaaaaaatatacatatttgatactactttaagagacggtgcccagactgagggggttgatttttcagttgaagataaaaataaaattgcaaaaattttatctaatataggtgtagattacatagaaggcggttggccaggtgcaaatcctatagataatgaattttttgataaatctccaaatcttggaaactctaaattcacagctttcgggatgaccaagaagaatggagttagcgcagataatgatccaaatttatctcctttaatgaacgccgattgtaaaacagtttgtgtagttggtaaaacatgggactttcacgttaaaacagcactaggtataaaaaatgaggataatttaaaaaatattaaagaaactgctaagcattttgttaaaaataaaaaagaatttctttttgatgctgaacatttttttgacggatataaaaataatcctaattacgccctagactgtttaaaacaggcttatgatgagggggctagatgggtagttttatgtgatactaatggcggaactttaccaaatgaagttggagaaataatcaacaatgttactaaagtaataccaggaaaaaatctaggcattcatgcacataatgatacagaaaatgcagttagcaattctttaacagctgtattagctggagccagacaaatacaaggaactattaatggcttaggcgaaagatgcggaaacgcaaatttaatgtctattattccaacactttttttaaagaaaacatttagtgataaatttaatttaaatattagtaaagaaaaactctcttcgttaacagaatgttcaagatttttggatgaggtcctcaataaaaagcctaacaaaagt

SEQ ID NO: 236133 - DNA, 181 bp, Unknown
  Bacterial polypeptide expressing nucleotide sequence isolated from the Sargasso Sea
aatggaagataaaaatagaataataatttttgacacaaccatgagagatggtgaacagtctccgggcgcatcaatgagtctggaagaaaaaattcaaatctcaagagtttttgatgaattaggtattgatattatagaggcaggttttccattgcctctccaggtgattttgaggcggtaa

SEQ ID NO: 236134 - DNA, 149 bp, Unknown
  Bacterial polypeptide expressing nucleotide sequence isolated from the Sargasso Sea
aatgactgataaaaatagagtttatatttttgatacaacaatgcgagatggtgagcaatcaccaggagcatcaatgagtttggaagaaaaaatccaaattgcaagagtgtttgatgaacttggtattgatattattgaggcaggatttc

SEQ ID NO: 236135 - DNA, 766 bp, Unknown
  Bacterial polypeptide expressing nucleotide sequence isolated from the Sargasso Sea
tgacataaaaaaaggtttacttggaatagttgttgatgaaacagaagtttcaaaagttatgcctgagataaattctcttacctatagaggttatgcagcacaagatctttgtgaattttgtaaatttgaagaagtcgcatatttaattttgaacaaagatttaccaaattcaatagaattaagaaaatttgaaaaagaagaaagaaataatagagatctctcaaaagatctatactcattcattaaaaaaatgcctaaaaaatcccatcctatggatgtagctagaactgcagtcagcatcatgggtttagaagataaagaaacaacagactcttcacctgaagcaaacatgagaaaagcagttagaattttagctaaaacaccaactgctttagctgcattttatagaataagaaaaggtaaaagtataattaaacctaaaaaaaatttgaatatgtctgagaatttttttcatatgtgctttggaaaagttcctcaaaaagaaattgtaaaagcttttgatgtatctttgattttatatgctgaacacagttttaatgtttcaacatttactgcaagaactataacaagtagtttgtctgatattcacggagctataactggtgccatagcaagcttaaagggtccactacatggcggtgctaacgaagaagttatgcatatgatgaataaaataaaagatcctaaaaatgctttaaaatggatcaataacgcacttgctaaaaaaccaggttgtgatgggatt

SEQ ID NO: 236136 - DNA, 805 bp, Unknown
  Bacterial polypeptide expressing nucleotide sequence isolated from the Sargasso Sea
atgacaaaaaaattagagggagcaggtctaagaggccagtcagcaggacaaacttctttatcaactgttgagcaagagggctcactcagatatcttgggtatagcattgaggatttagcaaaaaatgcttcttttgaagaagttgcatacttgctacttcttggacagttgcctaattctaatcagcttcatgattttgaaaatgagctttttgaacttagggcaataccaacttctttagtgagtgtacttgaatcaattccttcatcagctcacccaatggaagttattagaacaatcgtttcttatatgggagtaattgagcctgaaaaatctttcgaagatcagctccacatagctaaaagacttttaggtgttactacttcagcaatagtttattggtacaaattttctcatgaaaacaaaaaaatagatcaagaaacaggtgaaaagtcgttagcagctcattttcttaaattgttgagacaagaggaaatacctgaacttcatcaaaaaactttagatgtatcgcttactttatatgctgagcatgaatttaatgcatcaacattcactgggagagtttgtgcatcgactttatctgatttgcattcctgtcttacagctgcagttggcagtttgaggggaccacttcacggtggtgctaacgaggaggctatggttatgcttcaagaagtgcaatctgtcgagagtgtaaaaaattatgtcgaccaaaagcttcaaaacaaagaaaagataatgggttttggtcatgctgtctattctgttaaagatccaagaagca

SEQ ID NO: 236137 - DNA, 823 bp, Unknown
  Bacterial polypeptide expressing nucleotide sequence isolated from the Sargasso Sea
aatgagcaaagaaaaaatatacatatttgatactacattgagagatggggcacagactcaaggtgtagatttttctatagatgataaattaaaagtagctaaggctttagatggtttaggagttgattatatagaaggaggctggccaggagccaaccctacagatactgaattttttcagaaaaaaattaaactaaataactctgtgctaactgcctttggtatgaccaaaaaatctggtcgaagtgcagataatgatcctggactttcatctgtactaaacagcaatacatctgcagtatgtttggttggtaaatcttgggattttcacgttgatgtagccttaggcatatcaaatgaagagaatttagaaaatatttcagaaagtgcaaagttgtttgtgaaagaaaaaaaagaatttatgttcgatgcagaacatttttttgatggatttaaaaataataaagaatatgcactttcatgtataaaatcagcatacgataatggtgcaagatggattgttctttgcgatactaacggtggcacgcttccaaatgaaatttctgaaatagtaagcgaagttacaaaaacagttccaggaaaaaacctaggtatccatgctcataatgatactggaaatgctgtaggtaactcattagcagcagttttgtctggagcaagacaaatacaaggaacaattaatggattaggtgaaagatgtggaaatgcaaatttaatgtcaataattccaacattacatttaaaacaaacttattcaaaaaattatgaaataaatattaaaaaagaaaatattaataaatta

SEQ ID NO: 236138 - DNA, 691 bp, Unknown
  Bacterial polypeptide expressing nucleotide sequence isolated from the Sargasso Sea
aatggcaatatttttcttttttgttacactagaaattaaaagagagtttttgcagggtgaactatcatcccttaaacaagctatgctgccgattgtaggtgctgttggtggaatgttagtaccagcattaatatatatttatattaactttgaaacttctgtaactttaaatggatgggccatcccctctgcaaccgatatagcgttttctattggtattttatcattactaggctctagagtaccattatccttaaaagtttttttaacagcgcttgcaattattgatgatctaggggcaattgttattattgcttttttttacactggtgatttaagcattaaatatcttttattaatttttattacttttatttttttattaatattaaatagattttcagttaaaaagtttactccatatttgatactaggattgttattatggttctttacacacgaatcgggaattcatgccactattgccggtgttcttttagcttctgtgattccacacagaaaaaaagagcatgatttttctttattaataaaaattgaacacgccataagtccttatgttgcatattttattatgccattatttgcattcgcaaatgctggtgtatcattagaaggtttatcgttagcatcattaatgatgcctgttccacttggaattttgttgggctta

SEQ ID NO: 236139 - DNA, 864 bp, Unknown
  Bacterial polypeptide expressing nucleotide sequence isolated from the Sargasso Sea
tttgctaataagtgcaattttagctctaataatcagtaatagttcattatcttacttgtattttcaaactttagaaaaatatattttttttggatttaataattttggtttaaagctatcagttttgcattggataaatgatgttttaatggcaatatttttcttttttgtaacgcttgaaattaaaagagaatttatacaaggtgaactatctaatattaaacaagctatactacctataatagcagcagttggaggaatgttggtaccagcgttaatatatgtttatataaactttggtaatactgaaactttaaatggttgggccataccatcggctacagatatagcattttctcttggtatattatctttactgggttccagggtgcccatttcattaaaagtttttttaactgctttagcaattattgatgatcttggtgctatagttattatcgcttttttttattctggtgatttaagtatactttatttaaccatgatgcttttatcatttatagcattattaattttaaataaatttggttttaaaacattttttccttatttaataataggcataattctttggcattttacacatgagtcaggcattcatgctacaattgcaggtgtattgcttgcgtgcactattcctcatagacaaaaagaaaaggatttctcattattggtaaaaattgaacatgctataagtccatatgttgcatttggtataatgccgctatttgcatttgcgaatgctggtgtttctttagaaggaatttcattttcatctcttttattacctgtaccacttggtattttattaggactttttataggcaaacaactaggtgtttt

SEQ ID NO: 236140 - DNA, 712 bp, Unknown
  Bacterial polypeptide expressing nucleotide sequence isolated from the Sargasso Sea
tatgataaattatatatcaaaaccatttaaatggttttttaagctagaagctgcaagtggaatattgttattaataagtgcaatattagcattaattgttagtaattctgatctttcaagcttatattttgaaactttaaacaagtacctttttgtgggtattaataactttggcttaaaattaagtgtccttcattggataaatgatgccttaatggcgatatttttcttttttgtcaccctagaaataaaaagagaatttttacaaggagagttatcctcacttaagcaagctatgcttccgattataggtgcagtgggtggaatggttgtgcctgcattaatttatataattattaattttaaaacatcagtaactttaaatggatgggctataccttcggcaacagatatagcattttctattggtatattatcattattaggatcgagggtgcctatatctttaaaagtctttttaactgcactagcaataattgatgatttgggcgctattttaattatagcttttttttatagtggagatcttagtattaaatatctattattaatgatcttaacttttattcttttgctagttttaaatagattatcagtaaggaaattcattccttatttagttttaggaatatttctttggttctttacacatgagtcaggtatacatgcaacgattgctggtgtgttgctt

SEQ ID NO: 236141 - DNA, 895 bp, Unknown
  Bacterial polypeptide expressing nucleotide sequence isolated from the Sargasso Sea
gtgaatgtctacctggaggactggtccaacggttacagggacttcccggagtatgtttatgacatggttgccggtttgaaggatgagggagtcgcaaggattatgcttcctgacaccctgggggtgatgtcaccggatcaggtatatcttagtatgatggacatgcaggaacgctttccatgggctgccttcgattttcatccgcacaatgactacggtcttggagtggcaaatgcgatgtatgcggtcaaagctggaatccgctgcatccattgcacgatgaactgtcttggtgagagagcaggaaatgcatctctggcagaaatagcggtggtgcttaaagaccagcttggggcagagctttccattgatgagactcatctttcaccggtttccgaaatggtggagaacttttccgggaagaggctggctcggaattcccccattgtcggagaggatgtgtttacccagaccagtggaatccatgcggacggggatcgaaaaggagggttataccacaacccaatctatcccgaacgttttggtcgaaaccggagttatgctctcggaaaaatgagtggtaaagcctctctggtgaaaaatctggaattactggggattcaactggtggaagaaaatctgcagaaagttcttcgaagaatcgttgaacttggagattcgaagaaaaccatcaccctcgccgaccttcctttcattataaccgatgtgctggaaacccatgaagagcaacggattgaattactgaattgttccatatccagtgggttgaatcttaagtctgttgccagcatcaggatgatgttcgatagaaaggaacacaacgaaagtggaagcggaaatggaggttacgatgctttcatgagtgcggtcaaaa

SEQ ID NO: 236142 - DNA, 875 bp, Unknown
  Bacterial polypeptide expressing nucleotide sequence isolated from the Sargasso Sea
cgattggattttagaagcaggtgggagggtgatgaatctgctcaccaaaggcagcgaaaatcattgcaccaaccaactgaggaaaactattgatgaacaccttaaagatattcggaaaaccctaaagtatgcccatcagaacaaggttaaggtgaatgtctacctggaggactggtccaacggttacagggacttaccggcttatgtttatgacatggttgccggtttgaaggatgagggagtcgagaggattatgcttcctgataccctgggggtgatgtcaccggatcaggtatatcagagtatgatggacatgcaggaacgctttccatgggctgccttcgattttcatccgcacaatgactatggtcttggagtggcgaatgcgatgtatgcggtcaaagccggaatccgctgcatccattgcacgatgaactgtcttggtgagagagcaggaaatgcatcactggctgaaatagcggtggtgcttaaagatcagcttggggcagagctttccattgatgagactcacctatcaccggtctccgagatggtggagaacttttccgggaagaggctggctcggaattcccccattgtcggtgaggatgtatttacccagaccagtggaatccatgcggacggggatcgaaaaggagggttgtaccacaacccaatctatcccgaacgttttggtcgaaaccggagttatgccctcgggaaaatgagtggtaaagcctccctggtaaaaaatctggaattactggggattcaactggtggaggaaaatctgcagaaagttcttagaagaatcgttaaacttggagattcgaagaaaaccatcactctggcagaccttcctttcatcattaccg

SEQ ID NO: 236143 - DNA, 742 bp, Unknown
  Bacterial polypeptide expressing nucleotide sequence isolated from the Sargasso Sea
atgagtgatgatattaaaaaaggcttattaggaattgttgtagacgagacagaagtctcaaaagtaatgcctgaaataaactctcttacttatagaggttatgctgctcaagatctttgtgaatattgtagatttgaggaggttgcttatcttattttaaataaagatttgcccaatactatccagcttagaaaatttgaaaaggaagagaaaaataatagagaattatcaaaagatttatattcagttataaaaaaaatgcctaaaaaatcccatcctatggatgtggccagaaccgcagtaagtattatgggtttagaggataaagaaacaaccgactcctctcctgaagcaaatatgagaaaagcaattagaatcctcgcaaaaactcctactgcattagctgctttctacagaattagaaaagggaaaaaaattatcaaacccaaaaaaaatttaaatatagcagaaaactttttttatatgtgttttggaaaagttcctcaaaaagaaatagtaaaagcttttgatgtatctttaatattgtatgcagagcatagctttaatgtctcaacatttactgcaagaactattaccagcagtttatctgatattcatggtgcaattactggagcaatagcaagtttaaaaggtccattacatggaggagcaaatgaagaagtgatgcatatgatgaataaaattaaggatcctggaaatgctcttaaatggataaatgatg

SEQ ID NO: 236144 - DNA, 874 bp, Unknown
  Bacterial polypeptide expressing nucleotide sequence isolated from the Sargasso Sea
aatgtcagataaaatatacatttttgatactaccttacgtgatggtgctcagactcaaggagttgatttttctctagatgataaagaaaaaatctctgtagcattagacaatttaggagttgactatatcgagggtggttggcctggagccaatcctacagatacagaattttttaataagaaacactcgtttaatcattcaatattaacagcatttggaatgactaagaaatcagaccatagtgcggagaatgatccaatgatatcttcgttaataaattctaaggcaaactcgatttgtttgtttggaaaatcctgggattttcacgttgatgttgcattggggatatcaaaagaacaaaacttaaaaaatattagtgaaagtgcaaagcacattattaattctggtaaagaatttatgtttgatgctgaacatttttttgatggttacaaatcaaacaaagaatacgctttaagttgtattaagtctgcatatgaccaaggtgctagatggattgtattatgtgatactaacggcggaactttgcctcatgaaatatcaaaaatcgttacagatatagtaaaacatattccagggaaaaatttaggaatacatgctcataacgatacagaaaatgcagttgctaattcattagttgcaattcaagctggtgttagacaagtacagggcacaattaatggtttgggagaaagatgtggtaatgctaatttaatgtcactaattccttctttatatttaaaacaagaattttccaacaactatgaaattaatataaaggaagagaatattaaacacttaacgcaatgttccagattgttggacgagattttaaacagaaaaccaaataaacat

SEQ ID NO: 236145 - DNA, 688 bp, Unknown
  Bacterial polypeptide expressing nucleotide sequence isolated from the Sargasso Sea
atgactgaagatattaaaaaaggtttgcttggaattgtagttgatgaaactgaagtttcaaaggtgatgcctgaaataaattctcttacttatagaggatatgccgcgcaagatctttgtgcaaaatgtaagtttgaagaagttgcatatcttattttaaatggggaattaccttctgaaaaacagttaaaaaattttgaaaaagttgagagaaaagagcgaaatctatcaaagacattattagaaagtattaagaattttcctaaaaaatcacatcctatggatgtagctagaacagcagtaagtataatggggctagaagataaagagacaaaagataattctccagaagcaaacttgagaaaggtaatgcgaatttttgcaaaaacacctgttgctttagcagccttctatagaattagaaaaggaaaaaaaatcattaaaccaaaaagcaatttgtcattctcggaaaactttttttatatgtgttttggaaaagttcctgaaaaagaaattgtaaaagctttcgatgtatctcttattttatatgctgaacatagttttaatgtttctacatttaccgcaagaacaattactagtagcttatcggatattcatggtgcaattactggtgccattgcaagtttaaaaggaccattacatggtggtgcaaatgaggaagtaatgc

SEQ ID NO: 236146 - DNA, 598 bp, Unknown
  Bacterial polypeptide expressing nucleotide sequence isolated from the Sargasso Sea
tgtatctcttattttatatgcagaacatgagtttaatgcttcaacatttgctgcaatagtttgtgcagctactttatcagacttttattcttgtgttaccggtgcaataggaactttgagaggtcctcttcatggtggagcaaatgagaaggcgatggagcttatctcaagatttcaagatgaggaatctgcagcaaaatctatctactctatgcttgaaaataaagaactcattatgggtttcggtcacgctgtatacacaaaacaagatccaagaaatgatattattaagaagtggtcgaaaaaactatctgtgggaagacctaatgaaaagctttatgatatctcgtgtcgaatagagaggataatgaaagaggagaaaggtctttttgctaatgccgactttttccacgcgtctgcctacaattttatggatatacctactaagcttttcactcccatctttgtgtgttctagagtatcgggttgggcggctcatatcattgagcagagatcagataataaactaattaggcctggagcaaagtatgtcggtagtgagccactcgattttgttccaataaacgatagagattga

SEQ ID NO: 236147 - DNA, 901 bp, Unknown
  Bacterial polypeptide expressing nucleotide sequence isolated from the Sargasso Sea
aatgaaaaagcaatagatatatccaatttgcgtgcaaaaacaggtcatatcacacttgacccggggtttgtaaatacaggtccatgcgaaagtgcaatcacttatctgaatggagagaaagggatattacattatcgtggatatccaattgaagaactggctgagcattccacattcatagaagtggggtatttgcttatacatggagaactacctaacaggcaacagcttgatgactatcttgatcgcatcagcaaacatgcaatgatccatgaagatatgaaacttttcttcgaaggattttccaaaacagcacatccaatggtgatcctttcatcaatggtgtcttctctttccgcatattatacagaagcatcaggcaaagcttcaatagagaatattgagattaattcagcccgcataatagcgaaaataagtaccatcgcagcattttcctacaaaaaaagcgtaggtcagccatttgtctatccaaaagacagcctttcctattgtgctaattttcttaatatgatgttttcagtccctgctgaatcatacgaaatagatcctgatatattaaaatcacttgaattagtactaattttgcacgcagaccatgaacaaaactgcagtgcttccaccgtaagagtagtaggtagcagcatggcaaatgtttatgcctccgttgcttcgggaattttagctttatggggtcctctgcatggaggagctaatcaacaggctgtccaaatgcttcagcaaatctatgaagacggatcaaatatttcaaaatacattgagttagcaaaaaataaaaaaaataagtttcgtttgatgggctttggccacagagtttataaaaattttgaccctcgtgctaaaataataaaaaaagttgtca

SEQ ID NO: 236148 - DNA, 700 bp, Unknown
  Bacterial polypeptide expressing nucleotide sequence isolated from the Sargasso Sea
aatgagtgatgaaatcaaaaaagggttattaggtatagttgttgacgaaacagaagtttccaaagtaatgccagaaattaattctttgacttatagaggatatgccgctcaagatttatgtgctaaatgtaaatttgaggaggtcgcttatctaatccttaatggtgaattaccaaccaaaaaacaattaaagaaatttgaaaaagaagaaagaaaagagagaaagctatctaaaacattattagatgatatcaaaaaatttcctaaaaaagctcaccctatggatgttgctagaacagcagtaagtattatgggacttgaagacaaagaaaccaaagataattcccctaaagccaatatgcgaaaagttatgagaatttttgcaaaaatgccagttgctctagctgcattttacagagcaagaaaaggaaaaaaaattattccacccaaaaaaaacctatctttttcagaaaatttttttcatatgtgttttggaaaggttccgaataaagatatagttaaggcattcgatgtatctctaattttatacgcagaacatagttttaatgtttcaacttttaccgcaagaacaataactagtagtttgtcagatattcatggtgcaattactggtgctatagcaagtttaaaaggacctctacatggaggagctaacgaagaggttatgcatatgatgaat

SEQ ID NO: 236149 - DNA, 682 bp, Unknown
  Bacterial polypeptide expressing nucleotide sequence isolated from the Sargasso Sea
atgagtgatgatattaaaaaaggtttacttggaattgttgtagatgaaactgaggtttcaaaagttatgccagagattaactctctaacctatagaggttatgctgctcaagatttatgtgaatactgtagatttgaagaagttgcatatttaatattgaataaagatcttccaaactcaatagagcttaaacattttgaaaaagaagagaggaacaacagagagcttacgaaaaatttatatgaaataataagacatatgccaaaaaaatctcatccaatggatgttgcgagaactgctgttagcgtgatgggattggaggataaagaaactacagattcttctcctgaagcaaatatgagaaaagcactgagaatttttgcaaaaacgccaactgcattagcagccttttatagaattagaaaaggaaaaaaaattataaaacccaagaaaaacttaacttttgctgaaaactttttctatatgtgttttggaaaagttcctcaaaaagaaattgttaaagcattcgatgtttctttaattttgtatgctgaacatagctttaacgtctcaacttttacagctagaacaattacaagtagtttatctgatatacacggtgcaataacgggtgcaattgctagtttaaaaggccctcttcacggtggagctaatgaagaag

SEQ ID NO: 236150 - DNA, 745 bp, Unknown
  Bacterial polypeptide expressing nucleotide sequence isolated from the Sargasso Sea
ctgacccctttaaaagaagtgcttcaaaaaatacctgccacagctcacccaatggatgtgatgagaactggaacatctatgctgggaaatctagaacctgaaggtgacttttcaaatcaattagattcaattaatagaatgatagcaacgatgccatctattgttacttactggtataagttttcacatgaagggctggatattgatttagtcaatgatgaagattctatggccggacattttttacatattctccatgggaaaaaaccctctgaattgcacaagaaagttatggatgtatctttaattttatatgctgaacatgagtttaatgcctctacgtttacggcaagagtttgtgcttcaacaatgtcagatattcattcctgtgttgttgctgctattggttccttaagaggtccattgcacggaggtgccaatgaaaaagctatggaattaatagaaaactggacctcaaaagaagaagctaaatctaacattattgaaatgctaaataacaaagaaaaaataatggggtttggccacgctgtatattcagtgcgagatccaagaaatgcagttatcaaagaatacgccaaacaattatctgaacttgctgatacggatacgctgtatcaagtagctgaagaagttgaaaaagttatggcggatgaaaagaagatgtttgcaaatgcagactttttccatgctcctgcatatttttacatgggtatcccaacaaaat

SEQ ID NO: 236151 - DNA, 730 bp, Unknown
  Bacterial polypeptide expressing nucleotide sequence isolated from the Sargasso Sea
atgagcgatgatgttaaaaaaggtcttctaggaatcgttgttgatgagacaacagtttcgcaagtaatgcctgatataaattcgctaacatacagagggtacgcagttcaagacctttgtgagaaatgtaattttgaagaagtagcttatcttgttttaaatggagagcttccaaataaaaagcagttaaagagttttgtcaaagaagaaagattagatagaaaactttccaaagagattttaagtgatataagaaaaatgcctaaaaaagcccatccaatggatgtagttagaactgcagtaagtttaatggctttagaagacaaagaaacaaaagataattctcccaaagccaatatgagaaaggcaataaggatattttcaaaaactccaattgcattagctgccttttttagagctcgaaaaggtaaaaaaataatagctccaaaaaaaaatttgtctttttctgaaaattttttttatatgtgttttgggaaaatcccaagcaaggaaatagttaaagcttttgatgtttctttaattctttacgctgagcatagttttaatgtttcaacattcactgcaagaacaataacgagtagtttatcagatatccatggcgcaataacaggtgcaatagcgagcttaaaaggtcctttgcacggtggtgctaatgaagaagttatgcacatgatgaataagatcaagaaaccagaaaatgcttttaagg

SEQ ID NO: 236152 - DNA, 708 bp, Unknown
  Bacterial polypeptide expressing nucleotide sequence isolated from the Sargasso Sea
aatggatgcagacattaaaaaaggtttaatgggggttacggtagatgagacctcagtgtcaaaagtgatgcctgaaataaactctttaacttataggggttatgcggcgcaggatttatgtgcaaattgtaaatttgaggaagtagcttatcttattctaaatggagaacttccaaccaaaaaacaattaaaagattttgaaaagaaagagaaaaaagaaagaaaactttctaaaactttattacaagatattaaaaattttccaaaaaaagctcatccaatggatgtagctagaacagccgtgagcataatggggcttgaggacatagaaaccaaagataattcccctaaagcaaacatgaggaaagtgatgagaatttttgcaaaaactccagttgccttagcagctttctatagatcaagaaaaggtaaaaaaataatacctccaaaacaaaatctttctttttcagaaaatttttttcatatgtgctttggcaaggttccaaataaagatattgtaaaagcttttgatgtctcattaatcttatatgctgaacacagttttaatgtttcaacttttactgcgaggactataaccagcagtctatctgatattcatggagcaataaccggtgctattgcaagtctaaaaggaccattacatggtggagctaacgaagaagtaatgcatatgatgaataaaataaa

SEQ ID NO: 236153 - DNA, 1073 bp, Unknown
  Bacterial polypeptide expressing nucleotide sequence isolated from the Sargasso Sea
aatgacggacaaaatatacatatttgatacaactttacgtgatggtgcacaaacacagggagtagatttttctttagatgacaaagaaaaaatctctgtagcattggataatcttggtgtcgattacatagaaggaggatggcctggagccaatccaacggatacagagttttttaacaagcaacatccctttaatcattcaatattaacagcttttggtatgacaaaaaaatctgatcatagtgctgagaatgatccaatgatttcatctttaataaattctaaggcaaattcaatttgtttatttggaaagtcttgggattttcacgtagatattgctttaggcatatccaaaaatcaaaatttaaaaaatattagtgaaagcgcaaaacatataatcaattctggaaaagaattcatgtttgatgctgagcacttttttgacggttataaatcaaataaagaatacgctttaagttgcatcaaatctgcatatgatcaaggtgctagatggattatattatgtgataccaatggtggtaccttaccccacgaaatatcaaaaatagtttcagatgtatcaaaacatataccaggaaaaaatttaggaattcatgcacacaatgatactgaaaatgcagttgcaaattctttagttgcaatccaagcaggtgtaagacaggtgcagggaacgattaatggtttaggtgaaagatgtggaaatgccaatttaatgtcactcataccatcattgtatctaaaaccagagttttctaacaattatgaaataaatataaatgataagaatattaagcatctaacacaatgctctagattattagatgaaattttaaacagaaaacctaacaaacatttgccttatgtgggtgctgcagctttttcacacaaaggtggaatgcatgtttcagcggttcaaaaagatccaaaaacttatgaacacattgatccaaaagaagttggcaatgtaagaaatatagttgtctcagatcaagctggacaatcaaatatattatctagattagaaaccattggaattgatatcaaaaaaaatg

SEQ ID NO: 236154 - DNA, 1195 bp, Unknown
  Bacterial polypeptide expressing nucleotide sequence isolated from the Sargasso Sea
atgagtaaagaaaaaatatttatttttgatactaccctaagagatggggctcaaacacaaggtgtagatttttctatcgatgataaattaaaaattgcaaatgctttagatgatttaggtgttgattatattgaaggtggttggcctggcgcaaatccaacagatacagaattttttcaaaaaataaaaaaacttaaaaattcgacattgacagcatttgggatgacaaaaaaatcaggtagaagtgctgaaaatgatccaggattatcgtcattacttgatacaaattcttctgctatttgtttagttggaaaatcttgggattttcatgttgatgtagctctaggtatttctaaaaatgaaaatttagaaaatatttcggaaagcgctaaacattttgttaatcataaaaaggaatttatgtttgacgctgagcatttttttgatggatataaaaacaataaagattatgcaatttcatgcataaaagcagcttatgaaaacggcgctagatggattgtactttgtgacacgaacggaggaactttgccaaatgaagttttcgaaattgtttcagaaataacaaaatttattccaggcaaaaaccttggtattcatgcacataacgataccgagaacgctgtttcaaactccttatctgctgtacttgcgggtgcaagacaaattcaaggtacaataaatggtttaggagaaagatgtggtaatgcaaatttaatgtcaattattccaagtttacatttaaagaaaatatttaaagataaatttataactaatattgaagagaaaaatattcgaaatttgactcaatgttcaagactattagatgaaatattgaatagaaaaccaaatcaacatctaccatatgttggagcatcagcattttctcataaaggaggtttgcatgtatcagcagtgcaaaaagatcctaaaacttacgaacatattgaaccatcattggtaggtaatgctagaaatattgttgtttcagatcaatcaggaaaatcaaatataatttcaagattaaattctattggtatagattttaaagaaagtgacccaaaaattaaaaaattattaaatgaagtaaaaggtagagaatttattggttatagttacgatggagcagatgcttctttcgaactactagcgagaagaataatgggactatacctag

SEQ ID NO: 236155 - DNA, 1267 bp, Unknown
  Bacterial polypeptide expressing nucleotide sequence isolated from the Sargasso Sea
atgagtaaagaaaaactatatatatttgacactacattaagagatggagcacaaacccaaggtgtagatttttctattgatgataaacttaaaattactgaagctttggacgttctgggagtagattatatagaaggaggttggccaggagccaacccaacagatacagaatttttccaaaaaaaaatcaattgtaaaaactctacattaacagcatttgggatgacaaaaaaaactggaagaagcgcagataacgatcctggtttatctgctcttttaaatagtaacacaaaagctatatgtatagttggaaagtcatgggattttcatgttgatgttgctcttggcatttctaatgaggaaaatttagaaaatattagcgaaagtacaaaactttttgtaaaggagaaaaaagaatttatgtttgatgccgaacatttctttgacggttataaaacaaatcctaaatacactatatcttgtctaaaagctgcttatgacaatggagctagatggatagtattatgtgatacaaatggtggaactttgcctcatgaagtaacaaaaatagttaatgaggttacaaaagttattcctggaaaaaatttaggtattcatgcacataatgatactggcaatgctgtttcaaacactctagcagctgtgttagctggcgtaagacaagtgcaaggaactattaatggattgggtgaaagatgtggaaatgcaaatcttatgtctttaataccaacattttacttaaaaaaagatttttcaagtagatttgaaataaatatcaaaaaaaataatattaaaaatttaacccagtgctcaagacttttagatgaaatactaaatagaaaacctaataaacatcttccatatgttggggctgctgcattttcacacaaaggaggattgcatgtttctgcagttcaaaaaaatccaaaaacttatgaacatataaatccagaagaagttggcaatgtaagaaacatagttgtttccgatcaagctggaaaatcaaatattttatccagattaaaaactattggagttgatgtaaaagaaaacgatccaaaaattaaaaaactattagatgaagttaaagatagagaatttataggttacagttatgatggtgctgatgcatcttttgaattattagctagaagaataatgagcaagatacctagatacattttaatcaaagaatatgatgtaacagtcaaaaaaaattctacaggaaatataatctcttctgcaa

SEQ ID NO: 236156 - DNA, 1051 bp, Unknown
  Bacterial polypeptide expressing nucleotide sequence isolated from the Sargasso Sea
atggacaccacattgcgtgatggagagcaaacgcagggagtttcctcttcggcaaacgagaaggtcaatattgctcgtgcattgctccaatctttaaaagtcgaccgtatagaagttgcgtcagcatgtgtgtctgatggggagcagcaagcagttgctaaaatttgtgattgggcttccgaagaaggtttggtcgatagaatcgagattcttggttttgtcgattataaaagaagcgttgactggattaaaaaggctggtggttcggtgataaatttgcttgctaagggcagtgagaagcactgtcgagagcaacttggcagagatctcactagtcatattgacgatatttcgagaacagttgaatatgctagggcaagacagcttagagtgaatatgtatctggaagattggtcgagtggatatagtgacagtagggactatgtctatggattagtctcagggacgcaggacctcggcatcagccattaccttctaccagataccctaggattgttttctccacgagaagttttcgattctttgaaagaaatgaaagaacagtttccaaaagaagaattcgattttcatcctcacaatgactatggattagctactgcaaatgtcatcgctgcgatagaagcgggtatagataatattcattgcacagtcaattgcctcggagagcgagcgggtaatgcttcactggctgaagttgctgttgttactagagacaagttggggatcgatttgtctattgatgagacacagatcacacttgttagccgaatggttgaaaatttttcgggtaaatggattgctgcgaatacgccggttgttggtgctgatgtttttactcaaaccgcaggtatccatgctgatggagatatgaaaggcaatctctatgtatcgaggctcactccggagagatttgaccgcaaacggagttatgcgcttggcaagatgagtggtaaggcatctctggtaaataatttggaagagcttggtatttctctgtcggaggaggatcaagcgaaagttttacagcgag

SEQ ID NO: 236157 - DNA, 1215 bp, Unknown
  Bacterial polypeptide expressing nucleotide sequence isolated from the Sargasso Sea
aatgtcggacaaaatatacatatttgatacaactttacgtgatggtgcacaaacacagggagtagacttttctttagatgacaaagaaaaaatctcggtagcattggataatcttggtgtcgattacatagaagggggatggcctggagctaatcccacagatacagagttttttaacaaacaacattcttttaatcattcaatattaacagcttttggtatgacaaaaaaatctgatcatagcgctgagaatgatccaatgatttcatctttaataaattctaaagcaaattcaatttgtttatttggaaagtcttgggattttcatgtggatgttgctttaggcatatctaaagatcaaaatttaaaaaatattagcgaaagtgcaaaacatataatcaattctggaaaagaattcatgtttgatgctgagcacttttttgatggttataaatcaaataaagaatacgctttaagttgtataaaatctgcatatgatcaaggtgcaagatggattatattgtgtgataccaacggcggcaccttaccccacgaaatatcaaaaatagttttagatgtatcaaaacatattccaggtaaaaatttaggaattcatgcacacaatgatacagaaaatgcagttgcaaattctttagttgcaatccaagcaggtgtaagacaggtgcagggaacgattaatggattgggtgaaagatgtggtaacgccaacttaatgtctctcataccatcattatatttaaaacctgagttttctaaaaattttgaaataaatataaaagacaagaatattaaacatctaacacaatgctctagattattagatgaaattctaaacagaaaacctaacaaacatttgccttatgtaggtgctgcagctttttcacataaaggtggaatgcatgtttcagcggttcaaaaagatccaaaaacttatgagcatattgatccaaaagaagttggcaatgtaagaaatatagttgtttcagatcaggctggtcaatcaaatatattatcaagattaggaaccattggaattgatatcaaaaaaaatgaccctaaaattaaagaacttctagaagaggtaaaaggaagagagtttataggttatagctatgatggtgctgacgcatcgtttgaaatattagcaagaagaatagttggtgaaatacctagatacttaattattaaggctta

SEQ ID NO: 236158 - DNA, 1600 bp, Unknown
  Bacterial polypeptide expressing nucleotide sequence isolated from the Sargasso Sea
atgtcagacaaaatatacatttttgatactactttacgtgatggtgcacagacacaaggggttgatttttccttagatgataaagaaaaaatctcactagcattagataatctaggagttgactatatcgaaggtgggtggccaggagcaaatccaacagatacagaattttttaataaaaagcataattttgagaattccatattaacagcttttggtatgaccaaaaagactgatcatagcgctgaaaatgatccaatgatttcatcattgataaattctaaggcaaattcaatctgtttgtttggaaaatcttgggatttccatgttgacgttgctttaggtatttcaaaagaacaaaatttaaaaaatattagtgaaagcgcaaaacacattataaattctggaaaggaatttatgtttgatgctgaacatttttttgatggttataaatcaaataaagaatatgctttaaattgtatcaaatctgcttatgaccaaggagccagatggattgttctatgcgacaccaatggtggaacattaccacatgaaatatctgagatagttacagatgttgcaaaacatattcctggcgaaaatttaggaattcacgcacacaacgatacagaaaatgcagttgctaattcattagttgcaatacaagctggtgttagacaagtgcagggaactattaatggtttaggagaaagatgtggtaatgctaatttaatgtcactaattccatctttatatttaaaaaacgaattttctaataattatgaaataaatataaatgaggagaatattaaacatttaacgcaatgttctagactgttagatgaaattttaaacagaaaaccaaataaacatttaccttatgttggcgccgcagcattttcgcacaaaggtgggatgcacgtttctgcagtacaaaaagatccaaaaacttatgaacatattgatcctaaggaagttggaaatacaagaaatattgttgtttcggatcaagctgggcaatctaatattttatcgagattagaaactataggaattgatataaaaaaaaatgatccaaaaattaaacaacttttagaggaagttaaaggaagagaatttatcggttatagttatgatggtgcagatgcttcgtttgaacttttagctagaagaatagttggcgaaattccaaggtatttaataattaaagcttacgacgtatctgttaagaaaaattcatcaggagaaattgtttcatcagcaaaagcagaactagaagttgatggtgaaacaattgtttgtgaaggtgaaggaaatggtccagtaaatgcactagataacgctatcagagataacattaaaaagatttctaaatattctgattatcttaaagatttaagattagttgattacaaagtaagaatattaaatactggaacagaagctgtaactagagtttcaattgaaagcacagactcccaggggaagaattggttttacataggtgtatcaccaaatattatagatgcttcatttaaagcattaatagatagtcttgattataagttattcaaagataatgcaccagcaagtgcttaat

SEQ ID NO: 236159 - DNA, 1096 bp, Unknown
  Bacterial polypeptide expressing nucleotide sequence isolated from the Sargasso Sea
atgtcagacaaaatatacatatttgacactactctacgagatggcgcacaaacacaaggtgttgacttttcgttagacgataaagaaaaaatatctactgcattagacaatcttggtgttgattacattgaaggtgggtggccaggagctaatcctacggatacagaattttttaataaaaaacactcatttaatcattcaatactaactgcttttggaatgacaaaaaaatcagatcatagcgctgagaatgatccaatgatatcatctttaataaattcaaaggcaaattcaatttgtttatttggaaaatcttgggattttcatgttgatgttgctttaggtatatctaaagaacaaaatttaaaaaatataagtgaaagcgctaaacatattattaattctggaaaagaatttatgtttgatgccgaacatttttttgatggatataaatcaaataaagaatatgctttaagttgtataaagtctgcatatgatcaaggtgcaagatggattgtattgtgtgatactaatggtggaactttacctcatgaaatatcaaaaatagtcaccgatgtatcaaatcatattcctggaaaaaatttaggtattcatgcacacaatgacacagaaaatgcagttgcaaattctttagttgcaattcaagcaggtgtaagacaagtgcagggcacaatcaatggtttaggtgaaagatgtggaaatgctaatttgatgtctctaattccttctttgtatttaaaggatgaattttcaaagaatttcgaaataaatataaaagatgagaatattaaacatttaacacaatgttctagattattggatgaaattttaaacagaaaacctaataaacatttaccttatgttggtgctgcagctttttcacacaaaggtggaatgcatgtctctgcagttcaaaaagacccaaaaacatatgaacatattgatccaaaagaagttggtaatgtgagaaatattgttgtttcagatcaggctggtcaatcgaatatactatccagattggaaaccatagggattaacataaaaaaaaatgatcctaaaataaaagaactttaaa

SEQ ID NO: 236160 - DNA, 1174 bp, Unknown
  Bacterial polypeptide expressing nucleotide sequence isolated from the Sargasso Sea
atgaaagaatatcatccaggacttgagggttatcacccaggacttgagggtgtgattgcaactgagtcatctatatcagatatcaatggtgaaaaaggcattttaagctatcgaggatactccatagaggacttagcgaaaaagacttcttttgaagagacatcatatttattattaaccggagatttgccatctaaatcagaactagatagttttacacaaaaagttaatgcatccagagaacttccaaacgattttattaaactattaaaaaatatccccaaatcaactaagacgatggacgtacttcaatgcactgtctcatcactagcatctttttatgatatcgaatttgatgcggaatcactcaaaaaagggaaatattcaggagaatactttatagatgtttcagcaaaaatacttggctcaattggctctatagtcgctgcctggaaccgtataaaaaatgggaaagattacattaatgcggacgctaaattaaactatgcggataactttcttcatatgcttaatgataaagatgaatcgtctcctatagtcaaaagaattattgatgcctctttagtattacatgcagagcatactataaacgcatcaacatttactgcaatggttactgcatcaacattagcgcatccagttcaagttattgcatctgctataggatcactatcaggtcctctgcatggaggtgctaacgagaaggtggttagcatgcttgatgatataggctcgaaagagcatgccaaagaatggctagacaaaagactaaatagtaagcaagtagtttggggaatgggtcacagggaatattctaccaaagatcctagagcaaaaatacttacagcaatggttgaagattttttcaaagaaagaggtggtgaggtttcaagtaaatttgagacagctatggaattagaaaaggcgtgtgaagagagattatctaaaaaaggtgtctacgctaacgttgatttctattccgggattctctatcaagaaataggtatacccgtagatttattcactcctatatttgctgtctcaaggacgtcaggatggttagcacattggattgagcaagtaagtaataacaagatattcaggcctactcaaaactatattggtcaagaaccaagagaactaaaaaaataat

SEQ ID NO: 236161 - DNA, 766 bp, Unknown
  Bacterial polypeptide expressing nucleotide sequence isolated from the Sargasso Sea
aatgagtaaagatcagctatatatatttgataccactcttcgtgatggtgcacaaactcaaggtgttgatttttcaattgatgataaagagaaaatttcttccgctttagatgagcttggtgttgattacattgaaggaggttggcctggtgctaaccctactgatacagaattttttaataaagatcacaattttaaatcagctaatttgactgcgtttggtatgactaaaaaatcagagcatagtgctgaaaatgatccaatgttatcctctttaattaattcaaaaagttcatcaatttgtttgtttggaaaatcttgggattttcaagttgacgtagccctcggtatctcaaatgaggaaaaccttaccaatatcagcgaaagcgcaaaacacattattaaatctggtaaagagtttatgtttgatgctgaacatttttttgatggatataaggcaaatgctgattacgcacttgcttgcttaaaatctgcttatgacaatggagcaagatggattgttttatgcgatacaaatggaggaacacttcctcatgaggttgaaaaaattattttggacgttgcaaaacatataccaggaaaaaatttaggaattcatgctcataatgatacagaaaatgctgttgcaaatagtttaacggcagttcaagctggtgtgagacaagttcaaggaactataaatggattaggtgagagatgtggtaacgcaaacttaacatctctgatcccatactttttttttaaa

SEQ ID NO: 236162 - DNA, 1123 bp, Unknown
  Bacterial polypeptide expressing nucleotide sequence isolated from the Sargasso Sea
atgacaaaaaaattagaaggagccggcctaagaggtcaagtagctggagaaacgtctctttctacggttggtcaaatagaaggacttgcttatagaggccataaaattgaattacttgcagaaaaagctacatttgaagaagtagcttatcttttgttgtatgacaaattgcctaatcaagctgaattagacgattacaaagcattacttaaaaacaatagagatctcccagactctttaaaaaaagttcttcaaaaaataccagcttcggcgcaccccatggatgtaatgagaacaggaacatctatgttaggcaatttagagcctgagggtgatttcacaaatcaactagattcaattaatagaatgatagcaacaatgccttcaattgttacttattggtataaattctcacatgaaggacaagatattgatttggttaatgatgaagatagcatggccggacattttttacatattcttcatggtaaaacaccgtctgatttgcacaagaaagttatggatgtatctttaattctatatgctgagcatgagtttaatgcttctacttttacagccagagtatgtgcttcaacaatgtctgacattcattcatgtgttgttgctgcaataggttctctaagaggcccgttgcatggtggtgcaaatgaaaaagccatggaattaatagaaaactggacttcaaaagaagaagctaaatctaatattattgagatgttaaacaataaagaaaaaattatgggctttggccatgcagtttattcaattagagacccaagaaatgctgttattaaagaatatgctaaacaattatctgagcttgctgacacagacactctttatcgagtagctgaagaggttgaaaaagttatggctgacgaaaagaaaatgtttgccaatgcagactttttccatgctcctgcatatttttatatgggcataccaacaaaattgtttactccaatatttgttatgtccagagtttctggttgggctgcacattgcatggagcaaagagcgaacaatagaatcattagaccaagtgctgattacatcggagttgaatcttcagactgggttgaaatcgcagataggtcttaaa

SEQ ID NO: 236163 - DNA, 748 bp, Unknown
  Bacterial polypeptide expressing nucleotide sequence isolated from the Sargasso Sea
gatggacaccactcttagagatggtgagcagacccaggggatctcctttaccccggcagaaaagaccaatgtggccaaggctcttttaaataagcttagggttgaccgaattgaaattgcttcggcaagggtctccgagggagaaatggatggagtgatgaggacgacctcctgggcagaagataaagggtttttggaacagatcgaggttttgggatttgttgatcacaaccggagtgtcgactggattttagaagccggtgggagggtgatgaatctgctcaccaaaggcagcgaaaatcattgcaccaaccaactgaggaaaactctagatgagcaccttaaagatatccggaaaaccttaaagtatgcccatcagaacaaggttaaggtgaatgtctacctggaggactggtctaacggttacagagacttgccggattatgtttatgacatggttgccggtttgaaggatgagggagtcgcaaggattatgcttcctgacaccctgggggtgatgtcaccggatcaggtatatcagagtatgatggatatgcaggaacgctttccatgggctgcctttgatttccatccgcacaatgattatggtcttggagtggcgaatgcgatgtatgcagtcaaagccggaatccgctgcatccattgcacgatgaactgtcttggtgagagggcaggaaatgcatcactgggtgaaatagcggtggtgcttaaagatcagcttagtgca

SEQ ID NO: 236164 - DNA, 1138 bp, Unknown
  Bacterial polypeptide expressing nucleotide sequence isolated from the Sargasso Sea
aatgagtaaagatcaactatatatatttgataccactcttcgtgatggggcacaaacccaaggtgttgatttttcaattgacgataaagagaaaatttcttctgctttagatgagcttggtgttgattacattgaaggaggttggcctggtgcaaacccaactgatacagaattttttaacaaagatcacaattttaaatcagctaatttaactgcttttggcatgacaaagaaatcagagcatagtgctgaaaatgacccaatgttatcctcattaattaattcgaaaagttcatcaatttgcttatttggaaaatcttgggattttcaagttgacgtagcccttggtatatcaaatcaagaaaatcttacaaatattagcgatagtgcaaaacatatcgttaaatcaggcaaagaatttatgtttgatgctgaacatttttttgatggatataaatcaaattctgaatatgcacttgcttgcttaaaatctgcttatgacaatggagcaagatggattgttttgtgtgatacaaatggaggaacactacctcatgagattgaaaaaattgttttggaagttgcaaaacatataccaggaaaaaatttaggaattcatgctcataatgatactgaaaatgccgttgcaaatagtttaactgcagttcaagctggtgtgagacaagtccagggaactataaatgggttaggtgaaagatgtggtaatgcaaacttaacatctctgatcccaaccttgtttttaaaaaaagatttttatgaaaattataaacttaatattaaacgcgaaaatttgaaaaatttaacacaatgctcaaggttgttagatgaattacttaatcgcaaacctaataaacacttaccttatgttggtgcatcagccttttctcacaagggaggaatgcatgtttctgctgttcaaaaagatccaaaaacttacgaacacattaatcctgaacaggtaggaaactcaagaaatatagttgtctcagaccaatcaggacagtctaatattatgtctagattaaattctataggaataaagatagagaaaaatgatcctaaaataaaaaaacttcttgaggaggtaaaagatagagaatttataggatatagctac

SEQ ID NO: 236165 - DNA, 1117 bp, Unknown
  Bacterial polypeptide expressing nucleotide sequence isolated from the Sargasso Sea
aatgaaaaaactagaaggagccggattaagagggcagacagcagggcaaacttccttatcaactgtggagcaagaaggaagcttaaggtatctaggctataagattgaggatttagctaagcatgcttcttttgaagaagttgcatacttattacttttgggacatttgccaaataaagaacaattatctgattttgaaaatgaattaatgtcgttgagagctatgcctgattcattaatttcagttcttgaatcaataccagctgaagctcatcctatggaagttataagaactattatttcttatatgggcgtaactgagccagagataagttttgatgatcagttatctatatcaaaaagacttttaggggtaacctccacagctattgtttattggtacaagcattctcatgaaaatattaaagttgaacaaaatacaggcgaaaaatcagttgcaggacatttccttaaacttttaagacaagaagatattgaagatttacataaagaaactttagatgtgtccttaactctttatgctgaacatgaatttaatgcctctacttttactggaagagtttgcgcatcaacattatcagacattcactcttgcttaacagcagccgtaggaagtttaagaggacctctccatggaggtgcaaatgaagaggcaatgaaaatgcttgaagaaataaattcaacagatgaggtaagagattacatagatagaaaattagaaaacaaagaaaaaattatgggatttgggcatgctgtatattcagttaaagatcctagaagtgacataataaaagcttattctgaagagttaagtaaatcacaccctaaaaaaatattgcatgatgtagctgcaattatggaggaggatttgaaagaaaagaagaatctttttcctaataccgatttttttatggctcctgcatatcattatattaagattccaacaaaactatttacgcctctatttgctatagcaaggattgttggatggtcagcacatgtctttgagcaaagagaaaataatagaataattagacctagcgctgaatacattggcccaccagatcgagagtgggaagatattgaatcaaggtaa

SEQ ID NO: 236166 - DNA, 907 bp, Unknown
  Bacterial polypeptide expressing nucleotide sequence isolated from the Sargasso Sea
atgtcagacaaaatatatatttttgatactactttacgtgatggcgcacagacacaaggagttgatttttccttagatgataaggaaaaaatctcagtagcattggataatctaggtgtagactatattgaaggtggttggccaggagcaaatccaacagatacagaattttttaataaaaagcatacttttaagaattccatattaacagcttttggtatgacgaaaaaatctgatcatagtgctgaaaatgatccaatgatatcatcgttgataaattctaaggcaaattcaatttgtctgtttggaaaatcatgggatttccacgttgatgttgctctaggcatctcaaaggaacaaaatttaaaaaatattagtgaaagcgcaaaacacattattaattctggaaaagaatttatgtttgatgctgaacatttctttgatggttataaatcaaataaagaatatgctttgaattgtattaaatctgcttatgaccaaggagccagatggattgttctatgtgataccaatggtggaacattaccacatgaagtatctaaaatagttacagatgttgcaaaacatatccctggcaaaaacctaggaatccatgcacacaacgatacagaaaatgcagttgctaattcattagttgcaattcaagctggtgttagacaagtgcagggaactatcaatggtttaggagaaagatgtggtaatgccaatttaatgtcactaataccttctttatatttaaagcacgaattttctaataattttgaaataaatataagtgaggagaatattaaacatttaacgcaatgctctagactattagatgaaattttaaatagaaaaccaaataaacatttgccttatgtcggtgctgctgcattttctcaca

SEQ ID NO: 236167 - DNA, 615 bp, Unknown
  Bacterial polypeptide expressing nucleotide sequence isolated from the Sargasso Sea
ttcatcaaaaaactttagatgtatcgcttactttatatgccgagcatgaatttaatgcatcaacattcactggcagggtttgtgcgtcaactttatctgatttgcactcctgtctaacagctgcagttggcagtttgagagggccacttcacggtggtgctaacgaagaggcgatggttatgcttcaagaagtacaatctgttgagagtgtgaaaaattatgttgaccaaaagcttgaaaataaagaaaagataatgggatttggtcatgctgtctattctgttagagatccaagaagcgacatcataaaagatttctcccagaaattgagtcaagatcatgcagataaattgcttcatgatattgctgaggaaatggaaacctatatgtgggaactaaagaaactgtttccaaatacagatttttttcatgctcctgcataccactacattggaataccaaccaaactttttactccactttttgcaattgcaagaatagtaggttggtctgcacatgcgtttgaacaaagaggcaataatagaatcataagacctagtgcagattatattggtcctgaagatagagaatggattgatattaaatcaaggtaat

SEQ ID NO: 236168 - DNA, 543 bp, Unknown
  Bacterial polypeptide expressing nucleotide sequence isolated from the Sargasso Sea
gagtctgcgcatcaacaatgtccgatattcattcatgtgtagttgctgcaatcggatcattgaggggtccattgcatggaggggctaatgaaaaagcaatggaattaatagaaaattggaattcaagagaagaagcaaaatctaatattattgaaatgttgagtaataaggaaaaaataatgggttttggtcatgcagtttattctattaaagatccaagaaatgctgttattaaagaatatgcgaaacaactatcagagcttgctgatacagatactctatatcaggtagctgaggaagttgaaaaagttatggctgatgagaaaaagatgtttgccaatgcagattttttccatgctcctgcatatttttatatgggcataccaacaaaactatttactccaatatttgtaatgtcaagagtatcaggttgggcagcccattgtatggaacaaagagcaaataataggattattagaccaagcgctgaatatgtcggagtagagtcttcagactgggttgatatttctgataggtcttaaa

SEQ ID NO: 236169 - DNA, 683 bp, Unknown
  Bacterial polypeptide expressing nucleotide sequence isolated from the Sargasso Sea
aaacgatgaggaaagtatggctggtcactttttatacatacttcatggaaaaacaccatcagatttgcatagaaaagtaatggacgtttctttaattttatatgctgagcatgaatttaatgcttcaacttttacggcaagagtctgtgcgtcaactatgtcagatattcattcatgtgtggtagccgctataggttcattgagaggaccacttcatggcggtgctaatgaaaaagcaatggagttaatagaaaattggacttctaaagaagaagcaaaatcaaaaattattgagatgctgagtaataaagaaaaaattatgggctttgggcatgctgtttattcaattagagatccaagaaatgctgttatcaaagaacatgcaaaagagttatccgaattagctgaaaacgatactttatatcaagtagcagaagaggttgagaaagtaatggctgatgaaaagaaaatgtttgctaacgcagacttttttcatgctccagcatatttttatatgggaatacctacaaaactatttacaccaatatttgtgatgtcaagagtttctggttggacagcacattgtatggagcaaagggcaaataatagaattatcagacctagtgctgactatgttggtgttgagtcatctgaatggattgatatctctgataggtcttaaa

SEQ ID NO: 236170 - DNA, 883 bp, Unknown
  Bacterial polypeptide expressing nucleotide sequence isolated from the Sargasso Sea
tatgttaaaatatttatcttcaccattcagatggttttttaagctggaagcagctagtggattaatattactaataagcgctatattagcccttattattagcaactcatcaatatcatatgtatattttgaaacattagaaaaatatatttttttgggcgtaaataattttggtcttaaattatcagtactacattggataaatgacgtattaatggcaatattttttttctttgttactctagaaattaaaagagaatttattcaaggtgagctttcaaatatcaaacaagcaattcttccaataattgcagctgtaggaggaatgttggttcctgcattaatttatgtttatataaattttggtaattctgagactttaactggttgggcaataccctcagcaacagatatagctttttctttaggagttttatctctcttaggatcacgagtacctatttcacttaaagtttttctaacagcattagctataatcgatgacctcggcgcaattgttatcatagcctttttttattctggagatctaagcatattttatttaattatgatgcttttatcattcatagctttgttagctttaaacaaatttaatattaaaaagtttctaccatatttaatagttggaattcttttgtgggattttacacacgagtcaggaattcatgctacaatagcaggagttttgttagcttgtactattccccatagaaaaaaagaaaaggatttttccctgctagttaaaattgaacatgcaataagcccctatgtagcatttggtataatgcccttatttgcttttgctaacgctggggtttctctagaaggaatttctttttcatcattattaatgcctgttcca

SEQ ID NO: 236171 - DNA, 1603 bp, Unknown
  Bacterial polypeptide expressing nucleotide sequence isolated from the Sargasso Sea
aatgagtaaagaaaaattatacatatttgataccacgctaagagacggggcacaaacacagggtgttgatttttctattgatgataaattaaaaatagctaaatcattagatgatcttggggttgattatatcgaaggtggatggccaggagccaatccaacagatacagaattttttcagaaaaaagttaaatgtaaaaattcagtcttaacagcattcggtatgacaaaaaaaactggtagaagtgctgacaatgatccgggcttatctgctcttttaaatagcaattcaaaagcagtatgtattgttggtaaatcatgggactttcatgttgatgttgctcttggtatttcgaatgaagaaaacttagaaaatattagcgaaagcacaaagctttttgttaaagaaaaaaaagaatttatgtttgatgctgaacatttctttgatggctttaaagcaaatccaaaatacacaatgtcatgtttaaaagctgcttatgataacggtgcaagatggatagttttgtgtgatactaatggtgggacactacctcatgaagtaacaaaaatagttaatgaagttataaaaattattccaggaaaaaatttaggaattcacgctcataatgatactggaaatgctgtatctaatagtttagcagcggtattagctggtgtaagacaagttcaaggaacaattaatggattaggtgaaagatgtggaaacgcaaatcttatgtctttaataccaacattttatttaaaaaaagatttttcagataaatttgaaataaatattaaagaaaaaaacataaaaaatttaactcaatgctcaagacttttagatgagatattaaatagaaaaccaaataaacatttaccttatgttggggcagctgctttttcccataaaggaggtttacatgtttctgcagttcaaaaagatccaaaaacctatgaacatataaatcctgaagaagttggcaatgtaagaaatattgttgtttcagatcaggctggaaaatcaaatattttatcaagattaaaaaccattggaattgaaattaaagaagatgatccaaaagttaaaaagcttttgagcgaggttaaagatagagaatttataggctatagttacgatggagcagatgcttcatttgaattattagccagaagaataatgagcgaaataccaagatatattttaattaaagaatatgatgtgtcagtaaaaaaaaactcctcaggaaatataatttcatctgcaaaggctcatctagaagtagatggagaaaaaattgtttgcgaaggtgagggtaatggaccagttaatgctttggataacgctataagaaataatgtcgatcgattagcaaaatattctaaatatttaaaagatcttaaattggtagactataaagttagaattttaaataccggaacagaggctataacaagagtttcaatagaaagcacggattcaaaagggaaaaattggtttacaataggagtttcaacaaacattattgatgcttcatttaaagctttaatagatagtttggattataaattatttaaagataatgctcctgcaagtaattaa

SEQ ID NO: 236172 - DNA, 985 bp, Unknown
  Bacterial polypeptide expressing nucleotide sequence isolated from the Sargasso Sea
atgaaaaaactagaaggagccggattaagagggcaaacagcaggacagacttctttatcaaccgtagaacaagagggaagtttaaggtatctaggctacaagattgaagatttagctaaacatgcttcttttgaagaagttgcacacttattgcttttgggacatttgccaaataaagaacagttatctgattttgaaaatgagctaatgtcattgagaactatgcctgattcattagtttcagttcttgaatcaataccagctgaagctcatcctatggaagttataagaactattatttcttatatgggcgtaactgagccagagaaaagttttgatgatcagttgtctatatcaaaaagacttttaggtgtgacctctacagctattgtttattggtacaagcattctcatgaaaatattaaagttgaacaaaatacaggcgaaaaatcagttgcaggacatttccttaaacttttaagacaagaagatattgaagatttacataaagagactttagatgtgtccttaactctttatgctgagcatgaatttaatgcctctacttttactggaagagtttgtgcatcaacattatcagacattcattcttgcttaacagcagccgtaggaagtttaagaggacctctccatggaggtgcaaatgaagaggcaatgaaaatgcttgaagaaataaattcaacagatgaagtaatagattacatagacagaaaattagaaaacaaagaaaaaattatgggatttgggcatgctgtatattcagttaaagatcctagaagtgacataataaaatcttattccaaagagttaagtaaatcgcaccctaaaaaaatattgcatgatgtagctgcaattatggaagaggatttgaaagaaagaagaatctttttcctaatactgacttttttatggctcctgcatatcattatattaagattccacaaaactatttacgcttctattt

SEQ ID NO: 236173 - DNA, 1123 bp, Unknown
  Bacterial polypeptide expressing nucleotide sequence isolated from the Sargasso Sea
atgacaaaaaaattagaaggagcgggcctaagaggacaagtagctggagagacatctctttcaacggttggccaaatagaaggacttgcctatagaggtcataaaattgaattacttgcagaaaaagcaacatttgaagaagtagcatatcttttactttacgacaaactaccgaatcaagaagaattaattaactacaaagtattgctaagaagccatagggatctccctgactcattaaaagaagtgctacaaaaaatacctgctactgctcacccaatggatgttatgagaactggaacatctatgctgggaaatctagagcctgaaggtgacttttcaaatcaattagattcaattaatagaatgattgcgacgatgccatccattgttacttattggtataagttttcacatgaagggcaggatattgatttggtcaatgatgaagattctatggccggacattttttacatattctccatggcaaaaaaccatctgatctgcataagaaagttatggatgtatctttaattttatatgctgagcatgagtttaatgcttctacgtttactgcaagagtttgtgcttcaacaatgtcggatattcattcctgtgttgttgctgcgattggttccttaagaggtccattgcatggcggcgccaatgaaaaagctatggaattaatagaaaactggacatcaaaagaagaagctaaatctaacattattgaaatgcttaacaacaaagaaaaaataatgggttttggccacgctgtatattcagttcgagatccaagaaatgcagttatcaaagaatatgctaaacaattatctgaacttgctgatacggatacgctatatcaagtagctgaagaggttgaaaaagttatggcggacgaaaagaagatgtttgcaaatgcagactttttccatgctcctgcatatttttatatgggtatcccaacaaaattgtttactccgatatttgtcatgtctagagtttctggttgggcggcgcattgtatggagcaaagagcgaacaatagaattattagaccaagtgctgaatatatcggagttgaatcttcagactgggttgaaatagcagataggtcctaaa

SEQ ID NO: 236174 - DNA, 1015 bp, Unknown
  Bacterial polypeptide expressing nucleotide sequence isolated from the Sargasso Sea
gattgaagatttagctaaacatgcttcttttgaagaagttgcacacttattgcttttgggacatttaccaaataaagaacagttatctgattttgaaaatgagctaatgtcattgagaactatgcctgattcattagtttcagttcttgaatcaataccagctgaagctcatcctatggaagttataagaactattatttcttatatgggcgtaactgagccagagaaaagttttgatgatcagttgtctatatcaaaaagacttttaggtgtgacctctacagctattgtttattggtacaagcattctcatgaaaatattaaagttgaacaaaatacaggcgaaaaatcagttgcaggacatttccttaaacttttaagacaagaagatattgaagatttacataaagagactttagatgtgtccttaaccctttatgctgagcatgaatttaatgcctctacttttactggaagagtttgtgcatcaacattatcagatattcactcttgcttaacagcagccgtaggaagtttaagaggacctctccatggaggtgcaaatgaagaggcaatgaaaatgcttgaagaaataaattcaacagatgaagtaagagattacatagacagaaaattagaaaacaaagaaaaaattatgggatttgggcatgctgtatattcagttaaagatcctagaagtgacataataaaagcttattccaaagagttaagtaaatcgcaccctaaaaaaatattgcatgatgtagctgcaattatggaagaggatttgaaagaaaagaagaatctttttcctaatactgacttttttatggctcctgcatatcattatattaagattccaacaaaactatttacgcctctatttgctatagcaaggattgttggatggtcagcacatgtctatgagcaaagagaaaataatagaataattagacctagtgctgaatacattggcccatcagatcgagagtgggaagatattgaatcaaggtaa

SEQ ID NO: 236175 - DNA, 1603 bp, Unknown
  Bacterial polypeptide expressing nucleotide sequence isolated from the Sargasso Sea
aatgagcaaagaaaaaatacatatatttgatactacattgagagatggagcccaaactcaaggtgtggatttttcaatagatgataaattaaaaatagcaaaggctttagatgatttaggtgttgattatatagaaggtgggtggccaggtgccaacccaactgatacagagttttttcaaaaaaaaattaaattaaataattctgttttaactgcatttggtatgaccaaaagatcagggagaagcgctgataatgatccgggactttcatctattttaaatagcaatacaccagccgtatgtttagttggtaaatcttgggattttcatgttgatgtagctttaggaatatcaaacgaagaaaatttagaaaatatttcggaaagtgcgaagctttttgttaaagaaaagaaagaattcatgtttgatgcagagcatttttttgatggttttaaaaataataaggaatatgcactttcatgcattaaatcagcatacgataatggagctagatggattgtgctttgtgacacaaatggaggaactttacctaatgaagtatctgaaattgtaaatgaagtatctaaatcagttccaggaaaaaatcttggtattcatgctcacaatgatacaggaaatgcagtttcaaattccctagcagctgttttgtcaggagttagacaaatacaaggtacaattaatggacttggtgaaagatgtggaaatgcaaatttaatgtcggtaattccaacattgtacttaaaagaaagctactcaaataattatgaaataaatattaaaaaagaaaatattagcaaattaactcagtgttcaagattgcttgatgaaatattaaatagaaaacctaatcaacatttgccttatgttggtgctgctgcattttcacataaaggaggcttgcatgtctcagccgtacaaaaagatccaaaaacatatgagcacattaatcccgaagatgtaggaaacgtaagaaatattgtagtttcagaccaatctggaaaatcaaatatagtttctagattaaaatctattggaatagattttaaacaagatgacccaaaaataaaaaaacttttagaagaagtaaaagatagggaattcattggctacagctatgatggtgccgatgcgtcttttgaattactagcaagaagaataatgggggaaattccaagatatatttcaattaaagaatatgatgttagtgttaaaaaaaatacttctggagaaatcgtttcttctgccaaagctcaattagaagttgataagaaattaattctttgtgaaggagagggcaacggtcctgttcacgcacttgataatgcaataagaaacaatgtcgacaaacttgcaaaatattctcagtatttaaaagatttaaaattagttgattataaagttagaattcttaacactggaacagaggctgtaacaagagtttcaattgagagcacagattcaaaaggtaaaaactggtttacaattggagtttctccaaacattattgatgcatcatttaaagcacttgtcgatagtttagattataaactatttaaagataaagcacctgcaagcatttaa

SEQ ID NO: 236176 - DNA, 1117 bp, Unknown
  Bacterial polypeptide expressing nucleotide sequence isolated from the Sargasso Sea
aatgaaaaaacttgaaggagctggattaagaggccagacagcaggacaaacttctttatcaactgtagaacaagaaggaagtttaaggtatctaggttatagcattgaagatttagctaagcatgcttctttcgaagaagttgcctatttattgcttctaggacatttaccaaataaaggacaattgtctgattttgaagatgaattagtttcactaagaactatgccaaattctttaattccagttcttgaatcaataccggccgatgctcatccaatggaagttataaggactattatttcttatatgggtgtgactgagccagagaaaagttttgatgagcaattatctgtagctaaaagacttttgggtataacttctacagctattgtttattggtataaatattcacatgagaatattaaagttgaacaaaatactggtgaaaaatcagtcgctggacatttcctcaaacttttaagacaagaagatatagaagatttgcataaaaaaactttggatgtgtccttaactctgtatgctgagcatgaatttaatgcctctacttttaccggaagagtctgtgcatctacattatcagatattcattcgtgtttaactgctgcagtaggaagcttaaggggtcctctacatggaggtgcaaatgaagaagcaatgaaaatgcttgaagaagtcaattcaacggaggatgtaagagattacatagacagaaaattagaaaacaaagaaaaaattatgggatttggtcatgccgtatattcagttaaagatcctcgaagcgacataataaaagcatactctgaagaattaagtaaatcacatgcaaaaaaaatgttgcatgatattgctgcaattatggaagaagacatgagagaaaagaagaatttatttcctaatactgattttttcatggctcctgcatatcactacattaaaattccaacaaaactttttacacctttatttgctatagcgagaattgttggttggtcggcacatgtatttgagcaaagagagaacaatagaataattcgaccaagtgcagaatatataggcccagctgatcgagaatgggaagatattgaatcaaggtaa

SEQ ID NO: 236177 - DNA, 1123 bp, Unknown
  Bacterial polypeptide expressing nucleotide sequence isolated from the Sargasso Sea
atgactaaaaaactagagggcgcaggtttaagaggacaggttgcaggagaaacttcgctgtcaactgttggtcaaattgaggggcttgcctacaggggtcataaaattgaattgcttgcagaaaagtcttcttttgaagaagtcgcttatcttttactttacgataaacttcctaatcaagcagaactagatgattataagaaactgctcaagagtcaaagagaccttcctgattcactaaaacaagttcttcaaaaaattccttcttcagctcatccaatggacgtaatgcgaacaggtacgtcgatgttaggcaatttagaacctgaaggagagttttctaatcagttaaattctattaataggatgattgcaacaatgccatcgattgttacttattggtataaatactctcatgagggtttagatatagatctcgtgaatgatgaagatagtatggccggtcattttttacatattcttcatggaaaaagaccttcagatttgcatagaaaagtaatggatgtttctctaattttgtacgccgaacatgaatttaatgcttctacttttacagcaagagtttgcgcatcaaccatgtcagatatccattcatgcgttgtagctgctattggttctttaagaggacctcttcatggcggagcaaatgaaaaagcaatggagttaatagaaaactggacttcaaaagaagaagcaaaatcaaaaattatcgagatgcttgggaacaaagaaaaaatcatgggatttggtcatgctgtttattcaataagagatcctagaaatgctgtaattaaggagtatgcaaaagaattatctgagttggctgaaaatgatactttatataaagtagctgaagaggttgaaaaagtcatggctgatgaaaagaaaatgtttgctaacgcagacttttttcatgcaccagcatatttctatatgggcattccaacaaaactatttactccaatatttgtaatgtctagagtatctggttggactgcgcattgcatggagcaaagagcaaacaatcgaatcatcagaccgagtgctgattatattggagttgagacttcagattgggtcgatatttctgataggtcctaaa

SEQ ID NO: 236178 - DNA, 1603 bp, Unknown
  Bacterial polypeptide expressing nucleotide sequence isolated from the Sargasso Sea
aatgagtaaagatcagctatatatatttgataccactcttcgtgatggtgcacaaactcaaggtgttgatttttcaattgatgataaagaaaaaatttcttccactttagatgagcttggtgttgattacattgaaggaggttggcctggtgcaaacccaaccgatacagaattttttaacaaagatcacaattttaaatcagctaatttaactgcgtttggtatgaccaaaaaatcagagcatagtgctgaaaatgatccaatgttatcttctttaattaattcgaaaagttcatcaatttgtttgtttggaaaatcttgggattttcaagttgacgtagccctcggtatctcaaatgaggaaaaccttaccaatattagcgaaagtgcaaaacacattgttaaatctggtaaagaatttatgtttgatgctgaacatttttttgatggatataaagcaaacgctgattatgcacttgcttgtttaaaatctgcctatgataatggagcaagatggattgttttgtgtgatacaaatggaggaacacttcctcatgaggttgagaaaattattctagaagttacaaaacatataccgggaaaaaatttaggaattcatgctcataatgatacagaaaatgctgttgcaaacagtttaacagcagttcaagctggcgtgagacaagttcaaggaactataaatggattgggagaaaggtgtggtaatgcaaacttaacatctctgattccaactttttttttaaaaaaagacttttatgaaaattatcatctaaacataaaacgtgaaaacttaaaaaatttaacacaatgttcaaggttgttagatgaattgcttaatagaaaacctaataaacacttaccttacgtaggtgcatctgccttttctcacaaaggagggatgcatgtttctgctgttcaaaaagatccaaaaacttacgaacacataaatcctgaggaggtaggaaattcaaggaatatagttgtctcagatcaatcaggtcagtctaatattatgtctagattgaattcaataggtatcaaggtagagaaaaatgatcctaaaataaaaaaacttcttgaggaggtaaaagatagagaatttataggatatagttatgatggtgcagatgcttcttttgaattattggcaagaagattaatgggtaatataccaagatatatttcaattaatgaatatgatgtttctgttaaaaaagataaattgggagatattatttctcacgcaaaggcaaagttagaagtagatggtcaaaaaatattgtgtgaaggagaaggaaatggtcctgttaatgctttagataacgcaattagaaaaaatgtaaataaacttgataaatattccgaatacctaaaagatttaagattagtcgattataaagtaagaattttaaatacaggaacagaggcggtaactagagttagtattgaaagtacagactctaaagggttaaattggtttactattggagtttcaccaaatatcattgatgcatcttttaaagcactcatcgatagcttggattacaaactctataaagataacgctcctgctagcctttaa

SEQ ID NO: 236179 - DNA, 963 bp, Unknown
  Bacterial polypeptide expressing nucleotide sequence isolated from the Sargasso Sea
tatgattgaatacatatccaagccttttagatggttttttaaattagaagctgccagcggattagttctattaataagtgcaattttagctctaataattagtaatagttcattttcttatttatattttgaaactttagaaaaatatattttttttggattcaataatttcggtttaaaactatcagttttgcattggataaacgatgttttaatggcaatatttttcttttttgtaacacttgaaattaaacgagagtttatacaaggtgaactttctaatatcaaacaagctatactgcctataatagccgctgttggcggaatgttagtgccagccttaatatatatttatataaactttggtaatactgaaaccttaaatggttgggccataccttcggctacagatatagcattttcattaggtatattgtctctacttggttcaagagtacccatatccctaaaagtttttttaactgctttggcaattattgatgatcttggcgctatagttataatcgcttttttttattctggagatttaagtatcttttatttaactatgatgcttttatcttttatagcattgttagttttaaataaatttggttttaaaacattttttccttatttaataatcggtatagccctatggcattttactcatgaatcaggaatacatgctacaatcgcaggtgtattgcttgcatgcaccatacctcataggaaaaaagagaaagatttctctttattagtaaaaattgaacattctataagtccgtatgttgcatttggtataatgccactttttgcatttgctaacgctggcgtttctttagatgggatttctttttcatctcttctcttgccagttccccttggtattttattagggctttttattggaaagcaattaggtgtttttttattttcttatgtagctataaaatttggttt

SEQ ID NO: 236180 - DNA, 955 bp, Unknown
  Bacterial polypeptide expressing nucleotide sequence isolated from the Sargasso Sea
taaaagccaactattagaatttgataaatcattaaaatcttatagaaatttaccacaaactacatacgatattattgatattgtcaaagattctcatccaatggatgtcttaagaactgccatatcatctttatcatcttttgatgaagatagagaagatttctcagaggaagcaattataagaaaaggaataagattaacatcccaggttcccattatagttatggcgcataataggatgagaaaagggctagatccaatagaatcttcaaacgaattatctcatgcagctaactttctttatatgcttgaaggagagaagccaagtgaagatacagctaggttaatggatattgattttgttgttcatgctgatcatggatgtaatgcttctgcatttacaactagagttgttacaggaaccaatgctgatttctacggagcaataactgctggaattgctgcattgtcaggtccttctcatggtggagccgctgaaggtgtaatggagctagctaaagatgtcggaactgccgacaacgcagctaatcatgtaaaaaatcttttggcaaatagagaaagagtaatgggatttggccacagagtttataaagctgcagatccaagagctaagcatttaaaagaaggggtcaaaaatcttagtgaagaaaaaggtgaaacagaatggtatgatattcttttagctgttcaagaggctatgactccatacgctagaagagggatacatgcaaatgtagatttctttgctggagctgtttactacttactaggcattccttctgatctttttgtccctatatttgctgtaggaaggattccaggatggacaatccaaatacttgaacaaatgaggcacaatattctgataaggccattgcttcaatatacaggtgaaagatccaaagaatacatacctattgataaaagggattag

SEQ ID NO: 236181 - DNA, 1123 bp, Unknown
  Bacterial polypeptide expressing nucleotide sequence isolated from the Sargasso Sea
atgacaaaaaaattagaaggagcgggcctaagaggacaagtagctggagagacatctctttctacggttggtcaaatagaaggacttgcttataggggccataaaattgaattacttgcagaaaaagcaacatttgaagaagtagcttatcttttactttatgacaaactacccaaccaagaagaattaaataactataaaacattgctaagaagcaatagagatctccctgactcactaaaagaagtgcttcaaaaaatacctgctacagctcacccaatggatgtaatgagaactggaacatctatgctgggaaatctagagcctgaaggtgacttttcaaatcaattagattcaattaatagaatgatagcaactatgccatccattgttacgtattggtataagttttcacatgatggacaagacatcgatttagtaaatgatgaagatagtatggccggacattttttacatattcttcatggcaaaaaaccatctgatctgcataagaaagttatggatgtatctctaattttatatgctgaacatgagtttaatgcttctacttttaccgcaagagtttgtgcttcaactatgtctgatatttattcctgtgtcgttgctgcgattggttccttaagaggcccattgcatggaggcgctaatgaaaaagctatggaattaattgaaaattggacatcaaaagaagaagctaaatctaatattattgaaatgctcaacaataaagaaaaaattatgggttttggccacgctgtttattcaattagagatccaagaaatgctgttattaaagaatatgctaaacaattatctgagcttgctgatacagacactctttatctggtagctgaagaggttgaaaaagttatggctgatgaaaaaaagatgtttgctaatgcagactttttccatgctcctgcatatttttatatgggtataccaacaaaattatttaccccaatatttgttatgtctagagtttctggttgggcggcccattgcatggagcaaagagcgaacaatagaattattagaccaagtgctgaatatatcggagttgaatcttcagactgggttgaaatagcagataggtcctaaa

SEQ ID NO: 236182 - DNA, 691 bp, Unknown
  Bacterial polypeptide expressing nucleotide sequence isolated from the Sargasso Sea
gatcttgtgaatgatgaagatagtatggccggtcattttttacatattcttcatggaaaaacaccttcagatttgcacagaaaagtaatgatgttttctcttatcttgtatgccgaacatgaatttaatgcctctacttttacagcaagggtttgcgcatcaactatgtcagatattcattcatgcgttgtggctgctattggttctttaagaggacctcttcatggcggagcaaatgaaaaagcaatggagttaattgaaaactggacctcaagagaagaagcaaaagaaaaaattatcaagatgcttgggaacaaagaaaaaataatgggatttggccatgctgtttattcaataagagatcctagaaacgctgtaattaaggaatatgcaaaagaattatctgagttggctgaaaatgatactttatataaagtagctgaagaggttgaaaaagttatggctgatgaaaagaaaatgtttgccaacgcagacttttttcatgcacctgcatatttctatatgggcatcccaacaaaactatttactccaatatttgtaatgtcaagagtatctggttggactgcgcattgcatggagcaaagagcaaacaatcgaatcatcagaccgagtgctgattatattggagttgagacttcagattgggtcgatatttctgataggtcctaaa

SEQ ID NO: 236183 - DNA, 822 bp, Unknown
  Bacterial polypeptide expressing nucleotide sequence isolated from the Sargasso Sea
aatgaccaaagaaaaaatatttattttcgataccacattaagagatggagctcaaaccgagggcgttaatttttctattgatgataaaaataaaatagctaaagcacttgctgaacttggggtagattatttagagggtggatggcctggagccaatacacttgataccactttttttaacaaacctccaaagttaggaaaaactgtccttacagcttttggcatgacaaagaaaagtggtaggagcgctcaaaatgatcctggattatctgctattttaaattcaaatacaccagctgtttgtttggttggtaagtcatgggattttcatgttgaaaaagctttaggaataacaaatgaagaaaatctacaaaatatcaaagagtcatcaaaaattttcataaaaaataaaaaagaatttatgttcgatgctgaacatttttttgacggttataaaaacaatcctgaatatgcattaaattgtattaaaaccgcatttgacgaaggagcgagatggattgttctttgtgatacaaatggaggaactcttccgcatgaagttggagaaatagtttttaaagtttcaaaaagtattccaggaaaaaatttaggaatacatgctcataatgacaccgaaaatgctgtagctaattctttgacagcagttttatcaggtgctcgtcaaattcagggaacaattaatggattaggagaaagatgcggtaatgcaaatttaatttctgtaattccatcactagttttaaaagaaagttttgcaaaaaattttgaaataggtatttctaaagacaaaatgaaaacatt

SEQ ID NO: 236184 - DNA, 970 bp, Unknown
  Bacterial polypeptide expressing nucleotide sequence isolated from the Sargasso Sea
atgattaaatatctatctaaaccctttatatggtttttcaaattagaagctgcaagcggtttaatattattaattagtgcaattttagctcttataataagcaattcatcattatcaaatctttattttgaatctttaaagcaatatatatttattggattaaataattatggtctaaagctatctgttttacattggataaatgatgttcttatggcaatcttctttttttttgtaactttagaaattaaaagagaattcatacaaggcgaactttcaaatattaagcaagctatgctgcctatcgttgctgctgttggtgggatgcttgtcccagcattaatttatgtttatataaactggggtaactctttaacaataagtggatgggctatcccttctgccacagatatagcgttttcactaggagtactatctttacttggatctcgtgtgcccatttctttaaaagtttttttaacagctctagctattattgatgatctcggcgctatagttatcattgcttttttctactctggaaatttaagcgtcttttatttaactatgatgcttctaagttttattggattgcttattttaaatagaactggttttaaaacatttttaccatatttaattcttggaatagcgctttggcactttactcatgaatctggcattcatgcaacgatagccggtgtattattagcgtgcacaatacctcatagaaaaaaagaaaaagacttttcgttattagttaaaattgaacatataataagcccatatgttgcctttggaataatgccattgtttgcttttgcaaatgcaggtgtttccttagaaggcatttctctaatgtatcttttaaaaccggttcctcttggaattttgttgggtttatttattggaaaacaattaggagttttcttcttttcatacatatctattaaactaggatttgcacaaa

SEQ ID NO: 236185 - DNA, 828 bp, Unknown
  Bacterial polypeptide expressing nucleotide sequence isolated from the Sargasso Sea
aatgtcagaaaaaatatatatatttgatacaactttaagagatggtgctcaaactcaaggagtagacttttccttagatgataaagaaaaaatatcaaaagctttagataacttaggtgttgattatatagaaggagggtggcctggagccaatccaacagatacagaattttttaataaaaaacatgcttttaaacactcaaaattaacagcttttgggatgactaaaaaatctgatcatagtgctgagaatgatccaatgatttcatctctaataaattctaaggcaagctcaatttgtttgtttggaaaatcatgggattttcatgttgatgtagctttgggtatatccaaggagcaaaatttaaaaaatattagcgaaagtgcaaggcacataataagctctggaaaagaattcatgtttgatgctgaacatttttttgatggatataaatcaaataaaaattatgctttgagttgtattaaatctgcatatgatgctggagcaagatggattgttttgtgcgatacaaatggaggaaccttacctcacgaaatttctgaaattattaccaatgtaatcaagcatgttcctggaaaaaatttgggtatacatgcacataatgatactgaaaatgcagtagcaaattcattagttgctattcaagctggagttagacaagttcaaggaacaataaatgggcttggagaaagatgtggtaatgctaatttaatgtccgtaattcctacattatacttaaaatctgaattttctaataaatttgagattaatattaactcagataatattaaacatttaacacaatg

SEQ ID NO: 236186 - DNA, 904 bp, Unknown
  Bacterial polypeptide expressing nucleotide sequence isolated from the Sargasso Sea
atgagtaaagataaactatatatatttgacactacattaagagatggcgcccaaacacaaggggtggatttttctattgatgataagctaaaaataactgaagcgcttgacaatttaggtgttgattatattgaaggtggttggccaggagctaacccaactgatacagaattttttcagaaaaaaaataattgcaaaaactcaatattaactgcatttgggatgacaaaaaaaactggtagaagcgctgataatgatccgggtttatccgcacttttaaatagcaatacaaaagcaatatgtatagttggaaagtcatgggattttcatgttgatgttgctttaggtatttctaatgaggaaaacttagaaaatattactgaaagtactaagttattcgttaaagaaaaaaaagaatttatgttcgatgcagaacatttttttgacggctacaaagcaaatcctaaatatgcattagattgtcttaaagctgcctatgataatggtgcaagatggatagttttgtgtgacacaaatggtggaacattacctcatgaagtatcaacaattattaatgaagttattaaagtggttcctggaaaaaatttaggaattcatgcgcacaacgatacaggaaatgcagtatcgaatactttaaccgcagtattagctggtgttagacaagtgcaaggaacaattaatggactaggtgaaagatgcgggaatgcaaatattatgtcattaataccaacattttatttaaaaaaagatttttcagataaatttgaaattaatattaaagaaaataacattaagaatttaactcaatgttcaaggcttttagatgagatattgaacagaaaaccaaataaacatttgccttatgttggtgcggctgcttttc

SEQ ID NO: 236187 - DNA, 1123 bp, Unknown
  Bacterial polypeptide expressing nucleotide sequence isolated from the Sargasso Sea
atgactaagaaattagaaggagcaggtttaagaggtcaagtagctggagaaacttctctttctactgtcgggcaaattgaaggtttagcatacagaggacacaaaattgaaacccttgcagaaaaagcaacttttgaagaggtagcttatcttctactatatgacaaacttcctaatcaaactgaattagacgaatacaaagagctattaaaaaatcaaagagatcttcctgattcattaaaagaagttcttcaaaaaattcctgccaatgcacatccaatggatgtaatgagaacgggaacctcaatgttaggtaatttagagccagaaggagatttttcaaatcaacttaattcaataaatagaatgattgcaactatgccatccatagttacatattggtataagttttcccatgaaggtatagatattgatttagtgaatgatgaagatactatggctggacattttctccatattctccatggccagaaaccatccgatcttcatagaaaggttatggatgtatctttaattctctatgcagagcatgaatttaatgcttcaacttttactgccagagtttgtgcttcaacaatgtcagatattcattcgtgtgttgtagctgcaattggatctttaagagggccacttcatgggggagcaaatgaaaaagctatggaattaattgaaaactggacttcaaaagaagaagcaaaatcaaacataattgaaatgctaagcaagaaagaaaaaattatgggttttggacacgcagtatattcaatcaaggatcctagaaatgctgttataaaagaatatgctaaagagttatctgaacttgctgataatgatactttatatcaagttgcagaagaggtagaaaaggtcatggcagatgaaaagaaaatgtttgctaatgctgatttcttccacgcgccagcatatttttatatgggcatacccactatgttgttcactcctatatttgtaatgtccagagtttctggttgggcagcgcattgtatagagcaaagagctaacaacagaatcattcgaccaagtgctgaatatatcggtgttgagtcatctgactgggttgatatctcagaaaggtcttaat

SEQ ID NO: 236188 - DNA, 727 bp, Unknown
  Bacterial polypeptide expressing nucleotide sequence isolated from the Sargasso Sea
aatgatcactaaaacaacctccttttttaaatggttcataaaacaagaaacgtcagctggtattgtgttagtctttatgacagtaattgcgctaatcgtcagcaattcagttctttcagatacttatttttcaattttaaaaacttatatccccctagggtttggtgaatttaaattaaaactttctgtatttcactggattaatgatgcattaatggcaatattttttttagtggtaggtctcgaaatcaagagagaatttgttgaaggtgaattgtctagaccaaaacaagctgccttacctatcttgggtgcggttggcggaatgcttgtacctgcgcttgtttatgttgcatttaattatgaaacaccagaaactttaagaggttgggcaattccatcggctaccgacattgctttttcgattggtattttgtctttattgggatccagagttccattgtcattaaaagtttttttagtagcccttgctattatagatgatatgggcgccgttataattatagctatattttattctacaaaattaaatattttttatttaactttagtcctgtttagctttttaattctgatgggattaaacaagtttaaggttaaaagcttttttccctttgcgatcgtaggaacctttatgtggttttttactcatgagtctggaattcatgcaacaattgcaggggtcttattggccattacaattcca

SEQ ID NO: 236189 - DNA, 994 bp, Unknown
  Bacterial polypeptide expressing nucleotide sequence isolated from the Sargasso Sea
aatgagtaaggaaaaaatctatatatttgatactacattaagagatggagcccaaacccaaggagtagacttttccttaaatgagaaggaaaagattgcaaaatctttagatcatttaggagtggattatattgaagggggatggccaggagctaacccaactgatacagaattttttaataaagaccaaaatttaaaaaatgcaagtctaactgcatttggtatgactaaaaaatcagagcatagtgcaaataacgacccaatgttatcatcattaataaattctaaaagttcatcagtttgtttgtttggcaaggcatgggattttcatgttgatgtcgctttaggtatttcaaatgagcagaatttagaaaacatttgtgaaagcgcaaaacatattgtgagctctggtaaagaatttatgtttgatgcagagcacttttttgacggttataaatcaaattctgaatatgctttatcatgcttaaagtctgcatatgataatggtgcgagatggattgttctttgtgatacaaacggtggaactttacctcatgaaatatctaaaattgttgaagatgttacaaaacatattccaggaaaaaatttaggcattcatgcacacaatgatactgaaaatgctgttgctaatagtttagtagcagtacaagctggcgttagacaggttcaaggtaccataaatggattaggggagagatgcgggaatgcaaatcttatgtctttaataccaacttttttctttaaaaaagatttttcagataaatacgaaataagtattaaaccagaaaatattaaaaatttaacacagtgttcaagattattagatgaaatattaaatagaaaaccaaacaaacatttgccttatgtgggtgcatctgcattttctcataaaggaggaatgcatgtatcagctgttcaaaaagatccaaaaacctatgagcatattaaccctgataatgtaggaaaatgttag

SEQ ID NO: 236190 - DNA, 719 bp, Unknown
  Bacterial polypeptide expressing nucleotide sequence isolated from the Sargasso Sea
aatgagtgaagatataaaaaaaggtttacttggaatagttgttgatgagacagaagtttcaaaagttatgccagaaattaattctcttacttatagaggttatgcagctcaagacctatgtgaatattgtagatttgaagaagttgcctacttaattttaaataaagatcttccaaatactattcagctaagaaaatttgagaaagaagagaaaaataatagagaattatctaaagacctttattcaattttaaaaaagatgcctaaaaaagctcatccaatggatgtagcaagaacagctgttagtgtaatgggcttagaggataaggaaacgacagactcttcaccagaagcaaacatgcgaaaagcaattagaattttggctaaaacacctactgctttagctgccttttatagattgagaaaaggaaaaacaattattaaacctaaaaaagatctaaatattgctgaaaattttttctacatgtgttttggtaaagtgccacaaaaggaaattgtcaaagcttttgatgtttctctaattttatacgctgaacatagttttaatgtatcaacattcacagcaagaactattacaagtagtttatctgatattcatggagcaataactggagctattgccagtttaaaaggaccccttcatggaggtgcaaatgaagaagtaatgcacatgatgaataaaattaagaaacctgaaa

SEQ ID NO: 236191 - DNA, 829 bp, Unknown
  Bacterial polypeptide expressing nucleotide sequence isolated from the Sargasso Sea
aatgagtaaggaaaaaatatatatttttgatacaactttaagagatggagcccagacagagggtgtgaatttttctatagatgaaaaaaataaaatcgctaaatcactctcagaacttggtgtagattatttagagggcgggtggccaggagcaaatacattagacactactttttttaataaacctccgagtctcggcaatacagtcttaactgctttcggaatgacaaaaaaaagtggaagaagtgcacaaaatgatccaggtttatctgctattttaaactctaatacacccgctgtatgtttagtaggaaaatcttgggatttccatgtggatgtagctttaggcattagcaataaagaaaatttagaaaacataaaagagtcagcaaaattatttgtcaaaaataaaaaagaattcatgtttgatgctgagcatttttttgatggttataaaaataatccagaatatgcaataaattgtttaaaaactgcttatgacgaaggggcaagatggattgttctttgtgatacaaatggaggtactcttccacatgaagtaggagaaattgtttcaaaagtttctaaagttataccgggtaaaaatttaggaatccatgcacataacgatactgaaaatgcagtagcaaactctttaattgcaattttatctggcgcaagacaagtacaaggaacaattaatggtcttggcgaaagatgtggtaatgcaaacttaatgtcagtaattccgacattagtcctaaaagaatccttttcaaaaaaattcgatataggtattaaaaaagaaaaaataaaaaaattgactgaa

SEQ ID NO: 236192 - DNA, 1603 bp, Unknown
  Bacterial polypeptide expressing nucleotide sequence isolated from the Sargasso Sea
aatggaacgcgtttacatatttgatacaacacttagggatggcgggcaaactaaaggagttgatttttcttttgctgataaaattgctattagtgaagctttagatgatttaggaattgattacatagagggtggttggccaggtgcaaatccaactgatgataaattatttggctctccaccaaaattaaaagtttcgaattttgtcgcgtttggaatgactagaaggccaaacacaagtgctgccaatgatccaggtttaaatgcggttctaagtgggaaatctgattctgtatgcctggtgggaaaaacatgggactttcatgtaagtaaagcactaaatattacccttgaagaaaatattgacatgataagtgagtctataaatgagattaataaaagaggcaagcaagcactatttgattgcgagcacttttttgatggctttaaaaataataaaaaatttgcgttagaatgtgttcgttctgcttttgaagcgggggcaaaatgggttgttctttgtgataccaatggaggcactcttccacatgagattactaagataataaatgaagttaatgaaagcattcctggtgtgccattggggatccactgtcacaatgattcaggaactgctgttgcttgcagtttagccgcaattgaagctggtgttcgtcacgtgcaaggcacaataaacggtcttggtgagagatgtgggaatgctgacttaatagctttaattcctaatttaatgctcaaattaaattatgaaactggaattaaaaaagaaaatttatataagcttaagcacttgtctaggctcattgatgacagattaaacaggtcaccaaatttaacacagccatatgttggcgaagcggcttttgctcataaaggaggattgcatgcgtcaggtgttcagaaagacagtaggtcttatgaacatgtagaaccagaaatagttggcaatcaaagaagtttcgtagtttcagatcaaactggaaaatcaaacattatcgcaagattaaaagaggtaggcttaaaatttgatgtgaaagacagccggttagacaaactcattgagaatataaaagaaaatgaatttaaaggattttcttacgatactgctgaagcaagtttcgaattaatggcaaggagaactcttgaaaaagttcctgattattttgtaattggcaggtttcgtgttatggatgaaagaagatttaacgcgaaaggggatttagtagttgagtctgaggcatctgttacgctcaatgtgggaggacagtcattccatgaagttgcaataggtaatggaccggttaatgcagttgacacagctctaagaaaagcactcactaaaatttatccaagtttaaattcagtcagcctagtagactataaagtgagaattattgatagtggttcaggtactgaggctacaacaagggtgttaattgagtgtgaagatgataacggtgatcggtggagatcagttggattgtcaacgaacattattgatgcctcagtcatggcactttatgactctctcacctggagattattatccttaggtataacaccagaagcaccagcaaattaa

SEQ ID NO: 236193 - DNA, 1582 bp, Unknown
  Bacterial polypeptide expressing nucleotide sequence isolated from the Sargasso Sea
tatggatgacaaagtatatatatttgataccactctaagagatggtcagcaaactactggtgtaaatttttcagttagtgataaaatgataatatcacaacatctaaacgagattggtattgattatatagaaggagggtggccaggagcaaatcctacagacaatgattttttttctagagatttagaattaaataatagtaaattaactgcttttggtatgacacgcagaccaggtagaagtgtagaaaatgaccctggtttaaattctctaattaactcaagtgcaagttgtgtatgtatagtcgggaaatcctcatcttttcatgtaaaaaatgcattagaaatttcaaaagatgaaaatctaaaaatgatcagtgatagtattaaatatataaaaagtaaaaacaaagaacctatttttgatgctgaacatttttttgatggatataaagaagataaagaatttgctattagttgtattaaagctgcttatgatactggagctagatgggttgttctttgtgatacgaatggtggaacgttaccaaatgaaatttttaatatagttagtgaggttgttaaaattatccctggaaaaaatattggaattcatgctcacaatgatactgaaaatgctgtagctaatgcgttagctgccgttaatgctggtgcacgacaagtccaaggtactattaatgggttaggagaaagatgtggaaacactaatcttatttcattaattccttcattagttttaaaaacaaattttgaaacaagcatcaataaagataaattaaaaaatttaataaatatatctaggacacttgataatattttgaatttacaacctacaaaaaatgcaccttatgttggtgagcatgctttttctcacaaaggaggcttacatgcatcagctgtagaaaaaaactcctcaacttatgagcatattgaaccagaaattgtaggtaactcaagaaatgttgtaatttctaatcaagctggaagatcaaatatattaaatcaattaaacaaattaaatatagaattaaaaaaagatgaaataaataagatattagaaaatattaaagaaaaagaatcagaaggttattcgtttgataccgctcttgctagttttgaactattagtaaggcgtcaattaggtcattttgaagattattataaattagaaaaatttagagttactgatgaaagaagatggaatgctaaaggatctttagtaacagaagcagaagcaacggtacatttaaaagttaataaaactgatattatgactgttggaataggtaatggtcctgttaacgctatagatagtgcactaagaaaaggtctaattgatcattttccatcattggaagatttaaaacttacagattataaagtaatgatactttcatccgataaaggcactggtgcaataactagagttttaatagaatcatctgattcaactaataaacactggactacaattggtgtttcaccaaatataattgatgcttcctacagtgctatttttgatagtataacttataaattatttaatgctcaaaagaattag

SEQ ID NO: 236194 - DNA, 673 bp, Unknown
  Bacterial polypeptide expressing nucleotide sequence isolated from the Sargasso Sea
atgaaaaaattacaaggcgccggtttaagaggacaatctgcaggtcaaacctctctttcaactgtggaacaggaaggtagtcttagatatcttggttatagcattgaagatcttgctaaaaatgcaagttttgaagaggttgcctatctgcttttactcggacatttaccaaaaaaacaagaattagaggaatttgaaaatgagttggccagtcttcgtgaaatgcctgattctctagtgaccgtgcttgaatcaatccctgcagaagcacaccctatggaagtagtcagaacaattatttcttacatgggtgtgattgagtcagagaggtcattcgatgaacaactagacgttacgaaaaggttgcttggggtgacaactactgccattgtttattggtataagttttctcatgaaggaataagaatagagcaaacttcacatgaagtttctgttgctgcgcattttcttaaattattaaggcaagaggaaataaatgatctccataaaaggacattagatgtttcattaactttgtacgctgaacatgaatttaatgcatctacatttactggaagggtatgtgcgtcaacattgtctgatttacattcctgtttaacagctgccgttgggagtttaagaggaccattgcatggtggagctaatgaagaag

SEQ ID NO: 236195 - DNA, 1528 bp, Unknown
  Bacterial polypeptide expressing nucleotide sequence isolated from the Sargasso Sea
atgagtaaagatcggttatatatatttgatacaacgctgcgtgatggtgcacagactcaaggtgtagatttttcaattgatgataaagaaaagatatcattctccttagatagtctaggtattgattatattgaaggaggatggcctggggcaaatcctacagacactgaattttttaacaaggatcataaatttaaatctgcaaaattaacagcattcggtatgacaaaaaaaactgaacatagtgctgaaaatgatccaatgctatcttctttaataaattcaaaaagttcatcagtatgtttgtttggtaaatcatgggattttcaagttaatgttgctcttggcatctctaatagtcaaaatcttttaaacataagtgaaagcgcaaaacatatagttaaatcaggtaaagaattcatgtttgatgcagaacatttctttgatggatataaatcaaatccagaatatgctatttcttgtgtaaaagctgcatatgataatggtgccagatggattattttgtgtgatacgaatggcggaactcttccccacgaagttgctaaaattgttaaagaagtcattaaatacataccaggtaaaaacttaggaattcatgcacataatgatactgaaaatgctgtagccaatagtttaatagcagtccaagcaggcgttagacaagttcaaggaaccttaaacgggttgggagaaagatgtggaaatgcgaatttagtttcattgattccaactttttttttaaaaaaagatttttatgaaaattatgaattaaatatcaaacgcgaaaatttaaaaaatcttactcaatgctcaagattattggatgaactcttaaatagaaaaccaaataaacatttaccctatgttggagcttctgctttttctcataaaggtggtatgcatgtttctgctgttcaaaaagatccaaaaacttacgaacatgttaatcctgaagaggtgggaaattctagaaatatagttgtttcagatcaatcaggacaatcaaatattatgtctagactaaatctaataggaataaaagttgaaaagagtgatccaaaaattaaaaaacttttggatgaagttaaagatcgagaatttattggttatagttatgacggtgctgatgcatcatttgagttattagcacgaagattaatgggggagataccaagatatatttctattaatgaatatgatgtttcagttaagaaagatagtgtaggagagattatttcatacgcaaaagctcaattagaagtcgatggggataaaatattgtgtgaaggacaaggaaacggacctgttaatgccttagataacgctatcagaaagaatgttaacaagcttgctaaatattcagaatatttaaaagatttaagacttgttgattacaaagttagaattttaaacactggtacagaagctgtaacaagagttagtattgaaagtacagactcgaaaggagtaaattggtttactataggagtatcgccaaaatataatt

SEQ ID NO: 236196 - DNA, 1156 bp, Unknown
  Bacterial polypeptide expressing nucleotide sequence isolated from the Sargasso Sea
atgcgaataaataaaaaaatagaaattcttgattcgactctaagggagggcgaacaaactccaggtgtatcatttaccaaatcacagaaaatagaaatagtaaaaatgttagatgattttggagttgattttatagagctaggccatcccgcagtttctaaagatatttatagcacaattaaattattaaatagtgagccattaacttcagaaaaaattgtccatgctagactgaaaaagtcagatatagatgatgccgttaacttgggcgtcccatggataggactgttttttggtacatctaaagattaccttcatgacaagtataatttggatgaaaaaaatgcactagaaatgatcaaagaaagtatagagtatgcaaaacgtaacggtctaaaaattcgttttacagcagaagacgcatcacgaacagatatagattttttaataaaaatcgggaagctagctgagaaagctggagcagatcgttttagcctagcagatactgtaggaatattatatccagctaaagtgtcggaattagtaagtgctttaatttcagaattgaaaatccccttacatatgcactgtcataatgattttggtttggctactgcgaacgctcttcaggcacttcaatcaggtgttaagtgtgttgatgttactataaatggtctaggggaaagatgtgggttgcctcctttagctgaagtaacagcagcccttgatgaattatataaaatagatcactcatgggatttaaaaaaacttaagctgatgtcctcctatattgataaaataacaaaaacagataataaatatatcagacccataactgggaaatattcttttagtcacaaggcaggcctacatgtaaatgcaatgttgaaaaatcaaagttcttatcagtctatgtctccaaaaaagcttaatcgtagacatagaattattattgataaatatacaggtaggaaagctattcaatatcgcttgaaacatttaaaaatcgaatatgatgaccaactcattgataatattgttttagagataaaaagaaatccaattattactaattggacagataaaaaaattatgcaattagctgaaaaatttatatctgccaaaattgaaagcgcgaaatcatccgttttataat

SEQ ID NO: 236197 - DNA, 1123 bp, Unknown
  Bacterial polypeptide expressing nucleotide sequence isolated from the Sargasso Sea
atgacaaaaaaattagagggagcgggtttaagaggtcaagtcgcaggagaaacttctctttcaactgttggtcaagttgaaggactcgcctatagaggacacaaaatagagttacttgctgaaaaatcatgttttgaagaagttgcttatttgcttttatacgataagttacctaatcaaaaagagttagatgattacaaacagttacttaaaaatcaaagagatcttccagactcattaaagcttgtattgcaaaaaatcccgtcatcagcacatccaatggatgttatgcgcacaggcacctcaatgttaggaaaccttgagccagaaggagagttttcaaatcaattgaactcaattaatagaatgattgcgactatgccatcaattgttacatactggtataaatactctcatgaggggttagatattgatctacttaatgatgaggatagtatggctggtcattttttacatatactccatggagaaaaaccaactgatcttcacagaaaggttatggacgtatcattaattttatatgctgagcatgaatttaatgcatccacttttacagcaagggtctgtgcgtctaccatgtcagatattcattcttgtgttgtagctgcaattggttccttaagagggcctcttcatggcggtgcaaatgaaaaagccatggaattaattgaaaactggacttcaaaagaagaagcaaaaacaaaaataatcgaaatgctaggtaacaaagagaagataatgggttttggtcatgctgtttactcaataagagatccaagaaacgcagtcataaaagaatatgctaaggaattatctcagttggccgaaaatgatactttgtatcaagtagctgaggaagttgaaaaggtgatggcagatgaaaagaaaatgtttgccaatgcagacttcttccatgctcctgcatatttttatatgggtatacccactaaattgtttacaccaatattcgtaatgtctagagtttctggatggacagcgcactgtatggaacaaagagcaaataatagaatcattagacctagtgcagaatatattggagttgaatcttcagattgggttgatatttctgacaggtcttaaa

SEQ ID NO: 236198 - DNA, 1603 bp, Unknown
  Bacterial polypeptide expressing nucleotide sequence isolated from the Sargasso Sea
atgagtaaagaaaaaatatatatttttgataccacattgagggatggtgctcaaaccgaaggtgtaaatttttcaattgacgataaaaataaaatatcaaaatcacttgctgatttaggtgttgattatttagaaggtggatggccaggagctaatacactagatacaactttttttaataaaccacctaatttaggaaatacaatactgacagctttcggtatgaccaaaagatctggacgtagtgctgaaaatgatcctggattagctgcaattataaattcaaatacaccagctgtttgtttagtgggtaagtcctgggattttcatgttgaaaaagctttgggtataacaaataaagaaaatttggcaaatattaaagagtcgacaaaaatttttataaaaaataaaaaagaatttatgtttgacgcagaacatttttttgatggatacaaaaataatcctgaatatgcattaagttccataaaaactgcatatgatgaaggggcaagatggattgttctttgtgatacgaatggtggaacactcccgcatgaagttggagaaatagttttaaaagttgcaaaaagtattccaggaaaaaatttagggattcatgctcacaatgacacagaaaatgctgtaggaaattctttgacagcagtattatcaggtgctcgccaaattcaaggaacaatcaatggattaggagaaagatgcggcaatgcaaacttaatttctgttattccctcactagttttaaaggaaagttttgcaaaaaattttgaaataggtatttccaaagataaaatgaaaacattaacagattgctcgagattattagatgaaattcttaatagaaaatctaatagacactctgcatatgtaggggcctcagcctttgcacataagggaggtctacatgtttctgcagtaacaaaggatcccaaaacctacgaacatattgatcctaatttggtagggaactttagaaatattgttgtttcagatcaatctggaaaatcaaatattatgtctagattagaaaaatatggaatcaaaattgacaaaagtgactcaaagatacaaaaattattaaacgaggtaaaagacagagagtttgccggttattcttatgatggtgctgatgcatcatttgagttattagcgagacgactcttgggcgaaatacctaaatatttaactatttctaaatacgatgtctcagtaaaaagagattcaaaagataaaattaattcctttgccaaagcgcacattgaggttgacggaaaagaaattatctgcgagggatcgggcaatggtccagttaatgctttagataatgcaataaggtctaatgtagataaagttggaaagtattctaaatatctaaaagacttaaaacttgttgattataaagttagaatattaaacacaggaactaacgcaacaacacgtgtctcaatagaaagtacagataaagatggtaagaattggtttactatcggtgtgtccccgaatattatagatgcttcatttaaagcattgattgatagtttggattacaaattatacaaagaaaaagccccggcaaatgattaat

SEQ ID NO: 236199 - DNA, 493 bp, Unknown
  Bacterial polypeptide expressing nucleotide sequence isolated from the Sargasso Sea
gctatagctagtttaaaaggtccattacatgggggagctaatgaagaagtgatgcatatgatgaacaaaataaagaaacctgaaaaagctctgaaatggattaatgatgctttagataacaaagatgtggttatgggttttgggcatagagtttacaaaagtggagattctagagtacctaccatgagaaaatactttggaaaggttgcaaaaattaaaaaagacaagaagtttgaaaaaatttatgacattgttgaaaaggtaatgattgatagaaaaaatattcatcctaatgttgattatccaactggacccacttatcatttaatgggctttgatacagatttctttacgcctatatttgttacttctagaattacaggctggtcggcacatataatggaacaacacgctgcaaataaattaattagaccgctctctaaatatagtggtccaaaacatagaaaagttttacaattaaatcaaagataat

SEQ ID NO: 236200 - DNA, 817 bp, Unknown
  Bacterial polypeptide expressing nucleotide sequence isolated from the Sargasso Sea
aatgagtgatgaagtaaaaaaaggtttgttgggtattgtagttgatgaaactcaagtctctaaggttatgcccgaaataaattcgttaacttacagaggttatgcggttcaagacttatgtgaaatgtgtagatttgaggaagctgcatatttaatccttaatggtgatcttccaaatactattcagttaagaaagtttgagaaggaagaaagatttaatagagatctttcaaaaaatctaaacgatataatcaaacacatgccaaaaaaatctcatccaatggatgtggctagaactgcagtaagtgtaatgggattagaagataaagaaacaaataataattcacctgaagctaatatgagaaaagcaatgagaatttttgctaaaactccaacagctttagcagctttttatagaataagaaaaggtaaaaaaatcattaagccgaaaaaaaacttaacttttgcggaaaactttttttatatgtgctttggtaaagttccaaataaagaaattgtaaaggcttttgatgtatctttaattttatatgcagaacatagctttaatgtctctacttttactgcaagaacaataacaagtagtttatccgatattcatggggctattactggagcaatagctagccttaaaggtccattacatggtggtgcaaatgaagaagttatgcatatgatgaataagattaaaaaaccagaaaatgctctaaagtggattaataacgcattggataaaaaagaagttgtaatgggttttggtcacagagtttataagtctggagactcaagagtccctaca

SEQ ID NO: 236201 - DNA, 769 bp, Unknown
  Bacterial polypeptide expressing nucleotide sequence isolated from the Sargasso Sea
atgagaaaagcattaagaatttttgcaaaaactcctactgcgttggcagcattttatagaattagaaaaggaaaaaaaattattaaaccaaagaaaaacttaacttttgctgaaaactttttctatatgtgttttggaaaagttcctcaaaaggaaattgttaaagcatttgatgtttctttaattttatatgctgaacacagttttaacgtatcaacttttacagctagaacaatcaccagtagcttatctgatatacacggcgcaataacaggagcaattgctagtttaaaaggacctcttcacggtggtgccaatgaagaagtgatgcatatgatgaataaaattaaaaaaccagaaaatgcacttaaatggataaatagtgcgcttaaaaataaggaagtagtcatgggatttggtcatagagtttataagtcaggcgactcgagagttccgactatgagaaagtactttggtaaagtggctaaacttaagaaagataaaaaatttgaaaaaatctacgatattgttgaaagagtaatgatcaaaaagaaaaatatatatcctaatgttgattatccaactggacctacataccatttaatgggttttgatactgactttttcaccccaatatttgtaatttcaaggatcacaggctggtcagcccacataatggaacagcacgcagctaacaaacttatacggccacttgctaagtataaaggtagtaagcaccgtaaggttatggaattgaactatcgataat

SEQ ID NO: 236202 - DNA, 817 bp, Unknown
  Bacterial polypeptide expressing nucleotide sequence isolated from the Sargasso Sea
gatgggattagaagataaagatacaacaaacaactctcctgaagcaaatatgagaaaagcaatgagaatttttgctaaaactcctactgcactcgctgctttttatagaataagaaaaggaaaaaaaataattaaaccaaaaaaaaatctttcttttgctgaaaacttttttcatatgtgttttggaaaagttccaaataaagaaatagttaaagcttttgatgtctctttaattttatatgctgaacatagttttaatgtttcgacttttactgcaagaactataacaagtagtttatcagatattcatggagcgattacaggagctattgcaagtttaaaagggcctttgcacggtggggcaaacgaagaagtaatgcatatgatgaataaaattaaaaaacctgagaatgctcttaaatggattaacaatgctttaagtaaaaaagaagttgttatgggatttggacatagagtttataaatctggtgactcgagagtgcctacaatggaaaaatattttaaaaatgtctcaaaaataaaatctgataaaaaatttattaaaatttacaatattgtcaaaaaagtgatgatagataaaaaaaatattcatcctaacgttgattatccaacgggtccaacttatcatttaatgggttttgatactgatttttttactcctatatttgttacatcaagaattactggttggtctgctcatataatggaacagcatgccgcaaacaaattaattagacctctttcaaagtatagtggtcaaaaacatcgtaaagtgatgttgttaaatcaaagataa

SEQ ID NO: 236203 - DNA, 809 bp, Unknown
  Bacterial polypeptide expressing nucleotide sequence isolated from the Sargasso Sea
aatgagtgatgatataaaaaaaggtttactaggtattgttgtagatgaaactgaagtttcaaaagttatgcctgaaattaattctcttacatatagaggttacgcagctcaagatttatgcgagtattgtagatttgaagaagttgcttatttaattttaaataaagatctaccaaataccattcaacttagacaatttgaaaaagaagagaaaaataatagagaactgacaaaaaatttatatgaaataattaaacacatgcctaaacgatctcatccaatggatgttgcacgaactgcggtaagtgtgatgggattagaagataaagaaactacagattcttcacctgaggctaatatgaggaaagctttaagaatttttgcaaaaacgccgactgctttagctgcattttatagaattagaaaaggaaaaaaaataattaaaccaaaaaaaactttaacatttgctgaaaattttttctatatgtgttttggaaaagttcctcaaaaagaaattgttaaggcctttgatgtgtctttaattttgtatgctgagcatagttttaatgtttcaactttcactgcaagaacaattactagtagcttgtctgatatacatggcgctataactggggcaattgctagtttaaaaggtccgcttcatggtggagcaaatgaagaagttatgcatatgatgaataaaattaaaaaaccaggaaatgcactaaaatggattaataacgccctaaaaaataaacaagttgtaatgggatttgggcacagagtttataaatcaggagattctaggg

SEQ ID NO: 236204 - DNA, 985 bp, Unknown
  Bacterial polypeptide expressing nucleotide sequence isolated from the Sargasso Sea
atgccagaaattaatcttctaacttacagaggttatgctgcacaagatttgtgtgaatactgtagatttgaggaagtagcttacttaattttaaataaagatttaccaaatactatagagcttagaaaatttgaaaaagaggaaaaaaataacagagagttatcaaaaaatttatatgaaataataaaacatatgccaaaaaaatcacatcctatggatgtagccagaactgctgtaagtgtaatgggattagaagataaagaaacccaagattcttcaccagaagctaatatgagaaaggcattaagaatttttgcaaagacccctactgctttagcggcgttttatagaattagaaaaggaaaaaaaataattaagcctaagaaaactttaacttttgcggaaaactttttttatatgtgttttggtaaagttccacaaaaagaaattgttaaagcttttgatgtatcactaatactttatgctgaacatagttttaatgtttcaacatttactgcaagaactataacgagtagcttatcagatattcatggagcaattacaggagccattgctagtttgaaaggaccgttgcatgggggtgctaatgaagaagttatgcacatgatgaataagataaaaaaacctgagaatgcgttaaaatggattaataatgctctaaaaaataaagaagtagttatgggtttcggtcatagagtttataaatcaggagattctagagtgccaactatgagacagtattttggaaaagttgcaaaacttaagaaagataaaaaatttgagaaaatttacgacattgttgaaaaggttatgattaaagaaaaaaatattcatccaaatgtggattatccaacaggtccaacttatcatttaatgggatttgataccgatttttttacaccaaatatttgttatttcaagaataactggttggtcagctcatataatggaacaaccatgctgc

SEQ ID NO: 236205 - DNA, 727 bp, Unknown
  Bacterial polypeptide expressing nucleotide sequence isolated from the Sargasso Sea
catagcagctttttttagagcaagaaaaggtaaaaatgtaatacctccaaagaaaaatttgtctttttctgaaaattttttctacatgtgttttggaaaggtgccaagtaaagaaatagtaaaagcttttgatgtatctctaatcctttatgcagagcatagttttaacgtttctacgtttaccgcaagaactataacaagtagtttatcagatattcatggtgctataacaggtgctatagctagcctaaaaggtcccttacatggtggagcaaacgaagaagtaatgcatatgatgaataaaataaaaaaaccagaaaatgctttaaaatggattaacaaaactctagataaaaaagaagtggtaatgggttttggtcatagggtttataaaaaaggagattcaagagttccaacaatggaaaaatattttaaaaaagtatctaaagtaaaatcagataaaaaatttattaaaatttatgaaattgttaaaaaagtaatgatagatagaaaaaatatacatcctaatgttgattaccccactggtccaacatatcatttaatgggttttgataccgatttttttacaccgatttttgtaatttctagaatcacaggttggtcagcacatattatggaacaacatgctgcaaataaactgattagacctctatcaaagtacagtggaccagatcatcgtaaagtaatgttgcttaatcaaagataa

SEQ ID NO: 236206 - DNA, 534 bp, Unknown
  Bacterial polypeptide expressing nucleotide sequence isolated from the Sargasso Sea
ttacaagtagtttatcagatattcatggggcaataactggtgctattgcaagtttaaaaggaccattacacggaggtgcgaatgaggaggtaatgcatatgatgaataaaattaaaaaaccagaaaatgcacttaaatggattaacaatgcactcgataataaagaagtggtaatgggatttgggcatagggtttacaaaagtggagactcaagggttccaacaatgagaaaatattttggtaaagttgccaaaattaaaaaagataaaaaatttgaaaaaatttacgaaatagttcaaaaagtaatgattgaaagaaagaatatacatccaaatgttgattatcctacgggacctacttatcacttaatgggttttgatacggacttttttacaccaatttttgttatctctagaattacaggatggtctgctcacataatggagcaacatgctgcaaacaaacttattagaccgcttgctagttataaaggtagtaagcatagaaaagttttagaattaaatcaaagataat

SEQ ID NO: 236207 - DNA, 765 bp, Unknown
  Bacterial polypeptide expressing nucleotide sequence isolated from the Sargasso Sea
gaaaagttatgagaatttttgcaaaaatgccagttgcacttgctgcattttatagagctagaaaaggcaaaaaaattataccaccaaaaagtaaactctcattttctgaaaacttttttcacatgtgttttgggaaagtaccaaataaagacatagtaaaagctttcgatgtatctcttattctgtatgcagagcatagttttaatgtttcaacttttaccgcaagaacaataactagtagtttatcagatattcacggtgcaataacaggtgcaatagctagtttaaaaggtcctcttcatgggggtgcaaacgaagaagtaatgcatatgatgaataaaattaaaaaacctgagaatgcactaaaatggataaataaagcattagataataaagatgttgttatgggttttggtcatagagtttataaaagtggagactcgagagttccgacaatgagagaatattttggaaaggttgcaaaaataaaaaaagataaaaagtttgaaaaaatttatgacattgttgaaaaggttatgattgataggaagaatattcatcctaatgtagattaccctactggtccaacttatcatctaatgggttttgatactgatttcttcacaccaatatttgtaatttcaagaattactggttggtcagcgcatataattgaacaacacgctgccaataaattaataagacctctcgcaagttacaaaggcaataaacacagaagagttcttcaattaaaccaaagataat

SEQ ID NO: 236208 - DNA, 544 bp, Unknown
  Bacterial polypeptide expressing nucleotide sequence isolated from the Sargasso Sea
gccagaaccataacaagtagtttgtctgatatacatggtgcaattactggtgctattgctagtttaaagggaccgcttcatggtggagcaaatgaagaagtaatgcacatgatggataaaattaagaaacctgaaaatgccctaaaatggattaataaatcacttaaaaataaagatgtagtgatgggttttgggcatagagtttataaaaaaggagattcaagagtacctacaatggaaaaatacttccgaaaggtttcttcaataaaaaaagatagaaaatttattaaaatttacgacattgttaaaaatgttatgattgaaaaaaaaaatattcatccaaacgttgattatccgacaggccctacttatcatctaatgggttttgatactgatttctttacacctatttttgtaatttccagaattactggttggtctgcacatattatggagcaacacgctgctaacaaattgattagacctttatctaaatatagcggagctaagcatagaaaagttatgcttttaaatcaaagataaa

SEQ ID NO: 236209 - DNA, 847 bp, Unknown
  Bacterial polypeptide expressing nucleotide sequence isolated from the Sargasso Sea
aatggacgtagctagaacagctgtgagtgttatgggtttagaagacagagaagtgactaataattctcaagaagctaatatgagaaaagctatgagaatattttcaaaaacacctacggccctagctgctttttataggttaagaaaagggaaaaaaattatatcaccaaagaaaaaactatcgtttgctgaaaatttttttcacatgtgttttggaaaagtaccaaataaagatattgtaaaagcatttgatgtatctttaattttatatgctgaacatagtttcaatgtttctacttttactgctagaactattacaagtagtttgtctgatatacatggtgcaatcactggtgctattgcaagtttgaagggtcctctacatggcggtgcaaacgaagaagtaatgcatatgatgaaaaaaattaaaaaacctgaaaatgcaaaaaaatggataaacaatgctttggacaaaaaagctgtagtcatggggtttggtcatagagtttacaaaaatggagactctagagttccaactatgagagaatattttggtaaagttgctaaaattaaaaaagataaaacttttgaaaaaatttacgacatagttgaagaagtaatgattgaaagaaaaaatattcatccaaatgttgattaccctactggacctacataccatttaatgggatttgatactgatttctttactccgatatttgttatttcaagaattactggttggtctgcacatatcatggaacagcactcagcaaacaaattaattagacctttagcggcatataatggtaataaatatagaaaagtttctgaaattaaagatcgataa

SEQ ID NO: 236210 - DNA, 847 bp, Unknown
  Bacterial polypeptide expressing nucleotide sequence isolated from the Sargasso Sea
aatggatgtagcgagaactgctgtaagcttaatggctttagaagataaagaaacaaaagataattctccaaaagctaatatgagaaaagctataagaatattttcaaaaactccaattgctttagctgcctttttcagagctagaaagggtaaaaaaattatatctccaaagaaaaatttgtctttttctgaaaactttttttatatgtgttttggaaaagttccaagtaaagaaattgttaaagcttttgatgtatcactaattttatatgctgagcatagttttaacgtttcaacttttactgcaagaactataactagtagtttatctgatattcatggagcaataactggtgctatagcaagtttaaaaggtcctttgcatggcggcgctaatgaagaagtgatgcatatgatgaataaaattaaaaagcctgaaaatgctctaaaatggatcaataaagctcttaaaaataaagatgttgtaatgggttttggtcatagggtttataaaagaggcgactctagagtgcctactatggagaaatattttaaaaaagtatcatcaataaaaaaagataaaaaatttattagaatttatgacattgttaaaaatgtaatgattgagagaaaaaatattcacccaaatgtcgactaccctactggacctacttaccatttaatgggttttgatacagatttcttcactcccatttttgtaatatcgagaattactggttggtctgcgcatattatggaacagcatgcagcaaataaattaattaggccactttctaaatatagtggagcaaagcatagaaaagttatgcttcttaaccaaagatga

SEQ ID NO: 236211 - DNA, 798 bp, Unknown
  Bacterial polypeptide expressing nucleotide sequence isolated from the Sargasso Sea
atacaattcagctcagaaaatttgaaaaagaagaaaaaaacaatagagaattatctaaagatctttattcaatactcaaaaaaatgccgagaaaatctcatccaatggatgtagcaagaacagctgtaagtataatgggtcttgaggataaagaaactactgactcctctgctgaagctaatatgagaaaagctgtaagaattttagctaaaacccctacagctttagcagctttttatagattaagaaaaggtaaaaaaattattaaacctaaaaaaaatttaaatattgctgaaaactttttttatatgtgttttggaaaagtacctcaaaaagaaattgttaaagcttttgatgtttctctaattttatacgctgagcacagtttcaatgtatcaacatttacagcaagaactataacaagtagtttatctgatattcacggcgctatcactggagcaatagcaagtttaaaaggtcctcttcatggaggagctaatgaagaagtaatgcatatgatgaataaaattaaatctcctaataatgcgctcaaatggattaatagcgctttagataataaagaagttgttatgggttttgggcatagagtttataaatcaggtgactcaagagttcctacaatgagaaaatattttgcaaaagttgctaaaattaaaaaagataaaaaatttgaaaaaatttacgatattgttgaaaaagtgatgatagacagaaaaaatatctaccctaaatgtagattatccgacaggccccacatatcatttaatgggttttgat

SEQ ID NO: 236212 - DNA, 715 bp, Unknown
  Bacterial polypeptide expressing nucleotide sequence isolated from the Sargasso Sea
aatttatatgaaattataaaacacatgcccaaaaaatcccatccaatggatgttgcaagaacagctgttagtgtaatgggattagaagataaagagacctccaactctactccagaagctaatatgcgaaaagcattaagaatttctgctaaaacacctacagctcttgctgctttttatagaattagaagtggtaaaaaaataattaaacctaaaaagaatttaacttttgctgaaaactttttctacatgtgctttggaaaagtgcctcaaaaagaaattgttaaagcatttgatgtttctttaatattgtacgctgaacacagtttcaatgtttcaacttttactgctagaacaattacaagtagtttatctgatattcatggagcaattacaggcgcaatcgctagtttaaaaggtccattacatggtggagcaaatgaagaagtaatgcacatgatgaacagaattaaaaaaccagaaaatgcactaaaatggattaataatgctcttaaaaataaagaggtagttatgggctttggtcatagagtttataaatcaggagactcaagagttccaactatgagaaattattttggtaaagttgctaaacttaaaaaagataaaaagtttgaaaaaatttacgatattgttgaaaaagttatgatcaaaaagaaaaacatccatcccaacgtggactaccctactggtccaa

SEQ ID NO: 236213 - DNA, 838 bp, Unknown
  Bacterial polypeptide expressing nucleotide sequence isolated from the Sargasso Sea
aatgagcgatgaaataaaaaagggtttattagggatagtggttgatgaaacagaagtttccaaagttatgccagaaattaattctcttacttacagaggatatgctgctcaagatttatgtgagtattgtaaatttgaagaggtagcttatttaattttaaacaaagatcttccaaatactattgagcttagaaaatttgaaaaagaggagagaaataacagagatttatcaaaagatctttattctattttaaaaaagatgcctaaaaaatctcatccaatggatgttgcaagaacagccgtaagtataatgggtctcgaagacaaagaaacaatcaactcatcaccagaagcaaacatgcgtaaagctataagaattttagctaaaacacctacggcgttagctgctttttatagattaagaaaaggtaaaaatattattaaacccaaaaaaaatttaaatattgctgaaaattttttctatatgtgttttggaaaagttcctcaaaaagaaatagtaaaagcttttgatgtgtctttaatcttatatgcagagcatagttttaatgtatctacatttacagcaagaactataactagtagcttatcagatatacatggtgctattactggagcaatagcgagtttgaagggccctcttcatggtggtgctaatgaggaagtgatgcatatgatgaataagattaagtcacctaacaacgctcttaaatggattaataacgctttagataaaaaagaagtggtcatgggatttggtcatagagtttataaatctggcgactctagagttcccgacatgagaaaatactttggctaa

SEQ ID NO: 236214 - DNA, 887 bp, Unknown
  Bacterial polypeptide expressing nucleotide sequence isolated from the Sargasso Sea
aataaaaaaaggtttgctaggcatagttgttgatgaaactcaagtttcaaaagttatgcccgaaatcaattccttaacttatagaggttacgctgttcaagatttatgtgaaatgtgcaaatttgaagaagctgcttatttaattcttaatggagatcttccaaatagtattcaattaaaaaaattcgaaaatgaagaaaaatcaaatagagagctaactaaaaaccttagtgaaataattaaacatatgccaaaaaaatcacacccaatggatgttgcaagaactgctgtcagtgtaatggggctagaagataaagacacatcaaataacacgccagaagcaaatatgagaaaggcaatgagaatttttgcaaaaactccgactgctttagctgctttttatagaataagaaaaggtaaaaagataattaaaccaaagaaaaaattgtcgtttgcagaaaattttttttacatgtgttttgggaaagttcctaataaagaaatagtaaaagcttttgatgtttcgttaatattatatgcagaacatagtttcaatgtttcaacttttacggcaagaactataacaagtagtttatcagatatacatggcgcaataactggagcaatagctagtctaaaaggacctttgcatggaggtgctaatgaagaggttatgcatatgatggaaaaaattaaaaaaccagaaaatgcattaaaatggattaataatgctctagataaaaaagaagttgttatgggttttggtcatcgtgtgtacaaatctggggactcaagggttccaacaatgaaaaaatattttaaaaatgtagcaaaaattaaaaaagataaaaagtttagtaaaatttacgacattgtgaaagagtaat

SEQ ID NO: 236215 - DNA, 643 bp, Unknown
  Bacterial polypeptide expressing nucleotide sequence isolated from the Sargasso Sea
tatgtgctttggaaaagtcccgagtaaagaaattgttaaggcatttgatgtatcattaattttatatgcagagcatagttttaatgtttcaacatttactgctagaactataactagtagtttatctgatattcatggagcaataactggcgctatagctagtttaaaaggacctttgcatggtggtgccaatgaagaagtaatgcatatgatgagtaaaattaaaaagcctgaaaatgctctaaaatggatcaataaagctcttaaaaataaagatgttgtaatgggttttggacatagagtttataaaagaggagattctagagttcctacaatggagaaatactttaaaaaagttgcatcaatcaaaaaagataaaaagtttattaaaatttatgacattgttaaaaatgttatgattgaaagaaaaaatattcatccaaatgttgattatcctactggacctacttaccatctaatgggttttgatacagatttcttcacacctatctttgtaatatcaagaattactggttggtctgcacacattatggaacaacatgcagcaaataaactaattagaccactttctaaatatagtggagcaaagcatagaaaagttatgcttttaaatcaaagataa

SEQ ID NO: 236216 - DNA, 832 bp, Unknown
  Bacterial polypeptide expressing nucleotide sequence isolated from the Sargasso Sea
aatgccagaaataaattctttaacatacaggggatatgctgctcaagacttatgtgcaaagtgtaaatttgaagaggttgcttatttaattttaaatggggaacttccaaacaaaaaacaattaaaaaattttgaaaaagacgaaagtaaagaaagaaagttatctaaaagtttaattaacgcaataaaaagtattcctaaaacagctcaccctatggatgtagccagaacagctgttagtattatgggtttagaagataaggatacgagagataattcacctaaagcaaatttacggaaggtaatgaggatatttgcaaaaacacctgtggctttagctgctttttatagaactagaaaaggcaaaaaaataattccaccaaagaataatctctcattttctgaaaacttttttcacatgtgctttggcaaagttccaaataaagatatcgtcaaagcatttgatgtatctttaattctttatgctgaacatagttttaatgtttcaacttttaccgcaagaacaattacaagtagtttatcagatattcatggagcaatcactggagcaatcgctagtttaaaaggtcctttacacggcggagccaatgaagaagtaatgcatatgatgaataaaattaagaaaccagaaaatgcattaaagtggattaatatggctcttgataacaaagatgttgtgatgggatttggtcacagagtttataaaagtggagattctagagttccaacgatgagagaatactttggaaaagtagctaaaattaaaaaagataagaagtttgaaaaaatctacgatattgttgaaaaagta

SEQ ID NO: 236217 - DNA, 866 bp, Unknown
  Bacterial polypeptide expressing nucleotide sequence isolated from the Sargasso Sea
ttccaaagaaagctcaccctatggatgttgcaagaactgccgtaagtattatgggctgaaggataatgagacgaaggataattcctctaaagcaaatatgagaaaagtaatgagaattttcgctaaaatgcctgttgcacttgctgcattttatagagctagaaaaggaaaaaaaattattccaccaaaaaagaacctttctttttctgaaaacttttttcatatgtgttttggcaaagtaccaaacaaagatatagttaaagcctttgatgtatctttaatcttatatgcagaacatagttttaatgtttcaacttttacagctagaaccataacaagtagtttatccgatattcatggtgccatcactggagctatagcaagtttgaaaggtcctcttcatggaggggcgaatgaagaagtcatgcatatgatgaataaaatcaaaaaaccagaaaatgcacttaaatggataaacaaagcgctaaacaataaagatgttataatgggatttggtcatagagtttataaaagtggagattcaagagttcctacaatgagagaatatttcggaaaagttgctaaaattaaaaaagacaaaaaatttgaaaaaatttatgacattgttgaaaaagtgatgatagacagaaaaaatattcatccaaatgtagactacccgactgggcctacttatcacttaatgggatttgatactgattttttcacgccaatttttgtaatttcaagaattacaggttggtcagctcatataatcgaacaacatgctgctaataaattaattagacctttggcaagttacaaagggagtaaacatagaaaagttcttcaattgaatcaaagataga

SEQ ID NO: 236218 - DNA, 592 bp, Unknown
  Bacterial polypeptide expressing nucleotide sequence isolated from the Sargasso Sea
tatctttattttatatgctgagcatagctttaatgtttcaacttttacagcacgtacaattacgagtagcttatctgatatacatggcgcaataactggagcgatcgccagtctaaaaggccctcttcatggtggagcaaacgaagaagtaatgcatatgatgaataaaattaaaaaaccagaaaatgctctaaaatggattaacaatgcacttaaaaataaagaagtagtcatgggatttggacatagagtttataaatctggggattctagagttccaactatgagaaaatactttggtaaagtggctaaactcaagaaagataaaaaatttgaaaaaatctatgacatcgttgaaaaagtgatgattaagaagaaaaatatttacccaaacgtagattatccaacagggcctacttatcatttaatgggttttgaaacggactttttcacacctatatttgtaatttctagaattacaggttggtctgctcatataatggaacaacatgctgccaacaaacttattagacctttagctagctataaaggtaataagcatcgaaaagtgatgcagttaaatcaaagataa

SEQ ID NO: 236219 - DNA, 847 bp, Unknown
  Bacterial polypeptide expressing nucleotide sequence isolated from the Sargasso Sea
aaaaaaatgcctaaaaaatcacacccaatggatgtggctagaacagctgtaagtataatgggtcttgaggataaggaaacagtagactcaacaccagagtccaatatgcgaaaaactatcagaattttagctaaaacacctacagcattagcggccttttatagattgagaaaaggtaaaaaaattattaaaccaaaaaaaaatttaaacatagctgaaaattttttctacatgtgttttgggaaagtgccacaaaaagaaatagtaaaagctttcgatgtttctctaattttatatgccgaacatagttttaatgtatcaacatttacagcaagaactatcacaagcagtttatcagatattcatggggctattacaggagcaatagcaagtttaaaaggtcctcttcatggtggtgctaatgaagaagtaatgcatatgatgaataaaattaagacacccaaaaatgcacttaagtggattaataatgctttggataataaagatgtaattatgggatttggtcatagagtttataaaagtggagactctagagtaccaacaatgagaaaatattttgcaaaagttgctaaaatcaaaaaagataaaaaatttgaaaaaatttacgatattgtggaaaaggtaatgattgaaagaaaaaatatacatccaaatgtagactacccaaccggacctacttatcatttaatgggttttgatactgattttttcacacctatttttgttatttcaagaattactggatggtcagctcacatatttgagcaacatgctgctaacaaattaattagaccacttgctagttataagggtaaccaacacagaa

SEQ ID NO: 236220 - DNA, 664 bp, Unknown
  Bacterial polypeptide expressing nucleotide sequence isolated from the Sargasso Sea
atggctgaaaattttttctatatgtgttttggaaaagttcctcaaaaagaaatagtgaaagcttttgatgtttctttaattctttatgctgaacatagttttaatgtatcaacttttacagcgagaactattacaagtagtttatctgacattcatggagctattactggtgcaatagcaagtttaaaaggtcctcttcatggtggtgctaacgaagaagtaatgcatatgatgaataaaattaagaaacctgaaaatgcactcaaatggattaataaagctttagataataaagatgttgtgatgggttttggtcatagagtttataagtctggagactctagagttccaactatgagaaagtatttctcaaaagtagcaaaaataaaaaaggataaaaaatttgaaaagatttacgatattgttgaaaaagtaatgattgaaagaaaaaatattcatccaaatgtggattaccctacaggacctacttatcatttgatgggttttgatacagattttttcacaccaatttttgttatttctagaataacaggttggtcggcccatattatggagcaacatgctgctaataaattaataagacctttagcaagttacaaaggaaatcagcatagaaaagttgttcagttaaaccaaagataat

SEQ ID NO: 236221 - DNA, 955 bp, Unknown
  Bacterial polypeptide expressing nucleotide sequence isolated from the Sargasso Sea
gcacaagatttatgtgcaaaatgtaaatttgaagaagttgcttatttaattttaaacggtgaactgcctaacaaaaaacaattaaaagaatttgaaaaacaagaaagaagtgagagaaaactatctaaaactttacttgatgatattaagaaatttccaaaaaaagctcatccaatggatgttgcaagaacaactgttagcatcatgggtcttgaagataaagaaacaaaagataattcacctaaagctaatatgcgaaaagttatgagaatttttgctaaaactcctgttgctttagctgcattttatagatcaagaaagggtaaaaaaattatatcacctaataagaagttatcattttctgaaaacttttttcatatgtgttttggtaaaatacctaataaagatattgtaaaagcatttgatgtatctttaattttatatgctgagcatagttttaatgtttcaacttttacagctagaactattacgagtagcctttctgatattcatggatcaattactggagctatagcaagtttaaaaggtcctttacatggcggagctaatgaagaagtgatgcatatgatgaataaaatcaaaaaacctgaaaatgcattaagatggattaataacgccttagacaaaaaggaagttgtaatgggatttggtcatagagtttataagagtggagattctagagttcctacaatgcgggaatacttcggaaaagtagctaaaattaaaaaagacaaaaagtttgaaaaaatttacgatattgttgaaaaagtaatgattgagagaaaaaacattcatccaaatgtagactatcctacaggacctacttaccatttgatgggctttgatactgatttctttacaccaatctttgtaatttcaagaattacgggatggtcagcacacataattgaacaatatgctgcaaataactgat

SEQ ID NO: 236222 - DNA, 904 bp, Unknown
  Bacterial polypeptide expressing nucleotide sequence isolated from the Sargasso Sea
cttggtattgttgttgatgaaactactatatcgcaagtgatgcctgatataaattcgcttacatatagaggttatgctgttcaagatctttgtgagaaatgtaactttgaagaagtagcttatttggttcttaatggcgaactaccaaataaaagtgagcttaaaaaattcaaaaatcaactaaaaaaaaatagaaatatatcaattaacttaagagaaattgttagacatatgcctaaaaaatctcatccgatggatgtagcaagaactattgttagtgttttggggctagaagacaaggaaactacagataattcacataaagcaaacatgagaaaagtaataagaatatttgctaaaactcctacggcaattgctgctttttttagagctagaaaaggtaaaaaaattattcctccaaaaagaaatttgtcttttgctgaaaattttttttacatgtgttttggaaaagtgcctagcaaagatatagttaaggcttttgatgtatcgttaatactttatgccgaacatagttttaatgtttctacttttactgctagaactattacaagtagtttatcagatattcatggagcaataacaggagcaatagcaagcctaaaaggacctctacatggaggtgccaatgaagaagtcatgcatatgatgaataagataaaaaaaccagaaaatgctttcaaatggattaataaagcccttgataaaaaagaagttgttatgggtttcgggcatagagtttacaaaaaaggagattctagagtccctactatggaaaaatattttaaaaaagtttctaaaattcagaaagacaaaaaatttattaaaatttatgatgtagttaaatctgtcatgattgaaagaaaaacattcatcttaatgtaga

SEQ ID NO: 236223 - DNA, 892 bp, Unknown
  Bacterial polypeptide expressing nucleotide sequence isolated from the Sargasso Sea
tatgcagcacaagatttgtgtgaatattgtaaatttgaggaagtcgcttatttaattttgaataaagatctaccaaattcaatagaattgagaaaatttgaaaaagaggaaagaaataatagagatctctcaaaagatctttactcatttattaaaaagatgcctaagaaatcccatcctatggatgtagctagaactgcggtcagcatcatgggtttggaagataaagagacgacagactcatcacctgaagcaaacatgagaaaagcagttagaattttagcgaaaacaccaactgctttagctgcgttttatagaataagaaaaggtaaaaatattatcaaacctaaaaaaaatttaaatatgtcggagaatttttttcatatgtgctttggaaaagttcctcaaaaagaaattgtaaaagcttttgatgtttcattaattttatatgctgaacacagtttcaatgtttcaacatttacagcaagaactataacaagtagtttgtctgatattcacggagctataactggtgcaatagcaagtttaaaaggtcctcttcatggtggagctaatgaagaagtcatgcatatgatgaataaaataaaaagtcctaaaaatgcattaaattggataaacaatgcactcgcaaaaaaagaagttgtaatgggttttggtcatagagtttataaatccggtgactcgagagtccctaccatgaggaaatattttgctaaagtagcaaagatcaaaaaagataaaaaatttgaaaaaatttacgacattgttgaaagagttatgattgataaaaaaaatattcaccctaatgtagattatcccactggacctacgtaccatttaatgggttttgacacagaatttttttacacca

SEQ ID NO: 236224 - DNA, 800 bp, Unknown
  Bacterial polypeptide expressing nucleotide sequence isolated from the Sargasso Sea
tagaggttacgctgttcaagatttatgtgaaatgtgtagatttgaagaggcggcatatttgattttaaatggtgatcttccaaatagtattcaattaaaaaaatttgaaaaattagaacgatcaaatcgagatttaactaaaaatcttagtgaaataattaaacacatgccaaaaaaatctcatccaatggatgttgcaagaaccgcagtaagtgtaatgggattggaggataaagaaacaactgacaattctcctgaatcaaatatgagaaaagctatgagaattttttcaaaaactccaactgctttagctgcattttatagaattagaaaaggtaaaaaaataattaaacctaagaaaaatctcacatttgcagaaaactttttttatatgtgttttggaaaagttccaaataaagaaatagttaaagcctttgatgtctctttaattttatatgctgaacatagttttaatgtttcaacttttacagcgagaactataacaagtagcttatctgatattcatggtgcaataactggagcaatagcaagtcttaaaggaccattgcacggtggagcaaacgaagaggttatgcatatgatgaataaaattaaaaaacctgaaaatgcgcttaaatggataaataacgctttaaataataaagaagttgtgatgggatttggtcatagggtctataaatctggtgattcaagagttcctacgatgaaagcatattttaaaaaagttgctaaaataaaaaaagataaaaagttcagtaaaatttatgacattgtggaaa

SEQ ID NO: 236225 - DNA, 660 bp, Unknown
  Bacterial polypeptide expressing nucleotide sequence isolated from the Sargasso Sea
tagagaagttatgccacacgaaggcctccaacatcgcaacaaccgttttcaatacaacgttaattttatacgccgagcatgaattcaatgcatcgacgtttgtggctcgtaccgttacctctactgggtctgatatgcactccggggtaactgcagccatcggagcactcaagggcccccttcatggcggggcaaatgaaaaagttctccatcaacttatggacattggtgtgcctgaaaacatcgagccatggcttgcccgaaaactgaacgaccatgaggtcatcatgggattcggacaccgtgtctacaaaacgggtgatatccgggcggctcttttgggcgacgcatgccatcgccttatctacagcgattcaacgtacgaaaagcaccagaagcttgaaaagctcgcatacaagctggaacaactgatgctcgagaaaaaagaactcaggccgaacctcgattggccggctgcccgcatctatcacgccctcgggctgcctataaatcttttcacaccactctttgttgttgcacgcgtgagtggatggacatcacacattattgagcaaatgggcaacaatcgcctgatccgacccttggcaaaatatgttggccaggcgccgcgaccatacgtgtccatagaagatcgctaga

SEQ ID NO: 236226 - DNA, 847 bp, Unknown
  Bacterial polypeptide expressing nucleotide sequence isolated from the Sargasso Sea
gatggatgttgcgagaacagctgtaagtttaatggccttagatgataaagaaactaaagacaattctccaaaagcaaacatgagaaaagctataagaatattttctaaaactcctattgctttggctgcatttttcagagctagaaaaggtaaaaaaataatatcgccaaagaaaaacttgtctttttcagaaaactttttttatatgtgttttggcaaaatccctgataaagaaatagttaaagcttttgacgtctctttaatactatatgccgaacatagctttaatgtttctacattcacagcgagaacaataactagcagcttatccgatatccatggagctataaccggtgcaatagctagtttaaaaggtccattacacggtggtgccaatgaagaagtaatgcatatgatgaataaaattaagaaacctgaaaaagccttaaaatggataaataaagcactagataataaagatgtagtgatgggttttggtcacagagtttataaaaaaggagattcaagagttcctacaatggaaaaatattttagaaaagttgcttttttaaaaaatgataaaaaatttattaaaatatatgacattgtgaaaaatgttatgattgaaagaaaaaatattcatccaaacgttgattatcctactggaccgacttatcatttaatgggttttgatactgattttttcacacctatttttgtaatatcaagaattacaggctggtctgcccatataatggagcaacatgctgctaataaattaattagacctttgtccaaatatagtggagcaaagcacagaaaagtgatgcttttaaatcaaagataa

SEQ ID NO: 236227 - DNA, 817 bp, Unknown
  Bacterial polypeptide expressing nucleotide sequence isolated from the Sargasso Sea
tatgggtcttgaggataaagaaactaaagataattcacctaaagccaatatgaaaaaagtcatgagaatttttgcaaagactccaactgctttagcggcattttatagacttagaaaaggtaaaaaaataataagccctaaaagcaatttatcattttcagaaaatttcttttacatgtgttttggaaaagttccaaacaaagaaatagtaaaagcgtttgatgtatctttaattttatatgctgagcatagtttcaacgtgtcaacttttacagctagaactatcacaagtagtttatcagatatacatggtgcgattactggtgctatagctagtttaaaggggccattacatggaggtgcaaatgaagaagttatgcacatgatgaataaaattaagaaaccagaaaatgctcttaaatggatcaataatgctttggataaaaaagctgttgtgatgggttttggtcatagagtttataaaagtggagactcgagagtgcctacgatgagggagtatttcgctaaagttgcaaaagttaaaaaagacaaaaaatttgaaaaaatatatgacattgtagaaaaagttatgattgatagaaaaaatatctatccaaatgtagactaccctacgggacctacttatcatttaatgggcttcgatacagactttttcacacctatctttgtcatatctagaattacaggttggtcagcgcatattcttgaacaacatgctgcgaataagttaataagaccacttgcaagctataaaggtagctcctatcgtaaagttgtaccgttaaaccaaagataa

SEQ ID NO: 236228 - DNA, 872 bp, Unknown
  Bacterial polypeptide expressing nucleotide sequence isolated from the Sargasso Sea
aatgagtgatgaaatcaaaaaagggctgctaggaattgtagttgatgaaacagaagtttctaaagttatgcctgaaatcaactccttaacttatagaggttatgccgctcaagatctatgtgcaaaatgtaaatttgaggaagtggcttatctaattttaaatggtgaacttccaagtaaaaaacaattaaaaaaatttgaaaaagaagaaaaaaaagaaagaaaattatctaaaacattattagaagatataaaaaaatttccaaagaaagcacatccaatggatgtggcaagaacagcagtaagtattatgggactagaggataaagaaacaaaagataattcctctaaagcaaatatgagaaaagtaatgagaattttcgctaaaatgcctgttgcacttgctgcattttatagagcaagaaagggaaaaaaaattattgcaccaaaaaagaacctttcattttctgaaaacttttttcatatgtgttttggcaaagtcccaaacaaagatatagttaaggcttttgatgtatctttaatcttatatgcagaacatagttttaatgtttcaacatttacagctagaaccataacaagtagtttatctgatattcatggtgcaattactggtgctatagcaagtttaaaaggtcctcttcacggaggggcgaatgaagaggtcatgcatatgatgaacaaaatcaaaaaaccagaaaacgcacttaaatggataaataaagctctagataataaagatgttgtaatgggatttggtcatagagtttataaaagtggagattcaagagtcccaactatgagagaatattttggaaaagttgctaaaatcaaaaaagataaaaaatttgaaa

SEQ ID NO: 236229 - DNA, 848 bp, Unknown
  Bacterial polypeptide expressing nucleotide sequence isolated from the Sargasso Sea
aatgggggagctaccaacaaaaaaacaattaaaaaaatttgaaaacgaggaaaaaaaagagagaaaactgtctaaaactttattagatgatatcaaaagatttccaaaaaaagcacatcctatggatgttgcaagaactgttgttagtattatgggacttgaagataaagaaacaaaagataattctccaaaagccaatatgaggaaagtaatgagaatttttgcaaaaacaccagttgcacttgctgctttttatagagcaagaaaaggaaaaaaaattattccacccaaaaaaaatctatctttttcagaaaatttttttcaaatgtgttttggaaaagttccagacaaagatatagttaaagcatttgatgtgtcacttattttgtatgcagaacatagttttaatgtttcaactttcacagcaagaactataacaagtagtttatcggatattcatggtgcaattactggtgcaatagcaagtttaaaaggtcctcttcatggaggtgctaatgaagaagttatgcacatgatgaataaaataaaaaaacctgaaaatgcacttaaatggataaacaaagctttagacaataaagatgttgttatgggttttggtcacagagtttacaaaagtggagattctagagttcctacaatgagagaatattttggcaaagttgctagaattaaaaaagataaaaaatttgaaaagatttatgacattgtagaaaaagtgatgattgacagaaaaaatatttatccaaatgtagattaccctaccggaccaatgtaccatttaatgggatttgatactgatttctttacaccaatttttgtaatttcaa

SEQ ID NO: 236230 - DNA, 685 bp, Unknown
  Bacterial polypeptide expressing nucleotide sequence isolated from the Sargasso Sea
taaacctaaaaaaaacctgtcttttgcagaaaactttttttatatgtgttttggaaaagttccaaacaaagaaattgttaaagcttttgatgtttctttaattctatacgctgaacatagcttcaatgtttctacttttaccgcaagaacaataacaagtagtttatcagatatacacggagcaataacaggtgcaattgctagtcttaaaggcccattacatggaggggcaaatgaagaagtaatgaatatgatgaataagattaaaaaaccagaaaatgcattaaaatggattaacaatgctttggataaaaaagacgttgtaatgggctttggacatagggtttataagtcaggagattcgagagttccaacaatgagggattatttcaaaagagttgcaaaaattaaaaaagacaaaaaatttagtaaaatttatgacatcgttgaaaaagtaatgattgaaagaaaaaatattcatccaaatgtggattatcctacaggtccaacatatcacttaatgggttttgatactgatttcttcacacctatttttgtaacatcaagaattactggttggtccgcccatattatggaacaacacgcagcaaataaacttattagaccactttctaaatacagtgggccaaagcatagaaaagttatgcttcttaaccaaagataa

SEQ ID NO: 236231 - DNA, 877 bp, Unknown
  Bacterial polypeptide expressing nucleotide sequence isolated from the Sargasso Sea
tctcaagtaatgcctgatataaattcactgacctacaggggatatgcagtacaagatctctgtgaaaaatgtagttttgaagaagtggcatacttaatactcaataaagagttgccaaacaaaacaaaactaaaaaaatttaaaaaagaattagaggaaaatagaaatatcacaataaatcttagagaaattgtaaaacatatgcctaaaaaagcacatccaatggatgttgcgagaacagtagtcagtgttatgggtcttgaggataaggatacaagtaataattctcctgctgctaatatgagaaaagctataagaatatttgcaaagacacctacggctatcgctgctttctttagagccagaaggagtaaaaatgtaataccagcaaaaaaaggtttgggtttttcggaaaattttttttatatgtgtttcggaaaaatacctagtaaagaaattattaaagcttttgacgtttctttaattctttatgctgaacacagctttaatgtgtcaacttttacagcaagaacaattacaagtagtttgtctgatatccatagtgctattactggcgctataggtagtctaaaaggtcctttacatggaggcgctaatgaagaagtaatgcatatgatggataaaattaaaaaacctgaaaatgcattaaattggattaataagtctcttaataataaagaagttgtaatgggttttggtcacagagtttataaaaaaggcgactcacgagtacccacaatggaaaaatattttaaaaaagttgctaaaaataaaaatgataaaaaattacataaaatctatgatttagttaaaaatgtaatgattaaaagaaaaaatatccatccaaatgttgatt

SEQ ID NO: 236232 - DNA, 926 bp, Unknown
  Bacterial polypeptide expressing nucleotide sequence isolated from the Sargasso Sea
cgctgctcaagatttgtgtgctaaatgtaaatttgaagaggtggcatatttaattttaaatggagaacttcctgacaaaaaacaattaagaaaatttgaaaagcaagaaagaaaagagaggaaattatctaaaactttacttgaagatatcaaaaaatttccaaaaaaagctcatcctatggatgtcgcaagaacagcagtgagtattatggggcttgaggataaagagacaaaagacaactcaccaaaagctaatatgcgaaaggtaatgagaatttttgcaaaaatgcctgtcgctcttgcagctttttatagatcaagaaaaggtaaaaaaattattcctccaaaaagtaatttatccttttcggagaatttttttcatatgtgttttggtaaggtgcctaataaagacattgtaaaagcttttgatgtatctttaattctttatgccgaacatagttttaatgtctcaacttttacagcaagaacaattaccagcagtttgtcagatattcatggtgcaatcactggggcaattgcaagtttaaaaggtcctttgcacggcggtgcgaatgaagaggtaatgcatatgatgaataaaattaaaaaacctgaaaatgcacttaaatggattaataaagcacttgataataaagatgttgttatgggatttggccatagagtttacaaaagtggagattcaagagtgccaactatgagagagtattttggtaaagttgcaaaaattaaaaaagataaaaaatttgaaaaaatttacgacattattgaaaaagtaatgattgaaagaaaaaatatccatcctaatgttgactatccgactgggcccacttaccatttaatgggatttgatacagatttttttacacctatttttgtgatatcaagaataactgggtggtcagctc

SEQ ID NO: 236233 - DNA, 679 bp, Unknown
  Bacterial polypeptide expressing nucleotide sequence isolated from the Sargasso Sea
aaaaaaaacttatctttttctgaaaatttttttcacatgtgttttggcaaagtgccaaataaagatattgtaaaagcatttgatgtatctttaattttatacgctgaacatagttttaatgtttcaacttttactgcaagaacaattacaagcagtttgtcagatattcatggggcaataacaggtgcaatagctagtttaaaaggaccattgcacggtggtgccaatgaagaagtaatgcacatgatgaataaaatcaaaaaacctgaaaaggctcataaatggataaataaagcattagataataaagatgtaatcatgggttttggtcatagagtttataaaagtggtgattcaagagttcctactatgagggaatactttggtaaagttgcaaagatcaaaaaagataaaaagtttgaaagaatttatgacattgtggaaaaagtaatgatagacaggaagaacatacatcctaatgttgattaccctactggacctacatatcatttaatgggatttgacactgatttttttaccccaatttttgtaatctcaagaataactggttggtctgcacatataatggagcaacatgctgcaaataaattgattagaccacttgcaagttataagggcagcaagtatcgaaaagttgttcagttaaatcaaaggtaaa

SEQ ID NO: 236234 - DNA, 850 bp, Unknown
  Bacterial polypeptide expressing nucleotide sequence isolated from the Sargasso Sea
taaaaaaggcttactaggtattgttgtagatgaaacagaagtttcaaaagtaatgccagaaataaattcccttacttacagagggtatgctgctcaggatttatgtgaatattgtcggtttgaggaagttgcctacttaattttaaataaagatcttcctaattcaatagagcttaaaaattttgagaaagaagaaagaaacaatagagagcttactaaaaatttatatgaaattataaaacacatgccaaaaagatctcatcctatggatgtggctagaactgcagtgagcgtgatgggactagaagacaaagaaaccacagactcttcacctgaagcaaatatgagaaaagcattaagaatttttgcaaaaactccaactgcactagcagcattttatagaattagaaaagggaaaaaaataattaaacctaagaaaaatttaacttttgctgaaaactttttctatatgtgttttgggaatgtgccacaaaaagaaatagttaaagcttttgatgtatctttgattttatacgctgaacatagttttaatgtctcaacttttacagcaagaacaattacgagtagcttatctgacatacatggtgcaataacaggtgcaattgctagcttaaaaggtcctcttcatggtggagctaatgaagaagttatgcacatgatgagtaaaattaaaaaacctgaaaatgcactaaaatggattaacagtgcacttaaaaacaaagaagtagtaatgggatttggacatagagtttacaaatcaggtgactcaagagttccaacaatgagaaagtactttggtaaagttgctaaacttaagaaagataaaaaa

SEQ ID NO: 236235 - DNA, 883 bp, Unknown
  Bacterial polypeptide expressing nucleotide sequence isolated from the Sargasso Sea
atgagtgatgagattaaaaaaggtttattaggtattgttgttgatgaaactacgttttctcaagtaatgcctgacataaattctcttacatatagaggttatgcagttcaggatctttgttcaaaatgtaattttgaagaagttgcttatcttgttttaaacggagaacttcctaacaaaaaacaattaaaagcttttattaaagaagaaaggtcagatcgaaaactttcaaaggaaattttaagtgatattaaaaaaatgccaaaaaaagctcacccaatggatgtggcaagaactgctgtaagcttaatggcattagaagataaggaaacaaaagacaattctccaaaagccaacatgagaaaagctataagaatattttcaaaaactccaattgcattagctgctttttttagagcaagaaaaggtaaaaagatgatagcgcctaagaaaaatttatctttttctgaaaactttttttacatgtgctttggcaaagtcccaagtaaagaaattgtaaaggcctttgacgtatctttaatactttatgcagaacatagctttaatgtatcaacttttactgcaagaactataactagtagtttatctgatattcatggagcaataactggtgctatagctagtttaaaaggtcctttgcatggtggagctaacgaagaagtaatgcatatgatgaataaaattaaaaagcctgaaaatgcactaaaatggattaataaagcacttaaaaataaagacgttgtaatgggttttggacatagagtttataaaaaaggagactcgagagttcctacaatggaaaaatactttaagaaagttgcttcaatcaagaaagataaaaagtttattaaaatctatgaca

SEQ ID NO: 236236 - DNA, 335 bp, Unknown
  Bacterial polypeptide expressing nucleotide sequence isolated from the Sargasso Sea
aattgtcaaagcttttgatgtgtcattaattttatatgctgaacatagttttaatgtttcaacttttaccgctagaacaattactagtagcttatcggatattcatggagcaataactggagctatagccagcttaaaaggtcctcttcatggtggtgctaatgaagaagttatgcatatgatgaaaaagatcaaaaaacctgaaaatgcagataaatggattaataatgcattaaacaaaaaggctgtggtaatgggttttggtcatagagtttataaaagtggtgactcaagagttcctactatgagagaatattttggaaaagttgcgaaga

SEQ ID NO: 236237 - DNA, 532 bp, Unknown
  Bacterial polypeptide expressing nucleotide sequence isolated from the Sargasso Sea
tacaagtagtttatctgacattcatggagctattactggtgcaatagcaagttttaaaggtcctcttcatggaggagctaatgaagaagtaatgcatatgatgaataaaattaagaaacccgaaaatgcacttaaatggataaataaagctctagataataaagatgttgtaatgggatttggtcatagggtttataagtctggagactctagagtcccaactatgagaaaatattttgcaaaagtagcaaaaatcaaaaaggataaaaaatttgagaaaatttacgatattattgaaaaagtaatgattgaaagaaaaaatattcatcctaatgttgattaccctactggacctacctatcatttaatgggttttgatacagattttttcacaccaatatttgttatttctagaattacaggttggtcagcgcacattatggaacaacatgcggctaataaattaataagacctttagcaagttacaaaggaaatcagcacagaaaagttgttcagttaaaccaaaggtaa

SEQ ID NO: 236238 - DNA, 661 bp, Unknown
  Bacterial polypeptide expressing nucleotide sequence isolated from the Sargasso Sea
tctgaaactttttttatatgtgggctttggaaaagttccaaataaagaaattgtaaaagcatttgatgtttcgctaattttatatgcggaacatagttttaatgtttctacatttacagctagaacaataacaagcagtttgtcagatatacacggagcaatcactggcgctatcgcaagtcttaaaggtccattacatggtggtgctaatgaagaggtaatgcatatgatgaataaaattaaaaaccctaaaaatgcacacagttggataaacaaagctttagataaaaaagaagtagtaatgggttttgggcatagagtttataaaagtggagattcaagagtgccgactatgagagagtattttggcaaagtagcaaaaataaaaaaagacaaaaaatttgaaaaaatttacgatattgttgaaaaggtaatgattaaacgaaaaaatatacatccaaacgttgattatccaacaggtccaacttatcacttaatgggctttgacacagatttttttacaccaatttttgttatatcaagaattactggttggtctgcacatatcatggaacaatatgctgccaataaactaataagacctcttgctaaatataagggtaatcaacacaggaaagtaataaatttaaatcaaagataa

SEQ ID NO: 236239 - DNA, 800 bp, Unknown
  Bacterial polypeptide expressing nucleotide sequence isolated from the Sargasso Sea
aatgagtgatgatattaaaaaaggtttgctaggaatagtggttgatgaaacagaagtttcgaaagttatgccagaaattaattctctaacttatagaggatatgctgcacaggatttatgtgaatattgtagatttgaagaggttgcttatttaattttaaacaaagatcttcctaataccctagaacttagaaaatttgaaaaggaagaaaaaaataatagagagttatctaaagatctttattcaattttaaaaaaaatgcctaaaaaatctcatccaatggatgtggctagaacagctgtaagtataatgggccttgaggataaggaaacagttgattcatcgccggagtcaaatatgagaaaaactataagaattttagccaaaacacccacggctttagcagccttctatagattaagaaaaggtaaaaaaattatcaaaccaaaaaaaaacttaagtattgctgaaaattttttctacatgtgttttgggaaagtgccacaaaaagaaatagtaaaagcttttgatgtttctttaattttatatgctgaacatagttttaatgtatcaacttttacagcaagaactattacaagtagtttatctgatattcatggagctattactggagcaatagcgagtttaaaaggtcctcttcatggtggtgctaatgaggaggtaatgcatatgatgaataaaattaagacaccaaataatgcacttaagtggattaataatgccttaaataacaaagaagttgttatggggtttggtcacagagtttataaatctggtg

SEQ ID NO: 236240 - DNA, 751 bp, Unknown
  Bacterial polypeptide expressing nucleotide sequence isolated from the Sargasso Sea
aatattttcaaaaatgccaactgcaattgcagctttttttcgagtaagaaagggtaaaaaaataatacctccaaaaaaaaatttatcctttgcagaaaattttttttatatgtgttttggaaatgttccttcaaaagatattgtgaaagcttttgatgtttctttaattctttatgccgagcacagttttaacgtatcaacatttactgcaagaacaataacaagtagcttatctgatatacatggagcaataactggcgctatagcaagtttaaaagggcctctacatggtggcgcaaatgaagaagtaatgcacatgatgaaaaaaattaaagaaccaaaaaatgcattaaaatggattaataatactcttgataaaaaagaagtggtaatggggtttggtcatagagtttataaaaaaggcgactcaagagttccaactatggaaaaatattttagaaaagtttctaaaataaaaaaagacactaaatttcataaaatttacgatgttgttaaaaatgttatgattaaaagaaaagatatttatccaaatgtagattatccaactggtcctacttatcatcttatgggttttgatactgacttttttacgccgatttttgtaatttcaagaatcactggatgggcagctcatattatggaacagcatgctgcaaataaattgattagaccgctttcaaaatatagcggacctgatcacagacgtgtcatgttgttaaatcaaagataa

SEQ ID NO: 236241 - DNA, 745 bp, Unknown
  Bacterial polypeptide expressing nucleotide sequence isolated from the Sargasso Sea
attggatagcaaaaaactaattttaaaaccaggattagagggtgtcccagttactaattcatctatctgtgatattgacggcaaaaaaggtaaattattgtacagaggctactccattgaggaactatcaaaaaaaagcagttttttagaaacggcttacctattgatttggggtgaattgcctacagctattcaactaagagattttgaacaagaagttcaaatgcatcgaaggttaagttttagagtaagggatatgatgaaatgtttccctgcgacaggtcatcctatggacgcactacaatctagtgcagcttctttgggacttttctattcacgtagagcaatagatgatcctaattacatttacaacgcagttataagactaatagcaaaaatacccactatgattgctgcttttcaacttattagaaaaggacaagaccctattcaacctagagatgatttaacttactcttcaaattttctttacatgctgactgaaaaagaacaagatcctatagctgcaaaagtttttgataggtgtttaatcttacatgccgaacatagtttaaacgcgagcacattcagcgctagagttaccgcaagcactcttacagacccatacgctgtcatcgcatctgcagtaggaactcttgctggcccgcttcatggcggagcaaatgaagatgttattgcaatgttagaagaaattaaaactccaaaaaatgctgcttctttttta

SEQ ID NO: 236242 - DNA, 796 bp, Unknown
  Bacterial polypeptide expressing nucleotide sequence isolated from the Sargasso Sea
tgtgaatactgtaaatttgaagaagttgcttatttaattttaaataaagatttgccaaatactatacaacttaaaaaatttgaaaaagaagaaagaaataacagagatctatcaaaagaactttacgctgcaattaaaagtatgccaaagaaatcacatccaatggatgtggctagaactgctgtaagtattatgggtttagaagataaagaaacaggagactcatcacctgaagctaatatgagaaaagcaataaggattttggcaaaaacaccaacagctttagctgcgttttatagacttcgaaaaggaaaaaaaattattaagccaaaaaaaagtttaaatatggctgaaaattttttttatatgtgtttcaataagatacctcaaaaagaaatagttaaagcttttgatgtttcattaattctatatgcagagcatagttttaatgtttctacattcaccgctagaacaatcacaagcagtctttcagatattcatggggcaatcactggagcaatcgcaagtttaaaaggtcctttacatggtggggcaaacgaagaagtaatgcacatgatgaataaaataaaaaaaccagaaaatgcattaaaatggattaataaagctcttgataataaagatgttgttatgggctttggacatagagtttataaaagtggagactctagagttcccactatgagagaatattttggaaaagttgcaaaaattaagaaggataaaaaatttgaaaaaatttatgacatagttgaaaaggttatgatcaatagaaaaa

SEQ ID NO: 236243 - DNA, 925 bp, Unknown
  Bacterial polypeptide expressing nucleotide sequence isolated from the Sargasso Sea
aaagttgagagaaaagagcgaaagctatcaaagacattattagaaagtattaagaattttcttaaaaaatcacatcctatggatgttgctagaacagcagtaagcataatgggactggaagataaagaaactaaagataactcaccagaagcaaatttaagaaaagtgatgagaatatttgcaaaaactcctgttgctttggctgccttctatagaattagaaaaggaaaaaaaatcataaaaccaaagaataatttaactttctcagaaaattttttctatatgtgttttggtaaagttcctgaaaaagaaattgtaaaagcatttgatgtatctctgatattgtatgctgaacatagttttaacgtatcaacctttactgctagaacaataaccagcagtttgtcagatattcatggtgcaattactggggcaattgcaagtttaaaaggtccattgcatggtggagcaaatgaagaagtaatgcatatgatgaataaaattaaaaaacctgaaaatgcattgaattggataaataatgccttagatcaaaagactgttgtaatgggtttcggtcatagagtttataaaagtggcgattctagagtaccgaccatgagagaatatttttctaaagttgcaaaagtaaaaaaagataaaaagttcgaaaaaatttatgacattgttgaaaaagtaatgattgaaagaaaaaatattcatcctaacgtagattatcctactgggccaacctaccatttaatgggatttgatactgacttctttacaccaattttcgtaatttcaagaattacaggatggtctgctcatattcttgagcaacatgcagccaacaaacttattagaccactcgctagctacaaaggaaatagttatcgtaaagttgtaccaattaatcaaagataag

SEQ ID NO: 236244 - DNA, 493 bp, Unknown
  Bacterial polypeptide expressing nucleotide sequence isolated from the Sargasso Sea
cgctatcgcgagtttgaaaggtccgcttcatggtggggccaatgaagaggtaatgcatatgatgaacaaaatcaaaaaaccagagaatgcactaaaatggataaataatgcacttaaaaataaagaggtagtcatgggatttgggcatagagtttataaatcaggggactctagagttccaactatgagaaaatacttcggtaaggtcgctaggcttaaaaaagataaaaaatttgaaaaaatctacgatattgttgaaaaagttatgattaaaaagaagaatatttaccctaacgtagattatccaactggacctacttaccatttgatgggttttgatactgatttttttactcctatatttgtaatttcaaggattacaggttggtctgctcacataatggagcaacatgctgctaacaaacttattagacctttggcaagttataaaggcagtaagcaccgaaaagtaatgcagttaaatcaaagataa

SEQ ID NO: 236245 - DNA, 724 bp, Unknown
  Bacterial polypeptide expressing nucleotide sequence isolated from the Sargasso Sea
agcggcattctataggataagaaaaggggggaaaataattaaacctaaaaaaaatttaaatatagctgagaattttttctatatgtgttttggaaaagtacctcaaaaagaaattgttaaagcatttgatgtctctttgatattatatgcagagcatagttttaatgtttctacatttactgctagaactattacaagtagcttatcagatattcatggagctataacgggagcaatagctagtttaaaaggcccacttcatggtggcgcaaatgaagaagtgatgcatatgatgaataaaattcaaaaaccagaaaatgccctgaaatggattaataatgctctaaaaaataaagaagttgtaatgggttttggtcacagagtttataaatccggagactcaagagttccaacaatgagaaagtattttgctaaagttgctaaaatcaaaaagggcaaaaaatttgaaaaaatatacgatattgtagaaaaggtaatgatagagagaaaaaatatttaccctaatgtagactatcctacaggtcctacttatcatttgatgggttttgatacagatttcttcacacctatttttgttatttcaagaattacaggttggtcggctcatataatggaacaacatgctgcaaataaattaattagaccccttgcaagctacaaaggtagccagcatagaaaagttgttcaacttaatcaaagataa

SEQ ID NO: 236246 - DNA, 594 bp, Unknown
  Bacterial polypeptide expressing nucleotide sequence isolated from the Sargasso Sea
tatctttaatattatatgctgaacacagttttaatgtttcaacatttactgccagaaccattacaagtagtttgtctgatattcacggcgcaatcactggagctattgcaagtttaaaaggtccattgcatggtggagctaatgaggaagtaatgcatatgatgaacaaaattaaaaaaccagaaaatgcactaaaatggataaataatgccttaaagaataaagaagttgtaatgggatttggtcacagagtttacaagtcaggcgactcaagagttcctacaatgagagagtattttggcaaagttgctaaaattaaaaaagacaaaaaatttgaaaaaatttatgacattgttgaaaaagtaatgatcaaagaaaaaaatatttatccaaatgtagactatcctactggaccaacttatcacttaatgggctttgatactgatttctttacgcctatatttgttatatcaagaattactggctggtctgctcatatcatggaacaacatgcagctaataaacttattagaccattagccagctataagggcaacaaacacagaaaagtattacaattaaatcaaagatagt

SEQ ID NO: 236247 - DNA, 880 bp, Unknown
  Bacterial polypeptide expressing nucleotide sequence isolated from the Sargasso Sea
aatgaatgatgaaataaaaaaaggcttactaggtatagttgttgatgaaacaacaatttctcaagtaatgcctgatataaattctcttacttatagaggttacgctgttcaagatctttgtgaaaaatgtagtttcgaagaagttgcttatctcgtgcttaatggagaccttccaaacaaaaatcaattaaaaaaatttcttaaagaagaaagaaaaaatagaatactttcaaagcaaatattaaacgatattaaaaaaatgccgaagaaggcacatcctatggatgttgttagaacagcagttagcttaatggccttagaagataaagatacaaaagataattcaccaaaggctaatatgaaaaaagcagttagaatattttctaaaacacctactgcattagcagctttttttagatcaagaaaaggaaaaaaaataatatcacctaaaaaaaatacttctttttctgaaaatttttttcatatgtgtttcggtaaaattcctaataaagatattgttagagcatttgacatatcattaatactttatgccgaacatagcttcaatgtttctacttttacggcaagaacaataacaagcagtctatcagatattcatggagcaattactggtgcaattgcaagcttaaaaggtcctttgcatggtggtgccaacgaagaagtaatgcatatgatgaataaagtaaaaaaacctgaaaatgcttttaaatggattaacaaagcccttgataaaaaagaagttgttatgggttttggtcacagagtatataaaaaaggtgattctagagtgcctactatggaaaaatattttaaaaaagttgctaagattaaaaatgataagaaatttattaaaatttat

SEQ ID NO: 236248 - DNA, 730 bp, Unknown
  Bacterial polypeptide expressing nucleotide sequence isolated from the Sargasso Sea
aaataaaaaacaattaaaaaattttataaaggaagaaagattagatagaaaactctctaaagagatattaagcgacataagaaaaatgcctaaaaaagctcatccaatggatgttgtgagaactgcggtcagtttaatgtctcttgaagataaggaaacaagagacaattctccaaaagcaaacatgagaaaagctataagaatatttgcaaaaacaccaatcgcattagctgctttttttagaagtagaaaaggaaaaaaaatattggctccaaagaaaaatttatctttttccgaaaactttttctacatgtgttttggcaaagttccaaaaaaagaaatagttaaagcttttgatgtgtctttaatactttatgccgagcatagttttaatgtctcaacttttactgcaagaactataactagtagtttatcagatatacacggagcaataactggagctattgcaagtttaaaaggtcctttgcatggtggggctaacgaagaagttatgcacatgatgagtaaaattaaaaaacctaaaaatgccttaaaatggattaacaaagctctagataaaaaagatgtagtaatgggatttggtcacagagtttataaaaaaggagattctagagttccaacaatggaaaaatactttaaaaaagtcgcttcaattaaaaatgataaaaaattcataaaaatttatgacatagtaaaaaatgttatgatt

SEQ ID NO: 236249 - DNA, 836 bp, Unknown
  Bacterial polypeptide expressing nucleotide sequence isolated from the Sargasso Sea
tagaggttatgctgctcaagatctttgtgaatattgtagatttgaggaagtagcttatcttattttaaataaagatttacctaatactattcagcttagaaaatttgaaaaggaagagaaaaataatagagaattatctaaagatttatactcagttataaaaaaaatgcctaaaaaatctcatcctatggatgtggccagaactgctgtaagtattatgggtttagaagataaagaaacaactgactcctctcctgaagcaaatatgagaaaagcgattagaatccttgcaaaaactcctactgcattggctgccttctacagaattagaaaaggtaaaaaaattattaaacccaaaaaaaatttaaatatagcagaaaattttttttatatgtgttttggaaaagtgcctcaaaaagaaatagtaaaagcttttgatgtgtctttaatattatatgcagagcatagttttaacgtctcaacttttactgcaagaactataaccagcagtttatctgatattcatggtgcaattactggagcaatagcgagtttaaaaggtccattacatggaggagctaatgaggaagtaatgcacatgatgaatagaattaaggatcctaagaatgctttaaagtggataaatgatgcattagataacaaagatgttgtcatgggttttggccatagagtttataaaagtggagattcaagagttcctacaatgagaaaatactttgctaaagtggccaaaattaaaaaagataaaaaatttgagaaaatctatgacattgttgaaaaggtaatgatagaaagaaaaaatatccatccaaatg

SEQ ID NO: 236250 - DNA, 659 bp, Unknown
  Bacterial polypeptide expressing nucleotide sequence isolated from the Sargasso Sea
tgaaaactttttttatatgtgttttggaaaagtcccaagtaaagagattgtaaaagcctttgatgtatctttgatactttacgcagaacacagttttaatgtatcaacttttactgcaagaactataactagtagtttgtctgatattcatggagctataactggtgcaatagctagtttaaaaggtcccttgcatggtggagctaacgaggaagttatgcatatgatgaataaaattaaaaagcctgaaaatgctctaaaatggattaacaaagcacttaaaaataaagatgttgtaatgggttttggacatagagtttataaaaaaggcgattctagagtacctacaatggagaaatactttaaaaaagtcgcttcaattaaaaaagataaaaagtttatgaaaatttatgacattgttaaaaatgtaatgattgaaagaaaaaatattcaccccaatgttgattacccaactggacccacttaccatctaatggggtttgatactgatttcttcacacctattttcgtaatatcaagaattactggttggtctgcacacataatggaacaacatgcagcaaacaaattaataagacctctttctaaatacagtggagcaaagcatagaaaggttatgcttttaaatcaaagataaa

SEQ ID NO: 236251 - DNA, 478 bp, Unknown
  Bacterial polypeptide expressing nucleotide sequence isolated from the Sargasso Sea
gaagcaaatatgagaaaagctatgagaatatttgctaaaacaccaactgctttagctgccttttatagaattagaaaaggtaaaaaaataataaaaccaaagaaaaacttaacattctcagaaaatttcttttacatgtgttttggaaaagtccctagtaaagaaattgttaaagcatttgatgtatcgttaattttatacgctgaacacagttttaatgtttcaacttttactgcaagaacaataacaagtagcttatcagacatacacggcgctattacgggtgcaattgctagtctgaaaggtcctttgcacggaggagctaacgaagaagttatgcacatgatgaataaaattaaaaaacctgagaatgcattaaaatggatcaataacgcactagataataaagacgttgtcatgggttttggacatagggtttataaatctggagactctagagttccaacaatgaaagaat

SEQ ID NO: 236252 - DNA, 874 bp, Unknown
  Bacterial polypeptide expressing nucleotide sequence isolated from the Sargasso Sea
atgagtgatgatataaaaaaaggcttgcttggaatagtagtagatgaaacagaagtttctaaagtaatgcctgaaattaactctcttacttatagagggtatgccgctcaagatctttgtgaatattgtagatttgaagaggttgcatatttaattttaaataaagacttaccaaatactattcaattaagaaaatttgaaaaagaagagagaaacaatagagaattaactaaaaatttatatgaaataattaaacatatgccaaaaaaatcacatcctatggatgttgcaaggacagctgtgagtgtaatgggattggaagacaaagaaactacagactcttctcctgaagcaaacatgagaaaagcattaagaatttttgctaaaacgcccactgcattggctgctttttatagaattagaaaaggaaagaagattataaaaccaaaaaaaactttaacttttgctgaaaactttttttatatgtgctttggaaaagttcctcaaaaagagattataaaagcatttgatgtttcattaatactttatgcagaacatagttttaatgtttcaacttttacagctaggactattaccagtagtttgtctgatatccatggcgcaattactggtgcgattgcaagtttgaaaggtccattacatggtggtgcgaacgaagaagtaatgcacatgatgagtaaaattaaaaaacctgaaaatgcacttaaatggataaataatgctctcaaaaacaaagaagttgtaatgggttttggtcacagagtttataaatcaggtgattcacgagtaccaactatgcgaaagtatttcggtaaagttgctaagatcaaaaaagataaaaaattgaaaaaat

SEQ ID NO: 236253 - DNA, 685 bp, Unknown
  Bacterial polypeptide expressing nucleotide sequence isolated from the Sargasso Sea
ttcctccaaaaaaaatctctctttctctgaaaacttttttcatatgtgttttggcaaagtgccaaacaaggatattgtaaaagctttcgatgtatctttaattctatatgcagaacacagctttaatgtttctacatttactgcaagaacaatcacaagtagtttatcagatattcatggcgcaattactggcgctatagccagtttaaaaggaccattgcatggtggtgctaatgaagaagtgatgcacatgatgaataaaattaaaaaacctgaaaaagctcttaaatggataaataaagcattagataataaagacgtaattatgggctttggtcatagagtttataaaagtggagactctagagttccaacaatgagagaatattttggcaaagttgcaaagattaaaaaagataaaaagtttgaaaaaatttatgacattgttgaaaaagtgatgatcgatagaaaaaatattcatcccaatgtagattatccaactgggcctacatatcatttaatgggatttgatactgatttttttacaccaatatttgtaatttcaagaattacaggttggtctgcccatataatggaacaacatgcggcgaataaattaattagacctcttgcgagttacaagggaagcaaatatcgaaaagttgttcagctaaatcaaagataa

SEQ ID NO: 236254 - DNA, 852 bp, Unknown
  Bacterial polypeptide expressing nucleotide sequence isolated from the Sargasso Sea
taaagaaagaactttatctaaaagtctaattaatattattaaacaaatgcctaggaagtctcatccaatggacgtagctagaactgctgtgagcgttatgggtttagaagataaagaggttacaaacaattcacctaaggcaaatttaagaaaagcaatgagaattttttcaaaaactccaacagcattagctgcattctataggttaagaaaaggaaaaaaaattattgctcccaaaaaaaaatttacatttgctgaaaactttttttacatgtgttttggaaaggttccaaataaagaaattgttaaagcttttgatgtgtcattaattttatatgctgaacatagttttaatgtttcaacttttacagctagaacaattactagtagcttatcagatattcatggagcaataactggagctatagctagcttaaaaggtcctctacatggtggtgctaatgaagaagttatgcatatgatgaaaaagatcaaaaaacctgaaaatgcagataaatggattaataatgcattaaacaaaaaagctgtggtaatgggttttggtcatagagtttataaaagtggtgattcaagagttcctactatgagagaatattttggaaaagttgcaaaaattaaaaaagataaaacttatgaaaaaatttatgacattgttgaaaaggtcatgattgagagaaaaaatatacatcctaatgtagattatccaactggccctacatatcacttaatgggatttgatactgatttctttacaccaatatttgttatttctagaataactggttggtcagctcatataatggagcaacattctacaaataaattaattag

SEQ ID NO: 236255 - DNA, 892 bp, Unknown
  Bacterial polypeptide expressing nucleotide sequence isolated from the Sargasso Sea
aacctttagagaaattgttaagcacatgcccaaaaaagctcatccaatggatgttgcgagaacagttgttagcgttttaggtttagaagacaaagaaacatcaaacaattctccaaaagcaaatatgaaaaaagcaataaaaatatttgctaaaacaccaactgctattgcagctttttttagatcaagaaaaggaaagaaagttatacctccaaaaaaaggtttaacatttgctgaaaactttttttatatgtgttttggtgaggttccaaacaaagatattgttaaagcttttgatgtatctttaattctttatgccgaacatagttttaatgtttcaacttttaccgctagaactataactagtagtttatctgatattcatggagcaattactggtgctatagcaagtttaaagggacctttgcacggtggtgctaatgaagaagtaatgcatatgatgaataaaataaaaaaacctgaaaatgcattaaaatggataaataaagctcttgataaaaaagatgttgtgatgggatttggtcacagggtttataaaaaaggcgactctagagttccaactatggaaaaatattttaaaaaagtcgctaaattaaaaaaggataaaaagttcattaaaatttatgatattgtaaaaaatgtaatgattgaaagaaaagatattcatccaaacgttgattaccctactggaccaacttaccacctcatgggttttgatactgatttttttacacctatatttgtaatttcaagaattactggttgggcagctcatatcatggaacagcatgctgctaataaactaattagacctctctctaaatatagcggccctgaacacaggaaagttatgttattaaaccaaagatag

SEQ ID NO: 236256 - DNA, 848 bp, Unknown
  Bacterial polypeptide expressing nucleotide sequence isolated from the Sargasso Sea
gaaagatctgatcgaaagctctcaaaagaaattttaagtgatattagaaaaatgccaaaaaaagcacatccaatggatgtggtaagaactgctgtaagcttaatggcattagaagataaggaaacaaaagacaattcttcaaaagctaacatgaggaaagctataagaatattttcgaaaacaccaattgctttagctgccttttttagagctagaaaaggtaaaaaaatgatagctccaaaaagaaatttatctttctctgagaactttttttatatgtgtttcggaaaagttccgagtaaagaaattgttaaggcctttgatgtatcgttaattctatatgcagaacatagttttaatgtttcaacttttactgcaagaactataactagtagcctgtctgatattcatggtgcaataactggtgcaattgcaagtttaaaaggtccattacatggtggtgccaatgaagaagtgatgcatatgatgaataaaattaaaaagcctaaaaatgctctaaaatggattaataaagcacttaaaaataaagatgttgtaatgggtttcggtcatagggtttataaaagaggcgattctagagtgcctactatggagaaatattttaaaaaagttgcatcaataaaaaaagataaaaaatttattaaaatttatgacattgttaaaaatgtaatgattgagagaaaaaatattcacccaaatgttgattaccctactggacctacttaccatttaatgggttttgatacagatttcttcacgcccatttttgtaatatcaaggattactggttggtctgcacatattatggaacagcacgcagcaaataa

SEQ ID NO: 236257 - DNA, 517 bp, Unknown
  Bacterial polypeptide expressing nucleotide sequence isolated from the Sargasso Sea
gatatccatggtgcaataactggtgcaatagctagtttaaaaggcccgttgcatggtggggcaaacgaagaagtaatgcatatgatgaataaaattaaaaaacccaagaatgcttttaaatggattaataaagcgctcaaaaacaaagatgttgtaatgggttttggtcatagagtttataaaaaaggtgattctagggtgcctacaatggaaaaatactttagaaaagtcgcttctataaagaaagataaaaaatttattaaaatttatgacatcgttaaagaagttatgatagataagaaaaatattcatccaaatgttgattatccaacagggcccacttaccatttaatgggttttgatactgatttttttactcctatttttgtaatttcaagaattactggttggtctgcccatattatggaacaacacgctgctaataaactgattaggcctttgtctaaatatagcggtgctaagcatagaaaagttatgcttttaaatcaaagataaa

SEQ ID NO: 236258 - DNA, 904 bp, Unknown
  Bacterial polypeptide expressing nucleotide sequence isolated from the Sargasso Sea
atagataacgaacaaaagacactaaatttggttctaaagccaggcttggaaggggttccagtaaccaactcagggatatgcgaaataaatgggacagagggaaagttgaactacagaggttatccaatatccgagctagcccaaaaaagtagttttttagaaacggcatttctcttgatatggggagaacttcccactaaagatgagcttcagaaatttgaagaggacgttcaaatgcatagacgagtgagctttcgaattagagatatgctcaagtgtttcccagaatctggacatccgatggatgcactacaagcaagtgctgcatctctgggactcttttattctcgaagagcaattgatgatccaaaatatatctacgacgcagtagtgaggttaattgcaaaaattccaactatggttgctgctttcgagcaaataagaaaaggagacgatccaattcaaccccaggatgatttaccgtattcctcaaatttcctttatatgcttaccgagagggaaccaaatcctcttgcagcaagagttttcgacagatgtttaattcttcatgccgagcacagtcttaatgcgagcaccttcagcgcaagagtaacagcgagcacactaacggatccttatgcggtagtagcttctgcggttgggacattagctggtcctcttcatggaggagccaatgaagatgtaatagcaatgctagaagaaattgggacacctgataaagcttctttatttcttaatgatgcaattgcaaaaaaaaggaaaatcatgggttttgggcacagagagtatcgtgttaaagaccctagagcaacaattttacaagccttcgcagaggaacttttctcggcatttggtaaagatgaaatgtatgaagtagcaaaag

SEQ ID NO: 236259 - DNA, 862 bp, Unknown
  Bacterial polypeptide expressing nucleotide sequence isolated from the Sargasso Sea
atgagtgaagatatcaaaaaaggattgcttggaattgtagttgatgaaactgaagtttctaaagtaatgccagaaattaattccctaacttacagaggttatgctgcacaagatttatgtgaatactgtagatttgaggaagtggcttacttaattttaaataaagatttaccgaatactatagagcttagaaaattcgaaaaagaggaaaaaaataacagagagttatcaaaaaacttatatgaaataataaaacatatgccaaaaaaatcacatcctatggatgtggccagaactgctgtaagtgtaatgggattagaggataaagaaacccaagattcttcaccagaagctaatatgagaaaggcattaagaatttttgcaaagacccctactgctttagcagcgttttatagaattagaaaaggaaaaaaaataattaaacctaggaaaactctaacttttgcggaaaactttttttatatgtgttttggtaaagttccacaaaaagaaattgttaaagcttttgatgtgtcactaattctttatgctgaacatagttttaatgtttcaacatttactgcaagaactataacgagtagcttatcagatattcatggagcaattacaggagccattgctagtctaaaaggaccgttgcatgggggtgctaatgaagaagttatgcacatgatgaataagataaaaaaacctgagaatgcgttaaaatggattaataatgctctaaaaaataaagaagtagttatgggttttggtcatagagtttataaatcaggagactctagagttccaactatgagacagtattttggaaaagttgctaaacttaagaaagataaaa

SEQ ID NO: 236260 - DNA, 857 bp, Unknown
  Bacterial polypeptide expressing nucleotide sequence isolated from the Sargasso Sea
tatgccgctcaagatttatgtgcgaaatgtaaatttgaagaggttgcttatctaatccttaatggtgagctaccaaccaaaaaacaattaaaaaaatttgaaaaagaagaaagaaaagagagaaagctatctaaaacattattagatgatattaaaaagtttccaaaaaaagctcatcctatggatgttgctagaacagcagttagtattatgggacttgaagacaaagaaactaaggataattcccctaaagccaatatgcgaaaagttatgagaatttttgcaaagatgccagttgccctagctgcattttacagagcaagaaaaggaaaaaaaattattccaccaaaaaaaaatctatctttttcagaaaatttttttcatatgtgttttggaaaagttccaaacaaagatattgtaaaagcatttgatgtatctcttattttatatgctgaacatagttttaatgtttcaacttttacagcaagaactataacaagtagtctatcagatattcatggagcaattactggtgctatagcaagtttaaaaggtcctcttcatggaggtgctaacgaagaggtaatgcacatgatgaataaaattaaaaaacctgagaatgcacttaaatggatcaataaagctttagataataaagatgttgttatgggatttgggcatagagtttataaaagtggagattcaagagttcctacaatgagagaatattttggaaaagttgcaaatattaaaaaagataaaaagtttgaaaagatttatgacattgttgaaaaagtaatgattgagagaaaaaatattcatcccaacgtggactaccctactggacccacatatca

SEQ ID NO: 236261 - DNA, 757 bp, Unknown
  Bacterial polypeptide expressing nucleotide sequence isolated from the Sargasso Sea
aatgagaatttttgcaaaaactcctgttgctttggctgctttttatcgagcaagaaaaggaaaaaaaattataccaccaaagaaaaatctttcattttctgaaaacttttttcatatgtgttttggcaaaacaccaaataaagatattgtaaaagcttttgatgtttcgctaatattatatgctgagcatagttttaatgtttcaacatttaccgcaagaactattactagtagtttgtctgatatacatggtgcaattacaggtgcaatagctagtttaaaaggtccattacatggaggtgctaacgaagaagtgatgcatatgatgaataaaataaaaaaaccagaaaacgcacttaaatggattaacaaagctttagataacaaagatgtgatcatgggatttggacacagagtttataaaagtggagactctagggtaccaacaatgagagaatattttggaaaagttgctaaaattaaaaaagataaaaagtttgaaaaaatttatgacattgttgaaaaagttatgattgaaagaaaaaatattcatccaaatgttgattacccaacaggaccaacctatcatttaatgggttttgatactgatttttttactcctatttttgtgatttcaagaataactggttggtcagcgcacataattgaacaatattctgcaaataaattaataagaccgcttgcgagttataaaggaagcaaacatagaaaagttattaatttaaatcaaagataa

SEQ ID NO: 236262 - DNA, 304 bp, Unknown
  Bacterial polypeptide expressing nucleotide sequence isolated from the Sargasso Sea
tctacatttactgctagaacgataacaagcagcttgtctgatattcatggggcaatcactggtgctattgcaagtttaaaaggtcctttgcatggtggcgcaaatgaggaagtaatgcacatgatgaataaaataaaaaaacctgagaatgcatcaaaatggattaacaacgctcttgataataaagatgtagttatgggttttgggcatagagtatataaaagtggagattcgagagtgccaactatgagagaatattttagaaaagtcgctaaaataaaaaaagataaaaaatttgagagaa

SEQ ID NO: 236263 - DNA, 821 bp, Unknown
  Bacterial polypeptide expressing nucleotide sequence isolated from the Sargasso Sea
aatgccagaaattaattcacttacttaccggggttatgctgcacaagatttatgtgccaaatgtaagtttgaagaagttgcttatctaattttaaatggagaactgcctaacaaaaaacaattaaaaaatttcgaaaaaaatgaaaaaaaagagcgaagattatctaaatccttactagatagtattaagaattttccaaaaaaatctcatcctatggatgtagcgagaacagcggtaagtattatgggtcttgaagacaaagagacaaaagataactctcctaaagctaatatgagaaaagttatgagaatatttgcgaaaacaccaacggctttagcagctttttacagattaaggaaaggaaaaaaaataataaaccctaaaaataatctctcattttcagaaaatttcttttatatgtgttttggtaaagtacctaacaaagaaattgttaaagcctttgatgtgtcattaattttatatgcagagcatagctttaacgtttcaacttttactgcaagaaccattacaagtagtttatctgatatacatggggcaattacgggtgctatagctagtttaaaaggtcctttgcatggtggtgccaatgaagaagtaatgcatatgatgaataaaatcaagaaaccagaaaacgcacttaaatggataaatactgctttagacaaaaagtctgttgtaatggggtttggacatagagtttataaaagcggagactcaagggtacctacaatgagagagtattttgctaaagttgctaaagtaaaaaaagacaaaaagttgaaaaaatttatgacatagt

SEQ ID NO: 236264 - DNA, 490 bp, Unknown
  Bacterial polypeptide expressing nucleotide sequence isolated from the Sargasso Sea
atagccagcttaaaaggtccactgcatggtggtgctaacgaagaagtaatgcatatgatgaataaaattaaaaaacctgaatacgcacttaaatggattaacaatgctctagataaaaaagatgtggtaatgggtttcggtcatagagtttataaaaatggagactcaagagttcctacaatgagagattattttggaaaagttgctaaaattaaaaaagataaaaagtttgaaaaaatatatgacattgttgaaaaagttatgattgaaagaaaaaatatacatccaaatgtagattatccaacaggtccaacttaccatttgatgggttttgatactgatttctttactccaatttttgttatttcaagaattacaggttggtcagctcacattatggagcaacacgctgccaacaaattaataagacctctggcaagttacaaaggtagccaacacagaaaagttattcaattaaatcaaagataaa

SEQ ID NO: 236265 - DNA, 799 bp, Unknown
  Bacterial polypeptide expressing nucleotide sequence isolated from the Sargasso Sea
gaaactacagactcttctcaagaagcaaacatgagaaaagctattagaattttagctaaaaccccaacagcattagctgctttctacagattaagaaaaggaaaaaaaataattaaacctaaaaaaaatcttaatatagcagagaattttttctatatgtgttttggaaaggttccacaaaaagaaatcgtaaaagcatttgatgtatctttaatcctatatgctgaacatagttttaatgtttcaacattcacagcaagaactattactagtagcttatcagatatccatggtgctataactggagcaattgccagtctcaaaggtcctttacatggtggcgctaatgaagaggttatgcacatgatgaataaaataaaaagcccaaaaaatgctcttaaatggataaataatgctctagataaaaaagaggtggttatgggctttggtcatagagtttataaatctggtgactctagagttccaactatgagaaagtattttgcgaaagtagcaaaaattaaaaaagacaaaaagtttgagaaaatttacgatattgttgaaaaagtaatgatagaaagaaaaaacattcatccaaatgttgattaccctacagggcccacttatcatttaatgggttttgatacagacttttttacaccaatatttgttgtttcaagaattacaggatggtcagctcatattatggaacaacatgctgcaaataaattaattagacctctagcaagctacaaaggaaatcaacacagaaaagttgttcaattaaatcaaagatagt

SEQ ID NO: 236266 - DNA, 704 bp, Unknown
  Bacterial polypeptide expressing nucleotide sequence isolated from the Sargasso Sea
aaaaggtaaaaaaattattaaaccaaaaaaaaacttgaatattgcagaaaattttttctatatgtgttttggaaaagtgccccaaaaggaaattgtaaaggcttttgatgtatctttaatattatacgcagaacatagttttaatgtttcaactttcactgcaagaacaattaccagtagtttatctgatattcatggagctatcactggggccatagccagtttaaaaggtcctcttcacggtggtgcaaatgaagaagtaatgcacatgatgaataagataaaaacccctaataatgctctcaaatggattaatagtgcattggataataaagaagtagtaatgggttttggtcatagagtttataaatctggtgactcaagagttccaacgatgagaaaatattttgctaaagttgcaaaaatcaaaaaggataaaaaatttgaaaaaatttatgacatagttgagagagttatgattgacagaaaaaatattcatccaaatgtcgattatcctactggaccgacctaccatttaatgggttttgacacagacttttttacaccaatttttgtgatttcaagaataacaggctggtcagcacacattatggaacaacatgcggctaataaattaattagaccacttgcaagctacaaaggaaaccaacatagaaaagttgttcaactaaaccaaagataaa

SEQ ID NO: 236267 - DNA, 585 bp, Unknown
  Bacterial polypeptide expressing nucleotide sequence isolated from the Sargasso Sea
ttttatatgctgaacatagtttcaatgtttcaactttcacagcgagaactataacaagcagtttatctgatatacatggtgcaatcactggtgcaattgctagtttaaagggtcctctgcacggaggagctaatgaagaagttatgcacatgatgaataaaattaaaaaaccagaaaatgctcttaattggataaataatgcattaaaaaataaagaagtggtaatgggatttggtcatagagtttataagtcaggagactcaagggttccaacaatgagaaaatattttggaaaagttgctaaacttaaaaaagataaaaaatttgaaaaaatttatgacatagttgaaaaagtgatgattaataagaaaaatatttatccgaacgtcgactatccaactggtcccacttaccatctgatgggctttgacactgattttttcaccccaatatttgtaatttcaagaatcactggttggtcagcccatataatggagcagcatgcagctaacaaacttattagacctttggcaagttacaaaggaaataagcacagaaaagttatgcaattaaatcaaagataat

SEQ ID NO: 236268 - DNA, 879 bp, Unknown
  Bacterial polypeptide expressing nucleotide sequence isolated from the Sargasso Sea
gatgaactcagtttctcaggtgatgcctgacataaattctcttacatacagcggttatgctgttcaggatctttgtgaaaaatgtaattttgaagaagtagcttatcttgttttaaatggagaacttcccaataaaagacaattaattagttttataaaagaagagagatcagatcgaaaactttcaaaggaaattttaagtgatatcagaaaaatgccaaaaaaagctcatccaatggatgttgtaagaacagctgtaagtttgatgtcattagaagataaagaaaccaaagataattctccaaaagcaaacatgagaaaagctataagaatattttcaaaaactccaattgctttagctgcattttttagagccagaaaaggtaaaaaaataatagctccaaaaaaaaacttatctttttctgaaaactttttttatatgtgttttggaaaaattccaagtaaagaaattgttaaagcttttgatgtatctttaattttatatgctgaacatagttttaatgtttcaacttttacagcaagaactataactagtagtttgtcagatattcatggagcaataaccggtgctatagcaagtttaaaaggtcctttgcatggcggtgctaatgaagaagtgatgcatatgatgaataaaattaaaaagcccaaaaatgctctaaaatggattaataaagctcttaaaaataaagatgtcgtaatgggttttggtcatagagtttataaaagaggcgattctagagttcctacaatggaaaaatactttaaaaaagtggcttctattaaaaaagataaaaagtttattaaaatttatgacatcgttaaagatgttatgattgagagaaaaaatattcaccc

SEQ ID NO: 236269 - DNA, 610 bp, Unknown
  Bacterial polypeptide expressing nucleotide sequence isolated from the Sargasso Sea
gttaaagcattcgatgtctcattaatattgtatgctgaacacagcttcaatgtttcaacattcactgcaaggactatcacaagtagtttatctgatatacatggtgcaataacaggagctattgcaagtttaaaaggtccattacatggtggtgcaaatgaagaagttatgcacatgatgagaaagataaaaaaaccagaaaatgcattaaaatggatcaataatgctttagataataaaagtgttgtaatgggatttggacatagagtttataaaagtggtgactctagagttcccactatgagagaatattttggaaaagttgcaaaaattaaaaaggataaaaaatttgagaaaatttacaatattgtagaaaaagttatgattgaaagaaaaaatatacatcctaatgttgactatcctacaggacctacataccatttaatgggatttgacacagatttttttacaccgatttttgttatttcacgaataacaggttggtcagcacacattattgaacaatatgcttcaaataaacttattagaccgcttgcaagttacaaagggaataaacacagaaaagttattcaaataaaaaaaaggtagt

SEQ ID NO: 236270 - DNA, 616 bp, Unknown
  Bacterial polypeptide expressing nucleotide sequence isolated from the Sargasso Sea
gatatagttaaagcttttgatgtatctttaatcttatatgcagaacatagttttaatgtttcaacttttacagctagaacaataacaagtagtctatcggatattcatggagcaatcactggtgcaatagcaagtttaaaaggccctcttcatggaggcgctaatgaagaagttatgcatatgatgaataaaatcaaaaaaccagagaatgcacttaaatggataaataaagctctagataataaagatgttgttatgggatttggccatagagtttataaaagtggggattcaagagttcctacaatgagagaatattttggaaaagttgctaaaatcaaaaaagataaaaaatttgaaaaaatatatgatattgttgaaaaagtgatgatagacaggaaaaatattcatccaaatgtagactatcctaccgggcctacttatcacttaatgggatttgatactgatttcttcacaccaatttttgtaatttcaagaattacaggttggtcagctcatataattgaacaacatgctgcaaataaattaatcagacctttagcaagctataaaggtagcaagcaccgtaaagttcttcaattaaatcaaagataat

SEQ ID NO: 236271 - DNA, 817 bp, Unknown
  Bacterial polypeptide expressing nucleotide sequence isolated from the Sargasso Sea
aatgggtttagaagataaagaaactactgataattcacctaaagcaaatttaagaaaggcaatgagaatattctcaaaaatgcccgttgctttagcagctttttataggctaagaaaaggaaaaaaaattattgcaccaaagaataaactttcttttgcggagaacttttttcatatgtgttttggaaaagtccctaaaaaagaaattgttaaagcttttgatgtatcattaattttatatgcagaacacagttttaatgtttcaacttttactgcaagaacaataacaagtagtttgtctgacattcatggcgcaattacaggcgctatcgcaagcttaaaaggtccattacatggtggtgctaatgaagaagttatgcatatgatgaacaaaattaaaaaaccagaaaacgcactaaattggatcaataatgcattagacaagaaggctgtggttatgggttttggacatagagtttataaaaatggtgactcaagagtaccaacaatgcgtgagtattttggaaaggttgccaaaattactaaggacaaaaaatttgagaaaatttatgatattgttgaaaaagtaatgatagatagaaaaaacattcacccaaatgtagattatccaactggtcctacctatcatttaatgggttttgaaactgacttttttaccccgatatttgttatttcaagaattacaggttggtcagcacatattattgagcagcacagtactaataaattaattagaccattggctgcttacaatggtagcaaacatcgtcaagttgcaaatttaaaagatagataa

SEQ ID NO: 236272 - DNA, 931 bp, Unknown
  Bacterial polypeptide expressing nucleotide sequence isolated from the Sargasso Sea
tttgaaaaacaagagagaaaagaaagaaaactttctaaaactttgcttgaagatattaaaaaatttccgaaaaaagctcatccaatggatgttgcaagaactgttgtcagtatcatgggtctagaggataaagaaacaaaagataattctccaaaagcaaatatgagaaaagtgatgagaatttttgcaaaaacccctgtagctttagctgctttttatagagttagaaaaggaaaaaaaattataccacctaaaaataatttatccttttcagaaaatttttttaatatgtgtttcggtaaagtgccaaataaagatattgtgaaagcatttgatgtttctttaattttgtatgctgaacacagttttaatgtttcaacttttactgcgagaacgatcactagtagcttatctgatattcatggtgctattacaggagcaatagcaagtcttaagggccctcttcatggaggagcaaatgaagaagtaatgcatatgatgaataaaataaaaaaaccagaaaatgcacttaattggataaataaagcgctagataataaagacgtagtaatgggatttggtcatagagtttacaaaagtggagattcaagagtccctacaatgagagaatattttggtaaagttgctaaaattaaaaaagacaagaaatttgaaaaaatttacgacattgttgaaaaagttatgattgaaagaaaaaatattcatcctaatgtagattacccaactggccctacttatcatcttatgggttttgacactgattttttcacacctatttttgtaatttcaaggattactggttggtcagctcatattattgaacaacacgctgcaaataaattaattagaccacttgctagttacaaaggtaaccaacatagaaaagttgttcaattaaaccaaagataat

SEQ ID NO: 236273 - DNA, 775 bp, Unknown
  Bacterial polypeptide expressing nucleotide sequence isolated from the Sargasso Sea
gccaatatgagaaaagttatgagaatttttgcaaaaatgccagttgcactagctgctttttatagagcaagaaaaggaaaaaaaattataccaccaaaaagtaaactttcattttcagaaaacttttttcatatgtgttttggaaaagtaccaaacagagagattgtaaaagcatttgatgtatctcttattctgtatgcagagcatagttttaatgtttctacatttactgccagaacaatcacaagtagtttatcagatattcatggtgcaataactggcgcaatagcaagtttaaaaggaccccttcatggcggtgctaacgaagaagtaatgcacatgatgaataaaattaaaaaacctgagaacgcacttaaatggataaataaagctttagataataaagatgtagttatgggttttggtcacagagtttacaaaagtggagactctagagttccaaccatgagggaatattttggcaaagtcgctaaaattaaaaaagacaaaaaatttgaaaaaatttacgatattgtagaaaaggtaatgatagacagaaaaaatattcatccaaatgtagactaccctacagggcctacttaccatttaatgggatttgataccgatttcttcacaccaatttttgtgatttcaagaattacaggttggtcagctcatattatagaacaacatgctgctaataagcttattagacctttagcaagctataaaggtagcaagcaccgtagagttctccaattaaatcaaagataat

SEQ ID NO: 236274 - DNA, 496 bp, Unknown
  Bacterial polypeptide expressing nucleotide sequence isolated from the Sargasso Sea
ggggctattgcaagtttaaaaggtcctttacatgggggagccaatgaagaagtgatgcatatgatgaataaaataaaaaaacctgaacatgcattaaaatggattaataaagcattagataataaagatgttgtaatgggatttggtcatagagtttataaaagtggagattccagagttcctacgatgagagaatactttggtaaagttgccaaaatcaaaaaagataaaaaatttgaaaaaatttatgacatagtagaaaaggtaatgatagaaagaaaaaatattcatccaaatgtagattatccgacaggacccacttatcatttaatgggttttgacactgacttttttactccaatttttgttatttcaagaataactggttggtctgctcatattatggaacaacattctgctaataaattaatcagacctcttgcaagttataaaggtagccaacaccgaaaagttgttccaattaatcaaagataat

SEQ ID NO: 236275 - DNA, 862 bp, Unknown
  Bacterial polypeptide expressing nucleotide sequence isolated from the Sargasso Sea
atgagtgatgatataaaaaaaggcttactaggtatagtagtagatgaaactgaggtttcaaaagtaatgccagaaataaattctcttacgtatagaggctatgctgctcaagatttatgtgaatattgtaggtttgaagaggttgcttacttaattttaaataaagatcttccaaattcaatagaacttaaaaactttgagaaagaagaaagaaacaatagagaacttacaaaaaatttatatgaaattataaaacatatgcctaaaagatctcaccctatggatgttgctagaactgctgtaagtgttatgggacttgaggataaggaaacttcagactcctctcctgaggccaatatgagaaaggcactaagaatttttgctaagaccccaactgcattagcagcattttatagaattagaaaaggaaaaaaaattataaaacctaaaaaaacattaacttttgctgaaaattttttttacatgtgttttgggaaagttccacaaaaagaaattgtaaaagcttttgatgtatctttaattttatatgcggaacatagttttaatgtttcaacatttacagcaagaactatcactagtagcttgtcggatatacacggagcaatcacgggtgcgattgctagtttgaaaggacctctgcatggtggtgcaaatgaggaagtaatgcatatgatggataaaattaaaaaacctgaaaatgcacttaagtggatcaataacgctctcaaaaataaagaagtagtgatgggttttggtcacagggtttataaatcaggagattcaagagtaccaactatgagagaatattttggtaaagttgcaaaaataaaaaaggataaaa

SEQ ID NO: 236276 - DNA, 876 bp, Unknown
  Bacterial polypeptide expressing nucleotide sequence isolated from the Sargasso Sea
ttaaaaattttccaaagaaatctcatcctatggatgtagcaagaacagcagtgagtattttgggtctgaaggataaagaaactaaagataactcacctaaagccaatatgagaaaagtcatgagaatttttgcaaaaacaccgactgctttagcagcgttttatagacttagaaaaggtaaaaaaataataagcccgaaaagcaatctatcattttcagaaaatttcttttacatgtgttttggaaaagttccaaacaaagagatagtaaaagcgtttgatgtatctttaattttatatgctgagcatagttttaacgtgtcaacttttacagcaagaactataacaagtagtttatcagatattcatggtgcaattactggtgctatagctagtttaaaagggccattgcatgggggtgcaaatgaagaggtcatgcatatgatgaataaaattaagaaaccagaaaatgctcttaaatggatcaataatgctttagataaaaaagctgttgtgatgggttttggtcatagagtttataaaagcggagactctagagtacctaccatgagggaatatttcgcaaaagtcgcaaaagttaaaaaagacaaaaaatttgaaaaaatatatgacattgtagaaaaagttatgattgatagaaaaaatatttaccctaatgttgattacccaactggaccaacttatcatttaatgggttttgacactgatttctttacgcctatatttgtaatatcaagaataacaggctggtctgcacacattcttgaacagcacgctgcaaataaattaatcaggcctttagctagttacaaaggaagtagttataggaaagtggtacctttaaaccaaagataaa

SEQ ID NO: 236277 - DNA, 721 bp, Unknown
  Bacterial polypeptide expressing nucleotide sequence isolated from the Sargasso Sea
aatgattcacagattaagagaaggattacctatcgtagaggcagatccaacgaaaggccatgctgaagatttcctaagaatgttacatgataaggaagcaacacagactcaaattgaagctctaaatttatacctaatcttactggccgatcacggatttaatgcatctaccttttccgcaagagttacggctggaacactagccaatttacactcaactataacttcagcagtggggacacttagtggacccttacatggtggagccaacgaaaaagccatggacatgattcttgaagttgggacaaaaaagaaagcctcaaactacatacagaaagcattcgataacaaacaaaaaataatgggtttcgggcacagagtctacaaagttgatgatgcacgtaaaccacatctaaaaaagatggcaaaacaagttttggaagaaaaaggaaatatgaaaatttttgacgtatcggaagagattgaaaaacaagttaaagatcgaaaacctataataacaaatgtggatttttactctgcacccctattatatggcttagaaattcctacagacttattcactcccctttttgcaatgtcccgtgttgcaggatggactgcacatgttcttgaacaatatcgtaataatagattaattaggcccagagcaagatatatcggacaaatcgatcgtacttttaggccaattgatcaacgctaa

SEQ ID NO: 236278 - DNA, 883 bp, Unknown
  Bacterial polypeptide expressing nucleotide sequence isolated from the Sargasso Sea
aatgagtgaagaagtaaaaaaaggtttattaggaattgttgttgatgaaacagaagtttctaaagttatgcctgaaattaactctttaacttataggggttatgctgttcaagatctgtgtgaattttgtagatttgaggaagctgcatatcttattttaaagggtgatttaccaaacagtatagagctaagacaatttgaaaaaattgaacgaggacatagggatttatcgaaaaatctttacgaaataattaaacacatgccaaagaaatctcatcctatggatgttgctagaacagcagtaagtgttatgggattagaagataaagaaactacagataattctcaggaagcaaacacaagaaaagctttaagaattttagctaaaactccaactgctttagcagctttttatagaattcgaaaaggtaaaaaaattattaaaccaaaaaaagagctaacttttgcagaaaactttttctatatgtgttttggaaaagtacctcaaaaggaaattgtaaaagcgtttgatgtatctttaattttatacgcagaacacagttttaatgtatcaacttttacagctagaactattacaagtagtttatctgatattcatggtgctataacaggcgcaattgctagtttaaaaggaccattacatggtggagctaatgaagaagttatgcatatgatgaataaaatcaaaaaacctgagaatgccttaaaatggatcaataatgcattaaagaaaaaagaggttgtgatgggttttggacacagagtttataaaagtggtgactctagagttccaacaatgaaagaatatttcaaaaaagttgctaaaattaaaaaagataaaaagtttctaaagatttacgat

SEQ ID NO: 236279 - DNA, 805 bp, Unknown
  Bacterial polypeptide expressing nucleotide sequence isolated from the Sargasso Sea
agacaaggaaactaatgataattcacctaaagcgaatatgaggaaagtaatattaatatttgctaaaacccctacagcaatagcagctttttttagagctagaaaaggtaaaaaaattattccaccaaaaaaaaatttatcttttgctgaaaatttcttttatatgtgctttggaaaagtgcctaacaaggatattgttaaggcttttgatgtatctttaatactttatgctgaacacagttttaatgtatcaacttttacagcaaggactattacaagcagtttatcagatattcatggagcaataacaggtgcaatagcaagtttaaaaggaccattgcatggaggtgctaatgaagaggttatgcatatgatgaataagataaaaaaaccagataatgctttgaaatggatcaataatgcacttaaaaaaaaggaagttgttatgggttttggacacagagtttataaaaaaggagactctagagttcctacaatggaaaaatattttaaaaaggtatcaaaaataaatggagataaaaagtttattaaaatttatgatatagttaaatctgtcatgatagaaagaaaaaatattcatcctaatgttgattatccaactggtcctacttaccatttgatgggctttgatactgatttcttcactccgatctttgttatatctagaataactggttggtcagcacatataatagaacagcatgctgcgaataaattgattagacctttatctaaatacagtggtcctgatcatcgtaaagttatgttgcttaatcaaagataa

SEQ ID NO: 236280 - DNA, 799 bp, Unknown
  Bacterial polypeptide expressing nucleotide sequence isolated from the Sargasso Sea
aatgagtgaagatatcaaaaaaggattgcttggaattgtagttgatgaaactgaagtttctaaagtaatgccagaaattaattccctaacttacagaggttatgctgcacaagatttatgtgaatactgtagatttgaggaagtggcttacttaattttaaataaagatttaccgaatactatagagcttagaaaattcgaaaaagaggaaaaaaataacagagagttatcaaaaaacttatatgaaataataaaacatatgccaaaaaaatcacatcctatggatgtggccagaactgctgtaagtgtaatgggattagaggataaagaaacgcaagattcttcaccagaagctaatatgagaaaggcattaagaatttttgcaaagacccctactgctttagcagcgttttatagaattagaaaaggaaaaaaaataattaaacctaggaaaactctaacttttgcggaaaactttttttatatgtgttttggtaaagttccacaaaaagaaattgttaaagcttttgatgtgtcactaattctttatgctgaacatagttttaatgtttcaacatttactgcaagaactataacgagtagcttatcagatattcatggagcaattacaggagccattgctagtctaaaaggaccgttgcatgggggtgctaatgaagaagttatgcacatgatgaataagataaaaaaacctgagaatgcgttaaaatggattaataatgctctaaaaaataaagaagtagttatgggttttggtcatagagtttataaatcagga

SEQ ID NO: 236281 - DNA, 900 bp, Unknown
  Bacterial polypeptide expressing nucleotide sequence isolated from the Sargasso Sea
tgagtgaagaagtaaagaaaggtttattaggaattgttgttgatgaaacagaagtttctaaagttatgcctgagattaactcattaacttataggggttatgctgttcaagatttgtgtgaattttgtagatttgaagaagctgcatatcttattttaaaaggtgatttaccaaacagtatagagctaagacaatttgaaaaaattgaacgaggacatagggatttatcgaaaaatctttacgaaataattaaacacatgccaaagaaatctcatcctatggatgttgctcgaacagcggttagtgtaatgggattagaagacaaagaaactacagataattctcaggaagcaaatacaagaaaagctttaagaattttagctaaaactccaactgctttagcggcgttttacagaatacgaaaaggaaaaaaaattattaaaccaaaaaaagaactaacttttgcagaaaactttttctatatgtgttttggaaaagtacctcaaaaagaaattgtaaaagcttttgatgtatctttaattttatacgcagaacacagttttaatgtttcaacatttacagctagaactataacaagtagtttatctgacattcatggtgctataacaggcgctatagctagtctaaaaggaccactacacggtggagcaaatgaagaagttatgcatatgatgaacaaaataaaaaaacccgaaaaagctctcaaatggattaaaaacgcacttaagaataaagaagtagttatgggatttggacatagagtttataaaagtggggattctcgagtaccaacaatgaaaagttattttgaaaaagtgtgtaagattaagaaagacaaaaaatttctgaaaatttatgaaattgtgaaaaagaaatgat

SEQ ID NO: 236282 - DNA, 795 bp, Unknown
  Bacterial polypeptide expressing nucleotide sequence isolated from the Sargasso Sea
aatgagtgaagatataaaaaaaggtttacttggaatagttgttgatgagacagaagtttcaaaagttatgccagagatcaattctcttacttacagaggttatgcggcacaagacctgtgtgaatattgcagatttgaagaagttgcctacttaattttaaataaagatcttccaaataccattcagctaagaaaatttgagaaagaagaaaaaaataatagagaattatctaaagatctttattcaattttaaaaaagatgcctaaaaaagctcatccaatggatgtagctagaacagctgttagtgtaatgggcctagaggataaggaaacgacagactcttcaccagaggcaaacatgcgaaaagcgattagaattttggctaaaacacctactgctttagctgccttttatagattgagaaaaggaaaaacaattattaaacctaaaaaatatctaaatattgctgaaaattttttctacatgtgttttggtaaagtgccacaaaaggaaattgtcaaagcttttgacgtttctctaattttatacgctgaacatagttttaatgtatcaacattcacagcaagaactattacaagtagtttatctgatattcatggagcaataactggagctattgcaagtttaaaaggaccccttcatggaggtgcaaacgaagaagtaatgcacatgatgaataaaattaagaaacctgaaaatgcccttaaatggattaataatactttagataaaaaagaagttgtaatgggttttggtcatagagtttataaatc

SEQ ID NO: 236283 - DNA, 535 bp, Unknown
  Bacterial polypeptide expressing nucleotide sequence isolated from the Sargasso Sea
aattacgagtagtttatcagatattcatggggttattactggagctattgcaagtttaaagggaccattacatggtggagctaatgaagaagtgatgcatatgatgaacaaaattaaaaaaccagaaaatgcattaaaatggatcaataacgctttaaaaaataaagaagttgttatgggatttggtcatagagtttataaatcaggtgactcaagagttccaacaatgagacaatattttggaaaagttgcaaaacttaagaaagataaaaaatttgaaaaaatatatgacattgttgaaaaagtaatgatcaaagaaaaaaatattcatccaaatgttgattatccaacaggtcccacttatcatttaatgggttttgaaactgatttttttacaccaatatttgtgatctcaaggattactggttggtcagctcacatcatggagcaacatgctgctaataagcttattagacctttggctagttataaaggcagtaaacacagaaaagttttagaattaaatcaaagatag

SEQ ID NO: 236284 - DNA, 570 bp, Unknown
  Bacterial polypeptide expressing nucleotide sequence isolated from the Sargasso Sea
atagttttaatgtttcaacttttacagctagaaccataacaagtagtttgtctgacattcatggtgcaattactggtgctatagcaagcttgaaaggccctcttcacggaggtgcgaatgaagaagtcatgcatatgatgaataaaatcaaaaaaccagaaaacgcacttaattggataaataaagctctagataataaagatgttgtaatgggatttggtcatagagtttataaaagtggagattcaagagttcctacaatgagagaatattttggaaaagttgctaaaattaaaaaagataaaaagtttgaaaaaatttatgacattgtagaaaaagtaatgatagatcgaaaaaatattcatccaaacgtggactaccctactgggcctacttaccatttaatgggatttgataccgatttcttcacaccaatttttgtgatttcaagaattacaggttggtcagctcatataattgaacaacatgctgctaataaacttattagacctttggcaagttataaaggtagtaagcaccgtaaagttcttcaattaaatcaaagataat

SEQ ID NO: 236285 - DNA, 792 bp, Unknown
  Bacterial polypeptide expressing nucleotide sequence isolated from the Sargasso Sea
ggagagttaccttctgaaaaacagttaaaaaattttgaaaaagttgagagaaaagagcgaaacctatcaaagacattattagaaagtattaagaattttcctaaaaaatctcatcctatggatgtggctagaacagcagtgagtataatgggattagaagataaagaaactaaagataattctcctgatgcgaacttgagaaaggtaatgagaatttttgcaaaaacacctgttgctttagcagctttctatagaattagaaaaggaaagaaaatcattaaaccgaaaaggaatttgtcattctcagaaaactttttttatatgtgttttggaaaagttcctgaaaaagaaattgtaaaagcgtttgatgtatctcttatattatatgctgaacatagttttaatgtttctacgtttactgcaagaacaattactagtagcttgtcagatattcacggtgcaattactggtgctattgcaagtttaaaaggaccgttacacggtggtgcaaatgaggaagtaatgcatatgatgaataaaattaaaaagcctgaaaatgcattaaattggataaataatgctttggatcaaaaagctgtagtaatgggatttggtcacagggtttataaaagtggcgactctagagttcccaccatgagagagtatttttctaaagttgcaaaattaaaaaaagataaaaagtttgaaaaaatttacgacattgttgagaaggtgatgattgaaagaaaaaatatacatccaaatgtagattatccctactggaccgactta

SEQ ID NO: 236286 - DNA, 737 bp, Unknown
  Bacterial polypeptide expressing nucleotide sequence isolated from the Sargasso Sea
taaaaaacaattaaaaagttttattaaagaagaaaggtctgatcgaaagctttcaaaagaaattttaagtgatattagaaaaatgccaaaaaaagcccatcctatggatgtggctagaacagctgtaagcttaatggctttagaagataaagaaacaaaagataattctccaaaagccaacatgagaaaagctataagaatattttcaaaaactccaattgctttagctgccttttttagagctagaaagggcaaaaaaataatagctccgaaaaaaaatttatctttctctgaaaattttttttatatgtgttttggaaaagtaccgagcaaagaaattgttaaggcctttgatgtgtctttaattctatatgcggaacatagttttaatgtttcaacatttactgcaagaactataactagtagtttatctgatattcatggagctattactggcgctatagcaagtttaaaaggtcctttgcatggtggtgctaatgaagaagttatgcatatgatgaataaaataaaaaagcctgaaaatgctttaaaatggattaataaagcactcaaaaataaagatgttgtaatgggttttggacatagagtttacaaaagaggcgattccagagtgcctacaatggaaaaatactttaaaaaagtttcatcaataaaaaaagataaaaagtttatcaaaatttatgacattgttaaaaatgtcatgattgagaaaaaaa

SEQ ID NO: 236287 - DNA, 756 bp, Unknown
  Bacterial polypeptide expressing nucleotide sequence isolated from the Sargasso Sea
atctcatccaatggatgtaacaagaacatcgttagcgtcttaggtcttgaagataaagaaacaaataacaactctcctgaagcaaatatgagaaaagcaattagaatttttgctaaagcgcctacagctatagcagctttttttagagcgaggaaaggtaaaaatgtaataccaccaaagaaaaaattgtctttttctgaaaattttttctatatgtgttttggaaaagtgccaagtaaagaaatagtaaaggcttttgatgtatctctaatcctttatgctgaacatagttttaacgtttctacatttaccgcaagaactattacaagtagtttgtcagatattcatggtgcaataacaggcgctatagctagcttaaaaggtcctttgcatggtggagcaaacgaagaagttatgcatatgatgaataaaataaaaaaaccggaaaacgctttaaaatggattaacaaaactttagataaaaaagaagtggtaatgggttttggccatagagtttataaaaaaggagattcaagagttccaacaatggaaaaatattttaaaaaagtatctaaagtaaaatcagacaaaaaatttattaaaatttatgaaatagttaaaaaagtaatgatagatagaaaaaatatacaccctaatgttgattacccaactggtccaacctatcatttaatggggtttgatacagattttttcacaccaatttttgttatttctagaattactggttggtctgct

SEQ ID NO: 236288 - DNA, 829 bp, Unknown
  Bacterial polypeptide expressing nucleotide sequence isolated from the Sargasso Sea
aatgagtgatgaaatcaaaaaaggactgctaggtattgttgttgatgaaacagaagtttccaaagttatgcctgaaatcaactccttaacttatagaggttatgctgctcaagatttgtgtgcaaaatgtaaatttgaagaagtagcttatttaattttaaatggtgaacttccaagtaaaaaacaattaaaaaaatttgaaaaagaagagagaaaagaaagaaaattatctaaaactttgctggacgatattaaaaaatttccaaaaaaatctcacccaatggatgttgcaagaacagctgtaagtattatgggtcttgaagacaaggagactaaagataattctccaaaagctaatatgagaaaagtaatgagaatctttgcaaagacaccagttgctcttgctgctttttatagagctagaaaaggaaaaaaaattattccacctaaaaaaaatctgtctttttcagaaaattttttccatatgtgttttgggaaagtaccaaacaaagaaattgttaaggcattcgatgtgtctttaatcttatatgcagaacatagttttaatgtttcaacttttacagctagaaccataacaagtagtttatcggatattcatggtgcaattactggcgcaatagctagtttaaaaggacctcttcatggaggtgctaatgaagaagtcatgcatatgatgaataaaatcaaaaaaccagaaaatgcactcaaatggataaataaagctttagacaataaagatgttgttatgggttttggccacagagtttataaaagtggagactctagagtacctacaatgagagagtat

SEQ ID NO: 236289 - DNA, 1126 bp, Unknown
  Bacterial polypeptide expressing nucleotide sequence isolated from the Sargasso Sea
atgagtgatgatattaaaaaaggcttattaggaattgttgtagacgaaacagaagtctcaaaagtaatgcctgaaattaactctctaacttatagaggttatgctgctcaagatctttgtgaatattgtagatttgaggaggtggcttatcttattttaaataaagatttaccgaatactattcagcttagaaaatttgaaaaggaagagaaaaataatagagaattatctaaagatttatactcggttataaaaaaaatgcctaaaaaatctcatcctatggatgtggccagaactgctgtgagtattatgggtttagaggataaagaaacaactgactcctctcctgaagcaaatatgagaaaagcggttagaattcttgcaaaaactcctactgcattagctgccttctacagaattagaaaaggtaaaaaaattatcaaacccaaaaaaaatttaaatatagcagaaaacttcttttacatgtgttttggaaaagtacctcaaaaagaaatagtaaaagcttttgatgtgtctttaatattatatgcagagcatagctttaacgtttcaacttttactgcaagaactattaccagtagcttgtctgatattcacggtgcaattactggggcaatagcaagtttgaaaggtccattacatggcggagctaatgaggaagtaatgcatatgatgaacaaaattaaggatcctaaaaacgctcttaaatggataaatgatgccttagataacaaagaggttgttatgggttttggccatagagtttacaaaagtggagactcaagagttcctacaatgagaaaatatttcgctaaagtagcaaaaattaaaaaagataaaaaatttgaaaaaatttacgacattgttgaaaaagtaatgattgagagaaaaaacatccatccaaacgtggattatcctactggaccaacttatcacttgatgggttttgatacagacttctttacaccaatatttgttatttcaagaataactggttggtcagcacatataatggagcaacatgctgcaaacaaattgatccgaccacttgcaagttacaaaggcaacaagcacagaaaagttctacaattaaatcaaagataat

SEQ ID NO: 236290 - DNA, 793 bp, Unknown
  Bacterial polypeptide expressing nucleotide sequence isolated from the Sargasso Sea
caagattcttcaccagaagctaatatgagaaaggcattaagaatttttgcaaagacccctactgctttagcagcgttttatagaattagaaaaggaaaaaaaataattaagcctaggaaaactctaacttttgcggaaaactttttttatatgtgttttggtaaagttccacaaaaagaaattgttaaagcttttgatgtgtcactaattctttatgctgaacatagttttaatgtttcaacatttactgcaagaactataacgagtagcttatcagatattcatggagcaattacaggagccattgctagtctaaaaggaccgttgcatgggggtgctaatgaagaagttatgcacatgatgaataagataaaaaaacctgagaatgcgttaaaatggattaataatgctctaaaaaataaagaagtagttatgggttttggtcatagagtttataaatcaggagactctagagtgccgactatgagacagtattttggaaaagttgcaaaaattaaaaaagataaaaaatttgaaaaaatttatgacatcgttgaaagagtaatgatcaaagaaaaaaatattcatccaaatgttgattatccaacggggcctacttatcatttgatgggttttgatacagatttttttacgccaatatttgttatttcgagaataactggttggtctgctcatatcatggagcaacatgctgccaataaactcattagacctttagcaagttataaaggtagtaaacacagaaatgtattacaattaaaccaaagataat

SEQ ID NO: 236291 - DNA, 1100 bp, Unknown
  Bacterial polypeptide expressing nucleotide sequence isolated from the Sargasso Sea
gcatctgctccttggcgaaaccctgcgataccgaggatacgcagtctcggaccttgtgcaatgcagcttcgaagaagttgcgtaccttttgttgtggggtgagctccctacagcacatcagcttgaagcttttgctgcacggattcagcgtgctgcgcagtcaatgcctcaaacaattgtgtgctgctttcagaaacttgccgagagttcaccccagtcttcaattatggatgtacttagaactggcgtgagcgtcctcgggcagcttgagtgcgacaatgggcctgcggaatcgctttacgatcgcgacctctcccaacaacgcaacaaggccgagcaacttctgggccaagtcccagctttattgaccatctggattgactgtcttcgtggcagacagccttctccatggcccaacaaaccactaacaactgcacttttagagaaattatgccggacaaaggtttccgatatcgctgcaactgtttttaacacaacgttgattttatatgccgagcatgaattcaatgcttcaacgtttgcggctcgtactgtcacctctaccgggtctgatatgcactccggagtgactgctgccattggagcgctgaaaggcccgcttcatgggggagctaatgaaaaagtccttcatcaacttatggatattggggtgccagaaaatattgagccatggcttgcccgaaaactgaacgaccatgaggttgtcatggggttcgggcaccgtgtctacaaaacgggtgatatccgggcgaatcttttaggcgacgcatgccatcgtcttatccacagtgattcatcattcgaaccgcacgataagctcgaaaaacttgcgcaccagctggaacaattaatgcttgagaaaaaagggcttcacccgaacctcgattggccggctgcccgcgtctatcacgccctcgggcttcctatcaatctctttacgccactctttgttgttgcacgcgtaagtggttggacgtcacacattattgaacaaatgggcaccagtcgcttgatccgaccactggcacaatatgtcggcccgtcgccgcgaccatatgtcgccataaaggatcgctgag

SEQ ID NO: 236292 - DNA, 874 bp, Unknown
  Bacterial polypeptide expressing nucleotide sequence isolated from the Sargasso Sea
ctgcgtccaggcctggatggcgtgccggccacccagtcggcgatctgcgacatcgatggagagcaaggtctgctcacctatcgcggctatccgatgcaggatctggcggccaacagcagttttctggaaacggcttacctgctgatctggggagagctgcccagccgcgaccagctggcggagttcgagcacgcggtgcagatgcaccggcgggttagcttccgggtgagggacatgatgaagtgcttcccggccagcggccatccgatggacgcgctgcagtccagtgccgcttccctggggctgttctattcgcgccgggcgatcgacgacccgcagtacatctatgacgcggtggtgcggctgatcgccaagatccccacgatggtggccgcttttcagctgatccgcaaaggccaagacccaatccagcctcgggatgatctggcctactccgccaatttcctctacatgctcaccgaacgtgaaccagatcccctggcggcgcggatctttgatcgctgcctgatgctccatgccgagcacagcctcaacgccagcaccttcagtgcccgcgtcaccgccagcaccctcaccgacccctacgccgtggtggcttcagccgtcggcaccctggcgggtccactccacggcggcgccaatgaagatgtcctcgccatgctcgagcaggtgggcagtcccgagaacgctggcgctttcttggatgaagccatcgcggccaagcgcaaaatcatgggcttcggccaccgggaatacaaggtgaaggatccccgtgccgtgatcctgcaggccctggtggaggagatgttcgccagcttcggccatgacgacctctacgacgtggcccgtgcga

SEQ ID NO: 236293 - DNA, 584 bp, Unknown
  Bacterial polypeptide expressing nucleotide sequence isolated from the Sargasso Sea
tttatatgctgaacatagtttcaatgtttcaactttcacagctagaactataacaagtagtttatcagatgttcatggagcaattactggagctattgcaagtttaaaaggtcctttacatggtggggctaatgaagaagtgatgcatatgatgaataaaattaaaaaacctgaaaatgctcataaatggataaataaaacattggacaataaagaagttgtgatgggatttggtcatagagtttataaaagtggagattctagagtgcctacaatgagaaaatattttggaaaagtagcaaaaattaaaaaagataaaaaatttgaaaaaatttacaacattgttgaaaaagtaatgattgaaagaaaaaatatacatccaaatgtagactaccctactggacccacttaccatctaatgggttttgatactgatttttttacaccaatttttgttatttcaagaattactggatggtcagcacatattatagagcaacatgctgctaataaattaattagaccactttctaaatatagtggtcctaaacatagaaaagttatccaattaaatcaaaggtaat

SEQ ID NO: 236294 - DNA, 1126 bp, Unknown
  Bacterial polypeptide expressing nucleotide sequence isolated from the Sargasso Sea
atgactgaagatattaaaaaaggtttacttggaattgtggttgatgagacggaagtttcaaaagtaatgccagaaattaactctcttacatatagaggatatgctgcacaagacctttgtgcaaaatgtaagtttgaagaagttgcatatcttattttaaatggagaattaccctctgaaaaacagttaaaaaattttgaaaaagttgagagaaaagagcgaaacctatcaaaaaaattattgaaaagtattaagaattttcctaaaaaatcacatcctatggatgtagctagaacagcagtaagtattatgggattagaagataaagagacaaaagataattctccagaagcaaacttgagaaaggtaatgagaatttttgcaaagacacctgttgctttagcagccttctatagaatcagaaaaggaaagaaaatcattaaaccaaaaagtaatttgtcattctcagaaaactttttttatatgtgttttggaaaagttcctgaaaaagaaattgtaaaagcttttgatgtgtctcttatattatatgctgaacatagttttaatgtttctacatttactgcgagaacaatcactagcagcttgtcagatattcatggtgcaattactggtgctattgcaagtttaaaaggaccgttacacggtggtgccaacgaggaagtaatgcatatgatgaataaaattaaaaagcctgaaaatgcattaaattggataaataatgcactagatcaaaaagctgttgtaatgggctttggtcatagggtttataaaagtggggactctagagttcctactatgagagagtatttttctaaagttgcaaaagtaaaaaaagataaaaagtttgaaaaaatttatgacattgttgaaaaagtgatgattgaaagaaaaaatattcatcctaatgtagattatcctactgggccaacttaccatttaatgggatttgacaccgacttttttacaccaatttttgtaatttctagaataactggctggtccgcgcacattcttgagcaacatgcagcaaataaattaataagaccacttgctagttacaaaggaagtagctatcgtaaagttgtccctataaatcaaagataac

SEQ ID NO: 236295 - DNA, 542 bp, Unknown
  Bacterial polypeptide expressing nucleotide sequence isolated from the Sargasso Sea
aagaactattacaagtagtttatcagatattcatggagcaattactggagctatagctagtttaaaaggaccgttacatggcggtgctaatgaagaagtaatgcatatgatgaaaaaaattaaaaaacctgcaaacgcattaaaatggattaacaatgctttaaaaaataaagatgttgtaatgggttttggtcacagagtttataaatcaggagactcaagagtgcccacaatgagagaatattttggaaaagttgctaaaatcaaaaaagataaaactttcgaaaagatttatgacattgttgaaaatgttatgattaaggaaaaaaatattcatccaaacgtagactaccctactggtcccacttatcatttaatgggatttgatactgatttttttactccaatatttgtaatttcaagaattacaggttggtcagctcatattatggaacaacatgctgcaaacaaacttatacgaccactagcgagctacaaaggtaataaacatcgaaaagtaatgcagttaaatcaaagatagt

SEQ ID NO: 236296 - DNA, 846 bp, Unknown
  Bacterial polypeptide expressing nucleotide sequence isolated from the Sargasso Sea
tggatgttgcaagaacagctgtaagcataatgggccttgaagataaagatacaacagactcttctccagagtcaaatatgcgaaaaaccatcagaattttagctaaaacaccaactgctttagcggctttttatagattaagaaaaggtaaaaaaattattaaacctaaaaaaaatttaaatattgctgaaaactttttttatatgtgttttggtaaagtgcctcaaaaagagatagtaaaagcttttgatgtttctctaattttatatgctgaacacagcttcaatgtttcaacatttactgcaaggactattacaagtagtttatctgatattcatggagctattacaggagcaatagcaagtttaaaaggtccacttcatggtggtgctaacgaagaagtaatgcatatgatgaataaaattaagacacctaataatgcacttaaatggattaataatgccttagataaaaaagaggtcgttatgggttttggtcacagagtttataaatctggtgactctagagttccgactatgagaaaatattttgcaaaggttgctaaaattaaaaaagataaaaaatttgaaaaaatctacgacattgtagagaaggtaatgattgaaagaaaaaacatacatccaaatgtagactatcctactggacctacttatcatttaatgggttttgatactgatttttttacaccaatttttgttatttcaaggattactggttggtcagcccatatatttgaacaacatgctgcaaataaattaattaggcctctagcaagctatagaggtagtaaacacagaaaagtcgttcctttaaaccaaagataac

SEQ ID NO: 236297 - DNA, 724 bp, Unknown
  Bacterial polypeptide expressing nucleotide sequence isolated from the Sargasso Sea
atctgcttattttagaactagaaaaggtaaaaaaataattaaacctaaaaaaaaattaacattttcagaaaatttcttttatatgtgttttggtaaagtgccaagtaaagatatagtcaaagcttttgatgtatctttaattctttatgcagagcatagtttcaatgtatctacatttacagcaaggaccataacgagtagtttgtccgacattcatggagcaattactggtgcgatagcaagtttaaaaggccctttgcatggaggagctaatgaagaggtaatgtatatgatgaataaaatcaaaaatcccaataatgctttgaaatggattaataaagctctagataaaaaagaagttgttatgggttttggtcatagggtttacaaaaaaggagattcgagagttcctactatggaaaaatattttaaaaaagtttcaaaaattaaagctgataaaaaattcgttaaaatttatgatatagttaaaaatgtgatgattgaaaggaagaacattcatccaaatgttgattatccaactgggccaacttaccatttgatgggttttgaaactgatttttttactccaatttttgttatgtcaagaattacaggctggtctgctcacattatggagcaacacgctgcaaataaattaattaggcctctatctaaatatagtggagcatctcatcgtaaagtaatgcttcttaatcaaaggtag

SEQ ID NO: 236298 - DNA, 916 bp, Unknown
  Bacterial polypeptide expressing nucleotide sequence isolated from the Sargasso Sea
ttggacaataataaactaattttaaaaccaggattagagggagtcccagttgctaattcatctatctgtgatattgacggcaacaaaggtaaattattgtacaggggctattccattgaggaactatccaaaaaaagcagttttttagaaactgcttacctattgatttggggtgaattgccaacggctattcaacttagagattttgaacaagaagttcagatgcatcgaaggttgagttttagagtcagagatatgatgaaatgtttccctgcaacaggtcatcctatggatgctcttcaatctagtgcagcttctttggggttattttattcacgtagagctatagatgatcctaattacatttacaacgcagtaataagactaatagcaaaaattcccacaatgattgctgcgtttcaacttattagaaaaggacaagaccctatacaacctagagatgatttaacttactcatcaaattttctttacatgctgactgaaaaagaacaagatccaatagctgcaaaagtttttgatagatgtttaattttacatgccgaacatagtttaaacgcaagtacatttagcgctagagttactgcaagcactcttacagacccatatgctgttatcgcctctgcagtaggaaccctagctggcccgctgcatggaggagcaaatgaggatgtaattgcaatgttagaagagataaaaactccagaaaatgctgggtcttttctagataatgcaattaaaaataaaagtaagataatgggcttcggccacagagaatataaagttaaagatccaagagcaataattcttcaaaaactggcagaagagctttttattagatttggagcagatgaaatgtatgaagttgctaaatcacttgaggcagaggcaataccaa

SEQ ID NO: 236299 - DNA, 1126 bp, Unknown
  Bacterial polypeptide expressing nucleotide sequence isolated from the Sargasso Sea
atgagtgatgaaattaaaaaagggttattaggcatagttgttgatgaaacagaagtttctaaagttatgcctgaaatcaactctttaacttacagaggttatgctgctcaagatttatgtgcaaaatgtaaatttgaggaagtagcttatctaattttaaatggtgaacttccaagtaaaaaacaattaaaaaaatttgaaaaagaagagagaaaagaaagaaaattatccaaaactttattagatgatataaaaaaatttccaaagaaagcacatccaatggatgtagcaagaacagcagtaagcattatgggactagaggataaagaaacaaaagataattcccctaaagcaaatatgagaaaagttatgagaattttcgctaaaatgcctgttgcacttgctgcattttatagagcaagaaaaggaaagagaattatacctccaaaaagcaaactttcattttctgaaaacttttttcacatgtgttttggcaaagtaccaaataaagatatagttaaagcctttgatgtttctttaatcttatatgcagaacatagttttaatgtttcaacttttactgccagaactataacaagtagtttgtctgatattcatggtgccatcacaggtgctatagcaagtttaaaaggacctcttcatggaggtgctaatgaggaagtcatgcatatgatgaataaaatcaaaaaaccagagaatgcacttaaatggatcaataaagcactagataataaagatgttgtaatgggatttggtcacagagtttataaaagtggagattcaagagttcctacaatgagagaatattttggaaaagttgctaaaattaaaaaagacaaaaaatttgaaaaaatttatgatattgttgaaaaagtgatgataagtagaaaaaatattcatccaaatgtagactacccgactgggcctacttatcatttaatgggatttgacactgatttcttcacaccaatttttgtaatatcaagaattacaggttggtcagctcatataatcgaacaacatgctgcgaataaattaatccggcctttagcaagctacaaaggtagcaaacaccgtaaagttcttcaattaaatcaaagataat

SEQ ID NO: 236300 - DNA, 874 bp, Unknown
  Bacterial polypeptide expressing nucleotide sequence isolated from the Sargasso Sea
atgagtgatgatatcaaaaaagggttactaggtatagttgttgacgaaacagaagtttccaaagtaatgccagaaattaattctttgacttatagagggtatgctgctcaagatttatgtgcgaaatgtaaatttgaagaggttgcttatctaatccttaatggtgaactgccaaccaaaaaacaattaaaaaaatttgaaaaagaagaaagaaaagagagaaagctatctaaaacattattagatgatattaaaaggtttccaaaaaaagcacatcctatggatgttgctagaacagcagttagtattatgggacttgaagacaaagaaactaaggataattcccctaaagccaatatgcgaaaagttatgagaatttttgcaaaaatgcctgttgctctagctgcattttacagagcaaggaaaggaaaaaaaattattccacccaaaaaaaatctatctttttcagaaaatttttttcatatgtgttttggagaggttccaaataaagatattgtaaaagcgtttgatgtatctctaattttatatgcagaacacagttttaatgtttcaacttttacagcaagaacaataacaagtagtttatctgatattcacggtgcaattactggtgctatagcaagtttaaaaggtcctcttcatggaggtgctaacgaagaagttatgcatatgatgaataaaataaaaaaaccagaaaacgcactaaaatggataaataaagctttagataataaagatgttgttatgggatttggacatagagtttataaaagtggagattcaagagttcctacaatgagagaatattttggaaaagtagcaaaaattaaaaaagataaaaagtttgaaaaga

SEQ ID NO: 236301 - DNA, 1141 bp, Unknown
  Bacterial polypeptide expressing nucleotide sequence isolated from the Sargasso Sea
aatgagtgatgaaatcaaaaaaggtttactaggaattgttgtggatgagactgaagtttcaaaagttatgcctgaaattaattctctaacttatcgagggtatgcggctcaggacttatgtgaatattgtagatttgaagaagtagcttacttgattttaaataaagatttaccaaacacaatacaacttagaaaatttgaaaaagaagaaaaaaatcatagagaattgtcaaaaaatttatatgagattataaaacatatgcctaaaaaatctcatccaatggacgttgcaagaactgccgtaagtgtaatgggtttagaagataaagaaactcaagattcttctcatgaagcaaatatgaggaaagctttaagaatttttgcaaaaaccccaactgctttagctgcattttatagaattagaaaaggtaagaaaataataaaacctaaaaagaatttaacttttgctgaaaatttcttttatatgtgctttggtaaagtacctcaaaaagaaattgttaaagcttttgacgtttctttaatactttacgctgaacatagttttaatgtttcaacttttaccgcaagaacaattacaagtagtttatctgatattcatggagcaattactggagcaattgctagtttgaaaggaccattgcatggtggagctaatgaagaagttatgcacatgatgaacaaaattaaaaagcctgaaaacgcacttaaatggattaataacgctcttaaaaataaagaagtagttatgggttttggtcacagagtttataaatctggcgactcaagagttccaactatgagacaatattttggaaaagttgcaaaaattaaaaaagataaaaaatttgaaaaaatttatgacattgttgaaagagttatgattaaagagaaaaatatccaccccaatgttgattatcctacaggacctacttatcatttgatgggatttgatacagatttttttacaccaatatttgttatttcaagaattacaggttggtctgctcatattatggagcaacacgcagcaaacaaacttattagacctttagctagctataaaggtagcaaacatagaaaagtcctacagttaaaccacaagataatttttaaatattaa

SEQ ID NO: 236302 - DNA, 1060 bp, Unknown
  Bacterial polypeptide expressing nucleotide sequence isolated from the Sargasso Sea
aatgccagagattaattctttgacttatagaggatatgctgctcaagatttatgtgcaaaatgtaaatttgaggaagtcgcttaccttatactaaatggcgaactaccaaccaaaaaacaattaaaaaaatttgaaagagaagagagaaaagagagaaaattatctaaaacattgttagatgatattaagaagtttccaagaaaagctcaccctatggatgtagcaagaacagcggtaagtattatgggtcttgaagataaagagacaaaggacaactctcctaaagccaatatgagaaaagttatgagaatttttgcaaaaatgccagttgcacttgctgcattttatagagcaagaaaaggaaagaaaattataccaccaaaaagtaaactatcattttctgaaaacttttttcacatgtgttttggaaaagtaccaaataaagatatagtaaaagcttttgacgtatctcttattctgtatgcagagcatagttttaatgtttcaacttttactgcaagaacaataactagtagtttatctgatattcacggtgcaatcactggtgcaatagcaagtttaaaaggccctcttcatggaggtgccaacgaagaggtgatgcatatgatgaataaaattaaaaaacctgaaaacgcacttaaatggataaataaagctttagacaataaagatgttgttatgggttttggtcacagagtttataaaagtggagactcaagagttccaactatgagggaatattttggaaaggtcgcaaaaattaaaaaagataaaagatttgaaaaaatttatgacatcgttgaaaaggtaatgatagatagaaaaaatattcatccaaatgtagactaccctactggtccaacttatcatttgatgggatttgatactgacttttttacaccaatatttgtaatttctagaattactggttggtcagctcatattattgagcaacatgctgctaataaactgattagacctcttgcaagctacagaggtagcaaacacagaaaagttcttcaattaaatcaaagataa

SEQ ID NO: 236303 - DNA, 1126 bp, Unknown
  Bacterial polypeptide expressing nucleotide sequence isolated from the Sargasso Sea
aatgagtgatgatatcaagaagggattactaggcattgttgttgatgaaacagaggtttcaaaagtaatgcctgagattaactcgcttacttatagggggtatgctgctcaagatttatgtgagtattgtagatttgaggaggttgcatatttaattttaaataaagatttaccaaatactcttgaacttagaaaatttgagaaagaagaaaaaaataatagggagttaactaaaaatttatatgaaattattaggcatatgccaaaaaaatctcatccgatggatgtagctaggactgctgtaagtgtaatgggattggaagataaagagactactgactcttcaccagaagcaaatatgagaaaagccctaagaatttttgcaaaaactcctacagcacttgctgctttttaccgaataaggaaaggaaaaaaaattattaaaccaaaaaaaactttaacttttgctgaaaactttttctatatgtgttttggaaaagtacctcaaaaagaaattgttaaggcttttgatgtatctctaattctttatgctgagcatagttttaatgtttctacatttacggcaagaacaatcactagcagtttgtctgacatacatggagcaataacaggtgcaatcgccagtttaaaaggccctcttcacggtggcgctaacgaggaagttatgcatatgatgaacaaaattaaaaagcctgaaaatgccttaaaatggattaacaacgcattgaaaaataaagaggttgtgatgggatttgggcatagggtttataaatcaggtgattctagagttccaaccatgaggaaatattttgcaaaagttgcgaaaattaagaaagataaaaaattcgagaaaatttacgatattgttgaaagggtaatgataaaagaaaaaaacatatatcctaatgtagactatcctacaggacctacttatcatttaatgggatttgaaactgatttttttactccaatatttgtaatttcaagaattactggttggtctgctcatataatggagcaacatgctgctaataaacttattagacctttagctagttacaaaggtagcaagcatcgaaaagtgatgcagttaaatcaaagataa

SEQ ID NO: 236304 - DNA, 899 bp, Unknown
  Bacterial polypeptide expressing nucleotide sequence isolated from the Sargasso Sea
atcaaaaaatttatatgaaataataaaacatatgccaaaaaaatcacatcctatggatgtagctagaactgctgtaagtgtaatgggattagaagataaagaaacccaagattcttcaccagaagctaatatgagaaaggcattaagaatttttgcaaagacccctaccgctttagcagcgttttatagaattagaaaaggaaaaaaaataattaaacctaggaaaaccttaacttttgctgaaaactttttttatatgtgttttggtaaagttccacaaaaagaaattgttaaagcttttgatgtgtcactaattctttatgctgaacatagttttaatgtttcaacatttactgcaagaactataacgagtagcttatcagatattcatggagcaattacaggagccattgctagtctaaaaggaccgttgcatgggggtgctaatgaagaagttatgcacatgatgaataagataaaaaaacctgagaatgcgttaaaatggattaataatgctctaaaaaataaagaagtagttatgggttttggtcatagagtttataaatcaggagattctagagtgccgactatgagacagtattttggaaaagttgctaaacttaagaaagataaaaaatttgagaaaatttacgacattgttgaaaaagttatgattaaagaaaaaaatattcatccaaatgttgattatccaacaggtcctacttatcatttgatgggttttgatactgatttttttacccctatatttgttatttcaaggataactggttggtcagctcatataatggagcagcatgctgctaataaattaatcagacctttagcaagctacaaaggtagcaagcatagaaaagttcttgaattaaatcagagataat

SEQ ID NO: 236305 - DNA, 1126 bp, Unknown
  Bacterial polypeptide expressing nucleotide sequence isolated from the Sargasso Sea
atgagtgatgaaatcaaaaaaggattgctgggaattgtagttgatgaaacagaagtttccaaagttatgcctgaaatcaactccttaacttatagaggttatgcggctcaagatctatgtgcgaaatgtaaattcgaggaggttgcatatctaattttaaatggtgaacttccaagtaaaaaacaattaaaaaaatttgaaaaagaagagagaaaagaaagaaaattatctaaaacattattagatgatataaaaaaatttccaaaaaaagctcaccctatggatgttgcaagaacagcagtgagtattatgggacttgaggataaagaaacaaaagataattcacctaaagcaaatatgagaaaagtaatgagaattttcgctaaaatgcctgttgcacttgcagcattttatagggcaagaaaaggaaaaagaattatacctccaaaaaacaaactttcattttctgaaaacttttttcatatgtgttttggcaaagtacccaacaaagatatagttaaagcttttgatgtttcgttaattttatatgcagaacatagttttaatgtttcaacttttacagctagaacaataacaagtagtctatcggatattcatggtgcaatcactggcgcaatagcaagtttaaaaggacctcttcatggaggtgctaatgaagaagtcatgcatatgatgaataaaatcaaaaaaccagagaatgcacttaaatggataaataaagcactagataataaagatgttgtaatgggatttggccatagagtctataaaagtggagattcaagagttcctacaatgagagaatattttggaaaagttgctaaaatcaaaaaagatagaaagtttgaaaaaatttacgacattgtagaaaaagtaatgatagatcgaaaaaatatccatccaaacgtagattatcctactggacctacctatcatttaatgggatttgatactgacttttttacaccaatttttgtgatttcaagaataacaggttggtcggctcatattatagagcagcatgctgctaataaacttattagacctttagcaagttataaaggtagtaagcaccgtaaagttctccaattaaatcagagataac

SEQ ID NO: 236306 - DNA, 769 bp, Unknown
  Bacterial polypeptide expressing nucleotide sequence isolated from the Sargasso Sea
tatgagaaaagcaatgagaatatttgctaaaacacctactgcgctggcagctttttatagaattagaaaagggaaaaaaataatcaaacctaagaaaaatttgtcattctcagaaaactttttttatatgtgttttggaaaagtacctagtaaagaaatagtaaaagcttttgatgtttctttaattttgtacgcagaacacagttttaacgtatctacttttaccgcaaggacaataaccagtagtttatctgatattcatggagcaattacgggagcaattgctagccttaaaggaccactacacggtggtgcgaacgaagaggtaatgcatatgatgaataaaattaaaaaaccagaaaatgcattaaaatggattaataatgcattagataaaaaagatgttgtaatgggatttggtcatagagtttataaatctggtgactctagagttccaacaatgaaaaaatatttcaaaaaagttgcaaaaattaaaaaagacaaaaaatttagcaaaatttatgacattgttgaaaaagtaatgatagaaagaaaaaatatacatcctaatgtagattatcctactggacccacatatcatctaatgggatttgatactgatttttttacacctatttttgtaacttctagaattactggttggtcagcgcacataatggaacaacatgcggcaaacaaattaataagaccactttctaaatataatggaccaaaacacaggaaggtcttacttttaaatcaaagataa

SEQ ID NO: 236307 - DNA, 1126 bp, Unknown
  Bacterial polypeptide expressing nucleotide sequence isolated from the Sargasso Sea
atgagtgatgaagtaaaaaaaggtttgttgggtattgtagttgatgaaactcaagtttctaaggttatgcccgaaataaattcgttaacttaccgaggttacgcagttcaagacttatgtgagatgtgtagattcgaggaagctgcatatttaatccttaatggtgatcttccaaatactattgagttacgaaagtttgaaaaagaagaaagaagcaatagagatctttcaaaaaatctaaacgatataatcaaacatatgccaaaaaaatctcatccgatggatgttgctagaacagcagtaagtgtaatgggtttagaagacaaagaaactactgataactcacctgaggcaaatatgagaaaagcaatgagaatttttgctaaaacacctgttgcattagcagctttttatagaattagaaaaggaaaaaaaattattaaaccaaaaaaaaacttaacttttgcagaaaactttttttatatgtgctttggtaaagttccaaataaagaaatagttaaagcttttgatgtatctttaattttatatgcagaacatagttttaatgtctctacttttactgcaagaacaatcacaagtagcttatcagatattcatggagcaattactggtgcaatagctagtcttaaaggaccattacacggtggtgcaaacgaagaagtgatgcacatgatgagcaaaattaaaaagccagaacatgcattaaagtggattaatgatgcattggataagaaagaagttgttatgggttttggtcatagagtttataaatctggagattcaagggttcctacaatgagagaatattttaagaaagtcgcaaaaattaaaaaggataaaaaattcagtaaaatctacgatattgttgaaaaagttatgattgagagaaaaaacatccatccaaacgttgattaccctactggaccaacttatcatttaatgggatttgacactgatttttttactcctatttttgttacttcaagaataactggatggtctgcacatattatggaacaacactctgctaacaaactgatcaggccactttctaagtatagcgggccaaagcatagaaaagttatgcttttaaaccaaagataat

SEQ ID NO: 236308 - DNA, 1126 bp, Unknown
  Bacterial polypeptide expressing nucleotide sequence isolated from the Sargasso Sea
atgagtgatgatattaaaaaaggcttactaggtatagttgttgatgaaactgaagtttcaaaagtaatgccagaaattaattctcttacttatagaggatatgctgctcaggatttatgtgaatattgtagatttgaagaagttgcatatttgatacttaataaggatctcccaaatacgatccaacttagacaatttgaaaaagaagaaagaaacaacagagaattaacaaaaaatttatatgaaataattaaacatatgccaaagaaatcccatccaatggatgtggcaagaacggctgtaagcgttatgggattagaagataaagaaacaacggactcttcggcagaatcaaatatgagaaaagctttgagaatatttgcaaaaaccccaactgctttagctgctttttatagaattagaaaaggtaaaaaaataattaaacctaaaaaaacattaacgtttgctgaaaactttttttatatgtgttttggtaaagtaccacaaaaagaaatagtaaaagcatttgatgtgtctttaattttatatgctgaacatagttttaatgtttcaacatttactgcaagaacaatcactagtagtttgtctgatattcatggcgcaatcacaggagctattgctagtttaaaaggcccacttcatggtggtgcaaatgaagaagtaatgcatatgatgaacaaaatccaaaaaccagaaaatgcacttaaatggattaataatgctttaaggaataaagaagtagttatggggtttggtcacagagtttacaaatcaggagattcaagagtccctacaatgagagaatattttggaaaagttgccaaaatcaagaaagataaaaaatttgagaaaatttatgacattgttgaaaaggttatgattaaagaaaaaaatatctaccctaatgtagattatcctacagggccaacttaccatctaatgggttttgatactgatttctttacaccaatatttgtaatttcaagaataacaggttggtctgctcatataatggaacaacacgcagccaataaacttattagaccattagctagttacaagggtaataaacatagaaaagtaatggaattaaatcagagataat

SEQ ID NO: 236309 - DNA, 988 bp, Unknown
  Bacterial polypeptide expressing nucleotide sequence isolated from the Sargasso Sea
aatgagtgaagaaataaaaaaaggattgcttggcatagtagttgacgaaactgaagtctcaaaagtgatgccagaaataaattcacttacttacaggggatatgcagcacaggacttatgtgcaaaatgtaaatttgaagaagttgcatatttaattttaaacggagaacttcctaataaaaaacaattgaaagattttgagatacaagaaagaaaagagagaaaattatcaaatactttgcttgctgatataaaaaaaatcccaaagaaagcgcacccaatggatgttgcaagaacagcagtaagtattatgggtttagaagacaaagaaactagagataattctcctaaagctaacatgagaaaggcgatgagaatatttgcaaaaactcctgtcgcattagcagcattttatagagcaagaaaaggaaagaaaattatcccaccaaaaaagaaatattcaatgtcagagaatttttttcatatgtgctttggtaaagtcccaaataaagaaattgttaaagcttttgatgtttctttaattttatatgcagaacatagctttaatgtttcaacattcactgctagaacaattacaagtagtttgtctgatatccatggtgcaattactggtgctattgctagtttaaaaggacctttgcatggtggtgctaatgaagaagtgatgcatatgatgaaaaaaataaaaaaacctgaaaatgctttaaaatggataaataacgctcttgataataaagaagtagttatgggttttggtcatagggtttataaaagtggagattcgagagttccaacaatgagagaatattttggcaaagtcgctaaacttaaaaaagataaaaaatttgagaaaatctacgatattgttgaaaaagttatgatagatcgtaaaaatattcatcctaatgtagactaccctactggtcctacttatcatttaatgggttttgatactgatttttttact

SEQ ID NO: 236310 - DNA, 1054 bp, Unknown
  Bacterial polypeptide expressing nucleotide sequence isolated from the Sargasso Sea
aatgagtgatgatattaagaaaggattacttggtattgttgtagatgaaactgaagtttcaaaagtaatgccagaaattaattctcttacctatagaggatacgctgctcaagatttatgtgaatactgtagatttgaagaagttgcttatttaattttgaataaagacctaccaaatactattcaacttagacaatttgaaaaagaagaaaaaaataacagagaacttacaaaaaatttatatgaaataataagacatatgcctaaacgatcccacccaatggatgtggcaagaactgctgtgagtgttatgggattagaagataaagaaacaaccgactcttcacctgaagcaaatatgagaaaagctttacgaatctttgcaaaaactcctactgctcttgctgctttttacagaattagaaaaggtaaaaaaattatcaaaccaaaaaaaacactcacttttgcagaaaattttttctatatgtgttttggaaaagtacctcaaaaagaaattgttaaagcttttgatgtatctttaattttatatgctgagcatagttttaatgtttcaactttcacagcaagaactataacaagtagtttgtctgatattcatggagcaatcacaggtgctatagcaagtttaaaaggtccgcttcatggtggggcaaatgaagaagttatgcatatgatgaataaaattaaaaaacctgaaaacgcacttaaatggataaataatgctttgaaaaataaggaagttgttatgggatttgggcacagagtttataaatctggagactctagagttccaactatgagaaaatattttggaaaagttgctaaacttaaaaaggataaaaagtttgaaaaaatctacgatattgttgaaaaagttatgattagagagaaaaatatacaccccaatgttgattatcctacaggtcctacttaccatttaatggggtttgacactgattttttcacacctatttttgtaatatctagaatcacggggttggtctgctcatataatggagcaacatgctgctaa

SEQ ID NO: 236311 - DNA, 757 bp, Unknown
  Bacterial polypeptide expressing nucleotide sequence isolated from the Sargasso Sea
aatgagaatatttgcgaaaactcctgtagcattagctgctttttacagattaaggaaaggaaagaaaataatttctcctaagaaaaatctatcttttgcagaaaactttttttatatgtgttttggtaaagttcctcaaaaagatattgtcaaagcttttgacgtttctttaattctttatgctgaacatagttttaatgtttctacttttacagctagaacaatcactagcagtctttctgatattcatggtgcagtaacaggagcaatagctagtcttaagggaccgctacatggtggtgcaaatgaagaagtcatgcatatgatgaataaaattaagaaacctgagaatgcattaaaatggattaataatgctttagaaaaaaaagctgtagtgatgggttttggccacagagtttataaaagtggagattcaagagtccctactatgcgagaatattttggaaaagttgctaaaattaaaaaagataaaaaatttgaaaaaatttatgacattgttgaaaaagtaatgattgatagaaaaaatattcatcctaatgttgactatccaacagggcctacatatcatttaatgggttttgatacagattttttcacccccatatttgtaatatcgagaattacaggatggtcagctcatataattgaacagcatgctactaacaaacttatacgtcctttggctgcttataatggaagtcagtacagaaaagttcccagtattaataaaagataa

SEQ ID NO: 236312 - DNA, 941 bp, Unknown
  Bacterial polypeptide expressing nucleotide sequence isolated from the Sargasso Sea
gcttaaaaagtttgaaaaagaggaaaaaaataacagagatttgtccaaagatctttattcaatcattaaaaaaatgccaaaaaaatctcatccaatggatgtagcgagaacagcagtaagcataatggggcttgaagacaaagagactactgactcctcagaagaagctaatatgagaaaggctataagaattttggcaaaaaccccgactgcattagctgctttttacagaataagaaaaggtaaaaatatcattaaacctaagaaaaatttaaatatagcggagaattttttctatatgtgctttggaaaagttccacaaaaagaaattgtaaaagcatttgatgtatccttaattttatatgctgaacatagctttaatgtttcaacattcacagcgagaactatcactagtagcttatcggatattcatggagcaataactggagcaatagctagtttaaagggccctcttcatggtggtgcaaatgaagaagtaatgcacatgatgaataaaattaaatctccaaataatgctctcaagtggataaataatgcattagataaaaaagaggtagttatgggttttgggcatagagtttataaatcaggagactcaagggttccgaccatgagaaaatattttgctaaagttgcaaaaataaaaaaggataaaaaatttgaaaaaatttacgatattgttgaaaaagtaatgattgacagaaaaaatattcatccaaatgtcgattatccaactggtcccacttaccatttgatgggtttcgatacggatttttttacaccaatatttgtaatttcaagaatcaccggttggtcagcacacataatggaacaacacgccgcaaataaacttattagaccactagcgagctataaaggtaacaaacacagaaaagtattacaattaaatcaaagataaa

SEQ ID NO: 236313 - DNA, 1126 bp, Unknown
  Bacterial polypeptide expressing nucleotide sequence isolated from the Sargasso Sea
gatggctgaagatattaaaaaaggtttacttggaattgtggttgatgaaactgaagtttcaaaggtgatgcctgaaataaattctcttacatatagaggatatgctgctcaagatctttgtgcaaaatgtaagtttgaagaagttgcatatcttattttaaatggagagttaccttctgaaaaacagttaaaaaattttgaaaaagttgagagaaaagaacgaaatctatcaaagacattattagaaagtattaagaattttcctaaaaaatcacatcctatggatgtagctagaacagcagtaagtataatggggctagaagataaagagacaaaagataattctccagaagcaaacttgagaaaggtaatgagaatttttgcaaaaacacctgttgctttagcagccttctatagaattagaaaaggaaaaaaaatcattaaaccaaaaagtaatttgtcattctcggaaaactttttttatatgtgttttggaaaagttcctgaaaaagaaattgtaaaagcttttgatgtatctcttatattatatgctgaacatagttttaatgtttctacgtttactgcaagaacaatcactagtagcttgtcagatattcatggtgcaattactggtgctattgcaagtttaaaaggaccattgcatggcggtgcaaatgaagaagtgatgcatatgatgaataaaattaaaaaacctgaaaatgcattgaattggattaacaatgctttagatcaaaaagctgttgtcatgggtttcggtcatagagtttataaaagtggtgactctagagtgccgactatgagagaatatttttctaaagttgcaaaagttaaaaaagacaagaagtttgaaaaaatttatgacattgttgagaaggtgatgattgaaagaaagaatattcatccaaacgtagattatcctactggaccgacttatcacttaatgggatttgatactgacttctttacgccaatttttgtaatttctagaataactggatggtctgcacacgttcttgaacaacatgcagcaaataaattaataagaccacttgctagctataaaggaagtagctatcgtaaagttgttcctataaatcaaagataa

SEQ ID NO: 236314 - DNA, 1126 bp, Unknown
  Bacterial polypeptide expressing nucleotide sequence isolated from the Sargasso Sea
aatgagtgatgatattaaaaaaggtttattaggaatagttgttgatgaaacagaagtttctaaagttatgcctgaaatcaattctcttacatatagaggttatgcagcccaagatttatgcgagtattgtagatttgaagaggtggcttatctaattttaaataaagatttaccgaatacaatacaacttagaaaatttgaaaaagaagaaaaaaataacagagatttgtccaaagatctttattcaatcattaaaaaaatgccaaaaaaatctcatccaatggatgttgccagaacggcagtaagtataatggggcttgaagacaaagaaaccactgactcctcagaggaagcaaatatgagaaaggctataagaattttggcaaaaacaccaaccgcattagctgctttttatagattaagaaaagggaaaaatattattaaacctaagaaaaatctaaatatagctgagaattttttctatatgtgttttggaaaagttccacaaaaagaaattgtaaaagcatttgatgtatcgttaattttatatgctgaacatagctttaatgtttcaacattcacagcaaggaccattactagtagcttatcggatattcacggagcaataactggagcaatagctagtttaaagggccctcttcatggtggtgctaatgaagaagtaatgcatatgatgaataaaattaaatctccaaataacgctcttaaatggataaataatgcattagataaaaaagaggtagtgatgggttttgggcatagagtttataaatcaggagactctagggttccaaccatgagaaaatattttgctaaagttgccaaaattaaaaaggataaaaaatttgaaaaaatttatgatattgttgaaaaagtaatgattgaaagaaaaaatattcatccaaatgtcgattatccaactggtcccacttaccatttgatggggtttgatactgatttttttacaccaatatttgtcatttcaagaattacaggttggtcagcacacataatggagcaacatgctgccaataaacttattagaccacttgcgagctataaagggaacaaacacagaaaagtattacaattaaatcagagataa

SEQ ID NO: 236315 - DNA, 1091 bp, Unknown
  Bacterial polypeptide expressing nucleotide sequence isolated from the Sargasso Sea
gttgttgacgaaacaactggtttctcaagttatgcctgatataaattcactaacttatagaggttacgctgtacaagatttatgcgaaaaatgtaattttgaagaagtagcttatcttgttttaaatggagaacttccaaataaaaaacaattaaaaaattttattaaagaagaaagatcagacagaaaactctctaaagaaatattaagtgatataagaaaaatgccaaaaaaagctcatccaatggatgttgtgagaactgcagtcagtttaatgtcacttgaagataaggaaactagagacaattctccaaaagccaacatgagaaaagctatcagaatatttgcaaagacacctattgctctagctgctttttttagaagcagaaaaggaaaaaaaataatagcccctataaaaaaattgtcgttttctgaaaattttttctacatgtgctttggaaaagttccaaaaacagaaatagttaaagcttttgatgtatctttaatactttatgcagaacatagttttaatgtttcaacttttactgctagaactataactagtagtttatcagatatacatggagcaataactggagctatagcaagtttaaaaggtccattgcatggtggagctaacgaagaagtcatgcatatgatgaataaaattaaaaaacctgaaaatgccttaaaatggattaataaagctctagataaaaaagatgtagtaatggggtttggtcacagagtttataaaaaaggagattctagagttccaacaatggaaaaatactttaaaaaagttgctttaattaaaaatgataaaaaattcataaaaatttatgacatcgtaaaaaatgtaatgattgaaagaaaaaatatccatccaaatgttgattatcctactggaccaacttatcatttaatgggttttgatactgatttttttactcctatttttgtaatatcaagaattaccggttggtcagcacatatcatggagcaacatgcggctaataaattaattagacctctgtctaaatatagtggagcgaagcatagaaaagtaatgcttttgaaccaaagataat

SEQ ID NO: 236316 - DNA, 1108 bp, Unknown
  Bacterial polypeptide expressing nucleotide sequence isolated from the Sargasso Sea
atgggtgaagatatcaaaaagggtttaatgggcgtaacagttgatgaaacgggtatttcaaaagtgatgcctgaaattaattcattaacttatagaggttatgcagctcaagacttgtgtgctaattgtgaatttgaagaaattgcttatttaatacttaatggtgagcttccaaataaaaaacaattaaaaaaatttgagaaagaagagagaaaagaaagaaaactttctaaaagtttaattaatataattaaacaaatgccaaaaaaatctcatccaatggatgtggctagaactgcggttagcgttatgggtttagaggataaagaagttactaataactcaccagaagcaaatttaagaaaagctatgagaatatttgccaaaactcctacagcccttgcgtcattttatagattaagaaaaggaaaaaaagttatagctccaaagaaaaaattatctttttcagaaaactttttttatatgtgttttggaaaagtgccaaataaagagattgtaaaggcatttgatgtatctttaattttatatgcggaacatagcttcaatgtttcaacttttactgcaagaacaatcacgagtagcttatctgatattcatggtgcaattactggtgctattgcaagtttaaaaggcccgttgcatggaggagcaaacgaagaagtaatgcatatgatgaaaaaaattaaaaaaccagaaaatgcaaaaagatggattaataatgctcttgataaaaaagctgttgtaatgggatttggtcatagagtttataaaagtggagactcaagagttcctacaatgagagaatattttggtagagttgcaaaaattaaaaaagataaaacatttgaaaaaatttatgacattgttgaagaggtaatgatagatagaaagaatattcatccaaatgttgattatccaacaggtccaacttatcatttaatgggctttgacactgattttttcactcctatatttgttatttccagaattacaggttggtcagctcatataatggagcaatattctacaaataaattaattagacctttggctgcttacaatggaagtaaatatagaaaagttccaa

SEQ ID NO: 236317 - DNA, 841 bp, Unknown
  Bacterial polypeptide expressing nucleotide sequence isolated from the Sargasso Sea
ttgaaaaaaatacctaaaaaatcacatccaatggatgttgctagaactgctgtaagtataatgggacttgaggataaagaaacaacagactcttcacctgaagctaatatgaaaaaagcaatcagaattttagctaaaacgccgactgctttagctgctttttatagattaagaaaaggtaaaaatatcattaaacccaaaaaaaacttaaacatagctgagaattttttctatatgtgttttggaaaagttccacaaaaagaaattgttaaagcttttgatgtttctttaattttatatgctgagcatagctttaacgtatcaacatttacagcaagaactattactagtagcctgtctgacattcatggagctattacaggagcaatagcaagtttaaaaggtccgcttcatggaggtgccaatgaagaagtaatgcatatgatgaataaaattaagacacctgctaatgctcttaaatggattaacaatgcattagataaaagggaagttgttatgggttttggtcatagagtttataaatctggtgattctagagtccctacaatgagaaaatattttgcaaaagttgctaaaattaagaaggataaaaaatttgagaaaatttatgatattgttgaaaaagttatgatcgaaagaaaaaacatttaccctaatgtagattatcccactggacctacttatcatttaatgggttttgatacagacttttttacaccaatatttgtaatttcaagaattactggctggtcagctcacattatggagcagcatgcagcaaacaaattgatcagactcctggctagttacaaagggtaac

SEQ ID NO: 236318 - DNA, 900 bp, Unknown
  Bacterial polypeptide expressing nucleotide sequence isolated from the Sargasso Sea
attggatagtaaaaaactgattttaaaaccaggattagagggtgtcccagttactaattcatctatctgtgatattgacggcaacaaaggtaaattattgtacaggggatactccattgaggaactatctaaaaaaagtagttttttagaaactgcttacctattgatttggggtgaattacccacggctatccaacttagagattttgaacaagaagttcaaatgcatcgaaggttaagttttagagtcagagatatgatgaaatgtttccctgcgacaggtcatcctatggatgctcttcagtctagtgcggcttctttggggctcttctattcgcgtagggcaatagatgatcctaattacatctacaacgcagtcataagactaatagcaaaaatacccacaatgattgctgcttttcaacttattagaaaaggacaagacccaattcaacctagagatgatttaacttactcatcaaattttctttacatgcttaccgaaaaagaacaagatcctatagctgcaaaagtttttgataggtgtttaattctacatgccgaacatagtttaaacgcaagtacttttagcgctagagttactgcaagcactcttacagacccatatgctgtcatcgcctccgcagtaggaaccctcgctggcccattgcatggaggagcaaatgaagatgtaattgcaatgctagaagagataaaaaccccagaaaatgctgcttcttttttggataacgcgataaaaaataaaagtaaaataatgggcttcggtcatagagaatataaagtcaaagatccaagagcaattattcttcaaaaactggcagaagagctttttattagatttggagcagatgaaatgtatgaagttgctaaatcactaga

SEQ ID NO: 236319 - DNA, 1126 bp, Unknown
  Bacterial polypeptide expressing nucleotide sequence isolated from the Sargasso Sea
aatgagtgacgaaatcaaaaaaggtttgctaggtatagttgttgacgaaacagaagtttccaaagtaatgccagagattaattctttaacttatagaggatatgctgctcaagatttatgtgcgaaatgtaaatttgaagaagttgcttatcttatacttaatggggaacttccaaccaaaaaacaattaaaaaaatttgaaaaagaagagagaaaagaaaggaagttatctaagactttgatagatgatataagaaaatttccaaaaaaagctcatcctatggatgttgcaagaacagctgtcagtattatgggtcttgaagataaagagaccaaagataactctcctaaggccaatatgagaaaagttatgagaatttttgcaaaaatgccagttgcactagctgctttttatagagcaagaaaaggtaaaaaaattataccaccaaaaagtaaactttcattttcagaaaatttttttcatatgtgttttggaaaagtcccaaacaaagagattgtaaaagcatttgatgtatctcttattctgtatgcagaacatagttttaatgtttctacgtttaccgccagaacaatcacaagtagtttgtcagatattcatggtgcaataactggcgcaatagctagtttaaaaggaccccttcatggcggtgctaacgaagaggtaatgcatatgatgaataaaattaaaaaacctgagaacgcacttaaatggataaataaagctctagataataaagatgtagttatgggttttggtcacagagtttataaaagtggagactctagagttccaaccatgagggaatattttggtaaagtcgctaaaattaaaaaagacaaaaaatttgaaaaaatttacgatattgtggaaaaggtaatgatagacagaaaaaatattcatccaaatgtagactaccctactggaccaacttaccatttaatgggatttgatacagattttttcactccgatttttgttatctcaagaattactggctggtcagctcatattatagaacaacatgctgcaaataagctaattaggccactagctagctataaaggtagcaaacatcgtagggttcttcaattaaatcaaagataa

SEQ ID NO: 236320 - DNA, 808 bp, Unknown
  Bacterial polypeptide expressing nucleotide sequence isolated from the Sargasso Sea
atgaacaaagaaaaaatatatatttttgatactactttgagagacggagctcaaacagaaggtgtcaatttttcaattgatgataaaaataaaattgcaaaagctcttgctgggctaggcgttgattatttagagggaggatggccaggagctaacactttagatacaaatttttttaataagccacctaaattaggaaatactattttgacagcttttggaatgacaaaaaggacaggaagaagcgctgaaaatgatccaggcttatctgcaatcttaaattctaatactcaagcagtttgtttagttggaaagacttgggattttcatgttgataaagctttgggcataaccaataaggaaaacttagagaatataaaagagtcgacaaaagtatttataaaaaagaaaaaagaattcatgtttgatgccgaacatttctttgatggttataaaaataatcgagattatgccttaagttgtataaaaactgcttatgacgaaggagcaagatggattgttctctgtgacacaaatggtggcacacttccacatgaagttggagaaattgtttcagaagttgcaaaaattattccaggaaaaaatcttggaatacacgcacataacgatacagaaaatgcagtagcaaactctctaacagcaatactatctggagttcggcaagttcaaggaacaattaatggattaggagaaagatgtggaaatgcaaatttgatatctataatcccttcactttttgtaaaagaaagtttttctaaaaattttgaaataggtattaccgaagtaa

SEQ ID NO: 236321 - DNA, 924 bp, Unknown
  Bacterial polypeptide expressing nucleotide sequence isolated from the Sargasso Sea
aagaagaaagaaaagaaagaaaattatctaaaacattattagatgatatcaaaaaatttccaaaaaaagctcatcctatggatgtagcaaggacagccgtaagtattatgggacttgaggacaatgagacgaaggataattcactaaaagctaacttaagaaaagtaatgagaatttttgcaaaaactccagttgctttagctgctttttatagagctagaaaaggaaaaaaaatcattgcaccaaaaaaaaatctttcattttctgaaaacttttttcatatgtgttttggcaaagtaccaaacaaagatatagttaaagcttttgatgtatctttaattttatatgcagaacatagttttaatgtttcaacttttacagccagaaccataacaagtagtttatccgacattcatggtgcaattactggtgctatagcaagcttgaaaggtcctcttcacggaggagcgaatgaggaagtcatgcatatgatgaacaaaatcaaaaaaccagaaaatgcacttaaatggataaataaggctttaaaaaataaagatgttgtaatgggatttggtcatagagtttataaaagtggtgattcaagagttcctacaatgagagaatattttggaaaagttgctaaaatcaaaaaagataaaaagtttgaaaaaatttatgacattgtagaaaaagtaatgattgatcaaaaaaatatccatccaaacgtagactacccaactgggcctacttaccatttgatgggatttgatactgatttcttcacaccaatttttgtaatttcaagaattacaggttggtcagcgcatattattgagcaacatgctgctaacaaacttattagacctttagcaagctataaaggtagcaaacaccgtaaagttcttcaattaaatcaaagataat

SEQ ID NO: 236322 - DNA, 1020 bp, Unknown
  Bacterial polypeptide expressing nucleotide sequence isolated from the Sargasso Sea
aatgagtgatgaaatcaaaaaagggctactagggattgtcgttgacgaaacagaagtttccaaagttatgcctgaaatcaactctttaacttatagaggctatgctgctcaagatctatgtgcaaaatgcaaattcgaagaagtggcttatctcattttaaatggtgagcttccaagtaaaaaacaattaaaaaaatttgaaaaagaagagagaaaagaaagaaaattatctaaaacattattagatgatatcaaaaaatttcctaaaaaagctcaccctatggatgctgcaagaacggctgtgagtattatgggtcttgaagataaggaaacaaaagataattcaccagcagctaatatgagaaaagtaatgagaatttttgcaaaaacaccagttgctttagctgctttttatagagctagaaaaggaaaaaaaattattgcaccaaaaaagaacctttcattttctgaaaacttttttcatatgtgttttggcaaagtaccaaacaaagatatagttaaggcctttgatgtatctttaatcttatatgcagaacatagttttaatgtttcaacttttacagctagaaccataacaagtagtttgtctgacattcatggagcaattactggtgctatagcaagcttgaaaggccctcttcacggaggagcgaatgaagaagtcatgcatatgatgaataaaatcaaaaaaccagagaatgcacttaaatggataaataaagctctagataataaagatgttgttatgggatttggccatagagtttataaaagtggagattcaagagttcctacaatgagagaatattttggaaaagttgctaaaatcaaaaaagataaaaaatttgaaaaaatatatgatatcgttgaaaaagtgatgatagacaggaaaaatattcatccaaatgtagactatcctaccgggcctacttatcacttaatgggatttgatactgatttcttcacaccaatttttgttatttcaagaattacaggatg

SEQ ID NO: 236323 - DNA, 633 bp, Unknown
  Bacterial polypeptide expressing nucleotide sequence isolated from the Sargasso Sea
gaaaagttccaaaaagtgaaattgtaaaagcatttgacgtatctttaatactatacgctgaacatagttttaatgtttcaacctttacagcaagaactattacaagcagtttgtctgatatacatggagcaataaccggggctatcgcaagtttaaaaggaccacttcatggaggagcaaatgaagaagtaatgcatatgatgaataaaataaagaaacctgaaaatgcacttaaatggattaacaacgctttagataaaaaagaagttgttatgggatttggtcatagagtttataaaagtggagactcaagggtccctacaatgagaaaatattttggaaaagttgcaaatattaaaaaagataaaaaatttgaaaaaatatatgacattgtagaaaaagttatgattgatagaaaaaatattcatccaaacgtggattatccaaccggacctacctaccatttaatggggtttgatactgatttctttacaccaatttttgtaatttcaagaattaccggatggtctgcacatataattgaacaacattctactaacaaacttataagacccttggctgcttacaatggtaataagcacaggcaggtcttatcaattaataatcgataat

SEQ ID NO: 236324 - DNA, 475 bp, Unknown
  Bacterial polypeptide expressing nucleotide sequence isolated from the Sargasso Sea
aggaccattacatggaggagcgaatgaagaggtcatgcatatgatgaataaaattaaaaaacctgagaatgctttaaaatggatcaataatgcattaaagaaaaaagaggttgtgatgggttttggacatagagtttataaaagtggagactctagagttccaaccatgaaagagtatttcaaaaaagtagctaagattaaaaaagataaaaagtttttaaagatttacgacatcgttgaaagagtaatgattagtaaaaagaatattcatccaaatgtagattacccaacaggaccaacttatcatctaatgggttttgatacagatttctttacaccaatatttgtaatttcaaggattactggttggtcagctcatataatggagcaacattcatctaataaattaattagaccattagctaaatacaaaggtagcaaatatcgaaaagttatgcttttaaatcaaagataa

SEQ ID NO: 236325 - DNA, 1003 bp, Unknown
  Bacterial polypeptide expressing nucleotide sequence isolated from the Sargasso Sea
aaagtgtaaatttgaggaagtagcttatcttattttaaatggtgaacttccaagtaaaaaacaattaaaaaaattggaaaaagaagagagaaaagaaagaaaattatctaaaacattattagatgatataaaaaaatttccaaagaaagcacatccaatggatgtagcaaggacagcagtgagtatcatgggtctagaggataaagaaactaaagataattcacctaaagcaaatatgagaaaagtaatgagaattttcgctaaaatgcctgttgcacttgcagcattttatagggcaagaaaaggaaagagaattatacctccaaaaaacaaactttcattttctgaaaacttttttcatatgtgttttggcaaagtacccaacaaagatatagttaaagcttttgatgtttcgttaattttatatgcagaacatagttttaatgtttcaacctttacagctagaacaataacaagtagtctatcggatattcatggcgcaatcactggtgcaatagcaagtttaaaaggacctcttcatggaggtgcgaatgaagaagtcatgcatatgatgaataaaatcaaaaaaccagagaatgcacttaaatggataaataaagcactagataataaagatgttgtaatgggatttggccatagagtttataaaagcggagattcaagagttcctacaatgagagaatattttggaaaagttgctaaaatcaaaaaagatagaaagtttgaaaaaatttacgacattgtagaaaaagtaatgatagatcgaaaaaatatccatccaaacgtagattaccctactggacctacttaccatttaatgggatttgatactgatttcttcacaccaatttttgtaatttcaagaattactggctggtcagctcatattattgagcagcatgctgctaataagcttattagacctttagcaagctataaaggtagcaagcaccgtaaagttttacaattaaatcaaagataa

SEQ ID NO: 236326 - DNA, 256 bp, Unknown
  Bacterial polypeptide expressing nucleotide sequence isolated from the Sargasso Sea
tctattgctttaagtgaggactattttattcaaaggaatttatatccaaatgttgatttctattctggattaatttaccaaagcatgggaattccaagtcctatgtttactgttctttttactattggtagaactcctgggtggttagcacagtggaaagaattcttaaatgataaagatcaaaagattgcaaggccaagacaaatttataccggatatgattcaagagattatcaagatttagaatctagataaa

SEQ ID NO: 236327 - DNA, 298 bp, Unknown
  Bacterial polypeptide expressing nucleotide sequence isolated from the Sargasso Sea
acttggtgtaaatgatcctttgttggaaatagcaaaacagttagaggaagtagctctaaaagacgattattttcttgatagaaagctttatcctaatgttgatttttattcaggtataatatatagagctctaggaatacccactacaatgtttacggtaatgtttgctttgggaaggcttccaggttggatttctcaatggaaggaaatgagggaagatcctaaatggcggatttaccgtcctcgccagatatatactggaaggacaattaccaaatttgaagaaaaaaataagtag

SEQ ID NO: 236328 - DNA, 220 bp, Unknown
  Bacterial polypeptide expressing nucleotide sequence isolated from the Sargasso Sea
atggctgattatgaaaataataaattaaaaaaatcctttacattgtttaataatgaaacaggaaaatcttatgatcttccagtaattaaaggcactgaaggaccagatgttttagatatcagaaaactatatcaagaaactggtatgtttacatatgatccaggtttcacctcaactgcatcatgtgagtcttcaattacgtacattgatggaaataaag

SEQ ID NO: 236329 - DNA, 683 bp, Unknown
  Bacterial polypeptide expressing nucleotide sequence isolated from the Sargasso Sea
tatgccaagaactgcaagaattgaggtcaatgacaattcaatagaactccctttggttgtaggaagtgaaggtgaaacaggcattgatatagggaaattacgagcagagacaaaatccatcacactagaccccggctttgttaatacaggttcatgcgaaagcggaataacctttctcaatggcgaaaagggaatactacgttaccgaggttatccgattgaagtccttgcagaaaagtcaaactttcttgaagttagctacctgctgatatttggggaactgccttccaacaatgagttggaaaagtttgagttcaatgtcaaacgccacactatgctgcatgaagatgtgaagcatatttatcaggcctttcccaaggatgctcacccgatggcaattttatcaagcattgtctgcgcactttcaacattctatccggatttcagtgcaacagacagagacgctgtagatttggctatctggcgcttaatgggcaaattgcctaccattgcagcatggtcttacaaaaaaaatataggccagccttttgttttcccagtaaacgattacagttatgcaaaaaactttctccacatgcttttcagtgttcctacaacttcatacgaagccccgccagaatttgttgatgctttgaatgtgcttttcattttgcacgcagatc

SEQ ID NO: 236330 - DNA, 334 bp, Unknown
  Bacterial polypeptide expressing nucleotide sequence isolated from the Sargasso Sea
cgtcatagtgctcatgaggtattagaggagttaggttcaaaggatgaacctcttctaaaacttgcaattgaactagaaaaactcgccctggaggacccctatttcgtcgaacgtaaattatttcctaatgtggatttttactcaggaataatcttgcgtgctatggacattccgacagacctattcaccgtcttatttgccgttgcccggaccgttggttggcttgctcaatgggacgaaatgatctgtgatccgggacaaaaaattggccgaccgcggcaactctacactggcccggctgaacgttcattcatccctatctcggctcgctagg

SEQ ID NO: 236331 - DNA, 280 bp, Unknown
  Bacterial polypeptide expressing nucleotide sequence isolated from the Sargasso Sea
ctagctatagcagttgaacttgaaaaaattgcactagaagatgattattttgtagaaaagaaactttatccaaatatagatttttactcaggcattgttatgaagtcattaggttttccaatggatatgtttacagttttgtttgcagttggaagaacagttggatgggtttctcaatggaatgaaatgatagaggatacaagtcaaagaattggaagacctcgtcaattatatattggaagtgaacatagacaatatattggtatgcataaaagataat

SEQ ID NO: 236332 - DNA, 313 bp, Unknown
  Bacterial polypeptide expressing nucleotide sequence isolated from the Sargasso Sea
cgaggttttgaaagatttaggaattaaagatcctattcttgatatagctaaatcattagaagaggtagcattaaatgatccttattttacttctagaaaactttaccctaatgttgatttttactcaggaattatatataaggctttacaaattcctactgaaatgtttactgtaatgtttgctttaggaagagttccaggctggattgcacactggagagagatgagaataaataatgatccaataggaaggcctagacaaatatatactggaagtaatcagcgtgattttgtctctataaataaacgatag

SEQ ID NO: 236333 - DNA, 273 bp, Unknown
  Bacterial polypeptide expressing nucleotide sequence isolated from the Sargasso Sea
aatggcagataaaaaagctgtcgtgcatatcgaaggcctggcgcctatcgaactgccaatttactcgggcacggcaggcacagatgtaatcgatgttcgcgccttgggtcaacatggttacttcacttttgacccgggctttatgtcaaccggctcttgtgaatcaaaaatcacttatatcgacggcgacaacggcgtgttattacaccgtggttacccgattgagcagttggctgtgaagtcagattatctggaaacctgttatttgttatt

SEQ ID NO: 236334 - DNA, 385 bp, Unknown
  Bacterial polypeptide expressing nucleotide sequence isolated from the Sargasso Sea
aatgattgaggaaaaaagatttaaattagttgatactaaaactggtaaagaatatgaatttgatggtcttaatggctctattggacctgatgtaataaacatatcatccttatacaaaaagacaggtctgtttacatacgatccaggctttacatcaaccgctgcttgtaattctaaaattacatatattgatggtgagaaaggtatcctccaatacagaggttacccaatcgaggaacttgcaaataatagctctcatttagaagtttgttacttacttatgcatggtgaactaccctcagaaagtgataaaaatgaatttgaagaaataattaaaaatcatactttactgaatgaacaaataattcaattttataaaggcttc

SEQ ID NO: 236335 - DNA, 282 bp, Unknown
  Bacterial polypeptide expressing nucleotide sequence isolated from the Sargasso Sea
tactggatatcgccaagcaactcgaagaagcagctctgacagatgaatacttcattgaccgcaatttatatccaaatgtggatttttacagcggtattatctacaaagctctcggatttccaactgaaatgtttacagtattattttctctgggacggctgccaggctggattgctcactggctggaaatgcataatagtgcatctaaaattggacgaccacgtcagatttatacaggccataccgaacgagaatatgtggctctcagtcagcgaaactgaa

SEQ ID NO: 236336 - DNA, 464 bp, Unknown
  Bacterial polypeptide expressing nucleotide sequence isolated from the Sargasso Sea
catggcagcagatagcatttctccaaagacagtcacccttacccaaggagagggcggcgaacaaatcgaactgcctgttctggatggttcgatcgggccaagtgttgtggatatccgcaagctctatggggcaacggacatgttcacttttgatccaggatatggggccacaggatcatgcgtttcggggctgacttatatcgatggcgataatggtgttttgatgcaccgtggttacgcgattgaggatcttgcggaaaaatctgattttctggagctggcttatcttctgctggaaggcgatctgccgtcggccgaagaaaagaccaccttcgacaatgcgatttcccgccacacaatggtgcatgaacagctgtcgatttttttccgtggcttccggcgggatgcccaccctatggccattatgtgcggcgtcgttggcgcgctgtctgcattctaccatg

SEQ ID NO: 236337 - DNA, 279 bp, Unknown
  Bacterial polypeptide expressing nucleotide sequence isolated from the Sargasso Sea
aatggccgattacgaagataacatacaaaaaaattcttttacattatttaataatgaaactggtaaatcttatgaacttcctgttatcaaaggtactgacggccctgatgtattagatattagaaaactatatcaggagacaggtatgtttacctatgatcctggtttcacttctactgcttcatgcgactcttcaattacttatattgatggtaataaaggtgttttaagacacagaggctataatatccatgatttagcaagtaatagtgaattttt

SEQ ID NO: 236338 - DNA, 297 bp, Unknown
  Bacterial polypeptide expressing nucleotide sequence isolated from the Sargasso Sea
aatggcagattacgaaaatagtaaacaaaaaaattcatttacattatttaataatgagactggtaaatcttatgaacttcccgtgatcaaaggtactgacggccctgatgttttagatattagaaaactctatcaggagactggtatgtttacctatgatcctggtttcacttctactgcttcatgtgactcttcaattacttatattgatggtaataaaggtgttttaagacacagaggctataatatccatgatttagcaagtaatagtgaatttttagaagtatgttatttatt

SEQ ID NO: 236339 - DNA, 334 bp, Unknown
  Bacterial polypeptide expressing nucleotide sequence isolated from the Sargasso Sea
aatcattaagaaagctgcagatgatgttcttggaaagttaggtgttgtagatccagttttagatattgctaaaaaattagaagaagttgctctaaatgacgactatttccaatcaagagggttgtatccgaatgttgatttttattccggaataatatatcgtgcacttggaattcctactgaaatgtttaccgttatgtttgctcttggtaggttgccaggatggattgctcaatggaaagaaatgatgtatgaaaatcaacctattagcagacccagacaaatttatactggtgaaacagcaagagattttgtggatattgataaaagataa

SEQ ID NO: 236340 - DNA, 181 bp, Unknown
  Bacterial polypeptide expressing nucleotide sequence isolated from the Sargasso Sea
tggatttcctccagaaatgttcaccgtcatatttgctattgcaagaaccgctggatggactgcgcagtggaccgaaatgattgaagatccaatacagaaaattggcagacccagacaattatatactggaaaaggcattacaaaatatggagtaggaagatctagtaaaaatacacgttaa

SEQ ID NO: 236341 - DNA, 712 bp, Unknown
  Bacterial polypeptide expressing nucleotide sequence isolated from the Sargasso Sea
gatggctaacaatgcgcattccgaaaagtccgtaaccatgactgacaacacatcaggtaaaaaggtcacattttcagtacgctctggaacaatcggaccagatgttattgatatgcgaaacttatatggtgaaactggtatgtttaccttcgacccagggtatggggcaactggctcatgtgtctccggtctaacctacattgatggtgatgaaggtgttttgctacatcgcgggtatgccattgaagagcttgctgaaaaagcagacttcctggaattagcttatcttttactcgagggggaattgccaaacccaatagaaaaaaaggaatttgacacagcaattacgcggcacaccatggtgaatgaacaactatcagctttcttccgtggtttccgccgtgacgctcaccccatggccatcctatgcggcgttacaggtgccctttctgctttttatcatgactctacagatatccacgacccaagacagagaatgatagcgtcgcaccgaatgatcgctaaaatgccaacattagcatcaatggcctttaaatattcgctcgggcaaccctttaactatccgcgcaacaatctaaattatgctgaaaattttctgcaaatgtgttttgcggttcctgcagaggattatattgtcgaccctgttttagcggacgcaatgaacaaaatttttattctccacgctgatcat

SEQ ID NO: 236342 - DNA, 796 bp, Unknown
  Bacterial polypeptide expressing nucleotide sequence isolated from the Sargasso Sea
catgagtaatcagctaagttttgaaatcaatggcagaaaagcggaccttcctctttacactggatcggagggtgaaactgcaattgacatttcgaagttaagatcccaaacaggtacaatcaccctggatcccggctatgtcaacaccggtgcctgcaccagcggcatcacctttctcaacggtgaagagggaattctcaggtaccgtgggtatccgattgaacagcttgcggagaactccagttttctggaggtcagttacctcctgatccatggagaattgccgaatgcggagcaattggaagattttgaaagaaacattaccaggcacacgatgctccatgaggatttacgccacatttatcaggcttttcccaaaggggctcatccgatggcgatgctttccagtgtggtcaacgcactctcgaccttttatccggatttcagtgctacggatcagaaaggggtggatctggcaatctggaggctgatgggtaagatgcctacgattgccggctgggccttcaagaaaaatatcggacaaccgtttatttatcctgacaataatctcagttactgcgcgaatttcctgagcatgatgtttcaggttccggcggtggattacgaaccggcagaagaattcgtaaaagcgctcaatgtgctgttcatcctgcatgccgatcacgaacagaattgttccacttcaacagtgcgtctggtgggcagtagtcaggccaatctttttgcctcgattgcttccggcattgctgcgctctgggggccattacacggagga

SEQ ID NO: 236343 - DNA, 712 bp, Unknown
  Bacterial polypeptide expressing nucleotide sequence isolated from the Sargasso Sea
actgagggcaaaaaccgggtacatcaccctcgatccggggtatgtcaataccggttcctgcagcagttcggtcacatttctcgacggagaaaaaggaatcctccgttaccggggttatcccatcgagcaacttgcagaaaattcaagctttgttgaagtcgcctacctgcttctgaacggatcgttgccgacggtaaaacagcttgacgattttaatgatcatctgagtaaacactcgctgatccatgaagacatgaaacacttcttcgagggattttccaccaccgctcacccgatggtgatcctatcctcgatggtttcctccctttccgcctattattcggaagcgtcaggtgccgcctctgtgaaccagttggaggtcaatactgcgagactgatggcaaaaatccggacgattgctgccttttcctacaaaaaatcgatcggccagcccttcatttatccccaggacaaactcgcctactgcgccaattttctgaacatgatgtttgccgttccggcagaaccttacgaagtcgatcccgagatcatcaaggctctcgatctgttgctgatcctgcatgcagatcatgagcagaactgcagcgcttccactgtccgtgtggtaggcagcagcatggccaatgtctatgcttcggtcgcttcaggcatcctcgcgctttggggtccgcttcacggtggtgcgaaccaa

SEQ ID NO: 236344 - DNA, 294 bp, Unknown
  Bacterial polypeptide expressing nucleotide sequence isolated from the Sargasso Sea
cctatttcaaagaaaaaaatctctatccaaatgtagatttctactcaggaatactccttaaagctctaggtatacccacctcaatgtttacacctatttttgcagttggaagaacagtaggttggttatcacaatggaaagaaatgattgaagataatgaatttaaaattacaagaccaagacaactatttacaggtgataaaaatagatcctacaaaaaagttcctgaaagagagaaaaaatcgatatttaatttattatggcttaagaaaacttttctaaataatcaataat

SEQ ID NO: 236345 - DNA, 835 bp, Unknown
  Bacterial polypeptide expressing nucleotide sequence isolated from the Sargasso Sea
cccattgaattgcccgtaatcattggatccgaaggtgaaaaagccatcgacgtgtccaaactgagggccaaaaccgggtacatcaccctcgacccggggtatgtcaataccggttcctgcagcagttcggtcacctttctcgatggagaaaaaggggtcctccgctaccggggttaccctatcgagcaacttgctgaaaattcaagcttcgttgaagtcgcctacctgcttctacacggagcactgccgaccgcgcaacagcttgatgatttcaatgatcatctgagtaaacactcgctgatccatgaagacatgaaacacttcttcgagggattttccaccaccgcacacccgatggtgatcttgtcctcaatggtttcctccctttccgcctattattcggaagcatcaggagccgcctcggtgaaccagttggatgtcaatactgcgagactgatggcaaaaatcaggacgattgctgccttttcctacaaaaaatcgatcggccagccattcatttatccgcagaacaaactcgcatactgcgccaattttctgaacatgatgtttgccgttccggcagaaccttacgaagtcgatcccgagatcaccaaggctctcgatctgttgctgatcctgcatgcggatcatgagcagaactgcagcgcttccaccgtccgtgtggtaggcagcagcatggccaatgtttacgcttcggtcgcttcaggcatcctcgcgctttggggcccgcttcacggtggtgcaaaccagcaggtattgcggatgctggaacggatccacgccaaaggagatgatcttgataaatatgtccgac

SEQ ID NO: 236346 - DNA, 610 bp, Unknown
  Bacterial polypeptide expressing nucleotide sequence isolated from the Sargasso Sea
atgaacgagaaaaactcgggaacgttcacacttataaacgataaaacgggtgaaaaatacacgctcccagttatcgatggcacgactggcccaagtgtaattgacgtaagaaccctctatggagaaacagatcacttcacctttgaccctggatatacttcaacgggatcatgtgaatccgcgctgacatatatagacggggataaaggtattttattacatcgcggttacccgatagagcagttggcggagcatagtaattttttagaagtcgctcaccttcttttatatggagatttacccaatcaacaagaatccgaaaaatttgtgacggatatcacctaccacacaatgcttcatgatcaattgatgaatttctacaggggatttagacgcgatgctcaccctatggccattatgtgcggtgttgtaggtgcactttcttctttttatcatgactcaaccgacatagccgacccacacgctagaatggtagcttcttaccgattgattgcgaaagtgccaacaatagcagccatggccttcaaatattctctaggacagccatttaattttcctcaaaacaaactgacttatgctgagaactttc

SEQ ID NO: 236347 - DNA, 735 bp, Unknown
  Bacterial polypeptide expressing nucleotide sequence isolated from the Sargasso Sea
tatgggaaaatctgcaaaaattgaatatgatggaaaatcttatacttttcctgtaattactggatctgaaaatgaggaggcaattgatataaatcaattaagatcagaaactggtttaattacttatgatcctggctataaaaacacaggtcattgtataagtgaaataacttatcttgacggagagaatggtgttttaagatacagaggctactctgttgatgaattatgtcaaaaaaaatctttcttagaggttgcctatcttttaatttatggagatttaccaacaaagtcagaaatacaaaagtttcaagaggatattagagaagaggctcttgtagacgaagatcttaagcaaatctttaaaagtttccctaaatctgctcatccaatgggtgtattatcctctcttacatctgctttgattgcatttaaccctttaaatgaaacaaaaatttcaataaaagatgctgcaggtacaacagaaaaagataaaatgtatttatctacaatcagacttcttgcaaagtttcctattatgtcatcttggacgttaagaaaaatcaaaggtttgcctttaaattatagtaacaataatatagagtatacagaaaatattgcatatatgatgtttgctaagccaaatcaagattataagcaaaatgatattatagttaatgctttgaatacactcttgattcttcatgctgatcatgaacaaaatttgttcacatc

SEQ ID NO: 236348 - DNA, 556 bp, Unknown
  Bacterial polypeptide expressing nucleotide sequence isolated from the Sargasso Sea
atggataaagaagtaacactacatagaggtctacagggagtatattttgatagaagtgaaaccacttttattgatggaaaagaaggagtccttgaatatagagggtacaatattaatgatttagctgaacattcttcctttgaagagacatcatatttactaatttatggcaaacttccaaataaggaagaattatctgaatttgatgcaatgttaaaatcatacagaaagttacctgaagagatatttgatgtaatcaatgtagtaaaagattctcatccaatggatgctcttagaacaacagtttctgctctttcttctttcgacgaagatagaaatgataattctgaagaagctacaattcgaaaaggtatacgattaacctctcaggtggctacaattgtaatggctcaccataatattcgtaatggcaaagaacccatagaccccagcgataatttaaaccatgcaggcaattttttatatatgttaaatggaaaaagtcctgaccaagatactatagatttaatggataaagatttttactgcatgctga

SEQ ID NO: 236349 - DNA, 709 bp, Unknown
  Bacterial polypeptide expressing nucleotide sequence isolated from the Sargasso Sea
aatgagtgaatttgataaaatacaaattaatagaaataacaaaaaaatagctgaattagatatcctaaaaggatcacttggtccagatgttatagatataagaaaccttcaaaaacaaacaggtttttttacttacgacccaagttatggcgcgacaagctcctgtgaatcatcaattacattcatagatggtgataaaggaattttattgtatagaggctatccaatagaacagttagccgaagaatcaacatttttagagattgcttatcttttactaaaaggtgagcttcctaataaacaacaatttgagatgttttcacataatataattaatcatacgatggtacacgagcaaatattaaatttttatcagggctttagaagaaatgctcacccaatggcaattctatgcggtgcaacaggcgcaatgtcagcattttacgaagatagtgccgatatcaatgaccctaatcaaaggatgatttccactaatcggttaatagcaaagatacctacactagcagccatggcctacaagtactctgtaggacaaccatttaattaccctgacaatgagctttcatattctgaaaactttttaaaaatgtgttttgcagttcctacagaaaaatataattcccaaaaggttttatcagatgcaattgaaaaaatatttattttacatgcagatcatgagcaaaatgcc

SEQ ID NO: 236350 - DNA, 181 bp, Unknown
  Bacterial polypeptide expressing nucleotide sequence isolated from the Sargasso Sea
catgaaatctctaggttatccaatggatatgtttacagtgctgtttgctgttggaagaactgttgggtgggtttctcagtggaatgaaatgatagaagatacaagtcaaagaattggtcgacctcgtcaattatatgttggaagtgattatagacagtatgttggaatacacaaaagataa

SEQ ID NO: 236351 - DNA, 178 bp, Unknown
  Bacterial polypeptide expressing nucleotide sequence isolated from the Sargasso Sea
atgactgataaaattaaggaaaaagctgatttaaagttaaatggtgacctttataactttgatgttcatgaaggtacaattggtccagatgtcctagatatttcaaaattatatgctcagtcaggaaaatttacatatgatccaggttttacttctactgcaaactgtaaatcaacta

SEQ ID NO: 236352 - DNA, 482 bp, Unknown
  Bacterial polypeptide expressing nucleotide sequence isolated from the Sargasso Sea
tatggctgattacgaagataaaaaagttaacaataaacagtttactctttttaacaatgagagtggtaaatcctatcaattacctcttatagaaagtaaagatggtccaaatgttttggatattcgtaaactttatcaagaaacaggtttatttacttttgatccaggttttacttcaactgcatcatgtgaatcaggaataacttacatagatggtgaaaaaggaattttacgtcataggggatatgatattcatgatttagcctcaaaaagtgaatttcttgaagtttgttatcttttactacacggtgaattaccctcccctgaagacaagcagaaatttaaagatgtaataaccaatcatacaatgttgcatgagcaactagtaaatttatacagaggttttcgaagagatgcacaccctatggcaattatggtaggtgttgtaggtgccctttcggccttttatcatgacagtaccg

SEQ ID NO: 236353 - DNA, 762 bp, Unknown
  Bacterial polypeptide expressing nucleotide sequence isolated from the Sargasso Sea
atagaatggttgcaaccatgccttcaattgttacttattggtataagtattctcacgatggtgaggatatctccttagttaatgatgaagacaccatggctggtcattttctttacattctccatgggaaaacaccttcagatttatttagaagagtgatggatgcttctttaattttatacgcagaacatgaatttaatgcttcaacctttacagcaagagtttgtgcttcgactatgtcagatattcattcgtgtgttgttgcagccattggttctttaagaggtccacttcatggtggagcaaatgaagcagctatggaaatgatagaaaattggaaaacaagagaagaagctaaagacaacatattaaagatgcttgccaacaaagataagattatgggttttggtcatgctgtttattctgagagagatcctagaaacgcagttattaaggaattctcaaaacagcttgccgaagcttacggtgacgataacctttatcaggttagtgaagaagttgaaactgtcatgtgggacgaaaagaagcttttcccaaatgcagacttttttcatgcgtcagcttatttttatatggggattccaacaaaactatttaccccgatcttcgtcatgtcacgagtgactggatggactgctcactgcatggagcaaagagctaataataggattatcaggccaagtgctgactatacaggacctgagtcatctgaatgggtcaacatagaagatagagaataat

SEQ ID NO: 236354 - DNA, 858 bp, Unknown
  Bacterial polypeptide expressing nucleotide sequence isolated from the Sargasso Sea
ctgtcaatttgaagaagtggcgtatcttattcttaagggcaagctacctaatcagtctgagctagacgcttataaagcaaaacttcgcggtatgcgcggtcttcctaccgcgcttaaagaagtactagagcgcattcctaaaaatgcccacccaatggacgtacttcgcacgggctgctcaatgctaggtaaccttgaaatggaaaccagcttcgaccagcaacaagatgttacggatcgcatgttagcttgcttcccaagtatcatttgttactggtaccgcttctcgcacgacggcgtgcgcgtagacgttgaaaccgatgacgactcaattggaggtcacttccttcacatgcttcacggcgaaaagccgcgtgaacttcacgaacaggtcatgcatgtatcgttaattctttatgcagagcatgaatttaacgcgtctaccttcactgcacgtgtttgcgcttcaaccttatctgatatgcattcttgtgtaacgggtgctatcggctcacttcgcggcccgcttcacggtggtgctaacgaagccgccatggaaatgatcgagggctttacctctgctgatgacgcagaagaaaaaatgatgggcatgcttgagcgcaaagagaagatcatgggctttggccatgctatttactcagactctgacccgcgtaacgaaattatcaagaaatggtctgaaaaactggctgctgatgtgggtgacgacgtactttaccctgtgtctgttcgctgtgaagaagtgatgtggcgcgagaagaagcttttctgtaacgccgatttcttccacgcctctgcgtataacttcatgggtattcctacaccgctatttacgcc

SEQ ID NO: 236355 - DNA, 265 bp, Unknown
  Bacterial polypeptide expressing nucleotide sequence isolated from the Sargasso Sea
aatggctgatactaaagcaaaactcactctaaatggtgatgctgctattgaactggatgtgctgaaaggtacgctcggtcaggacgttattgatattcgtagccttggctcaaaagggatgtttacttttgacccaggttttacctctaccgcatcctgcgaatccaaaattactttcatcgacggtgacgaaggtgttttgctgcatcgcggcttcccgattgaccagttggcgaccgagtccaactatctggaagtgtgttat

SEQ ID NO: 236356 - DNA, 858 bp, Unknown
  Bacterial polypeptide expressing nucleotide sequence isolated from the Sargasso Sea
gatgggaaagaagcttgaaggagctggattaagaggccaagtcgcaggagaaactgcactttcaaccgtaggtaaagagggtaaaggcctgacttacagaggttatgcgattgaagatttagcggagaaagcaacttttgaagaagttgcctatatgcttctttatggaaaattacctaatcaagatgaatacgaatcttatacatcgaagctcaggagctatagagatttaccaagagagctaaaaaacgttctaacagcaataccaaaagaaactcatccaatggatgtccttcgaactgggacttctatgttaggaaatcttgagccagaaggagattttactaatcaaaatgatacagctgataggattcttgctgctatgccttcaataatgacatattggtatagagcatctcattttggcgaggatatagatactcttacagatcataaaactatgggtggtcagtttttaagtttacttacaggaagcgagccaagtgatgaacacattagagcacttgatacttctcttatttgctatgcagaacatggctttaatgcatcgacatttacagctaggacttgtgcatcaacactgtctgatatgcattcatgtattactgcggcaataggaacattaagaggaccacttcatggtggcgctaatgaagcagctatggaaatgatagaaagattttcttcaagggaagatgctaatgttggtgtgaagaatatgctagcaaacaaagaaaagattatgggtttcggtcatgcggtttattcagatgaggatcctagaaacaagattgtaaaagcctgggcaaagaagcttagctcaaatgcatccaaccc

SEQ ID NO: 236357 - DNA, 444 bp, Unknown
  Bacterial polypeptide expressing nucleotide sequence isolated from the Sargasso Sea
atattacgcaatatgttgctaaggcaaaagataaaaatgacccctttcgattaatgggttttgggcatcgtgtctataagaatcatgacccaagagcaacaataattcgaaaaatgtgtcatcgcgtacttgagaagctaggccgtgaacaagacacaccattatttgagctggcattggaactcgagcaaatcgcattaaaagattcttatttcattgaaaagaacctttatccaaatgttgatttctattcaggcatcatctaccaagctttgggcataccaaaatccatgtttacagtgatgtttgctattgcccgaacggttggatgggtcgctcaatggcgtgaaatggtgagagacccagaaacacgcattggcagaccacgccagcgctatataggcccagccgaacgaaactatatacccatcactaatcgttagc

SEQ ID NO: 236358 - DNA, 673 bp, Unknown
  Bacterial polypeptide expressing nucleotide sequence isolated from the Sargasso Sea
gattccatcgcgggacacttcctatcgtgtcttcatggtaaacccccaagtgagctgcatgaacaggtaatgaatgtatccctaatattgtatgccgagcatgagtttaacgcgtctacgttcactgctagagtatgtgcgtccacattgtcggacattcactcatcagttacaggtgcgatagggtctttacggggacctcttcatgggggagcgaacgaggccgcgatggacatgatatcccagtggagttcacctgatgaagctgagactgaactactcgagatgctaaaaaataaagataagataatgggattcggccacgcaatttacagagaatcagaccctcgtaatgaaattattaaaggatgggcaaaaaagctctccgaggaagtgggggataaggttctctatgctgtttcagagagagtagatgaagttatgtggagagaaaaaaaactttttccaaacgccgatttctatcatgcctctgcttatcacttcatgggtatcccaactaaactttttaccccaatattcgtctgctctagggtggcgggttgggccgctcatattatggaacaaagagccaataatagaattattcgaccgagtgcagattacattggcccagaaagttccgaatgggttgatatcgaggcccgttcataaa

SEQ ID NO: 236359 - DNA, 718 bp, Unknown
  Bacterial polypeptide expressing nucleotide sequence isolated from the Sargasso Sea
gatgggaaagaagcttgaaggagccggattaagaggtcaagtcgcaggagaaactgcactttcaaccgtaggtaaagagggtaaaggcctgacttacagaggttatgcgattgaagatttagcggagaaagcaacttttgaagaagttgcctatatgcttctttatggaaaattacctaatcaagacgaatatgactcttatacctctaagctcaggaactatagagatttaccaagagagttaaaaaatgttttgacagcaataccaaaagaaactcatcccatggatgtgcttcgaactggtacttctatgttaggaaatcttgagccagaaggagattttactaatcaaaatgatacagctgatagaattctagctgccatgccttcaataatgacatattggtatagagcatctcattttggcgaagatatagatactcttacagatcataaaactatgggcggccagtttttaagtttacttacaggaagtgagccaagtgatgaacacattagagcacttgatacttctcttatttgctatgcagaacatggctttaatgcatcgacatttacagctagaacttgtgcatcaacactgtctgatatgcattcatgtattactgcggcaataggaacattaagaggaccacttcatggtggtgctaatgaagcagctatggaaatgatagaaagattttcttcaagggaagat

SEQ ID NO: 236360 - DNA, 487 bp, Unknown
  Bacterial polypeptide expressing nucleotide sequence isolated from the Sargasso Sea
ggtccattacatggaggagcaaacgaggatgtgattgcgatgttagaagagattaaaaccccagaaaatgctggttcttttttagataatgcaataaaaaataaaagtaagataatgggcttcggccacagagaatataaagtcaaagatcccagagcaataattcttcaaaaacttgcagaagaactttttattagatttggagcagatgaaatgtatgaagttgctaaatcagttgaggcagaggcaataccaagacttggacctaagggtatattcccgaacgtggatttttattctggtcttgtttatagaaaacttggtattcctcgtgatttatttactccaatttttgccatatctagagtggctggttggttagctcattggagagagcaacttggagcaaatagaattttcagaccatcgcaaatctatacaggttcagcaccaagagattggatcagcttagaaaatagagaataat

SEQ ID NO: 236361 - DNA, 889 bp, Unknown
  Bacterial polypeptide expressing nucleotide sequence isolated from the Sargasso Sea
aaaaagatttattaaagaagaaagagctgaaagaaaactttcaaaaagtattttgaatgatattaaaagaatgccaaaaaatgcacatccgatggatgttatcagaacttgtgtaagtttaatgggattggaagataaagatactaaaaacaactcgcctaaagcaaatatgagaaaagcaatgagaattttttctaaaactccaacggcagttgcagcctattttagggctcgtaaaggaaaaaaaataatatctccagataagaaactatctttctctgaaaatttttttaaaatgatgtttaataaagttccggacaaagaaattgttagagcttttgatatttctttaattttatacgctgaacatagttttaatgtttctacttttaccgctaggacaataacaagtagtttatctgatttacatggagcaattacaggtgccatcgcttctctcaaaggtccattgcatggtggagcgaatgaagcggtaatgcatatgatgaaggaaattggaaaaccagaaaaagcaaaaaattggatagagaatgctttgtctaaaaagaaagttgtaatgggctttggtcatagagtctacagaactggagactcgagagttccaaccatgaaacattatatgttcaaagtagcaaaacttttaaataaagaaaaatatactaaaatttatgaaatattagaaaaagtcatgattgaaaaaaaaaatattcatccaaatgtagattttccttgtggaccaacatattacatgatgggaatagatattgatttttatactccaatttttgtgatgtctagaattactggatggtccgcacatattatggaacaacatgcttcaaacaagttgataaggccttttatctaa

SEQ ID NO: 236362 - DNA, 580 bp, Unknown
  Bacterial polypeptide expressing nucleotide sequence isolated from the Sargasso Sea
tatgcggaacatagttttaatgtttcaacttttactgccagaacaataactagtagtttgtctgatttacacggtgctattactggagcgatagcatcacttaaaggccctttacacggtggagctaatgaagctgtaatgcacatgatgaaggaaataaaaaaaccagaaaaagctaaaacatggattgaaaatgccttagataagaaaaaggttattatgggatttggtcatagagtatacagaacaggagactcaagagtacctactatgaaacattatatgttcaaagttgcgaaacttttaaaaaaagaaaagtatactcaaatatatgaaattttagaaaaagtcatgttagagaaaaagaatatacaccctaacgtagattttccgtgcggacctacttattatatgatgggaattgacatagatttttatactcccatatttgtaatgtctagaattactggttggtctgcccatattatggaacaacatgcttcaaataaactgatcaggccattatcaaaatataaaggtcaagaagtcagagaagtaatgttattaaatcaaagatagc

SEQ ID NO: 236363 - DNA, 841 bp, Unknown
  Bacterial polypeptide expressing nucleotide sequence isolated from the Sargasso Sea
atgggaaagaagcttgaaggagcaggattaagaggccaagttgcaggagaaactgcactttcgaccgtaggtaaagagggcaaaggcctgacttacagaggttacgcgattgaagacctagctgagaaagcaacttttgaagaagttgcctatatgcttctatatgggaaattacctaatcaagatgagtatgattcatatacctctaagctcaggaactatagagatttaccaagagagttaaaaaatgttttaacagcaataccgaaagaaactcatccaatggatgttctgcgaactgggacgtctatgctaggaaatcttgaaccagaaggagattttgctaatcaaaatgatacagctgatagaattcttgccgccatgccttcaataatgacatattggtatagggcatctcattttggtgaagatatagatacacttacagatcataaaactatgggcggccagttcttaagtttacttactggaagtgaacctagttatgaacatactagagcacttgatacttctctgatttgctatgcagaacatggctttaatgcatcgacatttacagccagaacatgtgcatcaactctatctgatatgcactcttgtatcaccgcagcaataggaacattaagaggacctcttcatggcggcgctaatgaagcggcgatggaaatgatagaaagattttcttctagagaagatgctaatgttggtgtgaagaacatgcttgcaaacaaggaaaagattatgggttttggtcatgcagtttattcagatgaggatcccagaaacaagatcgtaaaagcatgggcaaagaaactcagct

SEQ ID NO: 236364 - DNA, 622 bp, Unknown
  Bacterial polypeptide expressing nucleotide sequence isolated from the Sargasso Sea
attattgattttacatgcagatcatgaacaaaattgttcaacatccacagtaagaatagtaggttcatctgaagctagtttatttgcttctgtttcagcaggtatttcagctttatggggaagacttcatggcggtgctaatcaagctgttctagaaatgttagaggcgattaaaaatgatggaggagatactaaaaagtttatggaaaaagctaaggataaaaatgatccttttagattgatgggctttggccatagagtttataaaaactttgatcctagagcaaagattattaaagttgctgctcatgaagtattaaaagatttaggaattaaagatccaattcttgacatagctaaatctttggagaaagaggcgttaaatgatccatatttcacaactagaaaactttatccaaacgttgatttttattctggaataatatataaagcattacaaattcctactgaaatgtttactgtaatgttcgctttaggtagagttcctggctggattgctcattggagagagatgaggatgaataatgatccaattggaagaccaagacaggtttatacaggaagtaaccagcgtgatttcgtatctataaataaacgatag

SEQ ID NO: 236365 - DNA, 601 bp, Unknown
  Bacterial polypeptide expressing nucleotide sequence isolated from the Sargasso Sea
gatgaacgtgtcactgatcctctacgccgaacacgaattcaacgcttcgaccttcaccgcacgggtgtgtgcatcgacattgtccgacctgtattcctgcgtcaccgctgccatcggctccctgcgcggcccgctgcatggcggtgccaacgaagcagcgatggaaatgatcgagcgtttctcctcggcccaggaagcggttgaaggcacccttggcatgttggcgcgcaaagacaagatcatgggctttggccacgcgatctataaagacagcgatccgcgcaatgaggtgatcaagggctggtcgaaaaaactcgctgacgaagtgggcgacaccgtgttgttcccggtctccgaagccatcgacaagaccatgtgggaacagaagaagctgtttcccaacgccgatttctaccatgcctcggcgtaccacttcatgggcatcccgaccaagttgttcacgccgatcttcgtatgctcgcgcctgaccggctgggctgcgcatgtgttcgagcagcgcgccaacaaccgcatcatccgtccaagcgccgagtacaccggcgttgagcagcgcaagttcgtgccaatcgaacgtcgctga

SEQ ID NO: 236366 - DNA, 853 bp, Unknown
  Bacterial polypeptide expressing nucleotide sequence isolated from the Sargasso Sea
atgagtgaagaaattaaaaaaggtttgctgggcatagttgttgatgaaactacaatttcgcatgtagttcctgaactcagtgccttaacttatagaggttatacagttcaagaactatgcgataaatgcgattttgaagaagttgcatatttagtacttaatggagagcttcctaacaaaagtcagctgaaaaaatttatcaaacaagaaagatcagagagaaaactttcaaaacaaatattaaacgatattaaaaaaatgccccgaaatgctcatccgatggatgtaattagaacctgcgtaagtttaatggcattagaagataaagacacaaaggacaattctcctaaagcaaatatgagaaaggcaatgagaatatttgctaaaacaccaactgctgttgctgcttatttcagaacacgtaaaggaaagtcaattatagctccaagtaaaaaattatctttttcagaaaatttctttaaaatgatgtttaataaagttccggataaggagatagtaagagcatttgatatttcgttaatattatacgcggaacatagttttaacgtttcgacattcacagctagaacaataacatctagcttatctgatttacatggtgcaataaccggagcaattgcctctttgaaaggtccacttcatggaggagccaatgaagcagtaatgcatatgatgaaagaaatcgggaaacctgaaaaagcaaaagcttggattgaaaatgcattaaataaaaaaaaggtagtaatgggattcggacacagagtttatcgtacaggagactctagggtgccaacaatgaaacactatatgtttaaagtagctaagctttgaa

SEQ ID NO: 236367 - DNA, 643 bp, Unknown
  Bacterial polypeptide expressing nucleotide sequence isolated from the Sargasso Sea
actggtaaaggtttgacatatagaggctttgctattgaagaattagctgaaaaagcaaccttcgaagaggtagctttcatgctgctttatgggcatttgcctaatcaagaagaatttaattcttattcaaataaattaaaaggacatagaaagctacctaaagaattaatggaagtattggaaaggataccatcctctactcatcctatggatgtcatgcgaacgggttgctctatgctaggtaatctagagccagaaggagacttttcaaatcagaatgaaacagcagataggattttagctgctatgacttctataatcacttattggtatagatattctcatgatggagttaaggttgatactgctactgatcatgaaacaattggtggtcaatttctttctttattaacaggcaaagagccgtcagaagagcattctagagcacttgatgtttcactgattctttatgcggagcatggatttaatgcttctacttttacagctaggacttgtgcttcaactttatcagatatgcattcttgtattactggagcaattggcactttgagaggccctcttcatggaggagctaatgaagctgctatggacatgatagaaaaattctccactagagaagatg

SEQ ID NO: 236368 - DNA, 814 bp, Unknown
  Bacterial polypeptide expressing nucleotide sequence isolated from the Sargasso Sea
gaaaaatgtagttttgaagaggtagcttacttaatacttaacaaagagttgccaaataaaattaaactaaaaaaatttaaaaaagaattagaggaaaatagaaatatcacaataaatctaagggaaattgtaaagcatatgcctaaaagagcccatccaatggatgttgcaagaacagtcgttagcgttatgggtcttgaagataaagacacaagcaataattctcctacagcaaatatgcgtaaagcaataagaatatttgctaaaacaccaactgctatggctgcattctttagagcaagaaaaagcaaaaatgtaataccaccaaaaaaaggtttgggtttttcagaaaactttttttatatgtgttttggaaaaatacctaataaagaaattgttaaagcttttgatatttctttaattctctatgctgaacacagttttaatgtatcaactttcacagcaagaacaattacaagcagtttatcagatatccatagtgctattactggcgcaataggaagtttaaaaggtcctttgcatggcggagctaacgaagctgtgatgcatatgatgaatagaattaaaaagcctgaaaatgctttgaagtggataaataatgctcttaataaaaaagaagtagtaatgggttttggtcacagagtatacaaaaaaggtgattcaagagtacctactatggaaaaatattttaaaaaaatttctaaaataaaaaatgataaaacatttcataaaattcacgatatagttaaaaaagtaatgattgaaagaaaagatatccacccccaatgttgat

SEQ ID NO: 236369 - DNA, 200 bp, Unknown
  Bacterial polypeptide expressing nucleotide sequence isolated from the Sargasso Sea
catgacgccgtccgaagtgaaagccaccctatcgttttccgatggctcgcccagcgtcgagctgccgatctacaagggcacggttggcccggacgtgatcgacatccgcaagctgtacggtcagacgggcaagttcacgtacgaccccggcttcatgtcgactgcgtcgtgcaattccaagatcacctacatcgatggtg

SEQ ID NO: 236370 - DNA, 494 bp, Unknown
  Bacterial polypeptide expressing nucleotide sequence isolated from the Sargasso Sea
aggagcaaatcaggcagttttggaaatgctgatgaggatccacaatgacgggggaaatatcgacaaatatgtggatatggcaaaggacaaggattccggtttccgtctgatgggttttgggcacagggtttataaaaatttcgacccgcgtgcattgatcatcaaaaattattgtgaccagattctggaaaaggtaggacttcatgatccattgctggacatagccaaacaactggaacatgttgcgcttgaagatgattttttcaaagaacgaaaactttatccgaatgttgatttctatagcggaatcatctataaagccctgggttttccaattgacatgtttacggtacttttcgcccttggccggttgccagggtggattgcccattgggttgagatgagccagagtcctcccaagatcggtcgcccccgccagatctacacgggagcctccgaaaggccttttcttcccctggaagcacggggctgaa

SEQ ID NO: 236371 - DNA, 670 bp, Unknown
  Bacterial polypeptide expressing nucleotide sequence isolated from the Sargasso Sea
aatggtcaaaaaaaaattaaataaaaaaaataatagaagagccaaactaataattgacaatacatcttacgaatttccaatatataactctactgaaggcgaagctgtaatagatatttcaaagttacacgctgaggccaatatatttacatatgaccctggatttacatccactgcctcatgtgaatcaaaaatcacatacattgatggggataaaggtattctcaggtatagaggatacgacatagaagaattggcaaaaaaaagtgattttattgaagttgttaacttgctcatttatggtgatttaccgaataaaaaacaacttactaaatacaaaaaacttatcacaagacacacactgcttcatcagcaaatcataaacttttttcaaggatttagaagagacgctcatccaatggcaatgatggtcggagttatgggagctttatcctcattttaccaggatacattgaacataaatgattcccatcaaagacaagaagcaacaagaagaatcattgcaaaatcagcaacaattggtgcaatggcatataaatattcattaggccaagcatttgtttctccaaggaataatctttctttttcagaaaattttttatacatgtgctttagcaatactgcagaaaactacaaagtttcacctgtt

SEQ ID NO: 236372 - DNA, 926 bp, Unknown
  Bacterial polypeptide expressing nucleotide sequence isolated from the Sargasso Sea
cttatcttgtcttaatggtgagcttccaaataaaaaccaacttaaaagatttattaaacaagagagatcagaaagaaaactatcaaaacaaattttaaatgacatcaaaaaaatgccaaggaatgctcacccaatggatgtaattagaacctgtgtaagtttgatggcattagaagataaagacacaaaagacaattctcctaaagcaaatatgagaaaagcaatgagaatatttgctaaaacaccgacagccgttgctgcttattttagaacacgaaaaggaaagacaattatagctccaagtaagaaattatctttttcagaaaatttctttaaaatgatgtttaacaaagttcctgataaagaaattgtaagagcatttgatatatcgctaatattatacgctgaacatagttttaatgtttcaacttttacagcaagaacgattacatctagtttatctgatttacacggtgcaataactggagcaattgcctctttgaaaggtccacttcatgggggggcaaatgaagcagtgatgcatatgatgaaagagattggtaaacctgaaaaagcaaaagcttggatagaaaatgcattaaataaaaaaaaggtagtaatgggatttgggcacagagtttaccgtacaggggactcgagagtaccaacaatgaaacactatatgtttaaagtagctaagcttttgaaaaaagaaaagtatacaagaatgtatgagattttagaaaaagtaatgatacaaagaaaaaatatccatccaaatgtagattttccatgtggtccaacttattatatgatgggtatcgatatagatttctacacaccaatatttgttatgtcacgtattacgggttggtctgcacatataatggaacagcatgcttccaataaactaattaggcctttat

SEQ ID NO: 236373 - DNA, 817 bp, Unknown
  Bacterial polypeptide expressing nucleotide sequence isolated from the Sargasso Sea
gatgggtcttgaagataaagatacaagagacaactctccaaaagcaaatatgaacaaggcaatgaggatttttgctcaaactccaactgcagtggcagcatattttagggcccgaaaaggtaaaaaatttattcctccaaataaaaaattatcttattctgaaaatttctttaatatgatgtttggaaaagtacccaacaaagaaatagtaaaagcttttgatgtgtcaatgatactttatgcagaacatagttttaatgtttcaacttttaccgcgagaacgattacaagtagcctttcagatatgcatggagctataactggtgctatagctagtttaaaagggccattacatggtggtgcgaatgaagcagtaatgcatatgtttaaagagattaaaaacccagaaaaagcagaaacatggattaataatgctcttaataagaaaaaagttgttatgggttttggacacagagtctatagaagtggagactcaagagtcccgactatgaaaaagtattttttaaaagtagcagaattaaaaaataacacaaaatatcctaagatgtatgagattcttgagaaagttatgctcgaaagaaaaaatattcatccgaacgttgactatccatgtggtccaacataccatttaatgggtattgatactgattttttcacgccagtttttgttatggcaagaataactggttggtcagctcatataattgaacaacatgcggctaataagcttatacgtcctttatctaagtacaagggtagtgaacacagagaagttttatccttaaatattagataa

SEQ ID NO: 236374 - DNA, 550 bp, Unknown
  Bacterial polypeptide expressing nucleotide sequence isolated from the Sargasso Sea
ttttactgcaagaacaataacaagcagcttatcagatttacacggtgctattacaggagcgatagcttcacttaaaggtcctttacacggcggagctaatgaagctgtaatgcacatgatgaaggaaataaaaaaaccagaaaaggctaaaacttggattgaaaatgccttaaataagaaaaaggttattatgggatttggtcacagagtttatagaacgggagactcgagagtacctacaatgaaacattatatgtttaaagtggcaaagcttttaaaaaaagagaaatatactcaaatatacgaaatattagaaaaagttatgttagagaaaaagaatatacaccctaatgtagattttccatgtggacccacttattacatgatgggaatagatatagatttttacactcccatatttgtaatgtctagaattacaggttggtcagctcatattatggaacaacatgcttcaaacaaattgattagacctttatcaaaatataaaggacaagaagtaagagaagtaatgttattgaatcaaagataa

SEQ ID NO: 236375 - DNA, 334 bp, Unknown
  Bacterial polypeptide expressing nucleotide sequence isolated from the Sargasso Sea
ggacaaacatgatgatcctctattaaaagtagctctagagttagaaagaattgctcttgaagatgagtactttattcaaaaaaaattatttcctaatgtagatttctactccggatttattttaaaagctcttggttttccaacaagtatgtttacagtactgtttgctattggaagaactgttggctggatttcacaatggaaagaaatgatagaagaccctataaataaaatcggaagacctagacagttataccttggaaaaacatcaagagtgtatcaacaggaatcaactagagagaaaaaatcaatatttaagtggttgtggaaataa

SEQ ID NO: 236376 - DNA, 454 bp, Unknown
  Bacterial polypeptide expressing nucleotide sequence isolated from the Sargasso Sea
atcaaaaatgacggaggtgacactaaaaaattcatggaaaaagcaaaagataaaaatgattcttttcgattaatggggtttggacatagagtttataaaaattttgatccaagagctaaaataattaaagttactgcacatgaagttttaaaagatttaggaattaaagatcccatactaaatatcgcaaaatcgttggagaaagaagctttgaatgatccgtattttacatctagaaaactttatccgaatgttgatttttattctggtataatatataaagcactcaatataccaacagaaatgtttacagtaatgtttgctttgggtagagtacctgggtggattgctcattggagagaaatgagaatgaataatgatccaattggtagacccagacaagtttatactggtagtaaaaaaagagatttcctacctttaaaaaatagatagt

SEQ ID NO: 236377 - DNA, 349 bp, Unknown
  Bacterial polypeptide expressing nucleotide sequence isolated from the Sargasso Sea
cgtgccaaactcataagggccacatgcgaccgacttcttgaaaaactgtcgaggcgagatccaatttttgatatggctcagcaacttgaagaagtcgccttagctgacgagtattttattgaacgcaaactgtatccaaatgtggatttctactctggtgtgatctaccgagcaatgggaatccctgtgcagatgttcacagtgctctttaccatgggtcgcttagctggctggatcgcccattggattgagatgcaccattcacctaccaagaaaatctgccgacctcggcaagtgtacacaggtgaaacactccgtgagtttgtacccatcgctgacagaacatagt

SEQ ID NO: 236378 - DNA, 809 bp, Unknown
  Bacterial polypeptide expressing nucleotide sequence isolated from the Sargasso Sea
gttcaggatctttgtgaaaaatgtattttcgaggaagttgcgtatcttgttttaaatggcgaacttcctagatcgaaagaattaaaaaaatttattaacgaggaaagaaataatcgtaaattatctaaacaaattttaaatgatataaaaaatatgccaaagaaagcacatccaatggatgcggtaagatcggcagtcagtttgatgggtcttgaagacaaagatgcaagagataattctccaaaagcaaacatgagaaaagcaatgagaatttttgcgcaaacacctacagctgttgctgcttattttagagcaagaaaaggtaaaaaatttatacctcctaataaaaaattatcttactcagaaaatttcttccatatgatgtttggtaaagttccaaagaaagaaatagtagaagcttttgatgtttcgatgatactttatgcagaacatagttttaatgtttctactttcacagctagaacaataacaagtagtttatctgatatgcacggtgcgataaccggggcaatcgctagtcttaaagggcctttacatggaggtgctaatgaggctgtgatgcatatgtttaaagaaattaaatctccccagaaagctaaatcttggattaataacgcattagataagaaaaaagttgttatgggatttggtcatagagtctatagaagtggcgactctagagttccaaccatgaagaaatattttttgaaagtagcagaattaatgaaaaatacaaaatatccggaaatgtataatattctggaagaagtaatgcttgaaagaaaaaa

SEQ ID NO: 236379 - DNA, 993 bp, Unknown
  Bacterial polypeptide expressing nucleotide sequence isolated from the Sargasso Sea
gaagcttgaaggagccggattaagaggtcaagtagcaggacagactgcactttcaaccgtaggtaaagagggtcaaggcctaacatatagaggttatgcaattgaggatctagcagagaaagcaacttttgaagaagttgcctatatgcttttatacggaaaattacctaatcaagatgaatatgattcttatacttctaagctaaggaaatatagagatttacccagagagttaaaaagtgttttaaatgcaataccaaaagaaacgcatccaatggatgtgctgcgaactggaacttctatgttaggaaatcttgaaccagaagggggttttgctaaccagaatgatacggccgatagaattcttgctgctttgccttcaataatgacatattggtatagagcatctcattttgatgaggatataaatacacttacagatcataaaactatgggtggacagttcctaagtctccttactggaagtgagcctactgaggaacatactcgagctcttgacacttctttgatttgttacgcagaacatggttttaatgcatcaacatttacagctagaacatgcgcatcaactctatctgatatgcactcatgcattactgctgcaatagggacattaagaggacctcttcatggcggtgccaatgaagctgcaatggaaatgatagaaagattctcttcaagagaagatgctaatgttggcgtgaaaaacatgcttgaaaataaagaaaagattatgggtttcggccatgcagtttattcagatgaagatcccagaaataagattgtaaaagcatgggcaaagaaattaagctcaaatgcatcaaactctattatttatgaggtttctgaagaaattgaaaaggtaatgagcgaagaaaaaatctctttgcaatacagatttctatatggcatctgcatacaattttttaggcataccaacaccaatctttactccactttttgttattggta

SEQ ID NO: 236380 - DNA, 667 bp, Unknown
  Bacterial polypeptide expressing nucleotide sequence isolated from the Sargasso Sea
atggctaataaaaatagacgactaaataataaatttgcaaaactttctctcaataacaaaacatttaaacttcccatatataattctactcaaggtgaatcagtaatagatatttctaaattacattctcaagctaaaatatttacatacgatcccggatttacgtctactgcttcatgcgagtcaaaaattacatttatagacggtgataagggaatactaaggtatcgaggctatgacatagaagaactagcaattaaaagtgattttattgaagttgtaaatttattaatctacggagatttacctaataaagagcaattaattaaatataaaaagttaatcacaagacacactctattacacgagcaaataataaatttttttcaaggttttagacgcgacgctcacccaatggccatgatggttggagttatgggtgctttatcttcattttatcaagatagccttgatattaatgatcctcatcaaagacaggaagctacaagaagaatcattgcgaagtcttcaacaataggtgctatggcttataaatattctattggacaagcatttgtttctccaaaaaataatttatcattttcagaaaatttcctacatatgtgcttcagtaatactgctgaagaatataaaatttcacccagtc

SEQ ID NO: 236381 - DNA, 256 bp, Unknown
  Bacterial polypeptide expressing nucleotide sequence isolated from the Sargasso Sea
tatggggggacagttcctaagtctccttactggaagtgagcctactgaggaacatactcgagctcttgacacttctttgaattgttacgcagaacatggttttaaggcatcaacatttacagctagaacatgcgcatcaactctatctgaaatgcactcatgcattactgctgcaatagggacattaagaggacctcttcatggcggtgccaatgaagctgcaatggaaatgatagaaagaatctcttcaagagaa

SEQ ID NO: 236382 - DNA, 751 bp, Unknown
  Bacterial polypeptide expressing nucleotide sequence isolated from the Sargasso Sea
tgagacaaccatttcacaagtaatgccagacataaactctttaacttatagaggttatgctgtgcaagatctctgcgaaaaatgttgttttgaggaagttgcttacctaatacttaataaagagttgccaaataaatccaaattaaaaaaatttaaaaaggaattagaagaaaacagaaacattacaataaatcttagagaaattgtaaagcatatgcctaaaaaatctcatccaatggatgttgcaagaacagttgttagcgtaatgggacttgaagataaagacacaagtaataatacacctgctgcaaatatgagaaaggcaataagaatattcgcaaaaacacccactgctatggctgcattctttagaacaagaaaaggtaaaaatgtaataccaccaaaaaagggattaggtttttctgaaaactttttttatatgtgctttgggaaaatacccagcaaagaaattattaagacttttgatatttctctaattctttatgctgaacacagctttaatgtttcaactttcactgcaagaacaattacaagtagtttgtcagacatccatagtgctattactggtgcgataggaagtttaaagggtcctttgcatggtggagctaacgaagcagtaatgcatatgatgaataaaattaataaacccgaaagtgctttaaaatggataaataatgctcttgataaaaaagaggtagtaatgggttttggacatagagttacaaaaaag

SEQ ID NO: 236383 - DNA, 748 bp, Unknown
  Bacterial polypeptide expressing nucleotide sequence isolated from the Sargasso Sea
tatgagtgaggatataaaaaaaggcttaatgggaatagttgtagatgaaactacaatttctcaagtaatgccagaaataaattcattaacttatagaggttataaagtccaagatctatgtcaaaaatgtagttttgaagaagttgcatatctcgttttgaacggtgaacttccaaaatcaaaagaattaaaaaaatttataaaagaagagagaaacaataggaaactatctaaacaaattttaaataacataaagaacatgccgaaaaaagcacatcccatggatgcaataagaactgctgtaagtttgatgggtttagaagacaaagatgtaagagataattctcccaaagccaacatgaagaaagcaatgagaattttttcacaaactcctacagccgttgcagcatactttagggctcgaaaagggaaaaaatttatacttccaaataaaaaattgtcttattctgaaaatttttttaatatgctgtttggaaaagttccaaacaaagaaattgtaaaagcatttgatgtttcaatgatactttatgcagagcatagttttaatgtttcaacatttacagcaaggaccattaccagtagtctttccgacatgcatggcgctattactggagctatagcaagcctaaagggtccattgcatggtggtgccaatgaagcagttatgcacatgttcaataaaataaaaaaaccagagaacgctgaggcatggataaataatgctctg

SEQ ID NO: 236384 - DNA, 757 bp, Unknown
  Bacterial polypeptide expressing nucleotide sequence isolated from the Sargasso Sea
aattcttgctgccatgccttcaataatgacatattggtacagagcatctcattttggcgaagatatagatactcttacagatcataaaactatgggcggccagtttttaagtttacttacaggaagcaagccaagtgatgaacacattagagctcttgatacttctcttatttgctatgcagaacatggctttaatgcatcgacatttacagctaggacgtgtgcatcaacactgtctgatatgcattcatgtattactgcggcaataggaacattaagaggaccacttcatggtggtgctaatgaagcagctatggaaatgatagaaagattttcttcaagggaagatgctaatgttggtgtgaagaatatgctagcaaacaaagaaaagattatgggtttcggtcatgcggtttattcagatgaggatcctagaaacaagattgtaaaagcatgggcaaagaaacttagctcaaatgcatcaaaccctgtcatttatgaggtttcggaagaaattgaaaaggtaatgagcgaagagaaaaatctctttgcaaatacagatttttatatggcatctgcatataattttttaggcataccaacaccaatctttacgccactttttgtaattggtagaacctctggatgggctgccaatgtgatggaacaaagagcagataatagaattataagacctagtgaagaatatattggacccgaatctgcaacttgggttgatcttcaagatagagattaa

SEQ ID NO: 236385 - DNA, 678 bp, Unknown
  Bacterial polypeptide expressing nucleotide sequence isolated from the Sargasso Sea
ttcctacaaaaaactttgaagtttatgaagaatttgttcaagcactgaacatactcttcatacttcacgctgaccatgaacaaaattgctcaacatccactgtaagactcgtaggtagtagcgaggccaatctattcgcttctatatctaccggtatagcagcactttgggggcgtttacatggtggagcaaatcaggctgtacttgaaatgttggaacaaattcataacgacaatgaaggaattcaaaagtttttaaatctagcgaaggataaaaaatcaaattttaaattaatgggttttggacatcgagtctacaaaaattttgatcctcgtgctaaaattttaaaaaaatattgtgacaaaattctgaaattacttggcacaaaagatcctttgttagatatagcaaaacgtctagaggaagctgctttaactgacagttattttattgatcgaaatttatatcctaacgtggatttttacagtggtattatttataaagcaatgggttttccaacggatatgtttacagtgctctttgcattggggagattaccaggttggatagctcattggttagaaatgagaaatggaatttcaaaaattggaagaccaagacaaatttatacgggagaaactgtgagaaaatatattcctctaagcaaaaggggttaaa

SEQ ID NO: 236386 - DNA, 429 bp, Unknown
  Bacterial polypeptide expressing nucleotide sequence isolated from the Sargasso Sea
gatgattgatgaaaaacgatttaaattagtcgatacaaaaactggtaaagagtatgagttcgatggaatcaaaggatctattgggccagatgtaattaacatatcatcactttataagaagacaggcctatttacttatgaccctggttttacatcaactgcagcttgtaattctaaaataacatacattgatggcgaaaaaggtattcttcaatatagaggttatcctattgaggaacttgcaaataatagctctcatttagaagtttgttacttacttatgcatggcgagttgccatcagagagtgataaaaatgaatttgaagaaatcattaaaaaccacacactactaaatgaacaaataattcaattttataggggttttagaagagatgcacatcctatggccatgatgattggaattgttgg

SEQ ID NO: 236387 - DNA, 298 bp, Unknown
  Bacterial polypeptide expressing nucleotide sequence isolated from the Sargasso Sea
gaaaatgagccattacttttattggcaaaagagttagaaagcatagcactaaaagattcatactttgttgatagaaaactatttccaaatgttgatttttattcaggtataatattaagagctatgggttttccttcaaatatgtttacagttctttttgcacttgcaagaactgttggttggataactcattggatggaaatggcatctgaagaaagcataaaaattgggaggccaagacaactttatacaggccatcctcaaagatcatatattaaaattataaatagaaaataaa

SEQ ID NO: 236388 - DNA, 925 bp, Unknown
  Bacterial polypeptide expressing nucleotide sequence isolated from the Sargasso Sea
ctatctcttttgtatggcaaattaccaaccataacagaattatctaattataaaaactgtttaaaaagtctcagagacttgcctgattctcttaagaaggtgcttagagaaatacccgcttcagctcacccaatggcagttatggcaacagggtgctccatgttaggaaatctcgaacccgaagagtcaatggatgcccaaatggattcaattaatcgaatggttgcaactttgccatcaattgttacatattggtatagatattctcatgatggagaggatataagtcttgtaaatgatgaagatacgattgcaggacatttcttgcatattcttcatggtaagactccatcagatcttcatagacgggtaatggatgcatcattagttttgtatgctgagcatgagttcaatgcttccactttcactgcaagagtttgcgcttcaacaatgtcagatatcttctcctgcgttgttgcagccataggttcactaaaaggtcctttgcatggaggagctaatgaagccgcaatggaaatgattgagaattggaagactagagatgaggctaagacaaatattttggacatgcttgcaaacaaaggcaagataatgggttttggtcatgcaatatattctgaaaaagatccaagaaatgctgtgattaaagaattttcaaaggagttatcccaagagtatggagatgatacgctatatcaagtgtctgaggaggtagagcaggttatgtgggatgaaaaaaaattatttccaaatgctgacttttttcatgcttctgcatatttttatctaggcattccaactaaactttttactcctatttttgttatgtcacgagtaacaggctggactgctcattgtatggagcaaagagctaataatagaattattagaccccagtgctgaa

SEQ ID NO: 236389 - DNA, 961 bp, Unknown
  Bacterial polypeptide expressing nucleotide sequence isolated from the Sargasso Sea
agttgcttatttgatacttaatgatgacttgcctaataaaaaccaattatcagaatttaaaaagaacgaaagaaataatagagagatttcgggtaatttaaaatcaattattaaaaactatccaaaaaaagctcatccaatggatactaccagaacatctatcagccacatgggattagaagatccagatgcatcggataattcaaaagaagctaatatgagaaaatcattaagattactttcaaaaatctctactgctgtagctgcaaactttagagtaagaaaagggcaagatattattgaacctaacaatgatttagatttttgtgaaaatttttttcatatgtgttttggaaaagtccccagtaaagaagttgtcaaagcatttgatgcatccatgacattatatgctgaacatagttttaatgcatcgacatttacttcaagagtgattactagcagcttgtcagatatgcatggagcagtaactggagcagtagctagtttaaaaggaccattgcatggaggtgcaaacgaagcagtcgcgcatatgctgaatgaagtgggctcttcagataaagctgaggaatttattttaaacaaaattaaaaataaagaactaatcatggggtttggtcatagggtttatcgtaatggtgactcaagggttcctacaatgactgaatacttccataaaacagctaaatattataaaaattctgaattacctaagatttcaaaaattcttgaagatacaatgctaagagaaaagaatattaaaccaaatttagactttccagcaggtcccacttatcttttgatgggttttgatattgatttttttacacctatttttattgtatcgagaattactggttggtgtgctcacataatggaacaatttgaaagcaacaagctgattagacctctttctaaatatactggcacttctcacaagaaa

SEQ ID NO: 236390 - DNA, 301 bp, Unknown
  Bacterial polypeptide expressing nucleotide sequence isolated from the Sargasso Sea
aggtagcgcagattcaccgctacttgaattggctatagcattggaagagattgcgctaaaagatgattactttcgagagaggaacttatatcctaatgtggatttctattcagggataatatatcaagcactaggtatccctacatcaatgtttactgttatgtttgcaattggaagaacagtgggttgggtttctcattggagagagatgattacagatcccaattcaaaaatcagtagaccgagacagttgtatacaggtccaggaaaaagaaattatatatcaattgataaacgataa

SEQ ID NO: 236391 - DNA, 691 bp, Unknown
  Bacterial polypeptide expressing nucleotide sequence isolated from the Sargasso Sea
gccgttccggcagaaccatacgaagtcgatcccgagattgtccaggccctcgatctgttgctgatcctgcatgccgatcatgagcagaactgcagcgcttccaccgtccgtgtggtaggcagcagcatggcaaatgtatacgcttcggtcgcttcaggcatcctagcgctttggggtccgcttcacggtggtgcgaaccaacaggtattgcggatgctggaacagatccatgccgacggagatgacctggacaaatatgtccgcctggcaaaggaccctgattcggattttcgtctgatgggttttgggcatcgtgtctacaagaattttgacccccgtgcgacgatcatcaagggcgcctgcgaccgggtactcaatctcctcggagttgacgatcccctgctcgatcttgcccgtaggctggaggaagttgccctctccgatgaatacttcgtcgagcgaaaactctaccctaacgtcgatttttacagcggcattatctaccgagcaatcggcatcccggagaacatgtttaccgtcatgtttgccctgggaagactgccggggtggattgcccagtggaaagaaatgcatcaggatcccaaaaccaaaatcgcccgtccccgccaaatttataacggtgaaaccgtccgggattatgtcccgatcgaaaaacgtgtcgcagggtaga

SEQ ID NO: 236392 - DNA, 247 bp, Unknown
  Bacterial polypeptide expressing nucleotide sequence isolated from the Sargasso Sea
ctaaaagatgattactttcgagagaagaacttatatcctaatgtggatttctattcagggataatatatcaagcactaggtatccctacatcaatgtttactgttatgttcgcaattggaagaacagtgggttgggtttctcactggagagagatgattacagatcccaattcaaaaatcagtagaccgagacagttgtatacaggcccagaaaaaagaaattatatatcaattgataaacgataaa

SEQ ID NO: 236393 - DNA, 842 bp, Unknown
  Bacterial polypeptide expressing nucleotide sequence isolated from the Sargasso Sea
tgatttagaagtaagtcctgagaaagtcaaaggcaaaaagtacgatgaaaaatatttcttgaatacatctgctgcgcttattggagcattaggctctattgtggctgcttggcataggattcgaaatggagacgaaccaatatcatctaaacctgattgcacttacgcagagaattttttacatatccttggtgctgaaaaaataacaccacttatgacgcgtataatggatgcaacattagttcttcatggtgaacacaccatcaatgcgtccacttttaccgctatggtaacctcctccacacttgctaatgcatctcaggtcgttgcgtctgcgattggttcattatcaggtcctctgcatggcggggctaatgagaaagttattgcaatgttgcaaaaaattcagtctaaagaagaaataagaccatggttagacgagacattaaaagctaaaaatgttgtttggggcatgggacacagagaatactctgtcaaagatcctagagcaaatatcctaactgacatggtacaagaactctttgaagagagagagggtggtgttacagatatatttgaaaaagctattgagttagagaaggcttgtgaggaaaaattatcacataagggagtctatcctaacgttgatttttactcgggaattctctataaggagatggacattccgactgatattttcacaccaatttttgcaatgtcacgtgtatcaggctggctggctcattggatagaacagatacaagacaataagattttcaggcctacgcagaactatgttggctcaaatgatcgagcttatgttgatatcagcgatagatgat

SEQ ID NO: 236394 - DNA, 906 bp, Unknown
  Bacterial polypeptide expressing nucleotide sequence isolated from the Sargasso Sea
aactatctaaaaaaagcagttttttagaaactgcttacctattgatttggggtgaattgcccacagctattcaactaagagattttgaacaagaggttcagatgcatcgtagattaagttttagagtcagagatatgatgaaatgtttccctgcaacaggtcatcctatggatgcacttcaatctagtgcggcttctttggggctcttctattcacgaagagcaatagatgatcctaattacatctacaacgcagtgataagactaatagcaaaaatacctactatgatagctgcgtttcaacttatcagaaaaggacaagacccaattcaacctagagatgatttaacttattcatcaaatttcctttacatgctgactgaaaaagaacaagatcctattgctgcaaaagtttttgataggtgtctaattctacatgccgaacatagtttaaacgcaagtacatttagcgctagagtgactgcaagcactcttacagacccatatgctgttatcgcttcagcagtaggaaccctagctggaccactgcatggaggggcaaatgaggatgtgattgcaatgttagaagagatcaaaactccaaaaaatgctgcttcttttttggataacgcgataagaaataaaagtaagataatgggcttcggtcatagagaatataaagtcaaagatccaagagcaataattcttcaaaaactggcagaagagctttttatcagatttggagcagatgaaatgtatgaagttgctaaatctctagaggcggaggcaataccaagacttggacctaagggtatattccctaacgtggacttttattctggtcttgtttatagaaaacttggtattcctcgtgatctatttactccaaatttttgcaatatctaga

SEQ ID NO: 236395 - DNA, 236 bp, Unknown
  Bacterial polypeptide expressing nucleotide sequence isolated from the Sargasso Sea
aatgcctaaaaatataagaacgtcaaaaaaaaattcagcaaaactagtaattaaaaataaaacttacgaactaccaatttataattctactgagggtgagtcggtaatagatatttcaaaactgcactcacaagcaaaaatatttacttatgatccaggatttacttcaacggcatcgtgtgagtcaaaaattacatttattgatggtgataaaggaattttaagatatcgtggat

SEQ ID NO: 236396 - DNA, 666 bp, Unknown
  Bacterial polypeptide expressing nucleotide sequence isolated from the Sargasso Sea
catgacggacaaaacagccaagctaaccatagatggcaaagaaattgacttgccgatatatgaagcaacgaacggacctgatgttgtagacgtaggtaagctcacaggacagggatatttcacctatgacccaggcttcgtctctaccgcggcttgtgattccgaaatcactttcatcgatggagatcaagggatactgcttcatcgaggctatccaatagagcaactggcggaaaaatctcaacatctcgaattatgctacctgctcttaaatggcgagcttccatctgagtccgagctcaatgaatttatcgcaaacgtaaaatctcgcgcagcagttgactctcaatttaaggagttctttaaaggtttcaaaactaacgctcatccgatggctatcatgtgtggggtgactggagctctcgctgccagctttcacaactctttggatatcgacaacgcggaagatcgaaaagaaacctcacttcagcttatcgccaagatcccaacaatggcggccatgagctataaaaatgcgttgggggaagacttcgttgaaccaagagaggacttgggctacgcagagaatttcttacatatgatgttcgctaagaagggtgaagactataaagtcagccctaccattgcaaaggcgatgggacgcat

SEQ ID NO: 236397 - DNA, 643 bp, Unknown
  Bacterial polypeptide expressing nucleotide sequence isolated from the Sargasso Sea
gaacctgaaggggaattttcaaatcagaatgaaaccgctgatagggtcttggcttctatggcttcaattatcacatactggtacagatattcgcatgaaggggttaaggtagagactgcaacagatcatccaactattggtggccaatttctttctttactgacaggcaatgaaccatctgaagagcattctagagctttagatgtatctcttattctctatgccgaacacggatttaatgcttcaacttttacggctagaacttgcgcgtcgactttatcggacatgcattcttgtattacaggagctataggaactttaagaggccctctgcatggaggtgcaaatgaagcagcaatggaaatgatagaaaaatttagtaacagggaggaggcaaaatctggggttttagatttacttgcaaataaagaaaagataatgggatttggtcatgcagtttacagtaccgaggatcctagaaacgctatcatcaaagaatggtctaagaagttatctgaaatagatggtgatgcaactttatatgaagtttctgatgagatagaaagagttatggatgaagaaaagggcatgtttgcaaatacagatttttttatggcttctgcttaccactatttaggcattc

SEQ ID NO: 236398 - DNA, 412 bp, Unknown
  Bacterial polypeptide expressing nucleotide sequence isolated from the Sargasso Sea
atggttaagaaaaagaaaataaataaaaaaaatataagaaaagccaaactaataatcgacgaaacaacttacgaatttccaatatataactctactgaaggtgaatctgttatagatatctccaaattacatgccgaggcaaatgtatttacatatgatccaggttttacatccactgcctcatgtgagtcaaaaattacatatattgatggaattaaaggtattttaagatacagaggatatgacattgaagaattagcaagaaaaagtgatttcattgaagttgttaacttgcttatttatggcgatctaccaaataaggagcaacttataaaatacaaaagacttattacaagacacacgctccttcatgaacagatcataaacttttttcaaggttcaggagagatgc

SEQ ID NO: 236399 - DNA, 636 bp, Unknown
  Bacterial polypeptide expressing nucleotide sequence isolated from the Sargasso Sea
tatgtcagaaaaaaataataaaatagccaatttaaaacttcctaatggatcaaacattgaatttcctatacactctggaacaattgggcctgacgtaatagatgttaaaaaattatattcagaatctgaccattttacatacgatcctggttttacaagtacaggatcttgcaaatctaaaatcacatatattgatggagaaaaaggagttttactccatagaggatataaaattgaagatttggctgaaaattgcgattttttagaggttgcctatctgttattaaattctgacctacctaacccagaacagaaaaaggtgtttgataataaaattacaacgcatacaatgattcatgaacaattatcaatgttttttagaggtttcagaagagatgcgcacgctatggctgtaatgtgtggagtagttggagcactaagtgcattttatcatgatagtacagacatcacagatcctagtcaaaggctagttgcatctcataggttagtagcaaaaataccaactatagctgctatggcatacaaattttcaataggacaaccatttatataccctagaaatgatttaagttattcagaaaattttttaaatatgatgttttctgttcccgcaga

SEQ ID NO: 236400 - DNA, 643 bp, Unknown
  Bacterial polypeptide expressing nucleotide sequence isolated from the Sargasso Sea
catgatgtttggcaaagttcctaacaaggaaattgtaaaagcttttgatgtatcaatgatactctacgctgaacatagttttaatgtttctacttttactgcaagaactattacaagcagtctttctgatatgcatggggctatcactggtgcaatagcaagccttaaaggtccgttacatggcggagcaaatgaggcggtaatgcatatgtttaaagaaattaacaaaccagaaaaagctcaaacatggataaataatgctctcgacaacaagaaagttgttatgggttttggacatagagtttacagaagtggagattcaagagtaccaacaatgaaaaaatactttttaaaagtcgcagaacttaaaaaaaataaaaaatatcctgaaatttatgagactctcgaaaaagttatgcttgaaagaaaaaatattcacccgaatgtggattatccttgtggtccaacatatcatttaatgggtatagatacagatttttttacgccagtttttgttatggcaagaataactggctggtcagctcatataattgaacaacatgcagctaataaacttatcagacctttgtcgaagtacaagggtagtgaacatagagaagtgttatcattaaatattaggtaa

SEQ ID NO: 236401 - DNA, 433 bp, Unknown
  Bacterial polypeptide expressing nucleotide sequence isolated from the Sargasso Sea
tgacgaatacgtagcaaaagcaaaagataaagcggacccgttccgtcttatgggctttggacaccgtgtttataaaaacttcgatcctcgtgcaacagtaatgcgtcaaacatgtcatgaagtgttagcagagctaaacattcaagatccattacttgatatcgcaatgaaactagagcaaattgcacttgaagacccgtactttgttgagaagaaactttaccctaatgtagatttctactcaggtattatcttaaaagcaatcggcatccctaccagcatgttcactgtaatctttgcaatggcacgtactgtaggttggatctcacactgggacgagatgctttctcaacctggtcataagatcagccgtccacgtcagctttacacaggtgaaacacaccgtgattataaagcaactgacaagcgctaa

SEQ ID NO: 236402 - DNA, 244 bp, Unknown
  Bacterial polypeptide expressing nucleotide sequence isolated from the Sargasso Sea
gatgattattttattaaaaaaaaactttatccaaatgttgatttttactcaggtataattttaaaagcgcttggacttccagaatccatgtttacagttatttttgcagttgctagaactgttgggtggatttcccaatggaaagaaatgataggaatggaaaagtccaagatcagtagaccaagacaactttatactggcaaagcaaaaagagacttcattgatattaatgataggaagtaat

SEQ ID NO: 236403 - DNA, 722 bp, Unknown
  Bacterial polypeptide expressing nucleotide sequence isolated from the Sargasso Sea
aatgagtgaagagattaaaaaaggtttgttaggtatagttgttgatgaaactacaatttcgcatgtagttcctgaactcagcgccttaacttataggggttacaccgttcaagagctttgtgataaatgtgatttcgaagaagttgcatatttagtgctaaacggagagcttcctaacaaaaatcagttgaaaaaatttatcaaacaagaaaggtcagaaagaaaactttctaaacaaatattaaatgatattaaaagaatgccccgaaatgctcatccaatggatgttatcagaacttgtgtaagtttaatggcattagaagacaaagacactaaagataattctccaaaagcaaatatgagaaaggcaatgagaatatttgctaaaacaccaacagctgttgcagcttatttcagatcaagaaaaggaaaatcaattatagctccaagtaaaaaattatctttttcagaaaatttttttaaaatgatgttcaataaagttccagataaagagatcgtaagagcatttgatatttcgttaatattatacgctgagcacagtttcaacgtttcgacattcacagctagaacaataacatctagcttatctgatttacatggtgcaataactggagctatagcctctttaaaaggtcctttacacggaggagcaaatgaagcagtaatgcatatgatgaaagaaatcggaaaacctgaaaaag

SEQ ID NO: 236404 - DNA, 718 bp, Unknown
  Bacterial polypeptide expressing nucleotide sequence isolated from the Sargasso Sea
aatgagtgaagaggtaaaaaaaggtttgttaggaattgtagttgatgagactaccatatcccaagtaatgcctgaaattaactctttaacatatagaggttatactgttcaagaattatgcgataaatgcagttttgaagaagttgcttatttagtgcttaacggagaactaccaaataaaaaacaacttagaaaatttgaaaaagaggaaagatctaatcgtaagctctctaaacaaattttatctgatatttctaaaatgccaaagaaagctcatccaatggatgtgattagaactgctgtcagtttaatgggtttagaagataaagaaacaaaagataattctccaaaagctaacatgagaaaagcaatgagaatatttgcacaggctccaacagctgttgcagctttttttagattaagaaaaggaaaaaaaatcgtaaaacctaaccctagattatcttttgcagaaaattttttaaacatgatgttcaatagaattccaaataaagaaataacaagagcttttgaaatttcactaatattatacgctgaacacagttttaatgtttctactttcactgcaagaacaattacaagtagcctctcagatattcacggcgctataacaggagctatagcaagtttaaaaggacctttgcatggtggtgcaaatgaagcagtaatgcatatgatgaaagagataaaaaaaccagag

SEQ ID NO: 236405 - DNA, 220 bp, Unknown
  Bacterial polypeptide expressing nucleotide sequence isolated from the Sargasso Sea
aaaactttatcccaatgtagatttttattctggaataattttagatgcaatgggtttcccaacctcaatgtttaccccaatatttgcgcttgcaagaaccgttggttggatttcccaatggaaagaaatgatttcagacccctcaaataaaattggcaggccaaggcaactgtatacaggcgttgaataccgagactacgttaaattaaatgagcgttag

SEQ ID NO: 236406 - DNA, 721 bp, Unknown
  Bacterial polypeptide expressing nucleotide sequence isolated from the Sargasso Sea
ttgaaagcaaattcaaataactctgctggtttaagaggtcaggttgctggagaaactgaactttgtactgtaggtcaatctggaactggattaacttacagaggatatgaaattacagacttggctaataatgcagaatttgaggaaatagcttttcttcttttaaaggggcatttgccaaaaagccaagaactaaatagctataagacaaagttaaaaaaactaagagaaattccttcagagcttaaaagtgtattagagcaaataccttctaatagtcatcctatggatgtaatgaggacaggatgttcaatgttagggtgtcttgagacagaagaaagtttttcagaagaagatgacaaaattgatagaatgttagcattattcccatcaataatttcttattggtatagatatagtcatgataaagtaagaattgatactgttacagacgacgatacaataggagcacatttcttaagattactgcatgatgaaaaaccatctgatctttatacaaaggtgatgaatgtatcattaatactatatgcagaacatgaatttaatgcctctacttttgcagctagagtgtgtgcttcaaccttatcagatttacatagttgcattaccgcagcaattggaacattaaggggaccacttcatggaggtgcaaatgaagctgctatggatctaattcaaaaatttaaaagtccaggatgat

SEQ ID NO: 236407 - DNA, 739 bp, Unknown
  Bacterial polypeptide expressing nucleotide sequence isolated from the Sargasso Sea
gctgcgtggcacagaataaggagtgatcaagatcctatttcttcaaacccagaatcaacgtatgcagaaaactttttacttatgttaggcgctgagaagatcacacctcttatgacaagaattatggatgctacattagtgcttcatggagagcatactatcaatgcatcaacttttacggctatggtaacctcatctaccttagcaaatgcatcacaagtggttgcttcagcaattggttcattgtcaggaccacttcatggtggtgctaatgaaaaagtagtatcgatgctttctaagattgatagcaaagatgatatcagaccatggcttgatgatactcttaaagctaaaaatgttgtctggggtatgggacacagagagtactcagtaaaagacccaagggcaaatatcttaacagacatggttcaagaactttttaatgagagagaaggcggggttactgatatcttcgaaaaagcgatagagctggaaaaagcttgcgaagaaaaattagcacacaaaggcgtatatcctaatgtagatttctattctggaattttgtacaaagaaatggatatcccaacagatatctttactcctatttttgcgatgtcacgcgtgtcaggatggctttctcactggatagaacaaatccaagacaataaaatctttagacccactcaaaattatgttggatctgatgaccgcgactacacagatattagcggtagatagt

SEQ ID NO: 236408 - DNA, 401 bp, Unknown
  Bacterial polypeptide expressing nucleotide sequence isolated from the Sargasso Sea
gatggcggataagaaagccacggtccatattgatggtcttgatccaatcgaacttccaatttaccaaggcactgctggccaagacgtaatcgacgtacgtacgttaggttcacacggtcacttcacttacgacccaggtttcatgtcgaccggttcttgtgaatcttcaatcacttacatcgatggcggcaaaggtgttctattgcaccgtggttacccaatcgagcaattagctgatgaatcaaactacatcgagctttgctacttactattaaacggcgaattaccgactaaagaacaatacgaagcgtttgctcaagaaatcacgcacaacacaatgcttgatactaaaatcgcaaacttcttccaaggtttccgctttgacgctcacccaatggcaa

SEQ ID NO: 236409 - DNA, 599 bp, Unknown
  Bacterial polypeptide expressing nucleotide sequence isolated from the Sargasso Sea
aaactgtagtgcttcaaccgtaagggtagtagggagcagcatggcgaatgtttatgcatcagttgcatctggaattttagctttatggggccctcttcatggtggagctaatcaacaggctgtacaaatgcttcaacaaatttatgaagacggatctaatatttcaaaatacattgagttagccaaaaataaaaaaaataagtttcgtttgatgggttttggtcaccgagtttataaaaattttgaccctcgtgctagaataataaaaaaagtttgtcacaaattgcttaataaattgggtgtgaaagatccactgttacagattgcgcttgacctagaaaatgcaacacttgaagatgaatattttattgaaaaaaaactatatccaactttagatttttataccggaatcatgtatcgcgcaataggaattcctcttaacatgtttactgttatgtttgcattgggaagggtaccaggttggattgcccaatggaaggagatgcatgaagacaaaacacagaaaattgcacgtccacgtcagttatttattggtccgaacaagcgaaaatataagaatattaatgagcgcagttaat

SEQ ID NO: 236410 - DNA, 386 bp, Unknown
  Bacterial polypeptide expressing nucleotide sequence isolated from the Sargasso Sea
aatggctgacacaccaacgaaatcggcgaccctaaaaatcgacggcgaagacaacgctatagaactacccatttactccggcaatctcggcccagatgtcgtcgacgtgggaaaacttacgggacaggggtatttcacatacgatcctggatttgtttccacggcttcttgtgattctgaaatcaccttcattgacggagacaacggcgtgctcctacatcgcgggtatcccattgagcagctggctgaaaaatctagctacttagaattgtgctacttgttattaaacggggagctgccgagcaaagaagagggtgaagcgttcgttgacactatcaagcatcacaccatggttaatgaaacacttcggcaatttttatgggctt

SEQ ID NO: 236411 - DNA, 550 bp, Unknown
  Bacterial polypeptide expressing nucleotide sequence isolated from the Sargasso Sea
tttacagctagaactattactagtagtttatctgatatgcatggagcgattactggggctattgcaagtttaaaaggaccattacatggaggtgctaatgaagcagtaatgcatatgtttaaagaaattaaaactcctgaaaaagcaaaagattggataaataatgctcttgataaaaaaaaggttgttatggggtttggtcacagggtctacagaagtggcgactctagagttcccacaatgaaaagatattttttaaaagttgctgaaatcatgaaaaacaataaataccccaaaatttatgaaacattagaaaaaattatgctcgaaagaaaaaatatccatccaaatgttgattatccctgtgggccaacatatcatttaatgggtattgatactgatttttttacccctgtttttgtaatggcaagaataactggttggtccgctcatataatggaacaacatacagcaaataaacttataagaccgctatcaaagtataaggggagtgagcacagagaagttttggcattaaatataagatgat

SEQ ID NO: 236412 - DNA, 787 bp, Unknown
  Bacterial polypeptide expressing nucleotide sequence isolated from the Sargasso Sea
atgacagaggatattaaaaaaggacttttaggtattgtagtagatgaaactactatctctcacgttgttccagaattaagtgcacttacttatcgaggatataaagtgcaagatctttgcgataagtgtgaatttgaagaagtggcctacttagtactccatggagaacttccaagtaaaaaacaattaaaaaaatttacaaagcaagaaagatcagaaagaaaactttcaaatagtattttaaaagatattaaaagaatgccaaaaaatgcacatccgatggatgtaattagaacatgtgtaagtttaatggctttagaagacaaagatactaaggataactcgcctaaagcaaatatgagaaaagcaatgaggatttttgctaaaactccaacagcagttgctgcttactttagagtcagaaagggaaaaaaaataatatctccagataagaaattgtcattttctgaaaatttttttaaaatgatgtttaataaggttccagataaagaaattgtaagagcttttgatatttctttgattttatatgcagaacacagttttaacgtttctacttttacagccagaacaataacaagtagtttgtcagatttacatggagctatcactggtgctattgcttcacttaaaggtcctttgcatggtggggcaaatgaagcagtgatgcacatgatgaaagaaattggaaagccagaaaaagcaaaaagttggatagagaatgctttgtctaaaaagaaagttgtaatggggtttggccatagggtta

SEQ ID NO: 236413 - DNA, 826 bp, Unknown
  Bacterial polypeptide expressing nucleotide sequence isolated from the Sargasso Sea
gatgtatggagctttaccaaatcaaaatgaatttaatgaatattcaaataaattaatttctatgcgagctttgcccgaatctttgatagaggttttagagcgaattcctgcagaagctcacccgatggatgttatgagaaccggttgttctatgttaggtaatatagaaccggagggtgattttagtaatcaacaagaatccgctgatcgaatattagcgacaatggcatctgtaattgtttattggtacaagtattctcatgaaggagtaaaagttaacacagaaactgataatcctaccattggcggtcattttttatctcttcttcatggcaaggaagtaggtgaagatcaaattagatgcctagacacatctttaattttgtacgcagagcatggttttaatgcctctaccttcacggcaagaacttgcgcttcaactttatctgatattcactcttgcataacaggcgcgataggaacattaagaggtcctttacatggcggagcaaatgaggcggcaatggagctcatagagaaattttcatctactgaagaagcaaagttagcagtgttaaaaatgttagagaataaagaaaaaattatgggtttcggacacgcggtttacagtaccgaagatccaagaaatgcaattataaaaaaatggtctgaaaagcttagtaaagataatggagacgaaaccctttaccttgtttctgctgaaatagaaaaaacaatggacgaagagaaaaatatgttcgccaacacagacttttttatggcgtctgcttattcatatcttggcatcccaaccaaattatttact

SEQ ID NO: 236414 - DNA, 752 bp, Unknown
  Bacterial polypeptide expressing nucleotide sequence isolated from the Sargasso Sea
gccagtcattgtcggaagtgagggtgaaaaagcacttgatatctctcgtttacgatctggcaccagctatatcacgcttgatgagggattcgtaaacactgggtcgacaacaagtggaatcacatttttagatggagaaaaaggtattctccgctatcgcggatacccaattgaagaccttgcagcacgttgtgattttattgaagttgcctacctcttgatttacggggaactcccaacagaggacgaactcactacgttccgcaattctctatcaaaccactcaatgatccacgaggatatgcgtagcttttacagcggcttcccgcgtgatgctcaccctatggccattgtggggagtgttgttggtgctctttcgacattttatcaagactcgttggatgttcgggatccgaagcaagttgaagtaagtgttcatcgtcttcttgcaaaacttccgacaattgcagcatacagctacaaaaaatcaattggccagcctcttatatacccacggaatgatagatcgtattgtgagaactttctgaagatgatgttcgccgtaccttgcgaagaatatgagattgatcccgactttgccgaggcgctcgatatgctcctgattgttcatgctgaccacgaacagaattgttcaacgtcaacagttcgcatggttggatcaagtgacgcaaatctttttgctagtatttctgcaggtgtctccgccctttggggcccactacatggcggcg

SEQ ID NO: 236415 - DNA, 334 bp, Unknown
  Bacterial polypeptide expressing nucleotide sequence isolated from the Sargasso Sea
atgaaaaataaaaattttgcgaagctttcaataaataataaaacttataatctgccaatatataaagcctctgagggtaactccgttatcgatattgcaaaactttttgctgagagtggtcattttacttacgatcctggatttacttcaaccgcttcttgccaatcaaagataacctacattgatggtgacaagggaattttaagatatagaggttatgacattgaagatcttgcgaagaacagtgatttcattgaagttacaaatttacttatctacggagatcttccaaacaaaaaacaattaaacaagtattataaactcgatatctaac

SEQ ID NO: 236416 - DNA, 538 bp, Unknown
  Bacterial polypeptide expressing nucleotide sequence isolated from the Sargasso Sea
ttgttagaaaaaccacaaaagtatgccgagctcaaaatagatgaaaagagtataaaagtaccagtaagcaaaggtactttggggcctgatgttttagacataagaactttatacaaggaaacgggattattcacctatgatcctggcttcacttcaacagcctcttgcgacagtaacataacttttatagatggagacaagggtgaattactctatagagggtacccgatagaagaactagcagaaaaatctacgtttttagaagtttcttacctgttactgcgcggtgaattaccagacaaatcacaatatgatgacttttgtagcagggttacccgacatacaatgttacatgagcagatgctgaattttttcagaggattcagaagagatgcgcacccaatggcaatcgtttgcggcgtacaggccgccatgtctgcgttttaccatgacagtaccgacattaatgatccatggcaacgagaagtggcaactattagaatgatagcaaagctacctacaattgttgcggggctta

SEQ ID NO: 236417 - DNA, 784 bp, Unknown
  Bacterial polypeptide expressing nucleotide sequence isolated from the Sargasso Sea
aataaaaaccaattatcagaatttaaaaagaatgaaagaaataatagagagatttcagataatttaaaatcaattattaaaaactatccaaaaaaagctcatccaatggatactaccagaacatctatcagccacatgggactagaagatccagatgcatcggataattcaaaagaagctaatatgagaaaatcattaagattacttgcaaaaatctctactgctgtagctgcaaactttagagtaagaaaaggacaagatattattgaacctaacaatgatttagatttttgcgaaaatttttttcatatgtgttttggaaaagtccccagtaaagaagttgtcaaagcatttgatgcatccatgacattatatgctgaacatagttttaatgcatcgacatttacttcaagagtaattactagcagcttgtcagatatgcatggagcagtaactggagcagtagctagtttaaaagggccattgcatggaggtgcaaacgaagcagtcgcacatatgctgaatgaagtgggttcttcagataaagctgaggagtttattttaaacaaaattaaaaacaaagagctaatcatggggtttggtcatagggtttatcgtaatggtgactcaagggttcctacaatgactgaatacttccataaaacagctaaatattataaaaattctaaattacccaagatttcaaaaattcttgaagatacaatgctaagagaaaagaatattaaaccaaatttagactttccagcaggtcccacctatcttt

SEQ ID NO: 236418 - DNA, 598 bp, Unknown
  Bacterial polypeptide expressing nucleotide sequence isolated from the Sargasso Sea
attctacatgccgaacatagtttaaacgcaagtacatttagcgccagggtgactgcaagcactcttacagacccatatgctgtcatagcctctgcagtaggaacacttgccggccctctgcatggaggagcaaatgaggatgtgattgcaatgttagaggagattaaaaccccagaaaatgctgggtcttttttagataaagcgataaaaaataaaagcaagataatgggcttcggccacagagaatataaagtcaaagatccaagagcaataattcttcaaaaactggcagaagagctttttattagatttggagcagatgaaatgtatgaagttgctaaaacacttgaggcagaggcaataccaagacttggacctaagggtatatttcctaacgtggacttttattctggtcttgtttatagaaaacttggtattccacgtgatttatttactccaatttttgcaatatctagagtggctggttggttagctcattggagagagcaacttggagcaaatagaattttcagaccatcgcaaatatacacaggttcagcaccaagagcttggatcagcctagaaaacagagaataat

SEQ ID NO: 236419 - DNA, 724 bp, Unknown
  Bacterial polypeptide expressing nucleotide sequence isolated from the Sargasso Sea
aatgagtgaagaaattaaaaaaggtttattagggatagttgttgatgaaacaacaatatctcacgttgtaccagaactaagtaccctaacctatagaggttacacggtacaagaactttgtgataaatgtgattttgaggaagtggcatatttagtgctacatggcgaattgccaaataaaaaacagcttaaaaaatttattagagaggaaagatctgaaagaaggctttcaagacaaattttaaaagacattcaaaaaatgccaaaaaacgcacatcctatggatgtgataaggacatgtgttagcttaatggccttggaagacaaagatacaaaagacaattcacctaaagcaaatatgcgtaaagcaatgaaaatttttgccaaaactcctactgcagtcgctgcttattttagagtgcgaaaaggaaaaagaataatctcgcctaacaaaaaattatctttttcagaaaatttttttaaaatgatgtttaataaagtgcctgacaaggaaatagtaagagcttttgatatatctttaatattatatgcagagcatagtttcaatgtttcaacttttaccgcaaggactattacaagtagtttatcggatttacatggagctattacaggtgctattgcatctttaaagggtccattgcatggtggcgctaatgaagcagtaatggatatgatgaaagaaatcggaaaaccagaaaaggct

SEQ ID NO: 236420 - DNA, 913 bp, Unknown
  Bacterial polypeptide expressing nucleotide sequence isolated from the Sargasso Sea
tttaaaaggcgagttaccgaacgaagctgaactggctgcgtacaaaaaacgtttaaaagctatgcgtaacctgccacaggcactcaaagaagtgttggaacgtattcctgcttctgctcatcctatggatgtaatgcgcacgggttgctctatgttaggcaacttagaaactgaacagagttttgctcagcaacaggatgcgaccgaccggttactggcgattttccctggcttaattaactactggtataacttcagccataaaggccagcgcattgaggtggaaacagcggccgattctattgccgagcagttcctctggactttacatggtgaaaaaccaactcagctgcatacagatgtaatgaactcgtcgctgattttatacgcagagcatgagtttaatgcgtctaccttcactgcccgtgtttgtgcatcgaccttaagtgatatgcactcgtgtatcactggcgctattggttcattacgtggccctctgcatggtggcgccaacgaagcggcgatggaactgattgaaaagatggataatccggatgatgccgaaaccaagttaatgggcatgctggaacggaaagaaaaaatcatggggtttggccatgccatttatgccgagtctgacccacgtaatgctgtgatcaaagaatggtcagaaaagctgggtaaagctaacggcaatacctccttgtacgatatttctgtgcgctgtgaagcggtaatgtggcgtgagaaaaaactgttctgtaacgccgatttcttccacgcttcggcttacaactacatgggtattccaaccaagctgtttacgcctatttttgtatgttcacgtttaacaggttgggccgctcatgtgatggagcaacgggcggacaaccgtattattcgtccaagcgcc

SEQ ID NO: 236421 - DNA, 769 bp, Unknown
  Bacterial polypeptide expressing nucleotide sequence isolated from the Sargasso Sea
tatgagaaaaactataagaatatttgcaaaaacaccaactgctctagctgctttctttagaacaagaaaaggtaaaaatgtaatacctccaaaaaaaggtttgggtttttctgaaaactttttttatatgtgctttggtaaagttcctagtaaagaaattattaaagcctttgatgtttctttaattttatatgcagaacatagtttcaatgtttcaacttttacggccagaacaattacaagtagcttgtcagacatgcatagcgcaattactggagcaataggaagtttaaaaggtcctctacatgggggagctaacgaagcggtaatgcatatgatgaataaaattaataaacctgaaaatgctttgaaatggataaataatgctctcgataaaaaagaagtaataatgggttttggtcatagagtttataaaaaaggtgattcaagagtacctactatggaaaaatatttcataaaagtttctaaaataaaaaatgataaaaaatttcttaaaatttacgatacagtaaaaaacgtaatgattgatagaaaagatatacatccaaatgttgattttcctactggccccacttatcatttgatgggatttgatacagacttcttcaccccaatattcgttatctcacgaataacgggttggtcggctcacattatggaacaacatgcggccaataaattaattagacctttatctaaatacagtggagagaagcaccgtaaagtaatgcttctcaaccaaagataa

SEQ ID NO: 236422 - DNA, 299 bp, Unknown
  Bacterial polypeptide expressing nucleotide sequence isolated from the Sargasso Sea
catgctaaaaaagaaaaattcaaaaaaaaataaaaaaattgcaaaaattattataggcaaagatacatatgatttacctatatatgaatcaactataggtgaaaatgtaatagatatctctaagcttcactcacttgctaatcactttacttatgaccctggatttacttctactgcttcctgtgagtcaaaaatcacctatattgatggtaagaatggaatattaaggtatcgaggctatgatattgaggaattagctaaaaaaagtgattttatagaagttgcaaatttactaattt

SEQ ID NO: 236423 - DNA, 829 bp, Unknown
  Bacterial polypeptide expressing nucleotide sequence isolated from the Sargasso Sea
atggctgaaaagaaattagaaggtgcagggttaagaggtcaggtagctggacaaaccgctttatcaactgtaggaaaaactggtaaaggtttgacatatagaggctttgctattgaagaattagctgaaaaagcaaccttcgaagaggtagctttcatgctgctttatggatatttgcctaatcaagaagaatttaattcttattcaaataaattaaaaagacatagagaactaccaaaagaattaatagaagtattggaaaggataccatcctctactcatccaatggatgtcatgcgaacgggttgctctatgctaggtaatctagagcctgaaggagacttttcaaatcagaatgaaacagctgataggattttagctgctatgacttccataatcacttattggtatagatattctcatgatggagttaaggtcgatactgccactgatcatgaaacaattggtggtcaatttctatctttattaacaggcaaagagccgtcagaagagcattctagagcacttgatgtttcactgattctttatgcggagcatggatttaatgcttctacttttacagctaggacttgtgcttcaactttatcagatatgcattcttgtattactggagcaataggtactttgagaggccctcttcatggtggagctaatgaagctgctatggacatgatagaaaaattctccactagagaagacgctaaacaaggagtgctagaccttttggcaaagaaagaaaaaatcatgggttttggacacgctgtttatagtaatgaagaccccagaaatgccattataaaaaaatggt

SEQ ID NO: 236424 - DNA, 945 bp, Unknown
  Bacterial polypeptide expressing nucleotide sequence isolated from the Sargasso Sea
gaagagcttgaaggagctggattaagaggtcaagtagcaggagaaactgcactttcaaccgtaggtaaagagggcaaaggcctgacttacagaggttacgcaattgaagatttagcggagaaagcaacttttgaagaagttgcctatatgcttctttatggaaaattacctaatcaagatgaatacgactcttatacctctaagcttagaaattatagagatttaccaagagagctaaaaaatgtcttaacggcaataccaaaagaaactcatccaatggatgtgctacgaactgggacttctatgttaggaaatcttgagccagaaggagattttactaatcaaaatgatacagctgatagaattcttgctgccatgccttcaataatgacatattggtatagagcatctcattttggtgaagatatagatactctaacagatcataaaactatgggcggacagtttttaagtttacttacaggaagtgagccaagtgacgaacatattagagcacttgatacttctcttatttgctacgcagaacatggctttaatgcatcgacatttacagctagaacatgcgcatcaactctatctgacatgcactcgtgtatcactgctgcaataggaacattaagaggtccactgcatggcggagctaatgaagcagctatggaaatgatagaaagattttcttcaagggaagatgctaatgttggtgtaaagaatatgcttgcaaacaaggaaaagattatgggttttggtcatgcagtttattcagatgaggatcccagaaacaagattgtaaaagcttgggcaaagaaacttagctcaaatgcatcaaaccctgttatttatgaggtttctgaagaaattgaaaaggtaatgagtgaagaaaaaatctctttgcaatacagatttttatatggcatctgcatataa

SEQ ID NO: 236425 - DNA, 915 bp, Unknown
  Bacterial polypeptide expressing nucleotide sequence isolated from the Sargasso Sea
attaagttaggaaatgaaatgggtgagagaaaattagaaggagcaggtctaagagggcaggtagctggaaacactgctttatcaacagtaggaaaaaccggtaaaggtttaacttaccgtggctatgcgattgaagaattagctgagaaagctacatttgaagaagttgcgtacatgctgttgtatggaaaattaccaacacaatccgattacgatgagtattcttctaaactgcaaacatatagatccctacctaaggaacttaaagaagttttagaaagaattcctcaagatacacatcctatggacgttatgagaaccggttgttctatgttaggaaacctagaacctgaaggagatttttctaaccaaaatgagacagctgacagaatcttagcttccatgacttcaattattacttactggtataggtattctcatgaaggagttaaagttgagactgcaacagatcacccaactattggaggtcagtttttatctttactcacaggcagtgagccatctgaagagcattccagggctttagatgtgtcgcttattttgtacgccgaacatggatttaatgcttcaacttttacagcaagaacatgcgcttctactttatcggatatgcactcttgcattacaggtgctataggaactttgagaggccctttgcacggaggagcaaatgaagcagcaatggaaatgatagagaaatttagtaccagggaagaggctaagtctggagttttggaattactagcaaataaagaaaagatcatgggttttggccatgctgtttacagtaatgaagatccaaggaatgccattattaaagagtggtctcataagctttcagggttaaatggagacgccactttatatgaagtttcagatgaaatagaaagagtc

SEQ ID NO: 236426 - DNA, 700 bp, Unknown
  Bacterial polypeptide expressing nucleotide sequence isolated from the Sargasso Sea
gggtgtgcgcatagataccgcaactgacgagccgtctttagccgcgcactttttgcgcaccctcagtggcgagtcacccaatgagttgcatcagcaggtaatggatacgtcgttgattctttatgctgagcacgaatttaatgcttcgacctttactgcacgcgtatgcgcgtcgaccctatcagatatgcattcatgcgtaacgggcgccattggttcgctgcgcgggccgctgcacggtggtgcgaacgaagcagctatggagctaattgagaagttcgccacgccggatgcggccactgaaggcgtgcgcggcatgttagagcgcaaagacaagataatgggctttggccatgccatctatcgcaccagcgatccgcgtaatgtgatcattaagcagtgggcagaaaagcttgctgatgatgttggtgataagattctgtatccggtgtcctgtgccattgagaagttgatgtgggacgaaaaggaactgtttgcgaatgcagactttttccatgcttcggcctataactccatgggcattcctacgaagctgttcacgccgatattcgtctgttcaagagtcgctggttggactgcacacgtgatggaacaacgggaaaataaccggattattcgtcctagcgcagactatgtaggtccagagccgcgtaaggttgaaccgatcgcagaacgctag

SEQ ID NO: 236427 - DNA, 220 bp, Unknown
  Bacterial polypeptide expressing nucleotide sequence isolated from the Sargasso Sea
tgaatattttatagaaaaaaagttatatcctaatgttgatttttactctggtataatatacagagcccttggtattccaactgaaatgtttactgttatgtttgccttaggtagaattcctggttggattgctcaatggaaagaaatgagagattcaaataatccaataggaagaccaagacaaatttataacgggcctacacatagaactatatcataa

SEQ ID NO: 236428 - DNA, 223 bp, Unknown
  Bacterial polypeptide expressing nucleotide sequence isolated from the Sargasso Sea
atgacggacaaaacagccaagctaaccatagatggcaaagacattgacttgccgatatatgaggcaacgaacggacctgatgttgtagacgtaggtaagctcacaggacagggatatttcacctatgacccaggcttcgtctccactgctgcttgcgactccgaaatcactttcatagatggagatcaaggaatactgcttcatcgaggatacccaatagagc

SEQ ID NO: 236429 - DNA, 703 bp, Unknown
  Bacterial polypeptide expressing nucleotide sequence isolated from the Sargasso Sea
aaaggaaaaaaaatcattcaaccaaacaaaaagttatcttattcggaaaacttttttaatatgatgtttggtaaagttcctaacaaagaaattgttaaagcttttgatgtttcgatgattttatatgctgagcatagttttaatgtttctactttcactgcaagaacaattacaagcagtctttctgatatgcatggtgcaatcacaggagctatcgcaagccttaaaggacctttgcacggaggagctaatgaggcagtgatgtatatgtttaaagatattaaaaaacctgaaaaagctgagtcttggataaataatgcgcttgataagaaaaaagtagttatgggtttcggtcatagagtttacagaagtggtgactctagggttccaactatgaaaaaatattttttaaaagttgccgagataaagaataatacaagttttccaaaaatatatgcgacgttggaaagaataatgcttgaaaggaaaaatatacaccctaatgtagattacccatgtggacctacttaccacttaatgggaattgatacagatttttttactccgatatttgttatggctagaataactggttggtcagctcatataattgaacagcatgccgctaataaacttattagacctttgtcgaaatacaagggcagtgaacacagagaggtgttgtctctaaatattagataat

SEQ ID NO: 236430 - DNA, 400 bp, Unknown
  Bacterial polypeptide expressing nucleotide sequence isolated from the Sargasso Sea
cccttttcgattgatgggattcggccatcgtgtttataaacattatgacccacgagcaaaaatcattagaaaaatgtgtcataaagttctcaatcaaaaaggtagtgcagattcaccattacttgaattggctatagaattagaagagattgctctaaaagatgattattttcgagagaagaacttatatcctaatgtggatttctattcagggataatatatcaagcacttggtatccccacatcaatgtttactgttatgtttgcaattggaagaacagtgggctgggtttctcactggagagagatgattacagatcccaattcaaaaatcagtagaccgagacagttgtatacaggtccagagaaaagaaattatatctcaattgataagcgataa

SEQ ID NO: 236431 - DNA, 376 bp, Unknown
  Bacterial polypeptide expressing nucleotide sequence isolated from the Sargasso Sea
aatgaataaaaaatctacagttaccatcggcgataacatttatgatttaccacttattgatggtacaataggaccctctgttatagatgtttcaaaattatacggggactcaaattatttcacatatgatccaggatttacttcaacagcaagttgcaaatctagcatcacttatattgatggagataaaggggaatgcttttatagaggatatccaatggatgtacttgccgaagaaagtaactttttagaaattgtttatttattatggcaagaagaactacctgacaaaaagcaatggagtgaattttctgaagcaattaaaaatcacacaatggttcacgaacaatttaaaaatttttttaatggtttagaa

SEQ ID NO: 236432 - DNA, 694 bp, Unknown
  Bacterial polypeptide expressing nucleotide sequence isolated from the Sargasso Sea
ttgaaaaaaaaaaataatagaaaagccaaactaataatcgataacacaacttacgaatttccaatatacaactctactgaaggcgaagctgtaatagatatctcaaagttacatgctgaggcaaatatatttacgtatgatccaggttttacatctactgcctcatgtgagtcaaaaattacctatattgatggagataatggtattcttagatataggggatatgatatcgcagaattagcaaaaaaaagtgatttcattgaagttgttaacttgctaatatatggagatcttccaaataaagttcaacttgctaaatacaaaagacttatcacaagacacactttgcttcatgagcagatcataaacttttttcaaggatttagaagagatgcacatcctatggcaatgatggttggggttatgggtgctttatcctccttttatcaagatacattaaacattaatgactctcatcaaaggcaagaagctacaaggagaattattgcaaaatctgctacaattggtgcaatggcatataaatattcattgggacaagcctttgtttccccaaagaataacctttcattttcagaaaattttttatacatgtgctttagcaacactgcagaaacatacgaagtatctccagttattgcaaaggcaatggatacaattttaattcttcatgctg

SEQ ID NO: 236433 - DNA, 685 bp, Unknown
  Bacterial polypeptide expressing nucleotide sequence isolated from the Sargasso Sea
gatttatcttactcatcaaattttctttatatgcttactgaaaaagagcaggatccaatagcagcaaaagtttttgacagatgcttaatccttcatgcggaacatagcttaaatgcgagtaccttcagtgcgagagttactgcaagcacactcacagacccatatgcggttattgcatctgctgttggaacactagctggtcctcttcatggaggagctaatgaagatgtaattgcaatgttagaggaaatcaaaacaccggaaaatgcaggttcttttcttgataatgcaattcaaagcaagagtaaaatcatggggttcggtcacagagagtacaaagttaaagatcctcgagcaattattcttcaaaaactagcagaagatctttttgtcaaatttggtaaagacgaaatgtatgaagttgctaaaaaagtagaattagaggctataccaaggctgggaccgaaaggtatttttcctaatgttgatttctactccggtcttgtttacagaaaacttggaataccgcgtgacttatttactcctatttttgcaatatcaagagttgctggttggttagcacattggagagaacaattaggagcaaatagaatttttagaccatcacaaatttatactggctcgactccaagagattggattactttagaaactcgaaaataat

SEQ ID NO: 236434 - DNA, 637 bp, Unknown
  Bacterial polypeptide expressing nucleotide sequence isolated from the Sargasso Sea
atgcctagaaaaaaatctttaaaaaaattcaaaactgctaaattaatatacaataacaatacatacgaatttccagtatatgattcaactgaaggtgaagccgttatagatatttctaaacttcactcaaaagcaaatatctttacttacgaccccggatttacttccacagcatcgtgtgagtcgaaaataacatttattgatggtgacaaaggtattttaagatatagaggctatgatattgaagagctcgcaaaaaaaagcgactttatcgaagttgttaatcttttaatctatggcgacttacctaataaacgccaattaacaaaatataaaaacctaatatctagacatactttactccatgaacagataattaatttctttcaaggatttagacgcgacgcacatcctatggcaatgatggtaggtgtaatgggtgcattatcgtcgttttatcaagatagccttgacataaatgactctcatcaaagacaagaggctactagaagaattgttgctaaatctgcaactattggtgcaatgtcctataaatattcaataggtcaatcatttgtttctccaaaaaataatctctcattttctgaaaacttcttacatatgtgcttagcaatac

SEQ ID NO: 236435 - DNA, 757 bp, Unknown
  Bacterial polypeptide expressing nucleotide sequence isolated from the Sargasso Sea
tatgagcgaagatattaaaaaaggtctattaggaatagtagtagatgaaacaacaatttctcaagtaatgcctgatataaattctcttacgtatagaggatatgcagtgcaagacctttgtgaaaaatgcagttttgaggaagttgcctatctaatattaaataaagaattaccaactaaagctcaacttacaaaatttaaaaaagaattggagttaaatagaaatataacaattaaccttagggaaattgtaaaacatatgcctaaaaagtcccatccaatggatgttgcaagaactgttgttagcgtgatgggtttagaggataaagatacaagtaacaactctccaacatcaaatatgcgtaaagcaataagaatatttgcaaaaacaccaactgctatggctgctttttttagagcaagaaaaggtaaaaatgtaatatcaccaaaaaaaggtttgggattttctgaaaattttttttatatgtgttttggaaaaatacctaataaagaaattatcaaagcgtttgatgtttctttaattttgtatgcagaacacagttttaatgtatcaacttttactgcaagaacaattacaagtagtttgtcagatatccatagtgctattactggtgcaataggcagtttaaaaggacctctacatggtggcgcgaacgaggcggtaatgcatattatatataaaattaaaaaacctgaaaatgctttaaaatggattaataatgcgcttgataaaaaa

SEQ ID NO: 236436 - DNA, 757 bp, Unknown
  Bacterial polypeptide expressing nucleotide sequence isolated from the Sargasso Sea
aatgagaatatttgctaaaacacctactgctgtagctgcttatttcagaacacgaaaaggaaagtcaatcatagctccaagtaagaaattatctttttcagaaaacttctttaaaatgatgtttaataaagttcctgataaagaaattgtaagagcatttgatatttctttaattttgtacgctgaacacagtttcaacgtttcgacattcacagctagaacaattacatccagcttgtctgatttacatggtgcaataactggagctatagcttctttaaaaggtccattacatggtggagctaatgaagcagtgatgcatatgatgaaagaaattgggaaacctgaaagagcaaaagcttggattgaaaatgcactaaacaaaaaaaaagttgttatgggatttggtcatagagtctaccgtacgggagactctagagttccaacaatgaaacattacatgtttaaagttgcgaagcttttgaaaaaagaaaaatatacaagaatgtatgagattttagaaaaggtaatgttggaccgaaaaaatattcatccgaacgtagattttccatgtggtccaacttattacatgatgggaattgatatagacttctatacgccaatatttgttatgtcacgtatcacgggttggtctgcgcatataatggaacagcatgcttccaataaactaattagacctttatctaaatatagaggggcagaagtaagagaagttatgcttttgaatcaaagataa

SEQ ID NO: 236437 - DNA, 466 bp, Unknown
  Bacterial polypeptide expressing nucleotide sequence isolated from the Sargasso Sea
tatgactaaagaagaaaataaaaaaaaaccatttacattatttaataatgaaacaggtcaatctattgaattgccagtacttgtgggcacagagggaccagatgttctagatataagaaatctttacaaagatactggattatttacttatgacccaggatatacttctactgcttcatgtaattcagcaattacttttattgatggaaataagggaattcttcgtcatagaggttatgacataaaagatttagcaaataaaagtgattttttagaagtttgttacttattacttcatggagatctgccctctcctgaagataaacaaaaatttgaaaatgtaatacaaagacatacaatggtgcatgagcaattggtaaatttatatagaggttttagaagagatgcccatccaatggctataatggggtggtgttgtgggtgcattatcagctttttatcatga

SEQ ID NO: 236438 - DNA, 395 bp, Unknown
  Bacterial polypeptide expressing nucleotide sequence isolated from the Sargasso Sea
tagattgatgggttttggtcatagagtttataaaaattttgacccaagagcgaaggtaatgcaaaaaatatgtcatgaagttttagatcacttaggaataaaggatgatcctttgctggctatagcggtagagcttgaaaaaattgcgcttgaagatgagtattttgtagaaaaaaagctttatccaaatatagacttttactcaggcatcgtcatgaaatctctaggttatccaatggatatgtttacagtgctgtttgctgttggaagaactgttgggtgggtttctcagtggaatgaaatgatagaagatacaagtcaaagaattggtcgacctcgtcaattatatgttggaagtgattatagacagtatgttggaatacacaaaagataat

SEQ ID NO: 236439 - DNA, 871 bp, Unknown
  Bacterial polypeptide expressing nucleotide sequence isolated from the Sargasso Sea
cttccaagatcaaaagaattaaaaaaatttattaatgaagaaagaagtaatcgtaaattatctaaacaaattttaaatgatataaaaaatatgccaaagaatgcacatccaatggatgcgataagatctgcagttagtttgatgggtcttgaagacaaagacgcgagtgacaattctccaaaagcaaatatgagaaaagcgatgagaattttcgcacaaacacctacagctgttgctgcttattttagggcaagaaaaggtaaaaaatttatacctcctaataaaaaattatcgtattcagaaaatttcttccatatgatgtttggtaaagttccaaagaaagaaatagtagaagcttttgacgtttcaatgatactttacgcagaacatagttttaatgtttctacttttactgccagaacaataacaagtagcttatcagatatgcatggtgcaataactggagcgatcgctagtcttaagggaccattacatgggggtgctaatgaggctgtaatgcatatgtttaaagaaattaagttgcctcagaaagcaaagtcttggattaataacgcactcgacaagaaaaaagttgttatgggttttggtcacagagtctatagaagcggtgactctagagttccaactatgaagaaatattttttaaaagtagctgaattaatgaaaaatactaaatatcctgaaatgtataatactttagaaaaagttatgcttgaaagaaaaaatattcatcctaatgttgattatccatgtgggccaacataccatttgatgggaatagatacagatttttttacacctgtttttgtaatggctagaattaccggatggtctgctcatatcatgaaca

SEQ ID NO: 236440 - DNA, 513 bp, Unknown
  Bacterial polypeptide expressing nucleotide sequence isolated from the Sargasso Sea
tatgaacgagaagactttcaaaataaccaatcaagagtctgggaaagatctcggactagaacgcaaagacgctgtattaggtccaagtgttgttgatataaccgcgttatatcgggaacaaggtgtattcacttatgaccctggcttcggtgcaacagcctgctgttctagcaccattacttatattgatggtgagcagggtgtgctcatgtatcggggctatccaattgaacaattagcagcacactcgacatatatcgaggttgcatatttgctcatgtatggagaacttcctacacaagaagaattaacaggattcgatcagtccatccgtaaccacaccatgttaaatgaatcatttcttcgattctttaatggctttgatcatgatgctcatccaatggctatggtatctggaatcgttgcttgtatgtcagcgttctaccatgactcaacagatattcaagatgcagcccatagagatgtatttgctcatcgtatcattgcaaaaat

SEQ ID NO: 236441 - DNA, 970 bp, Unknown
  Bacterial polypeptide expressing nucleotide sequence isolated from the Sargasso Sea
acagttcaagatttatgtgcaaaatgtaaatttgaagaagttgcttatctattacttaatgatgacttgccaaataaagaacagcttgaacaatttgaaaaagaggagagattaaatagaccgatatcagatagtttaaaatcaattataaaaaattatccaaaaaactcccatccaatggatacaactagaacatctgtaagccatatgggtttagaagacccggatgcagcagataattcaaaagaagccaacatgagaaaggcaatgagacttctagctaaaatttccactgcagttgcggctgatttcagagtaagaaaaggagaaaaaattatagatccagatccaaagttaggtttttgtgaaaatttttttaatatgtgttttgataaagtaccaagcaaagaggttataaaagctttcgatgtttcgatgacactttatgctgaacatagttttaacgcatcaacttttacatcaagagttattacaagtagtttatctgatatgcacggggctgtaactggtgctattgctagcttaaaaggaccattgcatggtggagcaaatgaagcagtggcgcatatgttgaatgaagttggatcaccagataaagctgagcaattcataatgaataaaataaaaaataaagagttaataatgggatttggacatcgtgtttatagaaatggtgactctagggttcctacaatgactgaatattatcataaaaccgctgaattttaccaaaataaaaaacttcccgaaatttcaaaaattttagaagaaacaatgttgagagaaaaaaatataaaacctaacttagattttccagcaggcccaacatactatcttatgggttttgatatagatttctttacacctatttttattgtatctagaattactggttgggcagctcatgttatggaacagtttgattctaacaaactaattagaccacttc

SEQ ID NO: 236442 - DNA, 880 bp, Unknown
  Bacterial polypeptide expressing nucleotide sequence isolated from the Sargasso Sea
ttccctgcgacaggtcatcctatggatgctcttcaatctagtgcggcttctttgggccttttttattcacgtcgagcaatagatgatcctaattacatatataacgctgtgataaggctaatagcaaaaatacccactatgatcgctgcgtttcaacttattagaaaaggccaggaccccattcagccgagagatgatctaacgtactcttcaaattttctatacatgttgactgaaaaagaacaagatccaatagctgcgaaagttttcgataggtgtttaattttacatgccgaacatagtttaaacgctagtacatttagcgccagagtaactgcaagcactcttacagacccatatgcagttatcgcctctgcagtagggacattggctggtccgcttcatggaggagctaatgaagatgttattgcgatgttagaggaaatcgaaactccagaaaaagcagcttcttttttagaaaacgcaataaaaaataaaagtaagataatgggatttggtcacagagaatataaagtcaaagatccaagagcaattattcttcaaaaactggcagaagaactttttattagatttggagcagataaaatgtatgaagttgccaaaagattagaggcagaggcgataccaagacttggaccaaaaggtatatttccaaacgtcgacttttattctggccttgtttacaggaaacttggtattcctcgtgatttatttactccaatttttgctatatccagagtcgctggttggttagctcactggagagagcaacttggagcaaatagaatttttagaccatcacaaatttataccggttcagcacctagagattggattagcttagaaaatcgagaataat

SEQ ID NO: 236443 - DNA, 682 bp, Unknown
  Bacterial polypeptide expressing nucleotide sequence isolated from the Sargasso Sea
cctagcaaaagtttatcattttcagaaaattttttcaaaatgatgttcaataaagtgcctgataaagaagttgtcagagcttttgacatatctttaattttatatgcagagcatagtttcaatgtttcaacttttaccgctagaactataacaagcagcttatctgatttacatggggcgattacaggagcgatagcttcattaaaaggacctttacatggtggagcaaatgaggctgtcatgcacatgatgaaagagataggtaagccagaaaaagctaaagcatggatagaaaatgctttggcaaagaaaaaagttgtaatgggttttggccatagagtttatagaacaggagattctagagtgccaacaatgaaacattatatgtttaaagtggcaaaacttttgaaaaaagaaaagtacactaaaatgtatgaaattttagaaaaagtaatgatagaaagaaaaaacatccatcctaatgtagattttccatgtggtcctacatattacatgatgggaatcgatatagacttttatactccaatttttgtgatgtctcgaattactggctggtcagctcatataatggaacaacatacttctaacaaactaattaggcctttatctaaatataaaggaaaagaagtgagagaagtaatgttgttaaatcaaagataaa

SEQ ID NO: 236444 - DNA, 751 bp, Unknown
  Bacterial polypeptide expressing nucleotide sequence isolated from the Sargasso Sea
ttagctgctatgacttccataatcacttattggtatagatattctcatgatggagttaaggtcgatactgccactgatcatgaaacaattggtggtcaatttctatctttattaacaggcaaagagccgtcagaagagcattctagagcacttgatgtttcactgattctttatgcggagcatggatttaatgcttctacttttacagctaggacttgtgcttcaactttatcagatatgcattcttgtattactggagcaataggtactttgagaggccctcttcatggtggagctaatgaagctgctatggacatgatagaaaaattctccactagagaagacgctaaacaaggagtgctagaccttttggcaaagaaagaaaaaatcatgggttttggacacgctgtttatagtaatgaagaccccagaaatgccattataaaaaaatggtcaaataccttggcagattctaatggagacaggactctctatgaggtttcagacgagatagagcatgtaatggatgaagaaaaaggtatgtttgctaatacagattttttcatggcttctgcttatcactatctagggatacccactccaatatttactcctttatttgtcatagggagaacctctggttgggcttcaaacataatggaacaaagggcagataacagaattattagacctagtgaagaatacataggtccagataacgctacttgggtagatattaaagaccgctaat

SEQ ID NO: 236445 - DNA, 907 bp, Unknown
  Bacterial polypeptide expressing nucleotide sequence isolated from the Sargasso Sea
aaatttcagtctgatattaatgaagagtcattagttgatgagcatataaaggatatctttcaaagttttcccaaatctgctcatccaatgggagttctctcttcactaacttcagcattgattgcattcaatccagaaaatgagactaagttgtctttaaaagaatctgataaatctgaagatgatcaaaaactgtataattcaacagttaaattacttgcaaaatttccaattttatcatcttggactttaagaaagattaagggtcttccattaaattatagtagtgataaatttaattatgtagagaatattgcctatttaatgtttgcaaaaccaaaccaggagtatattcagaatgatattattgttaatgccttgaatagtttgcttattcttcatgctgatcatgaacagaattgttctacatctacagttaggatagtaggatcttcatatgcagggttattcgcttcaatttcagcagggatttcagctttatggggaagacttcatggaggtgcaaatcaagcagtaatagagatgcttgaattaattaaaaatgatgattcaaatattgagaaatatattgagaaggcaaaggataaaaatgatccttttaggttaatgggatttggacatcgagtatataaaaactttgatcctagagcaaaaataattaagaaggcagctgaccaggttttaaatgatttggggattaatgatcctgttcttgatatagcaaaagaaatagaaacaaaagctttaagtgacccatattttatagaaaagaaactatatccaaatgttgatttctattctggaattatttatagagcccttggcataccttctgagatgtttactgtaatatttgctttgggaagaattcctggttggatagctc

SEQ ID NO: 236446 - DNA, 815 bp, Unknown
  Bacterial polypeptide expressing nucleotide sequence isolated from the Sargasso Sea
ttcgcgtagagcaatagatgatcctaattacatctacaacgcagtcataagactaatagcaaaaatacccacaatgattgcagcgtttcaactgattagaaagggtcaagaccccattcagcctagagatgatctaacttactcatcaaattttctttacatgttgactgaaaaagaacaagatcctatagctgcaaaagtttttgataggtgtttaattctacatgccgaacatagtttaaacgcaagtacatttagcgctagagtgactgcaagtactcttacagacccatatgctgtcatcgcctctgcagtaggaacccttgctggcccactgcatggaggggcaaatgaggatgttattgcaatgttagaagagattaaacacccagaaaatgctggagcttttttagataaagcgataaaaaataaaagtaaaattatgggcttcggtcatagagaatataaagtcaaagatccaagagcaattattcttcaaaagctggcagaagagctttttattagatttggagcagatgaaatgtatgaagttgctaaatcattagaagcagaagcaataccaagacttggcccaaaaggtatattccccaacgtggacttttattctggtcttgtttatagaaaacttggtattcctcgtgatttatttactccaatttttgccatatctagagttgctggttggttagcgcattggagagagcaactcggagcaaatagaatttttagaccatcgcaaatatacacaggttcagcactaagagattggaccagcttagaaaatagagaataaa

SEQ ID NO: 236447 - DNA, 897 bp, Unknown
  Bacterial polypeptide expressing nucleotide sequence isolated from the Sargasso Sea
aataaattaaaaggacatagaaagctaccaaaagaattaatggaagtattggaaaggataccatcctctactcatcctatggatgtcatgcgaacgggttgctctatgctaggtaatctagagccagaaggagacttttcaaatcagaatgaaacagcagataggattttagctgctatgacttctataatcacttattggtatagatattctcatgatggagttaaggttgatactgctactgatcatgaaacaattggtggtcaatttctttctttattaacaggcaaagagccgtcagaagagcattctagagcacttgatgtttcactgattctttatgcggagcatggatttaatgcttctacttttacagctaggacttgtgcttcaactttatcagatatgcattcttgtattactggagcaattggcactttgagaggccctcttcatggaggagctaatgaagctgctatggacatgatagaaaaattctccactagagaagatgctaaacaaggagtgttagatcttttggcaaagaaagaaaaaatcatgggttttggacacgctgtttatagtaatgaagaccccagaaatgccattataaaaaaatggtcaaataccttggcagattctaatggagatagaactctctatgaggtttcagatgagatagagcgtgttatggacgaagaaaaaggtatgtttgctaatacagattttttcatggcttctgcttatcactatctagggatacccaccccaatatttactcctttatttgtcatagggagaacctctggttgggcttcaaacataatggaacaaagggcagataacagaattattagacctagtgaagaatacataggtccagataacgctacttgg

SEQ ID NO: 236448 - DNA, 388 bp, Unknown
  Bacterial polypeptide expressing nucleotide sequence isolated from the Sargasso Sea
gatgggctttggtcatcgtgtctacaagaattacgatccgcgcgcgaagctgatgcgtgagacctgtcacgaggtgcttgaagagttggggttgcatgatgacccgctgttcaagcttgctatggcgcttgagaagatcgcgcttgaggatgaatacttcgtgtcgcggaagttgtatccgaatgtggatttctattcgggtatcgtgcagcgggcgcttgggattcctactgcgatgtttacgtgtatctttgcgatggctcggactgttgggtggattgcgcagtggaacgagatgattgccgatccggagcagaagatcgggcggccgcggcagttgttcgtgggggagactcagcgcgaggctcgggcgctcgataagaggtaa

SEQ ID NO: 236449 - DNA, 700 bp, Unknown
  Bacterial polypeptide expressing nucleotide sequence isolated from the Sargasso Sea
aatgggtgaaaaaaaattagaaggagcaggtttaagagggcaagttgctggaaacactgctttatcgacagtaggaaaggcaggtaaaggattaacttaccgaggttatgcaatagaagaattggctgagaaagcaacatttgaagaagttgcttatatgttgctttacggaaaattaccaactcaatctgagtatgatgaatattcctctaaattgaagtcttacaggtccttaccgactgaacttaaggaagttctagaaagaataccgcaagatgctcatccgatggatgtaatgagaacaggatgttctatgctaggaaacttagatcccgaaggggatttttctaatcaaagtgagacagcagacagaatattagcttctatggcttcaattgtaacttattggtatagatattctcatgaaggggttaaggtagagactgcaacagatcacccaaccatagggggtcaatttttatctttgataacgggcaaggaaccttctgaagaacattctagggttttagatgtttcgcttattttgtatgcggaacatggatttaatgcttcaacttttacagctagaacttgcgcgtcgactttatccgacatgcattcttgcattacaggggctataggaactttaagaggccctttacatggaggagcaaacgaagctgcaatggaaatgatagaa

SEQ ID NO: 236450 - DNA, 1147 bp, Unknown
  Bacterial polypeptide expressing nucleotide sequence isolated from the Sargasso Sea
ttggatagtaacaaactaattttaaaaccaggattagagggagtcccagttactaattcatctatatgtgatattgacggcaacaaaggtaaattattgtacagaggctattccattgaggaactatccaaaaaaagcagttttttagaaactgcttacctattgatttggggtgaattgcccacagctattcaactaagagatttcgaacaagaagttcagatgcatcgaaggctaagttttagagtcagggatatgatgaaatgtttccctgcaactggtcatcctatggatgctcttcaatctagtgcggcttctttagggctattctattctcgtagagcaatagatgatcctaattacatctacaacgcagtcataagactaattgcaaaaatacccacaatgattgcagcgtttcaacttattagaaaaggacaagacccaattcaacctagagatgatctaacttactcatcaaattttctttacatgttgactgaaaaagaacaagatcctatagctgcaaaagtttttgataggtgcttaattctacatgccgaacatagtttaaacgcaagtacatttagcgctagagtgactgcaagtactcttacagatccatatgctgtcatcgcctctgcggtaggaaccctggctggtccattacatggaggagcaaacgaggatgtgattgcgatgttagaagagattaaaaccccagaaaatgctgggtcttttttagataatgcaataaaaaataaaagtaagataatgggcttcggccacagagaatataaagtcaaagatccccgagcaataattcttcaaaaacttgcagaagaactttttattagatttggagcagatgaaatgtatgaagttgctaaatcagttgaggcagaggcaataccaagacttggacctaagggtatattcccgaacgtggatttttattctggtcttgtttatagaaaacttggtattcctcgtgatttatttactccaatttttgccatatctagagtggctggttggttagctcattggagagagcaacttggagcaaatagaattttcagaccatcgcaaatttatacaggttcagcaccaagagattggatcagcttagaaagtagagaataat

SEQ ID NO: 236451 - DNA, 568 bp, Unknown
  Bacterial polypeptide expressing nucleotide sequence isolated from the Sargasso Sea
ctttaaagcatcgacatttacagctaggacgtgtgcatcaacactgtctgatatgcattcatgtattactgcggcaataggaacattaagaggaccacttcatggtggtgctaatgaagcagctatggaaatgatagaaagattttcttcaagggaagatgctaatgttggtgtgaagaatatgctagcaaacaaagaaaagattatgggtttcggtcatgcggtttattcagatgaggatcctagaaacaagattgtaaaagcatgggcaaagaaacttagttcaaatgcatcaaaccctgtcatttatgaggtttcggaagaaattgaaaaggtaatgagcgaagaaaaaaatctctttgcaaatacagatttttatatggcatctgcatataattttttaggcataccaacaccaatctttacgccactttttgtaattggtagaacctctggatgggctgccaatgtgatggaacaaagagcagataatagaattataagacctagtgaagaatatattggacccgaatctgcaacttgggttgatcttcaagatagagattaa

SEQ ID NO: 236452 - DNA, 485 bp, Unknown
  Bacterial polypeptide expressing nucleotide sequence isolated from the Sargasso Sea
aatggcggattacgaagataataaacagaaaagttcttttacattatttaataatgaaactggcaaatcatatgaactaccaattataaaaggtacagatggacctgatgttttagatataagaaatctttatcaggaaaccggcttatttacttatgatcctggatttacatctactgcttcttgtgactcagcaataaccttcattgatgggaataaaggaattcttagacatagagggtacgatattcatgaattggctagcaacagtgaatttttagaagtttgctatttgttattgcatggagaattaccatctccagaagataaaaaaaaatttaaagatgtaattacaaatcacacaatgttgcatgaacaactagtgcatttatatagaggttttagacgagatgcccatccaatggcaattatggttggtgttgtaggggctttgtcagctttttatcacgataagtacagatttt

SEQ ID NO: 236453 - DNA, 1126 bp, Unknown
  Bacterial polypeptide expressing nucleotide sequence isolated from the Sargasso Sea
tatgactgaagatatcaaaaaaggtttaatgggtatagttgtagacgagactacaatttcacaagttatgccagaaataaattctctaacatatagaggttataaagttcaagatctttgtcaaaaatgcagttttgaggaagtagcctaccttgtattgaatggggaacttccaaaatcaaaagaactaaaaaaatttattaatgaagaaagaaataatcgtaaactttctaaacaaattctaaacgatattaaaaatatgccaaaaaaagcccatcctatggatgcaataagaactgcagttagtttaatggggctggaggataaagatgtaagagataattccccaaaagctaacatgaaaaaagctatgagaatttttgctcaaactcctactgctgttgctgcttatttcagggcaagaaagggaaaaaaatccataccaccaaacaaaaagttgtcctattcagaaaacttttttaatatgatgtttggtaaagttcctaacaaggaaattgtaaaagcatttgatatttccatgattctttatgccgaacacagttttaatgtttcaacttttacagcaagaacaattacaagtagtctttctgatatgcatggagcaataacaggtgctatagcaagtttgaaagggccattgcacggaggagctaatgaggcagtaatgtacatgtttaaagatattaaaaaacctcaaagagctaaatcatggataaataatgctcttgataagaaaaaagttgttatgggcttcggtcatagagtttacagaagtggtgattcaagggttccgactatgaaaaaatattttttaaaggttgccgaaataaaaaagaatactaattttcctaaaatatatgagatattggagcaagtaatgcttgaaaggaaaaatatacatcccaatgtagactatccatgtggcccaacctatcacttaatgggtatagatacagattttttcactccaatatttgttatggcaagaataacaggctggtcagctcacataatagaacagcatgcagctaataaacttattagacctttatctaaatacaaaggtagtgagcatagagaggtgttgtcccttaatattagatga

SEQ ID NO: 236454 - DNA, 987 bp, Unknown
  Bacterial polypeptide expressing nucleotide sequence isolated from the Sargasso Sea
tatgagcgacgaagttaaaaagggtttaatgggcatagtagtcgatgaaactactatctcacaagttatgccagaaattaactctcttacatatagaggttacaaagttcaggatctttgtgaaaaatgtattttcgaagaagttgcttatctcgttttaaatggtgagcttccaagatcaaaagaattaaaaaaatttattaatgaagaaagagataatcgtaaattatcaaaacaaattttgaatgatataagaaatatgccaaaaaaggcacatccaatggatgcaataagatcagcagttagtttaatgggtcttgaagacaaagacgcaagtgataattctccaaaagcaaatatgagaaaagcgatgagaatttttgcacaaacacctacagctgttgcagcttattttagagcaagaaaaggtaaaaaatttatacctcctaataaaaaattatcatattcagaaaatttcttccatatgatgtttggtaaagttccaaagaaagaaatagtagaagcttttgacatttcaatgattctttatgcagaacatagttttaatgtttctactttcacagcgagaacaataacaagtagtttatctgatatgcacggtgcgataaccggggcgatagctagtcttaaaggaccattacatggaggtgctaatgaggctgtgatgcatatgtttaaagaaattaaatcgcctcagaaagctaaatcttggattaataacgcattagataagaaaaaagttgttatgggttttggtcatagagtctataggagcggtgactctagagttccaaccatgaagaaatattttttgaaagtagcagaattaatgaaaaatactaaatatccggagatgtataataccttggaagaagtaatgctcgaaagaaaaaatattcatcctaacgttgattatccttgtggaccaacttaccatttgatgggaatagacactagattttttta

SEQ ID NO: 236455 - DNA, 733 bp, Unknown
  Bacterial polypeptide expressing nucleotide sequence isolated from the Sargasso Sea
aatgcctgaaattaattcactaacttataggggttacaaagttcaagatttatgtgaaaaatgcacttttgaagaggtcgcttatttagttcttaatggtgaactgccaaaaaaaagtgagcttaaaaaatttatatccgaagaaagaaaaaatagaaaattatccaaacaaattttagatgatattgtaaagatgcctaaaagagctcacccaatggacgtagtgcgaactgcggtaagtttaatgggtttagaagatagagatacgtctaacaattcacctaaagcaaatatgaaaaaagcaatgagaatatttgcccagacaccaaccgctgtcgcagcattttttagagcgagaagaggtaaaaaaattattaaacccgattcaaaactatcgtactctgaaaatttttttaaaatgatgtttggtaaagtcccaaataaagatattgtaaaagcctttgatgtttctatgatactttacgcggaacacagttttaacgtttcaacatttactgctagaacgattacaagcagcctatcagatatgcatggcgctatcacaggtgcaattgcaagtcttaaaggaccactccatggtggtgcaaatgaagcagtaatgtacatgtttaaagaaattaaaaaacctgaaaaggctgcagcttggattaataacgctttagacaaaaagagagtaattatgggttttgggcatagagtttacaggagtgga

SEQ ID NO: 236456 - DNA, 1129 bp, Unknown
  Bacterial polypeptide expressing nucleotide sequence isolated from the Sargasso Sea
atgggacagcaaaaaccgttgggtggcgccggcttgcgtggccagagcgcaggggagaccagcatctgcaccgtgggcaagagcggcaccgggctcacctatcgcggctatgacatccaggagctggccgatggcgcccagttcgaagaggtcgcctacctgctgctcaagggcgagctgccggacgagcagcaactcgaggattacaagcgaaccttgcgcagcctgcgcaccctgcctgccgccctgctggaggtactcgagcgcattcccgccgacgcccaccccatggatgtgctgcgtaccggctgctccatgctcggcgatctggagccggaagatggcttcgagcatgagcacgcagtggcggatcggctgctggccgccttcccgggcattctcctctactggtacaagttcagccacgacggggtacgcatccccctcgacaccgacgaagagtgcatcggcggccacttcctggcgctgctgcaccagaaggcgccgagcgagctggagcgcctggtgatgcacgtctccctcattctctacgccgagcatgagttcaacgcctccacctttgcggcgcgggtctgcgcctcgacgctctctgacatgttctcctgcgtcaccgcggccatcggcaccctgcgcggcccgctgcacggcggcgccaacgaggccgccatggcgatgatcgaaccctggcaggatgaggcccaggcgcggcgtgagttgctggccaagctcgcggccaaggagaagatcatgggctttggccacgccgtctatcgcacctcggatccgcgcaacgtcatcatcaagaactggtcggccaagctggccgaggcagtgggcgatgatcggctctatcgcgtctcctgcgaggcggagaaggtgatgtgggaagaaaaagaactcttccccaacgccgacttcttccacgccagcgcctatcactacatggggatcccgaccaagctgttcacccccatcttcgtctgctcgcgggtcaccggctggtgcgcccacgtgatggagcagcgtgaacacaatcggatcatccgcccgagcgccgattatgtcggcccggcgccccgtcatttcgtctcgctgcagcagcgataaa

SEQ ID NO: 236457 - DNA, 1126 bp, Unknown
  Bacterial polypeptide expressing nucleotide sequence isolated from the Sargasso Sea
atgagtgatgaaattaaaaaaggattaatgggtattgtagttgatgaaactactatctcccaagttatgccagaaataaattctcttacttatagaggatataaagttcaggacctctgcgaaaaatgtgtttttgaggaagttgcctatcttgttttaaatggtgaactcccaagatcaaaagaattaaagaaatttataaatgaggaaagaaataaccgaaaattatctaaacaaattttaaatgatataaaaaacatgccaaaaaaagcacatccgatggatgctataagaacagcggtaagtttaatgggactggaagataaagatgcgagggataattcaccaaaagcaaatatgagaaaagcaatgagaatttttgcacaaacaccaactgctgttgctgcttattttagagcaagaaaaggtaaaaaatttatacctccgaacaagaaactatcttactcagaaaatttctttcacatgatgtttgataaagtaccaaaaaaagagattgtagacgcttttgacatttcaatgatactttatgctgaacatagttttaatgtttcaacttttacagcaagaacaataacaagcagtttgtcagatatgcacggtgctataacaggagctatagctagtcttaagggacctttgcatggaggtgcgaatgaagctgtcatggacatgttcaaggaaattaagagtccagaaaaagcagaatcttggattaataatgctttagataaaaaaaaggttgttatgggttttggtcacagggtttacagaagtggtgactctagggtgccgacaatgaaaaaatacttctttaaagttgccgagttgatgaaaaatactaaatacccaaaaatatacaatactttggagaaagtaatgcttgaaagaaaaaatattcatccgaatgttgactatccgtgtggtccaacttatcacttaatgggtatagacactgattttttcacaccgatctttgtaatggctagaattacaggttggtctgctcacattatggagcaacacgctgcaaataaattaataagacctttatccaaatataaaggtagcgaacatagagaagttttggcactaaatataagataat

SEQ ID NO: 236458 - DNA, 1129 bp, Unknown
  Bacterial polypeptide expressing nucleotide sequence isolated from the Sargasso Sea
tatgtcagacgcaaaaaaattaagtggtgcaggattacgtggccagagcgcgggtgaaaccgcattaagtacagtcggtgtatcgggcagcggcctgacctaccgcggttacgatgtgaaggatctggccgaaaacgcgaccttcgaagaagtcgcccacctcatcctctacggtgaactgccaaccacagcacaactcgaagcctacaagagcaaacttaaaggcatgcgtggcctaccacaggcattaaaagaagtgttagagcgcatccctgccgacgcccatccaatggatgtgatgcgtaccggttgttctatgctgggtaacctcgaagccgagcacagctttagcgaacaaagccaaatcgccgatcgtttacttgcggccttcccatcgatcatctgctactggtatcgctttagccacgatggcgtgcgcatcgaaaccgaaaccaacgatgagcaaatcggtgcccacttcctgcacctgctgcacggcaaagccccatcggcactgcacgctaaggtgatggacgtatccttaattctgtatgcagagcatgaatttaacgcttcaacctttaccgcccgcgtatgtgcatcgaccctgtcggatatgcattcctgcgtcactggtgctatcggctcactgcgtggtccgctgcatggcggcgccaacgaagcggcgatggaactgatccaagatatgaaagacgaagccgatgcccgcgatgtgctcatgggtaaactcgagcgtaaagagaagatcatgggctttggtcacgccatctaccgtgagtcagacccacgtaacgccatcatcaaagaatggtctgaaaagctggccgccgattacggcgatgatcgcctctaccgcgtatcggtagcctgtgaagccatgatgtgggaacagaagaaactcttctgtaacgccgacttcttccacgccagtgcttaccacttcatgggcattccaaccaagctatttaccccaatcttcgtatgttcacgggtaacaggctggacggcgcatgtgatggaacaacgctcaaacaaccgcattattcgcccaagtgccgactatgtgggtgtggcgttacgtaaagtcgtgccaatttcggaccgttaa

SEQ ID NO: 236459 - DNA, 1177 bp, Unknown
  Bacterial polypeptide expressing nucleotide sequence isolated from the Sargasso Sea
aatgacagattcaagcacgcacttatatagccctgggctagtcggtatcatagctactgaatcatccgtgtcaaacataaatggcaagaaaggtattctcagttacagaggttactctattgaagaattagctcaaaaaagcacttttgaagagacctcttacttactcttgtttggagagctccccacctcagctcaactaaaagaatttacatccaaagtgacacaatacagggatcttcccgaagaattagtctcaatcttgaaagctttgccgaaacatactaggccaatggatgtgcttcagatggctgtatcttcacttggtaccttttatgatttagaagtaagtcctgagaaagtcaaaggcaaaaagtacgatgaaaaatatttcttgaatacatctgctgcgcttattggagcattaggctctattgtggctgcatggcataggattcgaaatggagacgaaccaatatcatctaaacctgattgcacttacgcagagaactttttgcatatccttggtgctgaaaaaataacaccacttatgacgcgtataatggatgcaacattagttcttcatggtgaacacaccatcaatgcgtccacttttactgctatggtaacttcatccacacttgctaatgcatctcaggtcgttgcgtctgcgattggttcattatcaggtcctcttcatggcggggctaatgagaaggttattgcgatgttgcaaaaaattgagactaaagaagaaataagaccatggcttgatgacacattaaaagctaaaaatgttgtttggggcatgggacacagagaatactctgtcaaagatcctagagctaatatactaactgaaatggtacagcaattatttgatgagagagaaggtggtgttacagatatatttgaaaaagctattgaattagagaaggcttgtgaggaaaaattatcacataagggagtctatcctaacgttgatttttactcgggaattctctataaggagatggacattccgactgatattttcacaccaatttttgcaatgtcacgtgtatcaggctggctggctcattggatagaacagatacaagacaataagattttcaggcctacgcagaactatgttggctcagatgatcgagcttatgttgatatcagcgatagatga

SEQ ID NO: 236460 - DNA, 865 bp, Unknown
  Bacterial polypeptide expressing nucleotide sequence isolated from the Sargasso Sea
aatgagtgaagaaataaaaaaaggattattaggaattgttgttgatgaaacaacaatttctcatgttgtgcccgaactaagtacccttacttatcgaggttatacggtacaagaattatgtgacaaatgtgattttgaagaagtcgcatacttagttttaaacggtgacctaccaaataaaaaacaattaaaaaaatttattaaagaagaaagatcagaaagaaaactgtctaaacaaattttaaagaacattcagactatgccaaaaaatgctcatcccatggatgttataagaacttgcgttagtttgatggctctagaagataaagacactaaagataattctcctaaagctaatatgagaaaaactatgagaatttttgctaaaactcctacagcagtttcggcttattttagatatagaaaaggtaaaaaaatcatttcacctagtaaaaatttatcattttcagaaaactttttcaaaatgatgtttaataaagtaccagataaagaaattgtcagggcttttgatatatctctgattttatacgcggaacatagcttcaacgtttcaacttttacagctagaactataacaagtagcttatcagatttgcacggagcaataacaggtgcgatagcttcattgaaggggccattacatggcggcgctaatgaagctgtgatgcacatgatgaaagagatagggaaacctgaaaaagctaaagcttggatagaaaatgctttagctaagaaaaaagttgtaatgggttttggccatagagtttatagaactggtgactcaagagttccaactatgaaacattacatgtttaaagttgcaaaacttttaaaaaagaaaaat

SEQ ID NO: 236461 - DNA, 934 bp, Unknown
  Bacterial polypeptide expressing nucleotide sequence isolated from the Sargasso Sea
aatgagtgaagaaattaaaaaaggtttattaggaatagttgtcgatgaaacaaccatatcacaagtagtaccagagcttagtgcattaacttatagaggttatacagtacaagaactttgtgataaatgtgactttgaggaagttgcttatttagtgctcaacggtgaattaccaaacagatcgcagctaaaaaaatttataaaacaagaaagatccgaaagaaaactctcaaaacaaattttaagtgatattaaaaagatgccaagaaatgctcatccaatggatgtaattagaacttgtgtgagtttgatggcgctagaggacaaagatacaaaagataattctcctaaagcaaatatgagaaaagcaatgcggatatttgctaaaactccaacagcagtagcagcttattttaggtctagaaaagggaaaaaaattattaaccctaataacaaattatctttttctgaaaacttttttaaaatgatgtttaacaaagttcctgacaaagaaattgttcgagcttttgatatatctttaattttatacgcagaacatagctttaatgtttcaacttttacagctagaacgataacatctagtttatctgatcttcatggtgcgattactggagcaatagcttcattaaaaggtcctcttcacggcggtgctaatgaagcggttatgcatatgatgaaagaaattggaagacctgaaaaagcgaaagcttggattgaaaatgctctggctaaaaagaaagttgtaatgggttttggacacagagtttatagaacaggagactcacgagtaccaactatgaaacattatatgtttaaagtagcgaagttactcaaaaaagaaaagtatacaaaaatgtatgaaattttagaaaaggtaatgctagataaaaaaaatattcatccaaaacgttga

SEQ ID NO: 236462 - DNA, 572 bp, Unknown
  Bacterial polypeptide expressing nucleotide sequence isolated from the Sargasso Sea
tatggctgataagatagccaccctacatctacccggtaaagacccggtagaactcccgatcctgtcaggaactgtcggacccgacgtgatcgatgtcagaaaactgggcgcgcaagggtacttcaccttcgaccccggttttatggcaaccggttcttgcaaatcatccattacgtacatagatggcgatcagggtgtcttgctgcaccgtggttaccccatcgcccagttggccacccaggccagctatctggaagtctgctacatcctgctgtacggcgaggcgcccaccaaggcgcagtacacggaattcgaacgtctggtcacccgccacaccatggtgcacgagcagattgccttcttcttccgcggcttccgtcgcgacgctcaccccatggccgtcatgtgcggcgtggtcagtgcgctctccgccttctatcacgatgccctcgacatcaacaacgaagagcaccgcgagatctgcgccttccgtctgctctccaagatgccgaccctggccgccatgtgctacaagtactccatcggtcagccgttcatgcagccgcgtaacg

SEQ ID NO: 236463 - DNA, 1054 bp, Unknown
  Bacterial polypeptide expressing nucleotide sequence isolated from the Sargasso Sea
aatgggtgagaagaagttagatggagcaggtttaagagggcaagttgcaggtaagactgccctttcaactgtaggaaaagaaggaaagggtttaacttatagaggttatgccatagaggagctcgctgaaaaggcttcttttgaagaagtggcctatatgttgttgtatggaaacttaccaaatcaatctgagtatgatctatattcatctaaactaaaatcatatagatctttgcctgatcaactcaaggaggttttggaaagaatacccgccgatgcacatccgatggatgtaatgagaaccgggtgctctatgttgggaaatttagaatcagaaggtgacttctctaatcagaacgaaacagctgacaggataatggcttcttttgcttcaatagttacttattggtacagatatgctcatgacggtattagagttgaaaccgaaacagaccatccaactattggaggtcaatttttgtcattattgacaggaaaagaaccttctgaagaacatgctagagcacttgatgtttcgttgatactttacgctgagcatggctttaatgcatctactttcacagctagaacttgtgcatcaacattatctgatatgcactcttgcattacaggtgcaattggaacgttaagaggaccgttgcacgggggtgcaaatgaggctgcaatggagatgattgagaagtactctagtagagaagaagctaaagcaggagttcttgaactgttggctaaaaaagaaaagataatgggctttggtcatgctgtctacagtactgaagatcctaggaatgcgattattaaagtttggtcagaaaaactttctaaattagatggtgataaaacccttttcgaagtttccgacgaaatagaaagagtcatggatgaagaaaaaggaatgtttgctaatactgacttctttatggcctctgcttacaactatcttagggatacctactgcaatattcactccattatttgtcataggcagaacctcgggttggggtgcaaatatcatagagcaaagagcggataa

SEQ ID NO: 236464 - DNA, 624 bp, Unknown
  Bacterial polypeptide expressing nucleotide sequence isolated from the Sargasso Sea
gcgacgaacatactagagcactgatactttctcttatttgctatgcagaacatggcttaaatgcatcgacatttacagctagaacatgtgcatcaactttatctgacatgcactcgtgtatcactgctgcaataggaacattaagaggccctcttcatggcggtgctaatgaagcagctatggaaatgatagaaagattttcttcaagggaagatgctaatgttggcgtgaagagcatgctcgcaaataaggaaaagattatgggtttcggtcatgcagtttattcagatgaggatcctagaaacaagattgtaaaagcatgggcaaagaagcttagttcaaatgcatcaaaccctgttatttatgatgtttctgaagaaattgaaaaggtaatgagcgaagaaaaaaatctttttgcaaatacagatttttatatggcatctgcctataattttttaggcataccaacaccaatttttactccactttttgtaattggcagaacctctggatgggcagctaatgtgatggagcaaagagcagataatagaattataagaccaagtgaagattatataggtcccgaatctgcgacttgggttgatcttcaagatagagattaaa

SEQ ID NO: 236465 - DNA, 244 bp, Unknown
  Bacterial polypeptide expressing nucleotide sequence isolated from the Sargasso Sea
cgattactttttgtggaaagaaaactatacccaaatgttgatttttactcaggtattattcttaaagcattaggaattccaacgtctatgtatacagtaatgttcgctttagcgaggtctgctggatgggtagctcaatggatggagatgatggaagacccagattttaagattggacgcccaagacaactctacacaggagagaaaagtcgggactacattccaattgataaaagaaattaat

SEQ ID NO: 236466 - DNA, 1123 bp, Unknown
  Bacterial polypeptide expressing nucleotide sequence isolated from the Sargasso Sea
atggctaaaaagttagaaggcgcaggattacggggtcaagttgctggcgaaacatcactttgcacagttggtcaagaggagggtttggcatacagaggacataaaattgagacattggctgaaaaaggaacatttgaggaagttgcttaccttcttttgtatggtaaattgccaaataaaacagaattatctaattataaaaatttattaaaaagtcttcgagacctgcctgattctttaaaaaaggttcttcaggaaatacctgcatctgctcatccaatggcagtaatggcaacagggtgttctatgttaggcaatcttgagcctgaagagtcaatggatgctcaaatggattcaattaatcgaatggttgcaactttaccctcaattgttacttactggtataaattttcccatgatggcgaagatataagtcttgtaaatgacgaggatacaatagcaggccacttcttgcatattcttcatggcaagagtccctcagaccttcataggcgtgtaatggatgcttccttggttttgtatgctgagcacgaatttaatgcttctacttttactgctagagtttgcgcttcaacaatgtcagatatctactcatgtgtagttgctgctataggctctctgaaaggcccactgcatggaggagccaatgaagccgcaatggagatgatagaaaactggaagaccagagatgaagctaaggcaaatatcatggacatgcttgcaaacaaaggcaagatcatgggctttggccatgcaatttattccgaaaaagatccaagaaatgctgtgattaaagagttttcaaaagaattatcccaagagtatggcgacgacacactttaccaagtgtctgaggaagttgagcaggtaatgtgggatgagaaaaaattatttccaaatgcagacttttttcatgcttctgcatatttttatctaggaattccaaccaaactttttactcccatctttgtcatgtcaagagtaactggttggactgctcattgcatggagcaaagagctaataatagaattatcagaccaagtgctgaatatacaggtcctgaaacttctgtctgggttgacctagaagatagagaataaa

SEQ ID NO: 236467 - DNA, 1126 bp, Unknown
  Bacterial polypeptide expressing nucleotide sequence isolated from the Sargasso Sea
atggtagacaagcagttgggcggagcaggcctaagaggccagagtgcgggagacacggctctctgtacagtaggtaaatctgggacgggtttaacttatagaggatacgacattactgatctggcggaaaatgccacattcgaagaagtagcttacttgatctattttggtgaattgccaaatcaacaacagttggacgaatacaagacaacattaagaggttatcgaaagcttcctgaagagctaatagctgtcctggaggctattcctgcttctgcacaccccatggacgtgatgagaactggttgctcaatgcttggtaacttggagccggaaggagattttgaaaaccagcagagagctgctgatcgtttgctaggagcgcttccatcgatcattaattattggtaccaatacagccaccacggtaaccgtattgatactgatagcgacgaggactccttggcagggcattttcttaaaacgctgtctggcaactctccgtcagagcttcaccagcgagtaatggacgtttccctgattttgtacgcggagcacgagttcaatgcctctacctttaccgcgcgagtgtgcgcctccaccttgtcagatatgcatagctgcgtaactggcgctatcgggtcattgcgaggccctttacacggtggtgctaatgaggcagcgatggagatgattgagaaattctcttcggtcgaggatgcaactcaaggcgtgcacggcatgctcgaaagaaaagataagataatggggtttggtcatgcgatataccgaacttctgaccctcggaacgtgataatcaaacagtgggcggagaaattggccgatgaagtaggtgatgagtctctgtatcccatctcgtgtgcggttgaaaaggtgatgtgggacgagaaagagctttttgccaatgctgacttttttcacgcgtctgcataccattttatgggtatacccacgaaattgtttaccccaattttcgtttgctctcgagtgtctggctggacggcgcacgtcatggaacagcgagtaaataaccgaattattcgacccagtgcggactatgttggtccggagccaagagtgttagcaccgattggagagcgttaaa

SEQ ID NO: 236468 - DNA, 640 bp, Unknown
  Bacterial polypeptide expressing nucleotide sequence isolated from the Sargasso Sea
gatgtttaacaaagtgcctgacaaagaaattgttagagcatttgatatctctttaattttatacgctgaacatagctttaatgtttctacttttaccgctaggactattacaagtagtttatcggatctacatggagcaattactggagcaatagcatctttaaaagggcctcttcatggcggagcgaatgaagcagtaatgcacatgatgaaagaaataggtaagccagaaaaagctaaagattggatagaaaatgccctagaaaagaaaaaagttgttatgggttttggacatagagtttatagaacaggagattctagagttccgacaatgaaacactacatgtttaaagtggcaaaacttttaaagaaagaaaaatacactaaaatgtatgaaattttagaaaaagtaatgttggacagaaagaatatccatcctaatgtagattttccttgtggacctacttattacatgatggggattgatatagatttttatacacccatatttgtaatgtctcgaattactggctggtcagctcatatcatggaacaacatgcatcgaacaagttaattagacctttatctaaatataaaggacaagaagtaagagaagtaatgttgttaaaccaaagataa

SEQ ID NO: 236469 - DNA, 388 bp, Unknown
  Bacterial polypeptide expressing nucleotide sequence isolated from the Sargasso Sea
aatggttaagaagaaattaaataaaaaaagtaatagaaaagctaaattaataatcaaccaaaaaacttacgaatttccgatatataattctactgaaggcgaagctgttatagatatctctaatttgcacgctgaggcaaatatatttacatatgacccaggatttacatctactgcctcatgtgagtcaaagattacatacattgatggagataaaggcattctaaggtataggggatatgatattgaagaattagctagaaaaagtgattttattgaagttgttaacttgcttatctatggagaccttccaaataaagatcaactcactaaatacaaaagacttataacaagacacaccttgcttcatgagcaaatcataaacttt

SEQ ID NO: 236470 - DNA, 1108 bp, Unknown
  Bacterial polypeptide expressing nucleotide sequence isolated from the Sargasso Sea
atgagcgatgaagtcaaaaaaggtttaatgggtatagttgttgatgaaactactatctcacaagttatgccagaaattaattctcttacatacagaggttacaaagttcaggatctttgcgaaaaatgtattttcgaggaagttgcatatcttgttttaaatggtgaacttccaagatcgaaagaattaaaaaaatttactaatgaagaaagaaataatcgtaaattatctaaacaaattttaaatgatataaaaaatatgccaaagaaagcgcatccaatggatgcgataagatcggcagtcagtttgatgggtcttgaagacaaagacgcaagtgacaattcaccaaaagcaaatatgagaaaagctatgagaatttttgcacaaacacctacagctgttgctgcttattttagagcaagaaaaggtaaaaaatttatacctcctaataaaaaattatcgtattcagaaaatttctttcacatgatgtttggtaaagtgccaaagaaagaaatagtagaagcttttgatgtttcaatgatactttatgctgaacatagttttaatgtttctactttcacagctaggacaataacaagtagtttatctgatatgcacggtgcgataaccggggcgatagctagtctaaaaggacccttacatggcggtgctaatgaggctgtgatgcatatgtttaaagaaattaaatcgcctcagaaagctaaatcttggattaataacgcattagataagaaaaaagttgttatgggttttggtcatagagtctatagaagcggtgactctagagttccaaccatgaagaaatattttttgaaagtagcagaattagtgaaaaatactaaatatccagagatgtataatactttggaaaaagtaatgcttgaaagaaaaaatattcatcctaacgttgattatccatgtggaccaacttaccatttgatgggaatagacacagatttttttacacctgtttttgttatggctagaattactgggtggtctgcacatatcatggagcagcatactgctaataaactaattaggcctttatcaaatataaaggaagtgagcacagagaggtgctggc

SEQ ID NO: 236471 - DNA, 1126 bp, Unknown
  Bacterial polypeptide expressing nucleotide sequence isolated from the Sargasso Sea
atggcagaagaaattaaaaaaggtttaatgggaatagttgttgatgaaactactatttctcaagtaatgcctgaaataaattctttaacttacagaggttataaagttcaggatctttgtgaaaaatgtagtttcgaagaagtagcttatttagttttgaatggtgaacttccaaaatctaaagaacttaaaaagtttattaaagaagagagaagcaatcgcaaattatcaaagcaaatcttaaatgatattaaaaatatgcctaagaaggcacatcctatggatgccattagatcagcagttagtttaatgggtctcgaagataaagacacaagagataactctccaaaagcaaatatgagaaaagctatgagaatttttgctcaaactccaaccgctgtggcagcatattttagagctcggaaaggcaaaaaatttatacctccaattaaaaagttatcttactctgaaaacttctttaatatgatgtttggtaaagttccaaacaaggaaattgttaaagcgtttgatgtttcaatgatactgtacgctgaacatagttttaatgtttctacatttacagctagaaccattactagcagtctttctgatatgcatggtgctattactggtgccatagcaagtttaaagggtccattgcatggaggtgctaacgaagcggtcatgcacatgtttaaagaaattaaaaaaccagaaagagctgaggcatggataaatgatgcacttgataaaaaaaaagttgtcatgggttttggtcatagagtttatagaagtggtgattcaagggttccaactatgaaaaactattttttaaaagttgcgaagcttatgaaaaatactaaatacccaaagatgtatgagatattagaaaaagttatgcttgaaagaaaaaatattcatcctaatgtagattatccttgtggaccaacttatcatttgatgggtatcgacacagacttttttacaccagtatttgttatggcgagaattactggttggtcagcacatattatggagcaacatactgctaacaaactaattcgacccctgtcaaaatataaaggaaatgatcacagaaaagtacttgccttaaatgtaagataaa

SEQ ID NO: 236472 - DNA, 1126 bp, Unknown
  Bacterial polypeptide expressing nucleotide sequence isolated from the Sargasso Sea
tatggctgaagaaattaaaaaaggtttgatgggaatagttgttgatgaaactactatatctcaagtaatgcccgaaataaattctctaacttataggggttacaaggtccaagatctttgtgaaaaatgtagttttgaagaggtagcttatttggttttgaatggcgaacttccaaaatctaaagaacttaaaaagtttattaaagaagaaaggaataatcggaaattatcaaagcaaatcttaagcgatattaaaaatatgccgaggaaggcacatcctatggatgccattagatctgcagttagtttgatgggtcttgaagataaagatacaagggataactcaccaaaagcaaatatgagaaaagctatgagaattttcgctcaaactccaaccgctgttgcagcatattttagagcacgaaaaggtaagaaatttattcctccaaataaaaaattatcttattcagaaaatttttttaatatgatgtttggcaagattcctaacaaagaaattgtaaaggcttttgatgtatctatgatactttacgctgaacatagttttaatgtttctacttttactgcgagaactatcacaagcagtctttctgacatgcatggagctatcactggtgcaatagcaagtttaaaaggcccattacatggtggtgcaaacgaggcagtgatgcatatgtttaaagaaattaacaaaccagaaaaagctgaaacatggataaataacgctctagacaaaaagaaagttgttatgggttttggacacagggtttacagaagtggagattctagagtgccaacaatgaaaaaatactttttaaaagtcgcagaactgaaaaaaaatacaaaatatcctaaaatgtataagacacttgaaaaaattatgcttgaaagaaaaaacattcacccaaatgtagattatccttgtggtcctacgtatcatttgatgggtatagatacagatttttttacaccagtttttgttatggcaagaataactggctggtcagctcacataattgagcagcatgctgctaacaaacttattaggcccttgtcaaagtacaagggtagtgaacatagagaagttttatccttaaatattagataa

SEQ ID NO: 236473 - DNA, 1303 bp, Unknown
  Bacterial polypeptide expressing nucleotide sequence isolated from the Sargasso Sea
atgagcaaaaaagttacattacaatacaatgacaaagaatataactttaatcttcttaaaggttctgaaaatgaaaatgcgatagatgtttcatctttaaggtcagaagctaatttaattactctagacccaggattcaaaaacactggatcatgtaaaagttcaatcacatttctagatggcgaaaaaggaatacttagatatagaggttactcaattgaagatttagcaaaaaatgcaaattttcttgaagttgcatttttattaatttttggagaacttccaacaaaaaaagaattagaaaaactcatttcagatatacaagagaacgcaataattgatgaggatttaaaaaagattttagtaagctttccaagatctgctcacccaatgggaatactctcatctttaaccagtgctctaattgcttttaatcctgaaaagaaaattagtttaaataaaaaaacaggtgatggccatacctatatgtataacttgatagttaaactactagctaaaattccaatactcgttgcatgggttcacagaagaagaaaaggtttatctcttgattatggtgattatacacaaggatatgttgaaaatattacaaaaatgatgtttcaacttccaaatcaagcatatgttaaaaatgatgttatcgttaatgctatgaataaacttttaatccttcatgctgatcatgaacaaaactgctcaacatctacagtaagaatagtgggttcatctgaagctagcttatttgcttcagtatcagctggtatatcagcattgtgggggagacttcatggtggtgctaatcaagcggttttagaaatgttagaagctattaaaaatgatggaggtgatactaaaaaatttatggagaaagcaaaggacaaaaatgatcctttcagattgatgggctttggtcatagagtttataaaaactttgatcctagagcaaagattattaaagtagctgctcatgaagtattaaaagatttaggaattaaagatccaatacttgacatagctaaatcgttggagaaagaggcactaaatgatccatatttcacaactagaaaactttatccaaatgttgatttttactctggaataatatataaagcattacaaattcctaccgaaatgtttactgtaatgttcgctttaggtagagttcctggctggattgctcattggagagagatgaggatgaataatgatccaattggaagaccaagacaggtttatacaggaagtaaccagcgtgatttcgtatctataaataaacgatagt

SEQ ID NO: 236474 - DNA, 412 bp, Unknown
  Bacterial polypeptide expressing nucleotide sequence isolated from the Sargasso Sea
tatggctgatttaaaagccaaattagaattaccagggaatgactcgatagagttgccagtaaagcaaggatccgctggttttgacgtaatcgacatcagtaaacttggcagcaaaggttacttcacctttgatccgggttttcttgcgacagcctcctgcgaatctgcaattacctatattgatggcgatcaaggtatattgttacaccgcggctatccaatcgagcaacttgccgttgactccgattacctagacctgtgttatctgctgctttacggtgaactgccgacaaaagagcaatatgctgaatttgtacacacagtcaaaacccacactatggtgcatgagcaaatcgccttcttctttagaggcttccgtcgtgatgctcatcctatggcgatgttgtgtggt

SEQ ID NO: 236475 - DNA, 985 bp, Unknown
  Bacterial polypeptide expressing nucleotide sequence isolated from the Sargasso Sea
gaagttgcctatatgcttctttatggaaaattacctaatcaagacgaatatgactcttatacctctaagctcaggaactatagagatttaccaagagagttaaaaaatgttttaacagcaataccaaaagaaactcatcccatggatgtgcttcgaactggtacttctatgttaggaaatcttgagccagaaggggattttactaatcaaaatgatacagctgataggattcttgctgccatgccttcaataatgacatattggtatagagcatctcattttggcgaagatatagatactcttacagatcataaaactatgggcggtcagtttttaagtttacttacaggaagtgagccaagtgatgaacacattagagcacttgatacttctcttatttgctatgcagaacatggctttaatgcatcgacatttacagctagaacatgcgcatcaactctgtctgatatgcactcttgtattactgctgcaataggaacattaagaggtcctctgcatggtggtgctaatgaagcagctatggaaatgatagaaagattttcttcaagggaagatgctaatgttggtgtgaagaatatgcttgcaaacaaggaaaagattatgggtttcggtcatgcagtttattcagatgaggatcccagaaacaagattgtaaaagcttgggcaaagaaacttagctcaaatgcatcaaacccagttatttatgaagtttctgaagaaattgaaaaggtaatgagcgaagaaaaaaatctctttgcaaatacagatttctatatggcatctgcatataattttttaggcataccaacaccaatctttactccactttttgtaattggcagaacctctggatgggctgctaatgtgatggagcaaagagcagataatagaattataagaccaagtgaagaatatattggacctgaatctgcgacttggattgatcttaaagatagagattaaa

SEQ ID NO: 236476 - DNA, 630 bp, Unknown
  Bacterial polypeptide expressing nucleotide sequence isolated from the Sargasso Sea
aatgaagctagctgacaacaaagccaccctgtcgttcagtaacggcagccccagcgtggacctgccggtctatcagggcagcatcggcccggacgtcatcgacatccgtaagctgtatgcgcagacgggcatgttcacctatgacccgggcttcctgtccacagcagccacccagtcggccatcacctacatcgatggcgacaagggcgagttgctgtaccgcggctaccccattgagcagctggccgaaaactgcgacttcctggaaacctgtcacctgctgctgtacggcgatctgcccaacgcagctcagaagaccgacttcaccagccgcgtgaccaaccacaccatggtcaacgagcagatgcagttcttcctgcgtggcttccgccgcgacgcgcaccccatggctgtgctgactggcctggtgggcgctctttcggccttctaccacgacagcacggacatcaacaatccgcagcaccgcgagatcgccgctatccgcctgatcgccaagatgcctaccctggtcgctatggcctacaagtacggcatgggccagccctacatgtatccgcagaaccacctgagctatgcaggcaacttcctgcgcatgatgttcggtacgcc

SEQ ID NO: 236477 - DNA, 1090 bp, Unknown
  Bacterial polypeptide expressing nucleotide sequence isolated from the Sargasso Sea
ggacaggtgctgggtaacactgctttatcaccagtagggaaaacaggaaaagggttaacatatcgaggatatgctatagaagaattggctgagaaagctacttttgaagaagtcgcttacatgttgctgtatggcaaattacctactcaatctgaatataatgaatatgctgtaaaacttcagtcataccgctcgttgccaaatgagcttaaagaagttttagaaaggattcctcaagatgcccatccaatggatgtcatgagaacgggttgttctatgttgggaaacttagaacctgaaggtgatttttccaatcaaaacgagacagctgataggatcttagcttctatggcttctgttattacttactggtatagatactcacacgagggtgttaaagttgagactgagacagatcatgccactattggtggtcaatttctttctttacttacaggcagagaaccttcagaagaacattctagagctttagatgtctctcttattttatatgctgaacatggctttaatgcgtcaacctttacagccagaacttgcgcttcgaccttatcagatatgcattcttgtattacaggtgcaataggaactttaagagggcctttgcacggaggggccaatgaagcagcaatggaaatgattgaaaaatttaatactagagaagaagcaaaatctggagtcttagatttattagcaaataaagaaaagataatggggtttggtcatgccgtttacagcactgaagatcctagaaatgccatcatcaaggaatggtctaagaaattatcaggtttagatggcgatgctactttgtatgaagtttctgatgaaattgaaaaagtcatggatgaagaaaaaggcatgtttgctaatacagatttctttatggcttctgcttaccactatttaggtatcccaacacagatatttactccactttttgtgattggtagaacctctggttgggctgcaaatataatggaacaaagagccgataatagaatcattcgtcctagtgaagaatacattggcccagataactctgtttgggttgatatggcagatcgttaat

SEQ ID NO: 236478 - DNA, 1126 bp, Unknown
  Bacterial polypeptide expressing nucleotide sequence isolated from the Sargasso Sea
aatgagtgaagaaataaaaaaaggtttattagggatagtagttgatgaaactacgatatcacatgttgttccagaattgagcacgcttacttacaggggttatacggttcaagaattatgtgacaaatgtgattttgaggaagtggcctacttagttttacacggagaattaccaaacaaaaaacaattaaaaaaatttattaaagatgaaagatcagagagaaaactttcaaaacaaattttaaatgatattcaaaaaatgccaaagactgcacatcctatggatgttattagaacttgtgtgagtttgatggctttagaggataaagacacaaaagataactctcctaaagccaacatgagaaaagcaatgagaatttttgcgaagacgcctacagcagttgcggcctattttaggtatcgaaaaggtaaaaaaattatttccccagacaaaaaattgtcattttcacaaaattttttcaaaatgatgtttaataaagttcctgataaagagattgttagagcttttgatatttctctaattctttatgctgaacatagttttaatgtttcgactttcactgctagaacaataacaagtagcttgtctgatttacacggtgctattacaggagcgatagcctcacttaaaggtcctttgcacggtggagctaatgaagccgtaatgcacatgatgaaagaaataaaaaaacctgaaaaagctaaagcttggattgaaaatgcattagataagaaaaaggttattatgggatttggtcatagagtttatagaactggagactcgagagtgcctactatgaaacattatatgtttaaagtggcaaagcttttaaaaaaagagaaatatactcaaatatacgaaatattagaaaaggttatgttagagaaaaagaatatacaccctaatgtagattttccatgcggacccacttattacatgatgggaatagatatagacttttatactcccatatttgtaatgtctagaattacaggttggtcagctcatataatggagcaacatgcttcaaacaaattgattaggccactatcaaaatataaagggcaagaagttagagaagtaatgttgctaaatcagagataa

SEQ ID NO: 236479 - DNA, 256 bp, Unknown
  Bacterial polypeptide expressing nucleotide sequence isolated from the Sargasso Sea
aatgactgataaaattaaagaaaaagctaatttaaaaatgaatgataacctttatgatttcgatgttcatgaaggtacaattggtcctgatgttcttgatatttcaaaattatatgctcaatctggaaaatttacttacgatcctggttttacttctacagcaaattgtaaatcaacaattacttatattgatggtgaagaaggaactcttctatatagaggataccctatcgatcaacttgctgagcataggtaa

SEQ ID NO: 236480 - DNA, 820 bp, Unknown
  Bacterial polypeptide expressing nucleotide sequence isolated from the Sargasso Sea
ttgatgggtcttgaagacaaagacgcaagtgacaattctccaaaagcaaatatgagaaaagcgatgagaatttttgctcaaacacctacagccgttgctgcttattttagagcaagaaaaggtaaaaaatttatacctcctaataaaaaattatcgtattcagaaaatttcttccatatgatgtttggtaaagttccaaataaagaaatagtagaagcttttgatgtttcaatgatactttatgcagaacatagttttaatgtttcaactttcacagcaagaacaattacaagtagtttgtctgatatgcatggtgcaataacaggagcgattgctagtcttaaaggacctttgcatgggggtgctaatgaagcagtgatgcacatgtttaaagaaattaaatcacctcagaaagctaaatcttggattaataatgcattagataagaaaaaagttgttatgggttttggtcatagagtctatagaagcggtgactctagagttccaaccatgaagaaatattttttgaaagtagccgagttaatgaaaaacactaaatatccggagatgtataatactttggaagaagtaatgcttgaaagaaaaaatattcatcctaacgttgattatccatgtggaccaacttaccatttgatgggaatagatacagatttttttacacctgtttttgtcatggctagaattactgggtggtctgctcatatcatggagcaacatactgcaaataaattaattaggcctttatctaaatataaaggaagtgagcacagagaggtcctagctttgaatataagataat

SEQ ID NO: 236481 - DNA, 970 bp, Unknown
  Bacterial polypeptide expressing nucleotide sequence isolated from the Sargasso Sea
catgctcttatatggcaagttaccaaatcaatcagaatatgatgaatattcttcaaagttaaagtcataccgatctctaccaacggaacttaaagaagttttagaaagaatacctcaagatgctcatccgatggatgttatgagaacaggatgttctatgttaggaaacctagaaccagaaggtgacttttcaaatcaaaatgaaacagctgatagggttttagcttccatggcttcaattattacgtactggtatagatattcacatgatggtgttaaggttgagacggcaactgatcattctactattggtggtcaatttctctctttacttacaggtaaagaaccatccgaagatcatgctagagctttagatgtttcacttattttatatgctgaacatggttttaatgcttcaacctttacagctagaacctgcgcttcaaccttatcagatatgcactcatgtattacgggagcaataggaactttaagaggccctttgcacggtggcgctaatgaagcggcaatggagatgattgaaaaatttaatactagagaagaagcgaaatcaggagtcttgaaattattggcaaataaagaaaagattatggggtttggtcatgccgtttacagtacggaagatcctaggaatgcaatcataaaagaatggtccaagacattatcaagtttagatggtgatacaacgttatatgaagtttctgatgaaattgaaaaagtcatggatgaagaaaaaggtatgtttgctaacacagatttcttcatggcttctgcttaccactatttaggtatcccaacacagatatttacgccactttttgtaattggtagaacctcaggttgggcggcaaacataatggagcaaagagctgacaatagaataattcgtccaagtgaagagtacattggtccagataattctgtttgggttgatatagcagaccgttaa

SEQ ID NO: 236482 - DNA, 1129 bp, Unknown
  Bacterial polypeptide expressing nucleotide sequence isolated from the Sargasso Sea
tatgtcagacgcaaaaaaattaactggtgcaggattacgtggccaaagcgcgggtgagaccgcattaagtactgtaggtgtatcgggcagcggcctaacttaccgcggttacgatgtgaaggatctggccgaaaacgccaccttcgaagaagtcgcctacctgatcctttacggtgagctgcccaccactgcacaactcgagtcctataaaaccaaactcaaaggcatgcgcggcctgccacaggcattaaaagaagtgttagagcgcattccagccgacgctcatccaatggatgtgatgcgtaccggttgctctatgctgggtaaccttgaagctgagcacaactttagcgagcaaagccaaattgccgatcgtttactggcggctttcccatcgatcatttgctactggtatcgctttagccacgatggcgtacgcatcgatacagaaaccgatgacaatcaaatcggcgcccatttcttacacctgctgcacggcaaagccccatcggcgctgcacgctaaagtaatggacgtttcgttaattctgtatgcagagcatgagtttaacgcttcaacctttaccgcccgtgtgtgtgcatcgaccctgtcggacatgcattcttgcgtaactggcgcaatcggttcactacgtggcccactgcatggcggcgccaacgaagcggcgatggaactcattcaagatatgaaagacgaagccgatgcccgcgatgtgctcatgggtaaactcgagcgcaaagaaaagattatgggctttggtcacgccatctaccgagattcagatcctcgtaacgccatcatcaaagaatggtcagaaaaactggccgcagattatggcgatgatcgcctctaccgcgtatcggtcgcctgtgaagccctgatgtgggaacagaaaaaactcttctgcaatgccgacttcttccacgccagtgcttaccacttcatgggcattccaaccaagttgtttaccccaatcttcgtttgttcacgggtaacaggttggacggcgcacgtgatggagcagcgttcaaacaaccgcatcattcgtccaagtgccgattatgtgggtgtatcaccacgcaaagtggtacccattgccaaccgttaa

SEQ ID NO: 236483 - DNA, 634 bp, Unknown
  Bacterial polypeptide expressing nucleotide sequence isolated from the Sargasso Sea
tgacataattgtaaacgcattaaatacactattaatacttcatgcagatcatgagcaaaattgttctacttcaacagtcagaatagttggttcatcttacgctggaatgtacgcatcgatttcagctggaatatctgcactatggggaaggcttcacggtggtgcaaatcaagcagtaattgaaatgttggaacttatcaaaaatgataattcagatattgataaatacctaaataaagcaaaagataaatctgatcctttcagattgatgggctttggtcacagggtatataagaattttgacccacgtgcaaaaattataaagaaagcagcagaccaggttttaaatgatctaggtatagacgatcctattcttgaaatagctaagacaattgaagataaggctttaaatgatgaatactttattcaaaagaaactatatccaaatgttgatttttactcaggtattatatacagagcacttggaatacctactgatatgtttactgtaatgtttgctttaggtagaatacccggttggattgctcaatggaaagaaatgagagattcaaataatccaattggtagaccaagacaaatctataacgggcctactcataggtcaatttcataa

SEQ ID NO: 236484 - DNA, 748 bp, Unknown
  Bacterial polypeptide expressing nucleotide sequence isolated from the Sargasso Sea
tggcttcttttgcttcatagttacgtattggtatagatactctcatgacggagttcgagttgaaactgaaacagatcatcctactattggaggtcaatttttatccttacttactggaaaagaaccatctgaagaccatgctagagcacttgatgtttcgttgatactttatgctgagcatggctttaatgcatctacttttacggccagaacttgtgcatcaacattatctgacatgcactcttgcattacaggtgcaattggaactttaagggggcctttgcatggcggtgcaaatgaagctgcaatggaaatgattgaaaaatactccagccgagaagaggctaaagaaggagttcttgatttgctggataaaaaagaaaaaataatgggctttggacatgctgtttacagtactgaagatcctagaaatgcgattattaaagtttggtcagaaaaactttcaaaactaaatggtgatactacacttttcgaagtttccgacgaaatagaaagagttatggatgaagaaaaaggaatgtttgctaatactgacttctttatggcctctgcatacaactatctaggtatacctactgcaatattcactccattatttgttataggcagaacctcaggttgggctgcaaacattatggagcaaagagctgacaacagaattattcgtcctagtgaagagtatatcggaccagataactctgtctgggtcgatatgtccgatcgttaa

SEQ ID NO: 236485 - DNA, 1084 bp, Unknown
  Bacterial polypeptide expressing nucleotide sequence isolated from the Sargasso Sea
attgatgggaaagaagcttgaaggagccggattaagaggtcaagtcgcaggagaaactgcactttcaaccgtaggtaaagagggtaaaggcctgacttacagaggttatgcgattgaagatttagcggagaaagcaacttttgaagaagttgcctatatgcttctttatggaaaattacctaatcaagatgaatatgactcttatacctctaaacttaggaactatagagatttaccaagagagttaaaaaatgttttgacagcaataccaaaagaaactcatcccatggatgtgcttcgaactggtacttctatgttaggaaatcttgagccagaaggagattttactaatcaaaatgatacagctgatagaattctagctgccatgccttcaataatgacatattggtatagagcatctcattttggcgaagatatagatactcttacagatcataaaactatgggcggccagtttttaagtttacttacaggaagtgagccaagtgatgaacacattagagcacttgatacttctcttatttgctatgcagaacatggctttaatgcatcgacatttacagctagaacttgtgcatcaacactgtctgatatgcattcatgtattactgcggcaataggaacattaagaggaccacttcatggtggtgctaatgaagcagctatggaaatgatagaaagattttcttcaagggaagatgctaatgttggtgtgaagaatatgctagcaaacaaagaaaagattatgggtttcggtcatgctgtttactcagatgaggatcctagaaacaagattgtaaaagcatgggcaaagaaacttagttcaaatgcatccaaccctgtcatttatgaggtttcggaagaaattgaaaaggtaatgagcgaagaaaaaaatctctttgcaaatacagatttttatatggcatctgcatataattttttaggcataccaacaccaatctttacgccactttttgtaattggtagaacctctggatgggctgccaatgtgatggaacaaagagcagataatagaattataagacctagtgaagaatatatt

SEQ ID NO: 236486 - DNA, 1012 bp, Unknown
  Bacterial polypeptide expressing nucleotide sequence isolated from the Sargasso Sea
gatttagcaaataaaagtgattttttagaagtttgttatttattacttcatggcgacctaccctctcctgaagataaagaaaaatttgaaaatgtaattcaaagacatactatggtgcatgaacaattggtaaatttatatagaggttttaggagggatgctcatccaatggcaataatggttggtgttgttggagcattatcagctttttatcatgatagtactgatttttcagatataaatcaaagaatgattgcttgtcataggttaattgcaaaaatagcaactattggcgctatggcctataaatattctattggtcaaccatttgtgtatccaaaaaataatctatcttattgtgaaaatttcctacatatgacattttcggtccctacagaagattatattattaatccaaaaatttcaaaagccatggatcgtttttttattttacatgctgatcacgagcaaaatgcttctacatcaactgttaggctcgcaggatcgtctggagctaacccatttgcctgtatagcagcaggaattgcttctctatgggggccagctcatgggggtgctaatgaagcagtaattaaaatgttagaaaatattggagatgtttctaaaatacctgaatatatcaatagagctaaagacaaaaatgatgactttaggttaatgggttttggtcatagaatttacaagaattatgatccaagagcagatgtaatgaaaaaatcagctcatgaagttttaaaagaattaggtatggaagatgacaggcttttgaaaatagctatagaattagaaaaaattgctttaaaagatccatactttattgaaaaaaaactttatcctaatgttgatttttattcaggaataattcttaaagctttaggattcccaacaagtatgtttactgtaatatttgctataggaagaacagttggttggatctctcaatggaaagagatgatagaagatcctataaataaaattggcagacccaaga

SEQ ID NO: 236487 - DNA, 901 bp, Unknown
  Bacterial polypeptide expressing nucleotide sequence isolated from the Sargasso Sea
cataggggatatgatatcaaagatttaacaaagaatagcgattttcttgaagtttgttatcttcttcttcatggcgatcttccatcacttgaagataaaaataaatttagtaaagcaatattaaatcacacaatgcttcatgaacaattagtttatttatatagaggatttagaagagatgcgcacccaatggcaattatggtaggagttgttggcgctctttctgcattttatcatgacagtactgatttttcagatttaaatcaacgaatgatagcatgtcatagattaattgcaaaaatacctacgattggggctatggcttataaatactctatcggacaaccatttgtttacccaaaaaataatcttacatattctgagaattttcttaatatgactttttcagtacctactgaaaactatgaaataaatccgataatttctaatgctatggataaattttttattttacatgcagatcatgaacaaaatgcttcaacttcaacagtaagattagcaggatcatcaggggcaaatccatttgcttgtattgctgcaggaattgcctcactatgggggcctgcacatggaggtgcaaatgaagcagtaattatgatgttagaaaaaattggcgatattgaaaatattcaagaatatattgaaaaggcaaaaaataaagatgatccatttagattaatggggtttggtcatagagtatacaaaaattatgatccacgtgcagaagtaatgaaaaaaactgcccatgatgttcttaaagaattaaataaaatggatgacccacttcttaagattgctttaaaacttgaagaaattgctcttaatgatcaatattttattgataaaaaattatatcctaatgtagacttttattctggaa

SEQ ID NO: 236488 - DNA, 685 bp, Unknown
  Bacterial polypeptide expressing nucleotide sequence isolated from the Sargasso Sea
gatgtttggcgtgccgaccgaggagtacaaggtcaaccccatcgtcgaacgcgccatggaccgcatcttcaccctacatgcggaccacgagcagaacgcctccacctccaccgtgcgtctggccggctcctccggcgccaacccgtttgcctgtatcgccgcggggatcgcctccctgtggggaccggcccacggcggtgccaacgaagcctgcctcaagatgctcgaggagatcggctccgttgaccgcatccccgagtacatcgccaaggccaaggacaagaacgatccgttccgtctgatgggcttcggccaccgggtctacaagaaccacgacccccgtgccaccgtgatgcgcgaaacctgtcacgaggtactgaccgagctgcagatcaaggatccgttgctggacgtggccatggagctggagcgcatcgcgctctccgacccctacttcatcgagaagaagctctacccgaacgtcgacttctactccggcatcatcatgaaggccatcggcatccccatgtccatgttcaccgtgatcttcgccatctcccgtaccatcggctggattgcccactggaacgaaatgcactcggatccggatcagaagatcggccgtccgcgtcagctctataccggtcagccgcagcgcgagttcaccccgctcgaccagcgttga

SEQ ID NO: 236489 - DNA, 968 bp, Unknown
  Bacterial polypeptide expressing nucleotide sequence isolated from the Sargasso Sea
aataatcccaaattctactaaatcatgggcaaaaaaaattacacttaagaatgatatacagagtgttgatctcgaaatcaaagatgcgtcagtaggacccagcgtcatagatttgaaaagcctctacaatgatacaggctattttaccttcgatccttcatactcgacgacagctagctgcgaaagtaaaatcacctatatcgatggagccaaaggaatcctagaatacagaggatatccaatcgaacagcttgcagagcaaagcacttatttagaggttgcatacttgctattcaatggtgagctgccatcgagcaatatttcacttaatgaatttagatcgcaagtgaagaaaaacatgagtttgccagagaatatgagcggaatcttcacaggctttggaaaagatgcacatccaatggcgatgctcacgacagccgtagcggcactctcaggatcttatcatgagggaataaacgtaagagatgaagatcatcaaaaagaattcttctttaatattcttggtaagatgccaatcttggttgccaatgtttttaatcacaaccaagaagatgcaaatgttgggtatgacgaatcactttcgtatgcagaaaatattttgagattattctttgggtggaaagatggatatgaaattaacccgatcttttcaaaagctctcgatattcttttgatactccatgctgatcatgaacaaaactgcagcacctcatctgtcagactaacaggaagctcaggaacaaacccatacgctgctatagccgctggagttgctgctctatggggtcctgcacacggaggagcaaacgaagcagtagtcaaaatgtttggtgaaattggatcgaaagataatatctctaaatacattgataaggcaaaagataaaaatgacccatttcgtttaatgggctttggacatcgtgtctacaaaaattatgacccaagag

SEQ ID NO: 236490 - DNA, 685 bp, Unknown
  Bacterial polypeptide expressing nucleotide sequence isolated from the Sargasso Sea
ttcttcggatggaaagatggctatgaaatagaccctattctctcaaaggctcttgatattctcttgatacttcatgctgaccatgagcagaattgcagtacctcttctgttagattaactggaagctctggcacaaatccctatgcagcaattgcagccggagttgcagctctatggggccccgcacatggaggagcgaatgaagctgttgttagaatgtttgatgaaattgtgacaaaagacaatattcctaaattcattgagaaggcaaaagataaaaatgatccatttaggctaatgggttttggtcatcgcgtttataaaaattacgaccctagagcaacaataatcaggagtcagtgccataaagttttggagtcaaccggcaatgactctaatccgatgtttgagcttgcacttgaactagaagaaatcgctttaaatgatgaatattttgttgagaggaatctctaccccaacgttgatttttattcaggattgatttaccaggcaatggatatccctaaggagatgtttactgcaatgtttgccttggcaagaactgtcggatgggctacacattggtgtgagatgatgtctaatcctaaacacaaaattggtcgtccaagacagctctatctaggcgaaaaaaagagagactacattccaatcagtgatcgctaga

SEQ ID NO: 236491 - DNA, 811 bp, Unknown
  Bacterial polypeptide expressing nucleotide sequence isolated from the Sargasso Sea
actgcactcgctagctaaagtgttcacttatgatccaggatttacttcaacagcatcatgtgaatcaaaaattacatacattgatggtgataaaggtattttaagatatcgtgggtatgatatagaagaattggcaaataaaagtgactttatagaagttgtaaacttattaatttatggcgatttacccaataaagaacaactaaaaaaatataaaaaacttattactcgtcacacacttttgcatgaacaaattataaacttttttcaaggtttcagacgtgatgctcatccaatggcaatgatggtcggagttatgggggcattatcctcattttatcaagacaccttggatatcaatgatgcccatcaaagacaagaggcaactagaagaataattgctaagtcatcaaccatcggtgctatggcgtataaatattcaattggtcaagcttttgtctctccaaaaaacaacctatctttttcagaaaattttttacatatgtgttttagtaatacggcggaggaatacaaaatctctcctgttatatctaaagctatggatacaatatttattttgcacgcagatcacgaacaaaatgcttctacatctacagtgcgtttggctggctcatctggtgctaatccatttgcttgtattgctgcaggagtctcgtctttgtgggggcctgctcatggaggagctaatcaagcagccttagaaatgcttgaagaaattggatcaacaaaaaatataagaaaatatctaaacaaagcaaaatcaaaaaaagatccatttaaattaatggga

SEQ ID NO: 236492 - DNA, 856 bp, Unknown
  Bacterial polypeptide expressing nucleotide sequence isolated from the Sargasso Sea
ttgttattacatggtgaacttccatctcctgaagataaaaagcaatttaatcaagttataattaatcataccatgcttcatcagcagttagtgaatctttacggaggttttagaagagatgcacacccaatggcaattatggtaggagttgttggtgctttatctgctttttatcatgatagtacagatttttctgatattgagcaaagaatgatagcttgtcatagattaattgctaaaattccaactattggtgctatggcatataaatattctgtagggcagccctttgtttatcctaaaaatgatttaacttattcggagaatttattatatatgacattctctgtacctactgaagaatttcgtattagccctaaaatagttaaagctttggataaatttcttattttacatgctgatcatgaacaaaatgcatcgacttccactgtaagacttgcaggatcatcaggtgcaaatccctttgcttgtattgctgctggaatagcttccttatggggacctgctcatggaggagcaaatgaagcagttattaagatgcttgaagatattggtgatatttcaaatatctcaaaatttatagccaaagcaaaagacaaaaacgatcctttccgtttaatgggttttggtcatagagtttataaaaattatgatccaagagctagtgttatgaaagaaagtgcacatgaagttctaaaagaattagataatggtaatgatccacttttaaatattgccttagaattagaaaaaatagctttaaaagatgaatattttattgaaaagaaattatatcctaatgtagatttttattcaggattaatactaaaagctt

SEQ ID NO: 236493 - DNA, 518 bp, Unknown
  Bacterial polypeptide expressing nucleotide sequence isolated from the Sargasso Sea
catgtcaaataattcatattcagaaaaaaataaaattatctttaatggtaaagaattagaattagaaactttatctgggtcagttggaccagatgtagtggatatcagatctctttatagtaatttaggcatatttacctatgaccctggttatggatcaacaggttcgtgtgagtcagcaataacatatatcgatggtgaaaaaggtgttttattacatagaggttatccaatagaccaattagccaataaaagtagttttttagaagttgcttacttattgcttaatggtgaattacctaataagcctgaaaaagatgaatttgaaaatgctattacttttcatacaatggttcatgaacaattaattaatttctataggggatttaggcgtgacgctcaccctatggctataatggtaggagttgtaggtgctctttcagctttttatcctgattcaaccaacattaatgatccttatgagagattagtctcctctagaagattaatagccaaaa

SEQ ID NO: 236494 - DNA, 514 bp, Unknown
  Bacterial polypeptide expressing nucleotide sequence isolated from the Sargasso Sea
ttatggggtcctgcacatggaggagcgaacgaatctgtggttagaatgtttgatgagattgggtcaaaagacaatatttctcaatacattgagaaggcgaaagacaaaaatgatccatttaggctgatgggatttggacaccgtgtttataaaaattatgatcctagagcaacaataattagaagtcagtgccataaagttttggaatcgaccggcaatgactctaatcccatgttcgaacttgcgcttgagttagaagaaattgccttaaacgatgactattttgttcagaggaacctctatcccaatgtcgatttttattctggattgatttatcaggcaatggatattcctaaggagatgtttactgcaatgtttgccttggcaagaactgttggttgggcgacacattggtgtgagatgatgtctaatcctaagcatagaataggtcgtccaagacagctctatctaggcgaaaaaaagagggactatgtcccactcagtgatcgctaga

SEQ ID NO: 236495 - DNA, 745 bp, Unknown
  Bacterial polypeptide expressing nucleotide sequence isolated from the Sargasso Sea
tatggtagaaacttcaaaaacggcaaagcttttacttgacggtaaggagtacgacttgccaattatgtctcctacggcaggtcctgacgtactagatataagaaagctttacggtgaggctggagtttttacatatgaccctgggttcacgtcgaccgctagttgtgatagcacaattactttcattgacggagggaagggtgaacttcttcatagaggataccctattgaccaacttgcagaacattcacactatttagaagtctgttatcttctcttatatggaaatttaccaaaaccagctgagctggaagatttcgaaaatagagtgactaatcacacaatgattcatgagcaaatgggctatttatttcgcggctttagacgtgatgctcaccctatggcgataatgacgggcgttgttggagcaatgtccgccttttatcacgatagcactgatataaatgatccgtggcaacgcgaagttgcctcaatacgaatgatcgcaaaaatgccaacaattgcagctatggcatacaaatatactataggccaaccgtttgtttatccacgcaatgacctagattatgcgtcaaactttttacgaatgtgttttgctgtacctgctgagaattatgaggttaacccaattttaagcagagcaatggaccgaatatttacgctgcatgctgatcatgagcaaaatgcttcgacgagtacagttcgtctggcatcaagctctgga

SEQ ID NO: 236496 - DNA, 499 bp, Unknown
  Bacterial polypeptide expressing nucleotide sequence isolated from the Sargasso Sea
catgggtggtgcaaatgtagctgcattaaacatgctaaaaacaattggagatgtaaaaaatattaaaaaatacatagataaagccaaagacaaaaatgatccctttagacttatgggatttggtcacagagtttataaaaactatgatccaagggccaaagttatgcaaaaaacatgtcacgaagttcttgatgaagtcggaagaaccgatgataaattattagaagtcgctaaagaattagaaaagattgctttaaatgataaatattttatcgaaaaaaaattatatcctaatatcgatttttattcaggtataactttaagtgctatgggtttcccgtcctcgatgtttacagttttatttgcaatcgctagaactgcgggatggcttgctcattggaaagaaatgtgtcttgatcctaaaaacaaaataggtagaccaagacagctatacactggagaaaagcctagaaaatttaaacctttacaaaaaagataa

SEQ ID NO: 236497 - DNA, 620 bp, Unknown
  Bacterial polypeptide expressing nucleotide sequence isolated from the Sargasso Sea
actgcccaccgcagaacagaaagaaaagtttgtcagcacggtgaaaaaccacaccatggtgcacgagcagattcgtaatttcttcaacggtttccgccgtgatgcgcaccccatggccatcatgtgtggcgtagtgggcgccctgtccgccttctaccacgactctctggacatcaacaatcctgagcaccgtgaaatcactgcgtaccgtctgatcgccaagatgcctaccatcgcggccatgtgctataagtacgctttgggccagcctttcatgtacccacgcaacgacttgggttatgcggaaaactttctgcatatgatgttcggcaacccctgtgaagaatccaagatcagcccgaccctggccaaggccatggaccgtatttttatcctgcacgctgatcacgagcagaacgcctccacctccaccgtacgcttggctggttcctctggcgccaacccgttcgcctgtattgctgcgggcatttctgccctgtggggcccggcacacggcggcgctaacgaagccgtactgaacatgcttgatgaaatcggctcactggataacatcgacgcctacatcgccaaagcaaaagacaagaacgacccgttcaagc

SEQ ID NO: 236498 - DNA, 823 bp, Unknown
  Bacterial polypeptide expressing nucleotide sequence isolated from the Sargasso Sea
tctcacattatttaataatgatacaggtcaatcttttcaaattcctgtactaaaaggaaatgagggaccagatgtattagatataagaaatttatataatgaaacgggaatgtttacttatgatccaggtttcacttctacggcttcttgtaaatcttctataacttttattgatggtcataaaggtattctgagacatagaggttacaatattaaagatcttgcggctaatagtgattttatagaagtctgctatttattactgcatggtgatttgccctcttctgctgataaggaaaaattcgaaaaagttattactgatcatacaatgttgcatgaacaacttgtttatttatatagaggctttagaagagatgctcatccaatggctatcatggtaggagtagtaggagctttatcagcgttttatcatgacagtactgatttttcagatttaaatcaaagaatgattgcttcgcatagacttatcgcaaaaatagctactattggagcaatggcatataaatattctattggtcaaccattcgtatatccaaaaaataatttatcttacgcagaaaattttttacatatgacattttctgttcctactgaagaatataaagttaacccgataattgctaatgctattgataaattttttatcttacatgcagatcatgaacaaaatgcttcgacttctactgtaagattagcaggttcttctggtgctaatccatttgcgtgtatagctgctggcatagcatcattgtggggaccagctcatggtggagcaaatgaagcagttattcaaatgctgaag

SEQ ID NO: 236499 - DNA, 796 bp, Unknown
  Bacterial polypeptide expressing nucleotide sequence isolated from the Sargasso Sea
attgttagaaaaaacaaataaaactgcaaaaataacaatagatggaaaaactgtagaagtacctgttaccaagggtagcttagggccagacgttctagatataagaagcttatacaaacaaacgggattgtttacttttgatccaggatttacctcaactgcatcatgtgagagtgatatcactttcattgacggagacaagggggagcttctatatagaggatatccaatcgaacagcttgcagataagtctagctttttagaggtttcctatctcttactttatggagagttacctacaaaattacagtatgaggatttttcaagtaaagttacacgtcatacaatgctccatgagcagatgttaaatttttttagaggttttagacgggatgcgcatcctatggcgatcgtgtgtggcgtccaagccgcgatgtctgctttttatcatgacagtaccgacataaatgacccatggcaacgagaagtggcaactataagaatgattgctaagctcccaacaatagttgcttgggcttacaagtattctattggacaaccttttgcatatcccaaaaataatcttcaatatgctcagaatttcctgcagatgtgcttctcggtacctgccgaggattatgttgttgacccaatattaagtacggcgatggatagaatatttattcttcacgctgatcatgaacaaaacgcttctacgtcaacggtaaggttggctgcatcatccggggcaaacccttttgcttgtattgcagctggaattgcatgtttatgggga

SEQ ID NO: 236500 - DNA, 712 bp, Unknown
  Bacterial polypeptide expressing nucleotide sequence isolated from the Sargasso Sea
aatgatagcttgccatagattaatagcaaaaattccaactattggagcaatggcttataagtattctattggacaaccttttgtttaccctagaaatgatttatcatatgcagaaaatttactatacatgactttttcagttcctactgaaaaatttaatattagtcctaaaatagtgaaggctatggatcgatttttaattcttcatgcagaccatgaacaaaatgcctctacatcaactgttagactagcaggatcttcaggagcaaatccttttgcctgtattgcagcaggaattgcatctttatggggacctgcccatggtggtgcaaatgaagctgtaatcaaaatgttagaagagatagaacatatagataatatacctgattttataaatagagctaaagataaaaatgatccttttaggttaatgggttttggacatagagtttataagaactatgatcctagagcttcggttatgaaagaaagtgcacatgaagtactaaatgagttaaacaaaactgatgatcaactgttaaaaattgcgctggaattggaaaaaatagctttaaaggatgaatatttcattgaaaaaaaattatatcctaatgtagacttttattcaggtattattttaaaagcactaggattcccaactagtatgtttacagttttatttgcgataggaagaacggttggatggatatct

SEQ ID NO: 236501 - DNA, 709 bp, Unknown
  Bacterial polypeptide expressing nucleotide sequence isolated from the Sargasso Sea
tatgctcccattttttgcaatgtgcttttcagtccccgctgaagaatatgtgagtgatccaattttaagtaaagctatggataggatattcattcttcatgctgatcatgaacaaaatgcttcaacgtctaccgttaggcttgcggcttcctctggagcaaacccatttgcctgtatagccgcaggtatagcatgcctttggggccctgctcatggaggcgcaaatgaggctgcattaaatatgttgaaagaaatcggcgctcctaaccgaatacctgaatatattataaaggcaaaggataaaaatgatccatttcgactgatgggctttggtcacagggtatataaaaatttcgacccaagatcaagggttatgaagcaaagcgcagatgaagttctcgatttgctaggcatcaaagacaacccaacgcttcaagtagcaaaagagctagaaaaaattgctttggaagatgaatattttattgagaaaaaactgtacccaaatgtcgatttttattctggaataatacttgaggctatgaactttccaacttctatgtttactccaatttttgcactggctagaactgtagggtggcttgctcaatggcaagaaatgatttcagaccctaatataaagattggtcgcccaagacaacttttcaccggtgcaactcatagaacctataaggcttttgataagcgttaa

SEQ ID NO: 236502 - DNA, 799 bp, Unknown
  Bacterial polypeptide expressing nucleotide sequence isolated from the Sargasso Sea
gctacttatttattacatggagaattaccttcaccggcagataaagaaaattttgaaaatttaatttcaaaacatacaatggtacatgaacagttagtgcatttatatagaggattccgaagagatgctcatccaatggctattatggtaggggtagtaggtgctttatcagccttttatcatgatagcactgatttttctgatattaatcaaagaatggtagcttgccatagacttatagctaaaatagctacaataggagctatggcttataaattttctataggtcaaccttttgtataccctcgcaataatctatcttatacagaaaattttttacatatgactttctcagttccaacagaagaatacaaaatcaacccaaaaattgctagagcaatggatagattttttattttgcatgcagatcatgagcaaaatgcatctacttcaactgttagactagcaggatcatctggtgcaaacccatttgcttgtattgctgcaggaatagcttcattatggggtcctgctcatgggggcgctaatgaagcagtaataaaaatgttaaaagaaataggcgatgtttctaatatccctgaatatataaataaagcaaaagataaaaaagatccttttagattaatgggttttggacacagagtttataaaaattatgatcccagagcttctgttatgaaacaaagtgcccatgaagtattagaagaattaaataaacttgatgatccacttttgaaaatagcattagaattagaaaaaatagcattagaagattctt

SEQ ID NO: 236503 - DNA, 817 bp, Unknown
  Bacterial polypeptide expressing nucleotide sequence isolated from the Sargasso Sea
attggaagattttgaaaatagagtgactaatcacacaatgattcatgagcaaatgggatatctgtttcgcggcttcagacgtgatgctcaccctatggcgataatgacaggcgttgttggagcgatgtccgccttttatcacgatagtactgatatcaatgatccgtggcaacgcgaagttgcttcaatacgaatgatcgcgaaaatgccaacaattgcagctatggcatacaagtatacgatagggcaaccgtttgtgtatcctcgtaatgacctagattatgcgtcaaactttttacgaatgtgttttgctgtacctgctgagaattatgaagttaacccaattctaagtagagcaatggaccgaatatttacgctacatgctgatcatgagcaaaatgcttcgaccagtacagttcgtctggcatcaagttctggggccaacccgtttgcatgcatcgctgcaggcatagcatgtttatggggcccggcccatggtggtgctaatcaggcatgcctagaaatgctgcgtgaaatcggtacagcagatagaatacctgaattcataaagcgcgctaaggacaaagacgacccgtttcgacttatgggatttgggcaccgtgtttacaaaaatactgatccgagagcaaaagtgttaaaaaggtccgccgacgaggttctagatttacttggcgttaacaataatccactactccaagtcgcaaaacaactagaagaagtagcactgaatgatgaatacttcgctgataaaaagttgtttccaaatgtagatttctattctggtattatattagaa

SEQ ID NO: 236504 - DNA, 604 bp, Unknown
  Bacterial polypeptide expressing nucleotide sequence isolated from the Sargasso Sea
ttttgcgtgtgtttcagcaggaattgcttctttatggggccctgcacatggaggggcaaatgaagctgttatgaatatgcttcttaaaataaaaagaaatgcaaaaataaaggattttatcgatcgtgctaaagatccaaaagatacatttaaactaatgggttttggacatagagtttataaaaattatgatcctagagcatctgtaatgagagaagcatgtcataatgttctaaatgaattaggtagaaaaaataatcgttttttagctatagctcttgatctagaagatgcagcattaaatgataaatattttatcaaaaaaaaattgtatccaaatgtagatttttattctggaattttactttgggctctgggttttccactttctatgtatactgcagtatttgctgtagcaagaactgttggttgggtatcacattggaaagaaatgatcgaggatccaacaagaaaaatctcaagacctaggcaattatacactggttacaaaaaaagagattatattgaattagataaaagacaaaaaaattcaatattaaatactatttcttcaattattaaaaacagatatcaaaaatcataa

SEQ ID NO: 236505 - DNA, 964 bp, Unknown
  Bacterial polypeptide expressing nucleotide sequence isolated from the Sargasso Sea
ttgttatttacttttgcatggagaccttccttcctctgaagataaacaaaaatttaaagatgtaattactaaccacacaatgattcatgagcaacttgttcatctttacagaggatttagaagagatgcgcaccctatggctattatggttggtgttgttggtgccttatcagctttttatcatgacagtactgacttctcagatgttaatcaaagaatgatagcttgtcatagattaattgcgaaaatgcctacaattggtgcgatggcatataaatattctattggtcagccatttgtctatccaagtaatgatttatcatatgcagaaaattttttatatatgactttttctgttccaacagcagaattcaaaattagtccaaaaattgttagagcaatggacagattttttattctacatgcagaccatgaacaaaatgcatctacatcaactgttaggttggctggctcatctggtgcaaatccatttgcttgcatagcatcaggaattgcatcactttgggggcctgcacatggtggagcaaatgaagccgtaataaaaatgcttgaagaaattggagatgtgaaaaacattccagaatatattaaaaaagcaaaagataagaatgatccttttagacttatgggttttggacatagagtatataaaaactacgatccaagagctacagtaatgaaagaaagtgcccatgaagttttagaagaattaaataaacatgatgaccctctattaaagatagctttagagttagaaaaaattgctttaaatgatgaatattttattcaaaaaaaactatttccaaatgtagatttctactctggtttcatattaaaagctttaggatttccaactagtatgtttacagtattatttgccattggaagaactgttggatggatttcacaatgggaaagagatgatcgaagatccaataaataa

SEQ ID NO: 236506 - DNA, 571 bp, Unknown
  Bacterial polypeptide expressing nucleotide sequence isolated from the Sargasso Sea
aagtgaatttcttgaagtttgttatcttttactacacggagaattaccatcgcctgaaaataaacagaaatttaaagatgtaatcactaatcataccatgttgcatgagcaactagtaaatttatacagaggttttcgaagagatgcgcaccctatggcaattatggttggtgttgttggtgccctttcggccttttatcatgacagtactgatttttcagacattaatcaaagaatgattgcctgtcatagattaatagcaaaaattcccacaataggtgcaatggcatataaatattccattggtcaaccttttgtttatccaagaaatgatctttcttatgcagaaaattttttatacatgacattctctgtcccatcagaagattacaaggtgagtccaaaaattgttagagcaatggatagattttttacgttacatgctgatcatgaacaaaatgcatccacttcaacagtaagattggcaggttcctctggtgcaaatccttttgcttgtattgctgctggtattgcatctttatggggaccagctcatggtggggctaatgaa

SEQ ID NO: 236507 - DNA, 838 bp, Unknown
  Bacterial polypeptide expressing nucleotide sequence isolated from the Sargasso Sea
ccacgcttcgctggacctgtccgacgccgaacagcgtcgccagtccgccgtgcgcctgatcgccaaggtgccgaccctgtcggcgctgatctaccgccacggcaagggcctgccggccaacacgccggacacctcgctggactacgtcagccgcttcctgaagcagaccttcgagtccgccgacggccagtacgacctgaacccggacgtggtcaaggcgctggacctgctgttcatcctgcacgccgaccacgagcagaacgcctcgacctcgaccgtgcgcctggtcggttcgaccggtgccaacccgtacgcctcggtcgccgccggcgtcaccgcgctgtggggtccggcccacggcggtgccaacgaagccgtgctgaagatgctcgaggaaatcggttcggccgacaacgtcgaatcggccgtgctcaaggccaaggacaagacctccggcttccgcctgatgggcttcggccaccgcgtgtacaagaacttcgacccgcgcgccaaggtcatcggcgagatgaccagcaaggtgctcaagcagctgggcgtgcaggatccgctgctcgacgttgcggtcaagctggaacaggccgcgctgcaggacgactacttcgtcgcccgcaagctgtacccgaacgtcgacttctacagcggcatcatctacaaggcgctgcagatcccgaccgaaatgttcaccgtcatgttcgcactgggccgtacctccggctgggtcgcgcattggctggaacagcaggtcgacccggaaatgaagatcggccgtccgcgccaggtctacaccggcagcgacgtgcgcgactaccagggctga

SEQ ID NO: 236508 - DNA, 879 bp, Unknown
  Bacterial polypeptide expressing nucleotide sequence isolated from the Sargasso Sea
ggcgatcaaggtatattgttacaccgcggctatccaatcgagcaactcgccgttgactcagattacttagacctgtgttacctgctgctttacggtgaactgccgacgaaagagcaatatgctgaatttgtacacacagtaaaaacccacactatggttcatgagcaactcgccttcttctttagaggtttccgtcgtgatgctcatcctatggcgatgttatgtggtgttactggtgcattgtctgcattttatcaagactcactcgatgtcaacgatcctcgccaccgcgaaatcgccgcttatcgcctagtctccaaaatgccaacgattgccgctatgtgctacaagtactcttctggccaaccattcgtttacccacgcaatgacttaagctacgcaggcaacttcttaagcatgatgtttgccgtgccttgtgaagagtacaaggtaaacccaatcgttgaacgtgctatggaccgtatcttcattctacatgcggatcacgaacaaaacgcgtcaacgtcaaccgtacgtttagccggttcttcaggcgcgaatccattcgcgtgtatcgctgcgggtattgcttctctatggggccctgcacacggcggcgcgaacgaagcttgtctacaaatgttagaagaaatcggttcagtagaccgtattcctgaattcatcgcccgtgcgaaagacaagaacgacccattccgtctaatgggcttcggacaccgtgtttacaaaaactttgacccacgtgccaaagtgatgcgtgaaacctgtcacgaagtgttaaaagagctgaaagtacaagatccattattagatgtggctatggaacttgagcgtatcgcactggaagacgagtacttcatt

SEQ ID NO: 236509 - DNA, 632 bp, Unknown
  Bacterial polypeptide expressing nucleotide sequence isolated from the Sargasso Sea
tattttgcacgctgatcacgagcaaaatgcttcaacgtccacagtaagacttgctggatcatcgggagcaaatccttttgcgtgcatagcggcaggagtatcttcactatggggcccagctcatggaggtgcaaatcaggctgctttggaaatgcttgagcagataggctcatcgaaaaatataaaaaaatatataaacaaagctaaaaataaaaaagataaatttaaattaatgggatttgggcacagagtgtataaaaattatgatccaagagctaaaatattgaaaaagatatgtcaaaaagttttaaaccatattggaattaaaaatgatccaatattaaaacttgctatggatcttgaaaaaatagctttaaaggacaagtattttattgaaaaaaaactttatcctaatgtagatttttattctggaattatactcagagcaattggtttccctcctgaaatgtttactgtaattttcgctatctcaagaactgctggttggacggcacaatggacagaaatgattgaagatccaatacaaaagattggtcgtccaagacaattatataccggaagcaccaaattaaagtatgggctaaagagatcaaaaaagaatactaggtaaa

SEQ ID NO: 236510 - DNA, 654 bp, Unknown
  Bacterial polypeptide expressing nucleotide sequence isolated from the Sargasso Sea
ttttcggttccagctcaaaaatatgaatctcaaaagattttatctgacgcaattgaaaaaatctttattttacatgctgatcatgagcaaaatgcatccacatcaactgttagattagctggttcatctggagcaaacccttttgcatgtatttctgcaggcatagcatcactgtggggacctgcgcacggaggagcgaatgaagcagtattgaaaatgctaagagaaattgaagatgaaaaaaatatttcaaattatttaaaaaaagctagagataaaggtgatccctttagattatttggttttggacatagagtttataaaaactatgatcccagggcaaaagttatgcaaaaaacttgtcatgaagtattaagccttttaggcattaaaaatgacccccttttaactttagcaatgaagcttgagaatatagctttggaagatgattattttatagaaaaaaaactctaccctaatgttgatttttattcaggaataatacttaaagctatcgggtttccaactagcatgtttacagttttatttgcagttgccagaacagtaggatgggttgctcagtggaatgaaatgattgaagatcccaaccaaagaattggaagacctagacaattgtataccggacctaaaaca

SEQ ID NO: 236511 - DNA, 628 bp, Unknown
  Bacterial polypeptide expressing nucleotide sequence isolated from the Sargasso Sea
tatagaggttttagaagagatgctcatccaatggctattatggtaggagttgttggagctttatcagcattctatcatgatagtacggatttttctgacattaaccaaagaatgatagcttgtcataggttaattgcaaaaattccaacaataggtgctatggcttataaatattctattgggcaaccatttgtgtatcctagaaatgatttatcttatgcagaaaatttcctttatatgactttttctgttccaactgaagattttaaaattagtccaaaaattgttcaagctatggatagattttttattttgcatgctgatcatgaacaaaatgcatctacttcaacagtaagacttgcaggttcttctggcgctaatccctttgcatgtattgctgcaggaattgcatcattatgggggccagctcatggaggtgcaaatgaagctgtcataaaaatgctagaggaaattggtgatgttaaaaacatccctcaatatataaataaagctaaagataaaaatgacccttatagattaatgggttttggtcacagagtttacaaaaactatgatccgagagcaagtgttatgaaagaaagtgcgcatgaagttttagaagaactta

SEQ ID NO: 236512 - DNA, 926 bp, Unknown
  Bacterial polypeptide expressing nucleotide sequence isolated from the Sargasso Sea
ataggagatttaccaacaaacttagagatacagaagcttcaagaagatattagagaagaagctcttgtagatgaagacttaaagcaaatctttaaaagtttccctaaatctgctcatccaatgggtgtcttatcctctcttacatctgctttgatcgcatttaatcctttaaatgaaacaaaaatttcattaaaagatagcgcaggtacaactgaaaaagataaaatgtatttatctacaatcagacttcttgcaaagtttcctattatgtcatcttggacactaagaaaaatcaaaggtttgcctttaaattatagtaacaataatttagagtatacagaaaatattgcatatatgatgtttgctaagccaaatcaagattataaacaaaatgatattatagttaatgctttgaacacactcttgattcttcatgctgatcatgaacaaaattgttcaacatcaactgtaagaattgtaggatcatcatatgctggtttatatgcatcaatatctgcaggaatttctgccctttggggaagattacatggaggtgcaaatcaagctgtaattgagatgctagagttgattaaaaatgatggttcagatattgacaaatatattaacaaagcaaaagataagtctgacccatttagattaatgggatttggtcatagggtttataaaaactttgatcctagagcaaaaataattaaaaaagctgctgaccaagttcttaacgatcttggtattgatgatccaatacttgaaattgctaaatcaattgaagaaaaggcattaaacgatgaatactttatcgaaaaaaaattatatcctaatgtggacttctactctggtattatatacagagctttaggtattcctactgaaatgtttacggttatgtttgctctagggagaatacc

SEQ ID NO: 236513 - DNA, 833 bp, Unknown
  Bacterial polypeptide expressing nucleotide sequence isolated from the Sargasso Sea
cttcgagggattttccaccaccgcacacccgatggtgatcttgtcctcgatggtttcctccctttccgcctattattcggaagcatcaggtgccgcctctgtggaccagcttgaggtcaatactgccagactgatggcaaaaatacgtacgattgcagccttttccttcaaaaaatcgatcggccagccattcatttatccgcaggacaaactcgcctactgtgccaattttctgaacatgatgtttgccgttccggcagaaccttacaaagtcgatcccgagatctgcaaggctctcgatctgttgctgatccttcatgccgatcacgagcagaactgcagcgcttctaccgtccgtgtggtaggcagcagcatggctaatgtctacgcttcggtcgcttcaggcatcctcgcactttggggcccgcttcacggtggtgcgaaccagcaggtattgcggatgctggaacggatccacgccgacggagatgacctcgacaaatatgtccgtttggcaaaggaccctgattcggattttcgtctgatgggttttgggcatcgtgtctacaagaattttgacccccgtgcgacgatcatcaagagcgcctgcgaccgggtgctgaacctcctcggagttaacgatcccctgctcgatcttgcccgtaggctggaggaagttgccctctccgatgaatacttcgtcgagcgaaaactctaccctaacgtcgatttctacagcggcattatctaccgagcaatcggcatcccggagaacatgtttaccgtcatgtttgccctgggaagactgccggggtggattgcccagtggaaag

SEQ ID NO: 236514 - DNA, 970 bp, Unknown
  Bacterial polypeptide expressing nucleotide sequence isolated from the Sargasso Sea
aaactatatcagcagactggaatgtttacatatgatccaggtttcacatctactgcttcatgtgactcttcaattacatatattgatggaaataaaggtgttttaagacatagaggatataatatccatgatttagcaagtaatagtgaatttttagaagtgtgctatttattattacatggagatttgccttctccagaagataaacaaaagtttatagatgttattaccaatcatacaatgttgcatgagcaattggttcacttgtatagaggctttagaagagatgctcatccaatggctattatggtaggagttgttggagctttatcagcattctatcatgatagtacggatttttctgacattaaccaaagaatggtagcttgtcataggttaattgcaaaaattccaacaataggtgctatggcttataaatattctattgggcaaccatttgtgtatcctagaaatgatttatcttatgcagaaaatttcctttatatgaccttttctgttccaactgaagattttaaaattagtccaaaaattgtacaagctatggatagattttttattttgcatgctgatcatgaacaaaatgcatctacttcgactgtaagacttgcaggttcttcaggcgctaatccctttgcatgtattgctgcaggaattgcatctttatggggaccagcacatggaggagctaatgaagctgttataaaaatgcttgaggaaataggtgatgtaaaaaatattcctcaatatataagcaaagcaaaagataagaatgactcttttcgattaatgggctttggacatagagtttataaaaattatgatcccagagcaagtgtcatgaaagaaagtgctcatgaggttttagaagagctaaataaattagatgatcctcttttaaagattgctattgaattagaaaaaatagctctaaaagatgaatatttttgaa

SEQ ID NO: 236515 - DNA, 517 bp, Unknown
  Bacterial polypeptide expressing nucleotide sequence isolated from the Sargasso Sea
gcctttggggccctggctcatggcggtgcaaatgaagcatgccttaatatgttaaaagaaattggcacagccgacaatatccctaaattcatcgaacgcgctaaagataaagatgatccatttcgtttgatggggtttggtcatcgtgtttataagaactatgacccacgcgccaaagtcatgcagaaaacctgtcatgaagtgttagcagcacttgggaaagaaaatgatcctttatttaagctggcaatggatttagaaaaaatcgcgttagaggacccctacttcgttgagaaaaaattataccctaatgttgatttttattccggcattacattgagtgcgattaatattcctagcaatatgtttaccgtgatttttgcattatcgcgaactgtcggctggatttcacaatggatggaaatgatgagtgatcctgactatcgcctcgcgcgccccagacaattatatattggtgaaaaacaacgtgatgttttaaagcgcgacgaacgttaat

SEQ ID NO: 236516 - DNA, 833 bp, Unknown
  Bacterial polypeptide expressing nucleotide sequence isolated from the Sargasso Sea
attagaattaccagggaacgactcgatagaattgccagtaaagcaaggatccgctggttttgacgtaatcgatatcagtaaacttggcagcaagggttacttcacttttgatccaggttttctcgcgacagcctcctgtgaatctgcaattacctatatcgatggcgatcaaggtatattgttacaccgcggctatccaatcgagcaactcgccgttgactcagattacttagacctgtgttacctgctgctttacggtgaactgccgacgaaagagcaatatgctgaatttgtacacacagtaaaaacccacactatggttcatgagcaactcgccttcttctttagaggtttccgtcgtgatgctcatcctatggcgatgttatgtggtgttactggtgcattgtctgcattttatcaagactcactcgatgtcaacgatcctcgccaccgcgaaatcgccgcttatcgcctagtctccaaaatgccaacgattgccgctatgtgctacaagtactcttctggccaaccattcgtttacccacgcaatgacttaagctacgcaggcaacttcttaagcatgatgtttgccgtgccttgtgaagagtacaaggtaaacccaatcgttgaacgtgctatggaccgtatcttcattctacatgcggatcacgaacaaaacgcgtcaacgtcaaccgtacgtttagccggttcttcaggcgcgaatccattcgcgtgtatcgctgcgggtattgcttctctatggggccctgcacacggcggcgcgaacgaagcttgtctacaaatgttagaagaaatcggttcagtagaccgta

SEQ ID NO: 236517 - DNA, 748 bp, Unknown
  Bacterial polypeptide expressing nucleotide sequence isolated from the Sargasso Sea
aatggttaagaagaaattaaataaaagaaataatagaaaagctaaaattataatcgacgaaacaacttacgaatttccaatatataattcaactgaaggtgaagctgttatagatatctctaaattacacgctgaggcaaatatttttacatacgacccaggatttacatctactgcttcatgtgagtcaaaaattacatatattgatggagataaaggtattctaaggtataggggatatgatattgaagaattagcaaaaaaaagtgatttcattgaagttgttaacttgcttatctatggagatctaccaaataaagagcaactcactaaatacaaaatgcttatcacaagacacactttgcttcatgaacagatcataaactttttccaaggatttagaagagatgctcatcctatggcaatgatggttggagttatgggggccttatcgtccttttatcaagataccttaaacattaatgactcgcatcaaagacaagaagcaacaagaagaatcattgcaaaatcagctacaattggtgccatggcttataaatactccttgggccaagcctttgtatccccaagaaataatctttctttttcagaaaattttttatacatgtgctttagcaatactgcagaaaactacaaagtttcgcctgttcttgcaaaagcaatggatacaattctaatacttcatgctgatcatgaacaaaatgcgtctacatcaactgtgagactt

SEQ ID NO: 236518 - DNA, 524 bp, Unknown
  Bacterial polypeptide expressing nucleotide sequence isolated from the Sargasso Sea
tatgtttacctatgatcctggtttcacgtctactgcttcatgtgactcttcaattacttatatcgatggtaataaaggtgttttaagacacagaggctataatatccatgatttagcaagcaatagtgaatttttagaggtatgttatttattattacatggagaattaccttctccagaagataagcaaaaatttattgatgtaattactaaccatacaatgttgcatgagcaattggtgcatttgtataggggtttcagaagagatgcgcatccaatggccattatggtaggagttgttggtgctttatcagcattctatcatgacagtacggatttttctgacattaatcaaagaatggtggcctgtcataggctgattgcaaaaattccaacaataggagctatggcttacaaatattctattggacaaccatttgtatatccaagaaatgacttatcttatgcagaaaattttctttacatgactttttttgtaccaactgtaagagtttataattagt

SEQ ID NO: 236519 - DNA, 450 bp, Unknown
  Bacterial polypeptide expressing nucleotide sequence isolated from the Sargasso Sea
tatggtaaaatcttcaaaaacggcaaagcttttacttgatggtaaggagtacgacttgccaattatgtctcctacggcaggcccagacgtactagatataagaaagctctacggtgacgctggagttttcacatatgaccctggattcacgtcaaccgctagttgtgatagcacaattactttcatagatggaggtaagggtgaacttcttcatagaggatatccaattgaccaacttgcggaatattcacactatttagaggtctgttatcttcttttatatggagatttaccaacaccagctgaattggaagattttgaaaatagagtgactaatcacacgatgattcatgagcaaatgggatacctgtttcgtggctttagacgtgatgctcaccctatggcgataatgacaggcgttgttggagcgatgtccgccttctatcacga

SEQ ID NO: 236520 - DNA, 910 bp, Unknown
  Bacterial polypeptide expressing nucleotide sequence isolated from the Sargasso Sea
tgttgagctcgaaaccaaagatgcttcagtcggaccaagtgttatcgatttaaaaaacctctatcacgacacaggttactttacctttgatccctcatattcaaccactgcaagctgcgaaagttacattacatatattgatggcgccaaaggaattctggaatacaggggctatccaatagagcaacttgcagaacaaagtacttacttagaggtcgcttacttgctcttcaatggagagctaccatcgagcaatattgctcttgatgagttcagatcagatgtaaaacacaatatgactctaccagagaatatggacctgattttttctggctttggaagagatgcacacccaatggcgatgcttacaacagcagtagcagcattgtctggatcctatcatgatggcataaatatcagggacaaagggcatcaaaaagaattcttctttaatatactcggcaagatgccaatactggttgcaaatgttttcaaccacaaccaaaaagacgcgaatgttgattacgatgagtctttgtcatattcagaaaatgttttgagattattctttggatggaaaggtgactatgaaatagaccctgttctttcaaaggcacttgatattctcttgatacttcatgccgaccatgagcaaaactgtagtacctcatctgtaagattaacagggagctctggtacaaatccttatgcagcaattgcagccggagttgctgctttatgggggcctgcgcatggaggagcaaatgaagctgtggttagaatgtttgatgagattggttcaaaagacaatattcctcaatacattgagaaggcaaaagataaaaatgatccatttagacaaatggggtttggacatcgtgtttataaaaattatgaccccagagcaacg

SEQ ID NO: 236521 - DNA, 370 bp, Unknown
  Bacterial polypeptide expressing nucleotide sequence isolated from the Sargasso Sea
ttataaaaattatgatccacgcgctaccgtaatgaaaaagacagccgatgaagttctaaaagctgttggcaaagaagatgaacctatgtttaaattagctagagaattagaaaaaattgcattagaggatgaatattttatatcaaaaaaactttatccaaatgttgatttttattctggagtaatactacaagctatgggtttcccatctagtttatttaccgttttatttgcggtagcaagaacagttggttgggtagcacaatggaacgaaatgatagaagaccctgaacaaagaataggaagaccaagacaactatatacaggtgcaaaagaaagagacttcataaaaattaaagatagaatataa

SEQ ID NO: 236522 - DNA, 478 bp, Unknown
  Bacterial polypeptide expressing nucleotide sequence isolated from the Sargasso Sea
aatattagtaaattcattgaaagagccaaagataaaaatgatcaatttagactcatgggttttgggcatagggtttataaaaattatgatcctagagctaatgttctaagaaaatattgccataatttgcttaaagaaaccgataacttcaaccttcctttatttagattagcgaataaactagaggagatagctttaaatgacagttattttatcaaaaaaaaattatatccaaatgtagatttttattcaggcataattttaaaagcattaggtttgcctgaatcaatgtttacagttatttttgcagtagcaagaacagtgggatggatttcgcagtggaaagaaatgactgaagaaactaacaaaaaaattagtcgtcccagacaactgtatatggggaataaacacaggaaatttgttgatatagacaaaaggaaaaatataaagcaaatgtttccaggtgaaataaaataat

SEQ ID NO: 236523 - DNA, 758 bp, Unknown
  Bacterial polypeptide expressing nucleotide sequence isolated from the Sargasso Sea
ggccatgtgctataagcatggtatcgggcagccttttatctatccaaagaataaaatgtctttagccgaaaatttcgtgaatatgctgtttggaacaccttgtgaagagacatcggtaagtccggttatcgcaaaggctatggatacattgtttctacttcatgccgatcacgagcaaaatgcttccacttctacggtcagattagctggatcaaccggatcaaatccgtttgcctgtttagcgtctggaattgccgcattgtggggacctgcccatggcggagctaatgaggctgtgctggatatgctgaacgagattggagatgagtcgagaattgacgaatttatattgaaggcaaaggataaagatgacccgttcagactgatgggttttggtcatagggtgtacaaaaactacgatccgcgtgccactgttatcagagggatatgtgcggaggttttagatgaactaggcgttgacaatgatccactttttaaaattgcccgcaagcttgaaaaactagctcttgaagacgactactttaacgaacgcaaacttttcccaaatgttgacttttattccggaatcattttgaaggccataggcataccaactagtctatttacagtaatttttgcgacaggcagaacacctggctggatcgcacattggaacgaaatgctcagtaatccatacaagattggcaggccaagacaattatacagaggggaaatcaagcgagactatcctgactgat

SEQ ID NO: 236524 - DNA, 850 bp, Unknown
  Bacterial polypeptide expressing nucleotide sequence isolated from the Sargasso Sea
ggcatgtcatagacttatagcaaaaatacctacgataggtgctatggcatataaatattctatgggtcaaccatttatttatccaaaaaataatttatcttatactgaaaactttctatacatgactttttcattacccactaaagattttcatataagtccaaaaattataagagcaatggatcgtttttttattttgcatgcagatcatgagcaaaatgcttcaacatcaactgtacgactagcaggatcttcaggggctaatccatttgcatgtattgcagctggtatagcctcgctttggggaccagcacacggtggtgctaatgaagctgtaattaaaatgcttgaagatataggcgatgtatcaaacataccaacatttataaaaaaggcaaaagataaagatgatccttttagattgatgggttttggtcatagagtatataaaaattatgacccaagagctagcatgatgaaagaaagtgcatacgaagtattagaagaacttaataaacttgacgaccctttactgaaaatagcaatagagttagaaacaatagcattaaaagatgaatactttatagaaaaaaaattgtttcctaatgttgatttttattcgggaataattcttaaatcacttggatttccaacaagtatgtttacagtcttgtttgctataggaagaactgttggctggatatcacaatggaaggaaatgattgaagatccaataaataaaataggtagacctagacaattatacaaaggtcatcttgatagaaaatttcagacagaagattcaagagaaaagaaatcaatatttaattggctgtggaaaaagaattaa

SEQ ID NO: 236525 - DNA, 660 bp, Unknown
  Bacterial polypeptide expressing nucleotide sequence isolated from the Sargasso Sea
ttcttatccttcatgcagatcatgaacaaaatgcgtctacttcaactgtcagacttgctggttcttccggcgctaatccgtttgcatgtatagcagcaggaatagcttctctatggggacctgctcatggtggagctaatgaagcagtaattaaaatgttagaagaaattggtgatataaaaaatattccaaattatgtaaataaagctaaagataaaaatgacccttttagattgatgggatttggacatagagtctacaagaattatgatcctagagcttctgttatgaaagaaagtgcttacgaagtccttgaggagttaaacaaactcaatgacccacttctcaaaatagctattgaacttgaaaaattagctttaaatgatgaatattttatagaaaaaaaactatatccaaatgttgatttttattctggaataatattaaaagccttaggcttcccaactagtatgttcacggttttatttgcaattggcaggaccgttggttggatttctcaatggaaagaaatgattgaagatcctataaacaaaataggaagacctagacaattatataaaggaaataaatcaagagaataccagttagaggaaaaaagagagaaaaaatcaatattcaattggttgtggagtaaataat

SEQ ID NO: 236526 - DNA, 343 bp, Unknown
  Bacterial polypeptide expressing nucleotide sequence isolated from the Sargasso Sea
gaagagctaaataaattagatgatccacttttaaaaattgcaattgaattagaaaaaatagctctaaaagatgaatattttattgaaaaaaaattatttcctaatgtagacttttattcaggaattatcctgaaagcattaggctttccaacaagtatgtttactgttttatttgcaatcggaagaaccgttggctggatttcacaatggaaagaaatgatagaagatccaataaataaaataggccgacctagacaattgtatttaggtaaaaatgcaagagaatttcaaaacgaatcaactagagagaaaaaatcaatttttaaatggctttggaaataat

SEQ ID NO: 236527 - DNA, 771 bp, Unknown
  Bacterial polypeptide expressing nucleotide sequence isolated from the Sargasso Sea
caatggcttataaatattcactaggccaaccatttaattaccctcaaaataacttaacttatgcagaaaactttttacatatgtgtttttcagtacctgcggaaaaatataagatagatccaataatagcgaaagctatggataaaatattaattttacatgctgatcatgaacaaaacgcttcaacttcaactgtgagggttgcaggatcttctggcgcaaatccctttgcttgtattgcagctggcatagcttctttatggggacctgctcacggtggcgcaaatgaagctgtattgaagatgttgtctgaaataggcactattgatagaattggagagttcgtaaacaaagctaaagataaaaatgatccctttagattatttggatttggccacagagtttataaaaattatgatccaagagcagccgtaatgagagttacttgtcacgaagtgttagatttattaggcataaaaaatgatccacttttagaaatagcaatggagttagagaaaattgctctcaatgaagaatattttattgaaaaaaaactttaccccaatgttgatttttattcagggataattcttaaagccatgggattcccaacagatatgtttacagtactttttgcagtagctagaacagttggttgggtggctcaatggaatgaaatgattactgatccagttcaaagaataggtaggcctagacaactttatacaggtagcactattagagattttgttgagttaaaaaacagataat

SEQ ID NO: 236528 - DNA, 886 bp, Unknown
  Bacterial polypeptide expressing nucleotide sequence isolated from the Sargasso Sea
gtgtaaatctaaaattacatatatagacggagagaaaggtgttctgctacatagaggatataaaatagaagatttagctgaaaattgtgattttttggaagttgcttttctactattaaatgctgatcttccaacccctgaacaaaaaaaagcatttgataataaaattactacacacactatgatacatgaacaactatcaatgttttttagaggttttagaagagatgcgcatgctatggctgttatgtgtggcgttgtaggcgcattaagcgctttttatcatgatagcacagatattactgaccctggtcaaagattagtagcctcgcacaggttagttgcaaaaataccaacaattgcggcaatggcatataaattttctattggacaaccatttatctatcctagaaacgacttatcatattcagaaaactttttaaatatgatgttttcagtgccagcagaagattataaaattgaccctatattatctaaagcaatggataaaatacttattttacatgcagaccatgaacaaaatgcttctacttcaacagtaagactagccggatcatctggcgcaaacccgtttgcttgtattgctgcaggcattgcttcattgtggggaccagctcatggtggagctaatgaagccgtaatacatatgcttaaagagattcaggctaacggaaacgtttacgactatgtgaaaaaagcaaaagatccgaacgatcctttcaggttaatgggttttggacatagagtttataaaaattatgatcctagagctaccgtaatgaaaaaaaccgcagatgcagttttaagtgctgtaggaaaagaagatgaacctatgttcatattagcacgtgaattagagaaaatt

SEQ ID NO: 236529 - DNA, 759 bp, Unknown
  Bacterial polypeptide expressing nucleotide sequence isolated from the Sargasso Sea
aatgtcaaaaaaaagaaaatctcttaaaaataaacaaaacgcgcagctactaattaataataaatcatacgtcttgccaatttacaattcaaccgagggtgagtcagtcatcgatatcacaaaactacacgcggacgcaaaaatattcacttacgatcctggtttcacttctaccgcgtcatgtgagtcaaaaattacatttatagatggcgataaaggaatactaagatatagagggtatgatatagaagagttggcaaagaaaagtgactttattgaagttgtaaatttattaatttatggtgatttgccaaataaggaacagcttaaaaaatataaaaaattaataacgcgacacacattattacatgaacaaattataaacttttttcaaggttttaggcgagacgctcacccaatggcaatgatggtaggcgtaatgggggcgctttcatctttttatcaagacagcctagatataaatgatgcccatcaaagacaagaagcaactagaagaatcgtcgcaaaatcatcaaccattggagcaatggcctataaatattcaataggtcagtcgtttgtatctccaaaaaataatttatctttttctgagaattttttacacatgtgtttcagcaatactgctgaagaatataaagtatcgccaattctagctaaggcaatggatacaatttttattttacatgcagatcacgaacaaaatgcatctacttctactgttcgattagctggctcatc

SEQ ID NO: 236530 - DNA, 275 bp, Unknown
  Bacterial polypeptide expressing nucleotide sequence isolated from the Sargasso Sea
cgaaatcgccaaacgactcgaagaaatcgcgctcaaagacgagtatttcatcgagaagaagctctaccccaacgtcgacttttactccggcattattttgaaagcattgggtattccgacatcgatgttcacggtgatctttgccattggtagaaccgttggctggatcgcacactggaacgagatgatcggcggcgcttatcgcatcgggcgaccgcgtcagctatataccggtgagacccaaagagacttcatcccattggataagcggtaag

SEQ ID NO: 236531 - DNA, 646 bp, Unknown
  Bacterial polypeptide expressing nucleotide sequence isolated from the Sargasso Sea
tatggcagattacgaagacaaaaaagataaagtaaaacctttcactttatttaataatgagacaggtcaatcttttgagattccagtattaagaggaactcaaggacctgacgttcttgatattagatcgcttcatgataaaacaggtatgtttacttatgatcctggctttacatccacagcttcttgcgactcttcaattacttatattgatggacataaaggaattttaagacatagaggttatgacataaaagatttagcaacaaatagtgattttttagaagtttgttatttattacttcattctgaattaccttctcaagaagataaaaataaatttgaaaaagtgataatgaatcatacaatgcttcatgagcaattagttcatttgtacagaggttttagaagagatgctcatccaatggccattatggttggagtagttggagctttatcagcattttatcatgatagcactgatttttcagatctaaatcaaaggatggttgcctgtcatagactaatcgcaaaaattccaacaattggagctatggcttataaatactctatagggcaaccttttgtttatcctaaaaataatctaagctacactgaaaactttcttcatatgacattttcagtg

SEQ ID NO: 236532 - DNA, 484 bp, Unknown
  Bacterial polypeptide expressing nucleotide sequence isolated from the Sargasso Sea
cgaagcagtagtcaaaatgtttggtgaaattggatcaaaagataatatctctaaatacattgaaaaggcaaaagataaaaatgacccattccgtttaatgggcttcggacatcgtgtctacaaaaattatgacccaagagcaacaatcatcagaagtcagtgccataaggttttggaatcgacaggaaatgattcaaatccaatgttcgagctagctttagagctggaagagattgcacttaatgatgactactttgttgcaagaaatctctaccctaatgtcgatttttactctggtttgatttatgaggcaatggacattcccaaagagatgtttaccgcaatgtttgctttggccagaacagttggatgggcaacacactggtgtgagatgatgtctaaccctaaacagaaaattgggcgaccaagacaactctacctgggtgataaaaagagggactatgtcccaatcaatgatcgctag

SEQ ID NO: 236533 - DNA, 805 bp, Unknown
  Bacterial polypeptide expressing nucleotide sequence isolated from the Sargasso Sea
atgacggacaaaacagccaagctgaccatagatggcaaagacattgacttgccgatatatgaggcaacaaacggacctgatgttgtagacgtaggtaagctcacaggacagggatatttcacctatgacccaggctttgtctctactgccgcttgcgattccgaaatcactttcattgatggtgatcaaggaatactgcttcatcgaggatacccaatagagcaactggcggaaaaatctcaacatctcgaactatgctacctcctcttaaacggcgagctaccatctgagtccgagctcaatgaatttatcgcaagcgtaaaatctcgcgcagcagttgactctcaatttaaggagttctttaaaggttttaaaactgacgctcatccgatggctatcatgtgtggagtgactggagcgctcgctgccagctttcacaactctttggatatcgacaacgcggaagatcgaaaagaaacctcgcttcagctaatcgcaaagatcccaacaatggcggccatgagctataaaaatgcgttgggggaagacttcgtggagccaagagaagatctgggctatgcagaaaatttcctacatatgatgtttgctaagaagggtgaagactataaagtcagccctaccattgcaaaggcgatggaccgcatctttcttttgcatgcagaccacgagcaaaatgcatccacctccaccgtgagactcgctggatctacaggtaccaatccttacgcagccatcgccgccggaattgcagccttatggggaccgtcacacggaggcgccaatg

SEQ ID NO: 236534 - DNA, 814 bp, Unknown
  Bacterial polypeptide expressing nucleotide sequence isolated from the Sargasso Sea
gtcgcctcctaccgattgatcgctaaaatgccgacaatcgcggccatggcctataagttctctatcggcgcgccgttcatgtacccccgcaacaacctgaaatacgccgagaacttcctctacatgatgttctccaacccatgcgaggattatgaggtcaatcctatcttatcgaaggccatggatcggattttgatcctgcatgccgaccatgagcagaacgcgtcgacatccacggttcgcttggccggttccagtggcgcaaacccctttgcctgcatctccgccggtatcgcatcgctttgggggccggctcacggcggggccaacgaggcagtactaaacatgctcgaagagatcgagcatccgaagaacatcaccaaattcgtggaaaaggccaaggataaagatgatcctttccggctcatgggttttggccatcgggtctataagaacttcgacccgcgcgccaaggtaatgcaccagacttgccacgaagttctcggcgagttgggcatcacaaatgagccgcttcttgatatcgccgtggaactggagcggctggctcttgaggacgattactttgtcgagaagaagctgtatccgaacgtggatttctattccggcattatctttaaggccatgggcatacccaccagtctttttacggtgctattcgccgtggcgcggacggtgggctgggtcgcccaatggaacgagatggtcgaggacccgtcccagaaaattggtcggccgcgtcaactctacactggcgagaccactcgcgagttcgttcccttgggtcaacgctgat

SEQ ID NO: 236535 - DNA, 805 bp, Unknown
  Bacterial polypeptide expressing nucleotide sequence isolated from the Sargasso Sea
gctatgggcttataaatattcagttggccagccttttgtttacccaaaaaataatttatcttatgctgaaaattttcttcatatgactttttcagtaccaacagaagattataagattaatcccaaaattgcaaaagcaatggaccggttttttatattacatgctgatcatgagcaaaacgcttcaacttcaacagtaagattagctggttcttcaggtgctaatccatttgcatgtatagctgctggcatagcatcactatggggaccagcgcatggaggggcaaatgaagcggtaattaagatgttagaagaaattggaagtgaaaaaaatatatctaattatataaataaagctaaagataagaatgacccatttcgtttgatgggttttggtcatagagtatataaaaactatgatccaagagcctccgttatgaaacaaagtgctcatgaagttttggaagaattaaatttgaaagatccgcttttagatatagctttaaaattagaaaaaatagctttagaagataaatattttatagataaaaaactttatcctaatgtagatttttattcaggaataatgttaaaagcattgggttttccgaaaagtatgtttactgtattatttgccattggaagaacagttggatggatttctcaatggaaagaaatgattgaagatcctattaataaaattggcagaccaagacaattgtttatagggaataaagcaagagaatttcagattattgatattagagaaaaaaaatcaatatttaattggctttggaaaaagtaa

SEQ ID NO: 236536 - DNA, 493 bp, Unknown
  Bacterial polypeptide expressing nucleotide sequence isolated from the Sargasso Sea
gaaataggagatattaaaaatattcctgagtttataaacaaagcaaaagataaaaatgatccatttagattaatgggttttggacatagggtttataaaaactatgatcctagagcaagcgtaatgaaagaaagtgctcatgaagttttagaagaattaaataaacttgatgatcaactcttaaaaattgcaatagaattagaaaaaatagcattaaaagatgaatactttattaagaaaaaattgtttccaaacgttgatttttattctggcattattcttaaagcattaggtttccccactagtatgtttacagttttatttgctattggtaggacggttggatggatatcacaatggaaagaaatgattgaagacccaataaataagattggacgcccaagacaattatacttaggtaaatcagcaagagaatttcaaaaagaatctacaagagagaaaaagtcaatttttaaatggctttggaaataat

SEQ ID NO: 236537 - DNA, 703 bp, Unknown
  Bacterial polypeptide expressing nucleotide sequence isolated from the Sargasso Sea
catgtgttttagtaatacagcagaagaatacaaaatttctcctgttatatctaaagctatggatacaatatttattttgcacgcagatcacgaacaaaatgcttcaacatctacagtacgtctggctggctcatctggcgctaatccatttgcttgtattgctgcaggagtatcatctttatggggacctgctcatggaggagctaatcaagcagctttagaaatgcttgaagaaattggatcgacaaaaaatataagaaaatatctaaacaaagcaaaatcaaaaaaagatccatttaaattaatgggatttggacacagggtttataaaaactacgatccaagagcaaagattttaaaaaaaatatgtaaaaaagttttatctcatgtaggtattaaaaatgatccaatacttgaactcgctatggaactagaaaaaattgctttaaatgaaaagtattttatagaaaagaaattatacccaaatgttgatttctattctggaataattcttagagcaataggatttccccctgaaatgtttacagttatttttgctatagctcgaacagctggatggactgctcaatggacagaaatgatagaagatccaattcaaaaaattggaagacccagacaattatatactggcaataagtatcttaaatatggcgttaaaagatcaaaaaaaagcacaagataa

SEQ ID NO: 236538 - DNA, 884 bp, Unknown
  Bacterial polypeptide expressing nucleotide sequence isolated from the Sargasso Sea
tacattcatcgacggtaataaaggaattttaagatatcgtggatatgatatagaagaattagcaaataaaagtgactttatagaggttgtaaatttattaatttatggcgatttgcctaataaggaacaattaaaaaaatataaaaaacttattactcgtcatacacttttgcatgaacaaattataaacttttttcaaggcttcagacgtgatgctcatccaatggcaatgatggtcggggttatgggggcattgtcctcattttatcaagatacattggatatcaatgacgcccatcaaagacaagaagcaactagaagaataattgctaaatcatcaacaatcggtgctatggcgtataaatattcaattggccaatcatttgtctctccaaaaaacaacttatctttttcagaaaattttttacatatgtgttttagcaatacagcagaagaatacagaatttctcctattatatctaaagctatggatacaatatttattttacacgcagatcatgaacaaaatgcttcaacatctacagtgcgtttggctggctcatctggcgctaatccatttgcttgtattgctgcaggagtctcatctttatggggacctgctcatggaggagctaatcaagcagctttagaaatgcttgaagaaattggatcaacaaaaaatataaggaagtatctaaataaagcaaaatcaaaaaaagatccatttaaattaatgggatttggacacagggtttataaaaactacgatccaagagcaaagattttaaaaaaaatatgtaaaaaagttttagctcatgtaggtataaaaaatgatccaatacttaaactggccatggaactggaaaaaattgccttaaatgaaa

SEQ ID NO: 236539 - DNA, 739 bp, Unknown
  Bacterial polypeptide expressing nucleotide sequence isolated from the Sargasso Sea
aaattttttatatatgactttttcagtaccatcagaagattttaaaattagtcccaaaatagtaaaagctatggatagattttttatgcttcatgctgatcatgaacaaaatgcttcgacttcaactgttagattagcaggatcatcaggtgctaatccttttgcttgtattgctgctggtatagcatcactttggggccccgcacatggaggagcaaatgaagctgtaattaaaatgttagaagaaataggtgatgtttcaaacattcaaaagttcgtcgataaggcaaaagataaaaatgattcattcagacttatgggatttggtcatagagtttataaaaattatgacccaagggcaacagtaatgaaagagagcgcacatgaggttttgcaagaattaaataaaactgatgatccattattaaaaattgcaatcgaactagaaaaaattgctttaaaagatgattattttattcagaaaaaattatttcctaatgttgatttttattcaggaattattttaaaagcactaggttttcccactagtatgttcacggttttatttgctattggtagaactgttggttggatttcacaatggaaagaaatgattgaagatcctataaacaaaataggaagaccacgacaattatatactggctacaattcgagagaatatgagattgaagactcaagagagaaaaaatcaatattcaattggctttggaaaaaatag

SEQ ID NO: 236540 - DNA, 645 bp, Unknown
  Bacterial polypeptide expressing nucleotide sequence isolated from the Sargasso Sea
gaatgtaatacaaagacataccatggtgcatgaacagttggtaaatttatatagaggttttagaagagatgctcatccaatgtctataatggttggtgtggtaggagcattatcagccttttatcatgatagtactgatttttcagacataaaccagagaatgatagcttgtcatagattaattgcaaaaatagcaactattggagctatggcttataaatattctattgggcaaccatttgtatacccaaaaaataatctatcttattgtgaaaatttccttcatatgacattttcagtgcctacagaagattatgttataaacccaaaaatttcaaaagctatggatcgtttttttattttacatgctgatcatgaacaaaatgcatctacttcaactgttagacttgcaggatcatctggggctaatccatttgcatgcatagcagcaggaattgcttctttatggggaccagcacatggaggtgcaaatgaagcagtaattaaaatgttagaagaaattggagatatttctagaatacctgaatatattaatagagctaaagacaaaaatgatgactttagattaatgggttttggacatagagtttataaaaattatgatccaagagctgatgtaatgaa

SEQ ID NO: 236541 - DNA, 858 bp, Unknown
  Bacterial polypeptide expressing nucleotide sequence isolated from the Sargasso Sea
tttgacaggttctgttggaccggatgtaatcgatgttcggcaactttatggggcgacggattgtttcacatatgatcctggatacacctccaccggcagttgcagttctaaaatcacttatatagatggagagaatggcattcttctataccgtggttatcctattgatcaactcgcggaaaactcggatttcatggaggtttgctatcttcttctctacggcgaactgccaagtgaagagcaaaaaagcacattcgaggatggcattacttaccatacaatgttgaatgaacaattgaattattttttccgtgggttccggcgtgatgcgcatccgatggcggtgatgtgcggaatagtcggtgctttatcagcgttttaccatgacagtctagatatatcggatccaaaacacaggatggtcgcctcctaccggttaattgccaaaatgcccacaatcgccgccatggcctataaattttctgtgggcgcgccatttatgtaccctcggaatgatctgaaatatgccgaaaatttccttcaaatgatgttctcaaatccctgtgaggattacagcgttaatccaatcctcgccaaagctatggatcgaattttgattcttcatgcagatcacgaacagaatgcgtcgacttcaacggtcaggcttgctggttcgagcggcgccaatccatttgcgtgtatttctgctgggattgcatcgctttggggaccggcgcatggaggggctaatgaggctgttctgaatatgctcgaagagattgaacacccaaaaaatattgcaaaattcgttgaaaaagcaaaggacaaagatgacccattcaggttgatgggttttgg

SEQ ID NO: 236542 - DNA, 693 bp, Unknown
  Bacterial polypeptide expressing nucleotide sequence isolated from the Sargasso Sea
cgcgcaaggcgccgcgcacgaccctctccatgtcggaaaacttcttccacatgtgtttcggtgaagtacctcccaaagaagttatcaaggcattcgatatctctctcattctgtatgcggaacacagctttaacgcctccaccttcaccacccgcgtcatcacgtcgtcgcggtctgatatctacagtgccgtgaccggtggtatcgggtcgttgaaaggcccgctgcatggtggtgcaaacgaagccgtgatgcacaatctgctggagatccggacaccggcgcgggcggaaaaatggctacgcgacaagcagaagaacaaggagctggtgatgggtttcggtcaccgggtctacaaacagggcgattcccgcgtccccaccatgcgggccgcgctggaggatcttgctgcctggaagggagataccaagtggctggaaatctcagatattcttcaggacattatgatcaacgagaaggccattcatcccaacctcgatttcccggcgggaccagcctattacctcatgggcttcgacatcgacatgtacacgccgatcttcgtgatgagccggatcactggctgggccgcgcatatcctagaacagaatgccagcaacagcctaatacggccgctcagcgcttacggcggccgcgcccagcgtaaggtgaaactgatttcgaagcggtaag

SEQ ID NO: 236543 - DNA, 539 bp, Unknown
  Bacterial polypeptide expressing nucleotide sequence isolated from the Sargasso Sea
tgtattcagcaggaatagcttctttatggggcctgctcatggtggagcgaatgaagctgtcttgaaaatgctaaatgaaatacaagatgagaaaaatatttcaaaatatttaaaaaaagcaagagataaaaatgatccttttagactttttgggtttggacacagagtatacaaaaattatgatcctagagcaaaagttatgcaaaaaacctgtcatgaagttttagatttactagggattaaaaataatcctcttctttctttagcaatgaaattagaaaaaattgccctagaagatgaatattttattaaaagaaaattatacccaaatgttgatttttactcaggtattattttacaagcaattggttttccaacaagtatgtttaccgtattatttgccgtagctaggactgtaggatgggtagcacaatggaatgaaatgattgaagatcctaaccaaagaattggaagaccaaggcaactctacaccgggccaaacaaaagaaattatgttaaattaaataagagaggttagt

SEQ ID NO: 236544 - DNA, 574 bp, Unknown
  Bacterial polypeptide expressing nucleotide sequence isolated from the Sargasso Sea
atcaggagcaaacccatttgcatgtatagcggcaggtattgcctctctatgggggccagctcacggaggtgccaatgaagcagtgattaaaatgttagaagaaattggaaatatttctaaaataaatgaatatatcaatagagctaaagataaaaatgatgattttagactaatgggctttgggcacagggtttataaaaattatgatccaagagctgatgttatgaagaatacagcacatgaagtattgaaagaattaaatatggaagatgataaattgttgaaaatagctattgaattagaaaaaattgctttaaaagattcatattttattgaaaaaaaactttatcctaatgttgatttttattcaggaataatactaaaagctctaggatttccaactagcatgtttactgttttatttgcaataggtagaacggttggttggatatctcaatggaaagaaatgattgaggatcccataaataaaattggcaggccaagacaattatatagaggaaaaaatacaagacaatatgaaattgtagaaagtagagaaaaaagatctattttt

SEQ ID NO: 236545 - DNA, 703 bp, Unknown
  Bacterial polypeptide expressing nucleotide sequence isolated from the Sargasso Sea
aactttttacgaatgtgttttgctgtacctgcggagagttatgaggttaacccaattttaagcagagcaatggaccgaatatttacgctacatgctgatcatgagcaaaacgcttcaacaagtacagttcgtctggcatcaagttctggagccaacccgttcgcatgcatcgcagcaggcatagcatgtttatggggcccagctcatggtggggcaaatcaggcatgtctagaaatgctacgtgaaatcggcacagcagatagaatacctgaattcataaagcgagctaaggacaaagatgacccgtttagactcatgggatttggacaccgtgtttacaaaaatactgatccgagagcaaaagtcttaaaaaggtccgccgacgaagttttagatttattaggcgttaacaataatccactactccaagtcgcaaaacaactagaagaagtagcactggatgatgagtacttcgctgataaaaagttatttccaaatgtagatttctattctggtattatactagaagcgatgggttttcccacttctatgttcacccctatttttgccctctctcgtacagtgggatggatttctcaatggaaagaaatgatcgcagatccacaggtcaaaatagggcgacccaggcagttgtacctgggagagataccaagagactatactgacattgaaaagcgttaaa

SEQ ID NO: 236546 - DNA, 840 bp, Unknown
  Bacterial polypeptide expressing nucleotide sequence isolated from the Sargasso Sea
ttataatatccatgatttagcaagtaaaagcgaatttttagaggtttgttatttgcttttgcacggagatcttccttctccagaagataagcaaaaatttatagatgtaattactaatcacacaatgattcatgaacaacttgttcacttgtatagaggttttagaagagatgcacatccaatggctattatggtgggagttgttggagcattatcagcattctatcatgatagtacggatttctctgatattaatcaaagaatgatagcttgtcatagattaattgccaaaatgcccactattggagcaatggcttataaatattctataggacaaccatttgtgtatcctagaaatgatttatcttattcggaaaattttttgtatatgactttttctgttccaactgaagattttaaaattagtccaaaaattgtgaaagcaatggatagattttttattttgcatgctgaccatgaacaaaatgcatctacatctactgtaaggttagctggatcatctggggcaaatccatttgcctgtatagcatcagggattgcatcactttggggtcctgcgcacggtggtgcaaatgaagctgtaattaagatgctagaagaaattggtgacgttaaaaacattccagagtatattaaaaaagcaaaagataagaatgactcctttagactaatgggtttcggacatagagtttataaaaattatgatccaagagccacagtaatgaaagaaagtgcccatgaagttttagaggagctaaataaacatgatgatcctttactgaaaatagccttagagctagaaagaattgcgcttgaaga

SEQ ID NO: 236547 - DNA, 969 bp, Unknown
  Bacterial polypeptide expressing nucleotide sequence isolated from the Sargasso Sea
gttattactctaccgaggttatcctgtagaagagctagctaaatcttcaacgtttattgaagttgcatatcttctattatatggcgagcttccaaataaggctatgcttgaggatttttcagattcaataaatcaccatacaatgttaaatgaaggtatgttgaggttatttaatggttttagatatgatgcacatcctatggccatggtatcagctattgttggctcaatgtcagcctattatcacgatactatggatattaatagcgcacgtgcaagagaaatatttgcacatagaatcatcgcaaaaataccaacaattgccgctgcggcatataaacactctgtagggcaaccatttatttatccactgaatacactaaattactgcgaaaatttattgcacatgtttttttctgttccagcagagcaaagagacattgatccaattgcggcggaggcattagatttgcttttcatattacatgccgatcatgagcaaaattgttctacatcaacggtcagaatggctggtagctcaggggcaaacccatactctgcgattgcagcaggaatctcagctttgtggggccctgctcatggaggtgccaatgaagcagttcttaggatgcttgtggaaattggaagcaaaaaaaacattgaaaaatatattgataaagcaaaagataaagatgatccttttcgattgatgggatttggccatcgtgtttataaaaattatgacccacgagcaaaaattataagaaaaatgtgtcataaagttctcaatcaaaaaggtagtgctgattcaccactacttgaattggctatagaattggaagacattgcactaaaagatgattactttcgagagaagaacttatatcctaatgtggatttctattcagggataatatatcaagcgcttggtatccctacatcaatgtttactgttatgtttgcaattgg

SEQ ID NO: 236548 - DNA, 612 bp, Unknown
  Bacterial polypeptide expressing nucleotide sequence isolated from the Sargasso Sea
ggttggcaggttcctcaggtgctaatccttttgcatgtattgctgcaggtattgcatctttatggggaccagctcatggtggagctaatgaagcagtaattaaaatgttagaagagattggtgatgtatcaaatatacaaaaatttatagataaagctaaagataaaaatgactcttttagattaatgggttttgggcatagagtgtataaaaactatgatccaagagctactgtgatgaaagaaagtgcgcatgaggttttagaagagttaaatatgcaagatgatccattgcttaaaattgcaatagaattagaaaaaatagcactgaaagatgaatattttattagtaaaaagttattcccaaatgtagatttctattcaggcataattctaaaagcattaggtttccctacaagcatgtttacagtactatttgcaataggaagaactgtaggatggatatcacaatggaaagaaatgatagaagatcctattaataaaattggcagacctcgtcaattatacaccggttataaagctagaccttatcaagttgaatcttctagagaaaaaaaatcaatttttaattggctttggaagaaggattaat

SEQ ID NO: 236549 - DNA, 687 bp, Unknown
  Bacterial polypeptide expressing nucleotide sequence isolated from the Sargasso Sea
cttcttaagcatgatgtttgcagttccttgtgaagagtacaaggtaaacccaattgttgaacgtgctatggaccgtatcttcattctacatgcggatcacgaacaaaacgcgtcaacgtcaaccgtacgtttagccggttcttcaggcgcgaatccattcgcgtgtatcgctgcgggtattgcttctctatggggccctgcacacggcggcgcgaacgaagcttgtctacaaatgttagaggaaatcggttcagtagaccgtattcctgaattcatcgcccgtgcgaaagacaagaacgacccattccgtctgatgggctttggtcaccgtgtttacaaaaactttgacccacgtgccaaagtgatgcgtgaaacctgtcacgaagtgttaaaagagctaaaagtacaagatccattattagatgtcgccatggaacttgagcgtattgcgctggaagatgagtacttcatttcgaagaaactctatccaaacgtcgacttctactcaggcatcatcatgaaagccattggtattcctaccagtatgttcactgtactgttcgcattagcgcgtactgtgggttggattgctcactggaaagaaatgttggatcaacctggtcacaagatcagccgtccacgtcagctttatactggcgagactgcgcgtgacttcgtcgacctaga

SEQ ID NO: 236550 - DNA, 918 bp, Unknown
  Bacterial polypeptide expressing nucleotide sequence isolated from the Sargasso Sea
atttacttatgatcctggttttacatctactgcatcttgtgattcttcgataacatttatagatggaaataaaggcattcttagacatagaggatatgatattcatgaattagctagtaacagtgattttttagaagtttgctatttattattgcacggagatttaccatctcctgaagacaaaaagaaatttaaagatgtaattacaaatcatacaatgttgcatgaacaactagttcatttatacagaggttttagaagagatgcccatccaatggcaattatggttggtgttgttggggctttgtcagcattttatcatgatagtacagatttttcagatattaatcagagaatggtcgcatgtcatagattaattgctaaaataccaactataggtgcaatggcatataaatactctattggacaaccatttgtatatccaagaaatgatttatcttatgcagaaaactttctttacatgacattttctgtaccaacacaagaatttaaaataagccctaaaattgcaaaagctatggatagattctttgtattacatgcagaccatgagcaaaatgcatcaacttcaactgttagattagctggatcttcgggtgcaaatccatttgcttgtatcgctgctggaatagcatccttgtggggaccagcacatggtggagcaaatgaagcagtgattaaaatgcttgaagaaataggagatgttgaaaatatacctgaatttataaataaagcaaaagataaaaatgattcatttagattaatgggctttggacacagagtgtataaaaattatgaccctagagcaagcgttatgaaagaaagtactcatgaagttctagaagaattaaataaacttgatgatccacttttaaagattgcaattgaattagaaaa

SEQ ID NO: 236551 - DNA, 746 bp, Unknown
  Bacterial polypeptide expressing nucleotide sequence isolated from the Sargasso Sea
gcatcaaaaagaattcttctttatatacttggcaagatgccaatactggttgcaaatgttttcaaccacaaccaaaaagacgcgaatgttgattacgatgagtctttgtcatattcagaaaatattttgagattattctttggatggaaagatggctatgaaatagacccaattctttcaaaggcacttgatattctcttgatattgcatgcagaccatgaacaaaactgcagcacctcttctgttaggttaacaggaagttctggcacaaatccttatgcagcaattgcagcaggagttgcagctttatggggccctgcccatggaggagcgaacgaagctgtggttagaatgtttgatgagattgggtcaaaagacaatatttctcaatacattgagaaggcgaaagacaaaaatgatccatttaggctgatgggatttggacatcgtgtttataaaaattatgatcctagagcaacaataattagaagtcagtgccataaagttttggaatcgaccggcaatgactctaatcccatgttcgaacttgcgcttgagttagaagaaattgcattaaacgatgactattttgtccaaagaaatctctaccccaacgtagatttctattctggattgatttatcaggcaatggacatacctaaggagatgtttactgcaatgtttgccttggcaagaactgtcgggtgggcgacacattggtgtgagatgatgtctaaccctaagca

SEQ ID NO: 236552 - DNA, 730 bp, Unknown
  Bacterial polypeptide expressing nucleotide sequence isolated from the Sargasso Sea
tgtcattttcagaaaattttttttacacatgtgtttcagcaatactgcagaaaaatacaaagtttcacctgttcttgcaaaagcaatggatataatttttataattcatgctgaccatgaacaaaatgcctctacatcaactgtaagacttgcaggatcatctggcgcaaacccatttgcttgcatagccgcaggggtttcttcgttatgggggccagctcatggaggcgctaaccaagcagcgttagaaatgcttgaagaaatcggatcatctaaaaatataaaaaaatatattgcaaaggctaaaaataaaagagatgcatttaaattaatgggtttcggtcatcgtgtttataagaattatgatccaagagctaagatacttaaaagtatatgtgaaaaggttctaaagcacataggggtcaagaatgacccaatacttaaacttgctattgatcttgaaaaaattgcacttaatgacaaatattttaaagaaaaaagactttatcctaatgttgatttttattcaggaataattcttagggctatcggatttccaccagaaatgtttacagtcatatttgctattgcaagaactgccggatggactgctcaatggaccgagatgattgaagatccaatacaaaaaatcggtagacctaggcaattatatactggaaaaggcattaccaaatatggagtagaaagatctagaaaaaatacacgttaa

SEQ ID NO: 236553 - DNA, 739 bp, Unknown
  Bacterial polypeptide expressing nucleotide sequence isolated from the Sargasso Sea
ctatattgatggcgatcaaggtatattgttacaccgcggctatccaatcgagcaacttgccgttgactccgattacctagacctgtgttatctgctgctttacggtgaactgccgacaaaagagcaatatgctgaatttgtacacacagtcaaaacccacactatggtgcatgagcaaatcgccttcttctttagaggcttccgtcgtgatgctcatcctatggcgatgttgtgtggtgttactggtgcattgtctgcattttatcaagactcactcgatgtcaacgatcctcgccaccgcgaaatcgccgcttatcgcctagtctccaaaatgccaacgattgctgctatgtgctacaagtactcttcaggccagccattcgtttatccacgtaatgacttaagctatgcaggcaacttcttaagcatgatgtttgcagttccttgtgaagagtacaaggtaaacccaattgttgaacgtgctatggaccgtatcttcattctacatgcggatcacgaacaaaacgcgtcaacgtcaaccgtacgtttagccggttcttcaggcgcgaatccattcgcgtgtatcgctgcgggtattgcttctctatggggccctgcacacggcggcgcgaacgaagcttgtctacaaatgttagaggaaatcggttcagtagaccgtattcctgaattcatcgcccgtgcgaaaagacagaacgacccattccgtctgatgggcttt

SEQ ID NO: 236554 - DNA, 625 bp, Unknown
  Bacterial polypeptide expressing nucleotide sequence isolated from the Sargasso Sea
tgcttttctattacatgccgatcatgagcaaaattgttctacatcaacggtcagaatggctggtagctcaggggcaaacccatactctgcgattgcagcgggaatctcagctttgtggggtcctgctcatggaggtgccaatgaagcagtccttaggatgcttgtggaaatcggaagcaaaaaaaacattgaaaaatatattgataaagcgaaagataaagatgacccctttcgattgatgggattcggccatcgtgtttataaacattatgacccacgagcaaaaattattagaaaaatgtgtcataaagttctcaatcaaaaaggcagtgcagattcaccattacttgaattggctatagaattggaagagattgcactaaaagatgattattttcgagagaagagcttatatcctaatgtggatttctactcagggataatatatcaagcacttggtatccccacatcaatgtttactgttatgtttgcaattggaagaacagtgggctgggtttctcactggagagagatgattacagatcccaattcaaaaatcagtagaccgagacagttgtatacaggtccagaaaaaagaaattatatctcaattgataagcgataa

SEQ ID NO: 236555 - DNA, 863 bp, Unknown
  Bacterial polypeptide expressing nucleotide sequence isolated from the Sargasso Sea
tgttgatctcgaaatcaaagatgcatcagaaggacctagtgtcatagatttgaaaagcctttatagtgatacaggctattttacctttgatccttcatactcaacgacagctagttgcgaaagcaaaattacctatatcgatggagccaaagggatattagagtacagaggatatccaattgaacagctagcagagcaaagcacttatttagaggttgcatacttgttattcaatggtgagctgccatcgagcaatatttcactcgatgaatttagatcacaagtgaagaaaaacatgactttgccagagggtatgagcgctattttcactggctttggaaatgatgcacatccaatggcgatgctaacgacagccgtagcggcactttcaggatcttatcatcagggaataaacgtaagagataaagagcatcaaaaagaattcttctttaatattcttggtaagatgccaatcttggttgccaatgtttttaatcacaaccaagaaggtgcaaatgttgagtatgacgaatcactttcgtattcagaaaatattttgagattattctttgggtggaaagatggatatgaaattaacccgatcttttcaaaagcgctcgatattcttttgatactccatgctgatcatgaacaaaactgcagcacctcatctgttagattaacaggaagctcaggaacaaatccatatgctgctatagctgctggagtcgcggctctatgggggcctgctcatggaggggcaaacgaagcagtagtcaaaatgtttggtgaaattggatcaaaagacaatatttctaaatatattgataaggcaaaagataaaaatgatccgttccgtctaa

SEQ ID NO: 236556 - DNA, 835 bp, Unknown
  Bacterial polypeptide expressing nucleotide sequence isolated from the Sargasso Sea
agaactaccaaccaaatcagaatggaacgaattttctagcgcaataaaaaatcatacaatggttcatgagcaaataagagtattttataatggttttcgaagaggggctcatccaatggcaatcatggttgcttctgttgcagctttatctgcattttatcctgattcaataaatattaaagatccagagcaaagacgtatttcggcaagaagaatggtcgcaaaaattcctacattagcagccatggcatataaatatagtttaggtcaaccatttgtatatcctgataactcgttaccttattcagaaaattttatgcagatgtgctttgctgtccctgcagaaaaatatcaaatcaataaagtttttgctaatgcgttagataaaattttcattttacatgctgatcatgaacaaaatgcgtcaacatctactgtaagattagcggcatcatctggagcaaatccttttgcttcaatttcaactggatttacatctttatggggaccattacacggtggtgccaatgaggctgccctaaacatgcttaaagaaattggtgatgttaaaaatattcctaagtatattaaaaaagccaaagataaaaaagatccttttaaactaatgggttttggacatagagtttataaaaattatgacccacgtgctaaagtaatgcaaaaaacatgtcacgaagttttaaatgaaattggaaatactgacaataaattacttgaggttgctaaagaacttgaaaaaattgctctaaatgatgaatattttattgaaaaaaaactatatccaaatattgatttttattcagggataactcta

SEQ ID NO: 236557 - DNA, 841 bp, Unknown
  Bacterial polypeptide expressing nucleotide sequence isolated from the Sargasso Sea
ctaccacgactcactggatatcaacgatccgcatcatcgcgaatctccgcgattcgcctgatcgccaagatgccgaccctggccgccatggtctacaagtactccatgggccagcccatgatgtacccgcgcaatgacctgagctactccgaaaacttcctgcacatgatgttcaacacaccctgtgaagagaagaagatcagcccggtactggccaaggcaatggaccgcatcttcgtcctgcacgccgaccacgagcagaacgcctccacctccactgtacgcctggccggctcttccggcgccaacccgttcgcctgtatcgcagccggcattgcagcactgtggggtccggctcacggcggcgccaacgaagcggtactgcgcatgctggacgagatcggcgatgtgtcgaacatcgaaaaattcgttgccaaggccaaggacaaggacgacccgttcaagctgatgggcttcggtcaccgcgtctacaagaacttcgatccgcgcgccaaggtcatgaaagagacctgcgacgaagtactggccgagctgggcatcaacgacccgcaactggaactggccatgaagctcgaagagatcgcgcgcaacgatccctacttcaaagagcgcaacctgtacccgaacgtcgacttctactccggcatcatcctgaaggcgatcggcattccgaccgaaatgttcactgttatcttcgccaccggccgcaccccgggctggattgcacactggaacgagatgatcagcggtccgtacaagattggccgtccgcgccagctgtacaccggctcgacccagcgcgactaccccagcaagtaag

SEQ ID NO: 236558 - DNA, 835 bp, Unknown
  Bacterial polypeptide expressing nucleotide sequence isolated from the Sargasso Sea
tgtaagagataaagaggatcaaaaagaattcttctttaatattcttggtaagatgccaatcttggttgccaatgtttttaatcataaccaggaagattcaaatgttgagtatgacgaaacactttcatattcagaaaatattttgagattattctttgggtggaaagatggatatgaaataaacccgatattttcaaaagcgctcgatattcttttgatactccatgctgatcatgaacaaaactgcagcacctcatctgtcagactaacaggaagctcaggaacaaacccatacgctgctatagcagctggagttgctgctctatggggtcctgcacatggaggagcaaacgaagcagttgtcaaaatgtttggtgaaattggatcaaaagataatatctctaaatttattgataaggcaaaagataaaaatgacccattccgtttaatgggcttcgggcatcgtgtctacaaaaattatgacccaagagcgacaatcatcagaagtcagtgccataaggttttggaatcgaccagtaatgaatctaatcccatgttcgaacttgcgcttgagttagaagaaattgctttaaacgatgaatattttgttcagaggaacctctatcctaatgtcgatttttactctggtttgatttatgaggcaatggacattcccaaagagatgtttaccgcaatgttcgctttggccagaacagttggatgggcaacacactggtgtgagatgatgtctaaccctaaacacaaaattgggcgaccaagacaactctacctgggcgaaaaaaagagggactatgtcccaatcaatgatcgctag

SEQ ID NO: 236559 - DNA, 433 bp, Unknown
  Bacterial polypeptide expressing nucleotide sequence isolated from the Sargasso Sea
caatatatcgagaaggcgaaagacaaaaatgatccatttagactaatgggatttggacatcgtgtttataaaaattatgaccctagagcaacaattatcagaaatcagtgccataaagttttggaatcgaccggtaatgaatctaatcccatgttcgaactagctttagaactggaagagattgcacttaatgatgactactttgttgaaagaaatctctaccccaacgtcgatttttactctggtttgatttatgaggcaatggacattcccaaagagatgtttaccgcaatgttcgctttggccagaactgttggttgggcaacacactggtgtgaaatgatgtctaaccccaaacataaaattgggcgaccaagacaactttacctgggtgaaaaaaagagggactatgtcccaatcagtgatcgctaga

SEQ ID NO: 236560 - DNA, 533 bp, Unknown
  Bacterial polypeptide expressing nucleotide sequence isolated from the Sargasso Sea
ccccttcgcaagcatggcagcagggatagcagccttgtggggaccatcgcacggtggcgcgaacgaggccgtacttaccatgcttgatgaaataggtagtgttgagaacatccccgcctatataaagaaagcaaaagataaagacgaccccttcagaatcatgggtttcggccacagggtttacaaaaattacgatccgagagcgaaagtcatgcaacaaacttgtcatgaagttctcgaggaactaggcgtcgaggacgacccggtcttagcgatggccaaagagctcgaaagaatagcgttagaggacgactacttcgttgagaaaagactttatcctaacgtggatttctactcaggaatcatactgaaagccattggcattcccgtcgagatgtttacagtaatctttgcaactggtcgcacgcctggatggattgcgcattggtgcgagatgatctcaggcggatataagattggccgaccccgacaactctataagggatcgatcaagagagattacccaggctagt

SEQ ID NO: 236561 - DNA, 469 bp, Unknown
  Bacterial polypeptide expressing nucleotide sequence isolated from the Sargasso Sea
tatgttaaaagaaattggatcagttgatcgaattccagattttattaaaagagcaaaagacaaaaatgatccatttaggttaatgggatttggccatagggtttataaaaattttgatccaagagctaaagttatgaaagaaagtgctgatgaagtgctggaactacttggaataagtaataatagaactctacaagtagcaaaagaactagaaaaaattgcattagaagatgagtatttcatagaaaaaaaattgtatccaaatgtggatttttattctggcattattttagaagctatgggatttcctacatcaatgtttacaccaatatttgctcttgctagaacagtaggctggatatctcattggatagaaatgcattctgatcctgataaaaaaataggtaggcctagacaactttataaaggcaatcttgaaagaccttttgtattaataaaggaccgctaa

SEQ ID NO: 236562 - DNA, 763 bp, Unknown
  Bacterial polypeptide expressing nucleotide sequence isolated from the Sargasso Sea
taaaagcacctctaaaacaaaaacagcaaaactaactattaacaataatacttacgaacttccaatatacaaatctaccgaaggcgagtctgttattgatattactaaactacactcacaagcaaaattattcacttatgatccaggatttacttcaacagcatcgtgtgagtcaaaaattactttcattgatggtgataaaggaattttaagatatcgcgggtatgatatagaagaattagcaaataaaagtgactttatagaggttgtaaatttattaatttatggtgatttacctaataaggaacaattaaaaaaatataaaaaacttattactcgtcatacacttttgcatgaacaaattataaacttttttcaaggtttcagacgtgatgctcatccaatggcaatgatggtcggggttatgggggcattgtcttcattttatcaagattccttggatatcaatgatgcccatcaaagacaagaggcaactagaagaataattgctaagtcatcaacaattggtgcaatggcgtataaatactctattggccaggcttttgtatctccaaaaaacaacttatctttctcggaaaattttttacatatgtgttttagcaacacagcagaagaatacaaagtttctccagttctgtctaaagctatggatacaatatttatattacacgcagatcacgaacaaaatgcttcaacatctacagtgcgtcttgctggctcatctggtgctaatccatttgct

SEQ ID NO: 236563 - DNA, 741 bp, Unknown
  Bacterial polypeptide expressing nucleotide sequence isolated from the Sargasso Sea
aagtgtaattgacgtaaggaccctgtatggtgaaacggatcattttacgttcgatcccgggtatacctcaacaggatcatgtgagtccgctctgacatacattgatggggacaaaggtatactattacatcgaggatatccaatcgaacaattagcggagcatagtaactttttagaggtcgcccatcttcttttatatggagatttgcccaatcaacaagcaaatgaaaaatttgtaactgatatcacgtaccacactatgttgcacgatcagttgatgaatttttacagaggatttagacgggatgctcatccaatggcgatcatgtgcggcgttgtgggcgcactttctgcattctatcacgactccactgatataaacgatcctcatgcccgaatggttgcatcttatcgtcttatagcaaaagtgcccacgatcgcagcaatggcttttaagtattcgttaggacaaccatttaattttccccaaaataagctaacctacgctgaaaattttctgcagatgttatttggcgtgccctcagaagactatgaaataaaccctgttcttgcacgagcaatggacagacttttaattctccatgccgatcatgaacaaaatgcgtcgacctcaacagttagactagctggctcctccggagccaatccatttgcatgtatagcagcgggaattgcatccctatggggccctgcacatgggggggcaaatgaagctgtact

SEQ ID NO: 236564 - DNA, 434 bp, Unknown
  Bacterial polypeptide expressing nucleotide sequence isolated from the Sargasso Sea
atttagattaatgggatttggtcatagagtttataaaaattatgatcccagagcaaaagttatgaaagaaagtgctcatgaagttttggaagaattgaataaactagatgatcctcttttaaaaatcgcaattgagttagaaaaaattgcactaaaagatgaatattttattcagaaaaaattatttcctaatgttgacttttactcaggaattattttaaaagctcttggtttccctactagtatgtttacagtattatttgctataggaagaactgttggatggatttcacaatggaaagaaatgattgaagaccctgtaaataagattggtagaccaagacaattgtatacaggctataaagaaagggaatatcaaattgaagcttctagagaaaaaaaatctatatttaactggctttggaaaaaataaa

SEQ ID NO: 236565 - DNA, 913 bp, Unknown
  Bacterial polypeptide expressing nucleotide sequence isolated from the Sargasso Sea
gatgctcatcctatggcaattatggtaggtgttgttggtgccctttcggccttttatcatgacagtactgatttttcagacattaatcaaagaatgattgcctgtcatagattaatagcaaaaattcccacaataggcgcaatggcttataaatattccattggtcaaccatttgtttatccaagaaatgatctttcttatgctgaaaattttttatacatgactttttctgtgccatcagaagattacaaggtgagcccaaaaattgttagagcaatggatagattttttacgttacatgctgatcatgaacaaaatgcatccacttcaacagtaagattggcaggttcctctggcgcaaatccatttgcttgtattgctgctggtattgcatctttatggggaccagcacatggtggagctaatgaagcagtaattaaaatgttagaagagattggggatgtatcaaatatacaaaaattcatagataaagctaaagataaaaatgactcttttagattaatgggttttgggcatagagtttataaaaactatgatccaagagccactgttatgaaagaaagtgcgcatgaggttttagaagagttaaatatgcaagatgatccattgcttaaaattgcaatagaattagaaaaaatagctctgaaagatgaatattttattagtaaaaaattattcccaaatgtagatttctattcaggcataattctaaaagcattaggtttccctacaagcatgtttacagtgttatttgcaataggaagaaccgtaggatggatatcacaatggaaagaaatgatagaagatcctgttaataaaattggcagacctcgtcaattatacactggctataaagctagaccttatcaagctgaatcttccagagaaaaaa

SEQ ID NO: 236566 - DNA, 466 bp, Unknown
  Bacterial polypeptide expressing nucleotide sequence isolated from the Sargasso Sea
aatgaaatacaagaatgagagaaatatttcaaagtatttaaaaaaagcaagagataaaaatgatccttttagactttttgggtttggacacagagtatacaaaaattatgatcctagagcaaaagtcatgcaaaaaacctgtcatgaagttttagatttgcttgggattaaaaataatcctctgctttctttggcaatgaaattagaaaaaattgccctagaagatgaatattttattaaaagaaaattatacccaaatgttgatttttactcaggcattattttacaagcaattggttttccaacaagtatgtttaccgtattatttgccgtagctaggactgtaggatgggtagcacaatggaatgaaatgattgaagatcctaaccaaagaattggaagaccaaggcaactctacaccgggccaaacaaaagaaattatgttaaattaaataagagaggttag

SEQ ID NO: 236567 - DNA, 786 bp, Unknown
  Bacterial polypeptide expressing nucleotide sequence isolated from the Sargasso Sea
ttttaccaagacacattaaacattaatgactcacatcaaagacaggaagcgacaagaagaattattgcaaaatcagctacaataggtgcaatggcttataaatactccttgggccaagcttttgtttccccaagaaataatcttactttctcagaaaattttttatacatgtgctttagcaatactgcagaaaattacaaagtttcacctgttcttgctaaagcaatggatacaattctaattcttcatgctgatcatgagcaaaatgcatctacatcgactgtaagacttgctggttcttctggagcaaacccattcgcttgcatagccgcgggagtttcttcattatggggacctgctcatggaggtgctaaccaagctgctttagaaatgcttgaagaaattggctcatcaaaaaatattaaaaagtatattgcaaaggctaagaataaaaaagatcctttcaaattaatgggttttggccatcgagtttataaaaattatgatccgagagcaaaaatactcaaaagtatatgtcaaaaagttcttaagcatgtaggagttaagaatgatccaatattaaaacttgcaatggatctcgaaaaaattgcactaaatgataaatattttagagaaaaaagactttacccaaatgttgacttttattcaggaataattttgagagcaataggatttcctccagaaatgttcactgtcatatttgcaatagctagaacagctggatggacggcacagtggacagaaatgatgaagatccaatccaga

SEQ ID NO: 236568 - DNA, 703 bp, Unknown
  Bacterial polypeptide expressing nucleotide sequence isolated from the Sargasso Sea
aattttttaagaatgtgttttgcagttcctgcggaagagtatgaagtaaatccaatattaagtgaggctatggatcgaatatttattcttcatgcagatcacgaacagaatgcttccacttcaactgttagacttgctagttcttctggcgcaaatcctttcgcttgcattgcagctggaatagcctgcctttgggggcctgctcatggaggtgcaaatgaagcttgcttgcaaatgctaaggcaaattcaaacagtagataggatccccgaatttataaagagagcaaaagacaatcaagacccttttagacttatgggatttggacatagagtgtataaaaattttgacccgagatctagcgtaatgaaagaaagtgccgacgaagttttaaatttgctaggtgttgagaataaccccaccctgcaggtggctaaggaacttgaacgaattgctctagaagacgaatactttatagagaaaaaactttatccaaatgtggacttttattctggtattattttagatgctatgggcttccccacatcaatgtttactcctatttttgctttggctagaactgttggctggatatcacagtggaaggagatgatttctcacccagataataaaattggcagaccgaggcaattatacttaggctcaggatataggccattcaaaccgctaaatcaaaggtgat

SEQ ID NO: 236569 - DNA, 1006 bp, Unknown
  Bacterial polypeptide expressing nucleotide sequence isolated from the Sargasso Sea
agcacccattggaccagacgtgtgggatgtggttctcttactagtcaaaattggtttacttatgatcctgctttcgtatccaccgcaagttgcgaatcgcaaattacatacatagatggagaacaaggaatccttctacatcgcggctacccaattgatcaattggccgaatcctcaaactatcttgaaacctgctatcttttactttatggcgaattaccgaataacgagcaatatgagcaatttgtttcggtcattcaaaatcacaccatggttcacgaacaaatcagaactttttttaatggtttccgcagagatgcacatcctatggcggtcatgtgtggtgtagttggagcattatcagcgttttatcatgactctttagatatctccaatgaacgccatagagagatagctgcctatcggttagtcgcgaagattcctactatagcggctatgtgcttcaaattttctactggtcaaccattcatgtatccggataacagactcaactattcagaaaattttctacacatgatgtttggaacaccctgcgaaccaagcaaaattagtcctactttggcgaaagcaatggatagaatttttcttttacatgcggatcatgaacaaaatgcctctacctctactgtcagacttgctggctcgtcaggagcgaatccatttgcgtgtattgcagcggggattgttgctctatgggggccgtctcatggaggcgcgaatgaagcagtattggaaatgcttcaagaaataggtgacgtttcgagaatagatgaatatgtagcgagagcaaaagataaagaagatccctttagattgatgggattcgggcaccgggtctataagaacttcgatccccgagcaaaggtaatgaaggaagcagctgacgaagtgcttcaagaacttggtatagaaaatgacccgctactggcaattgcaaagcgactggaagagatagcacttgaagatgactatttcattagcaaga

SEQ ID NO: 236570 - DNA, 850 bp, Unknown
  Bacterial polypeptide expressing nucleotide sequence isolated from the Sargasso Sea
ttccgccgtgacgcgcatccaatggccatcatgtgtggcgttgtgggcgcgctgtctgctttctatcacgaccagatggacgtttccgatcccaagcaacgtgaaatcaccggccatcgcctgatcgcgaaaatgccgaccattgcggcatggtgctacaagtattccatgggacagcctttcatgtatccacggaacgacctgtcctacgcagagaacttcctgcacatgatgtttggcactccgtgcgaagagtacaagccaaatcctgttctggccaacgccatggacaagatcttcattctgcacgctgaccacgaacagaacgcgtccacctccaccgttcgccttgcaggctctaccggcgccaacccatacgcctgtattgcgtccggcattgccgcactctggggcccggctcacggcggcgcgaacgaagcggtactggacatgctggccgagatcggcgacgagtccaacatcgagaagttcattgccaaggcaaaagacaaggacgatccgttccgcctgatgggcttcggccaccgggtttacaagaacttcgatccacgcgccaaggtcatggctcagactgcccacgaagtattgagcgaactcggcctggaaaacgatccgctgctgaaaattgcccagcgcctggaaaagatcgccctggaagacgagtacttcgttcagcgccagctgtatccgaacgtcgacttctactccggcatcatcctgaaggccatcggtattccgacctccatgtttaccgttatcttcgccatgtcccgtaccatcggctggttctcccactggaacgaaatggtcagcggtgccaaccgtatcg

SEQ ID NO: 236571 - DNA, 548 bp, Unknown
  Bacterial polypeptide expressing nucleotide sequence isolated from the Sargasso Sea
tgtagcagcaggagtatcatcactgtggggaccggctcacggaggagcaaatcaagctgcattagaaatgcttgaaacaattgcatcatctaaaaatataaaaaaatatttaaataaagcaaaaaacaaaaaagatccatttaagctgatgggttttggtcacagagtatataaaaactatgacccaagagcaaaaattcttaaaaaaatatgcgataaagtattgaatcacgtcggaatcaagaacgatcctatacttaaacttgctaaggatcttgaaggaattgcacttaaggataaatattttatagagaaaaaattatatccaaatgtagacttctattcaggtattattcttagagcaattggatttcctccagaaatgtttacagtaatatttgctatcgcacgaactgcgggctgggcagctcaatggactgagatgatagaagatccaattcaaaaaataggaaggccaagacaactatatacaggaaataaaattcaaaaatatggaattaaaagatcgaaaaaaaataccagataat

SEQ ID NO: 236572 - DNA, 540 bp, Unknown
  Bacterial polypeptide expressing nucleotide sequence isolated from the Sargasso Sea
catgtatagcttcaggtatagcttgtttatggggacctgcccatggaggtgcaaatgaagcatgcataagaatgctggaagaaattgataatgtgaataatattcctgaatatgtgaaaaaagctaaagataagaatgatccctttagattgatgggctttggtcacagggtttataaaaattttgatccaagagcgaaggtaatgcaaaaaatatgtcatgaagttttagaccacttaggaataaaggatgatcctctgctagctatagcagtagagctagaaaaaattgcgcttgaagatgaatattttgttgaaaaaaagctttatccaaatatagacttttactcaggcattgttatgaaagctctaggttatccaatggatatgtttactgtgttgtttgctgttggaagaactgttgggtgggtttctcaatggaatgaaatgatagaagataaaagtcaaagaattggtagacctcgtcaattatacgttggaaatgatcatagacagtatgttggaatacaaaaaagataat

SEQ ID NO: 236573 - DNA, 756 bp, Unknown
  Bacterial polypeptide expressing nucleotide sequence isolated from the Sargasso Sea
cttctacgatccagggttcctgtcgaccgcaagctgtgattccgagatcacctacatcgatggagctgcaggtattctgatgtaccgcggttacccgattgagcagctggctgaacattcgaaccaccttgaagtctctcatctgctcctgaacggtgaactgcccagctcagccgagtacgacaatatggtcaagaccattaatgtcaatcaggatgtggacgagaagtaccagcagctattcaccggttttaagcaaggcgcacatccgatggcgatggtcggggctgccgtatctggtcttgccgccctctatcatgaagatactgacatcaccgtccatgaagatcgcgtcacaacagctcacagactgatcgcaaagatccctaccatcgcagcaatggcctttcgtcacggcgctggcaagacgtttattgcacccgatccttcgctaggttacgccgaaaatttcctcaatatgtgctttggtgacgaacgagagatcagcccgaccatcgcaaaagcaatggatcgaatttttattctgcacgctgaccatgaacagaatgcatcaacgtcaacggtccgcatggctggatccaccgactgcaatccctacgccgctattgcagccggtatcagcgcactgtggggacccgcacacggcggtgccaacgaagccgtgctcgacatgcttaacgagatcggagacgaatcgaaggttgaggaatacgttgccaaagccaaggacaagga

SEQ ID NO: 236574 - DNA, 739 bp, Unknown
  Bacterial polypeptide expressing nucleotide sequence isolated from the Sargasso Sea
tttaattatcctagaaataatttaaattattctgaaaattttttgcatatgtgtttttcagtcccagctgaaaaatatacactcgatccaataatttcaaaagcattagatagaattttaattctgcatgctgatcacgaacaaaatgcatcaacttcaactgtaagaattgcaggttcgtcaggagctaatccatttgcatgcatagcctcaggtatagcttcattatggggtccagctcatggtggagccaacgaagcagtattgaatatgcttgctgaaataggaagtaaagaaaatatttcaaaatttataagtaaagcaaaagataaagaggatccctttagattatttggctttggacatcgagtttataaaaattatgatccaagagcagcagtaatgagagaaacatgtcatgaagttttatcattaatgggagttaaagatgaacccttattagatatagcaatggaattagaaaaaattgctttaaatgacgagtacttcattgagaaaaaactataccctaatgtcgatttttactctggtataattttaaaagcaatgggttttcctacggagatgtttactgtattatttgctgtagctaggactgttggttgggttgcccaatggaatgagatgataaccgatcctgttcaaagaataggaagaccgagacaattatacacaggaaaaactcatagaaattttttggatttggacaaaagataat

SEQ ID NO: 236575 - DNA, 889 bp, Unknown
  Bacterial polypeptide expressing nucleotide sequence isolated from the Sargasso Sea
ctgcccaacgccaagcagaaggaagagttcaaccatgtggtgacgaatcacaccatggtccacgagcagatgcagttcttcctgcgcggtttccgccgtgatgcccacccgatggccgtgctgacgggcctggttggtgccatgagcgcgttctatccggacgctgccaacatcaatgatccgcgcgagcgtgaaatctcgcagatccgcctgattgccaagctgccgacgctggtggccatggcatacaagtacaacatcggtcagccgctcatctacccgcagaacaacctgtcgtacacgggcaacttcatgcgcatgatgtttgccacgccttgcgaagactacaaggtgaacccggtgctggagaaggcactggaccgcatcttcatcctgcacgcagaccacgagcagaacgcctcgacgtcgacggtgcgcctggcgggttcctcgggcaccaacccgatcgctgccatcgctgccggtatcgcctgcctgtggggtccggcgcacggtggcgcgaacgaagctgcgctgaacatgctggaagaaatcggtaccgtggacaaggtgcccgagttcatcaagcaggtgaaggacaagaacagcggcgtgcgcctgatgggctttggtcaccgcgtgtacaagaactacgatccgcgcgccaagctgatgcgcgaaacctgccacgaagtgctgaacgagctgggtctgcataacgacccgctgttcaagctggcgatggagctggaaaagatcgccctggaagacgagtacttcgtcagccgcaagctgtatccgaacgtcgacttctactcgggcattgtgcaacgcgcgttgggtatcccgacctcgatgttcacctgcatcttcgcgctggctcgctcgg

SEQ ID NO: 236576 - DNA, 777 bp, Unknown
  Bacterial polypeptide expressing nucleotide sequence isolated from the Sargasso Sea
cttttgtatatcctagaaatgatttatcttatgttgaaaattttcttaatatgactttttcagtacctacagaaaaatttaatataaacccaaaaattgttaaagcaatggatagattttttattttacatgcagatcatgaacaaaacgcatctacatctactgttagattagctggatcatctggtgcaaatccatttgcatgcatagcagctggtatagcttctttatggggtccagcacatggtggagcaaatgaagcagttattaaaatgcttgaagaaattgaagatgtagaaaacatacaaacttatattgaaagagcaaaggataaaaatgatccatttaggcttatgggttttggacacagagtttataaaaattatgatccaagagctacagtaatgaaagaaagtgctcatgaagtactaaatgaattaaacaagagtaatgatcctctaatgaagattgcaatagaattagaaaaaatagcactcaatgatccatattttattgaaaagaaactttatcctaatgttgatttttattcaggaataattcttaatgctttaggatttcctaaaagtatgttcacagttctattcgcaattggcagaactgtaggttggatatcacaatggaaagaaatgatagaagaccctgtaaacaaaataggaagacctagacaactttataaaggagaagaagttagaaaatatcaactagaagataatcgagaaaaaaaatctatatttaactggctttggaaaaaatagt

SEQ ID NO: 236577 - DNA, 817 bp, Unknown
  Bacterial polypeptide expressing nucleotide sequence isolated from the Sargasso Sea
actgcgagactgatggcaaaaatccggacgattgctgccttttccttcaaaaaatcgatcggccagccattcatttatccgcaggacaaactcgcctactgcgccaattttctgaacatgatgtttgccgttccggcagaaccatacgaagtcgatcccgagattgtccaggccctcgatctgttgctgatccttcatgccgatcatgagcagaactgcagcgcctccaccgtccgtgtggtaggcagcagcatggccaatgtttacgcttcggtcgcttcaggcattctcgcgctttggggtccgcttcacggtggtgcgaaccagcaggtattgcggatgctggaacagatccatgccgacggagatgacctggacaaatatgtccgcctggcaaaggaccctgattcggattttcgtctgatgggttttgggcatcgtgtctacaagaattttgacccccgtgcgacgatcatcaagggcgcctgcgaccgggtgctaaacctcctcggggtcgacgacccgctgctcgatcttgcccgtagactggaggaagttgccctctccgatgaatacttcgtcgagcgaaaactctaccctaacgtcgatttttatagcggcattatctaccgagcaatcggcatcccggagaacatgtttaccgtcatgtttgccctgggacgtctgccggggtggattgcccagtggaaagaaatgcatcaggatcccaaaaccaaaatcgcccgcccccgccaaatttataacggtgaaaccgcaagggattatgtcccgatcgaaaaacgggtcacagggtaga

SEQ ID NO: 236578 - DNA, 1013 bp, Unknown
  Bacterial polypeptide expressing nucleotide sequence isolated from the Sargasso Sea
caatggcgaactgccgagcaaggaggaaaaggccaagttcgtcagcaccatcaagaaccacaccatggttcatgagcagttgaagaccttcttcaacggtttccgccgcgatgcccacccgatggccatcatgtgcggcgtggttggcgccctgtccgccttctatcacgactcgctggacatcaataacccgcagcaccgcgaagtgtcggccatgcgcctggtggccaagatgccgaccatcgctgccatgacctacaagtactccatgggtcagcccatgatgtacccgcgcaatgacctgaattacgcggaaaacttcctgcacatgatgttcaacaccccgtgcgagatcaaaccgatcagcccggtgctggccaaggcgatggacaagattttcatcctccatgccgaccatgagcagaacgcctccacctccactgtacgcctggctggctcctcgggcgccaacccattcgcctgtatcgcagccggtattgccgcgctgtgggggccggcacacggcggcgccaacgaagccgtactggccatgctcgacgagatcggtgacgtttccaacatcgacaagttcattgccaaggccaaggacaagaacgacccgttcaagctgatgggcttcggtcaccgcgtgtacaagaaccgcgacccgcgcgccaccgtgatgaagcagacctgcgacgaagtcctcggcgagctgggcatcaccaatgacccgcagctggaactggccatgcgcctggaagagatcgctctgaccgatccgtacttcaaagagcgcaacctgtacccgaacgtcgacttctactcgggcatcatcctcaaggccatcggcattccgacctcgatgttcaccgttatcttcgccctggcacgtaccgtgggctggatctcgcactggaaggaaatgctctcgggtccgtacaagattggccgtccgcgccagctgtacaccggttacgagcagcgcgacctgccgaccaaccgcgactgat

SEQ ID NO: 236579 - DNA, 898 bp, Unknown
  Bacterial polypeptide expressing nucleotide sequence isolated from the Sargasso Sea
ggttggggttatgggggcattgtcctcattttatcaagataccttggatatcaatgacgcccatcaaagacaagaagcaacaagaagaataattgctaaatcatcaacaatcggtgctatggcgtataaatattcaattggccaagcttttgtatctccaaaaaacaacctatctttttcagaaaattttttacatatgtgttttagcaatacagcagaagaatacaaaatttctcctgttatatctaaagctatggatacaatatttattttgcacgcagatcacgaacaaaatgcttcaacatctactgtgcgtctggctggctcatctggtgctaatccatttgcttgtattgctgctggtgtctcatctttatggggaccagctcatggaggagctaatcaagcagctttagaaatgcttgaagaaattggatcgacaaaaaatataaggaaatatcttaacaaagcaaaatcaaaaaaagatccatttaaattaatgggatttggacacagggtttataaaaactatgatccaagggcaaagattttaaaaaaaatatgtaaaaacgttttagctcatataggtattaaaaatgatccaatacttaaactcgctatggagctagaaaaaattgctttaaatgaaaagtattttatagaaaagaaattataccctaatgttgatttctattctgggataattcttagagcaataggatttccgcctgaaatgtttacagttatttttgctatagctcgaacagctggatggactgctcaatggacagagatgattgaagaccctatccagaaaattggaagaccaaggcagtattatactggcaataaatcccttaaatatggcgcaaaaagatctagaaaaaacactagataa

SEQ ID NO: 236580 - DNA, 1342 bp, Unknown
  Bacterial polypeptide expressing nucleotide sequence isolated from the Sargasso Sea
atgacagaaaaagaagataataaaaagaaaccatttacattattcaataatgaaacaggtcaatctataaaattacctgtactaacgggcacagatggacctgacgtactagatattagaaatctatacaaagatactggcttatttacttatgatcctggttatacatctactgcatcttgtaattcagcaattacttttatagatggaaataaaggaattcttcgtcatagaggatatgacataaatgatttagcaaataaaagtgattttttagaagtttgctatttattacttcacggtgacttgccctctcctgaagataagaaaaaatttgagaatgtaatacaaagacatactatggtgcatgaacaattggtaaatttatatagaggttttagaagagatgctcatccaatgtctataatggttggtgtagtaggagcattatcagctttttatcatgatagtactgatttttcagacataaatcagagaatgatcgcatgtcatagattaattgcaaaaatagcaactattggagctatggcttataaatattctattgggcaaccatttgtatacccaaaaaataacttatcatattgtgaaaatttcctccatatgacattttcagtaccaacagaagattatattatcaatccaaaaatttcaaaagctatggatcgtttttttattttacatgctgaccatgaacaaaatgcatctacatcaactgttagacttgcaggttcatcgggtgctaacccatttgcatgtatagcagcaggaattgcttctctatgggggccagcacacggaggtgctaatgaggcagtaattaaaatgttagaggaaattggagatatttctaaaatacctgaatatataaataaagctaaagataaaaatgatgactttagattaatgggatttggacatagagtttataaaaattatgatccaagagcagatgtaatgaagaaatcagctcatgaagtattaaaagaattaaacatggaagatgataagcttctaaagatagctattgaattagaaaaaattgcattaaaagatccttattttattgaaaaaaaactttatcctaatgtagatttttactcaggaataattctaaaagctttaggatttccaactagtatgtttactgtactatttgcaataggcagaacagttgggtggatctctcaatggaaagaaatgatcgaagatccaataaataaaattggtagaccacgacaattatatagtgggcaaaatgcaagacaatatcaaattgttgaaagtagagagaaaaaatctatatttcaatggctttgga

SEQ ID NO: 236581 - DNA, 925 bp, Unknown
  Bacterial polypeptide expressing nucleotide sequence isolated from the Sargasso Sea
catgttcttccacggtttccgcaacgacgcgcaccctatggcaatgctatgtggtaccgttggcgctatgtcttcgttctatcacagtgatttagacgtttctaacgaagagcagcgtgttcgcagcgctcaccgtctaattgcgaaaatgcctacccttgttgctatgtgttataaatacaacatcggtcagcctttcgtatatccacgtaacgacctaagctatgcagctaacttcctgaacatgatgttctctgtacctgcagaagaatttcaaatcagccctgctgtagagcgtgcgatggaccgtatctttacccttcacgctgaccacgagcaaaacgcgtctacctcaacggtacgccttgctggttcgtctggcgctaacccttacgcgtgtattgcggcaggtgttgcgtcactttggggacctgctcacggtggtgcaaacgaagcatgtcttaacatgctagaagaaatcggtacagttgaccgcattccagagtttattgctcgtgctaaagacaagaatgacccattccgtctgatgggcttcggtcaccgtgtttataaaaaccacgatccacgtgcaacagtaatgcgtgaaagctgtcacgaagtattaagcgaacttaacgtaaaagatccactactagaagtagcgatggaactagaaaagattgcgttaagtgacccgtacttcgcagagaagaaactgttcccgaacgtagacttctattcaggtatcgtacttaaagcaattggtattcctactaacatgtttacgtgtatttttgccctatctcgtacagtaggttggatttcacactggcatgaaatgatgagcgaccctaaacaaaaaattggtcgtcctcgtcagctttacactggtcacaaccagcgtaagtacacgccaattaagtag

SEQ ID NO: 236582 - DNA, 1057 bp, Unknown
  Bacterial polypeptide expressing nucleotide sequence isolated from the Sargasso Sea
gatggctcaacctcaaatctttaagggcctggcaggtgtcgtcgccgataccacatcaatctcaaaagtcatgccggagaccaactcccttacttaccggggctatgcggtccaggatttggcagcacaatgcagttttgaagaagtagcctacctgatcctccaaggagaactgccaactcgcagtcagctcaacgcctttaaaaagaaggaacgggcacttcggaaaattagtaagtcacatgcagacgtaatcgcaaaatttccgcgccgggcacaccccatggacaccattcaggtggctgttgcctatctcggcacgacagaggtcgcctggggagcagagccccttgaagccgatatggaacgggccatgagcctgctcgcaaagatcccaaccatgatcgcgaccgatttccgcctccgccagggtaaacgtcgcatagcgccaaggacagatctttccatggcggaaaacttcttcaacatgtgttttggccggataccgccgaagacagtcatcaaggcattcgacgtctcactaattttgtatgcagaacacagttttaacgcctccaccttcactggacgagtgattacctccacgcgttcagatatatactctgccactactggtgcaattggagcgctcaagggtccgcttcatggcggtgctaacgaagccgtgatggagatgatgaagaaggtgggccggccgtccaatgcggagaaatggctgagggatgccatggcaaacaaagatttggtcatgggatttggacaccgggtttataaacagggtgactcccgtgttcccacaatgaaggcctgtctagaggacctgactgaatggtctggcgacaccaaatggctggaaatctacaacaccatggccgacatcatggtttctgaaaaaggaatccatccaaacttggatttcccctcagggccagcctactacctcatgggttttcctatcaatctgtatacaccgcatttttgtcatggcccggacaaccggttggtcggcgcactacttcgagcaaaacgcgaataa

SEQ ID NO: 236583 - DNA, 1288 bp, Unknown
  Bacterial polypeptide expressing nucleotide sequence isolated from the Sargasso Sea
catggcaggcaaaattacacttaagaaagatacacagagtgttgatctcgaaattaaaagcgcatcagtaggacctagcgttatagatttgaaaagcctatataacgatacaggctattttacatttgatccttcatactcaacaacggcgagttgcgaaagcaaaattacctatatcgacggagccaaaggaattcttgagtacagaggatatccaattgaacagcttgcagagcaaagcacttatttggaagttgcgtatttattatttaatggagagcttccaactagcaacattgcacttgatgagttcagatcacaagttaagaaaaacatgactctgccaaatcacatgagtggtttactcactggctttggaaaagatgcacatccaatggcgatgcttactacatcagttgctgcactttcagggtcttatcataatggaataaacataagaaacaaaaagcatcaaaaagagttcttctttaacatacttggcaagatgccgatcctagttgcgagtgtttttaatcataagaaaaatgatgctaatgttgagtatgatgaatcactttcatattcagaaaatatcttgaaactattctttggatggaaagatggctatgaaataaacccaatcttttcaaaagcacttgatattctattaatactccatgctgatcatgagcaaaactgcagtacatcatctgtcaggctaacagggagctctggaacaaacccatatgctgctatatccgcaggagttgcagctctatgggggcctgcacatggaggtgcaaatgaagctgttgtcagaatgtttggtgaaattggatcaaaaaacaatatctcaaagtatattgataaagcaaaagataaaaatgatccattccgtctaatgggcttcggccatcgtgtctacaaaaattatgacccaagagcaacgatcattaggagtcagtgccataaggttttgaaatcgacgggaaataataccaatccaatgtttgagcttgctctgcaattggaggagatcgcacttagcgatgactacttcgtagatagaaatctctaccccaatgtagacttttactctggtttgatttacgaggcaatggatattcccaaagaaatgtttactgcaatgtttgccttggccagaaccgttggatgggcaacacactggtgtgagatgatgtctaaccccaaacataaaattgggcggccaagacaactttacctaggtgaaaaaaagagggactatgtcccaatcagtgatcgctag

SEQ ID NO: 236584 - DNA, 806 bp, Unknown
  Bacterial polypeptide expressing nucleotide sequence isolated from the Sargasso Sea
aactataaaaatattttgcagattaattgctcaagttccgattttagctgcctatttctacagacactcacaagggcttgaaattgttcaaccagataattccttaagctattctcaaaactttttaaatatgctattcaaaggtgatgataaaaaattaaacccagatcttgtagatgccatggataccttattgatacttcatgcagatcatgaacaaaactgtagtgcaagtgtaatgagaggcacaggaagctctgagtctgatccatattcatcagttgcagcagcggcagctgcattatatggaccattacatgggggagcaaatgaagcagttttagaaatgctatcaaaagagattaaaactgttgaaaacataccttcatttttagaaagtgttcagaagaaggaagcattattaatggggtttggtcatagagtatataagtcatatgaccctagagccaaatatcttaaaattgctgctgataaagtttttgaaatcaccggtaccaatcctttattagatattgcattaaaacttgaatctattgcgctgagtgaagattattttcaagctagaaatttatatccaaatgttgatttctattctggtttaatatatgaatcaatgggtattccaacacctatgtttactgtgctttttgcagtaggtagaactccaggatggttagctcagtggaaagaatttttaaatgataaagatcaaaaaattgcaagaccaagacaggtttatactggttacgattccagagattatttgcctttagaatcaagataaa

SEQ ID NO: 236585 - DNA, 685 bp, Unknown
  Bacterial polypeptide expressing nucleotide sequence isolated from the Sargasso Sea
gatgaactcgaagacacacgcaacgctgagcttttccgacagcgatcagacgattgatttgcctgtctaccagggcacgctcgggccggatgttatcgacatccgcaagctgtacgctcagactggcaagttcacgtacgacccgggcttcatgtccacggcggcgtgcaactccgaaatcacgtatatcgacggtgacaaaggcgagctgctgtatcgcggttatccgatcgacaatctggcgcagaacgccgacttccttgaaacgtgctatttgctgctgaagggcgaattgccgaatgcgcagcagaaggaggagttcgtcaccacggttacgcagcacacgatggtgcatgagcagatgcatttcttcttccgtggatttcgccgtgacgcgcacccgatggcgattctggtggcggcggttggcgcattgtcggcgttctatcacgactcgctggacatcaacgatccgcagcatcgtgacgtatcggcgattcgcatgatcgcgaagctgccgacgctggtggcgatggcgtataagtacaccgtgggtcagcctttcgtttatccgcagaatgacctgtcgtacagcgcgaatttcatgcggatgatgtttgcgaatccggcggaagagtaccaggtgaatgacgtgctggtgcgcgcgttggaccgcattctgatt

SEQ ID NO: 236586 - DNA, 1045 bp, Unknown
  Bacterial polypeptide expressing nucleotide sequence isolated from the Sargasso Sea
gttgaaaaagaaaaaaacacataaaatcaaaaaaacagcaaaaattactattgataatgatacttatactcttccaatatttgaatcaagtgttggagaaaatgtagttgatatttcaaaattacattcgctatctaattactttacttatgatcctgggtttacatctacggcctcatgtgaatcaaaaatcacctatatagatggagaaaatgggatattaagatacagaggttatgatattcaagagcttgcaaaaaaaagcgattttatagaagttgcaaacttgcttatttatggtgatcttcctaataaagatcagctcctaaaatataaaaaactaattacaaggcatacactacttcatgatcaaataataaatttctttgagggttttcggcgtgatgcgcatcccatggccatgatggtaggagttatgggcgctctatcgtctttttatcaagactctctagatattcacgaccctcatcaaaggcaggaatcaacaagaagaattatagcaaaagcatctaccataggagcaatggcttataaatattcaataggacaaacttttgtgtctcctaaaaataaattaacattttccgaaaactttcttcacatgtgttttagtacaacagcagaaaattatagagtttctcctatattagcaaaggcaatggacacaatttttattttacatgctgaccatgagcaaaatgcatcaacatcaacagtaagattagctggatcttctggggcaaaccctttcgcatgtatcgctgcaggtgttgcttcattatggggaccagcacacggtggagctaatcaggctgcgctagaaatgttagaagaaataaaatataaaaagaatataagaaaatatattaataaagcaaaaaacccaaaggataaatttaaattaatgggatttggtcatcgtgtttataagaactacgatccgagagcaaaaattttaaaagaaacgtgcagaaaagttctaaaacacgttggaattaaaaatgatccaatattagaacttgct

SEQ ID NO: 236587 - DNA, 871 bp, Unknown
  Bacterial polypeptide expressing nucleotide sequence isolated from the Sargasso Sea
tctgcgcgctttcacattttatccggatttcagtgcaactgacacagaggcagtagatttggctatctggcgattaatgggtaaattgcctaccattgccgcttggtcttacaaaaaaaatatcggtcaaccgtttgtattcccagtaaatgagtacagttacccaaaaaactttctacacatgctttttagtttgcctacaacttcatatgaagtcccaccagaatttgttgaggctttgaatgtacttttcattttgcacgcagatcatgaacaaaattgttctacatctaccgtcagacttgtaggaagcagccgcgcaaatttatttgcttctatttcaactggcatagcagctctttggggtccgcttcacggtggtgcaaatcaagctgttcttgaaatgctccaacaaatttacatagatggtggagacgtgcaaaagtttgtaaaattatccaaagacaaagattcatcatttcgtttaatgggtttcgggcatcgtgtatataaaaattttgacccgcgagcaacaatccttaaaggatattgtgataaaattttgaagctgcttggtactcaagacccactgcttgatatcgcaaagcaattagaagaagcagctctgacagatgaatacttcattgaccgtaatctatatccaaatgtagatttttacagtggaattatttacaaagcacttggattccctacggacatgtttacagtactgttttcgctgggaagactcccaggctggattgctcactggctagaaatgcataatagcacatctaaaataggacgcccacgtcaaatttatacaggccacaccgtgcgtgaatatgtttctctcagcaagcgaaactga

SEQ ID NO: 236588 - DNA, 745 bp, Unknown
  Bacterial polypeptide expressing nucleotide sequence isolated from the Sargasso Sea
cttgagaaaaataaaaggacttccacttaattttagtaacaataaattatcatatactgaaaacattgcctatatgatgtttgctttaccaaatagagagtatattcaaaatgatgttgtaataaatgctttgaatactcttttaattcttcatgctgatcatgaacagaattgttcaacttcaacagtcagaatagttggatcttcatatgcgggtctttatgcttcaatatctgcagggataggcgcattgtggggtagactgcatggtggtgcaaatcaggctgtaattgaaatgttagaattaatcaaaaatgatgattctgatattgataaatatataagtaaagcaaaagacaagtcagatccatttagattaatgggttttggtcatagagtttataaaaattttgatcctcgtgcaaaaattattaaaaaagctgcagaccaagttctaaatgatctgggtatcaatgatcctgttttagatattgcaaaatctattgaggaaaaagcattaaatgatgaatattttatagagaaaaagttataccctaatgtcgatttttactctggtataatatacagggcccttggtattccaactgaaatgtttactgttatgtttgccttaggtagaattcctggttggattgctcaatggaaagaaatgagagattcgaataatccaataggaaggccaagacaaatttataacgggcctactcacagaactatatcataa

SEQ ID NO: 236589 - DNA, 1173 bp, Unknown
  Bacterial polypeptide expressing nucleotide sequence isolated from the Sargasso Sea
attttaccttcgacccttcatactcaacaacagctagttgcgaaagcaaaattacctatatcgatggagccaaaggaatcctagagtacagagggtatccaatcgaacagcttgcagagaaaagcacttatttagaggttgcatacttgctattcaatggtgaactaccatcaagcactatttcacttgatgagtttagatcgcaagtgaagaaaaacatgactttgccagagaacatgaatggcattttcactggctttggaaaaggtgcgcatccaatggcgatgcttacgacagcagtagcagcactttcgggattttatcatgagggaataaacgtaagagataaagagcatcaaagagaattcttctttaatattcttggtaagatgccgatcttggttgccaatgtttttaatcataaccaagaagatgcaaatgttgagtatgatgaatcactttcatattcagaaaatatcttgagattattctttgggtggaaagatggatatgaaataaacccgatcttttcaaaagcactcgatattctattgatactccatgctgatcatgaacaaaactgcagcacctcatctgtaagactaacaggaagctcaggaacaaacccatacgctgctatagccgctggagtcgcagctctgtggggtccagcacacggaggagcaaacgaagcagtagttaaaatgtttggtgaaattggatcaaaagacaatatctctaaatacattgataaggcaaaagataaaaatgacccattccgtttaatgggcttcggacatcgtgtctacaaaaattatgacccaagagcaacaatcatcaggagtcagtgccataaggttttggaatccacaggaaatgattcaaatccaatgttcgagctagctttagaactggaagagattgcgcttaatgatgactactttgttgcaagaaatctctaccccaatgtcgatttttactctggtttgatttatgaggcaatggacattcccaaagagatgtttaccgcaatgttcgcattggccagaacagttggatgggcaacacactggtgtgagatgatgtctaaccccaaacacaaaattgggcgaccaagacaactttatctgggcgaaaaaaagagggactatgtcccaatcaatgatcgctaga

SEQ ID NO: 236590 - DNA, 895 bp, Unknown
  Bacterial polypeptide expressing nucleotide sequence isolated from the Sargasso Sea
aatggcaattttatcaagcatagtgtgcgcactttcaacattctatccagatttcagtgcaacagacagggatgccgtagatttggctattttgcgcttattgggcaaactaccaactattgccgcttggtcttacaaaaaaaacataggtcagccgtttgttttcccagtaaatgattacagttatgccaaaaactttctacatatgctttttagcgttccaacaacttcatacgaagtaccaccagagtttgttgaggctttgaatgtcctttttattttgcacgcagatcatgagcaaaactgttctacatctactgttagacttgtaggcagcagccgggcaaatttatttgcctctatttcaactggcattgcagctctttggggtcctcttcatgggggggcaaatcaagctgttcttgaaatgctccagcaaatacacttggatggtggagatgtaaaaaaatttgtaaaacttgccaaagacaaagactcattatttcgtttaatgggctttggacatcgtgtatataaaaactttgaccctcgtgcaacaattcttaaagaatattgcgataaaattttaaaaatgcttgggactccagaccctcttcttgacatagcaaagcagctagaagaagccgctctaacagatcaatacttcatcgaccgtaatttatatccaaatgtagatttttacagcggtattatctacaaagctctaggattccctacagatatgtttacagtactattttctctgggcagactaccaggctggattgctcactggcttgaaatgcacaatagtgcatctaaaataggaaggccacgtcagatttataccggtcacaccgagcgcgaatatgtggatatcagcaaacgaaactga

SEQ ID NO: 236591 - DNA, 1111 bp, Unknown
  Bacterial polypeptide expressing nucleotide sequence isolated from the Sargasso Sea
gatggtgaagaaggaactcttctatatagaggataccctatcgatcaacttgctgagcataggtaactatcttgagacttgttttcttttgttaaatggtgaacttcccaatcaagatgaatataataaatttgaagaaacaattaatgagtacacactagttaacgaacaattaaatagattttttactggttttagacctgatgcacaccctatggcaattatgtgtggtgttgttggtgctctgtcagccttttatcacgactctcttgatataaatgatccagaacagagaagaattgcttgtcatagacttattgctaaaatgcctacattagctgcgatggcgtataaacattcattagggcagccttttatgtaccctaaaaatgatcttgattatgctgcaaattttttaaacatgtgttttgggttgcctactgaagataaaaatgtcgatagcactctagccaaagctatggataaaattttaattttacatgcggatcatgagcaaaatgcttctacctctactgtaagattagctggatcgtctggagcaaacccttttgcgtgtattgcctctggtattgcttgtttatggggtcctgctcatggcggtgcaaatgaggcatgtataagaatgctagaagaaattaatagcgtagataatattcctgaatatgtaaaaaaggctaaagataaaaatgacccattcagattaatgggttttggtcatagagtttataaaaactttgatccaagagctaaagtaatgcaaaaaatctgtcatgaagttttagatcacttaggcataaaggatgacccattgctagcaatagcagttgaacttgaaaaaattgcattagaagatgattatttcgtagaaaagaaactttatccaaatattgatttttactcaggtatcgtaatgaagtctctaggttttccgatggatatgttcacagtgttgtttgctgttggaagaactgttggatgggtttctcaatggaatgaaatgattgaggatacaagtcaaagaattggtaggcctcgtcaattgtatgttggcagtgaacatagacagtatgtcggtatccataaaagataa

SEQ ID NO: 236592 - DNA, 1111 bp, Unknown
  Bacterial polypeptide expressing nucleotide sequence isolated from the Sargasso Sea
ctgcttctgaacggagcgttgccgacggtaaaacagcttgacgattttaatgatcatctgagtaaacattcgctgatccatgaagacatgaaacacttcttcgagggattttccaccaccgcacatccgatggtgatcttgtcctcgatggtttcctccctttccgcctattattcggaagcatcaggtgccgcctctgtgaaccagttggaagtcaatactgcgagactgatggcaaaaatccggacgattgctgccttttcctacaaaaaatcgatcggccagcccttcatttatccgcaggacaaactcgcctactgcgccaattttctgaacatgatgtttgccgttccggcagaaccatacgaagtcgatcccgagatcgtcaaggctctcgatctgttgctgatcctgcatgccgatcatgagcagaactgcagtgcttccactgtccgtgtggtaggcagcagcatggccaatgtttacgcttcggttgcttcaggcatcctcgcgctttggggtccgcttcacggtggtgcaaaccagcaggtattgcggatgctggaacggatccacgccgacggagatgaccttgataaatatgtccgcctggcaaaggatcctgattcggattttcgtctgatgggttttgggcatcgtgtctacaagaattttgacccccgtgcgacgatcatcaagggcgcctgcgatcgggtgctcaatctcctcggagtcgacgatcccctgcttgatcttgcccgtaggctggaggaagttgccctctccgatgaatatttcgtcgaacgtaaactctaccccaacgtcgatttctacagcggcattatctaccgagcaatcggcataccggagaacatgtttaccgtcatgtttgccctaggacgacttccggggtggattgctcagtggaaagaaatgcatcaggatcccaaaaccaaaatcgctcgtccccgccaaatttataacggtgaaaccgcccgggattatgtcccgattgaaaaaccggatcgcagggtagaacacaatttgcatggaaccgccagacttgtgcttcggcacaggtctgaggccttttatgatttttcagaataaa

SEQ ID NO: 236593 - DNA, 1279 bp, Unknown
  Bacterial polypeptide expressing nucleotide sequence isolated from the Sargasso Sea
ttgtctgagatattaactataaatgatagtagaactaataaagagtataagattgaaatacatgacggaaatataagagcaaaagatttgcgacaaattaaagtaaatgaagatgaatttggaatgatgagttacgacccgtcttttgaaaatactgcatcttgcaaaagcagcgttacctatatagatggagatgaaggaatattacgatatagaggatatcctatcgagcaattagctgaaagtagtagccaattggaggtctcaaagctattaatcgatggtgaattacctaataatgaggaattaaagaagtggattgcagatgttaaagaacataatagtgttccaacagacattaataatataatcaaagcatttccacagaactctcatgcaatgggtgctctaactagccttgaagcagcattatcaactttttaccctgaatcaaaaaatattgatgacgcagatgagaattatagaagcatgtgccgtctgattgcacaagttccaatacttgcagctaatttttataggcattcacaaggtcttgattttattaatcctgatgattctttagattacgctgaaaattttttgaatatgatgtttcatggggacgagaaaaagatgcatcctgatttggtaagtgctatggatacattgttaattttacatgctgatcatgagcaaaattgtagtgcaagtgttatgaggaatgttgggagctctgagccagaccctttttcagctgtttcagcggcaactgccgccttgtacggcccccttcatggtggtgccaatgaagctgttcttcaaatgcttactgagataggctctgttgacaatattcctgcatttattgaaaaggtcaaaaagaaagaagttaaattaatgggctttggtcatagagtttataaagcatatgacccaagagctaaatatttaaaagaagctgcagataaagtttttagtgtcactggtactaaccctctattagatatagcccttgagcttgaatcaattgcactgagtgaagattactttgtagataggaatttatatccaaatgttgatttttattcgggtctcatctacgaaagcatgggtattccaaaagatatgtttacagtcttatttacaattggtaggacaccaggttggcttgctcaatggaaagagcttttagaagataaggatcaaaagattgctaggcctaggcaagtttatactggttatgattctagagattatataaaagtagataaaagatagt

SEQ ID NO: 236594 - DNA, 832 bp, Unknown
  Bacterial polypeptide expressing nucleotide sequence isolated from the Sargasso Sea
gatcagaaaggggtggatctagcaatctggaggctgatgggtaagatgcccacgattgccggttgggcgttcaagaaaaatatcggacaaccgtttatttatcctgacaacaatctcagttactgcgcgaatttcctgagcatgatgtttcaggtcccggcagtggattacgaaccggcagaagaattcgttaaagcgctcaatgtgctcttcatccttcatgccgatcacgaacagaattgttccacttcaacggtacgtctggtgggcagtagtcaggccaatctctttgcctcgattgcttccggcattgctgcgctctgggggccattacacggaggagctaatcaggcagttttggaaatgctgctgagaatccataatgacggtggaaatatcgataaatatgtggatatggcaaaggataaggattccggtttccgtctgatgggttttgggcacagagtttataaaaatttcgacccgcgtgcattgatcatcaaaaattattgtgaccagattctggaaaaggtaggacttcatgatccactgctggacatagccaaacaactggaacaggtcgcacttgaagatgattttttcaaagaacgaaagctctatccgaatgttgatttctacagcggaatcatctacaaagccctgggtttcccaattgacatgttcacggtacttttcgcccttggccggttgccgggctggattgcccattgggttgagatgagccagagtcctcccaagatcggtcgcccccgccagatctacacgggagcctccgaaaggccttttcttcctctggaagcacggggctgaa

SEQ ID NO: 236595 - DNA, 979 bp, Unknown
  Bacterial polypeptide expressing nucleotide sequence isolated from the Sargasso Sea
atggcagataaagttacacttcagacaaataaacaaactgttgagctcgaaatcaaagatgcttcagtcggaccaggtgttgttgacttaaaaaatctctatcaggacacaggttacttcaccttcgatccctcatattcaaccactgcaagctgcgaaagttacatcacatatattgatggcgctaaaggaattttggaatacagaggctatccaatagagcaacttgccgagcaaagcacctacttagaggtcgcttacttgctcttcaatggcgagttaccaacgagcaatgtttctctcgatgagttcaggtcagatgtcaaacacaatatgactctaccagagaatatggacctaattttctctggttttggaagagatgcgcatcctatggcgatgctcacaacagcggtagcagctttatctggatcatatcatgacggcataaatatcagagataaggaggatcaaaaagaattcttctttaatatacttggcaagatgccaatattggtcgcaaatgttttcaaccataaccaaaaagatgcgaatattgattacgatgagtctttgtcatattcagaaaatattttgagattattctttggatggaaaggtggctatgaaataaatcctgttctttcaaaggcacttgatattctcttgatacttcatgctgaccacgagcaaaactgtagtacctcatctgtaagattaacagggagctctggtacaaatccttatgcagcaattgcagccggagttgctgctttatggggacctgcgcatggaggagcaaatgaagctgtggtcagaatgtttgatgagattggttctaaagacaatattcctcaatatattgataaggcaaaagataaaaatgatccatttagactaatgggatttggacatcgtgtttataaaaactatgaccccagagcaacgatcatcagaaaacagtgccataaagtttgaa

SEQ ID NO: 236596 - DNA, 730 bp, Unknown
  Bacterial polypeptide expressing nucleotide sequence isolated from the Sargasso Sea
ttatccacgtaatgacttaagctatgcaggcaacttcttaagcatgatgtttgcagttccttgtgaagagtacaaggtaaacccaattgttgaacgtgctatggaccgtatcttcattctacatgcggatcacgaacaaaacgcgtcaacgtcaaccgtacgtttagccggttcttcaggcgcgaatccattcgcgtgtatcgctgcgggtattgcttctctatggggccctgcacacggcggcgcgaacgaagcttgtctacaaatgttagaggaaatcggttcagtagaccgtattcctgaattcatcgcccgtgcgaaagacaagaacgacccattccgtctgatgggctttggtcaccgtgtttacaaaaactttgacccacgtgccaaagtgatgcgtgaaacctgtcacgaagtgttaaaagagctaaaagtacaagatccattattagatgtcgccatggaacttgagcgtattgcgctggaagatgagtacttcatttcgaagaaactctatccaaacgtcgacttctactcaggcatcatcatgaaagccattggtattcctaccagtatgttcactgtactgttcgcattagcgcgtactgtgggttggattgctcactggaaagaaatgttggatcaacctggtcacaagatcagccgtccacgtcagctttatactggcgagactgcgcgtgacttcgtcgacctagataaacgctaa

SEQ ID NO: 236597 - DNA, 1270 bp, Unknown
  Bacterial polypeptide expressing nucleotide sequence isolated from the Sargasso Sea
ttgtcagactcaatcactatcaccgataatcgatctggagagtctgttgagataccaattgtagatggaggagttgactcgggtccgtggaccaacttacttccaggactttggttcaaagatgagggttttgccgccactgctgtcacgaatagctcgataacatttatcgatggtgctgctggcagacttgaataccgcggctatccaatagaagacctagcaaaccactcttcttttcttgaagttgctttcctcctacttaatggcgaattaccgaatcagaagcagttaacttcatgggaagaaactatcgctgaggcctctgacctagaccccaatcatcatgatctgctcttgcaggcattccaaaaagactctcatcctatgggcatgctcacttccgcacttgccgcattatcctctatgtatcctgattctcgcaacgtagaagatccacaaattcgttcaaagcatactgtcaatctcatcgctaagattccttcgatcgcagccgcggctgagaattttcgcaatggcagacccagccagccattcaggcaggacctcagctacacagagaattttcttgcagcaatttatgggaatggcgatgtcgaatatactcctgatcccatcttcacgaaagctttggagcagctctttatccttcatgccgaccacgagcaaaactgctcgactactgctgtacgtgtggttgggtctgctcatgctgacccctactcagctatagcggctggaagtgctgcattgtctgggcctaggcatggcggggctaacgaagctgttattaatatgctcgacgaaattgaaactttggaaaatgttgatgcttttgttgactctgttaagaatggagatgacctgctttggggttttggacatcgcgtttataaaaactacgacccaagagctcaaatcattaaagatacggcgcatcaaatctttgaagtaacaggcaagaatcccaaattagacattgccttaaaattagaggagacagctcttgccgatgaatatttcatcagccgaaagctctatccaaatgttgatttctacagcggactcatatatcaagcgatgggattccctgtaaagatgtttactgttctctttgcgatagcaagaacttcagggtggctctcgcactggaacgaaatgctagaaagaaatacccgaatagcaaggccaaggcagctctacgttgggaatacaactcgggatttttctccaattcaagaccgataaa

SEQ ID NO: 236598 - DNA, 502 bp, Unknown
  Bacterial polypeptide expressing nucleotide sequence isolated from the Sargasso Sea
tggggtcctgctcatggtggtgcaaacgaagcatgtctgaacatgctagaagaaattggcacagttgatcgtattcctgagtttattgcacgcgctaaagacaagaatgacccattccgtcttatgggcttcggtcaccgtgtttataagaaccacgatccacgtgcaacagtaatgcgtgaaagctgtcacgaagtattaagcgagcttaacgtaaaagatccactactagaagtagcgatggagctagaaaagattgcgttgagtgacccgtacttcgcagagaagaaactgttcccgaacgtagacttctattctggtatcgtacttaaagcgattggtattccaactaacatgtttacgtgtatttttgccctgtctcgtacagtaggttggatttcacactggcatgaaatgatgagcgaccctaaacaaaaaattggtcgtcctcgtcagctttacactggtcataaccagcgtaagtacacgccaattaagtagt

SEQ ID NO: 236599 - DNA, 691 bp, Unknown
  Bacterial polypeptide expressing nucleotide sequence isolated from the Sargasso Sea
atggcagatcagaaagccattcttaaagccggcggtaaggaaatcgagcttcctatcttgtctggcaccgaaggacaagatgtaatcgatgtccgtacgttaggccagcacggttatttcacgtacgacccaggttttatggcgacaggatcttgcgagtcttcaattacctacattgatggcgctcaaggtgtattattacaccgcggtttccctatcgaagaactagcgcgtgacgcagactacttagaagtttgtcacatgcttcttcacggtgatgcaccaacaaaagaacagtacgaagaatttaaagagacaattactcgtcacaccatggtacatgaacaaattaacatgttcttccatggtttccgcaacgacgcccaccctatggcaatgctatgtggtaccgttggcgcgatgtcttcgttctaccacagcgatttagacgtttctaatgaagaacagcgcattcgcagcgcgcaccgtctaattgctaaaatgcctactcttgttgctatgtgctacaagtacaatgtaggtcagccgtttgtttatccacgaaacgacttaagctatgcagctaacttcctgaacatgatgttctctgtaccagcagaagaatatcaaatcagcccagctgttgagcgcgcgatggaccgtatctttacgcttcacgcagaccacgaaa

SEQ ID NO: 236600 - DNA, 883 bp, Unknown
  Bacterial polypeptide expressing nucleotide sequence isolated from the Sargasso Sea
catgctcgacgcgggtttggacaatcgacatcgaccgcacccgaagctcgccaaggcgttggacgtcatgtttttgctccacgccgaacacgagatgaattgcagcacggcggcgtgcagacacttggcgtcgagcggcgtcgacgtgttttgtgccgtcgccggcgcggtgggtgccctctacggaccgcttcacggcggcgccaacgaggcggtgttgaagatgctcgaacgcatcggaaacgtcgagaacattccaaactttttggccggcgtcaaggagaagagatacgtgatgttcggattcggtcatcgcgtgtacaagaatttcgatccgcgtgcgaaaatcattcgcaagattgccaacgacgtcttcgaactcgtcggtcgcgatcccttgatcgacgtcgccatcgagctcgaaaagcaagcgcgcgcggacgagtacttcgtcaagcgcaaattgtacccgaacgttgacttttacagcggactcgtgtatcgcgccatggggttcccgcccgaattcttcaccgtgctcttcgccattccgcgagccaccggatacctgtcgcactggcgcgagagtctgaacgatcccgatcaaaaaatcatgcgacctcagcaggtataccaaggcgaatggttgcgtgattacgtgccgatcgcatctcggtctcgctcgctcacggacgccatggaggacattcaaccgtccaacgcggcgagacgccgtatggcgggggacccctccgacgcgcatccgtggttcggcaacggtatggagatgagcacgccggcgtggcaatccggcacgacggtcggcgacgcgacgagcggtgtcgaaaattgtctcgtaaaaaacgtcgcggcgggcaagtga

SEQ ID NO: 236601 - DNA, 1297 bp, Unknown
  Bacterial polypeptide expressing nucleotide sequence isolated from the Sargasso Sea
aatggctaataaaaagattattaagaataaaaaaatagcaaagttaacaatagctgataatacctacgaattcccaatatatagttctactgaaggcgagtctgtaatagatatttcaaaactacactcagaagcaaatatatttacatatgatccgggatttacatctactgcatcgtgtgaatcaaaaattacctatattgatggaaacaatggaattttaagatatagaggatacgatattgaagatcttgcggagaaaagcgattttattgaagttgttaatcttttaatttacggagatcttccaaataaagagcaactaaagaaatatagaagattaatttcaagacatacattactacacgagcaaataattaacttttttcaaggttttagacgtgatgcccatccaatggccatgatggtaggtgttatgggagcactgtcatcattttatcaggatactttggacattagtgactcacatcaaaggcaagaagcaaccagaagaattgtagcaaaatcagctactattggtgcaatggcttataaatattcaataggacagtcattcgtttcacccaaaaataatttatctttttctgaaaactttttacatatgtgttttagcaatacagccgaagaatataaaatttctccaatactttcaaaagcaatggatacaatttttattttacacgctgatcatgaacaaaatgcatctacttcaacagtaagactcgctggatcttcaggtgctaatccattcgcttgcatagcagcaggtgtatcatcattatgggggcctgctcatggtggggctaatcaagcagccttagaaatgttggaagaaattggttctacaaaaaatataaataaatatattaaaaaagcaaaaaataaaaaagatccgtttaaactcatgggatttggtcacagggtctacaaaaattatgatccccgagcaaaaattcttaaaggtatctgtcaaaaagttttaaaacatgtaggtattaaaaatgaccctatattaaaacttgctatggacttagaaaaaattgctctaaaagacaagtatttcgtagaaaaaaaactttatcctaatgtagatttttattcaggtataattttaagagcaattgggtttccaccagaaatgtttactgtaatttttgccatatctagaacagctggttggacagcgcaatggacagaaatgattgaagacccgattcaaaaaattggtcgtccaaggcagctatatactggcagtaaatcacttaaatatggaaaa

SEQ ID NO: 236602 - DNA, 1294 bp, Unknown
  Bacterial polypeptide expressing nucleotide sequence isolated from the Sargasso Sea
gataccgccaccctccagcttcccggacaagaatccgtcgaattgcccgtgatcactggatccgaaggtgaaaaagccatcgatgtgtctaaactgagggccaaaaccgggtacatcaccctcgatccggggtatgtcaataccggttcctgcagcagttcggtcacctttctcgacggagaaaaagggatcctccgctacaggggttatcccatcgagcaacttgctgaaaattcaagcttcgtcgaagtcgcctacctgcttctgaacggagctttgccgacgctaaaacagcttgacgaatttaatgatcatctgagtaaacattcgctgatccatgaagacatgaaacacttcttcgagggattttccaccaccgcacatccgatggtgatcttatcctcgatggtttcctccctttccgcctattattcggaagcatcaggtgccgcctcggtgcaccagttggaggtcaatactgcgagactgatggcaaaaatccggacgattgctgccttttcctacaaaaaatcgatcggccagcccttcatttatccgcaggacaaactcgcctactgcgccaattttctgaacatgatgtttgctgttccggcagaaccttacgaagtcgatcctgagatcgtccaggccctcgatctgttactgatcctgcatgccgatcatgagcagaactgcagcgcctccaccgtccgtgtggtaggcagcagcatggccaatgtctatgcttcggttgcttcaggcatcctcgcgctttggggtccgcttcacggtggtgcgaaccaacaggtattgcggatgctagaacagatccatgccgacggagatgacctggacaaatatgtccgtctggcaaaggaccctgattcggattttcgtctgatgggttttgggcatcgtgtctacaaaaattttgacccccgtgcgacgatcatcaagggcgcctgcgaccgagtgctcaacctcctcggggtcgacgaccccctgctcgatcttgcccgtaggctggaggaagttgccctctccgatgaatacttcgtcgagcgaaaactctaccctaacgtcgatttctacagcggcattatctaccgagcaatcggcatcccggagaacatgtttaccgtcatgtttgccctggggcgactgccggggtggattgcccagtggaaagaaatgcatcaggatcccaaaaccaaaatcgcccgtccccgccaaatttataacggtgaaaccgcacgggattatgtcccgatcgaaaaacgggtcacagggtaga

SEQ ID NO: 236603 - DNA, 1375 bp, Unknown
  Bacterial polypeptide expressing nucleotide sequence isolated from the Sargasso Sea
tatggctgattacgaagataagaaagttaacgataaacagtttactctattcaacaatgagagtggtaaatcgtatcaaattccacttattgaaagtaaagatggtccaaatgttttggatattcgtaaactttatcaagaaacaggcttatttacttttgatccaggttttacttcaactgcatcatgtgaatcaggaataacttacatagatggtgaaaaaggaattttacgtcataggggatatgatattcatgatttagcctcaaaaagtgaatttcttgaagtttgttatcttttactgcacggtgaattaccgtcacctgaagacaagcagaaatttaaagatgtaataaccaatcatacaatgttgcatgagcaactagtaaatttatacagaggttttcgaagagatgcgcaccctatggcaattatggtaggtgttgttggcgccctttcggccttttatcatgacagtactgatttttcagacattaatcaaagaatgattgcctgtcatagattaatagcaaaaattcccacaataggtgcaatggcttataaatattcaattggtcaaccatttgtttatccaagaaatgatctttcttatgctgaaaattttttatacatgacattttctgtaccatcagaagattacaaggtgagtccaaaaattgtaagagcaatggatagattttttacgttacatgcggatcatgaacaaaatgcatccacttcaacagtaagattagcaggttcctctggtgcaaatccttttgcttgtattgctgctggtattgcatctttatgggggccggctcatggtggagcaaatgaggcagtaattaaaatgttagaagagattggtgatatatcaaatatacaaaaatttattgataaagctaaagataaaaatgactcttttagattaatgggttttgggcatagagtttataaaaactatgatccaagagccactgtgatgaaagaaagtgcgcatgaggttttagaagaattaaatatgcaagatgatccattgcttaaaattgcaatagaattagaaaaaatagcactgaaagatgaatattttattagtaaaaaattattcccaaatgtagatttctattcaggtataattctaaaagcattaggtttccctacaagcatgtttactgtgctatttgcaataggaagaactgtaggatggatatcacaatggaaagaaatgatagaagatcctattaataaaattggtaggcctcgccaattatacactggttataaagctagaccttatcaagttgaatcttctagagaaaaaaaatcaatttttaattggctttggaagaaaggattaattaacttattatac

SEQ ID NO: 236604 - DNA, 1014 bp, Unknown
  Bacterial polypeptide expressing nucleotide sequence isolated from the Sargasso Sea
aatggcagataaaaaagctgtcgtgcagatcgaaggacaggcaccatttgaacttcctatctattctggcactgcaggcactgatgttattgatgttcgtgctttaggtcagcagggatacttcaccttcgatccgggctttatggccacgggctcatgcgaatcaaaaatcacctatatcgatggtgacaatggcgtgttgttacaccggggttacccaatagagcagttagcagaacattcagattatctggaaacctgttatttgttattggaaggcgaattaccaggcaaagaaaagtacgatgagtttgtgcacaccatcacgcgccacactatggtgcatgagaaaattgcctcatttttccagggcttccgtgttgacgctcacccaatggccatgctgtgtggcgtggttggcgcactgtcgtctttctaccattcagaccttgatattaacgacccggagcagcgtaaacgcagtgctcaccgcttaattgccaagttacctactatctctgccatggcgtataagtacactgtaggtcagccttttgtgtacccacgcaatgacttaacttatgcagaaaacttcctgcatatgatgttctctgtaccagctgaagaatacaaagttagccctatcctggccaaagccatggaccgtatttttatgctgcatgcagaccatgaacaaaacgcttcaacgtccacagtacgtttagctggttcttcaggcgcaaacccttacgcttgtatcgctgcaggcgttgcatctctgtggggccctgcacatggcggcgccaacgaagcatgcttaaaaatgttacaggaaattggctctgttgagcgtattcctgagtttgtggctcgtgccaaagacaaaaacgacagcttccgcctaatgggctttggtcaccgtgtttataaaaactttgaccctcgtgccaaagtaatgcgtgaaacctgtcacgaagtgttaaaagagctgaatatcaaggatcctctgttgga

SEQ ID NO: 236605 - DNA, 820 bp, Unknown
  Bacterial polypeptide expressing nucleotide sequence isolated from the Sargasso Sea
atggcagataaaaaagccacagttcatattgatggacttgatccaatcgaacttccaatttatcaaggcactgctggccaagatgtaatcgacgtacgtacgttaggttcacatggccactttacctatgacccaggtttcatgtcgactggttcttgtgaatctgcaatcacctacattgatggtggtaaaggtgttttacttcaccgcggttacccaattgagcaacttgctgaagaatcagactatattgaactttgctacttacttcttaacggtgagttgccatcgaaagagcaatacgatgcatttgcagagaaaatcactcgcagcacaatgctagatcaaaaaattgcaaatttcttccaaggtttccgctttgatgcacatccaatggcaatgctttgtggtgttgtgggtgctctatcttctttttatcatgaagatttagatattactgatgctgaacaacgcaaaacaagtgctattagattagttgctaaattacctacaattgctgcaatggcttataaaacaaacattggccagccttttgtttacccacgaaatgacctaagctatgcagaaaacttcttacatatgatgttctctgttccagccgaagagtacaaagtaaacccgattactgctaaagcaatggacaaaatattcatgcttcacgcagaccacgaacaaaatgcttctacatctacagttcgccttgctggttcttcgggcgcgaacccatatgcgtgtatttcagctggtatcgcttcattatggggccctgctcacggcggtgctaatgaagcatgtttaa

SEQ ID NO: 236606 - DNA, 1303 bp, Unknown
  Bacterial polypeptide expressing nucleotide sequence isolated from the Sargasso Sea
atgactccgtctgatgttaaagccacgctatcgttcagcgacaactcgccgagcgtcgaactgccgatctacaagggcacgatgggcccggacgtgatcgacatccgcaagctgtacggccagaccggcaagttcacgtacgacccgggcttcatgtcgacggcagcttgtaattcggcgatcacgtacatcgacggcgacaagggcgagctgctgtaccgcggctacccgatcgacaacctcgcgcaaaacgcggatttcctcgaaagctgctacctgctgctgaagggcgagctgccgaacgcagcgcaaaagaaggagttcgtcgacaccgtcacgaagcacacgatggtgcacgagcagatgcacttcttcttccgtggcttccgtcgcgacgcacacccgatggcgatcctcgtcgccgcagtcggcgcgctgtcggcgttctaccacgattcgctcgacatcaacgatccgcgtcaccgtgaagtgtcggcgatccgcatgatcgcgaagctgccgacgctcgtcgcgatggcgtacaagtacagcatcggccagccgttcgtgtatccgaagaactcgctgtcgtacagcgcgaacttcatgcacatgatgttctcgaacccgtgcgaagagtacaaggtcaacgacgtgctcgttcgcgcactcgaccgtatcctgatcctgcacgccgaccacgaacagaacgcatcgacgtcgaccgtccgtctggccggctcgtcgggcgcgaacccgttcgcgtgtatcgctgccggtatcgcctgtctgtggggcccggcgcacggtggtgcgaacgaagccgcgctgaacatgctcgagcagatcggttcgccggacaacatccccgaattcatcaagcaggtgaaggacaagaattcgggcgtgaagctgatgggcttcggtcaccgcgtgtacaagaactacgacccgcgtgcgaagctgatgcgcgaaacgtgctacgaagtgctgaacgaactgggcctgcacgacgacccgctgttcaagctcgcgatgcagctcgagaagatcgcgctggaagacgaatacttcgtgtcgcgcaagctgtacccgaacgtcgacttctactcgggcatcgtccagcgcgcgctgggcatcccgacgtcgatgttcacgtgtatcttcgcgatggcacgtacggtcggctggatcgcacagtggaacgaaatgatcggcgatccggaacagaagatcggccgtccgcgtcagctgttcatcggcgatacgccgcgcgaagcgaagccgctcgacgcacgttaag

SEQ ID NO: 236607 - DNA, 964 bp, Unknown
  Bacterial polypeptide expressing nucleotide sequence isolated from the Sargasso Sea
atgtcagataaagttaaacttcaaacgaatacacaaactgttgaactcgaaactaaagatgcatcagttggtccagacgtcatagatttaaaaaacctttatcatgatacaggttactttaccttcgatccttcgtattcaaccactgcgagctgtgaaagttccattacatatattgatggcgccaaaggaattttagaatacagaggttatccaatagaacaacttgcagaaaaaagtacttacttagaggtatcttacttgctgttcaatggtgagctcccaacaagcaatactgctctcgataatttcagatcagatgtcaaacaaaatatgattctaccaaagaatatggacctcattttttctggtttcggaatagatgcacatccaatggcgatgcttacaacagcagtagcagcattatctggatcatatcacgaaggtataaacatcagagatagagagcaccaaaaagaatttttctttaacatactcggcaaaatgccaatattggttgcaaatgttttcaaccacaaccaaaaagacgcgaatactgattatgatgagtctttatcatattcagaaaatattttgagactattctttggatggaatgatagctttgagatagatcctgttctatcaaaggcacttgatattcttttaatactccatgccgaccatgagcaaaattgcagtacttcttctgttagattaactggaagctctggcacaaatccctatgcagcaattgcagcaggagtcgcagctttatggggcccagcacatggaggagcgaacgaagctgtagttagaatgtttgatgagattgggtcaaaagacaatattcctaaatacattgaaaaggcaaaagacaaaaatgatccatttaggctaatgggttttggccaccgtgtttataaaaaaaacgatcctagagcaacaatcattagaagccagt

SEQ ID NO: 236608 - DNA, 1288 bp, Unknown
  Bacterial polypeptide expressing nucleotide sequence isolated from the Sargasso Sea
atggcagaaaaagttacacttcagaaaaacacacaaactgttgagctcgaaaccaaagatgcttcagtcggaccaagtgttatcgatttaaaaaacctctatcacgacacaggttactttacctttgatccctcatattcaaccactgcaagctgcgaaagttacattacatatattgatggcgccaaaggaattctggaatacaggggctatccaatagagcaacttgcagaacaaagtacttacttagaggtcgcttacttgctcttcaatggagagctaccatcgagcaatattgctcttgatgagttcagatcagatgtcaaacacaatatgactctaccagagaatatggacctgattttttctggctttggaagagatgcgcacccaatggcgatgcttacaacagcagtagcagcattgtctggatcctatcatcatggcataaacgtaagggacaaagagcatcaaaaagaattcttctttaatatacttggcaagatgccaatactggttgcaaatgttttcaaccacaaccaaaaagacgcgaatgttgattacgatgagtctttgtcatactcagaaaatattttgagattattctttggatggaaagatagctatgaaatagacccaattctttcaaaggcacttgatattctcttgatattgcatgcagaccatgagcaaaactgcagcacctcttctgttaggttaacaggaagttctggcacaaatccttatgcagcaattgcagccggagttgcagctttatggggccctgcacatggaggagcgaacgaagctgtggttagaatgtttgatgagattggatcaaaagacaatatttctcaatacattgagaaggcgaaagacaaaaatgatccatttaggctgatgggatttggacatcgtgtttataaaaattatgatcctagagcaacaataattagaagtcagtgccataaagttttggaatcgaccggcaatgactctaatcccatgttcgaacttgcgcttgagttagaagaaattgccttaaacgatgactatttcgttcagaggaacctctatcccaatgtcgatttttattctggattgatttatcaggcaatggatattcctaaagagatgtttactgcaatgtttgccttggcaagaactgtaggttgggcgacacattggtgtgagatgatgtctaatcctaagcacagaataggtcgtccaagacagctctatctaggcgaaaaaaagagggactatgtcccactcagtgatcgctaga

SEQ ID NO: 236609 - DNA, 1330 bp, Unknown
  Bacterial polypeptide expressing nucleotide sequence isolated from the Sargasso Sea
tatgaatgtgttactatttgtaaaaagaaatcaattcgaaatgccagacaataaaattaaaattattcacaattctgaagaggttgaactgcctattctcgactcaacgattggacctagtgttatagatattcgagctctagaagcaaaatttggttatctttcacatgatcctggctttatatcaacttcaagctgtgaaagtaaaataactttcattgacggtaaagaaggaaaattatggtatcgcgggtaccctattgagcaacttgctgaaaatagtacttttgaagaaacagcttatttacttttaagtggtgagctacctaaaaagaatgaatacgacaaattttgtttcaaattaaaagaaaaatacactgtaggtcctgactatgaaaaaattataaaatcattcaatgtatctgatcacccaatgtctattttaatggctctattaagtagaatggctgctgagtatcataacgaaattaatattaaaaataatgattatcaattagactcatctattaatctagttgctaaagttccaatattatcctcactaatacttaacttcgttctaaaaaaagatttacaaaagcctgatagttcattatcagtcgcgcaaaattttataaaaatgtcatttccagagatgaatgactctaggtttgaaaaatctgctaaagctatagatttaattatgcttcttcatgcagatcatgaacaaaacgcgtcgacttctactgtaagattgtcaggcagttctgagacaagtccttatgctgcaattgttgccggtatttcaacactttggggtccaacgcatggtggagcaaatgaagcagtaataaatatgttagaggaaattaaaaattcaggaaatagtatagacagttatattgatatggccaaagacaaagataacagttttaaattaatgggatttggacacaggatatataaaaactatgatcctagagcaaaaattattcaaaaaatagtacacgattatttagctgaaataagtgctgaagaaaataaaccgcttttggatattgcaatgcaacttgagaaaattgctttagaagatgaatattttgtcaaaagaaagctttaccctaacgttgacttttattctggaatattactgaaagctatgggaataccacaatcaatgtatacagttatctttgcattgtccagaactgtaggttggatgtcacattggttagaaatggttaatgataaaaattttaaaattggaaggcctagacaactatatacaggtaaggattcaagaaaatatttagatatttctagtcgatag

SEQ ID NO: 236610 - DNA, 666 bp, Unknown
  Bacterial polypeptide expressing nucleotide sequence isolated from the Sargasso Sea
aatgactgataaaattaaagaaaaagctaatttaaaattaaatggtgacctttacgactttgatgttcatgagggtacaattggtcctgatgttctagatatatcaaaattatacgctcaatcaggaaaatttacatatgatccaggttttacatctactgccaactgtaaatcgacaataacttatattgatggtgaagaaggaactcttctttatagaggatatcccatagaccaacttgctgaaaaaggtaattatattgaaacatgttatcttttgttaaatggcgagctccccgatcaagatgaatttaataaatttgaaaaatcaataactgagcacactcttgtaaatgaacaattaaatagatttttcaccggttttagacctgacgcgcatcctatggcaattatgtgtggagttgttggagctctttcagctttttatcatgactctcttgatataaatgaccctgaacaaagaagaattgcctgtcatagattaattgcaaaaatgccaactttggcagccatggcttataaacattctttaggacaaccttttatgtatccaaaaaatgatcttgattatgcttcaaattttttgaatatgtgttttggattaccaacagaaaataaaaatgttgacgctacattagctaaggc

SEQ ID NO: 236611 - DNA, 658 bp, Unknown
  Bacterial polypeptide expressing nucleotide sequence isolated from the Sargasso Sea
tacgttacatgctgatcatgaacaaaatgcatctacttcaacagttagattggcaggttcctctggcgcgaatccttttgcttgtattgctgctggtattgcatctttatggggaccagctcatggtggagctaatgaagcagtaattaaaatgttagaagagattggtgatgtatcgaatatacaaaaatttattgataaagctaaagataaaaatgactcttttagattaatgggttttgggcatagagtttataaaaactatgatccaagagccactgtgatgaaagaaagtgcgcatgaggttttagaagagttaaatatgcaagatgatccattgcttaaaattgcaatagaattagaaaaaatagcactgaaagatgaatattttattagtaaaaaattattcccaaatgtagatttctattcaggtataattctaaaagcattaggtttccctacaagcatgtttactgtgctatttgcaataggaagaactgtaggatggatatcacaatggaaagaaatgatagaagatcctattaataaaattggcagacctcgtcaattatacactggttataaagctagaccatatcaagttgagtcttctagagaaaaaaaatcaatttttaattggctttggaagaaggattaa

SEQ ID NO: 236612 - DNA, 1288 bp, Unknown
  Bacterial polypeptide expressing nucleotide sequence isolated from the Sargasso Sea
tatggctgatttaaaagccaaattagaattaccagggaacgactcgatagaattgccagtaaagcaaggatccgctggttttgacgtaatcgatatcagtaaacttggcagcaagggttacttcacttttgatccaggttttctcgcgacagcctcctgtgaatctgcaattacctatatcgatggcgatcaaggtatattgttacaccgcggctatccaatcgagcaactcgccgttgactcagattacttagacctgtgttacctgctgctttacggtgaactgccgacgaaagagcaatatgctgaatttgtacacacagtaaaaacccacactatggttcatgagcaactcgccttcttctttagaggtttccgtcgtgatgctcatcctatggcgatgttatgtggtgttactggtgcattgtctgcattttatcaagactcactcgatgtcaacgatcctcgccaccgcgaaatcgccgcttatcgcctagtctccaaaatgccaacgattgccgctatgtgctacaagtactcttctggccaaccattcgtttacccacgcaatgacttaagctacgcaggcaacttcttaagcatgatgtttgccgtgccttgtgaagagtacaaggtaaacccaatcgttgaacgtgctatggaccgtatcttcattctacatgcggatcacgaacaaaacgcgtcaacgtcaaccgtacgtttagccggttcttcaggcgcgaatccattcgcgtgtatcgctgcgggtattgcttctctatggggccctgcacacggcggcgcgaacgaagcttgtctacaaatgttagaagaaatcggttcagtagaccgtattcctgaattcatcgcccgtgcgaaagacaagaacgacccattccgtctaatgggcttcggacaccgtgtttacaaaaactttgacccacgtgccaaagtgatgcgtgaaacctgtcacgaagtgttaaaagagctgaaagtacaagatccattattagatgtggctatggaacttgagcgtatcgcactggaagacgagtacttcatttcgaagaaactctatccaaacgtcgacttctactctggcatcatcatgaaagccattggtattccaactagcatgttcaccgtactgttcgcattagcacgtactgtgggttggattgctcactggaaagaaatgttggatcaaccaggtcacaagatcagccgtccacgtcagctatatactggcgagacttcgcgtgatttcgtaagccaagataaacgctaa

SEQ ID NO: 236613 - DNA, 1024 bp, Unknown
  Bacterial polypeptide expressing nucleotide sequence isolated from the Sargasso Sea
ctttatcacgatacaggttactttacctttgatccctcgtattcaaccaccgcaagctgcgaaagttccattacatatattgatggagccaaaggaattttggaatacagaggttatccaatagaacaactcgcagaaaagagtacttacttagaggtcgcttacttgctcttcaatggcgagttaccagcaagtaatgtttatcttgatgagttcagatcagatgtcaaacacaagatgactctaccagagaatatggaccttattttttctggctttggaagagatgcgcacccaatggcgatgctcacaacagccgtagcagctttatctggatcatatcatgatggtataaacgtcagagataaggagcatcaaaaagaattcttctttaacatacttggcaagatgccaatattggtcgcaaatgttttcaaccacaaccaaaaagatgcgaatattgattacgatgagtcgttgtcatattcagaaaatattttgagattattctttggatggagaggtgactatgaaatagaccctgttctttcaaaggcgcttgatattctcttgatacttcatgctgaccatgaacaaaactgcagtacctcatctgtaagattaacaggaagctctggtacaaatccttacgcagcaattgcagctggagttgcggctttatggggacctgcacatggaggagcaaacgaagctgtagttagaatgtttgatgagattggttcaaaggatgatattcctcaatacattgagaaggcgaaagacaaaaatgatccatttaggctaatgggatttggacatcgtgtttataaaaattatgaccccagagcaacaatcatcagaaaccagtgtcataaagttttggaatcgactggtaatgactctaatccaatgttcgaacttgcgcttgagttagaagaaattgctttaaacgatgactattttgttcagaggaacctctatcccaacgtagatttttattctggattgatttatcaggccaatg

SEQ ID NO: 236614 - DNA, 933 bp, Unknown
  Bacterial polypeptide expressing nucleotide sequence isolated from the Sargasso Sea
ttgactctcaatttaaggagttctttaaaggtttcaaaactgacgctcatccgatggctattatgtgtggagtgactggagcgctcgctgccagctttcacaactctttggatatcgacaacgcggaagatcgaaaagaaacctcgcttcagctaatcgcaaaaatcccaacgatggcggccatgagctataaaaatgcgttgggagaagacttcgttgagccaagagaagatctgggctacgccgaaaattttttacatatgatgttcgccaaaaatggtgaagactataaagtcagccctaccattgcaaaggcgatggaccgcatctttcttttgcatgcagaccatgagcaaaatgcatccacctccactgtgcgactcgctggatctacaggcaccaatccttacgcagccatcgccgccggaattgcagccttatggggaccctcacacggaggcgccaatgaggctgttcttaacatgatcgacgaaattggcagcgttgataacattccggaatacatcaacaaggcaaaggacaaagacgatccatttcgcatcatggggtttggtcatcgggtgtacaaaaactacgaccccagagccaaagttatgcagcaaacctgtcatgaggtgctcgcagagctaggcgtagaagataacccgactcttgcgatggccaaagagctagagagaatagcgctggaagacgagtatttcgtagaaaagcgcctatatccgaacgtcgatttctattcagggatcatacttaaggcgattggcattcccgttgaaatgttcaccgtaatttttacgacaggaagaactccaggatggatcgctcactggaacgaaatggtgtctacggcctataaaattggtcgcccaaggcagctatataaaggatatacgaaacgcgattattcctagt

SEQ ID NO: 236615 - DNA, 1360 bp, Unknown
  Bacterial polypeptide expressing nucleotide sequence isolated from the Sargasso Sea
atggctgattacgaagataaaaaaattaatgataaacaatttactctatttaataacgaaagtggtaaatcgtatcaaattccacttattgaaagtaaagatggtccaaatgtcttggatattcgtaaactctatcaagaaactggactattcacttttgacccaggttttacttctactgcttcatgtgaatctggaataacatatattgatggtgataaaggaattcttcgtcatagaggctatgatatccacgatttagcatctaaaagtgaatttcttgaagtttgttatcttttactacatggggaattgccatctcctgaagataaacagaaatttaaagatgtaatcactaatcatacaatgttgcatgagcaactagtaaatttatacagaggtttccgaagagatgcccaccctatggcaattatggtaggtgtggtcggggcactttcagctttctatcatgatagtactgatttttcagatattaatcaaagaatgatagcatgtcatcgtttgatagcaaaaattcctacaataggcgcaatggcttataaatattccattggtcagccatttgtttatccaagaaatgacctttcatatgcagaaaattttttatacatgacattttcagtaccctctgaagactttaaagtcagtccaaagattgttaaagcgatggatagatttttcattttacatgcagatcatgagcaaaatgcttctacatcaacagtaagattagcaggatcttcaggtgctaatccatttgcttgtattgctgctggtattgcatctttatggggaccagctcatggtggggcaaatgaggctgtgatcaaaatgttagaagagattggtgatgtatcaaacatacagaaatttatagataaagctaaagataaaaatgactcatttagattaatgggctttggacatagagtttataaaaactatgatccaagagccactgtgatgaaagaaagtgcacatgaggttttagaagagttaaatatgcaagatgatccattgcttaagattgcaatagaattagaaaaaatagctctgaaagatgaatattttattagtaaaaaattgttcccaaatgtagatttctattcaggtataattttaaaagctttaggtttccctacaagcatgtttacggtattatttgcaataggaagaactgtaggatggatatcacaatggaaagaaatgatagaagatcctattaataaaattggcagacctcgtcaattatacactggttataaagctaggccttatcaagttgaatcttctagagaaaaaaaatctattttcaattggctttggaagaaggattaat

SEQ ID NO: 236616 - DNA, 1285 bp, Unknown
  Bacterial polypeptide expressing nucleotide sequence isolated from the Sargasso Sea
aaagccacgctatcgttcagcgacaattcgccgagcgttgaaatgccgatttacaagggcactctcggcccggacgtgatcgacatccgcaaactgtacggccagactggcaagttcacgtacgacccgggcttcatgtcgacggcggcgtgcaactccgcgatcacctacatcgacggcgacaagggcgagctgctgtaccgcggctacccgatcgacaacctcgcgcaaaacgccgacttcctcgaaacctgctatctgctgctgaagggcgaactgccgaacgcgcaacagaaagacgagttcgtgaacaccgtcacgaagcacacgatggtgcacgagcagatgcacttcttcttccgtggcttccgtcgcgacgcacacccgatggcgattctggtcgctgcggtcggcgcactgtcggcgttctatcacgactcgctcgacatcaacaatccgcgtcaccgtgaagtgtcggccattcgcatgatcgcgaagctgcccacgctggtcgcaatggcgtacaagtacagcatcggccagccgtttgcgtacccgaagaacgacctgtcgtacagcgcgaacttcatgcacatgatgttctcgaatccgtgcgaagagtacaaggtcaacgacgtgctggtgcgcgcgctcgaccgtatcctgatcctgcacgctgaccacgagcagaatgcgtcgacctcgacggttcgtctggccggctcgtcgggcgcgaatccgttcgcgtgtatcgcagcgggtatcgcctgtctgtggggcccggcgcacggcggtgcgaacgaagccgcactgaacatgctggaagaaatcggctcggtcgataacattcctgagttcatcaagcaggtgaaggacaagaactcgggcgtgaagctgatgggcttcggtcaccgcgtctacaagaactacgatccgcgtgcgaagctgatgcgcgaaacctgccacgaagtgctggaagagctgggcctgcacgacgacccgctgttcaagctggccatggcactggaaaagatcgcgctggaagacgaatacttcgtgtcgcgcaagctgtacccgaacgtcgacttctactcgggcatcgtgcagcgcgcgctgggcatcccgacctcgatgttcacgtgtatcttcgcgatggcacgtacggtcggctggattgcacagtggaacgaaatgatcgccgatccggaacagaagattggccgtccgcgtcaactgtttatcggcgacacgcagcgtgaagcgaagccgattgcgcaacgctaag

SEQ ID NO: 236617 - DNA, 628 bp, Unknown
  Bacterial polypeptide expressing nucleotide sequence isolated from the Sargasso Sea
aatgattaaaatctttaaaaaattaatttataaaacagagtctgcaaaactccaaaaacattcaatctcaaatgtaattagtgattttgaactaggtaaaaacaagaatttagtttttttagcaaaaaaaaggtttgaatggatgaatgattttattaaatcaaaagatataggtttagaggtaggagcaggagcagctttttcaaaaaaagtattgaattcaagatcaatacataccagcgatttttcgaatgatgctcatttggattttaagaatattaatgctgaaaaaactaaatttaaaaattcttcatatgatttcgttattgcctcaaacatgattcaccatgttccacatccagtattatttttaaaagaaatgcatagaattttaaaaaaaggcggaagattgataatttttgaacctcatgtttctattttttatcaattaattacacttataactaaacatgaaggttttgattttacagttgatgtctgggacaaaagtaaatcagttaaaattaataataatccatggaattctaaccaggcagtagcttatcttttatttaaaaataaagatttttttgaaaaaaaaatggaaggatcgtttaaaataatctat

SEQ ID NO: 236618 - DNA, 674 bp, Unknown
  Bacterial polypeptide expressing nucleotide sequence isolated from the Sargasso Sea
aatgagcaaagaaaaaatacatatatttgacactactttgagagatggggcacaaacccaaggtgttgatttttcaatagatgataaattaaaaatagcaaaagctttggatgatttaggagtcgactatatagaaggaggttggcctggcgctaacccaactgatacagagttttttcaaaaaaaaattaaattaaataattcaatattaacagcatttggtatgacaaaaagatctggtagaagcgctgaaaatgacccgggactttcatcaatattaaatagcaatacaccagcagtatgcttagttggtaaatcttgggatttccatgttgatgttgcattaggaatatcaaatgaagaaaatttggaaaatatttcagaaagtgcaaagctatttgttaaagaaaaaaaagaatttatgttcgatgcagaacatttttttgatggctttaaaaataataaagaatatgcactttcatgtataaaatcagcatacgataatggagcaagatgggttgtactttgtgatacaaatgggggaaccttgcctaatgaaattacagatattgtaaacgaagttactaaagcagtgccaggaaaaaatattggtattcatgcccataatgatacaggaaatgcagtagcaaattcccttgctgcagtttatcagg

SEQ ID NO: 236619 - DNA, 972 bp, Unknown
  Bacterial polypeptide expressing nucleotide sequence isolated from the Sargasso Sea
aaaagtagtaccaggaaaaaacttaggaattcacgcacataatgatactggtaatgcggttgctaattcattagcagcagtattgtctggtgttcgacaaattcaaggcacaataaatggattgggtgaaagatgtggaaatgcaaatttaatgtcattaataccaacattttttttaaagaatggtttttcatctcaatttgaaattggagtcaaatcaaaaaatattaaaaatctaactgattgttcaagacttttagatgaaattttaaatagaaaacctaaccaacatttaccatatgtaggcgcagcagctttttcacataaagggggattgcatgtatctgctgtacaaaaagatccaaaaacttatgaacacatcaatccagaggaagttggtaacactagaaatattgttgtctctgatcaatcaggaaaatcaaatatcatctctagattaaaaagtattaaaattgatattaaagaaaatgatccaaaaattaaaaaattattagatgaagtgaaagacagagaattcattggttatagttatgatggtgccgatgcatcatttgaattattagcaagaagaataattggagaaataccaagatatatatctattaatgaatatgacgtttcagtaaaaaaaaataattctggtgaaatagtttcttctgcaaaagctcaattagaagttgatggagaaaagattatgtgtgaaggagagggaaatggtccagtaaatgctttagataatgccatcagacaaaacgttgataaactagcaaaatactcaagatatttaaaagatttaaaactggtagattataaagtaagaattttaaatacaggaactgaagctgttacaagagtttcaattgaaagcacggactcccaaggaaaaaattggtttactattggtgtctcaacaaacattatcgaagcttcgttcaaagcattaattgatag

SEQ ID NO: 236620 - DNA, 166 bp, Unknown
  Bacterial polypeptide expressing nucleotide sequence isolated from the Sargasso Sea
tatgagcgataaaaacagaataataattttcgacacaactatgcgtgatggggaacaatctccaggcgcttcaatgagtttagaggaaaaacttcaaatctctagagtatttgatgaacttggagttgatataatcgaggcaggctttccaatagcctctccagga

SEQ ID NO: 236621 - DNA, 256 bp, Unknown
  Bacterial polypeptide expressing nucleotide sequence isolated from the Sargasso Sea
aaagttcttaatgaattaattgaattttctgtcaagtcggtaacagaaggaattgatgcattaggtgaagtaacaataagaataagaagagataataaaatatattctggtcattctgcagatacagatgttgtagttgctgcagcgaatgcatacgtaaatgctttaaataggcttgtcttttctgagaaaaaaaattcaattcacccacaatttgataatttagaaaattcggatagtacaatttctatctaat

SEQ ID NO: 236622 - DNA, 718 bp, Unknown
  Bacterial polypeptide expressing nucleotide sequence isolated from the Sargasso Sea
gagggcggctggccgggggccaacccgacagacgacgcttttttcggtgaccctccgaagacggcgaaggcacgcatggtcgccttcgggatgacgcgccgtggcggccgcagcaccgccaatgacccgggtctgaacgccgtcctcgacgccgaggttccggccacctgccttgtcggcaagacctgggacttccatgtcgaaacggcgatcaacacgacgctcgacgaaaatcttgagatgatccgccagtcggttgccgccgcggccgagcgtggtcgtgaatcgatgttcgactgcgaacatttctttgacgggtacaagaacaatcctgactatgctctcgactgcgttcgcgcggcacatgagggtggtgcctcctgggttgttctctgcgacacgaatggcggcgcgctgcccaacgaggtgttcgagatcgtcagcgccgtgcatgccgcactcccggaggtccgtctcggcatccattgccataatgatgccggcgtggcggtggccaattcgctggcggccattcgcgccggcgcgcggcaggtacagggcacgatcaacggtcttggcgagcgatgcggcaatgccgacctgattaccctgatcccgacgcttgttctgaagcttggctatgaaacaggcatttcggaagaaagccttcccaagttgatgggcctgtccagaatgctggacgaacggctgaaccgcc

SEQ ID NO: 236623 - DNA, 988 bp, Unknown
  Bacterial polypeptide expressing nucleotide sequence isolated from the Sargasso Sea
caaggccaaacccccgaatatgctttagcttgtatcaaagctgcatatgataacggagctaaatggatagttctatgtgatactaatggcggtactcttcctcatgaagtatctgatatagtaaaagaagtttcagaacacatacctggtgaaagtttaggtattcatgcacataatgatactggtaatgctgttgcaaattcgatagcagccgttttatcaggagctagacaaattcaaggtactataaatggtctaggtgaaagatgtggtaatgctaatttaatgtcaattattccaacttttcatcttaagaaagagctatcagataaatttgaaataagtattaaagaaaaaaatatcaaaaatattacacaatgttcaaggttgcttgacgaaatactaaatagaaaaccaaataaacatttaccatatgttggtgctgcagcattttcacataaaggtggtttacatgtatctgctgttcaaaaagatcctaaaacttatgagcatattaatcctgaggatgttggtaacaatagaaatatagttgtttctgatcagtcaggtaaatcaaatatcctgtctagacttaaaacaattggaattgatattaaggaaaatgatcctaaaattaaaaaattattagaagaagttaaagatagagaatttattggttatagttatgatggagctgacgcatcttttgaactactagctagaagagtaatgggagaaattcctagatatatctcaattaaggaatacgacgtttcagtctcaaaaaataatcaagataaaatagtttctagagcaagagcaaaattggaagttgatggtgagcaaatagtctgcgaaggtgagggtaatggacctgttcatgctttagataacgctataagaaataatattaaaaagttagaaaaatattctaaatatttgaaagatttaaaactagttgactataaggtaagaatattaaatacag

SEQ ID NO: 236624 - DNA, 724 bp, Unknown
  Bacterial polypeptide expressing nucleotide sequence isolated from the Sargasso Sea
cagtcgattggtctcttcgattacgggtatgcatgtcccaagaaataaagccatcgttggcgacaatgcctttgcacatgaagcaggcattcatcaacacggcatgcttagagattcatctacatatgaaatcatgaagcctcaggatgttggtattgcaagatcaaacctcgtgcttggaaaacacagtgggagacatgcttttttagataggattaatgagctaggatttgcactcgagaaagatgagattgatccagcttttcaggaattcaagaaattggctgatagaaaaaaggaaatattcgatacagacatagaagcaatcgttctaaatgcggatattgccaatatgagccgttggagccttatggacctagagacaacttcaggctcatcatggggatctacagcatcactgaaattgaaagattctggagaagagataatcgagagggacaataatagcaaccctgccagtggacccattgaagctgttttcaatatcataagtgatatcacaggatataaacttgaattgacaaattttgagattcacagtgtcagtgttggagacgacgcacagggagaagtaactgtcacagtaagctataacggacaaaattatagagggcatggcattagtactgatattatcgaatcaggtgctttggcttatcttgaagtcataaacagaattgaaagaaatcaagcaaaacattag

SEQ ID NO: 236625 - DNA, 607 bp, Unknown
  Bacterial polypeptide expressing nucleotide sequence isolated from the Sargasso Sea
catcattgggaagttccatatttacctattgatccaagtgatattggtagaacttatgaggcaataattagagtaaattcgcagtcaggaaaagctggctctgcatggttattggaacaggagcataacattaatataccaaggggagctcaaattcaatttagcgaggcagttcagaatatcgctgaccagacaggtaaagaaataacatcagatatgatttggggtatctttgagcaagaatttttgggaaaaggtacgttttctctgcttaaatttaaaagtaagaaaatttcaaaagatgataactctgaatttgttgaagcaactatagatcataacggggaaaaaataaaaatttcttcaacaggcaacggtccaataagcgctttcgtaaatgcgatgagagatacttttaagctaacttttatgcttaatgattttggccaaaatacaagaagctcaggctcctctgcagaagcagcagcttacatagaaattaaagttccggatgaaaatgggaaaagtgtcttcggggtaggaatagatacttccattacattggcgccaatcaaggccgtattaagtgctataaatagaatatagt

SEQ ID NO: 236626 - DNA, 418 bp, Unknown
  Bacterial polypeptide expressing nucleotide sequence isolated from the Sargasso Sea
aatgtctgaatttgatccaaagaacaaatatacgccctttgaaagaattaatttaaaagataggaagtggccaaaccaaataattaatagcgctccaacttggtgtagcgttgatttgcgagatggaaatcagtcattaattgagccaatggataccccaaaaaaattaaagctttttaaaactttagtatctattggctttaaggaaatagagattggttttcctgctgcctcagaaacagattataacttttgtcgatatttaattgaaaataatctgatccctaatgatgttacaattcaagttcttactcaagctagagagcaccttatagataatacttttgaggccttgataggttgcaattcagctattgttcacctttataactcagtttccacacttcaacgaagggta

SEQ ID NO: 236627 - DNA, 925 bp, Unknown
  Bacterial polypeptide expressing nucleotide sequence isolated from the Sargasso Sea
tacagagtttttcagaaaaaacataatttcaaaaattcaaaacttacatcatttgggatgactaaaagatctggtcgaagtgcggaaaatgacaccggattatcagcattaatgaattcaaatactcaagctgtttgtttggttgggaaatcttgggactttcatgttgaggttgctttaggaataacaaatgaagaaaatttagaaaatataagtgagagcgcaaaacacttcatcaaagcgaaaaaagaatttatgtttgatgcagaacatttttttgatggttataaaactaatccaaaatatgcaatttcatgtcttaaagccgcttatgatcaaggagctagatggattgttttatgtgatacaaatgggggaacacttccacatgaagtatctaaaattgtttctgaagtttcaaaagttgtaccaggagaaaatttaggcattcatgcacataacgatactggaaatgcggttgcaaattctttagcagcagtattatctggagtaagacaaattcaaggaacaataaacgggttaggagagagatgtggcaatgcaaacttaatgtcattaattcctacattttttttaaaaaaagatttttcatctaaatttgaaacaggaattaaatcaaaagatattaagaatttaactgaatgttcaagattactagacgaaattttaaatagaaaaccaaatcaacatttaccatatgttggagctgctgctttttctcacaaaggaggtttgcatgtttcggctgttcaaaaagatccaaaaacttatgagcatattaaacctgaagatgttggcaacacaagaaatatagtagtttctgatcaatctggtaaatcaaacatcatttctagattaaaaagtataaaaatcgatattaaagaaaatgatcctaaaataaaaa

SEQ ID NO: 236628 - DNA, 856 bp, Unknown
  Bacterial polypeptide expressing nucleotide sequence isolated from the Sargasso Sea
attattttatgtgatacaaatggtggaacacttccacatgaaataacaagaatagtcgaggatgttagtaaatatataccaggtaaaaatttaggaattcatgctcataatgatactgaaaatgcagtagcaaacagtttagcagcagtacaagcaggagtcagacaggttcaaggaactttaaatggtttgggagagagatgtgggaatgcaaatttagtttccctaattccaacgttttttttaaaaaaagatttttttgaaaattatgaattaaatataaaacgtgaaaatttaaaaaatttaacccaatgttcaagattattagatgagttgttaaacagaaaaccaaacaagcatctaccttatgttggagcttctgctttttcgcataagggtggtatgcatgtatccgcagttcaaaaaaatccgaaaacatatgaacatgtaaaccctgtagaggtaggtaactcaagaaatatagttgtttcagatcagtctggacaatcaaatattatgtcaagattaaatttaataggaattaatgttgaaaaaagtgacccaaaaattaaaaaacttttagacgaagttaaagatagagagtttattggatatagttatgatggtgcagatgcttcttttgaattattagcaagaagattgatgggtgaaattccaagatatatttctattaatgaatatgacgtctcagtaaaaaaagataaatcaggagaaattatttctcacgcaaaagctcaacttgaagtcgatggaaaaaaaatattatgtgaaggtcaaggtaatggacctgtaaatgctttggataatgcaattagaaaaaatgtaaataaactgc

SEQ ID NO: 236629 - DNA, 802 bp, Unknown
  Bacterial polypeptide expressing nucleotide sequence isolated from the Sargasso Sea
atgagtaaagaaagattatatttatttgatacaactttaagagatggagctcaaactcaaggtgtagatttttcaatagaggataaagaaaaaattgctaaagctctggatactttaggtgtggattatattgaaggaggatggcctggagctaatccaactgatacagaattttttcaaaaaaaacatatttttaaaaattctaaacttacttgttttggtatgactaaaaaaactggacacagtgcagaaaatgatacaggtttatcagccttgttaaattccaatacacccgctgtatgccttgttggtaaatcttgggattttcatgttgatgttgctttaggaatatcaaatgaagaaaatttgaccaatataagtgaaagcgcaaagcattttgttaaagctaaaaaagaatttatgtttgatgcagagcatttttttgatggatataaagctaatcctaattatgcaattgaatgtataaatgcagcatataagcaaggagctagatgggtagttttatgcgatacaaatggtggaactcttcctcatgaaatttccaaaatagtcactgaggtaactaaaattattcctggaaaaaatttgggtattcatgctcacaatgatactggaaatgcagtagcgaactctatagctgcagtattatctggagttcgtcaagtacagggaactattaatggactaggtgaaagatgtggaaatgctaatttaatgtccctaattcctacattttttttgaaaagtgatttttcatcaaaatttgaaactaggaattaaa

SEQ ID NO: 236630 - DNA, 829 bp, Unknown
  Bacterial polypeptide expressing nucleotide sequence isolated from the Sargasso Sea
aggatatgcaatgtcatgtttaaaagctgcttttgataatggtgctagatggattattttatgtgacactaacggcggtacacttccacacgagataacagaaattgtatataaagtaagcaagcaaattcccggaaaaaatttaggaatacacgctcataatgataccgaaaatgctgtagctaatagtcttgcagcagttcaagcaggtgttagacaagtccagggcacaatcaatggtttgggagaaagatgtggaaatgctaatttaatgtcattaattccatcattttttttaaagaaagatttttcagaaaagtttgaattaagtattaaaagagaaaatttaaaaaacttaactcaatgctcaagattattagatgagatattaaatagaaaacccaataaacatttaccttatgttggagcttctgctttttctcacaagggtggaatgcatgtgtcagctgttcaaaaaaatcctaaaacctatgagcacataaatccagaggaagttggaaactctagaaatattgtaatttcagaccaatcaggacaatccaatataatgtcgagattgaattcaataggaattaaagtcgagaaaagcaatccaaaaattaaaaaacttttagatgaagttaaagatcgagaatttattggttatagttatgatggtgccgacgcatcctttgagttgttggctcgaagattaatgggcgagataccaagatatatttctattaatgaatatgatgtttcggtaaagaaagataatgctggagaaatagtttcatatgcaaaagctcagttagaagtagaggagaca

SEQ ID NO: 236631 - DNA, 574 bp, Unknown
  Bacterial polypeptide expressing nucleotide sequence isolated from the Sargasso Sea
ggttcaatcaaatctagttcttggaaaacattctggaagacatgctttcactcaaaaattaaatgagttaggttttaaactaggtgataatgcagttgaagatgcatttaaaagattcaaagagttagctgataagaaaaaggatgtttatgatgaggatcttgtacctttagtagatgaagaagcgagatcaaacgacaggattaagtttatatcactaagggttgttgcgggttcagaaggcccacaatctgcagaaatacagattgagatagatggtgatttgaagagaaacaaatcagatggtgatggtccggtagatgcaacctttaattcggttaaagcactttttcctcataaagcaaaactcttgttatatcaggttcatgcagtaacagaaggaacagatgctcaagcagaagttacggttaggcttgaggaaaatggaaaaactgttaatggacagggtgcagatactgatactttggttgccagtgcaagagcgtatataaatgcgctgaataaattacttgtaaaaaggcaaaaagctgccccagaggcactaactgcataa

SEQ ID NO: 236632 - DNA, 661 bp, Unknown
  Bacterial polypeptide expressing nucleotide sequence isolated from the Sargasso Sea
aatgctaaaaaatagagaaacttatgaaattatgactccagagagcgtaggtgttaaaaaaacttcgcttgttatgggaaaacattcaggacgacatgcttttaaagataaattatccgacttaggttattcagatcttacagacgatattatccaagctgcatttggaaaatttaaagttttagctgataaaaaaaagcatatatacgacgaggatatagttgcgctggttgatgatagtttaattgtagataataaaataaatgcaattaatttgaaatctttaaaagtttttgctggcacaggagaaccacaaaaagccgaaatgacattagatgtatatggcgatattaaaaatactacagaaacaggggatggaccggttgatgcaatatttaaatgtataaaaaaattatttcctcacgatgtaaaattatctctttatcaagtacacgcagtaacagaaggcacagatgctcaagcaactgttagcgtaaaaattgaggaaaacgataggactacagtgggtcaatcagctgacacagatactttagttgcatcagcaaacgcatatttaaatgcattgaataaaatgcttataaaacgtgagaaaaaagcaccatctcaaaatattaaacatcaaaaagtgaaaggaatataa

SEQ ID NO: 236633 - DNA, 425 bp, Unknown
  Bacterial polypeptide expressing nucleotide sequence isolated from the Sargasso Sea
gaaaaacttcaaatttctagagtttttgacgaacttgagtgttgacataatagaggctggttttccaatagcgtcccccggagattttgaagcagtaactgaaatcagcaagtcattaaaaaagtctattcctgctggattggcaagagcaactaaaaaagatatagatgcatgtcatgactcactaaaatacgcaaaaaattttagaatacatacatttatttctactagcccgcttcatatgaagcataagttaaacaaatctccagaagatgttttaagtgctattaaagaaagtgtttcttatgcaagaaagtttactgatgatgtagaatggtcttgtgaagatggaacacgtacagatatggattacatgtgtaaaacagtagaacttgctattaagtcaggagcgaaaacaattaata

SEQ ID NO: 236634 - DNA, 853 bp, Unknown
  Bacterial polypeptide expressing nucleotide sequence isolated from the Sargasso Sea
gttgttccaggtaagaacttagggatccatgcacataatgatactggcaatgcagttgcaaattcattagcagcagtattatctggtgttaggcaaattcaaggaacaattaatggtttaggtgaaagatgtggaaatgcaaatttaatgtcattaatcccgacattttttttgaaaaaagatttttcatctcaatttgaaatcagtatcaaatcagaaaacattaaaaatttaactgaatgttcaagattattagatgaaattttaaacagaaaacctaatcagcactcaccttatgttggtgcagcagcattttctcataaaggaggattacatgtatccgctgtgcaaaaggacccaaaaacttatgagcatattaatccagaggaagttggtaatactagaaatattgttgtttcagatcaatctggaaaatcaaatattatatctagattaaaaagtatcaaaattaacattgaggaaagtgatccaaaaatcaaaaaactattagacgaagttaaggatagagaatttattggatatagttatgatggggctgatgcctcgtttgaattattagctagaagaattattggggaaataccaaggtatatttcaattaatgaatatgacgtgtctgttaaaaaaaataagtctggagaaatagtttcttctgcaaaagctcaattagaagttgatggagaaaaaattatgtgtgaaggagaggggaatggaccagtaaatgcattagataatgctattagacaaaacgtagatagactagcaaaatattcaaaatatctgaaagatttaaaacttgttgattataaagtaagaattttaaatacaggaa

SEQ ID NO: 236635 - DNA, 764 bp, Unknown
  Bacterial polypeptide expressing nucleotide sequence isolated from the Sargasso Sea
aatgctacaggttttcccgtccaatataataaagctattagttggaaaaaatgcttttgctcatgaagcaggtattcatcaagatggaatgttaaaaaataggcaaacatatgaaattatgacaccagaaagtgtaggtgttaaacaaacatctctcgtaatgggtaaacactcaggtagacacgcatttaaagataaattaaccagtttaggatatccagatcttactgatgatgttgtagataatgcttttgcaaaatttaaaatcttggcagataaaaagaaacatgtttatgatgaagatataattgctttaatagatgatagtttaataacagataacaaagtaagtgctatcaatttgaaatctttgaaggtatttgctggtactggcgaacctcaaagagcagaaatgacattggatgtttttggtgaagttaaaaaagcatcagagacaggtgatggaccagttgatgcaatttttaaatgtataaaaaaactttacccacatgaggtaaacttgcaactttatcaagttcatgctgttacagaaggaacagatgctcaagccacagtaagtgttaaaattgaagaaaatggaaaaacaactgtaggacaagctgcagatacagacactttagtagcatctgcaaatgcttatattaattcacttaataaaatgattataaaaagagataaaacagcaccagggcacaatatagaaaaatcaaattttgaaaaatcaaagatgaaaaggaatataa

SEQ ID NO: 236636 - DNA, 899 bp, Unknown
  Bacterial polypeptide expressing nucleotide sequence isolated from the Sargasso Sea
ctatgatcagggtgctagatggattgtattatgtgataccaatggaggaactcttccacatgaagtatcaaagatagtctcagagattgcaaaacatattcctggtgaaaatttaggaattcatgcacataacgatacggaaaatgctgttgcaaatagtttagctgcagttcaagcaggagtgagacaaattcaaggtactataaatgggttgggggagagatgtggaaatgcaaatttaatgtctttgattccaactttattcttaaagaaagattttagtgaaaaatttgaaatcaaaattaaacgtgaaaatttacaaaatctaactcaatgttctcgtttattagatgaattattaaatagaaaacctaataaacatttaccttatgttggcgcatcagcattttcacataaaggtggtatgcacgtttcagcagtacaaaaaaaccctaaaacttatgagcacattgatccagaggaagttggaaattcaagaaatatagttgtatccgatcaggctggtcaatcaaatataatgtctagattaaaatcaattggtattcaggtagaaaaaaatgatccaaaaattaaaaaacttttagaagaagtaaaagacagagaatttattggttatagttatgacggggctgatgcttcatttgaattattagccagaagattaatgggtgaaattccaagatatattttaattaatgagtacgatgtttcagttaaaaaagataatgcaggtgaaattatttcacatgcaaaagcgaacctagttgttgatggtgagaaaatattatgtgaaggtcaaggtaatggacctgtaaatgctttagataatgaaattagaaaaaatgtgaataaacttgcaaaatattctgaatattgaa

SEQ ID NO: 236637 - DNA, 295 bp, Unknown
  Bacterial polypeptide expressing nucleotide sequence isolated from the Sargasso Sea
ggtccggttgatgcggtctgccgcgctctgaacacgctggccggcattcccaacgacctgatcgagttctcggtgaaatccgtgaccgaagggatcgacgccatgggtgaagtgaccattcgactccggcgcgatggaagtctctactccggccatgccgctgacaccgatgtggtggtggcggcggccatggcgtttgtcaacgccctgaaccgactggtggctggggaggccaagcaatcgctgcacccgcagaaggatgcggtggtccccccttcccgtccgacgctctgag

SEQ ID NO: 236638 - DNA, 705 bp, Unknown
  Bacterial polypeptide expressing nucleotide sequence isolated from the Sargasso Sea
ttggaaaaaatgcatttgctcatgaagcaggtatccatcaagatggtatgcttaaaaatagacaaacatatgaaattatgacacctgaaagtgttggtgttaaacaaacctcattggtaatgggtaaacattctggtaaacacgcatttaaggacaaattaaatagtttaggttatccagatttaaccgacgatgttgttggtaatgcttttgctaagtttaaggtattagcagataagaaaaaacatgtttatgatgaagatataattgcacttatagatgatagtttaattatcgataataaagtaaatgcaattagtcttaaatctctaaaagtttttgctggcacaggtgaacctcaaagagccgaaatgactttggatgtttatggagatgttaaaaaagcatctgaaactggagatggcccagtagatgcaatttttagatgcattaaaacactatttccacatgatgttaatttacaattataccaagtgcatgctgtaactgagggaactgatgctcaagcaacagtaagtgtcaaaattgaggaaaaaggaaaaactacggttggacaagctgctgatacggatacactagtagcatcagcaaatgcatacataaattcattaaataaaatgattattaaacgaaataaaacagctccaatggagcaagaaagtcagaaagtaagaggtatataaa

SEQ ID NO: 236639 - DNA, 673 bp, Unknown
  Bacterial polypeptide expressing nucleotide sequence isolated from the Sargasso Sea
aatgagtaaagaaaaactatatatatttgatactacactcagagacggagcccagactcaaggtgtagatttttcaattgatgataaacttaaaatagcaaaagccttagatgatttaggcgtagattatatagagggtggctggccaggtgctaatccaacggatacagaattttttcaaaaaaatattaaattaaataattcaattatgactgcttttggtatgaccaaaaaaactggtagaagcgcagataatgatcctggactatcttctatattaaatagtaacactaaagcagtatgtttagttggtaaatcatgggattttcatgttgatgttgcattaggaataacaaatgaagaaaatttagaaaatatttctgaaagcacaaaactttttattaaagaaaaaaaagaattcatgtttgatgcagaacatttttttgatggttttaaaaataataaagaatacgcactttcatgtatcaaatcagcatatgataatggcgcaagatggattgtgctatgtgatacaaatggaggaacattacctaatgaagtttctgaaattgtgaaggaagtaactaaaactgttccaggaaaaaatcttggtatacatgcacataatgatactggaaatgctgttgcaaactctctagcagcagtattatca

SEQ ID NO: 236640 - DNA, 517 bp, Unknown
  Bacterial polypeptide expressing nucleotide sequence isolated from the Sargasso Sea
atggaaacatatgaaataatgaaaacaggcttatgttttataccacaggatagatctctatttaatacattgacagtagccgagaatcttgcaatggctggttatacaatcaatgataagcaagatttaagagggcgaatagatgaagcactggatacgtttcctcgtctaaaagagcggctaacacagtatgctggcacaatgtctggtggagagcaacaacaattaatttttgccagagctatcatattaaaaccaagagtaatattaattgatgaaccatcgctcgggcttgctccagcaattgtagagcaagcatttcagcacatagaaaatattgcgtcacaaggagtatctattttgcttgttgaacaaaatgcaagaagggggctatcatcatccaatttcggtactgttatggatttaggtgaaattgtttttgaaaaaccggcaaaccaggttctaagtgatgacaggatacaggagctatacttaggaaagaggaagaaaaaataat

SEQ ID NO: 236641 - DNA, 696 bp, Unknown
  Bacterial polypeptide expressing nucleotide sequence isolated from the Sargasso Sea
tatgcatgtcccaagaaataaagccatcgttggcgacaatgcctttgcacatgaagcaggtattcatcaacacggcatgcttagagattcatctacatatgaaatcatgaagcctcaggatgttggtattgcaagatcaaacctcgtgcttggaaaacacagtgggagacatgcttttttagacaggattaatgagctaggatttgcactcgagaaagatgagattgatccggcttttcaggaattcaagaaattggctgatagaaaaaaggaaatattcgatacagacatagaagcaatcgttctaaatgcggatattgccaatatgagccgttggagtcttatggacctagagacaacttcaggctcatcatggggatctacagcatcactgaaattgaaagattctggagaagagataatcgagagggacaataatagcaatcctgccagtggacccattgaagctgttttcaatatcataagtgatatcacaggatataaacttgaattgacaaattttgagattcacagtgtcagtgttggagacgacgcacagggagaagtaactgtcacagtaagctataacggacaaaattatagagggcatggcattagtactgatattatcgaatcaggtgctttggcttatcttgaagtcataaacagaattgaaagaaatcaagcaaaacatta

SEQ ID NO: 236642 - DNA, 928 bp, Unknown
  Bacterial polypeptide expressing nucleotide sequence isolated from the Sargasso Sea
atgacaaagaaatctggacgaagtgcagaaaatgatacaggtttatctgcaattatgaattcaaacacttctgcagtatgtttggttggtaagtcttgggattttcatgttgatgttgctttaggaataactaatgaggaaaatttagataatatttctgagagcgctaaacattttgtaaaagcaaaaaaagaatttatgtttgacgcagaacatttttttgatggttataaagcaaattcaaattacgcactttcttgtattaaagctgcttatgaccaaggtgctagatggatcatactttgtgacacgaatggtggaacactcccacatgaagttacaaaaatagtaagtgaagttacaaaagtagtgccagggaaaaatttaggaattcatgcccataatgatactggaaatgccgtcgcaaattcattagcagcagtgttatctggtgttcgacaaattcaaggtactataaatggattaggtgaaagatgtggaaatgcaaatttgatgtcattgataccaacgttttttttgaaaaaggatttttcatctcaattcgaaattggaataaaatcagaaaacataaaaaatctaactgattgttcaagacttttagatgaaattttaaatagaaaacccaaccagcatttaccttatgtgggtgccgcagccttttcacataaaggaggattgcatgtatctgctgttcaaaaaaatcctaaaacttatgaacatatcaatccagaagaagttggtaatgcaagaaatatcgttgtttctgatcaatcagggaaatccaatataatttcaaggttgaaaagtattagaattgatattcaagaaaatgatccaaaaattaaaaaattattagacgaagtaaaagatagggaatttattggttatagttatgatggcgcaggat

SEQ ID NO: 236643 - DNA, 271 bp, Unknown
  Bacterial polypeptide expressing nucleotide sequence isolated from the Sargasso Sea
atgaaagatttaattaaaaaatacaaaccttttgagcctattccattgaaaggaaggcagtggccaaatacagttattcaaacagcaccacgttggtgctcagtggatcttcgcgatggaaatcaagctcttattgaacccatgggtcatgagagaaaaaaacgaatgtttaaacttttatgtgatcttggattcaaagaaattgaagtaggttttacagctgcatctgaaactgactttgaatttgttagatggttaatgaagaaaagca

SEQ ID NO: 236644 - DNA, 898 bp, Unknown
  Bacterial polypeptide expressing nucleotide sequence isolated from the Sargasso Sea
agtgctgaaaatgatcctggtttatcagctatcataaattctaatacagagtcggtttgtttagttggaaaaacttgggacttccatgttgatgttgcattaggtatttcaaatgaagaaaatatagaaaacataaaagaaacgacaaaacattttgtaaaaaatgataaggaattcatgtttgatgctgagcatttttttgatggatataaatcaaatccaaagtacgcattagaatgtattaaagctgcttatgacaatggagcaaaatggatagttttatgcgatacaaatggaggaacacttcctcatgaggtaactaaaattgttaaagaagtatcagaacatattcctggtgaaaatttaggtatacatgctcataacgatacaggtaacgcagtagcaaattcaattgcggctgttatgtctggtgcaagacaaattcaaggaacaataaatggtttaggtgaaaggtgtggaaatgcaaatttaatgtcaataattccaacattccatcttaaaaaagaattatctgataaatatgaaattaatatcaaagaaaaaaatattaaacatattacacaatgctcaagactacttgatgaaatattaaatagaaaaccaaacaaacatcttccttatgttggtgctgcagcattttctcataaaggtggtttacatgtatctgctgttcaaaaggatcctaaaacttatgagcatataaatcctgaggaagttggtaacaatagaaacatagttgtttcggatcaatcaggaaaatcgaatattttatccagacttaaaacaataggaattgaaattgaagaaaatgatccaaaagtaaaaaaattacttgaggaagtaaaagatagagaatttataggctacagttatgatg

SEQ ID NO: 236645 - DNA, 678 bp, Unknown
  Bacterial polypeptide expressing nucleotide sequence isolated from the Sargasso Sea
agatttttcaattgatgacaaaattaaaatagcaaaagccttagatggtttaggtgtggattatatagagggcggctggccaggtgccaatccaacagatacagaattttttcaaaaaaaaattaaattaaataactcaattatgactgcttttggtatgaccaaaagaacaggcagaagtgcagataatgatcctggactgtcttctatattaaatagtaacactaaagcagtatgtttagttggtaaaacatgggactttcatgttgatgtagcattaggaatttcaaatcaagaaaatttagaaaatatttctgaaagtgcaaaactttttgttaaagaaaaaaaagaatttatgtttgatgctgaacactttttcgatggttttaaaaataataaagaatacgcgctttcatgtattaaatcagcatatgataatggtgcaagatggattgtattatgtgatacaaatggaggaacattacctaatgaagtttctgaaatagtgaatgaggtaactaaatctgttccaggaaaaaatcttggtattcatgctcataatgatactggaaacgctgttgcaaactccttagctgcagttttatcaggagcaagacaaatacaaggaacaattaatggacttggtgaaagatgtggtaatgcaaatttaatgtcagt

SEQ ID NO: 236646 - DNA, 808 bp, Unknown
  Bacterial polypeptide expressing nucleotide sequence isolated from the Sargasso Sea
tgagcaaaatttaatcaatataagcgaaagtacaaaacatattgttaaatctggtaaagaattcatgtttgatgccgaacatttttttgatggttataaatctaatcctgaatatgcaatgtcatgtctaaaagcttcttatgataatggtgcaagatggattgtattatgtgatacaaatggaggaacacttccccacgaaataacaaaaattattatggaagtaaaaaaacatattccaggagaaaatttaggaatacatgctcacaatgatactgaaaatgctgtagcgaatagtcttgcagcagttcaagcaggagtaaggcaagttcaaggcactataaacggtttaggtgagagatgtggcaatgcaaatttaatgtcattaataccttctttttttttaaagaaagatttttcaaataaatttgatttaagtattaaaagagaaaatttaaaaaatttaactcaatgctcaagattgttggatgaaattttaaatagaaagccaaataaacatttgccttatgttggagcctcagctttttctcataaaggtggaatgcatgtttctgcagttcaaaaagatcctaaaacttatgagcatattaatcctgatgaagtgggtaactctagaaatatagtagtttcagatcaatcagggcaatcaaacattatgtccaggttgaacttaataggaattaaagtcgagaaaagtgatccaaaaattaaaaaacttctagaagaagtgaaagatcgagaatttatcggttatagttatgacggtgcagatgcatcttttgaatta

SEQ ID NO: 236647 - DNA, 709 bp, Unknown
  Bacterial polypeptide expressing nucleotide sequence isolated from the Sargasso Sea
tctatcacggggatgcatgttcctagaaacaaagcaattgttggcgataacgcatttgctcatgaagctggtatccatcaacatggaatgcttagagattcttcaacatatgaaatcatgaagcctcaagatgttggtattgctagatcaaatctcgttcttggaaaacacagcggcagacatgcttttttggacagaatcaacgatttggggtttaagctcgaaaaggatgagattgatccagcttttcgagaattcaagaaattggctgacaaaaagaaggagatttttgatacagacatagaagcaattgttttaaatgcagatattgcaaatatgagtcgatggtcgctggaagatcttgaaacaaattctggctcctcatggggttctactgcatcattaaaattagtagattcagatgaaaacatcattgaaagagacaataaggagaatccagccagtggaccgattgaggctgttttcaatatcatcagtgatattacgggatatcagcttgaattgactaactttgaaattcacagcgtcagtgttggcgatgatgctcaaggtgaagtcactgtcacagtcagctatgatggacagaattatagagggcatggcatcagtactgatatcattgagtctggcgctttggcttatcttgaggtcattaaccgaatagaaagaaatcaagcaaaacattagg

SEQ ID NO: 236648 - DNA, 886 bp, Unknown
  Bacterial polypeptide expressing nucleotide sequence isolated from the Sargasso Sea
cctgttcgattccacgctgcgcgatggcgcgcagacgcagggcgtttatttcaccgttgctgataagatggccatcgcgcgcgcgttggatggtttgggcaccgattatgtagaaggtggctggcccggcgcgaatccgactgatgacgctttttttcgggaagcgcctaaacttttacgttcgaaattcacggcgttcggcatgacccgccggccggggcggtcggtcgagaacgatcccgggatcgccgccttgctggatgttaaacccgcggcagtctgcatggtcggcaagacatgggattaccatgtcgatgtggcgctagaaattccgcgggaagaaaacgtcgagatgatttcggattccatcgcccatgtgaaggcgaaggtggcggaagcgctattcgatgccgaacattttttcgacggctacaaggccaattccgaatatgcgcttacctgtgtaaaggcagcttatgaagccggcgcccgctggattgtgctgtgcgataccaatggcggcaccctgccgcacgaggtcgatgatatcgtgcgccgtgtcagcgaaatcgtaccgggtagctatctgggcatccattgccacaacgataccgaaaacgccgtcgccaattcgctggcggctgtgaatgccggtgcccggcaaattcagggtacgctgaatggtttgggcgagcgatgcggcaatgccaatctgactgcaatcatccccagcctgatgctgaaaatgggttttgagaccgcgcttggcgacgatgatctgcgcggcctgacgcgtgtgtcgcgcatgctggacgaacgtctgaacagggtgccatctcgcaatgccgcgtatgtcggcggatccgcttttgcgcacaagggcggt

SEQ ID NO: 236649 - DNA, 844 bp, Unknown
  Bacterial polypeptide expressing nucleotide sequence isolated from the Sargasso Sea
gctaatccatctgatacagaattttttcaaaaaggtttggatttaaaaaattctacatttactgctttgggaatgacgaagaaagctggacgaagtgcagaaaatgatccaggtttgtcagcgattttaaattcaaatactaaatctgtttgtttagtaggaaagtcttgggattttcatgttgatgttgcattagggataactaatgaggaaaatttagaaaacattaaagagacgactaaacattttgtaaaaaataacaaagagttcatgtttgatgcagaacacttctttgatggctacaaagcaaatccaaaatatgctttagcttgcattaaagctgcatacgataacggtgctaaatggatagttctttgtgatactaatggcggaacacttcctcatgaagttacaaaaatagttaaagaagtttcagaacatattcctggtgaaaacttaggtattcacgcacataatgatactggtaatgctgttgcaaattcaattgcagctgttttatcaggagcaagacaaatacaaggaacaataaatggcttaggtgaaagatgtggtaacgctaacttaatgtcaattatcccaacttttcatcttaaaaaagaattatcagataaattcgaaataagtattaaagaaaaaaatattaaacatattacacaatgttcaagattacttgatgagatactaaatagaaaaccaaataaacacttaccatatgtaggtgctgcagcattttcacacaaaggtggtttacatgtatccgccgttcaaaaagatcccaaaacttatgagcatataaatccagaagacgttggcaacaacagaa

SEQ ID NO: 236650 - DNA, 931 bp, Unknown
  Bacterial polypeptide expressing nucleotide sequence isolated from the Sargasso Sea
gtagattatattgaaggtggttggccaggcgccaatccaacagatacagaattctttaacaaaaatcataactttagaaatgctaagcttaccgcatttggaatgacaaaaaaatctgaacatagtgcaaataacgatccaatgctttcatcattaattaattctaaaagttcctcagtttgtttgtttggaaaatcttgggattttcaagttgatgttgcgttaggtatttcaaatgaacaaaacataaaaaatataagtgaaagtgcaaaacatattattgcctctggtaaagaatttatgtttgatgcagaacatttttttgatggatataaatcaaataaagaatatgcaatatcatgtataaaagctgcttttgatcaaggtgccagatggatagttttatgtgatactaatggaggaacccttccacatgaagtttcaaaaatagtatatgatgttactaatcatattccaggctcaaatttaggaatacatgcgcataatgatacagaaaatgctgttgcaaatagtttagcagccgttcagtctggagttagacaaattcaaggtacaattaatggcttaggagaaagatgtggtaatgctaatttaatgtcattaattccaacattttttttaaaaaaagatttttctgaaaaatatgaattaaatattaaacatgaaaatttaaaaaatttgacacaatgttcaagattgttagacgaaatacttaatagaaaaccaaacaaacatcttccatatgtaggtgcttctgcattttcacataaaggagggatgcatgtatctgcagttcaaaaaaatccaaaaacttatgaacatataaatcctgaagaagttggaaatgtaagaaatatcgtagtttctgatcaatctggacaatctaatattatttcaagattaaactcaa

SEQ ID NO: 236651 - DNA, 514 bp, Unknown
  Bacterial polypeptide expressing nucleotide sequence isolated from the Sargasso Sea
atgcaaatcaagaaagggtttaaagctataaaacaatctaatgatccaaagtggcaggtcccttatcttcccattgatccagcagatttaggaagaagttatgaagctgtggtaagaatcaactcacaatcaggcaaaggtggtgttgcgttcttattagaaaaagatcatggcgtttctctgccaagaagacttcaaataagtttaagtcaaaaaattcaaaagcttgcagaagatactggaaaagagataagtagttcacaaatttgggatatttttgaaaaaaattacctaaagcctataaataacttttcatatatagaacactcttcaacatccaatggagatgcacattttttagaacttactatgaatatggaaaacgaagaaattaaaataaagggaaatggtaatggacctattgattcatttataaatggtttatcagaaaagttaggtatgcaaattaaagttgctgactatcatcaatcagcaattcttctggatctgatgc

SEQ ID NO: 236652 - DNA, 991 bp, Unknown
  Bacterial polypeptide expressing nucleotide sequence isolated from the Sargasso Sea
caatataggtgtcgattacattgagggtggttggcctggcgctaaccctattgacacagaattttttaacaaatcaccaaaatttaataatagtatctttactgcttttggaatgacgaaaaaaagtggaagaagtgcagaaaatgatccaggcttgtcatctctattaaatgctaattcacaagcagtttgtgtagtcggaaaatcgtgggacttccacgtcaagatagccttaggcatcaaaaaccaagaaaacttagaaaatataagagagacagcaaaacattttgtaaaaaacaaaaaagaatttctatttgatgcggaacattttttcgacggatttaaaaacaatcctcaatatgctttagactgcttaaaacaagcttatgacgaaggtgctagatgggttgtattatgtgatactaacggtggaacacttccacatgaagttagtgaaatagtcagcaaggtaacaaaaataataccaggtaaaaatataggcattcatgcacataatgacactgaaaatgctgtcgcgaattctttagcagctgttcttgctggagccagacaaatccaaggtactataaatggtttaggcgaaagatgcggtaatgcaaacttatcttctattatcccaactttatttttgaaaaaaacatttaatgaaaaatttgatcttaatattaaaaaagaaaatttatcatcgcttactgagtgttctagatttttagacgagatattaaacaaaaaaccaaataaaaatatggcctatgtaggagcgtcagctttttcacataaaggcggtttacatgtatcagcagttaaaaaagatcctagaacttatgagcatattgatcctaaattagtaggaaatcatagaaacataattgtttcaaatcaatcaggaagatcaaatattttatccagattggaaaattatggagttaaaatagactccaaagatcctaaagtgcaaaaaatttcttga

SEQ ID NO: 236653 - DNA, 171 bp, Unknown
  Bacterial polypeptide expressing nucleotide sequence isolated from the Sargasso Sea
tatgaagaatattaaatttcaagatacctctttgagagatggagaacaaacgccaggtgttgcatataatctccaagacaaaattagaattacagaacaactaataaaattaaatgttgatagtattgaggttggttttcctgctgcttcaaaagatgaagcagcaattgt

SEQ ID NO: 236654 - DNA, 826 bp, Unknown
  Bacterial polypeptide expressing nucleotide sequence isolated from the Sargasso Sea
aagtgctgacaatgatccaggactttcttctatattacatagtaatactttagctgtatgtttagtcggaaagtcttgggattttcatgttgatgtagctctaggtatatctaacgacgaaaatttagaaaacatctctgaaagtgcaaaactttttgtaaaagaaaaaaaagaattcatgtttgatgctgagcatttttttgatggttttaaaaataataaagattatgcacttgcgtgcattaaatcagcattcgataatggtgctagatggattgtgctttgtgacacaaatggtggaacattgccccatgaagtttctgaaattgtaggagaagtagtcaaatctattccaggaaaaaatctaggtattcatgctcataatgatactggaaatgctgtagcaaattctttagcggctgttttatctggggttagacaaatacaaggaacaattaatggattgggagaaagatgtggaaatgcaaacttaatgtcaataattccaacattacatttaaaagaaacttactccaaaaattttgaaataaatattaaaaaagaaaatatcaataaattaacacaatgttcgagattacttgacgaaatattaaatagaaaaccaaatcaacatttgccttatgttggagctgctgcattttcacataaaggtggtttacatgtttcagcggttcaaaaggacccaaaaacatatgaacatataaatcctgaaaccgtaggaaatgtaagaaatatagttgtctcagatcaatctggaaaatcaaatattgtatctagattaaaatcaataggagttaaactttaa

SEQ ID NO: 236655 - DNA, 874 bp, Unknown
  Bacterial polypeptide expressing nucleotide sequence isolated from the Sargasso Sea
aatgaacaaagataaaatttatttatttgatactactttaagagatggtgcacaaacagaaggtgtagatttttctatagaggataaaaataaaatcgcaaatgttttatctgatatcggtatagattatatcgagggtggatggccaggggcaaatccaattgatactaaatttttttccaaacctcctaaaactaaaaagagtatttttacagcattcgggatgaccaaaaaaacaggcaggagtgctgataatgacccaggattggcatcattaattaatgcagatacttctgcagtttgtgttgttggaaaaacttgggatttccacgtaaaagtcgctttaggaattaataatgaagataacttagaaaatataagagaaacaaccaaacattttgtaaaacataaaaaagaatttttgtttgatgctgagcatttcttcgacggttacaaagctaactcaaactatgcactagattgtctaaaaaatgcatatgactcaggagcaaggtggattgttttatgtgatactaacggtggaacacttccaaatgaggtaagagaaatcgttaaaaaagttacaaaagtaattcctggtaaaaatcttggtatccacgcacataacgatacagaaaatgcagtggcaaactctctcgcagctgtcgagtccggtgttagacaaatccagggtacaataaatggattaggagagaggtgtggaaatgctaatttaatgtcaattattcctactttatttttaaaaaaatcatttaatgaaagatttgatattaatattaaaaaagaaaaactttcatctttaacagattgctcaagactcctagatgagatattgaatagaaaaccaaataaa

SEQ ID NO: 236656 - DNA, 232 bp, Unknown
  Bacterial polypeptide expressing nucleotide sequence isolated from the Sargasso Sea
tcgagttctcggtgaatccgtgaccgaagggatcgacgccatgggtgaagtgaccattcgactccggcgcgatggatgtctctactccggccatgccgccgacaccgatgtggtggtggcggcggccatggcgttcgtcaacgctctgaaccgactggtggctggggaggccaagcaatcgctgcatccgcagaaggatgcggtggtccccccctcccgtccgacgctctga

SEQ ID NO: 236657 - DNA, 618 bp, Unknown
  Bacterial polypeptide expressing nucleotide sequence isolated from the Sargasso Sea
caccatcaaataaatgggctgttccatatttgcccattgacccagctgatatgggaagaacttatgaagctataatacgcgttaatagccaatcaggtaaagggggaacagcttggttactagaatcagactatcaaataagattgccaaaaggagccgaagttgagttatcctcaaaagttcaaaagatagctgatgaaactggcaacgaaattacaagtgatgttatatggagaacttttgttgagaattttattctgcaaaaaccatttcagttaattgatttcaaagttgagggtgctaatagagaaaataatcttgaaataatcaatgcgaaaattagttacaatgaaaaagtacatcaattttcatcacaaggaaatgggccaatttcagcctttgtaaatgggataagagaaaattttgatttgcaatttacattagaagactttggtcaaaataccaggagtgcttcctcaaaggccgaatctgcggcctacgttaaacttaaaattaatgatagtgatgactcagtttatgggtgtgggataaatacaagtataactgtggcaccaattcttgcagttttaagtgctataaataagatcaagatttgaa

SEQ ID NO: 236658 - DNA, 580 bp, Unknown
  Bacterial polypeptide expressing nucleotide sequence isolated from the Sargasso Sea
ccaaaggatgtaggtagatcttatgaagctgtgatcagaataaatagccaatctggcaaaggtggtgttgcctaccttctagaaaaagatcacggactaagcatgccaagaagacttcaaattgagtttagtcaggtaatccaaaagattgctgatgatacaggaaaggaaatctccccttctgatatttgggacaactttcaagatacttacttgaatgaatctggtacttatgagttcaataatcactccatcagctcaactgcaaataaagatggaaaccaatcagatgatattgaaattggattgatcaaggatgcaaaggaaataactctaaaaggatctggaaatggacctatagatgccatgattgatgctataaaaagagatctaaatttggatctaaaaatttctgactatcaccaacatgcaataagctctggttcagatgcaaaagctgtcgcttattcagaaataattatgggtgagcaatcggtttggggggttggcattcatcaaaatacagtcattgccggtttaaaatctataatcagcggtctaaatagattgtctaaataac

SEQ ID NO: 236659 - DNA, 682 bp, Unknown
  Bacterial polypeptide expressing nucleotide sequence isolated from the Sargasso Sea
tcttaatattgtttcagaggtaaccaattatattcctggtcaaaacttaggaatccatgctcataatgacactgataacgctgtagcaaatagtctagccgcagtacaggcaggtgtaagacaagttcaaggaactttaaatgggttgggagagagatgtggaaatgcgaatttaacttcgctaattccaacattctttttaaaaaaagatttttatgaaaattatgaattaaatataaagcgtgaaaatttaaaaaaactaacacaatgttccagattgttggatgaactgctaaatagaaaaccaaataaacatatgccttatgttggtgcatctgccttttcacacaaaggtggaatgcatgtatctgctgtacaaaaaaatccaaaaacttatgaacatatcaatccagaagaagttggtaactccagaaatatagttgtttcagatcagtcgggacagtcaaatattatgtcaagattaaattctattggtattaaagtggaaaaaagtgatcctaaaatcaagaaacttttagatgaagtaaaagatagagagtttattggttatagttatgatggagcagatgcctcttttgaattacttgcaagaagattattgggtgaaattccaaggtatatttcaaggaatgaatatgatgtgtctgtcaaaaaagataag

SEQ ID NO: 236660 - DNA, 784 bp, Unknown
  Bacterial polypeptide expressing nucleotide sequence isolated from the Sargasso Sea
tatattcctggaaaaaatttaggtattcatgcacataatgatacagaaaatgcagtagcaaatagtttggcagctgtgcaatctggggcaagacaaattcaagggacaattaatggtctgggagaaagatgtggaaatgcaaacctaatgtctttaattccaactttttttttaaagaaagatttttcagatttatttgaactaaatataaaacgtgaaaatttaaaaaatttaacgcaatgttcgagattattagatgaaatattaaatagaaaaccaaataaacacttgccatatgtaggtgcttcagctttttcacataaaggtggaatgcatgtatcagcagttcaaaaagatccaaaaacatacgaacacattaatcctgaagaagttggaaatgtaagaaatatagtggtttcagatcaatctggacaatccaacatcatgtcaagattaaattctataggaatagaaataaaaaaaaatgatccaaaaattaaaaaactactacatgaggtaaaggatagagagtttattggttatagctatgatggagcagacgcctcttttgaattattggcaagaagacttatgggagaaattccaagatacatatcaattaacgaatatgatgtttctgtaaaaaaagacaaaacaggtgaaattatttcattagctaaagctcagttagaagttgatggtaaaaaaataatatgtgaaggacaaggaaatggcccagtgcatgctttagataatgccattagaaaaaatgtaaataaactgc

SEQ ID NO: 236661 - DNA, 961 bp, Unknown
  Bacterial polypeptide expressing nucleotide sequence isolated from the Sargasso Sea
catgcacataacgatactgaaaatgctgtagccaattctttagctgctgttttgtctggagtaagacaaattcaaggaacaattaatggattaggtgaaagatgtggtaatgcaaatttgatgtcaataattccaacattacatctaaaaaaaacttatacaaataattatgaaataaatattaaaaaagaaaatattaataaattaactcaatgctctagattacttgatgaaatattaaatagaaaaccaaatcaacacttaccttatgttggtgcagcagccttttctcataaaggaggattgcatgtttctgcagttcaaaaagatcccaaaacttatgaacatataaatcctcaagaagttggaaatgtaagaaatattgttgtttcagatcaatcaggaaaatctaatatagtttcaagattaaattctataggaattgattttaaacaagacgatccaaaaattaaaaaacttttagaggaagttaaagatagagagtttataggatatagttatgatggtgcagatgcatcttttgaattactagcaagaagagtaatgggtgaaattccaagatatatctctattaaagagtatgatgttagtgtcaaaaaaaataatttaggagaaattatttcatcagcaaaagctcaattagaagttgataagaaattaattctttgcgaaggtgagggtaatggtcctgtgcatgcacttgataatgcaatcagagataacgtagaaaaactagctaaatattcacaatatttaaaagatttaaaattagtagattataaagttagaatacttaataccggaacagaagctgtaacaagagtttcaattgaaagtaccgattcaaaaggaaaaaattggtttacaattggagtatcagcaaacattattgacgcttcatttaaagccttagttgacagtttagattataagcttttaa

SEQ ID NO: 236662 - DNA, 864 bp, Unknown
  Bacterial polypeptide expressing nucleotide sequence isolated from the Sargasso Sea
aaaaatctcgagcatagtggctgaaaatgatccaatgttatcatcattaattaattcaaaaagttcatcaatttgtttatttggtaaatcatgggattttcaagtgaaagttgctttaggaatttcgaacgaacaaaatttaactaacataggcgaaagtaccaagcatgttgttaaatcgggtaaagaatttatgtttgatgctgagcatttctttgatggatacaaatctaatcctgagtacgcattgtcctgtttgaaagctgcgtacgataacggtgcaagatggatcattttatgcgatactaatggcggaacacttccaaatgaaatttctaaaattataactgaagtaagcaaatatattccaggagaaaatttaggaatacatgctcataatgataccgaaaatgctgttgccaatagtcttgcagctgttcaagcgggagtaagacaagttcaaggaactataaatggattaggagaaagatgtggaaatgcaaacttaatgtcattaataccttcttttttcttaaagaaagatttttcagataaatttgaacttagtatcaaaagagaaaaattaaaaaatttaacccaatgctcaagattgttagatgaaatattaaatagaaaacctaataaacatttaccatacgtaggtgcctcagctttctcacataaaggtggaatgcatgtatctgcagttcaaaaagatccaaaaacttacgagcacattaatcctgaagaggttggaaattctagaaatattatagtttcagatcaatcaggacaatcaaacataatgtctagattaaacttaattggaattaatattgaaaaaagtgacccaaaaatcaaaaa

SEQ ID NO: 236663 - DNA, 928 bp, Unknown
  Bacterial polypeptide expressing nucleotide sequence isolated from the Sargasso Sea
aggaaaaattttaggaattcatgcacataacgatacagggaatgccgttgctaactctttagcagcagtattatctggagttcgacaaattcaagggacaataaatggattaggagaaagatgtggaaatgcaaatttaatgtcattaataccaacattttttttaaaaaaagatttttcatctcaatttgaaattggcataaaatcgaaaaacataaaaaatcttactgaatgttcaagattattagacgaaattttaaatagaaaacctaatcaacatttaccatatgttggtgctgcagcattttcacataaaggtgggttacatgtgtctgctgtacaaaaagatccaaaaacttatgaacatattaatccagaagaagttggtaatacgagaaatattgttgtgtcagaccaatctggaaaatccaatatcatctcaagattaaaaagtatcaaaattgaaattgaggaaaacgatcctaaaattaaaaaattactagatgaagtaaaagatagagaatttattggttatagttatgatggtgctgatgcatcatttgaattgttagctagaagaattattggagaaataccacgatatatttcaataaacgaatatgatgtttctgttaaaaaaaataagtctggagaaatagtttcttctgcaaaagctcaattagaagttgatggagaaaaaattatgtgtgaaggagagggtaatggacctgtaaatgctttagacaatgctattagacaaaacgttgatcgattagctaaatattcaaaatatttaaaagatttaaagctagttgattataaagttagaattttaaacacaggaaccgaagctgttactagagtatctattgaaagcacagattcgaaggggaagaattggtttactattggtgtatctacaaacatt

SEQ ID NO: 236664 - DNA, 855 bp, Unknown
  Bacterial polypeptide expressing nucleotide sequence isolated from the Sargasso Sea
tttatttgatgccgaacatttttttgatggatataaagctaatccaaattatgcattaagttgtttaaaacaagcatacgactctggagctaggtggttggttctttgtgacaccaatggaggaactttgccaaacgagataaaagaaattgtatctaaagtatcaaaagaaattccagggaaaaatcttggtattcatgctcacaatgatacagaaaatgcagtagcaaattctttggcagctgttgaggctggcgcaagacacattcaaggtaccataaatggtttaggcgaaagatgtggtaatgccaatttaatgtcaataattcctacattatgtttaaaaaaatcatttaaagataagtttgatgttgggattaaaaaagaaaagttatcttcgttaacagaatgctcaagacttttagacgaaattctgaatagaaagccaaataaaaatatggcttatgttggagcctctgctttttcacacaaaggtggtttgcacgtttcagcagtaaaaaaagatcctaagacttatgagcatgtcgaccctaaaatggtaggcaatcacagaaacattatcgtctctaatcaagctggaagatcaaatattttatctagattagaaaaatatggagtaaaaatagattcacaagatcctaaggtccaaaaaattttagatgaagtaaaggatagggaatttagtggatattcttatgatggagcagatgcttcctttgaacttctagctaatagacttttagggaaagtccctgaatatcttaaagttaaaagttataatgtcagtgttgctaaatcagatacaattaagaccaaagcgaatgttgttttttt

SEQ ID NO: 236665 - DNA, 611 bp, Unknown
  Bacterial polypeptide expressing nucleotide sequence isolated from the Sargasso Sea
gttgaactgcaagggctcccccccatcgtgcaagggccggtcgacgtctgcgctgttcgactgcgactcggacgaagtctcgcatcgaaacactagcgctgcccgtgaagggctcgtgtgggactacctcaacagcacgttctgcctcgttcctgctgatgggcggcaagcatcgagtcggctcttcgctgcggtcgcttccgggtgcgtgccagtgatcttcggtgactttgaaagcgtgtacccgaccctgccgttcaaggcgaccatcgattggtcgcagatggccatatttgccgggtccctcgagtgccactcgacggctcccccgattccagatcctcaggggttcgtccttccatccaaggatatggctcgatggctggagtcgctgggagagtctgcggagcgcctggcgagcagggtcggctgcttgagcagttatgggcgggaggcggccaagggcagcttatcgtacaccagcgatggcattgtcacggcattgcttcgcgaggcggtcgcgccgcgaccatcgcagcccgagcgcgaccaggcgaatgtgccacctccagcgcctcagctcggccgacttccagctgatgccacttcat

SEQ ID NO: 236666 - DNA, 709 bp, Unknown
  Bacterial polypeptide expressing nucleotide sequence isolated from the Sargasso Sea
aatgagtaaagaaaaattatatatatttgacacaacgcttagagatggcgcccaaacagagggtgtagatttttcaattgatgataaaaataagatttcaaaaatactttcaaatataggtgttgattatatagaaggtggttggccaggtgccaacccaattgatactgaatttttcaatagtgcgccaaaattaagtaaaagtatttttactgctttcggaatgacaaaaaaaagtgggagaagtgcagaaaatgatccaggattgtcatcattgctaaatgctaattctcaagcagtttgtgtggtaggtaaatcatgggattttcatgtaaaggttgctctaggaattaaaaatgatgagaatttagaaaatataaaagagacagcaaaacattttgtaaaaaataaaaaagaatttctttttgatgcagaacatttttttgatggatttaaaaataatcctcaatatgctcttgattgtctaaagcaagcttatgatgaaggtgctagatgggttgtgctatgcgacacaaatggaggaacacttccacatgaggttagcgaaattgtagaaaaggttacaaaaacaattcctggaaaaaatattggtattcatgcacataatgacactgagaatgctgtcgctaattcattagctgccgttctagcaggtgcccagacaattcaggaacatataatgggttag

SEQ ID NO: 236667 - DNA, 878 bp, Unknown
  Bacterial polypeptide expressing nucleotide sequence isolated from the Sargasso Sea
aaaaaatctcggcattcacgctcacaatgatacagaaaatgcagtagctaactctttagcagcagtggagtccggcgtaagacaaattcaagggacaattaatggtttaggtgaaagatgcggaaatgctaatttgatgtcaattatacctactttatgtctaaaaaaaacatttagtgaaaaatttgatgtaaatattaaaaaagataagctctcatctttaacagattgctcccgacttctagatgaaatattgaataggaaaccgaataaaagtttgccttatgttggagcttcagcgttttcacataagggcggtttgcatgtttcagcagtaaaaaaagatccaaaaacgtatgagcacattaacccagagttgatcggcaatcacagaaatataatagtttcaaatcaagctggcagatcaaatatattatcaagacttgaaaaatatggagtaaagatagattcaaacaatccaaaagttcaaaaaattttagacgaagtcaaagatagggaatttagcggatattcatatgacggagctgatgcatcatttgaattattagctaaaagacttttaggtaaattaccagaatatttaaaagtaaaaagttataaagtaagtgtgtcaaagtcagaaaaaattttaactaaagcaaatgttgtatttttaatagacggtaaagaaataagttgcgacggcgaaggtaatggtccagtaaatgctcttgacaatgcaattcgatcaaattttaaaaaggttaaaaaatattacaatttttttaatgaccttaaattactagactacaaagtcaggattttaaatacaggtacagaggctacaactagagttttgatcgagagtaccgataaaa

SEQ ID NO: 236668 - DNA, 607 bp, Unknown
  Bacterial polypeptide expressing nucleotide sequence isolated from the Sargasso Sea
tgacccgcaatgggaagtgccttatttaccagttgatcctgcagacctggggagaacttatgaagccgttgtaagaattaattcacaatctggaaaaggaggcgttgcttttctattggaaaaagatcatggcgtatctctcccgagaaggcttcaaataagcatgagtcagaagatacaaaaaattgctgatgagactggtaaagaaatttcaacatcagagatttgggaaatctttcatacaaactttgttatgccaaaatctggacatagttttaaaaactattccttaaaaacttcagatgcaactgatttaagtgatcatattaaagctgagattgaaattgatggtaaaaaccatgaaatatatggttcaggtaatggtccaattgacgcatttgtaaatgcactgaatcaaaaactatcaattgatataaaagtatctgattatcatcagagtgcaatttcatctggctctgacgctcaagctgctgcttatattgaactccaaaaaggtgacaaaacaagttggggtgttggtataaatcctaatactacaaaagcctcatttgaagccattattgttggagtagctaaactaatctaa

SEQ ID NO: 236669 - DNA, 576 bp, Unknown
  Bacterial polypeptide expressing nucleotide sequence isolated from the Sargasso Sea
tttggatttaaaaaactcttcttttactgcttttggaatgacaaaaaaaactggacgaagtgctgaaaatgatccaggtttgtcagcaattctcaattctaatactaaatctgtttgtttagttggaaaatcttgggatttccatgttgacattgcgttaggtatttctaatgaggaaaatctagaaaatattaaagagacaacaaaacactttgtaaaaaacaacaaggagttcatgtttgatgcagaacatttctttgatggttacaaagcaaacccaaaatatgctttagcttgtatcaaagctgcttatgataatggtgctaaatggatagttctatgtgatactaatggtggaacactcccacatgaagttactaaaattgtgaaagaagtttctgaacatatacctggtaaaaatttgggtatccatgcgcataatgatactggaaatgctgttgcaaactctattgctgcagttttatcaggcgtgaggcaaatacaaggtactattaatggtttaggtgaaaggtgtggtaacgctaacttgatgtcaattatcccaacttttcatct

SEQ ID NO: 236670 - DNA, 565 bp, Unknown
  Bacterial polypeptide expressing nucleotide sequence isolated from the Sargasso Sea
atgagcttcgatcatcgcaaataccgccgtgcccccgtcatcaatctggcggctcgccagtggcccaaccgggtgctggagcgggcgccgctctggtgcgccgtggatctgcgcgacggcaaccaggcgctggtcgagccgatgacggtggcgcagaagctgcagatgtgggcgctgatggtgcacatcggcttcaagcacatcgaggtgggctttccggccgcctcccagcccgatttcgacttcgtgcgcgagcttatcgatcgcaatctcattccagacgacgtcaccatccaggtgttggtgcaggcgcgcgaagatctgattgcccgtaccttcgaggccctcaagggggccaagcgggccatagtccatgtctataactcggtcaacccgacccagcgcaactatgtgttcaactcagggcgcgaaggggtcaaggccatcgccgtgcagggggcgcgctgggtgcgggagtatgcggcccgcaatccgggtaccgagtggagttttcagtactcgccggagagcttcagcagcaccgaggtggagttcgccgtcgagg

SEQ ID NO: 236671 - DNA, 547 bp, Unknown
  Bacterial polypeptide expressing nucleotide sequence isolated from the Sargasso Sea
ctcagcggccgcaacgccttcaagcagcgcctgcaggagctgggtgtgcagctcgacagcgaaaccgagatcaacgtggcttttgccaagttcaaggagctggccgaccgcaagagcgagatttttgacgaggacatcctcgcgctggtcagcgacgagagcgtgacggctgagaaggagcaatacggctttgtctcgttgttccagcagagtgaaaccggcgagcagccgcgtgcgcgcatcgtgttcacggtggatggacaagaggtgcgcggcgaggcggagggcaacggcccggttgatgcctcgctcaaagccatcgaatcgcacgtgaagagcggtgccgagatggtgctgtactccgtcaacgccatcagtggctccaccgagagccagggcgaggtcactgtgcggttgcagaacagcgggcgtgtcgtgaacggggtgggcgccgatccagacattgtcgtggcatcggcgaaggcctatctcagtgctttgaacaagttacaaagtaaagcagatcgcgtggccgcacaaggctgaa

SEQ ID NO: 236672 - DNA, 858 bp, Unknown
  Bacterial polypeptide expressing nucleotide sequence isolated from the Sargasso Sea
agctaatccactagatactgagttttttcaaaagggtttgagcctaaaaaattcaaaatttactgcttttggaatgacaaaaaaatctggacgtagtgctgaaaatgatcctggtttatcatctatcatgaattcaaatactaactcagtttgtttagttggtaagacttgggatttccatgttgatgtcgctttagaaatttcaaatgaagaaaatttagaaaatataaaagagacaacaaaacattttgttaaaaaagataaagaatttatgtttgatgctgaacatttttttgatggctacaaatcaaatccaaaatatgcattagattgtattaaagctgcttatgataatggagcaaaatggatagttttgtgtgatacaaatggtggaacgcttcctcatgaagtaactaaaattgttaaagaggtatccaaacatattcctggtgagaatttaggtatacacgctcataatgatactggtaatgcagtagcaaattcaattgcagctgttttgtcgggtgtaagacaaattcagggcacaataaatggtttaggtgaaagatgtggaaatgcaaatttaatgtcaataattccaactttgaaactaaaaaaagaattatctgataaatatgaattaaatatcaaaaaaaaaaatattaaatatattacacagtgctcaaggctacttgatgagatattaaatagaaaacctaacaaacatttaccttatgtaggtgctgcagcattttctcataaaggtggcttacatgtatccgccgttcaaaagaatcccaaaacttatgagcatataaatcctgaggaagtgggcaacagtagaaatatagttgtatc

SEQ ID NO: 236673 - DNA, 594 bp, Unknown
  Bacterial polypeptide expressing nucleotide sequence isolated from the Sargasso Sea
aattacacaaatagttagtgaggttataaaagtagtaccaggaaaaaacttaggaattcacgcacataatgatactggtaatgcggttgctaattcattagcagcagtattgtctggtgttcgacaaattcaaggcacaataaatggattgggtgaaagatgtggaaatgcaaatttaatgtcattaataccaacattttttttaaagaatgatttttcatctcaatttgaaattggagtcaaatcaaaaaatattaaaaatctaactgattgttcaagacttttagatgagattttaaatagaaaacctaaccaacatttaccatatgtaggtgcagcagctttttcacataaagggggattgcatgtatctgctgtacaaaaagatccaaaaacttatgaacacataaatccagaggaagttggtaacactagaaatattgttgtctctgatcaatcaggaaaatcaaatatcatctctagattaaaaagtattaaaattgatattcaagaaaatgatccaaaaattaaaaaattattagatgaagtgaaagacagagaattcattggttatagttatgatggtgccgatgc

SEQ ID NO: 236674 - DNA, 635 bp, Unknown
  Bacterial polypeptide expressing nucleotide sequence isolated from the Sargasso Sea
tggtacatatgaaataatgacacctgaatcaatagggcttaacaaatcttcattagttcttggcaaacattcaggtaaacatgctttttcagaaaaattaaaagaacttggttatgaagttggcgataatgctttgatggaattgtttggtagatttaaagatttagctgataagaaaaaagaaatttttgaggaggatttaatagccttagcagaagatagaacatcatcttatgatgaacacattaaatttgtatctttagaagtaaatgctggttctgttgaaaaagctgaagctaaattaaagatagaaattaacgataaagtggaaaatactaaaattaatggtaacggtcctgttgacgctacatttaatgcaataaaaaaacttactaatactgaatttaaactcaaactttaccaagtaaatgcaattacagcagggactgatgcgcaaggagaggtaactgtcagacttgaagatgataatctatcgtctcaagcaaaaggaagtgatcctgatataattgttgcttcagcaaaagcttatataaatgcattaaacagattgatctttaaaaaaactaaatctattaaagaaaattctgcgagtttaaaaatagaaggggtttaat

SEQ ID NO: 236675 - DNA, 801 bp, Unknown
  Bacterial polypeptide expressing nucleotide sequence isolated from the Sargasso Sea
gaaataagagagattgtcactaaggtttcaaaatcaatacctggtaaaaatcttggaatacatgctcataacgatactgaaaatgctgtcgcaaattctttagctgcagtagaatgtggtgctaggcaaattcaaggtacaataaatgggctaggtgaaaggtgtggcaatgctaatctaatgtcaataatacctacattatctcttaaaaaatctttttcagataaatttgagatcaatattaagagagaaaaacttaattcattaacagaatgttcaagattgttggatgaacttttaaatagaaaaccaaataaaaacttaccttatgttggagcttcggctttttcccacaaaggtggattgcatgtatcggctgtgaagaaagatcccaagacatatgaacatgtagaccccaaggctgttggaaatcatagaaatattattatctcaaatcaagcaggccgttcaaatattttatctaggttagaagcttatggagttaaaattaactcaaaagatacaaaagtacaaaaaatcttagataaagttaaagaaagagaatttagtggttattcatatgatggtgctgacgcttcttttgaattattagctaatcgattattaggtaaagttccagagtatctgaaagtagaaagttatgacgtaaatgtttctaaatcaaaaaagatttctaccaaagctaatgttgtttttttaattgatggaaagaaaattaaatgttcaggtgagggaaatggtccagtaaatgcattagataatgcaataagatctaatttt

SEQ ID NO: 236676 - DNA, 832 bp, Unknown
  Bacterial polypeptide expressing nucleotide sequence isolated from the Sargasso Sea
cggctttaaaaataataaagaatatgcactttcatgcattaaatccgcatatgataacggcgcgagatggattgtgctttgtgatacaaacggaggaactttacctaatgaagtttcagaaattgtagatgaagtagctaaattcgttccaggaaaacatctcggtattcatgctcataatgatacaggaaatgctgttgcaaactctttagcagcagttttatcaggtgccagacaaatacaaggaacaataaatggacttggtgaaagatgtggaaatgcaaatttaatgtctttaattccaacgctacacttaaaaaaaacttattcggaaaattatgaaataaatattaaaaaagaaaatattggtaaattgactcaatgttcaagattacttgacgaaatattaaatagaaaacccaatcaacatttaccttatgttggtgccgccgctttttcacataaaggcggcttgcatgtttctgcagtacaaaaagatccaaaaacatatgagcacataaatcctgaagatgttggaaatgtaagaaatattgttgtttccgatcaatctggaaaatcaaatatagtttcaagattaaaatcaattggaatagattttcagcaagatgatccaaaaataaaaaagcttttagaggaagttaaagatagagaattcatcggttacagttatgatggtgccgatgcatcttttgaactactagcaagaagaataatgggagaaattccaagatacattttaattaaagagtatgatgtttctgtaaaaaaaaacaattcaggagtaattatttcttctgcaaaagctcaatta

SEQ ID NO: 236677 - DNA, 865 bp, Unknown
  Bacterial polypeptide expressing nucleotide sequence isolated from the Sargasso Sea
gaacataattttaagaactcgaaactaacttcttttggtatgactaaaaaatcaggacgaagtgcagaaaatgatactggtttgtcagcaattatgaattcaagcacctctgctgtatgtttggttggcaagtcttgggattttcatgttgatattgctttgggagtaacaaatgaagagaatttaaataacattgctgagagtgctaaacattttgttaaggcaaaaaaagaatttatgtttgatgcagagcatttttttgatggttacaaagcaaatccaaaatatgcagtttcctgtttaaaagctgcttatgatcatggtgcaaggtgggtcatactctgtgatactaatggaggaacacttccacatgaagttacacggatagtcagtgaagttacaaaaataataccaggaaaaaacttaggaattcacgctcataatgatactggtaatgcagttgctaactcattagcagcagtattatctggtgtccgacaaattcaaggtacgataaatggattaggtgagagatgtggaaatgcgaatttgatatcattgataccaacattttttttgaagaaagatttttcatctcaatttgaaattggaataaaatcagaaaacatcaaaaatcttacagattgttccagacttttagatgaaatattaaatagaaaacctaaccaacatttaccttacgtaggtgctgcagctttttcacacaaagggggattacatgtatctgctgtacaaaaagatccaaaaacttatgaacacatcaatccagaagaagttggtaacacaagaaatattgttgtctctgatcaatcaggaaaatcaaatataatttcaagactttaaa

SEQ ID NO: 236678 - DNA, 874 bp, Unknown
  Bacterial polypeptide expressing nucleotide sequence isolated from the Sargasso Sea
aatgatactaaatttttttctaaaccgccaaaattaaaaaaaagtatttttactgctttcggtatgacaaaaaagacaggaagaagtgctgataacgatcctggattagcatctttaatgaatgcaaattctccagcagtatgtgtagttggaaagacttgggattttcatgtgaaagtagcactaggtattaataatgaggaaaatttagaaaatatcaaggaaacagctaaacattttgttaaaaataaaaaagaatttttatttgatgctgaacatttttttgacgggtataaagctaatccaaactatgcattaaattgcttaaaacaagcgtacgactccggagctagatggttggttctttgtgacactaatggaggaactttgccaaacgagattaaggaaattgtatctaaagtatcaaaagaaattccaggaaaaaatcttggtattcatgctcataatgacacagaaaatgcagtagcaaattctttggcagctgtcgaggctggtgtaagacacattcaaggcaccataaatggtttaggcgaaagatgcggtaatgcaaatttaatgtcgataattcctacattatgtttaaaaaaatcatttaaagataagtttgatgttggcattaaagaagaaaaattatcttcgctaacagaatgctcaagacttttagacgaaattctaaatagaaagccaaacaaaaatatggcttatgttggagcctcggccttttcacacaaaggaggtttgcacgtttcagcagtaaaaaaagatcctaagacctatgaacatgttgaccctaaaatggtaggtaatcacagaaacattatcgtctcaaatcaagctggaagatcaaatattt

SEQ ID NO: 236679 - DNA, 834 bp, Unknown
  Bacterial polypeptide expressing nucleotide sequence isolated from the Sargasso Sea
tttccatgtagatttagcgttaggtatttcaaatgatgaaaacttagtaaatattgcggagtctgttaactttttatcaagcagcaagaaggaagttcattttgatgctgaacatttctttgatggctacaaagctaatcctcaatatgcaataaagtgtttaaaagcagcacaagataatggtgcaaagtggatggttctttgtgatactaatggaggcacattaccccatgaagtagaacagattgtctcagaagttgtaaaggatattccaggtgatcaacttggcattcacgcacataatgatactggaaatgctgtagcaaattcattagccgcagttcatgctggggtcagacaagtgcaaggtacgattaacggacttggtgaacgatgtggaaatgctaatttaattactcttcttccaacttttgctttgaagaatgaatatatcgataaatttgatctatccattgatactaaaaatcttggtctgttaactgaactttcaagactgttagatgaaatcttaaatcgtgtacccaatagaacagcaccttatgtaggctcagcagcatttgcgcataaaggaggattgcacgtttcagcagtaaacaaagatcctaagacttatgaacatatcgatcctgaattagtgggaaatcatcgccaaatcatcatttcagaacaatcaggaaaatcaaatattcttgcacgattaaaatctaccaggattcagatcaatgaggatgatcaaacgatacaaaaaattctcgatcgagtgaaagaacgtgaatttattggatattcatacgatggtgctgatgcttcatt

SEQ ID NO: 236680 - DNA, 145 bp, Unknown
  Bacterial polypeptide expressing nucleotide sequence isolated from the Sargasso Sea
atgactgacaaaaatagggtttatatatttgatactacgatgcgagatggtgaacaatcgcctggtgcatccatgagtttagaagaaaaaattcagatagctagagtttttgatgaactaggtgttgatattattgaagctgggt

SEQ ID NO: 236681 - DNA, 913 bp, Unknown
  Bacterial polypeptide expressing nucleotide sequence isolated from the Sargasso Sea
agcgacaacaggatatggctgttcgacacgacgcttcgtgatggtggacagacccgcggtgtggatttctcgaaggccgacaagatggcgattgccgcggctcttgacgagattggcatcgactatatcgagggcggctggccgggggcaaacccgacagatgatgccttcttcgctgccccgccgcagacccgcaacgcccgcatggttgcctttggcatgacccgtcgcggtggccgcagcgctgccaacgacccggggctcaacgcagttcttgatgccgaggtgccggccacctgtcttgttggaaagacatgggattttcacgtcgagaccgcgatcaagaccagccttgaggaaaatctcgacatgatccgcagttccgtggctgccgcggcggacaaaggccgggagtcgatgttcgattgcgaacatttcttcgatggctacaagaccaaccctgactatgcgctggactgcgttcgcgcggcccatgagggcggtgcggcctgggttgtgctgtgcgacaccaatggtggaaccttgccgtccgaggtgttcgagattgtcagcacggtgcgcaaggctgttcccgatgcaaagctgggaattcattgccacaatgatgctggcgtcgcggtcgcgaactcgctggccgccatccgcgccggtgcgcggcaggtgcagggcacgatcaacggccttggtgagcgctgcggcaatgccgacctgatcacgctgatcccgacgcttgtgctgaagcttggctatgagaccagtattgccgaaaaaagcctgccaaaactcatgcagctgtctcggatgctggatgaacgtctgaaccgtgcgccgaacgcgcaagccccctatgttggcgaggctgcctttgcccacaagggtggtcttcacgcct

SEQ ID NO: 236682 - DNA, 802 bp, Unknown
  Bacterial polypeptide expressing nucleotide sequence isolated from the Sargasso Sea
atacctggagaaaatttaggtattcatgcacataatgatactggtaatgctgttgcaaattcaatcgcagccgttttatcaggagcaagacaaatacaagggaccataaatggcttaggggaaagatgtggaaacgctaacttaatgtctattataccaacattccatcttaaaaaagaattgtcagataaatttgaaattagtgttaaagaaaaaaatatcaaacacattactcaatgttcaagattacttgacgagatacttaatagaaaacccaataaacatttaccatatgtaggcgctgcagcgttttcacataaaggtggtttacatgtatctgccgttcaaaaagatcctaaaacttatgagcatataaatccagaagatgtaggtaataacagaaatatagttgtttcggatcagtcaggtaaatcaaatattttatctagacttaaaacaattggaattgaaatcgaagaaaacgatccaaaagttaaaaaacttttagaagaagttaaagacagagaattcattggttacagttatgatggagctgatgcttcttttgaattactagctagaagagtaatgggtgaaattccaagatatatatcaattaaagaatacgacgtttcagtttcaaaaaatgatcaggataaaattatttctagagcgaaagcaaaattagaagtggatggtgaacaaatagtctgtgaaggtgaaggtaacggacctgttcatgccctagacaatgccataagaaaaaatgttactaaattagaaaaatattatgaatattaaa

SEQ ID NO: 236683 - DNA, 325 bp, Unknown
  Bacterial polypeptide expressing nucleotide sequence isolated from the Sargasso Sea
atgtctgaatttgatccaaaaaacaaatatactccttttgaaagaattaatttaaaggacaggaagtggccaaaccaaattattaataatgcgccaacttggtgtagtgttgatttgcgagatggaaatcagtcattaattgagccaatggatactccaaaaaaattaaagctttttaaaactttagtatctattggctttaaggaaatagagattggttttcctgctgcctcagaaacagattataacttttgtcgatatttaattgaaaataaactgatccctaatgatgttacaattcaagttcttactcaagctagagagc

SEQ ID NO: 236684 - DNA, 833 bp, Unknown
  Bacterial polypeptide expressing nucleotide sequence isolated from the Sargasso Sea
gctatttcgtgcattaggtctgcctatgataatggtgctagatgggttattctttgtgatacaaatggaggaacattgcctcatgaggtttcagaaatagtttcagaagtatcaaaacatgttcctggtaaaaatcttggaatacatgctcataatgatacaggcaatgcagttgcaaattcattagcggcagtcttatctggtgttagacaagttcaaggaacaattaatggattaggggaaagatgtggtaatgcaaatcttatgtctattatcccaacaattcatttaaaggaagatttttataaaaaatttgaaactaatattaagtctgaggatacaaaaaaattaactcaatcttcaagattgttagatgaaatccttaatcgcaaaccaaataaacatttaccatacgttggtgctgctgcattttctcataaaggtggactacatgtttccgcggttcaaaaagatccaaaaacttatgaacatatagatccagaacttgtaggaaattcaagaaatattgttgtatctgatcaagcgggtaaatctaatattgtatcaagactcaaatctattggagttaattttcaagagaatgatcccaaaattaaaaaacttttagaagaagttaaagacagagaatttattggttatagttatgatggagcggatgcatcatttgaacttttggcaagaagaattatgggtgaaattccaagatacatattaattaaagaatatgatgttagtgtaaaaaaagatagctcaggtaatatagtatcttcagctaaagccaagttacaagtagataacaagttaattctttg

SEQ ID NO: 236685 - DNA, 757 bp, Unknown
  Bacterial polypeptide expressing nucleotide sequence isolated from the Sargasso Sea
atgaatgaatgctttgtcgtcattgccggtggaggaactgctggccatgtccatccgggtttagctgtagcaaatgctcttgctcgcgacgggcatcgtaaagaagagatcttgttcgtaggtagcgatcggggtatagagcaagatcttgttccttctgaagggtttgaacttgtcacgatctctggagccggaataccccgtcgaaatccgatcgctgctttaagggctatttatttactaattcgagggatagtagaggcacttcgtttgctgggccgaagaaagcctaaagttgttctagcgctaggaggatttgcatgcttcccctgtgcctttgcatcactagtattaaagattccggtgatcgcccatgagcaaaatgcagttcctggattagcaaataaaataattagtcgttgggcgcgcctttgtgccgtttcgtataaaggtacttcccttcgaaatgccgttcataccgggaaccctgtaaggcaatcaatcatcgaagcacggcagattgagccagcctctattcgagaaaagttgaaagtccctcgtgaaaatctcttcatagtcgctactggaggatctttaggagcgaaaacaattaacttggctttgagagacgctatccctctgcttaataaaggtgtcggcttgacggtttatcatataatcgggcgtcgagattgggaagaactcgctcggtccgaagaagaactgagaagctatgttgattatcggcccaattgag

SEQ ID NO: 236686 - DNA, 1368 bp, Unknown
  Bacterial polypeptide expressing nucleotide sequence isolated from the Sargasso Sea
tctacttctttagatgctctaggggttgattatattgaaggcgggtggccaggagccaatccgacagatactgaatttttcaataaagaccagggttttaaaaatgccaaacttactgcttttggtatgactaaaaagtctgaacatagtgcagaaaatgatcctatgttggcatctctaatcaattcaaaaagttcttcagtatgtttatttggcaaatcttgggattttcaagttgatgtagcactaggtattactaatgaacaaaatttagaaaatataagtgagagtgctaagcatatagttagctcaggtaaagagtttatgtttgatgcagagcattgttttgatggttataaagctaatccagaatacacactttcttgtttaaaggcagcttatgatcaaggtgctagatggattgtattatgtgataccaatggaggaactcttccacatgaagtatcaaagatagtttcagagattgcaaaacatattccaggtgaaaatttaggaattcatgcacataatgatacagaaaatgcagttgcaaatagtttagctgcagttcaagcaggagtgaggcaaattcaaggaactataaatggattgggggagagatgtggaaatgcaaatttgatgtctttaattccaactttatttttaaagaaagattttagtgaaaaatttgaaatcaatattaaacgtgaaaatttacaaaatttaactcaatgttctcgtttattagatgaattattaaatagaaaacccaataaacatttaccttatgttggtgcatcagcattttcgcataaaggcggcatgcatgtttcagcagttcaaaaaaaccctaaaacttatgaacacattgatcctgaggaagttggaaattcaagaaatattgttgtgtcagatcaagctggtcaatcaaatataatgtctagactaaaatcaattggtattcaggttgaaaaaaatgatccaaaaattaaaaaacttttagaagaagtaaaggacagagagtttattggttatagttatgatggagctgatgcttcttttgaattgttagctagaagattaatgggtgaaattccaagatatatattaattaatgaatacgatgtttcagttaaaaaggataatacaggtgaaattatttctcatgcaaaagcgaacctagttgttgatggtgaaaaaatattatgtgaaggtcaaggtaacggacctgtaaatgctttagataatgcaattagaaaaaatgtgaataaacttgcaaaatattccgaatatttaaaagatttaaaattagttgataataaagttagaattttaaatacaggaactgaagcagtaactagagttcaa

SEQ ID NO: 236687 - DNA, 985 bp, Unknown
  Bacterial polypeptide expressing nucleotide sequence isolated from the Sargasso Sea
tgaaaaattaggtattcacgcccataatgatacagaaaatgcagttgctaattcacttgctgctgttcgagcaggtgttagacaaattcagggtacaattaacggactgggagaaaggtgcggaaatgctaatttagtatctctaattccttcaataattctgaaaacggactttgatactagtatccccaagaaaaaactatcagccttaaagaaaacctcattacttttagatgaaattttaaaccgcttgccaaatactcagcaagcctatgttggtgaaaatgctttttcacataaaggtggtttacatgtttctgccattaacaaagatcctaaaacttacgaacatgtagatccagaaatagtaggtaatactagaaagattgttatatctgatcagtctggtcgatctaatatcatttctcttctgaatactgttggtattaatccagatgatcattctgacaaactagactttcttctacagaaagttaaagagagagaatttaaaggttatgcatatgatcaggcgattgctagttttgaaatacttgcaagacagactctatttggtattccagaatactttgagttgaaaagatttaaagtcatagacgatagaaggtggaatgcaaaaggggaattagtaactgagtctgaagcaactgtaagaatagaagtggaaaaaaaggaatatatgaatgtggaggttggtaatggacctgttaatgctttagacaaagcattaagaaaatcattaatggatttttatccttctttagaagatttagaactaacagattttaaggtaagaattttatcatcagaaaaaggaacagatgcaatagttcgtgttctcatcgagactaaagaccaaaaaggatctatttggacaacagtaggtgtttccactaacataattgatgcttcttataatgccctaagagagagtttaatttataaattaattaagttctcttga

SEQ ID NO: 236688 - DNA, 1273 bp, Unknown
  Bacterial polypeptide expressing nucleotide sequence isolated from the Sargasso Sea
ggctggcctggagctaacccagtagatacgaaatttttttcaagtccaccaaaaatgtctaaaacattatttactgcttttggaatgacaaaaaaaacaggtaggagtgctgataatgatcctggtatggcctctttaataaatgcgaatactccagctgtgtgtgtagttggtaaatcttgggattttcatgtcaaagtagcattggggattaaaaatgatgaaaatttagaaaatataagagaaacagctaaacattttgtaaaaaacaaaaaagagtttttatttgatgccgaacatttttttgatggtttcaagtctaatccagaatatgcagtaaattgtttaaaagaagcttacgataatggagcgagatgggtagttctttgcgatactaatggaggcactttgccaaatgaagttagagaaattgtatcaaaagtttcaaaaataattcctggaaaaaatcttggaatacatgctcataatgatactgaaaatgctgttgctaattctttagcagctgttgagtgtggagtaagacaaattcagggaactataaatggactgggtgaaaggtgtggaaatgctaacttaatgtcaataatacctagtatatgtttaaaaaaaagttttagcgataagtacgaattaaatattaaaaaagaaaaactgtcttcgttaaccgaatgttctagattgcttgatgaaatacttaatagaaaacctaataaaaatatggcttatgtgggtgcatcagctttctcacacaaaggaggtcttcatgtttcagcggtaaaaaaagatcctaaaacttatgaacatatagatccgaaagaaataggaaatcatagaaatataattatttcaaatcaatcgggccgatcaaatattttatctagacttgaaaagtatggagtcaagattgatgcaaaagaccccaaagttcaaaaaattttggatgaagttaaggagagagaatttagtggttactcttacgatggggcagacgcttcatttgaattgctagctaatagacttttgggtaaagtaccagaatatctaaatgtaaagagttatgatgtaaatgtttctaaatctgaaaaaattcaaactaaggctaaggttgtttttttaatagacggaagggaaattgtatgtcatggagaaggtaatggacctgttaatgcgcttgataatgcaattagatctaactttaaaaaagttacaaaatactacaattttttttctgatttaaaacttctagattata

SEQ ID NO: 236689 - DNA, 970 bp, Unknown
  Bacterial polypeptide expressing nucleotide sequence isolated from the Sargasso Sea
catgaaagacagacacgggctgcttagcgcgccaattggtcgtgtactgctcaacatgagcctccctaacttgattggcattatgaccattctgggttttagcctcgctgacactttttttatcagccagttagggacagaagccttagcggcgatcagttttacctttccggtgaccttaattatttccagcattgcgattgggattggcgctggcgtatcgaccaaccttggcagactgattggctcgggcaatgcccctcgtgccaaagtgtttttgcacgatgcactgctgctgacctttatccttatcgccagtttatccgcccctccagaaagcgtaggagttaaacaaacttcattagttatgggaaaacattctggaagacatgcatttaaagacaaattaactagcttaggttatgttgatgtaactgacgatgttatagaaaatgcttttggtaaatttaaagttttagcagataaaaaaaagcacgtttacgatgaagatattttagctcttgttgatgatagtttaataacagataataaaattaatgcattaagtttaaagtcattaaaagtttttgccggaacaggcgagccacagaaatctgaaatgacattagaagtttttggtgaagttaaaaaagcaactgaaacaggagatggcccagtagatgcaatttttaaatgtattaaaaaattatatccgcatgatgttaatttacaattatatcaagtacatgctgtaaccgaaggaacagatgcgcaagcaacagtaagtgtaagaattgaagaaaatggcaagacaacagttggccaagctgctgatacagatacattggtagcatctgcaaacgcttatattaatgctttaaacaaaatgattataaaaagaaataaaactgcaccagagaatcttagtagtcaaaagaattatgaaaatcaaaaaatgaaaggaatataa

SEQ ID NO: 236690 - DNA, 538 bp, Unknown
  Bacterial polypeptide expressing nucleotide sequence isolated from the Sargasso Sea
atgggttacaccagtgaagactacaacttagacgagatctacaaagcttttgtcactttagctgaccaaaaaggtcgtgtttttgattacgacttagaagcactggtgtttttccagaacttacaggacaccaacgagccctacaaactggagtttttaagctcttccactcatacaggccatgtcgccagcgctactgtgggtatcagcattaatggcgaaacccatacagaagcggccacgggcaatggcccggtggaagcttcattccaggctattcagcgtattgttggcagcgatgtaaaaatggtcgactttaacttgcaagccaaaggaagcggcgaagatgcattgggccaggtggatatcattgccgaacatcagggccgccgttatcacggtgctggtttagccactgacatagtgcgatcttcagtcttagcttatgtacatgtcttaaatttaattgaacgcagcaaacaggtcgacgccgccaagcaggctcgccgtttatctgaatcacagacagagaagtaac

SEQ ID NO: 236691 - DNA, 1349 bp, Unknown
  Bacterial polypeptide expressing nucleotide sequence isolated from the Sargasso Sea
tgatactgggtttatcagcactcatgaattcaacacttctgctgtttgtttggtaggaaagtcttgggattttcatgttgatgtagcattaggaataacaaatgaagaaaatttagataatatttctgagagcgccaaacattttataaaagcaaaaaaagaatttatgtttgatgcagagcatttttttgatggttataaagcaaatccaaaatatgcattgtcttgtataaaggctgcatatgaccaaggcgcaaggtggattattctatgtgatacaaatggaggaacgctccctcatgaagtttcactaattgttaaagaagtctctaaagttgttccaggcaagaacctggggatccatgcacataatgatactggcaatgcagttgcaaattctttagctgcagtattatctggtgttagacaaattcaaggaacaattaatggtttaggtgaaagatgcggtaatgcaaatttaatgtcactaatcccaacattttttttgaaaaaagatttttcatctcaatttgaaatcagtatcaaatcagaaaacattaaaaatttaactgaatgttcaagattattagatgaaattttaaatagaaaacctaatcagcatttaccttatgttggtgctgcagccttttcacataaaggaggattacatgtatctgctgtgcaaaaagatccaaaaacttatgagcatattaatccagaggaagttggtaatactagaaacattgttgtttcagatcaatctggaaagtcaaatatcatatctagattaaaaagtattaaaatttacattgaggagagtgatccaaaaattaaaaaattactagatgaagtaaaagatagggaatttattggttatagctatgatggtgctgatgcctcttttgaattattggctagaagaattattggagaaataccaaggtatatttcaattaatgaatatgacgtttctgttaaaaaaaataagtctggaaaaatagtttcttctgcaaaagctcaattagaagttgatggggaaaaaattatgtgtgaaggagaggggaatggaccagtaaatgcattagataacgctataaggcaaaatgttgataaacttgcaaaatattcacaatatttaaaagatttaaaactagttgattataaagttagaattttaaacacaggtacagaggctgttactagagtgtctattgaaagcacagactctaatggaaaaaattggtttactattggtgtatcaacaaacattatagatgcttctttcaaagcattaattgatagcttagattataaattatttaaggataatgctccagctagtaaataaa

SEQ ID NO: 236692 - DNA, 1186 bp, Unknown
  Bacterial polypeptide expressing nucleotide sequence isolated from the Sargasso Sea
ttaggagttgactatatagaaggaggttggcctggcgctaacccaactgatacagagttttttcaaaaaaaaattaaatttaataattcaattttaactgcatttggtatgacaaaaagagctggtagaagtgctgaaaatgacccaggactttcatctatattaaatagcaatacaccagcagtatgcttagtcggtaaatcttgggatttccatgttgatgttgcattaggtatatcaaatgaagaaaatttagaaaatatttcagaaagtgcaaagctttttgtgaaagaaaaaaaagaatttatgtttgatgcagaacatttttttgatggctttaaaaataataaagaatatgcactttcatgtattaaatcagcatacgataacggagctagatgggttgtgctttgtgatacaaatgggggaaccttgcctaatgaagttacagatattgtaaatgaagtcactaaatcagttccaggaaaaaatattggtattcatgcccataatgatacaggaaatgcagttgcaaattctcttgcagcagttttatctggtgcaagacaaatacaaggaacgattaatgggttaggtgaaagatgtggaaatgcaaatttaatgtctgtaattccaactttgcaattgaaagaaacttattcaaatagttatgaaataaacattaaaaaagaaaatattggtaaattaacacagtgctcaagattacttgatgaaatattaaatagaaaacccaaccaacatttaccttatgttggtgctgctgccttttcgcataaaggtggtttgcatgtttctgctgtacaaaaagatccaaaaacatatgaacacataaaccctgaagatgtaggaaatgtaagaaacattgttgtttctgaccaatctggaaaatcaaatatagtttctagactcaaatctattggaataaattttaaacaagatgatccaaaaataaaaaaacttttagaagaagtaaaagatagagaatttataggttatagctacgatggtgcagatgcatcttttgaactactagcaagaagaataatgggagaaattccaagatatatttcaattaaagaatacgatgtttctgtaaaaaaaaatagttcaggagaaattatttcctctgcgaaagcccagttagaagttgataagaaattaattc

SEQ ID NO: 236693 - DNA, 1032 bp, Unknown
  Bacterial polypeptide expressing nucleotide sequence isolated from the Sargasso Sea
atgaagtagagacaattgttcaagaagtaacaaaatatattccaggtgaaaaactgggcatccatgcgcataatgatacagaaaatgcagttgctaactcactggctgctgtgcgagcaggagtgagacaaattcaaggcacaattaatggattaggagaaaggtgcggaaatgcaaatttagtatctcttattccctcaataattttgaaaacaaaatttgaaactagtattcctaaagaaaaattaacagccttaaagaaaacctcattgcttctagatgaaattttaaatcgtatgccaaatactcaacaagcctatgttggtgaaaatgccttttcacataaaggaggtttgcatgtttcagcaattaataaagaccctaaaacatatgagcatatagacccagaaatagtaggtaatactagaaaagttgtaatttctgatcaatctggccgatctaatatcatatctcttttaaatactgttggtattaacccagatgatcattcagataaattagattttttactccaaaaagtaaaagagagagaattcaagggttacgcttacgatcaggcaattgcgagttttgagatactagctagacaaactcttttcggtattccagagtactttgaattaaaaagatttaaagttattgatgatagaagatggaatgctaaaggagaattagtaactgagtctgaagcaactgtaaggatagaagttgaaaaaaaagaatacatgaatgtagaagtaggaaatggtccagtaaatgctttggacaaagctttaagaaaatcactaatgggcttttatcctactttagaggatttagaattaactgattttaaggtaagaattttatcctcagaaaaaggaacagacgcaatagttcgtgttcttatcgagacgaaggatcaaaaaggatccatttggacaacagtaggtgtctctactaatataattgatgcgtcttataacgcccttagagagagtttaatttataaattaattaagtcctcttgaa

SEQ ID NO: 236694 - DNA, 1417 bp, Unknown
  Bacterial polypeptide expressing nucleotide sequence isolated from the Sargasso Sea
aatggcaaaggtctatctttatgacaccaccttaagggatggcgcacagcaagaaggcatttctctttctttagatgataaattaaagatcacaaaaaaacttgatgaagcaggtatttcatatatagaaggtggatggcctggttctaacccaaaagatgaagaatactttaaagaagttacaaaactcaaattaaataattcaattgttacttcttttggatctactagaaaagtaaattctctggcacataatgaccccaatctactttctttggtagaatcaaaaactaaggttgcaaccattgttggcaaaacatgggatcttcatgtcacagatattctaaatgctaatttggaagaaggcctgaatatgatttcagattcaatcgcttttctgaaatcaaaaggtcaaagggtatttttagatgctgagcattttttcgatgggtttaagtcaaataaagatttcacattacagtgtctaaaaatcgcagctgaatccggagttgaatgcatagtactttgtgatactaatggtggctcaatgccatttgaaattcaacaaattatccaagaagtaagaaacaatatcgatacagagttaggaatccacactcataatgattgtgagctggcagtagcaaatagtttaattgcagtagatgctggtgtaacgcaggtccaaggaacactaaatgggtatggagaacgttgtggtaatgctaatattcttagtattgctgcaaacctttcattaaaattagatattgctgttttaaatcaaacagaattaagccgactaacagaattacataagtttgcaagcgaaattataaatattccacctaataattttcaaccttatgttggagctaatgcatttaaccataagggaggtttacatgcctctgctgttatgaaactcgcagacagttaccaacatatcaaaccagaactagtaggaaataatactggaatgaccatctctgaactatcaggaagaggaaacattacttttaaattgaaggaacttgggttcccatcaagcaaaatatcagaaaatgtggctgaattgtcaaaagaaattaaatttcgagaaagtaagggccaccaatatgaaggtgctgaagcatcttttgaattacttgcccatagaaagataaatgacgttacaccaatgtttgaattaattgactacagagtaattgttgaaagtaaaagttccctcacagaagacaccctaacagaagccactgtcaaattaagaattggttctgaaatcagacatactgcctcagtaggaaatggtcctgtaaatgctatcgatcttgctttaaggaaagcattattacaagactaccctaccctagatagtgttcgtcttacagactataaagttagagttattgatcaa

SEQ ID NO: 236695 - DNA, 1447 bp, Unknown
  Bacterial polypeptide expressing nucleotide sequence isolated from the Sargasso Sea
ttacgagatggagcacaaacagaaggtgtcgatttttctatcgaagataaaaataagattgcaaatgtgttatcagatataggaatagattatgttgagggaggctggcctggggcaaatccagtggataccaaatttttttctagccctcctaaaatgaaaaagacaattttcactgcatttggtatgacaaaaaaaacagggagaagtgcagataacgatcctggattagcttcattaataaacgcaaataccccagcagtgtgtgttgtagggaagtcatgggattttcatgtaaaagcagcattaggtattaaaaatgaggaaaatttagaaaatataagtgaaacaactaaacattttgtaaaaaaaaataaagaattcctatttgatgctgagcacttttttgatggatacaagtcaaatccaaattatgcattagattgtattaagcaagcttatgataatggggctagatggatagttttatgtgatacaaatggaggaaccctacctaatgaaataagagaaattgtctcaaaagtttcaaaaactatacctggaaaaaatcttggaatacacgctcacaatgatactgaaaatgccgttgctaattctttagcagctgtagaatgtggagtaaggcagatacaaggaacaataaacggattaggggaaagatgcggcaatgcaaatttaatgtcaataataccaaatttatgtcttaaaaaaacttttagcgataaatttgaattaaatattaaaaaagaaaaattatcatcactaacagagtgttcaaggttattggatgagatactaaacagaaaaccaaacaaaaatatggcctatgttggtgcttcggcattttcacataaaggcggccttcatgtttctgcagtaaaaaaagacccaaagacttatgagcatatagatccaaaaataattggaaatcatagaaatataataatttcaaatcaatctggtagatcaaatattttatctaggcttgaaaaatatggtgttaaaattgattcaaaagattctaaagttcaaaaaattttagatgaggttaaagatagggaatttagtggttattcttatgatggtgcggacgcatcttttgaacttcttgcaaacagattattaggaaaagttcctgaatatttaaaagtgaagagctatgatgttaatgtttcgaaagaaaataaaatagaaactaaagcaagtgtagtatttttaatagacggcaaagagattgaatgtcatggggagggaaacgggcctgttaatgctttagataatgcgattagatccaattttaaaaaagtaacaaagtattataattatttctcagatttaaagttattagattataaagtaagaattttgaatactggtaccgaagcaactactcgagttttaattgaaagtacagacaaaacaggtg

SEQ ID NO: 236696 - DNA, 665 bp, Unknown
  Bacterial polypeptide expressing nucleotide sequence isolated from the Sargasso Sea
aaaaaatagagaaacctatgaaataatgactccagagagcgttggagtaaaacaaacatctttagtaatgggcaaacattctggaagacatgcttttaaagataagctagttagcttaggctatgtagacgttactgatgatgtgatagaaaatgcatttggtaaatttaaaattttagcagataaaaagaaacatgtttatgatgaagatataattgctctagttgatgatagtttaataattgataacaagattaatgcaattaacttaaaatcattaaaagtatttgctggaacaggcgaaccacaaagagctgaaatgactttagatgtttttggtgaagttaagaaagcatctgaaactggagatggacctgtagatgcaatatttaaatgtataaaaaaactttaccctcacgatgtaaatttacaattataccaagttcatgctgtgacagaaggaactgatgcccaagcaactgttagtgtccgaattgaggaaaatggaaaaacaaccgttggtcaagcagcagatactgatacattagttgcgtcggcaaatgcatacataaatgcattaaataaaatgattatcaaaagagataaaactgcacctggatactctccagagcaaaaaaaagaagaaaaaatgaaaggaatataaa

SEQ ID NO: 236697 - DNA, 445 bp, Unknown
  Bacterial polypeptide expressing nucleotide sequence isolated from the Sargasso Sea
gatgcttcttgatattgtttttagagaaatagaagtaggttttccttctgcttcccaaactgattttgatttcgtaagaacaataataaatgagaatttaatacctgagcatgtaaccattcaagcattaacccaagctagaccagagcttataaaaagaacctatgaggctttagagggtgctcctcgtgcaatagtgcatgtatataattctacttctaccttacaaagacgagttgtttttaatagcgatgaaaaagggataaaaaaaatagctacagatggagcaaaacaagtaagggattatgcagagaaatatcctaacactgactggatgtttgaatacagccccgaaagctttacaggaactgaacttccgtatgccgttgaagtatgtaatgcagttaatgagatatgggagcctaccaaggaaaaaaaactataa

SEQ ID NO: 236698 - DNA, 1096 bp, Unknown
  Bacterial polypeptide expressing nucleotide sequence isolated from the Sargasso Sea
agctaaatggattgtgctttgtgatacaaacggaggaacactccctcatgaggtaactaaaatagttaaagaagtatcagaacatattcctggcgaaaacttaggaatacacgcgcataatgatacaggtaacgctgtggccaattcaattgcagctgtattatctggagcaagacaaattcaaggaacaataaatggtttaggtgaaagatgtggtaacgcaaacttaatgtcaattattccaacatttcatcttaaacaagaattatcagataaatttgaaataaacattaaagaaaaaaatataaaacatataacccaatgttctagattgcttgatgagatattaaatagaaaaccaaacaaacatttaccttatgttggagctgcagcattttctcacaaaggtggtttacacgtatcagcagttcaaaaagatcccaaaacttatgaacatatagatccagaggatgtaggtaataatagaaatattgttgtctcagaccagtcaggtaaatccaatatcctatcaagactaaaaactataggaattgtaattgaagaaaatgatccaaaaataaaaaaattacttgaggaagtaaaagatagagagtttataggctacagttatgatggtgctgatgcatcttttgaattattagctcgaagagttatgggtgaaataccaagatatatttctattaaagaatacgatgtatctgtatcaaaaaataaacaagaacaaattatttctaaagcaaaagctaaattggaagttgatggtgagcaaattatttgtgaaggcgaaggtaatggacctgttcacgcacttgataatgccataagaaaaaatgtaacaaaactagaaaaatattccaaatatttaaaagatcttaaactagttgattataaggttagaattttaaatacaggtacagaagctactactagagtatcgattgagagtactgactcccaaggaaagaattggttcactataggtgtctcaccaaatataattgatgcatcttttaaagctttaatcgatagtcttgattttaagctgttcaaagataaagctcccgcaagcaaatag

SEQ ID NO: 236699 - DNA, 1056 bp, Unknown
  Bacterial polypeptide expressing nucleotide sequence isolated from the Sargasso Sea
aaactcaaggtgtacatttctcaatagatgaaaaaacaaaaattgctcatgcactagacaatttaggcgttgattacattgagggtggctggccaggggcaaatccgtcagatactgaattttttcaaaaaggtttggatttaaagaattctaaattcacagcttttggaatgacaaaaaaatctggacgtagtgctgaaaatgatcctggtttatcagctatcatgaattctaacacggagtcagtttgtttagttggaaagacctgggatttccatgttgatatcgctctagatatttcaaatcaagaaaatttagaaaatataaaagaaacaacaaaacattttgtaaaaaatgataaggaatttatgtttgatgctgagcatttttttgatggatataaatctaatccaaagtatgcattagaatgtattgaagctgcttacgataatggagcaaaatggatagttttgtgcgatacaaatggaggaacacttcctcacgaggtaactaaaattgttaaagaggtatcagaacatattcctggtgagaatttaggtatacatgcacacaatgatactggtaatgcagttgcaaattcaattgcagcagttttgtccggcgcaagacaaattcagggaacaataaatggtttaggtgaaagatgtggaaatgcaaatttaatgtcaataattccaacgtttcatcttaaaaaagaattatctgataaatatgaaattaacatcaaagaaaaaaatattaaacatattacacaatgctcaagactacttgatgaaatattaaatcgaaaacccaacaaacatcttccttatgttggtgctgcagcattttctcataaaggtggtttacatgtatccgctgttcaaaaaaatcctaaaacttacgagcatataaatcctgagaaagtaggtaacaatagaaacatagttgtttcagatcaatcaggtaaatcaaatatcttatccagactaaaaacaataggaattgaaattgaggaaaatgacccaaaagtaaaaaactacttgatgaagtaaa

SEQ ID NO: 236700 - DNA, 469 bp, Unknown
  Bacterial polypeptide expressing nucleotide sequence isolated from the Sargasso Sea
tatgagcttcgatcatcgcaaataccgccgtgcccccgtcatcaatctggcggctcgccagtggcccaaccgggtgctggagcgggcgccgctctggtgcgccgtggatctgcgcgacggcaaccaggcgctggtcgagccgatgacggtggcgcagaagctgcagatgtgggcgctgatggtgcacatcggcttcaagcacatcgaggtgggctttccggccgcctcccagcccgatttcgacttcgtgcgcgagcttatcgatcgcaatctcattccagacgacgtcaccatccaggtgttggtgcaggcgcgcgaagatctgattgcccgtaccttcgaggccctcaagggggccaagcgggccatagtccatgtctataactcggtcaacccgacccagcgcaactatgtgttcaactcaaggcgcgaaggggtcaaggccatcgccgtgcagggggcgcgctgg

SEQ ID NO: 236701 - DNA, 1273 bp, Unknown
  Bacterial polypeptide expressing nucleotide sequence isolated from the Sargasso Sea
tgttgatgtggcattaggaatttcaaacgaagaaaacttagaaaacattaaagaaactacaaaacattttgttaaaaataataaagagtttatgtttgatgctgaacatttttttgatggttataaaactaatccaaagtatgcattagcatgtgttaaagctgcttatgagaatggagctaaatggattgtgctttgtgacacaaatggaggaacacttcctcatgaggtaactagaatagttaaagaagtatcagaacatattcctggtgaaaacttaggaatacacgcgcataatgatacaggtaatgcagtagctaattcaattgcagctgtattatctggagcaagacaaattcaaggaacaataaatggtttaggtgaaagatgtggtaacgcaaacttaatgtcaattattccaacatttcatcttaaaaaagaattatcagataaatttgaaataaacataaaagaaaaaaatataaaacatataactcaatgttctagattacttgatgagatattaaatagaaaaccaaacaaacatttgccttatgttggagctgcagcattttctcacaaaggcggtttacacgtttcagcagttcaaaaggatcccaaaacttatgaacatatagatccagaggatgttggtaataatagaaatattgttgtctcagaccagtcgggcaaatccaatatcctgtcaagactaaaaactattggaattgagattgaggaaaatgatccaaaaataaaaaaattacttgaggaagtaaaagatagagagtttataggctacagttatgatggtgctgatgcatcttttgaattattagctcgaagagttatgggtgaaataccaagatatatttctattaaagaatacgatgtatctgtctcaaaaaataaccaagaacaaattatttctaaagcaaaagcaaaactagaagttgatggagaacaaattatttgcgaaggtgaggggaacggtcctgtccacgcgcttgataatgccataagaaaaaatgtaacaaaactagaaaaatattccaaatatttaaaagatcttaaactagttgattataaggttagaattttaaatacaggtacagaagctactactagagtatctattgagagtactgactcccagggaaagaattggttcactataggtgtctcaccaaacataatcgatgcatcttttaaagctttaatcgatagtcttgattttaagttgttcaaagacaaagctcccgcaagcaaatag

SEQ ID NO: 236702 - DNA, 1561 bp, Unknown
  Bacterial polypeptide expressing nucleotide sequence isolated from the Sargasso Sea
gatggagctcaaacgcaaggagtcgatttttctttggaagataaagaaaaaattgctttagctttagacaatttgggtgtggattacattgaagcaggttggcctggagctaacccaaccgacacagaattttttcaaaagaaatacgattttaaaaattcaaaactaacatcttttggaatgacgaaaaggtctggacgaagtgcagaaaatgatactggtttatctgcaatcatgaactctaatacttctgcagtatgtttagttggtaagtcttgggattttcatgtcgatgttgccttaggaataacaaatgaagaaaatttagataatatttctgagagcgcaaaacattttgttaaagtaaacaaagaattcatgtttgatgcagaacatttttttgatggttataaagcaaatccaaaatatgcactctcatgtattaaagctgcttatgatcaaggtgcaaggtgggtgatattatgtgataccaatggaggcacacttccacatgaagttacacagataattagtgaggttataaaagtagtgccaggaaaaaacttgggaattcatgcacataacgatactggtaatgcggttgctaattcattagcagcagtattgtctggtgttcgacaaattcaaggtacaataaatggattaggtgaaagatgtggaaatgcaaatttaatgtcattaataccaacattttttttaaagaaagatttttcatctcaatttgaaattggaataaaatcaaaaaacattaaaaatttaactgattgttcaagacttttagatgaaattttaaatagaaaacctaaccaacatttaccatatgtgggcgcagcagctttttcacataaagggggattgcatgtatctgctgtacaaaaagatccaaaaacttatgaacacatcaatccagaggaagttggtaacaccagaaatattgttgtctctgatcaatcaggaaaatcaaatattatatctagattaaaaagtatcaaaattgatattcaagaaaatgatccaaaaattaaaaaattattagatgaagtgaaagacagagaattcatcggttatagttatgatggtgctgatgcatcatttgaattgttagctagaagaattattggtgaaataccaagatatatatctattaatgaatatgatgtttcagtaaaaaaaaataattctggcgaaatagtttcctctgcaaaagctcaattagaagttgatggagaaaaaattatttgtgtaggagaggggaatggtccagtaaatgctttagacaatgccatcagacaaaacgttgatagattggcaaaatattcaaaatatttaaaagatttaaaactggtagattataaagtaagaattttaaatacaggaactgaggctgttacaagagtttcaattgaaagcacagactctcaaggaaaaaattggtttactattggtgtctcaacaaacattatcgaagcttcgttcaaagcattaattgatagtttggattataaattatttaaagataatgcgcctgcaagtaaataaa

SEQ ID NO: 236703 - DNA, 706 bp, Unknown
  Bacterial polypeptide expressing nucleotide sequence isolated from the Sargasso Sea
aatgagtaaagaacaactttatatctttgacactacattacgtgatggagcgcaaactcaaggtattgatttttctattgatgataaagagaaaatttcatcagcattagatttgctaggggttgattatgttgaaggaggttggcctggtgccaatccaacagatacagaattttttaataaagatcataattttaaatcagctaaattaactgcatttgggatgacaaaaaagtcagagcatagtgcagaaaatgacccaatgttatcctcattaattaattctaaaagctcatcagtttgtttatttggtaaatcatgggatttccaagtgaaagtagcattaggaattacgaatgaccaaaatttaattaatataagtgaaagtacaaagcatattgttaaatcaggtaaagaatttatgtttgatgctgagcatttctttgatggatataaatccaatccagaatatgcattgtcttgtttgaaagctgcatatgataatggagcaagatggatagttttatgtgatactaatggtggaacattaccacatgaaatctcaagaattgttactgaagttactaaacatatcccaggaaaaaatttaggaatacacgctcataatgatactgagaatgctgttgctaatagtctcgctgcagttcaagcaggagtaagacaagttcaaggaactataaatgga

SEQ ID NO: 236704 - DNA, 1062 bp, Unknown
  Bacterial polypeptide expressing nucleotide sequence isolated from the Sargasso Sea
gctgaaaacgatactggattgtcggcattaatgaattcaaatacacctgcagtatgtttagttggaaaggcatgggattttcatgttgatgtagcattaggtattagtaatgatgaaaatctagaaaatatcagtgaaagtgcaaaacattttgttaaagcaaaaaaagaatttatgtttgatgcagaacattttttcgatggttacaaggcaaatcctaaatatgctatttcatgcatcaaagctgcttatgaccaaggagctagatgggtgatattatgtgatactaatggaggaacccttcctcatgaagtatcaaaaatagtttctgatgtgtcaaaagttgttccaggaaaaaatctaggtattcacgcacataacgatacaggtaatgcagttgcaaattctttagcagcagttttgtcaggtgttcgtcaaatacaaggcacaattaatggtctaggggaaagatgtggtaatgcaaatttgatgtcactaataccaacatttttcttaaaaaaagatttttcttcaaaatttgaaattggaattaaatcaaacaatattaaaaatttaactgaatgttcaagactattagatgaaattttaaatagaaaacctaatcaacatttaccctatgtaggagcagcagcattttctcataaaggaggactacatgtttctgctgtccaaaaggatccaaaaacatatgaacatataaatcctgaagatgttggtaattcaagaaatattgtggtttcagaccaatctggtaaatcaaatatagtttcaagattaaaaagtataaaaattgacattaaagaaaacgatccaaaaataaaaaaattattagaagaagtgaaagatagagagtttattggttatagctatgatggagctgacgcatcatttgagctgttagctagaagaataattggagaaataccaagatatatatcgattaatgaatatgacgtttcagtaaaaaaaaataaatctggagaaattatttcatctgcaaaagctcaattagaagtagacggagaaaagattatttgtgaa

SEQ ID NO: 236705 - DNA, 1479 bp, Unknown
  Bacterial polypeptide expressing nucleotide sequence isolated from the Sargasso Sea
attatatagagggaggttggccaggtgccaatccatctgatacagaattttttcaaaagggtttggatttaaaaaactctacctttactgcttttggaatgacaaaaaaagttggacgaagtgcagaaaatgatccaggcttgtcagcaattttaaattctaatactaaatctgtttgtttagtaggaaagtcatgggattttcatgttgatgtcgcattaggaataactaatgaggaaaatttagaaaacattaaagagacaacaaaacattttgtaaaaaataataaagagttcatgtttgatgcagaacatttttttgatggctataaatcaaatccaaaatatgctttagcttgtattaaagctgcctacgacaatggagctaagtggatagttctttgtgatactaatggtggaacacttcctcatgaagtaacagaaatagtaaaagaagtttcaaaacatatccctggtgaaaatttaggtattcacgcacacaacgatacaggtaatgctgttgcaaattcaattgcagctgttttatcgggagcaagacaaatacaaggtactattaatggcttgggtgaaagatgtggtaacgctaatttaatgtcaattatcccaacttttcatcttaaaaaagaattatcagacaaatttgaaataagtattaaagaaaaaaatattaaacacattacacaatgttcaagactacttgatgaaatattaaatagaaaaccgaataaacatcttccatatgtgggtgccgcagcattttcacataaaggtggtttacatgtatctgcagttcaaaaagatcctaaaacttatgagcatataaatcctgaggatgttggtaacaacagaaatatagttgtttctgaccaatcagggaaatcaaatattttatctaggcttaaaacaattggaatagaaattgaagaaaatgatccaaaagttaaaaaacttttggaagaagtaaaagatagagagttcataggttacagttatgatggtgctgatgcttcatttgagttacttgctagaagagtaatgggagaaattccaagatatatctcaattaaagaatatgacgtttcagtttcaaaaaacagtcaggataaaataatttcaagagcaaaagcaaaactggaagtagacggtgaacaaatagtctgtgaaggtgagggtaatggacctgttcacgctttagacaacgctataagaaaaaatgtcactaagttagaaaaatattctgaatatttaaaagatttaaaactcgttgattacaaagttagaattttaaatacaggaactgaagctaccacgagagtatcgattgaaagtactgactctcaaggaaaaaattggtttactataggagtgtcgccaaacataattgatgcttcatttaaagctctaatcgatagtttagatttcaaattatttaaggataaagctcctgcaagtaaataaa

SEQ ID NO: 236706 - DNA, 763 bp, Unknown
  Bacterial polypeptide expressing nucleotide sequence isolated from the Sargasso Sea
atgagtaaagaacaactttatatatttgacacgacattacgtgatggtgcacaaacccaaggtgtagatttttcaattgatgataaagaaaaaatctcatcagccttagataaattgggtgtggattatgttgagggtggatggccaggagcaaatccaaccgatactgagtttttcaataaagatcataacttcaaatcaacgaaattaaccgcatttggaatgactaaaaaatcagagcatagtgcagaaaatgaccccatgctctcatctttaataaattcaaaaagcacttctgtttgtctgtttggaaaatcatgggattttcaagtagatgttgcattaggaataagtaaggagcagaatttaatgaatatcagtgaaagcacaaaacacatcgttaaatctggaaaagagttcatgtttgatgctgaacatttttttgatggatataaagctaatccagaatatgcaatagcatgtttaaaagcagcctttgataatggtgctagatggataatattatgtgatacaaatgggggcacacttcctcatgaagtaaccaaaattgttcatgaagtaactaaacatattccaggagaaaatttaggaatacatgctcataatgatactgaaaatgcagtagcaaatagtcttgctgcagttcaagcaggggttagacaagttcaaggaactataaatggactaggggaaagatgtggaaatgcaaatttaatgtcattaattccttcatttttttaaa

SEQ ID NO: 236707 - DNA, 783 bp, Unknown
  Bacterial polypeptide expressing nucleotide sequence isolated from the Sargasso Sea
aatgagcaaagaacaactttatatttttgatacaacactacgtgatggagcacaaacacaaggtgtagatttttctattgatgataaagagaaaatttcatctgcattagacttgttaggtgtcgattatgtagagggaggttggccaggtgccaatccaacagatacagaattttttaataaagatcacaattttaaatcaacaaaattaacagcatttgggatgacaaaaaaatcagaacatagtgctgaaaatgatccaatgttatcatcattaattaattcaaaaagctcatctgtttgcttatttggtaaatcatgggatttccaagtgaaagttgccttaggaattactaacgatgaaaatttaacaaacataagcgaaagtactaagcatattgttaaatcaggtaaagaattcatgtttgatgctgaacatttctttgatggatataaatctaatccagaatatgcattgtcttgtttgaaagtttcatatgataatggagcaagatggattgttttatgtgatactaatggtggaacacttccacatgaaatttataaaattgttactgaagtaagcaaacatattccaggtgaaaatttaggaatacacgctcataatgatactgaaaatgcggtagccaatagtctagctgcagttcaagcaggagcaagacaagttcaaggaactataaatggattaggagaaagatgtggtaatgctaatttgatgtcattaataccatcattttttttaaaaaaagatttttctgataa

SEQ ID NO: 236708 - DNA, 821 bp, Unknown
  Bacterial polypeptide expressing nucleotide sequence isolated from the Sargasso Sea
aatgagtaaagaaaaaatatatatatttgacactacattaagagatggtgctcaaacgcaaggagtagatttctctattgatgataagttaaaaattgcagaagctcttggaagcttaggagttgattatatagaagggggctggcctggagcgaatcctactgatacagaattttttcaaaaaaaaattaatattaaaagctctatattaactgcttttggtatgacaaaaaaaacaggtagaagcgcagaaaatgatcctggcctatcagctttgttaaactctaaagcctcagcaatttgtcttgttggaaaatcttgggattttcatgttgatgtagcattaggaatttcaaatgaagaaaatctagaaaacataagtgaaagtgcaaaacattttgtaaaagaaaagaaagaattcatgtttgatgcagaacatttctttgatggatttaagaacaataaagaatatgcaatttcttgtataaaatctgcatacgaaaatggagcgagatggatagttttatgcgatactaatggaggaacatttccagatgaagttgaaaaaattgtaactgaagtaacaaaacatgttcctggaaaaaatctaggaattcatgcacataacgatacaggaaatgcagtagctaactcattagctgctgttttggcaggtgcaaggcaaatacaaggaactattaatggattaggcgaaagatgtggtaatgcaaatttaatgtccatcatacccacaattcatctaaaagataatttttcaaaaaaatttaccacaaatataaaatctgaaaatataagcaaat

SEQ ID NO: 236709 - DNA, 290 bp, Unknown
  Bacterial polypeptide expressing nucleotide sequence isolated from the Sargasso Sea
tatggctgacaaagataaagtattcattttcgatacaacgatgagagatggtgagcaatcacctggagcttcaatgagtgttgaagaaaaaattcagatctcaagagtttttgatgaaatgggtattgatattatagaagcaggttttccaatatcatctcctggtgattttgaggctgtaagcgccataagcaaaagtgttaaaaattccatcccttgtggtttggcaagagcaactaaaaaagacatagatgcttgtcacgagtctttgaaatttgcaaaaagattta

SEQ ID NO: 236710 - DNA, 214 bp, Unknown
  Bacterial polypeptide expressing nucleotide sequence isolated from the Sargasso Sea
tatgagtgacaaagaaaaagtttatatctttgatacaacaatgagagacggtgagcagtcacctggcgcttcaatgagtgtcgaagaaaaaattcaaatttcaagggtatttgatgagatgggaattgatatcattgaggcaggatttcctatttcatctcctggtgactttgaagcggtttcagaaataagtaaaagcgtcaagaattctata

SEQ ID NO: 236711 - DNA, 436 bp, Unknown
  Bacterial polypeptide expressing nucleotide sequence isolated from the Sargasso Sea
ttgactaaaataattaataaatcagtttctaaatacaaaccttttgagcctatcaatttggagaatagagcttggcctaccaaaagtataaaagaagctcctatgtggtgtagtgttgatttaagagacggtaaccaagctttgatcgagcctatgggagaggaaagaaagttaagaatgtttaaaatgcttcttgagataggttttaaagagattgaggttggctttccttctgcttctcagacagattttgattttgtaagaaaaattattaatgagaatttaatacctgaagatgtatctattcaagcactaactcaagcaagacctgaactaatcaaaagaacttttgaagctttagaaggttctccaagagcaatagttcatgtttataactctacttctactttacaaagaagagtagtgttcaaaagcg

SEQ ID NO: 236712 - DNA, 250 bp, Unknown
  Bacterial polypeptide expressing nucleotide sequence isolated from the Sargasso Sea
tatgagtgacaaaaatagaattataatttttgatacaacaatgcgtgatggtgaacaatcaccaggcgcaacaatgagcttagaagaaaaaattcaaatagctagatgttttgatgaattaggaattgacgtcatagaagcaggttttcctatagcttcgcctggtgattttgaagcagttactgagataagtaaagttttaaaaaaatctattccagcggggctatcacgtgctacaaaaaagatatag

SEQ ID NO: 236713 - DNA, 361 bp, Unknown
  Bacterial polypeptide expressing nucleotide sequence isolated from the Sargasso Sea
atgagtgataaaaacagaattataatctttgatacaactatgcgtgacggagaacaatctcctggcgcgtcaatgagtttagaggaaaaactccaaatctctcgagtgtttgatgaacttggtgttgatataattgaagcaggttttcctatagcttctccaggtgattatgaggcagtaacagaaattagcaagacattaaaaaggtcaattccagctggattagctagagcaactaaaaaagatatagatgcttgccatgaatcattaagacatgccaaaaattttagaatacacacttttatttctactagtccgcttcatatgaagcataagttaaataaatctccagaggaagtat

SEQ ID NO: 236714 - DNA, 802 bp, Unknown
  Bacterial polypeptide expressing nucleotide sequence isolated from the Sargasso Sea
gtattttggttttgaaagtgatatagatacagaacagctttatccttcaagtaaactactttcacaaattactggtatagatgttcagcccaacaaggctattgtaggggcgaatgccttcgctcatgaggctggaattcaccaacatggtgttcttaagaatcccttgacttatgaaattatgacacctcagtcagttggtattaagtcaagcaacctagtaatgggtaagcattcaggtcgttttgctcttggtcagaggatacaggaacttggatttgatctaaatgacattgatcttaacaatattttcaaggaatttaaacgtcttgctgacctaaaaaaacaggtttttgatgaagatattgaagctctggttacccacggtataggcagaaactcagataaatttattttgaaggatttaatcgttacgtctggaacaaatgcgattccaacggcaacaattactatgaaaattgatgacaaggtttttaaaaaagcaggttttggagacggaccggtagatgcagcactgaatacaataaaggaaattacaggaattgattgtacacttacatcatatgttgtcaaagccataacgggcggaactgacgcacaaggtgaggtaagcgtcggtgtagaaaaagatggtatacgaattacaggccgtggagcacatacggatatagtcgttgccagcgctctcgcgttcttaaatgctcttaacagactggaaattcgcacaaagggcctaagccttgccaccccttcacaaaaagctgccctaggcggagtttaa

SEQ ID NO: 236715 - DNA, 770 bp, Unknown
  Bacterial polypeptide expressing nucleotide sequence isolated from the Sargasso Sea
aatgagtaaagaacgattatacatatttgatacaacattgagagatggggctcaaacccaaggtgtgcatttttcaattgatgaaaaaacaaaaattgcgcatgctttagatgatcttggtgtagattatatagagggaggttggccaggggctaatccatctgatacagaattttttcaaaagggtttagatttaaaaaactctaccttcactgcttttggaatgacaaagaaagctggacgaagtgcagaaaatgatccaggtttgtcagcaattttaaattcaaataccaaatctgtttgtttagtgggaaagtcatgggacttccatgttgatgtcgcattgggaataaccaatgaagaaaatttagaaaacattaaagagacaacaaaacattttgtaaaaaacaacaaagagttcatgtttgatgcagaacacttctttgatggctacaaagcaaatccaaaatacgctttagcttgcattaaagctgcttatgataatggagctaagtgggtagttctttgtgatactaatggtggaacacttcctcatgaagttacaaaaatagttaaagaagtttcagaacatattcctggtgaaaacttaggtattcacgcacataatgatactggtaatgcagttgcaaattcaatcgcagccgttttatcaggagcaagacaaatacaaggaactataaatggtttaggtgaaagatgtggtaacgctaacttaatgtcaattatcccaacttttcatcttaaaaaag

SEQ ID NO: 236716 - DNA, 343 bp, Unknown
  Bacterial polypeptide expressing nucleotide sequence isolated from the Sargasso Sea
gagtttagaggaaaaattacaaatttctagggttttcgatgaattaggagttgatgtaattgaagctggatttcctattgcgtcaccaggagattttgaagcagttacagagataagtaaaacattaaaacgttcaattcctgcaggtttagctagagctagaaaaaaagatattgatgcttgccatcaggctttaaagtatgccaaaaattttaggatccacacttttatttctacaagcccattacacatgaagcacaaattaaataagtcaccagaggaggttttagagtcaattaaagagagtgtgaaatacgctagaaattttaccgacgacattgaa

SEQ ID NO: 236717 - DNA, 220 bp, Unknown
  Bacterial polypeptide expressing nucleotide sequence isolated from the Sargasso Sea
gctgaccatctttgacaccaccttgcgcgatggagagcaatctcccggcgccacgctcaccggtgatgaaaaggtggagattggcaagcagctcgcgcgcctcggcgtcgacgtgtgcgaggccggcttcccaattgcctctcagggcgactttgaagcggtgaaacgcgttgcggagaccgcgggccagatgacagagggtcgtctcagcggccagtga

SEQ ID NO: 236718 - DNA, 283 bp, Unknown
  Bacterial polypeptide expressing nucleotide sequence isolated from the Sargasso Sea
catgtatgatgcttgggctaaaaataattttatgactgacaacaatagagtttttatttttgatactactatgcgcgatggtgaacaatcacctggcgcgtctatgagtttggaagaaaaaattcaaattgccagagtattcgatgaacttggtatcgacataattgaagctgggtttccaattgcatctcctggcgattttgaagcagtaaccgaggtaagtaaaatactaaaaaattctattcctgcaggactatcaagacattccaagaaagacattgat

SEQ ID NO: 236719 - DNA, 91 bp, Unknown
  Bacterial polypeptide expressing nucleotide sequence isolated from the Sargasso Sea
gatgcaagataaactaattatttttgatacaactttacgtgatggggaacaaagccctggagcgtcaatgaccaaagatgaaaaacttcgt

SEQ ID NO: 236720 - DNA, 306 bp, Unknown
  Bacterial polypeptide expressing nucleotide sequence isolated from the Sargasso Sea
tatgccagataataacagagtttatatttttgataccactatgcgtgatggcgaacaatcgcctggtgcctcaatgagtttggaagaaaaaattcaaattgcaagagtatttgatgagcttggaattgacataattgaagcaggttttcctatagcttctcctggtgattttgaagcagtaactgaagtcagtaaaatattaaaaaattctataccagcaggactatcaagacattctaagaaagatattgatagatgttatgaagctttaaagcatgcacctagatttaggattcatacatttat

SEQ ID NO: 236721 - DNA, 281 bp, Unknown
  Bacterial polypeptide expressing nucleotide sequence isolated from the Sargasso Sea
tatgagcaataaagataaggtatttatatttgatacgacaatgagagatggtgaacaatcacctggagcatcaatgagcgttgaggaaaaaattcaaatttctagagtttttgatgaaatgggaattgatattattgaagctggatttccgatatcttcacctggagactttgaggctgtatcagcaatcagcaaaggtttaaaaaattctatcccttgcggtttatcaagagctttaaaaaaagatattgatgcgtgtcacgaatcgttaaagtttgcta

SEQ ID NO: 236722 - DNA, 424 bp, Unknown
  Bacterial polypeptide expressing nucleotide sequence isolated from the Sargasso Sea
aatgactaaaataattaatgattcagcttctaaatatcgaccattcaagtctatagatatagacaatcgaacttggccttcaaatacaattactcaatcacctatgtggtgcagtgtagacttaagggatggtaatcaagctcttatagagcccatgggtgaagaaagaaagcttaggatgtttagtctcttaattgaaattggtttcaaagagattgaagtgggtttcccctctgcgtctcaaacagacttcgattttgtcagaaaaattattacggaaaatcttataccaaatgatgtaactatccaggctttaactcaagccaggcctgagttaattaagaaaacttttgaggctctagagggagcaaaaaaggctattgttcatgtctacaattctacttccactttacagcgtaaagtt

SEQ ID NO: 236723 - DNA, 232 bp, Unknown
  Bacterial polypeptide expressing nucleotide sequence isolated from the Sargasso Sea
tatgagcgagagagtatatatttttgatacaactttaagggatggagagcagtcccccggtgcatctatgaatttagatgaaaaaatgcaaattgctcaaatattagaggaaatggaagtagatattattgaggcaggttttccaatagcatctaatggtgactttgaggctgtttcagaaataagtaaaaatattaaaaactcaacaatagcagggtttatcaagagctaa

SEQ ID NO: 236724 - DNA, 185 bp, Unknown
  Bacterial polypeptide expressing nucleotide sequence isolated from the Sargasso Sea
tatgagcgataaagatagagtctttatattcgatacaactatgcgtgatggtgagcaatcaccaggtgcatctatgagtttggaagaaaaaattcaaattgccagagtatttgatgagttgggaattgatattattgaagcaggttttccaattgcatcacctggagattttgaagctgtttctg

SEQ ID NO: 236725 - DNA, 601 bp, Unknown
  Bacterial polypeptide expressing nucleotide sequence isolated from the Sargasso Sea
gggaaacttagtggaagaagtgcagtaagagcaagattagaagaaatgggttacgacttgagcagggaagatttaaatgatgctttttctcgttttaaggatttagctgacaggaaaagagaaattactgatagagacttagaagcaattgttagtgaacaagtacagcttccagaagctaaatttcaattaagtcttgtgcaagtaagttgcggtaacgcatctaaacctaccgccaccataacgcttttaaacactgaagataatactgaggatactagtgtatcaatagggactggacctgttgatgctgtatgcgaggctttaaataaattagctagagtccctaatgaattaattgaattttctgtaaagtcggtaacagaaggtattgatgctcttggcgaagtcacaataagaataagaagggataataagatatactctggtcattctgctgatactgatgttgttgttgccgccgcgaatgcatacgttaatgccttaaacaggcttgtattttccgagaaaaaaagttcaattcacccgcaatttgataatttagaaaattcagagaaaacatttctatctaatccttaaa

SEQ ID NO: 236726 - DNA, 736 bp, Unknown
  Bacterial polypeptide expressing nucleotide sequence isolated from the Sargasso Sea
aatgagtaaagaaagaatacatatttttgatacgactcttagagatggcgctcaaacgcaaggtgttgatttttcaatagatgataaactgaaaatcgcaaatgcattagatgagttaggagttgattatatagaaggtggatggccaggagctaatcctacagacactgaattttttcaaaagaagttaaaattaaaaaactcagtgttaactgcttttggtatgactaaaagatcaggaagaagcgcagataatgatcccgggctttcttcaatcctcaacagtaatacagcggcggtatgtttagttggtaagtcatgggattttcatgttgatgtagcattagaaatatctaatgaagaaaacttagataatattgctgaaagtgcaaaattatttgttaaagaaaaaagagagttcatgtttgatgcagaacatttttttgatggcttcaaaaataataaagaatatgcactttcttgcatcaaatcagcatatgacaacggtgcacgatggattgtgctttgtgatacaaatggaggtactttaccaaatgaagtatcagaaattgtaggtgaagtaagtaaagtcattccaggaaaaaatttaggtattcatgcacataatgatactggaaatgcagttgcaaattctttagcagcaatacattcaggggcaagacagatccagggaacaataaatggattaggggagcgatgcggtaatgctaactta

SEQ ID NO: 236727 - DNA, 298 bp, Unknown
  Bacterial polypeptide expressing nucleotide sequence isolated from the Sargasso Sea
atggcggataaaaatagaattataatttttgacactacaatgcgggatggagaacagtctccaggtgcatcgatgagtttagaagaaaagttgcagatttcaagagtgtttgatgaattaggtgtagatgtaattgaggcaggttttccaatcgcctctccaggagatttcgaagcagtcacagaaatcagcaaaactttaaaacgttcaataccagctggattagctagagctacaaaaaaagatattgatgcttgccatcaagccttaaaacatgcaaaaaattttagaattcata

SEQ ID NO: 236728 - DNA, 112 bp, Unknown
  Bacterial polypeptide expressing nucleotide sequence isolated from the Sargasso Sea
aatggaaaaaatccagatatttgacacaacccttcgtgacggtgagcaatcaccaggatgttccatgtcagcaggtgaaaaactgcttcttgcccgtcaattggaaaaacta

SEQ ID NO: 236729 - DNA, 808 bp, Unknown
  Bacterial polypeptide expressing nucleotide sequence isolated from the Sargasso Sea
atgaccaaagataaaatttttatatttgatactaccctaagagatggagcacaaacagaaggtgtagacttttcaattgaagataaaaacaaaatggctaatgttctatcggatatcggcatagattacattgaaggaggttggcctggagcaaatccaattgatactaagtttttttctaatcctccaaaaactaataaaagtatttttactgcttttgggatgacaaaaaaagcaggaagaagtgcagataacgatccaggcttagcttcattaattaatgcaaattctcctgcagtatgtgttgttggaaaaacttgggattttcatgtgaaagtagctttgggaattaaaaatgaggaaaatttagaaaatatcaaagagacagcaaaacactttgttaaaaataaaaaagaatttttatttgatgctgaacatttttttgatggatataaagctaatcctagttatgcattagattgtttaaaacaagcatttgactctggggctagatggttagttctctgtgatactaacggaggcactttaccaaatgagattagagaaatagtttcaaaagtttcaaaaataattccaggaaaaaatcttggtattcatgctcataatgacacggaaaatgctgtggcaaattctttagcagctgtagaggcgggcgcaagacaaattcaaggaactatcaatggattaggtgaaagatgtggaaatgctaatttaatgtcaattataccaacattgactttaaaaaaatcattttgtgatagatatgaaattaatattaaaaaagata

SEQ ID NO: 236730 - DNA, 378 bp, Unknown
  Bacterial polypeptide expressing nucleotide sequence isolated from the Sargasso Sea
aatggaagataaaaacagaatcataatatttgatacgactatgcgagatggagaacaatctcctggcgcatctatgagtcttgaggaaaaaatacaaatctcaagagtttttgacgaactaggtattgatattatcgaagcaggctttcccattgcttctcctggagattttgaagcagtaacggcaataagtaaaattttaaaaaaatctataccagcaggactagcgagacacacaaaaaaagatattgatgcttgtcaccaagctttaaaatcagcaaaaagatttagaattcatacttttatttctacaagctctttacatatgaaacataagttaaataaaactcctgaacaggtgattgaatcaatcaaaga

SEQ ID NO: 236731 - DNA, 226 bp, Unknown
  Bacterial polypeptide expressing nucleotide sequence isolated from the Sargasso Sea
atgagcaatgaaactgctaaggaaaaagtggttatttttgacactactttgcgagatggtgagcaatcacccggaatctcacttgacgtgggggaaaaacttgaaattgcaggacaacttgctcgactgggagtcgattacatcgaagcaggttttcccatagcaagccaaggtgactttgacgctgtccacgcaatagcatctaatgtaagcggaccagtaattg

SEQ ID NO: 236732 - DNA, 316 bp, Unknown
  Bacterial polypeptide expressing nucleotide sequence isolated from the Sargasso Sea
atgtcagataaaaatagagtttatattttcgatactacaatgcgtgatggcgaacaatcgcctggcgcatcaatgagtttggaagaaaaaatccaaattgctagagtatttgatgaacttggaattgatattatagaagctggatttccaattgcatcacctggtgattttgaagcagtaacagaagtaagtaaaatcttaaaaaattctattcctgcaggtctttctagacattcaaaaaaagacatagatagatgttacgaagcattaaaacatgcaccaagatttagaattcacacttttatttcaactagcc

SEQ ID NO: 236733 - DNA, 360 bp, Unknown
  Bacterial polypeptide expressing nucleotide sequence isolated from the Sargasso Sea
tatgagtgacaaaaatagaattataattttcgatacaaccatgcgtgatggggaacaatctcctggagcgacgatgagtttagaagaaaaaattcaaatagctagatgcttcgatgaccttggaatagacgtaattgaggctggatttccaattgcatctcctggtgactttgaggcagttacagagataagcaaagttttaaaaaagtctattccagcaggactgtcaagagctactaaaaaagatatagatgcgtgcaaagattcattaagtcatgccaaaagatttagaattcatacttttatttcaacaagtccacttcacatgaaacataaacttaataaatctccagaggaagt

SEQ ID NO: 236734 - DNA, 221 bp, Unknown
  Bacterial polypeptide expressing nucleotide sequence isolated from the Sargasso Sea
tatgagcaataaagatagagtctttatatttgatactactatgcgagatggtgaacaatcaccaggggcatcaatgagtttggaagaaaaaatccaaattgcaagggtgtttgatgaattaggtatcgatattattgaagcaggttttcctattgcttcacctggagattttgaggctgtgtcagaggtaagtaaaattttaaaaaattctattcctgcag

SEQ ID NO: 236735 - DNA, 323 bp, Unknown
  Bacterial polypeptide expressing nucleotide sequence isolated from the Sargasso Sea
aatgactgataataacagagtatacatatttgatactacaatgcgtgacggagagcagtctcctggcgcatcgatgagtttggaagaaaaaatccaaatagccagagtatttgatgaacttggaatagatattattgaagctggatttccaattgcatctccaggagattttgaagctgtaaccgaagtcagtaaaatattaaaaaaatcaatacctgcaggtttagcaagacattcaaaaaaagacattgatagatgctatgaggctcttaaacatgctccaagatttagaattcatacttttatttccacaagtcctttac

SEQ ID NO: 236736 - DNA, 253 bp, Unknown
  Bacterial polypeptide expressing nucleotide sequence isolated from the Sargasso Sea
atgagcaataaagatagagtctttatatttgatactactatgcgtgatggtgagcaatcgcctggcgcatctatgagtttagaagaaaaaattcagatcgctagagtgtttgatgaattaggtatcgatataattgaagcaggttttcctatagcttcaccaggggattttgaagctgtttcagaagtaagtaaaattttaaaaaattccattcctgcaggactttcaagacattcagtgaaagatatgatag

SEQ ID NO: 236737 - DNA, 141 bp, Unknown
  Bacterial polypeptide expressing nucleotide sequence isolated from the Sargasso Sea
aatgcaaaaagatactgttaagatttttgatactactcttagagatggtgaacaagttcctggatgtaaacttgaaacaaagcaaaaacttgtaatagctgaaaggctagattatcttggtgttgatataattgaagctgg

SEQ ID NO: 236738 - DNA, 349 bp, Unknown
  Bacterial polypeptide expressing nucleotide sequence isolated from the Sargasso Sea
tatgagcaataaagatagagtctttatatttgataccactatgcgagatggtgagcaatcaccaggggcatcaatgagtttggaagaaaaaatccaaattgcaagggtgtttgatgaattaggtatcgatattattgaagcaggttttcctattgcttcacctggagattttgaggctgtatcagaggtaagtaaaattttaaaaaattctattcctgcaggactttcaagacattctgtcaaagatatcgacagagcatacgaagctttaaaacatgcaccaaggtttagaatacacacttttatttctacaagtcctttacatatgaaacataaaattaatatgtca

SEQ ID NO: 236739 - DNA, 794 bp, Unknown
  Bacterial polypeptide expressing nucleotide sequence isolated from the Sargasso Sea
gccatttcatactgatatacaaactaatttaattatgaaagcttcaagactcgtatcttcaattactggatttccagttcagcctaataaagctattgttggagcaaatgcctttgcacatgaagcaggtattcatcaagatggaatgctaaaacattctggaacttacgagataatgactcctgaatcagtaggtttaaataaatcttcattggtattgggtaaacactcaggaaaacatgcattttcagaaaaattaaaagaattaggttatgagccaggagataatgctttaatggagttatttggaagatttaaagatttggctgacaagaaaaaagaaatttttgaagaggatctaattgcattagcagaagatcgatcagcatcttatgatgaacacattaaatttatatcattagaagttaatgcaggttctgtagagaagcatgaagcaaatttaaagattgaaatgaatgatgaaattaaaacaattaaaaatagcggtaatggaccggtcgatgctacatttaatgcaataaaaaaacttactttaacagattttaaattaaaattatatcaagttaatgcgataacggctggaactgatgcacaaggagaagttactgtcagacttgaatcagatgatttattttctcaagcaaaaggaagcgatcccgatattattgttgcttctgcaaaagcatatattagcgctttaaatagaatgttatttaaaaaaactaaatcaatcgtaaaaaaatctgccgaaattaaaatagaaggggtataaa

SEQ ID NO: 236740 - DNA, 272 bp, Unknown
  Bacterial polypeptide expressing nucleotide sequence isolated from the Sargasso Sea
aatggataacccaacagataaatactcagcttatatgccagttgatttggttaatcgcgaatggccaagcaacacgattaaaaaagcccctatttggtgctctgtagatcttagagatggcaatcaagctctcattgagccaatgggttctgagagaaagaatagaatgtttagcttattgtgtaaacttggcttcaaagagatcgaggtaggctttccatcagcctccaaaactgactatgattttgtaagagatcttattgaaaataaaa

SEQ ID NO: 236741 - DNA, 459 bp, Unknown
  Bacterial polypeptide expressing nucleotide sequence isolated from the Sargasso Sea
aatgagcgacaaaaatagagtatttatatttgatacaacaatgcgagacggagaacaatctccaggagcatcaatgagtttggaggaaaaaatccaaattgcaagagtctttgatgagcttggtgttgacatcatcgaggctggctttccgattgcttcacctggagactttgaggcagtaagtgaagttagtaaaatattaaaaaattctatcccagcaggattagcaaggcactcaaaaaaagatattgatagatgtaatgaagcattaaaacatgcaccaagatttagaattcatacgtttatttccacaagccctctgcatatgaagcataaattgaacaagacagcagaggaagtttataactcaattaaagaacatgtaacatatgctagaaattttactgatgatgttgagtggtcatgtgaagatggaacacgaacagatatggactatat

SEQ ID NO: 236742 - DNA, 397 bp, Unknown
  Bacterial polypeptide expressing nucleotide sequence isolated from the Sargasso Sea
ttgactaaaataatcaataaatcagtttccaaatacaaaccttttgagctaattcagttagaggacaggaattggcctactaaaagtataaagaaagctcccatttggtgtagtgttgatttgagagatggcaaccaagctttaattgaaccaatgggagaagagaggaagcttagaatgtttaagatgcttcttgatattggttttagagaaattgaagtaggctttccttctgcttcccaaactgattttgattttgtaagaaaaataataaacgaaaatttaatacctgcgcatgtaaccattcaagcattaacgcaagccagaccagagcttattaaaagaacttatgaagcattagaaggtgctcctcgtgcaatagttcatgtatataatt

SEQ ID NO: 236743 - DNA, 363 bp, Unknown
  Bacterial polypeptide expressing nucleotide sequence isolated from the Sargasso Sea
aatgagcgaaaaaaacaaagtatttatattcgatacaacgatgcgtgatggagagcagtctcctggagcatctatgagtttggaagaaaaaattcaaatcgcaagagtatttgatgaacttggagttgatataattgaagctggttttccaattgcatctcctggagattttgaggcagttacagaagtaagtaaaatactaaaaaattcaattccagctggattagcaagacattctaaaaaagatatagatagatgttacgaggctttaaaacatgcgcctaggtttagaattcatacctttatttccacaagtcctctgcatatgaagcataaattaaacaaaactcctgagcaagttta

SEQ ID NO: 236744 - DNA, 292 bp, Unknown
  Bacterial polypeptide expressing nucleotide sequence isolated from the Sargasso Sea
atgagtactaaagacagagttataatttttgacactacaatgcgagatggtgagcaatcaccaggtgcatctatgagtttggaggaaaaaatccaaatagcaagagtatttgatgaattaggaatagatgttattgaggcggggtttccaattgcatcacctggagattttgaagcagtaacagaggttagtaaaattttaaaaaaatcaattcctgcagggctatcgagacactcgaagaaagatattgatagagcgtatgaagctttaaaacatgctccaaaggtttaga

SEQ ID NO: 236745 - DNA, 964 bp, Unknown
  Bacterial polypeptide expressing nucleotide sequence isolated from the Sargasso Sea
tatatatttgatactacattgagagatggagcacaaacccaaggtgtgattttttcaatagatgataaattaaaaatagcaaaagctttagatgatttgggtgtcgactatatagaaggaggttggccaggtgcaaatcctactgatacagaatttttccaaaaaaaaattaatctaaacaactctgtactaactgcttttggtatgactaaaagaacaggtagaagcgcagataacgaccctggtctttcatctatattaaatagcaatacaccagcagtatgcttagttggaaaatcttgggattttcacgttgatgtagctttaggcatatcgaatgaagaaaatttagaaaatatttcagaaagcgcaaaactttttgttaaagaaaaaaaagagtttatgtttgatgctgaacatttttttgacggatttaaaaataataaagattatgcactttcatgtattaaatcagcatatgaaaatggtgctagatgggtcgtcctttgtgatacaaatggtggaactttacctcatgaagtttctgaaattgtaaatgaagtagttaaatctgtcccaggaaaaaatttaggtattcacgcacacaatgacactggaaatgctgtagcaaactctctagctgctgttctatctggtgctagacaaattcaaggaacaattaatggattaggtgaaagatgtggtaatgcaaatttaatgtcaataattcctacattacatttaaaagaaacttacttaaaaaattttgaaataaatattaaaaaagaaaatattagtaagttaactcaatgttcgagattgctagatgaaatattaaatagaaaaccaaatcaacatttaccttatgttggtgctgctgctttttctcataaaggaggattacatgtatctgcagtccaaaaagatccaaaaacttatgaacatataaatccagagtctgtgg

SEQ ID NO: 236746 - DNA, 687 bp, Unknown
  Bacterial polypeptide expressing nucleotide sequence isolated from the Sargasso Sea
ttgttcacacggcattctcgggctcccatcaagatgccatcaataagggtatgaaagcgatggaaactgccaacagtccattatttgaggttccgtaccttccaatagatccaaaggatattgggagagactatgaagcgattatccgcgtaaatagccaatctggtaagggaggggtgtcttatattttagaaaatgattactccattcgattacccaagccagcgcaagctcagttcagccaagttatacagaaaataaccgatgaaacgagccaggagatcacgccggaagaaatttggaaggcattccaatctacattcatagaacaaacgggtccttttaagctgatttcattttcttcggaagcggcttcgcgttccaatgatcttgaacgcatgactgcgaaagttgctttcaaaggtgcagaatatgaaataaagggaaccggcaacgggcctatagcagctttcattcagggtatacgagatacgtttgatcttaagttcaggcttaaagattatacggaacatacgcgaacggcaggttcagcatctgaagccgcagcctacatcgaacttaaagtgcccgacgaaaatggtgcaagcgtatttggggttgggattgatacttccattacactcgcccccattaaggcagtcattagtgcattaaacaggatataga

SEQ ID NO: 236747 - DNA, 295 bp, Unknown
  Bacterial polypeptide expressing nucleotide sequence isolated from the Sargasso Sea
atgacagataaaaatagaattattatttttgacaccactatgcgtgatggagagcagtctccgggagcatcaatgagtttggaggaaaaattacaaatctcaagagtctttgatgaattaggagttgatgtaattgaggctggttttccgattgcatccccaggtgattttgaagctgtaacagaaatcagcaaaactttaaaaaattctatccctgcaggattggctagagctactaaaaaagatattgatgcttgtcatcaagcattaaaacatgcaaaaaattttagaattc

SEQ ID NO: 236748 - DNA, 631 bp, Unknown
  Bacterial polypeptide expressing nucleotide sequence isolated from the Sargasso Sea
ggctgatactgttggatgtttaacaccaactaatatcaaaggatttgttatccaaatggtttcagagttagatatacccatacatgttcactgtcataatgattttggtatggccacagccaatgcactttcagctctagaagctggtgcacagtgtgtagatgtggcaataaatggattaggagagcgttgcgggctgccgccattggcagaagttgtaattgctttaactaacatttataaggtaaatggaaattggaatttgggattgattccagaattatctgaattggttaaggcattttctaaattagattcaaatgccaaccagcctattattggaaaaaatgcattcacccataaatcaggacttcatgtgaaagcagttgtgaaggagccagaatcctatgaagctatttctccggaatctgtacatcgaaaacgtcattttgtgattgataaatacacgggaaattttgcacttaataataaattaattcatatgggaataagtgtaacacccaaagaattggatacaattttaatcgaaataaaatctcatcccgaaaaattgaactgggatgataaagacctcatttctcttactaattcaatgggaataaaatcgtaa

SEQ ID NO: 236749 - DNA, 325 bp, Unknown
  Bacterial polypeptide expressing nucleotide sequence isolated from the Sargasso Sea
aatggataacccaacagataaatactcagcttataagccagttgatttgtttaatcgcgaatggccaagcaacacgataaagaaagcccctatttggtgctctgtagatcttagagatggcaatcaagctctcattgaaccaatgggttctgagagaaagaatagaatgtttagcttattatgtaagcttggcttcaaagagatagaggtaggctttccatcagcctcaaaaactgattatgattttgtaagagatcttattgaaaataaaaaaattccttcagatgtaaatattcaggtccttactcaagctcgagaagaatta

SEQ ID NO: 236750 - DNA, 937 bp, Unknown
  Bacterial polypeptide expressing nucleotide sequence isolated from the Sargasso Sea
aaaatttatatatttgatacaactttgagagatggggctcagactgagggtgttgatttttctttagaagataaaaataaaattgccaacgtattagctgatatcggcatagattatatagaaggtggatggcctggcgccaatccagtagatacaaagtttttttcaaatcctcctaaaatcgacaaaagtaaatttactgcttttggtatgactaaaaaaactggaagaagtgctgataatgaccccggattagcagatttaatgaacgcaagctcctcggcagtttgtgtcgttggtaaatcttgggattttcatgtcaaaacagctttaggcattaaaaatgaggaaaatttggaaaacataaaagagacaacaaaacattttgttaaaaatggaaaagaatttttgtttgacgctgaacatttctttgatggttataaatcaaatcctgattatgcaataaattgtttaaaacatgcttacgataatggtgcaagatgggttgttttatgtgatacaaatggagggacattgccaaatgagattagagatatagtctcgagtgttactaaaataatccctggtgaaaatttggggattcatgctcataatgatactgagaatgcagttgcaaattctttagcagctgtagagtgtggagtaagacaaattcaagggacaattaatggacttggagaaagatgtggaaatgcaaatttaatttctcttatacctactttatgcttaaaaaaaactttctcagataagttcgatgtgaacgttaaaaaaaacaaacttacttctttaacagaatgctcaagacttttagatgaaatattaaatcgtaaaccaaacagaaatatgccctatgttggtgcttcagctttttctcataaaggaggactacatgtttctgcagttaaaaaaaacccta

SEQ ID NO: 236751 - DNA, 871 bp, Unknown
  Bacterial polypeptide expressing nucleotide sequence isolated from the Sargasso Sea
atgagtaaagagagactgtacatatttgataccacacttagagatggagcccaaacccaaggggtgcatttttcattagatgaaaagatcaagattgctcatgcgctggataatttaggggtagattatatagaaggaggttggccaggagcgaatccaacggatacacaattttttcaaaaaaaacttaaacttaaaaattcaagtttcacagcatttggtatgactaaaaaatcaggacgaagcgctgaaaatgatccaggtttgtcagcaattttaaattctaatactaattcagtttgtttagttggtaaatcttgggactttcacgttgacgtagcattaggaatttcaaatgaagaaaacttagaaaacatcagtgaaacaaccatgcattttgtgaaaaataaaaaagaattcatgttcgatgcagagcatttttttgatggttataaagcaaatccaaaatacgcattgaagtgtatcaaagcagcctatgataaaggagcgagatggattgttttatgtgacactaatggtggaactttacctcacgaggtttcaaaaattgtaaaagaagtttcagaacatatacctggaaataatttaggaattcacgctcataatgacactggtaatgcagttgcgaattctatagcagcagttttatctggagctcgacaagttcaaggaacaattaatggacttggagaaagatgtggtaatgcaaatttgatgtcattaataccaacattttatcttaaaaaagaatttaatgactcatttgaaattaatatcaaagagaaaaatattaaaaatataacccaatgttctaggttattagatgaaatcttaaatagaaaaccaaata

SEQ ID NO: 236752 - DNA, 817 bp, Unknown
  Bacterial polypeptide expressing nucleotide sequence isolated from the Sargasso Sea
cgtaccggcaacatggatttggtcaccgccggcatgaacctgtacagccaggggattgatccacagatcgacttctcacggatgaaagaaattgtggcattggtggaggagattaccgacatccagactcaccctcgccatccctatgcgggggatctggtgttcagtgctttttccggtagccaccaggatgccattcgcaaatgtctggcccgttatcaggaaggggatatctggacagcggcctacctgccgattgacccggccgatgtgggacggcgttacgaggaagtggtgcgcatcaactcccagtccggcaagggcggggtcgctcacgtgctggagcgggatttcggtatcgacttgccgcgttggttgcagcaggagctggctggcgtggtgcagggcgatgcggaagaagacggcggcgagatcaccagcgagcgggtgcatcgtcgtttcaatagcgactatctgaacgtccccatgggctgggtgttgcgctcctacgacctgaaccgcagtaacgaacaggtgcaggcgcagatcagtattggtgatgacagccagccggtgacattgttgtccggccgtggagacggcgccatgtcggcactggtcgatgccctgaatcggcgcattggcggcgaggtgaaagtggtgtcattcgatgaatactcgttgggcgataacaccgaagccaatgccatggcctgtgtgcgcgtgcaggtaggcgacaccacccagagtgccgtggccatggcggcggacactaccgctgctgccttgcaggcgattctgtctgcggtgggccggg

SEQ ID NO: 236753 - DNA, 205 bp, Unknown
  Bacterial polypeptide expressing nucleotide sequence isolated from the Sargasso Sea
atgagtgagcgagtatatatttttgatacgactttaagagatggagaacaatctcctggtgcttcgatgaatttggatgaaaaaatgcaaattgctcaaattcttgaagaaatgaaagttgatataattgaagctggttttccaattgcttcaaatggtgattttgaagctgtatcagaaatcagtaaaaatattaaaaactcaa

SEQ ID NO: 236754 - DNA, 772 bp, Unknown
  Bacterial polypeptide expressing nucleotide sequence isolated from the Sargasso Sea
atacagacggaaaaactaacaaaaacctcaaagcttttttcggcagttacaggtttccccgttcaatttaataaagctatcgttggaaaaaatgcttttgctcacgaagcaggtattcatcaggacgggatgttaaaaaataataaaacttatgagattatgaccccagaaagtgttggagtttcagaatcaaatcttgtaatgggcaagcactccggcagacatgcattcaaacaaaaaataattgaacttggatattcaattaatgacaatgtaattgaggaggcttttgaaaattttaaaaacttagcagataaaaagaaaaatatatatgatgaagatatcatcgctattattgatgaccaggtgatcagagttaatgactctattttacttcaagatttgcaggtagtggctggaacaaaaggccctcaaaaagctgagatcagtcttttaattgatgatgagccaaagaaagtaacctctacgggagacggacctgttgatgcaatctttaatggtttaagtcaacttgttccacataaaggaaaattattactttatcaagttcatgctgttacggaaggaacggatgcacaagctgaagtttccgtaagattggcagaagatggtaaaactgttgttggactaggcgcacatacggatactcttgttgcgtctgccaaagcatatataaacgctctaaataaattaataattaaaagagaaaagtcagctccagccagtatgtcaggtgttactggagtttgat

SEQ ID NO: 236755 - DNA, 283 bp, Unknown
  Bacterial polypeptide expressing nucleotide sequence isolated from the Sargasso Sea
attgactaaaataattaataattcaacttcaaagtatcttccttttgaatccattgatctaaaagatagaacttggcctgataatgccattttaacttccccactttggtgtagcgttgaccttagagatggaaatcaagccctcatagagcctatgggagaggaaaggaagttgaggatgttcaagctgctattagagataggttttaaagaaatagaagtaggctttccttctgcttcacaaacagattttgatttcgttaggaagattattgaggataac

SEQ ID NO: 236756 - DNA, 754 bp, Unknown
  Bacterial polypeptide expressing nucleotide sequence isolated from the Sargasso Sea
aacgcaacaggatttcctggttcagtacaataaagcaatcgttggaaaaaatgcttttgcacatgaagccggaattcatcaagacggcatgttaaaaaatagacagacatatgaaattatgacacctgaaagtgtgggagtaaaacaaacttctttggttatgggaaaacactctggaagacatgcttttaaggataaattaaatagtttgggttatccagatttaacagatgatattgtaagcaatgcttttgcaaaatttaaagtgttagctgacaagaaaaaacatgtctatgatgaagatataattgcactagtagatgatagtttaattactgataataaagttaatgcaattaatctaaaatcactaaaagtttatgctggtacaggcgaaccacaaaaagcagaaatgacacttgatgtatatggtgaagttaaacaagcatccgagactggggatggtccggtagatgccatatttaagtgcataaaaatactttatccacatgacgtaaatttacaactttatcaagtacatgctgtaacagaaggaactgacgctcaagcaacagtgagtgtaaaaatagaagaaaatggcaagacaacagtaggccaagcagctgatacagatactttagttgcttctgcaaatgcatatataaatgcattaaataaaatgatcataaaaagagacaaaacagcaccagaacagcaacaaaattacgaaacagaaaaaatgaaaggaatataa

SEQ ID NO: 236757 - DNA, 736 bp, Unknown
  Bacterial polypeptide expressing nucleotide sequence isolated from the Sargasso Sea
gcatacaataaagcaatagttggaaaaaatgcctttgcacatgaagcaggaattcatcaggatggaatgctaaaaaatagacaaacttatgaaattatgacaccagaaagtgttggggtaaaacaaacttcattagttatgggaaaacattcaggaaggcatgcatttaaagataaattaattagcttaggttacgtagatgttacagatgatgttattagcaatgcatttggtaaattcaaggttttagctgacaaaaaaaaacatgtttatgatgaagatataattgctttggttgatgacagcttaattattgataataaagtcaatgcaattagtttaaaaactttaaaagtatttgctggaacaggtgaaccccaaagagcagatatgactttagatgtttttggagaagttaaaaaagcatccgaaactggagatggaccagtagatgcaatatttaaatgtataaagaaactttacccacatgaagtaaatttacaattatatcaagttcatgcagtgactgaaggaactgatgctcaagcaactgttagtgttcgaattgaggaaaatggaaaaacaactgttggtcaagcagcagatactgatacattagttgcatcagccaatgcatacataaatgcattaaataaaatgattatcaaaagggataaaactgcgcctggatactctccagagcaaaaaaaagaagagaaagtgaaaggaatataaa

SEQ ID NO: 236758 - DNA, 715 bp, Unknown
  Bacterial polypeptide expressing nucleotide sequence isolated from the Sargasso Sea
ttgaaaaaatgctttgcacacgagtcaggaattcatcaagatggaatgttaaaaaatagacaaacttatgaaattatgactcctgagagtgttggagttaaacaaacatctttagtaatgggtaaacactctggaagacatgcttttaaagataaattaaatagcttaggttatgtagatgttacagacgatgtaatagaaaatgcatttggcaaatttaaaattttagcagacaaaaaaaaacatgtttatgatgaagatataattgctctggttgatgatagcttgataattgataataaagttaatgcaattaatttaaaatcattaaaagtatttgctggaacaggagagccacaaagagcagaaatgacactagatgtttttggtgaagtcaaaaaagcatcggagaccggagatgggcctgtagatgcaatatttaaatgtataaagaaactttatcctcatgatgtaaacttacaattatatcaagttcatgctgtgacagaaggaactgatgctcaagcaacagttagcgttcgaattgaggaaaatggaaaaacaactgttggtcaagcagcagatactgatacattagttgcatcagccaatgcatacataaatgcattaaataagatgattattaaaagagacaaaacagcacccggatattctccggagcaaaaaaaagaagaaaaggtgaaaggaatataaa

SEQ ID NO: 236759 - DNA, 285 bp, Unknown
  Bacterial polypeptide expressing nucleotide sequence isolated from the Sargasso Sea
aatggaagataaaaacagaataataatttttgatactacgatgcgtgatggagaacagtctccaggtgcatctatgagtcttgaggaaaaaattcaaatttccagagtttttgatgaattaggaattgatgtaatcgaagcaggttttccaattgcttcaccaggtgattttgaagcagtaacagcaataagcaaaattttaaaaaaatcagttccagctggattagcaagacatacaaaaaaagatatagacgcttgtaacgagtctctaagatctgcaaaaag

SEQ ID NO: 236760 - DNA, 418 bp, Unknown
  Bacterial polypeptide expressing nucleotide sequence isolated from the Sargasso Sea
atgagcaataaagatagagtgtttatatttgatactactatgcgtgatggtgagcaatcgccaggtgcgtctatgagtttagaggaaaaaattcaaatcgctagagtgtttgatgaattaggtatcgatataattgaagcaggttttcctatagcttcaccaggggattttgaagctgtttcagaagtaagtaaaattttaaaaaattctattcctgcaggactttcaagacattcagtaaaagatattgatagagcttatgaagctctgaaacatgcaccaagatttagaatacatacatttatttctacaagtccattacacatgaagcataaattaaatatgtctccagaggatgtttatgagtcaattggaaaacatgttgcttatgcaagaaagtttactgatgacgttgagt

SEQ ID NO: 236761 - DNA, 337 bp, Unknown
  Bacterial polypeptide expressing nucleotide sequence isolated from the Sargasso Sea
atgcaaaatcaatatatgagtgataaaaacagaataataatttttgatacaacaatgcgtgatggggaacaatctccaggcgcttcaatgagtttagaagaaaaacttcaaatctctcgagtgtttgatgaacttggagttgatataattgaagcaggttttccaatagcttcaccaggagattatgaggcagtaacagaaattagtaagacattaaaaaattcaattccagctggattagcgagagcaacaaaaaaagatatagatgcgtgccatgagtctttaaagcatgcaaaaaattttagaatacatacgtttatttctacaagcccacttc

SEQ ID NO: 236762 - DNA, 486 bp, Unknown
  Bacterial polypeptide expressing nucleotide sequence isolated from the Sargasso Sea
tatgagcaaaactgacagagttataatttttgatacgacaatgcgtgacggtgaacaatcaccaggcgcttcaatgagtttggaagaaaaaatccaaattgctagagtgtttgatgagctaggtattgatgtaatagaagctggttttccaattgcatcaccgggagactttgaggcagtcacagaagtaagcaagatattaaaaaactctatcccagctggtctatctaggcactcaaaaaaagatattgatagagcttatgaagcattaaaacatgctccaagatttagaattcatacctttatttccacaagcccattgcacatgaaacataaactaaatatgtcaccagaagatgtatatgagtcaataggacagcatgtttcttatgcaagaaaatttacagatgacgttgaatggtcttgtgaggatggaactagaacagatatggactatatgtgtaagactgtagagcttgcaattaa

SEQ ID NO: 236763 - DNA, 832 bp, Unknown
  Bacterial polypeptide expressing nucleotide sequence isolated from the Sargasso Sea
atgagcaaagaaaaattatacatatttgatactacactgagagatggagcccagacacaaggtgtggatttttctatagatgataaattaaaaatatctaacgctttagatgaattgggtgttgattatattgaaggtggttggccaggcgccaatcctacagatactgaatttttccaaaaaaaaattaaattaaataactctgttctaacggcttttggaatgaccaaaaaatctggtcggagtgcagataatgatccaggattatcagctatattaaatagcaatacctccgctgtatgtttagttggtaaatcatgggattttcatgttgatatagccttaggtatatcaaatgaagagaatctagaaaatatttctgaaagtgcaaagctttttgtaaaagaaaaaaaagaatttatgtttgatgcagaacatttttttgatggatttaaaaataataaagaatacgcactttcttgcattaaatcagcttatgataatggtgcaagatggattgtgctttgtgatactaatggtgggactcttccaaacgaaatttcagaaattgttagtgaagtagtaaaatcagttccaggaaaaaacctaggcattcatgctcacaatgatacaggaaatgctgtagccaattcattagcagcagttttatctggagctagacaaatacagggaacaatcaatggattgggcgaaagatgtgggaatgcaaatttaatgtcaataattccaacattatacttaaaacaaacttataaccagaactacgagataaaaataagaaaagaaaatataaataaattaactcaatgtt

SEQ ID NO: 236764 - DNA, 345 bp, Unknown
  Bacterial polypeptide expressing nucleotide sequence isolated from the Sargasso Sea
aatgactgataaaaatagagtttatatctttgatactactatgcgagatggagagcaatctcctggcgcatcaatgagtttagaggaaaaaattcaaattgctagagtttttgatgaacttggaatagatattattgaggctggttttccaattgcatctcctggagattttgaagctgtaactgaggtcagcaaaatattaaagaaatcaatacctgcaggtttagcaagacattcaaaaaaagatattgatagatgttatgaggctcttaaacacgcttcaagatttagaattcatacttttatttccacaagtcctttacacatgaaacataagttgaataa

SEQ ID NO: 236765 - DNA, 892 bp, Unknown
  Bacterial polypeptide expressing nucleotide sequence isolated from the Sargasso Sea
aatgggtggaacacttccaaatgaaatttctaaaattgtaagcgaagtaatcaaatatattccaggaaataatttaggaatacacgctcataatgatactgaaaatgcagtagctaatagtctcgctgcagttcaagcaggagcaagacaagttcaaggaactataaatggtttaggagaaagatgtggtaatgctaatttgatgtctttaataccatcatttttcttaaagaaagatttttctgataaatttgaattaagtattaaaagagaaaatttaaaaaatttaactcaatgttcaagattgttagatgaaattttaaatagaaaacctaataaacatttaccttatgttggtgcctcagctttttcacacaaaggtggaatgcatgtatctgcagttcaaaaagatccaaaaacttacgagcatgttaatcctgaagaagttggaaattctagaaatattgttgtttcggatcaatctggacaatcaaatataatgtctagattaaatttaataggaattaatgttcagaaaagtgatccaaagattaaaaaacttttagatgaagtaaaagatagagagtttatcggttatagttacgacggtgccgacgcatcttttgaattacttgcaagaaggttaatgggagagataccaagatatatttcaattaatgaatacgacgtttctgtaaagaaagacaaaacaggagagattatatcttacgctaaagctaaattagaagtagatggcaacgaaattttgtgtgagggacaaggaaatggacctgttaatgctttagataatgcaattagaaagaatgttaagaagctcgctaaatactctaagtatttgaaagatttaaggcttgttgactataaaagttag

SEQ ID NO: 236766 - DNA, 157 bp, Unknown
  Bacterial polypeptide expressing nucleotide sequence isolated from the Sargasso Sea
atgactgagaaaatttatatatttgatactactcttagagatggtgaacaatcacctggtgcttctatgaatttagatgaaaaacttcaaatagctgaagttttagatgcaatgaaagtagatattattgaagcaggatttcctattgcttcaaatg

SEQ ID NO: 236767 - DNA, 784 bp, Unknown
  Bacterial polypeptide expressing nucleotide sequence isolated from the Sargasso Sea
aatgagcaaagaacaactttatatatttgacacaacactgcgtgatggagcacaaacacaaggtgtagatttttcaattgatgataaagaaaaaatctcatcagcattagataaattaggtgtagattatgttgaaggtggttggccgggtgcaaatccaactgatactgagtttttcaataaagatcataattttaaatcaacgaaattaactgcatttggtatgactaaaaaatctgaacatagtgctgaaaatgaccctatgctctcatcattaattaattcaaaaagtacttctgtttgcttgtttggaaaatcatgggattttcaagtggatgttgcattaggaataagtaatgagcagaatttaataaatataagtgaaagcacaaaacatattgttaaatctggtaaagagttcatgtttgatgctgaacatttttttgatggatacaaagctaatccagaatatgcaatgtcatgtttaaaagctgcttttgataatggtgctagatggattgtattatgtgatacaaatggcggtacacttccacacgagataacagaaattgtttctgaagtttgtaagcaaattcctggaaaaaatttaggaatacatgctcataatgatacagaaaatgcagttgctaatagtcttgcggcagttcaagcaggtgttagacaagtccagggcactatcaatggtttgggggaaagatgtggtaatgctaatttgatgtcattaattccttcatttttttttaaagaaagatttttcagataa

SEQ ID NO: 236768 - DNA, 394 bp, Unknown
  Bacterial polypeptide expressing nucleotide sequence isolated from the Sargasso Sea
atggaagataaaaatagaatcgtaatatttgatacgacaatgagggatggtgaacagtcaccaggagcctcaatgagtcttgaggagaaaactcagatctcaagagtttttgatgagctaggtatagatgttatagaagcaggttttcctatagcttcaccaggcgattttgaagcggtgagcgcaataagtagaattttaaaaaaatcaattccggctggactagctagacatactaaaaaagatattgatgcttgttacgaatctttaaagtctgcgaaaagatttaggattcatacctttatatctactagttctttacacatgaagcacaaattaaacaaaactcctgaacaggtagttgagtctattaaggagcacgttacttatgcaa

SEQ ID NO: 236769 - DNA, 445 bp, Unknown
  Bacterial polypeptide expressing nucleotide sequence isolated from the Sargasso Sea
gatgagcaaacaaaacaatttaataaaaatatttgataccactatgagagatggagagcaatctccgggtgcttcaatgaatattgaagaaaaacttaagattgcctcagcacttgagcatttaggagttgatattatagaagcagggttcccagcggcatcaaagggtgattttgctgctgtttcagaaatttctaaaaaaattaaaaatacttctatttgtgcattaagcagggcttcaaaaaatgatattcaatctgctgccgatgcattaaaaggtgccgtagctccaagaattcatacttttatttctacaagtgagcttcacatgaagcataaattgcaactagattcagaggaagtttatcaaaaggtaattgagagtgtttcttttgctcgaaacttgtgcgatgatgttgaatggtcctgtgaggatgggactaga

SEQ ID NO: 236770 - DNA, 352 bp, Unknown
  Bacterial polypeptide expressing nucleotide sequence isolated from the Sargasso Sea
tatgaccgataaaaacagagtttatatttttgatacaacgatgcgagatggcgagcaatcgcctggagcatctatgagtttggaagaaaaaattcaaatagcaagagtatttgatgaacttggtgttgatataatagaagcgggttttccaatagcctcaccaggtgattttgaagcagtgtctgaaataagcaaaatattaaaaaattctattcccgcaggtctttcaagacattcaaaaaaagatatagacagatgttatgaagcattaagacatgcgccaagatttagaattcatacttttatttctactagtccacttcacatgaaacataaattaaataaatctcca

SEQ ID NO: 236771 - DNA, 226 bp, Unknown
  Bacterial polypeptide expressing nucleotide sequence isolated from the Sargasso Sea
aatgactgataataacagagtatacatttttgatactactatgcgtgatggagagcagtctcctggtgcatctatgagtttggaagagaaaatccaaatagctagagtatttgatgaacttggaatagatattattgaagcaggatttcccattgcctcccctggagattttgaagctgtaaccgaagtcagtaaaatattaaaaaaatcaatacctgcaggttta

SEQ ID NO: 236772 - DNA, 492 bp, Unknown
  Bacterial polypeptide expressing nucleotide sequence isolated from the Sargasso Sea
tatgagcagcaaagatagagttataatttttgatactaccatgagagatggtgagcaatcacctggcgcatctatgagtttggaggaaaaaattcaaatagctagagtatttgatgaattaggaatagacattatcgaagcggggtttccgattgcatctcctggagattttgaagcagtaactgaggttagtaaaattctaaaaaaatctatacccgcaggtttatctagacattctaaaaaagacattgatagagcctatgaagctttaaaacatgctccaagatttagaattcatacatttatttcaactagtcctcttcatatgaaacataaattaaatatgtctccagaagatgtttatgagtctattgggcagcatgtatgctatgctagaaaatttactgatgatgttgaatggtcatgcgaagatggcacaagaacagatatggattttatgtgtaaaactgtagaacttgcaattaaaaatgg

SEQ ID NO: 236773 - DNA, 880 bp, Unknown
  Bacterial polypeptide expressing nucleotide sequence isolated from the Sargasso Sea
aatgataaaggagtcacttcaggcagccagtgctcggggtagagagccaatgtttgactgtgagcattattttgatggtttcaaatcaaactctgattttgctttggaatgtgtaaaagctgcttttgacggcggtgcgcactggataatcttgtgtgatacaaatggtggcacgttgacagatgatgtgtttgaaattgtgtctaagacaaaatcattcttacctaaagcaaatattgggattcattgtcataatgatattgggctggcggttgcaaacagcatagctgcaattaaggcgggcgcaagacaggtgcaaggaacaataaatggccttggagagcgctgtggaaacgcggatcttattacgcttatcccaacattgatgttgaaacttggttataagacctccattccagaggaaaagatttcaaaactactgagcttgtctcgaatggtagatgataggctcaatctagttcctaactcacatgctccatatgtaggctctgctgcatttgcacataaaggggggcttcacgcctcagcagctcaaaaagaccctagaacctacgagcatattcctcctgagacagttggcaatgagcgttcatttgttatttctgatcaaataggaagatcaaatgtactagcgcgcttttcagaggttggtattgaaattcccgcagatgacatcaggatagaaaagctaattagagaaattaaagaaaaagagtataatggttggtcttttgactccgctgaagctagtttcgagttacttgctagaaaagcattagggcaagttccagactattttaggattggtcgttttagggtaactgatgaaaggcgatttaatgcaaaaggggaattgggg

SEQ ID NO: 236774 - DNA, 397 bp, Unknown
  Bacterial polypeptide expressing nucleotide sequence isolated from the Sargasso Sea
atgaccgataaaaacagagtatacatttttgatacaacgatgcgagatggtgaacaatcgccaggagcatctatgagcttggaagaaaaaatacaaatatcaagagtatttgatgagcttggtgttgatattatagaagctggatttcctattgcatcgcctggtgactttgaggcagtcagtgaaattagtaaaattttaaaaaattcaattcccgcaggtctttcaagacattctaaaaaagacatagacagatgttatgaagcattgaaacatgcatcaagatttagaattcatacttttatatccactagccctctacatatgaaacataagttaaacaaatctccagatgaagtttatgaatctattaaagagcatgttacttatgcaagaa

SEQ ID NO: 236775 - DNA, 247 bp, Unknown
  Bacterial polypeptide expressing nucleotide sequence isolated from the Sargasso Sea
tatggaaaagataaggttcttggatactactttacgtgatggagagcagtcccccggatgttcaatgtcagcaagtgaaaagctgacccttgccaagcagctggaacgtcttggtgtaaacacaattgaagccggatttgcagcttcatcaccgggagactttgatagtgttcggaatatcggtcagcaaattcaaaattcaactattgtttcattgtgtcgtgcttcaaaaaacgacattgacgct

SEQ ID NO: 236776 - DNA, 685 bp, Unknown
  Bacterial polypeptide expressing nucleotide sequence isolated from the Sargasso Sea
gctgggtacgggagtacgcggcccgcaatccgggcaccgagtagtgagttttcagtactcgccggagagtttcagcagcaccgaggtggagttcgccgtcgaggtgtgtgacgccgtcatcgatgagtggcgcccggctgcccgcccgatgatcctgaacctgcccgccaccgtggaggtgagcacccccaacgtgtttgccgatcaggtggagtggttctgccgccacctcaaggcgcgccccgaggtgagcctctccattcacacccacaacgatcggggctgcggggtggccgccgccgagctggcggtgctggcgggggcggatcgcatcgagggcactctgctcggcaacggcgagcgcaccggcaacatggacatcgtcaccatggccatgaacctctacagccaggggatcgaccctgaactcaacctggcggacatggatgccatcgtcgccaccgtgggcgcctgtacccagattgccctgcacccgcgccacccctatgctggcgagctggtctacacggcgttttccggcagccaccaggatgccatccgcaaatccctggcggcggagaagccggatcactactgggacgtggcttacctgcccatcgaccctgccgatctcggtcgcagctacgaggcggtgatccgcatcaacagccagtccggcaagggc

SEQ ID NO: 236777 - DNA, 697 bp, Unknown
  Bacterial polypeptide expressing nucleotide sequence isolated from the Sargasso Sea
aatgagcaaagaaaaactttacatatttgatacaacattgcgtgatggtgcacaaactcaaggtgtagatttttcaattgatgataaagaaaaaatctcatcagccttagataaattgggcgttgattatgttgagggaggatggccaggagcaaatccaactgatactgagtttttcaataaagatcataatttcaaatcaacgaaattaactgcatttggaatgactaaaaaatcagagcatagcgctgaaaatgacccaatgctctcttctttaattaattcaaaaagtacttctatttgtctttttggtaaatcatgggattttcaagtggatgttgcattaggaataagtaatgaggaaaatttaatcaacattagtgaaagcacaaaacacattgttaaatctggcaaagagttcatgtttgatgctgaacatttttttgatggatataaatctaatcccaaatatgcaatgtcatgtttaaaagctgccttcgataatggtgcaagatggattgtattatgtgatacaaacggtggaacacttccacacgaagtaacaaaaattgtttctgaagttggtaaggaaattcctggaaaaaatttaggaattcatgctcataatgataccgaaaatgcagtagccaatagtcttgctgcagttcaagcaggagcaagacaagttcaaggtact

SEQ ID NO: 236778 - DNA, 319 bp, Unknown
  Bacterial polypeptide expressing nucleotide sequence isolated from the Sargasso Sea
atggataatccgatagacaaatattcagcttttatacctattgaattaaaaaataggaaatggccaaataagcttattgataaagcacctatttggtgttctgtagacttgcgtgatggaaatcaggcattaatagaacctatgggatccgaaagaaaaaatagaatgttcaatttattatgtagcctaggctttaaagaaattgaaattggtttcccatcagcatcaaaaactgattttgattttgttagagatcttattgaaaataaaaaaattccgttagatgtaaatattcaagttctcactcaagcaagagaag

SEQ ID NO: 236779 - DNA, 313 bp, Unknown
  Bacterial polypeptide expressing nucleotide sequence isolated from the Sargasso Sea
gggctcggcagtgggcaccggtccggtggatgccgtctgccgtgccctgtttgatctggcgggtgtgcccaatgaattgatcgagttttcggtgaagtcggtcaccgagggcatcgatgccatgggcgatgtgaccattcgcctgcgccgcaacggtgcgctctattccggtcacgctgcagacaccgatgtggtggtggcggcggccatggccttcgtgaacgccctcaatcgcctggtggccggagaggagcgccagtcattgcatccgcagaaggatcctgttgttctggagacccgaccgacgctctag

SEQ ID NO: 236780 - DNA, 338 bp, Unknown
  Bacterial polypeptide expressing nucleotide sequence isolated from the Sargasso Sea
gatgagtgttaatagatttgatcacacaaaatacaagcctttccctcagatagagattgaaaagcgaacctggccagataaggttattaccgaggcgcctatttggtgtagcgtggatctacgtgatgggaatcaagcgctcattgagcccatgtcagttggacagaaaaagaaaatgtttgaacttttagttgaggtgggctttaaggaaatagaggttggcttcccggcagcatcacagcccgactttgatttcgtcagaagcttaattgaggaagataaagttccagatgacgtgacaattcaggtgctgactccagctcgacctgaactgatcc

SEQ ID NO: 236781 - DNA, 354 bp, Unknown
  Bacterial polypeptide expressing nucleotide sequence isolated from the Sargasso Sea
acttgaagaagtcgtgatggctctcaagactcgagccgacttgtataagtgccagagtcgaattgctacgcagcggttagtaccaacgagtcgacttgttgcgaatatcacaggaattcaggtgccacgaaacaaggctattgttggacggaacgcgttcgcccatgaggcgggcattcatcaggatggcatgctgaaagatcgaagcacatatgaaatcatgcgtccagaggacgttgggcttgaacggactgatctggtgcttggtaaacacagtggtcgagcagctctggcagaccgggcagccgttcttggttatcagttgacaggagaacagcttcagacagttttcga

SEQ ID NO: 236782 - DNA, 301 bp, Unknown
  Bacterial polypeptide expressing nucleotide sequence isolated from the Sargasso Sea
gtatccgaaatcagtaaaaacattgaaaattcaactattgctggattagcgagagcgaaacttcctgacatagatcgtgcctgggaggctgtaaaacatgctaagtctccaagaatacatacatttattgctactagtccaattcatatgaaatataaattgatgaaaactgaagaagaagttttagagtcaataaaacatacagtaacgtacgctagaaacttatgtgataatattgaatggagttgtgaagatggaggaagatctaatctagattttttatatcaatgtattgaacttg

SEQ ID NO: 236783 - DNA, 823 bp, Unknown
  Bacterial polypeptide expressing nucleotide sequence isolated from the Sargasso Sea
atgactttgaaagtgaaaaaagatttaatgccataccatacagatattaaaactgagtctattatgaaagcttcaagattagtttcttctattactggttttccagttcaaccaaataaagctattgttggtgctaatgcctttgcacatgaagcaggcattcatcaagatggaatgctaaaacactcaggaacatatgaaattatgactcccgagtccgtagggttaaacaaatcctcattagtattgggaaagcattcaggtaaacatgctttttctgaaaagctaaaagaacttggatatgagccaggtgataatgctttaatggagttatttggaaggtttaaggatttagctgataagaaaaaagaaatatttgaagaagatttaattgctttagctgaagatagatcagcatcttacgatgaacacattaaatttgtatctttagaagtgaatgcaggttctgttgaaaaaccagaagcaaatttaaaaatagacatggagaatcaaattaaatcagtaaaaataaatggtaacggtccagtagatgcaacttttaatgcaataaaaaaactaacatctactgaatttaaactaaaactttatcaggtaaatgcaattactgctggtactgatgctcagggagaagttacagtaagattagaagatgatgacttatcttctcaagcaaaaggtagtgacccagatataatcgtagcatctgctaaggcatatattaatgccctaaacagattaatatttaaaaaatcaaaatctataaaagagaattcatctaatttacaaatacgaggagtttaat

SEQ ID NO: 236784 - DNA, 422 bp, Unknown
  Bacterial polypeptide expressing nucleotide sequence isolated from the Sargasso Sea
agctagagtgtttgatgaattaggtatcgatatcattgaagcaggttttcctatagcttcaccaggggattttgaggctgtttcagaagtaagtaaaattttaaaaaattctattcctgcaggactttcaagacactcaataaaagatattgatagagcttatgaagctctaaaacatgcgccaagatttagaatacatacatttatttctacaagtccattacacatgaagcataaattaaatatgtctccagaggatgtttatgaatcaattggaaaacatgtttcttatgcaagaaagtttactgatgacgttgagtggtcttgcgaagatggaacaagaactgatatggattatatgtgtaaaactgtagagcttgcaattaaaaatggagctacaacaattaatattcctgatacag

SEQ ID NO: 236785 - DNA, 199 bp, Unknown
  Bacterial polypeptide expressing nucleotide sequence isolated from the Sargasso Sea
tatgactgataaaaacagagtatatatttttgatactacaatgcgagatggtgagcaatcacctggtgcatcgatgagtttggaagaaaaattgcaaatttcaagagtatttgatgaacttggagttgatatcattgaagctggatttccaattgcatctcccggcgattttgaagctgttagcgaagtaagcaaaatt

SEQ ID NO: 236786 - DNA, 434 bp, Unknown
  Bacterial polypeptide expressing nucleotide sequence isolated from the Sargasso Sea
tagtgaacaagttcagctgccagaagcattgttccaattgaaattagtccaagtaagctgtggaacttctctaatgccaactgcaacagtaactgttgttggagaagatggagaggagaagaccgccgtctctcttggaacaggtcctgttgatgcagtagtccgagccttggattccctaactgaagaacctaatgaattgattgaattctcagtaaagtcagttacagaggggatagatgctctgggtgaagttactattagaataagaagagatggaaatctcttttctggccattctgcagatactgacgttgttgttgccgctgctcaagcatacataaatgcccttaatagattagtagctgctcatggaagaaaatccattcatccgcaacatgatttggctaaggtagacaaaaaagggatttgat

SEQ ID NO: 236787 - DNA, 566 bp, Unknown
  Bacterial polypeptide expressing nucleotide sequence isolated from the Sargasso Sea
tatgccggcgagctggtctacacggcagttttccggcagccaccaggacgccatccgcaagtctctcgcggcagaaaaaccggatcactactgggacgtggcttacctgcccatcgaccctgccgatcttggtcgcagctacgaggcggtgatccgcatcaacagccagtccggcaagggaggggtgacctatctgctggaacgtgacctcggtctgcaactgccgcgctggctgcaaatcgacttcagccgccgggtgcaggccgaggctgaggcgagcagcagcgaaatcagcccggagcagatccgcaccctgttcgagcagcactatctcgagcctgcccacggctatcgcatcgggcggttccagctcggtcatgacagtcaggagagcctgcgcctggagttgcagaccccccacggcaccctgcaactgtgcggtgaaggggagggagccatcaccgccctggtcaacggctggcagcgtcagaccggcatgcacatcgatgtgctggattactccgagcatgcgctcaccgccggcaccgaaatcccgcgccgccgcc

SEQ ID NO: 236788 - DNA, 123 bp, Unknown
  Bacterial polypeptide expressing nucleotide sequence isolated from the Sargasso Sea
catgaacgaccacctatacatttttgacaccactttgcgcgacggtgagcagagccccggcgcttccatgacagcagcggagaaaatccggattgcgcgccaactagagaaaactcaggtcga

SEQ ID NO: 236789 - DNA, 236 bp, Unknown
  Bacterial polypeptide expressing nucleotide sequence isolated from the Sargasso Sea
tatgagcagcaaagataaagtttttatatttgatacaactatgagggatggtgaacagtcacctggagcctctatgagtgttgaggaaaaaattcaaatttcaagagtttttgatgaaatgggaatagatattattgaggcgggttttccaatatcttcacctggagattttgaagcagttagcgctataagtaaaagtgtaaaaaattcaattccatgtggattagctagagcta

SEQ ID NO: 236790 - DNA, 446 bp, Unknown
  Bacterial polypeptide expressing nucleotide sequence isolated from the Sargasso Sea
tatgagcaataaagataaagtctttatatttgatactactatgcgtgatggtgagcaatcgccaggcgcatctatgagtttagaagaaaaaattcaaatcgccagagtatttgatgaattaggtatcgatataattgaagcaggttttccaatagcctcaccaggtgactttgaggcagtttcagaagtaagtaaaattttaaaaaattctattcctgcaggactttcaagacactcagtaaaagatattgatagagcttatgaagctctaaaacatgcaccaagatttagaatacatacattcatttctacaagtccattacacatgaagcataaactaaatatgtctccagaagatgtttatgagtcaattggaaaacatgttgcttatgcaagaaagtttactgatgatgttgagtggtcttgtgaagatggaacgaagactg

SEQ ID NO: 236791 - DNA, 478 bp, Unknown
  Bacterial polypeptide expressing nucleotide sequence isolated from the Sargasso Sea
gatagagacctagaagcaattgttagtgaacaagtacagcttccagaagcaaaatttcaattaagccttgtacaagtaagttgcggtaacgcatctaaacccactgcgaccattactcttctgaacacggaagataatactgaggatactgctgtatctatagggactggacctgttgatgctgtatgcgagactttaaataaattagcgaaagttcctaatgaattaattgaattttctgtaaagtcagtaacagaaggtattgatgctttgggcgaagtaacaataagaataagaaaggataataagatatattctggtcattctgctgatactgatgttgtagttgcggctgcgaatgcttacgttaatgctttaaataggcttatattctctgagaaaaaaaattcaatacacccacaatttgataatttagaaaattctgaaaaaacatttctatctaatcccgcaaattaaa

SEQ ID NO: 236792 - DNA, 425 bp, Unknown
  Bacterial polypeptide expressing nucleotide sequence isolated from the Sargasso Sea
tatgtctgacaataatagagtttatatttttgatacaactatgcgtgatggtgagcaatcacctggcgcgtctatgagtttggaggaaaaaatccaaattgcaagagtatttgatgaactaggaattgacataattgaagcgggttttcctatagcttccccgggcgattttgaagcagtaactgaagtaagtaaaatattaaaaaattctataccagcaggattatctcgtcattctaaaaaagatattgatagatgttatgaggcattaaagcatgctcctagatttagaattcataccttcatttctactagtcctctacacatgaagcataaacttaataaatctcccgatgaggtctatgaagcaataaaagaacacgtaacatatgctagaaattataccgatgatgttgaatggtcat

SEQ ID NO: 236793 - DNA, 118 bp, Unknown
  Bacterial polypeptide expressing nucleotide sequence isolated from the Sargasso Sea
attgactgataaagtattaatatttgatactacccttagagacggagagcagtctcctggggcttcgatgaatcaagaagaaaagctctctattgctagactattagaggagctaaag

SEQ ID NO: 236794 - DNA, 746 bp, Unknown
  Bacterial polypeptide expressing nucleotide sequence isolated from the Sargasso Sea
aatgagcaaagaacaactttatatatttgacacaacactgcgtgatggagcacaaacacaaggtgtagatttttcaattgatgataaagaaaaaatctcatcagcattagataaattaggtgtggattatgttgaaggtggttggccaggtgcaaatccaactgatactgagtttttcaataaagatcataattttaaatcaacgaaattaactgcatttggaatgactaaaaaatctgaacacagtgcagaaaatgaccctatgctctcatcattaattaattcaaaaagtacctctgtttgcttgtttggaaaatcatgggattttcaagtgaatatcgcattaggaataagtaatgagcagaatttaatgaatataagtgaaagtactaaacacattgttaaatctggaaaagagttcatgtttgatgctgaacatttttttgatggatataaagctaatccggaatatgcaatgtcatgtttaaaagctgcttttgataatggtgctagatggattgtattatgtgatacaaatggcggtacacttccacacgagataacagaaattgtatctaaagtaagcaagcaaattccgggaaaaaatttaggaatacatgctcataatgataccgaaaatgcagtagctaatagtcttgcagcagttcaagtaggtgttagacaagtgcagggcacaatcaatggtttgggtgaaagatgtggaaatgctaatttgatgtcattaa

SEQ ID NO: 236795 - DNA, 409 bp, Unknown
  Bacterial polypeptide expressing nucleotide sequence isolated from the Sargasso Sea
tatgatagataaaaacaaaattataatttttgatacaaccatgcgtgatggagaacagtctccaggagcatcaatgagtttagaagaaaaattacaaatctctagagtatttgacgaattaggcgtagatatcatagaggctggttttcctatagcttcgcccggcgacttcgaagctgtaactgaaataagcaaaactcttaaacggtctataccagcaggattagctagagccactaaaaaagatattgatgcatgtcatcaagctttaaagcatgcaaaaaattttagaattcacacttttatatctacaagtcctcttcatatgaagcataaactaaataaatcaccagaggaagttttagaatctattaaagaaagcgtcgcttatgctagaaaatttacagat

SEQ ID NO: 236796 - DNA, 703 bp, Unknown
  Bacterial polypeptide expressing nucleotide sequence isolated from the Sargasso Sea
ttttgcacatgaatctggtattcaccaagatggaatgcttaaaaatagaaacacttatgaaataatgacacccgaaagtgttggagttaaacaaacgtcattagttatgggaaagcattcaggaagacatgcatttaaagataaattaacaagtcttgggtacaaagatgtaactgacgatgtaattgagagtgcatttggaaaatttaaaattttggcagacaagaagaaacatgtttatgatgaagatattattgctttggtagatgatagcttaattatagataataaagtaaatgcaattaacttaaaatcattaaaagtttatgctggaacaggagaaccccaaaaggctgaaatgattttagatgtttatggcgatattaaaaatgcagcagagactggggatggtccagttgacgctatttttaaatgtatcaaaaaattatatcctcatgatgttaagcttcaattgtatcaagttcatgctgtgaccgaaggaacagacgctcaggctacagtaagtgtccgaattgaggaaaatggcaaaacaactgttggacaagcagcagatactgatacattagttgcatcagctaacgcttacatcaatgcgttgaataaaatgataattaaaagagacaaaactgctccaggacaaactacagagcaaagttttgaacaaaaagtgagaggaatttaa

SEQ ID NO: 236797 - DNA, 781 bp, Unknown
  Bacterial polypeptide expressing nucleotide sequence isolated from the Sargasso Sea
atgaataaggaaaaaatttatatctttgatacaacattacgagacggtgcacagaccgagggtgtagactttacaattgaagataaaaataaaattgcaaaagttttatctgaaattggtgttgattatatagaaggaggctggccaggagctaatccagtagacacgaaatttttttctcaacctcctaaaatgcaagatacattattcactgcatttggcatgacaaaaaaaacaggtagaagtgctgataatgatcctggattagcatcattaattaatgcgaacacacctgcagtatgtgtagttggaaaatcatgggatttccatgtaaaaattgctttaggcataaaagaaaaagaaaatttagaaaatattaaagaaactacaaaacacttcgttaaaaataaaaaagagtttttatttgatgcagagcattttttcgatggatataaagctaattctgaatatgcgcttaattgtttacgtcaagcatatgataatggagcaagatgggtagttttatgtgatacaaatggcgggacactgcctaatgaaattagagaaattgtatcaaaagtttcaaaaattattcctggaaaaaatttaggtattcatgcacacaatgatactgaaaatgcagtagctaattctttggctgctgttgaatgtggagtaagacaaattcaaggtactataaatggattaggtgaaagatgtggaaatgcaaatttaatgtcaataatcccccaatttatgtctaaaaaaatctttcagcgat

SEQ ID NO: 236798 - DNA, 247 bp, Unknown
  Bacterial polypeptide expressing nucleotide sequence isolated from the Sargasso Sea
aatgactgataataacagagtatacatttttgatactacaatgcgtgatggagagcagtctcctggcgcatcaatgagtttggaagaaaaaatccaaatagctagagtatttgacgaacttggaatagatattattgaagctggatttccaattgcatctccaggagattttgaagctgtaactgaagtcagtaaaatattaaaaaaatcaatacctgcaggtttagcaagacatcaaaaaaagata

SEQ ID NO: 236799 - DNA, 306 bp, Unknown
  Bacterial polypeptide expressing nucleotide sequence isolated from the Sargasso Sea
tatgactaaaaatcaaattattatttttgatacaactttgagagatggtgagcaatcaccaggcgcatctatgagtcttgaggaaaaaataaagattgctcatgcatttcaagatctaggtgttgatgttatggaagcaggttttccagccgcatctcaaggagattttgaagctgtaactgagatttcaaagatttttaaaactacaactccatgtggtttagcaagagctttaaaaaatgatttagaaaaatgtgttgaatctttaaagcacgcaaagaattttagaatacatacctttgtttc

SEQ ID NO: 236800 - DNA, 387 bp, Unknown
  Bacterial polypeptide expressing nucleotide sequence isolated from the Sargasso Sea
aatggataaaacaaataaaaaatataagccatataagcctgtaagtaaggagaacaggtcatggccttcaaaagttatagaaaatgctcctatttggtgttctgtagacctgcgagatggaaaccaagctcttattgagccaatgggagatgaaagaaaaaaaagaatgtttaatctattgtgcaaaattggttttaaacagattgagattggatttccggctgcatcacaaactgattttgatttcacaagatatttaattaatgaaaaagttatccccactgatgtaactattcaagttcttacgcaagctagacccgaaattataaagagaactttcgaagctcttgatggagctcctaatgccattcttcatttttataattc

SEQ ID NO: 236801 - DNA, 512 bp, Unknown
  Bacterial polypeptide expressing nucleotide sequence isolated from the Sargasso Sea
tatgagcagcaaagatagagttataatttttgataccactatgcgagatggtgagcaatcaccaggggcatcaatgagtttggaggaaaaaattcaaatagcaagagtatttgatgaattagggatagatattattgaagcagggtttccgattgcatcacctggagattttgaagcagtaacagaagttagcaagattttaaaaaaatctattcccgcaggtttatctagacattctaaaaaagatattgatagagcttatgaagctttaaaacatgcctcaagatttagaatccatacatttatttcaacaagtcctcttcatatgaaacacaaattaaatatgtcgccagaagatgtttacgagtctattggacagcatgtagcttatgcaagaaaatttactgatgatgttgaatggtcttgtgaagatggcacaagaactgatatggattttatgtgtaagacagtagagcttgcaattaaaaatggagcaacaacaataaatatac

SEQ ID NO: 236802 - DNA, 129 bp, Unknown
  Bacterial polypeptide expressing nucleotide sequence isolated from the Sargasso Sea
gagggcatcgaagcggccatcgccgctggtgccaccacgatcaacattccagacaccgttggctacaccacaccatcggaattcggagacctgattgctggcatcaatcgccatgtccccaacatcggg

SEQ ID NO: 236803 - DNA, 913 bp, Unknown
  Bacterial polypeptide expressing nucleotide sequence isolated from the Sargasso Sea
gtttccgaagtaagtaagcaaatgtcctgggaaaaaattttgggaatacatgctcataatgacactgaaaatgcagttgctaatagtctagctgcagttcaagcaggagctaggcaagttcaaggcactatcaatggtctaggagaaagatgtggaaatgctaatttaatgtcattaataccttcattttttttaaagaaagatttttcagataagtttgatttaagtattaaaagagaaaatttaaaaaatttaactcaatgctcaagattgttagacgagatattaaatagaaaacccaataaacatttaccttatgtgggagcttctgctttttctcacaaaggtggaatgcatgtttcagcagttcaaaaagatcctaaaacttatgaacatgttattcctgaagaagttggaaattccagaaacattgtagtttctgatcaatcaggtcaatcaaacattatgtctagattgaattcaataggaattaaggttgagaaaagtgatccaaaaattaaaaagcttttagatgaagtgaaggatagagaattcattggctatagttatgatggtgctgatgcttcttttgagttgttggctcgaagattaatgggagaaataccaagatatatctctattaatgaatatgatgtgtcagtaaagaaagacaatgcaggtgaaattatttcatacgcaaaagctcaattagaagtagatggtgataaaattatgtgtgaaggacaagggaacggacctgtcaatgccctggataatgctattagaaagaatgttaacaagcttgctaaatattcagaatatttaaaagatttacgacttgttgattacaaagttagaattttaaatactggcacagaagctgtaacaagagttagtatcgagagcacagatt

SEQ ID NO: 236804 - DNA, 231 bp, Unknown
  Bacterial polypeptide expressing nucleotide sequence isolated from the Sargasso Sea
aatgactgaaaaaatttatatttttgacacaactcttcgagatggagagcagtctccaggggcatcgatgaatttagatgaaaaacttcaaattgctgaagtattagattcaatgagagttgacattattgaggctggcttccctattgcatcaaatggagattatgaagcagtttgtgaagtaagtaaaaatgttaaacattcaacaattgctggtctagcaagagcaag

SEQ ID NO: 236805 - DNA, 912 bp, Unknown
  Bacterial polypeptide expressing nucleotide sequence isolated from the Sargasso Sea
aatgagtaaagataaaatatatatatttgacacgactttaagagatggagcacaaactgaaggtgtagacttctcgatcgaagataaaaataaaatcgctaatgtattgtcagaaattggagtagattatattgaaggaggttggcctggagcaaatccaatagatactaaatttttttctcatcctccgaaaatgaataaaagtatttttactgcctttggaatgactaaaaaaacaggaagaagtgctgaaaatgatccaggtttagcatctttaatgaatgcaaactctccagcagtatgcgttgtaggaaagacttgggattttcatgtaaaaatagcattaggcattaaaaacgaagaaaatttagaaaatattagagagacaactaaacattttgttaaaaacaataaagagtttttatttgatgctgagcactttttcgatggttacaaagctaatccaaaatatgcattagattgtctaaaacatgcatatgactctggggctagatggttagttctttgtgatacaaatggaggaactctacccaatgaaattagagagattgtttctaaagtatcaaaagaaataccaggaaaaaatcttggtattcatgctcacaacgatacagaaaatgctgtagctaattctttagcagctgttgagtcaggcgtaagacagatacaaggtactattaatggattaggcgaaagatgtggtaatgcaaacttaatgtcgataattccgacattatgtttaaaaaaatcatttaatgataaatttgatattaatatgaaaaaagaaaaattatcatcattaacagagtgttctagacttttagatgagatccttaatagaaagccaaacaaaaatatggcttatgttggtgcatctgctttttcccataa

SEQ ID NO: 236806 - DNA, 190 bp, Unknown
  Bacterial polypeptide expressing nucleotide sequence isolated from the Sargasso Sea
atgaaagattctagagaaataattatatttgataccactttgagagacggtgagcaggctcccggctgcagtatgacaattggtgaaaagctaaaaattgcacatgcacttaaagaattaaatgttgatgtaattgaggatggttttgcagcagcatcaccaggcgattatgaagctggaatgcaatgcc

SEQ ID NO: 236807 - DNA, 316 bp, Unknown
  Bacterial polypeptide expressing nucleotide sequence isolated from the Sargasso Sea
tgtcgaagcccccaccctcataaggatagaggaaccgcaggggcagcatctgaatacggtacaagggcaggagcagaaagagtcgaaggaactctacaaggaaatggagaaagaactgggaaggtagataaggtaacaatagctcaaaaaacgctcactcaaggaatagatcctaaattagatttttcaaatataaattcagttatgagagagggtgagtactgtaatcaacttcccgttcatcctaggcatccttatgctggagatcttgtttttactgctttttctggttcacatcaggatgcaataaaaaaag

SEQ ID NO: 236808 - DNA, 243 bp, Unknown
  Bacterial polypeptide expressing nucleotide sequence isolated from the Sargasso Sea
tatgagcaaaaaagacagagtttttatatttgatacaactatgagagatggagaacaatctccaggcgcatctatgagcgtagaagagaaaattcaaatttcaagagtttttgacgaaatgggaattgatataatcgaagctggatttccaatttcttcaccaggcgatttcgaggctgtgtcagcaatcagcaagagtttaaaaaattctattccttgtggcttatctagagctttaaaaaa

SEQ ID NO: 236809 - DNA, 250 bp, Unknown
  Bacterial polypeptide expressing nucleotide sequence isolated from the Sargasso Sea
aatggaagataaaaatagaataataatttttgatactacgatgcgtgatggagaacagtctccaggcgcatctatgtctcttgaggaaaaaattcaaatttccagagtttttgatgagctaggaattgatgtaatcgaagcaggttttccaattgcttcaccaggtgattttgaggccgtaaccgctataagtaaaattttaaaaaaatcagtcccggcaggtcttgcgagacatacaaaaaaagaatat

SEQ ID NO: 236810 - DNA, 550 bp, Unknown
  Bacterial polypeptide expressing nucleotide sequence isolated from the Sargasso Sea
tttgagtcgagaagatttaaatgatgcttttgcccgttttaaggatttagctgacaggaaaagagaaattactgatagagacttagaagcaattgttagtgaacaagttcaactcccagaagctaaatttcaattaagtcttgtacaagtaagttgcggtaacgcatctaaacctactgccaccatttcgcttttaaatacagaagataatactgaggatacggctgtatcaatagggacaggacccgttgacgctgtatgcgaggctttaaataaattagctaaagttcctaatgaattaattgaattttctgttaagtcagtaacagaaggaattgatgctttgggcgaagtgacaataagaataagaagggataataaaatatattctggtcattctgctgatacggatgttgttgttgctgcagcgaatgcttacgttaatgccttaaatagacttgtattttctgagaaaaaaaattcaattcatccacaatttgataatttagaaaattctaataatacatatatatctaatcctgcaaattaa

SEQ ID NO: 236811 - DNA, 685 bp, Unknown
  Bacterial polypeptide expressing nucleotide sequence isolated from the Sargasso Sea
catgcaacacggagccatcaccaaataccgcccctttccgaaaatcgagctgcccgaccggcaatggcccgacaagcggatcgagcgggccccgatctgggcgagcgtcgacctgcgcgacggcaaccaggcgctggcgatccccatgaacatcggggagaagctggaaatgtttcagatgctggtggcgatcggcttcaaggagatcgaggttggcttcccctccgccagcgacacggagttccagtttatccggcggctcgtggaggaccggttgattcccgaggacgtcaccctgcaggtcctggtgcaggcccgcgagcacctgatccgccgcacctttgagagcctggagggtgtgcccagcgcgatcgtccatctctacaactcgacctcgccgctccagcgccgggtcacctttgggaaaagcaaggcagagatcctgcaaatcgccgtcgagggcacccgcctggtaaagagcctcgtcgacaccctgccgggcacacgtatccgcctggaatattcgccggagagcttttcggacaccgaggtggactacgccctggaagtctgcgaggccgtgatggaggtgtggcagcccactgcggaggagcccatcgtcctcaacctgccggcgaccgttgaggtggccaccacccaacgtcccatgccgaatcaaatcgag

SEQ ID NO: 236812 - DNA, 1608 bp, Unknown
  Bacterial polypeptide expressing nucleotide sequence isolated from the Sargasso Sea
aaatgaaaaaagaaaaaatttatatttttgacacgacactgcgagacggagctcagacagagggcgttgatttcacaattgaggacaaaaataagattgcaaaagttttatctgatataggtgttgactatattgaagggggatggcctggagcaaatccagttgatacaaaattcttttcaaaacctcctaaaatgcataaaacacaatttacagcatttgggatgacaaaaaaaacaggtagaagcgctgataacgatcctggtttggcttcattagttaatgctaatacgcctgctgtatgcgttgtcggaaaatcatgggattttcatgtcaaagttgctcttggcattaaaaatgaagaaaatttagataatataaaagagactacaaaacatttcgtaaagaataataaagaatttttatttgatgctgaacacttttttgatggatacaaagctaactctgaatatgcaatgtcctgtcttaaacaagcctatgataatggagcaagatgggtagttttatgcgatacaaacggaggtaccttacccaatgaagtaagagagatcgtatcaaaagtttctcaagtaattcctggaaaaaatcttggtattcacgctcataacgatacagaaaatgctgttgcaaattctttagctgctgtggaatgtggcgcaagacaaattcaaggcactataaatggattaggagaaagatgtggtaacgcaaatttaatttcaataattcctaatttatgtcttaaaaaatcttttagtgataagtttgagataaatattaaaaaagaaaaactatcctctttaacagattgttcaagattgttggacgaaatattaaatagaaaaccaaataaaaatatggcctatgtaggtgcatcagccttttcacataaaggcggtttacatgtttcagcagtaaaaaaagacccaaaaacttatgaacatattgatcctaaattaataggcaatcacagaaatataattatttcaaatcaatcaggaagatcaaacatactatcaaggttagagaaatatggagtaaaaattgactctaaagactcaaaagttcaaaaaattttagatgaggtcaaagatagagaatttagcggttattcttatgatggtgcagatgcgtcttttgaacttttagctaatagacttttaggtaaagtgccagaatacttaaaggtgaaaagctatgatgttaatgtttctaaatcagataagattaaaactaaagctagtgttgtttttttaatcgacagtaaagaaattgagtgtcatggtgaaggtaatggtccagtaaacgcgttagataatgctataagatcaaattttaaaaaggtgacaaaatattataattttttttcagaccttaaattgcttgattataaagtgagaattttaaatacaggaactgaggctacaacaagagttttaattgagagtactgataaaaaaggtataagttggtttactgttggtgtttcgccaaatataattgaagcttcatttaaagcattaattgatagtctagattacaagctttataaagaaaaagctccagccaatttaaatgaaaaataaa

SEQ ID NO: 236813 - DNA, 1009 bp, Unknown
  Bacterial polypeptide expressing nucleotide sequence isolated from the Sargasso Sea
aatgaaaaaagaaaaaatttatatttttgatacaactctcagagatggggcacaaacagagggcgttgatttttcgattgaggataaaaataaaatagctaaagttctatctgagataggagtggattatattgaaggtggatggcctggtgctaatccggttgatactaagtttttttctaatccacctaaaatgaataaaacactatttactgcattcggaatgacaaaaaaaacaggaagaagtgttgaaaatgatccaggactagcatctttaatgaatgcgaatacatctaccgtttgcgtcgtaggaaaatcttgggattttcatgtaaaagtagctttaggtataaataacgaagaaaatctagaaaatattagagaaactacaaaacacttcgtaaaaaataaaaaagagtttctatttgatgccgaacatttttttgatggatataaagctaatccagaatacgcagttaattgtcttaaacaagcttatgaaaatggagctagatgggttattttgtgtgatacgaatggaggaactcttccaaatgaaattagggagattgtttcaaaagtttcaaaaataattcctggttctaatctaggaatacacgcacataatgatactgaaaatgctgttgctaattcactagcagccattgaatgtggtgcgagacatgttcaaggcactattaatggtttaggtgaaagatgtggtaatgcgaatttaatgtctataattccaactttatgtttaaagaaatcctttagcgataaatatgaaattaacattgataaaaaaaagttatcatcattaacagaatgctcaagattattagatgaaattttaaataggaagccaaataagaatatggcgtatgtcggggcgtcggcattttctcataaaggaggattacacgtctctgctgtgaaaaaagatcctaaaacttatgagcatattgatcctaaattaatagggaatcatagaaatataatcgtgtca

SEQ ID NO: 236814 - DNA, 1542 bp, Unknown
  Bacterial polypeptide expressing nucleotide sequence isolated from the Sargasso Sea
gtgtacatttttctcttgatgaaaaaaccaaaattgctcatgcattagatgctttaggtgtagattatatagaaggaggttggccaggtgctaatccttctgatacggaattttttcaaaaaggtttaaatttaaaaaattcaacctttactgcttttggaatgactaaaaaagcaggacgtagtgctgaaaatgatcctggtttatcgtcaattttaaattcaaacacaacatcagtttgtcttgtcggaaaagcatgggattttcatgttgatgtagctctaggtatttcaaaagaagaaaatttagaaaacataagtgaaaccactaaacactttgttaaaaataataaagaattcatgtttgatgcagaacatttttttgacggttataaatcaaatcccaaatatgccttagaatgcattaaagcagcttatgataatggagctaaatggatagttttatgtgatactaatggtgggactttacctcatgaagtaactgaaatagtaaaagaagtatctaaaaatgtaccaggaaaaaatttgggtattcacgcacataatgacactggcaatgctgttgcaaattcaattgctgcagttttatctggtgctcgtcaaatacaaggtactattaatggtttaggtgaaagatgcggtaatgctaatttaatgtcaattattccaacgtttcatcttaaaaaagaattatcagataagtttgaaataaatattaaagaaaaaaatataaagcacattactcaatgttcaagattacttgatgaaattttaaatagaaagccaaataaacatttaccatatgttggagctgcagccttttcgcataaaggcggattgcatgtttcagcagtacaaaaagacccaaaaacatatgaacacattgatccctcagatgttggtaatgcaagaaacatagttgtttcagatcagtcaggtaaatcaaatattttatctagactgaaaacaattggaatagaaattgaggaaaatgatccgaaagtcaaaaaactattagaagaagtaaaagatagagagtttattggttatagttatgatggtgctgatgcttcattcgaactattagctagaagagtaataggagaaattccaaggtatatatcaataaaagaatatgacgtttcagtttcaaaaaatgatcaagataaaattatttctagagcaaaagcaaaattagaggtggatggagaacagattgtctgtgaaggtgaaggtaatggacctgttcatgctctagataacgctataagaaaaaatgttaccagattagaaaaatattcagaatatttgaaagatctaaaattagttgattacaaggtaagaattttaaatacaggaactgaggccactactagggtttctattgaaagcacagactcgaaagggaagaattggtttaccattggagtttcgccaaacataatagatgcatcatttaaggctcttattgatagtttagatttcaaattatttaaggataaagctcccgcaagtaaataaa

SEQ ID NO: 236815 - DNA, 1603 bp, Unknown
  Bacterial polypeptide expressing nucleotide sequence isolated from the Sargasso Sea
atgagtaaagaaaaaatatacatatttgataccacattaagagatggagctcagactcaaggggtagatttttctatagatgataaattaaaaattgctaaatctttagatgatttaggtgttgattatatagaaggaggttggccgggagcgaatccaacagatactgaattttttcagaaaaaaattaaactcaataattctgtgcttacagcttttggtatgacaaaaagatcaggtcgaagcgctgataatgatccgggactttcttcaatattaaatagtaatacaccagcagtttgtttagtcggaaaatcatgggactttcatgtagatgtagctttaggcataacaaatgatgaaaatttggagaatatttcggaaagtgcaaaactttttgtaaaagaaaaaaaagaatttatgttcgatgccgaacatttttttgatggatttaaaaataacaaagaatatgcactttcatgtattaaatcagcatatgaaaatggagcaagatggattgttctttgtgatacaaatggtggcaccctcccaaatgaaattacagaaattgttggtgaagtagtcaaaactgttcctggaaaaaacttaggaatccatgcgcacaacgatactggaaatgctgtagctaattctttagccgctgtcttatccggagtaagacaaattcaaggaacaattaatggattaggtgaaagatgtggtaatgcaaatctgatgtcaataattccaacattacatctaaaaaaaacctatacaaataattatgaaataaatattaaaaaagataatattaataaactaactcaatgttcaaggttacttgatgaaatattaaatagaaagccaaatcaacacttgccttatgtaggtgctgcagccttttcacataaaggaggattacatgtatctgcagttcagaaagatcccaaaacttatgaacatataaatccactagaagtaggaaatgttagaaatatcgttgtttctgatcaatcaggaagatcaaacatagtttcaagattaaattctttaggcattcattttaaacaagacgacccaaaaattaaaaaactcttagaggaagttaaagatagagagttcataggatatagttatgatggtgcggacgcttcttttgaattactagcgagaagagtaatgggtgaaattccaagatatatctctattaaagagtatgatgttagtgtcaaaaaaaataatttaggagaaattatttcttcggcaaaagcccaattagaagttgataagaaattaattctttgtgaaggtcagggcaatggtcctgtccatgcacttgataatgctatcagagacaatgtagacaaactagccaaatattcacaatatttaaaagatttaaaattagtagattacaaagtcagaatactaaatactggaacagaggctgtaacaagagtttcaattgaaagtaccgattcaaaaggaaaaaattggtttacaattggagtgtcagctaacattattgatgcttcttttaaagcgttagttgacagtttagattataaattatttaaagataatgctcctgcaagcctttaat

SEQ ID NO: 236816 - DNA, 442 bp, Unknown
  Bacterial polypeptide expressing nucleotide sequence isolated from the Sargasso Sea
atgtattatgctcgagttaaaaatacaatgtcagataaagaaaaattatacatatttgatacgaccatgcgagatggtgagcagtcgccaggcgcatctatgagtgtcgaagagaaaattcagatatctagagtttttgatgaaatgggaatagatattgttgaagccggttttccaatagcatcaccaggagattttgaagcagtttctgaaataagtaaaataatgaaaaactcaattccatgcggtctttcaagagcattaaaaaaagatattgatgcatgtcacgaatcattaaaacatgctccaagatttagaattcatactttcatttcaacaagtcctctacacatgaaacacaaacttgaaatgacaaatgagcaagttttagatgcaattaaagaaagcgttacttatgcaagaaactttacagatgacgttg

SEQ ID NO: 236817 - DNA, 847 bp, Unknown
  Bacterial polypeptide expressing nucleotide sequence isolated from the Sargasso Sea
atggctatgaaaactagaagtgatttaatgccatattctactggaataaatacaacattattaagcaaagcatcaaaagtcgtttcgaacgcaacaggttttcctgttcagtttaacaaggctattgttgggaagaatgcttttgcacatgaagcaggcattcatcaagatggaatgcttaaaaatagaaacacttatgagattatgacacctgaaagtgttggagttaaacaaagttctttggtcatgggtaaacattcgggaagacatgcatttaaagacaaactaactagtttaggttatgtagatttaactgatgatgttattgaaaatgcctttggtaaatttaaaatactagctgacaaaaaaaaacatatttatgatgaagatattgttgcattagttgatgatagtttaattaaagaagataacgtaattactcttaaatcattaaaagtatttgcagggacaggcgaaccacaaagagcagaaatgacattagaagtttacggagaaattaagaaaactactgaaacaggggatggacctgttgatgcaatatttaaaggtattaaaaaactttatccacacgatgttaatttacaactttatcaagtgcatgcggtaacagaaggaacagatgcacaggcaacagtaagtgttagaatagaggaagaaggaaaaacaacagtcggacaagctgcagacacagatactttggttgcttcagcaaatgcttatataaatgcacttaacaaaatgattattaaaagaaaaagaaattttgcaccagacaacatagaagtaaaaaagaatttaaaaactgaaaaaatgaaaggaatataaa

SEQ ID NO: 236818 - DNA, 466 bp, Unknown
  Bacterial polypeptide expressing nucleotide sequence isolated from the Sargasso Sea
atggctgataaaaacagagtttatatatttgatactactatgcgtgatggtgagcagtcgccaggcgcatcaatgagtttagaagaaaaaattcaaatatctagagtctttgatgaactaggaattgatattattgaagcaggttttccaatagcgtcaccaggagattttgaagctgtaaccgaaataagcaaaatattaaaaaaatctatccctgcaggtttatcaagacactcaaaaaaagatattgatagatgttatgaagcattaaaacatgctccaagatttagaattcacacatttatttcaactagccctcttcatatgaaacacaaactaaatatgacttcagaacaagtttatgattcagttaaagaacatgttacctacgctaggaaatttactgacgatgttgaatggtcatgtgaagatggaacaagaactgatatggattttatgtgcaaaa

SEQ ID NO: 236819 - DNA, 1576 bp, Unknown
  Bacterial polypeptide expressing nucleotide sequence isolated from the Sargasso Sea
atgagtagagataaactatatatatttgatactacactcagagatggagctcagactcaaggtgtagatttttcaattgatgataaacttaaaatagcaaaagctttagatgatttaggcgtagattatatagaaggtggatggccaggtgctaatccaacagatacagaattttttcaaaaaaaaattaaattaaataattcaattatgactgcctttggtatgaccaaaagagcaggcagaagtgcggataatgaccccggactttcatctatattaaatagcaatactaaagcagtgtgtttagttggtaaatcatgggattttcatgttgatgttgcattaggaatatcaaacgaagaaaatttagaaaatatttctgaaagtgcaaaactttttgtcaaagaaaaaaaagaattcatgtttgatgctgaacacttttttgatggttttaaaaacaacaaagaatacacactttcatgtattaaatcagcatatgataatggcgcaagatggattgtcctatgtgatacaaatggaggaacattacctaatgaagtttcggaaatagttaatgaagttaccaaatctgttcctggaaaaaatcttggcattcatgcacataatgatactggaaatgctgttgcaaattctttagctgcaatcttatcaggcgtaagacaaatacaaggaacaattaatggacttggagaaagatgtggtaatgcaaatttaatgtcaataattccaactttacacttaaaagaaacatattcaaaaaattatgaaataaatattaaaaaagaaaatattaataaattaactcaatgctcaagattacttgatgagatattaaatagaaaacccaatcaacacatgccttatgttggtgctgctgctttttcacataaaggtggacttcacgtttctgctgtacaaaaagatccaaaaacttatgaacatataaatccagaaacagtgggaaatgcaagaaatattgttgtttcagatcaatcaggaaaatcaaatatagtttcaagattaaattctattggaatagattttaagcaggatgatcctaaaataaaaaaacttttagaagaagttaaagatagagaattcatcggttacagctatgatggagctgatgcatcttttgaacttttagcaagaagaataatgggagaaattccaaggtatatattaattaaagagtacgatgttagtgtaaaaaaaaatagttcaggagaaattatttcttccgctaaagcccaattagaagttgataagaagttaattctttgtgaaggtgagggcaatggtcctgttcatgctcttgataatgcgataagaaataatgtggacaaacttgcaaaatattcacagtatttaaaagatttaaaattggtagattataaagttagaattcttaacacaggaactgaagctgtgacgagagtatcaattgagagcacagactctaaaggtaaaaattggtttacaattggagtttcagcaaatattattgatgcatccttcaaagcacttgttgatagtttagactacaaattattaa

SEQ ID NO: 236820 - DNA, 670 bp, Unknown
  Bacterial polypeptide expressing nucleotide sequence isolated from the Sargasso Sea
tgtatttacagctttttctggctctcatcaagatgcaataaaaaagggtttccaggcaatgaaaacctctaatgaccctaaatgggcggttccttatcttcctattgatccagcagatcttggcagaagttatgaagcagttgtaagaattaactcacaatcaggaaaaggtggagttgcatttttattggaaaaggaccatggagtatctttacctagaaggttacaaatttcaatgagtcaaaaaatacaaaggcttgcagatcaaacggggaaagaaatatcaacattagaaatttgggaaatatttgaaaaaaattttttgattcctaaaaatggctataagtacattaagcattcatcttcttcgaaagatgacactaataatttagagttagaaatgatctttaataactctaaagagattattaatggttcaggaaatggtcctattgatgccttcataaatggattaaaaactaatttaaatcttgatctaaaagtctcagattacaatcaatctgcaatttcatcagggtctgatgctaaagccggtgcatatattgaacttgaaatgaatggcaaaacaagctggggagttggcataaattctagtacaacaaaagcatcttttgaagctatagttgttggaattagtaaacttgtctaa

SEQ ID NO: 236821 - DNA, 808 bp, Unknown
  Bacterial polypeptide expressing nucleotide sequence isolated from the Sargasso Sea
ttaatgccatatgaaactggaataaacacaacacttttaagcaaagcttcaaaaattgtttcaaacgcaacaggatttcctgttcaatacaataaagccatcgttggaaaaaatgcttttgctcatgaagcaggaattcatcaggatggaatgttaaaaaatagacaaacatatgagataatgacacctgaaagtgtaggagttaaacaaacatcattagtgatgggaaagcattctggtcgccatgcatttaaagataagttaaacagcttaggctatccagatttaactgacgatgtagtaggaaatgcatttgcaaaattcaaagtcttagcagacaagaaaaaacatgtttacgatgaagatattattgccttagtagatgatagtttaattgtagataataaagtaaatgcaataactcttaaatctttaaaagtttttgctggaacaggagaaccacaaaaagcagaaatgactttggatgtttacagtgatgttaaaaacgcaacagaaactggagatggtccagtggatgcaatattcaaatgtattaaaactttatatcctcacgatgttaacttacagctttatcaagttcatgcagttacagaaggaacagatgcacaagcaacagtaagtgttaagatagaggaaaagggcaaaacaacagtaggtcaagcagctgatacagatactttagttgcatcagcaaatgcttacataaatgcattaaataaaatgataatcaaacgagataaaacagctcccatggagcaagaaagtcagaaagtaagagggatataat

SEQ ID NO: 236822 - DNA, 1099 bp, Unknown
  Bacterial polypeptide expressing nucleotide sequence isolated from the Sargasso Sea
atgaccaaagaaaaagtatatatatttgatacaacattaagagatggagcacaaactcaaggtgttgatttctcaattgatgataaacttaaaattgcttcagcactagaccgcctgggagtagattatatagaagggggatggcctggagccaacccaacagatactgaattttttcagaaagatttaaatctaaaaaattctattttaactgcttttggaatgacaaaaaaaactggtagaagcactgaaaatgatccaggtattgcagctatatcaaattgcaatactagagcagtatgtctagtaggtaaagcatgggattatcatgttgatgtagcattagaaattacaaatgaagaaaatttagaaaacatagttgatagtacaaaacattttgtgaaagaaaaaaaagattttatgtttgatgctgaacatttttttgatggatataaaaataatccaaaatattctttaaaatgtataaaggcagcatatgacaatggagctagatgggttgttctttgtgacactaatggaggaacattgccaaatgagatatccaaaatagtttctgaggtgataaatcatattccaggtaaaaatcttggtattcatgcccataatgatactggaaatgcagttgctaactcattagcagcagttctttctggtgcaagacaagtacaaggaacaataaatggattaggtgaaagatgtggaaatgcaaatttaatgtcaataattcctacactccacttaaaagaaaatttctcaaaattatttgaaaccaatattaaaaataataatataaaaaatctaacgcaatgttctagacttttagatgaaattttaaatagaaaacctaataagcatttaccttatgttggagctgctgccttttcacacaaaggaggcctacatgtatcagctgttcaaaaggatcctaaaacatatgagcatattaaaccagaagaggtaggtaatcacagaaatattattgtttctgatcaatctggtaaatcaaatattttatctaggttaaaaactattggaatagaaattgaagaagataatcctaaaattaaaaaactttaga

SEQ ID NO: 236823 - DNA, 310 bp, Unknown
  Bacterial polypeptide expressing nucleotide sequence isolated from the Sargasso Sea
atgagtgacaaaaatagaattataattttcgatactacaatgcgtgatggagagcaatcaccaggcgcaacgatgagtttagaggaaaaaattcaaatagctagatgttttgatgaactgggaattgatgttattgaagcaggttttccaattgcttctccaggagactttgaggcagtcacagagataagtaaagttttaaaaaaatctattcctgctggactttcacgtgctactaaaaaagatatagatgcttgtagagattctttaaagcatgctaaaagatttagaattcatacttttatatcca

SEQ ID NO: 236824 - DNA, 767 bp, Unknown
  Bacterial polypeptide expressing nucleotide sequence isolated from the Sargasso Sea
tagcattgtaacagaaaaacttaccaagacttccaagcttgtgtctgctgttactggatttcctgttcaatttaacaaagcaattgttggaaaaaatgcttttgcgcatgaggcaggaattcatcaagatgggatgttaaaaaataataaaacttatgaaatcatgacacctgaaagtgtcggtgtatctgagtctaatcttgttatgggtaagcattctggaagacatgcattcaaacagaagataatagaacttggttatagtgttaatgacaatgtgatagaagaagcttttgaaaattttaaaagcttggccgataaaaaaaagaacatatatgatgaagatattgtagccattatcgatgatcaggtaattagaattaatgattcaataatcttaaaagacctgcaagtgattgcaggtacaaaaggacctcaacaagctgaaataaatttgatgatagaagataaattaaacaacattacctctacaggcgatggaccagttgatgcaatatttaatggtttaagtaaattagtaccacacaaagctaaattactcttgtatcaggtacatgctgttactgaaggaacagatgctcaagctgaggtatctgtcagactttcagaggatgggaaaactgttgttggtttaggatctgatacggatacattagtagcctcagcaaaagcttatatcaatgcattaaataaattagttgttaaaagagaaaaatctgcaccagctaaaatgtcaggtatttaat

SEQ ID NO: 236825 - DNA, 806 bp, Unknown
  Bacterial polypeptide expressing nucleotide sequence isolated from the Sargasso Sea
aatgccatatgaaactggaataaatacaacacttttaagcaaagcttcaaaaattgtttcaaacgcaacaggatttcctgttcaatacaataaagctatcgttggaaaaaatgcttttgctcatgaggcaggaattcatcaggatggaatgttaaaaaatagacaaacatacgagataatgacacctgaaagtgtaggggttaagcaaacatcattagtgatgggaaagcattctgggcgacatgcatttaaagataagttaaacagcctaggttatccagacttgactgacgatgtggtaggaaatgcatttgcaaaattcaaagtcttagcagataagaaaaagcatgtttacgatgaagatattattgccttagtagatgatagtttaattgtagataataaagtgaatgcaatcactcttaaatctttaaaagtttttgctggaacaggagaaccacaaaaagcagaaatgactttggatgtttatggtgatgttaaaaatgcaacagaaactggagatggtccagtagatgcgatattcaaatgcattaaaactttatatcctcacgatgttaacttacagctttatcaagttcatgcagttacagaaggaacagatgcacaagcaacagtaagtgtaaaaatagaggaaaagggtaaaacaactgtaggtcaagcagctgatacagatactttggttgcatcagcaaatgcttacataaatgcattaaataaaatgataatcaaaagagataaaacagctcctatggagcaagaaagtcagaaagtaagagggatataat

SEQ ID NO: 236826 - DNA, 457 bp, Unknown
  Bacterial polypeptide expressing nucleotide sequence isolated from the Sargasso Sea
agagaagtgaatgacaaagacttagagattctaatggacgaagagaaacgtgtgtcaaatgaaccaatcacttactctttagatcaagtacatttttcgagcggagaccatgacattccaactgcaaccgttcgcttaataggacctgacaacacccaattcacagacgcttcgactgggaatgggcctgttgacgcagtttgtaaagctatagatagagtgatcggtacaacatgtaaactgatagactttaacgttcagtccgtgactgaaggccttgattctcaaggaaccgttactattaggattgaaaacaacgatcagatattttctggcagaggagctaacacggatataattgttgcaagcgctgaagcttacctaagcgccgttaacaggatgatagctaacgatgacaattataaaatgcctgcgttagaaggtactccggactaac

SEQ ID NO: 236827 - DNA, 340 bp, Unknown
  Bacterial polypeptide expressing nucleotide sequence isolated from the Sargasso Sea
atggataacccaacagataaatactcagcttataagccagttgatttggttaatcgcgaatggcctagcaacacgataaaaaaagcccctatttggtgctctgtagatcttagagatggcaatcaagctctcattgagccaatgggttctgagagaaagaatagaatgtttagcttattgtgtaagcttggcttcaaagagatcgaggtaggttttccatcagcctcaaaaactgactatgattttgtgagagatctcattgaaaataaaaaaattcctttagatgtaaatattcaggtgcttactcaggctagagaagaattaataattaaaacattca

SEQ ID NO: 236828 - DNA, 1289 bp, Unknown
  Bacterial polypeptide expressing nucleotide sequence isolated from the Sargasso Sea
aatgaacaaagaaaaaatatatatatttgataccacattgagagatggcgcgcagactcagggcgttgatttttcaatagatgataaattaaaaatagcaaaagctctagatgatctaggagtggattatatagaaggagggtggccaggagccaaccctacagatacagaattttttcagaagaaaatgaaactaaataattcaatattaacagcttttggcatgactaaaaaagtaggaagaagtgcagataatgatccagggctttcttctatacttaatagcaatacaccagccgtgtgtttagttggaaaaacttgggattttcatgttgatatagcattgcaaatatctaatcaggaaaatttagaaaacatttcagaaagtgcaaaactttttgttaaagaaaagaaagaattcatgtttgatgctgaacatttttttgatggctttaaaaataataaagaatatgcaatttcatgtattaaatcagcatatgacaatggtgctagatggattgtactttgtgatacaaatggtggaactttaccaaatgaaatttcttcaattataaatgaagtaactaaatttattccaggaaaaaatttaggtattcatgcccacaatgatacaggaaatgcagttgcaaattcattagcagcaatattatctggtgttagacaagtacaaggaactatcaatggattaggtgaaagatgtggaaatgcaaatttaatgtcagtaatcccaacattgttcttaaaaaaaatttactcaaaaaattatgaaataaatattaaaaaggaaaatattaataaattaacacaatgttcaagattgcttgatgaaattttaaatagaaaacctaatcaacacttaccttatgtaggagcagctgccttttcacataaaggaggattacatgtatctgcagtacaaaaagatcctaaaacatacgaacatataaatccggaagatgttggaaatacaagaaatattgttgtttcagaccaatctggaaaatcaaatatcgtttcaagactaaaatctattggtattgattttaaacaagatgatccaaaaattaaaaaacttctagaggaagttaaggatagagaatttattggttacagttacgatggtgctgatgcatcgttcgaattgctagctagaagaataatgggcgagattccaagatatattttgataaaagaatatgatgtaagtgttaaaaaaaatagttcaggaaaaattatatcttcagctaaagctcaattagaagtcgaca

SEQ ID NO: 236829 - DNA, 457 bp, Unknown
  Bacterial polypeptide expressing nucleotide sequence isolated from the Sargasso Sea
aatgaataatggtcatgtaaaaatttttgatacgacactaagagatggagagcaagcaccaggttgtagcatgacacttggcgagaaacttaagatttcacgtgctctgaccgatctgaatgtcgatataattgaagctggcttcccagccgcatcacctggtgatttcaactctgtaaaagaaattgcagaccaaaatcttggcccaattatatgtggactcgctagatgcaatgaagatgacataaataaagcattcaatgcggtcaaagggtcagacaatcatcgtattcatgtctttgtcgcaaccagttcaattcacagggaatataagctaaaaatggcgaaagaagagataattaaaaacgctgtttcatcaatatctctcgcaaaaagcatgtgtgatgatattgaattctctcctgaagatgcctcgagaacagaactatcatactta

SEQ ID NO: 236830 - DNA, 503 bp, Unknown
  Bacterial polypeptide expressing nucleotide sequence isolated from the Sargasso Sea
attgactaaaataattaataaatcagtttctaaatacaaaccttttgaacctattaatttagagaatagagcttggcctaacaaaagtataaaagaggctcctatatggtgcagtgttgacttaagagacggcaatcaagccttaattgagccgatgggagaagaaagaaagctcagaatgtttaaaatgcttcttgagataggttttagagagattgaggttggcttcccttctgcttctcaaacagattttgattttgtaagaaaaattattaacgagaatttaatacctgaaaatgtgtctattcaagctctaactcaagctagaccagagcttataaaaagaacctatgaggctttagagggtgctcctcgtgcaatagtccatgtttataactctacttctaccttacaaaggcgagttgtttttaatagcgatgaaaatggcataaaaaaaatagctacagatggagcaaagcaagtaagggattatgctgagaaat

SEQ ID NO: 236831 - DNA, 385 bp, Unknown
  Bacterial polypeptide expressing nucleotide sequence isolated from the Sargasso Sea
atggaagataaaaatagaataataatttttgatactacgatgcgtgatggagaacagtctccaggtgcatctatgagtcttgaggaaaaaattcaaatttctagagtttttgatgagttaggaattgatgtaatcgaagcaggttttccaattgcttcaccaggtgattttgaagcagtaacagcaataagcaaaattttaaaaaaatcagttccagctggattagcaagacatacaaaaaaagatatagacgcctgtaacgagtctcttaaatctgcaaaaagatttagaattcatacatttatttctacaagctctttacatatgaagcacaaattaaacaaaacacctgaacaagttattgactctataaagagcatgtaac

SEQ ID NO: 236832 - DNA, 739 bp, Unknown
  Bacterial polypeptide expressing nucleotide sequence isolated from the Sargasso Sea
atgccgtttgcaaagtatcaggcttttaagccgatagagctgtccgatcggcaatggccgagtcgggtgattgataaggcgcctaggtggtgcagtgttgatttgagagatggcaatcaggcgctaatagaccccatgaacgttgatgaaaagctacgtttatgggatctcttgttaaaaatcggattttcggagattgaagtagggtttccagcggcttcccaacccgattttgatttcatcagaaagctcgtcgatgaagatagaattcccgatgatgttacggtacaagttctttgtcaggctcgaagggagctcattgaaaagacggtcgaagcgctagagggagcgccaaatgtaatttttcatctttataattcgacctcagagttacaaagacgcgtggtttttgatctagataaacaaggtattacagacctagcggtcaaaggaactgaaattgtaaaagaggggcttaaaaatttctcttctaacgtgacttttgaatactcgccggaaagttttacgggaactgaattggatttcgctgttgatatatgcagtgcagttgctgagacatggggcgcttcgcctgaagaccctatcattatcaacttgccttccactgtcgaaatggctacacccaatgtctatgctgatcagattgagttttttgtaaggaatttttcgtatagagatagttcggtgattagtcttcatacgcataatgatcgaggaa

SEQ ID NO: 236833 - DNA, 364 bp, Unknown
  Bacterial polypeptide expressing nucleotide sequence isolated from the Sargasso Sea
atggctaataaagatagagtttttatatttgatacaacgatgcgtgatggtgaacagtcaccaggagcatctatgagtcttgaagaaaaaattcaaatttcaagagtgtttgacgaattgggtattgatgttattgaagcaggttttccaattgcatctccaggtgattttgaggcagtctctgcaatcagtaaagttttaaaaaaatctattccttgcggattagcaagacattcaaaaaaagatattgatagatgttacgaggcattaaaacatgcacctagatttagaattcatacatttatttcaacaagccctcttcacatgaaacataaactcaataagacgcctgaacaagtttata

SEQ ID NO: 236834 - DNA, 300 bp, Unknown
  Bacterial polypeptide expressing nucleotide sequence isolated from the Sargasso Sea
tatgtcagataataacagagtttatatttttgataccactatgcgtgatggtgagcaatcgcctggcgcatcaatgagtttggaagaaaaaattcaaatagcaagagtatttgatgaacttggaattgatataattgaagcaggttttccaatagcatctcctggtgattttgaagcagttactgaagttagtaaaattttaaaaaactcaatcccagcaggattatctaggcattcgaagaaagataaaaatagatgctatgaagcattaaagcatgctccaagatttgaattcatact

SEQ ID NO: 236835 - DNA, 812 bp, Unknown
  Bacterial polypeptide expressing nucleotide sequence isolated from the Sargasso Sea
aatgagtaaagaaagattatacatatttgatacaactcttagagatggtgcacaaactcaaggggtacatttttctatagatgaaaaaactaaaattgcccatgcactagataatttaggtgttgattatattgagggaggttggcctggggctaatccatcagatacagaattttttcaaaaaggtcttaatcttaaaaattctaccttcacagcttttggaatgacaaaaaaaacaggaagaagcgctgagaatgatccaggattatctgcaatactaaattctaatacaaatgctgtatgcttagttggaaaatcttgggacttccatgttgatgtcgctttaggaatttcaaatgaagaaaatttagaaaatataaaagaaactacaaaacattttgttaaaaataataaagaattcatgtttgatgccgagcatttctttgatggatataaatcaaatccaaaatacgcattagattgtattaaagcagcatatgataatggagctaagtggattattttatgcgatactaatggtggaactttgcctcatgaagtaactgagatagttaaagaagtcactaaacacatacctggagaaaacttgggcattcatgcacataatgatactggaaatgcagttgcaaattcgattgcagctgttttgtcaggagctagacaggttcaaggaacaataaacggtttaggtgaaagatgtggtaacgctaacttaatgtctctaataccaacatttcatttgaaaaaggaattttcagataaatttgagataaatattaaggataaaaata

SEQ ID NO: 236836 - DNA, 217 bp, Unknown
  Bacterial polypeptide expressing nucleotide sequence isolated from the Sargasso Sea
aatgaccgataaaaatagagtatacattttcgatactacgatgcgagatggtgaacaatcaccaggagcatctatgagtttggaagagaaaatacaaattgcaagggtatttgatgaacttggagttgatataattgaagctggatttccaattgcatccccaggagattttgaagcagtttcagaagtaagtaaagttttaaaaaactctataccc

SEQ ID NO: 236837 - DNA, 271 bp, Unknown
  Bacterial polypeptide expressing nucleotide sequence isolated from the Sargasso Sea
aatgtcagaaaaagaaagagtttacatatttgatacaacaatgcgtgatggtgaacaatcaccaggcgcatctatgagcttggaggaaaaaatccaaatagcaagagtatttgatgagttgggaattgatataattgaagcaggcttcccaattgcttcaccaggtgactttgaagctgtaacggagattagtaaaatactaaaaaaatctattccagcaggattatcaaggcattcaaaaaaagatatgatagatgttatgaagcattaa

SEQ ID NO: 236838 - DNA, 1603 bp, Unknown
  Bacterial polypeptide expressing nucleotide sequence isolated from the Sargasso Sea
aatgagtaaagagagattatatatttttgatacaacattaagagatggagctcaaacacaaggagttgatttttctattgaagataaggaaaaaattgcttcagcgttagataatttaggtgttgattatattgagggaggatggccaggagctaatccaacagatacagagttttttcagaaaaaacataattttaaaaattcaaaacttacatcttttggaatgactaaaagatcaggtcgtagcgctgaaaatgatactggattatcagctttaataaattcgaactcacccgcagtttgtttggttggtaaatcttgggattttcatgttgatgttgctttagaaataacaaatgaagagaatttagaaaatataagagaaagcgcaaaacattttataaaagcaaaaaaagaattcatgtttgatgccgaacatttttttgatggatacaaggcgaattcgaaatatgcgctttcttgtattaaagctgcttatgatgaaggagctagatggattgtcttatgtgatacaaatggaggaacacttccacatgaagtctctagaattgtttcagaagtttcaaaagttataccgggtgaaaatttaggaattcatgcacacaatgatacaggaaatgcagttgcgaattcattagcagctgttctatctggtgcacgacaaattcaaggtacaataaatggcttaggagaaagatgtggtaatgcaaatttaatgtctttaatacctacattttttttaaaaaaagatttttcatctaaatttgagacaggaattaaaacaaaaaatattaataatttaactgaatgttctcgattattagatgaaattttaaataggaagccaaatcaacatttgccatatgtaggagcagctgctttttctcataaaggaggcttgcatgtttctgcggttcaaaaagatccaaaaacttatgagcatattaatccagaagatgtaggcaacacaagaaacatagtagtttcagatcaatctggtaaatcaaacattatttcaagattaaaaagtataaaaattgatatcaaagaaaatgatcctaaaattaaaaaattattgaacgaagttaaagacagagagtttattggatatagttatgatggtgcagacgcttcatttgaattattagcaagaagaataatcggtgaaataccaagatatatatcaattaacgaatatgatgtttcagttaaaaaaaataaacttggagaaattgtttcttctgcaaaagctcaattagaggttgatggcgagaaaataatttgtgaaggtgagggcaatggtccagttaatgctttagataatgctattagacaaaatgtagatcgattagctaaatactcaaaatatttaaaagatttaaaattagtagattataaagttagaattttaaatacaggtactgaagctgtaacaagagtttcaattgagagcacggattccgatggaaaaaattggtttactataggtgtgtccacaaacatcatagaggcttcatttaaagcattagtagatagtttagattataaactttttaaggataatgctccagctagcaaataa

SEQ ID NO: 236839 - DNA, 1189 bp, Unknown
  Bacterial polypeptide expressing nucleotide sequence isolated from the Sargasso Sea
atgagcaaagaaaaaatacacatatttgatactacattaagagatggagctcaaactcaaggagtagatttttctattgatgataaattaaaaatagccaaggcattagatgatttaggggttgattatatagagggaggttggccaggagccaaccccacagatacagagttttttcaaaaaaaaattaaattaaataactctgtgataacagcatttggcatgaccaaaagatctggtagaagtgcagataatgatccaggattatcagctatactaaatagcaatacacccgcagtatgtttggttggtaaatcatgggattttcatgtggatgtggccttaggtatttcaaacaaagaaaatttagaaaatatttcagaaagtacaaagctttttgtaaaagaaaataaagaatttatgtttgatgcagaacatttttttgatggatttaaaaataataaagaatatgcactttcatgtattaaatcagcatatgataatggtgcaagatggattgtgctttgtgatactaacggaggaactcttccaaatgaaatttcagaaattgtgagtgaggtggcaaaatcagttccaggacaaaacttaggtatccatgctcataacgatactggaaatgctgtagctaactcattagctgcagttttgtctggtgcaagacaaatacaaggaacaattaatgggttaggcgaaagatgtggaaatgcaaatttaatgtcaataattccaacattatatttaaaacaaaattataatcagaattatgagataaatataaaaaaagaaaatattaataaattaactcaatgttcaagattgcttgatgaaatattaaatagaaaaccaaatcaacacttgccttatgtaggtgcagcagctttttcacataagggaggattacacgtatctgccgttcaaaaagatcctaaaacttatgaacatataagccctgaagaagtaggaaatgttagaaatattgttgtttcagatcaatctggaaaatctaatatagtttcaagattaagttctataggagttgacttcaaacaggacgacccaaaaataaaaaaacttttagaagaagtaaaagatagagaatttattgggtatagttatgatggcgctgatgcatcttttgaattgttagctaggagagtaatgggcgaga

SEQ ID NO: 236840 - DNA, 1069 bp, Unknown
  Bacterial polypeptide expressing nucleotide sequence isolated from the Sargasso Sea
aatgagtaaagaacaactttatatatttgatacaacactgcgtgatggtgcacaaactcagggtgtagatttttcaattgatgataaagaaaaaatttcatcagctttagataaattgggtgtggattatgttgagggtggttggccaggagcaaatccaaccgatactgagtttttcaataaagatcataattttaaatcaacaaaattaactgcatttggaatgactaaaaagtctgaacacagcgcagaaaatgaccctatgctctcatcattaattaattcaaaaagtaattctgtttgcctgtttggaaaatcatgggattttcaagtggatgttgcattaggaataagtaatgagcagaatttaatgaatataagtgaaagcacaaaacatattgttaaatctggaaaggagttcatgtttgatgctgaacatttttttgatggatataaagctaatccagagtatgcaatgtcatgtttaaaagctgcttttgataatggtgctagatggattgttttatgtgatactaacggcggcacacttccacacgagataacagaaattgcatctaaagtaattaagcaaatcccaggaaaaaatttaggaatacacgctcataatgataccgaaaatgctgtagcaaacagtcttgcagcagttcaagcaggtgttagacaagtccagggtacaatcaatggtttgggtgaaagatgtggaaatgctaatttgatgtcattaattccctcattttttttaaagaaagatttttcagaaaagtttgaattaagtattaaaagagaaaatttaaaaaacttaactcaatgctcaagattattagatgagatattaaatagaaaacctaacaaacatttaccttatgttggagcttctgctttttctcacaagggtggcatgcatgtttcagctgttcaaaaagatcctaaaacctatgagcacataaatccagaagaagttggaaactccagaaatattgtagtttcagatcaatcaggtcaatccaatataatgtcgagattgaattcaataggaattaaagttgag

SEQ ID NO: 236841 - DNA, 279 bp, Unknown
  Bacterial polypeptide expressing nucleotide sequence isolated from the Sargasso Sea
aatgactgataataacagagtatacatttttgatactacaatgcgagatggagagcagtctcccggcgcatcaatgagtttggaagaaaaaatccaaatagctagagtatttgacgaacttggaatagatattattgaagctggatttccaattgcatctccaggagattttgaagctgtaaccgaagtcagtaaaatattaaaaaaatcaatacctgcaggtttagcaagacattcaaaaaaagatattgatagatgctatgaggctcttaaacatgc

SEQ ID NO: 236842 - DNA, 772 bp, Unknown
  Bacterial polypeptide expressing nucleotide sequence isolated from the Sargasso Sea
aaaaatagtttccaatgcaactggttttcctgttcaatttaataaagcaatagttggtaaaaatgcttttgctcatgaagcgggaattcaccaagatggaatgcttaaaaatagaaatacatatgaaattatgactccagaaagcgttggcgttaaacaaacatcacttgttatgggaaaacattcaggaagacatgcttttaaagataaattagtaagtcttggttatgcagatttaacagatgatataacagagaatgcttttggtaaattcaaagttttagcagataaaaagaaacatatttacgatgaagatatagttgctttagtagacgatagtttaataaaagatgataatgtaattacactaaaatctttgaaagtcttcgcgggaactggagaaccacagagagcagaaatgactttagaagtttatggtgagattaaaaaagcttctgaaattggagatggacccgtagatgcaatattcaaagctattaaaaaactttatcctcatgatgcaaacctacaactttaccaagttcatgcagtaacagaaggcacagacgctcaagctactgtaagcgtaagaatagaagaagaaggcaaaattacagttggacaagcagcagatactgacaccttggttgcatctgctaacgcttatattaatgcattaaataaaatgattataaaaagaaaaagaaattttgcacctgacagcatggaagtaaaacaaaatttaaaaactgaaaaaatgaaaggaatataa

SEQ ID NO: 236843 - DNA, 1585 bp, Unknown
  Bacterial polypeptide expressing nucleotide sequence isolated from the Sargasso Sea
tatgcccagagaaaaggttattttatttgatactacacttagggatggtcaacaaacccaaggagtagatttttcagttcaggataaagtgaatattgctaatgcccttgataatattgggatagactatattgaaggtggatggccaggagcaaatcctaccgacacaaagttttttgaaaacaaaaacaatttttcaaatgctaaatttacagcatttggaatgaccaaaagatctggaagatccgctgataatgaccctcagctgagatcactaattgacgcacattctgattctgtttgtttagtcgctaaaacttgggattttcatgttgatctggcattaggtatttctttggaagaaaatattgaggcaataaaagattcagttttatctgtaaaggcaggcggtaaagaaccacttattgactgcgaacatttttttgacggatacaaatcaaattctgaattctcatttaaatgtatagaagccgcactagaatctggtgcggaatgggtagtattatgcgatacaaatggaggaacacttcctagtgagatttttaatatcgtagaagaaattactaaaaaatttccaggtgataagattgggatacattgtcataatgatacagaaaatgctgtcgccaacagcttagctgcaattgatgctggtgcaagacatctccaaggaactataaacggattaggtgaaagatgtggaaatgctaatttaatatctataattcccacattattacttaaaaaagaatattctgataaatatgagatttcaattaatgctaacaagctatctgaattaaaaaatttatctcgattagttgatgatattttgaataaacatccaaataatcaccagccttatgttggtgaaaatgcatttgctcataaaggtgggcttcatgtatcggctgttatgaaggacccaacaacttatgaacatgtcaatccagaattagttggtaataatagaaaaattttagtctcaaatcaggctggaagatcaaatttattatcaagattgaagtctataggtatggaaattgatagtgatgataaaagaataaatactcttttagagatcgtaaaagaaagagagtacatgggatattcatatgatggagctggtgcttcttttgaaattcttgctaaaaatattttggatcaagttccaagctttttttcagttgagaattatgaagtaaccattgccggctctaaagataagagctctttatcaaaagcaaatatagtgctgaatgtagatgaaagaattatcaattcaacaggtgagggtaatgggccagttaatgcattagataatgcattaagaaaagatttaggaatatacaatgaatatattcaagaccttactttagttgattataaagttcgtatcttagatggtggaactgaagctattacaagagttgtaattgagagttcggacagtaaaaatcaaagctggtttacggttggtattagcccaaacattattgaggcatcatttgaagctttgatggactcaataaattataagttaataaaatctgatattaaataa

SEQ ID NO: 236844 - DNA, 367 bp, Unknown
  Bacterial polypeptide expressing nucleotide sequence isolated from the Sargasso Sea
atcatcgacaaggcaccgatctggctgtcgaccgacctgcgtgatggcaaccagtcgctgatcgagccgatggacgccgagaagaagatgcgtttcttcaagtgcctggtcgccgtgggcctgaaggaaatcgaagtgggcttcccgtccgcctcgcaaaccgacttcgacttcgtccgcgagctgatcgaaggcggccacattcccgatgacgtcaccatccaggtactgacccaggcccgtgacgacctcatcgaacgcaccttcgagtcgctcaagggcgccaagaaggccatcgtccactactacaacgcctgcgcgccgagcttccgcaagatcgtcttcaccaggacaaggcgggggtgaa

SEQ ID NO: 236845 - DNA, 1291 bp, Unknown
  Bacterial polypeptide expressing nucleotide sequence isolated from the Sargasso Sea
aaaagcatgggattttcatgttgatgtagcactaggtatttcaaaagaagaaaatttagaaaatattagtgaaactactaaacactttgtcaaaaataataaagagttcatgtttgatgcagaacacttttttgatggttataaatcaaatccgaaatatgctttagagtgtattaaagcagcctatgataatggagctaaatggatagttctatgtgatactaatggtgggacattgcctcatgaagtaactgaaatagtaaaagaggtatcaaaacatataccaggaaaaaatttgggtattcacgcacataatgatactggcaatgctgttgcaaattcaattgctgctgttttatctggagctcggcaaatacaaggtactattaatggattaggtgaacgatgtggtaatgctaatttaatgtcaattattccaacattccatcttaaaaaagaattatcggataaatttgaaataaatattaaagaaaaaaatattaagcacattacccaatgttcaagattacttgatgagattttaaatagaaaaccaaataagcatttaccatatgttggagctgcagcattttcgcataaaggcggcctacatgtttcagcagtacaaaaagacccaaaaacatatgaacatatcgatccttcagatgttggcaatgcaagaaacatagttgtttcagatcagtcaggtaaatcaaatattttatctagactgaaaacaattggaatagaaattgaggaaaatgatccgaaagtcaaaaaactattagaagaagtaaaagatagagagtttattggttatagttatgatggagctgatgcttcattcgaactattagctagaagagtaataggagaaattccaagatatatatctataaaagaatatgatgtttcagtttcaaaaaatgatcaagataaaatcatttctagagcaaaagcaaaattagaggtggatggagagcagattgtctgtgaaggtgaaggtaatggacctgttcatgctcttgataacgctataagaaaaaatgttaccaggttagaaaaatattcagaatatttaaaagatttaaaattagttgattacaaggtaagaattttaaatacaggaactgaggccactactagggtttcgatagaaagcacagactctaaagggaagaattggtttactattggagtttcgccaaacataatagatgcatcatttaaagctcttattgacagtttagatttcaaattatttaaggataaagctcccgcaagtaaataa

SEQ ID NO: 236846 - DNA, 568 bp, Unknown
  Bacterial polypeptide expressing nucleotide sequence isolated from the Sargasso Sea
attgactaaaattattaataaatcagtatctaaatacaaaccttttgaacctgttcagctagataacagggaatggccaacagaaagcataaaaagggcccctatttggtgcagtgttgatttaagagatggaaatcaagcattgattgaacctatgggagaggaaagaaaacttagaatgtttaatatgcttcttgatataggttttagagaaattgaagttggtttcccttctgcttcccaaacagactttgatttcgtaagaaaaatcataaatgaaaacttgattcctgaacatgtaactatacaagcacttactcaggctagacctgagcttataaaaagaacttttgaggctttagaaggcgctcctagagccatagtgcatgtttataattccacatctaccttacaaagaagggttgtattcaaaagcgatgaagaaggaataaaaaaaatagccactgatggtgctaagaacgttaaagattactctgaaaaatatcctaatacggattggatatttgaatatagcccggaaagttttacaggaactgaacttccatat

SEQ ID NO: 236847 - DNA, 500 bp, Unknown
  Bacterial polypeptide expressing nucleotide sequence isolated from the Sargasso Sea
attgtattatagattttctaaaattttagttatgagcagtaaagatagagtgtttatatttgatactactatgcgtgatggtgagcaatcaccaggtgcgtctatgagtttagaagaaaaaattcaaatcgcaagagtgtttgacgaattaggtattgatataattgaagcaggttttcctatagcttcaccaggggattttgaagctgtttcagaagtaagtaaaattttaaaaaattctattcccgcaggactttcaagacactcagtaaaagatattgatagagcttatgaagctctaaaacatgcaccaagatttagaatacatacatttatttctacaagtccattacatatgaagcataaattaaatatgacttcagatgatgtttatgaatcaattggaaaacatgttgcttatgcgagaaagtttactgacgatgttgagtggtcttgtgaagatggaacaagaacagatatgattacatgtgtaaaactgt

SEQ ID NO: 236848 - DNA, 817 bp, Unknown
  Bacterial polypeptide expressing nucleotide sequence isolated from the Sargasso Sea
aatggataacccaacagataaatactcagcttataagccagttgatttggttaatcgcgaatggccaagcaacacgataaagaaagcccctatttggtgctctgtagatcttagagatggcaatcaagctctcattgaaccaatgggttctgagagaaagaatagaatgtttagcttattgtgtaagcttggcttcaaagagatagaggtaggctttccatcagcctcaaaaactgactatgattttgtaagagatcttattgaaaataaaaaaattccttcagatgtaaatattcaggtccttactcaagctcgagaagaattaataattaaaacatttgaatcacttaaaggtgcatctaaaggaattattcatttttataattcaacttctacacttcaaagaaaagttgtttttaatcaagataaggatggtgttaaaaaaatagcaactgatgccgctgagttaattaaaaaattggcacttgaaaattctgacactgaatggacatttgaatattctccagaaagttttacaggaacagaactagaatatgcaagagatgtttgtgataacgtggtagaaattttaaagcctgtctcaaaaaacaaaattattataaatcttcctgctactgtagaaatgtcaactccaaatatttatggcgatcaaattgaatggatgagcaaaaatttaaaaaatagaaatgacatatgcctgagcctgcatcctcacaatgatagaggcacagctgttgcagcttctgagtttggaatcatggctggtgctgatagagttgaaggaacattattggaa

SEQ ID NO: 236849 - DNA, 808 bp, Unknown
  Bacterial polypeptide expressing nucleotide sequence isolated from the Sargasso Sea
atgccatacaatacaggtattaaaacagaattaataagtaaagcttcaaaaattgtatcaaatgcaactggattcccagttcaatttaataaagcaatagttggaaaaaatgcttttgcacatgagtcgggaattcatcaagatggaatgctaaaaaatagagaaacttatgaaattatgactcccgagagtgtaggtgttaagaaaacttcgcttgttatggggaaacattcgggacgacatgcttttaaagataaattatctgatttaggttactcaaatcttacagatgatattatccaagccgcttttggaaaatttaaagttttagctgataaaaaaaagcatatatatgatgaagacatagtagctttagttgatgatagtttaattgtagataataaaattaatgcaattaatttgaaatctttgaaagtttttgctggcacaggagaacctcaaaaagctgaaatgacattagatgtctatggtgatataaagaatacaactgaaacaggagatggaccagttgatgcaatatttaaatgtataaaaaaattatttcctcacgatgtaaaattatctctttatcaagtacatgcagtaacagaaggtactgatgctcaagcaactgttagtgtaaaaattgaagaaaatgatagaacaacagtaggtcaatcagctgacactgatactttagttgcatcagcaaacgcctatttaaatgcattgaataaaatgcttataaaacgtgagaaaaaagcaccatctcaaaatatcaaacatcaaaaagtgaaaggaatataat

SEQ ID NO: 236850 - DNA, 706 bp, Unknown
  Bacterial polypeptide expressing nucleotide sequence isolated from the Sargasso Sea
atgaaaaaaattataaataaggctatttcaaaatataaaccttttccaaaaattgaattggaggacagggtatggccagaaaatcaaatagaaaaacctccaatctggtgcagtgttgatttaagagatggtaaccaagctcttatagagccaatgggggaagaaagaaagctaagaatgtttaagttactacttgatataggctttaaagaaattgaagtaggttttccagctgcctcccaaacagattttgacttcgtaagaagaattataaaagaaggtttagttccagatgacgtctacattcaagttttaacccaatccagaaaggaattaattgaaaaaacttttgaatctcttaaaggggcaaaaaatgcaattctccatgtatataattcaacttcaactgtccaaagaaaagtagtttttaagagtaataaaaaaggcataaaaaggattgcgcaagaaggagctagttgggttctggaaaactcattaaagcatcctgatactaactggaagtttgaatatagcccagagagctttacagggacagaactaccttatgctgcagaagtctgtaatgcagtaaatgaaatttgggaaccaactaaagataataaatcaattataaacctacctgcaacagttgaattgtctacccctaatatatatgcagatcaaatagaatggatgtgtaaaaatt

SEQ ID NO: 236851 - DNA, 1003 bp, Unknown
  Bacterial polypeptide expressing nucleotide sequence isolated from the Sargasso Sea
ggtgaatcaataaaattgataattaataatattaaaaatattgatgggataattgtaagcgtgcattgtcataatgatttagggttagctgtttcaaatagtctttctgctgttgaaaatggagccaggcaaatcgaaggatgtataaatggtttgggagaaagagctggaaacgcagcattagaagaagtaattatgggtcttgaagtaaggaaagatcatttcaatgtccaaacaaaagttaatacatcagaaatcggaccaacaagcagaatggttagtaatatttttggttttccaatgcaagcaaataaggctatagttggtcagaatgcatttaggcattcatcaggaattcatcaggatgcttttcttaaagataaaagcacttttgaaataatggagccagaaactgttggctggagaggagaagcacttgttctcggaaaattgtcaggtagggcagggttgaaatctagacttaaagatctggggtatgaatttgatgaggatcaattaaattcactgtttataaaatttaaagatttggcagatagcaaaaaagaagtgactgatatggatttagaatctctgatgcttgagcaatcaagatctgaaaataataaacaatttcttactcttgaatctgttcaggtagagtgtggaaataaaattgatccaaaagcaaaaattgaattaataaacgaagccggcactaaaataaagacagaatctaatggaacaggaccagttgatgcagtttgcaaagctattgataagataataagttttacttctaaacttactgaattcagcgtaaattctgtcacagaaggtatagatgcgttaggtgaagtaactataagagttgaaaataaaaaaggaagaacatttacagggattggttcagattctgatatagtagtagcgtccgcgaaagcatatataaatgctataaataggcaggtgcaaatgatgaatgaaggttctgagtcacctgggt

SEQ ID NO: 236852 - DNA, 443 bp, Unknown
  Bacterial polypeptide expressing nucleotide sequence isolated from the Sargasso Sea
aatgactgaaaaaatatatatttttgatacaactttaagagatggtgagcaatcaccaggcgcttcaatgaatttggatgagaaacttcaaattgctgaggtgctagattcaatgagagttgatattatagaagcaggatttcctattgcttccaatggagattttgaagcagtccaagaggtaagtaaaaaagtaaaaaattctacaatcgcaggtttagctagagctagcttaaaagatattgatagagcttgggacgctgtacaatttgcaaagtctcctcgtatacatacttttattgcgacaagccctctacatatgaaatataaattaaagaaaaccgaaacggaagttttagaggcaattaaaaaaactgtatcatatgctagaaatctatgcgacaatattgaatggagttgtgaagatggaggtagatcagaat

SEQ ID NO: 236853 - DNA, 917 bp, Unknown
  Bacterial polypeptide expressing nucleotide sequence isolated from the Sargasso Sea
ttgtgtaagcttggcttcaaagagatcgaggtaggttttccatcagcctcaaaaactgactatgattttgtaagagatcttattgaaaataaaaaaattccttcagatgtaaatattcaggtccttactcaagctcgagaagaattaataattaaaacatttgaatcacttaaaggtgcatctaaaggaattattcatttttacaattcaacttctacacttcaaagaaaagttgtttttaatcaaaataaggatggtgttaaaaaaatagcaactgatgccgctgagttaattaaaaaattggcgcttgaaaattctgacactgaatggacatttgaatattctccagaaagttttacaggaacagaactagattatgcgagagaagtttgtgataacgttgtagaaattctaaagcctgtctcaaaaaacaaaattattataaatcttcctgctactgtagaaatgtcaactccaaatatttatggtgatcaaattgaatggatgaacaaaaatttaaaaaatagaaatgacatatgcctgagcctgcatcctcacaatgacagaggcacagctgttgcagcttctgagtttggaatcatggctggtgctgatagagttgaaggaacactatttggaaatggagagagaaccggtaatgtagatatagtgacgattgctttaaatatgctcactcaaggtgttgaaccaaatttagatttttctaatatcaattctgttatgagagaggtggagtactgcaatcaactgccagttcatccaagacatccttatgcaggagatctggtttttacagccttttcaggctctcaccaagatgcaattaaaaaaggttttcaagctattaaaaaatctaatgatccaaagtgggaagtgccctatcttccaatcgatcc

SEQ ID NO: 236854 - DNA, 991 bp, Unknown
  Bacterial polypeptide expressing nucleotide sequence isolated from the Sargasso Sea
catgctcaaagacccatcgaagaaataccgtccgttcacccagatccagattccggaccgcacctggccggacaagatcatcgacaaggcgccgatctggctgtcgaccgacctgcgtgacggtaaccagtcgctgatcgagccgatggatgccgagaagaagatgcgcttcttcaagtgcctggtcgcagtgggcctgaaggaaatcgaagtgggcttcccgtccgcctcgcagaccgacttcgacttcgtccgcgagctgatcgaaggcggccacatccccgacgacgtcaccatccaggtgctgacccaggcccgtgacgaccttatcgagcgtaccttcgagtcgctcaaaggcgccaagaaggccatcgtccactattacaacgcctgcgcgccgagcttccgcaagattgtcttcaatcaggacaaggccggcgtcaaagccatcgccgtggccgctggcaccaccatcaagcgcctggccgatgccgcgccggaaacccagtggggcttcgagtactcgccggaagtgttcagcagcaccgagatcgattttgccgtcgaggtgtgcaacgcggtgatcggtgtgttccagccgaccccggctaacaagctgatcctcaacctgcccgccaccatcgagtgcgccacgccgaacaactacgccgatcagatcgagtggttcggtcgtcacgtcgaccgccgcgacagcgtgctgatcagcgtgcacacccacaatgaccgtggcaccggcgtcgcagcctcggaactggccgtcatggctggcgccgaccgcgtcgaaggctgcctgttcggcaacggcgagcgcaccggcaacgtctgcctggtgaccctggcgctgaacctctacacccagggcgtagaccctgagctggacttctcggacatcgacgccgtgcgcaaggtggtcgaggactgcaaccagattccggtgcacccgcgccacccgtacgtcggcgatctggtg

SEQ ID NO: 236855 - DNA, 711 bp, Unknown
  Bacterial polypeptide expressing nucleotide sequence isolated from the Sargasso Sea
tatgagcggtaaagatagagtaataatttttgatactactatgcgagatggtgagcaatcaccaggtgcatctatgagtttggaagaaaaaatccaaatagcaagagtatttgatgaattaggtatagacattattgaagcgggttttccgatagcatcacctggagatttcgaagcagtaactgaagttagtaagatcttaaaaaaatctattcctgcaggactatctagacattcaaaaaaagatattgatagagcttatgaggctttaaaacatgctccaagatttagaatccacacatttatttcaacaagtcctcttcatatgaagcataaattaaatatgtcgccagaagatgtttacgagtctattggacagcatgtagcttatgcaagaaaatttaccgatgatgttgaatggtcttgtgaagatggcacaagaacggatatggattttatgtgcaagacagtagagcttgctatcaaaaatggagcaacaaccataaatattcctgatacagttggttatactattccatctgagttcacaaaaattattcaaacattattaaacaaagttcctaatattgataaagcaattttatccacgcactgtcataatgatctaggcttagcagttgcaaattctttggcgggagttcaggctggcgctagacaaattgaatgtacaataaatggtttaggggaaag

SEQ ID NO: 236856 - DNA, 613 bp, Unknown
  Bacterial polypeptide expressing nucleotide sequence isolated from the Sargasso Sea
atgactgagaaaatatacatatttgatacgaccttaagagatggtgagcagtctcctggagcttctatgaacttagaagaaaaattacaaattgcagaagtattagcttcaatgaaagtagatattattgaagctggctttcctatagcttctaatggagattttgaagctgtatcagaaataagtaaaaatattaaaggaccaactatagctggattagccagagctaagatatcagatattgaaagagcatgggaagcagttaaatttgctgaatctcctagaatacatacttttattgctaccagcccaattcatatgaaatataagttgatgaaaagtgaagatgaggttttggaaacaattaagaaaaccgtaacttatgctcgaaatttatgccctaatgttgagtggagttgtgaagatggtggtagatcaaatttagactatttatataagtgtatagaattagcaattaattgtggagcttcaacaattaatattccagataccgttggttatactttacccagtgaatttggttcaatttttaaatctgtaaaaaataatgtatccaatatagataaagcaattttgtcaactcatactcaca

SEQ ID NO: 236857 - DNA, 938 bp, Unknown
  Bacterial polypeptide expressing nucleotide sequence isolated from the Sargasso Sea
gatgatgggaccaaccatctgctctctgcaaagatgcaacgaaagcgatatagaaaaagcatatgaggcacttaaggttaataaaaacagaagaatccatgtttttgtcgccaccagtgaaatacatctcaagcacaaactaaatatggctaaagatgaagtgcttaaagccgcttatgaaggcgttaaaatggcaaagtcattttgtgataatgttgagttttcacccgaagatgcttcaagaactgatcatggttttctcacagaagtggtcaatgctgcaattgaagcaggcgccacaacaattaatgttcctgatacagttggttacacaatcccttatgaattcggtgaattatttaaacacttgatttcaaattgtacccatgcagaggatgttgttttcagtgttcactgtcatgatgatcttggtctttcagttgcaaatagcttggcagctgttgagtcgggagcaagacaaattgaatgtacaataaatggtatcggagaaagagctggaaatacctcacttgaagaagtatgcatggcaattagaacaagggaagagtattttgattttaaaacatcaatagattcaacaaaattatacccaacaagcagattggtttcctctatcactggcatgcatgttcctagaaacaaagcaattgttggcgataacgcatttgctcatgaagctggtatccatcaacatggaatgcttagagattcttcaacatatgaaattatgaagcctcaagatgttggtattgctagatcaaatctcgttcttggtaagcacagcggcagacatgcttttttggacagaatcaatgatttggggtttaagctcgaaaaggatgagattgatccagcttttcgagaattcaagaaattggctgacaaaaagaaggagatttttgatacagacatagaag

SEQ ID NO: 236858 - DNA, 277 bp, Unknown
  Bacterial polypeptide expressing nucleotide sequence isolated from the Sargasso Sea
catgaaagattctagagaaataattatatttgataccactttgagagacggtgagcaggctcccggctgcagtatgacaattggtgaaaagctaaaaattgcacatgcacttaaagaattaaatgttgatgtaattgaggctggttttgcagcagcatcaccaggtgattatgaagctgtgaatgcaattgcctctgagattgatggaccaaccatctgctctcttgcaagatgcaatgaaagcgatatagaaaaagcatatgaggcacttaaggtt

SEQ ID NO: 236859 - DNA, 478 bp, Unknown
  Bacterial polypeptide expressing nucleotide sequence isolated from the Sargasso Sea
aattaatggtattggagaaagagctgggaatacatctcttgaagaagttgtaatgatcttgagacagcattcagacttgaacttagatacaaatataaattctaaactattaaatgaaacaagtcagaaggtatcagaactcatgggaatgcctgttcaaccaaataaagctatagtagggtcaaatgcttttgctcatagctctggaatacatcaagatggagttataaaaaaaagggaaacctacgaaataatagatccaattgatgtgggtgtcaataaatcctcaatagttttaactgcaagaagtggtagagctgcgcttgcttacagaatgaaagaatttggagttaatcttaccaaaaaagagttagatgatgtttatggagaatttttagttattgcagatcaaaaaaaggaggtaactgactcggattttccattaatgcttcagaaaaaaaatattagctatggataa

SEQ ID NO: 236860 - DNA, 706 bp, Unknown
  Bacterial polypeptide expressing nucleotide sequence isolated from the Sargasso Sea
tctgcatatgaaatataaattaaagaaaactgaagaagaagttttagacgctattcaaaagactgtttctcatgcaagaaatctgtgtgataatattgagtggagttgtgaagatggtggaagatcagagttagaatttttatatcaatgtattgagcttgctattaattcaggagcttcaacaattaatatccctgatacagttggttatacattaccagaagagtttggtaaaatttttaaaaatgtaaaaaataatgttcctaatattgatagagcaattctttcgactcacacacataatgatttaggtttagcgacagcaaataatgttgcggctattaaagaaggtgcaagacaagttgagtgtacaattaatggaatgggtgaaagagctgggaattcatcattagaagaaattgttatgactttaaaagtaaaaaaagatcttatgccttttcatacagatattaaaacggagtccattatgaaagcttctagattggtatcatcaataacaggttttcctgttcagccaaacaaagcgatagtaggcgcaaatgcttttgctcatgaagcaggaatacatcaagatggtatgctcaaacatgctggaacgtatgaaattatgacgcctgaatcaatagggcttaacaaatcttcactagttcttggaaaacactcgggcaaacatgctttttcagaa

SEQ ID NO: 236861 - DNA, 973 bp, Unknown
  Bacterial polypeptide expressing nucleotide sequence isolated from the Sargasso Sea
acaagaacaaatttagatttcatgtgtaaaacaattgaacttgctattaaatgtggtgcaaaaaccattaatattccagatacagtaggatattcaataccagaagagtttgctaaaacgataacacatataaaaaataatgtaccaaacattgataaagcaattatatctgcacactgtcacaatgatcttggtttagctgttgcaaatgctcttgctggtttatcggcaggtgtaagacagatcgagtgtacaattaatggaataggtgaaagggccggaaatgcagccttagaggaaattgtaatggcaattaaaacaagaaatgatttaatgccttatgaaactggtatcaaaacagagcttataagcaaagcatcaaagatagtttctaatgcaaccggttttccggtacaatttaataaagcaatcgttggaaaaaatgcattcgcacacgagtcaggtattcaccaagatggtatgcttaaaaatagagaaacttatgaaataatgacaccagaaagtgtcggggttaaaaaaacatccttagtgatgggaaaacattcaggcagacatgcctttaaagataaacttaatgacttgggatatactgatgtaactgacgacgttattcaagcggctttcggaaaatttaagatattagctgataaaaaaaaacatatatatgatgaggatatcgtagctttagttgatgatagcttgatcattgataataagattaatgcaatcaatctaaaatcattaaaggtttttgcaggaacaggagagcctcaaagagcagaaatgactttagatgtttttggcgatgttaaaaaaactgttcaaactggagatggtccagttgatgcaatttttaaatgtataaaagaactataccctcataatgtgaaactatctttgtatcaggttcatgcagtgacagagggtacagacgcacaagcaactgtaagtg

SEQ ID NO: 236862 - DNA, 955 bp, Unknown
  Bacterial polypeptide expressing nucleotide sequence isolated from the Sargasso Sea
ctggaggccgtcaaaaatggtgctcggcagttggagtgcaccatcaatgggatcggtgagcgtgctggtaatgcatcgctggaagagctggtgatggcgctgcatgtgcgccgtagttatttcaacggctacatggatcgcgctgaggacagcaccaagcctctgacagccattcagaccgaggagatctacaagacctcacgcttggtgtccaacctcaccggcatggcggttcagcccaacaaagccatcgttggcgccaatgctttcgcccatgaatccggcattcatcaggacggtgttctgaagaatcgactcacctacgagatcattgatgcccgcaccatcggtttgaccgataaccgcatcagccttggcaagctcagtggacgcagtgccgtgcgtgctcgtcttgaggagcttggttaccagttggaaggtgacgacctcaatgatgcctttgctcgatttaaagaactagctgatcgcaagcgcgagatcaccgaccgagacctggaggcaattgtcagtcagaacgcccagcagattgaggcgcattaccagttggctggtgtccaggtgagttgtgggcgtgatcttcgcgccaccgccacggtcaccttgcgtacgagtgatggtgaggagtgctcacaggccgccattggtactggccctgttgatgcggtctgtcaggccctcaatgcgctggttcaggtccctaacgaattggtggaattcagcgtcaaatcagtcactgaaggaattgatgcgatgggtgaggtgacgatccgcttgcggcaggacggtcgcttgtattccggtcacgccgccgacactgatgtggtggtggcagctgcgcaggcgtttgtaaatgccctcaaccggatggtgagcggccagaaacacagcccattgcatccccaacgagcacccctgcccgccccagcgctatgac

SEQ ID NO: 236863 - DNA, 952 bp, Unknown
  Bacterial polypeptide expressing nucleotide sequence isolated from the Sargasso Sea
aaatttttaaaaatgttaaaaaataatgtttccaatatagataaagcaattttatctacccacactcataatgatttaggcctagctactgctaataatgttgctgcaattaaagaaggagcaagacaagtcgaatgtactataaatggtatgggagaaagagccggtaattcttctctcgaagaaatagttatgactttaaaagttaaaaaagacttaatgccttttcacactgatattaaaacagagtctataatgaaagcttcaaggttagtttcttctattacaggattcccagttcagcctaataaagctattgttggtgctaacgcttttgctcatgaagcaggtattcatcaagatggtatgcttaaacattctggaacatatgaaataatgactccagagtctattggtttaaacaaatcatctttagttctaggtaaacattctggaaaacatgctttttcagaaaaattaaaagaattaggatatgagccaggaaacaatgctttaatggagctatttggaagatttaaggatttagcagataagaaaaaagaaatatttgaagaagatttaattgcattagctgaggacaggtctgcatcttatgatgaacacattaagtttgtatctttagaagtaaatgcaggctcggtagaaaaacctgaagcaaaattaaaaattgaaatggatcaaaacattaagtcagttaaaattaacggaaatggaccagttgatgcaacatttaatgcaataaagaaacttacattaactgactttaaattaaaattatatcaagtaaatgcgattacagcaggtactgatgcgcaaggtgaagttacagttagactagaagatgatgatttatcctctcaagctaaaggaagtgatccagatataatagttgcatctgcaaaagcttatattaatgcacttaatcgattga

SEQ ID NO: 236864 - DNA, 934 bp, Unknown
  Bacterial polypeptide expressing nucleotide sequence isolated from the Sargasso Sea
agaaaaaatccaaatagcaagagtatttgatgaattaggtatagacattattgaagcgggttttccgatagcatcacctggagatttcgaagcagtaactgaagttagcaagattttaaaaaaatctattcccgcaggattatctagacattctaaaaaagatattgatagagcttatgaagctttaaaacatgctccaagatttagaatccacacatttatttcaacaagtcctcttcatatgaagcataaattaaatatgtcgccagaagatgtttatgagtctattggacagcatgtagcttatgcaagaaaatttaccgatgatgttgaatggtcttgcgaagatggcacaagaacagacatggattttatgtgcaagacagtagagcttgctattaaaaatggagcaacaacaataaatattcctgacacagttggttatactattccatctgagttcacaaaaattattcaaacattgttaaacaaagttcctaatattgataaagcaattttgtccacgcactgtcataatgacttaggcttagcagttgcaaattctttggcaggagttcaggctggtgctagacaaattgaatgtacaataaatggtttaggagaaagagctggaaatgcagcgttagaagaagttgtaatggcaattaaaacaagaccagatttgatgccttatgaaacaggaattaatacaacacttttaaataaagcttctaaaattgtgtcaaatgcaacaggttttcccgtgcagtataataaagcaattgttggaaaaaatgcttttgcacatgaagcgggcatccatcaagatggtatgcttaaaaatagacaaacatatgaaattatgacacctgaaagtgttggtgttaaacaaacctcattagtaatgggtaaacattctggtaaacacgcattt

SEQ ID NO: 236865 - DNA, 808 bp, Unknown
  Bacterial polypeptide expressing nucleotide sequence isolated from the Sargasso Sea
atgaacaaagaaaataattatataaagatttttgacactacattaagagatggtgagcagtctccaggtgcttcaatgaatattgaagaaaaattaaaaattgcagaagctctagaagatttgaaagttgatattattgaagcaggatttcccgccgcatcaaagggagactatgatgcagtttctgaaatttcaaaacagattaaaaattcgtcaatatgcgctttgagcagggcttcaaaaaatgatattcaaacagctgcagatgctctaaaaaatgcagcgtctccaagaatacatacattcatctcaacgagtgaacttcacatgaaacacaagttacaattgaattctgatgaagtttaccagaaggtaattgatagtgtatcttttgcaagaaatctatgtgatgacgttgagtggtcttgtgaagatggtaccaggacagacttagactttatgtgtaagactgtagaagcggcgattaagaatggtgcatctacaattaatattcctgatacggtcggttattcaattccagatgaatttaccaatattataaatcatctaatgaataatgttccaaatattgataaagttactatttcaacacattgtcataatgatcttgggttagctgtagcaaattctctagcaggcgtgagagctggggcaaggcaaattgagtgtacgattaatggtttgggtgaaagagctgggaatgctgccatggaagaagttgtcatggcaatcagaactagaaatgacatgatgccttttcaaacaaacatacagactgaaaaattac

SEQ ID NO: 236866 - DNA, 1069 bp, Unknown
  Bacterial polypeptide expressing nucleotide sequence isolated from the Sargasso Sea
aaataattacataaagatttttgatactacattaagagatggtgagcagtctcctggcgcttcaatgaacattgaagaaaaattaaaaattgcagaagctttagaagatttgaaagttgatattattgaagcaggatttcctgccgcatcaaagggagactatgaagcagtttctgaaatatcaaaaaagattaaaaattcatcaatatgcgctttgagtagagcttcaaaaaatgatattcaaacagctgcggatgctcttaaaaatgcaacagctccaagaatacatacatttatctcaacaagtgaacttcacatgaaacacaagttacaattgaattctgatgaggtttaccagaaggtaattgatagtgtatcttttgcacgaaatctatgtgatgacgttgagtggtcttgtgaagatggaactaggacagatttggactttatgtgtaaaaccgtcgaagctgcgattaagaacggcgcatctacaataaatattccagatactgtcggatactcaattcctgatgaatttacaaacattattaatcatttgatgaataatgttactaatattgataaggttacaatttcaacgcattgtcataatgatcttggattagcggtagcaaattctcttgcaggcgtgagagctggagcaaggcaaattgagtgcacgattaatggtttgggtgaaagagctggaaacgctgcaatggaagaagtggtcatggcaataagaactagaaatgacatgatgccttttcaaacaaatatacagactgaaaaactaacaaaaacctcaaagcttgtttcggcagttacaggtttccccgttcaatttaataaagctatcgttggaaaaaatgcttttgcacacgaagcaggtattcatcaggacgggatgttaaaaaataataaaacgtatgagattatgaccccagaaagtgttggagtttcagagtcaaatcttgtaatgggcaagcactctggcagacatgcattcaaacaaaaaataattgaacttggttattcaattaatgacaatgtaattgaggaggctttt

SEQ ID NO: 236867 - DNA, 883 bp, Unknown
  Bacterial polypeptide expressing nucleotide sequence isolated from the Sargasso Sea
agaagcaggttttccaatagcatcacctggtgattttgaagccgttactgcgattagtaaaattttaaaaaattcaattcctgctggactatcaagacatacaaaaaaagatattgatgcgtgctatgaatctttaaaaggcgcgaaaagatttagaatccacacttttatttctacaagcgcattacacatgaaacataaattaaacaaaactccagaagaggtaacagagtcaatcaaagagcatgtaacttatgcaagaaaattcactgatgatgttgagtggtcatgtgaagatggaacaagaacagatattgactttatgtgtaagactgttgagcttgctatcaaatgtggagcaaaaacaattaatattcctgatacagttggatatacagttccatctgaatacacaaaaattattaatacattatttaataaggttcctaatatcgataaagcgattctatctactcatactcacaatgacttaggtttggcagttgcaaattctttagcaggagtttctgcaggagctagacaagttgagtgtacaataaacggaattggtgaaagagcaggaaatgctgctcttgaggaaatagttatggcaatgaaaacaagacctgatttaatgccttttacaactggaattaatacaaagttactaagtaaagcttccaaagttgtatctaatgctacagggtttcctgtgcaattcaataaagcaatagtaggaaaaaatgcttttgctcatgagtcaggtattcaccaagatggaatgttaaaaaatagaaacacatacgaaataatgacaccagaaagcgttggagttaaaaaaacttcattggtaatgggaaaacattctggaagacatgctttt

SEQ ID NO: 236868 - DNA, 531 bp, Unknown
  Bacterial polypeptide expressing nucleotide sequence isolated from the Sargasso Sea
tatgagcggtaaagatagagtaataatttttgatactactatgcgagacggtgagcaatcaccaggtgcatctatgagtttggaagaaaaaatccaaatagcaagagtatttgatgaattaggtatagacattattgaagcgggttttccgatagcatcacctggagatttcgaagcagtaactgaagttagtaagatcttaaaaaaatctattcctgcaggactatctagacattctaaaaaagatattgatagagcttatgaggctttaaaacatgctccaagatttagaatccacacatttatttcaacaagtcctcttcatatgaagcataaattaaatatgtcgccagaggatgtttacgagtctattggacagcatgtagcttatgcaagaaaatttaccgatgatgttgaatggtcttgtgaagatggcacaagaacggatatggattttatgtgcaagacagtagagcttgctatcaaaaatggagcaaaaaccataaatattcctgatacagttggttatac

SEQ ID NO: 236869 - DNA, 391 bp, Unknown
  Bacterial polypeptide expressing nucleotide sequence isolated from the Sargasso Sea
atggctgataaaaatagaataattatatttgatacaacgatgcgtgatggagagcagtctccgggtgcatctatgagcttagaggaaaaattacaaatttctagagtatttgatgagctaggtgttgatgttattgaagcaggttttcctattgcatctccaggtgattttgaagctgttactgaaatcagcaaaactttaaaacgctcagttcctgctggacttgctagagccacaaaaaaagatattgatgcgtgccacgaatctttaaaacatgcaaaaaattttagaattcatacttttatttcaactagcccgcttcatatgaagcataaacttaataagactccagatgaagttttgggatcaatcaaaagaaagtgtaacctat

SEQ ID NO: 236870 - DNA, 731 bp, Unknown
  Bacterial polypeptide expressing nucleotide sequence isolated from the Sargasso Sea
aatgactaaaataattaatgattcagcttctaaatatcgaccattcaagtctatagatatagacaacagaacttggccttcaaatacaattactcaatcacctatatggtgcagtgtagacttaagggatggtaatcaagctcttatagagcccatgggtgaagaaagaaagcttaggatgtttagcctcctaattgaaattggtttcaaagagattgaagtgggtttcccctctgcgtcccaaacagacttcgattttgtcagaaaaattattacggaaaatcttataccaaatgatgtaactatccaggctttaactcaagccaggcctgagttaattaaaaaaacttttgaggctctagagggagcaaaaaaagctattgttcatgtctacaattctacgtccactttacagcgtaaagttgtttttaagagtgatgaggcagggataaagaaaattgcaactgatggtgctaaatgggtaaaagaagagtcagaactatatgatgaaactgattggtcatttgaatatagtccagagagctttactggcacagaactcccttatgcggttgaggtgtgtaatgcggtcaatgaaatttggcaaccgaatgatcaaaagaagacaatcatgaatctacctgccacagtggagatggcttctccaaatacttatgcagatcaaatagaatggatgtgtagaaatctgcaggatagagaaaatgtaatag

SEQ ID NO: 236871 - DNA, 697 bp, Unknown
  Bacterial polypeptide expressing nucleotide sequence isolated from the Sargasso Sea
atggataaaacaaataaaaaatataaaccatataggcctgtgagcatggaaaataggtcatggccttcaaaagttatagaaaaatctcctatttggtgttctgtagacctgcgtgatggaaaccaagctcttattgaaccaatgggagatgaaagaaaaaaaagaatgtttaatctattgtgtaaaattggttttaaacagattgagattggatttccagctgcatcacaaactgattttgatttcacaagatatttaattaatgaaaaagttatcccctctgatgttactattcaagttcttacacaagctagacctgaaattataaagagaactttcgaagctcttgatggtgctcctaatgcaattcttcatttttataattcgacttcaactcttcaaagaaaagttgtttttgataaagataaagaaggagttaaaaaaattgcaacggatgctgcaaaattaattaaagagttatcaagtgaatataagaacactaattggtcatttgaatactctcctgaaagtttcactggaactgagctagattatgcggtagaggtttgcgatgacgttgttgatatattaaaaaagtcttcaaataataaaattattattaatcttccagcaacagttgagatgtcaacggcaaatatatatggagatcaaatagaatggatgagtgagaacttta

SEQ ID NO: 236872 - DNA, 855 bp, Unknown
  Bacterial polypeptide expressing nucleotide sequence isolated from the Sargasso Sea
aacttttatgtgatcttggattcaaagaaattgaagtaggttttccagctgcatctgagactgactttgaatttgtgagatggttaattgaagaaaagcaaattccttcagatgtcacaatacaagtattaactcaagcaagagatcacattatagaaagaactttcgaatcacttgagggagcatcacaagctatagtgcatttttataactcgacttccacgctgcaaagaaaagtagtttttgatcaagataaatctggaataaaaaaaatagcaaccgatggagcaaagcttgtgaaaaaacttgccttaactcaaagtgaaacaaaatggtcttttgaatactctccagaaagctttacaggtactgagcttgattatgctgcagaggtttgtgattctgtagtcgatattttaaaagatgcaacatctgaaaaaatcattatcaatctgccagcgacagttgaaatggcaacaccaaatgtatacggtgaccaaattgaatggatgaatgaaaatttagaaaatcgagaaagtatttgtctctctttacatcctcacaatgatcgtggaactgcagtagcagcctctgaatttggattaatggcaggtgctgatagagttgaagggacattatttggtaatggagaaagaactggcaacgttgatattgtcactattgcattaaacctgcttactcaaggcattgatcctgagcttgatttttccgatattaactctgtaattagggaggttgagtactgcaatcaacttcctgttcatccaagacatccatatgctggtgatttggtttttacagctttctcgggatctcacccaagatgcaattaaa

SEQ ID NO: 236873 - DNA, 895 bp, Unknown
  Bacterial polypeptide expressing nucleotide sequence isolated from the Sargasso Sea
gcaggagttagacaaattgaatgtactataaatggaataggtgaaagagctggtaacgcagcgcttgaagaaattgtaatggctataaaaacacgagatgacttattaccttatgaaacaggaattaaaactgaactaattagcaaagcatctaaaattgtatctaatgctacaggttttcctgttcaatttaataaagcaatcgttggaaagaatgcttttgctcatgagtcaggaattcatcaagatggaatgttaaaaaatagagagacttatgaaataatgacaccagaaagtgttggtgtaaaaaaaacatctttagttatgggaaaacactctggacgtcatgcatttaaagataaattaagcgatctaggatatgctgatgtaacagatgatgttgtccaagcagcatttggtaaatttaaaattttagcggataagaaaaagcatatttacgacgaagatattgttgcattagtcgatgatagtttaattattgataataagataaatgcgattaatttaaaatcactaaaagtatttgctggtactggtgagccccaaagagctgatatgactttagatgtttttggagaagttaagaagacttcacaaactggtgatggtccagttgatgccatattcaagtgtattaaagaactttatcctcatgatgtaaaattatctctttatcaagttcatgcagttacagaaggaactgacgcccaagcaactgttagtgtaaagattgaggaaaatgatagaactacagtgggtcagtcagctgacacagatactttagtagcatcagcaaatgcttatttaaatgctttaaacaaaatgctcattaagagagagaaaaagtctttatataaaaacattgaaccaaaaa

SEQ ID NO: 236874 - DNA, 872 bp, Unknown
  Bacterial polypeptide expressing nucleotide sequence isolated from the Sargasso Sea
tgacgtaactattcaagttcttacgcaagctagacccgaaattataaagaggactttcgaagctcttgacggagctcctaatgcaattcttcatttttataattcgacttcaactcttcaaagaaaagttgtttttgataaagataaagaaggagttaaaaaaattgcaacggatgctgcaaaattaattaaagagttatcaagtgattataaaaatactaattggtcatttgagtactctcctgaaagtttcactggaactgagttagattatgcagcagaggtttgcgatgacgttgttgatatattaaaagagtcttcaaataacaaaattattattaaccttccagcaacagttgagatgtcaacggcaaatatatacggagatcaaatagaatggatgagtgagaactttaagaatagggaaaatatatgtctttcacttcatccgcataatgatagaggtacagcaatagctgcttctgagtttggcttaatggcaggtgcagatagagttgagggaacgttatttggtaatggtgaaagaacaggaaatgtagatatcgtaaccttagccctaaatatgtatagccaaggtataaatcctaatttagatttttcacaaattaataatgttatgagagaagttgaatactgtaatcaactgcccgtccatcccagacatccttatgccggtgatttggtctttactgctttttcgggatctcaccaagatgccataaaaaaaggtttaaatgcattaagaagctctaatgaaccacaatgggaagtgccttatttgccaattgatcctgcagacctggggagaacctatgaagccgttgtaagaataattcacaatctggaaaagg

SEQ ID NO: 236875 - DNA, 772 bp, Unknown
  Bacterial polypeptide expressing nucleotide sequence isolated from the Sargasso Sea
cataatgatcgtggcactgctgtagcagcaacagagttaggcgtaatggctggagctgataggatagaaggtactttatttggtaatggagaaagaactgggaatgttgatttagttactttagctttaaatatgcttactcaaggggtagatcctgaactagatttttctgatataaatccgataatgcgagaaactgagttttgcaatcaacttcctgtgcacccaagacacccttacgctggtgacctggtatttactgctttttctgggtctcatcaagacgcaattaaaaaaggccttaatgaattaagaaattctaatcaagaaacatgggaagtgccctacctcccaatagaccctaaggatgtaggcagatcttacgaagcagttataagaataaatagtcaatcaggtaaaggtggtgttgcttatctcttagaaaaagatcacggtttaagtatgcctagaaggctacaaatagagtttagtcaagttatccaaaggattaccgatgaaactggaaaagaaatttctgcttctgatatttgggacacttttcaagaaacttatttaaatgaaaatgggacttttaagttcctggaacatcatattaattcgacagcaaataaagaaggtattcaagaggatgaaatagaaataaagatcgagaaaggaagtgagattaaaactataacaggaactggtaatgggcctatagacgcaatgataaatgctttaagtacaaatttagaacttaacgtaaaaatag

SEQ ID NO: 236876 - DNA, 808 bp, Unknown
  Bacterial polypeptide expressing nucleotide sequence isolated from the Sargasso Sea
cagtgctgaggatgcaacacgaagcgatcctgaatttctggtggaacttttttcagagacggtcaaggctggtgcggtggtactcaatgtcccggacacagtgggatataccacaccggatgaaatgtattccctcctctcacgcctcatgaacgaggtttatcaatcggatcaggtcatcttttctgtgcactgccataatgatctggggatggcggtagccaattccatagcggctatccgggcgggggcccggcaggtagaatgcactattaacggtatcggcgaacgggccgggaatgcttccatggaagagattgtgatggcgctcaaaacccgccagcagtatttcaaatttcaaacaagcatccacactgagcagatttatcctaccagcaaactgctttcccagatcaccggtgtcgatgttcagccgaacaaagccatcgttggtgccaatgccttcgcccatgaagctgggatccatcagcacggagtgctgaagaacgccctcacttatgagattatgactcctcaatccgtgggcatcaaggccagcaacctagtactgggaaagcattctggacgtcatgccctgtcgaacagaatcaaacaactcggattcaaactcaacgatgtggaactaaaccagatttttcaggaattcaagcgacttgcagacattaaaaaacagatcttcgacgaagacctcgaagcactggtcacccatggaattcgcaagcacgcggaccgctatcacctggaaaatctaacggtcagttccggtaccgaggtgatcccgaccgcc

SEQ ID NO: 236877 - DNA, 618 bp, Unknown
  Bacterial polypeptide expressing nucleotide sequence isolated from the Sargasso Sea
tatggctgataaagacagagtttatatatttgatactactatgcgagatggtgagcagtcaccaggtgcatctatgagtttggaagaaaaaattcagatcgcaagagtatttgatgaattaggaattgatattatagaagctggttttccaattgcatctcctggagactttgaagcagtaacagaagttagtaaaattttaaaaaactctatccctgcaggtttgtctagacactccaaaaaagatatagatcgttgttacgaagcattaaaacatgctccaagatttagaattcacacatttatttcaacaagcccattacatatgaaacataaacttaataaatcttcagaagaagtttatgaatcgattaaagaacatgtaacatatgcaagaaaatttactgatgatgttgagtggtcatgtgaagatggaacaagaactgatatggactatatgtgcaaaactgttgaacttgcaattcaatgtggggcaaaaactataaatattcctgatacagtcggttatacaataccatctgaatttacaactataattcatacattgctaaataaagttccaaatattgataaagctattttgtcaactcattgtca

SEQ ID NO: 236878 - DNA, 968 bp, Unknown
  Bacterial polypeptide expressing nucleotide sequence isolated from the Sargasso Sea
gctggatgatcgccaatggccgggccgccaaatagacaaagcccccatttggtgctcagttgacttgcgtgacggcaatcaggcgctcattgaaccaatggatagcgcccgcaaaatgacgatgttcaaattgctggtgaaaataggtttcaaagaaattgaggttggatttcctgccgcgtctgatacagatttcaattttttgcgcgaattaatcgaaggcggtcatatcccaaatgacgtgacgatacaggtgctgacgcaagcccgtgaagaacttatccagcgcacggttgactcattgcgcggtgcgccaaatgccattctgcacctgtataattctacatcaacattgcaacggcgcgtggtcttcaaaagcgatcgagacggggttaaacagatcgctgtcgatggtgctaaaatggtggccgacagtctggccagggcaggcgcagaacatttgcgcctgcaatatagcccggaaagctttactggaaccgagctggattacgcccttgaggtttgcgaagcggtgatggaagtttggcagccaacgagcaccaagccaactgttatcaacttgccagcgacggtcgaaatgtcatcaccaaatatttatgcagatcaaatagaatggatgcatcgtaatttcagcaaccgtgccgcggtcatcctgtcattgcacccccataatgatcgtggttgtgcggtggccgcaaccgaattagcgttgatggctggcgcagaccgggtcgagggcacgctgtttggcaatggcgaacgaacaggtaatgtcgatcttgtgacattgggtttgaatatgttcacccaaggcgttgatccgcaccttgatttttctgatataaatcatcttattgaaacagccgaattctgcaaccagctacccgttcatgaacgccatccatatgctggcaaactggtgcatacagcttttttccggcagtcat

SEQ ID NO: 236879 - DNA, 782 bp, Unknown
  Bacterial polypeptide expressing nucleotide sequence isolated from the Sargasso Sea
tctgggcgcaaaaacaataaatatacctgatacagtaggttatactgttccttcagaatttaaaaaaattatcgaaacactaataaataaagttccaaatattgataaagctatactctctacacactgtcataatgatttaggtttagcggtagcaaattcattagctggagtgatggctggtgcgagacagatcgaatgtactattaatggtataggagaaagagctggaaacgctgctcttgaagaagttgttatggccatgagaactagacatgatttaatgccttacactacaaacattaatactaaacttttaagcaaagcatcaaaagttgtctcaaacgcaactgggtttccagttcaatttaacaaagcagtagttggaaaaaatgcatttgctcatgagtcaggaattcatcaggatggtatgcttaaaaatagaaacacttatgaaattatgactccagaaagtgtcggagttcataaaacttctttagtaatgggaaaacattcaggtcgtcacgcttttaaagataaattaaatgatcttggatatgtgggagttacagacgatgtaattcaaattgcttttggtaagttcaaagttttagctgataaaaaaaaacatatttatgatgaagatattgctgcaattgtagatgatagtttagtaacagaagataacgtaattaaattaaaatctttaaaagtttttgctggtactggtgagcctcagaaagcagaaatgactttagaagtatttggagaagtaaaaaaag

SEQ ID NO: 236880 - DNA, 848 bp, Unknown
  Bacterial polypeptide expressing nucleotide sequence isolated from the Sargasso Sea
gcaggatttcctattgcatctcctggagattttgaagctgtaaccgcgataagcaaaatcttaaaaaattcaattccttgtggactttcaagacattcaaaaaaagatatcgatgcttgctatgaagcgttaaaggccgcaccaagattcagaatacatacttttatttcaacaagtccacttcacatgaaacacaagttaaataaatcttcagaagaagtatatgagtcaattaaagaacacgttacttatgcaagaaattttacagatgatgtggaatggtcgtgtgaggatgggactagaactgaaatagattatatgtgtaagacagtagagcttgcaattaagtgtggagctaaaacagtgaatattcctgatacagttggttatacagttcctttagaatttaccaaaattattacaactttaaaaaataaagtaccaaatattgataaagctaaaatatctgtacactgtcataacgacttaggtttagctgttgcaaattctttagcgggagtttcggctggagcacgacaagtagaatgtacaattaatggaattggtgagagggctggaaatgcatctcttgaagaaattgttatggcaataaaaacaagaaatgatttaatgccatatcaaacaggaattaatacaactttattaagcaaagcttcaaaagttgtttcgaatgcaacttttccagttcaattcaataaagctattgtgggaaaaaatgcttttgcgcatgaagcgggaattcatcaagacggcatgttaaaaaatagaaatacttatgaaattatgacacctgaaagtgttggggttaaacaaacatctttagtgat

SEQ ID NO: 236881 - DNA, 638 bp, Unknown
  Bacterial polypeptide expressing nucleotide sequence isolated from the Sargasso Sea
aatgtcaaaggatcctggaagaattttgatctttgatacaactcttcgagatggagagcaatctcctggcgcaagtctaaatctcgaagaaaagcttgctattgctcatcaattagcgagattgggagtggatattatcgaagctggatttccctttgcaagtcctggagattttaaagctgtcaataaaattgcgaattctgtagggaaagaaaatggacctataatatgtggcttagctagagcatctaaagacgatataaaagcatgttacgaagcggtaagtcctgcacctaaaaaaagaatacatacttttattgctacaagtgatattcatcttaaacataaactaagaaaatctagaaaagatgttcttcaaatagttcctgatatggttaattatgcaaaatcattggtagatgatgttgagttttcatgtgaggatgcctctaggagcgatcctgattttttatacgaagtaattcaattagcaatttctgctggggcgacaacaataaatattcctgatactgttggatttacaactcccagtgaatttgggaaattgattgctgacataaacaaaaatgttccaaatattgatgaggcaataatatcagtacatggtcataacgatt

SEQ ID NO: 236882 - DNA, 898 bp, Unknown
  Bacterial polypeptide expressing nucleotide sequence isolated from the Sargasso Sea
tgtaccattaatggtattggtgaaagagccgggaatgcttctttggaagaattagtaatggcacttcatgttaggaaaagtttttttaatagttttttcaaaagaaatccagattcaccaactcctctaactgctataagaacagaagaaataacaaaaacctctagacttgtttccaacctaactggaatgaccgtacaacctaataaagcaattgtgggagctaacgcatttgcacatgagtcaggcattcatcaagatggggttttaaaaaatagactaacttacgaaattatcgatgcaaaaactgttggtttaagtgacaacaaaatatcattgggaaaacttagtgggagaagtgccgttagagcaagattagaagagatgggatatgacttgagccgagaagatttaaatgatgcttttgctcgttttaaggatttagccgacaggaaaagagaaatcactgatagagacttagaggcaattgttagtgaacaagttcagctcccagaagctaaatttcaattaagtcttgtacaagtaagttgcggtaacacatccaaacctactgccaccatttcgcttctaaacacggaagataatactgaggatactgctgtatcaatagggaccgggcccgttgatgctgtatgcgaggctctaaataaattagccaaagttcctaatgaattaattgaattttctgtcaagtcagtaacagaaggaattgatgctttgggcgaagtaacaataagaataagaagggataataaaatatattctggtcattctgctgatacggatgttgtagttgctgcagcgaatgcttacgttaatgcgttaaatagacttgtattttctgagaaaaaaaattcaattcatccaccaatttgat

SEQ ID NO: 236883 - DNA, 697 bp, Unknown
  Bacterial polypeptide expressing nucleotide sequence isolated from the Sargasso Sea
aatgactgaaaaaatatacatatttgatacaactttgagagatggtgaacaatcaccaggtgcttcaatgaatttggacgaaaaacttcaaatagctgaggtacttgattcaatgagagttgatatcattgaagcagggttccctatagcatcaaatggagattttgaggcagttcgtgaggtaagtaaaaaagtaaaaaactctacaatcgcaggtttagcaagagctagctttaaagatattgatagagcatgggaggctgtgcaacatgcaaaatcacctcgtattcatacatttatagccacaagccctcttcatatgaaatataaactaaaaaaaactgaagatgaagttttagaagcaattaataaaacagtttcacatgcaagaaatttatgcggtaatattgaatggagttgtgaagatggaggaagatctgaattagatttcctttataaatgtatcgagctagctataaattgtggagcttcaacaattaatattcctgacacagttggttatactttaccagaggaatttggaaaaatttttaaaaatgttaagaataatgttgttaatattgataaagcaattctatctactcatacacataatgatctcggattggcaactgcaaacaatgttgcagcgattaaagagggtgcaaggcaagtagagtgtacaattaatggtatg

SEQ ID NO: 236884 - DNA, 716 bp, Unknown
  Bacterial polypeptide expressing nucleotide sequence isolated from the Sargasso Sea
tttcgctcatgagtcaggaatccatcaggacggtgttttaaaaaacagacttacatatgagattattgacgcaaaaactgttggtttgacagataataaaatttcattagggaaacttagtggaagaagtgctgttagagctagattagaagaaatgggatacgacttaagcagagaagacttaaatgatgcttttgctcgtttcaaagatctagctgatagaaaaagagaaatcactgatagagatttagaagccatagttagtgagcaagttcaacttcctgagtccaaatttcaactaagtcatgttcaagtcagttgtggcagtacatccaagcctacagctactgtaactcttataaatacagaagatgatactgaagatactgctgttgcaataggtactgggcctgtagatgctgtttgcgaagctctaaatgcattagctaaagttcctaatgaactaatagaattttcagtgaaatctgtaactgaaggaatagatgcattaggggaagttacaataagaattagaaacaagaataaaatatattcggggcattctgcagatacagacgtagttgttgctgcggcccatgcttttgtaaacgctttaaacagaatgattttttcagagaagaaaaattctattcacccacaatttgatattttagaaaactctaaaaaagaggtattatcaaatcctaaagattaag

SEQ ID NO: 236885 - DNA, 875 bp, Unknown
  Bacterial polypeptide expressing nucleotide sequence isolated from the Sargasso Sea
gaatttgctaaaacgattacttcaataaaaaacaatgtcccaaatatagataaagcgattatttctgctcattgtcataatgatcttggtttagctgtagctaatgctctatcaggattatctgctggtgtaagacaaattgaatgtacaataaacggaattggagaaagagcaggaaatgctgcgcttgaagaaattgttatggcaattaaaactagagatgatttgttaccttatgaaaccggtatcaaaacagagttgattagtaaggcatcaaaaattgtatctaatgccactggtttcccagtacaatttaacaaagctatagttggaaaaaatgcttttgctcatgagtcaggaattcatcaagatggtatgcttaaaaatagagaaacttacgaaataatgacaccagaaagtgtaggagtaaaaaaaacctctttagtgatgggtaaacattctggtaggcatgcgtttaaagataaactaagtgatttaggttatgcagatgtaactgatgatgtagttcaagcagctttcggaaaatttaaaattttagccgataaaaaaaaacatatttatgatgaagatatcgttgctttagtagatgatagtttaatcatcgataataaaattaatgcaataaatcttaaatcattaaaagtctttgcaggcacaggagaaccccaaagagctgatatgacattagatgtttttggtgaaattaaaaaaacttctaagaccggagatgggcctgtagatgcaatttttaaatgtattaaagaactttatccacatgatgttaagttatcgctctatcaagttcacgctgttactgagggcacggatgctcaagcaacagtaagtgtgaaaat

SEQ ID NO: 236886 - DNA, 838 bp, Unknown
  Bacterial polypeptide expressing nucleotide sequence isolated from the Sargasso Sea
aaccttccagcaacagttgagatgtcaacggcaaatatatacggagatcaaatagaatggatgagtgagaactttaagaatagggaaaatatatgtctttcacttcatccgcataatgatagaggtacagcaatagctgcttctgagtttggcttaatggcaggtgcagatagagttgagggaacgttatttggtaatggtgaaagaacaggaaatgtagatatcgtaaccttagccctaaatatgtatagccaaggtataaatcctaatttagatttttcacaaattaataatgttatgagagaagttgaatactgtaatcaactgcccgtccatcccagacatccttatgccggtgatttggtctttactgctttttcgggatctcaccaagatgccataaaaaaaggtttaaatgcattaagaagctctaatgaaccacaatgggaagtgccttatttgccaattgatcctgcagacctggggagaacctatgaagccgttgtaagaattaattcacaatctggaaaaggaggcgttgcttttctattggaaaaagatcatggagtgtctctccctagaaggcttcaaataagcatgagtcagaaaatacaaaaaattgctgatgagactggtaaagaaatttcaacatcagagatttgggaaatctttcatacaaactttgtcatgccaaaatcggggcatagttttaaaaactattccttaaaaacttcagatgcaactgatgtaagtgatcatattaaagctgagattgaaattgatggtaaaaaccatgaaatatctggttcaggtaatggtccaattgacgcattgtaaa

SEQ ID NO: 236887 - DNA, 287 bp, Unknown
  Bacterial polypeptide expressing nucleotide sequence isolated from the Sargasso Sea
aatggaaaaaatccagatatttgatacaacccttcgtgacggtgagcaatcaccaggatgttccatgtctgcaggtgaaaaactgcttcttgcccgtcaattggaaaaactaggagtggatacaatcgaagccggttttgctgcatcgtctcccggagattttgagagtgtcaagagcattggtcaggaaatccgagaatcaatggtggtctccctctgccgaatggtagaaaatgatgtggaccgtggagccgaggcattgaaagacgctcataattgggggcttc

SEQ ID NO: 236888 - DNA, 958 bp, Unknown
  Bacterial polypeptide expressing nucleotide sequence isolated from the Sargasso Sea
tatttatgccgaccagatagagtgggtctgcaataatattgataatagagaaaaccttatcatcagccttcatcctcataacgatcgaggcacagctgttgcagcaactgaattaggtgtaatggctggagcagatagaatagaaggaaccttatttggtaatggagaacgaacaggaaatgttgatttggttaccttagctttaaatatgctaacccaaggagttgatcctgaactagatttttcaaatataaatccaataatgagagagacagaatattgtaaccaactacctgttcatcctagacatccttacgctggagatcttgtatttactgccttttctggatcacaccaagatgctataaaaaaaggattaaatgaattaagaaattccaatcaagagacttgggaagtcccttatctgcccattgatcctaaagatgtaggaagatcttacgaagcggtcattagaattaatagtcaatcaggcaaaggaggcgtagcttacctcttagaaaaagatcatggactgagtatgcctagaaggcttcagatagaatttagtcaagtcatccagaaaataactgacgaaactggaaaagaaatttctgcttcagatatttgggaaatatttcaggaaacatattttaatgaaaatggaagatttaagttcttagaacatcatattaattcaagagcaaatagaaaaggtcttcaagaagatgaaatagaaataaaaatcaatgatggaaataaatctcataccatcaaaggactaggtaatgggcctatagatgcgatgataaatgccttaagtgttgatttaaatcttgaaattacaatagcagactatcatcaacatgcaatcagctcaggctctgatgctaaagcggttgcttattatgagattgcatacaaaaaccaatcggtttggggagtagggattcatcaaaat

SEQ ID NO: 236889 - DNA, 583 bp, Unknown
  Bacterial polypeptide expressing nucleotide sequence isolated from the Sargasso Sea
atgagcaataaagatagagtctttatatttgataccactatgcgtgatggtgagcaatcaccaggagcatctatgagtttagaagaaaaaattcaaatcgccagagtttttgatgaattaggtatcgatattattgaagcaggttttccaatagcttcaccaggtgattttgaagctgtttcagaggtaagtaaaattttaaaaaattctattcctgcaggactttcaagacactcagtaaaagatattgatagagcttatgaagctctaaaacatgcaccaagatttagaatacatacatttatttctacaagtccattacacatgaagcataaattaaacatgtctccagaagacgtgtatgaatcaattggaaaacatgtcgcctatgcaagaaagtttactgatgatgttgagtggtcttgtgaagatggaacaagaactgatatggattacatgtgcaaaactgtagaacttgcaattaaaaacggagcaacaacaattaacattcctgatacagttggttacacaataccatctgagtttactacaattatagaaattttactaaataaagttccaa

SEQ ID NO: 236890 - DNA, 788 bp, Unknown
  Bacterial polypeptide expressing nucleotide sequence isolated from the Sargasso Sea
ggtggatccagagttggacttttctagcatcaacgaatcccgaagaatagccgatatgcaaaatcaattacctgtgcatcctagacatccatacgttggagacctagtttacaccgctttttcgggctcccatcaagatgctatcaagaagggattgagcgccctgtcaaaatctgacatgcccctttgggaggttccctatcttcccattgatcccaaagatgttgggcgtacctatgaagacgtgataagagtgaactcacagtctggaaagggtggagtctcttatttgctgaaaaccgatcaggatttggacctacctcgaagacttcagatcgaattcaccagagtcatacaagacatcacggataaaaccggaaaggaaattacagcccaggaaatatggggtgttttcagggaacattatctagataagaacaagccatttgaattgatatctttcaacactagtcagaatgccgaaggaaaggatcgaactcaagttgaggcggtcatcgcgatcgaaggaaaagaagaaaaattcacaggagaaggagggggatctatagaggcttttaccaaggctcttaactctggtttagagggtacggtcgcagttctagactatcatgaacatgcgatcggatcaggggcagatgcaaaagctgtttgctacatagaactcagtgtagatggcgatgaattgtggggaattggaatgcattcagacatcgtatcagcttctttaagagcaataatatcaggtttaaattcagccgctggctaaa

SEQ ID NO: 236891 - DNA, 937 bp, Unknown
  Bacterial polypeptide expressing nucleotide sequence isolated from the Sargasso Sea
atgagtgttgaagaaaaaattcaaatttctagagtatttgatgaaatgggaatagatataattgaggctggctttcctatatcatctccaggagattttgaagcagtatctgaaattagtaaagaaattaaaaattctataccctgtggtttagcaagagctttaagaaaagatattgatgcttgtcatgaatcgttaagacactcaaaaagatttagaattcatacttttatttcaacaagccctgttcatatgaaacacaaattagatatgtccaatgatcaagttctagatgctataaaagatagcgtaacttacgcaagaaaatttacaaatgacgtagaatggtcatgtgaagatggaactagaacagatttagattttatgtgtaaaacaattgaattagcaattaaatgtggagctacaacgataaatataccagatacagttggctactcagtacctgaagaatttgcaaaaacaataacacatattaaaaataaagtaccaaacattgataaagctattatatctgctcattgtcacaatgatttagggcttgctgttgcgaatgctttagctgggctatcagcaggtgtaagacaaattgaatgcacaattaatggcattggtgaaagagctggaaatgcggcacttgaagaaattgtaatggcaattaaaacaagaaatgatttaatgccatatgaaacaggtattaaaactgaacttataagcaaagcatctaaaattgtatctaatgcaactggttttcccgtgcaatttaataaagcaattgttggaaaaaatgcttttgcgcacgagtccggaattcaccaagatggtatgttaaaaaatagagagacatatgaaattatgacaccagagagtgttggagttaagaaaacttctttagtaatgggcaaacattctggcagac

SEQ ID NO: 236892 - DNA, 694 bp, Unknown
  Bacterial polypeptide expressing nucleotide sequence isolated from the Sargasso Sea
tcagatagcaggattggcgagagcaaaacatgaagatattgaagcagcttggaatgctgtaaaaaaagcaaaaaatccaagaatacatacatttattgccactagccctatacacatggaattcaaattaaaactaactgaagaccaagtgctcgacaaaattaaagatagtgtttcttttgcaagaaacctatgcccaaatattgaatggagctgtgaggatggtggaagatcctcgattgattttctttataggtgcatagaattagcaatagaaagtggagcatcaacaataaatatccctgatactgtaggatatactttaccatttgaatttggggagattataaaaaaagttaaaaacaatgttccaaatattgataaagcaatcatttctgttcattgtcacaatgatttgggtttggcagttgcaaattctctaaacgcagtagaaaacggtgcaagacaaattgaatgtacaataaatggattgggtgaaagagcgggcaacgcagccttagaagaagttgtaatggctatgaaagttagatcagatcttttaaaagttcagtccaatattaatacaagtgcaatttcaaaaacttcaaaacttgtatcttcaattacaggttttcctgttcaaccaaataaagcaattgtaggtgctaacgcatttgctcatgagtcagggata

SEQ ID NO: 236893 - DNA, 196 bp, Unknown
  Bacterial polypeptide expressing nucleotide sequence isolated from the Sargasso Sea
atgtcaaaagatccaggcagaatattaatatttgatacaacccttagagatggtgaacaatctcctggtgcaagtttaaatcttgaggagaaacttgcaattgctcatcagctagccagattaggtgtagatgttattgaagcaggttttccttttgcaagtcctggagattttaaagcagtaaataaaatttcgg

SEQ ID NO: 236894 - DNA, 787 bp, Unknown
  Bacterial polypeptide expressing nucleotide sequence isolated from the Sargasso Sea
aatgacaaaagatcctggaagaattttgatatttgatacaactcttcgagatggagagcagtcgcctggcgccagtttgaatcttgaagaaaaacttgctatcgctcatcaattagcaagactaggtgtggatgttattgaggctggattccctttcgcaagtccaggagattttaaagctgttaataaaattgccaatgctgtagggaaagaaaatggtcccataatatgtggtttagctagagcctctcaaggagatataaaagcctgttacgaagcagtaagtccagctcccagaaaaagaatacatacttttattgcgacaagtgatattcatcttaaacataaacttaaaaaatccagaaaagacgttcttcaaatagttccagaaatggttaactatgcaaaatcgttggtagatgatatcgagttttcttgtgaagatgcctcaaggagtgatcctgattttttatacgaagtgatacaactagcaatttctgcaggagcgacaacaataaatattcctgatactgttggatttacaactcctagtgaatttgggaaactaattgctgatataaataaaaatgtatcaaatattgatgaagcagtaatctcggttcatggtcataatgatttaggtttagcagtagccaattttctagaggcagtaaaaaatggagcaagacaactagaatgtacgattaatggaattggggaaagagcagggaatgcctcgctagaggaattagtaatggcactacatgttaggaaagagtttttttaa

SEQ ID NO: 236895 - DNA, 850 bp, Unknown
  Bacterial polypeptide expressing nucleotide sequence isolated from the Sargasso Sea
ttggaagaagtagttatggcaattaaaacaagaaatgatttaatgccatataatactggaattaaaacagaattaataagcaaagcatctaaaatagtttcaaatgcaactggttttccagttcaatttaataaagctatagttggaaaaaacgcttttgctcatgagtccggaattcatcaagatggaatgttaaagaatagagaaacttatgaaattatgacaccagagagtgtaggtgttaagaaaacctcacttgttatgggtaaacattcaggacgacatgcttttaaagataaattatctgacttaggttattcagatcttacagacgatattatccaagctgctttcggaaaatttaaagttttagctgataaaaagaaacatatttatgatgaagatatagtagcgttagttgatgacagtttaattgtagataataaaataaatgcaattaatttaaaatcgttaaaagtttttgccggaacaggagaaccacaaaaagctgaaatgacactggatgtctatggtgatattaagaatactaccgaaacaggagatggaccagttgatgcaatatttaaatgcataaaaaaattatttcctcacgatgtaaaattatctctttatcaagtacacgcagtaactgagggtacagatgctcaagcaactgttagtgtaaaaattgaagaaaacgataggacaacagtaggtcaatcagctgacacagatactctagtcgcatctgcaaacgcatatttgaatgcattgaataaaatgcttataaaacgtgagaaaaaagcaccgtcccaaaatattaaacatcaaaaagtgaaaggaatataat

SEQ ID NO: 236896 - DNA, 967 bp, Unknown
  Bacterial polypeptide expressing nucleotide sequence isolated from the Sargasso Sea
gatcctgattttttatacgaagtgattcagctggcaatttctgcaggagcgacaacaataaatatccctgatactgttggatttacaactcctagtgaatttggcaaattaatagccgatataaataaaaatgttccaaatattgatgaggcagtaatctcggttcatggacataatgatttaggtttagcagttgccaattttctagagtcagtaaaaaatggcgcgagacaactagaatgtacgattaatggaattggtgaaagagctgggaatgcctctctagaagaattagtaatggcattgcatgtaaggaaaagtttttttaataattttttcaaaagaactccagattcaccaactcctcttacagctataagaacagaagaaataacaaaaacctctaggcttgtttccaacctaactggaatgaccgttcaacctaataaagcaattgttggagctaatgcttttgcacatgagtcaggcattcatcaggatggagtcttaaaaaatagactaacttacgaaattatcgatgcgaaaactgttggtttgagtgacaacaaaatatctttagggaaacttagtggaagaagtgcagtaagagcaagattagaagagatgggatatgacttgagcagggaagatttaaatgatgcttttgctcgtttcaaggatttagctgacaggaaaagagaaattactgatagagacttagaagcaattgttagtgaacaagtacagcttccagaagctaaatttcaattaagtcttgtgcaagtaagttgcggtaatgcatctaaacctacagccactattactcttctaaacacggaagataatactgagcaaactgctgtatcaatagggactggacctgttgatgctgtatgcgaggctttaaataaattagctaaagttcctaatgaattaattgaattttctgtaaagtcggtaacagaag

SEQ ID NO: 236897 - DNA, 556 bp, Unknown
  Bacterial polypeptide expressing nucleotide sequence isolated from the Sargasso Sea
atgacacaagatacaaataatataaagatttttgatacgactatgagagatggcgaacagtctcctggcgcgtcaatgaacattgaagagaaaattaaaattgcacaggctttagagactcttggagttgatattattgaagcgggtttccctgcagcatcaaaaggtgattttaacgcagtaaaagaaatctcttcaattattaaaaagtcacaagtatgcgctttgagtagagcatcacaaaatgatattcagtctgcagcagatgctcttaagaatgccgctcaacctagaattcatacatttatttcgacaagtgagttacacatgaagcataaattacagctagactcagatcaggtgtatcaaaaggtaattgacagtgtttcgtttgcgagaaatttatgtgatgatattgaatggtcttgtgaggatggtactcgtactaatttagactttatgtgtaagactgttgaagcagcaattaaaaatggcgcttcaacaataaatattccagatacagtaggctactcagttcctgaagaatttacacata

SEQ ID NO: 236898 - DNA, 643 bp, Unknown
  Bacterial polypeptide expressing nucleotide sequence isolated from the Sargasso Sea
atgtcaaaagatcctggaagagttttgatatttgataccactcttcgagatggagagcaatctcctggtgcaagtttaaatcttgaagagaaacttgctatcgcccatcaattagcaagattaggggtagatgttattgaggctggattccctttcgcaagtcccggagattttaaagctgttaataaaattgcaaacgccgtagggaaagaaaatggccctataatatgtgggttagcgagggcatcagaaggagatataaaagcatgttacgaagctgtaagtccggctcccaagaaaagaatacatacttttattgcgacaagcgatattcaccttaaacataaacttaaaaaatccaggaaagatgttcttcaaatagttccagaaatggttaattatgcaaaatcattggtagatgatattgagttttcttgtgaagatgcctcaaggagtgatcctgattttttatacgaagtgattcagttagcaatttctgcaggagcaacaactataaatatccctgatactgttggatttacaactcctagtgaatttggtaaactaattaccgatataaatacaaatgttccaaatattgatgaggcagtaatctcggttcatggtcataatgatttgggtt

SEQ ID NO: 236899 - DNA, 495 bp, Unknown
  Bacterial polypeptide expressing nucleotide sequence isolated from the Sargasso Sea
aatgagcaacgatactgccagtgaaaaagtggttatttttgacaccactttgagagatggtgaacaatcaccaggcatttctcttgatgtaggagaaaagctagaaatagctggacagcttgctcgactgggagttgattacatcgaagcagggtttccaatagcaagccaaggtgatttcgacgcggtgcatgcaatagcttctaacgtaagtggccccgtaatttgcggactatcacgtacaagctataaagacatagatcgttgttgggaagcaatagagcctgcagaaaaacgaagaatccacacatttattgctacaagcccaacgcatatggaacataagctaaaaatgacaccggaacaggttctggctgaggctgcttccgcagttggtagagccagagaatacaccgatgatgttgaattcagccctgaagatgcatctagatcagatttcgattttatgtgtgatgtgcttccagcagcagttga

SEQ ID NO: 236900 - DNA, 829 bp, Unknown
  Bacterial polypeptide expressing nucleotide sequence isolated from the Sargasso Sea
tttcctatagcttcaccaggggattttgaggctgtttcagaagtaagtaaaattttaaaaaactctattcccgcaggactttcaagacactcagtaaaagatattgatagagcttttgaagctttaaaacatgctccaagatttagaattcatacttttatttcaacaagtccattacacatgaagcataaattaaatatgtctccagaagatgtttacgaatcaattggaaaacacgttacttatgcaagaaatttaactgacgacgttgaatggtcttgtgaggatggaacaagaactgatatggattatatgtgtaaaactgttgagcttgcaattaaaaatggagctacaacaattaatattcctgatacagttggttacacaataccgtctgagtttactacaataatagaaaccttattaaacaaagttccaaatatagataaagcaattttatcaactcattgtcataatgatttaggtttagcagtagctaactcattagctggagttcaagccggagcaagacaaattgaatgtacaataaatggattaggagaaagagcaggaaatgctgcacttgaggaagttgtaatggcaattaaaactagacctgatttgatgccatatgaaactggaattaatacgacacttttaagcaaagcctctaaaattgtttcaaacgcaacaggtttccctgttcaatacaataaagctatcgttggaaaaaacgcttttgctcatgaagcaggaattcatcaggatggaatgttaaaaaatagacaaacatacgagataatgacacctgaaagtgtgggagttaagc

SEQ ID NO: 236901 - DNA, 187 bp, Unknown
  Bacterial polypeptide expressing nucleotide sequence isolated from the Sargasso Sea
atgtcaaaagatcctggaagaattttgatatttgatacaactcttcgagatggagagcaatcccccggtgccagtttaaatctcgaagaaaaacttgctattgcccatcaattagcaagattaggagtagatgtcattgaagctggattccccttcgcaagtccaggagattttaaagctgttaata

SEQ ID NO: 236902 - DNA, 937 bp, Unknown
  Bacterial polypeptide expressing nucleotide sequence isolated from the Sargasso Sea
tatgagcaaggaaaatttaataatttttgacactactttaagggacggtgagcaaagcccaggagcctctatggatataagcgagaaggttcagatagctcatgcacttgaagaattaaatgttgatattatagaggctggttttcctatcgcaagcccgggagattacaaagctgttaaggaaatagctgaaactataaataactcaggtgtctgcgctctagctagagcattggataaggacatagagtctgcagcaaaggcgcttgaaaatgctaagaatccacgtatccatacattcatagcaacttcaccaattcatatggagaaaaaacttaatatgtccccagctaaagtaatagctaccgcagtacatgcggtagaactttctaaacaattcactgatgacattgaattctcgcctgaagacgcaggcaggtctgaattggattttctatatgaaattattgaggcaacaatagatgccggtgcaaaaactataaacattccagacacagttggatataatctaccacaccagtttggtgatttaattagaaatataatagccaatgtcaagaattcagataatgctatattttctgttcattgtcataatgatttaggtcttgcagttgcaaactctttagcagctgtatcgaatggagctagacaagtagaatgtacaataaatggtcttggtgaaagagcagggaatgcagcattagaagagattgttatgtctgttaagacaaggcgtgatatgtttcattgtaatactagaatcaatactaaaaaaatattaaagtgttctaggctcgttgcaggcattactggttttccagttcagccaaataaagcaattgttggtaaaaacgcatttgcccatgaatctggtattcatcaggatggcataattaaatctagagaaacttat

SEQ ID NO: 236903 - DNA, 682 bp, Unknown
  Bacterial polypeptide expressing nucleotide sequence isolated from the Sargasso Sea
aatgactgaaaaaatatatatttttgacacaactttaagagatggtgaacagtcaccaggcgccactatgactcttgaagaaaaacttcaaatagcagaagttcttgatgaaatgaacgttgatatcattgaggctggtttccctatagcctctaatggtgattttgaggcagtaagtgaaattagtaaaaatattaaaaactcaacaattgcaggtttagctagagcaaatttaaaggatatagaaagggcgtgggaagcaattaaatttgctaaatcgccaaggattcatacttttattgctacaagtccactgcatatgaaatttaaactaaaaaaaactgaagaagaagttcttgaatcaattaaaaaaactgtttcttatgcaagaaacctatgttcaaatattgaatggagctgtgaagatgcaggaagatctgatttagagtttttatataaatgcattgagctagctattacttgtggcgcaactactattaatattccagatactgtaggatatactttaccccaagagtttggaaaaatattcaatcaagttaagaacaatgtttctaatatagataaagcaattctttcttcacatactcataatgatttaggtttagcaactgcaaacaatgttgcagctattcaagaaggtgctcgacagatagaatgc

SEQ ID NO: 236904 - DNA, 799 bp, Unknown
  Bacterial polypeptide expressing nucleotide sequence isolated from the Sargasso Sea
tccatgaatgttgatattatcgaagcagggtttccaattgcttctaacggagattttgaagcagtttctgaagttagtaaacgtgtaaaaaattcaactatagctggattagcaagagcaagctttaaagatattgatcgtgcttggggagcagtacaacatgcaaagtctccaagaattcatacttttattgcaacaagtcctctacatatgaaatataaattaaagaaaactgaaaaagaagttttagaggctattcaaaaaactgtttcttacgcaagaaatctttgtgataatattgagtggagttgtgaggacggtggaagatcagagttagaatttttatatcaatgtatcgagcttgccattaactctggtgcttcaactattaatatacctgatactgttggttatactttaccagaagagtttggtaagatttttaaaaatgtaaaaaataacgttcctaatattgataaagcaattctttcaacacatacacataatgatttaggtttagcaacagcaaataatgttgcagctattaaagaaggtgcaagacaagttgagtgtacgattaatggtatgggtgaaagagctggaaattcatcattagaagaaattgtcatgaccttaaaagtaaaaaaagatcttatgccttttcatacagatatcaaaacagagtctattatgaaagcttctagattagtatcatcaataacaggttttccagttcagccaaataaagcaatagttggtgctaatgcttttgctcatgaagctggaatacatcaagacg

SEQ ID NO: 236905 - DNA, 316 bp, Unknown
  Bacterial polypeptide expressing nucleotide sequence isolated from the Sargasso Sea
gatgtctaacagagtaattatatttgataccaccttacgtgatggcgagcaggcgttagcggcaagcctgtcggtcaaagaaaagttacagatcgccatggcgttggaacgtctcggtgtggatgtaatggaagtcgggtttcccgtgtcttccccaggtgattttgagtcggtgcagaccattgcccgtaccatcaaaaatagccgtgtgtgcgccttatcccgcgccttggaaaagatatcgatgccgccgcccaagcattatcggttgccgaacagttccgtattcatacctttatctccacctcgactatcc

SEQ ID NO: 236906 - DNA, 814 bp, Unknown
  Bacterial polypeptide expressing nucleotide sequence isolated from the Sargasso Sea
ttgggactaaacatgtttacccaaggtattaatccagaactggatttttctgatattaacaatcttattgaaacggcggagttttgtaaccaaatacctgtacatcaacggcatccttacgcaggacttttagtccataccgcgttttcgggaagtcatcaggacgcgattagaaaggggatggaagcaatttcaaaatcgaataaacttcattgggaagttccatatttgcctattgatccgagcgatattggtagaacctatgaagcaatcattagggtgaattcgcagtcaggaaaagccggttctgcttggttgttagaacaagaacacaacattaacataccaaggggagctcaaatccagtttagccaagtagttcagaacatagctgataagtctggcaaagaaataacttcagacatgatctggagtatatttgagcaagaatttttgaaaaagggaaagttttctcttctcaaatttaaaagcaagaaaatatcaaaaggtgataatactgaatttgttgaggcaactattgaaaataacggagaaaaaataaaaatttcttcaacaggcaatggtccaataagcgctttcgtaaatgcgatgagagatactttcaagctaacttttatgcttaatgatttcggtcaaaatacaagaagctcaggatcctctgctgaagcagcagcttacattgaaattaaggttccagatgaaaatggtgaaagtgtgttcggagtcggcatagatacttccattactctggccccaattaaggcggtaataagcgctataaacagaatataat

SEQ ID NO: 236907 - DNA, 838 bp, Unknown
  Bacterial polypeptide expressing nucleotide sequence isolated from the Sargasso Sea
aagcgatgtcaatattcaagttcttactcaggcaagaaatgaattaattgagaaaacttttcaatcacttgagggagctaaaaatgcaatcatacatttttataattcaacttccacactccaaagaagagtcgtttttaatcaagataaagaaggcattaaaaatattgctatgaatgcagcattaaaaattaaagagttagctgaaaaaaatccaagcactgattggtcttttgaatattctccggaaagttttacaggtactgaaatagattatgctgcagagatttgtgattctgttgtgaaaattttgaaagattctactaatcacaaaatcatcataaatcttccagctacagtagaaatgtccactcctaatatttatggagatcaaatagaatggatgcattgtaatcttaaagaaagagataatatttgtcttagtcttcatcctcataatgatcgaggaacagcggttgcagcggctgaatttggtgtcatggctggagcagatagaatagaaggtactctttttggaaatggtgaaagaactggaaacgttgatatcgttacaattgcattgaacatgcttactcaaggaatagatccaaaattagacttttcaaatataaattctgtaatgcgagaagttgaattttgtaatcagttaccggttcatccaagacatccatatgctggtgaccttgtatttacagctttttctggctctcatcaagatgcaataaaaaagggtttccaggcaatgaaaacttctaacgaccctaaatgggcggttccttatcttcctattgatccagcagatctggcagaagttaga

SEQ ID NO: 236908 - DNA, 889 bp, Unknown
  Bacterial polypeptide expressing nucleotide sequence isolated from the Sargasso Sea
agataaaaagttaaggtttttttctatgctagtagaactaggatttaaacaaattgaaatcggcttcccttctgcttctgaaaccgaatttaagtttgtgcgggaacttgtgaaccaaaatctcattccggatgatgttcaaattcaagttttaactcaatcaagagagcacttaatagaaaaaacttttgaatcagttgctgattgtaaaaaagtgatactgcatttatataattcaacatcaactcttcaaagaaaggtagtttttaataaagacaaaaaagggatcactaaaatagccacagaaggagcagctttagtaaagaaattgtcagaagaagcgaaaaacacaaattggcaatttcaatatagcccagaaagttttacgggaaccgaattagagtatgctctagaagtttgcaacgaagtaaatgagatttggcaaccaactaaaaatagaaaatcaatcatgaaccttccggctactgttgaattgtctactccaaatatttatgcagatcaaattgaatggatgtctgaaaacttaaaaaatagagaaagtataattttgagtcttcatcctcataatgatagaggaactgctgttgcagctgctgagcttggtttaatggcaggcgcagacagaatagaaggaactttatttggtaatggagaaagaactggaaatgttgatatagtctcgcttgccttaaatcaactgactcaaggagttgatcctaaacttgatttttctaacatcaataaaattatgagagaagttgagtattgtaatcaactacccgttcatcctaggcacccttatgctggagacttggttttcactgcattttcaggttcacatcaagatgcaataaaaaaaaggttttga

SEQ ID NO: 236909 - DNA, 909 bp, Unknown
  Bacterial polypeptide expressing nucleotide sequence isolated from the Sargasso Sea
gacgcagttaaagacagtgtaacatatgcaagaaaatttacagatgatgttgaatggtcatgtgaagatggaacaagaactaatttagattttatgtgtaaaacaattgaacttgcaatcaaatgtggagcaaaaacaataaatataccagatacagttgggtattctattcctgaggaattcgcaaaaacaattacgcatataaaaaataatgtaccaaatattgataaagcaattatatctgcccactgtcacaatgatttaggtttagctgttgctaatgcgttagccggtttgtcagctggtgttagacagatcgagtgtacaataaatggtattggtgagagagcaggaaatgcagctttagaggaaattgttatggcaataaaaacaagaaatgatttaatgccttatgaaactggaattaaaactgaattaattagtaaagcgtcaaagatagtttctaatgctactggctttccagttcaatttaataaagcaattgtaggtaagaatgcttttgcacacgagtccggtattcaccaggatggaatgcttaaaaatagagaaacatacgaaattatgacacctgagagtgttggagtaaagaaaacttctttagttatgggtaagcactctgggaggcatgcttttaaagacaagttaaatgatttaggatacacagatgtaactgacgacgtgatccaagctgcatttggaaaatttaaaattttagctgataaaaagaaacatatctacgatgaggatatagtggcattagttgatgatagcctaataattgataataaaattaatgctataaatttaaaatctctaaaagtatttgctggaacaggcgagcctcagagagcagaaatgactctagacgtttttggtgaggtaaaaaaa

SEQ ID NO: 236910 - DNA, 750 bp, Unknown
  Bacterial polypeptide expressing nucleotide sequence isolated from the Sargasso Sea
catgaaagaatctagagaaataattatatttgacacaacactccgagatggtgagcaagcacctggatgcagtatgactatgggtgaaaaattaaagattgctcacgctttaaaagaattgaatgttgatgtcattgaagcaggttttgctgctgcatctcctggtgattttgatgctgtaaatgcaattgcatccgagattgatggcccaactatatgttcgcttgcgagatgcaatgagagcgatatagaaaaggcttacgaagccctgaaggtaaataaaaatagaagagttcatgtctttgtagctacgagtgaaattcatctcaaacacaaactaaatatggcaaaagatgaggttctcaaagctgcttacgaaggtgtaaaaatggcgaagtcattctgtgaaaatgttgagttttctcctgaggatgcttccagaactgatcacggttttctaactgaagttgtgaatgctgcaattgaagcaggtgcgacaacaattaatgttccagatacagtgggatacaccatcccctatgagtttggtgagctatttaagcacttgatttcaaactgcaatgatgctgagaatgtgatcttcagtgtccattgtcatgatgaccttggcctttctgtagcgaatagcttggctgcagttgaatccggagcaagacaaattgagtgtacaattaatggcattggagagcgagctggaaatacctcactcgaggaagtatgcatggcaat

SEQ ID NO: 236911 - DNA, 865 bp, Unknown
  Bacterial polypeptide expressing nucleotide sequence isolated from the Sargasso Sea
agcacgacaaattgaatgcactatcaacggtataggtgaaagagctggtaacgcagcacttgaagaagtagtcatggctatgagaactagaaatgaccttatgccttactcaactggtataaatacaaaacttttaagtaaagcatcaaaagtagtttccaatgcaactggttttccagttcaatttaataaagcaatagttggaaaaaatgcatttgcccacgagtctggcattcatcaagatggaatgctaaaaaatagaaacacttatgaaattatgacaccagagagtgttggtgttaaaaaaacatcattggttatgggtaaacattcaggtagacatgcttttagagataaattagctgacatgggttatgtaagtatcacagacgatataatcgatacagctttcggaaagtttaagatcttagctgataagaaaaaacatgtttatgacgaagatatcgctgctttagtagatgatagtttaattaaagaagataatgtgattaaacttaaatccttaaaggtatttgctggtacaggcgaacctcagaaagctgaaatgaaactagaggtattcggtgacctaaaagatgctagtgaaacaggagatggtcctgttgatgcaatatttaaatgtattaaaaagatttatccgcataatgttaatttacaactttacaatgttcatgctgtcaccgagggtacggatgctcaagcgaccgtaagtgtcagaattgaagaggaaggcaaaacaacagtcggacaggcagctaatacagacacgttagtagcatctgcagacgcctatttaaacgctttaaacaaaatgattatcaaaagaaaaaaaactgctccagag

SEQ ID NO: 236912 - DNA, 434 bp, Unknown
  Bacterial polypeptide expressing nucleotide sequence isolated from the Sargasso Sea
catgttgcaaacaccttcgactaaatactccgcatttgagcgaatagatttgcctgatcggaaatggccgtccaatctcattcactcagctccgatttggtgcagtgttgatctacgtgatggcaatcaggccttggtggagcctatggggccggagcgtaagcgtcgcatgtttcaacggctggtcgatgtgggttttaaggaaatcgaagttggttttccgtcagcgtcccagactgattttgattttgtgcgatcactcatcgaagaaaacctgattcctgatgatgtagttattcaagttctaacccaagcaagacgccatttgatcgatcgaacctttgaatctctagtgggtgtgaagcgggcgatcgtacatttatacaattcaacctcgaccctgcaacgtcgtgtcgttttcaatgccgatcgag

SEQ ID NO: 236913 - DNA, 880 bp, Unknown
  Bacterial polypeptide expressing nucleotide sequence isolated from the Sargasso Sea
aaaaacaattaatataccagacacagttggatatacagttccttcggaatttaaaaaaataattgaaactttaattaataaagttccaaatattgatcaagctattttatcaacacattgtcataatgatttaggtttagcagtggcaaattctttagccggcgtttctgcaggagccagacaaattgagtgtacaattaatggcattggtgaaagagcaggtaatgcagcgcttgaggaaattgtaatggcaatgaaaactagaaatgatttaatgccatttaaaacaggaataaatacaaaattattaagcaaagcttcaagagttgtatctaatgctactggctttcctgttcaatttaataaagctattgttggaaaaaatgcattcgctcacgaatctggaatacaccaagatggaatgcttaaaaatagaaatacctatgaaattatgacaccagaaagcgttggagtaaaacaaacttccttagttatgggcaaacactcaggaagacatgcttttaaagataaattaactgacctaggttatgttgatatcactgatgatgttattcaaattgcttttggaaaattcaaagttcttgctgataaaaaaaaacatatttacgatgaagatattgcagctttagtagatgacagtttgataaaagaagataacgtcattgtattaaaatctctaaaagtttttgcaggaactggagagccgcaaagagcagatatgactttagaagtctacggagaaatgaaaaaatctacagagactggagatggtccagttgatgctatttttaaatgtataaaaaaattatatcctcatgaggtgaaacttcaattatatcaagtgcatgctgtacagaag

SEQ ID NO: 236914 - DNA, 878 bp, Unknown
  Bacterial polypeptide expressing nucleotide sequence isolated from the Sargasso Sea
tgttgatattatcgaagctggatttcccatagcatcaaatggtgattttgaagcagtttgtgaagtaagtaaaaaagtaaaaaattcaactattgctggattagccagagctagtttaaaagatattgatagagcatgggaggctgttaaatatgcaaagtcaccacgtattcatacttttattgctactagcccactgcatatgaaatacaaattaaaaaaaactgaagatgaagttttagaagcaattaataaaactgtaaaatacgcaagaaatttatgtgataatattgaatggagctgtgaagatggaggaagatcagaattagattttttatataaatgtattgaacttgctataagctgtggagcaacaacaattaatattcctgatacagtaggctatactttacctgaagaatttggaaaaatatttaagaatgttaaaaataatgtaaacaatattgataaagcgattttatcaactcatactcataatgatcttggtttagcaactgcaaataatgtagcagctattaaagaaggcgcaagacaagttgaatgtactattaatggtatgggggagagagcaggtaattcatcactagaagaaatagtaatgacgctaaaagtaaaaaaggatttgatgccttatcatacagatattaaaactgaatcaattatgaaagcttctagattagtttcatcaattacaggttttcctgtacaaccaaataaagctatagttggagctaatgcttttgctcatgaagcaggaatacatcaggatggtatgttaaaacatgcgggtacttatgaaattatgactccagagtctataggtctaaataaatcatcattagttcttggtaaacact

SEQ ID NO: 236915 - DNA, 502 bp, Unknown
  Bacterial polypeptide expressing nucleotide sequence isolated from the Sargasso Sea
atgactgaaaaaatttatatttttgatacaactcttagggatggagagcaatctcctggcgcatcaatgaatttagatgaaaaacttcaaattgctgaagtacttgactctatgaaggttgatatcattgaagcaggttttccaattgcttctaacggagattttgaagcagtttcagaggttagtaaacatgtaaaaaactcaactatagctggtttagcaagagcaagctttaaagatattgaccgtgcttgggaagcagtgcaacatgcaaagtctccaagaattcatacttttattgcaacaagtcctctacatatgaaatataaattaaagaaaactgaagaagaagttttagaggctatacaaaagactgtttctcacgcaagaaatctttgtgataacattgagtggagttgtgaagatggtggaagatcagagttagaatttttatatcaatgcattgagcttgctatcaattctggtgcttcaacttataaat

SEQ ID NO: 236916 - DNA, 742 bp, Unknown
  Bacterial polypeptide expressing nucleotide sequence isolated from the Sargasso Sea
atgaaagacaaagatagaattataatatttgatactacgatgcgtgatggcgagcaatcgccaggtgcctcaatgagccttgaggaaaaaatccaaattgcaagagtgtttgatgaacttggtattgacattattgaagcaggttttcccatagcttcaccaggtgattttgaagctacaatagaagtaagtaaaattttaaaaaactctatcccagctggtttagcacgacattccaaaaaagatattgatagatgttatgaggctctaaaaaacgcaaaaagatttagaatccatacatttatatctacaagtccattgcatatgaaacataaacttaacaaaagtccagatgaagtttatgagtctataaaagaacatgttacttacgctagaaaatttactgatgatgttgagtggtcttgtgaagatggaacaagaacagatatggattatatgtgtaaaacagttgagcttgcaattaaatgcggagcaaaaacaataaatatacctgatactgttggctacactgtaccatcagagtttacaaaaattatccaaacgttaatgaacaaagtaccaaatattgataaagcaatattatctacacattgtcataacgacctaggcttagcagttgctaattctttagctggcgttcaagcaggtgcaagacaaatagaatgtactattaatggtaaaagggaaagagctggtaatgcagcactagaagaagtttgag

SEQ ID NO: 236917 - DNA, 860 bp, Unknown
  Bacterial polypeptide expressing nucleotide sequence isolated from the Sargasso Sea
aatgggagttgatatatgtgaagctggttttcctatagcatcagagggtgattttgaagcagtgtcaaagattggaaaaactgtaaaatctgctaaggtatgtggcttggctagggcaagtaaacttgacatagaaaggtgttggagagctgtagagaaatcaataaatccaagaatacatactttcataggtacatctcctttgcatagggaatttcaagtaaaattatctaaagacgaagttttagataaagtttttgatactgttacatttgccaaatctttttgtgatgatattcaatggtctcctatggatgctacaagaacagagagtgagtttctagttgaggtagtaaaaatcgcaattcaagcaggagcttcaaccattaacatcccagacaccgttggttatacagccccaaaagagagtgctaatataataaaaaatctttttctcaaaattccagaattaaagaatattatagtttctacacattgccataatgatttaggaatggctacagcaaactctttagctgcagtagaggctggagcaaggcaagttgagtgtacaattaatgggttgggtgaaagagctggaaatacagctttagaagaaattgttatggctttaaaagtaagaaaggacattttaccttatgaaactaatatgatcactaataaattaatccaagcaagccgtttggtttcgaaagtttcaggatttcctgtccaatttaataaagcagttgttggaaaaaatgcttttgcacatgagtctgggatacaccaagacggaatgttaaaacatgctggtacttttgaaataatgaaactcagaagatataggtttaactgaa

SEQ ID NO: 236918 - DNA, 837 bp, Unknown
  Bacterial polypeptide expressing nucleotide sequence isolated from the Sargasso Sea
ctaccatgcgagatggagaacagtctccaggcgcatcaatgagtttagaagaaaaactacagatctctagagtattcgatgagttaggtgttgatgttattgaagctggttttcccatagcatctcctggtgactttgaggctgttacagaaattagcaaaactttaaaaaaatctattcctgcggggttagctagagctacaaaaaaagatattgacgcttgtcatcaagcattgaagcacgcaaaaaattttagaattcatacttttatttcaacaagccctcttcatatgaagcataagttaaacaaatctcctaatgaggtcttggagtcaattaaagaaagtgtaacgtatgctagaaagtttactaatgatgttgagtggtcttgcgaagatggaacacgtacagatatggattatatgtgtaagacagtcgaacttgcaatcaagtgtggagctaaaacaataaatattccagatactgtcggttacacagttccatctgaatttaagaaaattatagaaacattaataaacaaagttccaaatattgataaagcgattctctctacacattgtcacaatgatttaggattagcagtagctaattctttagcaggagtaatggctggagcacgtcagattgaatgtacaataaatggaattggtgaaagagcaggtaatgctgcacttgaagaggtcgtaatggctatgagaacgagacatgatctaatgccatacactacaaatattaacactaaacttttaagtaaagcatcaaaagtagtatctaatgctacaggatttcctgtccaatttaataaagcaaagtagg

SEQ ID NO: 236919 - DNA, 525 bp, Unknown
  Bacterial polypeptide expressing nucleotide sequence isolated from the Sargasso Sea
aatgactgacaaaaacagggtttatatatttgatactactatgcgtgatggcgaacagtcgcctggcgcatcaatgagtttggaagaaaaaattcaaatagcgagagtatttgatgaacttggaattgatattattgaagcaggatttccaatagcttcaccaggagactttgaggcagtaacagaaataagtaaaattttaaaaaaatcagttcctgctggtctttcaagacattcaaaaaaagacatcgacagatgctatgaagctttaaaacattctaaaagatttagaattcatacatttatttcaacgagtccacttcatatgaagcataaattaaataaatctccagaagaggtttatgaatcaataaaagagcatgtgacctatgcaagaaaatttactgatgatgttgaatggtcatgtgaagatggaactagaacagatatggactacatgtgcaaaactgttgaattagcgattaagtgtggagcaagaacaataaatattccagatacagttgg

SEQ ID NO: 236920 - DNA, 900 bp, Unknown
  Bacterial polypeptide expressing nucleotide sequence isolated from the Sargasso Sea
ccacaagtgatatacatctgaaacataaacttaaaaaatctagaaaggatgttcttcaaatagttccagatatggttaactatgcaaaatcattggtagatgatattgagttttcttgtgaagatgcctcaaggagtgatcctgattttttatacgaagtgattcagctagcaatttctgcaggagcgaccacaataaatgtgccagatactgttggatttactacgcctagtgaatttggcaaattaattgccgatatcaataaaaatgttccaaatattgatgaagcagtaatttcggttcatggtcataatgatttaggtttggcagtagccaattttcttgaggcagtaaaaaatggagcaagacaactagaatgtacagttaatggaattggggaaagagcagggaatgcctctctagaggaattagtaatggcactgcatgttaggaaaagtttttttaatagctttttcaaaagaaattcagattcaccaactcctcttacagctataagaacagaagaaataactaaaacctctagacttgtttccaacctaactggaatgacagtgcagcctaataaagcaattgtgggcgccaacgcttttgcacatgagtcaggcattcatcaggatggggttttaaaaaatagactaacttatgaaattatcgatgcaaaaactgttggattgagtgacaacaaaatatcattggggaaacttagtggaagaagtgccgtaagagcaagattagaagagatgggatatgacttgagccgagaagatttaaatgatgcttttgctcgtttcaaggatttagctgataggaaaagagaaattaatgatcgagatttagaagcaatcgttagtgaacaggtgcagctcctcagaggctaaa

SEQ ID NO: 236921 - DNA, 931 bp, Unknown
  Bacterial polypeptide expressing nucleotide sequence isolated from the Sargasso Sea
accctcgatatggacggtgtcaagaagatcgcgaccgacggggcggagctgatcaaagaactggtgccgacggttcccaacaccaagatcatccatcagtactcgccggagagctacacccagaccgaattgccctatgccatggaggtctgcgaggcggtgatggatatctggcagccgacgccggagaacaagaccatcatcaacctgccggcgacggtcgaagtcgccaccccaaatgtctacgcggatggcatcgaatggatgcaccgcaatttctccaagcgcgagaatgtgatcctctccctgcatccgcacaacgaccgcgggaccggcgttgccgcaaccgagctgggaattctagcgggcgccgaccgagtcgagggcacgcttttcggcaacggcgagcgcaccggcaacgtcgacgttatcacgctcgccatgaatatggtgagccacggcctcgactcgcagttggatatgcgcaacatgcgggagctgcgcgccaccgccgagtactgcaaccagttgccagtccacccgcgccatccatacgctggcgacttggtcttcactgccttctccggcagccatcaggacgcgatcaacaagggcctgaaggcgatggaaacccagaacagcgaagaatgggacgttccatacctgccgatcgatccggccgatgtcggtgccagctatgaggcggtgatccgcatcaacagccagtcgggtaagggcggcatcgcgtatatcatggaaaccgagttcggcgtccagatgcctcgggcgttgcaggtcgagttttccggcgccgtgcagaagatttccgactcgtccggcgaagagcaaacgccggaggacatctggaaggcattcgaccaggaatacctgagcgccaagacgccgtacgagttcatcgaacaccagacgc

SEQ ID NO: 236922 - DNA, 902 bp, Unknown
  Bacterial polypeptide expressing nucleotide sequence isolated from the Sargasso Sea
ggcgcaaaaacaataaatatacctgatacagttggttatacaattccttctgaatttacaagtattattgaaacattaataaataaagttccaaatatcgataaggcaattttatcaactcattgtcacaatgatttaggtttagcagttgcaaattctcttgcaggagttcaagcaggagcaagacaaattgagtgtactataaatggtttaggagaaagagctggtaacgctgcacttgaagaagttgtgatggcaattaagacaagacctgacttgatgccattcgaaacaggaataaatacaactcttttaaacaaagcatctaaaatagtttcgaatgcaacaggatttcctgttcaatataataaagctatagtaggaaaaaatgcttttgctcacgaggcaggaattcaccaagatggaatgttaaaaaatagacaaacttatgaaattatgactccagaaagtgttggagtaaagcaaacttctttaattatgggtaagcattctggaagacatgcttttaaagataaattgaacagtttaggttatcctgatttaacagatgatgttgttagtaatgcatttgcaaagtttaaagttttagcagataagaaaaaacatgtttatgatgaagatataatagcattggtagatgatagtttaattattgataataaagttaatgcaattaatttaaaatctttaaaagtttttgctgggacaggagaacctcaaaaggccgaaatgacattaaatgtttatggagaaattaaaaaagcttcagaaataggtgatggcccagttgatgccatatttaaatgtataaaaacactttaccctcacaatgtaaatttacaactttatcaagttcatgcagtaacagaaggcactgatgc

SEQ ID NO: 236923 - DNA, 883 bp, Unknown
  Bacterial polypeptide expressing nucleotide sequence isolated from the Sargasso Sea
atttttaaaaatgtaaaaaataatgtccctaatattgataaaacaatactttcaacgcatacacacaatgatttaggtttagcgacagctaataatgttgcagcaattaaagaaggtgccagacaagtagaatgtaccattaatggtatgggtgaaagagctggaaattcatctttagaagaaattgttatgactttaaaagtaaaaaaagatcttatgccctttcataccgatattcaaacagagtccattatgaaagcatctagattagtttcatcaataacaggttttccagtacagccaaataaagccatagttggcgcaaatgcttttgctcacgaagctggaatacatcaagatggtatgctcaaacatgctggtacgtatgaaattatgacccctgaatcaatagggcttaacaaatcttcacttgttcttggtaaacattcaggaaaacatgctttttcagaaaagttaaaagaacttggttatgaagtaggtgataatgctttgatggaattatttggaagatttaaagatttagcagataagaaaaaagaaatatttgaagaggatttaattgccttagcagaagatagaacttcgtcatacgatgaacacattaaatttgtatcattagaagtaaatgccggatctgttgaaaaagctgaagctaaattaaagatagaaattaatgataaagtggtaaatactaaaattaatggtaatggccctgttgatgctacatttaacgcaataaaaaaacttacaaatacacaatttaaactcaaactttaccaagtaaatgctattacagcagggactgatgctcaaggcgaggtaactgtcagacttgaagatgataatttatcatcccaagcaa

SEQ ID NO: 236924 - DNA, 694 bp, Unknown
  Bacterial polypeptide expressing nucleotide sequence isolated from the Sargasso Sea
atgacaaaaaatagtaaccacataaaaatatttgatactacattgagagatggagaacaatctcctggcgcctcaatgaatattgaagagaaattaaaaattgctgaggctcttgaagaattaaaggtagatataattgaagctggatttcctgccgcatccaaaggggattttgaagcagtttcagagatttcaaaaaaaattaaaggatcatcaatttgcgcattgagtagagcttctaaaagcgatattgaaaccgcagctaaagcacttaaggatgcaaatgccccaagaattcatacatttatttcaacaagtgatttacacatgaagcataaattgcaattgaacgctgaagaagtttatcaaaaagtaattgatagtgtatcttttgcgagaaacttgtgtgatgacgttgaatggtcgtgtgaagatgggacaagaacagatatggactttatgtgccgtacggttgaagctgcaataaagaacggtgcatcaacaataaatataccggacacagttggatattcaattccggatgaattcacaaatataatcactcatcttgtgaacaatgttcctaatatcgataaggtaacaatctcgactcattgtcataatgatcttggcctagcggtggcgaattctttagctggtgtcagagcaggggcaagacagattgagtgtacga

SEQ ID NO: 236925 - DNA, 872 bp, Unknown
  Bacterial polypeptide expressing nucleotide sequence isolated from the Sargasso Sea
aggctttaaacatgcaccaagatttagaatacatacatttatttctacaagtccattacatatgaagcataaattaaatatgtctccagaggatgtttatgaatcaattgggaaacatgttgcttatgcaagaaaatttactgatgatgttgagtggtcatgcgaagatggaaccagaacagatatggattacatgtgtaaaacagttgagcttgcaattaaaaatggagcgacgacaattaatatcccagatacagttggttatacgataccatctgagtttaccacgatcatagaaactttattaaataaagttccaaatatagataaagcaattttatcaactcattgtcataacgatttaggcttagcagtagccaactcattagctggagttcaagctggagcaagacaaattgagtgtacaataaatggtttaggtgaaagagctggaaatgctgcacttgaagaagttgtaatggcgattaaaacaagacctgatttaatgccttatgaaactggaattaatacaacacttttaagcaaagcttctaaaattgtttcaaatgcaacagggttccctgtccaatataataaagctattgttggaaaaaatgcttttgctcacgaagcaggaattcatcaggatggaatgttaaaaaatagacaaacttatgagattatgacaccagaaagcgtaggcgtaaaacaaacatcattagtgatgggaaaacattcaggacgacatgcatttaaggataaattaaatagtctaggttatccagatttaacagatgatgtagtcggaaatgcatttgcaaagtttaaagttttagcagataagaaaaagcatgtttatgacgaagatatta

SEQ ID NO: 236926 - DNA, 820 bp, Unknown
  Bacterial polypeptide expressing nucleotide sequence isolated from the Sargasso Sea
agttgccaacgcgttgtcaggtttatcggcaggagtaagacaaattgagtgtactataaatggaataggtgaaagagctggtaacgcagcacttgaagaaattgtaatggctataaaaactcgagacgacttattaccgtatgaaacaggaattaaaactgaattaattagcaaagcgtcaaaaattgtatctaatgctacagggtttccagttcaattcaataaagcaatcgttggaaagaatgcttttgctcatgagtctggaattcaccaggatggaatgttaaagaatagagaaacatacgaaataatgacaccagaaagtgttggtgtaaaaaaaacatctcttgtaatgggaaaacattccggacgtcacgcattcaaagataaattaagtgatttaggatatgcagatgtaacagatgatgttgtgcaagcagcttttggtaaatttaaaattttagctgataagaaaaaacatatctacgatgaagatattgttgcactagtagatgatagcttaattattgataataagataaatgcaataaacttaaaatcgttaaaagtatttgctggaactggtgaaccacaaagggctgacatgactttagatgtttttggagaaatcaaaaagacttctcaaactggtgatggtccagttgatgcaatatttaaatgtattaaagaactttatcctcatgatgtaaaactatctctttaccaagttcatgcagtcacagaaggaactgatgcacaagccaccgttagtgtaaagatagaggaaaatgacagaactacagtgggtcagtcagctgac

SEQ ID NO: 236927 - DNA, 784 bp, Unknown
  Bacterial polypeptide expressing nucleotide sequence isolated from the Sargasso Sea
catgaaagattctagagaaataattatatttgataccactttgagagacggtgagcaggctcccggctgcagtatgacaattggtgaaaagctaaaaattgcacatgcacttaaagaattaaatgttgatgtaattgaagctggttttgcagcagcatcaccaggtgattatgaagctgtgaatgcaattgcctctgagattgatggaccaactatctgctcacttgcaagatgcaatgaaagcgatatagaaaaagcatatgaggcacttaaggttaataaaaataaaagaatacatgtttttgtcgccaccagtgaaatacatctcaagcacaaactaaatatggctaaagatgaagtgcttaaagccgcttatgaaggcgttaaaatggcaaagtcattttgtgataatgttgagttttcacccgaagatgcttcaagaactgatcatggttttctcacagaagtggtcaatgctgcaattgaagcaggcgccacaacaattaatgttcctgatacagttggttacacaatcccttatgaattcggtgaattatttaaacacttgatttcaaattgtaccgatgcagagaatgttgtttttagtgttcactgtcacgatgaccttggtctttcagttgcaaatagcttggcagctgttgagtctggagcaagacaaattgaatgtacgataaatggtatcggggaaagagctggaaatacctcacttgaagaagtatgcatggcaattagaacaagggaagagtattttgattttaaaaca

SEQ ID NO: 236928 - DNA, 724 bp, Unknown
  Bacterial polypeptide expressing nucleotide sequence isolated from the Sargasso Sea
ggatttcccgtcagccaataaagcaattgttggtgcaaatgcttttgcgcatgaagctggaattcatcaagatggaatgttaaaacacgcaggtacctatgaaattatgacaccagagtctattggtttaaacaaatcctctctggttctaggtaagcattcaggaaaacatgctttttcagagaaactaaaagaacttggatatgagcctggagacaatgctttgatggaattatttggcagatttaaagatcttgctgataagaaaaaagaaatttttgaagaagatttaattgcgttagcagaagatagatcatcatcttatgatgaacacattaaatttgtatctttagaagttaatgctggttctgtagaaaaacatgaagcaaatttaaaaatcactatgaatgaagaaacaaaaataattaaaagtaatggtaacggtcctgttgatgctacttttaatgcaataaaacagcttacttcaacagattttaaattaaagttataccaagtaaatgcaataacagctggtactgatgcccaaggtgaagttacagtaagacttgaagagcaagatttatcatctcaagctaaaggtagtgatccagatataattgttgcatcagctaaggcttatataaatgcattaaatagattaatttttaaaaaaaccaaatctattaaagagaattcatcaaatctagaaataagaggagtttaa

SEQ ID NO: 236929 - DNA, 622 bp, Unknown
  Bacterial polypeptide expressing nucleotide sequence isolated from the Sargasso Sea
atggataaaacaaataaaaaatataagccatataagcctgtaagcaaggaaaataggtcatggccttcaaaagttatagaaaatgctcctatttggtgttctgtagacctgcgtgatggaaaccaagctcttattgagccaatgggagatgaaagaaaaaaaaggatgtttaatctattatgcaaaattggttttaaacaaattgagattggatttccggctgcatcacaaactgattttgatttcacaagatatttaattaatgaaaaagttatcccctctgacgtaactattcaagttcttacgcaagctagacccgaaattataaagaggactttcgaagctcttgacggagctcctaatgcaattcttcatttttacaattcgacttcaactcttcaaagaaaagttgtttttgataaagataaagaaggagttaaaaaaattgcaacagatgctgcaaaattaattaaagagttatcaagtgattataaaaacactaattggtcatttgagtactctcctgaaagtttcactggaactgagttagattatgcaacagaggtttgcgatgacgttgttgatatattaaaagagtcttcaaataacaaaattattatta

SEQ ID NO: 236930 - DNA, 883 bp, Unknown
  Bacterial polypeptide expressing nucleotide sequence isolated from the Sargasso Sea
gagcagtcgccaggcgcatctatgagtgtcgaagagaaaatccagatatctagagtttttgatgaaatgggaatagatattgttgaagcgggttttccaatagcatcaccaggagattttgaggcagtttctgaaataagtaaaataatgaaaaactcaattccatgtggtctttcaagagcactaaagaaagatattgatgcatgccatgagtcgttgaaacatgctccaagatttagaattcatacttttatttctactagtcctttacatatgaaacacaaacttgaaatgacaaatgatcaggttctagatgcaataaaagaaagtgttacatatgcaagaaactttactgatgatgttgaatggtcctgcgaggatggaacaagaacagatatggattttatgtgtaaaactgttgaacttgcaattaaatgtggggccaaaacaattaatattccagatacagttggctattctattcctgaggaatttgcaaaaacaattaaacatttaaaaaataatgttccaaatatagataaagcaatattatctgcacactgtcacaatgatcttggcttagcagtagcaaatgcattagctggagtctcagaaggtgtaagacaaatagaatgtacaattaatggaataggtgaaagagcaggaaatgctgcattagaggaagtagtaatggcaattaaaacacgtaatgatttaatgccatataatacaggcattaaaacagaattaataagtaaagcctctaaaatagtttcaaatgcaactggttttccagttcaatttaacaaagcaatagttggaaaaaacgcttttgctcatgagtcaggaattcatcaagatggaatgttaaagaatagagaaa

SEQ ID NO: 236931 - DNA, 937 bp, Unknown
  Bacterial polypeptide expressing nucleotide sequence isolated from the Sargasso Sea
gcaaaggcattggaaagaatgcatgttgatattattgaggcgggttttccaattgcaagccctggtgattttgaagctgtaaaggctgtatctcaactaattactcagagcactgtctgtggtttggcgagagctttaaataaagatatagattgtgctgctgatgcactaaagccagcaaagtcttctcgcatacacacttttatagcaacatcaccgattcacatgcgcgaaaaactacgcatgcaaccagaacaagttgttgaaaatgcagttaaggctgttaaacgagcaggaaagtatacagatgatatagaattttctcctgaagatgctggacgctctgaatttgacttcctatgccaagtgattgaggcagtaattaatgctggtgcaacaacgatcaatatcccagatacagtcggatataacttaccgcaatactttggggagttaataggaaagctaatagagaacgtgccaaattctgacaaagctacattttcagtacactgtcataacgatctaggactcgctgtaggtaactcattggcagctgttataaatggtgcaaggcaagttgaatgtacaataaatgggctaggggagcgcgctggcaatgcggctttggaagaaatagtaatgtcagtaagaacacgaagggatgtatttacatgtgatactaatatcgatacaagtcagattgttaattgttcaagacttgtctcaacaataacgggttttcctgttcaaccaaataaggctatagtcggtgccaatgcatttgcacatgaatcgggtattcatcaagatggagttttaaaaagtcgtgaaacttatgaaatcatgcgtgccgaggatgttggctggaataccaataaaatggttttaggtaaacactccggacgtaatgcttttcgtactcgtttagaggaat

SEQ ID NO: 236932 - DNA, 823 bp, Unknown
  Bacterial polypeptide expressing nucleotide sequence isolated from the Sargasso Sea
cctcttacggctataagaacagaagaaataacaaaaacctctagacttgtttccaacctaactggaatgactgttcaacctaataaagcaattgtaggagctaacgcttttgcacatgagtcaggaattcatcaggatggggttttaaaaaatagactaacttacgaaattatcgatgcaaaaactgttggtttgagtgacaacaaaatatctttggggaaacttagtggaagaagtgcagtaagagcaagattagaagagatgggatatgacttgagccgagaagatttaaatgatgcttttgctcgttttaaggatttagctgacaggaaaagagaaattactgatagagacctagaagcaattgttagtgaacaagttcagcttccagaagctaaatttcaattaagtcttgtccaagtaagttgcggtaacgcatctaaacctactgccaccatttcgcttctaaacacggaagataatactgaggatactgctgtatcaatagggactggacccgttgatgctgtatgtgaggctttaaataaattagctaaagttcctaatgaattaattgaattttcagttaagtcggtaactgaaggaattgatgctttgggcgaagtaacaataagaataagaagcgataataaaatatattctggtcattctgctgatacggatgttgttgtcgcagctgcaactgcttacgttaatgctttaaataggcttgtcttttctgagaaaagaaattcaattcacccacaatttgataatttagaaaagtcgaataataaatttctatctaatcaagcaaattaaa

SEQ ID NO: 236933 - DNA, 943 bp, Unknown
  Bacterial polypeptide expressing nucleotide sequence isolated from the Sargasso Sea
gttcctaatattgataaagcaatcttatcagttcactgccacaatgacttaggtttagcagttgcaaattctttagcaggtgtttctgctggagctagacaagtagagtgcacaatcaatggaataggtgaaagagcaggcaatgctgctttagaggaaattgtaatggcaataagaacaaggaatgacttaatgccatatagtactggaataaatactgaattattaagcaaagcttctaaagtggtatctaatgcaacgttccctgttcaatttaataaagctattgttggaaaaaatgcatttgctcatgaagctggtatacatcaagatggaatgcttaaaaatagagaaacttacgaaattatgacaccagaaagtgtcggtgttaaaaaaacatctttagtaatgggaaaacattcggggagacacgcatttaaagaaaaactatctgaccttggatatgttgatgtcactgacgatgtaatacaaacggcatttggtaaattcaaaattttagcagataagaaaaaacatgtttatgatgacgatatagcggctttagttgatgacagtatggttcatgaaaaaaatgctattaatttaaaatctttgaaagtatttgcgggcactggggaaccacaaagagctgaaatgacacttgatgtttatggagaaattaaaaaaactacagaaacaggtgatggtccagtagattcgatatttaattgtattaaagttttatatcctcatgacataaaactattattgtatcaagttcatgcagttactgaaggtacagatgcacaagcgactgtaagtgtgcgaattgaggaggaaggcaaaactacagtaggtcaggctgcagataccgatacattagtagcatctgcaaatgcttacttaagtgcattaaacaaaatgataataaaaaagacaaaaa

SEQ ID NO: 236934 - DNA, 544 bp, Unknown
  Bacterial polypeptide expressing nucleotide sequence isolated from the Sargasso Sea
atgagtggtcaggacaaaatctggatttttgataccaccttaagagacggcgaacaggcattgcgtgccagtttaagtcataagcaaaaaattcagctggctcatgctattgcccgcttaaatgttgatgtgatggaagtgggttttcctgtgtcatcgccaggtgattttgaatcggtgcaaagcatagcaacccaagtcaaaggccctattatttgtggtttagcccgtgctgtcagtgctgacattgaagcttgtggccaggccttggctaatgccgaacgtcgccgtattcatacctttatcgcaacctctcctttgcatttacagtacaaattacgccgtactttagaacaagccacagaacaggctgttgcagctattcaactggcgcgtcgttatacagacgatgtcgagttctcctgtgaagatgcaggccgtactcctattgatgatttatgccgtattgtcgaagccgctattaaagccggcgcccgcactattaatattccggacactgtgggctacaccattccccaatgaa
